United States Patent Application Publication US 2005/0255487 A1 - sequence listing, part 18

SEQ ID NO: 475101 - RNA, 19 nt, Homo sapiens
  misc_RNA (1)...(19): siRNA sense strand
cagaagugaauauguacua

SEQ ID NO: 475102 - RNA, 19 nt, Homo sapiens
  misc_RNA (1)...(19): siRNA sense strand
uagagaagaugagaaugau

SEQ ID NO: 475103 - RNA, 19 nt, Homo sapiens
  misc_RNA (1)...(19): siRNA sense strand
ugaacauggugaagaugaa

SEQ ID NO: 475104 - RNA, 19 nt, Homo sapiens
  misc_RNA (1)...(19): siRNA sense strand
gagauuucacuccucauga

SEQ ID NO: 475105 - RNA, 19 nt, Homo sapiens
  misc_RNA (1)...(19): siRNA sense strand
gacagcagcaugagaaaca

SEQ ID NO: 475106 - RNA, 19 nt, Homo sapiens
  misc_RNA (1)...(19): siRNA sense strand
ccagugaugaugaagauga

SEQ ID NO: 475107 - RNA, 19 nt, Homo sapiens
  misc_RNA (1)...(19): siRNA sense strand
gaagaugaaauggauaugg

SEQ ID NO: 475108 - RNA, 19 nt, Homo sapiens
  misc_RNA (1)...(19): siRNA sense strand
ugagaugacucccguuacu

SEQ ID NO: 475109 - RNA, 19 nt, Homo sapiens
  misc_RNA (1)...(19): siRNA sense strand
cagauaauacagucccuuu

SEQ ID NO: 475110 - RNA, 19 nt, Homo sapiens
  misc_RNA (1)...(19): siRNA sense strand
cauccuauggcauuccuua

SEQ ID NO: 475111 - RNA, 19 nt, Homo sapiens
  misc_RNA (1)...(19): siRNA sense strand
ugaagaugacgaugagaaa

SEQ ID NO: 475112 - RNA, 19 nt, Homo sapiens
  misc_RNA (1)...(19): siRNA sense strand
gugaacaaccuuuggacaa

SEQ ID NO: 475113 - RNA, 19 nt, Homo sapiens
  misc_RNA (1)...(19): siRNA sense strand
caugaaagaauugcacaaa

SEQ ID NO: 475114 - RNA, 19 nt, Homo sapiens
  misc_RNA (1)...(19): siRNA sense strand
gagaugacucccguuacua

SEQ ID NO: 475115 - RNA, 19 nt, Homo sapiens
  misc_RNA (1)...(19): siRNA sense strand
gaauauguacuaccagaac

SEQ ID NO: 475116 - RNA, 19 nt, Homo sapiens
  misc_RNA (1)...(19): siRNA sense strand
caggacauguuaaggauac

SEQ ID NO: 475117 - RNA, 19 nt, Homo sapiens
  misc_RNA (1)...(19): siRNA sense strand
gauuucacuccucaugaua

SEQ ID NO: 475118 - RNA, 19 nt, Homo sapiens
  misc_RNA (1)...(19): siRNA sense strand
cagugaacauggugaagau

SEQ ID NO: 475119 - RNA, 19 nt, Homo sapiens
  misc_RNA (1)...(19): siRNA sense strand
ggguauuggugaacgguau

SEQ ID NO: 475120 - RNA, 19 nt, Homo sapiens
  misc_RNA (1)...(19): siRNA sense strand
cagggcuauugaaagauua

SEQ ID NO: 475121 - RNA, 19 nt, Homo sapiens
  misc_RNA (1)...(19): siRNA sense strand
gaugaugcuuuaguaacug

SEQ ID NO: 475122 - RNA, 19 nt, Homo sapiens
  misc_RNA (1)...(19): siRNA sense strand
uaucaucagugaacauggu

SEQ ID NO: 475123 - RNA, 19 nt, Homo sapiens
  misc_RNA (1)...(19): siRNA sense strand
aaugagaugacucccguua

SEQ ID NO: 475124 - RNA, 19 nt, Homo sapiens
  misc_RNA (1)...(19): siRNA sense strand
ugaugaagaugacgaugag

SEQ ID NO: 475125 - RNA, 19 nt, Homo sapiens
  misc_RNA (1)...(19): siRNA sense strand
gauaaugagccugguaaag

SEQ ID NO: 475126 - RNA, 19 nt, Homo sapiens
  misc_RNA (1)...(19): siRNA sense strand
gaacacuuaccagacaaug

SEQ ID NO: 475127 - RNA, 19 nt, Homo sapiens
  misc_RNA (1)...(19): siRNA sense strand
ugaugaugcuuuaguaacu

SEQ ID NO: 475128 - RNA, 19 nt, Homo sapiens
  misc_RNA (1)...(19): siRNA sense strand
gugaacauggugaagauga

SEQ ID NO: 475129 - RNA, 19 nt, Homo sapiens
  misc_RNA (1)...(19): siRNA sense strand
caagaaaugcgaggguaug

SEQ ID NO: 475130 - RNA, 19 nt, Homo sapiens
  misc_RNA (1)...(19): siRNA sense strand
caugagaaacaucugcaaa

SEQ ID NO: 475131 - RNA, 19 nt, Homo sapiens
  misc_RNA (1)...(19): siRNA sense strand
gguaaagaaacagcuuaaa

SEQ ID NO: 475132 - RNA, 19 nt, Homo sapiens
  misc_RNA (1)...(19): siRNA sense strand
auaauacagucccuuucaa

SEQ ID NO: 475133 - RNA, 19 nt, Homo sapiens
  misc_RNA (1)...(19): siRNA sense strand
cucaucagcugaaagugaa

SEQ ID NO: 475134 - RNA, 19 nt, Homo sapiens
  misc_RNA (1)...(19): siRNA sense strand
gaaauggauauggaaagug

SEQ ID NO: 475135 - RNA, 19 nt, Homo sapiens
  misc_RNA (1)...(19): siRNA sense strand
gugaagaugaaauggauau

SEQ ID NO: 475136 - RNA, 19 nt, Homo sapiens
  misc_RNA (1)...(19): siRNA sense strand
gagaaugaugccagugaug

SEQ ID NO: 475137 - RNA, 19 nt, Homo sapiens
  misc_RNA (1)...(19): siRNA sense strand
gaugacucccguuacuauu

SEQ ID NO: 475138 - RNA, 19 nt, Homo sapiens
  misc_RNA (1)...(19): siRNA sense strand
gaugggaacaggagcagau

SEQ ID NO: 475139 - RNA, 19 nt, Homo sapiens
  misc_RNA (1)...(19): siRNA sense strand
gcccgagaauugggagauu

SEQ ID NO: 475140 - RNA, 19 nt, Homo sapiens
  misc_RNA (1)...(19): siRNA sense strand
cagaacacuuaccagacaa

SEQ ID NO: 475141 - RNA, 19 nt, Homo sapiens
  misc_RNA (1)...(19): siRNA sense strand
gaaaagucacaaagacaaa

SEQ ID NO: 475142 - RNA, 19 nt, Homo sapiens
  misc_RNA (1)...(19): siRNA sense strand
ugagaaacgccggauaguu

SEQ ID NO: 475143 - RNA, 19 nt, Homo sapiens
  misc_RNA (1)...(19): siRNA sense strand
gaaugaugccagugaugau

SEQ ID NO: 475144 - RNA, 19 nt, Homo sapiens
  misc_RNA (1)...(19): siRNA sense strand
ugagaaugaugccagugau

SEQ ID NO: 475145 - RNA, 19 nt, Homo sapiens
  misc_RNA (1)...(19): siRNA sense strand
agauuucacuccucaugau

SEQ ID NO: 475146 - RNA, 19 nt, Homo sapiens
  misc_RNA (1)...(19): siRNA sense strand
ugagaaacaucugcaaagc

SEQ ID NO: 475147 - RNA, 19 nt, Homo sapiens
  misc_RNA (1)...(19): siRNA sense strand
ggacuccaugaaagaauug

SEQ ID NO: 475148 - RNA, 19 nt, Homo sapiens
  misc_RNA (1)...(19): siRNA sense strand
agaaugaugccagugauga

SEQ ID NO: 475149 - RNA, 19 nt, Homo sapiens
  misc_RNA (1)...(19): siRNA sense strand
uuuaguaacuggagaacag

SEQ ID NO: 475150 - RNA, 19 nt, Homo sapiens
  misc_RNA (1)...(19): siRNA sense strand
gcgaggguauguccaagac

SEQ ID NO: 475151 - RNA, 19 nt, Homo sapiens
  misc_RNA (1)...(19): siRNA sense strand
gaaagaauugcacaaaaca

SEQ ID NO: 475152 - RNA, 19 nt, Homo sapiens
  misc_RNA (1)...(19): siRNA sense strand
uaacuggagaacaggauga

SEQ ID NO: 475153 - RNA, 19 nt, Homo sapiens
  misc_RNA (1)...(19): siRNA sense strand
ccaaauggcccgagaauug

SEQ ID NO: 475154 - RNA, 19 nt, Homo sapiens
  misc_RNA (1)...(19): siRNA sense strand
gaacgacuccgaagaggaa

SEQ ID NO: 475155 - RNA, 19 nt, Homo sapiens
  misc_RNA (1)...(19): siRNA sense strand
ccgcagaagugaauaugua

SEQ ID NO: 475156 - RNA, 19 nt, Homo sapiens
  misc_RNA (1)...(19): siRNA sense strand
agacagaacucaacucauc

SEQ ID NO: 475157 - RNA, 19 nt, Homo sapiens
  misc_RNA (1)...(19): siRNA sense strand
ggaagaaaaugaagaaguu

SEQ ID NO: 475158 - RNA, 19 nt, Homo sapiens
  misc_RNA (1)...(19): siRNA sense strand
ucaagaagauggaguuauc

SEQ ID NO: 475159 - RNA, 19 nt, Homo sapiens
  misc_RNA (1)...(19): siRNA sense strand
ggauacaaaucaagaagau

SEQ ID NO: 475160 - RNA, 19 nt, Homo sapiens
  misc_RNA (1)...(19): siRNA sense strand
gagugaugaugaugcuuua

SEQ ID NO: 475161 - RNA, 19 nt, Homo sapiens
  misc_RNA (1)...(19): siRNA sense strand
aaauggauauggaaaguga

SEQ ID NO: 475162 - RNA, 19 nt, Homo sapiens
  misc_RNA (1)...(19): siRNA sense strand
gaacaggagcagauaagga

SEQ ID NO: 475163 - RNA, 19 nt, Homo sapiens
  misc_RNA (1)...(19): siRNA sense strand
ccagaacacuuaccagaca

SEQ ID NO: 475164 - RNA, 19 nt, Homo sapiens
  misc_RNA (1)...(19): siRNA sense strand
gaagaaguuuucaaaguga

SEQ ID NO: 475165 - RNA, 19 nt, Homo sapiens
  misc_RNA (1)...(19): siRNA sense strand
ccagggcuauugaaagauu

SEQ ID NO: 475166 - RNA, 19 nt, Homo sapiens
  misc_RNA (1)...(19): siRNA sense strand
uaccagggcuauugaaaga

SEQ ID NO: 475167 - RNA, 19 nt, Homo sapiens
  misc_RNA (1)...(19): siRNA sense strand
gcagauaaggaaaggaauu

SEQ ID NO: 475168 - RNA, 19 nt, Homo sapiens
  misc_RNA (1)...(19): siRNA sense strand
gaggguauguccaagacuu

SEQ ID NO: 475169 - RNA, 19 nt, Homo sapiens
  misc_RNA (1)...(19): siRNA sense strand
gauaauacagucccuuuca

SEQ ID NO: 475170 - RNA, 19 nt, Homo sapiens
  misc_RNA (1)...(19): siRNA sense strand
ggagugaugaugaugcuuu

SEQ ID NO: 475171 - RNA, 19 nt, Homo sapiens
  misc_RNA (1)...(19): siRNA sense strand
gagcagauaaggaaaggaa

SEQ ID NO: 475172 - RNA, 19 nt, Homo sapiens
  misc_RNA (1)...(19): siRNA sense strand
ugaugaugaugcuuuagua

SEQ ID NO: 475173 - RNA, 19 nt, Homo sapiens
  misc_RNA (1)...(19): siRNA sense strand
guaaagaaacagcuuaaag

SEQ ID NO: 475174 - RNA, 19 nt, Homo sapiens
  misc_RNA (1)...(19): siRNA sense strand
uaaaauugcucaagaagga

SEQ ID NO: 475175 - RNA, 19 nt, Homo sapiens
  misc_RNA (1)...(19): siRNA sense strand
cagauaaggaaaggaauua

SEQ ID NO: 475176 - RNA, 19 nt, Homo sapiens
  misc_RNA (1)...(19): siRNA sense strand
gcaagaggccucgcgagaa

SEQ ID NO: 475177 - RNA, 19 nt, Homo sapiens
  misc_RNA (1)...(19): siRNA sense strand
aagacuugcuugaguguuu

SEQ ID NO: 475178 - RNA, 19 nt, Homo sapiens
  misc_RNA (1)...(19): siRNA sense strand
gcucaagaaggaauauaaa

SEQ ID NO: 475179 - RNA, 19 nt, Homo sapiens
  misc_RNA (1)...(19): siRNA sense strand
ugacucccguuacuauuga

SEQ ID NO: 475180 - RNA, 19 nt, Homo sapiens
  misc_RNA (1)...(19): siRNA sense strand
caagaggccucgcgagaac

SEQ ID NO: 475181 - RNA, 19 nt, Homo sapiens
  misc_RNA (1)...(19): siRNA sense strand
gaacauggugaagaugaaa

SEQ ID NO: 475182 - RNA, 19 nt, Homo sapiens
  misc_RNA (1)...(19): siRNA sense strand
gaaagaaaagucacaaaga

SEQ ID NO: 475183 - RNA, 19 nt, Homo sapiens
  misc_RNA (1)...(19): siRNA sense strand
gaugaugaugcuuuaguaa

SEQ ID NO: 475184 - RNA, 19 nt, Homo sapiens
  misc_RNA (1)...(19): siRNA sense strand
gaagaaaucaaguuauagc

SEQ ID NO: 475185 - RNA, 19 nt, Homo sapiens
  misc_RNA (1)...(19): siRNA sense strand
ugaaauggauauggaaagu

SEQ ID NO: 475186 - RNA, 19 nt, Homo sapiens
  misc_RNA (1)...(19): siRNA sense strand
caacucaucagcugaaagu

SEQ ID NO: 475187 - RNA, 19 nt, Homo sapiens
  misc_RNA (1)...(19): siRNA sense strand
gaugagaaacgccggauag

SEQ ID NO: 475188 - RNA, 19 nt, Homo sapiens
  misc_RNA (1)...(19): siRNA sense strand
aagaugaaauggauaugga

SEQ ID NO: 475189 - RNA, 19 nt, Homo sapiens
  misc_RNA (1)...(19): siRNA sense strand
caaaucgacagcagcauga

SEQ ID NO: 475190 - RNA, 19 nt, Homo sapiens
  misc_RNA (1)...(19): siRNA sense strand
gaugaaauggauauggaaa

SEQ ID NO: 475191 - RNA, 19 nt, Homo sapiens
  misc_RNA (1)...(19): siRNA sense strand
uaauacagucccuuucaaa

SEQ ID NO: 475192 - RNA, 19 nt, Homo sapiens
  misc_RNA (1)...(19): siRNA sense strand
uguacuaccagaacacuua

SEQ ID NO: 475193 - RNA, 19 nt, Homo sapiens
  misc_RNA (1)...(19): siRNA sense strand
uauacaugcugcaaggaaa

SEQ ID NO: 475194 - RNA, 19 nt, Homo sapiens
  misc_RNA (1)...(19): siRNA sense strand
uaagacagaacucaacuca

SEQ ID NO: 475195 - RNA, 19 nt, Homo sapiens
  misc_RNA (1)...(19): siRNA sense strand
ggugaacgguauaaauuuu

SEQ ID NO: 475196 - RNA, 19 nt, Homo sapiens
  misc_RNA (1)...(19): siRNA sense strand
uggcauuccuuauaguuau

SEQ ID NO: 475197 - RNA, 19 nt, Homo sapiens
  misc_RNA (1)...(19): siRNA sense strand
uaauaucccucagguucaa

SEQ ID NO: 475198 - RNA, 19 nt, Homo sapiens
  misc_RNA (1)...(19): siRNA sense strand
uuagagaagaugagaauga

SEQ ID NO: 475199 - RNA, 19 nt, Homo sapiens
  misc_RNA (1)...(19): siRNA sense strand
ggaguuaucaucagugaac

SEQ ID NO: 475200 - RNA, 19 nt, Homo sapiens
  misc_RNA (1)...(19): siRNA sense strand
gcaagaaaugcgaggguau

SEQ ID NO: 475201 - RNA, 19 nt, Homo sapiens
  misc_RNA (1)...(19): siRNA sense strand
cagaagugaauauguacua

SEQ ID NO: 475202 - RNA, 19 nt, Homo sapiens
  misc_RNA (1)...(19): siRNA sense strand
uagagaagaugagaaugau

SEQ ID NO: 475203 - RNA, 19 nt, Homo sapiens
  misc_RNA (1)...(19): siRNA sense strand
ugaacauggugaagaugaa

SEQ ID NO: 475204 - RNA, 19 nt, Homo sapiens
  misc_RNA (1)...(19): siRNA sense strand
gagauuucacuccucauga

SEQ ID NO: 475205 - RNA, 19 nt, Homo sapiens
  misc_RNA (1)...(19): siRNA sense strand
gacagcagcaugagaaaca

SEQ ID NO: 475206 - RNA, 19 nt, Homo sapiens
  misc_RNA (1)...(19): siRNA sense strand
ccagugaugaugaagauga

SEQ ID NO: 475207 - RNA, 19 nt, Homo sapiens
  misc_RNA (1)...(19): siRNA sense strand
gaagaugaaauggauaugg

SEQ ID NO: 475208 - RNA, 19 nt, Homo sapiens
  misc_RNA (1)...(19): siRNA sense strand
ugagaugacucccguuacu

SEQ ID NO: 475209 - RNA, 19 nt, Homo sapiens
  misc_RNA (1)...(19): siRNA sense strand
cagauaauacagucccuuu

SEQ ID NO: 475210 - RNA, 19 nt, Homo sapiens
  misc_RNA (1)...(19): siRNA sense strand
cauccuauggcauuccuua

SEQ ID NO: 475211 - RNA, 19 nt, Homo sapiens
  misc_RNA (1)...(19): siRNA sense strand
ugaagaugacgaugagaaa

SEQ ID NO: 475212 - RNA, 19 nt, Homo sapiens
  misc_RNA (1)...(19): siRNA sense strand
gugaacaaccuuuggacaa

SEQ ID NO: 475213 - RNA, 19 nt, Homo sapiens
  misc_RNA (1)...(19): siRNA sense strand
caugaaagaauugcacaaa

SEQ ID NO: 475214 - RNA, 19 nt, Homo sapiens
  misc_RNA (1)...(19): siRNA sense strand
gagaugacucccguuacua

SEQ ID NO: 475215 - RNA, 19 nt, Homo sapiens
  misc_RNA (1)...(19): siRNA sense strand
gaauauguacuaccagaac

SEQ ID NO: 475216 - RNA, 19 nt, Homo sapiens
  misc_RNA (1)...(19): siRNA sense strand
caggacauguuaaggauac

SEQ ID NO: 475217 - RNA, 19 nt, Homo sapiens
  misc_RNA (1)...(19): siRNA sense strand
gauuucacuccucaugaua

SEQ ID NO: 475218 - RNA, 19 nt, Homo sapiens
  misc_RNA (1)...(19): siRNA sense strand
cagugaacauggugaagau

SEQ ID NO: 475219 - RNA, 19 nt, Homo sapiens
  misc_RNA (1)...(19): siRNA sense strand
ggguauuggugaacgguau

SEQ ID NO: 475220 - RNA, 19 nt, Homo sapiens
  misc_RNA (1)...(19): siRNA sense strand
cagggcuauugaaagauua

SEQ ID NO: 475221 - RNA, 19 nt, Homo sapiens
  misc_RNA (1)...(19): siRNA sense strand
gaugaugcuuuaguaacug

SEQ ID NO: 475222 - RNA, 19 nt, Homo sapiens
  misc_RNA (1)...(19): siRNA sense strand
uaucaucagugaacauggu

SEQ ID NO: 475223 - RNA, 19 nt, Homo sapiens
  misc_RNA (1)...(19): siRNA sense strand
aaugagaugacucccguua

SEQ ID NO: 475224 - RNA, 19 nt, Homo sapiens
  misc_RNA (1)...(19): siRNA sense strand
ugaugaagaugacgaugag

SEQ ID NO: 475225 - RNA, 19 nt, Homo sapiens
  misc_RNA (1)...(19): siRNA sense strand
gauaaugagccugguaaag

SEQ ID NO: 475226 - RNA, 19 nt, Homo sapiens
  misc_RNA (1)...(19): siRNA sense strand
gaacacuuaccagacaaug

SEQ ID NO: 475227 - RNA, 19 nt, Homo sapiens
  misc_RNA (1)...(19): siRNA sense strand
ugaugaugcuuuaguaacu

SEQ ID NO: 475228 - RNA, 19 nt, Homo sapiens
  misc_RNA (1)...(19): siRNA sense strand
gugaacauggugaagauga

SEQ ID NO: 475229 - RNA, 19 nt, Homo sapiens
  misc_RNA (1)...(19): siRNA sense strand
caagaaaugcgaggguaug

SEQ ID NO: 475230 - RNA, 19 nt, Homo sapiens
  misc_RNA (1)...(19): siRNA sense strand
caugagaaacaucugcaaa

SEQ ID NO: 475231 - RNA, 19 nt, Homo sapiens
  misc_RNA (1)...(19): siRNA sense strand
gguaaagaaacagcuuaaa

SEQ ID NO: 475232 - RNA, 19 nt, Homo sapiens
  misc_RNA (1)...(19): siRNA sense strand
auaauacagucccuuucaa

SEQ ID NO: 475233 - RNA, 19 nt, Homo sapiens
  misc_RNA (1)...(19): siRNA sense strand
cucaucagcugaaagugaa

SEQ ID NO: 475234 - RNA, 19 nt, Homo sapiens
  misc_RNA (1)...(19): siRNA sense strand
gaaauggauauggaaagug

SEQ ID NO: 475235 - RNA, 19 nt, Homo sapiens
  misc_RNA (1)...(19): siRNA sense strand
gugaagaugaaauggauau

SEQ ID NO: 475236 - RNA, 19 nt, Homo sapiens
  misc_RNA (1)...(19): siRNA sense strand
gagaaugaugccagugaug

SEQ ID NO: 475237 - RNA, 19 nt, Homo sapiens
  misc_RNA (1)...(19): siRNA sense strand
gaugacucccguuacuauu

SEQ ID NO: 475238 - RNA, 19 nt, Homo sapiens
  misc_RNA (1)...(19): siRNA sense strand
gaugggaacaggagcagau

SEQ ID NO: 475239 - RNA, 19 nt, Homo sapiens
  misc_RNA (1)...(19): siRNA sense strand
gcccgagaauugggagauu

SEQ ID NO: 475240 - RNA, 19 nt, Homo sapiens
  misc_RNA (1)...(19): siRNA sense strand
cagaacacuuaccagacaa

SEQ ID NO: 475241 - RNA, 19 nt, Homo sapiens
  misc_RNA (1)...(19): siRNA sense strand
gaaaagucacaaagacaaa

SEQ ID NO: 475242 - RNA, 19 nt, Homo sapiens
  misc_RNA (1)...(19): siRNA sense strand
ugagaaacgccggauaguu

SEQ ID NO: 475243 - RNA, 19 nt, Homo sapiens
  misc_RNA (1)...(19): siRNA sense strand
gaaugaugccagugaugau

SEQ ID NO: 475244 - RNA, 19 nt, Homo sapiens
  misc_RNA (1)...(19): siRNA sense strand
ugagaaugaugccagugau

SEQ ID NO: 475245 - RNA, 19 nt, Homo sapiens
  misc_RNA (1)...(19): siRNA sense strand
agauuucacuccucaugau

SEQ ID NO: 475246 - RNA, 19 nt, Homo sapiens
  misc_RNA (1)...(19): siRNA sense strand
ugagaaacaucugcaaagc

SEQ ID NO: 475247 - RNA, 19 nt, Homo sapiens
  misc_RNA (1)...(19): siRNA sense strand
ggacuccaugaaagaauug

SEQ ID NO: 475248 - RNA, 19 nt, Homo sapiens
  misc_RNA (1)...(19): siRNA sense strand
agaaugaugccagugauga

SEQ ID NO: 475249 - RNA, 19 nt, Homo sapiens
  misc_RNA (1)...(19): siRNA sense strand
uuuaguaacuggagaacag

SEQ ID NO: 475250 - RNA, 19 nt, Homo sapiens
  misc_RNA (1)...(19): siRNA sense strand
gcgaggguauguccaagac

SEQ ID NO: 475251 - RNA, 19 nt, Homo sapiens
  misc_RNA (1)...(19): siRNA sense strand
gaaagaauugcacaaaaca

SEQ ID NO: 475252 - RNA, 19 nt, Homo sapiens
  misc_RNA (1)...(19): siRNA sense strand
uaacuggagaacaggauga

SEQ ID NO: 475253 - RNA, 19 nt, Homo sapiens
  misc_RNA (1)...(19): siRNA sense strand
gagccaaggugcugcauga

SEQ ID NO: 475254 - RNA, 19 nt, Homo sapiens
  misc_RNA (1)...(19): siRNA sense strand
gcaggaauuuggugcauug

SEQ ID NO: 475255 - RNA, 19 nt, Homo sapiens
  misc_RNA (1)...(19): siRNA sense strand
ggaauuuggugcauugaug

SEQ ID NO: 475256 - RNA, 19 nt, Homo sapiens
  misc_RNA (1)...(19): siRNA sense strand
gaucauggaugcucuggau

SEQ ID NO: 475257 - RNA, 19 nt, Homo sapiens
  misc_RNA (1)...(19): siRNA sense strand
gaagagauacuccauguac

SEQ ID NO: 475258 - RNA, 19 nt, Homo sapiens
  misc_RNA (1)...(19): siRNA sense strand
caacaaaggcaacgggauu

SEQ ID NO: 475259 - RNA, 19 nt, Homo sapiens
  misc_RNA (1)...(19): siRNA sense strand
ccagaagaauuucaacaau

SEQ ID NO: 475260 - RNA, 19 nt, Homo sapiens
  misc_RNA (1)...(19): siRNA sense strand
gagaaggaccgcaucaaga

SEQ ID NO: 475261 - RNA, 19 nt, Homo sapiens
  misc_RNA (1)...(19): siRNA sense strand
gaagccacccguuaccuuu

SEQ ID NO: 475262 - RNA, 19 nt, Homo sapiens
  misc_RNA (1)...(19): siRNA sense strand
cagaagaauuucaacaauc

SEQ ID NO: 475263 - RNA, 19 nt, Homo sapiens
  misc_RNA (1)...(19): siRNA sense strand
cagcgacucuguguuguuu

SEQ ID NO: 475264 - RNA, 19 nt, Homo sapiens
  misc_RNA (1)...(19): siRNA sense strand
gccaagaagccacccguua

SEQ ID NO: 475265 - RNA, 19 nt, Homo sapiens
  misc_RNA (1)...(19): siRNA sense strand
gagcugcgcaaguccauuu

SEQ ID NO: 475266 - RNA, 19 nt, Homo sapiens
  misc_RNA (1)...(19): siRNA sense strand
gaccugagccguaacuuca

SEQ ID NO: 475267 - RNA, 19 nt, Homo sapiens
  misc_RNA (1)...(19): siRNA sense strand
ccaaggagaccacccagaa

SEQ ID NO: 475268 - RNA, 19 nt, Homo sapiens
  misc_RNA (1)...(19): siRNA sense strand
gggagcagcugcauagcau

SEQ ID NO: 475269 - RNA, 19 nt, Homo sapiens
  misc_RNA (1)...(19): siRNA sense strand
caucagcgacucuguguug

SEQ ID NO: 475270 - RNA, 19 nt, Homo sapiens
  misc_RNA (1)...(19): siRNA sense strand
gaauuuggugcauugauga

SEQ ID NO: 475271 - RNA, 19 nt, Homo sapiens
  misc_RNA (1)...(19): siRNA sense strand
gaccaucgcuaugugaaca

SEQ ID NO: 475272 - RNA, 19 nt, Homo sapiens
  misc_RNA (1)...(19): siRNA sense strand
gugaacaacuacacgaaca

SEQ ID NO: 475273 - RNA, 19 nt, Homo sapiens
  misc_RNA (1)...(19): siRNA sense strand
cagcauggacucuauggaa

SEQ ID NO: 475274 - RNA, 19 nt, Homo sapiens
  misc_RNA (1)...(19): siRNA sense strand
cggacaccaugaagagaua

SEQ ID NO: 475275 - RNA, 19 nt, Homo sapiens
  misc_RNA (1)...(19): siRNA sense strand
guaacuucauugagaggaa

SEQ ID NO: 475276 - RNA, 19 nt, Homo sapiens
  misc_RNA (1)...(19): siRNA sense strand
gcaggaugcuguggaccaa

SEQ ID NO: 475277 - RNA, 19 nt, Homo sapiens
  misc_RNA (1)...(19): siRNA sense strand
ggagaaggaccgcaucaag

SEQ ID NO: 475278 - RNA, 19 nt, Homo sapiens
  misc_RNA (1)...(19): siRNA sense strand
ggacgaccugcucaaugua

SEQ ID NO: 475279 - RNA, 19 nt, Homo sapiens
  misc_RNA (1)...(19): siRNA sense strand
agccguaacuucauugaga

SEQ ID NO: 475280 - RNA, 19 nt, Homo sapiens
  misc_RNA (1)...(19): siRNA sense strand
caaucucuauggcaccaaa

SEQ ID NO: 475281 - RNA, 19 nt, Homo sapiens
  misc_RNA (1)...(19): siRNA sense strand
caggagcacaagaaucaua

SEQ ID NO: 475282 - RNA, 19 nt, Homo sapiens
  misc_RNA (1)...(19): siRNA sense strand
gagaccacccagaagaauu

SEQ ID NO: 475283 - RNA, 19 nt, Homo sapiens
  misc_RNA (1)...(19): siRNA sense strand
gcaccggacaccaugaaga

SEQ ID NO: 475284 - RNA, 19 nt, Homo sapiens
  misc_RNA (1)...(19): siRNA sense strand
agaccacccagaagaauuu

SEQ ID NO: 475285 - RNA, 19 nt, Homo sapiens
  misc_RNA (1)...(19): siRNA sense strand
gacagucacuaggcaacuu

SEQ ID NO: 475286 - RNA, 19 nt, Homo sapiens
  misc_RNA (1)...(19): siRNA sense strand
gaguacuccuccagcauuc

SEQ ID NO: 475287 - RNA, 19 nt, Homo sapiens
  misc_RNA (1)...(19): siRNA sense strand
agaaguggcagaaggagaa

SEQ ID NO: 475288 - RNA, 19 nt, Homo sapiens
  misc_RNA (1)...(19): siRNA sense strand
ggaccugagccguaacuuc

SEQ ID NO: 475289 - RNA, 19 nt, Homo sapiens
  misc_RNA (1)...(19): siRNA sense strand
aggacgaccugcucaaugu

SEQ ID NO: 475290 - RNA, 19 nt, Homo sapiens
  misc_RNA (1)...(19): siRNA sense strand
gagcagcugcauagcauca

SEQ ID NO: 475291 - RNA, 19 nt, Homo sapiens
  misc_RNA (1)...(19): siRNA sense strand
ccaagaagccacccguuac

SEQ ID NO: 475292 - RNA, 19 nt, Homo sapiens
  misc_RNA (1)...(19): siRNA sense strand
gccauucuacgucaacaaa

SEQ ID NO: 475293 - RNA, 19 nt, Homo sapiens
  misc_RNA (1)...(19): siRNA sense strand
augaagagauacuccaugu

SEQ ID NO: 475294 - RNA, 19 nt, Homo sapiens
  misc_RNA (1)...(19): siRNA sense strand
ccugagccguaacuucauu

SEQ ID NO: 475295 - RNA, 19 nt, Homo sapiens
  misc_RNA (1)...(19): siRNA sense strand
ucaagagcuucaccaccaa

SEQ ID NO: 475296 - RNA, 19 nt, Homo sapiens
  misc_RNA (1)...(19): siRNA sense strand
gaaggagacggagcuguca

SEQ ID NO: 475297 - RNA, 19 nt, Homo sapiens
  misc_RNA (1)...(19): siRNA sense strand
ggagaccacccagaagaau

SEQ ID NO: 475298 - RNA, 19 nt, Homo sapiens
  misc_RNA (1)...(19): siRNA sense strand
aagugaaggugaucaugga

SEQ ID NO: 475299 - RNA, 19 nt, Homo sapiens
  misc_RNA (1)...(19): siRNA sense strand
aggcggaccugagccguaa

SEQ ID NO: 475300 - RNA, 19 nt, Homo sapiens
  misc_RNA (1)...(19): siRNA sense strand
caagaucauugagauugag

SEQ ID NO: 475301 - RNA, 19 nt, Homo sapiens
  misc_RNA (1)...(19): siRNA sense strand
gcgacucuguguuguuucu

SEQ ID NO: 475302 - RNA, 19 nt, Homo sapiens
  misc_RNA (1)...(19): siRNA sense strand
caacgggucgagcccagaa

SEQ ID NO: 475303 - RNA, 19 nt, Homo sapiens
  misc_RNA (1)...(19): siRNA sense strand
agaggaaccacauggagaa

SEQ ID NO: 475304 - RNA, 19 nt, Homo sapiens
  misc_RNA (1)...(19): siRNA sense strand
ggagugcaccggacaccau

SEQ ID NO: 475305 - RNA, 19 nt, Homo sapiens
  misc_RNA (1)...(19): siRNA sense strand
uccaggagcacaagaauca

SEQ ID NO: 475306 - RNA, 19 nt, Homo sapiens
  misc_RNA (1)...(19): siRNA sense strand
ugaagagauacuccaugua

SEQ ID NO: 475307 - RNA, 19 nt, Homo sapiens
  misc_RNA (1)...(19): siRNA sense strand
ucugcgagcugcaucucaa

SEQ ID NO: 475308 - RNA, 19 nt, Homo sapiens
  misc_RNA (1)...(19): siRNA sense strand
ggcgacccaucauccaguu

SEQ ID NO: 475309 - RNA, 19 nt, Homo sapiens
  misc_RNA (1)...(19): siRNA sense strand
gagcacaagaaucauagca

SEQ ID NO: 475310 - RNA, 19 nt, Homo sapiens
  misc_RNA (1)...(19): siRNA sense strand
cgacccaucauccaguuug

SEQ ID NO: 475311 - RNA, 19 nt, Homo sapiens
  misc_RNA (1)...(19): siRNA sense strand
gaucauugagauugaggau

SEQ ID NO: 475312 - RNA, 19 nt, Homo sapiens
  misc_RNA (1)...(19): siRNA sense strand
cccagaagaauuucaacaa

SEQ ID NO: 475313 - RNA, 19 nt, Homo sapiens
  misc_RNA (1)...(19): siRNA sense strand
gacccaucauccaguuugu

SEQ ID NO: 475314 - RNA, 19 nt, Homo sapiens
  misc_RNA (1)...(19): siRNA sense strand
gacgaccugcucaauguau

SEQ ID NO: 475315 - RNA, 19 nt, Homo sapiens
  misc_RNA (1)...(19): siRNA sense strand
caaggacgaccugcucaau

SEQ ID NO: 475316 - RNA, 19 nt, Homo sapiens
  misc_RNA (1)...(19): siRNA sense strand
cccguuaccuuugccgaaa

SEQ ID NO: 475317 - RNA, 19 nt, Homo sapiens
  misc_RNA (1)...(19): siRNA sense strand
agaaggaccgcaucaagag

SEQ ID NO: 475318 - RNA, 19 nt, Homo sapiens
  misc_RNA (1)...(19): siRNA sense strand
aaggagaccacccagaaga

SEQ ID NO: 475319 - RNA, 19 nt, Homo sapiens
  misc_RNA (1)...(19): siRNA sense strand
uguuguuucugcaggaauu

SEQ ID NO: 475320 - RNA, 19 nt, Homo sapiens
  misc_RNA (1)...(19): siRNA sense strand
gagcuucaccaccaaugag

SEQ ID NO: 475321 - RNA, 19 nt, Homo sapiens
  misc_RNA (1)...(19): siRNA sense strand
ucuauggcaccaaagguaa

SEQ ID NO: 475322 - RNA, 19 nt, Homo sapiens
  misc_RNA (1)...(19): siRNA sense strand
ccacccagaagaauuucaa

SEQ ID NO: 475323 - RNA, 19 nt, Homo sapiens
  misc_RNA (1)...(19): siRNA sense strand
guggcagccuggagaaugg

SEQ ID NO: 475324 - RNA, 19 nt, Homo sapiens
  misc_RNA (1)...(19): siRNA sense strand
gcgccacguugagaagaug

SEQ ID NO: 475325 - RNA, 19 nt, Homo sapiens
  misc_RNA (1)...(19): siRNA sense strand
ucugcuaccuuugcauguu

SEQ ID NO: 475326 - RNA, 19 nt, Homo sapiens
  misc_RNA (1)...(19): siRNA sense strand
gcuccuccuucucccugaa

SEQ ID NO: 475327 - RNA, 19 nt, Homo sapiens
  misc_RNA (1)...(19): siRNA sense strand
caaggagaccacccagaag

SEQ ID NO: 475328 - RNA, 19 nt, Homo sapiens
  misc_RNA (1)...(19): siRNA sense strand
gcaugcgccacguugagaa

SEQ ID NO: 475329 - RNA, 19 nt, Homo sapiens
  misc_RNA (1)...(19): siRNA sense strand
cauucuacgucaacaaagg

SEQ ID NO: 475330 - RNA, 19 nt, Homo sapiens
  misc_RNA (1)...(19): siRNA sense strand
ccgcaagugucccgugcau

SEQ ID NO: 475331 - RNA, 19 nt, Homo sapiens
  misc_RNA (1)...(19): siRNA sense strand
gcaccaaagguaacuacac

SEQ ID NO: 475332 - RNA, 19 nt, Homo sapiens
  misc_RNA (1)...(19): siRNA sense strand
gagcccauccgggacuuug

SEQ ID NO: 475333 - RNA, 19 nt, Homo sapiens
  misc_RNA (1)...(19): siRNA sense strand
acaacuacacgaacagcuu

SEQ ID NO: 475334 - RNA, 19 nt, Homo sapiens
  misc_RNA (1)...(19): siRNA sense strand
ggugaccaucgcuauguga

SEQ ID NO: 475335 - RNA, 19 nt, Homo sapiens
  misc_RNA (1)...(19): siRNA sense strand
gagccaaggugcugcauga

SEQ ID NO: 475336 - RNA, 19 nt, Homo sapiens
  misc_RNA (1)...(19): siRNA sense strand
gcaggaauuuggugcauug

SEQ ID NO: 475337 - RNA, 19 nt, Homo sapiens
  misc_RNA (1)...(19): siRNA sense strand
ggaauuuggugcauugaug

SEQ ID NO: 475338 - RNA, 19 nt, Homo sapiens
  misc_RNA (1)...(19): siRNA sense strand
gaucauggaugcucuggau

SEQ ID NO: 475339 - RNA, 19 nt, Homo sapiens
  misc_RNA (1)...(19): siRNA sense strand
gaagagauacuccauguac

SEQ ID NO: 475340 - RNA, 19 nt, Homo sapiens
  misc_RNA (1)...(19): siRNA sense strand
ccagaagaauuucaacaau

SEQ ID NO: 475341 - RNA, 19 nt, Homo sapiens
  misc_RNA (1)...(19): siRNA sense strand
gagaaggaccgcaucaaga

SEQ ID NO: 475342 - RNA, 19 nt, Homo sapiens
  misc_RNA (1)...(19): siRNA sense strand
gaagccacccguuaccuuu

SEQ ID NO: 475343 - RNA, 19 nt, Homo sapiens
  misc_RNA (1)...(19): siRNA sense strand
cagaagaauuucaacaauc

SEQ ID NO: 475344 - RNA, 19 nt, Homo sapiens
  misc_RNA (1)...(19): siRNA sense strand
cagcgacucuguguuguuu

SEQ ID NO: 475345 - RNA, 19 nt, Homo sapiens
  misc_RNA (1)...(19): siRNA sense strand
gccaagaagccacccguua

SEQ ID NO: 475346 - RNA, 19 nt, Homo sapiens
  misc_RNA (1)...(19): siRNA sense strand
gagcugcgcaaguccauuu

SEQ ID NO: 475347 - RNA, 19 nt, Homo sapiens
  misc_RNA (1)...(19): siRNA sense strand
gaccugagccguaacuuca

SEQ ID NO: 475348 - RNA, 19 nt, Homo sapiens
  misc_RNA (1)...(19): siRNA sense strand
ccaaggagaccacccagaa

SEQ ID NO: 475349 - RNA, 19 nt, Homo sapiens
  misc_RNA (1)...(19): siRNA sense strand
gggagcagcugcauagcau

SEQ ID NO: 475350 - RNA, 19 nt, Homo sapiens
  misc_RNA (1)...(19): siRNA sense strand
caucagcgacucuguguug

SEQ ID NO: 475351 - RNA, 19 nt, Homo sapiens
  misc_RNA (1)...(19): siRNA sense strand
gaauuuggugcauugauga

SEQ ID NO: 475352 - RNA, 19 nt, Homo sapiens
  misc_RNA (1)...(19): siRNA sense strand
gaccaucgcuaugugaaca

SEQ ID NO: 475353 - RNA, 19 nt, Homo sapiens
  misc_RNA (1)...(19): siRNA sense strand
gugaacaacuacacgaaca

SEQ ID NO: 475354 - RNA, 19 nt, Homo sapiens
  misc_RNA (1)...(19): siRNA sense strand
cagcauggacucuauggaa

SEQ ID NO: 475355 - RNA, 19 nt, Homo sapiens
  misc_RNA (1)...(19): siRNA sense strand
cggacaccaugaagagaua

SEQ ID NO: 475356 - RNA, 19 nt, Homo sapiens
  misc_RNA (1)...(19): siRNA sense strand
guaacuucauugagaggaa

SEQ ID NO: 475357 - RNA, 19 nt, Homo sapiens
  misc_RNA (1)...(19): siRNA sense strand
gcaggaugcuguggaccaa

SEQ ID NO: 475358 - RNA, 19 nt, Homo sapiens
  misc_RNA (1)...(19): siRNA sense strand
ggagaaggaccgcaucaag

SEQ ID NO: 475359 - RNA, 19 nt, Homo sapiens
  misc_RNA (1)...(19): siRNA sense strand
ggacgaccugcucaaugua

SEQ ID NO: 475360 - RNA, 19 nt, Homo sapiens
  misc_RNA (1)...(19): siRNA sense strand
agccguaacuucauugaga

SEQ ID NO: 475361 - RNA, 19 nt, Homo sapiens
  misc_RNA (1)...(19): siRNA sense strand
caaucucuauggcaccaaa

SEQ ID NO: 475362 - RNA, 19 nt, Homo sapiens
  misc_RNA (1)...(19): siRNA sense strand
caggagcacaagaaucaua

SEQ ID NO: 475363 - RNA, 19 nt, Homo sapiens
  misc_RNA (1)...(19): siRNA sense strand
gagaccacccagaagaauu

SEQ ID NO: 475364 - RNA, 19 nt, Homo sapiens
  misc_RNA (1)...(19): siRNA sense strand
gcaccggacaccaugaaga

SEQ ID NO: 475365 - RNA, 19 nt, Homo sapiens
  misc_RNA (1)...(19): siRNA sense strand
agaccacccagaagaauuu

SEQ ID NO: 475366 - RNA, 19 nt, Homo sapiens
  misc_RNA (1)...(19): siRNA sense strand
gacagucacuaggcaacuu

SEQ ID NO: 475367 - RNA, 19 nt, Homo sapiens
  misc_RNA (1)...(19): siRNA sense strand
gaguacuccuccagcauuc

SEQ ID NO: 475368 - RNA, 19 nt, Homo sapiens
  misc_RNA (1)...(19): siRNA sense strand
agaaguggcagaaggagaa

SEQ ID NO: 475369 - RNA, 19 nt, Homo sapiens
  misc_RNA (1)...(19): siRNA sense strand
ggaccugagccguaacuuc

SEQ ID NO: 475370 - RNA, 19 nt, Homo sapiens
  misc_RNA (1)...(19): siRNA sense strand
aggacgaccugcucaaugu

SEQ ID NO: 475371 - RNA, 19 nt, Homo sapiens
  misc_RNA (1)...(19): siRNA sense strand
gagcagcugcauagcauca

SEQ ID NO: 475372 - RNA, 19 nt, Homo sapiens
  misc_RNA (1)...(19): siRNA sense strand
gaaggagacggagcuguca

SEQ ID NO: 475373 - RNA, 19 nt, Homo sapiens
  misc_RNA (1)...(19): siRNA sense strand
ccaagaagccacccguuac

SEQ ID NO: 475374 - RNA, 19 nt, Homo sapiens
  misc_RNA (1)...(19): siRNA sense strand
augaagagauacuccaugu

SEQ ID NO: 475375 - RNA, 19 nt, Homo sapiens
  misc_RNA (1)...(19): siRNA sense strand
ccugagccguaacuucauu

SEQ ID NO: 475376 - RNA, 19 nt, Homo sapiens
  misc_RNA (1)...(19): siRNA sense strand
ucaagagcuucaccaccaa

SEQ ID NO: 475377 - RNA, 19 nt, Homo sapiens
  misc_RNA (1)...(19): siRNA sense strand
ggagaccacccagaagaau

SEQ ID NO: 475378 - RNA, 19 nt, Homo sapiens
  misc_RNA (1)...(19): siRNA sense strand
aagugaaggugaucaugga

SEQ ID NO: 475379 - RNA, 19 nt, Homo sapiens
  misc_RNA (1)...(19): siRNA sense strand
aggcggaccugagccguaa

SEQ ID NO: 475380 - RNA, 19 nt, Homo sapiens
  misc_RNA (1)...(19): siRNA sense strand
caagaucauugagauugag

SEQ ID NO: 475381 - RNA, 19 nt, Homo sapiens
  misc_RNA (1)...(19): siRNA sense strand
gcgacucuguguuguuucu

SEQ ID NO: 475382 - RNA, 19 nt, Homo sapiens
  misc_RNA (1)...(19): siRNA sense strand
caacgggucgagcccagaa

SEQ ID NO: 475383 - RNA, 19 nt, Homo sapiens
  misc_RNA (1)...(19): siRNA sense strand
agaggaaccacauggagaa

SEQ ID NO: 475384 - RNA, 19 nt, Homo sapiens
  misc_RNA (1)...(19): siRNA sense strand
ggagugcaccggacaccau

SEQ ID NO: 475385 - RNA, 19 nt, Homo sapiens
  misc_RNA (1)...(19): siRNA sense strand
uccaggagcacaagaauca

SEQ ID NO: 475386 - RNA, 19 nt, Homo sapiens
  misc_RNA (1)...(19): siRNA sense strand
ugaagagauacuccaugua

SEQ ID NO: 475387 - RNA, 19 nt, Homo sapiens
  misc_RNA (1)...(19): siRNA sense strand
ucugcgagcugcaucucaa

SEQ ID NO: 475388 - RNA, 19 nt, Homo sapiens
  misc_RNA (1)...(19): siRNA sense strand
ggcgacccaucauccaguu

SEQ ID NO: 475389 - RNA, 19 nt, Homo sapiens
  misc_RNA (1)...(19): siRNA sense strand
gagcacaagaaucauagca

SEQ ID NO: 475390 - RNA, 19 nt, Homo sapiens
  misc_RNA (1)...(19): siRNA sense strand
cgacccaucauccaguuug

SEQ ID NO: 475391 - RNA, 19 nt, Homo sapiens
  misc_RNA (1)...(19): siRNA sense strand
gaucauugagauugaggau

SEQ ID NO: 475392 - RNA, 19 nt, Homo sapiens
  misc_RNA (1)...(19): siRNA sense strand
cccagaagaauuucaacaa

SEQ ID NO: 475393 - RNA, 19 nt, Homo sapiens
  misc_RNA (1)...(19): siRNA sense strand
cccguuaccuuugccgaaa

SEQ ID NO: 475394 - RNA, 19 nt, Homo sapiens
  misc_RNA (1)...(19): siRNA sense strand
gacccaucauccaguuugu

SEQ ID NO: 475395 - RNA, 19 nt, Homo sapiens
  misc_RNA (1)...(19): siRNA sense strand
gacgaccugcucaauguau

SEQ ID NO: 475396 - RNA, 19 nt, Homo sapiens
  misc_RNA (1)...(19): siRNA sense strand
caaggacgaccugcucaau

SEQ ID NO: 475397 - RNA, 19 nt, Homo sapiens
  misc_RNA (1)...(19): siRNA sense strand
agaaggaccgcaucaagag

SEQ ID NO: 475398 - RNA, 19 nt, Homo sapiens
  misc_RNA (1)...(19): siRNA sense strand
aaggagaccacccagaaga

SEQ ID NO: 475399 - RNA, 19 nt, Homo sapiens
  misc_RNA (1)...(19): siRNA sense strand
uguuguuucugcaggaauu

SEQ ID NO: 475400 - RNA, 19 nt, Homo sapiens
  misc_RNA (1)...(19): siRNA sense strand
gagcuucaccaccaaugag

SEQ ID NO: 475401 - RNA, 19 nt, Homo sapiens
  misc_RNA (1)...(19): siRNA sense strand
ucuauggcaccaaagguaa

SEQ ID NO: 475402 - RNA, 19 nt, Homo sapiens
  misc_RNA (1)...(19): siRNA sense strand
ccacccagaagaauuucaa

SEQ ID NO: 475403 - RNA, 19 nt, Homo sapiens
  misc_RNA (1)...(19): siRNA sense strand
guggcagccuggagaaugg

SEQ ID NO: 475404 - RNA, 19 nt, Homo sapiens
  misc_RNA (1)...(19): siRNA sense strand
gcgccacguugagaagaug

SEQ ID NO: 475405 - RNA, 19 nt, Homo sapiens
  misc_RNA (1)...(19): siRNA sense strand
ucugcuaccuuugcauguu

SEQ ID NO: 475406 - RNA, 19 nt, Homo sapiens
  misc_RNA (1)...(19): siRNA sense strand
gcuccuccuucucccugaa

SEQ ID NO: 475407 - RNA, 19 nt, Homo sapiens
  misc_RNA (1)...(19): siRNA sense strand
caaggagaccacccagaag

SEQ ID NO: 475408 - RNA, 19 nt, Homo sapiens
  misc_RNA (1)...(19): siRNA sense strand
gcaugcgccacguugagaa

SEQ ID NO: 475409 - RNA, 19 nt, Homo sapiens
  misc_RNA (1)...(19): siRNA sense strand
gagcccauccgggacuuug

SEQ ID NO: 475410 - RNA, 19 nt, Homo sapiens
  misc_RNA (1)...(19): siRNA sense strand
gcaccaaagguaacuacac

SEQ ID NO: 475411 - RNA, 19 nt, Homo sapiens
  misc_RNA (1)...(19): siRNA sense strand
acaacuacacgaacagcuu

SEQ ID NO: 475412 - RNA, 19 nt, Homo sapiens
  misc_RNA (1)...(19): siRNA sense strand
ggugaccaucgcuauguga

SEQ ID NO: 475413 - RNA, 19 nt, Homo sapiens
  misc_RNA (1)...(19): siRNA sense strand
ccgcaagugucccgugcau

SEQ ID NO: 475414 - RNA, 19 nt, Homo sapiens
  misc_RNA (1)...(19): siRNA sense strand
gcaaaccugucuucauuaa

SEQ ID NO: 475415 - RNA, 19 nt, Homo sapiens
  misc_RNA (1)...(19): siRNA sense strand
cagcaaaccugucuucauu

SEQ ID NO: 475416 - RNA, 19 nt, Homo sapiens
  misc_RNA (1)...(19): siRNA sense strand
gaggagaagucccggguaa

SEQ ID NO: 475417 - RNA, 19 nt, Homo sapiens
  misc_RNA (1)...(19): siRNA sense strand
gagaccaccuacuccguua

SEQ ID NO: 475418 - RNA, 19 nt, Homo sapiens
  misc_RNA (1)...(19): siRNA sense strand
gaccagcacuucacaguca

SEQ ID NO: 475419 - RNA, 19 nt, Homo sapiens
  misc_RNA (1)...(19): siRNA sense strand
gacacccgcuuuacccuua

SEQ ID NO: 475420 - RNA, 19 nt, Homo sapiens
  misc_RNA (1)...(19): siRNA sense strand
caacacagaguacucguuu

SEQ ID NO: 475421 - RNA, 19 nt, Homo sapiens
  misc_RNA (1)...(19): siRNA sense strand
uaagucagcugugcccuuu

SEQ ID NO: 475422 - RNA, 19 nt, Homo sapiens
  misc_RNA (1)...(19): siRNA sense strand
ugacacggcuggaggagaa

SEQ ID NO: 475423 - RNA, 19 nt, Homo sapiens
  misc_RNA (1)...(19): siRNA sense strand
ggagggcucugacuacauc

SEQ ID NO: 475424 - RNA, 19 nt, Homo sapiens
  misc_RNA (1)...(19): siRNA sense strand
ccgaggagcucaccaagga

SEQ ID NO: 475425 - RNA, 19 nt, Homo sapiens
  misc_RNA (1)...(19): siRNA sense strand
gaacuccacugcugugcau

SEQ ID NO: 475426 - RNA, 19 nt, Homo sapiens
  misc_RNA (1)...(19): siRNA sense strand
caucaugcccuacgaauug

SEQ ID NO: 475427 - RNA, 19 nt, Homo sapiens
  misc_RNA (1)...(19): siRNA sense strand
gagcacaauuccaccauca

SEQ ID NO: 475428 - RNA, 19 nt, Homo sapiens
  misc_RNA (1)...(19): siRNA sense strand
cagaaggccuacauagcua

SEQ ID NO: 475429 - RNA, 19 nt, Homo sapiens
  misc_RNA (1)...(19): siRNA sense strand
caacaucgagcgccucaaa

SEQ ID NO: 475430 - RNA, 19 nt, Homo sapiens
  misc_RNA (1)...(19): siRNA sense strand
ccauggagcucgaguucaa

SEQ ID NO: 475431 - RNA, 19 nt, Homo sapiens
  misc_RNA (1)...(19): siRNA sense strand
aaaccugucuucauuaaag

SEQ ID NO: 475432 - RNA, 19 nt, Homo sapiens
  misc_RNA (1)...(19): siRNA sense strand
gcugugcccuuuaagauuc

SEQ ID NO: 475433 - RNA, 19 nt, Homo sapiens
  misc_RNA (1)...(19): siRNA sense strand
gaagccaucuaugagugua

SEQ ID NO: 475434 - RNA, 19 nt, Homo sapiens
  misc_RNA (1)...(19): siRNA sense strand
agaagacgguggacaucua

SEQ ID NO: 475435 - RNA, 19 nt, Homo sapiens
  misc_RNA (1)...(19): siRNA sense strand
gggagugacuacaucaaug

SEQ ID NO: 475436 - RNA, 19 nt, Homo sapiens
  misc_RNA (1)...(19): siRNA sense strand
gcagacagaggaccaguau

SEQ ID NO: 475437 - RNA, 19 nt, Homo sapiens
  misc_RNA (1)...(19): siRNA sense strand
gaacaucaugcccuacgaa

SEQ ID NO: 475438 - RNA, 19 nt, Homo sapiens
  misc_RNA (1)...(19): siRNA sense strand
aagaguggcuccagugaga

SEQ ID NO: 475439 - RNA, 19 nt, Homo sapiens
  misc_RNA (1)...(19): siRNA sense strand
ccacugcugugcaugucua

SEQ ID NO: 475440 - RNA, 19 nt, Homo sapiens
  misc_RNA (1)...(19): siRNA sense strand
ugaccacuaugcaacguaa

SEQ ID NO: 475441 - RNA, 19 nt, Homo sapiens
  misc_RNA (1)...(19): siRNA sense strand
gcagaaggccuacauagcu

SEQ ID NO: 475442 - RNA, 19 nt, Homo sapiens
  misc_RNA (1)...(19): siRNA sense strand
gugccaagcuacaggagaa

SEQ ID NO: 475443 - RNA, 19 nt, Homo sapiens
  misc_RNA (1)...(19): siRNA sense strand
gugaggaguucgagaagga

SEQ ID NO: 475444 - RNA, 19 nt, Homo sapiens
  misc_RNA (1)...(19): siRNA sense strand
ggagaaaugccaccaguac

SEQ ID NO: 475445 - RNA, 19 nt, Homo sapiens
  misc_RNA (1)...(19): siRNA sense strand
agugaaagcucuuccaaag

SEQ ID NO: 475446 - RNA, 19 nt, Homo sapiens
  misc_RNA (1)...(19): siRNA sense strand
cgagaccuguggccuuauu

SEQ ID NO: 475447 - RNA, 19 nt, Homo sapiens
  misc_RNA (1)...(19): siRNA sense strand
ccuuuaagauucuguacaa

SEQ ID NO: 475448 - RNA, 19 nt, Homo sapiens
  misc_RNA (1)...(19): siRNA sense strand
gaccacgucuaccacagaa

SEQ ID NO: 475449 - RNA, 19 nt, Homo sapiens
  misc_RNA (1)...(19): siRNA sense strand
uguaugaacugguguacug

SEQ ID NO: 475450 - RNA, 19 nt, Homo sapiens
  misc_RNA (1)...(19): siRNA sense strand
gcacagccaccaugcuaug

SEQ ID NO: 475451 - RNA, 19 nt, Homo sapiens
  misc_RNA (1)...(19): siRNA sense strand
agacagaggaccaguauca

SEQ ID NO: 475452 - RNA, 19 nt, Homo sapiens
  misc_RNA (1)...(19): siRNA sense strand
gagcggaucaucauguaug

SEQ ID NO: 475453 - RNA, 19 nt, Homo sapiens
  misc_RNA (1)...(19): siRNA sense strand
ucaggugccuugcagauag

SEQ ID NO: 475454 - RNA, 19 nt, Homo sapiens
  misc_RNA (1)...(19): siRNA sense strand
cuacaucaaugccaacuac

SEQ ID NO: 475455 - RNA, 19 nt, Homo sapiens
  misc_RNA (1)...(19): siRNA sense strand
agucagcugugcccuuuaa

SEQ ID NO: 475456 - RNA, 19 nt, Homo sapiens
  misc_RNA (1)...(19): siRNA sense strand
agacaccacuuacgacauc

SEQ ID NO: 475457 - RNA, 19 nt, Homo sapiens
  misc_RNA (1)...(19): siRNA sense strand
gaagacgguggacaucuau

SEQ ID NO: 475458 - RNA, 19 nt, Homo sapiens
  misc_RNA (1)...(19): siRNA sense strand
ucaccgaccuggcggacaa

SEQ ID NO: 475459 - RNA, 19 nt, Homo sapiens
  misc_RNA (1)...(19): siRNA sense strand
gcuucgaggucauugaguu

SEQ ID NO: 475460 - RNA, 19 nt, Homo sapiens
  misc_RNA (1)...(19): siRNA sense strand
gaugggcagucaaggacaa

SEQ ID NO: 475461 - RNA, 19 nt, Homo sapiens
  misc_RNA (1)...(19): siRNA sense strand
caaccuguaugcccacauc

SEQ ID NO: 475462 - RNA, 19 nt, Homo sapiens
  misc_RNA (1)...(19): siRNA sense strand
gcaaggaugaccagcacuu

SEQ ID NO: 475463 - RNA, 19 nt, Homo sapiens
  misc_RNA (1)...(19): siRNA sense strand
gaucacagaggaacuacau

SEQ ID NO: 475464 - RNA, 19 nt, Homo sapiens
  misc_RNA (1)...(19): siRNA sense strand
ggagaauggugugggaaca

SEQ ID NO: 475465 - RNA, 19 nt, Homo sapiens
  misc_RNA (1)...(19): siRNA sense strand
uuaagauucuguacaaugg

SEQ ID NO: 475466 - RNA, 19 nt, Homo sapiens
  misc_RNA (1)...(19): siRNA sense strand
ggacugaccacgucuacca

SEQ ID NO: 475467 - RNA, 19 nt, Homo sapiens
  misc_RNA (1)...(19): siRNA sense strand
ggacuuccuuccuguagac

SEQ ID NO: 475468 - RNA, 19 nt, Homo sapiens
  misc_RNA (1)...(19): siRNA sense strand
ggacaggaugggccuauca

SEQ ID NO: 475469 - RNA, 19 nt, Homo sapiens
  misc_RNA (1)...(19): siRNA sense strand
gcucugcucgcuaccagua

SEQ ID NO: 475470 - RNA, 19 nt, Homo sapiens
  misc_RNA (1)...(19): siRNA sense strand
ugaccaagcuucgggagau

SEQ ID NO: 475471 - RNA, 19 nt, Homo sapiens
  misc_RNA (1)...(19): siRNA sense strand
gcacaauuccaccaucauc

SEQ ID NO: 475472 - RNA, 19 nt, Homo sapiens
  misc_RNA (1)...(19): siRNA sense strand
ggacuucuggcgcaugcua

SEQ ID NO: 475473 - RNA, 19 nt, Homo sapiens
  misc_RNA (1)...(19): siRNA sense strand
cgaauugacccgugugugu

SEQ ID NO: 475474 - RNA, 19 nt, Homo sapiens
  misc_RNA (1)...(19): siRNA sense strand
cgugauugaugccauguug

SEQ ID NO: 475475 - RNA, 19 nt, Homo sapiens
  misc_RNA (1)...(19): siRNA sense strand
aacaggagcugcagaacau

SEQ ID NO: 475476 - RNA, 19 nt, Homo sapiens
  misc_RNA (1)...(19): siRNA sense strand
caacaggagcugcagaaca

SEQ ID NO: 475477 - RNA, 19 nt, Homo sapiens
  misc_RNA (1)...(19): siRNA sense strand
gacccaaccuccuccuaca

SEQ ID NO: 475478 - RNA, 19 nt, Homo sapiens
  misc_RNA (1)...(19): siRNA sense strand
gggcguggucgacauguuu

SEQ ID NO: 475479 - RNA, 19 nt, Homo sapiens
  misc_RNA (1)...(19): siRNA sense strand
gcaagcagaaugccuacau

SEQ ID NO: 475480 - RNA, 19 nt, Homo sapiens
  misc_RNA (1)...(19): siRNA sense strand
cccagaaggugaugugugu

SEQ ID NO: 475481 - RNA, 19 nt, Homo sapiens
  misc_RNA (1)...(19): siRNA sense strand
ggaaauccagacccugaga

SEQ ID NO: 475482 - RNA, 19 nt, Homo sapiens
  misc_RNA (1)...(19): siRNA sense strand
gggauucauugacuucauc

SEQ ID NO: 475483 - RNA, 19 nt, Homo sapiens
  misc_RNA (1)...(19): siRNA sense strand
ucacgugggagaauucaaa

SEQ ID NO: 475484 - RNA, 19 nt, Homo sapiens
  misc_RNA (1)...(19): siRNA sense strand
gaacgucugaagccauaug

SEQ ID NO: 475485 - RNA, 19 nt, Homo sapiens
  misc_RNA (1)...(19): siRNA sense strand
ucaggugguucuacauugu

SEQ ID NO: 475486 - RNA, 19 nt, Homo sapiens
  misc_RNA (1)...(19): siRNA sense strand
gcacuggugaugcuugguu

SEQ ID NO: 475487 - RNA, 19 nt, Homo sapiens
  misc_RNA (1)...(19): siRNA sense strand
cauccaagacgucaugcua

SEQ ID NO: 475488 - RNA, 19 nt, Homo sapiens
  misc_RNA (1)...(19): siRNA sense strand
ugggugagaucaacacuag

SEQ ID NO: 475489 - RNA, 19 nt, Homo sapiens
  misc_RNA (1)...(19): siRNA sense strand
caaggacaauccggcaguu

SEQ ID NO: 475490 - RNA, 19 nt, Homo sapiens
  misc_RNA (1)...(19): siRNA sense strand
ggagcucgaguucaaguug

SEQ ID NO: 475491 - RNA, 19 nt, Homo sapiens
  misc_RNA (1)...(19): siRNA sense strand
caagcagaaugccuacauc

SEQ ID NO: 475492 - RNA, 19 nt, Homo sapiens
  misc_RNA (1)...(19): siRNA sense strand
caacgauggccucaaguuc

SEQ ID NO: 475493 - RNA, 19 nt, Homo sapiens
  misc_RNA (1)...(19): siRNA sense strand
gaaccgcuaugcgaauguc

SEQ ID NO: 475494 - RNA, 19 nt, Homo sapiens
  misc_RNA (1)...(19): siRNA sense strand
ggagaugggcagggagaaa

SEQ ID NO: 475495 - RNA, 19 nt, Homo sapiens
  misc_RNA (1)...(19): siRNA sense strand
gagucauccuuaccucuau

SEQ ID NO: 475496 - RNA, 19 nt, Homo sapiens
  misc_RNA (1)...(19): siRNA sense strand
acccugagauuucuugguu

SEQ ID NO: 475497 - RNA, 19 nt, Homo sapiens
  misc_RNA (1)...(19): siRNA sense strand
cggcagcuuugaccacuau

SEQ ID NO: 475498 - RNA, 19 nt, Homo sapiens
  misc_RNA (1)...(19): siRNA sense strand
gcgagggauucauugacuu

SEQ ID NO: 475499 - RNA, 19 nt, Homo sapiens
  misc_RNA (1)...(19): siRNA sense strand
gguaaaaugugaucaguac

SEQ ID NO: 475500 - RNA, 19 nt, Homo sapiens
  misc_RNA (1)...(19): siRNA sense strand
cgagucauccuuaccucua

SEQ ID NO: 475501 - RNA, 19 nt, Homo sapiens
  misc_RNA (1)...(19): siRNA sense strand
gccugccucugccuacaua

SEQ ID NO: 475502 - RNA, 19 nt, Homo sapiens
  misc_RNA (1)...(19): siRNA sense strand
ggcccaacaccauagauuu

SEQ ID NO: 475503 - RNA, 19 nt, Homo sapiens
  misc_RNA (1)...(19): siRNA sense strand
gcuaccggcugcaguacug

SEQ ID NO: 475504 - RNA, 19 nt, Homo sapiens
  misc_RNA (1)...(19): siRNA sense strand
acucggagccuguaaccua

SEQ ID NO: 475505 - RNA, 19 nt, Homo sapiens
  misc_RNA (1)...(19): siRNA sense strand
gaggaugagaugccaguug

SEQ ID NO: 475506 - RNA, 19 nt, Homo sapiens
  misc_RNA (1)...(19): siRNA sense strand
uuccaaagccuccgauuga

SEQ ID NO: 475507 - RNA, 19 nt, Homo sapiens
  misc_RNA (1)...(19): siRNA sense strand
ggaguaccucggcagcuuu

SEQ ID NO: 475508 - RNA, 19 nt, Homo sapiens
  misc_RNA (1)...(19): siRNA sense strand
gacaggcgagggauucauu

SEQ ID NO: 475509 - RNA, 19 nt, Homo sapiens
  misc_RNA (1)...(19): siRNA sense strand
ggugagaucaacacuagug

SEQ ID NO: 475510 - RNA, 19 nt, Homo sapiens
  misc_RNA (1)...(19): siRNA sense strand
gucaggugguucuacauug

SEQ ID NO: 475511 - RNA, 19 nt, Homo sapiens
  misc_RNA (1)...(19): siRNA sense strand
gguggcggcugcaaugaag

SEQ ID NO: 475512 - RNA, 19 nt, Homo sapiens
  misc_RNA (1)...(19): siRNA sense strand
uaccaguacuuuguuguug

SEQ ID NO: 475513 - RNA, 19 nt, Homo sapiens
  misc_RNA (1)...(19): siRNA sense strand
ugaagacccugcguacaca

SEQ ID NO: 475514 - RNA, 19 nt, Homo sapiens
  misc_RNA (1)...(19): siRNA sense strand
gcaaaccugucuucauuaa

SEQ ID NO: 475515 - RNA, 19 nt, Homo sapiens
  misc_RNA (1)...(19): siRNA sense strand
cagcaaaccugucuucauu

SEQ ID NO: 475516 - RNA, 19 nt, Homo sapiens
  misc_RNA (1)...(19): siRNA sense strand
gaggagaagucccggguaa

SEQ ID NO: 475517 - RNA, 19 nt, Homo sapiens
  misc_RNA (1)...(19): siRNA sense strand
gagaccaccuacuccguua

SEQ ID NO: 475518 - RNA, 19 nt, Homo sapiens
  misc_RNA (1)...(19): siRNA sense strand
gaccagcacuucacaguca

SEQ ID NO: 475519 - RNA, 19 nt, Homo sapiens
  misc_RNA (1)...(19): siRNA sense strand
gacacccgcuuuacccuua

SEQ ID NO: 475520 - RNA, 19 nt, Homo sapiens
  misc_RNA (1)...(19): siRNA sense strand
caacacagaguacucguuu

SEQ ID NO: 475521 - RNA, 19 nt, Homo sapiens
  misc_RNA (1)...(19): siRNA sense strand
uaagucagcugugcccuuu

SEQ ID NO: 475522 - RNA, 19 nt, Homo sapiens
  misc_RNA (1)...(19): siRNA sense strand
ugacacggcuggaggagaa

SEQ ID NO: 475523 - RNA, 19 nt, Homo sapiens
  misc_RNA (1)...(19): siRNA sense strand
ggagggcucugacuacauc

SEQ ID NO: 475524 - RNA, 19 nt, Homo sapiens
  misc_RNA (1)...(19): siRNA sense strand
ccgaggagcucaccaagga

SEQ ID NO: 475525 - RNA, 19 nt, Homo sapiens
  misc_RNA (1)...(19): siRNA sense strand
gaacuccacugcugugcau

SEQ ID NO: 475526 - RNA, 19 nt, Homo sapiens
  misc_RNA (1)...(19): siRNA sense strand
caucaugcccuacgaauug

SEQ ID NO: 475527 - RNA, 19 nt, Homo sapiens
  misc_RNA (1)...(19): siRNA sense strand
gagcacaauuccaccauca

SEQ ID NO: 475528 - RNA, 19 nt, Homo sapiens
  misc_RNA (1)...(19): siRNA sense strand
cagaaggccuacauagcua

SEQ ID NO: 475529 - RNA, 19 nt, Homo sapiens
  misc_RNA (1)...(19): siRNA sense strand
caacaucgagcgccucaaa

SEQ ID NO: 475530 - RNA, 19 nt, Homo sapiens
  misc_RNA (1)...(19): siRNA sense strand
ccauggagcucgaguucaa

SEQ ID NO: 475531 - RNA, 19 nt, Homo sapiens
  misc_RNA (1)...(19): siRNA sense strand
aaaccugucuucauuaaag

SEQ ID NO: 475532 - RNA, 19 nt, Homo sapiens
  misc_RNA (1)...(19): siRNA sense strand
gcugugcccuuuaagauuc

SEQ ID NO: 475533 - RNA, 19 nt, Homo sapiens
  misc_RNA (1)...(19): siRNA sense strand
gaagccaucuaugagugua

SEQ ID NO: 475534 - RNA, 19 nt, Homo sapiens
  misc_RNA (1)...(19): siRNA sense strand
agaagacgguggacaucua

SEQ ID NO: 475535 - RNA, 19 nt, Homo sapiens
  misc_RNA (1)...(19): siRNA sense strand
gggagugacuacaucaaug

SEQ ID NO: 475536 - RNA, 19 nt, Homo sapiens
  misc_RNA (1)...(19): siRNA sense strand
gcagacagaggaccaguau

SEQ ID NO: 475537 - RNA, 19 nt, Homo sapiens
  misc_RNA (1)...(19): siRNA sense strand
gaacaucaugcccuacgaa

SEQ ID NO: 475538 - RNA, 19 nt, Homo sapiens
  misc_RNA (1)...(19): siRNA sense strand
aagaguggcuccagugaga

SEQ ID NO: 475539 - RNA, 19 nt, Homo sapiens
  misc_RNA (1)...(19): siRNA sense strand
ccacugcugugcaugucua

SEQ ID NO: 475540 - RNA, 19 nt, Homo sapiens
  misc_RNA (1)...(19): siRNA sense strand
ugaccacuaugcaacguaa

SEQ ID NO: 475541 - RNA, 19 nt, Homo sapiens
  misc_RNA (1)...(19): siRNA sense strand
gcagaaggccuacauagcu

SEQ ID NO: 475542 - RNA, 19 nt, Homo sapiens
  misc_RNA (1)...(19): siRNA sense strand
gugccaagcuacaggagaa

SEQ ID NO: 475543 - RNA, 19 nt, Homo sapiens
  misc_RNA (1)...(19): siRNA sense strand
gugaggaguucgagaagga

SEQ ID NO: 475544 - RNA, 19 nt, Homo sapiens
  misc_RNA (1)...(19): siRNA sense strand
ggagaaaugccaccaguac

SEQ ID NO: 475545 - RNA, 19 nt, Homo sapiens
  misc_RNA (1)...(19): siRNA sense strand
agugaaagcucuuccaaag

SEQ ID NO: 475546 - RNA, 19 nt, Homo sapiens
  misc_RNA (1)...(19): siRNA sense strand
cgagaccuguggccuuauu

SEQ ID NO: 475547 - RNA, 19 nt, Homo sapiens
  misc_RNA (1)...(19): siRNA sense strand
ccuuuaagauucuguacaa

SEQ ID NO: 475548 - RNA, 19 nt, Homo sapiens
  misc_RNA (1)...(19): siRNA sense strand
gaccacgucuaccacagaa

SEQ ID NO: 475549 - RNA, 19 nt, Homo sapiens
  misc_RNA (1)...(19): siRNA sense strand
uguaugaacugguguacug

SEQ ID NO: 475550 - RNA, 19 nt, Homo sapiens
  misc_RNA (1)...(19): siRNA sense strand
gcacagccaccaugcuaug

SEQ ID NO: 475551 - RNA, 19 nt, Homo sapiens
  misc_RNA (1)...(19): siRNA sense strand
agacagaggaccaguauca

SEQ ID NO: 475552 - RNA, 19 nt, Homo sapiens
  misc_RNA (1)...(19): siRNA sense strand
gagcggaucaucauguaug

SEQ ID NO: 475553 - RNA, 19 nt, Homo sapiens
  misc_RNA (1)...(19): siRNA sense strand
ucaggugccuugcagauag

SEQ ID NO: 475554 - RNA, 19 nt, Homo sapiens
  misc_RNA (1)...(19): siRNA sense strand
cuacaucaaugccaacuac

SEQ ID NO: 475555 - RNA, 19 nt, Homo sapiens
  misc_RNA (1)...(19): siRNA sense strand
agucagcugugcccuuuaa

SEQ ID NO: 475556 - RNA, 19 nt, Homo sapiens
  misc_RNA (1)...(19): siRNA sense strand
agacaccacuuacgacauc

SEQ ID NO: 475557 - RNA, 19 nt, Homo sapiens
  misc_RNA (1)...(19): siRNA sense strand
gaagacgguggacaucuau

SEQ ID NO: 475558 - RNA, 19 nt, Homo sapiens
  misc_RNA (1)...(19): siRNA sense strand
ucaccgaccuggcggacaa

SEQ ID NO: 475559 - RNA, 19 nt, Homo sapiens
  misc_RNA (1)...(19): siRNA sense strand
gcuucgaggucauugaguu

SEQ ID NO: 475560 - RNA, 19 nt, Homo sapiens
  misc_RNA (1)...(19): siRNA sense strand
gaugggcagucaaggacaa

SEQ ID NO: 475561 - RNA, 19 nt, Homo sapiens
  misc_RNA (1)...(19): siRNA sense strand
caaccuguaugcccacauc

SEQ ID NO: 475562 - RNA, 19 nt, Homo sapiens
  misc_RNA (1)...(19): siRNA sense strand
gcaaggaugaccagcacuu

SEQ ID NO: 475563 - RNA, 19 nt, Homo sapiens
  misc_RNA (1)...(19): siRNA sense strand
gaucacagaggaacuacau

SEQ ID NO: 475564 - RNA, 19 nt, Homo sapiens
  misc_RNA (1)...(19): siRNA sense strand
ggagaauggugugggaaca

SEQ ID NO: 475565 - RNA, 19 nt, Homo sapiens
  misc_RNA (1)...(19): siRNA sense strand
uuaagauucuguacaaugg

SEQ ID NO: 475566 - RNA, 19 nt, Homo sapiens
  misc_RNA (1)...(19): siRNA sense strand
ggacugaccacgucuacca

SEQ ID NO: 475567 - RNA, 19 nt, Homo sapiens
  misc_RNA (1)...(19): siRNA sense strand
ggacuuccuuccuguagac

SEQ ID NO: 475568 - RNA, 19 nt, Homo sapiens
  misc_RNA (1)...(19): siRNA sense strand
ggacaggaugggccuauca

SEQ ID NO: 475569 - RNA, 19 nt, Homo sapiens
  misc_RNA (1)...(19): siRNA sense strand
gcucugcucgcuaccagua

SEQ ID NO: 475570 - RNA, 19 nt, Homo sapiens
  misc_RNA (1)...(19): siRNA sense strand
ugaccaagcuucgggagau

SEQ ID NO: 475571 - RNA, 19 nt, Homo sapiens
  misc_RNA (1)...(19): siRNA sense strand
gcacaauuccaccaucauc

SEQ ID NO: 475572 - RNA, 19 nt, Homo sapiens
  misc_RNA (1)...(19): siRNA sense strand
ggacuucuggcgcaugcua

SEQ ID NO: 475573 - RNA, 19 nt, Homo sapiens
  misc_RNA (1)...(19): siRNA sense strand
cgaauugacccgugugugu

SEQ ID NO: 475574 - RNA, 19 nt, Homo sapiens
  misc_RNA (1)...(19): siRNA sense strand
cgugauugaugccauguug

SEQ ID NO: 475575 - RNA, 19 nt, Homo sapiens
  misc_RNA (1)...(19): siRNA sense strand
aacaggagcugcagaacau

SEQ ID NO: 475576 - RNA, 19 nt, Homo sapiens
  misc_RNA (1)...(19): siRNA sense strand
caacaggagcugcagaaca

SEQ ID NO: 475577 - RNA, 19 nt, Homo sapiens
  misc_RNA (1)...(19): siRNA sense strand
gacccaaccuccuccuaca

SEQ ID NO: 475578 - RNA, 19 nt, Homo sapiens
  misc_RNA (1)...(19): siRNA sense strand
gggcguggucgacauguuu

SEQ ID NO: 475579 - RNA, 19 nt, Homo sapiens
  misc_RNA (1)...(19): siRNA sense strand
gcaagcagaaugccuacau

SEQ ID NO: 475580 - RNA, 19 nt, Homo sapiens
  misc_RNA (1)...(19): siRNA sense strand
cccagaaggugaugugugu

SEQ ID NO: 475581 - RNA, 19 nt, Homo sapiens
  misc_RNA (1)...(19): siRNA sense strand
ggaaauccagacccugaga

SEQ ID NO: 475582 - RNA, 19 nt, Homo sapiens
  misc_RNA (1)...(19): siRNA sense strand
gggauucauugacuucauc

SEQ ID NO: 475583 - RNA, 19 nt, Homo sapiens
  misc_RNA (1)...(19): siRNA sense strand
ucacgugggagaauucaaa

SEQ ID NO: 475584 - RNA, 19 nt, Homo sapiens
  misc_RNA (1)...(19): siRNA sense strand
gaacgucugaagccauaug

SEQ ID NO: 475585 - RNA, 19 nt, Homo sapiens
  misc_RNA (1)...(19): siRNA sense strand
ucaggugguucuacauugu

SEQ ID NO: 475586 - RNA, 19 nt, Homo sapiens
  misc_RNA (1)...(19): siRNA sense strand
gcacuggugaugcuugguu

SEQ ID NO: 475587 - RNA, 19 nt, Homo sapiens
  misc_RNA (1)...(19): siRNA sense strand
cauccaagacgucaugcua

SEQ ID NO: 475588 - RNA, 19 nt, Homo sapiens
  misc_RNA (1)...(19): siRNA sense strand
ugggugagaucaacacuag

SEQ ID NO: 475589 - RNA, 19 nt, Homo sapiens
  misc_RNA (1)...(19): siRNA sense strand
caaggacaauccggcaguu

SEQ ID NO: 475590 - RNA, 19 nt, Homo sapiens
  misc_RNA (1)...(19): siRNA sense strand
ggagcucgaguucaaguug

SEQ ID NO: 475591 - RNA, 19 nt, Homo sapiens
  misc_RNA (1)...(19): siRNA sense strand
caagcagaaugccuacauc

SEQ ID NO: 475592 - RNA, 19 nt, Homo sapiens
  misc_RNA (1)...(19): siRNA sense strand
caacgauggccucaaguuc

SEQ ID NO: 475593 - RNA, 19 nt, Homo sapiens
  misc_RNA (1)...(19): siRNA sense strand
gaaccgcuaugcgaauguc

SEQ ID NO: 475594 - RNA, 19 nt, Homo sapiens
  misc_RNA (1)...(19): siRNA sense strand
ggagaugggcagggagaaa

SEQ ID NO: 475595 - RNA, 19 nt, Homo sapiens
  misc_RNA (1)...(19): siRNA sense strand
gagucauccuuaccucuau

SEQ ID NO: 475596 - RNA, 19 nt, Homo sapiens
  misc_RNA (1)...(19): siRNA sense strand
acccugagauuucuugguu

SEQ ID NO: 475597 - RNA, 19 nt, Homo sapiens
  misc_RNA (1)...(19): siRNA sense strand
cggcagcuuugaccacuau

SEQ ID NO: 475598 - RNA, 19 nt, Homo sapiens
  misc_RNA (1)...(19): siRNA sense strand
gcgagggauucauugacuu

SEQ ID NO: 475599 - RNA, 19 nt, Homo sapiens
  misc_RNA (1)...(19): siRNA sense strand
gguaaaaugugaucaguac

SEQ ID NO: 475600 - RNA, 19 nt, Homo sapiens
  misc_RNA (1)...(19): siRNA sense strand
cgagucauccuuaccucua

SEQ ID NO: 475601 - RNA, 19 nt, Homo sapiens
  misc_RNA (1)...(19): siRNA sense strand
gccugccucugccuacaua

SEQ ID NO: 475602 - RNA, 19 nt, Homo sapiens
  misc_RNA (1)...(19): siRNA sense strand
ggcccaacaccauagauuu

SEQ ID NO: 475603 - RNA, 19 nt, Homo sapiens
  misc_RNA (1)...(19): siRNA sense strand
gcuaccggcugcaguacug

SEQ ID NO: 475604 - RNA, 19 nt, Homo sapiens
  misc_RNA (1)...(19): siRNA sense strand
acucggagccuguaaccua

SEQ ID NO: 475605 - RNA, 19 nt, Homo sapiens
  misc_RNA (1)...(19): siRNA sense strand
gaggaugagaugccaguug

SEQ ID NO: 475606 - RNA, 19 nt, Homo sapiens
  misc_RNA (1)...(19): siRNA sense strand
uuccaaagccuccgauuga

SEQ ID NO: 475607 - RNA, 19 nt, Homo sapiens
  misc_RNA (1)...(19): siRNA sense strand
ggaguaccucggcagcuuu

SEQ ID NO: 475608 - RNA, 19 nt, Homo sapiens
  misc_RNA (1)...(19): siRNA sense strand
gacaggcgagggauucauu

SEQ ID NO: 475609 - RNA, 19 nt, Homo sapiens
  misc_RNA (1)...(19): siRNA sense strand
ggugagaucaacacuagug

SEQ ID NO: 475610 - RNA, 19 nt, Homo sapiens
  misc_RNA (1)...(19): siRNA sense strand
gucaggugguucuacauug

SEQ ID NO: 475611 - RNA, 19 nt, Homo sapiens
  misc_RNA (1)...(19): siRNA sense strand
gguggcggcugcaaugaag

SEQ ID NO: 475612 - RNA, 19 nt, Homo sapiens
  misc_RNA (1)...(19): siRNA sense strand
uaccaguacuuuguuguug

SEQ ID NO: 475613 - RNA, 19 nt, Homo sapiens
  misc_RNA (1)...(19): siRNA sense strand
ugaagacccugcguacaca

SEQ ID NO: 475614 - RNA, 19 nt, Homo sapiens
  misc_RNA (1)...(19): siRNA sense strand
gaagaaggcuggaaacaga

SEQ ID NO: 475615 - RNA, 19 nt, Homo sapiens
  misc_RNA (1)...(19): siRNA sense strand
ccacagggcugaucuauga

SEQ ID NO: 475616 - RNA, 19 nt, Homo sapiens
  misc_RNA (1)...(19): siRNA sense strand
ggugagggcuucaauguca

SEQ ID NO: 475617 - RNA, 19 nt, Homo sapiens
  misc_RNA (1)...(19): siRNA sense strand
gcaagauccucauuguaga

SEQ ID NO: 475618 - RNA, 19 nt, Homo sapiens
  misc_RNA (1)...(19): siRNA sense strand
ucacugaccucgccuucaa

SEQ ID NO: 475619 - RNA, 19 nt, Homo sapiens
  misc_RNA (1)...(19): siRNA sense strand
gcuauaagcccaagaaguc

SEQ ID NO: 475620 - RNA, 19 nt, Homo sapiens
  misc_RNA (1)...(19): siRNA sense strand
cugaagaccuggagacaga

SEQ ID NO: 475621 - RNA, 19 nt, Homo sapiens
  misc_RNA (1)...(19): siRNA sense strand
gaagcuagcggaggugauu

SEQ ID NO: 475622 - RNA, 19 nt, Homo sapiens
  misc_RNA (1)...(19): siRNA sense strand
ggaggaagaaccuaugaau

SEQ ID NO: 475623 - RNA, 19 nt, Homo sapiens
  misc_RNA (1)...(19): siRNA sense strand
ccagcaagauccucauugu

SEQ ID NO: 475624 - RNA, 19 nt, Homo sapiens
  misc_RNA (1)...(19): siRNA sense strand
uagcggaggugauucugaa

SEQ ID NO: 475625 - RNA, 19 nt, Homo sapiens
  misc_RNA (1)...(19): siRNA sense strand
cugaguaccuggcugcuuu

SEQ ID NO: 475626 - RNA, 19 nt, Homo sapiens
  misc_RNA (1)...(19): siRNA sense strand
ccuggugucugcuggauuu

SEQ ID NO: 475627 - RNA, 19 nt, Homo sapiens
  misc_RNA (1)...(19): siRNA sense strand
ggaagaaccuaugaaucuc

SEQ ID NO: 475628 - RNA, 19 nt, Homo sapiens
  misc_RNA (1)...(19): siRNA sense strand
gacaagagcaagcgaagug

SEQ ID NO: 475629 - RNA, 19 nt, Homo sapiens
  misc_RNA (1)...(19): siRNA sense strand
gcagauacccucggcugaa

SEQ ID NO: 475630 - RNA, 19 nt, Homo sapiens
  misc_RNA (1)...(19): siRNA sense strand
uggcugcucuucuggguaa

SEQ ID NO: 475631 - RNA, 19 nt, Homo sapiens
  misc_RNA (1)...(19): siRNA sense strand
gagcaaggccagcaagauc

SEQ ID NO: 475632 - RNA, 19 nt, Homo sapiens
  misc_RNA (1)...(19): siRNA sense strand
ccacuuugcccaguccuua

SEQ ID NO: 475633 - RNA, 19 nt, Homo sapiens
  misc_RNA (1)...(19): siRNA sense strand
gggcuucaaugucaaugug

SEQ ID NO: 475634 - RNA, 19 nt, Homo sapiens
  misc_RNA (1)...(19): siRNA sense strand
gcagcguggucaagcagaa

SEQ ID NO: 475635 - RNA, 19 nt, Homo sapiens
  misc_RNA (1)...(19): siRNA sense strand
agaauccacugcuccgaaa

SEQ ID NO: 475636 - RNA, 19 nt, Homo sapiens
  misc_RNA (1)...(19): siRNA sense strand
gcacccagcaaaccuucua

SEQ ID NO: 475637 - RNA, 19 nt, Homo sapiens
  misc_RNA (1)...(19): siRNA sense strand
ccauguuucugccaaaugu

SEQ ID NO: 475638 - RNA, 19 nt, Homo sapiens
  misc_RNA (1)...(19): siRNA sense strand
gcccuugcccuuccacuuu

SEQ ID NO: 475639 - RNA, 19 nt, Homo sapiens
  misc_RNA (1)...(19): siRNA sense strand
ccaugcagaucauucaaca

SEQ ID NO: 475640 - RNA, 19 nt, Homo sapiens
  misc_RNA (1)...(19): siRNA sense strand
gcaccaccaccucuuccua

SEQ ID NO: 475641 - RNA, 19 nt, Homo sapiens
  misc_RNA (1)...(19): siRNA sense strand
cagcaagauccucauugua

SEQ ID NO: 475642 - RNA, 19 nt, Homo sapiens
  misc_RNA (1)...(19): siRNA sense strand
cuggguggcuaccauguuu

SEQ ID NO: 475643 - RNA, 19 nt, Homo sapiens
  misc_RNA (1)...(19): siRNA sense strand
gaacaguccaucccaacag

SEQ ID NO: 475644 - RNA, 19 nt, Homo sapiens
  misc_RNA (1)...(19): siRNA sense strand
gaggaagaaccuaugaauc

SEQ ID NO: 475645 - RNA, 19 nt, Homo sapiens
  misc_RNA (1)...(19): siRNA sense strand
gaggaggaagaaccuauga

SEQ ID NO: 475646 - RNA, 19 nt, Homo sapiens
  misc_RNA (1)...(19): siRNA sense strand
gccaugggcuucugcuucu

SEQ ID NO: 475647 - RNA, 19 nt, Homo sapiens
  misc_RNA (1)...(19): siRNA sense strand
ugaccucgccuucaaagug

SEQ ID NO: 475648 - RNA, 19 nt, Homo sapiens
  misc_RNA (1)...(19): siRNA sense strand
aagaaccuaugaaucucua

SEQ ID NO: 475649 - RNA, 19 nt, Homo sapiens
  misc_RNA (1)...(19): siRNA sense strand
cauccuggcugaagauagg

SEQ ID NO: 475650 - RNA, 19 nt, Homo sapiens
  misc_RNA (1)...(19): siRNA sense strand
gaagaaccuaugaaucucu

SEQ ID NO: 475651 - RNA, 19 nt, Homo sapiens
  misc_RNA (1)...(19): siRNA sense strand
ggaaggccucccuggaaga

SEQ ID NO: 475652 - RNA, 19 nt, Homo sapiens
  misc_RNA (1)...(19): siRNA sense strand
aggaagaaccuaugaaucu

SEQ ID NO: 475653 - RNA, 19 nt, Homo sapiens
  misc_RNA (1)...(19): siRNA sense strand
acacugacaccaucuggaa

SEQ ID NO: 475654 - RNA, 19 nt, Homo sapiens
  misc_RNA (1)...(19): siRNA sense strand
ccagcaaaccuucuaccaa

SEQ ID NO: 475655 - RNA, 19 nt, Homo sapiens
  misc_RNA (1)...(19): siRNA sense strand
ggaggaggaagaaccuaug

SEQ ID NO: 475656 - RNA, 19 nt, Homo sapiens
  misc_RNA (1)...(19): siRNA sense strand
gccaggggcugacaaagaa

SEQ ID NO: 475657 - RNA, 19 nt, Homo sapiens
  misc_RNA (1)...(19): siRNA sense strand
acagaaacccaaccucaau

SEQ ID NO: 475658 - RNA, 19 nt, Homo sapiens
  misc_RNA (1)...(19): siRNA sense strand
gcggugagggcuucaaugu

SEQ ID NO: 475659 - RNA, 19 nt, Homo sapiens
  misc_RNA (1)...(19): siRNA sense strand
ucucugagcccaaccugaa

SEQ ID NO: 475660 - RNA, 19 nt, Homo sapiens
  misc_RNA (1)...(19): siRNA sense strand
acacgccgaugcccgaguu

SEQ ID NO: 475661 - RNA, 19 nt, Homo sapiens
  misc_RNA (1)...(19): siRNA sense strand
gaagaaguggaggcaguga

SEQ ID NO: 475662 - RNA, 19 nt, Homo sapiens
  misc_RNA (1)...(19): siRNA sense strand
accugaagcugcgcuauaa

SEQ ID NO: 475663 - RNA, 19 nt, Homo sapiens
  misc_RNA (1)...(19): siRNA sense strand
ggucagccaagccgaguga

SEQ ID NO: 475664 - RNA, 19 nt, Homo sapiens
  misc_RNA (1)...(19): siRNA sense strand
ggugucugcuggauuugau

SEQ ID NO: 475665 - RNA, 19 nt, Homo sapiens
  misc_RNA (1)...(19): siRNA sense strand
ccagugugcucuacaucuc

SEQ ID NO: 475666 - RNA, 19 nt, Homo sapiens
  misc_RNA (1)...(19): siRNA sense strand
ugcagucgguccacucuga

SEQ ID NO: 475667 - RNA, 19 nt, Homo sapiens
  misc_RNA (1)...(19): siRNA sense strand
gcagagacccucggagacu

SEQ ID NO: 475668 - RNA, 19 nt, Homo sapiens
  misc_RNA (1)...(19): siRNA sense strand
ugauccgggugcacaguaa

SEQ ID NO: 475669 - RNA, 19 nt, Homo sapiens
  misc_RNA (1)...(19): siRNA sense strand
ugacgcagcaacugaugaa

SEQ ID NO: 475670 - RNA, 19 nt, Homo sapiens
  misc_RNA (1)...(19): siRNA sense strand
gaagaccuggagacagaug

SEQ ID NO: 475671 - RNA, 19 nt, Homo sapiens
  misc_RNA (1)...(19): siRNA sense strand
cagccaagccgagugagaa

SEQ ID NO: 475672 - RNA, 19 nt, Homo sapiens
  misc_RNA (1)...(19): siRNA sense strand
cagauacccucggcugaag

SEQ ID NO: 475673 - RNA, 19 nt, Homo sapiens
  misc_RNA (1)...(19): siRNA sense strand
ggcagcuucuccacaagga

SEQ ID NO: 475674 - RNA, 19 nt, Homo sapiens
  misc_RNA (1)...(19): siRNA sense strand
cagaaacccaaccucaaug

SEQ ID NO: 475675 - RNA, 19 nt, Homo sapiens
  misc_RNA (1)...(19): siRNA sense strand
cuaccauguuucugccaaa

SEQ ID NO: 475676 - RNA, 19 nt, Homo sapiens
  misc_RNA (1)...(19): siRNA sense strand
gcucagccgccucaaacug

SEQ ID NO: 475677 - RNA, 19 nt, Homo sapiens
  misc_RNA (1)...(19): siRNA sense strand
ugacgacggcaacuucuuc

SEQ ID NO: 475678 - RNA, 19 nt, Homo sapiens
  misc_RNA (1)...(19): siRNA sense strand
cucgugagcuaaagaaugg

SEQ ID NO: 475679 - RNA, 19 nt, Homo sapiens
  misc_RNA (1)...(19): siRNA sense strand
gcaggacccauccgacucu

SEQ ID NO: 475680 - RNA, 19 nt, Homo sapiens
  misc_RNA (1)...(19): siRNA sense strand
ggcaacggcacccagcaaa

SEQ ID NO: 475681 - RNA, 19 nt, Homo sapiens
  misc_RNA (1)...(19): siRNA sense strand
agcaagauccucauuguag

SEQ ID NO: 475682 - RNA, 19 nt, Homo sapiens
  misc_RNA (1)...(19): siRNA sense strand
ggacaccaugcagaucauu

SEQ ID NO: 475683 - RNA, 19 nt, Homo sapiens
  misc_RNA (1)...(19): siRNA sense strand
caggacaccaugcagauca

SEQ ID NO: 475684 - RNA, 19 nt, Homo sapiens
  misc_RNA (1)...(19): siRNA sense strand
uggcacagcggauguuugu

SEQ ID NO: 475685 - RNA, 19 nt, Homo sapiens
  misc_RNA (1)...(19): siRNA sense strand
gcaaaccuucuaccaagac

SEQ ID NO: 475686 - RNA, 19 nt, Homo sapiens
  misc_RNA (1)...(19): siRNA sense strand
aaccugaagcugcgcuaua

SEQ ID NO: 475687 - RNA, 19 nt, Homo sapiens
  misc_RNA (1)...(19): siRNA sense strand
ggaaacagaaacccaaccu

SEQ ID NO: 475688 - RNA, 19 nt, Homo sapiens
  misc_RNA (1)...(19): siRNA sense strand
ggacaagagcaagcgaagu

SEQ ID NO: 475689 - RNA, 19 nt, Homo sapiens
  misc_RNA (1)...(19): siRNA sense strand
caccagagcccacauugcu

SEQ ID NO: 475690 - RNA, 19 nt, Homo sapiens
  misc_RNA (1)...(19): siRNA sense strand
ccaugacgacggcaacuuc

SEQ ID NO: 475691 - RNA, 19 nt, Homo sapiens
  misc_RNA (1)...(19): siRNA sense strand
ggaguggggcuguggauga

SEQ ID NO: 475692 - RNA, 19 nt, Homo sapiens
  misc_RNA (1)...(19): siRNA sense strand
ugcggcagcuucuccacaa

SEQ ID NO: 475693 - RNA, 19 nt, Homo sapiens
  misc_RNA (1)...(19): siRNA sense strand
gauccgggugcacaguaaa

SEQ ID NO: 475694 - RNA, 19 nt, Homo sapiens
  misc_RNA (1)...(19): siRNA sense strand
cagaagaaggcuggaaaca

SEQ ID NO: 475695 - RNA, 19 nt, Homo sapiens
  misc_RNA (1)...(19): siRNA sense strand
caguggugcuggccuugga

SEQ ID NO: 475696 - RNA, 19 nt, Homo sapiens
  misc_RNA (1)...(19): siRNA sense strand
ccagcagcguggucaagca

SEQ ID NO: 475697 - RNA, 19 nt, Homo sapiens
  misc_RNA (1)...(19): siRNA sense strand
gaaggccucccuggaagag

SEQ ID NO: 475698 - RNA, 19 nt, Homo sapiens
  misc_RNA (1)...(19): siRNA sense strand
ucaaugccauccgcucucu

SEQ ID NO: 475699 - RNA, 19 nt, Homo sapiens
  misc_RNA (1)...(19): siRNA sense strand
gugagggcuucaaugucaa

SEQ ID NO: 475700 - RNA, 19 nt, Homo sapiens
  misc_RNA (1)...(19): siRNA sense strand
gaagaaggcuggaaacaga

SEQ ID NO: 475701 - RNA, 19 nt, Homo sapiens
  misc_RNA (1)...(19): siRNA sense strand
ccacagggcugaucuauga

SEQ ID NO: 475702 - RNA, 19 nt, Homo sapiens
  misc_RNA (1)...(19): siRNA sense strand
ggugagggcuucaauguca

SEQ ID NO: 475703 - RNA, 19 nt, Homo sapiens
  misc_RNA (1)...(19): siRNA sense strand
gcaagauccucauuguaga

SEQ ID NO: 475704 - RNA, 19 nt, Homo sapiens
  misc_RNA (1)...(19): siRNA sense strand
ucacugaccucgccuucaa

SEQ ID NO: 475705 - RNA, 19 nt, Homo sapiens
  misc_RNA (1)...(19): siRNA sense strand
gcuauaagcccaagaaguc

SEQ ID NO: 475706 - RNA, 19 nt, Homo sapiens
  misc_RNA (1)...(19): siRNA sense strand
cugaagaccuggagacaga

SEQ ID NO: 475707 - RNA, 19 nt, Homo sapiens
  misc_RNA (1)...(19): siRNA sense strand
gaagcuagcggaggugauu

SEQ ID NO: 475708 - RNA, 19 nt, Homo sapiens
  misc_RNA (1)...(19): siRNA sense strand
ggaggaagaaccuaugaau

SEQ ID NO: 475709 - RNA, 19 nt, Homo sapiens
  misc_RNA (1)...(19): siRNA sense strand
ccagcaagauccucauugu

SEQ ID NO: 475710 - RNA, 19 nt, Homo sapiens
  misc_RNA (1)...(19): siRNA sense strand
uagcggaggugauucugaa

SEQ ID NO: 475711 - RNA, 19 nt, Homo sapiens
  misc_RNA (1)...(19): siRNA sense strand
cugaguaccuggcugcuuu

SEQ ID NO: 475712 - RNA, 19 nt, Homo sapiens
  misc_RNA (1)...(19): siRNA sense strand
ccuggugucugcuggauuu

SEQ ID NO: 475713 - RNA, 19 nt, Homo sapiens
  misc_RNA (1)...(19): siRNA sense strand
ggaagaaccuaugaaucuc

SEQ ID NO: 475714 - RNA, 19 nt, Homo sapiens
  misc_RNA (1)...(19): siRNA sense strand
gacaagagcaagcgaagug

SEQ ID NO: 475715 - RNA, 19 nt, Homo sapiens
  misc_RNA (1)...(19): siRNA sense strand
gcagauacccucggcugaa

SEQ ID NO: 475716 - RNA, 19 nt, Homo sapiens
  misc_RNA (1)...(19): siRNA sense strand
uggcugcucuucuggguaa

SEQ ID NO: 475717 - RNA, 19 nt, Homo sapiens
  misc_RNA (1)...(19): siRNA sense strand
gagcaaggccagcaagauc

SEQ ID NO: 475718 - RNA, 19 nt, Homo sapiens
  misc_RNA (1)...(19): siRNA sense strand
ccacuuugcccaguccuua

SEQ ID NO: 475719 - RNA, 19 nt, Homo sapiens
  misc_RNA (1)...(19): siRNA sense strand
gggcuucaaugucaaugug

SEQ ID NO: 475720 - RNA, 19 nt, Homo sapiens
  misc_RNA (1)...(19): siRNA sense strand
gcagcguggucaagcagaa

SEQ ID NO: 475721 - RNA, 19 nt, Homo sapiens
  misc_RNA (1)...(19): siRNA sense strand
agaauccacugcuccgaaa

SEQ ID NO: 475722 - RNA, 19 nt, Homo sapiens
  misc_RNA (1)...(19): siRNA sense strand
gcacccagcaaaccuucua

SEQ ID NO: 475723 - RNA, 19 nt, Homo sapiens
  misc_RNA (1)...(19): siRNA sense strand
ccauguuucugccaaaugu

SEQ ID NO: 475724 - RNA, 19 nt, Homo sapiens
  misc_RNA (1)...(19): siRNA sense strand
gcccuugcccuuccacuuu

SEQ ID NO: 475725 - RNA, 19 nt, Homo sapiens
  misc_RNA (1)...(19): siRNA sense strand
ccaugcagaucauucaaca

SEQ ID NO: 475726 - RNA, 19 nt, Homo sapiens
  misc_RNA (1)...(19): siRNA sense strand
gcaccaccaccucuuccua

SEQ ID NO: 475727 - RNA, 19 nt, Homo sapiens
  misc_RNA (1)...(19): siRNA sense strand
cagcaagauccucauugua

SEQ ID NO: 475728 - RNA, 19 nt, Homo sapiens
  misc_RNA (1)...(19): siRNA sense strand
cuggguggcuaccauguuu

SEQ ID NO: 475729 - RNA, 19 nt, Homo sapiens
  misc_RNA (1)...(19): siRNA sense strand
gaacaguccaucccaacag

SEQ ID NO: 475730 - RNA, 19 nt, Homo sapiens
  misc_RNA (1)...(19): siRNA sense strand
gaggaagaaccuaugaauc

SEQ ID NO: 475731 - RNA, 19 nt, Homo sapiens
  misc_RNA (1)...(19): siRNA sense strand
gaggaggaagaaccuauga

SEQ ID NO: 475732 - RNA, 19 nt, Homo sapiens
  misc_RNA (1)...(19): siRNA sense strand
gccaugggcuucugcuucu

SEQ ID NO: 475733 - RNA, 19 nt, Homo sapiens
  misc_RNA (1)...(19): siRNA sense strand
ugaccucgccuucaaagug

SEQ ID NO: 475734 - RNA, 19 nt, Homo sapiens
  misc_RNA (1)...(19): siRNA sense strand
aagaaccuaugaaucucua

SEQ ID NO: 475735 - RNA, 19 nt, Homo sapiens
  misc_RNA (1)...(19): siRNA sense strand
cauccuggcugaagauagg

SEQ ID NO: 475736 - RNA, 19 nt, Homo sapiens
  misc_RNA (1)...(19): siRNA sense strand
gaagaaccuaugaaucucu

SEQ ID NO: 475737 - RNA, 19 nt, Homo sapiens
  misc_RNA (1)...(19): siRNA sense strand
ggaaggccucccuggaaga

SEQ ID NO: 475738 - RNA, 19 nt, Homo sapiens
  misc_RNA (1)...(19): siRNA sense strand
aggaagaaccuaugaaucu

SEQ ID NO: 475739 - RNA, 19 nt, Homo sapiens
  misc_RNA (1)...(19): siRNA sense strand
acacugacaccaucuggaa

SEQ ID NO: 475740 - RNA, 19 nt, Homo sapiens
  misc_RNA (1)...(19): siRNA sense strand
ccagcaaaccuucuaccaa

SEQ ID NO: 475741 - RNA, 19 nt, Homo sapiens
  misc_RNA (1)...(19): siRNA sense strand
ggaggaggaagaaccuaug

SEQ ID NO: 475742 - RNA, 19 nt, Homo sapiens
  misc_RNA (1)...(19): siRNA sense strand
gccaggggcugacaaagaa

SEQ ID NO: 475743 - RNA, 19 nt, Homo sapiens
  misc_RNA (1)...(19): siRNA sense strand
acagaaacccaaccucaau

SEQ ID NO: 475744 - RNA, 19 nt, Homo sapiens
  misc_RNA (1)...(19): siRNA sense strand
gcggugagggcuucaaugu

SEQ ID NO: 475745 - RNA, 19 nt, Homo sapiens
  misc_RNA (1)...(19): siRNA sense strand
ucucugagcccaaccugaa

SEQ ID NO: 475746 - RNA, 19 nt, Homo sapiens
  misc_RNA (1)...(19): siRNA sense strand
acacgccgaugcccgaguu

SEQ ID NO: 475747 - RNA, 19 nt, Homo sapiens
  misc_RNA (1)...(19): siRNA sense strand
gaagaaguggaggcaguga

SEQ ID NO: 475748 - RNA, 19 nt, Homo sapiens
  misc_RNA (1)...(19): siRNA sense strand
accugaagcugcgcuauaa

SEQ ID NO: 475749 - RNA, 19 nt, Homo sapiens
  misc_RNA (1)...(19): siRNA sense strand
ggucagccaagccgaguga

SEQ ID NO: 475750 - RNA, 19 nt, Homo sapiens
  misc_RNA (1)...(19): siRNA sense strand
ggugucugcuggauuugau

SEQ ID NO: 475751 - RNA, 19 nt, Homo sapiens
  misc_RNA (1)...(19): siRNA sense strand
ccagugugcucuacaucuc

SEQ ID NO: 475752 - RNA, 19 nt, Homo sapiens
  misc_RNA (1)...(19): siRNA sense strand
ugcagucgguccacucuga

SEQ ID NO: 475753 - RNA, 19 nt, Homo sapiens
  misc_RNA (1)...(19): siRNA sense strand
gcagagacccucggagacu

SEQ ID NO: 475754 - RNA, 19 nt, Homo sapiens
  misc_RNA (1)...(19): siRNA sense strand
ugauccgggugcacaguaa

SEQ ID NO: 475755 - RNA, 19 nt, Homo sapiens
  misc_RNA (1)...(19): siRNA sense strand
ugacgcagcaacugaugaa

SEQ ID NO: 475756 - RNA, 19 nt, Homo sapiens
  misc_RNA (1)...(19): siRNA sense strand
gaagaccuggagacagaug

SEQ ID NO: 475757 - RNA, 19 nt, Homo sapiens
  misc_RNA (1)...(19): siRNA sense strand
cagccaagccgagugagaa

SEQ ID NO: 475758 - RNA, 19 nt, Homo sapiens
  misc_RNA (1)...(19): siRNA sense strand
cagauacccucggcugaag

SEQ ID NO: 475759 - RNA, 19 nt, Homo sapiens
  misc_RNA (1)...(19): siRNA sense strand
ggcagcuucuccacaagga

SEQ ID NO: 475760 - RNA, 19 nt, Homo sapiens
  misc_RNA (1)...(19): siRNA sense strand
cagaaacccaaccucaaug

SEQ ID NO: 475761 - RNA, 19 nt, Homo sapiens
  misc_RNA (1)...(19): siRNA sense strand
cuaccauguuucugccaaa

SEQ ID NO: 475762 - RNA, 19 nt, Homo sapiens
  misc_RNA (1)...(19): siRNA sense strand
gcucagccgccucaaacug

SEQ ID NO: 475763 - RNA, 19 nt, Homo sapiens
  misc_RNA (1)...(19): siRNA sense strand
ugacgacggcaacuucuuc

SEQ ID NO: 475764 - RNA, 19 nt, Homo sapiens
  misc_RNA (1)...(19): siRNA sense strand
cucgugagcuaaagaaugg

SEQ ID NO: 475765 - RNA, 19 nt, Homo sapiens
  misc_RNA (1)...(19): siRNA sense strand
gcaggacccauccgacucu

SEQ ID NO: 475766 - RNA, 19 nt, Homo sapiens
  misc_RNA (1)...(19): siRNA sense strand
ggcaacggcacccagcaaa

SEQ ID NO: 475767 - RNA, 19 nt, Homo sapiens
  misc_RNA (1)...(19): siRNA sense strand
agcaagauccucauuguag

SEQ ID NO: 475768 - RNA, 19 nt, Homo sapiens
  misc_RNA (1)...(19): siRNA sense strand
ggacaccaugcagaucauu

SEQ ID NO: 475769 - RNA, 19 nt, Homo sapiens
  misc_RNA (1)...(19): siRNA sense strand
caggacaccaugcagauca

SEQ ID NO: 475770 - RNA, 19 nt, Homo sapiens
  misc_RNA (1)...(19): siRNA sense strand
uggcacagcggauguuugu

SEQ ID NO: 475771 - RNA, 19 nt, Homo sapiens
  misc_RNA (1)...(19): siRNA sense strand
gcaaaccuucuaccaagac

SEQ ID NO: 475772 - RNA, 19 nt, Homo sapiens
  misc_RNA (1)...(19): siRNA sense strand
aaccugaagcugcgcuaua

SEQ ID NO: 475773 - RNA, 19 nt, Homo sapiens
  misc_RNA (1)...(19): siRNA sense strand
ggaaacagaaacccaaccu

SEQ ID NO: 475774 - RNA, 19 nt, Homo sapiens
  misc_RNA (1)...(19): siRNA sense strand
ggacaagagcaagcgaagu

SEQ ID NO: 475775 - RNA, 19 nt, Homo sapiens
  misc_RNA (1)...(19): siRNA sense strand
caccagagcccacauugcu

SEQ ID NO: 475776 - RNA, 19 nt, Homo sapiens
  misc_RNA (1)...(19): siRNA sense strand
ccaugacgacggcaacuuc

SEQ ID NO: 475777 - RNA, 19 nt, Homo sapiens
  misc_RNA (1)...(19): siRNA sense strand
ggaguggggcuguggauga

SEQ ID NO: 475778 - RNA, 19 nt, Homo sapiens
  misc_RNA (1)...(19): siRNA sense strand
ugcggcagcuucuccacaa

SEQ ID NO: 475779 - RNA, 19 nt, Homo sapiens
  misc_RNA (1)...(19): siRNA sense strand
gauccgggugcacaguaaa

SEQ ID NO: 475780 - RNA, 19 nt, Homo sapiens
  misc_RNA (1)...(19): siRNA sense strand
cagaagaaggcuggaaaca

SEQ ID NO: 475781 - RNA, 19 nt, Homo sapiens
  misc_RNA (1)...(19): siRNA sense strand
caguggugcuggccuugga

SEQ ID NO: 475782 - RNA, 19 nt, Homo sapiens
  misc_RNA (1)...(19): siRNA sense strand
ccagcagcguggucaagca

SEQ ID NO: 475783 - RNA, 19 nt, Homo sapiens
  misc_RNA (1)...(19): siRNA sense strand
gaaggccucccuggaagag

SEQ ID NO: 475784 - RNA, 19 nt, Homo sapiens
  misc_RNA (1)...(19): siRNA sense strand
ucaaugccauccgcucucu

SEQ ID NO: 475785 - RNA, 19 nt, Homo sapiens
  misc_RNA (1)...(19): siRNA sense strand
gugagggcuucaaugucaa

SEQ ID NO: 475786 - RNA, 19 nt, Homo sapiens
  misc_RNA (1)...(19): siRNA sense strand
gaaagcugcugccaagaaa

SEQ ID NO: 475787 - RNA, 19 nt, Homo sapiens
  misc_RNA (1)...(19): siRNA sense strand
ggaaagcugcugccaagaa

SEQ ID NO: 475788 - RNA, 19 nt, Homo sapiens
  misc_RNA (1)...(19): siRNA sense strand
caacaagggccacaaagug

SEQ ID NO: 475789 - RNA, 19 nt, Homo sapiens
  misc_RNA (1)...(19): siRNA sense strand
gccacaaagugaccaagaa

SEQ ID NO: 475790 - RNA, 19 nt, Homo sapiens
  misc_RNA (1)...(19): siRNA sense strand
gcccucaaauuuaucaaga

SEQ ID NO: 475791 - RNA, 19 nt, Homo sapiens
  misc_RNA (1)...(19): siRNA sense strand
gaaggucuccaaggacaaa

SEQ ID NO: 475792 - RNA, 19 nt, Homo sapiens
  misc_RNA (1)...(19): siRNA sense strand
gggaggagcugagcaacgu

SEQ ID NO: 475793 - RNA, 19 nt, Homo sapiens
  misc_RNA (1)...(19): siRNA sense strand
ugaccaaacacaccaaguu

SEQ ID NO: 475794 - RNA, 19 nt, Homo sapiens
  misc_RNA (1)...(19): siRNA sense strand
gcccuacgcuacccuaugg

SEQ ID NO: 475795 - RNA, 19 nt, Homo sapiens
  misc_RNA (1)...(19): siRNA sense strand
gaccaaacacaccaaguuc

SEQ ID NO: 475796 - RNA, 19 nt, Homo sapiens
  misc_RNA (1)...(19): siRNA sense strand
uacugaaggucuccaagga

SEQ ID NO: 475797 - RNA, 19 nt, Homo sapiens
  misc_RNA (1)...(19): siRNA sense strand
aacaagggccacaaaguga

SEQ ID NO: 475798 - RNA, 19 nt, Homo sapiens
  misc_RNA (1)...(19): siRNA sense strand
ccauggaguuacugaaggu

SEQ ID NO: 475799 - RNA, 19 nt, Homo sapiens
  misc_RNA (1)...(19): siRNA sense strand
ucaacaagggccacaaagu

SEQ ID NO: 475800 - RNA, 19 nt, Homo sapiens
  misc_RNA (1)...(19): siRNA sense strand
ugaccaagaacgugagcaa

SEQ ID NO: 475801 - RNA, 19 nt, Homo sapiens
  misc_RNA (1)...(19): siRNA sense strand
ccucaacaagggccacaaa

SEQ ID NO: 475802 - RNA, 19 nt, Homo sapiens
  misc_RNA (1)...(19): siRNA sense strand
ggccacaaagugaccaaga

SEQ ID NO: 475803 - RNA, 19 nt, Homo sapiens
  misc_RNA (1)...(19): siRNA sense strand
ggaggagcugagcaacgua

SEQ ID NO: 475804 - RNA, 19 nt, Homo sapiens
  misc_RNA (1)...(19): siRNA sense strand
ccaaacacaccaaguucgu

SEQ ID NO: 475805 - RNA, 19 nt, Homo sapiens
  misc_RNA (1)...(19): siRNA sense strand
aagcugcugccaagaaaga

SEQ ID NO: 475806 - RNA, 19 nt, Homo sapiens
  misc_RNA (1)...(19): siRNA sense strand
ccacaaagugaccaagaac

SEQ ID NO: 475807 - RNA, 19 nt, Homo sapiens
  misc_RNA (1)...(19): siRNA sense strand
gaaagcugcugccaagaaa

SEQ ID NO: 475808 - RNA, 19 nt, Homo sapiens
  misc_RNA (1)...(19): siRNA sense strand
ggaaagcugcugccaagaa

SEQ ID NO: 475809 - RNA, 19 nt, Homo sapiens
  misc_RNA (1)...(19): siRNA sense strand
caacaagggccacaaagug

SEQ ID NO: 475810 - RNA, 19 nt, Homo sapiens
  misc_RNA (1)...(19): siRNA sense strand
gccacaaagugaccaagaa

SEQ ID NO: 475811 - RNA, 19 nt, Homo sapiens
  misc_RNA (1)...(19): siRNA sense strand
gcccucaaauuuaucaaga

SEQ ID NO: 475812 - RNA, 19 nt, Homo sapiens
  misc_RNA (1)...(19): siRNA sense strand
gaaggucuccaaggacaaa

SEQ ID NO: 475813 - RNA, 19 nt, Homo sapiens
  misc_RNA (1)...(19): siRNA sense strand
gggaggagcugagcaacgu

SEQ ID NO: 475814 - RNA, 19 nt, Homo sapiens
  misc_RNA (1)...(19): siRNA sense strand
ugaccaaacacaccaaguu

SEQ ID NO: 475815 - RNA, 19 nt, Homo sapiens
  misc_RNA (1)...(19): siRNA sense strand
gcccuacgcuacccuaugg

SEQ ID NO: 475816 - RNA, 19 nt, Homo sapiens
  misc_RNA (1)...(19): siRNA sense strand
gaccaaacacaccaaguuc

SEQ ID NO: 475817 - RNA, 19 nt, Homo sapiens
  misc_RNA (1)...(19): siRNA sense strand
uacugaaggucuccaagga

SEQ ID NO: 475818 - RNA, 19 nt, Homo sapiens
  misc_RNA (1)...(19): siRNA sense strand
aacaagggccacaaaguga

SEQ ID NO: 475819 - RNA, 19 nt, Homo sapiens
  misc_RNA (1)...(19): siRNA sense strand
ccauggaguuacugaaggu

SEQ ID NO: 475820 - RNA, 19 nt, Homo sapiens
  misc_RNA (1)...(19): siRNA sense strand
ucaacaagggccacaaagu

SEQ ID NO: 475821 - RNA, 19 nt, Homo sapiens
  misc_RNA (1)...(19): siRNA sense strand
ugaccaagaacgugagcaa

SEQ ID NO: 475822 - RNA, 19 nt, Homo sapiens
  misc_RNA (1)...(19): siRNA sense strand
ccucaacaagggccacaaa

SEQ ID NO: 475823 - RNA, 19 nt, Homo sapiens
  misc_RNA (1)...(19): siRNA sense strand
ggccacaaagugaccaaga

SEQ ID NO: 475824 - RNA, 19 nt, Homo sapiens
  misc_RNA (1)...(19): siRNA sense strand
ggaggagcugagcaacgua

SEQ ID NO: 475825 - RNA, 19 nt, Homo sapiens
  misc_RNA (1)...(19): siRNA sense strand
ccaaacacaccaaguucgu

SEQ ID NO: 475826 - RNA, 19 nt, Homo sapiens
  misc_RNA (1)...(19): siRNA sense strand
aagcugcugccaagaaaga

SEQ ID NO: 475827 - RNA, 19 nt, Homo sapiens
  misc_RNA (1)...(19): siRNA sense strand
ccacaaagugaccaagaac

SEQ ID NO: 475828 - RNA, 19 nt, Homo sapiens
  misc_RNA (1)...(19): siRNA sense strand
ggaaagcgauguggagauu

SEQ ID NO: 475829 - RNA, 19 nt, Homo sapiens
  misc_RNA (1)...(19): siRNA sense strand
caacccagcugaacaacaa

SEQ ID NO: 475830 - RNA, 19 nt, Homo sapiens
  misc_RNA (1)...(19): siRNA sense strand
gugaggagcuucccuauag

SEQ ID NO: 475831 - RNA, 19 nt, Homo sapiens
  misc_RNA (1)...(19): siRNA sense strand
aaagcgauguggagauuua

SEQ ID NO: 475832 - RNA, 19 nt, Homo sapiens
  misc_RNA (1)...(19): siRNA sense strand
ccaagaccguggccuauuu

SEQ ID NO: 475833 - RNA, 19 nt, Homo sapiens
  misc_RNA (1)...(19): siRNA sense strand
gggaaugcguugaauaugu

SEQ ID NO: 475834 - RNA, 19 nt, Homo sapiens
  misc_RNA (1)...(19): siRNA sense strand
gcacaggugacauguauga

SEQ ID NO: 475835 - RNA, 19 nt, Homo sapiens
  misc_RNA (1)...(19): siRNA sense strand
gcauugaugaccagaguua

SEQ ID NO: 475836 - RNA, 19 nt, Homo sapiens
  misc_RNA (1)...(19): siRNA sense strand
agacaucgcugcugguaga

SEQ ID NO: 475837 - RNA, 19 nt, Homo sapiens
  misc_RNA (1)...(19): siRNA sense strand
gagcuucccuauagugaau

SEQ ID NO: 475838 - RNA, 19 nt, Homo sapiens
  misc_RNA (1)...(19): siRNA sense strand
aacaagaucugugauauug

SEQ ID NO: 475839 - RNA, 19 nt, Homo sapiens
  misc_RNA (1)...(19): siRNA sense strand
ggaaugcguugaauauguc

SEQ ID NO: 475840 - RNA, 19 nt, Homo sapiens
  misc_RNA (1)...(19): siRNA sense strand
caacaagaucugugauauu

SEQ ID NO: 475841 - RNA, 19 nt, Homo sapiens
  misc_RNA (1)...(19): siRNA sense strand
uagaagaggccauuaguga

SEQ ID NO: 475842 - RNA, 19 nt, Homo sapiens
  misc_RNA (1)...(19): siRNA sense strand
ucugugauauugccauuaa

SEQ ID NO: 475843 - RNA, 19 nt, Homo sapiens
  misc_RNA (1)...(19): siRNA sense strand
gcauuacggucucuauaag

SEQ ID NO: 475844 - RNA, 19 nt, Homo sapiens
  misc_RNA (1)...(19): siRNA sense strand
cugcagaccuccugaccua

SEQ ID NO: 475845 - RNA, 19 nt, Homo sapiens
  misc_RNA (1)...(19): siRNA sense strand
gucaagagcuucaauaucc

SEQ ID NO: 475846 - RNA, 19 nt, Homo sapiens
  misc_RNA (1)...(19): siRNA sense strand
gaucugugauauugccauu

SEQ ID NO: 475847 - RNA, 19 nt, Homo sapiens
  misc_RNA (1)...(19): siRNA sense strand
auacggaaauuacuucuuc

SEQ ID NO: 475848 - RNA, 19 nt, Homo sapiens
  misc_RNA (1)...(19): siRNA sense strand
gagcuucaauaucccucua

SEQ ID NO: 475849 - RNA, 19 nt, Homo sapiens
  misc_RNA (1)...(19): siRNA sense strand
uggcacaggugacauguau

SEQ ID NO: 475850 - RNA, 19 nt, Homo sapiens
  misc_RNA (1)...(19): siRNA sense strand
acaacaagaucugugauau

SEQ ID NO: 475851 - RNA, 19 nt, Homo sapiens
  misc_RNA (1)...(19): siRNA sense strand
gcacccgcaucgagaauca

SEQ ID NO: 475852 - RNA, 19 nt, Homo sapiens
  misc_RNA (1)...(19): siRNA sense strand
ccacaaauacggaaauuac

SEQ ID NO: 475853 - RNA, 19 nt, Homo sapiens
  misc_RNA (1)...(19): siRNA sense strand
gagcaacccagcugaacaa

SEQ ID NO: 475854 - RNA, 19 nt, Homo sapiens
  misc_RNA (1)...(19): siRNA sense strand
gaccagauccgccagacaa

SEQ ID NO: 475855 - RNA, 19 nt, Homo sapiens
  misc_RNA (1)...(19): siRNA sense strand
ggccagaggcacccaauga

SEQ ID NO: 475856 - RNA, 19 nt, Homo sapiens
  misc_RNA (1)...(19): siRNA sense strand
caaauacggaaauuacuuc

SEQ ID NO: 475857 - RNA, 19 nt, Homo sapiens
  misc_RNA (1)...(19): siRNA sense strand
augcaaggcuucaccaaga

SEQ ID NO: 475858 - RNA, 19 nt, Homo sapiens
  misc_RNA (1)...(19): siRNA sense strand
ucaacgacauugugauugg

SEQ ID NO: 475859 - RNA, 19 nt, Homo sapiens
  misc_RNA (1)...(19): siRNA sense strand
ccaugacaaugacaaggaa

SEQ ID NO: 475860 - RNA, 19 nt, Homo sapiens
  misc_RNA (1)...(19): siRNA sense strand
caucgcugcugguagaaga

SEQ ID NO: 475861 - RNA, 19 nt, Homo sapiens
  misc_RNA (1)...(19): siRNA sense strand
gagcuggacacccuaugaa

SEQ ID NO: 475862 - RNA, 19 nt, Homo sapiens
  misc_RNA (1)...(19): siRNA sense strand
gcaccuaguguccagauuc

SEQ ID NO: 475863 - RNA, 19 nt, Homo sapiens
  misc_RNA (1)...(19): siRNA sense strand
ggagcuggacacccuauga

SEQ ID NO: 475864 - RNA, 19 nt, Homo sapiens
  misc_RNA (1)...(19): siRNA sense strand
caggugacauguaugaagu

SEQ ID NO: 475865 - RNA, 19 nt, Homo sapiens
  misc_RNA (1)...(19): siRNA sense strand
gaauaugucaagagcuuca

SEQ ID NO: 475866 - RNA, 19 nt, Homo sapiens
  misc_RNA (1)...(19): siRNA sense strand
gcagaccuccugaccuaug

SEQ ID NO: 475867 - RNA, 19 nt, Homo sapiens
  misc_RNA (1)...(19): siRNA sense strand
gaacaacaagaucugugau

SEQ ID NO: 475868 - RNA, 19 nt, Homo sapiens
  misc_RNA (1)...(19): siRNA sense strand
cccaaugaguucuaugaug

SEQ ID NO: 475869 - RNA, 19 nt, Homo sapiens
  misc_RNA (1)...(19): siRNA sense strand
gaccguggccuauuucuac

SEQ ID NO: 475870 - RNA, 19 nt, Homo sapiens
  misc_RNA (1)...(19): siRNA sense strand
gaucgauugggcugcuuua

SEQ ID NO: 475871 - RNA, 19 nt, Homo sapiens
  misc_RNA (1)...(19): siRNA sense strand
gacgguguccuuccacaaa

SEQ ID NO: 475872 - RNA, 19 nt, Homo sapiens
  misc_RNA (1)...(19): siRNA sense strand
gcaccaugccaagaaguuu

SEQ ID NO: 475873 - RNA, 19 nt, Homo sapiens
  misc_RNA (1)...(19): siRNA sense strand
guuauacuguccgaaaugu

SEQ ID NO: 475874 - RNA, 19 nt, Homo sapiens
  misc_RNA (1)...(19): siRNA sense strand
cagaccuccugaccuauga

SEQ ID NO: 475875 - RNA, 19 nt, Homo sapiens
  misc_RNA (1)...(19): siRNA sense strand
ugaacaacaagaucuguga

SEQ ID NO: 475876 - RNA, 19 nt, Homo sapiens
  misc_RNA (1)...(19): siRNA sense strand
gaaagcgauguggagauuu

SEQ ID NO: 475877 - RNA, 19 nt, Homo sapiens
  misc_RNA (1)...(19): siRNA sense strand
cagaggcacccaaugaguu

SEQ ID NO: 475878 - RNA, 19 nt, Homo sapiens
  misc_RNA (1)...(19): siRNA sense strand
ucagaacucacgccaguau

SEQ ID NO: 475879 - RNA, 19 nt, Homo sapiens
  misc_RNA (1)...(19): siRNA sense strand
cgguguccuuccacaaaua

SEQ ID NO: 475880 - RNA, 19 nt, Homo sapiens
  misc_RNA (1)...(19): siRNA sense strand
caccuaguguccagauuca

SEQ ID NO: 475881 - RNA, 19 nt, Homo sapiens
  misc_RNA (1)...(19): siRNA sense strand
caucgagaaucagaacuca

SEQ ID NO: 475882 - RNA, 19 nt, Homo sapiens
  misc_RNA (1)...(19): siRNA sense strand
gguagaagaggccauuagu

SEQ ID NO: 475883 - RNA, 19 nt, Homo sapiens
  misc_RNA (1)...(19): siRNA sense strand
uauacuguccgaaauguug

SEQ ID NO: 475884 - RNA, 19 nt, Homo sapiens
  misc_RNA (1)...(19): siRNA sense strand
cgccuggcauugacccaua

SEQ ID NO: 475885 - RNA, 19 nt, Homo sapiens
  misc_RNA (1)...(19): siRNA sense strand
gcugaaccaugcaccuagu

SEQ ID NO: 475886 - RNA, 19 nt, Homo sapiens
  misc_RNA (1)...(19): siRNA sense strand
guagaagaggccauuagug

SEQ ID NO: 475887 - RNA, 19 nt, Homo sapiens
  misc_RNA (1)...(19): siRNA sense strand
gcugggugguggugguuau

SEQ ID NO: 475888 - RNA, 19 nt, Homo sapiens
  misc_RNA (1)...(19): siRNA sense strand
ggagcaacccagcugaaca

SEQ ID NO: 475889 - RNA, 19 nt, Homo sapiens
  misc_RNA (1)...(19): siRNA sense strand
ccacuccgaggacuacauu

SEQ ID NO: 475890 - RNA, 19 nt, Homo sapiens
  misc_RNA (1)...(19): siRNA sense strand
auuacggucucuauaagaa

SEQ ID NO: 475891 - RNA, 19 nt, Homo sapiens
  misc_RNA (1)...(19): siRNA sense strand
gcccgcugcuggacauaug

SEQ ID NO: 475892 - RNA, 19 nt, Homo sapiens
  misc_RNA (1)...(19): siRNA sense strand
ucaaccagguaguggacuu

SEQ ID NO: 475893 - RNA, 19 nt, Homo sapiens
  misc_RNA (1)...(19): siRNA sense strand
ugcauuacggucucuauaa

SEQ ID NO: 475894 - RNA, 19 nt, Homo sapiens
  misc_RNA (1)...(19): siRNA sense strand
gaggagcuucccuauagug

SEQ ID NO: 475895 - RNA, 19 nt, Homo sapiens
  misc_RNA (1)...(19): siRNA sense strand
gagaguggccgcuacuacu

SEQ ID NO: 475896 - RNA, 19 nt, Homo sapiens
  misc_RNA (1)...(19): siRNA sense strand
gaguucugcucgcguuaca

SEQ ID NO: 475897 - RNA, 19 nt, Homo sapiens
  misc_RNA (1)...(19): siRNA sense strand
ccuaugacaggacugauga

SEQ ID NO: 475898 - RNA, 19 nt, Homo sapiens
  misc_RNA (1)...(19): siRNA sense strand
uacggucucuauaagaaga

SEQ ID NO: 475899 - RNA, 19 nt, Homo sapiens
  misc_RNA (1)...(19): siRNA sense strand
gaacucacgccaguaucug

SEQ ID NO: 475900 - RNA, 19 nt, Homo sapiens
  misc_RNA (1)...(19): siRNA sense strand
gugguuauacuguccgaaa

SEQ ID NO: 475901 - RNA, 19 nt, Homo sapiens
  misc_RNA (1)...(19): siRNA sense strand
uaugucaagagcuucaaua

SEQ ID NO: 475902 - RNA, 19 nt, Homo sapiens
  misc_RNA (1)...(19): siRNA sense strand
cgauugggcugcuuuaacc

SEQ ID NO: 475903 - RNA, 19 nt, Homo sapiens
  misc_RNA (1)...(19): siRNA sense strand
aacaacaagaucugugaua

SEQ ID NO: 475904 - RNA, 19 nt, Homo sapiens
  misc_RNA (1)...(19): siRNA sense strand
cgccagacaaucuuugaaa

SEQ ID NO: 475905 - RNA, 19 nt, Homo sapiens
  misc_RNA (1)...(19): siRNA sense strand
ucuuaaugccuucaacgua

SEQ ID NO: 475906 - RNA, 19 nt, Homo sapiens
  misc_RNA (1)...(19): siRNA sense strand
gauccgccagacaaucuuu

SEQ ID NO: 475907 - RNA, 19 nt, Homo sapiens
  misc_RNA (1)...(19): siRNA sense strand
ggagcuucccuauagugaa

SEQ ID NO: 475908 - RNA, 19 nt, Homo sapiens
  misc_RNA (1)...(19): siRNA sense strand
ugagacaucgcugcuggua

SEQ ID NO: 475909 - RNA, 19 nt, Homo sapiens
  misc_RNA (1)...(19): siRNA sense strand
ucugggcugugaucgauug

SEQ ID NO: 475910 - RNA, 19 nt, Homo sapiens
  misc_RNA (1)...(19): siRNA sense strand
uggcauugaugaccagagu

SEQ ID NO: 475911 - RNA, 19 nt, Homo sapiens
  misc_RNA (1)...(19): siRNA sense strand
gccagacaaucuuugaaaa

SEQ ID NO: 475912 - RNA, 19 nt, Homo sapiens
  misc_RNA (1)...(19): siRNA sense strand
gguuauacuguccgaaaug

SEQ ID NO: 475913 - RNA, 19 nt, Homo sapiens
  misc_RNA (1)...(19): siRNA sense strand
auagccugguccugcauua

SEQ ID NO: 475914 - RNA, 19 nt, Homo sapiens
  misc_RNA (1)...(19): siRNA sense strand
cacccaaugaguucuauga

SEQ ID NO: 475915 - RNA, 19 nt, Homo sapiens
  misc_RNA (1)...(19): siRNA sense strand
ggccgcuacuacugucuga

SEQ ID NO: 475916 - RNA, 19 nt, Homo sapiens
  misc_RNA (1)...(19): siRNA sense strand
ucucugggcugugaucgau

SEQ ID NO: 475917 - RNA, 19 nt, Homo sapiens
  misc_RNA (1)...(19): siRNA sense strand
uaccaacccacgugcauug

SEQ ID NO: 475918 - RNA, 19 nt, Homo sapiens
  misc_RNA (1)...(19): siRNA sense strand
caagaccguggccuauuuc

SEQ ID NO: 475919 - RNA, 19 nt, Homo sapiens
  misc_RNA (1)...(19): siRNA sense strand
gcucuacauugacauugac

SEQ ID NO: 475920 - RNA, 19 nt, Homo sapiens
  misc_RNA (1)...(19): siRNA sense strand
gccucuggcuucugcuaug

SEQ ID NO: 475921 - RNA, 19 nt, Homo sapiens
  misc_RNA (1)...(19): siRNA sense strand
gcaacccagcugaacaaca

SEQ ID NO: 475922 - RNA, 19 nt, Homo sapiens
  misc_RNA (1)...(19): siRNA sense strand
ugacaaggaaagcgaugug

SEQ ID NO: 475923 - RNA, 19 nt, Homo sapiens
  misc_RNA (1)...(19): siRNA sense strand
ccagaggcacccaaugagu

SEQ ID NO: 475924 - RNA, 19 nt, Homo sapiens
  misc_RNA (1)...(19): siRNA sense strand
ugaggagcuucccuauagu

SEQ ID NO: 475925 - RNA, 19 nt, Homo sapiens
  misc_RNA (1)...(19): siRNA sense strand
cucgggugcucuacauuga

SEQ ID NO: 475926 - RNA, 19 nt, Homo sapiens
  misc_RNA (1)...(19): siRNA sense strand
agagucagccccaccaaua

SEQ ID NO: 475927 - RNA, 19 nt, Homo sapiens
  misc_RNA (1)...(19): siRNA sense strand
cauuacggucucuauaaga

SEQ ID NO: 475928 - RNA, 19 nt, Homo sapiens
  misc_RNA (1)...(19): siRNA sense strand
gcaaguaccugugguggau

SEQ ID NO: 475929 - RNA, 19 nt, Homo sapiens
  misc_RNA (1)...(19): siRNA sense strand
gagacgaacuacagaacag

SEQ ID NO: 475930 - RNA, 19 nt, Homo sapiens
  misc_RNA (1)...(19): siRNA sense strand
gcacguaccagagguggaa

SEQ ID NO: 475931 - RNA, 19 nt, Homo sapiens
  misc_RNA (1)...(19): siRNA sense strand
gaacugaggcaggcauucu

SEQ ID NO: 475932 - RNA, 19 nt, Homo sapiens
  misc_RNA (1)...(19): siRNA sense strand
caagucaaacgcagaagga

SEQ ID NO: 475933 - RNA, 19 nt, Homo sapiens
  misc_RNA (1)...(19): siRNA sense strand
ucacugagcaaccaagagu

SEQ ID NO: 475934 - RNA, 19 nt, Homo sapiens
  misc_RNA (1)...(19): siRNA sense strand
ggcaagggaucgcuuacac

SEQ ID NO: 475935 - RNA, 19 nt, Homo sapiens
  misc_RNA (1)...(19): siRNA sense strand
aaguaccugugguggauuu

SEQ ID NO: 475936 - RNA, 19 nt, Homo sapiens
  misc_RNA (1)...(19): siRNA sense strand
gcgggcaagggaucgcuua

SEQ ID NO: 475937 - RNA, 19 nt, Homo sapiens
  misc_RNA (1)...(19): siRNA sense strand
agaaggacugccucacuga

SEQ ID NO: 475938 - RNA, 19 nt, Homo sapiens
  misc_RNA (1)...(19): siRNA sense strand
acugaggcaggcauucuua

SEQ ID NO: 475939 - RNA, 19 nt, Homo sapiens
  misc_RNA (1)...(19): siRNA sense strand
guucucagcagcagcaagu

SEQ ID NO: 475940 - RNA, 19 nt, Homo sapiens
  misc_RNA (1)...(19): siRNA sense strand
uuacaccugagacgaacua

SEQ ID NO: 475941 - RNA, 19 nt, Homo sapiens
  misc_RNA (1)...(19): siRNA sense strand
gcaaguaccugugguggau

SEQ ID NO: 475942 - RNA, 19 nt, Homo sapiens
  misc_RNA (1)...(19): siRNA sense strand
gagacgaacuacagaacag

SEQ ID NO: 475943 - RNA, 19 nt, Homo sapiens
  misc_RNA (1)...(19): siRNA sense strand
gcacguaccagagguggaa

SEQ ID NO: 475944 - RNA, 19 nt, Homo sapiens
  misc_RNA (1)...(19): siRNA sense strand
gaacugaggcaggcauucu

SEQ ID NO: 475945 - RNA, 19 nt, Homo sapiens
  misc_RNA (1)...(19): siRNA sense strand
caagucaaacgcagaagga

SEQ ID NO: 475946 - RNA, 19 nt, Homo sapiens
  misc_RNA (1)...(19): siRNA sense strand
ucacugagcaaccaagagu

SEQ ID NO: 475947 - RNA, 19 nt, Homo sapiens
  misc_RNA (1)...(19): siRNA sense strand
ggcaagggaucgcuuacac

SEQ ID NO: 475948 - RNA, 19 nt, Homo sapiens
  misc_RNA (1)...(19): siRNA sense strand
aaguaccugugguggauuu

SEQ ID NO: 475949 - RNA, 19 nt, Homo sapiens
  misc_RNA (1)...(19): siRNA sense strand
gcgggcaagggaucgcuua

SEQ ID NO: 475950 - RNA, 19 nt, Homo sapiens
  misc_RNA (1)...(19): siRNA sense strand
agaaggacugccucacuga

SEQ ID NO: 475951 - RNA, 19 nt, Homo sapiens
  misc_RNA (1)...(19): siRNA sense strand
acugaggcaggcauucuua

SEQ ID NO: 475952 - RNA, 19 nt, Homo sapiens
  misc_RNA (1)...(19): siRNA sense strand
guucucagcagcagcaagu

SEQ ID NO: 475953 - RNA, 19 nt, Homo sapiens
  misc_RNA (1)...(19): siRNA sense strand
uuacaccugagacgaacua

SEQ ID NO: 475954 - RNA, 19 nt, Homo sapiens
  misc_RNA (1)...(19): siRNA sense strand
gaaguaaguuggagaagaa

SEQ ID NO: 475955 - RNA, 19 nt, Homo sapiens
  misc_RNA (1)...(19): siRNA sense strand
gagcugauaucaaggaaau

SEQ ID NO: 475956 - RNA, 19 nt, Homo sapiens
  misc_RNA (1)...(19): siRNA sense strand
ggaaguaaguuggagaaga

SEQ ID NO: 475957 - RNA, 19 nt, Homo sapiens
  misc_RNA (1)...(19): siRNA sense strand
gagaaaggccaacuucaaa

SEQ ID NO: 475958 - RNA, 19 nt, Homo sapiens
  misc_RNA (1)...(19): siRNA sense strand
ggaagaagccauccagugu

SEQ ID NO: 475959 - RNA, 19 nt, Homo sapiens
  misc_RNA (1)...(19): siRNA sense strand
ccggagaucuuaauaggaa

SEQ ID NO: 475960 - RNA, 19 nt, Homo sapiens
  misc_RNA (1)...(19): siRNA sense strand
gaaugcagcuuuugaaaug

SEQ ID NO: 475961 - RNA, 19 nt, Homo sapiens
  misc_RNA (1)...(19): siRNA sense strand
gcugugagcuugccaugau

SEQ ID NO: 475962 - RNA, 19 nt, Homo sapiens
  misc_RNA (1)...(19): siRNA sense strand
gaaaggccaacuucaaaga

SEQ ID NO: 475963 - RNA, 19 nt, Homo sapiens
  misc_RNA (1)...(19): siRNA sense strand
agucaucgcugcugucaau

SEQ ID NO: 475964 - RNA, 19 nt, Homo sapiens
  misc_RNA (1)...(19): siRNA sense strand
caacuucaaagaccaguga

SEQ ID NO: 475965 - RNA, 19 nt, Homo sapiens
  misc_RNA (1)...(19): siRNA sense strand
gcacagccggagaucuuaa

SEQ ID NO: 475966 - RNA, 19 nt, Homo sapiens
  misc_RNA (1)...(19): siRNA sense strand
aagcaggucuugucagcaa

SEQ ID NO: 475967 - RNA, 19 nt, Homo sapiens
  misc_RNA (1)...(19): siRNA sense strand
uaguagcgauggccaaaga

SEQ ID NO: 475968 - RNA, 19 nt, Homo sapiens
  misc_RNA (1)...(19): siRNA sense strand
gaaaugcagaaccugaguu

SEQ ID NO: 475969 - RNA, 19 nt, Homo sapiens
  misc_RNA (1)...(19): siRNA sense strand
gaugaccgcguuuguggaa

SEQ ID NO: 475970 - RNA, 19 nt, Homo sapiens
  misc_RNA (1)...(19): siRNA sense strand
cagcaagauuuguccuguu

SEQ ID NO: 475971 - RNA, 19 nt, Homo sapiens
  misc_RNA (1)...(19): siRNA sense strand
ggccaaagaaucagugaau

SEQ ID NO: 475972 - RNA, 19 nt, Homo sapiens
  misc_RNA (1)...(19): siRNA sense strand
gccaaagaaucagugaaug

SEQ ID NO: 475973 - RNA, 19 nt, Homo sapiens
  misc_RNA (1)...(19): siRNA sense strand
gacauuaacagaaggaagu

SEQ ID NO: 475974 - RNA, 19 nt, Homo sapiens
  misc_RNA (1)...(19): siRNA sense strand
ugaguuuccaggacuguua

SEQ ID NO: 475975 - RNA, 19 nt, Homo sapiens
  misc_RNA (1)...(19): siRNA sense strand
agagaaaggccaacuucaa

SEQ ID NO: 475976 - RNA, 19 nt, Homo sapiens
  misc_RNA (1)...(19): siRNA sense strand
uaacagaaggaaguaaguu

SEQ ID NO: 475977 - RNA, 19 nt, Homo sapiens
  misc_RNA (1)...(19): siRNA sense strand
gugcuaacuuugaguacau

SEQ ID NO: 475978 - RNA, 19 nt, Homo sapiens
  misc_RNA (1)...(19): siRNA sense strand
caagauuuguccuguugag

SEQ ID NO: 475979 - RNA, 19 nt, Homo sapiens
  misc_RNA (1)...(19): siRNA sense strand
aaagagaaaggccaacuuc

SEQ ID NO: 475980 - RNA, 19 nt, Homo sapiens
  misc_RNA (1)...(19): siRNA sense strand
ucaaggaaaugcagaaccu

SEQ ID NO: 475981 - RNA, 19 nt, Homo sapiens
  misc_RNA (1)...(19): siRNA sense strand
gucaauggcuaugccuuug

SEQ ID NO: 475982 - RNA, 19 nt, Homo sapiens
  misc_RNA (1)...(19): siRNA sense strand
agcaagauuuguccuguug

SEQ ID NO: 475983 - RNA, 19 nt, Homo sapiens
  misc_RNA (1)...(19): siRNA sense strand
caaagaaucagugaaugca

SEQ ID NO: 475984 - RNA, 19 nt, Homo sapiens
  misc_RNA (1)...(19): siRNA sense strand
cgccucgggugcuaacuuu

SEQ ID NO: 475985 - RNA, 19 nt, Homo sapiens
  misc_RNA (1)...(19): siRNA sense strand
aaaugcagaaccugaguuu

SEQ ID NO: 475986 - RNA, 19 nt, Homo sapiens
  misc_RNA (1)...(19): siRNA sense strand
gaagggaugaccgcguuug

SEQ ID NO: 475987 - RNA, 19 nt, Homo sapiens
  misc_RNA (1)...(19): siRNA sense strand
ggaaaugcagaaccugagu

SEQ ID NO: 475988 - RNA, 19 nt, Homo sapiens
  misc_RNA (1)...(19): siRNA sense strand
uugagacacugguggaaga

SEQ ID NO: 475989 - RNA, 19 nt, Homo sapiens
  misc_RNA (1)...(19): siRNA sense strand
caaccuuugccacugauga

SEQ ID NO: 475990 - RNA, 19 nt, Homo sapiens
  misc_RNA (1)...(19): siRNA sense strand
ggugagaaggcccaguuug

SEQ ID NO: 475991 - RNA, 19 nt, Homo sapiens
  misc_RNA (1)...(19): siRNA sense strand
gaguacaucaucgcagaaa

SEQ ID NO: 475992 - RNA, 19 nt, Homo sapiens
  misc_RNA (1)...(19): siRNA sense strand
ggugcuaacuuugaguaca

SEQ ID NO: 475993 - RNA, 19 nt, Homo sapiens
  misc_RNA (1)...(19): siRNA sense strand
gagacucacccgugcuguu

SEQ ID NO: 475994 - RNA, 19 nt, Homo sapiens
  misc_RNA (1)...(19): siRNA sense strand
ugugugauaucaucuaugc

SEQ ID NO: 475995 - RNA, 19 nt, Homo sapiens
  misc_RNA (1)...(19): siRNA sense strand
ccaaagaaucagugaaugc

SEQ ID NO: 475996 - RNA, 19 nt, Homo sapiens
  misc_RNA (1)...(19): siRNA sense strand
uaacuuugaguacaucauc

SEQ ID NO: 475997 - RNA, 19 nt, Homo sapiens
  misc_RNA (1)...(19): siRNA sense strand
ccacugaugaccggaaaga

SEQ ID NO: 475998 - RNA, 19 nt, Homo sapiens
  misc_RNA (1)...(19): siRNA sense strand
ugucaauggcuaugccuuu

SEQ ID NO: 475999 - RNA, 19 nt, Homo sapiens
  misc_RNA (1)...(19): siRNA sense strand
gcaagauuuguccuguuga

SEQ ID NO: 476000 - RNA, 19 nt, Homo sapiens
  misc_RNA (1)...(19): siRNA sense strand
ggucaagaagccagucauc

SEQ ID NO: 476001 - RNA, 19 nt, Homo sapiens
  misc_RNA (1)...(19): siRNA sense strand
auucaaccuuugccacuga

SEQ ID NO: 476002 - RNA, 19 nt, Homo sapiens
  misc_RNA (1)...(19): siRNA sense strand
cagaaggaaguaaguugga

SEQ ID NO: 476003 - RNA, 19 nt, Homo sapiens
  misc_RNA (1)...(19): siRNA sense strand
ccucgggugcuaacuuuga

SEQ ID NO: 476004 - RNA, 19 nt, Homo sapiens
  misc_RNA (1)...(19): siRNA sense strand
aaucagugaaugcagcuuu

SEQ ID NO: 476005 - RNA, 19 nt, Homo sapiens
  misc_RNA (1)...(19): siRNA sense strand
gccauccagugugcagaaa

SEQ ID NO: 476006 - RNA, 19 nt, Homo sapiens
  misc_RNA (1)...(19): siRNA sense strand
gacuguuacuccagcaagu

SEQ ID NO: 476007 - RNA, 19 nt, Homo sapiens
  misc_RNA (1)...(19): siRNA sense strand
acuuugcgauggccugauu

SEQ ID NO: 476008 - RNA, 19 nt, Homo sapiens
  misc_RNA (1)...(19): siRNA sense strand
agacucacccgugcuguug

SEQ ID NO: 476009 - RNA, 19 nt, Homo sapiens
  misc_RNA (1)...(19): siRNA sense strand
caucuaugccggugagaag

SEQ ID NO: 476010 - RNA, 19 nt, Homo sapiens
  misc_RNA (1)...(19): siRNA sense strand
guagcgauggccaaagaau

SEQ ID NO: 476011 - RNA, 19 nt, Homo sapiens
  misc_RNA (1)...(19): siRNA sense strand
ggagcugauaucaaggaaa

SEQ ID NO: 476012 - RNA, 19 nt, Homo sapiens
  misc_RNA (1)...(19): siRNA sense strand
gaagaaggaucauaucucu

SEQ ID NO: 476013 - RNA, 19 nt, Homo sapiens
  misc_RNA (1)...(19): siRNA sense strand
gcacugcgcuucuucaaag

SEQ ID NO: 476014 - RNA, 19 nt, Homo sapiens
  misc_RNA (1)...(19): siRNA sense strand
gaaacaacaggaaguagua

SEQ ID NO: 476015 - RNA, 19 nt, Homo sapiens
  misc_RNA (1)...(19): siRNA sense strand
gcaacuguaccaaguaaua

SEQ ID NO: 476016 - RNA, 19 nt, Homo sapiens
  misc_RNA (1)...(19): siRNA sense strand
gaaaggagacggauagaag

SEQ ID NO: 476017 - RNA, 19 nt, Homo sapiens
  misc_RNA (1)...(19): siRNA sense strand
ucaaagacuucaaagagaa

SEQ ID NO: 476018 - RNA, 19 nt, Homo sapiens
  misc_RNA (1)...(19): siRNA sense strand
ggaugcagauuccgugauu

SEQ ID NO: 476019 - RNA, 19 nt, Homo sapiens
  misc_RNA (1)...(19): siRNA sense strand
gagguuggauucuuugaug

SEQ ID NO: 476020 - RNA, 19 nt, Homo sapiens
  misc_RNA (1)...(19): siRNA sense strand
gaucaaagacuucaaagag

SEQ ID NO: 476021 - RNA, 19 nt, Homo sapiens
  misc_RNA (1)...(19): siRNA sense strand
caaguaauaugaugucagu

SEQ ID NO: 476022 - RNA, 19 nt, Homo sapiens
  misc_RNA (1)...(19): siRNA sense strand
gaaugcaacuguaccaagu

SEQ ID NO: 476023 - RNA, 19 nt, Homo sapiens
  misc_RNA (1)...(19): siRNA sense strand
gcagauaauggcagcuuua

SEQ ID NO: 476024 - RNA, 19 nt, Homo sapiens
  misc_RNA (1)...(19): siRNA sense strand
gaaagagaacgucugcaaa

SEQ ID NO: 476025 - RNA, 19 nt, Homo sapiens
  misc_RNA (1)...(19): siRNA sense strand
gagucuaucuccucaaguu

SEQ ID NO: 476026 - RNA, 19 nt, Homo sapiens
  misc_RNA (1)...(19): siRNA sense strand
ggagacggauagaagaaga

SEQ ID NO: 476027 - RNA, 19 nt, Homo sapiens
  misc_RNA (1)...(19): siRNA sense strand
aaacaucgguugugaagag

SEQ ID NO: 476028 - RNA, 19 nt, Homo sapiens
  misc_RNA (1)...(19): siRNA sense strand
gaacagcagcaaauucuca

SEQ ID NO: 476029 - RNA, 19 nt, Homo sapiens
  misc_RNA (1)...(19): siRNA sense strand
aaacaugucuaaagaggau

SEQ ID NO: 476030 - RNA, 19 nt, Homo sapiens
  misc_RNA (1)...(19): siRNA sense strand
caacaagccuuugcuggau

SEQ ID NO: 476031 - RNA, 19 nt, Homo sapiens
  misc_RNA (1)...(19): siRNA sense strand
agaaggaucauaucucuuu

SEQ ID NO: 476032 - RNA, 19 nt, Homo sapiens
  misc_RNA (1)...(19): siRNA sense strand
gauaauggcagcuuuaaac

SEQ ID NO: 476033 - RNA, 19 nt, Homo sapiens
  misc_RNA (1)...(19): siRNA sense strand
gaccucagaucaaagacuu

SEQ ID NO: 476034 - RNA, 19 nt, Homo sapiens
  misc_RNA (1)...(19): siRNA sense strand
gacacgaccucagaucaaa

SEQ ID NO: 476035 - RNA, 19 nt, Homo sapiens
  misc_RNA (1)...(19): siRNA sense strand
ugggaaacaugucuaaaga

SEQ ID NO: 476036 - RNA, 19 nt, Homo sapiens
  misc_RNA (1)...(19): siRNA sense strand
gaagaagcccuggagaaug

SEQ ID NO: 476037 - RNA, 19 nt, Homo sapiens
  misc_RNA (1)...(19): siRNA sense strand
accagaagcugcagaagaa

SEQ ID NO: 476038 - RNA, 19 nt, Homo sapiens
  misc_RNA (1)...(19): siRNA sense strand
ugacaacuccuacucuuug

SEQ ID NO: 476039 - RNA, 19 nt, Homo sapiens
  misc_RNA (1)...(19): siRNA sense strand
cauauaauccagacacuug

SEQ ID NO: 476040 - RNA, 19 nt, Homo sapiens
  misc_RNA (1)...(19): siRNA sense strand
cacagacaauuaugacauu

SEQ ID NO: 476041 - RNA, 19 nt, Homo sapiens
  misc_RNA (1)...(19): siRNA sense strand
ggacacgaccucagaucaa

SEQ ID NO: 476042 - RNA, 19 nt, Homo sapiens
  misc_RNA (1)...(19): siRNA sense strand
ggaauuugccacagacaau

SEQ ID NO: 476043 - RNA, 19 nt, Homo sapiens
  misc_RNA (1)...(19): siRNA sense strand
ggcaaagcauuucauccaa

SEQ ID NO: 476044 - RNA, 19 nt, Homo sapiens
  misc_RNA (1)...(19): siRNA sense strand
gucaagcucuuaaauaggu

SEQ ID NO: 476045 - RNA, 19 nt, Homo sapiens
  misc_RNA (1)...(19): siRNA sense strand
gaugcagauuccgugauua

SEQ ID NO: 476046 - RNA, 19 nt, Homo sapiens
  misc_RNA (1)...(19): siRNA sense strand
gaggaaaggagacggauag

SEQ ID NO: 476047 - RNA, 19 nt, Homo sapiens
  misc_RNA (1)...(19): siRNA sense strand
aagaagcccuggagaaugg

SEQ ID NO: 476048 - RNA, 19 nt, Homo sapiens
  misc_RNA (1)...(19): siRNA sense strand
caacaggcagcauuacaga

SEQ ID NO: 476049 - RNA, 19 nt, Homo sapiens
  misc_RNA (1)...(19): siRNA sense strand
guaugcagcccaacaguau

SEQ ID NO: 476050 - RNA, 19 nt, Homo sapiens
  misc_RNA (1)...(19): siRNA sense strand
aagcauuucauccaacuua

SEQ ID NO: 476051 - RNA, 19 nt, Homo sapiens
  misc_RNA (1)...(19): siRNA sense strand
ggaaaggagacggauagaa

SEQ ID NO: 476052 - RNA, 19 nt, Homo sapiens
  misc_RNA (1)...(19): siRNA sense strand
caucgguugugaagagaaa

SEQ ID NO: 476053 - RNA, 19 nt, Homo sapiens
  misc_RNA (1)...(19): siRNA sense strand
agaaucucuuccaguaaua

SEQ ID NO: 476054 - RNA, 19 nt, Homo sapiens
  misc_RNA (1)...(19): siRNA sense strand
cagaagaagcccuggagaa

SEQ ID NO: 476055 - RNA, 19 nt, Homo sapiens
  misc_RNA (1)...(19): siRNA sense strand
gacagacucuccaaacacu

SEQ ID NO: 476056 - RNA, 19 nt, Homo sapiens
  misc_RNA (1)...(19): siRNA sense strand
caaagcauuucauccaacu

SEQ ID NO: 476057 - RNA, 19 nt, Homo sapiens
  misc_RNA (1)...(19): siRNA sense strand
cgacgaggaggaagaagaa

SEQ ID NO: 476058 - RNA, 19 nt, Homo sapiens
  misc_RNA (1)...(19): siRNA sense strand
gagaaggaagagcaagaaa

SEQ ID NO: 476059 - RNA, 19 nt, Homo sapiens
  misc_RNA (1)...(19): siRNA sense strand
gagaacgucugcaaaagga

SEQ ID NO: 476060 - RNA, 19 nt, Homo sapiens
  misc_RNA (1)...(19): siRNA sense strand
aagaaaggcuucgguugga

SEQ ID NO: 476061 - RNA, 19 nt, Homo sapiens
  misc_RNA (1)...(19): siRNA sense strand
gcaaaaggaggaagagaaa

SEQ ID NO: 476062 - RNA, 19 nt, Homo sapiens
  misc_RNA (1)...(19): siRNA sense strand
gaacuacgaacagcagcaa

SEQ ID NO: 476063 - RNA, 19 nt, Homo sapiens
  misc_RNA (1)...(19): siRNA sense strand
ggaaccagaagcugcagaa

SEQ ID NO: 476064 - RNA, 19 nt, Homo sapiens
  misc_RNA (1)...(19): siRNA sense strand
agaaagagaacgucugcaa

SEQ ID NO: 476065 - RNA, 19 nt, Homo sapiens
  misc_RNA (1)...(19): siRNA sense strand
cagauuccgugauuacagu

SEQ ID NO: 476066 - RNA, 19 nt, Homo sapiens
  misc_RNA (1)...(19): siRNA sense strand
ggaaugacaggaggagaga

SEQ ID NO: 476067 - RNA, 19 nt, Homo sapiens
  misc_RNA (1)...(19): siRNA sense strand
caacuguaccaaguaauau

SEQ ID NO: 476068 - RNA, 19 nt, Homo sapiens
  misc_RNA (1)...(19): siRNA sense strand
ugaagaggaagaaagagaa

SEQ ID NO: 476069 - RNA, 19 nt, Homo sapiens
  misc_RNA (1)...(19): siRNA sense strand
ucagaucaaagacuucaaa

SEQ ID NO: 476070 - RNA, 19 nt, Homo sapiens
  misc_RNA (1)...(19): siRNA sense strand
acaggcagcauuacagaaa

SEQ ID NO: 476071 - RNA, 19 nt, Homo sapiens
  misc_RNA (1)...(19): siRNA sense strand
gcaacacuaucagcaguac

SEQ ID NO: 476072 - RNA, 19 nt, Homo sapiens
  misc_RNA (1)...(19): siRNA sense strand
agaagaagcccuggagaau

SEQ ID NO: 476073 - RNA, 19 nt, Homo sapiens
  misc_RNA (1)...(19): siRNA sense strand
ggaguuugucaagcucuua

SEQ ID NO: 476074 - RNA, 19 nt, Homo sapiens
  misc_RNA (1)...(19): siRNA sense strand
ccacagacaauuaugacau

SEQ ID NO: 476075 - RNA, 19 nt, Homo sapiens
  misc_RNA (1)...(19): siRNA sense strand
uggauucuuugauguguug

SEQ ID NO: 476076 - RNA, 19 nt, Homo sapiens
  misc_RNA (1)...(19): siRNA sense strand
gugaagaggaagaaagaga

SEQ ID NO: 476077 - RNA, 19 nt, Homo sapiens
  misc_RNA (1)...(19): siRNA sense strand
uugucaagcucuuaaauag

SEQ ID NO: 476078 - RNA, 19 nt, Homo sapiens
  misc_RNA (1)...(19): siRNA sense strand
gaaaacaucgguugugaag

SEQ ID NO: 476079 - RNA, 19 nt, Homo sapiens
  misc_RNA (1)...(19): siRNA sense strand
ggacagacucuccaaacac

SEQ ID NO: 476080 - RNA, 19 nt, Homo sapiens
  misc_RNA (1)...(19): siRNA sense strand
gaaggaucauaucucuuuu

SEQ ID NO: 476081 - RNA, 19 nt, Homo sapiens
  misc_RNA (1)...(19): siRNA sense strand
aaaagugaaugcaacugua

SEQ ID NO: 476082 - RNA, 19 nt, Homo sapiens
  misc_RNA (1)...(19): siRNA sense strand
ggucuuccuugccuacauc

SEQ ID NO: 476083 - RNA, 19 nt, Homo sapiens
  misc_RNA (1)...(19): siRNA sense strand
acagaaacaacaggaagua

SEQ ID NO: 476084 - RNA, 19 nt, Homo sapiens
  misc_RNA (1)...(19): siRNA sense strand
cagauaauggcagcuuuaa

SEQ ID NO: 476085 - RNA, 19 nt, Homo sapiens
  misc_RNA (1)...(19): siRNA sense strand
uaggagagaagaagaggaa

SEQ ID NO: 476086 - RNA, 19 nt, Homo sapiens
  misc_RNA (1)...(19): siRNA sense strand
gcgugaagaggaagaaaga

SEQ ID NO: 476087 - RNA, 19 nt, Homo sapiens
  misc_RNA (1)...(19): siRNA sense strand
agagaaacguaggagagaa

SEQ ID NO: 476088 - RNA, 19 nt, Homo sapiens
  misc_RNA (1)...(19): siRNA sense strand
cuacagagucuauuauacu

SEQ ID NO: 476089 - RNA, 19 nt, Homo sapiens
  misc_RNA (1)...(19): siRNA sense strand
ucuacuacagagucuauua

SEQ ID NO: 476090 - RNA, 19 nt, Homo sapiens
  misc_RNA (1)...(19): siRNA sense strand
aucaaagacuucaaagaga

SEQ ID NO: 476091 - RNA, 19 nt, Homo sapiens
  misc_RNA (1)...(19): siRNA sense strand
gcaacaggcagcauuacag

SEQ ID NO: 476092 - RNA, 19 nt, Homo sapiens
  misc_RNA (1)...(19): siRNA sense strand
ggagagaagaagaggaaag

SEQ ID NO: 476093 - RNA, 19 nt, Homo sapiens
  misc_RNA (1)...(19): siRNA sense strand
acagcaacaggcagcauua

SEQ ID NO: 476094 - RNA, 19 nt, Homo sapiens
  misc_RNA (1)...(19): siRNA sense strand
gaugagauugugccugugu

SEQ ID NO: 476095 - RNA, 19 nt, Homo sapiens
  misc_RNA (1)...(19): siRNA sense strand
acaagccuuugcuggauga

SEQ ID NO: 476096 - RNA, 19 nt, Homo sapiens
  misc_RNA (1)...(19): siRNA sense strand
augcaacuguaccaaguaa

SEQ ID NO: 476097 - RNA, 19 nt, Homo sapiens
  misc_RNA (1)...(19): siRNA sense strand
gagaaacguaggagagaag

SEQ ID NO: 476098 - RNA, 19 nt, Homo sapiens
  misc_RNA (1)...(19): siRNA sense strand
caaaaucagucuacuacag

SEQ ID NO: 476099 - RNA, 19 nt, Homo sapiens
  misc_RNA (1)...(19): siRNA sense strand
gagaauggaccaaaagaau

SEQ ID NO: 476100 - RNA, 19 nt, Homo sapiens
  misc_RNA (1)...(19): siRNA sense strand
aaaggagacggauagaaga

SEQ ID NO: 476101 - RNA, 19 nt, Homo sapiens
  misc_RNA (1)...(19): siRNA sense strand
gaaacguaggagagaagaa

SEQ ID NO: 476102 - RNA, 19 nt, Homo sapiens
  misc_RNA (1)...(19): siRNA sense strand
gcauuucauccaacuuaug

SEQ ID NO: 476103 - RNA, 19 nt, Homo sapiens
  misc_RNA (1)...(19): siRNA sense strand
gaguuugucaagcucuuaa

SEQ ID NO: 476104 - RNA, 19 nt, Homo sapiens
  misc_RNA (1)...(19): siRNA sense strand
guccugagguuggauucuu

SEQ ID NO: 476105 - RNA, 19 nt, Homo sapiens
  misc_RNA (1)...(19): siRNA sense strand
cauccaacuuaugaagaaa

SEQ ID NO: 476106 - RNA, 19 nt, Homo sapiens
  misc_RNA (1)...(19): siRNA sense strand
cuacgaacagcagcaaauu

SEQ ID NO: 476107 - RNA, 19 nt, Homo sapiens
  misc_RNA (1)...(19): siRNA sense strand
gaagaggaagaaagagaac

SEQ ID NO: 476108 - RNA, 19 nt, Homo sapiens
  misc_RNA (1)...(19): siRNA sense strand
cuacuacagagucuauuau

SEQ ID NO: 476109 - RNA, 19 nt, Homo sapiens
  misc_RNA (1)...(19): siRNA sense strand
guaccaaguaauaugaugu

SEQ ID NO: 476110 - RNA, 19 nt, Homo sapiens
  misc_RNA (1)...(19): siRNA sense strand
gagagaagaagaggaaagg

SEQ ID NO: 476111 - RNA, 19 nt, Homo sapiens
  misc_RNA (1)...(19): siRNA sense strand
aaagagaacgucugcaaaa

SEQ ID NO: 476112 - RNA, 19 nt, Homo sapiens
  misc_RNA (1)...(19): siRNA sense strand
gauaugaguuggacagaga

SEQ ID NO: 476113 - RNA, 19 nt, Homo sapiens
  misc_RNA (1)...(19): siRNA sense strand
gcuguaccguguuuccuua

SEQ ID NO: 476114 - RNA, 19 nt, Homo sapiens
  misc_RNA (1)...(19): siRNA sense strand
uuccuuagcuugugugugu

SEQ ID NO: 476115 - RNA, 19 nt, Homo sapiens
  misc_RNA (1)...(19): siRNA sense strand
gcgagaagggcacccacaa

SEQ ID NO: 476116 - RNA, 19 nt, Homo sapiens
  misc_RNA (1)...(19): siRNA sense strand
gaagauggaccccucaaca

SEQ ID NO: 476117 - RNA, 19 nt, Homo sapiens
  misc_RNA (1)...(19): siRNA sense strand
ugaguuggacagagacuug

SEQ ID NO: 476118 - RNA, 19 nt, Homo sapiens
  misc_RNA (1)...(19): siRNA sense strand
acagacaggcucccacaug

SEQ ID NO: 476119 - RNA, 19 nt, Homo sapiens
  misc_RNA (1)...(19): siRNA sense strand
cgcaggcuguaccguguuu

SEQ ID NO: 476120 - RNA, 19 nt, Homo sapiens
  misc_RNA (1)...(19): siRNA sense strand
gagauaugaguuggacaga

SEQ ID NO: 476121 - RNA, 19 nt, Homo sapiens
  misc_RNA (1)...(19): siRNA sense strand
gauaugaguuggacagaga

SEQ ID NO: 476122 - RNA, 19 nt, Homo sapiens
  misc_RNA (1)...(19): siRNA sense strand
gcuguaccguguuuccuua

SEQ ID NO: 476123 - RNA, 19 nt, Homo sapiens
  misc_RNA (1)...(19): siRNA sense strand
uuccuuagcuugugugugu

SEQ ID NO: 476124 - RNA, 19 nt, Homo sapiens
  misc_RNA (1)...(19): siRNA sense strand
gcgagaagggcacccacaa

SEQ ID NO: 476125 - RNA, 19 nt, Homo sapiens
  misc_RNA (1)...(19): siRNA sense strand
gaagauggaccccucaaca

SEQ ID NO: 476126 - RNA, 19 nt, Homo sapiens
  misc_RNA (1)...(19): siRNA sense strand
ugaguuggacagagacuug

SEQ ID NO: 476127 - RNA, 19 nt, Homo sapiens
  misc_RNA (1)...(19): siRNA sense strand
acagacaggcucccacaug

SEQ ID NO: 476128 - RNA, 19 nt, Homo sapiens
  misc_RNA (1)...(19): siRNA sense strand
cgcaggcuguaccguguuu

SEQ ID NO: 476129 - RNA, 19 nt, Homo sapiens
  misc_RNA (1)...(19): siRNA sense strand
gagauaugaguuggacaga

SEQ ID NO: 476130 - RNA, 19 nt, Homo sapiens
  misc_RNA (1)...(19): siRNA sense strand
caagaagaguccagugaua

SEQ ID NO: 476131 - RNA, 19 nt, Homo sapiens
  misc_RNA (1)...(19): siRNA sense strand
gagaaaggcuaucccagaa

SEQ ID NO: 476132 - RNA, 19 nt, Homo sapiens
  misc_RNA (1)...(19): siRNA sense strand
gaaaggcuaucccagaaau

SEQ ID NO: 476133 - RNA, 19 nt, Homo sapiens
  misc_RNA (1)...(19): siRNA sense strand
gauaagggaugaggaagaa

SEQ ID NO: 476134 - RNA, 19 nt, Homo sapiens
  misc_RNA (1)...(19): siRNA sense strand
gcuaugaguuggcaagaug

SEQ ID NO: 476135 - RNA, 19 nt, Homo sapiens
  misc_RNA (1)...(19): siRNA sense strand
gaagaccuaugcuuucaag

SEQ ID NO: 476136 - RNA, 19 nt, Homo sapiens
  misc_RNA (1)...(19): siRNA sense strand
ggaugcagcucucuauugg

SEQ ID NO: 476137 - RNA, 19 nt, Homo sapiens
  misc_RNA (1)...(19): siRNA sense strand
gggaagaccuaugcuuuca

SEQ ID NO: 476138 - RNA, 19 nt, Homo sapiens
  misc_RNA (1)...(19): siRNA sense strand
acaauggauucacuucuuu

SEQ ID NO: 476139 - RNA, 19 nt, Homo sapiens
  misc_RNA (1)...(19): siRNA sense strand
gguagaaccuaaccuggau

SEQ ID NO: 476140 - RNA, 19 nt, Homo sapiens
  misc_RNA (1)...(19): siRNA sense strand
ccaaucaaggguuuguuua

SEQ ID NO: 476141 - RNA, 19 nt, Homo sapiens
  misc_RNA (1)...(19): siRNA sense strand
cacaauggauucacuucuu

SEQ ID NO: 476142 - RNA, 19 nt, Homo sapiens
  misc_RNA (1)...(19): siRNA sense strand
gaacacaauggauucacuu

SEQ ID NO: 476143 - RNA, 19 nt, Homo sapiens
  misc_RNA (1)...(19): siRNA sense strand
guguggcgcuacauuaauu

SEQ ID NO: 476144 - RNA, 19 nt, Homo sapiens
  misc_RNA (1)...(19): siRNA sense strand
ugaacuggaugccaugaug

SEQ ID NO: 476145 - RNA, 19 nt, Homo sapiens
  misc_RNA (1)...(19): siRNA sense strand
gacuauguguggacuguau

SEQ ID NO: 476146 - RNA, 19 nt, Homo sapiens
  misc_RNA (1)...(19): siRNA sense strand
gaagcugaauaggguagaa

SEQ ID NO: 476147 - RNA, 19 nt, Homo sapiens
  misc_RNA (1)...(19): siRNA sense strand
gcaagaagaguccagugau

SEQ ID NO: 476148 - RNA, 19 nt, Homo sapiens
  misc_RNA (1)...(19): siRNA sense strand
caauggauucacuucuuua

SEQ ID NO: 476149 - RNA, 19 nt, Homo sapiens
  misc_RNA (1)...(19): siRNA sense strand
gugggaagaccuaugcuuu

SEQ ID NO: 476150 - RNA, 19 nt, Homo sapiens
  misc_RNA (1)...(19): siRNA sense strand
guacgggcauaaccuugga

SEQ ID NO: 476151 - RNA, 19 nt, Homo sapiens
  misc_RNA (1)...(19): siRNA sense strand
ggcuaucccagaaauauuu

SEQ ID NO: 476152 - RNA, 19 nt, Homo sapiens
  misc_RNA (1)...(19): siRNA sense strand
ggcaagaagaguccaguga

SEQ ID NO: 476153 - RNA, 19 nt, Homo sapiens
  misc_RNA (1)...(19): siRNA sense strand
gacaagguguggcgcuaca

SEQ ID NO: 476154 - RNA, 19 nt, Homo sapiens
  misc_RNA (1)...(19): siRNA sense strand
uggauucacuucuuuaagg

SEQ ID NO: 476155 - RNA, 19 nt, Homo sapiens
  misc_RNA (1)...(19): siRNA sense strand
aagaagaguccagugauaa

SEQ ID NO: 476156 - RNA, 19 nt, Homo sapiens
  misc_RNA (1)...(19): siRNA sense strand
cuacucgccucgaacacaa

SEQ ID NO: 476157 - RNA, 19 nt, Homo sapiens
  misc_RNA (1)...(19): siRNA sense strand
uaagggaugaggaagaaga

SEQ ID NO: 476158 - RNA, 19 nt, Homo sapiens
  misc_RNA (1)...(19): siRNA sense strand
ggcauaaccuuggauacca

SEQ ID NO: 476159 - RNA, 19 nt, Homo sapiens
  misc_RNA (1)...(19): siRNA sense strand
caaccagcagcuucgagua

SEQ ID NO: 476160 - RNA, 19 nt, Homo sapiens
  misc_RNA (1)...(19): siRNA sense strand
gggaugaggaagaagaaga

SEQ ID NO: 476161 - RNA, 19 nt, Homo sapiens
  misc_RNA (1)...(19): siRNA sense strand
ggcgcuacauuaauuucaa

SEQ ID NO: 476162 - RNA, 19 nt, Homo sapiens
  misc_RNA (1)...(19): siRNA sense strand
gcccucggcugcuaugagu

SEQ ID NO: 476163 - RNA, 19 nt, Homo sapiens
  misc_RNA (1)...(19): siRNA sense strand
gggacuauguguggacugu

SEQ ID NO: 476164 - RNA, 19 nt, Homo sapiens
  misc_RNA (1)...(19): siRNA sense strand
ggccgagucuacuucuuca

SEQ ID NO: 476165 - RNA, 19 nt, Homo sapiens
  misc_RNA (1)...(19): siRNA sense strand
gcaagauggccgagucuac

SEQ ID NO: 476166 - RNA, 19 nt, Homo sapiens
  misc_RNA (1)...(19): siRNA sense strand
cuugggcacucccgauauu

SEQ ID NO: 476167 - RNA, 19 nt, Homo sapiens
  misc_RNA (1)...(19): siRNA sense strand
caagguguggcgcuacauu

SEQ ID NO: 476168 - RNA, 19 nt, Homo sapiens
  misc_RNA (1)...(19): siRNA sense strand
gccagacccuugcaguagu

SEQ ID NO: 476169 - RNA, 19 nt, Homo sapiens
  misc_RNA (1)...(19): siRNA sense strand
ccagacccuugcaguagug

SEQ ID NO: 476170 - RNA, 19 nt, Homo sapiens
  misc_RNA (1)...(19): siRNA sense strand
ggaagaccuaugcuuucaa

SEQ ID NO: 476171 - RNA, 19 nt, Homo sapiens
  misc_RNA (1)...(19): siRNA sense strand
gcgcuacauuaauuucaag

SEQ ID NO: 476172 - RNA, 19 nt, Homo sapiens
  misc_RNA (1)...(19): siRNA sense strand
cgaacacaauggauucacu

SEQ ID NO: 476173 - RNA, 19 nt, Homo sapiens
  misc_RNA (1)...(19): siRNA sense strand
ccgagugucugcccuuugg

SEQ ID NO: 476174 - RNA, 19 nt, Homo sapiens
  misc_RNA (1)...(19): siRNA sense strand
gcugucuacucgccucgaa

SEQ ID NO: 476175 - RNA, 19 nt, Homo sapiens
  misc_RNA (1)...(19): siRNA sense strand
gagcuagcccgaacugacu

SEQ ID NO: 476176 - RNA, 19 nt, Homo sapiens
  misc_RNA (1)...(19): siRNA sense strand
ugaggaagaagaagagaca

SEQ ID NO: 476177 - RNA, 19 nt, Homo sapiens
  misc_RNA (1)...(19): siRNA sense strand
aagacgaguucuggacuga

SEQ ID NO: 476178 - RNA, 19 nt, Homo sapiens
  misc_RNA (1)...(19): siRNA sense strand
aagguguggcgcuacauua

SEQ ID NO: 476179 - RNA, 19 nt, Homo sapiens
  misc_RNA (1)...(19): siRNA sense strand
uguguggacuguaucagau

SEQ ID NO: 476180 - RNA, 19 nt, Homo sapiens
  misc_RNA (1)...(19): siRNA sense strand
gaagaguccagugauaagg

SEQ ID NO: 476181 - RNA, 19 nt, Homo sapiens
  misc_RNA (1)...(19): siRNA sense strand
aaccacguuugaauacuga

SEQ ID NO: 476182 - RNA, 19 nt, Homo sapiens
  misc_RNA (1)...(19): siRNA sense strand
cauugcagcccaugaagug

SEQ ID NO: 476183 - RNA, 19 nt, Homo sapiens
  misc_RNA (1)...(19): siRNA sense strand
uggaugcagcucucuauug

SEQ ID NO: 476184 - RNA, 19 nt, Homo sapiens
  misc_RNA (1)...(19): siRNA sense strand
gugaaccugcgcaucauug

SEQ ID NO: 476185 - RNA, 19 nt, Homo sapiens
  misc_RNA (1)...(19): siRNA sense strand
ugauaagggaugaggaaga

SEQ ID NO: 476186 - RNA, 19 nt, Homo sapiens
  misc_RNA (1)...(19): siRNA sense strand
agaaaggcuaucccagaaa

SEQ ID NO: 476187 - RNA, 19 nt, Homo sapiens
  misc_RNA (1)...(19): siRNA sense strand
ggauccaggcucucuaugg

SEQ ID NO: 476188 - RNA, 19 nt, Homo sapiens
  misc_RNA (1)...(19): siRNA sense strand
ggaugaggaagaagaagag

SEQ ID NO: 476189 - RNA, 19 nt, Homo sapiens
  misc_RNA (1)...(19): siRNA sense strand
caaucaaggguuuguuuac

SEQ ID NO: 476190 - RNA, 19 nt, Homo sapiens
  misc_RNA (1)...(19): siRNA sense strand
ggacuauguguggacugua

SEQ ID NO: 476191 - RNA, 19 nt, Homo sapiens
  misc_RNA (1)...(19): siRNA sense strand
aaaggcuaucccagaaaua

SEQ ID NO: 476192 - RNA, 19 nt, Homo sapiens
  misc_RNA (1)...(19): siRNA sense strand
caagauggccgagucuacu

SEQ ID NO: 476193 - RNA, 19 nt, Homo sapiens
  misc_RNA (1)...(19): siRNA sense strand
gaaccugcgcaucauugca

SEQ ID NO: 476194 - RNA, 19 nt, Homo sapiens
  misc_RNA (1)...(19): siRNA sense strand
ccuggaugcugcugucuac

SEQ ID NO: 476195 - RNA, 19 nt, Homo sapiens
  misc_RNA (1)...(19): siRNA sense strand
guccagugauaagggauga

SEQ ID NO: 476196 - RNA, 19 nt, Homo sapiens
  misc_RNA (1)...(19): siRNA sense strand
gguguggcgcuacauuaau

SEQ ID NO: 476197 - RNA, 19 nt, Homo sapiens
  misc_RNA (1)...(19): siRNA sense strand
ggugaaccugcgcaucauu

SEQ ID NO: 476198 - RNA, 19 nt, Homo sapiens
  misc_RNA (1)...(19): siRNA sense strand
gcagcuucgaguagagaaa

SEQ ID NO: 476199 - RNA, 19 nt, Homo sapiens
  misc_RNA (1)...(19): siRNA sense strand
ccucggcugcuaugaguug

SEQ ID NO: 476200 - RNA, 19 nt, Homo sapiens
  misc_RNA (1)...(19): siRNA sense strand
uuacgggagugccaaacca

SEQ ID NO: 476201 - RNA, 19 nt, Homo sapiens
  misc_RNA (1)...(19): siRNA sense strand
gcagggauccaggcucucu

SEQ ID NO: 476202 - RNA, 19 nt, Homo sapiens
  misc_RNA (1)...(19): siRNA sense strand
caagaagaguccagugaua

SEQ ID NO: 476203 - RNA, 19 nt, Homo sapiens
  misc_RNA (1)...(19): siRNA sense strand
gauaagggaugaggaagaa

SEQ ID NO: 476204 - RNA, 19 nt, Homo sapiens
  misc_RNA (1)...(19): siRNA sense strand
gaagaccuaugcuuucaag

SEQ ID NO: 476205 - RNA, 19 nt, Homo sapiens
  misc_RNA (1)...(19): siRNA sense strand
gggaagaccuaugcuuuca

SEQ ID NO: 476206 - RNA, 19 nt, Homo sapiens
  misc_RNA (1)...(19): siRNA sense strand
acaauggauucacuucuuu

SEQ ID NO: 476207 - RNA, 19 nt, Homo sapiens
  misc_RNA (1)...(19): siRNA sense strand
cacaauggauucacuucuu

SEQ ID NO: 476208 - RNA, 19 nt, Homo sapiens
  misc_RNA (1)...(19): siRNA sense strand
gaacacaauggauucacuu

SEQ ID NO: 476209 - RNA, 19 nt, Homo sapiens
  misc_RNA (1)...(19): siRNA sense strand
ugaacuggaugccaugaug

SEQ ID NO: 476210 - RNA, 19 nt, Homo sapiens
  misc_RNA (1)...(19): siRNA sense strand
gacuauguguggacuguau

SEQ ID NO: 476211 - RNA, 19 nt, Homo sapiens
  misc_RNA (1)...(19): siRNA sense strand
gcaagaagaguccagugau

SEQ ID NO: 476212 - RNA, 19 nt, Homo sapiens
  misc_RNA (1)...(19): siRNA sense strand
caauggauucacuucuuua

SEQ ID NO: 476213 - RNA, 19 nt, Homo sapiens
  misc_RNA (1)...(19): siRNA sense strand
gugggaagaccuaugcuuu

SEQ ID NO: 476214 - RNA, 19 nt, Homo sapiens
  misc_RNA (1)...(19): siRNA sense strand
ggcaagaagaguccaguga

SEQ ID NO: 476215 - RNA, 19 nt, Homo sapiens
  misc_RNA (1)...(19): siRNA sense strand
aagaagaguccagugauaa

SEQ ID NO: 476216 - RNA, 19 nt, Homo sapiens
  misc_RNA (1)...(19): siRNA sense strand
cuacucgccucgaacacaa

SEQ ID NO: 476217 - RNA, 19 nt, Homo sapiens
  misc_RNA (1)...(19): siRNA sense strand
uaagggaugaggaagaaga

SEQ ID NO: 476218 - RNA, 19 nt, Homo sapiens
  misc_RNA (1)...(19): siRNA sense strand
gggaugaggaagaagaaga

SEQ ID NO: 476219 - RNA, 19 nt, Homo sapiens
  misc_RNA (1)...(19): siRNA sense strand
gggacuauguguggacugu

SEQ ID NO: 476220 - RNA, 19 nt, Homo sapiens
  misc_RNA (1)...(19): siRNA sense strand
cuugggcacucccgauauu

SEQ ID NO: 476221 - RNA, 19 nt, Homo sapiens
  misc_RNA (1)...(19): siRNA sense strand
gccagacccuugcaguagu

SEQ ID NO: 476222 - RNA, 19 nt, Homo sapiens
  misc_RNA (1)...(19): siRNA sense strand
ccagacccuugcaguagug

SEQ ID NO: 476223 - RNA, 19 nt, Homo sapiens
  misc_RNA (1)...(19): siRNA sense strand
ggaagaccuaugcuuucaa

SEQ ID NO: 476224 - RNA, 19 nt, Homo sapiens
  misc_RNA (1)...(19): siRNA sense strand
cgaacacaauggauucacu

SEQ ID NO: 476225 - RNA, 19 nt, Homo sapiens
  misc_RNA (1)...(19): siRNA sense strand
ccgagugucugcccuuugg

SEQ ID NO: 476226 - RNA, 19 nt, Homo sapiens
  misc_RNA (1)...(19): siRNA sense strand
gcugucuacucgccucgaa

SEQ ID NO: 476227 - RNA, 19 nt, Homo sapiens
  misc_RNA (1)...(19): siRNA sense strand
ugaggaagaagaagagaca

SEQ ID NO: 476228 - RNA, 19 nt, Homo sapiens
  misc_RNA (1)...(19): siRNA sense strand
uguguggacuguaucagau

SEQ ID NO: 476229 - RNA, 19 nt, Homo sapiens
  misc_RNA (1)...(19): siRNA sense strand
aagacgaguucuggacuga

SEQ ID NO: 476230 - RNA, 19 nt, Homo sapiens
  misc_RNA (1)...(19): siRNA sense strand
cauugcagcccaugaagug

SEQ ID NO: 476231 - RNA, 19 nt, Homo sapiens
  misc_RNA (1)...(19): siRNA sense strand
gaagaguccagugauaagg

SEQ ID NO: 476232 - RNA, 19 nt, Homo sapiens
  misc_RNA (1)...(19): siRNA sense strand
gugaaccugcgcaucauug

SEQ ID NO: 476233 - RNA, 19 nt, Homo sapiens
  misc_RNA (1)...(19): siRNA sense strand
ggauccaggcucucuaugg

SEQ ID NO: 476234 - RNA, 19 nt, Homo sapiens
  misc_RNA (1)...(19): siRNA sense strand
ggaugaggaagaagaagag

SEQ ID NO: 476235 - RNA, 19 nt, Homo sapiens
  misc_RNA (1)...(19): siRNA sense strand
ugauaagggaugaggaaga

SEQ ID NO: 476236 - RNA, 19 nt, Homo sapiens
  misc_RNA (1)...(19): siRNA sense strand
gaaccugcgcaucauugca

SEQ ID NO: 476237 - RNA, 19 nt, Homo sapiens
  misc_RNA (1)...(19): siRNA sense strand
ccuggaugcugcugucuac

SEQ ID NO: 476238 - RNA, 19 nt, Homo sapiens
  misc_RNA (1)...(19): siRNA sense strand
ggacuauguguggacugua

SEQ ID NO: 476239 - RNA, 19 nt, Homo sapiens
  misc_RNA (1)...(19): siRNA sense strand
guccagugauaagggauga

SEQ ID NO: 476240 - RNA, 19 nt, Homo sapiens
  misc_RNA (1)...(19): siRNA sense strand
gcagggauccaggcucucu

SEQ ID NO: 476241 - RNA, 19 nt, Homo sapiens
  misc_RNA (1)...(19): siRNA sense strand
ggugaaccugcgcaucauu

SEQ ID NO: 476242 - RNA, 19 nt, Homo sapiens
  misc_RNA (1)...(19): siRNA sense strand
gagaaaggcuaucccagaa

SEQ ID NO: 476243 - RNA, 19 nt, Homo sapiens
  misc_RNA (1)...(19): siRNA sense strand
gaaaggcuaucccagaaau

SEQ ID NO: 476244 - RNA, 19 nt, Homo sapiens
  misc_RNA (1)...(19): siRNA sense strand
gcuaugaguuggcaagaug

SEQ ID NO: 476245 - RNA, 19 nt, Homo sapiens
  misc_RNA (1)...(19): siRNA sense strand
gaagaccuaugcuuucaag

SEQ ID NO: 476246 - RNA, 19 nt, Homo sapiens
  misc_RNA (1)...(19): siRNA sense strand
ggaugcagcucucuauugg

SEQ ID NO: 476247 - RNA, 19 nt, Homo sapiens
  misc_RNA (1)...(19): siRNA sense strand
gggaagaccuaugcuuuca

SEQ ID NO: 476248 - RNA, 19 nt, Homo sapiens
  misc_RNA (1)...(19): siRNA sense strand
acaauggauucacuucuuu

SEQ ID NO: 476249 - RNA, 19 nt, Homo sapiens
  misc_RNA (1)...(19): siRNA sense strand
gguagaaccuaaccuggau

SEQ ID NO: 476250 - RNA, 19 nt, Homo sapiens
  misc_RNA (1)...(19): siRNA sense strand
ccaaucaaggguuuguuua

SEQ ID NO: 476251 - RNA, 19 nt, Homo sapiens
  misc_RNA (1)...(19): siRNA sense strand
cacaauggauucacuucuu

SEQ ID NO: 476252 - RNA, 19 nt, Homo sapiens
  misc_RNA (1)...(19): siRNA sense strand
gaacacaauggauucacuu

SEQ ID NO: 476253 - RNA, 19 nt, Homo sapiens
  misc_RNA (1)...(19): siRNA sense strand
guguggcgcuacauuaauu

SEQ ID NO: 476254 - RNA, 19 nt, Homo sapiens
  misc_RNA (1)...(19): siRNA sense strand
gacuauguguggacuguau

SEQ ID NO: 476255 - RNA, 19 nt, Homo sapiens
  misc_RNA (1)...(19): siRNA sense strand
gaagcugaauaggguagaa

SEQ ID NO: 476256 - RNA, 19 nt, Homo sapiens
  misc_RNA (1)...(19): siRNA sense strand
caauggauucacuucuuua

SEQ ID NO: 476257 - RNA, 19 nt, Homo sapiens
  misc_RNA (1)...(19): siRNA sense strand
gugggaagaccuaugcuuu

SEQ ID NO: 476258 - RNA, 19 nt, Homo sapiens
  misc_RNA (1)...(19): siRNA sense strand
guacgggcauaaccuugga

SEQ ID NO: 476259 - RNA, 19 nt, Homo sapiens
  misc_RNA (1)...(19): siRNA sense strand
ggcuaucccagaaauauuu

SEQ ID NO: 476260 - RNA, 19 nt, Homo sapiens
  misc_RNA (1)...(19): siRNA sense strand
uggauucacuucuuuaagg

SEQ ID NO: 476261 - RNA, 19 nt, Homo sapiens
  misc_RNA (1)...(19): siRNA sense strand
gacaagguguggcgcuaca

SEQ ID NO: 476262 - RNA, 19 nt, Homo sapiens
  misc_RNA (1)...(19): siRNA sense strand
cuacucgccucgaacacaa

SEQ ID NO: 476263 - RNA, 19 nt, Homo sapiens
  misc_RNA (1)...(19): siRNA sense strand
caaccagcagcuucgagua

SEQ ID NO: 476264 - RNA, 19 nt, Homo sapiens
  misc_RNA (1)...(19): siRNA sense strand
ggcauaaccuuggauacca

SEQ ID NO: 476265 - RNA, 19 nt, Homo sapiens
  misc_RNA (1)...(19): siRNA sense strand
ggcgcuacauuaauuucaa

SEQ ID NO: 476266 - RNA, 19 nt, Homo sapiens
  misc_RNA (1)...(19): siRNA sense strand
gcccucggcugcuaugagu

SEQ ID NO: 476267 - RNA, 19 nt, Homo sapiens
  misc_RNA (1)...(19): siRNA sense strand
gggacuauguguggacugu

SEQ ID NO: 476268 - RNA, 19 nt, Homo sapiens
  misc_RNA (1)...(19): siRNA sense strand
ggccgagucuacuucuuca

SEQ ID NO: 476269 - RNA, 19 nt, Homo sapiens
  misc_RNA (1)...(19): siRNA sense strand
gcaagauggccgagucuac

SEQ ID NO: 476270 - RNA, 19 nt, Homo sapiens
  misc_RNA (1)...(19): siRNA sense strand
caagguguggcgcuacauu

SEQ ID NO: 476271 - RNA, 19 nt, Homo sapiens
  misc_RNA (1)...(19): siRNA sense strand
cgaacacaauggauucacu

SEQ ID NO: 476272 - RNA, 19 nt, Homo sapiens
  misc_RNA (1)...(19): siRNA sense strand
ccgagugucugcccuuugg

SEQ ID NO: 476273 - RNA, 19 nt, Homo sapiens
  misc_RNA (1)...(19): siRNA sense strand
ggaagaccuaugcuuucaa

SEQ ID NO: 476274 - RNA, 19 nt, Homo sapiens
  misc_RNA (1)...(19): siRNA sense strand
gcgcuacauuaauuucaag

SEQ ID NO: 476275 - RNA, 19 nt, Homo sapiens
  misc_RNA (1)...(19): siRNA sense strand
gcugucuacucgccucgaa

SEQ ID NO: 476276 - RNA, 19 nt, Homo sapiens
  misc_RNA (1)...(19): siRNA sense strand
gagcuagcccgaacugacu

SEQ ID NO: 476277 - RNA, 19 nt, Homo sapiens
  misc_RNA (1)...(19): siRNA sense strand
uguguggacuguaucagau

SEQ ID NO: 476278 - RNA, 19 nt, Homo sapiens
  misc_RNA (1)...(19): siRNA sense strand
aagguguggcgcuacauua

SEQ ID NO: 476279 - RNA, 19 nt, Homo sapiens
  misc_RNA (1)...(19): siRNA sense strand
aaccacguuugaauacuga

SEQ ID NO: 476280 - RNA, 19 nt, Homo sapiens
  misc_RNA (1)...(19): siRNA sense strand
uggaugcagcucucuauug

SEQ ID NO: 476281 - RNA, 19 nt, Homo sapiens
  misc_RNA (1)...(19): siRNA sense strand
agaaaggcuaucccagaaa

SEQ ID NO: 476282 - RNA, 19 nt, Homo sapiens
  misc_RNA (1)...(19): siRNA sense strand
caaucaaggguuuguuuac

SEQ ID NO: 476283 - RNA, 19 nt, Homo sapiens
  misc_RNA (1)...(19): siRNA sense strand
ggacuauguguggacugua

SEQ ID NO: 476284 - RNA, 19 nt, Homo sapiens
  misc_RNA (1)...(19): siRNA sense strand
aaaggcuaucccagaaaua

SEQ ID NO: 476285 - RNA, 19 nt, Homo sapiens
  misc_RNA (1)...(19): siRNA sense strand
caagauggccgagucuacu

SEQ ID NO: 476286 - RNA, 19 nt, Homo sapiens
  misc_RNA (1)...(19): siRNA sense strand
ccuggaugcugcugucuac

SEQ ID NO: 476287 - RNA, 19 nt, Homo sapiens
  misc_RNA (1)...(19): siRNA sense strand
gguguggcgcuacauuaau

SEQ ID NO: 476288 - RNA, 19 nt, Homo sapiens
  misc_RNA (1)...(19): siRNA sense strand
uuacgggagugccaaacca

SEQ ID NO: 476289 - RNA, 19 nt, Homo sapiens
  misc_RNA (1)...(19): siRNA sense strand
gcagcuucgaguagagaaa

SEQ ID NO: 476290 - RNA, 19 nt, Homo sapiens
  misc_RNA (1)...(19): siRNA sense strand
ccucggcugcuaugaguug

SEQ ID NO: 476291 - RNA, 19 nt, Homo sapiens
  misc_RNA (1)...(19): siRNA sense strand
caagaagaguccagugaua

SEQ ID NO: 476292 - RNA, 19 nt, Homo sapiens
  misc_RNA (1)...(19): siRNA sense strand
gagaaaggcuaucccagaa

SEQ ID NO: 476293 - RNA, 19 nt, Homo sapiens
  misc_RNA (1)...(19): siRNA sense strand
gaaaggcuaucccagaaau

SEQ ID NO: 476294 - RNA, 19 nt, Homo sapiens
  misc_RNA (1)...(19): siRNA sense strand
gauaagggaugaggaagaa

SEQ ID NO: 476295 - RNA, 19 nt, Homo sapiens
  misc_RNA (1)...(19): siRNA sense strand
gcuaugaguuggcaagaug

SEQ ID NO: 476296 - RNA, 19 nt, Homo sapiens
  misc_RNA (1)...(19): siRNA sense strand
gaagaccuaugcuuucaag

SEQ ID NO: 476297 - RNA, 19 nt, Homo sapiens
  misc_RNA (1)...(19): siRNA sense strand
ggaugcagcucucuauugg

SEQ ID NO: 476298 - RNA, 19 nt, Homo sapiens
  misc_RNA (1)...(19): siRNA sense strand
gggaagaccuaugcuuuca

SEQ ID NO: 476299 - RNA, 19 nt, Homo sapiens
  misc_RNA (1)...(19): siRNA sense strand
acaauggauucacuucuuu

SEQ ID NO: 476300 - RNA, 19 nt, Homo sapiens
  misc_RNA (1)...(19): siRNA sense strand
gguagaaccuaaccuggau

SEQ ID NO: 476301 - RNA, 19 nt, Homo sapiens
  misc_RNA (1)...(19): siRNA sense strand
ccaaucaaggguuuguuua

SEQ ID NO: 476302 - RNA, 19 nt, Homo sapiens
  misc_RNA (1)...(19): siRNA sense strand
cacaauggauucacuucuu

SEQ ID NO: 476303 - RNA, 19 nt, Homo sapiens
  misc_RNA (1)...(19): siRNA sense strand
gaacacaauggauucacuu

SEQ ID NO: 476304 - RNA, 19 nt, Homo sapiens
  misc_RNA (1)...(19): siRNA sense strand
guguggcgcuacauuaauu

SEQ ID NO: 476305 - RNA, 19 nt, Homo sapiens
  misc_RNA (1)...(19): siRNA sense strand
ugaacuggaugccaugaug

SEQ ID NO: 476306 - RNA, 19 nt, Homo sapiens
  misc_RNA (1)...(19): siRNA sense strand
gacuauguguggacuguau

SEQ ID NO: 476307 - RNA, 19 nt, Homo sapiens
  misc_RNA (1)...(19): siRNA sense strand
gaagcugaauaggguagaa

SEQ ID NO: 476308 - RNA, 19 nt, Homo sapiens
  misc_RNA (1)...(19): siRNA sense strand
gcaagaagaguccagugau

SEQ ID NO: 476309 - RNA, 19 nt, Homo sapiens
  misc_RNA (1)...(19): siRNA sense strand
caauggauucacuucuuua

SEQ ID NO: 476310 - RNA, 19 nt, Homo sapiens
  misc_RNA (1)...(19): siRNA sense strand
gugggaagaccuaugcuuu

SEQ ID NO: 476311 - RNA, 19 nt, Homo sapiens
  misc_RNA (1)...(19): siRNA sense strand
guacgggcauaaccuugga

SEQ ID NO: 476312 - RNA, 19 nt, Homo sapiens
  misc_RNA (1)...(19): siRNA sense strand
ggcuaucccagaaauauuu

SEQ ID NO: 476313 - RNA, 19 nt, Homo sapiens
  misc_RNA (1)...(19): siRNA sense strand
ggcaagaagaguccaguga

SEQ ID NO: 476314 - RNA, 19 nt, Homo sapiens
  misc_RNA (1)...(19): siRNA sense strand
gacaagguguggcgcuaca

SEQ ID NO: 476315 - RNA, 19 nt, Homo sapiens
  misc_RNA (1)...(19): siRNA sense strand
uggauucacuucuuuaagg

SEQ ID NO: 476316 - RNA, 19 nt, Homo sapiens
  misc_RNA (1)...(19): siRNA sense strand
aagaagaguccagugauaa

SEQ ID NO: 476317 - RNA, 19 nt, Homo sapiens
  misc_RNA (1)...(19): siRNA sense strand
cuacucgccucgaacacaa

SEQ ID NO: 476318 - RNA, 19 nt, Homo sapiens
  misc_RNA (1)...(19): siRNA sense strand
uaagggaugaggaagaaga

SEQ ID NO: 476319 - RNA, 19 nt, Homo sapiens
  misc_RNA (1)...(19): siRNA sense strand
ggcauaaccuuggauacca

SEQ ID NO: 476320 - RNA, 19 nt, Homo sapiens
  misc_RNA (1)...(19): siRNA sense strand
caaccagcagcuucgagua

SEQ ID NO: 476321 - RNA, 19 nt, Homo sapiens
  misc_RNA (1)...(19): siRNA sense strand
gggaugaggaagaagaaga

SEQ ID NO: 476322 - RNA, 19 nt, Homo sapiens
  misc_RNA (1)...(19): siRNA sense strand
ggcgcuacauuaauuucaa

SEQ ID NO: 476323 - RNA, 19 nt, Homo sapiens
  misc_RNA (1)...(19): siRNA sense strand
gcccucggcugcuaugagu

SEQ ID NO: 476324 - RNA, 19 nt, Homo sapiens
  misc_RNA (1)...(19): siRNA sense strand
gggacuauguguggacugu

SEQ ID NO: 476325 - RNA, 19 nt, Homo sapiens
  misc_RNA (1)...(19): siRNA sense strand
ggccgagucuacuucuuca

SEQ ID NO: 476326 - RNA, 19 nt, Homo sapiens
  misc_RNA (1)...(19): siRNA sense strand
gcaagauggccgagucuac

SEQ ID NO: 476327 - RNA, 19 nt, Homo sapiens
  misc_RNA (1)...(19): siRNA sense strand
cuugggcacucccgauauu

SEQ ID NO: 476328 - RNA, 19 nt, Homo sapiens
  misc_RNA (1)...(19): siRNA sense strand
caagguguggcgcuacauu

SEQ ID NO: 476329 - RNA, 19 nt, Homo sapiens
  misc_RNA (1)...(19): siRNA sense strand
gccagacccuugcaguagu

SEQ ID NO: 476330 - RNA, 19 nt, Homo sapiens
  misc_RNA (1)...(19): siRNA sense strand
ccagacccuugcaguagug

SEQ ID NO: 476331 - RNA, 19 nt, Homo sapiens
  misc_RNA (1)...(19): siRNA sense strand
ggaagaccuaugcuuucaa

SEQ ID NO: 476332 - RNA, 19 nt, Homo sapiens
  misc_RNA (1)...(19): siRNA sense strand
gcgcuacauuaauuucaag

SEQ ID NO: 476333 - RNA, 19 nt, Homo sapiens
  misc_RNA (1)...(19): siRNA sense strand
cgaacacaauggauucacu

SEQ ID NO: 476334 - RNA, 19 nt, Homo sapiens
  misc_RNA (1)...(19): siRNA sense strand
ccgagugucugcccuuugg

SEQ ID NO: 476335 - RNA, 19 nt, Homo sapiens
  misc_RNA (1)...(19): siRNA sense strand
gcugucuacucgccucgaa

SEQ ID NO: 476336 - RNA, 19 nt, Homo sapiens
  misc_RNA (1)...(19): siRNA sense strand
gagcuagcccgaacugacu

SEQ ID NO: 476337 - RNA, 19 nt, Homo sapiens
  misc_RNA (1)...(19): siRNA sense strand
ugaggaagaagaagagaca

SEQ ID NO: 476338 - RNA, 19 nt, Homo sapiens
  misc_RNA (1)...(19): siRNA sense strand
aagacgaguucuggacuga

SEQ ID NO: 476339 - RNA, 19 nt, Homo sapiens
  misc_RNA (1)...(19): siRNA sense strand
aagguguggcgcuacauua

SEQ ID NO: 476340 - RNA, 19 nt, Homo sapiens
  misc_RNA (1)...(19): siRNA sense strand
uguguggacuguaucagau

SEQ ID NO: 476341 - RNA, 19 nt, Homo sapiens
  misc_RNA (1)...(19): siRNA sense strand
gaagaguccagugauaagg

SEQ ID NO: 476342 - RNA, 19 nt, Homo sapiens
  misc_RNA (1)...(19): siRNA sense strand
aaccacguuugaauacuga

SEQ ID NO: 476343 - RNA, 19 nt, Homo sapiens
  misc_RNA (1)...(19): siRNA sense strand
cauugcagcccaugaagug

SEQ ID NO: 476344 - RNA, 19 nt, Homo sapiens
  misc_RNA (1)...(19): siRNA sense strand
uggaugcagcucucuauug

SEQ ID NO: 476345 - RNA, 19 nt, Homo sapiens
  misc_RNA (1)...(19): siRNA sense strand
gugaaccugcgcaucauug

SEQ ID NO: 476346 - RNA, 19 nt, Homo sapiens
  misc_RNA (1)...(19): siRNA sense strand
ugauaagggaugaggaaga

SEQ ID NO: 476347 - RNA, 19 nt, Homo sapiens
  misc_RNA (1)...(19): siRNA sense strand
agaaaggcuaucccagaaa

SEQ ID NO: 476348 - RNA, 19 nt, Homo sapiens
  misc_RNA (1)...(19): siRNA sense strand
ggauccaggcucucuaugg

SEQ ID NO: 476349 - RNA, 19 nt, Homo sapiens
  misc_RNA (1)...(19): siRNA sense strand
ggaugaggaagaagaagag

SEQ ID NO: 476350 - RNA, 19 nt, Homo sapiens
  misc_RNA (1)...(19): siRNA sense strand
caaucaaggguuuguuuac

SEQ ID NO: 476351 - RNA, 19 nt, Homo sapiens
  misc_RNA (1)...(19): siRNA sense strand
ggacuauguguggacugua

SEQ ID NO: 476352 - RNA, 19 nt, Homo sapiens
  misc_RNA (1)...(19): siRNA sense strand
aaaggcuaucccagaaaua

SEQ ID NO: 476353 - RNA, 19 nt, Homo sapiens
  misc_RNA (1)...(19): siRNA sense strand
caagauggccgagucuacu

SEQ ID NO: 476354 - RNA, 19 nt, Homo sapiens
  misc_RNA (1)...(19): siRNA sense strand
gaaccugcgcaucauugca

SEQ ID NO: 476355 - RNA, 19 nt, Homo sapiens
  misc_RNA (1)...(19): siRNA sense strand
ccuggaugcugcugucuac

SEQ ID NO: 476356 - RNA, 19 nt, Homo sapiens
  misc_RNA (1)...(19): siRNA sense strand
guccagugauaagggauga

SEQ ID NO: 476357 - RNA, 19 nt, Homo sapiens
  misc_RNA (1)...(19): siRNA sense strand
gguguggcgcuacauuaau

SEQ ID NO: 476358 - RNA, 19 nt, Homo sapiens
  misc_RNA (1)...(19): siRNA sense strand
ggugaaccugcgcaucauu

SEQ ID NO: 476359 - RNA, 19 nt, Homo sapiens
  misc_RNA (1)...(19): siRNA sense strand
gcagcuucgaguagagaaa

SEQ ID NO: 476360 - RNA, 19 nt, Homo sapiens
  misc_RNA (1)...(19): siRNA sense strand
ccucggcugcuaugaguug

SEQ ID NO: 476361 - RNA, 19 nt, Homo sapiens
  misc_RNA (1)...(19): siRNA sense strand
uuacgggagugccaaacca

SEQ ID NO: 476362 - RNA, 19 nt, Homo sapiens
  misc_RNA (1)...(19): siRNA sense strand
gcagggauccaggcucucu

SEQ ID NO: 476363 - RNA, 19 nt, Homo sapiens
  misc_RNA (1)...(19): siRNA sense strand
caagaagaguccagugaua

SEQ ID NO: 476364 - RNA, 19 nt, Homo sapiens
  misc_RNA (1)...(19): siRNA sense strand
gauaagggaugaggaagaa

SEQ ID NO: 476365 - RNA, 19 nt, Homo sapiens
  misc_RNA (1)...(19): siRNA sense strand
gaagaccuaugcuuucaag

SEQ ID NO: 476366 - RNA, 19 nt, Homo sapiens
  misc_RNA (1)...(19): siRNA sense strand
gggaagaccuaugcuuuca

SEQ ID NO: 476367 - RNA, 19 nt, Homo sapiens
  misc_RNA (1)...(19): siRNA sense strand
acaauggauucacuucuuu

SEQ ID NO: 476368 - RNA, 19 nt, Homo sapiens
  misc_RNA (1)...(19): siRNA sense strand
cacaauggauucacuucuu

SEQ ID NO: 476369 - RNA, 19 nt, Homo sapiens
  misc_RNA (1)...(19): siRNA sense strand
gaacacaauggauucacuu

SEQ ID NO: 476370 - RNA, 19 nt, Homo sapiens
  misc_RNA (1)...(19): siRNA sense strand
ugaacuggaugccaugaug

SEQ ID NO: 476371 - RNA, 19 nt, Homo sapiens
  misc_RNA (1)...(19): siRNA sense strand
gacuauguguggacuguau

SEQ ID NO: 476372 - RNA, 19 nt, Homo sapiens
  misc_RNA (1)...(19): siRNA sense strand
gcaagaagaguccagugau

SEQ ID NO: 476373 - RNA, 19 nt, Homo sapiens
  misc_RNA (1)...(19): siRNA sense strand
caauggauucacuucuuua

SEQ ID NO: 476374 - RNA, 19 nt, Homo sapiens
  misc_RNA (1)...(19): siRNA sense strand
gugggaagaccuaugcuuu

SEQ ID NO: 476375 - RNA, 19 nt, Homo sapiens
  misc_RNA (1)...(19): siRNA sense strand
ggcaagaagaguccaguga

SEQ ID NO: 476376 - RNA, 19 nt, Homo sapiens
  misc_RNA (1)...(19): siRNA sense strand
aagaagaguccagugauaa

SEQ ID NO: 476377 - RNA, 19 nt, Homo sapiens
  misc_RNA (1)...(19): siRNA sense strand
cuacucgccucgaacacaa

SEQ ID NO: 476378 - RNA, 19 nt, Homo sapiens
  misc_RNA (1)...(19): siRNA sense strand
uaagggaugaggaagaaga

SEQ ID NO: 476379 - RNA, 19 nt, Homo sapiens
  misc_RNA (1)...(19): siRNA sense strand
gggaugaggaagaagaaga

SEQ ID NO: 476380 - RNA, 19 nt, Homo sapiens
  misc_RNA (1)...(19): siRNA sense strand
gggacuauguguggacugu

SEQ ID NO: 476381 - RNA, 19 nt, Homo sapiens
  misc_RNA (1)...(19): siRNA sense strand
cuugggcacucccgauauu

SEQ ID NO: 476382 - RNA, 19 nt, Homo sapiens
  misc_RNA (1)...(19): siRNA sense strand
gccagacccuugcaguagu

SEQ ID NO: 476383 - RNA, 19 nt, Homo sapiens
  misc_RNA (1)...(19): siRNA sense strand
ccagacccuugcaguagug

SEQ ID NO: 476384 - RNA, 19 nt, Homo sapiens
  misc_RNA (1)...(19): siRNA sense strand
ggaagaccuaugcuuucaa

SEQ ID NO: 476385 - RNA, 19 nt, Homo sapiens
  misc_RNA (1)...(19): siRNA sense strand
cgaacacaauggauucacu

SEQ ID NO: 476386 - RNA, 19 nt, Homo sapiens
  misc_RNA (1)...(19): siRNA sense strand
ccgagugucugcccuuugg

SEQ ID NO: 476387 - RNA, 19 nt, Homo sapiens
  misc_RNA (1)...(19): siRNA sense strand
gcugucuacucgccucgaa

SEQ ID NO: 476388 - RNA, 19 nt, Homo sapiens
  misc_RNA (1)...(19): siRNA sense strand
ugaggaagaagaagagaca

SEQ ID NO: 476389 - RNA, 19 nt, Homo sapiens
  misc_RNA (1)...(19): siRNA sense strand
uguguggacuguaucagau

SEQ ID NO: 476390 - RNA, 19 nt, Homo sapiens
  misc_RNA (1)...(19): siRNA sense strand
aagacgaguucuggacuga

SEQ ID NO: 476391 - RNA, 19 nt, Homo sapiens
  misc_RNA (1)...(19): siRNA sense strand
cauugcagcccaugaagug

SEQ ID NO: 476392 - RNA, 19 nt, Homo sapiens
  misc_RNA (1)...(19): siRNA sense strand
gaagaguccagugauaagg

SEQ ID NO: 476393 - RNA, 19 nt, Homo sapiens
  misc_RNA (1)...(19): siRNA sense strand
gugaaccugcgcaucauug

SEQ ID NO: 476394 - RNA, 19 nt, Homo sapiens
  misc_RNA (1)...(19): siRNA sense strand
ggauccaggcucucuaugg

SEQ ID NO: 476395 - RNA, 19 nt, Homo sapiens
  misc_RNA (1)...(19): siRNA sense strand
ggaugaggaagaagaagag

SEQ ID NO: 476396 - RNA, 19 nt, Homo sapiens
  misc_RNA (1)...(19): siRNA sense strand
ugauaagggaugaggaaga

SEQ ID NO: 476397 - RNA, 19 nt, Homo sapiens
  misc_RNA (1)...(19): siRNA sense strand
gaaccugcgcaucauugca

SEQ ID NO: 476398 - RNA, 19 nt, Homo sapiens
  misc_RNA (1)...(19): siRNA sense strand
ccuggaugcugcugucuac

SEQ ID NO: 476399 - RNA, 19 nt, Homo sapiens
  misc_RNA (1)...(19): siRNA sense strand
ggacuauguguggacugua

SEQ ID NO: 476400 - RNA, 19 nt, Homo sapiens
  misc_RNA (1)...(19): siRNA sense strand
guccagugauaagggauga

SEQ ID NO: 476401 - RNA, 19 nt, Homo sapiens
  misc_RNA (1)...(19): siRNA sense strand
gcagggauccaggcucucu

SEQ ID NO: 476402 - RNA, 19 nt, Homo sapiens
  misc_RNA (1)...(19): siRNA sense strand
ggugaaccugcgcaucauu

SEQ ID NO: 476403 - RNA, 19 nt, Homo sapiens
  misc_RNA (1)...(19): siRNA sense strand
gagaaaggcuaucccagaa

SEQ ID NO: 476404 - RNA, 19 nt, Homo sapiens
  misc_RNA (1)...(19): siRNA sense strand
gaaaggcuaucccagaaau

SEQ ID NO: 476405 - RNA, 19 nt, Homo sapiens
  misc_RNA (1)...(19): siRNA sense strand
gcuaugaguuggcaagaug

SEQ ID NO: 476406 - RNA, 19 nt, Homo sapiens
  misc_RNA (1)...(19): siRNA sense strand
gaagaccuaugcuuucaag

SEQ ID NO: 476407 - RNA, 19 nt, Homo sapiens
  misc_RNA (1)...(19): siRNA sense strand
ggaugcagcucucuauugg

SEQ ID NO: 476408 - RNA, 19 nt, Homo sapiens
  misc_RNA (1)...(19): siRNA sense strand
gggaagaccuaugcuuuca

SEQ ID NO: 476409 - RNA, 19 nt, Homo sapiens
  misc_RNA (1)...(19): siRNA sense strand
acaauggauucacuucuuu

SEQ ID NO: 476410 - RNA, 19 nt, Homo sapiens
  misc_RNA (1)...(19): siRNA sense strand
gguagaaccuaaccuggau

SEQ ID NO: 476411 - RNA, 19 nt, Homo sapiens
  misc_RNA (1)...(19): siRNA sense strand
ccaaucaaggguuuguuua

SEQ ID NO: 476412 - RNA, 19 nt, Homo sapiens
  misc_RNA (1)...(19): siRNA sense strand
cacaauggauucacuucuu

SEQ ID NO: 476413 - RNA, 19 nt, Homo sapiens
  misc_RNA (1)...(19): siRNA sense strand
gaacacaauggauucacuu

SEQ ID NO: 476414 - RNA, 19 nt, Homo sapiens
  misc_RNA (1)...(19): siRNA sense strand
guguggcgcuacauuaauu

SEQ ID NO: 476415 - RNA, 19 nt, Homo sapiens
  misc_RNA (1)...(19): siRNA sense strand
gacuauguguggacuguau

SEQ ID NO: 476416 - RNA, 19 nt, Homo sapiens
  misc_RNA (1)...(19): siRNA sense strand
gaagcugaauaggguagaa

SEQ ID NO: 476417 - RNA, 19 nt, Homo sapiens
  misc_RNA (1)...(19): siRNA sense strand
caauggauucacuucuuua

SEQ ID NO: 476418 - RNA, 19 nt, Homo sapiens
  misc_RNA (1)...(19): siRNA sense strand
gugggaagaccuaugcuuu

SEQ ID NO: 476419 - RNA, 19 nt, Homo sapiens
  misc_RNA (1)...(19): siRNA sense strand
guacgggcauaaccuugga

SEQ ID NO: 476420 - RNA, 19 nt, Homo sapiens
  misc_RNA (1)...(19): siRNA sense strand
ggcuaucccagaaauauuu

SEQ ID NO: 476421 - RNA, 19 nt, Homo sapiens
  misc_RNA (1)...(19): siRNA sense strand
uggauucacuucuuuaagg

SEQ ID NO: 476422 - RNA, 19 nt, Homo sapiens
  misc_RNA (1)...(19): siRNA sense strand
gacaagguguggcgcuaca

SEQ ID NO: 476423 - RNA, 19 nt, Homo sapiens
  misc_RNA (1)...(19): siRNA sense strand
cuacucgccucgaacacaa

SEQ ID NO: 476424 - RNA, 19 nt, Homo sapiens
  misc_RNA (1)...(19): siRNA sense strand
caaccagcagcuucgagua

SEQ ID NO: 476425 - RNA, 19 nt, Homo sapiens
  misc_RNA (1)...(19): siRNA sense strand
ggcauaaccuuggauacca

SEQ ID NO: 476426 - RNA, 19 nt, Homo sapiens
  misc_RNA (1)...(19): siRNA sense strand
ggcgcuacauuaauuucaa

SEQ ID NO: 476427 - RNA, 19 nt, Homo sapiens
  misc_RNA (1)...(19): siRNA sense strand
gcccucggcugcuaugagu

SEQ ID NO: 476428 - RNA, 19 nt, Homo sapiens
  misc_RNA (1)...(19): siRNA sense strand
gggacuauguguggacugu

SEQ ID NO: 476429 - RNA, 19 nt, Homo sapiens
  misc_RNA (1)...(19): siRNA sense strand
ggccgagucuacuucuuca

SEQ ID NO: 476430 - RNA, 19 nt, Homo sapiens
  misc_RNA (1)...(19): siRNA sense strand
gcaagauggccgagucuac

SEQ ID NO: 476431 - RNA, 19 nt, Homo sapiens
  misc_RNA (1)...(19): siRNA sense strand
caagguguggcgcuacauu

SEQ ID NO: 476432 - RNA, 19 nt, Homo sapiens
  misc_RNA (1)...(19): siRNA sense strand
cgaacacaauggauucacu

SEQ ID NO: 476433 - RNA, 19 nt, Homo sapiens
  misc_RNA (1)...(19): siRNA sense strand
ccgagugucugcccuuugg

SEQ ID NO: 476434 - RNA, 19 nt, Homo sapiens
  misc_RNA (1)...(19): siRNA sense strand
ggaagaccuaugcuuucaa

SEQ ID NO: 476435 - RNA, 19 nt, Homo sapiens
  misc_RNA (1)...(19): siRNA sense strand
gcgcuacauuaauuucaag

SEQ ID NO: 476436 - RNA, 19 nt, Homo sapiens
  misc_RNA (1)...(19): siRNA sense strand
gcugucuacucgccucgaa

SEQ ID NO: 476437 - RNA, 19 nt, Homo sapiens
  misc_RNA (1)...(19): siRNA sense strand
gagcuagcccgaacugacu

SEQ ID NO: 476438 - RNA, 19 nt, Homo sapiens
  misc_RNA (1)...(19): siRNA sense strand
uguguggacuguaucagau

SEQ ID NO: 476439 - RNA, 19 nt, Homo sapiens
  misc_RNA (1)...(19): siRNA sense strand
aagguguggcgcuacauua

SEQ ID NO: 476440 - RNA, 19 nt, Homo sapiens
  misc_RNA (1)...(19): siRNA sense strand
aaccacguuugaauacuga

SEQ ID NO: 476441 - RNA, 19 nt, Homo sapiens
  misc_RNA (1)...(19): siRNA sense strand
uggaugcagcucucuauug

SEQ ID NO: 476442 - RNA, 19 nt, Homo sapiens
  misc_RNA (1)...(19): siRNA sense strand
agaaaggcuaucccagaaa

SEQ ID NO: 476443 - RNA, 19 nt, Homo sapiens
  misc_RNA (1)...(19): siRNA sense strand
caaucaaggguuuguuuac

SEQ ID NO: 476444 - RNA, 19 nt, Homo sapiens
  misc_RNA (1)...(19): siRNA sense strand
ggacuauguguggacugua

SEQ ID NO: 476445 - RNA, 19 nt, Homo sapiens
  misc_RNA (1)...(19): siRNA sense strand
aaaggcuaucccagaaaua

SEQ ID NO: 476446 - RNA, 19 nt, Homo sapiens
  misc_RNA (1)...(19): siRNA sense strand
caagauggccgagucuacu

SEQ ID NO: 476447 - RNA, 19 nt, Homo sapiens
  misc_RNA (1)...(19): siRNA sense strand
ccuggaugcugcugucuac

SEQ ID NO: 476448 - RNA, 19 nt, Homo sapiens
  misc_RNA (1)...(19): siRNA sense strand
gguguggcgcuacauuaau

SEQ ID NO: 476449 - RNA, 19 nt, Homo sapiens
  misc_RNA (1)...(19): siRNA sense strand
uuacgggagugccaaacca

SEQ ID NO: 476450 - RNA, 19 nt, Homo sapiens
  misc_RNA (1)...(19): siRNA sense strand
gcagcuucgaguagagaaa

SEQ ID NO: 476451 - RNA, 19 nt, Homo sapiens
  misc_RNA (1)...(19): siRNA sense strand
ccucggcugcuaugaguug

SEQ ID NO: 476452 - RNA, 19 nt, Homo sapiens
  misc_RNA (1)...(19): siRNA sense strand
caagaagaguccagugaua

SEQ ID NO: 476453 - RNA, 19 nt, Homo sapiens
  misc_RNA (1)...(19): siRNA sense strand
gagaaaggcuaucccagaa

SEQ ID NO: 476454 - RNA, 19 nt, Homo sapiens
  misc_RNA (1)...(19): siRNA sense strand
gaaaggcuaucccagaaau

SEQ ID NO: 476455 - RNA, 19 nt, Homo sapiens
  misc_RNA (1)...(19): siRNA sense strand
gauaagggaugaggaagaa

SEQ ID NO: 476456 - RNA, 19 nt, Homo sapiens
  misc_RNA (1)...(19): siRNA sense strand
gcuaugaguuggcaagaug

SEQ ID NO: 476457 - RNA, 19 nt, Homo sapiens
  misc_RNA (1)...(19): siRNA sense strand
gaagaccuaugcuuucaag

SEQ ID NO: 476458 - RNA, 19 nt, Homo sapiens
  misc_RNA (1)...(19): siRNA sense strand
ggaugcagcucucuauugg

SEQ ID NO: 476459 - RNA, 19 nt, Homo sapiens
  misc_RNA (1)...(19): siRNA sense strand
gggaagaccuaugcuuuca

SEQ ID NO: 476460 - RNA, 19 nt, Homo sapiens
  misc_RNA (1)...(19): siRNA sense strand
acaauggauucacuucuuu

SEQ ID NO: 476461 - RNA, 19 nt, Homo sapiens
  misc_RNA (1)...(19): siRNA sense strand
gguagaaccuaaccuggau

SEQ ID NO: 476462 - RNA, 19 nt, Homo sapiens
  misc_RNA (1)...(19): siRNA sense strand
ccaaucaaggguuuguuua

SEQ ID NO: 476463 - RNA, 19 nt, Homo sapiens
  misc_RNA (1)...(19): siRNA sense strand
cacaauggauucacuucuu

SEQ ID NO: 476464 - RNA, 19 nt, Homo sapiens
  misc_RNA (1)...(19): siRNA sense strand
gaacacaauggauucacuu

SEQ ID NO: 476465 - RNA, 19 nt, Homo sapiens
  misc_RNA (1)...(19): siRNA sense strand
guguggcgcuacauuaauu

SEQ ID NO: 476466 - RNA, 19 nt, Homo sapiens
  misc_RNA (1)...(19): siRNA sense strand
ugaacuggaugccaugaug

SEQ ID NO: 476467 - RNA, 19 nt, Homo sapiens
  misc_RNA (1)...(19): siRNA sense strand
gacuauguguggacuguau

SEQ ID NO: 476468 - RNA, 19 nt, Homo sapiens
  misc_RNA (1)...(19): siRNA sense strand
gaagcugaauaggguagaa

SEQ ID NO: 476469 - RNA, 19 nt, Homo sapiens
  misc_RNA (1)...(19): siRNA sense strand
gcaagaagaguccagugau

SEQ ID NO: 476470 - RNA, 19 nt, Homo sapiens
  misc_RNA (1)...(19): siRNA sense strand
caauggauucacuucuuua

SEQ ID NO: 476471 - RNA, 19 nt, Homo sapiens
  misc_RNA (1)...(19): siRNA sense strand
gugggaagaccuaugcuuu

SEQ ID NO: 476472 - RNA, 19 nt, Homo sapiens
  misc_RNA (1)...(19): siRNA sense strand
guacgggcauaaccuugga

SEQ ID NO: 476473 - RNA, 19 nt, Homo sapiens
  misc_RNA (1)...(19): siRNA sense strand
ggcuaucccagaaauauuu

SEQ ID NO: 476474 - RNA, 19 nt, Homo sapiens
  misc_RNA (1)...(19): siRNA sense strand
ggcaagaagaguccaguga

SEQ ID NO: 476475 - RNA, 19 nt, Homo sapiens
  misc_RNA (1)...(19): siRNA sense strand
gacaagguguggcgcuaca

SEQ ID NO: 476476 - RNA, 19 nt, Homo sapiens
  misc_RNA (1)...(19): siRNA sense strand
uggauucacuucuuuaagg

SEQ ID NO: 476477 - RNA, 19 nt, Homo sapiens
  misc_RNA (1)...(19): siRNA sense strand
aagaagaguccagugauaa

SEQ ID NO: 476478 - RNA, 19 nt, Homo sapiens
  misc_RNA (1)...(19): siRNA sense strand
cuacucgccucgaacacaa

SEQ ID NO: 476479 - RNA, 19 nt, Homo sapiens
  misc_RNA (1)...(19): siRNA sense strand
uaagggaugaggaagaaga

SEQ ID NO: 476480 - RNA, 19 nt, Homo sapiens
  misc_RNA (1)...(19): siRNA sense strand
ggcauaaccuuggauacca

SEQ ID NO: 476481 - RNA, 19 nt, Homo sapiens
  misc_RNA (1)...(19): siRNA sense strand
caaccagcagcuucgagua

SEQ ID NO: 476482 - RNA, 19 nt, Homo sapiens
  misc_RNA (1)...(19): siRNA sense strand
gggaugaggaagaagaaga

SEQ ID NO: 476483 - RNA, 19 nt, Homo sapiens
  misc_RNA (1)...(19): siRNA sense strand
ggcgcuacauuaauuucaa

SEQ ID NO: 476484 - RNA, 19 nt, Homo sapiens
  misc_RNA (1)...(19): siRNA sense strand
gcccucggcugcuaugagu

SEQ ID NO: 476485 - RNA, 19 nt, Homo sapiens
  misc_RNA (1)...(19): siRNA sense strand
gggacuauguguggacugu

SEQ ID NO: 476486 - RNA, 19 nt, Homo sapiens
  misc_RNA (1)...(19): siRNA sense strand
ggccgagucuacuucuuca

SEQ ID NO: 476487 - RNA, 19 nt, Homo sapiens
  misc_RNA (1)...(19): siRNA sense strand
gcaagauggccgagucuac

SEQ ID NO: 476488 - RNA, 19 nt, Homo sapiens
  misc_RNA (1)...(19): siRNA sense strand
cuugggcacucccgauauu

SEQ ID NO: 476489 - RNA, 19 nt, Homo sapiens
  misc_RNA (1)...(19): siRNA sense strand
caagguguggcgcuacauu

SEQ ID NO: 476490 - RNA, 19 nt, Homo sapiens
  misc_RNA (1)...(19): siRNA sense strand
gccagacccuugcaguagu

SEQ ID NO: 476491 - RNA, 19 nt, Homo sapiens
  misc_RNA (1)...(19): siRNA sense strand
ccagacccuugcaguagug

SEQ ID NO: 476492 - RNA, 19 nt, Homo sapiens
  misc_RNA (1)...(19): siRNA sense strand
ggaagaccuaugcuuucaa

SEQ ID NO: 476493 - RNA, 19 nt, Homo sapiens
  misc_RNA (1)...(19): siRNA sense strand
gcgcuacauuaauuucaag

SEQ ID NO: 476494 - RNA, 19 nt, Homo sapiens
  misc_RNA (1)...(19): siRNA sense strand
cgaacacaauggauucacu

SEQ ID NO: 476495 - RNA, 19 nt, Homo sapiens
  misc_RNA (1)...(19): siRNA sense strand
ccgagugucugcccuuugg

SEQ ID NO: 476496 - RNA, 19 nt, Homo sapiens
  misc_RNA (1)...(19): siRNA sense strand
gcugucuacucgccucgaa

SEQ ID NO: 476497 - RNA, 19 nt, Homo sapiens
  misc_RNA (1)...(19): siRNA sense strand
gagcuagcccgaacugacu

SEQ ID NO: 476498 - RNA, 19 nt, Homo sapiens
  misc_RNA (1)...(19): siRNA sense strand
ugaggaagaagaagagaca

SEQ ID NO: 476499 - RNA, 19 nt, Homo sapiens
  misc_RNA (1)...(19): siRNA sense strand
aagacgaguucuggacuga

SEQ ID NO: 476500 - RNA, 19 nt, Homo sapiens
  misc_RNA (1)...(19): siRNA sense strand
aagguguggcgcuacauua

SEQ ID NO: 476501 - RNA, 19 nt, Homo sapiens
  misc_RNA (1)...(19): siRNA sense strand
uguguggacuguaucagau

SEQ ID NO: 476502 - RNA, 19 nt, Homo sapiens
  misc_RNA (1)...(19): siRNA sense strand
gaagaguccagugauaagg

SEQ ID NO: 476503 - RNA, 19 nt, Homo sapiens
  misc_RNA (1)...(19): siRNA sense strand
aaccacguuugaauacuga

SEQ ID NO: 476504 - RNA, 19 nt, Homo sapiens
  misc_RNA (1)...(19): siRNA sense strand
cauugcagcccaugaagug

SEQ ID NO: 476505 - RNA, 19 nt, Homo sapiens
  misc_RNA (1)...(19): siRNA sense strand
uggaugcagcucucuauug

SEQ ID NO: 476506 - RNA, 19 nt, Homo sapiens
  misc_RNA (1)...(19): siRNA sense strand
gugaaccugcgcaucauug

SEQ ID NO: 476507 - RNA, 19 nt, Homo sapiens
  misc_RNA (1)...(19): siRNA sense strand
ugauaagggaugaggaaga

SEQ ID NO: 476508 - RNA, 19 nt, Homo sapiens
  misc_RNA (1)...(19): siRNA sense strand
agaaaggcuaucccagaaa

SEQ ID NO: 476509 - RNA, 19 nt, Homo sapiens
  misc_RNA (1)...(19): siRNA sense strand
ggauccaggcucucuaugg

SEQ ID NO: 476510 - RNA, 19 nt, Homo sapiens
  misc_RNA (1)...(19): siRNA sense strand
ggaugaggaagaagaagag

SEQ ID NO: 476511 - RNA, 19 nt, Homo sapiens
  misc_RNA (1)...(19): siRNA sense strand
caaucaaggguuuguuuac

SEQ ID NO: 476512 - RNA, 19 nt, Homo sapiens
  misc_RNA (1)...(19): siRNA sense strand
ggacuauguguggacugua

SEQ ID NO: 476513 - RNA, 19 nt, Homo sapiens
  misc_RNA (1)...(19): siRNA sense strand
aaaggcuaucccagaaaua

SEQ ID NO: 476514 - RNA, 19 nt, Homo sapiens
  misc_RNA (1)...(19): siRNA sense strand
caagauggccgagucuacu

SEQ ID NO: 476515 - RNA, 19 nt, Homo sapiens
  misc_RNA (1)...(19): siRNA sense strand
gaaccugcgcaucauugca

SEQ ID NO: 476516 - RNA, 19 nt, Homo sapiens
  misc_RNA (1)...(19): siRNA sense strand
ccuggaugcugcugucuac

SEQ ID NO: 476517 - RNA, 19 nt, Homo sapiens
  misc_RNA (1)...(19): siRNA sense strand
guccagugauaagggauga

SEQ ID NO: 476518 - RNA, 19 nt, Homo sapiens
  misc_RNA (1)...(19): siRNA sense strand
gguguggcgcuacauuaau

SEQ ID NO: 476519 - RNA, 19 nt, Homo sapiens
  misc_RNA (1)...(19): siRNA sense strand
ggugaaccugcgcaucauu

SEQ ID NO: 476520 - RNA, 19 nt, Homo sapiens
  misc_RNA (1)...(19): siRNA sense strand
gcagcuucgaguagagaaa

SEQ ID NO: 476521 - RNA, 19 nt, Homo sapiens
  misc_RNA (1)...(19): siRNA sense strand
ccucggcugcuaugaguug

SEQ ID NO: 476522 - RNA, 19 nt, Homo sapiens
  misc_RNA (1)...(19): siRNA sense strand
uuacgggagugccaaacca

SEQ ID NO: 476523 - RNA, 19 nt, Homo sapiens
  misc_RNA (1)...(19): siRNA sense strand
gcagggauccaggcucucu

SEQ ID NO: 476524 - RNA, 19 nt, Homo sapiens
  misc_RNA (1)...(19): siRNA sense strand
caagaagaguccagugaua

SEQ ID NO: 476525 - RNA, 19 nt, Homo sapiens
  misc_RNA (1)...(19): siRNA sense strand
gauaagggaugaggaagaa

SEQ ID NO: 476526 - RNA, 19 nt, Homo sapiens
  misc_RNA (1)...(19): siRNA sense strand
gaagaccuaugcuuucaag

SEQ ID NO: 476527 - RNA, 19 nt, Homo sapiens
  misc_RNA (1)...(19): siRNA sense strand
gggaagaccuaugcuuuca

SEQ ID NO: 476528 - RNA, 19 nt, Homo sapiens
  misc_RNA (1)...(19): siRNA sense strand
acaauggauucacuucuuu

SEQ ID NO: 476529 - RNA, 19 nt, Homo sapiens
  misc_RNA (1)...(19): siRNA sense strand
cacaauggauucacuucuu

SEQ ID NO: 476530 - RNA, 19 nt, Homo sapiens
  misc_RNA (1)...(19): siRNA sense strand
gaacacaauggauucacuu

SEQ ID NO: 476531 - RNA, 19 nt, Homo sapiens
  misc_RNA (1)...(19): siRNA sense strand
ugaacuggaugccaugaug

SEQ ID NO: 476532 - RNA, 19 nt, Homo sapiens
  misc_RNA (1)...(19): siRNA sense strand
gacuauguguggacuguau

SEQ ID NO: 476533 - RNA, 19 nt, Homo sapiens
  misc_RNA (1)...(19): siRNA sense strand
gcaagaagaguccagugau

SEQ ID NO: 476534 - RNA, 19 nt, Homo sapiens
  misc_RNA (1)...(19): siRNA sense strand
caauggauucacuucuuua

SEQ ID NO: 476535 - RNA, 19 nt, Homo sapiens
  misc_RNA (1)...(19): siRNA sense strand
gugggaagaccuaugcuuu

SEQ ID NO: 476536 - RNA, 19 nt, Homo sapiens
  misc_RNA (1)...(19): siRNA sense strand
ggcaagaagaguccaguga

SEQ ID NO: 476537 - RNA, 19 nt, Homo sapiens
  misc_RNA (1)...(19): siRNA sense strand
aagaagaguccagugauaa

SEQ ID NO: 476538 - RNA, 19 nt, Homo sapiens
  misc_RNA (1)...(19): siRNA sense strand
cuacucgccucgaacacaa

SEQ ID NO: 476539 - RNA, 19 nt, Homo sapiens
  misc_RNA (1)...(19): siRNA sense strand
uaagggaugaggaagaaga

SEQ ID NO: 476540 - RNA, 19 nt, Homo sapiens
  misc_RNA (1)...(19): siRNA sense strand
gggaugaggaagaagaaga

SEQ ID NO: 476541 - RNA, 19 nt, Homo sapiens
  misc_RNA (1)...(19): siRNA sense strand
gggacuauguguggacugu

SEQ ID NO: 476542 - RNA, 19 nt, Homo sapiens
  misc_RNA (1)...(19): siRNA sense strand
cuugggcacucccgauauu

SEQ ID NO: 476543 - RNA, 19 nt, Homo sapiens
  misc_RNA (1)...(19): siRNA sense strand
gccagacccuugcaguagu

SEQ ID NO: 476544 - RNA, 19 nt, Homo sapiens
  misc_RNA (1)...(19): siRNA sense strand
ccagacccuugcaguagug

SEQ ID NO: 476545 - RNA, 19 nt, Homo sapiens
  misc_RNA (1)...(19): siRNA sense strand
ggaagaccuaugcuuucaa

SEQ ID NO: 476546 - RNA, 19 nt, Homo sapiens
  misc_RNA (1)...(19): siRNA sense strand
cgaacacaauggauucacu

SEQ ID NO: 476547 - RNA, 19 nt, Homo sapiens
  misc_RNA (1)...(19): siRNA sense strand
ccgagugucugcccuuugg

SEQ ID NO: 476548 - RNA, 19 nt, Homo sapiens
  misc_RNA (1)...(19): siRNA sense strand
gcugucuacucgccucgaa

SEQ ID NO: 476549 - RNA, 19 nt, Homo sapiens
  misc_RNA (1)...(19): siRNA sense strand
ugaggaagaagaagagaca

SEQ ID NO: 476550 - RNA, 19 nt, Homo sapiens
  misc_RNA (1)...(19): siRNA sense strand
uguguggacuguaucagau

SEQ ID NO: 476551 - RNA, 19 nt, Homo sapiens
  misc_RNA (1)...(19): siRNA sense strand
aagacgaguucuggacuga

SEQ ID NO: 476552 - RNA, 19 nt, Homo sapiens
  misc_RNA (1)...(19): siRNA sense strand
cauugcagcccaugaagug

SEQ ID NO: 476553 - RNA, 19 nt, Homo sapiens
  misc_RNA (1)...(19): siRNA sense strand
gaagaguccagugauaagg

SEQ ID NO: 476554 - RNA, 19 nt, Homo sapiens
  misc_RNA (1)...(19): siRNA sense strand
gugaaccugcgcaucauug

SEQ ID NO: 476555 - RNA, 19 nt, Homo sapiens
  misc_RNA (1)...(19): siRNA sense strand
ggauccaggcucucuaugg

SEQ ID NO: 476556 - RNA, 19 nt, Homo sapiens
  misc_RNA (1)...(19): siRNA sense strand
ggaugaggaagaagaagag

SEQ ID NO: 476557 - RNA, 19 nt, Homo sapiens
  misc_RNA (1)...(19): siRNA sense strand
ugauaagggaugaggaaga

SEQ ID NO: 476558 - RNA, 19 nt, Homo sapiens
  misc_RNA (1)...(19): siRNA sense strand
gaaccugcgcaucauugca

SEQ ID NO: 476559 - RNA, 19 nt, Homo sapiens
  misc_RNA (1)...(19): siRNA sense strand
ccuggaugcugcugucuac

SEQ ID NO: 476560 - RNA, 19 nt, Homo sapiens
  misc_RNA (1)...(19): siRNA sense strand
ggacuauguguggacugua

SEQ ID NO: 476561 - RNA, 19 nt, Homo sapiens
  misc_RNA (1)...(19): siRNA sense strand
guccagugauaagggauga

SEQ ID NO: 476562 - RNA, 19 nt, Homo sapiens
  misc_RNA (1)...(19): siRNA sense strand
gcagggauccaggcucucu

SEQ ID NO: 476563 - RNA, 19 nt, Homo sapiens
  misc_RNA (1)...(19): siRNA sense strand
ggugaaccugcgcaucauu

SEQ ID NO: 476564 - RNA, 19 nt, Homo sapiens
  misc_RNA (1)...(19): siRNA sense strand
gagaaaggcuaucccagaa

SEQ ID NO: 476565 - RNA, 19 nt, Homo sapiens
  misc_RNA (1)...(19): siRNA sense strand
gaaaggcuaucccagaaau

SEQ ID NO: 476566 - RNA, 19 nt, Homo sapiens
  misc_RNA (1)...(19): siRNA sense strand
gcuaugaguuggcaagaug

SEQ ID NO: 476567 - RNA, 19 nt, Homo sapiens
  misc_RNA (1)...(19): siRNA sense strand
gaagaccuaugcuuucaag

SEQ ID NO: 476568 - RNA, 19 nt, Homo sapiens
  misc_RNA (1)...(19): siRNA sense strand
ggaugcagcucucuauugg

SEQ ID NO: 476569 - RNA, 19 nt, Homo sapiens
  misc_RNA (1)...(19): siRNA sense strand
gggaagaccuaugcuuuca

SEQ ID NO: 476570 - RNA, 19 nt, Homo sapiens
  misc_RNA (1)...(19): siRNA sense strand
acaauggauucacuucuuu

SEQ ID NO: 476571 - RNA, 19 nt, Homo sapiens
  misc_RNA (1)...(19): siRNA sense strand
gguagaaccuaaccuggau

SEQ ID NO: 476572 - RNA, 19 nt, Homo sapiens
  misc_RNA (1)...(19): siRNA sense strand
ccaaucaaggguuuguuua

SEQ ID NO: 476573 - RNA, 19 nt, Homo sapiens
  misc_RNA (1)...(19): siRNA sense strand
cacaauggauucacuucuu

SEQ ID NO: 476574 - RNA, 19 nt, Homo sapiens
  misc_RNA (1)...(19): siRNA sense strand
gaacacaauggauucacuu

SEQ ID NO: 476575 - RNA, 19 nt, Homo sapiens
  misc_RNA (1)...(19): siRNA sense strand
guguggcgcuacauuaauu

SEQ ID NO: 476576 - RNA, 19 nt, Homo sapiens
  misc_RNA (1)...(19): siRNA sense strand
gacuauguguggacuguau

SEQ ID NO: 476577 - RNA, 19 nt, Homo sapiens
  misc_RNA (1)...(19): siRNA sense strand
gaagcugaauaggguagaa

SEQ ID NO: 476578 - RNA, 19 nt, Homo sapiens
  misc_RNA (1)...(19): siRNA sense strand
caauggauucacuucuuua

SEQ ID NO: 476579 - RNA, 19 nt, Homo sapiens
  misc_RNA (1)...(19): siRNA sense strand
gugggaagaccuaugcuuu

SEQ ID NO: 476580 - RNA, 19 nt, Homo sapiens
  misc_RNA (1)...(19): siRNA sense strand
guacgggcauaaccuugga

SEQ ID NO: 476581 - RNA, 19 nt, Homo sapiens
  misc_RNA (1)...(19): siRNA sense strand
ggcuaucccagaaauauuu

SEQ ID NO: 476582 - RNA, 19 nt, Homo sapiens
  misc_RNA (1)...(19): siRNA sense strand
uggauucacuucuuuaagg

SEQ ID NO: 476583 - RNA, 19 nt, Homo sapiens
  misc_RNA (1)...(19): siRNA sense strand
gacaagguguggcgcuaca

SEQ ID NO: 476584 - RNA, 19 nt, Homo sapiens
  misc_RNA (1)...(19): siRNA sense strand
cuacucgccucgaacacaa

SEQ ID NO: 476585 - RNA, 19 nt, Homo sapiens
  misc_RNA (1)...(19): siRNA sense strand
caaccagcagcuucgagua

SEQ ID NO: 476586 - RNA, 19 nt, Homo sapiens
  misc_RNA (1)...(19): siRNA sense strand
ggcauaaccuuggauacca

SEQ ID NO: 476587 - RNA, 19 nt, Homo sapiens
  misc_RNA (1)...(19): siRNA sense strand
ggcgcuacauuaauuucaa

SEQ ID NO: 476588 - RNA, 19 nt, Homo sapiens
  misc_RNA (1)...(19): siRNA sense strand
gcccucggcugcuaugagu

SEQ ID NO: 476589 - RNA, 19 nt, Homo sapiens
  misc_RNA (1)...(19): siRNA sense strand
gggacuauguguggacugu

SEQ ID NO: 476590 - RNA, 19 nt, Homo sapiens
  misc_RNA (1)...(19): siRNA sense strand
ggccgagucuacuucuuca

SEQ ID NO: 476591 - RNA, 19 nt, Homo sapiens
  misc_RNA (1)...(19): siRNA sense strand
gcaagauggccgagucuac

SEQ ID NO: 476592 - RNA, 19 nt, Homo sapiens
  misc_RNA (1)...(19): siRNA sense strand
caagguguggcgcuacauu

SEQ ID NO: 476593 - RNA, 19 nt, Homo sapiens
  misc_RNA (1)...(19): siRNA sense strand
cgaacacaauggauucacu

SEQ ID NO: 476594 - RNA, 19 nt, Homo sapiens
  misc_RNA (1)...(19): siRNA sense strand
ccgagugucugcccuuugg

SEQ ID NO: 476595 - RNA, 19 nt, Homo sapiens
  misc_RNA (1)...(19): siRNA sense strand
ggaagaccuaugcuuucaa

SEQ ID NO: 476596 - RNA, 19 nt, Homo sapiens
  misc_RNA (1)...(19): siRNA sense strand
gcgcuacauuaauuucaag

SEQ ID NO: 476597 - RNA, 19 nt, Homo sapiens
  misc_RNA (1)...(19): siRNA sense strand
gcugucuacucgccucgaa

SEQ ID NO: 476598 - RNA, 19 nt, Homo sapiens
  misc_RNA (1)...(19): siRNA sense strand
gagcuagcccgaacugacu

SEQ ID NO: 476599 - RNA, 19 nt, Homo sapiens
  misc_RNA (1)...(19): siRNA sense strand
uguguggacuguaucagau

SEQ ID NO: 476600 - RNA, 19 nt, Homo sapiens
  misc_RNA (1)...(19): siRNA sense strand
aagguguggcgcuacauua

SEQ ID NO: 476601 - RNA, 19 nt, Homo sapiens
  misc_RNA (1)...(19): siRNA sense strand
aaccacguuugaauacuga

SEQ ID NO: 476602 - RNA, 19 nt, Homo sapiens
  misc_RNA (1)...(19): siRNA sense strand
uggaugcagcucucuauug

SEQ ID NO: 476603 - RNA, 19 nt, Homo sapiens
  misc_RNA (1)...(19): siRNA sense strand
agaaaggcuaucccagaaa

SEQ ID NO: 476604 - RNA, 19 nt, Homo sapiens
  misc_RNA (1)...(19): siRNA sense strand
caaucaaggguuuguuuac

SEQ ID NO: 476605 - RNA, 19 nt, Homo sapiens
  misc_RNA (1)...(19): siRNA sense strand
ggacuauguguggacugua

SEQ ID NO: 476606 - RNA, 19 nt, Homo sapiens
  misc_RNA (1)...(19): siRNA sense strand
aaaggcuaucccagaaaua

SEQ ID NO: 476607 - RNA, 19 nt, Homo sapiens
  misc_RNA (1)...(19): siRNA sense strand
caagauggccgagucuacu

SEQ ID NO: 476608 - RNA, 19 nt, Homo sapiens
  misc_RNA (1)...(19): siRNA sense strand
ccuggaugcugcugucuac

SEQ ID NO: 476609 - RNA, 19 nt, Homo sapiens
  misc_RNA (1)...(19): siRNA sense strand
gguguggcgcuacauuaau

SEQ ID NO: 476610 - RNA, 19 nt, Homo sapiens
  misc_RNA (1)...(19): siRNA sense strand
uuacgggagugccaaacca

SEQ ID NO: 476611 - RNA, 19 nt, Homo sapiens
  misc_RNA (1)...(19): siRNA sense strand
gcagcuucgaguagagaaa

SEQ ID NO: 476612 - RNA, 19 nt, Homo sapiens
  misc_RNA (1)...(19): siRNA sense strand
ccucggcugcuaugaguug

SEQ ID NO: 476613 - RNA, 19 nt, Homo sapiens
  misc_RNA (1)...(19): siRNA sense strand
ccagaaagcuuaagaaauu

SEQ ID NO: 476614 - RNA, 19 nt, Homo sapiens
  misc_RNA (1)...(19): siRNA sense strand
gggaggaccuggagaaguu

SEQ ID NO: 476615 - RNA, 19 nt, Homo sapiens
  misc_RNA (1)...(19): siRNA sense strand
gcacugcaaucucaacgaa

SEQ ID NO: 476616 - RNA, 19 nt, Homo sapiens
  misc_RNA (1)...(19): siRNA sense strand
ggaauucuuugucacauca

SEQ ID NO: 476617 - RNA, 19 nt, Homo sapiens
  misc_RNA (1)...(19): siRNA sense strand
cgagaaagccuuagcacaa

SEQ ID NO: 476618 - RNA, 19 nt, Homo sapiens
  misc_RNA (1)...(19): siRNA sense strand
ugaaggaccuggccacugu

SEQ ID NO: 476619 - RNA, 19 nt, Homo sapiens
  misc_RNA (1)...(19): siRNA sense strand
ucagagcccuucagcuuug

SEQ ID NO: 476620 - RNA, 19 nt, Homo sapiens
  misc_RNA (1)...(19): siRNA sense strand
gagaaagccuuagcacaag

SEQ ID NO: 476621 - RNA, 19 nt, Homo sapiens
  misc_RNA (1)...(19): siRNA sense strand
caucaaugacuuuaccaua

SEQ ID NO: 476622 - RNA, 19 nt, Homo sapiens
  misc_RNA (1)...(19): siRNA sense strand
gcagggagcauuccuugug

SEQ ID NO: 476623 - RNA, 19 nt, Homo sapiens
  misc_RNA (1)...(19): siRNA sense strand
ucuacacccugcaggauuu

SEQ ID NO: 476624 - RNA, 19 nt, Homo sapiens
  misc_RNA (1)...(19): siRNA sense strand
gcucaauggugccacauac

SEQ ID NO: 476625 - RNA, 19 nt, Homo sapiens
  misc_RNA (1)...(19): siRNA sense strand
cagggagcauuccuuguga

SEQ ID NO: 476626 - RNA, 19 nt, Homo sapiens
  misc_RNA (1)...(19): siRNA sense strand
cagaaagcuuaagaaauug

SEQ ID NO: 476627 - RNA, 19 nt, Homo sapiens
  misc_RNA (1)...(19): siRNA sense strand
gaaguucaaggcccugaga

SEQ ID NO: 476628 - RNA, 19 nt, Homo sapiens
  misc_RNA (1)...(19): siRNA sense strand
gcaaucucaacgaacauaa

SEQ ID NO: 476629 - RNA, 19 nt, Homo sapiens
  misc_RNA (1)...(19): siRNA sense strand
ucgcaucccagaaagcuua

SEQ ID NO: 476630 - RNA, 19 nt, Homo sapiens
  misc_RNA (1)...(19): siRNA sense strand
ggaggaacacguggcugua

SEQ ID NO: 476631 - RNA, 19 nt, Homo sapiens
  misc_RNA (1)...(19): siRNA sense strand
uggauucagcgucauauuu

SEQ ID NO: 476632 - RNA, 19 nt, Homo sapiens
  misc_RNA (1)...(19): siRNA sense strand
caaggaauucuuugucaca

SEQ ID NO: 476633 - RNA, 19 nt, Homo sapiens
  misc_RNA (1)...(19): siRNA sense strand
gauucagcgucauauuuua

SEQ ID NO: 476634 - RNA, 19 nt, Homo sapiens
  misc_RNA (1)...(19): siRNA sense strand
caucugcacuccucacacu

SEQ ID NO: 476635 - RNA, 19 nt, Homo sapiens
  misc_RNA (1)...(19): siRNA sense strand
caggguccguugaaagaug

SEQ ID NO: 476636 - RNA, 19 nt, Homo sapiens
  misc_RNA (1)...(19): siRNA sense strand
ggauucagcgucauauuuu

SEQ ID NO: 476637 - RNA, 19 nt, Homo sapiens
  misc_RNA (1)...(19): siRNA sense strand
agucagagcccuucagcuu

SEQ ID NO: 476638 - RNA, 19 nt, Homo sapiens
  misc_RNA (1)...(19): siRNA sense strand
gccacauccucaaccugua

SEQ ID NO: 476639 - RNA, 19 nt, Homo sapiens
  misc_RNA (1)...(19): siRNA sense strand
ucagcgccuuggucaguaa

SEQ ID NO: 476640 - RNA, 19 nt, Homo sapiens
  misc_RNA (1)...(19): siRNA sense strand
gguggacgagaaagccuua

SEQ ID NO: 476641 - RNA, 19 nt, Homo sapiens
  misc_RNA (1)...(19): siRNA sense strand
ggacgagaaagccuuagca

SEQ ID NO: 476642 - RNA, 19 nt, Homo sapiens
  misc_RNA (1)...(19): siRNA sense strand
gcaggcgguugcaguucga

SEQ ID NO: 476643 - RNA, 19 nt, Homo sapiens
  misc_RNA (1)...(19): siRNA sense strand
acaggucgcaucccagaaa

SEQ ID NO: 476644 - RNA, 19 nt, Homo sapiens
  misc_RNA (1)...(19): siRNA sense strand
gaaggcacgcggguucaga

SEQ ID NO: 476645 - RNA, 19 nt, Homo sapiens
  misc_RNA (1)...(19): siRNA sense strand
ugcaggauuugcuguauca

SEQ ID NO: 476646 - RNA, 19 nt, Homo sapiens
  misc_RNA (1)...(19): siRNA sense strand
gaugaggcagggagcauuc

SEQ ID NO: 476647 - RNA, 19 nt, Homo sapiens
  misc_RNA (1)...(19): siRNA sense strand
gagauccgccgagccauca

SEQ ID NO: 476648 - RNA, 19 nt, Homo sapiens
  misc_RNA (1)...(19): siRNA sense strand
gucagagcccuucagcuuu

SEQ ID NO: 476649 - RNA, 19 nt, Homo sapiens
  misc_RNA (1)...(19): siRNA sense strand
uaaccaccaccucaucaau

SEQ ID NO: 476650 - RNA, 19 nt, Homo sapiens
  misc_RNA (1)...(19): siRNA sense strand
gagagugaucgugcggaua

SEQ ID NO: 476651 - RNA, 19 nt, Homo sapiens
  misc_RNA (1)...(19): siRNA sense strand
ucaaggcccugagagugau

SEQ ID NO: 476652 - RNA, 19 nt, Homo sapiens
  misc_RNA (1)...(19): siRNA sense strand
caauggugccacauacaga

SEQ ID NO: 476653 - RNA, 19 nt, Homo sapiens
  misc_RNA (1)...(19): siRNA sense strand
gcgccuuggucaguaauag

SEQ ID NO: 476654 - RNA, 19 nt, Homo sapiens
  misc_RNA (1)...(19): siRNA sense strand
gcucaggguccguugaaag

SEQ ID NO: 476655 - RNA, 19 nt, Homo sapiens
  misc_RNA (1)...(19): siRNA sense strand
uagcacaagcccucaagga

SEQ ID NO: 476656 - RNA, 19 nt, Homo sapiens
  misc_RNA (1)...(19): siRNA sense strand
cauaaccaccaccucauca

SEQ ID NO: 476657 - RNA, 19 nt, Homo sapiens
  misc_RNA (1)...(19): siRNA sense strand
caucagcgccuuggucagu

SEQ ID NO: 476658 - RNA, 19 nt, Homo sapiens
  misc_RNA (1)...(19): siRNA sense strand
ucccagaaagcuuaagaaa

SEQ ID NO: 476659 - RNA, 19 nt, Homo sapiens
  misc_RNA (1)...(19): siRNA sense strand
acugcaaucucaacgaaca

SEQ ID NO: 476660 - RNA, 19 nt, Homo sapiens
  misc_RNA (1)...(19): siRNA sense strand
agagugaucgugcggauag

SEQ ID NO: 476661 - RNA, 19 nt, Homo sapiens
  misc_RNA (1)...(19): siRNA sense strand
gagacgcugggccucauug

SEQ ID NO: 476662 - RNA, 19 nt, Homo sapiens
  misc_RNA (1)...(19): siRNA sense strand
ggagacgcugggccucauu

SEQ ID NO: 476663 - RNA, 19 nt, Homo sapiens
  misc_RNA (1)...(19): siRNA sense strand
acagcggacucuaccaucu

SEQ ID NO: 476664 - RNA, 19 nt, Homo sapiens
  misc_RNA (1)...(19): siRNA sense strand
cccagaaagcuuaagaaau

SEQ ID NO: 476665 - RNA, 19 nt, Homo sapiens
  misc_RNA (1)...(19): siRNA sense strand
guugaaagaugccccgaau

SEQ ID NO: 476666 - RNA, 19 nt, Homo sapiens
  misc_RNA (1)...(19): siRNA sense strand
ccagaaagcuuaagaaauu

SEQ ID NO: 476667 - RNA, 19 nt, Homo sapiens
  misc_RNA (1)...(19): siRNA sense strand
gggaggaccuggagaaguu

SEQ ID NO: 476668 - RNA, 19 nt, Homo sapiens
  misc_RNA (1)...(19): siRNA sense strand
gcacugcaaucucaacgaa

SEQ ID NO: 476669 - RNA, 19 nt, Homo sapiens
  misc_RNA (1)...(19): siRNA sense strand
ggaauucuuugucacauca

SEQ ID NO: 476670 - RNA, 19 nt, Homo sapiens
  misc_RNA (1)...(19): siRNA sense strand
cgagaaagccuuagcacaa

SEQ ID NO: 476671 - RNA, 19 nt, Homo sapiens
  misc_RNA (1)...(19): siRNA sense strand
ugaaggaccuggccacugu

SEQ ID NO: 476672 - RNA, 19 nt, Homo sapiens
  misc_RNA (1)...(19): siRNA sense strand
ucagagcccuucagcuuug

SEQ ID NO: 476673 - RNA, 19 nt, Homo sapiens
  misc_RNA (1)...(19): siRNA sense strand
gagaaagccuuagcacaag

SEQ ID NO: 476674 - RNA, 19 nt, Homo sapiens
  misc_RNA (1)...(19): siRNA sense strand
caucaaugacuuuaccaua

SEQ ID NO: 476675 - RNA, 19 nt, Homo sapiens
  misc_RNA (1)...(19): siRNA sense strand
gcagggagcauuccuugug

SEQ ID NO: 476676 - RNA, 19 nt, Homo sapiens
  misc_RNA (1)...(19): siRNA sense strand
ggaaauccacgagaagguu

SEQ ID NO: 476677 - RNA, 19 nt, Homo sapiens
  misc_RNA (1)...(19): siRNA sense strand
ucuacacccugcaggauuu

SEQ ID NO: 476678 - RNA, 19 nt, Homo sapiens
  misc_RNA (1)...(19): siRNA sense strand
gcucaauggugccacauac

SEQ ID NO: 476679 - RNA, 19 nt, Homo sapiens
  misc_RNA (1)...(19): siRNA sense strand
cagggagcauuccuuguga

SEQ ID NO: 476680 - RNA, 19 nt, Homo sapiens
  misc_RNA (1)...(19): siRNA sense strand
cagaaagcuuaagaaauug

SEQ ID NO: 476681 - RNA, 19 nt, Homo sapiens
  misc_RNA (1)...(19): siRNA sense strand
gaaguucaaggcccugaga

SEQ ID NO: 476682 - RNA, 19 nt, Homo sapiens
  misc_RNA (1)...(19): siRNA sense strand
gcaaucucaacgaacauaa

SEQ ID NO: 476683 - RNA, 19 nt, Homo sapiens
  misc_RNA (1)...(19): siRNA sense strand
ucgcaucccagaaagcuua

SEQ ID NO: 476684 - RNA, 19 nt, Homo sapiens
  misc_RNA (1)...(19): siRNA sense strand
ggaggaacacguggcugua

SEQ ID NO: 476685 - RNA, 19 nt, Homo sapiens
  misc_RNA (1)...(19): siRNA sense strand
uggauucagcgucauauuu

SEQ ID NO: 476686 - RNA, 19 nt, Homo sapiens
  misc_RNA (1)...(19): siRNA sense strand
caaggaauucuuugucaca

SEQ ID NO: 476687 - RNA, 19 nt, Homo sapiens
  misc_RNA (1)...(19): siRNA sense strand
gauucagcgucauauuuua

SEQ ID NO: 476688 - RNA, 19 nt, Homo sapiens
  misc_RNA (1)...(19): siRNA sense strand
caucugcacuccucacacu

SEQ ID NO: 476689 - RNA, 19 nt, Homo sapiens
  misc_RNA (1)...(19): siRNA sense strand
caggguccguugaaagaug

SEQ ID NO: 476690 - RNA, 19 nt, Homo sapiens
  misc_RNA (1)...(19): siRNA sense strand
ggauucagcgucauauuuu

SEQ ID NO: 476691 - RNA, 19 nt, Homo sapiens
  misc_RNA (1)...(19): siRNA sense strand
agucagagcccuucagcuu

SEQ ID NO: 476692 - RNA, 19 nt, Homo sapiens
  misc_RNA (1)...(19): siRNA sense strand
gccacauccucaaccugua

SEQ ID NO: 476693 - RNA, 19 nt, Homo sapiens
  misc_RNA (1)...(19): siRNA sense strand
ucagcgccuuggucaguaa

SEQ ID NO: 476694 - RNA, 19 nt, Homo sapiens
  misc_RNA (1)...(19): siRNA sense strand
gguggacgagaaagccuua

SEQ ID NO: 476695 - RNA, 19 nt, Homo sapiens
  misc_RNA (1)...(19): siRNA sense strand
gcaggaaauccacgagaag

SEQ ID NO: 476696 - RNA, 19 nt, Homo sapiens
  misc_RNA (1)...(19): siRNA sense strand
ggacgagaaagccuuagca

SEQ ID NO: 476697 - RNA, 19 nt, Homo sapiens
  misc_RNA (1)...(19): siRNA sense strand
gcaggcgguugcaguucga

SEQ ID NO: 476698 - RNA, 19 nt, Homo sapiens
  misc_RNA (1)...(19): siRNA sense strand
acaggucgcaucccagaaa

SEQ ID NO: 476699 - RNA, 19 nt, Homo sapiens
  misc_RNA (1)...(19): siRNA sense strand
gaaggcacgcggguucaga

SEQ ID NO: 476700 - RNA, 19 nt, Homo sapiens
  misc_RNA (1)...(19): siRNA sense strand
ugcaggauuugcuguauca

SEQ ID NO: 476701 - RNA, 19 nt, Homo sapiens
  misc_RNA (1)...(19): siRNA sense strand
gaugaggcagggagcauuc

SEQ ID NO: 476702 - RNA, 19 nt, Homo sapiens
  misc_RNA (1)...(19): siRNA sense strand
gagauccgccgagccauca

SEQ ID NO: 476703 - RNA, 19 nt, Homo sapiens
  misc_RNA (1)...(19): siRNA sense strand
gucagagcccuucagcuuu

SEQ ID NO: 476704 - RNA, 19 nt, Homo sapiens
  misc_RNA (1)...(19): siRNA sense strand
uaaccaccaccucaucaau

SEQ ID NO: 476705 - RNA, 19 nt, Homo sapiens
  misc_RNA (1)...(19): siRNA sense strand
gagagugaucgugcggaua

SEQ ID NO: 476706 - RNA, 19 nt, Homo sapiens
  misc_RNA (1)...(19): siRNA sense strand
ucaaggcccugagagugau

SEQ ID NO: 476707 - RNA, 19 nt, Homo sapiens
  misc_RNA (1)...(19): siRNA sense strand
caauggugccacauacaga

SEQ ID NO: 476708 - RNA, 19 nt, Homo sapiens
  misc_RNA (1)...(19): siRNA sense strand
gcgccuuggucaguaauag

SEQ ID NO: 476709 - RNA, 19 nt, Homo sapiens
  misc_RNA (1)...(19): siRNA sense strand
gcucaggguccguugaaag

SEQ ID NO: 476710 - RNA, 19 nt, Homo sapiens
  misc_RNA (1)...(19): siRNA sense strand
uagcacaagcccucaagga

SEQ ID NO: 476711 - RNA, 19 nt, Homo sapiens
  misc_RNA (1)...(19): siRNA sense strand
cauaaccaccaccucauca

SEQ ID NO: 476712 - RNA, 19 nt, Homo sapiens
  misc_RNA (1)...(19): siRNA sense strand
caucagcgccuuggucagu

SEQ ID NO: 476713 - RNA, 19 nt, Homo sapiens
  misc_RNA (1)...(19): siRNA sense strand
ucccagaaagcuuaagaaa

SEQ ID NO: 476714 - RNA, 19 nt, Homo sapiens
  misc_RNA (1)...(19): siRNA sense strand
acugcaaucucaacgaaca

SEQ ID NO: 476715 - RNA, 19 nt, Homo sapiens
  misc_RNA (1)...(19): siRNA sense strand
agagugaucgugcggauag

SEQ ID NO: 476716 - RNA, 19 nt, Homo sapiens
  misc_RNA (1)...(19): siRNA sense strand
gagacgcugggccucauug

SEQ ID NO: 476717 - RNA, 19 nt, Homo sapiens
  misc_RNA (1)...(19): siRNA sense strand
ggagacgcugggccucauu

SEQ ID NO: 476718 - RNA, 19 nt, Homo sapiens
  misc_RNA (1)...(19): siRNA sense strand
acagcggacucuaccaucu

SEQ ID NO: 476719 - RNA, 19 nt, Homo sapiens
  misc_RNA (1)...(19): siRNA sense strand
cccagaaagcuuaagaaau

SEQ ID NO: 476720 - RNA, 19 nt, Homo sapiens
  misc_RNA (1)...(19): siRNA sense strand
guugaaagaugccccgaau

SEQ ID NO: 476721 - RNA, 19 nt, Homo sapiens
  misc_RNA (1)...(19): siRNA sense strand
gugaagacccgguauauga

SEQ ID NO: 476722 - RNA, 19 nt, Homo sapiens
  misc_RNA (1)...(19): siRNA sense strand
ggaaugcuaucgucaacug

SEQ ID NO: 476723 - RNA, 19 nt, Homo sapiens
  misc_RNA (1)...(19): siRNA sense strand
aggagaagcugcuggacua

SEQ ID NO: 476724 - RNA, 19 nt, Homo sapiens
  misc_RNA (1)...(19): siRNA sense strand
gaacuuugcccaacaucau

SEQ ID NO: 476725 - RNA, 19 nt, Homo sapiens
  misc_RNA (1)...(19): siRNA sense strand
caccauggcugugaaguuc

SEQ ID NO: 476726 - RNA, 19 nt, Homo sapiens
  misc_RNA (1)...(19): siRNA sense strand
gaggaaugcuaucgucaac

SEQ ID NO: 476727 - RNA, 19 nt, Homo sapiens
  misc_RNA (1)...(19): siRNA sense strand
ggacaacuccagccucacu

SEQ ID NO: 476728 - RNA, 19 nt, Homo sapiens
  misc_RNA (1)...(19): siRNA sense strand
ugaagacccgguauaugaa

SEQ ID NO: 476729 - RNA, 19 nt, Homo sapiens
  misc_RNA (1)...(19): siRNA sense strand
caacuuccccugccacuuu

SEQ ID NO: 476730 - RNA, 19 nt, Homo sapiens
  misc_RNA (1)...(19): siRNA sense strand
uugcugaccucguuaccuu

SEQ ID NO: 476731 - RNA, 19 nt, Homo sapiens
  misc_RNA (1)...(19): siRNA sense strand
gaaaauacagcgggacuau

SEQ ID NO: 476732 - RNA, 19 nt, Homo sapiens
  misc_RNA (1)...(19): siRNA sense strand
ccacuuugucucugccuuu

SEQ ID NO: 476733 - RNA, 19 nt, Homo sapiens
  misc_RNA (1)...(19): siRNA sense strand
cagccucacuacccggauu

SEQ ID NO: 476734 - RNA, 19 nt, Homo sapiens
  misc_RNA (1)...(19): siRNA sense strand
aaauacagcgggacuaugg

SEQ ID NO: 476735 - RNA, 19 nt, Homo sapiens
  misc_RNA (1)...(19): siRNA sense strand
gacuauggacgccuacaga

SEQ ID NO: 476736 - RNA, 19 nt, Homo sapiens
  misc_RNA (1)...(19): siRNA sense strand
ggaacuuugcccaacauca

SEQ ID NO: 476737 - RNA, 19 nt, Homo sapiens
  misc_RNA (1)...(19): siRNA sense strand
ccugcucacugacaacuuc

SEQ ID NO: 476738 - RNA, 19 nt, Homo sapiens
  misc_RNA (1)...(19): siRNA sense strand
ccaccauggcugugaaguu

SEQ ID NO: 476739 - RNA, 19 nt, Homo sapiens
  misc_RNA (1)...(19): siRNA sense strand
ggugaagacccgguauaug

SEQ ID NO: 476740 - RNA, 19 nt, Homo sapiens
  misc_RNA (1)...(19): siRNA sense strand
ucgacuguaugauaaagau

SEQ ID NO: 476741 - RNA, 19 nt, Homo sapiens
  misc_RNA (1)...(19): siRNA sense strand
gaagacccgguauaugaac

SEQ ID NO: 476742 - RNA, 19 nt, Homo sapiens
  misc_RNA (1)...(19): siRNA sense strand
ugaccauggugcggacuga

SEQ ID NO: 476743 - RNA, 19 nt, Homo sapiens
  misc_RNA (1)...(19): siRNA sense strand
gguggugaccuacgacauc

SEQ ID NO: 476744 - RNA, 19 nt, Homo sapiens
  misc_RNA (1)...(19): siRNA sense strand
guggugaagacccgguaua

SEQ ID NO: 476745 - RNA, 19 nt, Homo sapiens
  misc_RNA (1)...(19): siRNA sense strand
cauccaggagcgacagaaa

SEQ ID NO: 476746 - RNA, 19 nt, Homo sapiens
  misc_RNA (1)...(19): siRNA sense strand
ugaggaaugcuaucgucaa

SEQ ID NO: 476747 - RNA, 19 nt, Homo sapiens
  misc_RNA (1)...(19): siRNA sense strand
ugcccaacaucaugaggaa

SEQ ID NO: 476748 - RNA, 19 nt, Homo sapiens
  misc_RNA (1)...(19): siRNA sense strand
gacaacuccagccucacua

SEQ ID NO: 476749 - RNA, 19 nt, Homo sapiens
  misc_RNA (1)...(19): siRNA sense strand
gugcccagcccacagaugu

SEQ ID NO: 476750 - RNA, 19 nt, Homo sapiens
  misc_RNA (1)...(19): siRNA sense strand
gugaagacccgguauauga

SEQ ID NO: 476751 - RNA, 19 nt, Homo sapiens
  misc_RNA (1)...(19): siRNA sense strand
ggaaugcuaucgucaacug

SEQ ID NO: 476752 - RNA, 19 nt, Homo sapiens
  misc_RNA (1)...(19): siRNA sense strand
aggagaagcugcuggacua

SEQ ID NO: 476753 - RNA, 19 nt, Homo sapiens
  misc_RNA (1)...(19): siRNA sense strand
gaacuuugcccaacaucau

SEQ ID NO: 476754 - RNA, 19 nt, Homo sapiens
  misc_RNA (1)...(19): siRNA sense strand
caccauggcugugaaguuc

SEQ ID NO: 476755 - RNA, 19 nt, Homo sapiens
  misc_RNA (1)...(19): siRNA sense strand
gaggaaugcuaucgucaac

SEQ ID NO: 476756 - RNA, 19 nt, Homo sapiens
  misc_RNA (1)...(19): siRNA sense strand
ggacaacuccagccucacu

SEQ ID NO: 476757 - RNA, 19 nt, Homo sapiens
  misc_RNA (1)...(19): siRNA sense strand
ugaagacccgguauaugaa

SEQ ID NO: 476758 - RNA, 19 nt, Homo sapiens
  misc_RNA (1)...(19): siRNA sense strand
caacuuccccugccacuuu

SEQ ID NO: 476759 - RNA, 19 nt, Homo sapiens
  misc_RNA (1)...(19): siRNA sense strand
uugcugaccucguuaccuu

SEQ ID NO: 476760 - RNA, 19 nt, Homo sapiens
  misc_RNA (1)...(19): siRNA sense strand
gaaaauacagcgggacuau

SEQ ID NO: 476761 - RNA, 19 nt, Homo sapiens
  misc_RNA (1)...(19): siRNA sense strand
ccacuuugucucugccuuu

SEQ ID NO: 476762 - RNA, 19 nt, Homo sapiens
  misc_RNA (1)...(19): siRNA sense strand
cagccucacuacccggauu

SEQ ID NO: 476763 - RNA, 19 nt, Homo sapiens
  misc_RNA (1)...(19): siRNA sense strand
aaauacagcgggacuaugg

SEQ ID NO: 476764 - RNA, 19 nt, Homo sapiens
  misc_RNA (1)...(19): siRNA sense strand
gacuauggacgccuacaga

SEQ ID NO: 476765 - RNA, 19 nt, Homo sapiens
  misc_RNA (1)...(19): siRNA sense strand
ggaacuuugcccaacauca

SEQ ID NO: 476766 - RNA, 19 nt, Homo sapiens
  misc_RNA (1)...(19): siRNA sense strand
ccugcucacugacaacuuc

SEQ ID NO: 476767 - RNA, 19 nt, Homo sapiens
  misc_RNA (1)...(19): siRNA sense strand
ccaccauggcugugaaguu

SEQ ID NO: 476768 - RNA, 19 nt, Homo sapiens
  misc_RNA (1)...(19): siRNA sense strand
ggugaagacccgguauaug

SEQ ID NO: 476769 - RNA, 19 nt, Homo sapiens
  misc_RNA (1)...(19): siRNA sense strand
ucgacuguaugauaaagau

SEQ ID NO: 476770 - RNA, 19 nt, Homo sapiens
  misc_RNA (1)...(19): siRNA sense strand
gaagacccgguauaugaac

SEQ ID NO: 476771 - RNA, 19 nt, Homo sapiens
  misc_RNA (1)...(19): siRNA sense strand
ugaccauggugcggacuga

SEQ ID NO: 476772 - RNA, 19 nt, Homo sapiens
  misc_RNA (1)...(19): siRNA sense strand
gguggugaccuacgacauc

SEQ ID NO: 476773 - RNA, 19 nt, Homo sapiens
  misc_RNA (1)...(19): siRNA sense strand
guggugaagacccgguaua

SEQ ID NO: 476774 - RNA, 19 nt, Homo sapiens
  misc_RNA (1)...(19): siRNA sense strand
cauccaggagcgacagaaa

SEQ ID NO: 476775 - RNA, 19 nt, Homo sapiens
  misc_RNA (1)...(19): siRNA sense strand
ugaggaaugcuaucgucaa

SEQ ID NO: 476776 - RNA, 19 nt, Homo sapiens
  misc_RNA (1)...(19): siRNA sense strand
ugcccaacaucaugaggaa

SEQ ID NO: 476777 - RNA, 19 nt, Homo sapiens
  misc_RNA (1)...(19): siRNA sense strand
gacaacuccagccucacua

SEQ ID NO: 476778 - RNA, 19 nt, Homo sapiens
  misc_RNA (1)...(19): siRNA sense strand
gugcccagcccacagaugu

SEQ ID NO: 476779 - RNA, 19 nt, Homo sapiens
  misc_RNA (1)...(19): siRNA sense strand
gugaagacccgguauauga

SEQ ID NO: 476780 - RNA, 19 nt, Homo sapiens
  misc_RNA (1)...(19): siRNA sense strand
ggaaugcuaucgucaacug

SEQ ID NO: 476781 - RNA, 19 nt, Homo sapiens
  misc_RNA (1)...(19): siRNA sense strand
aggagaagcugcuggacua

SEQ ID NO: 476782 - RNA, 19 nt, Homo sapiens
  misc_RNA (1)...(19): siRNA sense strand
gaacuuugcccaacaucau

SEQ ID NO: 476783 - RNA, 19 nt, Homo sapiens
  misc_RNA (1)...(19): siRNA sense strand
caccauggcugugaaguuc

SEQ ID NO: 476784 - RNA, 19 nt, Homo sapiens
  misc_RNA (1)...(19): siRNA sense strand
gaggaaugcuaucgucaac

SEQ ID NO: 476785 - RNA, 19 nt, Homo sapiens
  misc_RNA (1)...(19): siRNA sense strand
ggacaacuccagccucacu

SEQ ID NO: 476786 - RNA, 19 nt, Homo sapiens
  misc_RNA (1)...(19): siRNA sense strand
ugaagacccgguauaugaa

SEQ ID NO: 476787 - RNA, 19 nt, Homo sapiens
  misc_RNA (1)...(19): siRNA sense strand
caacuuccccugccacuuu

SEQ ID NO: 476788 - RNA, 19 nt, Homo sapiens
  misc_RNA (1)...(19): siRNA sense strand
uugcugaccucguuaccuu

SEQ ID NO: 476789 - RNA, 19 nt, Homo sapiens
  misc_RNA (1)...(19): siRNA sense strand
gaaaauacagcgggacuau

SEQ ID NO: 476790 - RNA, 19 nt, Homo sapiens
  misc_RNA (1)...(19): siRNA sense strand
ccacuuugucucugccuuu

SEQ ID NO: 476791 - RNA, 19 nt, Homo sapiens
  misc_RNA (1)...(19): siRNA sense strand
cagccucacuacccggauu

SEQ ID NO: 476792 - RNA, 19 nt, Homo sapiens
  misc_RNA (1)...(19): siRNA sense strand
aaauacagcgggacuaugg

SEQ ID NO: 476793 - RNA, 19 nt, Homo sapiens
  misc_RNA (1)...(19): siRNA sense strand
gacuauggacgccuacaga

SEQ ID NO: 476794 - RNA, 19 nt, Homo sapiens
  misc_RNA (1)...(19): siRNA sense strand
ggaacuuugcccaacauca

SEQ ID NO: 476795 - RNA, 19 nt, Homo sapiens
  misc_RNA (1)...(19): siRNA sense strand
ccugcucacugacaacuuc

SEQ ID NO: 476796 - RNA, 19 nt, Homo sapiens
  misc_RNA (1)...(19): siRNA sense strand
ccaccauggcugugaaguu

SEQ ID NO: 476797 - RNA, 19 nt, Homo sapiens
  misc_RNA (1)...(19): siRNA sense strand
ggugaagacccgguauaug

SEQ ID NO: 476798 - RNA, 19 nt, Homo sapiens
  misc_RNA (1)...(19): siRNA sense strand
ucgacuguaugauaaagau

SEQ ID NO: 476799 - RNA, 19 nt, Homo sapiens
  misc_RNA (1)...(19): siRNA sense strand
gaagacccgguauaugaac

SEQ ID NO: 476800 - RNA, 19 nt, Homo sapiens
  misc_RNA (1)...(19): siRNA sense strand
ugaccauggugcggacuga

SEQ ID NO: 476801 - RNA, 19 nt, Homo sapiens
  misc_RNA (1)...(19): siRNA sense strand
gguggugaccuacgacauc

SEQ ID NO: 476802 - RNA, 19 nt, Homo sapiens
  misc_RNA (1)...(19): siRNA sense strand
guggugaagacccgguaua

SEQ ID NO: 476803 - RNA, 19 nt, Homo sapiens
  misc_RNA (1)...(19): siRNA sense strand
cauccaggagcgacagaaa

SEQ ID NO: 476804 - RNA, 19 nt, Homo sapiens
  misc_RNA (1)...(19): siRNA sense strand
ugaggaaugcuaucgucaa

SEQ ID NO: 476805 - RNA, 19 nt, Homo sapiens
  misc_RNA (1)...(19): siRNA sense strand
ugcccaacaucaugaggaa

SEQ ID NO: 476806 - RNA, 19 nt, Homo sapiens
  misc_RNA (1)...(19): siRNA sense strand
gacaacuccagccucacua

SEQ ID NO: 476807 - RNA, 19 nt, Homo sapiens
  misc_RNA (1)...(19): siRNA sense strand
gugcccagcccacagaugu

SEQ ID NO: 476808 - RNA, 19 nt, Homo sapiens
  misc_RNA (1)...(19): siRNA sense strand
gugaagacccgguauauga

SEQ ID NO: 476809 - RNA, 19 nt, Homo sapiens
  misc_RNA (1)...(19): siRNA sense strand
ggaaugcuaucgucaacug

SEQ ID NO: 476810 - RNA, 19 nt, Homo sapiens
  misc_RNA (1)...(19): siRNA sense strand
aggagaagcugcuggacua

SEQ ID NO: 476811 - RNA, 19 nt, Homo sapiens
  misc_RNA (1)...(19): siRNA sense strand
gaacuuugcccaacaucau

SEQ ID NO: 476812 - RNA, 19 nt, Homo sapiens
  misc_RNA (1)...(19): siRNA sense strand
caccauggcugugaaguuc

SEQ ID NO: 476813 - RNA, 19 nt, Homo sapiens
  misc_RNA (1)...(19): siRNA sense strand
gaggaaugcuaucgucaac

SEQ ID NO: 476814 - RNA, 19 nt, Homo sapiens
  misc_RNA (1)...(19): siRNA sense strand
ggacaacuccagccucacu

SEQ ID NO: 476815 - RNA, 19 nt, Homo sapiens
  misc_RNA (1)...(19): siRNA sense strand
ugaagacccgguauaugaa

SEQ ID NO: 476816 - RNA, 19 nt, Homo sapiens
  misc_RNA (1)...(19): siRNA sense strand
caacuuccccugccacuuu

SEQ ID NO: 476817 - RNA, 19 nt, Homo sapiens
  misc_RNA (1)...(19): siRNA sense strand
uugcugaccucguuaccuu

SEQ ID NO: 476818 - RNA, 19 nt, Homo sapiens
  misc_RNA (1)...(19): siRNA sense strand
gaaaauacagcgggacuau

SEQ ID NO: 476819 - RNA, 19 nt, Homo sapiens
  misc_RNA (1)...(19): siRNA sense strand
ccacuuugucucugccuuu

SEQ ID NO: 476820 - RNA, 19 nt, Homo sapiens
  misc_RNA (1)...(19): siRNA sense strand
cagccucacuacccggauu

SEQ ID NO: 476821 - RNA, 19 nt, Homo sapiens
  misc_RNA (1)...(19): siRNA sense strand
aaauacagcgggacuaugg

SEQ ID NO: 476822 - RNA, 19 nt, Homo sapiens
  misc_RNA (1)...(19): siRNA sense strand
gacuauggacgccuacaga

SEQ ID NO: 476823 - RNA, 19 nt, Homo sapiens
  misc_RNA (1)...(19): siRNA sense strand
ggaacuuugcccaacauca

SEQ ID NO: 476824 - RNA, 19 nt, Homo sapiens
  misc_RNA (1)...(19): siRNA sense strand
ccugcucacugacaacuuc

SEQ ID NO: 476825 - RNA, 19 nt, Homo sapiens
  misc_RNA (1)...(19): siRNA sense strand
ccaccauggcugugaaguu

SEQ ID NO: 476826 - RNA, 19 nt, Homo sapiens
  misc_RNA (1)...(19): siRNA sense strand
ggugaagacccgguauaug

SEQ ID NO: 476827 - RNA, 19 nt, Homo sapiens
  misc_RNA (1)...(19): siRNA sense strand
ucgacuguaugauaaagau

SEQ ID NO: 476828 - RNA, 19 nt, Homo sapiens
  misc_RNA (1)...(19): siRNA sense strand
gaagacccgguauaugaac

SEQ ID NO: 476829 - RNA, 19 nt, Homo sapiens
  misc_RNA (1)...(19): siRNA sense strand
ugaccauggugcggacuga

SEQ ID NO: 476830 - RNA, 19 nt, Homo sapiens
  misc_RNA (1)...(19): siRNA sense strand
gguggugaccuacgacauc

SEQ ID NO: 476831 - RNA, 19 nt, Homo sapiens
  misc_RNA (1)...(19): siRNA sense strand
guggugaagacccgguaua

SEQ ID NO: 476832 - RNA, 19 nt, Homo sapiens
  misc_RNA (1)...(19): siRNA sense strand
cauccaggagcgacagaaa

SEQ ID NO: 476833 - RNA, 19 nt, Homo sapiens
  misc_RNA (1)...(19): siRNA sense strand
ugaggaaugcuaucgucaa

SEQ ID NO: 476834 - RNA, 19 nt, Homo sapiens
  misc_RNA (1)...(19): siRNA sense strand
ugcccaacaucaugaggaa

SEQ ID NO: 476835 - RNA, 19 nt, Homo sapiens
  misc_RNA (1)...(19): siRNA sense strand
gacaacuccagccucacua

SEQ ID NO: 476836 - RNA, 19 nt, Homo sapiens
  misc_RNA (1)...(19): siRNA sense strand
gugcccagcccacagaugu

SEQ ID NO: 476837 - RNA, 19 nt, Homo sapiens
  misc_RNA (1)...(19): siRNA sense strand
gaacaaggacaucuuugaa

SEQ ID NO: 476838 - RNA, 19 nt, Homo sapiens
  misc_RNA (1)...(19): siRNA sense strand
gccaucacauaucgaauua

SEQ ID NO: 476839 - RNA, 19 nt, Homo sapiens
  misc_RNA (1)...(19): siRNA sense strand
caacgugacuccugauuac

SEQ ID NO: 476840 - RNA, 19 nt, Homo sapiens
  misc_RNA (1)...(19): siRNA sense strand
ggacaucuuugaaguagag

SEQ ID NO: 476841 - RNA, 19 nt, Homo sapiens
  misc_RNA (1)...(19): siRNA sense strand
gaggagaacacaaauguca

SEQ ID NO: 476842 - RNA, 19 nt, Homo sapiens
  misc_RNA (1)...(19): siRNA sense strand
gcccaguacugcucuguga

SEQ ID NO: 476843 - RNA, 19 nt, Homo sapiens
  misc_RNA (1)...(19): siRNA sense strand
caaggacaucuuugaagua

SEQ ID NO: 476844 - RNA, 19 nt, Homo sapiens
  misc_RNA (1)...(19): siRNA sense strand
acaaggacaucuuugaagu

SEQ ID NO: 476845 - RNA, 19 nt, Homo sapiens
  misc_RNA (1)...(19): siRNA sense strand
gaggaggacacgaaaguga

SEQ ID NO: 476846 - RNA, 19 nt, Homo sapiens
  misc_RNA (1)...(19): siRNA sense strand
caacucggccaucacauau

SEQ ID NO: 476847 - RNA, 19 nt, Homo sapiens
  misc_RNA (1)...(19): siRNA sense strand
guacugcucugugaacaag

SEQ ID NO: 476848 - RNA, 19 nt, Homo sapiens
  misc_RNA (1)...(19): siRNA sense strand
ucaacucggccaucacaua

SEQ ID NO: 476849 - RNA, 19 nt, Homo sapiens
  misc_RNA (1)...(19): siRNA sense strand
ucaacgugacuccugauua

SEQ ID NO: 476850 - RNA, 19 nt, Homo sapiens
  misc_RNA (1)...(19): siRNA sense strand
ucacauaucgaauuaccaa

SEQ ID NO: 476851 - RNA, 19 nt, Homo sapiens
  misc_RNA (1)...(19): siRNA sense strand
caucaucuacagcaucuuu

SEQ ID NO: 476852 - RNA, 19 nt, Homo sapiens
  misc_RNA (1)...(19): siRNA sense strand
ugaacaaggacaucuuuga

SEQ ID NO: 476853 - RNA, 19 nt, Homo sapiens
  misc_RNA (1)...(19): siRNA sense strand
ggccaucacauaucgaauu

SEQ ID NO: 476854 - RNA, 19 nt, Homo sapiens
  misc_RNA (1)...(19): siRNA sense strand
ucaaccagcccaucaucua

SEQ ID NO: 476855 - RNA, 19 nt, Homo sapiens
  misc_RNA (1)...(19): siRNA sense strand
gaccucaacucggccauca

SEQ ID NO: 476856 - RNA, 19 nt, Homo sapiens
  misc_RNA (1)...(19): siRNA sense strand
uagaggagaacacaaaugu

SEQ ID NO: 476857 - RNA, 19 nt, Homo sapiens
  misc_RNA (1)...(19): siRNA sense strand
ggacgacauucuguucuac

SEQ ID NO: 476858 - RNA, 19 nt, Homo sapiens
  misc_RNA (1)...(19): siRNA sense strand
cgacaaggacgacauucug

SEQ ID NO: 476859 - RNA, 19 nt, Homo sapiens
  misc_RNA (1)...(19): siRNA sense strand
caaggacgacauucuguuc

SEQ ID NO: 476860 - RNA, 19 nt, Homo sapiens
  misc_RNA (1)...(19): siRNA sense strand
aaggacaucuuugaaguag

SEQ ID NO: 476861 - RNA, 19 nt, Homo sapiens
  misc_RNA (1)...(19): siRNA sense strand
ggccgaacaugaccuucug

SEQ ID NO: 476862 - RNA, 19 nt, Homo sapiens
  misc_RNA (1)...(19): siRNA sense strand
guucuacacccuccaggaa

SEQ ID NO: 476863 - RNA, 19 nt, Homo sapiens
  misc_RNA (1)...(19): siRNA sense strand
ugacagcaggugccaguga

SEQ ID NO: 476864 - RNA, 19 nt, Homo sapiens
  misc_RNA (1)...(19): siRNA sense strand
guagaggagaacacaaaug

SEQ ID NO: 476865 - RNA, 19 nt, Homo sapiens
  misc_RNA (1)...(19): siRNA sense strand
aggacgacauucuguucua

SEQ ID NO: 476866 - RNA, 19 nt, Homo sapiens
  misc_RNA (1)...(19): siRNA sense strand
ugucagugcuggacgucaa

SEQ ID NO: 476867 - RNA, 19 nt, Homo sapiens
  misc_RNA (1)...(19): siRNA sense strand
ucagagcggaggcacauug

SEQ ID NO: 476868 - RNA, 19 nt, Homo sapiens
  misc_RNA (1)...(19): siRNA sense strand
gaaguagaggagaacacaa

SEQ ID NO: 476869 - RNA, 19 nt, Homo sapiens
  misc_RNA (1)...(19): siRNA sense strand
gcuaaggguguucguguca

SEQ ID NO: 476870 - RNA, 19 nt, Homo sapiens
  misc_RNA (1)...(19): siRNA sense strand
gacaaggacgacauucugu

SEQ ID NO: 476871 - RNA, 19 nt, Homo sapiens
  misc_RNA (1)...(19): siRNA sense strand
ucuacacccuccaggaaau

SEQ ID NO: 476872 - RNA, 19 nt, Homo sapiens
  misc_RNA (1)...(19): siRNA sense strand
gaauuaccaaccacucaca

SEQ ID NO: 476873 - RNA, 19 nt, Homo sapiens
  misc_RNA (1)...(19): siRNA sense strand
aaguagaggagaacacaaa

SEQ ID NO: 476874 - RNA, 19 nt, Homo sapiens
  misc_RNA (1)...(19): siRNA sense strand
cauaucgaauuaccaacca

SEQ ID NO: 476875 - RNA, 19 nt, Homo sapiens
  misc_RNA (1)...(19): siRNA sense strand
caucacauaucgaauuacc

SEQ ID NO: 476876 - RNA, 19 nt, Homo sapiens
  misc_RNA (1)...(19): siRNA sense strand
uaaggguguucgugucagu

SEQ ID NO: 476877 - RNA, 19 nt, Homo sapiens
  misc_RNA (1)...(19): siRNA sense strand
cgaccuugcccgcuacuca

SEQ ID NO: 476878 - RNA, 19 nt, Homo sapiens
  misc_RNA (1)...(19): siRNA sense strand
ggaguucucggaccucaac

SEQ ID NO: 476879 - RNA, 19 nt, Homo sapiens
  misc_RNA (1)...(19): siRNA sense strand
ugugaacaaggacaucuuu

SEQ ID NO: 476880 - RNA, 19 nt, Homo sapiens
  misc_RNA (1)...(19): siRNA sense strand
caaccagcccaucaucuac

SEQ ID NO: 476881 - RNA, 19 nt, Homo sapiens
  misc_RNA (1)...(19): siRNA sense strand
ggaggaggacacgaaagug

SEQ ID NO: 476882 - RNA, 19 nt, Homo sapiens
  misc_RNA (1)...(19): siRNA sense strand
ugaaguagaggagaacaca

SEQ ID NO: 476883 - RNA, 19 nt, Homo sapiens
  misc_RNA (1)...(19): siRNA sense strand
ccacacuagugcugaacgu

SEQ ID NO: 476884 - RNA, 19 nt, Homo sapiens
  misc_RNA (1)...(19): siRNA sense strand
gguggaggaggacacgaaa

SEQ ID NO: 476885 - RNA, 19 nt, Homo sapiens
  misc_RNA (1)...(19): siRNA sense strand
acaaggacgacauucuguu

SEQ ID NO: 476886 - RNA, 19 nt, Homo sapiens
  misc_RNA (1)...(19): siRNA sense strand
ggcuacgucugcauucaag

SEQ ID NO: 476887 - RNA, 19 nt, Homo sapiens
  misc_RNA (1)...(19): siRNA sense strand
uuuaagaccaaggagauaa

SEQ ID NO: 476888 - RNA, 19 nt, Homo sapiens
  misc_RNA (1)...(19): siRNA sense strand
ucuuugaaguagaggagaa

SEQ ID NO: 476889 - RNA, 19 nt, Homo sapiens
  misc_RNA (1)...(19): siRNA sense strand
ggagaagucacugcuugag

SEQ ID NO: 476890 - RNA, 19 nt, Homo sapiens
  misc_RNA (1)...(19): siRNA sense strand
gaacaaggacaucuuugaa

SEQ ID NO: 476891 - RNA, 19 nt, Homo sapiens
  misc_RNA (1)...(19): siRNA sense strand
gccaucacauaucgaauua

SEQ ID NO: 476892 - RNA, 19 nt, Homo sapiens
  misc_RNA (1)...(19): siRNA sense strand
caacgugacuccugauuac

SEQ ID NO: 476893 - RNA, 19 nt, Homo sapiens
  misc_RNA (1)...(19): siRNA sense strand
ggacaucuuugaaguagag

SEQ ID NO: 476894 - RNA, 19 nt, Homo sapiens
  misc_RNA (1)...(19): siRNA sense strand
gaggagaacacaaauguca

SEQ ID NO: 476895 - RNA, 19 nt, Homo sapiens
  misc_RNA (1)...(19): siRNA sense strand
gcccaguacugcucuguga

SEQ ID NO: 476896 - RNA, 19 nt, Homo sapiens
  misc_RNA (1)...(19): siRNA sense strand
caaggacaucuuugaagua

SEQ ID NO: 476897 - RNA, 19 nt, Homo sapiens
  misc_RNA (1)...(19): siRNA sense strand
acaaggacaucuuugaagu

SEQ ID NO: 476898 - RNA, 19 nt, Homo sapiens
  misc_RNA (1)...(19): siRNA sense strand
gaggaggacacgaaaguga

SEQ ID NO: 476899 - RNA, 19 nt, Homo sapiens
  misc_RNA (1)...(19): siRNA sense strand
caacucggccaucacauau

SEQ ID NO: 476900 - RNA, 19 nt, Homo sapiens
  misc_RNA (1)...(19): siRNA sense strand
guacugcucugugaacaag

SEQ ID NO: 476901 - RNA, 19 nt, Homo sapiens
  misc_RNA (1)...(19): siRNA sense strand
ucaacucggccaucacaua

SEQ ID NO: 476902 - RNA, 19 nt, Homo sapiens
  misc_RNA (1)...(19): siRNA sense strand
ucaacgugacuccugauua

SEQ ID NO: 476903 - RNA, 19 nt, Homo sapiens
  misc_RNA (1)...(19): siRNA sense strand
ucacauaucgaauuaccaa

SEQ ID NO: 476904 - RNA, 19 nt, Homo sapiens
  misc_RNA (1)...(19): siRNA sense strand
caucaucuacagcaucuuu

SEQ ID NO: 476905 - RNA, 19 nt, Homo sapiens
  misc_RNA (1)...(19): siRNA sense strand
ugaacaaggacaucuuuga

SEQ ID NO: 476906 - RNA, 19 nt, Homo sapiens
  misc_RNA (1)...(19): siRNA sense strand
ggccaucacauaucgaauu

SEQ ID NO: 476907 - RNA, 19 nt, Homo sapiens
  misc_RNA (1)...(19): siRNA sense strand
ucaaccagcccaucaucua

SEQ ID NO: 476908 - RNA, 19 nt, Homo sapiens
  misc_RNA (1)...(19): siRNA sense strand
gaccucaacucggccauca

SEQ ID NO: 476909 - RNA, 19 nt, Homo sapiens
  misc_RNA (1)...(19): siRNA sense strand
uagaggagaacacaaaugu

SEQ ID NO: 476910 - RNA, 19 nt, Homo sapiens
  misc_RNA (1)...(19): siRNA sense strand
ggacgacauucuguucuac

SEQ ID NO: 476911 - RNA, 19 nt, Homo sapiens
  misc_RNA (1)...(19): siRNA sense strand
cgacaaggacgacauucug

SEQ ID NO: 476912 - RNA, 19 nt, Homo sapiens
  misc_RNA (1)...(19): siRNA sense strand
caaggacgacauucuguuc

SEQ ID NO: 476913 - RNA, 19 nt, Homo sapiens
  misc_RNA (1)...(19): siRNA sense strand
aaggacaucuuugaaguag

SEQ ID NO: 476914 - RNA, 19 nt, Homo sapiens
  misc_RNA (1)...(19): siRNA sense strand
ggccgaacaugaccuucug

SEQ ID NO: 476915 - RNA, 19 nt, Homo sapiens
  misc_RNA (1)...(19): siRNA sense strand
guucuacacccuccaggaa

SEQ ID NO: 476916 - RNA, 19 nt, Homo sapiens
  misc_RNA (1)...(19): siRNA sense strand
ugacagcaggugccaguga

SEQ ID NO: 476917 - RNA, 19 nt, Homo sapiens
  misc_RNA (1)...(19): siRNA sense strand
guagaggagaacacaaaug

SEQ ID NO: 476918 - RNA, 19 nt, Homo sapiens
  misc_RNA (1)...(19): siRNA sense strand
aggacgacauucuguucua

SEQ ID NO: 476919 - RNA, 19 nt, Homo sapiens
  misc_RNA (1)...(19): siRNA sense strand
ugucagugcuggacgucaa

SEQ ID NO: 476920 - RNA, 19 nt, Homo sapiens
  misc_RNA (1)...(19): siRNA sense strand
ucagagcggaggcacauug

SEQ ID NO: 476921 - RNA, 19 nt, Homo sapiens
  misc_RNA (1)...(19): siRNA sense strand
gaaguagaggagaacacaa

SEQ ID NO: 476922 - RNA, 19 nt, Homo sapiens
  misc_RNA (1)...(19): siRNA sense strand
gcuaaggguguucguguca

SEQ ID NO: 476923 - RNA, 19 nt, Homo sapiens
  misc_RNA (1)...(19): siRNA sense strand
gacaaggacgacauucugu

SEQ ID NO: 476924 - RNA, 19 nt, Homo sapiens
  misc_RNA (1)...(19): siRNA sense strand
ucuacacccuccaggaaau

SEQ ID NO: 476925 - RNA, 19 nt, Homo sapiens
  misc_RNA (1)...(19): siRNA sense strand
gaauuaccaaccacucaca

SEQ ID NO: 476926 - RNA, 19 nt, Homo sapiens
  misc_RNA (1)...(19): siRNA sense strand
aaguagaggagaacacaaa

SEQ ID NO: 476927 - RNA, 19 nt, Homo sapiens
  misc_RNA (1)...(19): siRNA sense strand
cauaucgaauuaccaacca

SEQ ID NO: 476928 - RNA, 19 nt, Homo sapiens
  misc_RNA (1)...(19): siRNA sense strand
caucacauaucgaauuacc

SEQ ID NO: 476929 - RNA, 19 nt, Homo sapiens
  misc_RNA (1)...(19): siRNA sense strand
uaaggguguucgugucagu

SEQ ID NO: 476930 - RNA, 19 nt, Homo sapiens
  misc_RNA (1)...(19): siRNA sense strand
cgaccuugcccgcuacuca

SEQ ID NO: 476931 - RNA, 19 nt, Homo sapiens
  misc_RNA (1)...(19): siRNA sense strand
ggaguucucggaccucaac

SEQ ID NO: 476932 - RNA, 19 nt, Homo sapiens
  misc_RNA (1)...(19): siRNA sense strand
ugugaacaaggacaucuuu

SEQ ID NO: 476933 - RNA, 19 nt, Homo sapiens
  misc_RNA (1)...(19): siRNA sense strand
caaccagcccaucaucuac

SEQ ID NO: 476934 - RNA, 19 nt, Homo sapiens
  misc_RNA (1)...(19): siRNA sense strand
ggaggaggacacgaaagug

SEQ ID NO: 476935 - RNA, 19 nt, Homo sapiens
  misc_RNA (1)...(19): siRNA sense strand
ugaaguagaggagaacaca

SEQ ID NO: 476936 - RNA, 19 nt, Homo sapiens
  misc_RNA (1)...(19): siRNA sense strand
ccacacuagugcugaacgu

SEQ ID NO: 476937 - RNA, 19 nt, Homo sapiens
  misc_RNA (1)...(19): siRNA sense strand
gguggaggaggacacgaaa

SEQ ID NO: 476938 - RNA, 19 nt, Homo sapiens
  misc_RNA (1)...(19): siRNA sense strand
acaaggacgacauucuguu

SEQ ID NO: 476939 - RNA, 19 nt, Homo sapiens
  misc_RNA (1)...(19): siRNA sense strand
ggcuacgucugcauucaag

SEQ ID NO: 476940 - RNA, 19 nt, Homo sapiens
  misc_RNA (1)...(19): siRNA sense strand
uuuaagaccaaggagauaa

SEQ ID NO: 476941 - RNA, 19 nt, Homo sapiens
  misc_RNA (1)...(19): siRNA sense strand
ucuuugaaguagaggagaa

SEQ ID NO: 476942 - RNA, 19 nt, Homo sapiens
  misc_RNA (1)...(19): siRNA sense strand
ggagaagucacugcuugag

SEQ ID NO: 476943 - RNA, 19 nt, Homo sapiens
  misc_RNA (1)...(19): siRNA sense strand
gaacaaggacaucuuugaa

SEQ ID NO: 476944 - RNA, 19 nt, Homo sapiens
  misc_RNA (1)...(19): siRNA sense strand
gccaucacauaucgaauua

SEQ ID NO: 476945 - RNA, 19 nt, Homo sapiens
  misc_RNA (1)...(19): siRNA sense strand
caacgugacuccugauuac

SEQ ID NO: 476946 - RNA, 19 nt, Homo sapiens
  misc_RNA (1)...(19): siRNA sense strand
ggacaucuuugaaguagag

SEQ ID NO: 476947 - RNA, 19 nt, Homo sapiens
  misc_RNA (1)...(19): siRNA sense strand
gaggagaacacaaauguca

SEQ ID NO: 476948 - RNA, 19 nt, Homo sapiens
  misc_RNA (1)...(19): siRNA sense strand
gcccaguacugcucuguga

SEQ ID NO: 476949 - RNA, 19 nt, Homo sapiens
  misc_RNA (1)...(19): siRNA sense strand
caaggacaucuuugaagua

SEQ ID NO: 476950 - RNA, 19 nt, Homo sapiens
  misc_RNA (1)...(19): siRNA sense strand
acaaggacaucuuugaagu

SEQ ID NO: 476951 - RNA, 19 nt, Homo sapiens
  misc_RNA (1)...(19): siRNA sense strand
gaggaggacacgaaaguga

SEQ ID NO: 476952 - RNA, 19 nt, Homo sapiens
  misc_RNA (1)...(19): siRNA sense strand
caacucggccaucacauau

SEQ ID NO: 476953 - RNA, 19 nt, Homo sapiens
  misc_RNA (1)...(19): siRNA sense strand
guacugcucugugaacaag

SEQ ID NO: 476954 - RNA, 19 nt, Homo sapiens
  misc_RNA (1)...(19): siRNA sense strand
ucaacucggccaucacaua

SEQ ID NO: 476955 - RNA, 19 nt, Homo sapiens
  misc_RNA (1)...(19): siRNA sense strand
ucaacgugacuccugauua

SEQ ID NO: 476956 - RNA, 19 nt, Homo sapiens
  misc_RNA (1)...(19): siRNA sense strand
ucacauaucgaauuaccaa

SEQ ID NO: 476957 - RNA, 19 nt, Homo sapiens
  misc_RNA (1)...(19): siRNA sense strand
caucaucuacagcaucuuu

SEQ ID NO: 476958 - RNA, 19 nt, Homo sapiens
  misc_RNA (1)...(19): siRNA sense strand
ugaacaaggacaucuuuga

SEQ ID NO: 476959 - RNA, 19 nt, Homo sapiens
  misc_RNA (1)...(19): siRNA sense strand
ggccaucacauaucgaauu

SEQ ID NO: 476960 - RNA, 19 nt, Homo sapiens
  misc_RNA (1)...(19): siRNA sense strand
ucaaccagcccaucaucua

SEQ ID NO: 476961 - RNA, 19 nt, Homo sapiens
  misc_RNA (1)...(19): siRNA sense strand
gaccucaacucggccauca

SEQ ID NO: 476962 - RNA, 19 nt, Homo sapiens
  misc_RNA (1)...(19): siRNA sense strand
uagaggagaacacaaaugu

SEQ ID NO: 476963 - RNA, 19 nt, Homo sapiens
  misc_RNA (1)...(19): siRNA sense strand
ggacgacauucuguucuac

SEQ ID NO: 476964 - RNA, 19 nt, Homo sapiens
  misc_RNA (1)...(19): siRNA sense strand
cgacaaggacgacauucug

SEQ ID NO: 476965 - RNA, 19 nt, Homo sapiens
  misc_RNA (1)...(19): siRNA sense strand
caaggacgacauucuguuc

SEQ ID NO: 476966 - RNA, 19 nt, Homo sapiens
  misc_RNA (1)...(19): siRNA sense strand
aaggacaucuuugaaguag

SEQ ID NO: 476967 - RNA, 19 nt, Homo sapiens
  misc_RNA (1)...(19): siRNA sense strand
ggccgaacaugaccuucug

SEQ ID NO: 476968 - RNA, 19 nt, Homo sapiens
  misc_RNA (1)...(19): siRNA sense strand
guucuacacccuccaggaa

SEQ ID NO: 476969 - RNA, 19 nt, Homo sapiens
  misc_RNA (1)...(19): siRNA sense strand
ugacagcaggugccaguga

SEQ ID NO: 476970 - RNA, 19 nt, Homo sapiens
  misc_RNA (1)...(19): siRNA sense strand
guagaggagaacacaaaug

SEQ ID NO: 476971 - RNA, 19 nt, Homo sapiens
  misc_RNA (1)...(19): siRNA sense strand
aggacgacauucuguucua

SEQ ID NO: 476972 - RNA, 19 nt, Homo sapiens
  misc_RNA (1)...(19): siRNA sense strand
ugucagugcuggacgucaa

SEQ ID NO: 476973 - RNA, 19 nt, Homo sapiens
  misc_RNA (1)...(19): siRNA sense strand
ucagagcggaggcacauug

SEQ ID NO: 476974 - RNA, 19 nt, Homo sapiens
  misc_RNA (1)...(19): siRNA sense strand
gaaguagaggagaacacaa

SEQ ID NO: 476975 - RNA, 19 nt, Homo sapiens
  misc_RNA (1)...(19): siRNA sense strand
gcuaaggguguucguguca

SEQ ID NO: 476976 - RNA, 19 nt, Homo sapiens
  misc_RNA (1)...(19): siRNA sense strand
gacaaggacgacauucugu

SEQ ID NO: 476977 - RNA, 19 nt, Homo sapiens
  misc_RNA (1)...(19): siRNA sense strand
ucuacacccuccaggaaau

SEQ ID NO: 476978 - RNA, 19 nt, Homo sapiens
  misc_RNA (1)...(19): siRNA sense strand
gaauuaccaaccacucaca

SEQ ID NO: 476979 - RNA, 19 nt, Homo sapiens
  misc_RNA (1)...(19): siRNA sense strand
aaguagaggagaacacaaa

SEQ ID NO: 476980 - RNA, 19 nt, Homo sapiens
  misc_RNA (1)...(19): siRNA sense strand
cauaucgaauuaccaacca

SEQ ID NO: 476981 - RNA, 19 nt, Homo sapiens
  misc_RNA (1)...(19): siRNA sense strand
caucacauaucgaauuacc

SEQ ID NO: 476982 - RNA, 19 nt, Homo sapiens
  misc_RNA (1)...(19): siRNA sense strand
uaaggguguucgugucagu

SEQ ID NO: 476983 - RNA, 19 nt, Homo sapiens
  misc_RNA (1)...(19): siRNA sense strand
cgaccuugcccgcuacuca

SEQ ID NO: 476984 - RNA, 19 nt, Homo sapiens
  misc_RNA (1)...(19): siRNA sense strand
ggaguucucggaccucaac

SEQ ID NO: 476985 - RNA, 19 nt, Homo sapiens
  misc_RNA (1)...(19): siRNA sense strand
ugugaacaaggacaucuuu

SEQ ID NO: 476986 - RNA, 19 nt, Homo sapiens
  misc_RNA (1)...(19): siRNA sense strand
caaccagcccaucaucuac

SEQ ID NO: 476987 - RNA, 19 nt, Homo sapiens
  misc_RNA (1)...(19): siRNA sense strand
ggaggaggacacgaaagug

SEQ ID NO: 476988 - RNA, 19 nt, Homo sapiens
  misc_RNA (1)...(19): siRNA sense strand
ugaaguagaggagaacaca

SEQ ID NO: 476989 - RNA, 19 nt, Homo sapiens
  misc_RNA (1)...(19): siRNA sense strand
ccacacuagugcugaacgu

SEQ ID NO: 476990 - RNA, 19 nt, Homo sapiens
  misc_RNA (1)...(19): siRNA sense strand
gguggaggaggacacgaaa

SEQ ID NO: 476991 - RNA, 19 nt, Homo sapiens
  misc_RNA (1)...(19): siRNA sense strand
acaaggacgacauucuguu

SEQ ID NO: 476992 - RNA, 19 nt, Homo sapiens
  misc_RNA (1)...(19): siRNA sense strand
ggcuacgucugcauucaag

SEQ ID NO: 476993 - RNA, 19 nt, Homo sapiens
  misc_RNA (1)...(19): siRNA sense strand
uuuaagaccaaggagauaa

SEQ ID NO: 476994 - RNA, 19 nt, Homo sapiens
  misc_RNA (1)...(19): siRNA sense strand
ucuuugaaguagaggagaa

SEQ ID NO: 476995 - RNA, 19 nt, Homo sapiens
  misc_RNA (1)...(19): siRNA sense strand
ggagaagucacugcuugag

SEQ ID NO: 476996 - RNA, 19 nt, Homo sapiens
  misc_RNA (1)...(19): siRNA sense strand
gaacaaggacaucuuugaa

SEQ ID NO: 476997 - RNA, 19 nt, Homo sapiens
  misc_RNA (1)...(19): siRNA sense strand
caacgugacuccugauuac

SEQ ID NO: 476998 - RNA, 19 nt, Homo sapiens
  misc_RNA (1)...(19): siRNA sense strand
ggacaucuuugaaguagag

SEQ ID NO: 476999 - RNA, 19 nt, Homo sapiens
  misc_RNA (1)...(19): siRNA sense strand
gaggagaacacaaauguca

SEQ ID NO: 477000 - RNA, 19 nt, Homo sapiens
  misc_RNA (1)...(19): siRNA sense strand
gcccaguacugcucuguga

SEQ ID NO: 477001 - RNA, 19 nt, Homo sapiens
  misc_RNA (1)...(19): siRNA sense strand
caaggacaucuuugaagua

SEQ ID NO: 477002 - RNA, 19 nt, Homo sapiens
  misc_RNA (1)...(19): siRNA sense strand
acaaggacaucuuugaagu

SEQ ID NO: 477003 - RNA, 19 nt, Homo sapiens
  misc_RNA (1)...(19): siRNA sense strand
guacugcucugugaacaag

SEQ ID NO: 477004 - RNA, 19 nt, Homo sapiens
  misc_RNA (1)...(19): siRNA sense strand
ucaacgugacuccugauua

SEQ ID NO: 477005 - RNA, 19 nt, Homo sapiens
  misc_RNA (1)...(19): siRNA sense strand
ugaacaaggacaucuuuga

SEQ ID NO: 477006 - RNA, 19 nt, Homo sapiens
  misc_RNA (1)...(19): siRNA sense strand
uagaggagaacacaaaugu

SEQ ID NO: 477007 - RNA, 19 nt, Homo sapiens
  misc_RNA (1)...(19): siRNA sense strand
aaggacaucuuugaaguag

SEQ ID NO: 477008 - RNA, 19 nt, Homo sapiens
  misc_RNA (1)...(19): siRNA sense strand
gaaguagaggagaacacaa

SEQ ID NO: 477009 - RNA, 19 nt, Homo sapiens
  misc_RNA (1)...(19): siRNA sense strand
guagaggagaacacaaaug

SEQ ID NO: 477010 - RNA, 19 nt, Homo sapiens
  misc_RNA (1)...(19): siRNA sense strand
aaguagaggagaacacaaa

SEQ ID NO: 477011 - RNA, 19 nt, Homo sapiens
  misc_RNA (1)...(19): siRNA sense strand
ugugaacaaggacaucuuu

SEQ ID NO: 477012 - RNA, 19 nt, Homo sapiens
  misc_RNA (1)...(19): siRNA sense strand
ugaaguagaggagaacaca

SEQ ID NO: 477013 - RNA, 19 nt, Homo sapiens
  misc_RNA (1)...(19): siRNA sense strand
ucuuugaaguagaggagaa

SEQ ID NO: 477014 - RNA, 19 nt, Homo sapiens
  misc_RNA (1)...(19): siRNA sense strand
gcaaguaccugugguggau

SEQ ID NO: 477015 - RNA, 19 nt, Homo sapiens
  misc_RNA (1)...(19): siRNA sense strand
gagacgaacuacagaacag

SEQ ID NO: 477016 - RNA, 19 nt, Homo sapiens
  misc_RNA (1)...(19): siRNA sense strand
gcacguaccagagguggaa

SEQ ID NO: 477017 - RNA, 19 nt, Homo sapiens
  misc_RNA (1)...(19): siRNA sense strand
gaacugaggcaggcauucu

SEQ ID NO: 477018 - RNA, 19 nt, Homo sapiens
  misc_RNA (1)...(19): siRNA sense strand
caagucaaacgcagaagga

SEQ ID NO: 477019 - RNA, 19 nt, Homo sapiens
  misc_RNA (1)...(19): siRNA sense strand
ucacugagcaaccaagagu

SEQ ID NO: 477020 - RNA, 19 nt, Homo sapiens
  misc_RNA (1)...(19): siRNA sense strand
ggcaagggaucgcuuacac

SEQ ID NO: 477021 - RNA, 19 nt, Homo sapiens
  misc_RNA (1)...(19): siRNA sense strand
aaguaccugugguggauuu

SEQ ID NO: 477022 - RNA, 19 nt, Homo sapiens
  misc_RNA (1)...(19): siRNA sense strand
gcgggcaagggaucgcuua

SEQ ID NO: 477023 - RNA, 19 nt, Homo sapiens
  misc_RNA (1)...(19): siRNA sense strand
agaaggacugccucacuga

SEQ ID NO: 477024 - RNA, 19 nt, Homo sapiens
  misc_RNA (1)...(19): siRNA sense strand
acugaggcaggcauucuua

SEQ ID NO: 477025 - RNA, 19 nt, Homo sapiens
  misc_RNA (1)...(19): siRNA sense strand
guucucagcagcagcaagu

SEQ ID NO: 477026 - RNA, 19 nt, Homo sapiens
  misc_RNA (1)...(19): siRNA sense strand
uuacaccugagacgaacua

SEQ ID NO: 477027 - RNA, 19 nt, Homo sapiens
  misc_RNA (1)...(19): siRNA sense strand
gcaaguaccugugguggau

SEQ ID NO: 477028 - RNA, 19 nt, Homo sapiens
  misc_RNA (1)...(19): siRNA sense strand
gagacgaacuacagaacag

SEQ ID NO: 477029 - RNA, 19 nt, Homo sapiens
  misc_RNA (1)...(19): siRNA sense strand
gcacguaccagagguggaa

SEQ ID NO: 477030 - RNA, 19 nt, Homo sapiens
  misc_RNA (1)...(19): siRNA sense strand
gaacugaggcaggcauucu

SEQ ID NO: 477031 - RNA, 19 nt, Homo sapiens
  misc_RNA (1)...(19): siRNA sense strand
caagucaaacgcagaagga

SEQ ID NO: 477032 - RNA, 19 nt, Homo sapiens
  misc_RNA (1)...(19): siRNA sense strand
ucacugagcaaccaagagu

SEQ ID NO: 477033 - RNA, 19 nt, Homo sapiens
  misc_RNA (1)...(19): siRNA sense strand
ggcaagggaucgcuuacac

SEQ ID NO: 477034 - RNA, 19 nt, Homo sapiens
  misc_RNA (1)...(19): siRNA sense strand
aaguaccugugguggauuu

SEQ ID NO: 477035 - RNA, 19 nt, Homo sapiens
  misc_RNA (1)...(19): siRNA sense strand
gcgggcaagggaucgcuua

SEQ ID NO: 477036 - RNA, 19 nt, Homo sapiens
  misc_RNA (1)...(19): siRNA sense strand
agaaggacugccucacuga

SEQ ID NO: 477037 - RNA, 19 nt, Homo sapiens
  misc_RNA (1)...(19): siRNA sense strand
acugaggcaggcauucuua

SEQ ID NO: 477038 - RNA, 19 nt, Homo sapiens
  misc_RNA (1)...(19): siRNA sense strand
guucucagcagcagcaagu

SEQ ID NO: 477039 - RNA, 19 nt, Homo sapiens
  misc_RNA (1)...(19): siRNA sense strand
uuacaccugagacgaacua

SEQ ID NO: 477040 - RNA, 19 nt, Homo sapiens
  misc_RNA (1)...(19): siRNA sense strand
ucagaaagaucaagccaaa

SEQ ID NO: 477041 - RNA, 19 nt, Homo sapiens
  misc_RNA (1)...(19): siRNA sense strand
ugaauuugauccucuguga

SEQ ID NO: 477042 - RNA, 19 nt, Homo sapiens
  misc_RNA (1)...(19): siRNA sense strand
ugagauguauccugcaaga

SEQ ID NO: 477043 - RNA, 19 nt, Homo sapiens
  misc_RNA (1)...(19): siRNA sense strand
gaaagaucaagccaaagaa

SEQ ID NO: 477044 - RNA, 19 nt, Homo sapiens
  misc_RNA (1)...(19): siRNA sense strand
gacuauagaaugagaugua

SEQ ID NO: 477045 - RNA, 19 nt, Homo sapiens
  misc_RNA (1)...(19): siRNA sense strand
ugacaagcauaugaauuug

SEQ ID NO: 477046 - RNA, 19 nt, Homo sapiens
  misc_RNA (1)...(19): siRNA sense strand
gcagcacauugacuauaga

SEQ ID NO: 477047 - RNA, 19 nt, Homo sapiens
  misc_RNA (1)...(19): siRNA sense strand
gcaaccagagcgugaagaa

SEQ ID NO: 477048 - RNA, 19 nt, Homo sapiens
  misc_RNA (1)...(19): siRNA sense strand
agaaagaucaagccaaaga

SEQ ID NO: 477049 - RNA, 19 nt, Homo sapiens
  misc_RNA (1)...(19): siRNA sense strand
ugugaugaguucagaaaga

SEQ ID NO: 477050 - RNA, 19 nt, Homo sapiens
  misc_RNA (1)...(19): siRNA sense strand
gugaugaguucagaaagau

SEQ ID NO: 477051 - RNA, 19 nt, Homo sapiens
  misc_RNA (1)...(19): siRNA sense strand
caaagauacuggcauugcu

SEQ ID NO: 477052 - RNA, 19 nt, Homo sapiens
  misc_RNA (1)...(19): siRNA sense strand
gacaagcauaugaauuuga

SEQ ID NO: 477053 - RNA, 19 nt, Homo sapiens
  misc_RNA (1)...(19): siRNA sense strand
aaucuucauuggcaccuuu

SEQ ID NO: 477054 - RNA, 19 nt, Homo sapiens
  misc_RNA (1)...(19): siRNA sense strand
gggaagaggcacuguagca

SEQ ID NO: 477055 - RNA, 19 nt, Homo sapiens
  misc_RNA (1)...(19): siRNA sense strand
gggagaacuugguauccau

SEQ ID NO: 477056 - RNA, 19 nt, Homo sapiens
  misc_RNA (1)...(19): siRNA sense strand
gaugaguucagaaagauca

SEQ ID NO: 477057 - RNA, 19 nt, Homo sapiens
  misc_RNA (1)...(19): siRNA sense strand
gauccucugugauugugau

SEQ ID NO: 477058 - RNA, 19 nt, Homo sapiens
  misc_RNA (1)...(19): siRNA sense strand
gaacuugguauccaugacu

SEQ ID NO: 477059 - RNA, 19 nt, Homo sapiens
  misc_RNA (1)...(19): siRNA sense strand
aaugagauguauccugcaa

SEQ ID NO: 477060 - RNA, 19 nt, Homo sapiens
  misc_RNA (1)...(19): siRNA sense strand
cccaugggcccaccaauug

SEQ ID NO: 477061 - RNA, 19 nt, Homo sapiens
  misc_RNA (1)...(19): siRNA sense strand
ggaccaucccagcagguaa

SEQ ID NO: 477062 - RNA, 19 nt, Homo sapiens
  misc_RNA (1)...(19): siRNA sense strand
aauuugauccucugugauu

SEQ ID NO: 477063 - RNA, 19 nt, Homo sapiens
  misc_RNA (1)...(19): siRNA sense strand
gccaaagaaugcgaagcaa

SEQ ID NO: 477064 - RNA, 19 nt, Homo sapiens
  misc_RNA (1)...(19): siRNA sense strand
aggaaugcguccaccaaga

SEQ ID NO: 477065 - RNA, 19 nt, Homo sapiens
  misc_RNA (1)...(19): siRNA sense strand
gauggccgaaucuucauug

SEQ ID NO: 477066 - RNA, 19 nt, Homo sapiens
  misc_RNA (1)...(19): siRNA sense strand
gagaacuugguauccauga

SEQ ID NO: 477067 - RNA, 19 nt, Homo sapiens
  misc_RNA (1)...(19): siRNA sense strand
gaagcaaccagagcgugaa

SEQ ID NO: 477068 - RNA, 19 nt, Homo sapiens
  misc_RNA (1)...(19): siRNA sense strand
agauguauccugcaagaug

SEQ ID NO: 477069 - RNA, 19 nt, Homo sapiens
  misc_RNA (1)...(19): siRNA sense strand
aaagaucaagccaaagaau

SEQ ID NO: 477070 - RNA, 19 nt, Homo sapiens
  misc_RNA (1)...(19): siRNA sense strand
ggaaugcguccaccaagac

SEQ ID NO: 477071 - RNA, 19 nt, Homo sapiens
  misc_RNA (1)...(19): siRNA sense strand
uggcaagaguagcaagaug

SEQ ID NO: 477072 - RNA, 19 nt, Homo sapiens
  misc_RNA (1)...(19): siRNA sense strand
caaccagagcgugaagaaa

SEQ ID NO: 477073 - RNA, 19 nt, Homo sapiens
  misc_RNA (1)...(19): siRNA sense strand
gcucgagggacgccaauag

SEQ ID NO: 477074 - RNA, 19 nt, Homo sapiens
  misc_RNA (1)...(19): siRNA sense strand
gaccaucccagcagguaau

SEQ ID NO: 477075 - RNA, 19 nt, Homo sapiens
  misc_RNA (1)...(19): siRNA sense strand
ugcagcacauugacuauag

SEQ ID NO: 477076 - RNA, 19 nt, Homo sapiens
  misc_RNA (1)...(19): siRNA sense strand
ccaggaaugcguccaccaa

SEQ ID NO: 477077 - RNA, 19 nt, Homo sapiens
  misc_RNA (1)...(19): siRNA sense strand
ccugcaagauggccgaauc

SEQ ID NO: 477078 - RNA, 19 nt, Homo sapiens
  misc_RNA (1)...(19): siRNA sense strand
ggcagcugguagaggagua

SEQ ID NO: 477079 - RNA, 19 nt, Homo sapiens
  misc_RNA (1)...(19): siRNA sense strand
ccaaagauacuggcauugc

SEQ ID NO: 477080 - RNA, 19 nt, Homo sapiens
  misc_RNA (1)...(19): siRNA sense strand
gaauuugauccucugugau

SEQ ID NO: 477081 - RNA, 19 nt, Homo sapiens
  misc_RNA (1)...(19): siRNA sense strand
ugauugugaugaguucaga

SEQ ID NO: 477082 - RNA, 19 nt, Homo sapiens
  misc_RNA (1)...(19): siRNA sense strand
cagggaagaggcacuguag

SEQ ID NO: 477083 - RNA, 19 nt, Homo sapiens
  misc_RNA (1)...(19): siRNA sense strand
gaaucuucauuggcaccuu

SEQ ID NO: 477084 - RNA, 19 nt, Homo sapiens
  misc_RNA (1)...(19): siRNA sense strand
cagcacauugacuauagaa

SEQ ID NO: 477085 - RNA, 19 nt, Homo sapiens
  misc_RNA (1)...(19): siRNA sense strand
aagaucaagccaaagaaug

SEQ ID NO: 477086 - RNA, 19 nt, Homo sapiens
  misc_RNA (1)...(19): siRNA sense strand
ucagaaagaucaagccaaa

SEQ ID NO: 477087 - RNA, 19 nt, Homo sapiens
  misc_RNA (1)...(19): siRNA sense strand
ugaauuugauccucuguga

SEQ ID NO: 477088 - RNA, 19 nt, Homo sapiens
  misc_RNA (1)...(19): siRNA sense strand
ugagauguauccugcaaga

SEQ ID NO: 477089 - RNA, 19 nt, Homo sapiens
  misc_RNA (1)...(19): siRNA sense strand
gaaagaucaagccaaagaa

SEQ ID NO: 477090 - RNA, 19 nt, Homo sapiens
  misc_RNA (1)...(19): siRNA sense strand
gacuauagaaugagaugua

SEQ ID NO: 477091 - RNA, 19 nt, Homo sapiens
  misc_RNA (1)...(19): siRNA sense strand
ugacaagcauaugaauuug

SEQ ID NO: 477092 - RNA, 19 nt, Homo sapiens
  misc_RNA (1)...(19): siRNA sense strand
gcagcacauugacuauaga

SEQ ID NO: 477093 - RNA, 19 nt, Homo sapiens
  misc_RNA (1)...(19): siRNA sense strand
gcaaccagagcgugaagaa

SEQ ID NO: 477094 - RNA, 19 nt, Homo sapiens
  misc_RNA (1)...(19): siRNA sense strand
agaaagaucaagccaaaga

SEQ ID NO: 477095 - RNA, 19 nt, Homo sapiens
  misc_RNA (1)...(19): siRNA sense strand
ugugaugaguucagaaaga

SEQ ID NO: 477096 - RNA, 19 nt, Homo sapiens
  misc_RNA (1)...(19): siRNA sense strand
gugaugaguucagaaagau

SEQ ID NO: 477097 - RNA, 19 nt, Homo sapiens
  misc_RNA (1)...(19): siRNA sense strand
caaagauacuggcauugcu

SEQ ID NO: 477098 - RNA, 19 nt, Homo sapiens
  misc_RNA (1)...(19): siRNA sense strand
gacaagcauaugaauuuga

SEQ ID NO: 477099 - RNA, 19 nt, Homo sapiens
  misc_RNA (1)...(19): siRNA sense strand
aaucuucauuggcaccuuu

SEQ ID NO: 477100 - RNA, 19 nt, Homo sapiens
  misc_RNA (1)...(19): siRNA sense strand
gggaagaggcacuguagca

SEQ ID NO: 477101 - RNA, 19 nt, Homo sapiens
  misc_RNA (1)...(19): siRNA sense strand
gggagaacuugguauccau

SEQ ID NO: 477102 - RNA, 19 nt, Homo sapiens
  misc_RNA (1)...(19): siRNA sense strand
gaugaguucagaaagauca

SEQ ID NO: 477103 - RNA, 19 nt, Homo sapiens
  misc_RNA (1)...(19): siRNA sense strand
gauccucugugauugugau

SEQ ID NO: 477104 - RNA, 19 nt, Homo sapiens
  misc_RNA (1)...(19): siRNA sense strand
gaacuugguauccaugacu

SEQ ID NO: 477105 - RNA, 19 nt, Homo sapiens
  misc_RNA (1)...(19): siRNA sense strand
aaugagauguauccugcaa

SEQ ID NO: 477106 - RNA, 19 nt, Homo sapiens
  misc_RNA (1)...(19): siRNA sense strand
cccaugggcccaccaauug

SEQ ID NO: 477107 - RNA, 19 nt, Homo sapiens
  misc_RNA (1)...(19): siRNA sense strand
ggaccaucccagcagguaa

SEQ ID NO: 477108 - RNA, 19 nt, Homo sapiens
  misc_RNA (1)...(19): siRNA sense strand
aauuugauccucugugauu

SEQ ID NO: 477109 - RNA, 19 nt, Homo sapiens
  misc_RNA (1)...(19): siRNA sense strand
gccaaagaaugcgaagcaa

SEQ ID NO: 477110 - RNA, 19 nt, Homo sapiens
  misc_RNA (1)...(19): siRNA sense strand
aggaaugcguccaccaaga

SEQ ID NO: 477111 - RNA, 19 nt, Homo sapiens
  misc_RNA (1)...(19): siRNA sense strand
gauggccgaaucuucauug

SEQ ID NO: 477112 - RNA, 19 nt, Homo sapiens
  misc_RNA (1)...(19): siRNA sense strand
gagaacuugguauccauga

SEQ ID NO: 477113 - RNA, 19 nt, Homo sapiens
  misc_RNA (1)...(19): siRNA sense strand
gaagcaaccagagcgugaa

SEQ ID NO: 477114 - RNA, 19 nt, Homo sapiens
  misc_RNA (1)...(19): siRNA sense strand
agauguauccugcaagaug

SEQ ID NO: 477115 - RNA, 19 nt, Homo sapiens
  misc_RNA (1)...(19): siRNA sense strand
aaagaucaagccaaagaau

SEQ ID NO: 477116 - RNA, 19 nt, Homo sapiens
  misc_RNA (1)...(19): siRNA sense strand
ggaaugcguccaccaagac

SEQ ID NO: 477117 - RNA, 19 nt, Homo sapiens
  misc_RNA (1)...(19): siRNA sense strand
uggcaagaguagcaagaug

SEQ ID NO: 477118 - RNA, 19 nt, Homo sapiens
  misc_RNA (1)...(19): siRNA sense strand
caaccagagcgugaagaaa

SEQ ID NO: 477119 - RNA, 19 nt, Homo sapiens
  misc_RNA (1)...(19): siRNA sense strand
gcucgagggacgccaauag

SEQ ID NO: 477120 - RNA, 19 nt, Homo sapiens
  misc_RNA (1)...(19): siRNA sense strand
gaccaucccagcagguaau

SEQ ID NO: 477121 - RNA, 19 nt, Homo sapiens
  misc_RNA (1)...(19): siRNA sense strand
ugcagcacauugacuauag

SEQ ID NO: 477122 - RNA, 19 nt, Homo sapiens
  misc_RNA (1)...(19): siRNA sense strand
ccaggaaugcguccaccaa

SEQ ID NO: 477123 - RNA, 19 nt, Homo sapiens
  misc_RNA (1)...(19): siRNA sense strand
ccugcaagauggccgaauc

SEQ ID NO: 477124 - RNA, 19 nt, Homo sapiens
  misc_RNA (1)...(19): siRNA sense strand
ggcagcugguagaggagua

SEQ ID NO: 477125 - RNA, 19 nt, Homo sapiens
  misc_RNA (1)...(19): siRNA sense strand
ccaaagauacuggcauugc

SEQ ID NO: 477126 - RNA, 19 nt, Homo sapiens
  misc_RNA (1)...(19): siRNA sense strand
gaauuugauccucugugau

SEQ ID NO: 477127 - RNA, 19 nt, Homo sapiens
  misc_RNA (1)...(19): siRNA sense strand
ugauugugaugaguucaga

SEQ ID NO: 477128 - RNA, 19 nt, Homo sapiens
  misc_RNA (1)...(19): siRNA sense strand
cagggaagaggcacuguag

SEQ ID NO: 477129 - RNA, 19 nt, Homo sapiens
  misc_RNA (1)...(19): siRNA sense strand
gaaucuucauuggcaccuu

SEQ ID NO: 477130 - RNA, 19 nt, Homo sapiens
  misc_RNA (1)...(19): siRNA sense strand
cagcacauugacuauagaa

SEQ ID NO: 477131 - RNA, 19 nt, Homo sapiens
  misc_RNA (1)...(19): siRNA sense strand
aagaucaagccaaagaaug

SEQ ID NO: 477132 - RNA, 19 nt, Homo sapiens
  misc_RNA (1)...(19): siRNA sense strand
ucagaaagaucaagccaaa

SEQ ID NO: 477133 - RNA, 19 nt, Homo sapiens
  misc_RNA (1)...(19): siRNA sense strand
ugaauuugauccucuguga

SEQ ID NO: 477134 - RNA, 19 nt, Homo sapiens
  misc_RNA (1)...(19): siRNA sense strand
ugagauguauccugcaaga

SEQ ID NO: 477135 - RNA, 19 nt, Homo sapiens
  misc_RNA (1)...(19): siRNA sense strand
gaaagaucaagccaaagaa

SEQ ID NO: 477136 - RNA, 19 nt, Homo sapiens
  misc_RNA (1)...(19): siRNA sense strand
gacuauagaaugagaugua

SEQ ID NO: 477137 - RNA, 19 nt, Homo sapiens
  misc_RNA (1)...(19): siRNA sense strand
ugacaagcauaugaauuug

SEQ ID NO: 477138 - RNA, 19 nt, Homo sapiens
  misc_RNA (1)...(19): siRNA sense strand
gcagcacauugacuauaga

SEQ ID NO: 477139 - RNA, 19 nt, Homo sapiens
  misc_RNA (1)...(19): siRNA sense strand
gcaaccagagcgugaagaa

SEQ ID NO: 477140 - RNA, 19 nt, Homo sapiens
  misc_RNA (1)...(19): siRNA sense strand
agaaagaucaagccaaaga

SEQ ID NO: 477141 - RNA, 19 nt, Homo sapiens
  misc_RNA (1)...(19): siRNA sense strand
ugugaugaguucagaaaga

SEQ ID NO: 477142 - RNA, 19 nt, Homo sapiens
  misc_RNA (1)...(19): siRNA sense strand
gugaugaguucagaaagau

SEQ ID NO: 477143 - RNA, 19 nt, Homo sapiens
  misc_RNA (1)...(19): siRNA sense strand
caaagauacuggcauugcu

SEQ ID NO: 477144 - RNA, 19 nt, Homo sapiens
  misc_RNA (1)...(19): siRNA sense strand
gacaagcauaugaauuuga

SEQ ID NO: 477145 - RNA, 19 nt, Homo sapiens
  misc_RNA (1)...(19): siRNA sense strand
aaucuucauuggcaccuuu

SEQ ID NO: 477146 - RNA, 19 nt, Homo sapiens
  misc_RNA (1)...(19): siRNA sense strand
gggaagaggcacuguagca

SEQ ID NO: 477147 - RNA, 19 nt, Homo sapiens
  misc_RNA (1)...(19): siRNA sense strand
gggagaacuugguauccau

SEQ ID NO: 477148 - RNA, 19 nt, Homo sapiens
  misc_RNA (1)...(19): siRNA sense strand
gaugaguucagaaagauca

SEQ ID NO: 477149 - RNA, 19 nt, Homo sapiens
  misc_RNA (1)...(19): siRNA sense strand
gauccucugugauugugau

SEQ ID NO: 477150 - RNA, 19 nt, Homo sapiens
  misc_RNA (1)...(19): siRNA sense strand
gaacuugguauccaugacu

SEQ ID NO: 477151 - RNA, 19 nt, Homo sapiens
  misc_RNA (1)...(19): siRNA sense strand
aaugagauguauccugcaa

SEQ ID NO: 477152 - RNA, 19 nt, Homo sapiens
  misc_RNA (1)...(19): siRNA sense strand
cccaugggcccaccaauug

SEQ ID NO: 477153 - RNA, 19 nt, Homo sapiens
  misc_RNA (1)...(19): siRNA sense strand
ggaccaucccagcagguaa

SEQ ID NO: 477154 - RNA, 19 nt, Homo sapiens
  misc_RNA (1)...(19): siRNA sense strand
aauuugauccucugugauu

SEQ ID NO: 477155 - RNA, 19 nt, Homo sapiens
  misc_RNA (1)...(19): siRNA sense strand
gccaaagaaugcgaagcaa

SEQ ID NO: 477156 - RNA, 19 nt, Homo sapiens
  misc_RNA (1)...(19): siRNA sense strand
aggaaugcguccaccaaga

SEQ ID NO: 477157 - RNA, 19 nt, Homo sapiens
  misc_RNA (1)...(19): siRNA sense strand
gauggccgaaucuucauug

SEQ ID NO: 477158 - RNA, 19 nt, Homo sapiens
  misc_RNA (1)...(19): siRNA sense strand
gagaacuugguauccauga

SEQ ID NO: 477159 - RNA, 19 nt, Homo sapiens
  misc_RNA (1)...(19): siRNA sense strand
gaagcaaccagagcgugaa

SEQ ID NO: 477160 - RNA, 19 nt, Homo sapiens
  misc_RNA (1)...(19): siRNA sense strand
agauguauccugcaagaug

SEQ ID NO: 477161 - RNA, 19 nt, Homo sapiens
  misc_RNA (1)...(19): siRNA sense strand
aaagaucaagccaaagaau

SEQ ID NO: 477162 - RNA, 19 nt, Homo sapiens
  misc_RNA (1)...(19): siRNA sense strand
ggaaugcguccaccaagac

SEQ ID NO: 477163 - RNA, 19 nt, Homo sapiens
  misc_RNA (1)...(19): siRNA sense strand
uggcaagaguagcaagaug

SEQ ID NO: 477164 - RNA, 19 nt, Homo sapiens
  misc_RNA (1)...(19): siRNA sense strand
caaccagagcgugaagaaa

SEQ ID NO: 477165 - RNA, 19 nt, Homo sapiens
  misc_RNA (1)...(19): siRNA sense strand
gcucgagggacgccaauag

SEQ ID NO: 477166 - RNA, 19 nt, Homo sapiens
  misc_RNA (1)...(19): siRNA sense strand
gaccaucccagcagguaau

SEQ ID NO: 477167 - RNA, 19 nt, Homo sapiens
  misc_RNA (1)...(19): siRNA sense strand
ugcagcacauugacuauag

SEQ ID NO: 477168 - RNA, 19 nt, Homo sapiens
  misc_RNA (1)...(19): siRNA sense strand
ccaggaaugcguccaccaa

SEQ ID NO: 477169 - RNA, 19 nt, Homo sapiens
  misc_RNA (1)...(19): siRNA sense strand
ccugcaagauggccgaauc

SEQ ID NO: 477170 - RNA, 19 nt, Homo sapiens
  misc_RNA (1)...(19): siRNA sense strand
ggcagcugguagaggagua

SEQ ID NO: 477171 - RNA, 19 nt, Homo sapiens
  misc_RNA (1)...(19): siRNA sense strand
ccaaagauacuggcauugc

SEQ ID NO: 477172 - RNA, 19 nt, Homo sapiens
  misc_RNA (1)...(19): siRNA sense strand
gaauuugauccucugugau

SEQ ID NO: 477173 - RNA, 19 nt, Homo sapiens
  misc_RNA (1)...(19): siRNA sense strand
ugauugugaugaguucaga

SEQ ID NO: 477174 - RNA, 19 nt, Homo sapiens
  misc_RNA (1)...(19): siRNA sense strand
cagggaagaggcacuguag

SEQ ID NO: 477175 - RNA, 19 nt, Homo sapiens
  misc_RNA (1)...(19): siRNA sense strand
gaaucuucauuggcaccuu

SEQ ID NO: 477176 - RNA, 19 nt, Homo sapiens
  misc_RNA (1)...(19): siRNA sense strand
cagcacauugacuauagaa

SEQ ID NO: 477177 - RNA, 19 nt, Homo sapiens
  misc_RNA (1)...(19): siRNA sense strand
aagaucaagccaaagaaug

SEQ ID NO: 477178 - RNA, 19 nt, Homo sapiens
  misc_RNA (1)...(19): siRNA sense strand
ucagaaagaucaagccaaa

SEQ ID NO: 477179 - RNA, 19 nt, Homo sapiens
  misc_RNA (1)...(19): siRNA sense strand
ugaauuugauccucuguga

SEQ ID NO: 477180 - RNA, 19 nt, Homo sapiens
  misc_RNA (1)...(19): siRNA sense strand
ugagauguauccugcaaga

SEQ ID NO: 477181 - RNA, 19 nt, Homo sapiens
  misc_RNA (1)...(19): siRNA sense strand
gaaagaucaagccaaagaa

SEQ ID NO: 477182 - RNA, 19 nt, Homo sapiens
  misc_RNA (1)...(19): siRNA sense strand
gacuauagaaugagaugua

SEQ ID NO: 477183 - RNA, 19 nt, Homo sapiens
  misc_RNA (1)...(19): siRNA sense strand
ugacaagcauaugaauuug

SEQ ID NO: 477184 - RNA, 19 nt, Homo sapiens
  misc_RNA (1)...(19): siRNA sense strand
gcagcacauugacuauaga

SEQ ID NO: 477185 - RNA, 19 nt, Homo sapiens
  misc_RNA (1)...(19): siRNA sense strand
gcaaccagagcgugaagaa

SEQ ID NO: 477186 - RNA, 19 nt, Homo sapiens
  misc_RNA (1)...(19): siRNA sense strand
agaaagaucaagccaaaga

SEQ ID NO: 477187 - RNA, 19 nt, Homo sapiens
  misc_RNA (1)...(19): siRNA sense strand
ugugaugaguucagaaaga

SEQ ID NO: 477188 - RNA, 19 nt, Homo sapiens
  misc_RNA (1)...(19): siRNA sense strand
gugaugaguucagaaagau

SEQ ID NO: 477189 - RNA, 19 nt, Homo sapiens
  misc_RNA (1)...(19): siRNA sense strand
caaagauacuggcauugcu

SEQ ID NO: 477190 - RNA, 19 nt, Homo sapiens
  misc_RNA (1)...(19): siRNA sense strand
gacaagcauaugaauuuga

SEQ ID NO: 477191 - RNA, 19 nt, Homo sapiens
  misc_RNA (1)...(19): siRNA sense strand
aaucuucauuggcaccuuu

SEQ ID NO: 477192 - RNA, 19 nt, Homo sapiens
  misc_RNA (1)...(19): siRNA sense strand
gggaagaggcacuguagca

SEQ ID NO: 477193 - RNA, 19 nt, Homo sapiens
  misc_RNA (1)...(19): siRNA sense strand
gggagaacuugguauccau

SEQ ID NO: 477194 - RNA, 19 nt, Homo sapiens
  misc_RNA (1)...(19): siRNA sense strand
gaugaguucagaaagauca

SEQ ID NO: 477195 - RNA, 19 nt, Homo sapiens
  misc_RNA (1)...(19): siRNA sense strand
gauccucugugauugugau

SEQ ID NO: 477196 - RNA, 19 nt, Homo sapiens
  misc_RNA (1)...(19): siRNA sense strand
gaacuugguauccaugacu

SEQ ID NO: 477197 - RNA, 19 nt, Homo sapiens
  misc_RNA (1)...(19): siRNA sense strand
aaugagauguauccugcaa

SEQ ID NO: 477198 - RNA, 19 nt, Homo sapiens
  misc_RNA (1)...(19): siRNA sense strand
cccaugggcccaccaauug

SEQ ID NO: 477199 - RNA, 19 nt, Homo sapiens
  misc_RNA (1)...(19): siRNA sense strand
ggaccaucccagcagguaa

SEQ ID NO: 477200 - RNA, 19 nt, Homo sapiens
  misc_RNA (1)...(19): siRNA sense strand
aauuugauccucugugauu

SEQ ID NO: 477201 - RNA, 19 nt, Homo sapiens
  misc_RNA (1)...(19): siRNA sense strand
gccaaagaaugcgaagcaa

SEQ ID NO: 477202 - RNA, 19 nt, Homo sapiens
  misc_RNA (1)...(19): siRNA sense strand
aggaaugcguccaccaaga

SEQ ID NO: 477203 - RNA, 19 nt, Homo sapiens
  misc_RNA (1)...(19): siRNA sense strand
gauggccgaaucuucauug

SEQ ID NO: 477204 - RNA, 19 nt, Homo sapiens
  misc_RNA (1)...(19): siRNA sense strand
gagaacuugguauccauga

SEQ ID NO: 477205 - RNA, 19 nt, Homo sapiens
  misc_RNA (1)...(19): siRNA sense strand
gaagcaaccagagcgugaa

SEQ ID NO: 477206 - RNA, 19 nt, Homo sapiens
  misc_RNA (1)...(19): siRNA sense strand
agauguauccugcaagaug

SEQ ID NO: 477207 - RNA, 19 nt, Homo sapiens
  misc_RNA (1)...(19): siRNA sense strand
aaagaucaagccaaagaau

SEQ ID NO: 477208 - RNA, 19 nt, Homo sapiens
  misc_RNA (1)...(19): siRNA sense strand
ggaaugcguccaccaagac

SEQ ID NO: 477209 - RNA, 19 nt, Homo sapiens
  misc_RNA (1)...(19): siRNA sense strand
uggcaagaguagcaagaug

SEQ ID NO: 477210 - RNA, 19 nt, Homo sapiens
  misc_RNA (1)...(19): siRNA sense strand
caaccagagcgugaagaaa

SEQ ID NO: 477211 - RNA, 19 nt, Homo sapiens
  misc_RNA (1)...(19): siRNA sense strand
gcucgagggacgccaauag

SEQ ID NO: 477212 - RNA, 19 nt, Homo sapiens
  misc_RNA (1)...(19): siRNA sense strand
gaccaucccagcagguaau

SEQ ID NO: 477213 - RNA, 19 nt, Homo sapiens
  misc_RNA (1)...(19): siRNA sense strand
ugcagcacauugacuauag

SEQ ID NO: 477214 - RNA, 19 nt, Homo sapiens
  misc_RNA (1)...(19): siRNA sense strand
ccaggaaugcguccaccaa

SEQ ID NO: 477215 - RNA, 19 nt, Homo sapiens
  misc_RNA (1)...(19): siRNA sense strand
ccugcaagauggccgaauc

SEQ ID NO: 477216 - RNA, 19 nt, Homo sapiens
  misc_RNA (1)...(19): siRNA sense strand
ggcagcugguagaggagua

SEQ ID NO: 477217 - RNA, 19 nt, Homo sapiens
  misc_RNA (1)...(19): siRNA sense strand
ccaaagauacuggcauugc

SEQ ID NO: 477218 - RNA, 19 nt, Homo sapiens
  misc_RNA (1)...(19): siRNA sense strand
gaauuugauccucugugau

SEQ ID NO: 477219 - RNA, 19 nt, Homo sapiens
  misc_RNA (1)...(19): siRNA sense strand
ugauugugaugaguucaga

SEQ ID NO: 477220 - RNA, 19 nt, Homo sapiens
  misc_RNA (1)...(19): siRNA sense strand
cagggaagaggcacuguag

SEQ ID NO: 477221 - RNA, 19 nt, Homo sapiens
  misc_RNA (1)...(19): siRNA sense strand
gaaucuucauuggcaccuu

SEQ ID NO: 477222 - RNA, 19 nt, Homo sapiens
  misc_RNA (1)...(19): siRNA sense strand
cagcacauugacuauagaa

SEQ ID NO: 477223 - RNA, 19 nt, Homo sapiens
  misc_RNA (1)...(19): siRNA sense strand
aagaucaagccaaagaaug

SEQ ID NO: 477224 - RNA, 19 nt, Homo sapiens
  misc_RNA (1)...(19): siRNA sense strand
ucagaaagaucaagccaaa

SEQ ID NO: 477225 - RNA, 19 nt, Homo sapiens
  misc_RNA (1)...(19): siRNA sense strand
ugaauuugauccucuguga

SEQ ID NO: 477226 - RNA, 19 nt, Homo sapiens
  misc_RNA (1)...(19): siRNA sense strand
ugagauguauccugcaaga

SEQ ID NO: 477227 - RNA, 19 nt, Homo sapiens
  misc_RNA (1)...(19): siRNA sense strand
gaaagaucaagccaaagaa

SEQ ID NO: 477228 - RNA, 19 nt, Homo sapiens
  misc_RNA (1)...(19): siRNA sense strand
gacuauagaaugagaugua

SEQ ID NO: 477229 - RNA, 19 nt, Homo sapiens
  misc_RNA (1)...(19): siRNA sense strand
ugacaagcauaugaauuug

SEQ ID NO: 477230 - RNA, 19 nt, Homo sapiens
  misc_RNA (1)...(19): siRNA sense strand
gcagcacauugacuauaga

SEQ ID NO: 477231 - RNA, 19 nt, Homo sapiens
  misc_RNA (1)...(19): siRNA sense strand
gcaaccagagcgugaagaa

SEQ ID NO: 477232 - RNA, 19 nt, Homo sapiens
  misc_RNA (1)...(19): siRNA sense strand
agaaagaucaagccaaaga

SEQ ID NO: 477233 - RNA, 19 nt, Homo sapiens
  misc_RNA (1)...(19): siRNA sense strand
ugugaugaguucagaaaga

SEQ ID NO: 477234 - RNA, 19 nt, Homo sapiens
  misc_RNA (1)...(19): siRNA sense strand
gugaugaguucagaaagau

SEQ ID NO: 477235 - RNA, 19 nt, Homo sapiens
  misc_RNA (1)...(19): siRNA sense strand
caaagauacuggcauugcu

SEQ ID NO: 477236 - RNA, 19 nt, Homo sapiens
  misc_RNA (1)...(19): siRNA sense strand
gacaagcauaugaauuuga

SEQ ID NO: 477237 - RNA, 19 nt, Homo sapiens
  misc_RNA (1)...(19): siRNA sense strand
aaucuucauuggcaccuuu

SEQ ID NO: 477238 - RNA, 19 nt, Homo sapiens
  misc_RNA (1)...(19): siRNA sense strand
gggaagaggcacuguagca

SEQ ID NO: 477239 - RNA, 19 nt, Homo sapiens
  misc_RNA (1)...(19): siRNA sense strand
gggagaacuugguauccau

SEQ ID NO: 477240 - RNA, 19 nt, Homo sapiens
  misc_RNA (1)...(19): siRNA sense strand
gaugaguucagaaagauca

SEQ ID NO: 477241 - RNA, 19 nt, Homo sapiens
  misc_RNA (1)...(19): siRNA sense strand
gauccucugugauugugau

SEQ ID NO: 477242 - RNA, 19 nt, Homo sapiens
  misc_RNA (1)...(19): siRNA sense strand
gaacuugguauccaugacu

SEQ ID NO: 477243 - RNA, 19 nt, Homo sapiens
  misc_RNA (1)...(19): siRNA sense strand
aaugagauguauccugcaa

SEQ ID NO: 477244 - RNA, 19 nt, Homo sapiens
  misc_RNA (1)...(19): siRNA sense strand
cccaugggcccaccaauug

SEQ ID NO: 477245 - RNA, 19 nt, Homo sapiens
  misc_RNA (1)...(19): siRNA sense strand
ggaccaucccagcagguaa

SEQ ID NO: 477246 - RNA, 19 nt, Homo sapiens
  misc_RNA (1)...(19): siRNA sense strand
aauuugauccucugugauu

SEQ ID NO: 477247 - RNA, 19 nt, Homo sapiens
  misc_RNA (1)...(19): siRNA sense strand
gccaaagaaugcgaagcaa

SEQ ID NO: 477248 - RNA, 19 nt, Homo sapiens
  misc_RNA (1)...(19): siRNA sense strand
aggaaugcguccaccaaga

SEQ ID NO: 477249 - RNA, 19 nt, Homo sapiens
  misc_RNA (1)...(19): siRNA sense strand
gauggccgaaucuucauug

SEQ ID NO: 477250 - RNA, 19 nt, Homo sapiens
  misc_RNA (1)...(19): siRNA sense strand
gagaacuugguauccauga

SEQ ID NO: 477251 - RNA, 19 nt, Homo sapiens
  misc_RNA (1)...(19): siRNA sense strand
gaagcaaccagagcgugaa

SEQ ID NO: 477252 - RNA, 19 nt, Homo sapiens
  misc_RNA (1)...(19): siRNA sense strand
agauguauccugcaagaug

SEQ ID NO: 477253 - RNA, 19 nt, Homo sapiens
  misc_RNA (1)...(19): siRNA sense strand
aaagaucaagccaaagaau

SEQ ID NO: 477254 - RNA, 19 nt, Homo sapiens
  misc_RNA (1)...(19): siRNA sense strand
ggaaugcguccaccaagac

SEQ ID NO: 477255 - RNA, 19 nt, Homo sapiens
  misc_RNA (1)...(19): siRNA sense strand
uggcaagaguagcaagaug

SEQ ID NO: 477256 - RNA, 19 nt, Homo sapiens
  misc_RNA (1)...(19): siRNA sense strand
caaccagagcgugaagaaa

SEQ ID NO: 477257 - RNA, 19 nt, Homo sapiens
  misc_RNA (1)...(19): siRNA sense strand
gcucgagggacgccaauag

SEQ ID NO: 477258 - RNA, 19 nt, Homo sapiens
  misc_RNA (1)...(19): siRNA sense strand
gaccaucccagcagguaau

SEQ ID NO: 477259 - RNA, 19 nt, Homo sapiens
  misc_RNA (1)...(19): siRNA sense strand
ugcagcacauugacuauag

SEQ ID NO: 477260 - RNA, 19 nt, Homo sapiens
  misc_RNA (1)...(19): siRNA sense strand
ccaggaaugcguccaccaa

SEQ ID NO: 477261 - RNA, 19 nt, Homo sapiens
  misc_RNA (1)...(19): siRNA sense strand
ccugcaagauggccgaauc

SEQ ID NO: 477262 - RNA, 19 nt, Homo sapiens
  misc_RNA (1)...(19): siRNA sense strand
ggcagcugguagaggagua

SEQ ID NO: 477263 - RNA, 19 nt, Homo sapiens
  misc_RNA (1)...(19): siRNA sense strand
ccaaagauacuggcauugc

SEQ ID NO: 477264 - RNA, 19 nt, Homo sapiens
  misc_RNA (1)...(19): siRNA sense strand
gaauuugauccucugugau

SEQ ID NO: 477265 - RNA, 19 nt, Homo sapiens
  misc_RNA (1)...(19): siRNA sense strand
ugauugugaugaguucaga

SEQ ID NO: 477266 - RNA, 19 nt, Homo sapiens
  misc_RNA (1)...(19): siRNA sense strand
cagggaagaggcacuguag

SEQ ID NO: 477267 - RNA, 19 nt, Homo sapiens
  misc_RNA (1)...(19): siRNA sense strand
gaaucuucauuggcaccuu

SEQ ID NO: 477268 - RNA, 19 nt, Homo sapiens
  misc_RNA (1)...(19): siRNA sense strand
cagcacauugacuauagaa

SEQ ID NO: 477269 - RNA, 19 nt, Homo sapiens
  misc_RNA (1)...(19): siRNA sense strand
aagaucaagccaaagaaug

SEQ ID NO: 477270 - RNA, 19 nt, Homo sapiens
  misc_RNA (1)...(19): siRNA sense strand
ggagaccauugaccagaua

SEQ ID NO: 477271 - RNA, 19 nt, Homo sapiens
  misc_RNA (1)...(19): siRNA sense strand
gagaaggugauuaaagaua

SEQ ID NO: 477272 - RNA, 19 nt, Homo sapiens
  misc_RNA (1)...(19): siRNA sense strand
gaggagacccugcugcuuu

SEQ ID NO: 477273 - RNA, 19 nt, Homo sapiens
  misc_RNA (1)...(19): siRNA sense strand
gcacagcccucagcaucaa

SEQ ID NO: 477274 - RNA, 19 nt, Homo sapiens
  misc_RNA (1)...(19): siRNA sense strand
uggagaaggugauuaaaga

SEQ ID NO: 477275 - RNA, 19 nt, Homo sapiens
  misc_RNA (1)...(19): siRNA sense strand
ucaaccagcugagggagua

SEQ ID NO: 477276 - RNA, 19 nt, Homo sapiens
  misc_RNA (1)...(19): siRNA sense strand
gaccgaaagucuccugcuu

SEQ ID NO: 477277 - RNA, 19 nt, Homo sapiens
  misc_RNA (1)...(19): siRNA sense strand
ggacuccgaucgcgauguc

SEQ ID NO: 477278 - RNA, 19 nt, Homo sapiens
  misc_RNA (1)...(19): siRNA sense strand
ucugacagcuccaugagau

SEQ ID NO: 477279 - RNA, 19 nt, Homo sapiens
  misc_RNA (1)...(19): siRNA sense strand
gauacggagucccuguuca

SEQ ID NO: 477280 - RNA, 19 nt, Homo sapiens
  misc_RNA (1)...(19): siRNA sense strand
gaggauuucucaggcuaug

SEQ ID NO: 477281 - RNA, 19 nt, Homo sapiens
  misc_RNA (1)...(19): siRNA sense strand
agaaggugauuaaagauac

SEQ ID NO: 477282 - RNA, 19 nt, Homo sapiens
  misc_RNA (1)...(19): siRNA sense strand
ggagaaggugauuaaagau

SEQ ID NO: 477283 - RNA, 19 nt, Homo sapiens
  misc_RNA (1)...(19): siRNA sense strand
ugacuugggaggagacuga

SEQ ID NO: 477284 - RNA, 19 nt, Homo sapiens
  misc_RNA (1)...(19): siRNA sense strand
aagauagccuggagaaggu

SEQ ID NO: 477285 - RNA, 19 nt, Homo sapiens
  misc_RNA (1)...(19): siRNA sense strand
cagcugagggaguaugauu

SEQ ID NO: 477286 - RNA, 19 nt, Homo sapiens
  misc_RNA (1)...(19): siRNA sense strand
gaaggugauuaaagauacg

SEQ ID NO: 477287 - RNA, 19 nt, Homo sapiens
  misc_RNA (1)...(19): siRNA sense strand
auggagaugugcagcauga

SEQ ID NO: 477288 - RNA, 19 nt, Homo sapiens
  misc_RNA (1)...(19): siRNA sense strand
aggagacccugcugcuuug

SEQ ID NO: 477289 - RNA, 19 nt, Homo sapiens
  misc_RNA (1)...(19): siRNA sense strand
gccuggagaaggugauuaa

SEQ ID NO: 477290 - RNA, 19 nt, Homo sapiens
  misc_RNA (1)...(19): siRNA sense strand
ggagaugugcagcaugaag

SEQ ID NO: 477291 - RNA, 19 nt, Homo sapiens
  misc_RNA (1)...(19): siRNA sense strand
gcacgaguacauggagaug

SEQ ID NO: 477292 - RNA, 19 nt, Homo sapiens
  misc_RNA (1)...(19): siRNA sense strand
gcaccugcacgaguacaug

SEQ ID NO: 477293 - RNA, 19 nt, Homo sapiens
  misc_RNA (1)...(19): siRNA sense strand
ugacagcuccaugagauag

SEQ ID NO: 477294 - RNA, 19 nt, Homo sapiens
  misc_RNA (1)...(19): siRNA sense strand
gaguaucaggagaccauug

SEQ ID NO: 477295 - RNA, 19 nt, Homo sapiens
  misc_RNA (1)...(19): siRNA sense strand
ggaggauuucucaggcuau

SEQ ID NO: 477296 - RNA, 19 nt, Homo sapiens
  misc_RNA (1)...(19): siRNA sense strand
gccuggacgugcagaugga

SEQ ID NO: 477297 - RNA, 19 nt, Homo sapiens
  misc_RNA (1)...(19): siRNA sense strand
accggcaccugcacgagua

SEQ ID NO: 477298 - RNA, 19 nt, Homo sapiens
  misc_RNA (1)...(19): siRNA sense strand
aaacccgggagaaggagua

SEQ ID NO: 477299 - RNA, 19 nt, Homo sapiens
  misc_RNA (1)...(19): siRNA sense strand
gcugagggaguaugauuuu

SEQ ID NO: 477300 - RNA, 19 nt, Homo sapiens
  misc_RNA (1)...(19): siRNA sense strand
ggagaccauugaccagaua

SEQ ID NO: 477301 - RNA, 19 nt, Homo sapiens
  misc_RNA (1)...(19): siRNA sense strand
gagaaggugauuaaagaua

SEQ ID NO: 477302 - RNA, 19 nt, Homo sapiens
  misc_RNA (1)...(19): siRNA sense strand
gaggagacccugcugcuuu

SEQ ID NO: 477303 - RNA, 19 nt, Homo sapiens
  misc_RNA (1)...(19): siRNA sense strand
gcacagcccucagcaucaa

SEQ ID NO: 477304 - RNA, 19 nt, Homo sapiens
  misc_RNA (1)...(19): siRNA sense strand
uggagaaggugauuaaaga

SEQ ID NO: 477305 - RNA, 19 nt, Homo sapiens
  misc_RNA (1)...(19): siRNA sense strand
ucaaccagcugagggagua

SEQ ID NO: 477306 - RNA, 19 nt, Homo sapiens
  misc_RNA (1)...(19): siRNA sense strand
gaccgaaagucuccugcuu

SEQ ID NO: 477307 - RNA, 19 nt, Homo sapiens
  misc_RNA (1)...(19): siRNA sense strand
ggacuccgaucgcgauguc

SEQ ID NO: 477308 - RNA, 19 nt, Homo sapiens
  misc_RNA (1)...(19): siRNA sense strand
ucugacagcuccaugagau

SEQ ID NO: 477309 - RNA, 19 nt, Homo sapiens
  misc_RNA (1)...(19): siRNA sense strand
gauacggagucccuguuca

SEQ ID NO: 477310 - RNA, 19 nt, Homo sapiens
  misc_RNA (1)...(19): siRNA sense strand
gaggauuucucaggcuaug

SEQ ID NO: 477311 - RNA, 19 nt, Homo sapiens
  misc_RNA (1)...(19): siRNA sense strand
agaaggugauuaaagauac

SEQ ID NO: 477312 - RNA, 19 nt, Homo sapiens
  misc_RNA (1)...(19): siRNA sense strand
ggagaaggugauuaaagau

SEQ ID NO: 477313 - RNA, 19 nt, Homo sapiens
  misc_RNA (1)...(19): siRNA sense strand
ugacuugggaggagacuga

SEQ ID NO: 477314 - RNA, 19 nt, Homo sapiens
  misc_RNA (1)...(19): siRNA sense strand
aagauagccuggagaaggu

SEQ ID NO: 477315 - RNA, 19 nt, Homo sapiens
  misc_RNA (1)...(19): siRNA sense strand
cagcugagggaguaugauu

SEQ ID NO: 477316 - RNA, 19 nt, Homo sapiens
  misc_RNA (1)...(19): siRNA sense strand
gaaggugauuaaagauacg

SEQ ID NO: 477317 - RNA, 19 nt, Homo sapiens
  misc_RNA (1)...(19): siRNA sense strand
auggagaugugcagcauga

SEQ ID NO: 477318 - RNA, 19 nt, Homo sapiens
  misc_RNA (1)...(19): siRNA sense strand
aggagacccugcugcuuug

SEQ ID NO: 477319 - RNA, 19 nt, Homo sapiens
  misc_RNA (1)...(19): siRNA sense strand
gccuggagaaggugauuaa

SEQ ID NO: 477320 - RNA, 19 nt, Homo sapiens
  misc_RNA (1)...(19): siRNA sense strand
ggagaugugcagcaugaag

SEQ ID NO: 477321 - RNA, 19 nt, Homo sapiens
  misc_RNA (1)...(19): siRNA sense strand
gcacgaguacauggagaug

SEQ ID NO: 477322 - RNA, 19 nt, Homo sapiens
  misc_RNA (1)...(19): siRNA sense strand
gcaccugcacgaguacaug

SEQ ID NO: 477323 - RNA, 19 nt, Homo sapiens
  misc_RNA (1)...(19): siRNA sense strand
ugacagcuccaugagauag

SEQ ID NO: 477324 - RNA, 19 nt, Homo sapiens
  misc_RNA (1)...(19): siRNA sense strand
gaguaucaggagaccauug

SEQ ID NO: 477325 - RNA, 19 nt, Homo sapiens
  misc_RNA (1)...(19): siRNA sense strand
ggaggauuucucaggcuau

SEQ ID NO: 477326 - RNA, 19 nt, Homo sapiens
  misc_RNA (1)...(19): siRNA sense strand
gccuggacgugcagaugga

SEQ ID NO: 477327 - RNA, 19 nt, Homo sapiens
  misc_RNA (1)...(19): siRNA sense strand
accggcaccugcacgagua

SEQ ID NO: 477328 - RNA, 19 nt, Homo sapiens
  misc_RNA (1)...(19): siRNA sense strand
aaacccgggagaaggagua

SEQ ID NO: 477329 - RNA, 19 nt, Homo sapiens
  misc_RNA (1)...(19): siRNA sense strand
gcugagggaguaugauuuu

SEQ ID NO: 477330 - RNA, 19 nt, Homo sapiens
  misc_RNA (1)...(19): siRNA sense strand
gaaauuagcucgcuugaau

SEQ ID NO: 477331 - RNA, 19 nt, Homo sapiens
  misc_RNA (1)...(19): siRNA sense strand
gcacaagauguuccaaaua

SEQ ID NO: 477332 - RNA, 19 nt, Homo sapiens
  misc_RNA (1)...(19): siRNA sense strand
ccaauacccuucuucuuca

SEQ ID NO: 477333 - RNA, 19 nt, Homo sapiens
  misc_RNA (1)...(19): siRNA sense strand
guacucagguugucaaugc

SEQ ID NO: 477334 - RNA, 19 nt, Homo sapiens
  misc_RNA (1)...(19): siRNA sense strand
ucacagcgaccaaaguuaa

SEQ ID NO: 477335 - RNA, 19 nt, Homo sapiens
  misc_RNA (1)...(19): siRNA sense strand
cacaagauguuccaaauac

SEQ ID NO: 477336 - RNA, 19 nt, Homo sapiens
  misc_RNA (1)...(19): siRNA sense strand
gggaaugcaggagaaauua

SEQ ID NO: 477337 - RNA, 19 nt, Homo sapiens
  misc_RNA (1)...(19): siRNA sense strand
gggcaaaggcgcucaguca

SEQ ID NO: 477338 - RNA, 19 nt, Homo sapiens
  misc_RNA (1)...(19): siRNA sense strand
caaaggcgcucagucaacu

SEQ ID NO: 477339 - RNA, 19 nt, Homo sapiens
  misc_RNA (1)...(19): siRNA sense strand
aaauacuucugcuagcuaa

SEQ ID NO: 477340 - RNA, 19 nt, Homo sapiens
  misc_RNA (1)...(19): siRNA sense strand
caaauacuucugcuagcua

SEQ ID NO: 477341 - RNA, 19 nt, Homo sapiens
  misc_RNA (1)...(19): siRNA sense strand
agagagggcugcucagucu

SEQ ID NO: 477342 - RNA, 19 nt, Homo sapiens
  misc_RNA (1)...(19): siRNA sense strand
caagauguuccaaauacuu

SEQ ID NO: 477343 - RNA, 19 nt, Homo sapiens
  misc_RNA (1)...(19): siRNA sense strand
uugaacagauggaacaugu

SEQ ID NO: 477344 - RNA, 19 nt, Homo sapiens
  misc_RNA (1)...(19): siRNA sense strand
cccaauacccuucuucuuc

SEQ ID NO: 477345 - RNA, 19 nt, Homo sapiens
  misc_RNA (1)...(19): siRNA sense strand
gaagagcggaaagugaaga

SEQ ID NO: 477346 - RNA, 19 nt, Homo sapiens
  misc_RNA (1)...(19): siRNA sense strand
gcaaaggcgcucagucaac

SEQ ID NO: 477347 - RNA, 19 nt, Homo sapiens
  misc_RNA (1)...(19): siRNA sense strand
uggaagagcggaaagugaa

SEQ ID NO: 477348 - RNA, 19 nt, Homo sapiens
  misc_RNA (1)...(19): siRNA sense strand
gcuugaauuuggagcucua

SEQ ID NO: 477349 - RNA, 19 nt, Homo sapiens
  misc_RNA (1)...(19): siRNA sense strand
ccaaauacuucugcuagcu

SEQ ID NO: 477350 - RNA, 19 nt, Homo sapiens
  misc_RNA (1)...(19): siRNA sense strand
caacuucacagcgaccaaa

SEQ ID NO: 477351 - RNA, 19 nt, Homo sapiens
  misc_RNA (1)...(19): siRNA sense strand
gagaaauuagcucgcuuga

SEQ ID NO: 477352 - RNA, 19 nt, Homo sapiens
  misc_RNA (1)...(19): siRNA sense strand
aaacuucaagcauuuggaa

SEQ ID NO: 477353 - RNA, 19 nt, Homo sapiens
  misc_RNA (1)...(19): siRNA sense strand
gaagcuggccguggugcaa

SEQ ID NO: 477354 - RNA, 19 nt, Homo sapiens
  misc_RNA (1)...(19): siRNA sense strand
uuagcucgcuugaauuugg

SEQ ID NO: 477355 - RNA, 19 nt, Homo sapiens
  misc_RNA (1)...(19): siRNA sense strand
ggaaugcaggagaaauuag

SEQ ID NO: 477356 - RNA, 19 nt, Homo sapiens
  misc_RNA (1)...(19): siRNA sense strand
uggaaaacuucaagcauuu

SEQ ID NO: 477357 - RNA, 19 nt, Homo sapiens
  misc_RNA (1)...(19): siRNA sense strand
ugcacaagauguuccaaau

SEQ ID NO: 477358 - RNA, 19 nt, Homo sapiens
  misc_RNA (1)...(19): siRNA sense strand
gcacaggguuuucaaaucc

SEQ ID NO: 477359 - RNA, 19 nt, Homo sapiens
  misc_RNA (1)...(19): siRNA sense strand
ggagcucuauggggaguua

SEQ ID NO: 477360 - RNA, 19 nt, Homo sapiens
  misc_RNA (1)...(19): siRNA sense strand
ggagagagggcugcucagu

SEQ ID NO: 477361 - RNA, 19 nt, Homo sapiens
  misc_RNA (1)...(19): siRNA sense strand
uuucaaauccugcaucaca

SEQ ID NO: 477362 - RNA, 19 nt, Homo sapiens
  misc_RNA (1)...(19): siRNA sense strand
gcagaugcacaagauguuc

SEQ ID NO: 477363 - RNA, 19 nt, Homo sapiens
  misc_RNA (1)...(19): siRNA sense strand
cuuccucacugaugucuca

SEQ ID NO: 477364 - RNA, 19 nt, Homo sapiens
  misc_RNA (1)...(19): siRNA sense strand
agagggcugcucagucuuu

SEQ ID NO: 477365 - RNA, 19 nt, Homo sapiens
  misc_RNA (1)...(19): siRNA sense strand
cgucacuuccguaaacaaa

SEQ ID NO: 477366 - RNA, 19 nt, Homo sapiens
  misc_RNA (1)...(19): siRNA sense strand
aaacagccagugacuccaa

SEQ ID NO: 477367 - RNA, 19 nt, Homo sapiens
  misc_RNA (1)...(19): siRNA sense strand
ggcaaaggcgcucagucaa

SEQ ID NO: 477368 - RNA, 19 nt, Homo sapiens
  misc_RNA (1)...(19): siRNA sense strand
ccacuguacucagguuguc

SEQ ID NO: 477369 - RNA, 19 nt, Homo sapiens
  misc_RNA (1)...(19): siRNA sense strand
ccauuuggcagaugcacaa

SEQ ID NO: 477370 - RNA, 19 nt, Homo sapiens
  misc_RNA (1)...(19): siRNA sense strand
cuggaaaacuucaagcauu

SEQ ID NO: 477371 - RNA, 19 nt, Homo sapiens
  misc_RNA (1)...(19): siRNA sense strand
cuucacagcgaccaaaguu

SEQ ID NO: 477372 - RNA, 19 nt, Homo sapiens
  misc_RNA (1)...(19): siRNA sense strand
ucacuuccguaaacaaacg

SEQ ID NO: 477373 - RNA, 19 nt, Homo sapiens
  misc_RNA (1)...(19): siRNA sense strand
ggcagaugcacaagauguu

SEQ ID NO: 477374 - RNA, 19 nt, Homo sapiens
  misc_RNA (1)...(19): siRNA sense strand
ggaagagcggaaagugaag

SEQ ID NO: 477375 - RNA, 19 nt, Homo sapiens
  misc_RNA (1)...(19): siRNA sense strand
aaacuccauuuggcagaug

SEQ ID NO: 477376 - RNA, 19 nt, Homo sapiens
  misc_RNA (1)...(19): siRNA sense strand
gaaugcaggagaaauuagc

SEQ ID NO: 477377 - RNA, 19 nt, Homo sapiens
  misc_RNA (1)...(19): siRNA sense strand
caucacagucaacuucaca

SEQ ID NO: 477378 - RNA, 19 nt, Homo sapiens
  misc_RNA (1)...(19): siRNA sense strand
acaagauguuccaaauacu

SEQ ID NO: 477379 - RNA, 19 nt, Homo sapiens
  misc_RNA (1)...(19): siRNA sense strand
uuuggcagaugcacaagau

SEQ ID NO: 477380 - RNA, 19 nt, Homo sapiens
  misc_RNA (1)...(19): siRNA sense strand
cugaggcugucgggucuuu

SEQ ID NO: 477381 - RNA, 19 nt, Homo sapiens
  misc_RNA (1)...(19): siRNA sense strand
gaaauucccugaguuguuu

SEQ ID NO: 477382 - RNA, 19 nt, Homo sapiens
  misc_RNA (1)...(19): siRNA sense strand
uaaagcagcugacaucauu

SEQ ID NO: 477383 - RNA, 19 nt, Homo sapiens
  misc_RNA (1)...(19): siRNA sense strand
gaggauauaugcugauaaa

SEQ ID NO: 477384 - RNA, 19 nt, Homo sapiens
  misc_RNA (1)...(19): siRNA sense strand
caagaagacucaauaugaa

SEQ ID NO: 477385 - RNA, 19 nt, Homo sapiens
  misc_RNA (1)...(19): siRNA sense strand
gcagagaaaugccaaggaa

SEQ ID NO: 477386 - RNA, 19 nt, Homo sapiens
  misc_RNA (1)...(19): siRNA sense strand
ggaauucaguacucuguaa

SEQ ID NO: 477387 - RNA, 19 nt, Homo sapiens
  misc_RNA (1)...(19): siRNA sense strand
uaacaaguaucgugucaaa

SEQ ID NO: 477388 - RNA, 19 nt, Homo sapiens
  misc_RNA (1)...(19): siRNA sense strand
gaacauauuuaucguugug

SEQ ID NO: 477389 - RNA, 19 nt, Homo sapiens
  misc_RNA (1)...(19): siRNA sense strand
ggagauagauuaugcuucu

SEQ ID NO: 477390 - RNA, 19 nt, Homo sapiens
  misc_RNA (1)...(19): siRNA sense strand
ccaagaagacucaauauga

SEQ ID NO: 477391 - RNA, 19 nt, Homo sapiens
  misc_RNA (1)...(19): siRNA sense strand
aaacuacacuccagcauug

SEQ ID NO: 477392 - RNA, 19 nt, Homo sapiens
  misc_RNA (1)...(19): siRNA sense strand
gcaagaagaccauggagaa

SEQ ID NO: 477393 - RNA, 19 nt, Homo sapiens
  misc_RNA (1)...(19): siRNA sense strand
ucagacagcugcagcauau

SEQ ID NO: 477394 - RNA, 19 nt, Homo sapiens
  misc_RNA (1)...(19): siRNA sense strand
gagaaagaaucccuccauu

SEQ ID NO: 477395 - RNA, 19 nt, Homo sapiens
  misc_RNA (1)...(19): siRNA sense strand
gaagguugauucugugaga

SEQ ID NO: 477396 - RNA, 19 nt, Homo sapiens
  misc_RNA (1)...(19): siRNA sense strand
gggaucaacuuuaaacaga

SEQ ID NO: 477397 - RNA, 19 nt, Homo sapiens
  misc_RNA (1)...(19): siRNA sense strand
acaaguaucgugucaaaua

SEQ ID NO: 477398 - RNA, 19 nt, Homo sapiens
  misc_RNA (1)...(19): siRNA sense strand
gaaggaaacagcaagaaga

SEQ ID NO: 477399 - RNA, 19 nt, Homo sapiens
  misc_RNA (1)...(19): siRNA sense strand
caaggaagcuggaggaaac

SEQ ID NO: 477400 - RNA, 19 nt, Homo sapiens
  misc_RNA (1)...(19): siRNA sense strand
caaagaaccuauggauguu

SEQ ID NO: 477401 - RNA, 19 nt, Homo sapiens
  misc_RNA (1)...(19): siRNA sense strand
ccagguugcucgucucuuu

SEQ ID NO: 477402 - RNA, 19 nt, Homo sapiens
  misc_RNA (1)...(19): siRNA sense strand
ggacuccucucuguaaaga

SEQ ID NO: 477403 - RNA, 19 nt, Homo sapiens
  misc_RNA (1)...(19): siRNA sense strand
gagaguaucuaugaugaga

SEQ ID NO: 477404 - RNA, 19 nt, Homo sapiens
  misc_RNA (1)...(19): siRNA sense strand
caucagaagucauccauag

SEQ ID NO: 477405 - RNA, 19 nt, Homo sapiens
  misc_RNA (1)...(19): siRNA sense strand
ggaggagaaugcuggugua

SEQ ID NO: 477406 - RNA, 19 nt, Homo sapiens
  misc_RNA (1)...(19): siRNA sense strand
gaaagaaucccuccauugc

SEQ ID NO: 477407 - RNA, 19 nt, Homo sapiens
  misc_RNA (1)...(19): siRNA sense strand
gaaacuacacuccagcauu

SEQ ID NO: 477408 - RNA, 19 nt, Homo sapiens
  misc_RNA (1)...(19): siRNA sense strand
gcagagcgcuggucagacu

SEQ ID NO: 477409 - RNA, 19 nt, Homo sapiens
  misc_RNA (1)...(19): siRNA sense strand
agaaggaggacaaauauaa

SEQ ID NO: 477410 - RNA, 19 nt, Homo sapiens
  misc_RNA (1)...(19): siRNA sense strand
gaagauuuguugucagagu

SEQ ID NO: 477411 - RNA, 19 nt, Homo sapiens
  misc_RNA (1)...(19): siRNA sense strand
gccaucaacuauguuaaua

SEQ ID NO: 477412 - RNA, 19 nt, Homo sapiens
  misc_RNA (1)...(19): siRNA sense strand
ucaaagaaccuauggaugu

SEQ ID NO: 477413 - RNA, 19 nt, Homo sapiens
  misc_RNA (1)...(19): siRNA sense strand
uauacaaccucuucuaugu

SEQ ID NO: 477414 - RNA, 19 nt, Homo sapiens
  misc_RNA (1)...(19): siRNA sense strand
ggaggaagaggaagaagaa

SEQ ID NO: 477415 - RNA, 19 nt, Homo sapiens
  misc_RNA (1)...(19): siRNA sense strand
ucagagaggcuuuaacaaa

SEQ ID NO: 477416 - RNA, 19 nt, Homo sapiens
  misc_RNA (1)...(19): siRNA sense strand
gcagucagcuacgggaauu

SEQ ID NO: 477417 - RNA, 19 nt, Homo sapiens
  misc_RNA (1)...(19): siRNA sense strand
gggcauugcuauggagaua

SEQ ID NO: 477418 - RNA, 19 nt, Homo sapiens
  misc_RNA (1)...(19): siRNA sense strand
ggaggacaaauauaagaua

SEQ ID NO: 477419 - RNA, 19 nt, Homo sapiens
  misc_RNA (1)...(19): siRNA sense strand
ugacagagcaggaggugua

SEQ ID NO: 477420 - RNA, 19 nt, Homo sapiens
  misc_RNA (1)...(19): siRNA sense strand
aagaagagauggauguaga

SEQ ID NO: 477421 - RNA, 19 nt, Homo sapiens
  misc_RNA (1)...(19): siRNA sense strand
uaucgagccuuaccaaaga

SEQ ID NO: 477422 - RNA, 19 nt, Homo sapiens
  misc_RNA (1)...(19): siRNA sense strand
caaucaaccuguggaguuu

SEQ ID NO: 477423 - RNA, 19 nt, Homo sapiens
  misc_RNA (1)...(19): siRNA sense strand
ugaagaacaagccaaauuu

SEQ ID NO: 477424 - RNA, 19 nt, Homo sapiens
  misc_RNA (1)...(19): siRNA sense strand
ccaaacugcucaaucugaa

SEQ ID NO: 477425 - RNA, 19 nt, Homo sapiens
  misc_RNA (1)...(19): siRNA sense strand
ggacaauuccuaccagaug

SEQ ID NO: 477426 - RNA, 19 nt, Homo sapiens
  misc_RNA (1)...(19): siRNA sense strand
gcacacauaucagaaagag

SEQ ID NO: 477427 - RNA, 19 nt, Homo sapiens
  misc_RNA (1)...(19): siRNA sense strand
uggauaagcuggaguguag

SEQ ID NO: 477428 - RNA, 19 nt, Homo sapiens
  misc_RNA (1)...(19): siRNA sense strand
gggaagugcugggcauaaa

SEQ ID NO: 477429 - RNA, 19 nt, Homo sapiens
  misc_RNA (1)...(19): siRNA sense strand
agagauggauguagaugaa

SEQ ID NO: 477430 - RNA, 19 nt, Homo sapiens
  misc_RNA (1)...(19): siRNA sense strand
gaaaagcacuccagaggau

SEQ ID NO: 477431 - RNA, 19 nt, Homo sapiens
  misc_RNA (1)...(19): siRNA sense strand
cuguacaucuggaaacuua

SEQ ID NO: 477432 - RNA, 19 nt, Homo sapiens
  misc_RNA (1)...(19): siRNA sense strand
gccaacagcuccgugcuuu

SEQ ID NO: 477433 - RNA, 19 nt, Homo sapiens
  misc_RNA (1)...(19): siRNA sense strand
ggagguguaugcccagguu

SEQ ID NO: 477434 - RNA, 19 nt, Homo sapiens
  misc_RNA (1)...(19): siRNA sense strand
gaucaaaucagaggacuau

SEQ ID NO: 477435 - RNA, 19 nt, Homo sapiens
  misc_RNA (1)...(19): siRNA sense strand
gaagaacaagccaaauuuc

SEQ ID NO: 477436 - RNA, 19 nt, Homo sapiens
  misc_RNA (1)...(19): siRNA sense strand
uuccuacgcugucuuguua

SEQ ID NO: 477437 - RNA, 19 nt, Homo sapiens
  misc_RNA (1)...(19): siRNA sense strand
ccucaggucuacaaugauu

SEQ ID NO: 477438 - RNA, 19 nt, Homo sapiens
  misc_RNA (1)...(19): siRNA sense strand
auacagagacccugcauuu

SEQ ID NO: 477439 - RNA, 19 nt, Homo sapiens
  misc_RNA (1)...(19): siRNA sense strand
agagagauguucaccauuc

SEQ ID NO: 477440 - RNA, 19 nt, Homo sapiens
  misc_RNA (1)...(19): siRNA sense strand
ccaggaagauuuguuguca

SEQ ID NO: 477441 - RNA, 19 nt, Homo sapiens
  misc_RNA (1)...(19): siRNA sense strand
gugaacaucuagcacagaa

SEQ ID NO: 477442 - RNA, 19 nt, Homo sapiens
  misc_RNA (1)...(19): siRNA sense strand
cagaggauauaugcugaua

SEQ ID NO: 477443 - RNA, 19 nt, Homo sapiens
  misc_RNA (1)...(19): siRNA sense strand
cagaagucauccauagaaa

SEQ ID NO: 477444 - RNA, 19 nt, Homo sapiens
  misc_RNA (1)...(19): siRNA sense strand
ggaucaacuuuaaacagaa

SEQ ID NO: 477445 - RNA, 19 nt, Homo sapiens
  misc_RNA (1)...(19): siRNA sense strand
cagacuacguggagcgaua

SEQ ID NO: 477446 - RNA, 19 nt, Homo sapiens
  misc_RNA (1)...(19): siRNA sense strand
ugagagagauguucaccau

SEQ ID NO: 477447 - RNA, 19 nt, Homo sapiens
  misc_RNA (1)...(19): siRNA sense strand
gaugcgcuaucuuaucuug

SEQ ID NO: 477448 - RNA, 19 nt, Homo sapiens
  misc_RNA (1)...(19): siRNA sense strand
gaauguggauagucuggau

SEQ ID NO: 477449 - RNA, 19 nt, Homo sapiens
  misc_RNA (1)...(19): siRNA sense strand
aaacugauccagagcauug

SEQ ID NO: 477450 - RNA, 19 nt, Homo sapiens
  misc_RNA (1)...(19): siRNA sense strand
caacaacaacugguauauu

SEQ ID NO: 477451 - RNA, 19 nt, Homo sapiens
  misc_RNA (1)...(19): siRNA sense strand
uaagaggaauggaugaagu

SEQ ID NO: 477452 - RNA, 19 nt, Homo sapiens
  misc_RNA (1)...(19): siRNA sense strand
gaugaaagaggaagaaugg

SEQ ID NO: 477453 - RNA, 19 nt, Homo sapiens
  misc_RNA (1)...(19): siRNA sense strand
ccgcuugucugcugaagaa

SEQ ID NO: 477454 - RNA, 19 nt, Homo sapiens
  misc_RNA (1)...(19): siRNA sense strand
agaccaaucuggcaacaau

SEQ ID NO: 477455 - RNA, 19 nt, Homo sapiens
  misc_RNA (1)...(19): siRNA sense strand
ggucuacaaugauuuccuu

SEQ ID NO: 477456 - RNA, 19 nt, Homo sapiens
  misc_RNA (1)...(19): siRNA sense strand
gaugguguaugugaucaaa

SEQ ID NO: 477457 - RNA, 19 nt, Homo sapiens
  misc_RNA (1)...(19): siRNA sense strand
gaagauucacugagagaga

SEQ ID NO: 477458 - RNA, 19 nt, Homo sapiens
  misc_RNA (1)...(19): siRNA sense strand
ggauguugauguagaagau

SEQ ID NO: 477459 - RNA, 19 nt, Homo sapiens
  misc_RNA (1)...(19): siRNA sense strand
agacaggcauucagaagga

SEQ ID NO: 477460 - RNA, 19 nt, Homo sapiens
  misc_RNA (1)...(19): siRNA sense strand
ccaagguccugaggucuaa

SEQ ID NO: 477461 - RNA, 19 nt, Homo sapiens
  misc_RNA (1)...(19): siRNA sense strand
caaaggagcgagccacaga

SEQ ID NO: 477462 - RNA, 19 nt, Homo sapiens
  misc_RNA (1)...(19): siRNA sense strand
ggaacagaaucguuauuuu

SEQ ID NO: 477463 - RNA, 19 nt, Homo sapiens
  misc_RNA (1)...(19): siRNA sense strand
aaauugaggugcaaaccaa

SEQ ID NO: 477464 - RNA, 19 nt, Homo sapiens
  misc_RNA (1)...(19): siRNA sense strand
gcagaugccagcaaacaug

SEQ ID NO: 477465 - RNA, 19 nt, Homo sapiens
  misc_RNA (1)...(19): siRNA sense strand
aaucagaggacuauaugua

SEQ ID NO: 477466 - RNA, 19 nt, Homo sapiens
  misc_RNA (1)...(19): siRNA sense strand
ggacagcagcaauuucaga

SEQ ID NO: 477467 - RNA, 19 nt, Homo sapiens
  misc_RNA (1)...(19): siRNA sense strand
caaaucagaggacuauaug

SEQ ID NO: 477468 - RNA, 19 nt, Homo sapiens
  misc_RNA (1)...(19): siRNA sense strand
ucagcuacgucucaaagaa

SEQ ID NO: 477469 - RNA, 19 nt, Homo sapiens
  misc_RNA (1)...(19): siRNA sense strand
acaaacaaauacuggaaga

SEQ ID NO: 477470 - RNA, 19 nt, Homo sapiens
  misc_RNA (1)...(19): siRNA sense strand
gcucagagaggcuuuaaca

SEQ ID NO: 477471 - RNA, 19 nt, Homo sapiens
  misc_RNA (1)...(19): siRNA sense strand
gcuuugagcuugauguagu

SEQ ID NO: 477472 - RNA, 19 nt, Homo sapiens
  misc_RNA (1)...(19): siRNA sense strand
ggacggacuccucucugua

SEQ ID NO: 477473 - RNA, 19 nt, Homo sapiens
  misc_RNA (1)...(19): siRNA sense strand
ucccugaguuguuuaauug

SEQ ID NO: 477474 - RNA, 19 nt, Homo sapiens
  misc_RNA (1)...(19): siRNA sense strand
guggagcgauacaugaauu

SEQ ID NO: 477475 - RNA, 19 nt, Homo sapiens
  misc_RNA (1)...(19): siRNA sense strand
gagagauguucaccauuca

SEQ ID NO: 477476 - RNA, 19 nt, Homo sapiens
  misc_RNA (1)...(19): siRNA sense strand
ucucagauguggaggaaga

SEQ ID NO: 477477 - RNA, 19 nt, Homo sapiens
  misc_RNA (1)...(19): siRNA sense strand
ggagaaugcugguguaccu

SEQ ID NO: 477478 - RNA, 19 nt, Homo sapiens
  misc_RNA (1)...(19): siRNA sense strand
caaaguauggcgagaacaa

SEQ ID NO: 477479 - RNA, 19 nt, Homo sapiens
  misc_RNA (1)...(19): siRNA sense strand
gaagaugaaagaggaagaa

SEQ ID NO: 477480 - RNA, 19 nt, Homo sapiens
  misc_RNA (1)...(19): siRNA sense strand
ccacagagggcauugcuau

SEQ ID NO: 477481 - RNA, 19 nt, Homo sapiens
  misc_RNA (1)...(19): siRNA sense strand
gaaaugaccucaacaguga

SEQ ID NO: 477482 - RNA, 19 nt, Homo sapiens
  misc_RNA (1)...(19): siRNA sense strand
gcagugaggugguauauaa

SEQ ID NO: 477483 - RNA, 19 nt, Homo sapiens
  misc_RNA (1)...(19): siRNA sense strand
gagggaagcugguuacuuu

SEQ ID NO: 477484 - RNA, 19 nt, Homo sapiens
  misc_RNA (1)...(19): siRNA sense strand
caggaaaucuacugaauua

SEQ ID NO: 477485 - RNA, 19 nt, Homo sapiens
  misc_RNA (1)...(19): siRNA sense strand
gagcaagacuccagaauga

SEQ ID NO: 477486 - RNA, 19 nt, Homo sapiens
  misc_RNA (1)...(19): siRNA sense strand
gagcuacccuccacucuaa

SEQ ID NO: 477487 - RNA, 19 nt, Homo sapiens
  misc_RNA (1)...(19): siRNA sense strand
ugacauagccacccaguua

SEQ ID NO: 477488 - RNA, 19 nt, Homo sapiens
  misc_RNA (1)...(19): siRNA sense strand
ggacacagaauauaaguga

SEQ ID NO: 477489 - RNA, 19 nt, Homo sapiens
  misc_RNA (1)...(19): siRNA sense strand
ccacaugguugaagaguga

SEQ ID NO: 477490 - RNA, 19 nt, Homo sapiens
  misc_RNA (1)...(19): siRNA sense strand
gcaacugacuuaaagacaa

SEQ ID NO: 477491 - RNA, 19 nt, Homo sapiens
  misc_RNA (1)...(19): siRNA sense strand
caacugacuuaaagacaaa

SEQ ID NO: 477492 - RNA, 19 nt, Homo sapiens
  misc_RNA (1)...(19): siRNA sense strand
gaaaucuacugaauuacug

SEQ ID NO: 477493 - RNA, 19 nt, Homo sapiens
  misc_RNA (1)...(19): siRNA sense strand
gagcaucaguccuugaaga

SEQ ID NO: 477494 - RNA, 19 nt, Homo sapiens
  misc_RNA (1)...(19): siRNA sense strand
ggaaggaugugguguguac

SEQ ID NO: 477495 - RNA, 19 nt, Homo sapiens
  misc_RNA (1)...(19): siRNA sense strand
gcagugggcuucuggaaag

SEQ ID NO: 477496 - RNA, 19 nt, Homo sapiens
  misc_RNA (1)...(19): siRNA sense strand
gcacuggcuuugcuacuga

SEQ ID NO: 477497 - RNA, 19 nt, Homo sapiens
  misc_RNA (1)...(19): siRNA sense strand
gaaccuaucaucaaaguca

SEQ ID NO: 477498 - RNA, 19 nt, Homo sapiens
  misc_RNA (1)...(19): siRNA sense strand
ggaaauauuugagguugau

SEQ ID NO: 477499 - RNA, 19 nt, Homo sapiens
  misc_RNA (1)...(19): siRNA sense strand
gcaagacuccagaaugaaa

SEQ ID NO: 477500 - RNA, 19 nt, Homo sapiens
  misc_RNA (1)...(19): siRNA sense strand
ccagcaagcuuuacugcaa

SEQ ID NO: 477501 - RNA, 19 nt, Homo sapiens
  misc_RNA (1)...(19): siRNA sense strand
ggagagaggcacuggcuuu

SEQ ID NO: 477502 - RNA, 19 nt, Homo sapiens
  misc_RNA (1)...(19): siRNA sense strand
gaggagcgcuuugcugaug

SEQ ID NO: 477503 - RNA, 19 nt, Homo sapiens
  misc_RNA (1)...(19): siRNA sense strand
gcugggaacucgcauggaa

SEQ ID NO: 477504 - RNA, 19 nt, Homo sapiens
  misc_RNA (1)...(19): siRNA sense strand
gacaauggcaugcuuauuc

SEQ ID NO: 477505 - RNA, 19 nt, Homo sapiens
  misc_RNA (1)...(19): siRNA sense strand
uauauaagcuaccaacaca

SEQ ID NO: 477506 - RNA, 19 nt, Homo sapiens
  misc_RNA (1)...(19): siRNA sense strand
ggaaggagccugugauugc

SEQ ID NO: 477507 - RNA, 19 nt, Homo sapiens
  misc_RNA (1)...(19): siRNA sense strand
agaagaagguggccacaug

SEQ ID NO: 477508 - RNA, 19 nt, Homo sapiens
  misc_RNA (1)...(19): siRNA sense strand
gcgcuuugcugaugccauu

SEQ ID NO: 477509 - RNA, 19 nt, Homo sapiens
  misc_RNA (1)...(19): siRNA sense strand
ucagagcccucgacuugaa

SEQ ID NO: 477510 - RNA, 19 nt, Homo sapiens
  misc_RNA (1)...(19): siRNA sense strand
gaugugguguguaccugua

SEQ ID NO: 477511 - RNA, 19 nt, Homo sapiens
  misc_RNA (1)...(19): siRNA sense strand
guaaagaugagcuucagaa

SEQ ID NO: 477512 - RNA, 19 nt, Homo sapiens
  misc_RNA (1)...(19): siRNA sense strand
gcacauuggaaauauuuga

SEQ ID NO: 477513 - RNA, 19 nt, Homo sapiens
  misc_RNA (1)...(19): siRNA sense strand
caagagccagcaagcuuua

SEQ ID NO: 477514 - RNA, 19 nt, Homo sapiens
  misc_RNA (1)...(19): siRNA sense strand
ggccuggcauccugacaua

SEQ ID NO: 477515 - RNA, 19 nt, Homo sapiens
  misc_RNA (1)...(19): siRNA sense strand
uggaguaucuauaugagaa

SEQ ID NO: 477516 - RNA, 19 nt, Homo sapiens
  misc_RNA (1)...(19): siRNA sense strand
ugucagagcccucgacuug

SEQ ID NO: 477517 - RNA, 19 nt, Homo sapiens
  misc_RNA (1)...(19): siRNA sense strand
cugagaagauggaaaggaa

SEQ ID NO: 477518 - RNA, 19 nt, Homo sapiens
  misc_RNA (1)...(19): siRNA sense strand
uaacuugaaugugccaaug

SEQ ID NO: 477519 - RNA, 19 nt, Homo sapiens
  misc_RNA (1)...(19): siRNA sense strand
uggcuuugcuacugacaua

SEQ ID NO: 477520 - RNA, 19 nt, Homo sapiens
  misc_RNA (1)...(19): siRNA sense strand
caagggaaaugaccucaac

SEQ ID NO: 477521 - RNA, 19 nt, Homo sapiens
  misc_RNA (1)...(19): siRNA sense strand
cagcaagcuuuacugcaaa

SEQ ID NO: 477522 - RNA, 19 nt, Homo sapiens
  misc_RNA (1)...(19): siRNA sense strand
ggaaaucuacugaauuacu

SEQ ID NO: 477523 - RNA, 19 nt, Homo sapiens
  misc_RNA (1)...(19): siRNA sense strand
ggcacaagcaccacugaua

SEQ ID NO: 477524 - RNA, 19 nt, Homo sapiens
  misc_RNA (1)...(19): siRNA sense strand
gggacacucucaccucaug

SEQ ID NO: 477525 - RNA, 19 nt, Homo sapiens
  misc_RNA (1)...(19): siRNA sense strand
gcacaagcaccacugauac

SEQ ID NO: 477526 - RNA, 19 nt, Homo sapiens
  misc_RNA (1)...(19): siRNA sense strand
ccaaacacaccacaaagga

SEQ ID NO: 477527 - RNA, 19 nt, Homo sapiens
  misc_RNA (1)...(19): siRNA sense strand
gcaguugugugggaucuca

SEQ ID NO: 477528 - RNA, 19 nt, Homo sapiens
  misc_RNA (1)...(19): siRNA sense strand
ccugaaggcuguccucauc

SEQ ID NO: 477529 - RNA, 19 nt, Homo sapiens
  misc_RNA (1)...(19): siRNA sense strand
ccuacagggucacucagua

SEQ ID NO: 477530 - RNA, 19 nt, Homo sapiens
  misc_RNA (1)...(19): siRNA sense strand
ccucagccuucuuugauga

SEQ ID NO: 477531 - RNA, 19 nt, Homo sapiens
  misc_RNA (1)...(19): siRNA sense strand
ggaaguccagcauaugaga

SEQ ID NO: 477532 - RNA, 19 nt, Homo sapiens
  misc_RNA (1)...(19): siRNA sense strand
uauaugagaagcucuguga

SEQ ID NO: 477533 - RNA, 19 nt, Homo sapiens
  misc_RNA (1)...(19): siRNA sense strand
cucauaagcugcuggucua

SEQ ID NO: 477534 - RNA, 19 nt, Homo sapiens
  misc_RNA (1)...(19): siRNA sense strand
gaauuacugucagaacaag

SEQ ID NO: 477535 - RNA, 19 nt, Homo sapiens
  misc_RNA (1)...(19): siRNA sense strand
ucagucaagucaccacaga

SEQ ID NO: 477536 - RNA, 19 nt, Homo sapiens
  misc_RNA (1)...(19): siRNA sense strand
gaaauuucccgagcucugu

SEQ ID NO: 477537 - RNA, 19 nt, Homo sapiens
  misc_RNA (1)...(19): siRNA sense strand
ggacaauggcaugcuuauu

SEQ ID NO: 477538 - RNA, 19 nt, Homo sapiens
  misc_RNA (1)...(19): siRNA sense strand
uuugggaucugaauaacuu

SEQ ID NO: 477539 - RNA, 19 nt, Homo sapiens
  misc_RNA (1)...(19): siRNA sense strand
ucauuugggaucugaauaa

SEQ ID NO: 477540 - RNA, 19 nt, Homo sapiens
  misc_RNA (1)...(19): siRNA sense strand
gcaugcuuauucuauacaa

SEQ ID NO: 477541 - RNA, 19 nt, Homo sapiens
  misc_RNA (1)...(19): siRNA sense strand
gaacaagcugccagagaca

SEQ ID NO: 477542 - RNA, 19 nt, Homo sapiens
  misc_RNA (1)...(19): siRNA sense strand
gagaggcacuggcuuugcu

SEQ ID NO: 477543 - RNA, 19 nt, Homo sapiens
  misc_RNA (1)...(19): siRNA sense strand
agauauugauggacuccua

SEQ ID NO: 477544 - RNA, 19 nt, Homo sapiens
  misc_RNA (1)...(19): siRNA sense strand
caaacacaccacaaaggaa

SEQ ID NO: 477545 - RNA, 19 nt, Homo sapiens
  misc_RNA (1)...(19): siRNA sense strand
ccucaacagugacagacaa

SEQ ID NO: 477546 - RNA, 19 nt, Homo sapiens
  misc_RNA (1)...(19): siRNA sense strand
gcaggaggccuugggauca

SEQ ID NO: 477547 - RNA, 19 nt, Homo sapiens
  misc_RNA (1)...(19): siRNA sense strand
gaaggagccugugauugcu

SEQ ID NO: 477548 - RNA, 19 nt, Homo sapiens
  misc_RNA (1)...(19): siRNA sense strand
gauauugauggacuccuaa

SEQ ID NO: 477549 - RNA, 19 nt, Homo sapiens
  misc_RNA (1)...(19): siRNA sense strand
gagcuggucccucagaaca

SEQ ID NO: 477550 - RNA, 19 nt, Homo sapiens
  misc_RNA (1)...(19): siRNA sense strand
uaggauacaguaaagauga

SEQ ID NO: 477551 - RNA, 19 nt, Homo sapiens
  misc_RNA (1)...(19): siRNA sense strand
ggaucugaauaacuugaau

SEQ ID NO: 477552 - RNA, 19 nt, Homo sapiens
  misc_RNA (1)...(19): siRNA sense strand
ugugggaucucaggaagaa

SEQ ID NO: 477553 - RNA, 19 nt, Homo sapiens
  misc_RNA (1)...(19): siRNA sense strand
ucagcgagguguccagcuu

SEQ ID NO: 477554 - RNA, 19 nt, Homo sapiens
  misc_RNA (1)...(19): siRNA sense strand
ucucuggacuugaaacaca

SEQ ID NO: 477555 - RNA, 19 nt, Homo sapiens
  misc_RNA (1)...(19): siRNA sense strand
ggacccuucucuggacuug

SEQ ID NO: 477556 - RNA, 19 nt, Homo sapiens
  misc_RNA (1)...(19): siRNA sense strand
ugacccacauccugucuuc

SEQ ID NO: 477557 - RNA, 19 nt, Homo sapiens
  misc_RNA (1)...(19): siRNA sense strand
gagggcagcagggcacuaa

SEQ ID NO: 477558 - RNA, 19 nt, Homo sapiens
  misc_RNA (1)...(19): siRNA sense strand
gcuggucccucagaacaug

SEQ ID NO: 477559 - RNA, 19 nt, Homo sapiens
  misc_RNA (1)...(19): siRNA sense strand
ggagggaagcugguuacuu

SEQ ID NO: 477560 - RNA, 19 nt, Homo sapiens
  misc_RNA (1)...(19): siRNA sense strand
acaauggcaugcuuauucu

SEQ ID NO: 477561 - RNA, 19 nt, Homo sapiens
  misc_RNA (1)...(19): siRNA sense strand
cccaacacauucugucuuc

SEQ ID NO: 477562 - RNA, 19 nt, Homo sapiens
  misc_RNA (1)...(19): siRNA sense strand
ucaggaagaaugaaccuau

SEQ ID NO: 477563 - RNA, 19 nt, Homo sapiens
  misc_RNA (1)...(19): siRNA sense strand
cacagaauauaagugacua

SEQ ID NO: 477564 - RNA, 19 nt, Homo sapiens
  misc_RNA (1)...(19): siRNA sense strand
cagcuaagagaucggcuuu

SEQ ID NO: 477565 - RNA, 19 nt, Homo sapiens
  misc_RNA (1)...(19): siRNA sense strand
uauaagcuaccaacacaga

SEQ ID NO: 477566 - RNA, 19 nt, Homo sapiens
  misc_RNA (1)...(19): siRNA sense strand
caggaagaaugaaccuauc

SEQ ID NO: 477567 - RNA, 19 nt, Homo sapiens
  misc_RNA (1)...(19): siRNA sense strand
gcccucgacuugaauccuu

SEQ ID NO: 477568 - RNA, 19 nt, Homo sapiens
  misc_RNA (1)...(19): siRNA sense strand
gagcuacaagggauucuuc

SEQ ID NO: 477569 - RNA, 19 nt, Homo sapiens
  misc_RNA (1)...(19): siRNA sense strand
ggaucaguuuguacucugu

SEQ ID NO: 477570 - RNA, 19 nt, Homo sapiens
  misc_RNA (1)...(19): siRNA sense strand
gagcagugaggugguauau

SEQ ID NO: 477571 - RNA, 19 nt, Homo sapiens
  misc_RNA (1)...(19): siRNA sense strand
caaugacccugggauccaa

SEQ ID NO: 477572 - RNA, 19 nt, Homo sapiens
  misc_RNA (1)...(19): siRNA sense strand
gaucugaauaacuugaaug

SEQ ID NO: 477573 - RNA, 19 nt, Homo sapiens
  misc_RNA (1)...(19): siRNA sense strand
cccaggaguuccaggagaa

SEQ ID NO: 477574 - RNA, 19 nt, Homo sapiens
  misc_RNA (1)...(19): siRNA sense strand
ccauccagccuuugccuuu

SEQ ID NO: 477575 - RNA, 19 nt, Homo sapiens
  misc_RNA (1)...(19): siRNA sense strand
agagacaucaucuuacaga

SEQ ID NO: 477576 - RNA, 19 nt, Homo sapiens
  misc_RNA (1)...(19): siRNA sense strand
caaccuacagggucacuca

SEQ ID NO: 477577 - RNA, 19 nt, Homo sapiens
  misc_RNA (1)...(19): siRNA sense strand
gagagaggcacuggcuuug

SEQ ID NO: 477578 - RNA, 19 nt, Homo sapiens
  misc_RNA (1)...(19): siRNA sense strand
acaagagccagcaagcuuu

SEQ ID NO: 477579 - RNA, 19 nt, Homo sapiens
  misc_RNA (1)...(19): siRNA sense strand
caacacauucugucuucug

SEQ ID NO: 477580 - RNA, 19 nt, Homo sapiens
  misc_RNA (1)...(19): siRNA sense strand
cccaggacacagaauauaa

SEQ ID NO: 477581 - RNA, 19 nt, Homo sapiens
  misc_RNA (1)...(19): siRNA sense strand
gcagugaggugguauauaa

SEQ ID NO: 477582 - RNA, 19 nt, Homo sapiens
  misc_RNA (1)...(19): siRNA sense strand
ugacauagccacccaguua

SEQ ID NO: 477583 - RNA, 19 nt, Homo sapiens
  misc_RNA (1)...(19): siRNA sense strand
gcagugggcuucuggaaag

SEQ ID NO: 477584 - RNA, 19 nt, Homo sapiens
  misc_RNA (1)...(19): siRNA sense strand
gaaccuaucaucaaaguca

SEQ ID NO: 477585 - RNA, 19 nt, Homo sapiens
  misc_RNA (1)...(19): siRNA sense strand
ggaaauauuugagguugau

SEQ ID NO: 477586 - RNA, 19 nt, Homo sapiens
  misc_RNA (1)...(19): siRNA sense strand
gacaauggcaugcuuauuc

SEQ ID NO: 477587 - RNA, 19 nt, Homo sapiens
  misc_RNA (1)...(19): siRNA sense strand
uauauaagcuaccaacaca

SEQ ID NO: 477588 - RNA, 19 nt, Homo sapiens
  misc_RNA (1)...(19): siRNA sense strand
ggaaggagccugugauugc

SEQ ID NO: 477589 - RNA, 19 nt, Homo sapiens
  misc_RNA (1)...(19): siRNA sense strand
ucagagcccucgacuugaa

SEQ ID NO: 477590 - RNA, 19 nt, Homo sapiens
  misc_RNA (1)...(19): siRNA sense strand
gcacauuggaaauauuuga

SEQ ID NO: 477591 - RNA, 19 nt, Homo sapiens
  misc_RNA (1)...(19): siRNA sense strand
ggccuggcauccugacaua

SEQ ID NO: 477592 - RNA, 19 nt, Homo sapiens
  misc_RNA (1)...(19): siRNA sense strand
ugucagagcccucgacuug

SEQ ID NO: 477593 - RNA, 19 nt, Homo sapiens
  misc_RNA (1)...(19): siRNA sense strand
uaacuugaaugugccaaug

SEQ ID NO: 477594 - RNA, 19 nt, Homo sapiens
  misc_RNA (1)...(19): siRNA sense strand
gcaguugugugggaucuca

SEQ ID NO: 477595 - RNA, 19 nt, Homo sapiens
  misc_RNA (1)...(19): siRNA sense strand
ggaaguccagcauaugaga

SEQ ID NO: 477596 - RNA, 19 nt, Homo sapiens
  misc_RNA (1)...(19): siRNA sense strand
ggacaauggcaugcuuauu

SEQ ID NO: 477597 - RNA, 19 nt, Homo sapiens
  misc_RNA (1)...(19): siRNA sense strand
uuugggaucugaauaacuu

SEQ ID NO: 477598 - RNA, 19 nt, Homo sapiens
  misc_RNA (1)...(19): siRNA sense strand
ucauuugggaucugaauaa

SEQ ID NO: 477599 - RNA, 19 nt, Homo sapiens
  misc_RNA (1)...(19): siRNA sense strand
gcaugcuuauucuauacaa

SEQ ID NO: 477600 - RNA, 19 nt, Homo sapiens
  misc_RNA (1)...(19): siRNA sense strand
gaaggagccugugauugcu

SEQ ID NO: 477601 - RNA, 19 nt, Homo sapiens
  misc_RNA (1)...(19): siRNA sense strand
ggaucugaauaacuugaau

SEQ ID NO: 477602 - RNA, 19 nt, Homo sapiens
  misc_RNA (1)...(19): siRNA sense strand
ggacccuucucuggacuug

SEQ ID NO: 477603 - RNA, 19 nt, Homo sapiens
  misc_RNA (1)...(19): siRNA sense strand
ugugggaucucaggaagaa

SEQ ID NO: 477604 - RNA, 19 nt, Homo sapiens
  misc_RNA (1)...(19): siRNA sense strand
ucucuggacuugaaacaca

SEQ ID NO: 477605 - RNA, 19 nt, Homo sapiens
  misc_RNA (1)...(19): siRNA sense strand
acaauggcaugcuuauucu

SEQ ID NO: 477606 - RNA, 19 nt, Homo sapiens
  misc_RNA (1)...(19): siRNA sense strand
cccaacacauucugucuuc

SEQ ID NO: 477607 - RNA, 19 nt, Homo sapiens
  misc_RNA (1)...(19): siRNA sense strand
ugacccacauccugucuuc

SEQ ID NO: 477608 - RNA, 19 nt, Homo sapiens
  misc_RNA (1)...(19): siRNA sense strand
ucaggaagaaugaaccuau

SEQ ID NO: 477609 - RNA, 19 nt, Homo sapiens
  misc_RNA (1)...(19): siRNA sense strand
uauaagcuaccaacacaga

SEQ ID NO: 477610 - RNA, 19 nt, Homo sapiens
  misc_RNA (1)...(19): siRNA sense strand
caggaagaaugaaccuauc

SEQ ID NO: 477611 - RNA, 19 nt, Homo sapiens
  misc_RNA (1)...(19): siRNA sense strand
gcccucgacuugaauccuu

SEQ ID NO: 477612 - RNA, 19 nt, Homo sapiens
  misc_RNA (1)...(19): siRNA sense strand
ggaucaguuuguacucugu

SEQ ID NO: 477613 - RNA, 19 nt, Homo sapiens
  misc_RNA (1)...(19): siRNA sense strand
gagcagugaggugguauau

SEQ ID NO: 477614 - RNA, 19 nt, Homo sapiens
  misc_RNA (1)...(19): siRNA sense strand
caaugacccugggauccaa

SEQ ID NO: 477615 - RNA, 19 nt, Homo sapiens
  misc_RNA (1)...(19): siRNA sense strand
gaucugaauaacuugaaug

SEQ ID NO: 477616 - RNA, 19 nt, Homo sapiens
  misc_RNA (1)...(19): siRNA sense strand
caacacauucugucuucug

SEQ ID NO: 477617 - RNA, 19 nt, Homo sapiens
  misc_RNA (1)...(19): siRNA sense strand
ggagcagugaggugguaua

SEQ ID NO: 477618 - RNA, 19 nt, Homo sapiens
  misc_RNA (1)...(19): siRNA sense strand
uggcacauuggaaauauuu

SEQ ID NO: 477619 - RNA, 19 nt, Homo sapiens
  misc_RNA (1)...(19): siRNA sense strand
ccggcaagcccaacacauu

SEQ ID NO: 477620 - RNA, 19 nt, Homo sapiens
  misc_RNA (1)...(19): siRNA sense strand
ugauucagcugugggacuu

SEQ ID NO: 477621 - RNA, 19 nt, Homo sapiens
  misc_RNA (1)...(19): siRNA sense strand
gagcccagccagccaauac

SEQ ID NO: 477622 - RNA, 19 nt, Homo sapiens
  misc_RNA (1)...(19): siRNA sense strand
gcuaaggacagccagaucu

SEQ ID NO: 477623 - RNA, 19 nt, Homo sapiens
  misc_RNA (1)...(19): siRNA sense strand
cagcuagauuccuccuuca

SEQ ID NO: 477624 - RNA, 19 nt, Homo sapiens
  misc_RNA (1)...(19): siRNA sense strand
gggaaggagccugugauug

SEQ ID NO: 477625 - RNA, 19 nt, Homo sapiens
  misc_RNA (1)...(19): siRNA sense strand
ggaaagcuccgggguuauu

SEQ ID NO: 477626 - RNA, 19 nt, Homo sapiens
  misc_RNA (1)...(19): siRNA sense strand
ggaguccuuucugccuuga

SEQ ID NO: 477627 - RNA, 19 nt, Homo sapiens
  misc_RNA (1)...(19): siRNA sense strand
uucaacggcuggaucaguu

SEQ ID NO: 477628 - RNA, 19 nt, Homo sapiens
  misc_RNA (1)...(19): siRNA sense strand
ucgggacccuucaguguuc

SEQ ID NO: 477629 - RNA, 19 nt, Homo sapiens
  misc_RNA (1)...(19): siRNA sense strand
ugaucgacuucccgugauu

SEQ ID NO: 477630 - RNA, 19 nt, Homo sapiens
  misc_RNA (1)...(19): siRNA sense strand
uggaaauauuugagguuga

SEQ ID NO: 477631 - RNA, 19 nt, Homo sapiens
  misc_RNA (1)...(19): siRNA sense strand
ggcagugggcuucuggaaa

SEQ ID NO: 477632 - RNA, 19 nt, Homo sapiens
  misc_RNA (1)...(19): siRNA sense strand
ugggaaguccagcauauga

SEQ ID NO: 477633 - RNA, 19 nt, Homo sapiens
  misc_RNA (1)...(19): siRNA sense strand
acccuucucuggacuugaa

SEQ ID NO: 477634 - RNA, 19 nt, Homo sapiens
  misc_RNA (1)...(19): siRNA sense strand
cuggaaagcuccgggguua

SEQ ID NO: 477635 - RNA, 19 nt, Homo sapiens
  misc_RNA (1)...(19): siRNA sense strand
uauuugagguugauuucag

SEQ ID NO: 477636 - RNA, 19 nt, Homo sapiens
  misc_RNA (1)...(19): siRNA sense strand
aggaacaucugcccaacag

SEQ ID NO: 477637 - RNA, 19 nt, Homo sapiens
  misc_RNA (1)...(19): siRNA sense strand
caacggcuggaucaguuug

SEQ ID NO: 477638 - RNA, 19 nt, Homo sapiens
  misc_RNA (1)...(19): siRNA sense strand
auggcaugcuuauucuaua

SEQ ID NO: 477639 - RNA, 19 nt, Homo sapiens
  misc_RNA (1)...(19): siRNA sense strand
guauauaagcuaccaacac

SEQ ID NO: 477640 - RNA, 19 nt, Homo sapiens
  misc_RNA (1)...(19): siRNA sense strand
ugaggugguauauaagcua

SEQ ID NO: 477641 - RNA, 19 nt, Homo sapiens
  misc_RNA (1)...(19): siRNA sense strand
uaaggacagccagaucuug

SEQ ID NO: 477642 - RNA, 19 nt, Homo sapiens
  misc_RNA (1)...(19): siRNA sense strand
gccugugauugcucagaaa

SEQ ID NO: 477643 - RNA, 19 nt, Homo sapiens
  misc_RNA (1)...(19): siRNA sense strand
gggacaauggcaugcuuau

SEQ ID NO: 477644 - RNA, 19 nt, Homo sapiens
  misc_RNA (1)...(19): siRNA sense strand
gcugugggacuugcgcuuu

SEQ ID NO: 477645 - RNA, 19 nt, Homo sapiens
  misc_RNA (1)...(19): siRNA sense strand
cggcaagcccaacacauuc

SEQ ID NO: 477646 - RNA, 19 nt, Homo sapiens
  misc_RNA (1)...(19): siRNA sense strand
uggcaugcuuauucuauac

SEQ ID NO: 477647 - RNA, 19 nt, Homo sapiens
  misc_RNA (1)...(19): siRNA sense strand
ugauugcucagaaacagaa

SEQ ID NO: 477648 - RNA, 19 nt, Homo sapiens
  misc_RNA (1)...(19): siRNA sense strand
gacauagccacccaguuag

SEQ ID NO: 477649 - RNA, 19 nt, Homo sapiens
  misc_RNA (1)...(19): siRNA sense strand
gcccaacacauucugucuu

SEQ ID NO: 477650 - RNA, 19 nt, Homo sapiens
  misc_RNA (1)...(19): siRNA sense strand
gcagcuggugcuuugaugu

SEQ ID NO: 477651 - RNA, 19 nt, Homo sapiens
  misc_RNA (1)...(19): siRNA sense strand
cuaaggacagccagaucuu

SEQ ID NO: 477652 - RNA, 19 nt, Homo sapiens
  misc_RNA (1)...(19): siRNA sense strand
ggacagaaguggaggcaaa

SEQ ID NO: 477653 - RNA, 19 nt, Homo sapiens
  misc_RNA (1)...(19): siRNA sense strand
ggaaggauauuacaccuau

SEQ ID NO: 477654 - RNA, 19 nt, Homo sapiens
  misc_RNA (1)...(19): siRNA sense strand
gggcagaacugguuaaagu

SEQ ID NO: 477655 - RNA, 19 nt, Homo sapiens
  misc_RNA (1)...(19): siRNA sense strand
gcuaucugcuucccuauga

SEQ ID NO: 477656 - RNA, 19 nt, Homo sapiens
  misc_RNA (1)...(19): siRNA sense strand
cuucaaaggugacaaguau

SEQ ID NO: 477657 - RNA, 19 nt, Homo sapiens
  misc_RNA (1)...(19): siRNA sense strand
ugacaaguauuggguguuu

SEQ ID NO: 477658 - RNA, 19 nt, Homo sapiens
  misc_RNA (1)...(19): siRNA sense strand
gaaggaggcagacaucaug

SEQ ID NO: 477659 - RNA, 19 nt, Homo sapiens
  misc_RNA (1)...(19): siRNA sense strand
gcgagauguuugucuuuaa

SEQ ID NO: 477660 - RNA, 19 nt, Homo sapiens
  misc_RNA (1)...(19): siRNA sense strand
ggcgagauguuugucuuua

SEQ ID NO: 477661 - RNA, 19 nt, Homo sapiens
  misc_RNA (1)...(19): siRNA sense strand
ggagauuugucuucuucaa

SEQ ID NO: 477662 - RNA, 19 nt, Homo sapiens
  misc_RNA (1)...(19): siRNA sense strand
gaggagacacccacuuuga

SEQ ID NO: 477663 - RNA, 19 nt, Homo sapiens
  misc_RNA (1)...(19): siRNA sense strand
cuacagcauucacaacuau

SEQ ID NO: 477664 - RNA, 19 nt, Homo sapiens
  misc_RNA (1)...(19): siRNA sense strand
gaaguuugacaaccagaaa

SEQ ID NO: 477665 - RNA, 19 nt, Homo sapiens
  misc_RNA (1)...(19): siRNA sense strand
agacaacgaucgaguggau

SEQ ID NO: 477666 - RNA, 19 nt, Homo sapiens
  misc_RNA (1)...(19): siRNA sense strand
gauguggugucccugauca

SEQ ID NO: 477667 - RNA, 19 nt, Homo sapiens
  misc_RNA (1)...(19): siRNA sense strand
ucaaaggugacaaguauug

SEQ ID NO: 477668 - RNA, 19 nt, Homo sapiens
  misc_RNA (1)...(19): siRNA sense strand
gaaggauauuacaccuauu

SEQ ID NO: 477669 - RNA, 19 nt, Homo sapiens
  misc_RNA (1)...(19): siRNA sense strand
gacaaguauuggguguuua

SEQ ID NO: 477670 - RNA, 19 nt, Homo sapiens
  misc_RNA (1)...(19): siRNA sense strand
acacaucaccuacagcauu

SEQ ID NO: 477671 - RNA, 19 nt, Homo sapiens
  misc_RNA (1)...(19): siRNA sense strand
gcaccaaacccaacaucug

SEQ ID NO: 477672 - RNA, 19 nt, Homo sapiens
  misc_RNA (1)...(19): siRNA sense strand
guuaaaguccuauggcuau

SEQ ID NO: 477673 - RNA, 19 nt, Homo sapiens
  misc_RNA (1)...(19): siRNA sense strand
ccaugcagaucgagcaguu

SEQ ID NO: 477674 - RNA, 19 nt, Homo sapiens
  misc_RNA (1)...(19): siRNA sense strand
cgagauguuugucuuuaag

SEQ ID NO: 477675 - RNA, 19 nt, Homo sapiens
  misc_RNA (1)...(19): siRNA sense strand
gaugggagauuugucuucu

SEQ ID NO: 477676 - RNA, 19 nt, Homo sapiens
  misc_RNA (1)...(19): siRNA sense strand
ccuacagcauucacaacua

SEQ ID NO: 477677 - RNA, 19 nt, Homo sapiens
  misc_RNA (1)...(19): siRNA sense strand
aguauuggguguuuaagga

SEQ ID NO: 477678 - RNA, 19 nt, Homo sapiens
  misc_RNA (1)...(19): siRNA sense strand
cgacgcagccuaugaaagg

SEQ ID NO: 477679 - RNA, 19 nt, Homo sapiens
  misc_RNA (1)...(19): siRNA sense strand
gaggugccauaccaugaga

SEQ ID NO: 477680 - RNA, 19 nt, Homo sapiens
  misc_RNA (1)...(19): siRNA sense strand
ggaaggaggcagacaucau

SEQ ID NO: 477681 - RNA, 19 nt, Homo sapiens
  misc_RNA (1)...(19): siRNA sense strand
ggaggagacacccacuuug

SEQ ID NO: 477682 - RNA, 19 nt, Homo sapiens
  misc_RNA (1)...(19): siRNA sense strand
gccauaccaugagaucaaa

SEQ ID NO: 477683 - RNA, 19 nt, Homo sapiens
  misc_RNA (1)...(19): siRNA sense strand
gcccucagccugucaccua

SEQ ID NO: 477684 - RNA, 19 nt, Homo sapiens
  misc_RNA (1)...(19): siRNA sense strand
acaaguauuggguguuuaa

SEQ ID NO: 477685 - RNA, 19 nt, Homo sapiens
  misc_RNA (1)...(19): siRNA sense strand
caacacaguggcccucuuc

SEQ ID NO: 477686 - RNA, 19 nt, Homo sapiens
  misc_RNA (1)...(19): siRNA sense strand
aggcagacaucaugaucuu

SEQ ID NO: 477687 - RNA, 19 nt, Homo sapiens
  misc_RNA (1)...(19): siRNA sense strand
ggacgacguggacaucaug

SEQ ID NO: 477688 - RNA, 19 nt, Homo sapiens
  misc_RNA (1)...(19): siRNA sense strand
uaggaaacgccaaccauga

SEQ ID NO: 477689 - RNA, 19 nt, Homo sapiens
  misc_RNA (1)...(19): siRNA sense strand
cacaucaccuacagcauuc

SEQ ID NO: 477690 - RNA, 19 nt, Homo sapiens
  misc_RNA (1)...(19): siRNA sense strand
gcagacaucaugaucuuuu

SEQ ID NO: 477691 - RNA, 19 nt, Homo sapiens
  misc_RNA (1)...(19): siRNA sense strand
ucaccgguguguuggauca

SEQ ID NO: 477692 - RNA, 19 nt, Homo sapiens
  misc_RNA (1)...(19): siRNA sense strand
ggaaguuugacaaccagaa

SEQ ID NO: 477693 - RNA, 19 nt, Homo sapiens
  misc_RNA (1)...(19): siRNA sense strand
uuacaccuauuucuacaag

SEQ ID NO: 477694 - RNA, 19 nt, Homo sapiens
  misc_RNA (1)...(19): siRNA sense strand
ugggagauuugucuucuuc

SEQ ID NO: 477695 - RNA, 19 nt, Homo sapiens
  misc_RNA (1)...(19): siRNA sense strand
caucgacgcagccuaugaa

SEQ ID NO: 477696 - RNA, 19 nt, Homo sapiens
  misc_RNA (1)...(19): siRNA sense strand
ccaaacccaacaucuguga

SEQ ID NO: 477697 - RNA, 19 nt, Homo sapiens
  misc_RNA (1)...(19): siRNA sense strand
ucagcaaggaaggauauua

SEQ ID NO: 477698 - RNA, 19 nt, Homo sapiens
  misc_RNA (1)...(19): siRNA sense strand
ggaggcagacaucaugauc

SEQ ID NO: 477699 - RNA, 19 nt, Homo sapiens
  misc_RNA (1)...(19): siRNA sense strand
caucagcaaggaaggauau

SEQ ID NO: 477700 - RNA, 19 nt, Homo sapiens
  misc_RNA (1)...(19): siRNA sense strand
agaacugguuaaaguccua

SEQ ID NO: 477701 - RNA, 19 nt, Homo sapiens
  misc_RNA (1)...(19): siRNA sense strand
caccaaacccaacaucugu

SEQ ID NO: 477702 - RNA, 19 nt, Homo sapiens
  misc_RNA (1)...(19): siRNA sense strand
uugaagaggugccauacca

SEQ ID NO: 477703 - RNA, 19 nt, Homo sapiens
  misc_RNA (1)...(19): siRNA sense strand
gcaucgacgcagccuauga

SEQ ID NO: 477704 - RNA, 19 nt, Homo sapiens
  misc_RNA (1)...(19): siRNA sense strand
ccacuaugcagcaguuuua

SEQ ID NO: 477705 - RNA, 19 nt, Homo sapiens
  misc_RNA (1)...(19): siRNA sense strand
caaggccacucccuacacu

SEQ ID NO: 477706 - RNA, 19 nt, Homo sapiens
  misc_RNA (1)...(19): siRNA sense strand
uggaggagacacccacuuu

SEQ ID NO: 477707 - RNA, 19 nt, Homo sapiens
  misc_RNA (1)...(19): siRNA sense strand
ggagacacccacuuugacu

SEQ ID NO: 477708 - RNA, 19 nt, Homo sapiens
  misc_RNA (1)...(19): siRNA sense strand
ucacaacuauaccccaaaa

SEQ ID NO: 477709 - RNA, 19 nt, Homo sapiens
  misc_RNA (1)...(19): siRNA sense strand
gggcgagauguuugucuuu

SEQ ID NO: 477710 - RNA, 19 nt, Homo sapiens
  misc_RNA (1)...(19): siRNA sense strand
ggucaccgguguguuggau

SEQ ID NO: 477711 - RNA, 19 nt, Homo sapiens
  misc_RNA (1)...(19): siRNA sense strand
ggcgacagcuccccauuug

SEQ ID NO: 477712 - RNA, 19 nt, Homo sapiens
  misc_RNA (1)...(19): siRNA sense strand
cagccugucaccuacuaua

SEQ ID NO: 477713 - RNA, 19 nt, Homo sapiens
  misc_RNA (1)...(19): siRNA sense strand
gagcuagacacgcggaaag

SEQ ID NO: 477714 - RNA, 19 nt, Homo sapiens
  misc_RNA (1)...(19): siRNA sense strand
ggauauuacaccuauuucu

SEQ ID NO: 477715 - RNA, 19 nt, Homo sapiens
  misc_RNA (1)...(19): siRNA sense strand
ucgccaggcuuucgaugug

SEQ ID NO: 477716 - RNA, 19 nt, Homo sapiens
  misc_RNA (1)...(19): siRNA sense strand
cuagacacgcggaaagcua

SEQ ID NO: 477717 - RNA, 19 nt, Homo sapiens
  misc_RNA (1)...(19): siRNA sense strand
cagcaaggaaggauauuac

SEQ ID NO: 477718 - RNA, 19 nt, Homo sapiens
  misc_RNA (1)...(19): siRNA sense strand
ucuggcgucugcgcaauaa

SEQ ID NO: 477719 - RNA, 19 nt, Homo sapiens
  misc_RNA (1)...(19): siRNA sense strand
ggagaaacaagcgcuaugc

SEQ ID NO: 477720 - RNA, 19 nt, Homo sapiens
  misc_RNA (1)...(19): siRNA sense strand
acaacgaucgaguggauga

SEQ ID NO: 477721 - RNA, 19 nt, Homo sapiens
  misc_RNA (1)...(19): siRNA sense strand
uacaccaucuuccaguuca

SEQ ID NO: 477722 - RNA, 19 nt, Homo sapiens
  misc_RNA (1)...(19): siRNA sense strand
gacccuggcuacccuaagc

SEQ ID NO: 477723 - RNA, 19 nt, Homo sapiens
  misc_RNA (1)...(19): siRNA sense strand
agucggcagucuccacuau

SEQ ID NO: 477724 - RNA, 19 nt, Homo sapiens
  misc_RNA (1)...(19): siRNA sense strand
gcuaggaaacgccaaccau

SEQ ID NO: 477725 - RNA, 19 nt, Homo sapiens
  misc_RNA (1)...(19): siRNA sense strand
ucuacaccaucuuccaguu

SEQ ID NO: 477726 - RNA, 19 nt, Homo sapiens
  misc_RNA (1)...(19): siRNA sense strand
gggacuacuggaaguuuga

SEQ ID NO: 477727 - RNA, 19 nt, Homo sapiens
  misc_RNA (1)...(19): siRNA sense strand
cgggacuacuggaaguuug

SEQ ID NO: 477728 - RNA, 19 nt, Homo sapiens
  misc_RNA (1)...(19): siRNA sense strand
ccgcaucgacgcagccuau

SEQ ID NO: 477729 - RNA, 19 nt, Homo sapiens
  misc_RNA (1)...(19): siRNA sense strand
acauggagacgcacaacuu

SEQ ID NO: 477730 - RNA, 19 nt, Homo sapiens
  misc_RNA (1)...(19): siRNA sense strand
ugacgggaacgaccucuuc

SEQ ID NO: 477731 - RNA, 19 nt, Homo sapiens
  misc_RNA (1)...(19): siRNA sense strand
agauguuugucuuuaagga

SEQ ID NO: 477732 - RNA, 19 nt, Homo sapiens
  misc_RNA (1)...(19): siRNA sense strand
gcaaggaaggauauuacac

SEQ ID NO: 477733 - RNA, 19 nt, Homo sapiens
  misc_RNA (1)...(19): siRNA sense strand
gaaagggccgaugggagau

SEQ ID NO: 477734 - RNA, 19 nt, Homo sapiens
  misc_RNA (1)...(19): siRNA sense strand
aaaguccuauggcuaucug

SEQ ID NO: 477735 - RNA, 19 nt, Homo sapiens
  misc_RNA (1)...(19): siRNA sense strand
ucaacacaguggcccucuu

SEQ ID NO: 477736 - RNA, 19 nt, Homo sapiens
  misc_RNA (1)...(19): siRNA sense strand
ugacggcaacuucaacaca

SEQ ID NO: 477737 - RNA, 19 nt, Homo sapiens
  misc_RNA (1)...(19): siRNA sense strand
ucuccacuaugcagcaguu

SEQ ID NO: 477738 - RNA, 19 nt, Homo sapiens
  misc_RNA (1)...(19): siRNA sense strand
gcauccuggugcuggucua

SEQ ID NO: 477739 - RNA, 19 nt, Homo sapiens
  misc_RNA (1)...(19): siRNA sense strand
gaacugguuaaaguccuau

SEQ ID NO: 477740 - RNA, 19 nt, Homo sapiens
  misc_RNA (1)...(19): siRNA sense strand
caagcgcuaugcccugacu

SEQ ID NO: 477741 - RNA, 19 nt, Homo sapiens
  misc_RNA (1)...(19): siRNA sense strand
gauguuugucuuuaaggau

SEQ ID NO: 477742 - RNA, 19 nt, Homo sapiens
  misc_RNA (1)...(19): siRNA sense strand
caucugugacggcaacuuc

SEQ ID NO: 477743 - RNA, 19 nt, Homo sapiens
  misc_RNA (1)...(19): siRNA sense strand
gcauccagaagaucuaugg

SEQ ID NO: 477744 - RNA, 19 nt, Homo sapiens
  misc_RNA (1)...(19): siRNA sense strand
aagaggugccauaccauga

SEQ ID NO: 477745 - RNA, 19 nt, Homo sapiens
  misc_RNA (1)...(19): siRNA sense strand
gaucgaguggaugaagaaa

SEQ ID NO: 477746 - RNA, 19 nt, Homo sapiens
  misc_RNA (1)...(19): siRNA sense strand
aagggccgaugggagauuu

SEQ ID NO: 477747 - RNA, 19 nt, Homo sapiens
  misc_RNA (1)...(19): siRNA sense strand
gcagagcccugagaaguug

SEQ ID NO: 477748 - RNA, 19 nt, Homo sapiens
  misc_RNA (1)...(19): siRNA sense strand
ggagucaggccucacauuu

SEQ ID NO: 477749 - RNA, 19 nt, Homo sapiens
  misc_RNA (1)...(19): siRNA sense strand
ggccgaauccuccucuuua

SEQ ID NO: 477750 - RNA, 19 nt, Homo sapiens
  misc_RNA (1)...(19): siRNA sense strand
gaggagaccuggacuuuug

SEQ ID NO: 477751 - RNA, 19 nt, Homo sapiens
  misc_RNA (1)...(19): siRNA sense strand
ucaaagucaugcagagguu

SEQ ID NO: 477752 - RNA, 19 nt, Homo sapiens
  misc_RNA (1)...(19): siRNA sense strand
acacucacuuugacgauga

SEQ ID NO: 477753 - RNA, 19 nt, Homo sapiens
  misc_RNA (1)...(19): siRNA sense strand
gggcgacccugacaaguac

SEQ ID NO: 477754 - RNA, 19 nt, Homo sapiens
  misc_RNA (1)...(19): siRNA sense strand
caugagcuaugcccugaug

SEQ ID NO: 477755 - RNA, 19 nt, Homo sapiens
  misc_RNA (1)...(19): siRNA sense strand
agucaggccucacauuuca

SEQ ID NO: 477756 - RNA, 19 nt, Homo sapiens
  misc_RNA (1)...(19): siRNA sense strand
ugacaagcccacaaggaaa

SEQ ID NO: 477757 - RNA, 19 nt, Homo sapiens
  misc_RNA (1)...(19): siRNA sense strand
cgacauccucaucgacuuu

SEQ ID NO: 477758 - RNA, 19 nt, Homo sapiens
  misc_RNA (1)...(19): siRNA sense strand
gcgauggccugcagcaacu

SEQ ID NO: 477759 - RNA, 19 nt, Homo sapiens
  misc_RNA (1)...(19): siRNA sense strand
gccgaauccuccucuuuag

SEQ ID NO: 477760 - RNA, 19 nt, Homo sapiens
  misc_RNA (1)...(19): siRNA sense strand
acaaguaccgccugucuca

SEQ ID NO: 477761 - RNA, 19 nt, Homo sapiens
  misc_RNA (1)...(19): siRNA sense strand
gaagaagcgaacccugaca

SEQ ID NO: 477762 - RNA, 19 nt, Homo sapiens
  misc_RNA (1)...(19): siRNA sense strand
cccaagaacagcaucaaga

SEQ ID NO: 477763 - RNA, 19 nt, Homo sapiens
  misc_RNA (1)...(19): siRNA sense strand
gagucaggccucacauuuc

SEQ ID NO: 477764 - RNA, 19 nt, Homo sapiens
  misc_RNA (1)...(19): siRNA sense strand
ggacacucacuuugacgau

SEQ ID NO: 477765 - RNA, 19 nt, Homo sapiens
  misc_RNA (1)...(19): siRNA sense strand
guccgaaaccugcgauugu

SEQ ID NO: 477766 - RNA, 19 nt, Homo sapiens
  misc_RNA (1)...(19): siRNA sense strand
aagcgaacccugacaugga

SEQ ID NO: 477767 - RNA, 19 nt, Homo sapiens
  misc_RNA (1)...(19): siRNA sense strand
ugggcgacccugacaagua

SEQ ID NO: 477768 - RNA, 19 nt, Homo sapiens
  misc_RNA (1)...(19): siRNA sense strand
gaugugagggcaauuuuga

SEQ ID NO: 477769 - RNA, 19 nt, Homo sapiens
  misc_RNA (1)...(19): siRNA sense strand
ggcugacucgcuaugguua

SEQ ID NO: 477770 - RNA, 19 nt, Homo sapiens
  misc_RNA (1)...(19): siRNA sense strand
ccacacacagcccauccuu

SEQ ID NO: 477771 - RNA, 19 nt, Homo sapiens
  misc_RNA (1)...(19): siRNA sense strand
gaugaggagaccuggacuu

SEQ ID NO: 477772 - RNA, 19 nt, Homo sapiens
  misc_RNA (1)...(19): siRNA sense strand
ccuagcccaugccuucuuc

SEQ ID NO: 477773 - RNA, 19 nt, Homo sapiens
  misc_RNA (1)...(19): siRNA sense strand
ccaagaacagcaucaagac

SEQ ID NO: 477774 - RNA, 19 nt, Homo sapiens
  misc_RNA (1)...(19): siRNA sense strand
gacaagcccacaaggaaac

SEQ ID NO: 477775 - RNA, 19 nt, Homo sapiens
  misc_RNA (1)...(19): siRNA sense strand
uaugacaagcccacaagga

SEQ ID NO: 477776 - RNA, 19 nt, Homo sapiens
  misc_RNA (1)...(19): siRNA sense strand
ugacaccuacuucuucaag

SEQ ID NO: 477777 - RNA, 19 nt, Homo sapiens
  misc_RNA (1)...(19): siRNA sense strand
cacagaacgggaagaccua

SEQ ID NO: 477778 - RNA, 19 nt, Homo sapiens
  misc_RNA (1)...(19): siRNA sense strand
gaaaccugcgauugucagu

SEQ ID NO: 477779 - RNA, 19 nt, Homo sapiens
  misc_RNA (1)...(19): siRNA sense strand
gcagagcccugagaaguug

SEQ ID NO: 477780 - RNA, 19 nt, Homo sapiens
  misc_RNA (1)...(19): siRNA sense strand
ggagucaggccucacauuu

SEQ ID NO: 477781 - RNA, 19 nt, Homo sapiens
  misc_RNA (1)...(19): siRNA sense strand
ggccgaauccuccucuuua

SEQ ID NO: 477782 - RNA, 19 nt, Homo sapiens
  misc_RNA (1)...(19): siRNA sense strand
gaggagaccuggacuuuug

SEQ ID NO: 477783 - RNA, 19 nt, Homo sapiens
  misc_RNA (1)...(19): siRNA sense strand
ucaaagucaugcagagguu

SEQ ID NO: 477784 - RNA, 19 nt, Homo sapiens
  misc_RNA (1)...(19): siRNA sense strand
acacucacuuugacgauga

SEQ ID NO: 477785 - RNA, 19 nt, Homo sapiens
  misc_RNA (1)...(19): siRNA sense strand
gggcgacccugacaaguac

SEQ ID NO: 477786 - RNA, 19 nt, Homo sapiens
  misc_RNA (1)...(19): siRNA sense strand
caugagcuaugcccugaug

SEQ ID NO: 477787 - RNA, 19 nt, Homo sapiens
  misc_RNA (1)...(19): siRNA sense strand
agucaggccucacauuuca

SEQ ID NO: 477788 - RNA, 19 nt, Homo sapiens
  misc_RNA (1)...(19): siRNA sense strand
ugacaagcccacaaggaaa

SEQ ID NO: 477789 - RNA, 19 nt, Homo sapiens
  misc_RNA (1)...(19): siRNA sense strand
cgacauccucaucgacuuu

SEQ ID NO: 477790 - RNA, 19 nt, Homo sapiens
  misc_RNA (1)...(19): siRNA sense strand
gcgauggccugcagcaacu

SEQ ID NO: 477791 - RNA, 19 nt, Homo sapiens
  misc_RNA (1)...(19): siRNA sense strand
gccgaauccuccucuuuag

SEQ ID NO: 477792 - RNA, 19 nt, Homo sapiens
  misc_RNA (1)...(19): siRNA sense strand
acaaguaccgccugucuca

SEQ ID NO: 477793 - RNA, 19 nt, Homo sapiens
  misc_RNA (1)...(19): siRNA sense strand
gaagaagcgaacccugaca

SEQ ID NO: 477794 - RNA, 19 nt, Homo sapiens
  misc_RNA (1)...(19): siRNA sense strand
cccaagaacagcaucaaga

SEQ ID NO: 477795 - RNA, 19 nt, Homo sapiens
  misc_RNA (1)...(19): siRNA sense strand
gagucaggccucacauuuc

SEQ ID NO: 477796 - RNA, 19 nt, Homo sapiens
  misc_RNA (1)...(19): siRNA sense strand
ggacacucacuuugacgau

SEQ ID NO: 477797 - RNA, 19 nt, Homo sapiens
  misc_RNA (1)...(19): siRNA sense strand
guccgaaaccugcgauugu

SEQ ID NO: 477798 - RNA, 19 nt, Homo sapiens
  misc_RNA (1)...(19): siRNA sense strand
aagcgaacccugacaugga

SEQ ID NO: 477799 - RNA, 19 nt, Homo sapiens
  misc_RNA (1)...(19): siRNA sense strand
ugggcgacccugacaagua

SEQ ID NO: 477800 - RNA, 19 nt, Homo sapiens
  misc_RNA (1)...(19): siRNA sense strand
gaugugagggcaauuuuga

SEQ ID NO: 477801 - RNA, 19 nt, Homo sapiens
  misc_RNA (1)...(19): siRNA sense strand
ggcugacucgcuaugguua

SEQ ID NO: 477802 - RNA, 19 nt, Homo sapiens
  misc_RNA (1)...(19): siRNA sense strand
ccacacacagcccauccuu

SEQ ID NO: 477803 - RNA, 19 nt, Homo sapiens
  misc_RNA (1)...(19): siRNA sense strand
gaugaggagaccuggacuu

SEQ ID NO: 477804 - RNA, 19 nt, Homo sapiens
  misc_RNA (1)...(19): siRNA sense strand
ccuagcccaugccuucuuc

SEQ ID NO: 477805 - RNA, 19 nt, Homo sapiens
  misc_RNA (1)...(19): siRNA sense strand
ccaagaacagcaucaagac

SEQ ID NO: 477806 - RNA, 19 nt, Homo sapiens
  misc_RNA (1)...(19): siRNA sense strand
gacaagcccacaaggaaac

SEQ ID NO: 477807 - RNA, 19 nt, Homo sapiens
  misc_RNA (1)...(19): siRNA sense strand
uaugacaagcccacaagga

SEQ ID NO: 477808 - RNA, 19 nt, Homo sapiens
  misc_RNA (1)...(19): siRNA sense strand
ugacaccuacuucuucaag

SEQ ID NO: 477809 - RNA, 19 nt, Homo sapiens
  misc_RNA (1)...(19): siRNA sense strand
cacagaacgggaagaccua

SEQ ID NO: 477810 - RNA, 19 nt, Homo sapiens
  misc_RNA (1)...(19): siRNA sense strand
gaaaccugcgauugucagu

SEQ ID NO: 477811 - RNA, 19 nt, Homo sapiens
  misc_RNA (1)...(19): siRNA sense strand
ggaaggucccucagacauc

SEQ ID NO: 477812 - RNA, 19 nt, Homo sapiens
  misc_RNA (1)...(19): siRNA sense strand
ccucagacauccccgauug

SEQ ID NO: 477813 - RNA, 19 nt, Homo sapiens
  misc_RNA (1)...(19): siRNA sense strand
ggaaggucccucagacauc

SEQ ID NO: 477814 - RNA, 19 nt, Homo sapiens
  misc_RNA (1)...(19): siRNA sense strand
ccucagacauccccgauug

SEQ ID NO: 477815 - RNA, 19 nt, Homo sapiens
  misc_RNA (1)...(19): siRNA sense strand
ggaaggucccucagacauc

SEQ ID NO: 477816 - RNA, 19 nt, Homo sapiens
  misc_RNA (1)...(19): siRNA sense strand
ccucagacauccccgauug

SEQ ID NO: 477817 - RNA, 19 nt, Homo sapiens
  misc_RNA (1)...(19): siRNA sense strand
ggaaggucccucagacauc

SEQ ID NO: 477818 - RNA, 19 nt, Homo sapiens
  misc_RNA (1)...(19): siRNA sense strand
ccucagacauccccgauug

SEQ ID NO: 477819 - RNA, 19 nt, Homo sapiens
  misc_RNA (1)...(19): siRNA sense strand
ggaaggucccucagacauc

SEQ ID NO: 477820 - RNA, 19 nt, Homo sapiens
  misc_RNA (1)...(19): siRNA sense strand
ccucagacauccccgauug

SEQ ID NO: 477821 - RNA, 19 nt, Homo sapiens
  misc_RNA (1)...(19): siRNA sense strand
ggaaggucccucagacauc

SEQ ID NO: 477822 - RNA, 19 nt, Homo sapiens
  misc_RNA (1)...(19): siRNA sense strand
ccucagacauccccgauug

SEQ ID NO: 477823 - RNA, 19 nt, Homo sapiens
  misc_RNA (1)...(19): siRNA sense strand
gaugggcacugaacucacu

SEQ ID NO: 477824 - RNA, 19 nt, Homo sapiens
  misc_RNA (1)...(19): siRNA sense strand
gaugggcacugaacucacu

SEQ ID NO: 477825 - RNA, 19 nt, Homo sapiens
  misc_RNA (1)...(19): siRNA sense strand
gaugggcacugaacucacu

SEQ ID NO: 477826 - RNA, 19 nt, Homo sapiens
  misc_RNA (1)...(19): siRNA sense strand
agaagaggcugcagaauau

SEQ ID NO: 477827 - RNA, 19 nt, Homo sapiens
  misc_RNA (1)...(19): siRNA sense strand
agaaagcccuuaaauaaag

SEQ ID NO: 477828 - RNA, 19 nt, Homo sapiens
  misc_RNA (1)...(19): siRNA sense strand
gccaguauguuguaagaaa

SEQ ID NO: 477829 - RNA, 19 nt, Homo sapiens
  misc_RNA (1)...(19): siRNA sense strand
gaaagcccuuaaauaaaga

SEQ ID NO: 477830 - RNA, 19 nt, Homo sapiens
  misc_RNA (1)...(19): siRNA sense strand
aaggagaacuggagaaaga

SEQ ID NO: 477831 - RNA, 19 nt, Homo sapiens
  misc_RNA (1)...(19): siRNA sense strand
gaacgcaaacuucguacuu

SEQ ID NO: 477832 - RNA, 19 nt, Homo sapiens
  misc_RNA (1)...(19): siRNA sense strand
aagaagaggcugcagaaua

SEQ ID NO: 477833 - RNA, 19 nt, Homo sapiens
  misc_RNA (1)...(19): siRNA sense strand
guucucaacuugguuauug

SEQ ID NO: 477834 - RNA, 19 nt, Homo sapiens
  misc_RNA (1)...(19): siRNA sense strand
gaagcagcguaccaagaaa

SEQ ID NO: 477835 - RNA, 19 nt, Homo sapiens
  misc_RNA (1)...(19): siRNA sense strand
caaaagagcuagcagaauc

SEQ ID NO: 477836 - RNA, 19 nt, Homo sapiens
  misc_RNA (1)...(19): siRNA sense strand
gaugaacgcaaacuucgua

SEQ ID NO: 477837 - RNA, 19 nt, Homo sapiens
  misc_RNA (1)...(19): siRNA sense strand
gccagaaacucauugaagu

SEQ ID NO: 477838 - RNA, 19 nt, Homo sapiens
  misc_RNA (1)...(19): siRNA sense strand
ccaaagcacccaagauuca

SEQ ID NO: 477839 - RNA, 19 nt, Homo sapiens
  misc_RNA (1)...(19): siRNA sense strand
ugaauccagucagaaauaa

SEQ ID NO: 477840 - RNA, 19 nt, Homo sapiens
  misc_RNA (1)...(19): siRNA sense strand
uaaagaagaggcugcagaa

SEQ ID NO: 477841 - RNA, 19 nt, Homo sapiens
  misc_RNA (1)...(19): siRNA sense strand
gcaaacuucguacuuucua

SEQ ID NO: 477842 - RNA, 19 nt, Homo sapiens
  misc_RNA (1)...(19): siRNA sense strand
guaaggggcauuccuguua

SEQ ID NO: 477843 - RNA, 19 nt, Homo sapiens
  misc_RNA (1)...(19): siRNA sense strand
gugaagaauggaaggguua

SEQ ID NO: 477844 - RNA, 19 nt, Homo sapiens
  misc_RNA (1)...(19): siRNA sense strand
gcagaauaugcuaaacuuu

SEQ ID NO: 477845 - RNA, 19 nt, Homo sapiens
  misc_RNA (1)...(19): siRNA sense strand
caaacuucguacuuucuau

SEQ ID NO: 477846 - RNA, 19 nt, Homo sapiens
  misc_RNA (1)...(19): siRNA sense strand
ggagaacuggagaaagaaa

SEQ ID NO: 477847 - RNA, 19 nt, Homo sapiens
  misc_RNA (1)...(19): siRNA sense strand
gaugauguccgccaguaug

SEQ ID NO: 477848 - RNA, 19 nt, Homo sapiens
  misc_RNA (1)...(19): siRNA sense strand
agaagcagcguaccaagaa

SEQ ID NO: 477849 - RNA, 19 nt, Homo sapiens
  misc_RNA (1)...(19): siRNA sense strand
ggauauuccuggacugacu

SEQ ID NO: 477850 - RNA, 19 nt, Homo sapiens
  misc_RNA (1)...(19): siRNA sense strand
ccaaggagaacuggagaaa

SEQ ID NO: 477851 - RNA, 19 nt, Homo sapiens
  misc_RNA (1)...(19): siRNA sense strand
aagaugauguccgccagua

SEQ ID NO: 477852 - RNA, 19 nt, Homo sapiens
  misc_RNA (1)...(19): siRNA sense strand
ggacgaugaacgcaaacuu

SEQ ID NO: 477853 - RNA, 19 nt, Homo sapiens
  misc_RNA (1)...(19): siRNA sense strand
ugcagaauaugcuaaacuu

SEQ ID NO: 477854 - RNA, 19 nt, Homo sapiens
  misc_RNA (1)...(19): siRNA sense strand
gauguccgccaguauguug

SEQ ID NO: 477855 - RNA, 19 nt, Homo sapiens
  misc_RNA (1)...(19): siRNA sense strand
gcguauggccacagaaguu

SEQ ID NO: 477856 - RNA, 19 nt, Homo sapiens
  misc_RNA (1)...(19): siRNA sense strand
cuucguacuuucuaugaga

SEQ ID NO: 477857 - RNA, 19 nt, Homo sapiens
  misc_RNA (1)...(19): siRNA sense strand
ccgccaguauguuguaaga

SEQ ID NO: 477858 - RNA, 19 nt, Homo sapiens
  misc_RNA (1)...(19): siRNA sense strand
ggagaaagaaagagaaaau

SEQ ID NO: 477859 - RNA, 19 nt, Homo sapiens
  misc_RNA (1)...(19): siRNA sense strand
agcagaauccgcaaacuuu

SEQ ID NO: 477860 - RNA, 19 nt, Homo sapiens
  misc_RNA (1)...(19): siRNA sense strand
ccaguauguuguaagaaag

SEQ ID NO: 477861 - RNA, 19 nt, Homo sapiens
  misc_RNA (1)...(19): siRNA sense strand
gacgaugaacgcaaacuuc

SEQ ID NO: 477862 - RNA, 19 nt, Homo sapiens
  misc_RNA (1)...(19): siRNA sense strand
aacgcaaacuucguacuuu

SEQ ID NO: 477863 - RNA, 19 nt, Homo sapiens
  misc_RNA (1)...(19): siRNA sense strand
ugaagaagcagcguaccaa

SEQ ID NO: 477864 - RNA, 19 nt, Homo sapiens
  misc_RNA (1)...(19): siRNA sense strand
ccagaaacucauugaagug

SEQ ID NO: 477865 - RNA, 19 nt, Homo sapiens
  misc_RNA (1)...(19): siRNA sense strand
agaagcguauggccacaga

SEQ ID NO: 477866 - RNA, 19 nt, Homo sapiens
  misc_RNA (1)...(19): siRNA sense strand
uagcagaauccgcaaacuu

SEQ ID NO: 477867 - RNA, 19 nt, Homo sapiens
  misc_RNA (1)...(19): siRNA sense strand
acgcaaacuucguacuuuc

SEQ ID NO: 477868 - RNA, 19 nt, Homo sapiens
  misc_RNA (1)...(19): siRNA sense strand
uucaaucucucuaaagaag

SEQ ID NO: 477869 - RNA, 19 nt, Homo sapiens
  misc_RNA (1)...(19): siRNA sense strand
gaagaggcugcagaauaug

SEQ ID NO: 477870 - RNA, 19 nt, Homo sapiens
  misc_RNA (1)...(19): siRNA sense strand
gcguauugcucugaagaag

SEQ ID NO: 477871 - RNA, 19 nt, Homo sapiens
  misc_RNA (1)...(19): siRNA sense strand
aguggacgaugaacgcaaa

SEQ ID NO: 477872 - RNA, 19 nt, Homo sapiens
  misc_RNA (1)...(19): siRNA sense strand
cauuguggaugcaaaucug

SEQ ID NO: 477873 - RNA, 19 nt, Homo sapiens
  misc_RNA (1)...(19): siRNA sense strand
gaagaauggaaggguuaug

SEQ ID NO: 477874 - RNA, 19 nt, Homo sapiens
  misc_RNA (1)...(19): siRNA sense strand
aaacuucguacuuucuaug

SEQ ID NO: 477875 - RNA, 19 nt, Homo sapiens
  misc_RNA (1)...(19): siRNA sense strand
caugaagcagggugucuug

SEQ ID NO: 477876 - RNA, 19 nt, Homo sapiens
  misc_RNA (1)...(19): siRNA sense strand
aagaagcagcguaccaaga

SEQ ID NO: 477877 - RNA, 19 nt, Homo sapiens
  misc_RNA (1)...(19): siRNA sense strand
ucucaacuugguuauugua

SEQ ID NO: 477878 - RNA, 19 nt, Homo sapiens
  misc_RNA (1)...(19): siRNA sense strand
gcagaauccgcaaacuuuu

SEQ ID NO: 477879 - RNA, 19 nt, Homo sapiens
  misc_RNA (1)...(19): siRNA sense strand
gagaacuggagaaagaaag

SEQ ID NO: 477880 - RNA, 19 nt, Homo sapiens
  misc_RNA (1)...(19): siRNA sense strand
gguuaugugguccgaauca

SEQ ID NO: 477881 - RNA, 19 nt, Homo sapiens
  misc_RNA (1)...(19): siRNA sense strand
ucaguucgugguugcauug

SEQ ID NO: 477882 - RNA, 19 nt, Homo sapiens
  misc_RNA (1)...(19): siRNA sense strand
gaacuggagaaagaaagag

SEQ ID NO: 477883 - RNA, 19 nt, Homo sapiens
  misc_RNA (1)...(19): siRNA sense strand
uggacugacugauacuaca

SEQ ID NO: 477884 - RNA, 19 nt, Homo sapiens
  misc_RNA (1)...(19): siRNA sense strand
caacaaagaugauaccaaa

SEQ ID NO: 477885 - RNA, 19 nt, Homo sapiens
  misc_RNA (1)...(19): siRNA sense strand
gcagagaaguuuaauuuga

SEQ ID NO: 477886 - RNA, 19 nt, Homo sapiens
  misc_RNA (1)...(19): siRNA sense strand
gaagagaggaugagaauga

SEQ ID NO: 477887 - RNA, 19 nt, Homo sapiens
  misc_RNA (1)...(19): siRNA sense strand
ggaacgacaucauuuaaga

SEQ ID NO: 477888 - RNA, 19 nt, Homo sapiens
  misc_RNA (1)...(19): siRNA sense strand
gcauguaccuuguguagaa

SEQ ID NO: 477889 - RNA, 19 nt, Homo sapiens
  misc_RNA (1)...(19): siRNA sense strand
ggaacgagaauucuuaaua

SEQ ID NO: 477890 - RNA, 19 nt, Homo sapiens
  misc_RNA (1)...(19): siRNA sense strand
gaaaggaacuucguagcaa

SEQ ID NO: 477891 - RNA, 19 nt, Homo sapiens
  misc_RNA (1)...(19): siRNA sense strand
gaauauguccggaaacuuu

SEQ ID NO: 477892 - RNA, 19 nt, Homo sapiens
  misc_RNA (1)...(19): siRNA sense strand
ugacagagguuccaguaaa

SEQ ID NO: 477893 - RNA, 19 nt, Homo sapiens
  misc_RNA (1)...(19): siRNA sense strand
gaauacagauuaccuuaca

SEQ ID NO: 477894 - RNA, 19 nt, Homo sapiens
  misc_RNA (1)...(19): siRNA sense strand
gaauaaagaguccaacaaa

SEQ ID NO: 477895 - RNA, 19 nt, Homo sapiens
  misc_RNA (1)...(19): siRNA sense strand
gaagaacaaucuggaaaug

SEQ ID NO: 477896 - RNA, 19 nt, Homo sapiens
  misc_RNA (1)...(19): siRNA sense strand
gaagugaaagacuauguua

SEQ ID NO: 477897 - RNA, 19 nt, Homo sapiens
  misc_RNA (1)...(19): siRNA sense strand
cauaguagaugcuuuccua

SEQ ID NO: 477898 - RNA, 19 nt, Homo sapiens
  misc_RNA (1)...(19): siRNA sense strand
gaccauccauuuccuauug

SEQ ID NO: 477899 - RNA, 19 nt, Homo sapiens
  misc_RNA (1)...(19): siRNA sense strand
ggagacauguggacgguuu

SEQ ID NO: 477900 - RNA, 19 nt, Homo sapiens
  misc_RNA (1)...(19): siRNA sense strand
ggcaaauucucaauccuua

SEQ ID NO: 477901 - RNA, 19 nt, Homo sapiens
  misc_RNA (1)...(19): siRNA sense strand
gauaauuaguccagagaaa

SEQ ID NO: 477902 - RNA, 19 nt, Homo sapiens
  misc_RNA (1)...(19): siRNA sense strand
cagauuaccuuacagauuc

SEQ ID NO: 477903 - RNA, 19 nt, Homo sapiens
  misc_RNA (1)...(19): siRNA sense strand
caagauugguugcuacauu

SEQ ID NO: 477904 - RNA, 19 nt, Homo sapiens
  misc_RNA (1)...(19): siRNA sense strand
gaacaugggccuggaauug

SEQ ID NO: 477905 - RNA, 19 nt, Homo sapiens
  misc_RNA (1)...(19): siRNA sense strand
caacagcccuuccagaauc

SEQ ID NO: 477906 - RNA, 19 nt, Homo sapiens
  misc_RNA (1)...(19): siRNA sense strand
aaagaaacaucaagaggaa

SEQ ID NO: 477907 - RNA, 19 nt, Homo sapiens
  misc_RNA (1)...(19): siRNA sense strand
ugaagaggaugaagaagaa

SEQ ID NO: 477908 - RNA, 19 nt, Homo sapiens
  misc_RNA (1)...(19): siRNA sense strand
gaagauauucgauuaggaa

SEQ ID NO: 477909 - RNA, 19 nt, Homo sapiens
  misc_RNA (1)...(19): siRNA sense strand
gcacuauucuggacacaug

SEQ ID NO: 477910 - RNA, 19 nt, Homo sapiens
  misc_RNA (1)...(19): siRNA sense strand
gagcaucuuuucagaauua

SEQ ID NO: 477911 - RNA, 19 nt, Homo sapiens
  misc_RNA (1)...(19): siRNA sense strand
gagaauacagauuaccuua

SEQ ID NO: 477912 - RNA, 19 nt, Homo sapiens
  misc_RNA (1)...(19): siRNA sense strand
gaagaggaggguucugaua

SEQ ID NO: 477913 - RNA, 19 nt, Homo sapiens
  misc_RNA (1)...(19): siRNA sense strand
gaagauagacauaaacagu

SEQ ID NO: 477914 - RNA, 19 nt, Homo sapiens
  misc_RNA (1)...(19): siRNA sense strand
aaggaucucucuaagguua

SEQ ID NO: 477915 - RNA, 19 nt, Homo sapiens
  misc_RNA (1)...(19): siRNA sense strand
ggaaucagcuguuauuuuc

SEQ ID NO: 477916 - RNA, 19 nt, Homo sapiens
  misc_RNA (1)...(19): siRNA sense strand
uagauuacaugaucaguga

SEQ ID NO: 477917 - RNA, 19 nt, Homo sapiens
  misc_RNA (1)...(19): siRNA sense strand
agaagagacuggaagauga

SEQ ID NO: 477918 - RNA, 19 nt, Homo sapiens
  misc_RNA (1)...(19): siRNA sense strand
gcaacgaaguggugaaucu

SEQ ID NO: 477919 - RNA, 19 nt, Homo sapiens
  misc_RNA (1)...(19): siRNA sense strand
uaaaugagccagaagaaga

SEQ ID NO: 477920 - RNA, 19 nt, Homo sapiens
  misc_RNA (1)...(19): siRNA sense strand
gagcaaaugaugagaaaga

SEQ ID NO: 477921 - RNA, 19 nt, Homo sapiens
  misc_RNA (1)...(19): siRNA sense strand
gcaagaacaagaagauuau

SEQ ID NO: 477922 - RNA, 19 nt, Homo sapiens
  misc_RNA (1)...(19): siRNA sense strand
ggcaagaacaagaagauua

SEQ ID NO: 477923 - RNA, 19 nt, Homo sapiens
  misc_RNA (1)...(19): siRNA sense strand
gauuaggaauggagguuaa

SEQ ID NO: 477924 - RNA, 19 nt, Homo sapiens
  misc_RNA (1)...(19): siRNA sense strand
ugauauugcuggacuugua

SEQ ID NO: 477925 - RNA, 19 nt, Homo sapiens
  misc_RNA (1)...(19): siRNA sense strand
agaacaaucuggaaaugaa

SEQ ID NO: 477926 - RNA, 19 nt, Homo sapiens
  misc_RNA (1)...(19): siRNA sense strand
ggacacauguggccaguac

SEQ ID NO: 477927 - RNA, 19 nt, Homo sapiens
  misc_RNA (1)...(19): siRNA sense strand
guacaaggaucucucuaag

SEQ ID NO: 477928 - RNA, 19 nt, Homo sapiens
  misc_RNA (1)...(19): siRNA sense strand
ugaugacaccuuagaauua

SEQ ID NO: 477929 - RNA, 19 nt, Homo sapiens
  misc_RNA (1)...(19): siRNA sense strand
gauggaguguuagaagaua

SEQ ID NO: 477930 - RNA, 19 nt, Homo sapiens
  misc_RNA (1)...(19): siRNA sense strand
ccugauggcucuccaaguu

SEQ ID NO: 477931 - RNA, 19 nt, Homo sapiens
  misc_RNA (1)...(19): siRNA sense strand
gaacaagaagagaggauga

SEQ ID NO: 477932 - RNA, 19 nt, Homo sapiens
  misc_RNA (1)...(19): siRNA sense strand
gaacugcuaagaccaaaga

SEQ ID NO: 477933 - RNA, 19 nt, Homo sapiens
  misc_RNA (1)...(19): siRNA sense strand
gaugacaccuuagaauuag

SEQ ID NO: 477934 - RNA, 19 nt, Homo sapiens
  misc_RNA (1)...(19): siRNA sense strand
gcaacaggcagaacaagaa

SEQ ID NO: 477935 - RNA, 19 nt, Homo sapiens
  misc_RNA (1)...(19): siRNA sense strand
ggaaaugaaagugaaguaa

SEQ ID NO: 477936 - RNA, 19 nt, Homo sapiens
  misc_RNA (1)...(19): siRNA sense strand
gaaagaagcaagcaaugca

SEQ ID NO: 477937 - RNA, 19 nt, Homo sapiens
  misc_RNA (1)...(19): siRNA sense strand
ccaggaauauguccggaaa

SEQ ID NO: 477938 - RNA, 19 nt, Homo sapiens
  misc_RNA (1)...(19): siRNA sense strand
gaaggcagaggaagaauca

SEQ ID NO: 477939 - RNA, 19 nt, Homo sapiens
  misc_RNA (1)...(19): siRNA sense strand
ugaaaccgaugaagagaau

SEQ ID NO: 477940 - RNA, 19 nt, Homo sapiens
  misc_RNA (1)...(19): siRNA sense strand
acagggagcuccagaauac

SEQ ID NO: 477941 - RNA, 19 nt, Homo sapiens
  misc_RNA (1)...(19): siRNA sense strand
gaacgacaucauuuaagaa

SEQ ID NO: 477942 - RNA, 19 nt, Homo sapiens
  misc_RNA (1)...(19): siRNA sense strand
aggaagagaauacagauua

SEQ ID NO: 477943 - RNA, 19 nt, Homo sapiens
  misc_RNA (1)...(19): siRNA sense strand
ggaugaagaagaagaagaa

SEQ ID NO: 477944 - RNA, 19 nt, Homo sapiens
  misc_RNA (1)...(19): siRNA sense strand
ccaaagaucaaacucugua

SEQ ID NO: 477945 - RNA, 19 nt, Homo sapiens
  misc_RNA (1)...(19): siRNA sense strand
acaaggaucucucuaaggu

SEQ ID NO: 477946 - RNA, 19 nt, Homo sapiens
  misc_RNA (1)...(19): siRNA sense strand
gaaacuucuugaugaacaa

SEQ ID NO: 477947 - RNA, 19 nt, Homo sapiens
  misc_RNA (1)...(19): siRNA sense strand
ugguaaaccuggagaauau

SEQ ID NO: 477948 - RNA, 19 nt, Homo sapiens
  misc_RNA (1)...(19): siRNA sense strand
gaaccucauugauuugaag

SEQ ID NO: 477949 - RNA, 19 nt, Homo sapiens
  misc_RNA (1)...(19): siRNA sense strand
ugaagagaauacugaggua

SEQ ID NO: 477950 - RNA, 19 nt, Homo sapiens
  misc_RNA (1)...(19): siRNA sense strand
ggaagagaauacagauuac

SEQ ID NO: 477951 - RNA, 19 nt, Homo sapiens
  misc_RNA (1)...(19): siRNA sense strand
caccuaacaucaccaaguu

SEQ ID NO: 477952 - RNA, 19 nt, Homo sapiens
  misc_RNA (1)...(19): siRNA sense strand
gaagggagcaccuaaugca

SEQ ID NO: 477953 - RNA, 19 nt, Homo sapiens
  misc_RNA (1)...(19): siRNA sense strand
uaaaggcgguggacuuaag

SEQ ID NO: 477954 - RNA, 19 nt, Homo sapiens
  misc_RNA (1)...(19): siRNA sense strand
gaacaaucuggaaaugaaa

SEQ ID NO: 477955 - RNA, 19 nt, Homo sapiens
  misc_RNA (1)...(19): siRNA sense strand
gacaaagacucaaaagauu

SEQ ID NO: 477956 - RNA, 19 nt, Homo sapiens
  misc_RNA (1)...(19): siRNA sense strand
guuggagaaucuagaaauu

SEQ ID NO: 477957 - RNA, 19 nt, Homo sapiens
  misc_RNA (1)...(19): siRNA sense strand
ucaugucucuguagugauu

SEQ ID NO: 477958 - RNA, 19 nt, Homo sapiens
  misc_RNA (1)...(19): siRNA sense strand
ggaggguucugauaaugau

SEQ ID NO: 477959 - RNA, 19 nt, Homo sapiens
  misc_RNA (1)...(19): siRNA sense strand
ggccuggaauugauauauu

SEQ ID NO: 477960 - RNA, 19 nt, Homo sapiens
  misc_RNA (1)...(19): siRNA sense strand
cugcagagaaguuuaauuu

SEQ ID NO: 477961 - RNA, 19 nt, Homo sapiens
  misc_RNA (1)...(19): siRNA sense strand
ggagcucagugaagauaga

SEQ ID NO: 477962 - RNA, 19 nt, Homo sapiens
  misc_RNA (1)...(19): siRNA sense strand
gcaaacaccaaucgugaga

SEQ ID NO: 477963 - RNA, 19 nt, Homo sapiens
  misc_RNA (1)...(19): siRNA sense strand
gaggaggguucugauaaug

SEQ ID NO: 477964 - RNA, 19 nt, Homo sapiens
  misc_RNA (1)...(19): siRNA sense strand
cguuguggauggaguguua

SEQ ID NO: 477965 - RNA, 19 nt, Homo sapiens
  misc_RNA (1)...(19): siRNA sense strand
caacccaccuccagcugaa

SEQ ID NO: 477966 - RNA, 19 nt, Homo sapiens
  misc_RNA (1)...(19): siRNA sense strand
gcaccucugcucucucuuu

SEQ ID NO: 477967 - RNA, 19 nt, Homo sapiens
  misc_RNA (1)...(19): siRNA sense strand
gaagagaauacugagguaa

SEQ ID NO: 477968 - RNA, 19 nt, Homo sapiens
  misc_RNA (1)...(19): siRNA sense strand
gagaagaagaggaggaaga

SEQ ID NO: 477969 - RNA, 19 nt, Homo sapiens
  misc_RNA (1)...(19): siRNA sense strand
ugaaguaaaugagccagaa

SEQ ID NO: 477970 - RNA, 19 nt, Homo sapiens
  misc_RNA (1)...(19): siRNA sense strand
cagugaagauagacauaaa

SEQ ID NO: 477971 - RNA, 19 nt, Homo sapiens
  misc_RNA (1)...(19): siRNA sense strand
ggccaaacgucagcaagaa

SEQ ID NO: 477972 - RNA, 19 nt, Homo sapiens
  misc_RNA (1)...(19): siRNA sense strand
gaagaaaaguuuggagguu

SEQ ID NO: 477973 - RNA, 19 nt, Homo sapiens
  misc_RNA (1)...(19): siRNA sense strand
caucagcagugccaaguuc

SEQ ID NO: 477974 - RNA, 19 nt, Homo sapiens
  misc_RNA (1)...(19): siRNA sense strand
ugguagagaaugcauauua

SEQ ID NO: 477975 - RNA, 19 nt, Homo sapiens
  misc_RNA (1)...(19): siRNA sense strand
gauuucagauuucauguac

SEQ ID NO: 477976 - RNA, 19 nt, Homo sapiens
  misc_RNA (1)...(19): siRNA sense strand
gaucucaucucaagcucau

SEQ ID NO: 477977 - RNA, 19 nt, Homo sapiens
  misc_RNA (1)...(19): siRNA sense strand
ggucuuuccuuaaucuaug

SEQ ID NO: 477978 - RNA, 19 nt, Homo sapiens
  misc_RNA (1)...(19): siRNA sense strand
aaaggaacuucguagcaaa

SEQ ID NO: 477979 - RNA, 19 nt, Homo sapiens
  misc_RNA (1)...(19): siRNA sense strand
cgacaucauuuaagaaagg

SEQ ID NO: 477980 - RNA, 19 nt, Homo sapiens
  misc_RNA (1)...(19): siRNA sense strand
gcacccugcuggagacaug

SEQ ID NO: 477981 - RNA, 19 nt, Homo sapiens
  misc_RNA (1)...(19): siRNA sense strand
gcgguggacuuaagcaugu

SEQ ID NO: 477982 - RNA, 19 nt, Homo sapiens
  misc_RNA (1)...(19): siRNA sense strand
gacuagugcucuaccaaga

SEQ ID NO: 477983 - RNA, 19 nt, Homo sapiens
  misc_RNA (1)...(19): siRNA sense strand
caucuggaaugugaaauau

SEQ ID NO: 477984 - RNA, 19 nt, Homo sapiens
  misc_RNA (1)...(19): siRNA sense strand
caacaaagaugauaccaaa

SEQ ID NO: 477985 - RNA, 19 nt, Homo sapiens
  misc_RNA (1)...(19): siRNA sense strand
gcagagaaguuuaauuuga

SEQ ID NO: 477986 - RNA, 19 nt, Homo sapiens
  misc_RNA (1)...(19): siRNA sense strand
gaagagaggaugagaauga

SEQ ID NO: 477987 - RNA, 19 nt, Homo sapiens
  misc_RNA (1)...(19): siRNA sense strand
ggaacgacaucauuuaaga

SEQ ID NO: 477988 - RNA, 19 nt, Homo sapiens
  misc_RNA (1)...(19): siRNA sense strand
gcauguaccuuguguagaa

SEQ ID NO: 477989 - RNA, 19 nt, Homo sapiens
  misc_RNA (1)...(19): siRNA sense strand
ggaacgagaauucuuaaua

SEQ ID NO: 477990 - RNA, 19 nt, Homo sapiens
  misc_RNA (1)...(19): siRNA sense strand
gaaaggaacuucguagcaa

SEQ ID NO: 477991 - RNA, 19 nt, Homo sapiens
  misc_RNA (1)...(19): siRNA sense strand
gaauauguccggaaacuuu

SEQ ID NO: 477992 - RNA, 19 nt, Homo sapiens
  misc_RNA (1)...(19): siRNA sense strand
ugacagagguuccaguaaa

SEQ ID NO: 477993 - RNA, 19 nt, Homo sapiens
  misc_RNA (1)...(19): siRNA sense strand
gaauacagauuaccuuaca

SEQ ID NO: 477994 - RNA, 19 nt, Homo sapiens
  misc_RNA (1)...(19): siRNA sense strand
gaauaaagaguccaacaaa

SEQ ID NO: 477995 - RNA, 19 nt, Homo sapiens
  misc_RNA (1)...(19): siRNA sense strand
gaagaacaaucuggaaaug

SEQ ID NO: 477996 - RNA, 19 nt, Homo sapiens
  misc_RNA (1)...(19): siRNA sense strand
gaagugaaagacuauguua

SEQ ID NO: 477997 - RNA, 19 nt, Homo sapiens
  misc_RNA (1)...(19): siRNA sense strand
cauaguagaugcuuuccua

SEQ ID NO: 477998 - RNA, 19 nt, Homo sapiens
  misc_RNA (1)...(19): siRNA sense strand
gaccauccauuuccuauug

SEQ ID NO: 477999 - RNA, 19 nt, Homo sapiens
  misc_RNA (1)...(19): siRNA sense strand
ggagacauguggacgguuu

SEQ ID NO: 478000 - RNA, 19 nt, Homo sapiens
  misc_RNA (1)...(19): siRNA sense strand
ggcaaauucucaauccuua

SEQ ID NO: 478001 - RNA, 19 nt, Homo sapiens
  misc_RNA (1)...(19): siRNA sense strand
gauaauuaguccagagaaa

SEQ ID NO: 478002 - RNA, 19 nt, Homo sapiens
  misc_RNA (1)...(19): siRNA sense strand
cagauuaccuuacagauuc

SEQ ID NO: 478003 - RNA, 19 nt, Homo sapiens
  misc_RNA (1)...(19): siRNA sense strand
caagauugguugcuacauu

SEQ ID NO: 478004 - RNA, 19 nt, Homo sapiens
  misc_RNA (1)...(19): siRNA sense strand
gaacaugggccuggaauug

SEQ ID NO: 478005 - RNA, 19 nt, Homo sapiens
  misc_RNA (1)...(19): siRNA sense strand
caacagcccuuccagaauc

SEQ ID NO: 478006 - RNA, 19 nt, Homo sapiens
  misc_RNA (1)...(19): siRNA sense strand
aaagaaacaucaagaggaa

SEQ ID NO: 478007 - RNA, 19 nt, Homo sapiens
  misc_RNA (1)...(19): siRNA sense strand
ugaagaggaugaagaagaa

SEQ ID NO: 478008 - RNA, 19 nt, Homo sapiens
  misc_RNA (1)...(19): siRNA sense strand
gaagauauucgauuaggaa

SEQ ID NO: 478009 - RNA, 19 nt, Homo sapiens
  misc_RNA (1)...(19): siRNA sense strand
gcacuauucuggacacaug

SEQ ID NO: 478010 - RNA, 19 nt, Homo sapiens
  misc_RNA (1)...(19): siRNA sense strand
gagcaucuuuucagaauua

SEQ ID NO: 478011 - RNA, 19 nt, Homo sapiens
  misc_RNA (1)...(19): siRNA sense strand
gagaauacagauuaccuua

SEQ ID NO: 478012 - RNA, 19 nt, Homo sapiens
  misc_RNA (1)...(19): siRNA sense strand
gaagaggaggguucugaua

SEQ ID NO: 478013 - RNA, 19 nt, Homo sapiens
  misc_RNA (1)...(19): siRNA sense strand
gaagauagacauaaacagu

SEQ ID NO: 478014 - RNA, 19 nt, Homo sapiens
  misc_RNA (1)...(19): siRNA sense strand
aaggaucucucuaagguua

SEQ ID NO: 478015 - RNA, 19 nt, Homo sapiens
  misc_RNA (1)...(19): siRNA sense strand
ggaaucagcuguuauuuuc

SEQ ID NO: 478016 - RNA, 19 nt, Homo sapiens
  misc_RNA (1)...(19): siRNA sense strand
uagauuacaugaucaguga

SEQ ID NO: 478017 - RNA, 19 nt, Homo sapiens
  misc_RNA (1)...(19): siRNA sense strand
agaagagacuggaagauga

SEQ ID NO: 478018 - RNA, 19 nt, Homo sapiens
  misc_RNA (1)...(19): siRNA sense strand
gcaacgaaguggugaaucu

SEQ ID NO: 478019 - RNA, 19 nt, Homo sapiens
  misc_RNA (1)...(19): siRNA sense strand
uaaaugagccagaagaaga

SEQ ID NO: 478020 - RNA, 19 nt, Homo sapiens
  misc_RNA (1)...(19): siRNA sense strand
gagcaaaugaugagaaaga

SEQ ID NO: 478021 - RNA, 19 nt, Homo sapiens
  misc_RNA (1)...(19): siRNA sense strand
gcaagaacaagaagauuau

SEQ ID NO: 478022 - RNA, 19 nt, Homo sapiens
  misc_RNA (1)...(19): siRNA sense strand
ggcaagaacaagaagauua

SEQ ID NO: 478023 - RNA, 19 nt, Homo sapiens
  misc_RNA (1)...(19): siRNA sense strand
gauuaggaauggagguuaa

SEQ ID NO: 478024 - RNA, 19 nt, Homo sapiens
  misc_RNA (1)...(19): siRNA sense strand
ugauauugcuggacuugua

SEQ ID NO: 478025 - RNA, 19 nt, Homo sapiens
  misc_RNA (1)...(19): siRNA sense strand
agaacaaucuggaaaugaa

SEQ ID NO: 478026 - RNA, 19 nt, Homo sapiens
  misc_RNA (1)...(19): siRNA sense strand
ggacacauguggccaguac

SEQ ID NO: 478027 - RNA, 19 nt, Homo sapiens
  misc_RNA (1)...(19): siRNA sense strand
guacaaggaucucucuaag

SEQ ID NO: 478028 - RNA, 19 nt, Homo sapiens
  misc_RNA (1)...(19): siRNA sense strand
ugaugacaccuuagaauua

SEQ ID NO: 478029 - RNA, 19 nt, Homo sapiens
  misc_RNA (1)...(19): siRNA sense strand
gauggaguguuagaagaua

SEQ ID NO: 478030 - RNA, 19 nt, Homo sapiens
  misc_RNA (1)...(19): siRNA sense strand
ccugauggcucuccaaguu

SEQ ID NO: 478031 - RNA, 19 nt, Homo sapiens
  misc_RNA (1)...(19): siRNA sense strand
gaacaagaagagaggauga

SEQ ID NO: 478032 - RNA, 19 nt, Homo sapiens
  misc_RNA (1)...(19): siRNA sense strand
gaacugcuaagaccaaaga

SEQ ID NO: 478033 - RNA, 19 nt, Homo sapiens
  misc_RNA (1)...(19): siRNA sense strand
gaugacaccuuagaauuag

SEQ ID NO: 478034 - RNA, 19 nt, Homo sapiens
  misc_RNA (1)...(19): siRNA sense strand
gcaacaggcagaacaagaa

SEQ ID NO: 478035 - RNA, 19 nt, Homo sapiens
  misc_RNA (1)...(19): siRNA sense strand
ggaaaugaaagugaaguaa

SEQ ID NO: 478036 - RNA, 19 nt, Homo sapiens
  misc_RNA (1)...(19): siRNA sense strand
gaaagaagcaagcaaugca

SEQ ID NO: 478037 - RNA, 19 nt, Homo sapiens
  misc_RNA (1)...(19): siRNA sense strand
ccaggaauauguccggaaa

SEQ ID NO: 478038 - RNA, 19 nt, Homo sapiens
  misc_RNA (1)...(19): siRNA sense strand
gaaggcagaggaagaauca

SEQ ID NO: 478039 - RNA, 19 nt, Homo sapiens
  misc_RNA (1)...(19): siRNA sense strand
ugaaaccgaugaagagaau

SEQ ID NO: 478040 - RNA, 19 nt, Homo sapiens
  misc_RNA (1)...(19): siRNA sense strand
acagggagcuccagaauac

SEQ ID NO: 478041 - RNA, 19 nt, Homo sapiens
  misc_RNA (1)...(19): siRNA sense strand
gaacgacaucauuuaagaa

SEQ ID NO: 478042 - RNA, 19 nt, Homo sapiens
  misc_RNA (1)...(19): siRNA sense strand
aggaagagaauacagauua

SEQ ID NO: 478043 - RNA, 19 nt, Homo sapiens
  misc_RNA (1)...(19): siRNA sense strand
ggaugaagaagaagaagaa

SEQ ID NO: 478044 - RNA, 19 nt, Homo sapiens
  misc_RNA (1)...(19): siRNA sense strand
ccaaagaucaaacucugua

SEQ ID NO: 478045 - RNA, 19 nt, Homo sapiens
  misc_RNA (1)...(19): siRNA sense strand
acaaggaucucucuaaggu

SEQ ID NO: 478046 - RNA, 19 nt, Homo sapiens
  misc_RNA (1)...(19): siRNA sense strand
gaaacuucuugaugaacaa

SEQ ID NO: 478047 - RNA, 19 nt, Homo sapiens
  misc_RNA (1)...(19): siRNA sense strand
ugguaaaccuggagaauau

SEQ ID NO: 478048 - RNA, 19 nt, Homo sapiens
  misc_RNA (1)...(19): siRNA sense strand
gaaccucauugauuugaag

SEQ ID NO: 478049 - RNA, 19 nt, Homo sapiens
  misc_RNA (1)...(19): siRNA sense strand
ugaagagaauacugaggua

SEQ ID NO: 478050 - RNA, 19 nt, Homo sapiens
  misc_RNA (1)...(19): siRNA sense strand
ggaagagaauacagauuac

SEQ ID NO: 478051 - RNA, 19 nt, Homo sapiens
  misc_RNA (1)...(19): siRNA sense strand
caccuaacaucaccaaguu

SEQ ID NO: 478052 - RNA, 19 nt, Homo sapiens
  misc_RNA (1)...(19): siRNA sense strand
gaagggagcaccuaaugca

SEQ ID NO: 478053 - RNA, 19 nt, Homo sapiens
  misc_RNA (1)...(19): siRNA sense strand
uaaaggcgguggacuuaag

SEQ ID NO: 478054 - RNA, 19 nt, Homo sapiens
  misc_RNA (1)...(19): siRNA sense strand
gaacaaucuggaaaugaaa

SEQ ID NO: 478055 - RNA, 19 nt, Homo sapiens
  misc_RNA (1)...(19): siRNA sense strand
gacaaagacucaaaagauu

SEQ ID NO: 478056 - RNA, 19 nt, Homo sapiens
  misc_RNA (1)...(19): siRNA sense strand
guuggagaaucuagaaauu

SEQ ID NO: 478057 - RNA, 19 nt, Homo sapiens
  misc_RNA (1)...(19): siRNA sense strand
ucaugucucuguagugauu

SEQ ID NO: 478058 - RNA, 19 nt, Homo sapiens
  misc_RNA (1)...(19): siRNA sense strand
ggaggguucugauaaugau

SEQ ID NO: 478059 - RNA, 19 nt, Homo sapiens
  misc_RNA (1)...(19): siRNA sense strand
ggccuggaauugauauauu

SEQ ID NO: 478060 - RNA, 19 nt, Homo sapiens
  misc_RNA (1)...(19): siRNA sense strand
cugcagagaaguuuaauuu

SEQ ID NO: 478061 - RNA, 19 nt, Homo sapiens
  misc_RNA (1)...(19): siRNA sense strand
ggagcucagugaagauaga

SEQ ID NO: 478062 - RNA, 19 nt, Homo sapiens
  misc_RNA (1)...(19): siRNA sense strand
gcaaacaccaaucgugaga

SEQ ID NO: 478063 - RNA, 19 nt, Homo sapiens
  misc_RNA (1)...(19): siRNA sense strand
gaggaggguucugauaaug

SEQ ID NO: 478064 - RNA, 19 nt, Homo sapiens
  misc_RNA (1)...(19): siRNA sense strand
cguuguggauggaguguua

SEQ ID NO: 478065 - RNA, 19 nt, Homo sapiens
  misc_RNA (1)...(19): siRNA sense strand
caacccaccuccagcugaa

SEQ ID NO: 478066 - RNA, 19 nt, Homo sapiens
  misc_RNA (1)...(19): siRNA sense strand
gcaccucugcucucucuuu

SEQ ID NO: 478067 - RNA, 19 nt, Homo sapiens
  misc_RNA (1)...(19): siRNA sense strand
gaagagaauacugagguaa

SEQ ID NO: 478068 - RNA, 19 nt, Homo sapiens
  misc_RNA (1)...(19): siRNA sense strand
gagaagaagaggaggaaga

SEQ ID NO: 478069 - RNA, 19 nt, Homo sapiens
  misc_RNA (1)...(19): siRNA sense strand
ugaaguaaaugagccagaa

SEQ ID NO: 478070 - RNA, 19 nt, Homo sapiens
  misc_RNA (1)...(19): siRNA sense strand
cagugaagauagacauaaa

SEQ ID NO: 478071 - RNA, 19 nt, Homo sapiens
  misc_RNA (1)...(19): siRNA sense strand
ggccaaacgucagcaagaa

SEQ ID NO: 478072 - RNA, 19 nt, Homo sapiens
  misc_RNA (1)...(19): siRNA sense strand
gaagaaaaguuuggagguu

SEQ ID NO: 478073 - RNA, 19 nt, Homo sapiens
  misc_RNA (1)...(19): siRNA sense strand
caucagcagugccaaguuc

SEQ ID NO: 478074 - RNA, 19 nt, Homo sapiens
  misc_RNA (1)...(19): siRNA sense strand
ugguagagaaugcauauua

SEQ ID NO: 478075 - RNA, 19 nt, Homo sapiens
  misc_RNA (1)...(19): siRNA sense strand
gauuucagauuucauguac

SEQ ID NO: 478076 - RNA, 19 nt, Homo sapiens
  misc_RNA (1)...(19): siRNA sense strand
gaucucaucucaagcucau

SEQ ID NO: 478077 - RNA, 19 nt, Homo sapiens
  misc_RNA (1)...(19): siRNA sense strand
ggucuuuccuuaaucuaug

SEQ ID NO: 478078 - RNA, 19 nt, Homo sapiens
  misc_RNA (1)...(19): siRNA sense strand
aaaggaacuucguagcaaa

SEQ ID NO: 478079 - RNA, 19 nt, Homo sapiens
  misc_RNA (1)...(19): siRNA sense strand
cgacaucauuuaagaaagg

SEQ ID NO: 478080 - RNA, 19 nt, Homo sapiens
  misc_RNA (1)...(19): siRNA sense strand
gcacccugcuggagacaug

SEQ ID NO: 478081 - RNA, 19 nt, Homo sapiens
  misc_RNA (1)...(19): siRNA sense strand
gcgguggacuuaagcaugu

SEQ ID NO: 478082 - RNA, 19 nt, Homo sapiens
  misc_RNA (1)...(19): siRNA sense strand
gacuagugcucuaccaaga

SEQ ID NO: 478083 - RNA, 19 nt, Homo sapiens
  misc_RNA (1)...(19): siRNA sense strand
caucuggaaugugaaauau

SEQ ID NO: 478084 - RNA, 19 nt, Homo sapiens
  misc_RNA (1)...(19): siRNA sense strand
gaacaaugccuucaaacau

SEQ ID NO: 478085 - RNA, 19 nt, Homo sapiens
  misc_RNA (1)...(19): siRNA sense strand
aacaaugccuucaaacaua

SEQ ID NO: 478086 - RNA, 19 nt, Homo sapiens
  misc_RNA (1)...(19): siRNA sense strand
gagaagcaguggaaugugu

SEQ ID NO: 478087 - RNA, 19 nt, Homo sapiens
  misc_RNA (1)...(19): siRNA sense strand
ggacaaguggugaauauca

SEQ ID NO: 478088 - RNA, 19 nt, Homo sapiens
  misc_RNA (1)...(19): siRNA sense strand
ucaaagccaucgugaacaa

SEQ ID NO: 478089 - RNA, 19 nt, Homo sapiens
  misc_RNA (1)...(19): siRNA sense strand
ggacagaagaggagaagau

SEQ ID NO: 478090 - RNA, 19 nt, Homo sapiens
  misc_RNA (1)...(19): siRNA sense strand
caucaacagugccuuuaug

SEQ ID NO: 478091 - RNA, 19 nt, Homo sapiens
  misc_RNA (1)...(19): siRNA sense strand
gacaaguggugaauaucaa

SEQ ID NO: 478092 - RNA, 19 nt, Homo sapiens
  misc_RNA (1)...(19): siRNA sense strand
gauccagaaugucggaaau

SEQ ID NO: 478093 - RNA, 19 nt, Homo sapiens
  misc_RNA (1)...(19): siRNA sense strand
ccacggaggugcagaugag

SEQ ID NO: 478094 - RNA, 19 nt, Homo sapiens
  misc_RNA (1)...(19): siRNA sense strand
acaauaacgucuccuccuu

SEQ ID NO: 478095 - RNA, 19 nt, Homo sapiens
  misc_RNA (1)...(19): siRNA sense strand
ugucacagcuuccauggau

SEQ ID NO: 478096 - RNA, 19 nt, Homo sapiens
  misc_RNA (1)...(19): siRNA sense strand
gaggaccugugcucugaga

SEQ ID NO: 478097 - RNA, 19 nt, Homo sapiens
  misc_RNA (1)...(19): siRNA sense strand
aauaacgucuccuccuuga

SEQ ID NO: 478098 - RNA, 19 nt, Homo sapiens
  misc_RNA (1)...(19): siRNA sense strand
gccgagagaucaccaaggu

SEQ ID NO: 478099 - RNA, 19 nt, Homo sapiens
  misc_RNA (1)...(19): siRNA sense strand
gggcuuggccucuguguuc

SEQ ID NO: 478100 - RNA, 19 nt, Homo sapiens
  misc_RNA (1)...(19): siRNA sense strand
cggaggaccugugcucuga

SEQ ID NO: 478101 - RNA, 19 nt, Homo sapiens
  misc_RNA (1)...(19): siRNA sense strand
gcucugagaagcaguggaa

SEQ ID NO: 478102 - RNA, 19 nt, Homo sapiens
  misc_RNA (1)...(19): siRNA sense strand
ccacaucaacagugccuuu

SEQ ID NO: 478103 - RNA, 19 nt, Homo sapiens
  misc_RNA (1)...(19): siRNA sense strand
gcucaaagccaucgugaac

SEQ ID NO: 478104 - RNA, 19 nt, Homo sapiens
  misc_RNA (1)...(19): siRNA sense strand
uguacacucuggaggauga

SEQ ID NO: 478105 - RNA, 19 nt, Homo sapiens
  misc_RNA (1)...(19): siRNA sense strand
cagaagaggagaagaugga

SEQ ID NO: 478106 - RNA, 19 nt, Homo sapiens
  misc_RNA (1)...(19): siRNA sense strand
uaacgucuccuccuugaag

SEQ ID NO: 478107 - RNA, 19 nt, Homo sapiens
  misc_RNA (1)...(19): siRNA sense strand
gaagacccguguggagagu

SEQ ID NO: 478108 - RNA, 19 nt, Homo sapiens
  misc_RNA (1)...(19): siRNA sense strand
ucacagcuuccauggauga

SEQ ID NO: 478109 - RNA, 19 nt, Homo sapiens
  misc_RNA (1)...(19): siRNA sense strand
acaaugccuucaaacauag

SEQ ID NO: 478110 - RNA, 19 nt, Homo sapiens
  misc_RNA (1)...(19): siRNA sense strand
uuggacaaguggugaauau

SEQ ID NO: 478111 - RNA, 19 nt, Homo sapiens
  misc_RNA (1)...(19): siRNA sense strand
gagaggccagugccagaaa

SEQ ID NO: 478112 - RNA, 19 nt, Homo sapiens
  misc_RNA (1)...(19): siRNA sense strand
ucgggcagcugcucaagug

SEQ ID NO: 478113 - RNA, 19 nt, Homo sapiens
  misc_RNA (1)...(19): siRNA sense strand
gcauggugccggcugagaa

SEQ ID NO: 478114 - RNA, 19 nt, Homo sapiens
  misc_RNA (1)...(19): siRNA sense strand
uaccugagcuacaauaacg

SEQ ID NO: 478115 - RNA, 19 nt, Homo sapiens
  misc_RNA (1)...(19): siRNA sense strand
ucuggaggaugacaaguuc

SEQ ID NO: 478116 - RNA, 19 nt, Homo sapiens
  misc_RNA (1)...(19): siRNA sense strand
uggccuggauggagaaugu

SEQ ID NO: 478117 - RNA, 19 nt, Homo sapiens
  misc_RNA (1)...(19): siRNA sense strand
cagcuuccauggaugacau

SEQ ID NO: 478118 - RNA, 19 nt, Homo sapiens
  misc_RNA (1)...(19): siRNA sense strand
gagagacgccagaguacag

SEQ ID NO: 478119 - RNA, 19 nt, Homo sapiens
  misc_RNA (1)...(19): siRNA sense strand
gacagaagaggagaagaug

SEQ ID NO: 478120 - RNA, 19 nt, Homo sapiens
  misc_RNA (1)...(19): siRNA sense strand
caccauuaguguuggacaa

SEQ ID NO: 478121 - RNA, 19 nt, Homo sapiens
  misc_RNA (1)...(19): siRNA sense strand
cauuaguguuggacaagug

SEQ ID NO: 478122 - RNA, 19 nt, Homo sapiens
  misc_RNA (1)...(19): siRNA sense strand
ggagcuagugcagcaggua

SEQ ID NO: 478123 - RNA, 19 nt, Homo sapiens
  misc_RNA (1)...(19): siRNA sense strand
aggugaagcugaagcagau

SEQ ID NO: 478124 - RNA, 19 nt, Homo sapiens
  misc_RNA (1)...(19): siRNA sense strand
ggaccugugcucugagaag

SEQ ID NO: 478125 - RNA, 19 nt, Homo sapiens
  misc_RNA (1)...(19): siRNA sense strand
uccagaaugucggaaauca

SEQ ID NO: 478126 - RNA, 19 nt, Homo sapiens
  misc_RNA (1)...(19): siRNA sense strand
ggcagcugcucaaguggau

SEQ ID NO: 478127 - RNA, 19 nt, Homo sapiens
  misc_RNA (1)...(19): siRNA sense strand
cacaucaacagugccuuua

SEQ ID NO: 478128 - RNA, 19 nt, Homo sapiens
  misc_RNA (1)...(19): siRNA sense strand
gccagugccagaaagaaga

SEQ ID NO: 478129 - RNA, 19 nt, Homo sapiens
  misc_RNA (1)...(19): siRNA sense strand
uggcagacggcgagggaua

SEQ ID NO: 478130 - RNA, 19 nt, Homo sapiens
  misc_RNA (1)...(19): siRNA sense strand
ucaccagggcaacaccuuu

SEQ ID NO: 478131 - RNA, 19 nt, Homo sapiens
  misc_RNA (1)...(19): siRNA sense strand
cagcugcucaaguggauug

SEQ ID NO: 478132 - RNA, 19 nt, Homo sapiens
  misc_RNA (1)...(19): siRNA sense strand
gcgaccgucuggugcucaa

SEQ ID NO: 478133 - RNA, 19 nt, Homo sapiens
  misc_RNA (1)...(19): siRNA sense strand
gaguacagacgcggagaga

SEQ ID NO: 478134 - RNA, 19 nt, Homo sapiens
  misc_RNA (1)...(19): siRNA sense strand
acacaaagccccaggacuu

SEQ ID NO: 478135 - RNA, 19 nt, Homo sapiens
  misc_RNA (1)...(19): siRNA sense strand
uggagaugguggugcaugu

SEQ ID NO: 478136 - RNA, 19 nt, Homo sapiens
  misc_RNA (1)...(19): siRNA sense strand
acagugccuuuaugaccuu

SEQ ID NO: 478137 - RNA, 19 nt, Homo sapiens
  misc_RNA (1)...(19): siRNA sense strand
uggagaauguggccaccau

SEQ ID NO: 478138 - RNA, 19 nt, Homo sapiens
  misc_RNA (1)...(19): siRNA sense strand
guuccucuccuuccacaug

SEQ ID NO: 478139 - RNA, 19 nt, Homo sapiens
  misc_RNA (1)...(19): siRNA sense strand
caccagggcaacaccuuug

SEQ ID NO: 478140 - RNA, 19 nt, Homo sapiens
  misc_RNA (1)...(19): siRNA sense strand
accgagagacgccagagua

SEQ ID NO: 478141 - RNA, 19 nt, Homo sapiens
  misc_RNA (1)...(19): siRNA sense strand
acaaguuccucuccuucca

SEQ ID NO: 478142 - RNA, 19 nt, Homo sapiens
  misc_RNA (1)...(19): siRNA sense strand
gugcuguccucggagauca

SEQ ID NO: 478143 - RNA, 19 nt, Homo sapiens
  misc_RNA (1)...(19): siRNA sense strand
aaagccaucgugaacaaug

SEQ ID NO: 478144 - RNA, 19 nt, Homo sapiens
  misc_RNA (1)...(19): siRNA sense strand
gaacaaugccuucaaacau

SEQ ID NO: 478145 - RNA, 19 nt, Homo sapiens
  misc_RNA (1)...(19): siRNA sense strand
aacaaugccuucaaacaua

SEQ ID NO: 478146 - RNA, 19 nt, Homo sapiens
  misc_RNA (1)...(19): siRNA sense strand
gagaagcaguggaaugugu

SEQ ID NO: 478147 - RNA, 19 nt, Homo sapiens
  misc_RNA (1)...(19): siRNA sense strand
ggacaaguggugaauauca

SEQ ID NO: 478148 - RNA, 19 nt, Homo sapiens
  misc_RNA (1)...(19): siRNA sense strand
ucaaagccaucgugaacaa

SEQ ID NO: 478149 - RNA, 19 nt, Homo sapiens
  misc_RNA (1)...(19): siRNA sense strand
ggacagaagaggagaagau

SEQ ID NO: 478150 - RNA, 19 nt, Homo sapiens
  misc_RNA (1)...(19): siRNA sense strand
caucaacagugccuuuaug

SEQ ID NO: 478151 - RNA, 19 nt, Homo sapiens
  misc_RNA (1)...(19): siRNA sense strand
gacaaguggugaauaucaa

SEQ ID NO: 478152 - RNA, 19 nt, Homo sapiens
  misc_RNA (1)...(19): siRNA sense strand
gauccagaaugucggaaau

SEQ ID NO: 478153 - RNA, 19 nt, Homo sapiens
  misc_RNA (1)...(19): siRNA sense strand
ccacggaggugcagaugag

SEQ ID NO: 478154 - RNA, 19 nt, Homo sapiens
  misc_RNA (1)...(19): siRNA sense strand
acaauaacgucuccuccuu

SEQ ID NO: 478155 - RNA, 19 nt, Homo sapiens
  misc_RNA (1)...(19): siRNA sense strand
ugucacagcuuccauggau

SEQ ID NO: 478156 - RNA, 19 nt, Homo sapiens
  misc_RNA (1)...(19): siRNA sense strand
gaggaccugugcucugaga

SEQ ID NO: 478157 - RNA, 19 nt, Homo sapiens
  misc_RNA (1)...(19): siRNA sense strand
aauaacgucuccuccuuga

SEQ ID NO: 478158 - RNA, 19 nt, Homo sapiens
  misc_RNA (1)...(19): siRNA sense strand
gccgagagaucaccaaggu

SEQ ID NO: 478159 - RNA, 19 nt, Homo sapiens
  misc_RNA (1)...(19): siRNA sense strand
gggcuuggccucuguguuc

SEQ ID NO: 478160 - RNA, 19 nt, Homo sapiens
  misc_RNA (1)...(19): siRNA sense strand
cggaggaccugugcucuga

SEQ ID NO: 478161 - RNA, 19 nt, Homo sapiens
  misc_RNA (1)...(19): siRNA sense strand
gcucugagaagcaguggaa

SEQ ID NO: 478162 - RNA, 19 nt, Homo sapiens
  misc_RNA (1)...(19): siRNA sense strand
ccacaucaacagugccuuu

SEQ ID NO: 478163 - RNA, 19 nt, Homo sapiens
  misc_RNA (1)...(19): siRNA sense strand
gcucaaagccaucgugaac

SEQ ID NO: 478164 - RNA, 19 nt, Homo sapiens
  misc_RNA (1)...(19): siRNA sense strand
uguacacucuggaggauga

SEQ ID NO: 478165 - RNA, 19 nt, Homo sapiens
  misc_RNA (1)...(19): siRNA sense strand
cagaagaggagaagaugga

SEQ ID NO: 478166 - RNA, 19 nt, Homo sapiens
  misc_RNA (1)...(19): siRNA sense strand
uaacgucuccuccuugaag

SEQ ID NO: 478167 - RNA, 19 nt, Homo sapiens
  misc_RNA (1)...(19): siRNA sense strand
gaagacccguguggagagu

SEQ ID NO: 478168 - RNA, 19 nt, Homo sapiens
  misc_RNA (1)...(19): siRNA sense strand
ucacagcuuccauggauga

SEQ ID NO: 478169 - RNA, 19 nt, Homo sapiens
  misc_RNA (1)...(19): siRNA sense strand
acaaugccuucaaacauag

SEQ ID NO: 478170 - RNA, 19 nt, Homo sapiens
  misc_RNA (1)...(19): siRNA sense strand
uuggacaaguggugaauau

SEQ ID NO: 478171 - RNA, 19 nt, Homo sapiens
  misc_RNA (1)...(19): siRNA sense strand
gagaggccagugccagaaa

SEQ ID NO: 478172 - RNA, 19 nt, Homo sapiens
  misc_RNA (1)...(19): siRNA sense strand
ucgggcagcugcucaagug

SEQ ID NO: 478173 - RNA, 19 nt, Homo sapiens
  misc_RNA (1)...(19): siRNA sense strand
gcauggugccggcugagaa

SEQ ID NO: 478174 - RNA, 19 nt, Homo sapiens
  misc_RNA (1)...(19): siRNA sense strand
uaccugagcuacaauaacg

SEQ ID NO: 478175 - RNA, 19 nt, Homo sapiens
  misc_RNA (1)...(19): siRNA sense strand
ucuggaggaugacaaguuc

SEQ ID NO: 478176 - RNA, 19 nt, Homo sapiens
  misc_RNA (1)...(19): siRNA sense strand
uggccuggauggagaaugu

SEQ ID NO: 478177 - RNA, 19 nt, Homo sapiens
  misc_RNA (1)...(19): siRNA sense strand
cagcuuccauggaugacau

SEQ ID NO: 478178 - RNA, 19 nt, Homo sapiens
  misc_RNA (1)...(19): siRNA sense strand
gagagacgccagaguacag

SEQ ID NO: 478179 - RNA, 19 nt, Homo sapiens
  misc_RNA (1)...(19): siRNA sense strand
gacagaagaggagaagaug

SEQ ID NO: 478180 - RNA, 19 nt, Homo sapiens
  misc_RNA (1)...(19): siRNA sense strand
caccauuaguguuggacaa

SEQ ID NO: 478181 - RNA, 19 nt, Homo sapiens
  misc_RNA (1)...(19): siRNA sense strand
cauuaguguuggacaagug

SEQ ID NO: 478182 - RNA, 19 nt, Homo sapiens
  misc_RNA (1)...(19): siRNA sense strand
ggagcuagugcagcaggua

SEQ ID NO: 478183 - RNA, 19 nt, Homo sapiens
  misc_RNA (1)...(19): siRNA sense strand
aggugaagcugaagcagau

SEQ ID NO: 478184 - RNA, 19 nt, Homo sapiens
  misc_RNA (1)...(19): siRNA sense strand
ggaccugugcucugagaag

SEQ ID NO: 478185 - RNA, 19 nt, Homo sapiens
  misc_RNA (1)...(19): siRNA sense strand
uccagaaugucggaaauca

SEQ ID NO: 478186 - RNA, 19 nt, Homo sapiens
  misc_RNA (1)...(19): siRNA sense strand
ggcagcugcucaaguggau

SEQ ID NO: 478187 - RNA, 19 nt, Homo sapiens
  misc_RNA (1)...(19): siRNA sense strand
cacaucaacagugccuuua

SEQ ID NO: 478188 - RNA, 19 nt, Homo sapiens
  misc_RNA (1)...(19): siRNA sense strand
gccagugccagaaagaaga

SEQ ID NO: 478189 - RNA, 19 nt, Homo sapiens
  misc_RNA (1)...(19): siRNA sense strand
uggcagacggcgagggaua

SEQ ID NO: 478190 - RNA, 19 nt, Homo sapiens
  misc_RNA (1)...(19): siRNA sense strand
ucaccagggcaacaccuuu

SEQ ID NO: 478191 - RNA, 19 nt, Homo sapiens
  misc_RNA (1)...(19): siRNA sense strand
cagcugcucaaguggauug

SEQ ID NO: 478192 - RNA, 19 nt, Homo sapiens
  misc_RNA (1)...(19): siRNA sense strand
gcgaccgucuggugcucaa

SEQ ID NO: 478193 - RNA, 19 nt, Homo sapiens
  misc_RNA (1)...(19): siRNA sense strand
gaguacagacgcggagaga

SEQ ID NO: 478194 - RNA, 19 nt, Homo sapiens
  misc_RNA (1)...(19): siRNA sense strand
acacaaagccccaggacuu

SEQ ID NO: 478195 - RNA, 19 nt, Homo sapiens
  misc_RNA (1)...(19): siRNA sense strand
uggagaugguggugcaugu

SEQ ID NO: 478196 - RNA, 19 nt, Homo sapiens
  misc_RNA (1)...(19): siRNA sense strand
acagugccuuuaugaccuu

SEQ ID NO: 478197 - RNA, 19 nt, Homo sapiens
  misc_RNA (1)...(19): siRNA sense strand
uggagaauguggccaccau

SEQ ID NO: 478198 - RNA, 19 nt, Homo sapiens
  misc_RNA (1)...(19): siRNA sense strand
guuccucuccuuccacaug

SEQ ID NO: 478199 - RNA, 19 nt, Homo sapiens
  misc_RNA (1)...(19): siRNA sense strand
caccagggcaacaccuuug

SEQ ID NO: 478200 - RNA, 19 nt, Homo sapiens
  misc_RNA (1)...(19): siRNA sense strand
accgagagacgccagagua

SEQ ID NO: 478201 - RNA, 19 nt, Homo sapiens
  misc_RNA (1)...(19): siRNA sense strand
acaaguuccucuccuucca

SEQ ID NO: 478202 - RNA, 19 nt, Homo sapiens
  misc_RNA (1)...(19): siRNA sense strand
gugcuguccucggagauca

SEQ ID NO: 478203 - RNA, 19 nt, Homo sapiens
  misc_RNA (1)...(19): siRNA sense strand
aaagccaucgugaacaaug

SEQ ID NO: 478204 - RNA, 19 nt, Homo sapiens
  misc_RNA (1)...(19): siRNA sense strand
cgauaugacuguauagaua

SEQ ID NO: 478205 - RNA, 19 nt, Homo sapiens
  misc_RNA (1)...(19): siRNA sense strand
gaaccuggauguaaguuug

SEQ ID NO: 478206 - RNA, 19 nt, Homo sapiens
  misc_RNA (1)...(19): siRNA sense strand
ggacuucgguguucugcua

SEQ ID NO: 478207 - RNA, 19 nt, Homo sapiens
  misc_RNA (1)...(19): siRNA sense strand
agaaagcccugaagaauga

SEQ ID NO: 478208 - RNA, 19 nt, Homo sapiens
  misc_RNA (1)...(19): siRNA sense strand
gaaagacauuggccgauug

SEQ ID NO: 478209 - RNA, 19 nt, Homo sapiens
  misc_RNA (1)...(19): siRNA sense strand
gaaugaguguggaaugaaa

SEQ ID NO: 478210 - RNA, 19 nt, Homo sapiens
  misc_RNA (1)...(19): siRNA sense strand
gcagaugcuuuccaggaua

SEQ ID NO: 478211 - RNA, 19 nt, Homo sapiens
  misc_RNA (1)...(19): siRNA sense strand
gcuauuggcuucuauaugg

SEQ ID NO: 478212 - RNA, 19 nt, Homo sapiens
  misc_RNA (1)...(19): siRNA sense strand
gaaguugcuugcucacaaa

SEQ ID NO: 478213 - RNA, 19 nt, Homo sapiens
  misc_RNA (1)...(19): siRNA sense strand
gaaacaggauagagaagau

SEQ ID NO: 478214 - RNA, 19 nt, Homo sapiens
  misc_RNA (1)...(19): siRNA sense strand
caacuucuguuugcucuuu

SEQ ID NO: 478215 - RNA, 19 nt, Homo sapiens
  misc_RNA (1)...(19): siRNA sense strand
gauggcgucuugcuuguuu

SEQ ID NO: 478216 - RNA, 19 nt, Homo sapiens
  misc_RNA (1)...(19): siRNA sense strand
gcaauggacuucgguguuc

SEQ ID NO: 478217 - RNA, 19 nt, Homo sapiens
  misc_RNA (1)...(19): siRNA sense strand
ucuguuugcucuuugauua

SEQ ID NO: 478218 - RNA, 19 nt, Homo sapiens
  misc_RNA (1)...(19): siRNA sense strand
gaagagaaagcccugaaga

SEQ ID NO: 478219 - RNA, 19 nt, Homo sapiens
  misc_RNA (1)...(19): siRNA sense strand
gagaaagcccugaagaaug

SEQ ID NO: 478220 - RNA, 19 nt, Homo sapiens
  misc_RNA (1)...(19): siRNA sense strand
gaacucucauggagguaaa

SEQ ID NO: 478221 - RNA, 19 nt, Homo sapiens
  misc_RNA (1)...(19): siRNA sense strand
aaacaaaugcagaugcuuu

SEQ ID NO: 478222 - RNA, 19 nt, Homo sapiens
  misc_RNA (1)...(19): siRNA sense strand
gcagggauauaaaggcaau

SEQ ID NO: 478223 - RNA, 19 nt, Homo sapiens
  misc_RNA (1)...(19): siRNA sense strand
gggagaagaccacgaguga

SEQ ID NO: 478224 - RNA, 19 nt, Homo sapiens
  misc_RNA (1)...(19): siRNA sense strand
gaaugugccucugguaaag

SEQ ID NO: 478225 - RNA, 19 nt, Homo sapiens
  misc_RNA (1)...(19): siRNA sense strand
guaaaugcaagcagggaua

SEQ ID NO: 478226 - RNA, 19 nt, Homo sapiens
  misc_RNA (1)...(19): siRNA sense strand
gugaaugaguguggaauga

SEQ ID NO: 478227 - RNA, 19 nt, Homo sapiens
  misc_RNA (1)...(19): siRNA sense strand
gacugcagcuucaaucaug

SEQ ID NO: 478228 - RNA, 19 nt, Homo sapiens
  misc_RNA (1)...(19): siRNA sense strand
guuucgaacugcaauauau

SEQ ID NO: 478229 - RNA, 19 nt, Homo sapiens
  misc_RNA (1)...(19): siRNA sense strand
gcagucaagaugugaauga

SEQ ID NO: 478230 - RNA, 19 nt, Homo sapiens
  misc_RNA (1)...(19): siRNA sense strand
ucacauugguuucgaacug

SEQ ID NO: 478231 - RNA, 19 nt, Homo sapiens
  misc_RNA (1)...(19): siRNA sense strand
agaaagacauuggccgauu

SEQ ID NO: 478232 - RNA, 19 nt, Homo sapiens
  misc_RNA (1)...(19): siRNA sense strand
ggaaacaggauagagaaga

SEQ ID NO: 478233 - RNA, 19 nt, Homo sapiens
  misc_RNA (1)...(19): siRNA sense strand
ggaagcuacuacugcaaau

SEQ ID NO: 478234 - RNA, 19 nt, Homo sapiens
  misc_RNA (1)...(19): siRNA sense strand
caaaggaaagcgcuaacuu

SEQ ID NO: 478235 - RNA, 19 nt, Homo sapiens
  misc_RNA (1)...(19): siRNA sense strand
agaaguugcuugcucacaa

SEQ ID NO: 478236 - RNA, 19 nt, Homo sapiens
  misc_RNA (1)...(19): siRNA sense strand
uggacgauaugacuguaua

SEQ ID NO: 478237 - RNA, 19 nt, Homo sapiens
  misc_RNA (1)...(19): siRNA sense strand
ucaaagacagaaucaagaa

SEQ ID NO: 478238 - RNA, 19 nt, Homo sapiens
  misc_RNA (1)...(19): siRNA sense strand
gagaagagaaagcccugaa

SEQ ID NO: 478239 - RNA, 19 nt, Homo sapiens
  misc_RNA (1)...(19): siRNA sense strand
gcagccaccaugccaauug

SEQ ID NO: 478240 - RNA, 19 nt, Homo sapiens
  misc_RNA (1)...(19): siRNA sense strand
ggauagagaagaugauuuu

SEQ ID NO: 478241 - RNA, 19 nt, Homo sapiens
  misc_RNA (1)...(19): siRNA sense strand
uuaaauaucucgguugacu

SEQ ID NO: 478242 - RNA, 19 nt, Homo sapiens
  misc_RNA (1)...(19): siRNA sense strand
ggauguaaguuuggugagu

SEQ ID NO: 478243 - RNA, 19 nt, Homo sapiens
  misc_RNA (1)...(19): siRNA sense strand
aaagucaucugucccuaca

SEQ ID NO: 478244 - RNA, 19 nt, Homo sapiens
  misc_RNA (1)...(19): siRNA sense strand
cuacgugugugaacucuag

SEQ ID NO: 478245 - RNA, 19 nt, Homo sapiens
  misc_RNA (1)...(19): siRNA sense strand
ccaaacaaaugcagaugcu

SEQ ID NO: 478246 - RNA, 19 nt, Homo sapiens
  misc_RNA (1)...(19): siRNA sense strand
ugaaugugccucugguaaa

SEQ ID NO: 478247 - RNA, 19 nt, Homo sapiens
  misc_RNA (1)...(19): siRNA sense strand
gucuagauauugaugaaug

SEQ ID NO: 478248 - RNA, 19 nt, Homo sapiens
  misc_RNA (1)...(19): siRNA sense strand
caucaaagacagaaucaag

SEQ ID NO: 478249 - RNA, 19 nt, Homo sapiens
  misc_RNA (1)...(19): siRNA sense strand
caaacuggaacauaaagau

SEQ ID NO: 478250 - RNA, 19 nt, Homo sapiens
  misc_RNA (1)...(19): siRNA sense strand
gggaaaaccugcagucaag

SEQ ID NO: 478251 - RNA, 19 nt, Homo sapiens
  misc_RNA (1)...(19): siRNA sense strand
ucaggcuuauguccagaua

SEQ ID NO: 478252 - RNA, 19 nt, Homo sapiens
  misc_RNA (1)...(19): siRNA sense strand
gaacugaugcuaccaaaag

SEQ ID NO: 478253 - RNA, 19 nt, Homo sapiens
  misc_RNA (1)...(19): siRNA sense strand
agacauuggccgauugaaa

SEQ ID NO: 478254 - RNA, 19 nt, Homo sapiens
  misc_RNA (1)...(19): siRNA sense strand
gaauccugcugaucgagau

SEQ ID NO: 478255 - RNA, 19 nt, Homo sapiens
  misc_RNA (1)...(19): siRNA sense strand
agagaaagcccugaagaau

SEQ ID NO: 478256 - RNA, 19 nt, Homo sapiens
  misc_RNA (1)...(19): siRNA sense strand
aagacagaaucaagaaguu

SEQ ID NO: 478257 - RNA, 19 nt, Homo sapiens
  misc_RNA (1)...(19): siRNA sense strand
ugaucgagauaaugcuauu

SEQ ID NO: 478258 - RNA, 19 nt, Homo sapiens
  misc_RNA (1)...(19): siRNA sense strand
ggaacucucauggagguaa

SEQ ID NO: 478259 - RNA, 19 nt, Homo sapiens
  misc_RNA (1)...(19): siRNA sense strand
ggaccaaacaaaugcagau

SEQ ID NO: 478260 - RNA, 19 nt, Homo sapiens
  misc_RNA (1)...(19): siRNA sense strand
aaaggaaagcgcuaacuuc

SEQ ID NO: 478261 - RNA, 19 nt, Homo sapiens
  misc_RNA (1)...(19): siRNA sense strand
aaaagggaaugaagagaaa

SEQ ID NO: 478262 - RNA, 19 nt, Homo sapiens
  misc_RNA (1)...(19): siRNA sense strand
aaucgaagaugugugaaca

SEQ ID NO: 478263 - RNA, 19 nt, Homo sapiens
  misc_RNA (1)...(19): siRNA sense strand
caucacggguuguuagcau

SEQ ID NO: 478264 - RNA, 19 nt, Homo sapiens
  misc_RNA (1)...(19): siRNA sense strand
gggagucugugaagcuaca

SEQ ID NO: 478265 - RNA, 19 nt, Homo sapiens
  misc_RNA (1)...(19): siRNA sense strand
cgcaguggauggcgucuug

SEQ ID NO: 478266 - RNA, 19 nt, Homo sapiens
  misc_RNA (1)...(19): siRNA sense strand
gacauuggccgauugaaac

SEQ ID NO: 478267 - RNA, 19 nt, Homo sapiens
  misc_RNA (1)...(19): siRNA sense strand
caguacagcugugaagaca

SEQ ID NO: 478268 - RNA, 19 nt, Homo sapiens
  misc_RNA (1)...(19): siRNA sense strand
ggaaaauucaguuguauca

SEQ ID NO: 478269 - RNA, 19 nt, Homo sapiens
  misc_RNA (1)...(19): siRNA sense strand
cagggaaaauucaguugua

SEQ ID NO: 478270 - RNA, 19 nt, Homo sapiens
  misc_RNA (1)...(19): siRNA sense strand
gagacaaagucgggaaacu

SEQ ID NO: 478271 - RNA, 19 nt, Homo sapiens
  misc_RNA (1)...(19): siRNA sense strand
aagagaaagcccugaagaa

SEQ ID NO: 478272 - RNA, 19 nt, Homo sapiens
  misc_RNA (1)...(19): siRNA sense strand
gaugaaugugccucuggua

SEQ ID NO: 478273 - RNA, 19 nt, Homo sapiens
  misc_RNA (1)...(19): siRNA sense strand
ucuccuaccugaccugcaa

SEQ ID NO: 478274 - RNA, 19 nt, Homo sapiens
  misc_RNA (1)...(19): siRNA sense strand
ucaaucaugggaucuguga

SEQ ID NO: 478275 - RNA, 19 nt, Homo sapiens
  misc_RNA (1)...(19): siRNA sense strand
gcaagcagggauauaaagg

SEQ ID NO: 478276 - RNA, 19 nt, Homo sapiens
  misc_RNA (1)...(19): siRNA sense strand
agucaucugucccuacaau

SEQ ID NO: 478277 - RNA, 19 nt, Homo sapiens
  misc_RNA (1)...(19): siRNA sense strand
gaccacgagugaggaugaa

SEQ ID NO: 478278 - RNA, 19 nt, Homo sapiens
  misc_RNA (1)...(19): siRNA sense strand
gcugaucgagauaaugcua

SEQ ID NO: 478279 - RNA, 19 nt, Homo sapiens
  misc_RNA (1)...(19): siRNA sense strand
ugacuggaauccugcugau

SEQ ID NO: 478280 - RNA, 19 nt, Homo sapiens
  misc_RNA (1)...(19): siRNA sense strand
ugggaucugugacuggaaa

SEQ ID NO: 478281 - RNA, 19 nt, Homo sapiens
  misc_RNA (1)...(19): siRNA sense strand
ggaaugaagagaaaaugaa

SEQ ID NO: 478282 - RNA, 19 nt, Homo sapiens
  misc_RNA (1)...(19): siRNA sense strand
uugcagcccuucaacuaug

SEQ ID NO: 478283 - RNA, 19 nt, Homo sapiens
  misc_RNA (1)...(19): siRNA sense strand
gaacuugcagcccuucaac

SEQ ID NO: 478284 - RNA, 19 nt, Homo sapiens
  misc_RNA (1)...(19): siRNA sense strand
uacaaucgaagauguguga

SEQ ID NO: 478285 - RNA, 19 nt, Homo sapiens
  misc_RNA (1)...(19): siRNA sense strand
ggcaauggacuucgguguu

SEQ ID NO: 478286 - RNA, 19 nt, Homo sapiens
  misc_RNA (1)...(19): siRNA sense strand
ccugaagaaugacauagag

SEQ ID NO: 478287 - RNA, 19 nt, Homo sapiens
  misc_RNA (1)...(19): siRNA sense strand
aaagacagaaucaagaagu

SEQ ID NO: 478288 - RNA, 19 nt, Homo sapiens
  misc_RNA (1)...(19): siRNA sense strand
ugugugaacucuaggacau

SEQ ID NO: 478289 - RNA, 19 nt, Homo sapiens
  misc_RNA (1)...(19): siRNA sense strand
caugcgaaccuggauguaa

SEQ ID NO: 478290 - RNA, 19 nt, Homo sapiens
  misc_RNA (1)...(19): siRNA sense strand
gaagaccacgagugaggau

SEQ ID NO: 478291 - RNA, 19 nt, Homo sapiens
  misc_RNA (1)...(19): siRNA sense strand
auaaugcuauuggcuucua

SEQ ID NO: 478292 - RNA, 19 nt, Homo sapiens
  misc_RNA (1)...(19): siRNA sense strand
gaagcuacuacugcaaaug

SEQ ID NO: 478293 - RNA, 19 nt, Homo sapiens
  misc_RNA (1)...(19): siRNA sense strand
uggcaggucacaagaaaga

SEQ ID NO: 478294 - RNA, 19 nt, Homo sapiens
  misc_RNA (1)...(19): siRNA sense strand
aaugcaagcagggauauaa

SEQ ID NO: 478295 - RNA, 19 nt, Homo sapiens
  misc_RNA (1)...(19): siRNA sense strand
caauauaucaguggacgau

SEQ ID NO: 478296 - RNA, 19 nt, Homo sapiens
  misc_RNA (1)...(19): siRNA sense strand
gguuucgaacugcaauaua

SEQ ID NO: 478297 - RNA, 19 nt, Homo sapiens
  misc_RNA (1)...(19): siRNA sense strand
gcaggucacaagaaagaca

SEQ ID NO: 478298 - RNA, 19 nt, Homo sapiens
  misc_RNA (1)...(19): siRNA sense strand
ugaaugaagcaggugaauu

SEQ ID NO: 478299 - RNA, 19 nt, Homo sapiens
  misc_RNA (1)...(19): siRNA sense strand
aagaggggcuugaggauga

SEQ ID NO: 478300 - RNA, 19 nt, Homo sapiens
  misc_RNA (1)...(19): siRNA sense strand
cagaugcuuuccaggauac

SEQ ID NO: 478301 - RNA, 19 nt, Homo sapiens
  misc_RNA (1)...(19): siRNA sense strand
gugcgugggaccaaacaaa

SEQ ID NO: 478302 - RNA, 19 nt, Homo sapiens
  misc_RNA (1)...(19): siRNA sense strand
caggauagagaagaugauu

SEQ ID NO: 478303 - RNA, 19 nt, Homo sapiens
  misc_RNA (1)...(19): siRNA sense strand
gggcaaaaccggcgaaauc

SEQ ID NO: 478304 - RNA, 19 nt, Homo sapiens
  misc_RNA (1)...(19): siRNA sense strand
ggaagaagauccacaugaa

SEQ ID NO: 478305 - RNA, 19 nt, Homo sapiens
  misc_RNA (1)...(19): siRNA sense strand
ggagauauguucauuguuc

SEQ ID NO: 478306 - RNA, 19 nt, Homo sapiens
  misc_RNA (1)...(19): siRNA sense strand
gaacauacuuucagagcuu

SEQ ID NO: 478307 - RNA, 19 nt, Homo sapiens
  misc_RNA (1)...(19): siRNA sense strand
ggauguggguuacaaauuu

SEQ ID NO: 478308 - RNA, 19 nt, Homo sapiens
  misc_RNA (1)...(19): siRNA sense strand
gcaaggaaaucuauaauac

SEQ ID NO: 478309 - RNA, 19 nt, Homo sapiens
  misc_RNA (1)...(19): siRNA sense strand
uaacagaacugcuucaaca

SEQ ID NO: 478310 - RNA, 19 nt, Homo sapiens
  misc_RNA (1)...(19): siRNA sense strand
gaaagguuaucuucugaaa

SEQ ID NO: 478311 - RNA, 19 nt, Homo sapiens
  misc_RNA (1)...(19): siRNA sense strand
uagcaaaucuuguggaauu

SEQ ID NO: 478312 - RNA, 19 nt, Homo sapiens
  misc_RNA (1)...(19): siRNA sense strand
caacaaacaucguaugauc

SEQ ID NO: 478313 - RNA, 19 nt, Homo sapiens
  misc_RNA (1)...(19): siRNA sense strand
gauaguaguucagcacuuu

SEQ ID NO: 478314 - RNA, 19 nt, Homo sapiens
  misc_RNA (1)...(19): siRNA sense strand
gauguggguuacaaauuua

SEQ ID NO: 478315 - RNA, 19 nt, Homo sapiens
  misc_RNA (1)...(19): siRNA sense strand
ccaccgacauugagauaua

SEQ ID NO: 478316 - RNA, 19 nt, Homo sapiens
  misc_RNA (1)...(19): siRNA sense strand
gcacgauacucuauggaaa

SEQ ID NO: 478317 - RNA, 19 nt, Homo sapiens
  misc_RNA (1)...(19): siRNA sense strand
ccacggauguucaauauca

SEQ ID NO: 478318 - RNA, 19 nt, Homo sapiens
  misc_RNA (1)...(19): siRNA sense strand
agaaaucuguucagcauaa

SEQ ID NO: 478319 - RNA, 19 nt, Homo sapiens
  misc_RNA (1)...(19): siRNA sense strand
auucauggcuucagaaaua

SEQ ID NO: 478320 - RNA, 19 nt, Homo sapiens
  misc_RNA (1)...(19): siRNA sense strand
uaaggaaccuguaccaaug

SEQ ID NO: 478321 - RNA, 19 nt, Homo sapiens
  misc_RNA (1)...(19): siRNA sense strand
caagaacacugauauuagu

SEQ ID NO: 478322 - RNA, 19 nt, Homo sapiens
  misc_RNA (1)...(19): siRNA sense strand
gaaauaagcauggaagaug

SEQ ID NO: 478323 - RNA, 19 nt, Homo sapiens
  misc_RNA (1)...(19): siRNA sense strand
gaagaagaguacagugaau

SEQ ID NO: 478324 - RNA, 19 nt, Homo sapiens
  misc_RNA (1)...(19): siRNA sense strand
gaacuucgaacgcucagua

SEQ ID NO: 478325 - RNA, 19 nt, Homo sapiens
  misc_RNA (1)...(19): siRNA sense strand
gaacuuagcaaaucuugug

SEQ ID NO: 478326 - RNA, 19 nt, Homo sapiens
  misc_RNA (1)...(19): siRNA sense strand
ugaaaggucugcaggcauu

SEQ ID NO: 478327 - RNA, 19 nt, Homo sapiens
  misc_RNA (1)...(19): siRNA sense strand
gaagaguacagugaauuua

SEQ ID NO: 478328 - RNA, 19 nt, Homo sapiens
  misc_RNA (1)...(19): siRNA sense strand
gaacaaguacucaaugaca

SEQ ID NO: 478329 - RNA, 19 nt, Homo sapiens
  misc_RNA (1)...(19): siRNA sense strand
gcaccuugauggagcagua

SEQ ID NO: 478330 - RNA, 19 nt, Homo sapiens
  misc_RNA (1)...(19): siRNA sense strand
gaaagggcaugccacagau

SEQ ID NO: 478331 - RNA, 19 nt, Homo sapiens
  misc_RNA (1)...(19): siRNA sense strand
uguaacaucuaccugaaua

SEQ ID NO: 478332 - RNA, 19 nt, Homo sapiens
  misc_RNA (1)...(19): siRNA sense strand
uaacacaccuauugaacau

SEQ ID NO: 478333 - RNA, 19 nt, Homo sapiens
  misc_RNA (1)...(19): siRNA sense strand
gcaagaacacugauauuag

SEQ ID NO: 478334 - RNA, 19 nt, Homo sapiens
  misc_RNA (1)...(19): siRNA sense strand
cagcauaaguggccuacaa

SEQ ID NO: 478335 - RNA, 19 nt, Homo sapiens
  misc_RNA (1)...(19): siRNA sense strand
ugaagccacuacccuauuu

SEQ ID NO: 478336 - RNA, 19 nt, Homo sapiens
  misc_RNA (1)...(19): siRNA sense strand
uuucagagcuuguggagaa

SEQ ID NO: 478337 - RNA, 19 nt, Homo sapiens
  misc_RNA (1)...(19): siRNA sense strand
gaagaugugaacacuaauu

SEQ ID NO: 478338 - RNA, 19 nt, Homo sapiens
  misc_RNA (1)...(19): siRNA sense strand
ccaaacaggaagcuuauaa

SEQ ID NO: 478339 - RNA, 19 nt, Homo sapiens
  misc_RNA (1)...(19): siRNA sense strand
cauaaguggccuacaaaua

SEQ ID NO: 478340 - RNA, 19 nt, Homo sapiens
  misc_RNA (1)...(19): siRNA sense strand
gaagauagaaggcguguac

SEQ ID NO: 478341 - RNA, 19 nt, Homo sapiens
  misc_RNA (1)...(19): siRNA sense strand
gugcagaacuuagcaaauc

SEQ ID NO: 478342 - RNA, 19 nt, Homo sapiens
  misc_RNA (1)...(19): siRNA sense strand
aagcaaagauccugauauc

SEQ ID NO: 478343 - RNA, 19 nt, Homo sapiens
  misc_RNA (1)...(19): siRNA sense strand
cuacacaguuuguucauca

SEQ ID NO: 478344 - RNA, 19 nt, Homo sapiens
  misc_RNA (1)...(19): siRNA sense strand
aaauaagcauggaagauga

SEQ ID NO: 478345 - RNA, 19 nt, Homo sapiens
  misc_RNA (1)...(19): siRNA sense strand
ggacaagaccgaacacuac

SEQ ID NO: 478346 - RNA, 19 nt, Homo sapiens
  misc_RNA (1)...(19): siRNA sense strand
ggaacuucauguagucuau

SEQ ID NO: 478347 - RNA, 19 nt, Homo sapiens
  misc_RNA (1)...(19): siRNA sense strand
ccugauaucuuauuuaugc

SEQ ID NO: 478348 - RNA, 19 nt, Homo sapiens
  misc_RNA (1)...(19): siRNA sense strand
acagucauguuucuuguuu

SEQ ID NO: 478349 - RNA, 19 nt, Homo sapiens
  misc_RNA (1)...(19): siRNA sense strand
uauaauaccauccgucgua

SEQ ID NO: 478350 - RNA, 19 nt, Homo sapiens
  misc_RNA (1)...(19): siRNA sense strand
uaauagaucucaguguaug

SEQ ID NO: 478351 - RNA, 19 nt, Homo sapiens
  misc_RNA (1)...(19): siRNA sense strand
gaacacuacuggccagcau

SEQ ID NO: 478352 - RNA, 19 nt, Homo sapiens
  misc_RNA (1)...(19): siRNA sense strand
gcccauaaacucccaguaa

SEQ ID NO: 478353 - RNA, 19 nt, Homo sapiens
  misc_RNA (1)...(19): siRNA sense strand
guguggagauuacuacauu

SEQ ID NO: 478354 - RNA, 19 nt, Homo sapiens
  misc_RNA (1)...(19): siRNA sense strand
uagaugaacuugggaaugu

SEQ ID NO: 478355 - RNA, 19 nt, Homo sapiens
  misc_RNA (1)...(19): siRNA sense strand
augaagaugugaacacuaa

SEQ ID NO: 478356 - RNA, 19 nt, Homo sapiens
  misc_RNA (1)...(19): siRNA sense strand
ggcaaggaaaucuauaaua

SEQ ID NO: 478357 - RNA, 19 nt, Homo sapiens
  misc_RNA (1)...(19): siRNA sense strand
accagacacugaugaaaua

SEQ ID NO: 478358 - RNA, 19 nt, Homo sapiens
  misc_RNA (1)...(19): siRNA sense strand
aagaacaaguacucaauga

SEQ ID NO: 478359 - RNA, 19 nt, Homo sapiens
  misc_RNA (1)...(19): siRNA sense strand
guuaaguccaucaaaguua

SEQ ID NO: 478360 - RNA, 19 nt, Homo sapiens
  misc_RNA (1)...(19): siRNA sense strand
uacgagcuauucuaccuua

SEQ ID NO: 478361 - RNA, 19 nt, Homo sapiens
  misc_RNA (1)...(19): siRNA sense strand
gcagggaagucuggcaguu

SEQ ID NO: 478362 - RNA, 19 nt, Homo sapiens
  misc_RNA (1)...(19): siRNA sense strand
cagcucccauauaccauua

SEQ ID NO: 478363 - RNA, 19 nt, Homo sapiens
  misc_RNA (1)...(19): siRNA sense strand
gcaggcauuuugcaauuua

SEQ ID NO: 478364 - RNA, 19 nt, Homo sapiens
  misc_RNA (1)...(19): siRNA sense strand
gcagaggauuggaugaaag

SEQ ID NO: 478365 - RNA, 19 nt, Homo sapiens
  misc_RNA (1)...(19): siRNA sense strand
cccauaaacucccaguaaa

SEQ ID NO: 478366 - RNA, 19 nt, Homo sapiens
  misc_RNA (1)...(19): siRNA sense strand
gggaagaagauccacauga

SEQ ID NO: 478367 - RNA, 19 nt, Homo sapiens
  misc_RNA (1)...(19): siRNA sense strand
caagaguuguuagugguuu

SEQ ID NO: 478368 - RNA, 19 nt, Homo sapiens
  misc_RNA (1)...(19): siRNA sense strand
acaaauaccaccaugagaa

SEQ ID NO: 478369 - RNA, 19 nt, Homo sapiens
  misc_RNA (1)...(19): siRNA sense strand
gagauauguucauuguuca

SEQ ID NO: 478370 - RNA, 19 nt, Homo sapiens
  misc_RNA (1)...(19): siRNA sense strand
ggaggccgguauuauaaca

SEQ ID NO: 478371 - RNA, 19 nt, Homo sapiens
  misc_RNA (1)...(19): siRNA sense strand
gaugaacaaggccuuauug

SEQ ID NO: 478372 - RNA, 19 nt, Homo sapiens
  misc_RNA (1)...(19): siRNA sense strand
ggauggauguggguuacaa

SEQ ID NO: 478373 - RNA, 19 nt, Homo sapiens
  misc_RNA (1)...(19): siRNA sense strand
gauucuccaucuccuauug

SEQ ID NO: 478374 - RNA, 19 nt, Homo sapiens
  misc_RNA (1)...(19): siRNA sense strand
ugaagaagcccauaaacuc

SEQ ID NO: 478375 - RNA, 19 nt, Homo sapiens
  misc_RNA (1)...(19): siRNA sense strand
aaggagauauguucauugu

SEQ ID NO: 478376 - RNA, 19 nt, Homo sapiens
  misc_RNA (1)...(19): siRNA sense strand
ucauguagucuaugcuuua

SEQ ID NO: 478377 - RNA, 19 nt, Homo sapiens
  misc_RNA (1)...(19): siRNA sense strand
ugccacagaugaaugguuu

SEQ ID NO: 478378 - RNA, 19 nt, Homo sapiens
  misc_RNA (1)...(19): siRNA sense strand
caguguauguucugucuau

SEQ ID NO: 478379 - RNA, 19 nt, Homo sapiens
  misc_RNA (1)...(19): siRNA sense strand
cuaaggagcccuacaugga

SEQ ID NO: 478380 - RNA, 19 nt, Homo sapiens
  misc_RNA (1)...(19): siRNA sense strand
ugcaagaacacugauauua

SEQ ID NO: 478381 - RNA, 19 nt, Homo sapiens
  misc_RNA (1)...(19): siRNA sense strand
ugaguuaaguccaucaaag

SEQ ID NO: 478382 - RNA, 19 nt, Homo sapiens
  misc_RNA (1)...(19): siRNA sense strand
cagaagaagaguacaguga

SEQ ID NO: 478383 - RNA, 19 nt, Homo sapiens
  misc_RNA (1)...(19): siRNA sense strand
ccagggacauccaauaaac

SEQ ID NO: 478384 - RNA, 19 nt, Homo sapiens
  misc_RNA (1)...(19): siRNA sense strand
uugaagaccuaguagaaga

SEQ ID NO: 478385 - RNA, 19 nt, Homo sapiens
  misc_RNA (1)...(19): siRNA sense strand
acagaacgauagcagaaga

SEQ ID NO: 478386 - RNA, 19 nt, Homo sapiens
  misc_RNA (1)...(19): siRNA sense strand
gcaaaaggaacuucaugua

SEQ ID NO: 478387 - RNA, 19 nt, Homo sapiens
  misc_RNA (1)...(19): siRNA sense strand
ccugaauaguguccaagua

SEQ ID NO: 478388 - RNA, 19 nt, Homo sapiens
  misc_RNA (1)...(19): siRNA sense strand
ccaggguccuuuguacuuu

SEQ ID NO: 478389 - RNA, 19 nt, Homo sapiens
  misc_RNA (1)...(19): siRNA sense strand
ccaaaaggauuaauagauc

SEQ ID NO: 478390 - RNA, 19 nt, Homo sapiens
  misc_RNA (1)...(19): siRNA sense strand
gaaggugucaauccauuca

SEQ ID NO: 478391 - RNA, 19 nt, Homo sapiens
  misc_RNA (1)...(19): siRNA sense strand
gcuugaaucguuguuguua

SEQ ID NO: 478392 - RNA, 19 nt, Homo sapiens
  misc_RNA (1)...(19): siRNA sense strand
uguagucuaugcuuuauca

SEQ ID NO: 478393 - RNA, 19 nt, Homo sapiens
  misc_RNA (1)...(19): siRNA sense strand
ugacagaacgauagcagaa

SEQ ID NO: 478394 - RNA, 19 nt, Homo sapiens
  misc_RNA (1)...(19): siRNA sense strand
gcucccauauaccauuaaa

SEQ ID NO: 478395 - RNA, 19 nt, Homo sapiens
  misc_RNA (1)...(19): siRNA sense strand
cauguuucuuguuugcuua

SEQ ID NO: 478396 - RNA, 19 nt, Homo sapiens
  misc_RNA (1)...(19): siRNA sense strand
gugaugcccaacuuauuua

SEQ ID NO: 478397 - RNA, 19 nt, Homo sapiens
  misc_RNA (1)...(19): siRNA sense strand
gaagaagauccacaugaag

SEQ ID NO: 478398 - RNA, 19 nt, Homo sapiens
  misc_RNA (1)...(19): siRNA sense strand
gcaggaucaagaacaagua

SEQ ID NO: 478399 - RNA, 19 nt, Homo sapiens
  misc_RNA (1)...(19): siRNA sense strand
cagcauugcaugagauuug

SEQ ID NO: 478400 - RNA, 19 nt, Homo sapiens
  misc_RNA (1)...(19): siRNA sense strand
cacacuaaaugacagagaa

SEQ ID NO: 478401 - RNA, 19 nt, Homo sapiens
  misc_RNA (1)...(19): siRNA sense strand
aaaggaacuucauguaguc

SEQ ID NO: 478402 - RNA, 19 nt, Homo sapiens
  misc_RNA (1)...(19): siRNA sense strand
cacaguggauggcaaggaa

SEQ ID NO: 478403 - RNA, 19 nt, Homo sapiens
  misc_RNA (1)...(19): siRNA sense strand
caagaacaaguacucaaug

SEQ ID NO: 478404 - RNA, 19 nt, Homo sapiens
  misc_RNA (1)...(19): siRNA sense strand
ggaagaagauccacaugaa

SEQ ID NO: 478405 - RNA, 19 nt, Homo sapiens
  misc_RNA (1)...(19): siRNA sense strand
ggagauauguucauuguuc

SEQ ID NO: 478406 - RNA, 19 nt, Homo sapiens
  misc_RNA (1)...(19): siRNA sense strand
gaacauacuuucagagcuu

SEQ ID NO: 478407 - RNA, 19 nt, Homo sapiens
  misc_RNA (1)...(19): siRNA sense strand
ggauguggguuacaaauuu

SEQ ID NO: 478408 - RNA, 19 nt, Homo sapiens
  misc_RNA (1)...(19): siRNA sense strand
gcaaggaaaucuauaauac

SEQ ID NO: 478409 - RNA, 19 nt, Homo sapiens
  misc_RNA (1)...(19): siRNA sense strand
uaacagaacugcuucaaca

SEQ ID NO: 478410 - RNA, 19 nt, Homo sapiens
  misc_RNA (1)...(19): siRNA sense strand
gaaagguuaucuucugaaa

SEQ ID NO: 478411 - RNA, 19 nt, Homo sapiens
  misc_RNA (1)...(19): siRNA sense strand
uagcaaaucuuguggaauu

SEQ ID NO: 478412 - RNA, 19 nt, Homo sapiens
  misc_RNA (1)...(19): siRNA sense strand
caacaaacaucguaugauc

SEQ ID NO: 478413 - RNA, 19 nt, Homo sapiens
  misc_RNA (1)...(19): siRNA sense strand
gauaguaguucagcacuuu

SEQ ID NO: 478414 - RNA, 19 nt, Homo sapiens
  misc_RNA (1)...(19): siRNA sense strand
gauguggguuacaaauuua

SEQ ID NO: 478415 - RNA, 19 nt, Homo sapiens
  misc_RNA (1)...(19): siRNA sense strand
ccaccgacauugagauaua

SEQ ID NO: 478416 - RNA, 19 nt, Homo sapiens
  misc_RNA (1)...(19): siRNA sense strand
gcacgauacucuauggaaa

SEQ ID NO: 478417 - RNA, 19 nt, Homo sapiens
  misc_RNA (1)...(19): siRNA sense strand
ccacggauguucaauauca

SEQ ID NO: 478418 - RNA, 19 nt, Homo sapiens
  misc_RNA (1)...(19): siRNA sense strand
agaaaucuguucagcauaa

SEQ ID NO: 478419 - RNA, 19 nt, Homo sapiens
  misc_RNA (1)...(19): siRNA sense strand
auucauggcuucagaaaua

SEQ ID NO: 478420 - RNA, 19 nt, Homo sapiens
  misc_RNA (1)...(19): siRNA sense strand
uaaggaaccuguaccaaug

SEQ ID NO: 478421 - RNA, 19 nt, Homo sapiens
  misc_RNA (1)...(19): siRNA sense strand
caagaacacugauauuagu

SEQ ID NO: 478422 - RNA, 19 nt, Homo sapiens
  misc_RNA (1)...(19): siRNA sense strand
gaaauaagcauggaagaug

SEQ ID NO: 478423 - RNA, 19 nt, Homo sapiens
  misc_RNA (1)...(19): siRNA sense strand
gaagaagaguacagugaau

SEQ ID NO: 478424 - RNA, 19 nt, Homo sapiens
  misc_RNA (1)...(19): siRNA sense strand
gaacuucgaacgcucagua

SEQ ID NO: 478425 - RNA, 19 nt, Homo sapiens
  misc_RNA (1)...(19): siRNA sense strand
gaacuuagcaaaucuugug

SEQ ID NO: 478426 - RNA, 19 nt, Homo sapiens
  misc_RNA (1)...(19): siRNA sense strand
ugaaaggucugcaggcauu

SEQ ID NO: 478427 - RNA, 19 nt, Homo sapiens
  misc_RNA (1)...(19): siRNA sense strand
gaagaguacagugaauuua

SEQ ID NO: 478428 - RNA, 19 nt, Homo sapiens
  misc_RNA (1)...(19): siRNA sense strand
gaacaaguacucaaugaca

SEQ ID NO: 478429 - RNA, 19 nt, Homo sapiens
  misc_RNA (1)...(19): siRNA sense strand
gcaccuugauggagcagua

SEQ ID NO: 478430 - RNA, 19 nt, Homo sapiens
  misc_RNA (1)...(19): siRNA sense strand
gaaagggcaugccacagau

SEQ ID NO: 478431 - RNA, 19 nt, Homo sapiens
  misc_RNA (1)...(19): siRNA sense strand
uguaacaucuaccugaaua

SEQ ID NO: 478432 - RNA, 19 nt, Homo sapiens
  misc_RNA (1)...(19): siRNA sense strand
uaacacaccuauugaacau

SEQ ID NO: 478433 - RNA, 19 nt, Homo sapiens
  misc_RNA (1)...(19): siRNA sense strand
gcaagaacacugauauuag

SEQ ID NO: 478434 - RNA, 19 nt, Homo sapiens
  misc_RNA (1)...(19): siRNA sense strand
cagcauaaguggccuacaa

SEQ ID NO: 478435 - RNA, 19 nt, Homo sapiens
  misc_RNA (1)...(19): siRNA sense strand
ugaagccacuacccuauuu

SEQ ID NO: 478436 - RNA, 19 nt, Homo sapiens
  misc_RNA (1)...(19): siRNA sense strand
uuucagagcuuguggagaa

SEQ ID NO: 478437 - RNA, 19 nt, Homo sapiens
  misc_RNA (1)...(19): siRNA sense strand
gaagaugugaacacuaauu

SEQ ID NO: 478438 - RNA, 19 nt, Homo sapiens
  misc_RNA (1)...(19): siRNA sense strand
ccaaacaggaagcuuauaa

SEQ ID NO: 478439 - RNA, 19 nt, Homo sapiens
  misc_RNA (1)...(19): siRNA sense strand
cauaaguggccuacaaaua

SEQ ID NO: 478440 - RNA, 19 nt, Homo sapiens
  misc_RNA (1)...(19): siRNA sense strand
gaagauagaaggcguguac

SEQ ID NO: 478441 - RNA, 19 nt, Homo sapiens
  misc_RNA (1)...(19): siRNA sense strand
gugcagaacuuagcaaauc

SEQ ID NO: 478442 - RNA, 19 nt, Homo sapiens
  misc_RNA (1)...(19): siRNA sense strand
aagcaaagauccugauauc

SEQ ID NO: 478443 - RNA, 19 nt, Homo sapiens
  misc_RNA (1)...(19): siRNA sense strand
cuacacaguuuguucauca

SEQ ID NO: 478444 - RNA, 19 nt, Homo sapiens
  misc_RNA (1)...(19): siRNA sense strand
aaauaagcauggaagauga

SEQ ID NO: 478445 - RNA, 19 nt, Homo sapiens
  misc_RNA (1)...(19): siRNA sense strand
ggacaagaccgaacacuac

SEQ ID NO: 478446 - RNA, 19 nt, Homo sapiens
  misc_RNA (1)...(19): siRNA sense strand
ggaacuucauguagucuau

SEQ ID NO: 478447 - RNA, 19 nt, Homo sapiens
  misc_RNA (1)...(19): siRNA sense strand
ccugauaucuuauuuaugc

SEQ ID NO: 478448 - RNA, 19 nt, Homo sapiens
  misc_RNA (1)...(19): siRNA sense strand
acagucauguuucuuguuu

SEQ ID NO: 478449 - RNA, 19 nt, Homo sapiens
  misc_RNA (1)...(19): siRNA sense strand
uauaauaccauccgucgua

SEQ ID NO: 478450 - RNA, 19 nt, Homo sapiens
  misc_RNA (1)...(19): siRNA sense strand
uaauagaucucaguguaug

SEQ ID NO: 478451 - RNA, 19 nt, Homo sapiens
  misc_RNA (1)...(19): siRNA sense strand
gaacacuacuggccagcau

SEQ ID NO: 478452 - RNA, 19 nt, Homo sapiens
  misc_RNA (1)...(19): siRNA sense strand
gcccauaaacucccaguaa

SEQ ID NO: 478453 - RNA, 19 nt, Homo sapiens
  misc_RNA (1)...(19): siRNA sense strand
guguggagauuacuacauu

SEQ ID NO: 478454 - RNA, 19 nt, Homo sapiens
  misc_RNA (1)...(19): siRNA sense strand
uagaugaacuugggaaugu

SEQ ID NO: 478455 - RNA, 19 nt, Homo sapiens
  misc_RNA (1)...(19): siRNA sense strand
augaagaugugaacacuaa

SEQ ID NO: 478456 - RNA, 19 nt, Homo sapiens
  misc_RNA (1)...(19): siRNA sense strand
ggcaaggaaaucuauaaua

SEQ ID NO: 478457 - RNA, 19 nt, Homo sapiens
  misc_RNA (1)...(19): siRNA sense strand
accagacacugaugaaaua

SEQ ID NO: 478458 - RNA, 19 nt, Homo sapiens
  misc_RNA (1)...(19): siRNA sense strand
aagaacaaguacucaauga

SEQ ID NO: 478459 - RNA, 19 nt, Homo sapiens
  misc_RNA (1)...(19): siRNA sense strand
guuaaguccaucaaaguua

SEQ ID NO: 478460 - RNA, 19 nt, Homo sapiens
  misc_RNA (1)...(19): siRNA sense strand
uacgagcuauucuaccuua

SEQ ID NO: 478461 - RNA, 19 nt, Homo sapiens
  misc_RNA (1)...(19): siRNA sense strand
gcagggaagucuggcaguu

SEQ ID NO: 478462 - RNA, 19 nt, Homo sapiens
  misc_RNA (1)...(19): siRNA sense strand
cagcucccauauaccauua

SEQ ID NO: 478463 - RNA, 19 nt, Homo sapiens
  misc_RNA (1)...(19): siRNA sense strand
gcaggcauuuugcaauuua

SEQ ID NO: 478464 - RNA, 19 nt, Homo sapiens
  misc_RNA (1)...(19): siRNA sense strand
gcagaggauuggaugaaag

SEQ ID NO: 478465 - RNA, 19 nt, Homo sapiens
  misc_RNA (1)...(19): siRNA sense strand
cccauaaacucccaguaaa

SEQ ID NO: 478466 - RNA, 19 nt, Homo sapiens
  misc_RNA (1)...(19): siRNA sense strand
gggaagaagauccacauga

SEQ ID NO: 478467 - RNA, 19 nt, Homo sapiens
  misc_RNA (1)...(19): siRNA sense strand
caagaguuguuagugguuu

SEQ ID NO: 478468 - RNA, 19 nt, Homo sapiens
  misc_RNA (1)...(19): siRNA sense strand
acaaauaccaccaugagaa

SEQ ID NO: 478469 - RNA, 19 nt, Homo sapiens
  misc_RNA (1)...(19): siRNA sense strand
gagauauguucauuguuca

SEQ ID NO: 478470 - RNA, 19 nt, Homo sapiens
  misc_RNA (1)...(19): siRNA sense strand
ggaggccgguauuauaaca

SEQ ID NO: 478471 - RNA, 19 nt, Homo sapiens
  misc_RNA (1)...(19): siRNA sense strand
gaugaacaaggccuuauug

SEQ ID NO: 478472 - RNA, 19 nt, Homo sapiens
  misc_RNA (1)...(19): siRNA sense strand
ggauggauguggguuacaa

SEQ ID NO: 478473 - RNA, 19 nt, Homo sapiens
  misc_RNA (1)...(19): siRNA sense strand
gauucuccaucuccuauug

SEQ ID NO: 478474 - RNA, 19 nt, Homo sapiens
  misc_RNA (1)...(19): siRNA sense strand
ugaagaagcccauaaacuc

SEQ ID NO: 478475 - RNA, 19 nt, Homo sapiens
  misc_RNA (1)...(19): siRNA sense strand
aaggagauauguucauugu

SEQ ID NO: 478476 - RNA, 19 nt, Homo sapiens
  misc_RNA (1)...(19): siRNA sense strand
ucauguagucuaugcuuua

SEQ ID NO: 478477 - RNA, 19 nt, Homo sapiens
  misc_RNA (1)...(19): siRNA sense strand
ugccacagaugaaugguuu

SEQ ID NO: 478478 - RNA, 19 nt, Homo sapiens
  misc_RNA (1)...(19): siRNA sense strand
caguguauguucugucuau

SEQ ID NO: 478479 - RNA, 19 nt, Homo sapiens
  misc_RNA (1)...(19): siRNA sense strand
cuaaggagcccuacaugga

SEQ ID NO: 478480 - RNA, 19 nt, Homo sapiens
  misc_RNA (1)...(19): siRNA sense strand
ugcaagaacacugauauua

SEQ ID NO: 478481 - RNA, 19 nt, Homo sapiens
  misc_RNA (1)...(19): siRNA sense strand
ugaguuaaguccaucaaag

SEQ ID NO: 478482 - RNA, 19 nt, Homo sapiens
  misc_RNA (1)...(19): siRNA sense strand
cagaagaagaguacaguga

SEQ ID NO: 478483 - RNA, 19 nt, Homo sapiens
  misc_RNA (1)...(19): siRNA sense strand
ccagggacauccaauaaac

SEQ ID NO: 478484 - RNA, 19 nt, Homo sapiens
  misc_RNA (1)...(19): siRNA sense strand
uugaagaccuaguagaaga

SEQ ID NO: 478485 - RNA, 19 nt, Homo sapiens
  misc_RNA (1)...(19): siRNA sense strand
acagaacgauagcagaaga

SEQ ID NO: 478486 - RNA, 19 nt, Homo sapiens
  misc_RNA (1)...(19): siRNA sense strand
ccaggguccuuuguacuuu

SEQ ID NO: 478487 - RNA, 19 nt, Homo sapiens
  misc_RNA (1)...(19): siRNA sense strand
gcaaaaggaacuucaugua

SEQ ID NO: 478488 - RNA, 19 nt, Homo sapiens
  misc_RNA (1)...(19): siRNA sense strand
ccugaauaguguccaagua

SEQ ID NO: 478489 - RNA, 19 nt, Homo sapiens
  misc_RNA (1)...(19): siRNA sense strand
ccaaaaggauuaauagauc

SEQ ID NO: 478490 - RNA, 19 nt, Homo sapiens
  misc_RNA (1)...(19): siRNA sense strand
gaaggugucaauccauuca

SEQ ID NO: 478491 - RNA, 19 nt, Homo sapiens
  misc_RNA (1)...(19): siRNA sense strand
ugacagaacgauagcagaa

SEQ ID NO: 478492 - RNA, 19 nt, Homo sapiens
  misc_RNA (1)...(19): siRNA sense strand
gcuugaaucguuguuguua

SEQ ID NO: 478493 - RNA, 19 nt, Homo sapiens
  misc_RNA (1)...(19): siRNA sense strand
uguagucuaugcuuuauca

SEQ ID NO: 478494 - RNA, 19 nt, Homo sapiens
  misc_RNA (1)...(19): siRNA sense strand
gcucccauauaccauuaaa

SEQ ID NO: 478495 - RNA, 19 nt, Homo sapiens
  misc_RNA (1)...(19): siRNA sense strand
cauguuucuuguuugcuua

SEQ ID NO: 478496 - RNA, 19 nt, Homo sapiens
  misc_RNA (1)...(19): siRNA sense strand
gugaugcccaacuuauuua

SEQ ID NO: 478497 - RNA, 19 nt, Homo sapiens
  misc_RNA (1)...(19): siRNA sense strand
gaagaagauccacaugaag

SEQ ID NO: 478498 - RNA, 19 nt, Homo sapiens
  misc_RNA (1)...(19): siRNA sense strand
gcaggaucaagaacaagua

SEQ ID NO: 478499 - RNA, 19 nt, Homo sapiens
  misc_RNA (1)...(19): siRNA sense strand
cagcauugcaugagauuug

SEQ ID NO: 478500 - RNA, 19 nt, Homo sapiens
  misc_RNA (1)...(19): siRNA sense strand
cacacuaaaugacagagaa

SEQ ID NO: 478501 - RNA, 19 nt, Homo sapiens
  misc_RNA (1)...(19): siRNA sense strand
aaaggaacuucauguaguc

SEQ ID NO: 478502 - RNA, 19 nt, Homo sapiens
  misc_RNA (1)...(19): siRNA sense strand
cacaguggauggcaaggaa

SEQ ID NO: 478503 - RNA, 19 nt, Homo sapiens
  misc_RNA (1)...(19): siRNA sense strand
caagaacaaguacucaaug

SEQ ID NO: 478504 - RNA, 19 nt, Homo sapiens
  misc_RNA (1)...(19): siRNA sense strand
gaacuguggugucuuggua

SEQ ID NO: 478505 - RNA, 19 nt, Homo sapiens
  misc_RNA (1)...(19): siRNA sense strand
uggcuuaccuuaugcagaa

SEQ ID NO: 478506 - RNA, 19 nt, Homo sapiens
  misc_RNA (1)...(19): siRNA sense strand
gaaauggcgaucagcaaga

SEQ ID NO: 478507 - RNA, 19 nt, Homo sapiens
  misc_RNA (1)...(19): siRNA sense strand
gacuguggcuuaccuuaug

SEQ ID NO: 478508 - RNA, 19 nt, Homo sapiens
  misc_RNA (1)...(19): siRNA sense strand
ggcauuagccgcucaguca

SEQ ID NO: 478509 - RNA, 19 nt, Homo sapiens
  misc_RNA (1)...(19): siRNA sense strand
ggacucagcagcccaugug

SEQ ID NO: 478510 - RNA, 19 nt, Homo sapiens
  misc_RNA (1)...(19): siRNA sense strand
caacauauccccuaacuuc

SEQ ID NO: 478511 - RNA, 19 nt, Homo sapiens
  misc_RNA (1)...(19): siRNA sense strand
ggcaagaacuguggugucu

SEQ ID NO: 478512 - RNA, 19 nt, Homo sapiens
  misc_RNA (1)...(19): siRNA sense strand
acacaguggugcucuacga

SEQ ID NO: 478513 - RNA, 19 nt, Homo sapiens
  misc_RNA (1)...(19): siRNA sense strand
cagguggacucucugcaau

SEQ ID NO: 478514 - RNA, 19 nt, Homo sapiens
  misc_RNA (1)...(19): siRNA sense strand
gguggacucucugcaaucu

SEQ ID NO: 478515 - RNA, 19 nt, Homo sapiens
  misc_RNA (1)...(19): siRNA sense strand
uguggugucuugguacauu

SEQ ID NO: 478516 - RNA, 19 nt, Homo sapiens
  misc_RNA (1)...(19): siRNA sense strand
gagaggacgcugggacuca

SEQ ID NO: 478517 - RNA, 19 nt, Homo sapiens
  misc_RNA (1)...(19): siRNA sense strand
ugacuguggcuuaccuuau

SEQ ID NO: 478518 - RNA, 19 nt, Homo sapiens
  misc_RNA (1)...(19): siRNA sense strand
ccagguggacucucugcaa

SEQ ID NO: 478519 - RNA, 19 nt, Homo sapiens
  misc_RNA (1)...(19): siRNA sense strand
uauaccagguggacucucu

SEQ ID NO: 478520 - RNA, 19 nt, Homo sapiens
  misc_RNA (1)...(19): siRNA sense strand
cuuccaaccagaauguaua

SEQ ID NO: 478521 - RNA, 19 nt, Homo sapiens
  misc_RNA (1)...(19): siRNA sense strand
gugacuguggcuuaccuua

SEQ ID NO: 478522 - RNA, 19 nt, Homo sapiens
  misc_RNA (1)...(19): siRNA sense strand
gcagcgacuggaacgagaa

SEQ ID NO: 478523 - RNA, 19 nt, Homo sapiens
  misc_RNA (1)...(19): siRNA sense strand
uggacucucugcaaucuac

SEQ ID NO: 478524 - RNA, 19 nt, Homo sapiens
  misc_RNA (1)...(19): siRNA sense strand
ucgggcugcugcucaagaa

SEQ ID NO: 478525 - RNA, 19 nt, Homo sapiens
  misc_RNA (1)...(19): siRNA sense strand
guggugucuugguacauug

SEQ ID NO: 478526 - RNA, 19 nt, Homo sapiens
  misc_RNA (1)...(19): siRNA sense strand
gaacuguggugucuuggua

SEQ ID NO: 478527 - RNA, 19 nt, Homo sapiens
  misc_RNA (1)...(19): siRNA sense strand
uggcuuaccuuaugcagaa

SEQ ID NO: 478528 - RNA, 19 nt, Homo sapiens
  misc_RNA (1)...(19): siRNA sense strand
gaaauggcgaucagcaaga

SEQ ID NO: 478529 - RNA, 19 nt, Homo sapiens
  misc_RNA (1)...(19): siRNA sense strand
gacuguggcuuaccuuaug

SEQ ID NO: 478530 - RNA, 19 nt, Homo sapiens
  misc_RNA (1)...(19): siRNA sense strand
ggcauuagccgcucaguca

SEQ ID NO: 478531 - RNA, 19 nt, Homo sapiens
  misc_RNA (1)...(19): siRNA sense strand
ggacucagcagcccaugug

SEQ ID NO: 478532 - RNA, 19 nt, Homo sapiens
  misc_RNA (1)...(19): siRNA sense strand
caacauauccccuaacuuc

SEQ ID NO: 478533 - RNA, 19 nt, Homo sapiens
  misc_RNA (1)...(19): siRNA sense strand
ggcaagaacuguggugucu

SEQ ID NO: 478534 - RNA, 19 nt, Homo sapiens
  misc_RNA (1)...(19): siRNA sense strand
acacaguggugcucuacga

SEQ ID NO: 478535 - RNA, 19 nt, Homo sapiens
  misc_RNA (1)...(19): siRNA sense strand
cagguggacucucugcaau

SEQ ID NO: 478536 - RNA, 19 nt, Homo sapiens
  misc_RNA (1)...(19): siRNA sense strand
gguggacucucugcaaucu

SEQ ID NO: 478537 - RNA, 19 nt, Homo sapiens
  misc_RNA (1)...(19): siRNA sense strand
uguggugucuugguacauu

SEQ ID NO: 478538 - RNA, 19 nt, Homo sapiens
  misc_RNA (1)...(19): siRNA sense strand
gagaggacgcugggacuca

SEQ ID NO: 478539 - RNA, 19 nt, Homo sapiens
  misc_RNA (1)...(19): siRNA sense strand
ugacuguggcuuaccuuau

SEQ ID NO: 478540 - RNA, 19 nt, Homo sapiens
  misc_RNA (1)...(19): siRNA sense strand
ccagguggacucucugcaa

SEQ ID NO: 478541 - RNA, 19 nt, Homo sapiens
  misc_RNA (1)...(19): siRNA sense strand
uauaccagguggacucucu

SEQ ID NO: 478542 - RNA, 19 nt, Homo sapiens
  misc_RNA (1)...(19): siRNA sense strand
cuuccaaccagaauguaua

SEQ ID NO: 478543 - RNA, 19 nt, Homo sapiens
  misc_RNA (1)...(19): siRNA sense strand
gugacuguggcuuaccuua

SEQ ID NO: 478544 - RNA, 19 nt, Homo sapiens
  misc_RNA (1)...(19): siRNA sense strand
gcagcgacuggaacgagaa

SEQ ID NO: 478545 - RNA, 19 nt, Homo sapiens
  misc_RNA (1)...(19): siRNA sense strand
uggacucucugcaaucuac

SEQ ID NO: 478546 - RNA, 19 nt, Homo sapiens
  misc_RNA (1)...(19): siRNA sense strand
ucgggcugcugcucaagaa

SEQ ID NO: 478547 - RNA, 19 nt, Homo sapiens
  misc_RNA (1)...(19): siRNA sense strand
guggugucuugguacauug

SEQ ID NO: 478548 - RNA, 19 nt, Homo sapiens
  misc_RNA (1)...(19): siRNA sense strand
caaggccacuuaaaucaaa

SEQ ID NO: 478549 - RNA, 19 nt, Homo sapiens
  misc_RNA (1)...(19): siRNA sense strand
ggacaaggccacuuaaauc

SEQ ID NO: 478550 - RNA, 19 nt, Homo sapiens
  misc_RNA (1)...(19): siRNA sense strand
gcaguggacggcaaacuua

SEQ ID NO: 478551 - RNA, 19 nt, Homo sapiens
  misc_RNA (1)...(19): siRNA sense strand
gaaaugaggaagaggagaa

SEQ ID NO: 478552 - RNA, 19 nt, Homo sapiens
  misc_RNA (1)...(19): siRNA sense strand
cgaaggacaaggccacuua

SEQ ID NO: 478553 - RNA, 19 nt, Homo sapiens
  misc_RNA (1)...(19): siRNA sense strand
gaacaacaaggauaaacug

SEQ ID NO: 478554 - RNA, 19 nt, Homo sapiens
  misc_RNA (1)...(19): siRNA sense strand
gcaccacguucaagacuuc

SEQ ID NO: 478555 - RNA, 19 nt, Homo sapiens
  misc_RNA (1)...(19): siRNA sense strand
cagaacccgugcucgcuua

SEQ ID NO: 478556 - RNA, 19 nt, Homo sapiens
  misc_RNA (1)...(19): siRNA sense strand
ggaagaaggaaaugaggaa

SEQ ID NO: 478557 - RNA, 19 nt, Homo sapiens
  misc_RNA (1)...(19): siRNA sense strand
gaguuucucuuuaauccuu

SEQ ID NO: 478558 - RNA, 19 nt, Homo sapiens
  misc_RNA (1)...(19): siRNA sense strand
gcaauaucccgacuguaaa

SEQ ID NO: 478559 - RNA, 19 nt, Homo sapiens
  misc_RNA (1)...(19): siRNA sense strand
uaucagaccuuggaacuag

SEQ ID NO: 478560 - RNA, 19 nt, Homo sapiens
  misc_RNA (1)...(19): siRNA sense strand
gaaggacaaggccacuuaa

SEQ ID NO: 478561 - RNA, 19 nt, Homo sapiens
  misc_RNA (1)...(19): siRNA sense strand
gaagguggaggaagaagga

SEQ ID NO: 478562 - RNA, 19 nt, Homo sapiens
  misc_RNA (1)...(19): siRNA sense strand
gacaaggccacuuaaauca

SEQ ID NO: 478563 - RNA, 19 nt, Homo sapiens
  misc_RNA (1)...(19): siRNA sense strand
ggagaaagaagaggaggaa

SEQ ID NO: 478564 - RNA, 19 nt, Homo sapiens
  misc_RNA (1)...(19): siRNA sense strand
ugcaauaucccgacuguaa

SEQ ID NO: 478565 - RNA, 19 nt, Homo sapiens
  misc_RNA (1)...(19): siRNA sense strand
aggagaagguggaggaaga

SEQ ID NO: 478566 - RNA, 19 nt, Homo sapiens
  misc_RNA (1)...(19): siRNA sense strand
ggagaacaacaaggauaaa

SEQ ID NO: 478567 - RNA, 19 nt, Homo sapiens
  misc_RNA (1)...(19): siRNA sense strand
ggugcaauaucccgacugu

SEQ ID NO: 478568 - RNA, 19 nt, Homo sapiens
  misc_RNA (1)...(19): siRNA sense strand
ggacugaccgagagacaag

SEQ ID NO: 478569 - RNA, 19 nt, Homo sapiens
  misc_RNA (1)...(19): siRNA sense strand
ggaggaagaaggaaaugag

SEQ ID NO: 478570 - RNA, 19 nt, Homo sapiens
  misc_RNA (1)...(19): siRNA sense strand
aggcgagcguggugcaaua

SEQ ID NO: 478571 - RNA, 19 nt, Homo sapiens
  misc_RNA (1)...(19): siRNA sense strand
cccuggaaccggccuauua

SEQ ID NO: 478572 - RNA, 19 nt, Homo sapiens
  misc_RNA (1)...(19): siRNA sense strand
caauaucccgacuguaaau

SEQ ID NO: 478573 - RNA, 19 nt, Homo sapiens
  misc_RNA (1)...(19): siRNA sense strand
ggagaagguggaggaagaa

SEQ ID NO: 478574 - RNA, 19 nt, Homo sapiens
  misc_RNA (1)...(19): siRNA sense strand
aaggagaacaacaaggaua

SEQ ID NO: 478575 - RNA, 19 nt, Homo sapiens
  misc_RNA (1)...(19): siRNA sense strand
ggaagaggagaaagaagag

SEQ ID NO: 478576 - RNA, 19 nt, Homo sapiens
  misc_RNA (1)...(19): siRNA sense strand
agagacaagugaagaucug

SEQ ID NO: 478577 - RNA, 19 nt, Homo sapiens
  misc_RNA (1)...(19): siRNA sense strand
agaaggaaaugaggaagag

SEQ ID NO: 478578 - RNA, 19 nt, Homo sapiens
  misc_RNA (1)...(19): siRNA sense strand
ccagacagucccuuuaugg

SEQ ID NO: 478579 - RNA, 19 nt, Homo sapiens
  misc_RNA (1)...(19): siRNA sense strand
gacaagugaagaucugguu

SEQ ID NO: 478580 - RNA, 19 nt, Homo sapiens
  misc_RNA (1)...(19): siRNA sense strand
uaacaguagcgaaggacaa

SEQ ID NO: 478581 - RNA, 19 nt, Homo sapiens
  misc_RNA (1)...(19): siRNA sense strand
ggagccaugcgcuggugua

SEQ ID NO: 478582 - RNA, 19 nt, Homo sapiens
  misc_RNA (1)...(19): siRNA sense strand
ugaggaagaggagaaagaa

SEQ ID NO: 478583 - RNA, 19 nt, Homo sapiens
  misc_RNA (1)...(19): siRNA sense strand
aaacuuacagccgguauca

SEQ ID NO: 478584 - RNA, 19 nt, Homo sapiens
  misc_RNA (1)...(19): siRNA sense strand
ggaagaaaacaaggacuaa

SEQ ID NO: 478585 - RNA, 19 nt, Homo sapiens
  misc_RNA (1)...(19): siRNA sense strand
aggaagaggagaaagaaga

SEQ ID NO: 478586 - RNA, 19 nt, Homo sapiens
  misc_RNA (1)...(19): siRNA sense strand
uuccagaaccgaaggauga

SEQ ID NO: 478587 - RNA, 19 nt, Homo sapiens
  misc_RNA (1)...(19): siRNA sense strand
aggagaacaacaaggauaa

SEQ ID NO: 478588 - RNA, 19 nt, Homo sapiens
  misc_RNA (1)...(19): siRNA sense strand
gagacgccuccaaauucua

SEQ ID NO: 478589 - RNA, 19 nt, Homo sapiens
  misc_RNA (1)...(19): siRNA sense strand
ggaaaaggaagaaaacaag

SEQ ID NO: 478590 - RNA, 19 nt, Homo sapiens
  misc_RNA (1)...(19): siRNA sense strand
gaaagaagaggaggaaaag

SEQ ID NO: 478591 - RNA, 19 nt, Homo sapiens
  misc_RNA (1)...(19): siRNA sense strand
gcaaacuuacagccgguau

SEQ ID NO: 478592 - RNA, 19 nt, Homo sapiens
  misc_RNA (1)...(19): siRNA sense strand
ccuguucuccaaauacaaa

SEQ ID NO: 478593 - RNA, 19 nt, Homo sapiens
  misc_RNA (1)...(19): siRNA sense strand
accgaaggaugaaguggaa

SEQ ID NO: 478594 - RNA, 19 nt, Homo sapiens
  misc_RNA (1)...(19): siRNA sense strand
gagagacaagugaagaucu

SEQ ID NO: 478595 - RNA, 19 nt, Homo sapiens
  misc_RNA (1)...(19): siRNA sense strand
gguaucagaccuuggaacu

SEQ ID NO: 478596 - RNA, 19 nt, Homo sapiens
  misc_RNA (1)...(19): siRNA sense strand
gcacgcuucgcaccacguu

SEQ ID NO: 478597 - RNA, 19 nt, Homo sapiens
  misc_RNA (1)...(19): siRNA sense strand
gacugccgguucccucaga

SEQ ID NO: 478598 - RNA, 19 nt, Homo sapiens
  misc_RNA (1)...(19): siRNA sense strand
cccagacagucccuuuaug

SEQ ID NO: 478599 - RNA, 19 nt, Homo sapiens
  misc_RNA (1)...(19): siRNA sense strand
gaaaacgucggauugaagu

SEQ ID NO: 478600 - RNA, 19 nt, Homo sapiens
  misc_RNA (1)...(19): siRNA sense strand
acaaggccacuuaaaucaa

SEQ ID NO: 478601 - RNA, 19 nt, Homo sapiens
  misc_RNA (1)...(19): siRNA sense strand
gagaacaacaaggauaaac

SEQ ID NO: 478602 - RNA, 19 nt, Homo sapiens
  misc_RNA (1)...(19): siRNA sense strand
guaucagaccuuggaacua

SEQ ID NO: 478603 - RNA, 19 nt, Homo sapiens
  misc_RNA (1)...(19): siRNA sense strand
gguggaggaagaaggaaau

SEQ ID NO: 478604 - RNA, 19 nt, Homo sapiens
  misc_RNA (1)...(19): siRNA sense strand
gagaaagaagaggaggaaa

SEQ ID NO: 478605 - RNA, 19 nt, Homo sapiens
  misc_RNA (1)...(19): siRNA sense strand
agacgccuccaaauucuau

SEQ ID NO: 478606 - RNA, 19 nt, Homo sapiens
  misc_RNA (1)...(19): siRNA sense strand
uaaauccuccgccaacacu

SEQ ID NO: 478607 - RNA, 19 nt, Homo sapiens
  misc_RNA (1)...(19): siRNA sense strand
aagaaggaaaugaggaaga

SEQ ID NO: 478608 - RNA, 19 nt, Homo sapiens
  misc_RNA (1)...(19): siRNA sense strand
aggacaaggccacuuaaau

SEQ ID NO: 478609 - RNA, 19 nt, Homo sapiens
  misc_RNA (1)...(19): siRNA sense strand
cagaggaacugcugaauga

SEQ ID NO: 478610 - RNA, 19 nt, Homo sapiens
  misc_RNA (1)...(19): siRNA sense strand
ugaaauaccugcaaaguag

SEQ ID NO: 478611 - RNA, 19 nt, Homo sapiens
  misc_RNA (1)...(19): siRNA sense strand
aagaacaucuccagaggaa

SEQ ID NO: 478612 - RNA, 19 nt, Homo sapiens
  misc_RNA (1)...(19): siRNA sense strand
gaacaucuccagaggaacu

SEQ ID NO: 478613 - RNA, 19 nt, Homo sapiens
  misc_RNA (1)...(19): siRNA sense strand
ccagaggaacugcugaaug

SEQ ID NO: 478614 - RNA, 19 nt, Homo sapiens
  misc_RNA (1)...(19): siRNA sense strand
uugaaauaccugcaaagua

SEQ ID NO: 478615 - RNA, 19 nt, Homo sapiens
  misc_RNA (1)...(19): siRNA sense strand
aaauggaggaggaggaauu

SEQ ID NO: 478616 - RNA, 19 nt, Homo sapiens
  misc_RNA (1)...(19): siRNA sense strand
ccaaauggaggaggaggaa

SEQ ID NO: 478617 - RNA, 19 nt, Homo sapiens
  misc_RNA (1)...(19): siRNA sense strand
cccgcaaccugcuccuaaa

SEQ ID NO: 478618 - RNA, 19 nt, Homo sapiens
  misc_RNA (1)...(19): siRNA sense strand
guugaaauaccugcaaagu

SEQ ID NO: 478619 - RNA, 19 nt, Homo sapiens
  misc_RNA (1)...(19): siRNA sense strand
ugguugaaauaccugcaaa

SEQ ID NO: 478620 - RNA, 19 nt, Homo sapiens
  misc_RNA (1)...(19): siRNA sense strand
ccuagaagguauaaacaaa

SEQ ID NO: 478621 - RNA, 19 nt, Homo sapiens
  misc_RNA (1)...(19): siRNA sense strand
gguauaggcgauccuguua

SEQ ID NO: 478622 - RNA, 19 nt, Homo sapiens
  misc_RNA (1)...(19): siRNA sense strand
ccuguuaccugccuuaaga

SEQ ID NO: 478623 - RNA, 19 nt, Homo sapiens
  misc_RNA (1)...(19): siRNA sense strand
ggaacaaaaugcugcaaaa

SEQ ID NO: 478624 - RNA, 19 nt, Homo sapiens
  misc_RNA (1)...(19): siRNA sense strand
ggucuuguaucuccucuuc

SEQ ID NO: 478625 - RNA, 19 nt, Homo sapiens
  misc_RNA (1)...(19): siRNA sense strand
cauaugucauccagucuuu

SEQ ID NO: 478626 - RNA, 19 nt, Homo sapiens
  misc_RNA (1)...(19): siRNA sense strand
gaagguauaaacaaauugg

SEQ ID NO: 478627 - RNA, 19 nt, Homo sapiens
  misc_RNA (1)...(19): siRNA sense strand
ucucguuccucuucauauu

SEQ ID NO: 478628 - RNA, 19 nt, Homo sapiens
  misc_RNA (1)...(19): siRNA sense strand
ccuuaagaguggagccaua

SEQ ID NO: 478629 - RNA, 19 nt, Homo sapiens
  misc_RNA (1)...(19): siRNA sense strand
gauccuguuaccugccuua

SEQ ID NO: 478630 - RNA, 19 nt, Homo sapiens
  misc_RNA (1)...(19): siRNA sense strand
uaagaguggagccauaugu

SEQ ID NO: 478631 - RNA, 19 nt, Homo sapiens
  misc_RNA (1)...(19): siRNA sense strand
uguaucuccucuucucguu

SEQ ID NO: 478632 - RNA, 19 nt, Homo sapiens
  misc_RNA (1)...(19): siRNA sense strand
gaguggagccauaugucau

SEQ ID NO: 478633 - RNA, 19 nt, Homo sapiens
  misc_RNA (1)...(19): siRNA sense strand
gauccauuaucuucuguuu

SEQ ID NO: 478634 - RNA, 19 nt, Homo sapiens
  misc_RNA (1)...(19): siRNA sense strand
ggucauggaggaaucauaa

SEQ ID NO: 478635 - RNA, 19 nt, Homo sapiens
  misc_RNA (1)...(19): siRNA sense strand
gaggaaucauaaacacauu

SEQ ID NO: 478636 - RNA, 19 nt, Homo sapiens
  misc_RNA (1)...(19): siRNA sense strand
gaggauccauuaucuucug

SEQ ID NO: 478637 - RNA, 19 nt, Homo sapiens
  misc_RNA (1)...(19): siRNA sense strand
gugcucagcugccuuccaa

SEQ ID NO: 478638 - RNA, 19 nt, Homo sapiens
  misc_RNA (1)...(19): siRNA sense strand
cgaaaaugcugccgaagaa

SEQ ID NO: 478639 - RNA, 19 nt, Homo sapiens
  misc_RNA (1)...(19): siRNA sense strand
ggaggaaucauaaacacau

SEQ ID NO: 478640 - RNA, 19 nt, Homo sapiens
  misc_RNA (1)...(19): siRNA sense strand
ggaaucauaaacacauuac

SEQ ID NO: 478641 - RNA, 19 nt, Homo sapiens
  misc_RNA (1)...(19): siRNA sense strand
uccauuaucuucuguuugc

SEQ ID NO: 478642 - RNA, 19 nt, Homo sapiens
  misc_RNA (1)...(19): siRNA sense strand
gcucagcugccuuccaaag

SEQ ID NO: 478643 - RNA, 19 nt, Homo sapiens
  misc_RNA (1)...(19): siRNA sense strand
gcuuugcucuuccuguuuu

SEQ ID NO: 478644 - RNA, 19 nt, Homo sapiens
  misc_RNA (1)...(19): siRNA sense strand
aggaacagaucggcaagug

SEQ ID NO: 478645 - RNA, 19 nt, Homo sapiens
  misc_RNA (1)...(19): siRNA sense strand
uugcuuugcucuuccuguu

SEQ ID NO: 478646 - RNA, 19 nt, Homo sapiens
  misc_RNA (1)...(19): siRNA sense strand
cauggaggaaucauaaaca

SEQ ID NO: 478647 - RNA, 19 nt, Homo sapiens
  misc_RNA (1)...(19): siRNA sense strand
aaaugcugccgaagaaaga

SEQ ID NO: 478648 - RNA, 19 nt, Homo sapiens
  misc_RNA (1)...(19): siRNA sense strand
ucuguuugcuuugcucuuc

SEQ ID NO: 478649 - RNA, 19 nt, Homo sapiens
  misc_RNA (1)...(19): siRNA sense strand
gaacguggcucuagugucu

SEQ ID NO: 478650 - RNA, 19 nt, Homo sapiens
  misc_RNA (1)...(19): siRNA sense strand
gaggagaaauuaaccuuca

SEQ ID NO: 478651 - RNA, 19 nt, Homo sapiens
  misc_RNA (1)...(19): siRNA sense strand
gaaccugaguccuggaaug

SEQ ID NO: 478652 - RNA, 19 nt, Homo sapiens
  misc_RNA (1)...(19): siRNA sense strand
aggauacccuugacaaaua

SEQ ID NO: 478653 - RNA, 19 nt, Homo sapiens
  misc_RNA (1)...(19): siRNA sense strand
aaccaaaucugccuuccua

SEQ ID NO: 478654 - RNA, 19 nt, Homo sapiens
  misc_RNA (1)...(19): siRNA sense strand
ccagagcacuuucaagaag

SEQ ID NO: 478655 - RNA, 19 nt, Homo sapiens
  misc_RNA (1)...(19): siRNA sense strand
cgggacaucuugaccauug

SEQ ID NO: 478656 - RNA, 19 nt, Homo sapiens
  misc_RNA (1)...(19): siRNA sense strand
gugcagaggaggagaaauu

SEQ ID NO: 478657 - RNA, 19 nt, Homo sapiens
  misc_RNA (1)...(19): siRNA sense strand
ucaccaagcauaaacauau

SEQ ID NO: 478658 - RNA, 19 nt, Homo sapiens
  misc_RNA (1)...(19): siRNA sense strand
gaacaggucaacugcuuca

SEQ ID NO: 478659 - RNA, 19 nt, Homo sapiens
  misc_RNA (1)...(19): siRNA sense strand
ggccagagcacuuucaaga

SEQ ID NO: 478660 - RNA, 19 nt, Homo sapiens
  misc_RNA (1)...(19): siRNA sense strand
gaagacccaccaccacuug

SEQ ID NO: 478661 - RNA, 19 nt, Homo sapiens
  misc_RNA (1)...(19): siRNA sense strand
ggaggauacccuugacaaa

SEQ ID NO: 478662 - RNA, 19 nt, Homo sapiens
  misc_RNA (1)...(19): siRNA sense strand
gcagaggaggagaaauuaa

SEQ ID NO: 478663 - RNA, 19 nt, Homo sapiens
  misc_RNA (1)...(19): siRNA sense strand
gggcugauccacaacauga

SEQ ID NO: 478664 - RNA, 19 nt, Homo sapiens
  misc_RNA (1)...(19): siRNA sense strand
gaggauacccuugacaaau

SEQ ID NO: 478665 - RNA, 19 nt, Homo sapiens
  misc_RNA (1)...(19): siRNA sense strand
caccaagcauaaacauauu

SEQ ID NO: 478666 - RNA, 19 nt, Homo sapiens
  misc_RNA (1)...(19): siRNA sense strand
cagcauggcccucccuuug

SEQ ID NO: 478667 - RNA, 19 nt, Homo sapiens
  misc_RNA (1)...(19): siRNA sense strand
aaagaguucucaccaagca

SEQ ID NO: 478668 - RNA, 19 nt, Homo sapiens
  misc_RNA (1)...(19): siRNA sense strand
ucaauuaucugaggaacgu

SEQ ID NO: 478669 - RNA, 19 nt, Homo sapiens
  misc_RNA (1)...(19): siRNA sense strand
ggauacccuugacaaauac

SEQ ID NO: 478670 - RNA, 19 nt, Homo sapiens
  misc_RNA (1)...(19): siRNA sense strand
caggucaacugcuucaaca

SEQ ID NO: 478671 - RNA, 19 nt, Homo sapiens
  misc_RNA (1)...(19): siRNA sense strand
gucaacugcuucaacauca

SEQ ID NO: 478672 - RNA, 19 nt, Homo sapiens
  misc_RNA (1)...(19): siRNA sense strand
gcauggcccucccuuugag

SEQ ID NO: 478673 - RNA, 19 nt, Homo sapiens
  misc_RNA (1)...(19): siRNA sense strand
gcuucaacaucaauuaucu

SEQ ID NO: 478674 - RNA, 19 nt, Homo sapiens
  misc_RNA (1)...(19): siRNA sense strand
ggaccagagccauccagaa

SEQ ID NO: 478675 - RNA, 19 nt, Homo sapiens
  misc_RNA (1)...(19): siRNA sense strand
gagaaauuaaccuucauca

SEQ ID NO: 478676 - RNA, 19 nt, Homo sapiens
  misc_RNA (1)...(19): siRNA sense strand
ccuagagugugccaaacuu

SEQ ID NO: 478677 - RNA, 19 nt, Homo sapiens
  misc_RNA (1)...(19): siRNA sense strand
gaccagagccauccagaac

SEQ ID NO: 478678 - RNA, 19 nt, Homo sapiens
  misc_RNA (1)...(19): siRNA sense strand
gggaugaacaggucaacug

SEQ ID NO: 478679 - RNA, 19 nt, Homo sapiens
  misc_RNA (1)...(19): siRNA sense strand
gggaggauacccuugacaa

SEQ ID NO: 478680 - RNA, 19 nt, Homo sapiens
  misc_RNA (1)...(19): siRNA sense strand
ggucaacugcuucaacauc

SEQ ID NO: 478681 - RNA, 19 nt, Homo sapiens
  misc_RNA (1)...(19): siRNA sense strand
ggaacgccagcuccauuug

SEQ ID NO: 478682 - RNA, 19 nt, Homo sapiens
  misc_RNA (1)...(19): siRNA sense strand
gcugugaccugccauuucc

SEQ ID NO: 478683 - RNA, 19 nt, Homo sapiens
  misc_RNA (1)...(19): siRNA sense strand
cagagcagccuuggucuug

SEQ ID NO: 478684 - RNA, 19 nt, Homo sapiens
  misc_RNA (1)...(19): siRNA sense strand
gaacgccagcuccauuugg

SEQ ID NO: 478685 - RNA, 19 nt, Homo sapiens
  misc_RNA (1)...(19): siRNA sense strand
gcugcuaccugcccaacuc

SEQ ID NO: 478686 - RNA, 19 nt, Homo sapiens
  misc_RNA (1)...(19): siRNA sense strand
ggagaaauuaaccuucauc

SEQ ID NO: 478687 - RNA, 19 nt, Homo sapiens
  misc_RNA (1)...(19): siRNA sense strand
agaguucucaccaagcaua

SEQ ID NO: 478688 - RNA, 19 nt, Homo sapiens
  misc_RNA (1)...(19): siRNA sense strand
gaccugccauuuccagaac

SEQ ID NO: 478689 - RNA, 19 nt, Homo sapiens
  misc_RNA (1)...(19): siRNA sense strand
ugaggaacguggcucuagu

SEQ ID NO: 478690 - RNA, 19 nt, Homo sapiens
  misc_RNA (1)...(19): siRNA sense strand
gccagagcacuuucaagaa

SEQ ID NO: 478691 - RNA, 19 nt, Homo sapiens
  misc_RNA (1)...(19): siRNA sense strand
cuauuuggcuguugcuucu

SEQ ID NO: 478692 - RNA, 19 nt, Homo sapiens
  misc_RNA (1)...(19): siRNA sense strand
gcccaacucccugcugaaa

SEQ ID NO: 478693 - RNA, 19 nt, Homo sapiens
  misc_RNA (1)...(19): siRNA sense strand
acccugcccucugcuguua

SEQ ID NO: 478694 - RNA, 19 nt, Homo sapiens
  misc_RNA (1)...(19): siRNA sense strand
gagcagccuuggucuugac

SEQ ID NO: 478695 - RNA, 19 nt, Homo sapiens
  misc_RNA (1)...(19): siRNA sense strand
gucagcaugugguauaugg

SEQ ID NO: 478696 - RNA, 19 nt, Homo sapiens
  misc_RNA (1)...(19): siRNA sense strand
ucaacugcuucaacaucaa

SEQ ID NO: 478697 - RNA, 19 nt, Homo sapiens
  misc_RNA (1)...(19): siRNA sense strand
ggaaaccaaagaguucuca

SEQ ID NO: 478698 - RNA, 19 nt, Homo sapiens
  misc_RNA (1)...(19): siRNA sense strand
gggacaucuugaccauuga

SEQ ID NO: 478699 - RNA, 19 nt, Homo sapiens
  misc_RNA (1)...(19): siRNA sense strand
gaccgggaguaugcuguga

SEQ ID NO: 478700 - RNA, 19 nt, Homo sapiens
  misc_RNA (1)...(19): siRNA sense strand
gcugaggccagagcacuuu

SEQ ID NO: 478701 - RNA, 19 nt, Homo sapiens
  misc_RNA (1)...(19): siRNA sense strand
ccacacaaaccgccuagag

SEQ ID NO: 478702 - RNA, 19 nt, Homo sapiens
  misc_RNA (1)...(19): siRNA sense strand
caacugcuucaacaucaau

SEQ ID NO: 478703 - RNA, 19 nt, Homo sapiens
  misc_RNA (1)...(19): siRNA sense strand
gaggaacguggcucuagug

SEQ ID NO: 478704 - RNA, 19 nt, Homo sapiens
  misc_RNA (1)...(19): siRNA sense strand
augaacaggucaacugcuu

SEQ ID NO: 478705 - RNA, 19 nt, Homo sapiens
  misc_RNA (1)...(19): siRNA sense strand
gaaggaacgccagcuccau

SEQ ID NO: 478706 - RNA, 19 nt, Homo sapiens
  misc_RNA (1)...(19): siRNA sense strand
ccucugcuguuaccugagu

SEQ ID NO: 478707 - RNA, 19 nt, Homo sapiens
  misc_RNA (1)...(19): siRNA sense strand
ccagagccauccagaaccu

SEQ ID NO: 478708 - RNA, 19 nt, Homo sapiens
  misc_RNA (1)...(19): siRNA sense strand
ccucaugggccaccucugu

SEQ ID NO: 478709 - RNA, 19 nt, Homo sapiens
  misc_RNA (1)...(19): siRNA sense strand
caucuugaccauugacauc

SEQ ID NO: 478710 - RNA, 19 nt, Homo sapiens
  misc_RNA (1)...(19): siRNA sense strand
gggaguaugcugugaagac

SEQ ID NO: 478711 - RNA, 19 nt, Homo sapiens
  misc_RNA (1)...(19): siRNA sense strand
ugaccugccauuuccagaa

SEQ ID NO: 478712 - RNA, 19 nt, Homo sapiens
  misc_RNA (1)...(19): siRNA sense strand
ugaagacccaccaccacuu

SEQ ID NO: 478713 - RNA, 19 nt, Homo sapiens
  misc_RNA (1)...(19): siRNA sense strand
cagaggaggagaaauuaac

SEQ ID NO: 478714 - RNA, 19 nt, Homo sapiens
  misc_RNA (1)...(19): siRNA sense strand
ugcagaggaggagaaauua

SEQ ID NO: 478715 - RNA, 19 nt, Homo sapiens
  misc_RNA (1)...(19): siRNA sense strand
aaggaacgccagcuccauu

SEQ ID NO: 478716 - RNA, 19 nt, Homo sapiens
  misc_RNA (1)...(19): siRNA sense strand
uuccugggcugauccacaa

SEQ ID NO: 478717 - RNA, 19 nt, Homo sapiens
  misc_RNA (1)...(19): siRNA sense strand
ccaaaucugccuuccuaac

SEQ ID NO: 478718 - RNA, 19 nt, Homo sapiens
  misc_RNA (1)...(19): siRNA sense strand
gacaaucugaaccaaaucu

SEQ ID NO: 478719 - RNA, 19 nt, Homo sapiens
  misc_RNA (1)...(19): siRNA sense strand
agagcagccuuggucuuga

SEQ ID NO: 478720 - RNA, 19 nt, Homo sapiens
  misc_RNA (1)...(19): siRNA sense strand
accaaagaguucucaccaa

SEQ ID NO: 478721 - RNA, 19 nt, Homo sapiens
  misc_RNA (1)...(19): siRNA sense strand
ccaacucccugcugaaaag

SEQ ID NO: 478722 - RNA, 19 nt, Homo sapiens
  misc_RNA (1)...(19): siRNA sense strand
gaacguggcucuagugucu

SEQ ID NO: 478723 - RNA, 19 nt, Homo sapiens
  misc_RNA (1)...(19): siRNA sense strand
gaggagaaauuaaccuuca

SEQ ID NO: 478724 - RNA, 19 nt, Homo sapiens
  misc_RNA (1)...(19): siRNA sense strand
gaaccugaguccuggaaug

SEQ ID NO: 478725 - RNA, 19 nt, Homo sapiens
  misc_RNA (1)...(19): siRNA sense strand
aggauacccuugacaaaua

SEQ ID NO: 478726 - RNA, 19 nt, Homo sapiens
  misc_RNA (1)...(19): siRNA sense strand
aaccaaaucugccuuccua

SEQ ID NO: 478727 - RNA, 19 nt, Homo sapiens
  misc_RNA (1)...(19): siRNA sense strand
ccagagcacuuucaagaag

SEQ ID NO: 478728 - RNA, 19 nt, Homo sapiens
  misc_RNA (1)...(19): siRNA sense strand
cgggacaucuugaccauug

SEQ ID NO: 478729 - RNA, 19 nt, Homo sapiens
  misc_RNA (1)...(19): siRNA sense strand
gugcagaggaggagaaauu

SEQ ID NO: 478730 - RNA, 19 nt, Homo sapiens
  misc_RNA (1)...(19): siRNA sense strand
ucaccaagcauaaacauau

SEQ ID NO: 478731 - RNA, 19 nt, Homo sapiens
  misc_RNA (1)...(19): siRNA sense strand
gaacaggucaacugcuuca

SEQ ID NO: 478732 - RNA, 19 nt, Homo sapiens
  misc_RNA (1)...(19): siRNA sense strand
ggccagagcacuuucaaga

SEQ ID NO: 478733 - RNA, 19 nt, Homo sapiens
  misc_RNA (1)...(19): siRNA sense strand
gaagacccaccaccacuug

SEQ ID NO: 478734 - RNA, 19 nt, Homo sapiens
  misc_RNA (1)...(19): siRNA sense strand
ggaggauacccuugacaaa

SEQ ID NO: 478735 - RNA, 19 nt, Homo sapiens
  misc_RNA (1)...(19): siRNA sense strand
gcagaggaggagaaauuaa

SEQ ID NO: 478736 - RNA, 19 nt, Homo sapiens
  misc_RNA (1)...(19): siRNA sense strand
gggcugauccacaacauga

SEQ ID NO: 478737 - RNA, 19 nt, Homo sapiens
  misc_RNA (1)...(19): siRNA sense strand
gaggauacccuugacaaau

SEQ ID NO: 478738 - RNA, 19 nt, Homo sapiens
  misc_RNA (1)...(19): siRNA sense strand
caccaagcauaaacauauu

SEQ ID NO: 478739 - RNA, 19 nt, Homo sapiens
  misc_RNA (1)...(19): siRNA sense strand
cagcauggcccucccuuug

SEQ ID NO: 478740 - RNA, 19 nt, Homo sapiens
  misc_RNA (1)...(19): siRNA sense strand
aaagaguucucaccaagca

SEQ ID NO: 478741 - RNA, 19 nt, Homo sapiens
  misc_RNA (1)...(19): siRNA sense strand
ucaauuaucugaggaacgu

SEQ ID NO: 478742 - RNA, 19 nt, Homo sapiens
  misc_RNA (1)...(19): siRNA sense strand
ggauacccuugacaaauac

SEQ ID NO: 478743 - RNA, 19 nt, Homo sapiens
  misc_RNA (1)...(19): siRNA sense strand
caggucaacugcuucaaca

SEQ ID NO: 478744 - RNA, 19 nt, Homo sapiens
  misc_RNA (1)...(19): siRNA sense strand
gucaacugcuucaacauca

SEQ ID NO: 478745 - RNA, 19 nt, Homo sapiens
  misc_RNA (1)...(19): siRNA sense strand
gcauggcccucccuuugag

SEQ ID NO: 478746 - RNA, 19 nt, Homo sapiens
  misc_RNA (1)...(19): siRNA sense strand
gcuucaacaucaauuaucu

SEQ ID NO: 478747 - RNA, 19 nt, Homo sapiens
  misc_RNA (1)...(19): siRNA sense strand
ggaccagagccauccagaa

SEQ ID NO: 478748 - RNA, 19 nt, Homo sapiens
  misc_RNA (1)...(19): siRNA sense strand
gagaaauuaaccuucauca

SEQ ID NO: 478749 - RNA, 19 nt, Homo sapiens
  misc_RNA (1)...(19): siRNA sense strand
ccuagagugugccaaacuu

SEQ ID NO: 478750 - RNA, 19 nt, Homo sapiens
  misc_RNA (1)...(19): siRNA sense strand
gaccagagccauccagaac

SEQ ID NO: 478751 - RNA, 19 nt, Homo sapiens
  misc_RNA (1)...(19): siRNA sense strand
gggaugaacaggucaacug

SEQ ID NO: 478752 - RNA, 19 nt, Homo sapiens
  misc_RNA (1)...(19): siRNA sense strand
gggaggauacccuugacaa

SEQ ID NO: 478753 - RNA, 19 nt, Homo sapiens
  misc_RNA (1)...(19): siRNA sense strand
ggucaacugcuucaacauc

SEQ ID NO: 478754 - RNA, 19 nt, Homo sapiens
  misc_RNA (1)...(19): siRNA sense strand
ggaacgccagcuccauuug

SEQ ID NO: 478755 - RNA, 19 nt, Homo sapiens
  misc_RNA (1)...(19): siRNA sense strand
gcugugaccugccauuucc

SEQ ID NO: 478756 - RNA, 19 nt, Homo sapiens
  misc_RNA (1)...(19): siRNA sense strand
cagagcagccuuggucuug

SEQ ID NO: 478757 - RNA, 19 nt, Homo sapiens
  misc_RNA (1)...(19): siRNA sense strand
gaacgccagcuccauuugg

SEQ ID NO: 478758 - RNA, 19 nt, Homo sapiens
  misc_RNA (1)...(19): siRNA sense strand
gcugcuaccugcccaacuc

SEQ ID NO: 478759 - RNA, 19 nt, Homo sapiens
  misc_RNA (1)...(19): siRNA sense strand
ggagaaauuaaccuucauc

SEQ ID NO: 478760 - RNA, 19 nt, Homo sapiens
  misc_RNA (1)...(19): siRNA sense strand
agaguucucaccaagcaua

SEQ ID NO: 478761 - RNA, 19 nt, Homo sapiens
  misc_RNA (1)...(19): siRNA sense strand
gaccugccauuuccagaac

SEQ ID NO: 478762 - RNA, 19 nt, Homo sapiens
  misc_RNA (1)...(19): siRNA sense strand
ugaggaacguggcucuagu

SEQ ID NO: 478763 - RNA, 19 nt, Homo sapiens
  misc_RNA (1)...(19): siRNA sense strand
gccagagcacuuucaagaa

SEQ ID NO: 478764 - RNA, 19 nt, Homo sapiens
  misc_RNA (1)...(19): siRNA sense strand
cuauuuggcuguugcuucu

SEQ ID NO: 478765 - RNA, 19 nt, Homo sapiens
  misc_RNA (1)...(19): siRNA sense strand
gcccaacucccugcugaaa

SEQ ID NO: 478766 - RNA, 19 nt, Homo sapiens
  misc_RNA (1)...(19): siRNA sense strand
acccugcccucugcuguua

SEQ ID NO: 478767 - RNA, 19 nt, Homo sapiens
  misc_RNA (1)...(19): siRNA sense strand
gagcagccuuggucuugac

SEQ ID NO: 478768 - RNA, 19 nt, Homo sapiens
  misc_RNA (1)...(19): siRNA sense strand
gucagcaugugguauaugg

SEQ ID NO: 478769 - RNA, 19 nt, Homo sapiens
  misc_RNA (1)...(19): siRNA sense strand
ucaacugcuucaacaucaa

SEQ ID NO: 478770 - RNA, 19 nt, Homo sapiens
  misc_RNA (1)...(19): siRNA sense strand
ggaaaccaaagaguucuca

SEQ ID NO: 478771 - RNA, 19 nt, Homo sapiens
  misc_RNA (1)...(19): siRNA sense strand
gggacaucuugaccauuga

SEQ ID NO: 478772 - RNA, 19 nt, Homo sapiens
  misc_RNA (1)...(19): siRNA sense strand
gaccgggaguaugcuguga

SEQ ID NO: 478773 - RNA, 19 nt, Homo sapiens
  misc_RNA (1)...(19): siRNA sense strand
gcugaggccagagcacuuu

SEQ ID NO: 478774 - RNA, 19 nt, Homo sapiens
  misc_RNA (1)...(19): siRNA sense strand
ccacacaaaccgccuagag

SEQ ID NO: 478775 - RNA, 19 nt, Homo sapiens
  misc_RNA (1)...(19): siRNA sense strand
caacugcuucaacaucaau

SEQ ID NO: 478776 - RNA, 19 nt, Homo sapiens
  misc_RNA (1)...(19): siRNA sense strand
gaggaacguggcucuagug

SEQ ID NO: 478777 - RNA, 19 nt, Homo sapiens
  misc_RNA (1)...(19): siRNA sense strand
augaacaggucaacugcuu

SEQ ID NO: 478778 - RNA, 19 nt, Homo sapiens
  misc_RNA (1)...(19): siRNA sense strand
gaaggaacgccagcuccau

SEQ ID NO: 478779 - RNA, 19 nt, Homo sapiens
  misc_RNA (1)...(19): siRNA sense strand
ccucugcuguuaccugagu

SEQ ID NO: 478780 - RNA, 19 nt, Homo sapiens
  misc_RNA (1)...(19): siRNA sense strand
ccagagccauccagaaccu

SEQ ID NO: 478781 - RNA, 19 nt, Homo sapiens
  misc_RNA (1)...(19): siRNA sense strand
ccucaugggccaccucugu

SEQ ID NO: 478782 - RNA, 19 nt, Homo sapiens
  misc_RNA (1)...(19): siRNA sense strand
caucuugaccauugacauc

SEQ ID NO: 478783 - RNA, 19 nt, Homo sapiens
  misc_RNA (1)...(19): siRNA sense strand
gggaguaugcugugaagac

SEQ ID NO: 478784 - RNA, 19 nt, Homo sapiens
  misc_RNA (1)...(19): siRNA sense strand
ugaccugccauuuccagaa

SEQ ID NO: 478785 - RNA, 19 nt, Homo sapiens
  misc_RNA (1)...(19): siRNA sense strand
ugaagacccaccaccacuu

SEQ ID NO: 478786 - RNA, 19 nt, Homo sapiens
  misc_RNA (1)...(19): siRNA sense strand
cagaggaggagaaauuaac

SEQ ID NO: 478787 - RNA, 19 nt, Homo sapiens
  misc_RNA (1)...(19): siRNA sense strand
ugcagaggaggagaaauua

SEQ ID NO: 478788 - RNA, 19 nt, Homo sapiens
  misc_RNA (1)...(19): siRNA sense strand
aaggaacgccagcuccauu

SEQ ID NO: 478789 - RNA, 19 nt, Homo sapiens
  misc_RNA (1)...(19): siRNA sense strand
uuccugggcugauccacaa

SEQ ID NO: 478790 - RNA, 19 nt, Homo sapiens
  misc_RNA (1)...(19): siRNA sense strand
ccaaaucugccuuccuaac

SEQ ID NO: 478791 - RNA, 19 nt, Homo sapiens
  misc_RNA (1)...(19): siRNA sense strand
gacaaucugaaccaaaucu

SEQ ID NO: 478792 - RNA, 19 nt, Homo sapiens
  misc_RNA (1)...(19): siRNA sense strand
agagcagccuuggucuuga

SEQ ID NO: 478793 - RNA, 19 nt, Homo sapiens
  misc_RNA (1)...(19): siRNA sense strand
accaaagaguucucaccaa

SEQ ID NO: 478794 - RNA, 19 nt, Homo sapiens
  misc_RNA (1)...(19): siRNA sense strand
ccaacucccugcugaaaag

SEQ ID NO: 478795 - RNA, 19 nt, Homo sapiens
  misc_RNA (1)...(19): siRNA sense strand
gaaagagccugaugauuau

SEQ ID NO: 478796 - RNA, 19 nt, Homo sapiens
  misc_RNA (1)...(19): siRNA sense strand
gaaagaaggugagauguau

SEQ ID NO: 478797 - RNA, 19 nt, Homo sapiens
  misc_RNA (1)...(19): siRNA sense strand
gaauuagacuugaaggaua

SEQ ID NO: 478798 - RNA, 19 nt, Homo sapiens
  misc_RNA (1)...(19): siRNA sense strand
agaaagagccugaugauua

SEQ ID NO: 478799 - RNA, 19 nt, Homo sapiens
  misc_RNA (1)...(19): siRNA sense strand
acaaagagaucuccguaua

SEQ ID NO: 478800 - RNA, 19 nt, Homo sapiens
  misc_RNA (1)...(19): siRNA sense strand
gaaauuggcucugcuguca

SEQ ID NO: 478801 - RNA, 19 nt, Homo sapiens
  misc_RNA (1)...(19): siRNA sense strand
caagaacuuuccaguauuu

SEQ ID NO: 478802 - RNA, 19 nt, Homo sapiens
  misc_RNA (1)...(19): siRNA sense strand
gcaaauaacuguguagaag

SEQ ID NO: 478803 - RNA, 19 nt, Homo sapiens
  misc_RNA (1)...(19): siRNA sense strand
gcagagagcucaccuacca

SEQ ID NO: 478804 - RNA, 19 nt, Homo sapiens
  misc_RNA (1)...(19): siRNA sense strand
gcagauggcuacucagaga

SEQ ID NO: 478805 - RNA, 19 nt, Homo sapiens
  misc_RNA (1)...(19): siRNA sense strand
gaaguaaccagauccagua

SEQ ID NO: 478806 - RNA, 19 nt, Homo sapiens
  misc_RNA (1)...(19): siRNA sense strand
gaaagagggagauaaugua

SEQ ID NO: 478807 - RNA, 19 nt, Homo sapiens
  misc_RNA (1)...(19): siRNA sense strand
gcagacauccaaauagaua

SEQ ID NO: 478808 - RNA, 19 nt, Homo sapiens
  misc_RNA (1)...(19): siRNA sense strand
guaacaaccuuuaagacaa

SEQ ID NO: 478809 - RNA, 19 nt, Homo sapiens
  misc_RNA (1)...(19): siRNA sense strand
gaaacgaugguucugcuua

SEQ ID NO: 478810 - RNA, 19 nt, Homo sapiens
  misc_RNA (1)...(19): siRNA sense strand
uaaaagagcucaaggaaga

SEQ ID NO: 478811 - RNA, 19 nt, Homo sapiens
  misc_RNA (1)...(19): siRNA sense strand
aaagaagacuuguguaauc

SEQ ID NO: 478812 - RNA, 19 nt, Homo sapiens
  misc_RNA (1)...(19): siRNA sense strand
guacuaugguccuuugaaa

SEQ ID NO: 478813 - RNA, 19 nt, Homo sapiens
  misc_RNA (1)...(19): siRNA sense strand
gcaauccgcaguuuaauga

SEQ ID NO: 478814 - RNA, 19 nt, Homo sapiens
  misc_RNA (1)...(19): siRNA sense strand
ggaagaggcuuguggaacu

SEQ ID NO: 478815 - RNA, 19 nt, Homo sapiens
  misc_RNA (1)...(19): siRNA sense strand
guaaccagauccaguaguu

SEQ ID NO: 478816 - RNA, 19 nt, Homo sapiens
  misc_RNA (1)...(19): siRNA sense strand
gcagugagcagcuuuguau

SEQ ID NO: 478817 - RNA, 19 nt, Homo sapiens
  misc_RNA (1)...(19): siRNA sense strand
gaagaacucggauuggaaa

SEQ ID NO: 478818 - RNA, 19 nt, Homo sapiens
  misc_RNA (1)...(19): siRNA sense strand
gaagaggcuuguggaacua

SEQ ID NO: 478819 - RNA, 19 nt, Homo sapiens
  misc_RNA (1)...(19): siRNA sense strand
gauuguuucuguaccauaa

SEQ ID NO: 478820 - RNA, 19 nt, Homo sapiens
  misc_RNA (1)...(19): siRNA sense strand
caagcaauccgcaguuuaa

SEQ ID NO: 478821 - RNA, 19 nt, Homo sapiens
  misc_RNA (1)...(19): siRNA sense strand
gaagacagagaaacagaaa

SEQ ID NO: 478822 - RNA, 19 nt, Homo sapiens
  misc_RNA (1)...(19): siRNA sense strand
acucagagauuuccuaaug

SEQ ID NO: 478823 - RNA, 19 nt, Homo sapiens
  misc_RNA (1)...(19): siRNA sense strand
cauuaacucucaucucaaa

SEQ ID NO: 478824 - RNA, 19 nt, Homo sapiens
  misc_RNA (1)...(19): siRNA sense strand
ccaagaacuuuccaguauu

SEQ ID NO: 478825 - RNA, 19 nt, Homo sapiens
  misc_RNA (1)...(19): siRNA sense strand
ggaaacaagucauccaaaa

SEQ ID NO: 478826 - RNA, 19 nt, Homo sapiens
  misc_RNA (1)...(19): siRNA sense strand
agugaaauaugucgagaua

SEQ ID NO: 478827 - RNA, 19 nt, Homo sapiens
  misc_RNA (1)...(19): siRNA sense strand
aaacgaugguucugcuuaa

SEQ ID NO: 478828 - RNA, 19 nt, Homo sapiens
  misc_RNA (1)...(19): siRNA sense strand
ccaaagcugugacccuuau

SEQ ID NO: 478829 - RNA, 19 nt, Homo sapiens
  misc_RNA (1)...(19): siRNA sense strand
ccagaugcacagacaauua

SEQ ID NO: 478830 - RNA, 19 nt, Homo sapiens
  misc_RNA (1)...(19): siRNA sense strand
uccaagaacuuuccaguau

SEQ ID NO: 478831 - RNA, 19 nt, Homo sapiens
  misc_RNA (1)...(19): siRNA sense strand
aaugagagauuguuucugu

SEQ ID NO: 478832 - RNA, 19 nt, Homo sapiens
  misc_RNA (1)...(19): siRNA sense strand
agagggagauaauguagaa

SEQ ID NO: 478833 - RNA, 19 nt, Homo sapiens
  misc_RNA (1)...(19): siRNA sense strand
gcaagucaaguuucaaaga

SEQ ID NO: 478834 - RNA, 19 nt, Homo sapiens
  misc_RNA (1)...(19): siRNA sense strand
uaaggcagauggcuacuca

SEQ ID NO: 478835 - RNA, 19 nt, Homo sapiens
  misc_RNA (1)...(19): siRNA sense strand
gcacagacaauuagaacau

SEQ ID NO: 478836 - RNA, 19 nt, Homo sapiens
  misc_RNA (1)...(19): siRNA sense strand
ugaaagaaggugagaugua

SEQ ID NO: 478837 - RNA, 19 nt, Homo sapiens
  misc_RNA (1)...(19): siRNA sense strand
gagauuaagguuccuguga

SEQ ID NO: 478838 - RNA, 19 nt, Homo sapiens
  misc_RNA (1)...(19): siRNA sense strand
caagaugcaaacacaauuu

SEQ ID NO: 478839 - RNA, 19 nt, Homo sapiens
  misc_RNA (1)...(19): siRNA sense strand
cagagaaacagaaagaauu

SEQ ID NO: 478840 - RNA, 19 nt, Homo sapiens
  misc_RNA (1)...(19): siRNA sense strand
uguagaagcuaaugaaugg

SEQ ID NO: 478841 - RNA, 19 nt, Homo sapiens
  misc_RNA (1)...(19): siRNA sense strand
ggaagaacucggauuggaa

SEQ ID NO: 478842 - RNA, 19 nt, Homo sapiens
  misc_RNA (1)...(19): siRNA sense strand
caaggaagaacucggauug

SEQ ID NO: 478843 - RNA, 19 nt, Homo sapiens
  misc_RNA (1)...(19): siRNA sense strand
ugugaaaucgauccuauua

SEQ ID NO: 478844 - RNA, 19 nt, Homo sapiens
  misc_RNA (1)...(19): siRNA sense strand
gcaccaugauaaacuuguu

SEQ ID NO: 478845 - RNA, 19 nt, Homo sapiens
  misc_RNA (1)...(19): siRNA sense strand
auucagagguucaggguaa

SEQ ID NO: 478846 - RNA, 19 nt, Homo sapiens
  misc_RNA (1)...(19): siRNA sense strand
ggcaagaucugugaagcaa

SEQ ID NO: 478847 - RNA, 19 nt, Homo sapiens
  misc_RNA (1)...(19): siRNA sense strand
caagucaaguuucaaagag

SEQ ID NO: 478848 - RNA, 19 nt, Homo sapiens
  misc_RNA (1)...(19): siRNA sense strand
aacauuaacucucaucuca

SEQ ID NO: 478849 - RNA, 19 nt, Homo sapiens
  misc_RNA (1)...(19): siRNA sense strand
gccguaguaucaccucaua

SEQ ID NO: 478850 - RNA, 19 nt, Homo sapiens
  misc_RNA (1)...(19): siRNA sense strand
gaagaggaggacauugaaa

SEQ ID NO: 478851 - RNA, 19 nt, Homo sapiens
  misc_RNA (1)...(19): siRNA sense strand
gaacugauaacggagaaug

SEQ ID NO: 478852 - RNA, 19 nt, Homo sapiens
  misc_RNA (1)...(19): siRNA sense strand
ggagaaaccacucuauguc

SEQ ID NO: 478853 - RNA, 19 nt, Homo sapiens
  misc_RNA (1)...(19): siRNA sense strand
gugagcagcuuuguauuuc

SEQ ID NO: 478854 - RNA, 19 nt, Homo sapiens
  misc_RNA (1)...(19): siRNA sense strand
guggaacaauggaaaccua

SEQ ID NO: 478855 - RNA, 19 nt, Homo sapiens
  misc_RNA (1)...(19): siRNA sense strand
gaacuauugcagucuauca

SEQ ID NO: 478856 - RNA, 19 nt, Homo sapiens
  misc_RNA (1)...(19): siRNA sense strand
uagaagaggaggacauuga

SEQ ID NO: 478857 - RNA, 19 nt, Homo sapiens
  misc_RNA (1)...(19): siRNA sense strand
cugcagacauccaaauaga

SEQ ID NO: 478858 - RNA, 19 nt, Homo sapiens
  misc_RNA (1)...(19): siRNA sense strand
gugagccgaugcaaucaaa

SEQ ID NO: 478859 - RNA, 19 nt, Homo sapiens
  misc_RNA (1)...(19): siRNA sense strand
ugaaagagggagauaaugu

SEQ ID NO: 478860 - RNA, 19 nt, Homo sapiens
  misc_RNA (1)...(19): siRNA sense strand
ggagggcacuaccugaaag

SEQ ID NO: 478861 - RNA, 19 nt, Homo sapiens
  misc_RNA (1)...(19): siRNA sense strand
caagaucugugaagcaaaa

SEQ ID NO: 478862 - RNA, 19 nt, Homo sapiens
  misc_RNA (1)...(19): siRNA sense strand
ggaccaggaagaaguuuau

SEQ ID NO: 478863 - RNA, 19 nt, Homo sapiens
  misc_RNA (1)...(19): siRNA sense strand
acuaaagaguccaguggua

SEQ ID NO: 478864 - RNA, 19 nt, Homo sapiens
  misc_RNA (1)...(19): siRNA sense strand
ugccucagcugcuuacauu

SEQ ID NO: 478865 - RNA, 19 nt, Homo sapiens
  misc_RNA (1)...(19): siRNA sense strand
caccagauguucaaccaau

SEQ ID NO: 478866 - RNA, 19 nt, Homo sapiens
  misc_RNA (1)...(19): siRNA sense strand
gaaaccuaguccaagaugu

SEQ ID NO: 478867 - RNA, 19 nt, Homo sapiens
  misc_RNA (1)...(19): siRNA sense strand
gccagcagcuuguuguaca

SEQ ID NO: 478868 - RNA, 19 nt, Homo sapiens
  misc_RNA (1)...(19): siRNA sense strand
agacagagaaacagaaaga

SEQ ID NO: 478869 - RNA, 19 nt, Homo sapiens
  misc_RNA (1)...(19): siRNA sense strand
ccaggcaaauaacugugua

SEQ ID NO: 478870 - RNA, 19 nt, Homo sapiens
  misc_RNA (1)...(19): siRNA sense strand
aaacauucuugcuguggaa

SEQ ID NO: 478871 - RNA, 19 nt, Homo sapiens
  misc_RNA (1)...(19): siRNA sense strand
ccacaaacagccaggcaaa

SEQ ID NO: 478872 - RNA, 19 nt, Homo sapiens
  misc_RNA (1)...(19): siRNA sense strand
gaaucugcgcuacuaugua

SEQ ID NO: 478873 - RNA, 19 nt, Homo sapiens
  misc_RNA (1)...(19): siRNA sense strand
gggcacuaccugaaaguaa

SEQ ID NO: 478874 - RNA, 19 nt, Homo sapiens
  misc_RNA (1)...(19): siRNA sense strand
aaagagaucuccguauagg

SEQ ID NO: 478875 - RNA, 19 nt, Homo sapiens
  misc_RNA (1)...(19): siRNA sense strand
caaggaaaauccaauuguu

SEQ ID NO: 478876 - RNA, 19 nt, Homo sapiens
  misc_RNA (1)...(19): siRNA sense strand
uaauugagaagcuggauga

SEQ ID NO: 478877 - RNA, 19 nt, Homo sapiens
  misc_RNA (1)...(19): siRNA sense strand
gauggcuacucagagauuu

SEQ ID NO: 478878 - RNA, 19 nt, Homo sapiens
  misc_RNA (1)...(19): siRNA sense strand
agauuaagguuccugugaa

SEQ ID NO: 478879 - RNA, 19 nt, Homo sapiens
  misc_RNA (1)...(19): siRNA sense strand
gagaaucugcgcuacuaug

SEQ ID NO: 478880 - RNA, 19 nt, Homo sapiens
  misc_RNA (1)...(19): siRNA sense strand
uacuuaagcugcagaagau

SEQ ID NO: 478881 - RNA, 19 nt, Homo sapiens
  misc_RNA (1)...(19): siRNA sense strand
aagaagacuuguguaauca

SEQ ID NO: 478882 - RNA, 19 nt, Homo sapiens
  misc_RNA (1)...(19): siRNA sense strand
guggaacuauugcagucua

SEQ ID NO: 478883 - RNA, 19 nt, Homo sapiens
  misc_RNA (1)...(19): siRNA sense strand
caaagagaucuccguauag

SEQ ID NO: 478884 - RNA, 19 nt, Homo sapiens
  misc_RNA (1)...(19): siRNA sense strand
gagcucaccuaccacaaac

SEQ ID NO: 478885 - RNA, 19 nt, Homo sapiens
  misc_RNA (1)...(19): siRNA sense strand
aagaaggugagauguauaa

SEQ ID NO: 478886 - RNA, 19 nt, Homo sapiens
  misc_RNA (1)...(19): siRNA sense strand
aggagaaucugcgcuacua

SEQ ID NO: 478887 - RNA, 19 nt, Homo sapiens
  misc_RNA (1)...(19): siRNA sense strand
ggaaaccuaguccaagaug

SEQ ID NO: 478888 - RNA, 19 nt, Homo sapiens
  misc_RNA (1)...(19): siRNA sense strand
gaacaauggaaaccuaguc

SEQ ID NO: 478889 - RNA, 19 nt, Homo sapiens
  misc_RNA (1)...(19): siRNA sense strand
gaacuuuccaguauuuguc

SEQ ID NO: 478890 - RNA, 19 nt, Homo sapiens
  misc_RNA (1)...(19): siRNA sense strand
ugacuccaauucagagguu

SEQ ID NO: 478891 - RNA, 19 nt, Homo sapiens
  misc_RNA (1)...(19): siRNA sense strand
uaaucacaguggcaaagaa

SEQ ID NO: 478892 - RNA, 19 nt, Homo sapiens
  misc_RNA (1)...(19): siRNA sense strand
gaacauuaacucucaucuc

SEQ ID NO: 478893 - RNA, 19 nt, Homo sapiens
  misc_RNA (1)...(19): siRNA sense strand
agaagcuaaugaauggaua

SEQ ID NO: 478894 - RNA, 19 nt, Homo sapiens
  misc_RNA (1)...(19): siRNA sense strand
agauauugaugaagacaga

SEQ ID NO: 478895 - RNA, 19 nt, Homo sapiens
  misc_RNA (1)...(19): siRNA sense strand
gagccaugcuagccaauaa

SEQ ID NO: 478896 - RNA, 19 nt, Homo sapiens
  misc_RNA (1)...(19): siRNA sense strand
agaaagcagcgaaggaaua

SEQ ID NO: 478897 - RNA, 19 nt, Homo sapiens
  misc_RNA (1)...(19): siRNA sense strand
gaaagcagcgaaggaauag

SEQ ID NO: 478898 - RNA, 19 nt, Homo sapiens
  misc_RNA (1)...(19): siRNA sense strand
gugcaggugugguuucaga

SEQ ID NO: 478899 - RNA, 19 nt, Homo sapiens
  misc_RNA (1)...(19): siRNA sense strand
ggaauaggacaaccuucaa

SEQ ID NO: 478900 - RNA, 19 nt, Homo sapiens
  misc_RNA (1)...(19): siRNA sense strand
gaauaggacaaccuucaau

SEQ ID NO: 478901 - RNA, 19 nt, Homo sapiens
  misc_RNA (1)...(19): siRNA sense strand
aauaggacaaccuucaaua

SEQ ID NO: 478902 - RNA, 19 nt, Homo sapiens
  misc_RNA (1)...(19): siRNA sense strand
cacacuauccugaugcuuu

SEQ ID NO: 478903 - RNA, 19 nt, Homo sapiens
  misc_RNA (1)...(19): siRNA sense strand
gaaugagagagccaugcua

SEQ ID NO: 478904 - RNA, 19 nt, Homo sapiens
  misc_RNA (1)...(19): siRNA sense strand
gcuccgagacccaccgauu

SEQ ID NO: 478905 - RNA, 19 nt, Homo sapiens
  misc_RNA (1)...(19): siRNA sense strand
ggacagcgucuccguacag

SEQ ID NO: 478906 - RNA, 19 nt, Homo sapiens
  misc_RNA (1)...(19): siRNA sense strand
gagugcaggugugguuuca

SEQ ID NO: 478907 - RNA, 19 nt, Homo sapiens
  misc_RNA (1)...(19): siRNA sense strand
agagaaagcagcgaaggaa

SEQ ID NO: 478908 - RNA, 19 nt, Homo sapiens
  misc_RNA (1)...(19): siRNA sense strand
acgcuucccuccucaaauc

SEQ ID NO: 478909 - RNA, 19 nt, Homo sapiens
  misc_RNA (1)...(19): siRNA sense strand
gagaaagcagcgaaggaau

SEQ ID NO: 478910 - RNA, 19 nt, Homo sapiens
  misc_RNA (1)...(19): siRNA sense strand
aggacaaccuucaauagca

SEQ ID NO: 478911 - RNA, 19 nt, Homo sapiens
  misc_RNA (1)...(19): siRNA sense strand
cgagagugcaggugugguu

SEQ ID NO: 478912 - RNA, 19 nt, Homo sapiens
  misc_RNA (1)...(19): siRNA sense strand
aaacgcuucccuccucaaa

SEQ ID NO: 478913 - RNA, 19 nt, Homo sapiens
  misc_RNA (1)...(19): siRNA sense strand
cggcacaggcggaugagaa

SEQ ID NO: 478914 - RNA, 19 nt, Homo sapiens
  misc_RNA (1)...(19): siRNA sense strand
cuccgagacccaccgauua

SEQ ID NO: 478915 - RNA, 19 nt, Homo sapiens
  misc_RNA (1)...(19): siRNA sense strand
cggacacacuauccugaug

SEQ ID NO: 478916 - RNA, 19 nt, Homo sapiens
  misc_RNA (1)...(19): siRNA sense strand
acacuauccugaugcuuuu

SEQ ID NO: 478917 - RNA, 19 nt, Homo sapiens
  misc_RNA (1)...(19): siRNA sense strand
ggaaugagagagccaugcu

SEQ ID NO: 478918 - RNA, 19 nt, Homo sapiens
  misc_RNA (1)...(19): siRNA sense strand
gagagugcaggugugguuu

SEQ ID NO: 478919 - RNA, 19 nt, Homo sapiens
  misc_RNA (1)...(19): siRNA sense strand
aagcagcgaaggaauagga

SEQ ID NO: 478920 - RNA, 19 nt, Homo sapiens
  misc_RNA (1)...(19): siRNA sense strand
ggacaaugaccagcugaac

SEQ ID NO: 478921 - RNA, 19 nt, Homo sapiens
  misc_RNA (1)...(19): siRNA sense strand
acaaugaccagcugaacuc

SEQ ID NO: 478922 - RNA, 19 nt, Homo sapiens
  misc_RNA (1)...(19): siRNA sense strand
gacaaugaccagcugaacu

SEQ ID NO: 478923 - RNA, 19 nt, Homo sapiens
  misc_RNA (1)...(19): siRNA sense strand
cagcgaaggaauaggacaa

SEQ ID NO: 478924 - RNA, 19 nt, Homo sapiens
  misc_RNA (1)...(19): siRNA sense strand
ucuuugagcggacacacua

SEQ ID NO: 478925 - RNA, 19 nt, Homo sapiens
  misc_RNA (1)...(19): siRNA sense strand
gagccaugcuagccaauaa

SEQ ID NO: 478926 - RNA, 19 nt, Homo sapiens
  misc_RNA (1)...(19): siRNA sense strand
caacauggccaacagcauu

SEQ ID NO: 478927 - RNA, 19 nt, Homo sapiens
  misc_RNA (1)...(19): siRNA sense strand
ggccaaggaauauaguuua

SEQ ID NO: 478928 - RNA, 19 nt, Homo sapiens
  misc_RNA (1)...(19): siRNA sense strand
ggaaccaggugccaacagu

SEQ ID NO: 478929 - RNA, 19 nt, Homo sapiens
  misc_RNA (1)...(19): siRNA sense strand
agaaagcagcgaaggaaua

SEQ ID NO: 478930 - RNA, 19 nt, Homo sapiens
  misc_RNA (1)...(19): siRNA sense strand
gaaagcagcgaaggaauag

SEQ ID NO: 478931 - RNA, 19 nt, Homo sapiens
  misc_RNA (1)...(19): siRNA sense strand
gacugaaggccaaggaaua

SEQ ID NO: 478932 - RNA, 19 nt, Homo sapiens
  misc_RNA (1)...(19): siRNA sense strand
gugcaggugugguuucaga

SEQ ID NO: 478933 - RNA, 19 nt, Homo sapiens
  misc_RNA (1)...(19): siRNA sense strand
caaggaauauaguuuacag

SEQ ID NO: 478934 - RNA, 19 nt, Homo sapiens
  misc_RNA (1)...(19): siRNA sense strand
ccacaugugccaacaauag

SEQ ID NO: 478935 - RNA, 19 nt, Homo sapiens
  misc_RNA (1)...(19): siRNA sense strand
ggaauaggacaaccuucaa

SEQ ID NO: 478936 - RNA, 19 nt, Homo sapiens
  misc_RNA (1)...(19): siRNA sense strand
gaauaggacaaccuucaau

SEQ ID NO: 478937 - RNA, 19 nt, Homo sapiens
  misc_RNA (1)...(19): siRNA sense strand
aauaggacaaccuucaaua

SEQ ID NO: 478938 - RNA, 19 nt, Homo sapiens
  misc_RNA (1)...(19): siRNA sense strand
cacacuauccugaugcuuu

SEQ ID NO: 478939 - RNA, 19 nt, Homo sapiens
  misc_RNA (1)...(19): siRNA sense strand
gaaugagagagccaugcua

SEQ ID NO: 478940 - RNA, 19 nt, Homo sapiens
  misc_RNA (1)...(19): siRNA sense strand
gccaaggaauauaguuuac

SEQ ID NO: 478941 - RNA, 19 nt, Homo sapiens
  misc_RNA (1)...(19): siRNA sense strand
gcuccgagacccaccgauu

SEQ ID NO: 478942 - RNA, 19 nt, Homo sapiens
  misc_RNA (1)...(19): siRNA sense strand
ggacagcgucuccguacag

SEQ ID NO: 478943 - RNA, 19 nt, Homo sapiens
  misc_RNA (1)...(19): siRNA sense strand
gagugcaggugugguuuca

SEQ ID NO: 478944 - RNA, 19 nt, Homo sapiens
  misc_RNA (1)...(19): siRNA sense strand
gcaucaacauggccaacag

SEQ ID NO: 478945 - RNA, 19 nt, Homo sapiens
  misc_RNA (1)...(19): siRNA sense strand
cgccauggcuacuuauucu

SEQ ID NO: 478946 - RNA, 19 nt, Homo sapiens
  misc_RNA (1)...(19): siRNA sense strand
agagaaagcagcgaaggaa

SEQ ID NO: 478947 - RNA, 19 nt, Homo sapiens
  misc_RNA (1)...(19): siRNA sense strand
acgcuucccuccucaaauc

SEQ ID NO: 478948 - RNA, 19 nt, Homo sapiens
  misc_RNA (1)...(19): siRNA sense strand
gagaaagcagcgaaggaau

SEQ ID NO: 478949 - RNA, 19 nt, Homo sapiens
  misc_RNA (1)...(19): siRNA sense strand
aggacaaccuucaauagca

SEQ ID NO: 478950 - RNA, 19 nt, Homo sapiens
  misc_RNA (1)...(19): siRNA sense strand
cagcauugccaaccugaga

SEQ ID NO: 478951 - RNA, 19 nt, Homo sapiens
  misc_RNA (1)...(19): siRNA sense strand
cgagagugcaggugugguu

SEQ ID NO: 478952 - RNA, 19 nt, Homo sapiens
  misc_RNA (1)...(19): siRNA sense strand
cuacuuauucugccacaug

SEQ ID NO: 478953 - RNA, 19 nt, Homo sapiens
  misc_RNA (1)...(19): siRNA sense strand
cggcacaggcggaugagaa

SEQ ID NO: 478954 - RNA, 19 nt, Homo sapiens
  misc_RNA (1)...(19): siRNA sense strand
aaacgcuucccuccucaaa

SEQ ID NO: 478955 - RNA, 19 nt, Homo sapiens
  misc_RNA (1)...(19): siRNA sense strand
cuccgagacccaccgauua

SEQ ID NO: 478956 - RNA, 19 nt, Homo sapiens
  misc_RNA (1)...(19): siRNA sense strand
ugaaggccaaggaauauag

SEQ ID NO: 478957 - RNA, 19 nt, Homo sapiens
  misc_RNA (1)...(19): siRNA sense strand
cggacacacuauccugaug

SEQ ID NO: 478958 - RNA, 19 nt, Homo sapiens
  misc_RNA (1)...(19): siRNA sense strand
gaaggccaaggaauauagu

SEQ ID NO: 478959 - RNA, 19 nt, Homo sapiens
  misc_RNA (1)...(19): siRNA sense strand
ugccacaugugccaacaau

SEQ ID NO: 478960 - RNA, 19 nt, Homo sapiens
  misc_RNA (1)...(19): siRNA sense strand
acacuauccugaugcuuuu

SEQ ID NO: 478961 - RNA, 19 nt, Homo sapiens
  misc_RNA (1)...(19): siRNA sense strand
gcgccauggcuacuuauuc

SEQ ID NO: 478962 - RNA, 19 nt, Homo sapiens
  misc_RNA (1)...(19): siRNA sense strand
ggaaugagagagccaugcu

SEQ ID NO: 478963 - RNA, 19 nt, Homo sapiens
  misc_RNA (1)...(19): siRNA sense strand
gagagugcaggugugguuu

SEQ ID NO: 478964 - RNA, 19 nt, Homo sapiens
  misc_RNA (1)...(19): siRNA sense strand
aagcagcgaaggaauagga

SEQ ID NO: 478965 - RNA, 19 nt, Homo sapiens
  misc_RNA (1)...(19): siRNA sense strand
ggacaaugaccagcugaac

SEQ ID NO: 478966 - RNA, 19 nt, Homo sapiens
  misc_RNA (1)...(19): siRNA sense strand
acaaugaccagcugaacuc

SEQ ID NO: 478967 - RNA, 19 nt, Homo sapiens
  misc_RNA (1)...(19): siRNA sense strand
gagacugaaggccaaggaa

SEQ ID NO: 478968 - RNA, 19 nt, Homo sapiens
  misc_RNA (1)...(19): siRNA sense strand
gacaaugaccagcugaacu

SEQ ID NO: 478969 - RNA, 19 nt, Homo sapiens
  misc_RNA (1)...(19): siRNA sense strand
cagcgaaggaauaggacaa

SEQ ID NO: 478970 - RNA, 19 nt, Homo sapiens
  misc_RNA (1)...(19): siRNA sense strand
ucuuugagcggacacacua

SEQ ID NO: 478971 - RNA, 19 nt, Homo sapiens
  misc_RNA (1)...(19): siRNA sense strand
gagaagagauggcaagaaa

SEQ ID NO: 478972 - RNA, 19 nt, Homo sapiens
  misc_RNA (1)...(19): siRNA sense strand
caacaaaggugucauagga

SEQ ID NO: 478973 - RNA, 19 nt, Homo sapiens
  misc_RNA (1)...(19): siRNA sense strand
gaucaaagcuuaccgagau

SEQ ID NO: 478974 - RNA, 19 nt, Homo sapiens
  misc_RNA (1)...(19): siRNA sense strand
gggcaaugcuggcacgaua

SEQ ID NO: 478975 - RNA, 19 nt, Homo sapiens
  misc_RNA (1)...(19): siRNA sense strand
gaccaaggaggacaaauua

SEQ ID NO: 478976 - RNA, 19 nt, Homo sapiens
  misc_RNA (1)...(19): siRNA sense strand
gaagagauggcaagaaaga

SEQ ID NO: 478977 - RNA, 19 nt, Homo sapiens
  misc_RNA (1)...(19): siRNA sense strand
gagagggacuucagagaug

SEQ ID NO: 478978 - RNA, 19 nt, Homo sapiens
  misc_RNA (1)...(19): siRNA sense strand
ccaaggaggacaaauuaaa

SEQ ID NO: 478979 - RNA, 19 nt, Homo sapiens
  misc_RNA (1)...(19): siRNA sense strand
gcuacgccuucaucgaaua

SEQ ID NO: 478980 - RNA, 19 nt, Homo sapiens
  misc_RNA (1)...(19): siRNA sense strand
gcugauggccugguuauug

SEQ ID NO: 478981 - RNA, 19 nt, Homo sapiens
  misc_RNA (1)...(19): siRNA sense strand
gaaggaaagaggcaaguag

SEQ ID NO: 478982 - RNA, 19 nt, Homo sapiens
  misc_RNA (1)...(19): siRNA sense strand
ugaccagcaugagauauuu

SEQ ID NO: 478983 - RNA, 19 nt, Homo sapiens
  misc_RNA (1)...(19): siRNA sense strand
gggcuacgccuucaucgaa

SEQ ID NO: 478984 - RNA, 19 nt, Homo sapiens
  misc_RNA (1)...(19): siRNA sense strand
gacaagggaucgagaccau

SEQ ID NO: 478985 - RNA, 19 nt, Homo sapiens
  misc_RNA (1)...(19): siRNA sense strand
gugccgugaucaaagcuua

SEQ ID NO: 478986 - RNA, 19 nt, Homo sapiens
  misc_RNA (1)...(19): siRNA sense strand
cugauggccugguuauuga

SEQ ID NO: 478987 - RNA, 19 nt, Homo sapiens
  misc_RNA (1)...(19): siRNA sense strand
caagggaucgagaccauga

SEQ ID NO: 478988 - RNA, 19 nt, Homo sapiens
  misc_RNA (1)...(19): siRNA sense strand
gggacuuggucacagguuu

SEQ ID NO: 478989 - RNA, 19 nt, Homo sapiens
  misc_RNA (1)...(19): siRNA sense strand
ggaggacaaauuaaaggaa

SEQ ID NO: 478990 - RNA, 19 nt, Homo sapiens
  misc_RNA (1)...(19): siRNA sense strand
gcauugauggcaccgauga

SEQ ID NO: 478991 - RNA, 19 nt, Homo sapiens
  misc_RNA (1)...(19): siRNA sense strand
ggagggagaagaaggaaag

SEQ ID NO: 478992 - RNA, 19 nt, Homo sapiens
  misc_RNA (1)...(19): siRNA sense strand
ggguguggcccgacaauga

SEQ ID NO: 478993 - RNA, 19 nt, Homo sapiens
  misc_RNA (1)...(19): siRNA sense strand
gcaaugcuggcacgauaug

SEQ ID NO: 478994 - RNA, 19 nt, Homo sapiens
  misc_RNA (1)...(19): siRNA sense strand
gagagagggacuucagaga

SEQ ID NO: 478995 - RNA, 19 nt, Homo sapiens
  misc_RNA (1)...(19): siRNA sense strand
gacuaaacuugcagaccaa

SEQ ID NO: 478996 - RNA, 19 nt, Homo sapiens
  misc_RNA (1)...(19): siRNA sense strand
agaccaaggaggacaaauu

SEQ ID NO: 478997 - RNA, 19 nt, Homo sapiens
  misc_RNA (1)...(19): siRNA sense strand
caaggaggacaaauuaaag

SEQ ID NO: 478998 - RNA, 19 nt, Homo sapiens
  misc_RNA (1)...(19): siRNA sense strand
ucgaaaaccuauuaacuug

SEQ ID NO: 478999 - RNA, 19 nt, Homo sapiens
  misc_RNA (1)...(19): siRNA sense strand
ggagaagagauggcaagaa

SEQ ID NO: 479000 - RNA, 19 nt, Homo sapiens
  misc_RNA (1)...(19): siRNA sense strand
ggagagagagagggacuuc

SEQ ID NO: 479001 - RNA, 19 nt, Homo sapiens
  misc_RNA (1)...(19): siRNA sense strand
acucaaagcgggcagcauu

SEQ ID NO: 479002 - RNA, 19 nt, Homo sapiens
  misc_RNA (1)...(19): siRNA sense strand
ugagauauuuguggacuac

SEQ ID NO: 479003 - RNA, 19 nt, Homo sapiens
  misc_RNA (1)...(19): siRNA sense strand
gagagagagggacuucaga

SEQ ID NO: 479004 - RNA, 19 nt, Homo sapiens
  misc_RNA (1)...(19): siRNA sense strand
aaaggagucugggcaacug

SEQ ID NO: 479005 - RNA, 19 nt, Homo sapiens
  misc_RNA (1)...(19): siRNA sense strand
agagggacuucagagauga

SEQ ID NO: 479006 - RNA, 19 nt, Homo sapiens
  misc_RNA (1)...(19): siRNA sense strand
ggagcgugccgugaucaaa

SEQ ID NO: 479007 - RNA, 19 nt, Homo sapiens
  misc_RNA (1)...(19): siRNA sense strand
agagauggcaagaaagaga

SEQ ID NO: 479008 - RNA, 19 nt, Homo sapiens
  misc_RNA (1)...(19): siRNA sense strand
gagcuggaaaggacucuca

SEQ ID NO: 479009 - RNA, 19 nt, Homo sapiens
  misc_RNA (1)...(19): siRNA sense strand
gagcgugccgugaucaaag

SEQ ID NO: 479010 - RNA, 19 nt, Homo sapiens
  misc_RNA (1)...(19): siRNA sense strand
guuauugaccagcaugaga

SEQ ID NO: 479011 - RNA, 19 nt, Homo sapiens
  misc_RNA (1)...(19): siRNA sense strand
ggacaaauuaaaggaaguc

SEQ ID NO: 479012 - RNA, 19 nt, Homo sapiens
  misc_RNA (1)...(19): siRNA sense strand
cgacaaugacugggagaga

SEQ ID NO: 479013 - RNA, 19 nt, Homo sapiens
  misc_RNA (1)...(19): siRNA sense strand
gcccaucgccaaggaguau

SEQ ID NO: 479014 - RNA, 19 nt, Homo sapiens
  misc_RNA (1)...(19): siRNA sense strand
gcuggaaaggacucucaaa

SEQ ID NO: 479015 - RNA, 19 nt, Homo sapiens
  misc_RNA (1)...(19): siRNA sense strand
gcagaccaaggaggacaaa

SEQ ID NO: 479016 - RNA, 19 nt, Homo sapiens
  misc_RNA (1)...(19): siRNA sense strand
ggucagggacuuggucaca

SEQ ID NO: 479017 - RNA, 19 nt, Homo sapiens
  misc_RNA (1)...(19): siRNA sense strand
agagagggacuucagagau

SEQ ID NO: 479018 - RNA, 19 nt, Homo sapiens
  misc_RNA (1)...(19): siRNA sense strand
guggaucccucggcgacuu

SEQ ID NO: 479019 - RNA, 19 nt, Homo sapiens
  misc_RNA (1)...(19): siRNA sense strand
ggacuacgagcuggaaagg

SEQ ID NO: 479020 - RNA, 19 nt, Homo sapiens
  misc_RNA (1)...(19): siRNA sense strand
aaagcgggcagcauugaug

SEQ ID NO: 479021 - RNA, 19 nt, Homo sapiens
  misc_RNA (1)...(19): siRNA sense strand
agaaggaaagaggcaagua

SEQ ID NO: 479022 - RNA, 19 nt, Homo sapiens
  misc_RNA (1)...(19): siRNA sense strand
cgacuuggaggcggucuug

SEQ ID NO: 479023 - RNA, 19 nt, Homo sapiens
  misc_RNA (1)...(19): siRNA sense strand
gaccagcaugagauauuug

SEQ ID NO: 479024 - RNA, 19 nt, Homo sapiens
  misc_RNA (1)...(19): siRNA sense strand
gaugcugauggccugguua

SEQ ID NO: 479025 - RNA, 19 nt, Homo sapiens
  misc_RNA (1)...(19): siRNA sense strand
ggcuacgccuucaucgaau

SEQ ID NO: 479026 - RNA, 19 nt, Homo sapiens
  misc_RNA (1)...(19): siRNA sense strand
gaaaggcgggagcgaucuc

SEQ ID NO: 479027 - RNA, 19 nt, Homo sapiens
  misc_RNA (1)...(19): siRNA sense strand
agauauuuguggacuacga

SEQ ID NO: 479028 - RNA, 19 nt, Homo sapiens
  misc_RNA (1)...(19): siRNA sense strand
caaagcgggcagcauugau

SEQ ID NO: 479029 - RNA, 19 nt, Homo sapiens
  misc_RNA (1)...(19): siRNA sense strand
gagaagagauggcaagaaa

SEQ ID NO: 479030 - RNA, 19 nt, Homo sapiens
  misc_RNA (1)...(19): siRNA sense strand
caacaaaggugucauagga

SEQ ID NO: 479031 - RNA, 19 nt, Homo sapiens
  misc_RNA (1)...(19): siRNA sense strand
gaucaaagcuuaccgagau

SEQ ID NO: 479032 - RNA, 19 nt, Homo sapiens
  misc_RNA (1)...(19): siRNA sense strand
gggcaaugcuggcacgaua

SEQ ID NO: 479033 - RNA, 19 nt, Homo sapiens
  misc_RNA (1)...(19): siRNA sense strand
gaccaaggaggacaaauua

SEQ ID NO: 479034 - RNA, 19 nt, Homo sapiens
  misc_RNA (1)...(19): siRNA sense strand
gaagagauggcaagaaaga

SEQ ID NO: 479035 - RNA, 19 nt, Homo sapiens
  misc_RNA (1)...(19): siRNA sense strand
gagagggacuucagagaug

SEQ ID NO: 479036 - RNA, 19 nt, Homo sapiens
  misc_RNA (1)...(19): siRNA sense strand
ccaaggaggacaaauuaaa

SEQ ID NO: 479037 - RNA, 19 nt, Homo sapiens
  misc_RNA (1)...(19): siRNA sense strand
gcuacgccuucaucgaaua

SEQ ID NO: 479038 - RNA, 19 nt, Homo sapiens
  misc_RNA (1)...(19): siRNA sense strand
gcugauggccugguuauug

SEQ ID NO: 479039 - RNA, 19 nt, Homo sapiens
  misc_RNA (1)...(19): siRNA sense strand
gaaggaaagaggcaaguag

SEQ ID NO: 479040 - RNA, 19 nt, Homo sapiens
  misc_RNA (1)...(19): siRNA sense strand
ugaccagcaugagauauuu

SEQ ID NO: 479041 - RNA, 19 nt, Homo sapiens
  misc_RNA (1)...(19): siRNA sense strand
gggcuacgccuucaucgaa

SEQ ID NO: 479042 - RNA, 19 nt, Homo sapiens
  misc_RNA (1)...(19): siRNA sense strand
gacaagggaucgagaccau

SEQ ID NO: 479043 - RNA, 19 nt, Homo sapiens
  misc_RNA (1)...(19): siRNA sense strand
gugccgugaucaaagcuua

SEQ ID NO: 479044 - RNA, 19 nt, Homo sapiens
  misc_RNA (1)...(19): siRNA sense strand
cugauggccugguuauuga

SEQ ID NO: 479045 - RNA, 19 nt, Homo sapiens
  misc_RNA (1)...(19): siRNA sense strand
caagggaucgagaccauga

SEQ ID NO: 479046 - RNA, 19 nt, Homo sapiens
  misc_RNA (1)...(19): siRNA sense strand
gggacuuggucacagguuu

SEQ ID NO: 479047 - RNA, 19 nt, Homo sapiens
  misc_RNA (1)...(19): siRNA sense strand
ggaggacaaauuaaaggaa

SEQ ID NO: 479048 - RNA, 19 nt, Homo sapiens
  misc_RNA (1)...(19): siRNA sense strand
gcauugauggcaccgauga

SEQ ID NO: 479049 - RNA, 19 nt, Homo sapiens
  misc_RNA (1)...(19): siRNA sense strand
ggagggagaagaaggaaag

SEQ ID NO: 479050 - RNA, 19 nt, Homo sapiens
  misc_RNA (1)...(19): siRNA sense strand
ggguguggcccgacaauga

SEQ ID NO: 479051 - RNA, 19 nt, Homo sapiens
  misc_RNA (1)...(19): siRNA sense strand
gcaaugcuggcacgauaug

SEQ ID NO: 479052 - RNA, 19 nt, Homo sapiens
  misc_RNA (1)...(19): siRNA sense strand
gagagagggacuucagaga

SEQ ID NO: 479053 - RNA, 19 nt, Homo sapiens
  misc_RNA (1)...(19): siRNA sense strand
gacuaaacuugcagaccaa

SEQ ID NO: 479054 - RNA, 19 nt, Homo sapiens
  misc_RNA (1)...(19): siRNA sense strand
agaccaaggaggacaaauu

SEQ ID NO: 479055 - RNA, 19 nt, Homo sapiens
  misc_RNA (1)...(19): siRNA sense strand
caaggaggacaaauuaaag

SEQ ID NO: 479056 - RNA, 19 nt, Homo sapiens
  misc_RNA (1)...(19): siRNA sense strand
ucgaaaaccuauuaacuug

SEQ ID NO: 479057 - RNA, 19 nt, Homo sapiens
  misc_RNA (1)...(19): siRNA sense strand
ggagaagagauggcaagaa

SEQ ID NO: 479058 - RNA, 19 nt, Homo sapiens
  misc_RNA (1)...(19): siRNA sense strand
ggagagagagagggacuuc

SEQ ID NO: 479059 - RNA, 19 nt, Homo sapiens
  misc_RNA (1)...(19): siRNA sense strand
acucaaagcgggcagcauu

SEQ ID NO: 479060 - RNA, 19 nt, Homo sapiens
  misc_RNA (1)...(19): siRNA sense strand
ugagauauuuguggacuac

SEQ ID NO: 479061 - RNA, 19 nt, Homo sapiens
  misc_RNA (1)...(19): siRNA sense strand
gagagagagggacuucaga

SEQ ID NO: 479062 - RNA, 19 nt, Homo sapiens
  misc_RNA (1)...(19): siRNA sense strand
aaaggagucugggcaacug

SEQ ID NO: 479063 - RNA, 19 nt, Homo sapiens
  misc_RNA (1)...(19): siRNA sense strand
agagggacuucagagauga

SEQ ID NO: 479064 - RNA, 19 nt, Homo sapiens
  misc_RNA (1)...(19): siRNA sense strand
ggagcgugccgugaucaaa

SEQ ID NO: 479065 - RNA, 19 nt, Homo sapiens
  misc_RNA (1)...(19): siRNA sense strand
agagauggcaagaaagaga

SEQ ID NO: 479066 - RNA, 19 nt, Homo sapiens
  misc_RNA (1)...(19): siRNA sense strand
gagcuggaaaggacucuca

SEQ ID NO: 479067 - RNA, 19 nt, Homo sapiens
  misc_RNA (1)...(19): siRNA sense strand
gagcgugccgugaucaaag

SEQ ID NO: 479068 - RNA, 19 nt, Homo sapiens
  misc_RNA (1)...(19): siRNA sense strand
guuauugaccagcaugaga

SEQ ID NO: 479069 - RNA, 19 nt, Homo sapiens
  misc_RNA (1)...(19): siRNA sense strand
ggacaaauuaaaggaaguc

SEQ ID NO: 479070 - RNA, 19 nt, Homo sapiens
  misc_RNA (1)...(19): siRNA sense strand
cgacaaugacugggagaga

SEQ ID NO: 479071 - RNA, 19 nt, Homo sapiens
  misc_RNA (1)...(19): siRNA sense strand
gcccaucgccaaggaguau

SEQ ID NO: 479072 - RNA, 19 nt, Homo sapiens
  misc_RNA (1)...(19): siRNA sense strand
gcuggaaaggacucucaaa

SEQ ID NO: 479073 - RNA, 19 nt, Homo sapiens
  misc_RNA (1)...(19): siRNA sense strand
gcagaccaaggaggacaaa

SEQ ID NO: 479074 - RNA, 19 nt, Homo sapiens
  misc_RNA (1)...(19): siRNA sense strand
ggucagggacuuggucaca

SEQ ID NO: 479075 - RNA, 19 nt, Homo sapiens
  misc_RNA (1)...(19): siRNA sense strand
agagagggacuucagagau

SEQ ID NO: 479076 - RNA, 19 nt, Homo sapiens
  misc_RNA (1)...(19): siRNA sense strand
guggaucccucggcgacuu

SEQ ID NO: 479077 - RNA, 19 nt, Homo sapiens
  misc_RNA (1)...(19): siRNA sense strand
ggacuacgagcuggaaagg

SEQ ID NO: 479078 - RNA, 19 nt, Homo sapiens
  misc_RNA (1)...(19): siRNA sense strand
aaagcgggcagcauugaug

SEQ ID NO: 479079 - RNA, 19 nt, Homo sapiens
  misc_RNA (1)...(19): siRNA sense strand
agaaggaaagaggcaagua

SEQ ID NO: 479080 - RNA, 19 nt, Homo sapiens
  misc_RNA (1)...(19): siRNA sense strand
cgacuuggaggcggucuug

SEQ ID NO: 479081 - RNA, 19 nt, Homo sapiens
  misc_RNA (1)...(19): siRNA sense strand
gaccagcaugagauauuug

SEQ ID NO: 479082 - RNA, 19 nt, Homo sapiens
  misc_RNA (1)...(19): siRNA sense strand
gaugcugauggccugguua

SEQ ID NO: 479083 - RNA, 19 nt, Homo sapiens
  misc_RNA (1)...(19): siRNA sense strand
ggcuacgccuucaucgaau

SEQ ID NO: 479084 - RNA, 19 nt, Homo sapiens
  misc_RNA (1)...(19): siRNA sense strand
gaaaggcgggagcgaucuc

SEQ ID NO: 479085 - RNA, 19 nt, Homo sapiens
  misc_RNA (1)...(19): siRNA sense strand
agauauuuguggacuacga

SEQ ID NO: 479086 - RNA, 19 nt, Homo sapiens
  misc_RNA (1)...(19): siRNA sense strand
caaagcgggcagcauugau

SEQ ID NO: 479087 - RNA, 19 nt, Homo sapiens
  misc_RNA (1)...(19): siRNA sense strand
gagaagagauggcaagaaa

SEQ ID NO: 479088 - RNA, 19 nt, Homo sapiens
  misc_RNA (1)...(19): siRNA sense strand
caacaaaggugucauagga

SEQ ID NO: 479089 - RNA, 19 nt, Homo sapiens
  misc_RNA (1)...(19): siRNA sense strand
gaucaaagcuuaccgagau

SEQ ID NO: 479090 - RNA, 19 nt, Homo sapiens
  misc_RNA (1)...(19): siRNA sense strand
gggcaaugcuggcacgaua

SEQ ID NO: 479091 - RNA, 19 nt, Homo sapiens
  misc_RNA (1)...(19): siRNA sense strand
gaccaaggaggacaaauua

SEQ ID NO: 479092 - RNA, 19 nt, Homo sapiens
  misc_RNA (1)...(19): siRNA sense strand
gaagagauggcaagaaaga

SEQ ID NO: 479093 - RNA, 19 nt, Homo sapiens
  misc_RNA (1)...(19): siRNA sense strand
gagagggacuucagagaug

SEQ ID NO: 479094 - RNA, 19 nt, Homo sapiens
  misc_RNA (1)...(19): siRNA sense strand
ccaaggaggacaaauuaaa

SEQ ID NO: 479095 - RNA, 19 nt, Homo sapiens
  misc_RNA (1)...(19): siRNA sense strand
gcuacgccuucaucgaaua

SEQ ID NO: 479096 - RNA, 19 nt, Homo sapiens
  misc_RNA (1)...(19): siRNA sense strand
gcugauggccugguuauug

SEQ ID NO: 479097 - RNA, 19 nt, Homo sapiens
  misc_RNA (1)...(19): siRNA sense strand
gaaggaaagaggcaaguag

SEQ ID NO: 479098 - RNA, 19 nt, Homo sapiens
  misc_RNA (1)...(19): siRNA sense strand
ugaccagcaugagauauuu

SEQ ID NO: 479099 - RNA, 19 nt, Homo sapiens
  misc_RNA (1)...(19): siRNA sense strand
gggcuacgccuucaucgaa

SEQ ID NO: 479100 - RNA, 19 nt, Homo sapiens
  misc_RNA (1)...(19): siRNA sense strand
gacaagggaucgagaccau

SEQ ID NO: 479101 - RNA, 19 nt, Homo sapiens
  misc_RNA (1)...(19): siRNA sense strand
gugccgugaucaaagcuua

SEQ ID NO: 479102 - RNA, 19 nt, Homo sapiens
  misc_RNA (1)...(19): siRNA sense strand
cugauggccugguuauuga

SEQ ID NO: 479103 - RNA, 19 nt, Homo sapiens
  misc_RNA (1)...(19): siRNA sense strand
caagggaucgagaccauga

SEQ ID NO: 479104 - RNA, 19 nt, Homo sapiens
  misc_RNA (1)...(19): siRNA sense strand
gggacuuggucacagguuu

SEQ ID NO: 479105 - RNA, 19 nt, Homo sapiens
  misc_RNA (1)...(19): siRNA sense strand
ggaggacaaauuaaaggaa

SEQ ID NO: 479106 - RNA, 19 nt, Homo sapiens
  misc_RNA (1)...(19): siRNA sense strand
gcauugauggcaccgauga

SEQ ID NO: 479107 - RNA, 19 nt, Homo sapiens
  misc_RNA (1)...(19): siRNA sense strand
ggagggagaagaaggaaag

SEQ ID NO: 479108 - RNA, 19 nt, Homo sapiens
  misc_RNA (1)...(19): siRNA sense strand
ggguguggcccgacaauga

SEQ ID NO: 479109 - RNA, 19 nt, Homo sapiens
  misc_RNA (1)...(19): siRNA sense strand
gcaaugcuggcacgauaug

SEQ ID NO: 479110 - RNA, 19 nt, Homo sapiens
  misc_RNA (1)...(19): siRNA sense strand
gagagagggacuucagaga

SEQ ID NO: 479111 - RNA, 19 nt, Homo sapiens
  misc_RNA (1)...(19): siRNA sense strand
gacuaaacuugcagaccaa

SEQ ID NO: 479112 - RNA, 19 nt, Homo sapiens
  misc_RNA (1)...(19): siRNA sense strand
agaccaaggaggacaaauu

SEQ ID NO: 479113 - RNA, 19 nt, Homo sapiens
  misc_RNA (1)...(19): siRNA sense strand
caaggaggacaaauuaaag

SEQ ID NO: 479114 - RNA, 19 nt, Homo sapiens
  misc_RNA (1)...(19): siRNA sense strand
ucgaaaaccuauuaacuug

SEQ ID NO: 479115 - RNA, 19 nt, Homo sapiens
  misc_RNA (1)...(19): siRNA sense strand
ggagaagagauggcaagaa

SEQ ID NO: 479116 - RNA, 19 nt, Homo sapiens
  misc_RNA (1)...(19): siRNA sense strand
ggagagagagagggacuuc

SEQ ID NO: 479117 - RNA, 19 nt, Homo sapiens
  misc_RNA (1)...(19): siRNA sense strand
acucaaagcgggcagcauu

SEQ ID NO: 479118 - RNA, 19 nt, Homo sapiens
  misc_RNA (1)...(19): siRNA sense strand
ugagauauuuguggacuac

SEQ ID NO: 479119 - RNA, 19 nt, Homo sapiens
  misc_RNA (1)...(19): siRNA sense strand
gagagagagggacuucaga

SEQ ID NO: 479120 - RNA, 19 nt, Homo sapiens
  misc_RNA (1)...(19): siRNA sense strand
aaaggagucugggcaacug

SEQ ID NO: 479121 - RNA, 19 nt, Homo sapiens
  misc_RNA (1)...(19): siRNA sense strand
agagggacuucagagauga

SEQ ID NO: 479122 - RNA, 19 nt, Homo sapiens
  misc_RNA (1)...(19): siRNA sense strand
ggagcgugccgugaucaaa

SEQ ID NO: 479123 - RNA, 19 nt, Homo sapiens
  misc_RNA (1)...(19): siRNA sense strand
agagauggcaagaaagaga

SEQ ID NO: 479124 - RNA, 19 nt, Homo sapiens
  misc_RNA (1)...(19): siRNA sense strand
gagcuggaaaggacucuca

SEQ ID NO: 479125 - RNA, 19 nt, Homo sapiens
  misc_RNA (1)...(19): siRNA sense strand
gagcgugccgugaucaaag

SEQ ID NO: 479126 - RNA, 19 nt, Homo sapiens
  misc_RNA (1)...(19): siRNA sense strand
guuauugaccagcaugaga

SEQ ID NO: 479127 - RNA, 19 nt, Homo sapiens
  misc_RNA (1)...(19): siRNA sense strand
ggacaaauuaaaggaaguc

SEQ ID NO: 479128 - RNA, 19 nt, Homo sapiens
  misc_RNA (1)...(19): siRNA sense strand
cgacaaugacugggagaga

SEQ ID NO: 479129 - RNA, 19 nt, Homo sapiens
  misc_RNA (1)...(19): siRNA sense strand
gcccaucgccaaggaguau

SEQ ID NO: 479130 - RNA, 19 nt, Homo sapiens
  misc_RNA (1)...(19): siRNA sense strand
gcuggaaaggacucucaaa

SEQ ID NO: 479131 - RNA, 19 nt, Homo sapiens
  misc_RNA (1)...(19): siRNA sense strand
gcagaccaaggaggacaaa

SEQ ID NO: 479132 - RNA, 19 nt, Homo sapiens
  misc_RNA (1)...(19): siRNA sense strand
ggucagggacuuggucaca

SEQ ID NO: 479133 - RNA, 19 nt, Homo sapiens
  misc_RNA (1)...(19): siRNA sense strand
agagagggacuucagagau

SEQ ID NO: 479134 - RNA, 19 nt, Homo sapiens
  misc_RNA (1)...(19): siRNA sense strand
guggaucccucggcgacuu

SEQ ID NO: 479135 - RNA, 19 nt, Homo sapiens
  misc_RNA (1)...(19): siRNA sense strand
ggacuacgagcuggaaagg

SEQ ID NO: 479136 - RNA, 19 nt, Homo sapiens
  misc_RNA (1)...(19): siRNA sense strand
aaagcgggcagcauugaug

SEQ ID NO: 479137 - RNA, 19 nt, Homo sapiens
  misc_RNA (1)...(19): siRNA sense strand
agaaggaaagaggcaagua

SEQ ID NO: 479138 - RNA, 19 nt, Homo sapiens
  misc_RNA (1)...(19): siRNA sense strand
cgacuuggaggcggucuug

SEQ ID NO: 479139 - RNA, 19 nt, Homo sapiens
  misc_RNA (1)...(19): siRNA sense strand
gaccagcaugagauauuug

SEQ ID NO: 479140 - RNA, 19 nt, Homo sapiens
  misc_RNA (1)...(19): siRNA sense strand
gaugcugauggccugguua

SEQ ID NO: 479141 - RNA, 19 nt, Homo sapiens
  misc_RNA (1)...(19): siRNA sense strand
ggcuacgccuucaucgaau

SEQ ID NO: 479142 - RNA, 19 nt, Homo sapiens
  misc_RNA (1)...(19): siRNA sense strand
gaaaggcgggagcgaucuc

SEQ ID NO: 479143 - RNA, 19 nt, Homo sapiens
  misc_RNA (1)...(19): siRNA sense strand
agauauuuguggacuacga

SEQ ID NO: 479144 - RNA, 19 nt, Homo sapiens
  misc_RNA (1)...(19): siRNA sense strand
caaagcgggcagcauugau

SEQ ID NO: 479145 - RNA, 19 nt, Homo sapiens
  misc_RNA (1)...(19): siRNA sense strand
gagaagagauggcaagaaa

SEQ ID NO: 479146 - RNA, 19 nt, Homo sapiens
  misc_RNA (1)...(19): siRNA sense strand
caacaaaggugucauagga

SEQ ID NO: 479147 - RNA, 19 nt, Homo sapiens
  misc_RNA (1)...(19): siRNA sense strand
gaucaaagcuuaccgagau

SEQ ID NO: 479148 - RNA, 19 nt, Homo sapiens
  misc_RNA (1)...(19): siRNA sense strand
gggcaaugcuggcacgaua

SEQ ID NO: 479149 - RNA, 19 nt, Homo sapiens
  misc_RNA (1)...(19): siRNA sense strand
gaccaaggaggacaaauua

SEQ ID NO: 479150 - RNA, 19 nt, Homo sapiens
  misc_RNA (1)...(19): siRNA sense strand
gaagagauggcaagaaaga

SEQ ID NO: 479151 - RNA, 19 nt, Homo sapiens
  misc_RNA (1)...(19): siRNA sense strand
gagagggacuucagagaug

SEQ ID NO: 479152 - RNA, 19 nt, Homo sapiens
  misc_RNA (1)...(19): siRNA sense strand
ccaaggaggacaaauuaaa

SEQ ID NO: 479153 - RNA, 19 nt, Homo sapiens
  misc_RNA (1)...(19): siRNA sense strand
gcuacgccuucaucgaaua

SEQ ID NO: 479154 - RNA, 19 nt, Homo sapiens
  misc_RNA (1)...(19): siRNA sense strand
gcugauggccugguuauug

SEQ ID NO: 479155 - RNA, 19 nt, Homo sapiens
  misc_RNA (1)...(19): siRNA sense strand
gaaggaaagaggcaaguag

SEQ ID NO: 479156 - RNA, 19 nt, Homo sapiens
  misc_RNA (1)...(19): siRNA sense strand
ugaccagcaugagauauuu

SEQ ID NO: 479157 - RNA, 19 nt, Homo sapiens
  misc_RNA (1)...(19): siRNA sense strand
gggcuacgccuucaucgaa

SEQ ID NO: 479158 - RNA, 19 nt, Homo sapiens
  misc_RNA (1)...(19): siRNA sense strand
gacaagggaucgagaccau

SEQ ID NO: 479159 - RNA, 19 nt, Homo sapiens
  misc_RNA (1)...(19): siRNA sense strand
gugccgugaucaaagcuua

SEQ ID NO: 479160 - RNA, 19 nt, Homo sapiens
  misc_RNA (1)...(19): siRNA sense strand
cugauggccugguuauuga

SEQ ID NO: 479161 - RNA, 19 nt, Homo sapiens
  misc_RNA (1)...(19): siRNA sense strand
caagggaucgagaccauga

SEQ ID NO: 479162 - RNA, 19 nt, Homo sapiens
  misc_RNA (1)...(19): siRNA sense strand
gggacuuggucacagguuu

SEQ ID NO: 479163 - RNA, 19 nt, Homo sapiens
  misc_RNA (1)...(19): siRNA sense strand
ggaggacaaauuaaaggaa

SEQ ID NO: 479164 - RNA, 19 nt, Homo sapiens
  misc_RNA (1)...(19): siRNA sense strand
gcauugauggcaccgauga

SEQ ID NO: 479165 - RNA, 19 nt, Homo sapiens
  misc_RNA (1)...(19): siRNA sense strand
ggagggagaagaaggaaag

SEQ ID NO: 479166 - RNA, 19 nt, Homo sapiens
  misc_RNA (1)...(19): siRNA sense strand
ggguguggcccgacaauga

SEQ ID NO: 479167 - RNA, 19 nt, Homo sapiens
  misc_RNA (1)...(19): siRNA sense strand
gcaaugcuggcacgauaug

SEQ ID NO: 479168 - RNA, 19 nt, Homo sapiens
  misc_RNA (1)...(19): siRNA sense strand
gagagagggacuucagaga

SEQ ID NO: 479169 - RNA, 19 nt, Homo sapiens
  misc_RNA (1)...(19): siRNA sense strand
gacuaaacuugcagaccaa

SEQ ID NO: 479170 - RNA, 19 nt, Homo sapiens
  misc_RNA (1)...(19): siRNA sense strand
agaccaaggaggacaaauu

SEQ ID NO: 479171 - RNA, 19 nt, Homo sapiens
  misc_RNA (1)...(19): siRNA sense strand
caaggaggacaaauuaaag

SEQ ID NO: 479172 - RNA, 19 nt, Homo sapiens
  misc_RNA (1)...(19): siRNA sense strand
ucgaaaaccuauuaacuug

SEQ ID NO: 479173 - RNA, 19 nt, Homo sapiens
  misc_RNA (1)...(19): siRNA sense strand
ggagaagagauggcaagaa

SEQ ID NO: 479174 - RNA, 19 nt, Homo sapiens
  misc_RNA (1)...(19): siRNA sense strand
ggagagagagagggacuuc

SEQ ID NO: 479175 - RNA, 19 nt, Homo sapiens
  misc_RNA (1)...(19): siRNA sense strand
acucaaagcgggcagcauu

SEQ ID NO: 479176 - RNA, 19 nt, Homo sapiens
  misc_RNA (1)...(19): siRNA sense strand
ugagauauuuguggacuac

SEQ ID NO: 479177 - RNA, 19 nt, Homo sapiens
  misc_RNA (1)...(19): siRNA sense strand
gagagagagggacuucaga

SEQ ID NO: 479178 - RNA, 19 nt, Homo sapiens
  misc_RNA (1)...(19): siRNA sense strand
aaaggagucugggcaacug

SEQ ID NO: 479179 - RNA, 19 nt, Homo sapiens
  misc_RNA (1)...(19): siRNA sense strand
agagggacuucagagauga

SEQ ID NO: 479180 - RNA, 19 nt, Homo sapiens
  misc_RNA (1)...(19): siRNA sense strand
ggagcgugccgugaucaaa

SEQ ID NO: 479181 - RNA, 19 nt, Homo sapiens
  misc_RNA (1)...(19): siRNA sense strand
agagauggcaagaaagaga

SEQ ID NO: 479182 - RNA, 19 nt, Homo sapiens
  misc_RNA (1)...(19): siRNA sense strand
gagcuggaaaggacucuca

SEQ ID NO: 479183 - RNA, 19 nt, Homo sapiens
  misc_RNA (1)...(19): siRNA sense strand
gagcgugccgugaucaaag

SEQ ID NO: 479184 - RNA, 19 nt, Homo sapiens
  misc_RNA (1)...(19): siRNA sense strand
guuauugaccagcaugaga

SEQ ID NO: 479185 - RNA, 19 nt, Homo sapiens
  misc_RNA (1)...(19): siRNA sense strand
ggacaaauuaaaggaaguc

SEQ ID NO: 479186 - RNA, 19 nt, Homo sapiens
  misc_RNA (1)...(19): siRNA sense strand
cgacaaugacugggagaga

SEQ ID NO: 479187 - RNA, 19 nt, Homo sapiens
  misc_RNA (1)...(19): siRNA sense strand
gcccaucgccaaggaguau

SEQ ID NO: 479188 - RNA, 19 nt, Homo sapiens
  misc_RNA (1)...(19): siRNA sense strand
gcuggaaaggacucucaaa

SEQ ID NO: 479189 - RNA, 19 nt, Homo sapiens
  misc_RNA (1)...(19): siRNA sense strand
gcagaccaaggaggacaaa

SEQ ID NO: 479190 - RNA, 19 nt, Homo sapiens
  misc_RNA (1)...(19): siRNA sense strand
ggucagggacuuggucaca

SEQ ID NO: 479191 - RNA, 19 nt, Homo sapiens
  misc_RNA (1)...(19): siRNA sense strand
agagagggacuucagagau

SEQ ID NO: 479192 - RNA, 19 nt, Homo sapiens
  misc_RNA (1)...(19): siRNA sense strand
guggaucccucggcgacuu

SEQ ID NO: 479193 - RNA, 19 nt, Homo sapiens
  misc_RNA (1)...(19): siRNA sense strand
ggacuacgagcuggaaagg

SEQ ID NO: 479194 - RNA, 19 nt, Homo sapiens
  misc_RNA (1)...(19): siRNA sense strand
aaagcgggcagcauugaug

SEQ ID NO: 479195 - RNA, 19 nt, Homo sapiens
  misc_RNA (1)...(19): siRNA sense strand
agaaggaaagaggcaagua

SEQ ID NO: 479196 - RNA, 19 nt, Homo sapiens
  misc_RNA (1)...(19): siRNA sense strand
cgacuuggaggcggucuug

SEQ ID NO: 479197 - RNA, 19 nt, Homo sapiens
  misc_RNA (1)...(19): siRNA sense strand
gaccagcaugagauauuug

SEQ ID NO: 479198 - RNA, 19 nt, Homo sapiens
  misc_RNA (1)...(19): siRNA sense strand
gaugcugauggccugguua

SEQ ID NO: 479199 - RNA, 19 nt, Homo sapiens
  misc_RNA (1)...(19): siRNA sense strand
ggcuacgccuucaucgaau

SEQ ID NO: 479200 - RNA, 19 nt, Homo sapiens
  misc_RNA (1)...(19): siRNA sense strand
gaaaggcgggagcgaucuc

SEQ ID NO: 479201 - RNA, 19 nt, Homo sapiens
  misc_RNA (1)...(19): siRNA sense strand
agauauuuguggacuacga

SEQ ID NO: 479202 - RNA, 19 nt, Homo sapiens
  misc_RNA (1)...(19): siRNA sense strand
caaagcgggcagcauugau

SEQ ID NO: 479203 - RNA, 19 nt, Homo sapiens
  misc_RNA (1)...(19): siRNA sense strand
gugaaacccuccgagcuua

SEQ ID NO: 479204 - RNA, 19 nt, Homo sapiens
  misc_RNA (1)...(19): siRNA sense strand
guacagcacuggaacuucu

SEQ ID NO: 479205 - RNA, 19 nt, Homo sapiens
  misc_RNA (1)...(19): siRNA sense strand
guucagcacuagaugauau

SEQ ID NO: 479206 - RNA, 19 nt, Homo sapiens
  misc_RNA (1)...(19): siRNA sense strand
cuuagaaacucugcaaauu

SEQ ID NO: 479207 - RNA, 19 nt, Homo sapiens
  misc_RNA (1)...(19): siRNA sense strand
gcagaagccuuagaaacuc

SEQ ID NO: 479208 - RNA, 19 nt, Homo sapiens
  misc_RNA (1)...(19): siRNA sense strand
ggagugcccuuaaugaaaa

SEQ ID NO: 479209 - RNA, 19 nt, Homo sapiens
  misc_RNA (1)...(19): siRNA sense strand
gaaacucugcaaauuauca

SEQ ID NO: 479210 - RNA, 19 nt, Homo sapiens
  misc_RNA (1)...(19): siRNA sense strand
uaaagcagaagccuuagaa

SEQ ID NO: 479211 - RNA, 19 nt, Homo sapiens
  misc_RNA (1)...(19): siRNA sense strand
ccuccgagcuuagcaaaga

SEQ ID NO: 479212 - RNA, 19 nt, Homo sapiens
  misc_RNA (1)...(19): siRNA sense strand
acccagggcuucauaauca

SEQ ID NO: 479213 - RNA, 19 nt, Homo sapiens
  misc_RNA (1)...(19): siRNA sense strand
gauaugcugguacaucuga

SEQ ID NO: 479214 - RNA, 19 nt, Homo sapiens
  misc_RNA (1)...(19): siRNA sense strand
cauaaucaccuucuguuca

SEQ ID NO: 479215 - RNA, 19 nt, Homo sapiens
  misc_RNA (1)...(19): siRNA sense strand
ggugaaacccuccgagcuu

SEQ ID NO: 479216 - RNA, 19 nt, Homo sapiens
  misc_RNA (1)...(19): siRNA sense strand
gaaugucucacaaauaaac

SEQ ID NO: 479217 - RNA, 19 nt, Homo sapiens
  misc_RNA (1)...(19): siRNA sense strand
gaagacguuccgcuuugaa

SEQ ID NO: 479218 - RNA, 19 nt, Homo sapiens
  misc_RNA (1)...(19): siRNA sense strand
caaauaaaccaagauaugc

SEQ ID NO: 479219 - RNA, 19 nt, Homo sapiens
  misc_RNA (1)...(19): siRNA sense strand
caccuucuguucagcacua

SEQ ID NO: 479220 - RNA, 19 nt, Homo sapiens
  misc_RNA (1)...(19): siRNA sense strand
gcaaauuaucagaagagaa

SEQ ID NO: 479221 - RNA, 19 nt, Homo sapiens
  misc_RNA (1)...(19): siRNA sense strand
ucucacaaauaaaccaaga

SEQ ID NO: 479222 - RNA, 19 nt, Homo sapiens
  misc_RNA (1)...(19): siRNA sense strand
gcauacccagggcuucaua

SEQ ID NO: 479223 - RNA, 19 nt, Homo sapiens
  misc_RNA (1)...(19): siRNA sense strand
gcacuagaugauauucuug

SEQ ID NO: 479224 - RNA, 19 nt, Homo sapiens
  misc_RNA (1)...(19): siRNA sense strand
caagauaugcugguacauc

SEQ ID NO: 479225 - RNA, 19 nt, Homo sapiens
  misc_RNA (1)...(19): siRNA sense strand
gguggagugcccuuaauga

SEQ ID NO: 479226 - RNA, 19 nt, Homo sapiens
  misc_RNA (1)...(19): siRNA sense strand
caucugagucacacaagaa

SEQ ID NO: 479227 - RNA, 19 nt, Homo sapiens
  misc_RNA (1)...(19): siRNA sense strand
guacaucugagucacacaa

SEQ ID NO: 479228 - RNA, 19 nt, Homo sapiens
  misc_RNA (1)...(19): siRNA sense strand
gagcauacccagggcuuca

SEQ ID NO: 479229 - RNA, 19 nt, Homo sapiens
  misc_RNA (1)...(19): siRNA sense strand
uggagugcccuuaaugaaa

SEQ ID NO: 479230 - RNA, 19 nt, Homo sapiens
  misc_RNA (1)...(19): siRNA sense strand
gcagcgggauuuggugagu

SEQ ID NO: 479231 - RNA, 19 nt, Homo sapiens
  misc_RNA (1)...(19): siRNA sense strand
guggagugcccuuaaugaa

SEQ ID NO: 479232 - RNA, 19 nt, Homo sapiens
  misc_RNA (1)...(19): siRNA sense strand
gacguuccgcuuugaaaug

SEQ ID NO: 479233 - RNA, 19 nt, Homo sapiens
  misc_RNA (1)...(19): siRNA sense strand
cagaagccuuagaaacucu

SEQ ID NO: 479234 - RNA, 19 nt, Homo sapiens
  misc_RNA (1)...(19): siRNA sense strand
auaaucaccuucuguucag

SEQ ID NO: 479235 - RNA, 19 nt, Homo sapiens
  misc_RNA (1)...(19): siRNA sense strand
agcacuagaugauauucuu

SEQ ID NO: 479236 - RNA, 19 nt, Homo sapiens
  misc_RNA (1)...(19): siRNA sense strand
ccuuagaaacucugcaaau

SEQ ID NO: 479237 - RNA, 19 nt, Homo sapiens
  misc_RNA (1)...(19): siRNA sense strand
agcgggauuuggugaguuu

SEQ ID NO: 479238 - RNA, 19 nt, Homo sapiens
  misc_RNA (1)...(19): siRNA sense strand
cagcgggauuuggugaguu

SEQ ID NO: 479239 - RNA, 19 nt, Homo sapiens
  misc_RNA (1)...(19): siRNA sense strand
aucuaaagcagaagccuua

SEQ ID NO: 479240 - RNA, 19 nt, Homo sapiens
  misc_RNA (1)...(19): siRNA sense strand
ccagacugcugaggaacuc

SEQ ID NO: 479241 - RNA, 19 nt, Homo sapiens
  misc_RNA (1)...(19): siRNA sense strand
gugaaacccuccgagcuua

SEQ ID NO: 479242 - RNA, 19 nt, Homo sapiens
  misc_RNA (1)...(19): siRNA sense strand
guacagcacuggaacuucu

SEQ ID NO: 479243 - RNA, 19 nt, Homo sapiens
  misc_RNA (1)...(19): siRNA sense strand
guucagcacuagaugauau

SEQ ID NO: 479244 - RNA, 19 nt, Homo sapiens
  misc_RNA (1)...(19): siRNA sense strand
cuuagaaacucugcaaauu

SEQ ID NO: 479245 - RNA, 19 nt, Homo sapiens
  misc_RNA (1)...(19): siRNA sense strand
gcagaagccuuagaaacuc

SEQ ID NO: 479246 - RNA, 19 nt, Homo sapiens
  misc_RNA (1)...(19): siRNA sense strand
ggagugcccuuaaugaaaa

SEQ ID NO: 479247 - RNA, 19 nt, Homo sapiens
  misc_RNA (1)...(19): siRNA sense strand
gaaacucugcaaauuauca

SEQ ID NO: 479248 - RNA, 19 nt, Homo sapiens
  misc_RNA (1)...(19): siRNA sense strand
uaaagcagaagccuuagaa

SEQ ID NO: 479249 - RNA, 19 nt, Homo sapiens
  misc_RNA (1)...(19): siRNA sense strand
ccuccgagcuuagcaaaga

SEQ ID NO: 479250 - RNA, 19 nt, Homo sapiens
  misc_RNA (1)...(19): siRNA sense strand
acccagggcuucauaauca

SEQ ID NO: 479251 - RNA, 19 nt, Homo sapiens
  misc_RNA (1)...(19): siRNA sense strand
gauaugcugguacaucuga

SEQ ID NO: 479252 - RNA, 19 nt, Homo sapiens
  misc_RNA (1)...(19): siRNA sense strand
cauaaucaccuucuguuca

SEQ ID NO: 479253 - RNA, 19 nt, Homo sapiens
  misc_RNA (1)...(19): siRNA sense strand
ggugaaacccuccgagcuu

SEQ ID NO: 479254 - RNA, 19 nt, Homo sapiens
  misc_RNA (1)...(19): siRNA sense strand
gaaugucucacaaauaaac

SEQ ID NO: 479255 - RNA, 19 nt, Homo sapiens
  misc_RNA (1)...(19): siRNA sense strand
gaagacguuccgcuuugaa

SEQ ID NO: 479256 - RNA, 19 nt, Homo sapiens
  misc_RNA (1)...(19): siRNA sense strand
caaauaaaccaagauaugc

SEQ ID NO: 479257 - RNA, 19 nt, Homo sapiens
  misc_RNA (1)...(19): siRNA sense strand
caccuucuguucagcacua

SEQ ID NO: 479258 - RNA, 19 nt, Homo sapiens
  misc_RNA (1)...(19): siRNA sense strand
gcaaauuaucagaagagaa

SEQ ID NO: 479259 - RNA, 19 nt, Homo sapiens
  misc_RNA (1)...(19): siRNA sense strand
ucucacaaauaaaccaaga

SEQ ID NO: 479260 - RNA, 19 nt, Homo sapiens
  misc_RNA (1)...(19): siRNA sense strand
gcauacccagggcuucaua

SEQ ID NO: 479261 - RNA, 19 nt, Homo sapiens
  misc_RNA (1)...(19): siRNA sense strand
gcacuagaugauauucuug

SEQ ID NO: 479262 - RNA, 19 nt, Homo sapiens
  misc_RNA (1)...(19): siRNA sense strand
caagauaugcugguacauc

SEQ ID NO: 479263 - RNA, 19 nt, Homo sapiens
  misc_RNA (1)...(19): siRNA sense strand
gguggagugcccuuaauga

SEQ ID NO: 479264 - RNA, 19 nt, Homo sapiens
  misc_RNA (1)...(19): siRNA sense strand
caucugagucacacaagaa

SEQ ID NO: 479265 - RNA, 19 nt, Homo sapiens
  misc_RNA (1)...(19): siRNA sense strand
guacaucugagucacacaa

SEQ ID NO: 479266 - RNA, 19 nt, Homo sapiens
  misc_RNA (1)...(19): siRNA sense strand
gagcauacccagggcuuca

SEQ ID NO: 479267 - RNA, 19 nt, Homo sapiens
  misc_RNA (1)...(19): siRNA sense strand
uggagugcccuuaaugaaa

SEQ ID NO: 479268 - RNA, 19 nt, Homo sapiens
  misc_RNA (1)...(19): siRNA sense strand
gcagcgggauuuggugagu

SEQ ID NO: 479269 - RNA, 19 nt, Homo sapiens
  misc_RNA (1)...(19): siRNA sense strand
guggagugcccuuaaugaa

SEQ ID NO: 479270 - RNA, 19 nt, Homo sapiens
  misc_RNA (1)...(19): siRNA sense strand
gacguuccgcuuugaaaug

SEQ ID NO: 479271 - RNA, 19 nt, Homo sapiens
  misc_RNA (1)...(19): siRNA sense strand
cagaagccuuagaaacucu

SEQ ID NO: 479272 - RNA, 19 nt, Homo sapiens
  misc_RNA (1)...(19): siRNA sense strand
auaaucaccuucuguucag

SEQ ID NO: 479273 - RNA, 19 nt, Homo sapiens
  misc_RNA (1)...(19): siRNA sense strand
agcacuagaugauauucuu

SEQ ID NO: 479274 - RNA, 19 nt, Homo sapiens
  misc_RNA (1)...(19): siRNA sense strand
ccuuagaaacucugcaaau

SEQ ID NO: 479275 - RNA, 19 nt, Homo sapiens
  misc_RNA (1)...(19): siRNA sense strand
agcgggauuuggugaguuu

SEQ ID NO: 479276 - RNA, 19 nt, Homo sapiens
  misc_RNA (1)...(19): siRNA sense strand
cagcgggauuuggugaguu

SEQ ID NO: 479277 - RNA, 19 nt, Homo sapiens
  misc_RNA (1)...(19): siRNA sense strand
aucuaaagcagaagccuua

SEQ ID NO: 479278 - RNA, 19 nt, Homo sapiens
  misc_RNA (1)...(19): siRNA sense strand
ccagacugcugaggaacuc

SEQ ID NO: 479279 - RNA, 19 nt, Homo sapiens
  misc_RNA (1)...(19): siRNA sense strand
gugaaacccuccgagcuua

SEQ ID NO: 479280 - RNA, 19 nt, Homo sapiens
  misc_RNA (1)...(19): siRNA sense strand
guacagcacuggaacuucu

SEQ ID NO: 479281 - RNA, 19 nt, Homo sapiens
  misc_RNA (1)...(19): siRNA sense strand
guucagcacuagaugauau

SEQ ID NO: 479282 - RNA, 19 nt, Homo sapiens
  misc_RNA (1)...(19): siRNA sense strand
cuuagaaacucugcaaauu

SEQ ID NO: 479283 - RNA, 19 nt, Homo sapiens
  misc_RNA (1)...(19): siRNA sense strand
gcagaagccuuagaaacuc

SEQ ID NO: 479284 - RNA, 19 nt, Homo sapiens
  misc_RNA (1)...(19): siRNA sense strand
ggagugcccuuaaugaaaa

SEQ ID NO: 479285 - RNA, 19 nt, Homo sapiens
  misc_RNA (1)...(19): siRNA sense strand
gaaacucugcaaauuauca

SEQ ID NO: 479286 - RNA, 19 nt, Homo sapiens
  misc_RNA (1)...(19): siRNA sense strand
uaaagcagaagccuuagaa

SEQ ID NO: 479287 - RNA, 19 nt, Homo sapiens
  misc_RNA (1)...(19): siRNA sense strand
ccuccgagcuuagcaaaga

SEQ ID NO: 479288 - RNA, 19 nt, Homo sapiens
  misc_RNA (1)...(19): siRNA sense strand
acccagggcuucauaauca

SEQ ID NO: 479289 - RNA, 19 nt, Homo sapiens
  misc_RNA (1)...(19): siRNA sense strand
gauaugcugguacaucuga

SEQ ID NO: 479290 - RNA, 19 nt, Homo sapiens
  misc_RNA (1)...(19): siRNA sense strand
cauaaucaccuucuguuca

SEQ ID NO: 479291 - RNA, 19 nt, Homo sapiens
  misc_RNA (1)...(19): siRNA sense strand
ggugaaacccuccgagcuu

SEQ ID NO: 479292 - RNA, 19 nt, Homo sapiens
  misc_RNA (1)...(19): siRNA sense strand
gaaugucucacaaauaaac

SEQ ID NO: 479293 - RNA, 19 nt, Homo sapiens
  misc_RNA (1)...(19): siRNA sense strand
gaagacguuccgcuuugaa

SEQ ID NO: 479294 - RNA, 19 nt, Homo sapiens
  misc_RNA (1)...(19): siRNA sense strand
caaauaaaccaagauaugc

SEQ ID NO: 479295 - RNA, 19 nt, Homo sapiens
  misc_RNA (1)...(19): siRNA sense strand
caccuucuguucagcacua

SEQ ID NO: 479296 - RNA, 19 nt, Homo sapiens
  misc_RNA (1)...(19): siRNA sense strand
gcaaauuaucagaagagaa

SEQ ID NO: 479297 - RNA, 19 nt, Homo sapiens
  misc_RNA (1)...(19): siRNA sense strand
ucucacaaauaaaccaaga

SEQ ID NO: 479298 - RNA, 19 nt, Homo sapiens
  misc_RNA (1)...(19): siRNA sense strand
gcauacccagggcuucaua

SEQ ID NO: 479299 - RNA, 19 nt, Homo sapiens
  misc_RNA (1)...(19): siRNA sense strand
gcacuagaugauauucuug

SEQ ID NO: 479300 - RNA, 19 nt, Homo sapiens
  misc_RNA (1)...(19): siRNA sense strand
caagauaugcugguacauc

SEQ ID NO: 479301 - RNA, 19 nt, Homo sapiens
  misc_RNA (1)...(19): siRNA sense strand
gguggagugcccuuaauga

SEQ ID NO: 479302 - RNA, 19 nt, Homo sapiens
  misc_RNA (1)...(19): siRNA sense strand
caucugagucacacaagaa

SEQ ID NO: 479303 - RNA, 19 nt, Homo sapiens
  misc_RNA (1)...(19): siRNA sense strand
guacaucugagucacacaa

SEQ ID NO: 479304 - RNA, 19 nt, Homo sapiens
  misc_RNA (1)...(19): siRNA sense strand
gagcauacccagggcuuca

SEQ ID NO: 479305 - RNA, 19 nt, Homo sapiens
  misc_RNA (1)...(19): siRNA sense strand
uggagugcccuuaaugaaa

SEQ ID NO: 479306 - RNA, 19 nt, Homo sapiens
  misc_RNA (1)...(19): siRNA sense strand
gcagcgggauuuggugagu

SEQ ID NO: 479307 - RNA, 19 nt, Homo sapiens
  misc_RNA (1)...(19): siRNA sense strand
guggagugcccuuaaugaa

SEQ ID NO: 479308 - RNA, 19 nt, Homo sapiens
  misc_RNA (1)...(19): siRNA sense strand
gacguuccgcuuugaaaug

SEQ ID NO: 479309 - RNA, 19 nt, Homo sapiens
  misc_RNA (1)...(19): siRNA sense strand
cagaagccuuagaaacucu

SEQ ID NO: 479310 - RNA, 19 nt, Homo sapiens
  misc_RNA (1)...(19): siRNA sense strand
auaaucaccuucuguucag

SEQ ID NO: 479311 - RNA, 19 nt, Homo sapiens
  misc_RNA (1)...(19): siRNA sense strand
agcacuagaugauauucuu

SEQ ID NO: 479312 - RNA, 19 nt, Homo sapiens
  misc_RNA (1)...(19): siRNA sense strand
ccuuagaaacucugcaaau

SEQ ID NO: 479313 - RNA, 19 nt, Homo sapiens
  misc_RNA (1)...(19): siRNA sense strand
agcgggauuuggugaguuu

SEQ ID NO: 479314 - RNA, 19 nt, Homo sapiens
  misc_RNA (1)...(19): siRNA sense strand
cagcgggauuuggugaguu

SEQ ID NO: 479315 - RNA, 19 nt, Homo sapiens
  misc_RNA (1)...(19): siRNA sense strand
aucuaaagcagaagccuua

SEQ ID NO: 479316 - RNA, 19 nt, Homo sapiens
  misc_RNA (1)...(19): siRNA sense strand
ccagacugcugaggaacuc

SEQ ID NO: 479317 - RNA, 19 nt, Homo sapiens
  misc_RNA (1)...(19): siRNA sense strand
gcaaaucacugaaguacua

SEQ ID NO: 479318 - RNA, 19 nt, Homo sapiens
  misc_RNA (1)...(19): siRNA sense strand
gaaaguguguucagaauca

SEQ ID NO: 479319 - RNA, 19 nt, Homo sapiens
  misc_RNA (1)...(19): siRNA sense strand
gaacuuauuugguugaaug

SEQ ID NO: 479320 - RNA, 19 nt, Homo sapiens
  misc_RNA (1)...(19): siRNA sense strand
ggaaagagaugauuugcau

SEQ ID NO: 479321 - RNA, 19 nt, Homo sapiens
  misc_RNA (1)...(19): siRNA sense strand
ccaaagaagcuacugauua

SEQ ID NO: 479322 - RNA, 19 nt, Homo sapiens
  misc_RNA (1)...(19): siRNA sense strand
gaaggacuaugaauuacaa

SEQ ID NO: 479323 - RNA, 19 nt, Homo sapiens
  misc_RNA (1)...(19): siRNA sense strand
agacaaagcucaugauauc

SEQ ID NO: 479324 - RNA, 19 nt, Homo sapiens
  misc_RNA (1)...(19): siRNA sense strand
cagcagaucucauuauuca

SEQ ID NO: 479325 - RNA, 19 nt, Homo sapiens
  misc_RNA (1)...(19): siRNA sense strand
caaagaagcuacugauuac

SEQ ID NO: 479326 - RNA, 19 nt, Homo sapiens
  misc_RNA (1)...(19): siRNA sense strand
gaacaugaaccaagucuau

SEQ ID NO: 479327 - RNA, 19 nt, Homo sapiens
  misc_RNA (1)...(19): siRNA sense strand
caagaggaaucaguuuaua

SEQ ID NO: 479328 - RNA, 19 nt, Homo sapiens
  misc_RNA (1)...(19): siRNA sense strand
caaaugacagcaccucuua

SEQ ID NO: 479329 - RNA, 19 nt, Homo sapiens
  misc_RNA (1)...(19): siRNA sense strand
caaagacgaugaauguguu

SEQ ID NO: 479330 - RNA, 19 nt, Homo sapiens
  misc_RNA (1)...(19): siRNA sense strand
uaaauuugcuggugauuca

SEQ ID NO: 479331 - RNA, 19 nt, Homo sapiens
  misc_RNA (1)...(19): siRNA sense strand
agaaauugcuggguauaua

SEQ ID NO: 479332 - RNA, 19 nt, Homo sapiens
  misc_RNA (1)...(19): siRNA sense strand
aggaaucacucaaaguuua

SEQ ID NO: 479333 - RNA, 19 nt, Homo sapiens
  misc_RNA (1)...(19): siRNA sense strand
gaacagacaaagcucauga

SEQ ID NO: 479334 - RNA, 19 nt, Homo sapiens
  misc_RNA (1)...(19): siRNA sense strand
gguauauacuugaauguga

SEQ ID NO: 479335 - RNA, 19 nt, Homo sapiens
  misc_RNA (1)...(19): siRNA sense strand
uaaaucaguucaggagaua

SEQ ID NO: 479336 - RNA, 19 nt, Homo sapiens
  misc_RNA (1)...(19): siRNA sense strand
gaauuugaaucuagucuca

SEQ ID NO: 479337 - RNA, 19 nt, Homo sapiens
  misc_RNA (1)...(19): siRNA sense strand
gaaauuauggccuuaagga

SEQ ID NO: 479338 - RNA, 19 nt, Homo sapiens
  misc_RNA (1)...(19): siRNA sense strand
ccaggcagaucaauuggua

SEQ ID NO: 479339 - RNA, 19 nt, Homo sapiens
  misc_RNA (1)...(19): siRNA sense strand
aaacuaaacugugugaaga

SEQ ID NO: 479340 - RNA, 19 nt, Homo sapiens
  misc_RNA (1)...(19): siRNA sense strand
caauguggcuucaauaaag

SEQ ID NO: 479341 - RNA, 19 nt, Homo sapiens
  misc_RNA (1)...(19): siRNA sense strand
uaaacugacuuaugcagaa

SEQ ID NO: 479342 - RNA, 19 nt, Homo sapiens
  misc_RNA (1)...(19): siRNA sense strand
agaagcuacugauuacuua

SEQ ID NO: 479343 - RNA, 19 nt, Homo sapiens
  misc_RNA (1)...(19): siRNA sense strand
gcagaacaguacucagcua

SEQ ID NO: 479344 - RNA, 19 nt, Homo sapiens
  misc_RNA (1)...(19): siRNA sense strand
ugaagaagaagcaguuaua

SEQ ID NO: 479345 - RNA, 19 nt, Homo sapiens
  misc_RNA (1)...(19): siRNA sense strand
uagcaaaccuaaugggaaa

SEQ ID NO: 479346 - RNA, 19 nt, Homo sapiens
  misc_RNA (1)...(19): siRNA sense strand
gaguagagccaaauucauu

SEQ ID NO: 479347 - RNA, 19 nt, Homo sapiens
  misc_RNA (1)...(19): siRNA sense strand
gaauugagcaacaguauca

SEQ ID NO: 479348 - RNA, 19 nt, Homo sapiens
  misc_RNA (1)...(19): siRNA sense strand
caacugaagccaaggaauu

SEQ ID NO: 479349 - RNA, 19 nt, Homo sapiens
  misc_RNA (1)...(19): siRNA sense strand
gaauuggguugaugagaug

SEQ ID NO: 479350 - RNA, 19 nt, Homo sapiens
  misc_RNA (1)...(19): siRNA sense strand
ggagugcaguuucagaaug

SEQ ID NO: 479351 - RNA, 19 nt, Homo sapiens
  misc_RNA (1)...(19): siRNA sense strand
caugguagauucacaacaa

SEQ ID NO: 479352 - RNA, 19 nt, Homo sapiens
  misc_RNA (1)...(19): siRNA sense strand
gcaauggagaucugaagua

SEQ ID NO: 479353 - RNA, 19 nt, Homo sapiens
  misc_RNA (1)...(19): siRNA sense strand
uaaacugugugaagaagaa

SEQ ID NO: 479354 - RNA, 19 nt, Homo sapiens
  misc_RNA (1)...(19): siRNA sense strand
ccaggaaucccaagucuuu

SEQ ID NO: 479355 - RNA, 19 nt, Homo sapiens
  misc_RNA (1)...(19): siRNA sense strand
ucccuaaccucuucuagua

SEQ ID NO: 479356 - RNA, 19 nt, Homo sapiens
  misc_RNA (1)...(19): siRNA sense strand
gaacaggagaaacuaaaga

SEQ ID NO: 479357 - RNA, 19 nt, Homo sapiens
  misc_RNA (1)...(19): siRNA sense strand
cagaauguccugacucuuu

SEQ ID NO: 479358 - RNA, 19 nt, Homo sapiens
  misc_RNA (1)...(19): siRNA sense strand
gagcaacaguaucagaaug

SEQ ID NO: 479359 - RNA, 19 nt, Homo sapiens
  misc_RNA (1)...(19): siRNA sense strand
caggauuaguuccaaauuu

SEQ ID NO: 479360 - RNA, 19 nt, Homo sapiens
  misc_RNA (1)...(19): siRNA sense strand
gcagaucaauugguacaga

SEQ ID NO: 479361 - RNA, 19 nt, Homo sapiens
  misc_RNA (1)...(19): siRNA sense strand
gaccuaaggacucgauaua

SEQ ID NO: 479362 - RNA, 19 nt, Homo sapiens
  misc_RNA (1)...(19): siRNA sense strand
gcaauguggcuucaauaaa

SEQ ID NO: 479363 - RNA, 19 nt, Homo sapiens
  misc_RNA (1)...(19): siRNA sense strand
ccaaauucauugcaaacuu

SEQ ID NO: 479364 - RNA, 19 nt, Homo sapiens
  misc_RNA (1)...(19): siRNA sense strand
guacucagcuacagugaag

SEQ ID NO: 479365 - RNA, 19 nt, Homo sapiens
  misc_RNA (1)...(19): siRNA sense strand
gcagauugacaacagguua

SEQ ID NO: 479366 - RNA, 19 nt, Homo sapiens
  misc_RNA (1)...(19): siRNA sense strand
ugggaacaaucacaaauaa

SEQ ID NO: 479367 - RNA, 19 nt, Homo sapiens
  misc_RNA (1)...(19): siRNA sense strand
gcaagaggaaucaguuuau

SEQ ID NO: 479368 - RNA, 19 nt, Homo sapiens
  misc_RNA (1)...(19): siRNA sense strand
gagugcaguuucagaauga

SEQ ID NO: 479369 - RNA, 19 nt, Homo sapiens
  misc_RNA (1)...(19): siRNA sense strand
gagcagcuacuucuagaaa

SEQ ID NO: 479370 - RNA, 19 nt, Homo sapiens
  misc_RNA (1)...(19): siRNA sense strand
guacagauucuuauugaug

SEQ ID NO: 479371 - RNA, 19 nt, Homo sapiens
  misc_RNA (1)...(19): siRNA sense strand
gaaccaagucuauucuaug

SEQ ID NO: 479372 - RNA, 19 nt, Homo sapiens
  misc_RNA (1)...(19): siRNA sense strand
ggaacaaucacaaauaagu

SEQ ID NO: 479373 - RNA, 19 nt, Homo sapiens
  misc_RNA (1)...(19): siRNA sense strand
ggaaucaguuuauaaucuc

SEQ ID NO: 479374 - RNA, 19 nt, Homo sapiens
  misc_RNA (1)...(19): siRNA sense strand
gcaguauuaucaagaacuu

SEQ ID NO: 479375 - RNA, 19 nt, Homo sapiens
  misc_RNA (1)...(19): siRNA sense strand
guugaaagccauuuagaaa

SEQ ID NO: 479376 - RNA, 19 nt, Homo sapiens
  misc_RNA (1)...(19): siRNA sense strand
gcucagauuugccaagugu

SEQ ID NO: 479377 - RNA, 19 nt, Homo sapiens
  misc_RNA (1)...(19): siRNA sense strand
gagccaaauucauugcaaa

SEQ ID NO: 479378 - RNA, 19 nt, Homo sapiens
  misc_RNA (1)...(19): siRNA sense strand
gcaaaacucuugaauacau

SEQ ID NO: 479379 - RNA, 19 nt, Homo sapiens
  misc_RNA (1)...(19): siRNA sense strand
gagaugauuugcaugaaag

SEQ ID NO: 479380 - RNA, 19 nt, Homo sapiens
  misc_RNA (1)...(19): siRNA sense strand
uuacaaagacgaugaaugu

SEQ ID NO: 479381 - RNA, 19 nt, Homo sapiens
  misc_RNA (1)...(19): siRNA sense strand
ugagagaacuugaucaaaa

SEQ ID NO: 479382 - RNA, 19 nt, Homo sapiens
  misc_RNA (1)...(19): siRNA sense strand
gaaacuaaacugugugaag

SEQ ID NO: 479383 - RNA, 19 nt, Homo sapiens
  misc_RNA (1)...(19): siRNA sense strand
ggaaucacucaaaguuuaa

SEQ ID NO: 479384 - RNA, 19 nt, Homo sapiens
  misc_RNA (1)...(19): siRNA sense strand
gaacaguacucagcuacag

SEQ ID NO: 479385 - RNA, 19 nt, Homo sapiens
  misc_RNA (1)...(19): siRNA sense strand
gaacaaucacaaauaagug

SEQ ID NO: 479386 - RNA, 19 nt, Homo sapiens
  misc_RNA (1)...(19): siRNA sense strand
gaaguacagcugugauaga

SEQ ID NO: 479387 - RNA, 19 nt, Homo sapiens
  misc_RNA (1)...(19): siRNA sense strand
gcuuaugacuggagugaga

SEQ ID NO: 479388 - RNA, 19 nt, Homo sapiens
  misc_RNA (1)...(19): siRNA sense strand
gacagcaccucuuaaacug

SEQ ID NO: 479389 - RNA, 19 nt, Homo sapiens
  misc_RNA (1)...(19): siRNA sense strand
gggcugacccagaguuuaa

SEQ ID NO: 479390 - RNA, 19 nt, Homo sapiens
  misc_RNA (1)...(19): siRNA sense strand
gaaaaccccuucuaaaguc

SEQ ID NO: 479391 - RNA, 19 nt, Homo sapiens
  misc_RNA (1)...(19): siRNA sense strand
agugaaggacuaugaauua

SEQ ID NO: 479392 - RNA, 19 nt, Homo sapiens
  misc_RNA (1)...(19): siRNA sense strand
gaaacuacucagagaaaga

SEQ ID NO: 479393 - RNA, 19 nt, Homo sapiens
  misc_RNA (1)...(19): siRNA sense strand
uggaacgacuuaaagauga

SEQ ID NO: 479394 - RNA, 19 nt, Homo sapiens
  misc_RNA (1)...(19): siRNA sense strand
cuacaucucugaaguucga

SEQ ID NO: 479395 - RNA, 19 nt, Homo sapiens
  misc_RNA (1)...(19): siRNA sense strand
gagagaaacaccaacauag

SEQ ID NO: 479396 - RNA, 19 nt, Homo sapiens
  misc_RNA (1)...(19): siRNA sense strand
ugaauuggguugaugagau

SEQ ID NO: 479397 - RNA, 19 nt, Homo sapiens
  misc_RNA (1)...(19): siRNA sense strand
gaaauuuguucaggaucuu

SEQ ID NO: 479398 - RNA, 19 nt, Homo sapiens
  misc_RNA (1)...(19): siRNA sense strand
aaauuucaguucaggagua

SEQ ID NO: 479399 - RNA, 19 nt, Homo sapiens
  misc_RNA (1)...(19): siRNA sense strand
caaauaagugugaggaguu

SEQ ID NO: 479400 - RNA, 19 nt, Homo sapiens
  misc_RNA (1)...(19): siRNA sense strand
uaacacaacuggaaaagga

SEQ ID NO: 479401 - RNA, 19 nt, Homo sapiens
  misc_RNA (1)...(19): siRNA sense strand
gagauaaccauuuacaaag

SEQ ID NO: 479402 - RNA, 19 nt, Homo sapiens
  misc_RNA (1)...(19): siRNA sense strand
ucaaagcuaucugugacua

SEQ ID NO: 479403 - RNA, 19 nt, Homo sapiens
  misc_RNA (1)...(19): siRNA sense strand
aaacuucuauuccgaucaa

SEQ ID NO: 479404 - RNA, 19 nt, Homo sapiens
  misc_RNA (1)...(19): siRNA sense strand
ugagagaaacaccaacaua

SEQ ID NO: 479405 - RNA, 19 nt, Homo sapiens
  misc_RNA (1)...(19): siRNA sense strand
caaagaagcuaaaaucagu

SEQ ID NO: 479406 - RNA, 19 nt, Homo sapiens
  misc_RNA (1)...(19): siRNA sense strand
aggaggaaguugcuuauga

SEQ ID NO: 479407 - RNA, 19 nt, Homo sapiens
  misc_RNA (1)...(19): siRNA sense strand
aggagaaacuaaagaaaga

SEQ ID NO: 479408 - RNA, 19 nt, Homo sapiens
  misc_RNA (1)...(19): siRNA sense strand
gaagaucggcugauuagac

SEQ ID NO: 479409 - RNA, 19 nt, Homo sapiens
  misc_RNA (1)...(19): siRNA sense strand
gauauaacacaacuggaaa

SEQ ID NO: 479410 - RNA, 19 nt, Homo sapiens
  misc_RNA (1)...(19): siRNA sense strand
guacagcaaaggacgcaua

SEQ ID NO: 479411 - RNA, 19 nt, Homo sapiens
  misc_RNA (1)...(19): siRNA sense strand
gaggaugaguugcagaaag

SEQ ID NO: 479412 - RNA, 19 nt, Homo sapiens
  misc_RNA (1)...(19): siRNA sense strand
caauggagaucugaaguag

SEQ ID NO: 479413 - RNA, 19 nt, Homo sapiens
  misc_RNA (1)...(19): siRNA sense strand
ugaaccaagucuauucuau

SEQ ID NO: 479414 - RNA, 19 nt, Homo sapiens
  misc_RNA (1)...(19): siRNA sense strand
cuacagacaaauugagaua

SEQ ID NO: 479415 - RNA, 19 nt, Homo sapiens
  misc_RNA (1)...(19): siRNA sense strand
gcaguggagcuggaucuua

SEQ ID NO: 479416 - RNA, 19 nt, Homo sapiens
  misc_RNA (1)...(19): siRNA sense strand
ucacucucaugacacaaua

SEQ ID NO: 479417 - RNA, 19 nt, Homo sapiens
  misc_RNA (1)...(19): siRNA sense strand
gcaaaucacugaaguacua

SEQ ID NO: 479418 - RNA, 19 nt, Homo sapiens
  misc_RNA (1)...(19): siRNA sense strand
gaaaguguguucagaauca

SEQ ID NO: 479419 - RNA, 19 nt, Homo sapiens
  misc_RNA (1)...(19): siRNA sense strand
gaacuuauuugguugaaug

SEQ ID NO: 479420 - RNA, 19 nt, Homo sapiens
  misc_RNA (1)...(19): siRNA sense strand
ggaaagagaugauuugcau

SEQ ID NO: 479421 - RNA, 19 nt, Homo sapiens
  misc_RNA (1)...(19): siRNA sense strand
ccaaagaagcuacugauua

SEQ ID NO: 479422 - RNA, 19 nt, Homo sapiens
  misc_RNA (1)...(19): siRNA sense strand
gaaggacuaugaauuacaa

SEQ ID NO: 479423 - RNA, 19 nt, Homo sapiens
  misc_RNA (1)...(19): siRNA sense strand
agacaaagcucaugauauc

SEQ ID NO: 479424 - RNA, 19 nt, Homo sapiens
  misc_RNA (1)...(19): siRNA sense strand
cagcagaucucauuauuca

SEQ ID NO: 479425 - RNA, 19 nt, Homo sapiens
  misc_RNA (1)...(19): siRNA sense strand
caaagaagcuacugauuac

SEQ ID NO: 479426 - RNA, 19 nt, Homo sapiens
  misc_RNA (1)...(19): siRNA sense strand
gaacaugaaccaagucuau

SEQ ID NO: 479427 - RNA, 19 nt, Homo sapiens
  misc_RNA (1)...(19): siRNA sense strand
caagaggaaucaguuuaua

SEQ ID NO: 479428 - RNA, 19 nt, Homo sapiens
  misc_RNA (1)...(19): siRNA sense strand
caaaugacagcaccucuua

SEQ ID NO: 479429 - RNA, 19 nt, Homo sapiens
  misc_RNA (1)...(19): siRNA sense strand
caaagacgaugaauguguu

SEQ ID NO: 479430 - RNA, 19 nt, Homo sapiens
  misc_RNA (1)...(19): siRNA sense strand
uaaauuugcuggugauuca

SEQ ID NO: 479431 - RNA, 19 nt, Homo sapiens
  misc_RNA (1)...(19): siRNA sense strand
agaaauugcuggguauaua

SEQ ID NO: 479432 - RNA, 19 nt, Homo sapiens
  misc_RNA (1)...(19): siRNA sense strand
aggaaucacucaaaguuua

SEQ ID NO: 479433 - RNA, 19 nt, Homo sapiens
  misc_RNA (1)...(19): siRNA sense strand
gaacagacaaagcucauga

SEQ ID NO: 479434 - RNA, 19 nt, Homo sapiens
  misc_RNA (1)...(19): siRNA sense strand
gguauauacuugaauguga

SEQ ID NO: 479435 - RNA, 19 nt, Homo sapiens
  misc_RNA (1)...(19): siRNA sense strand
uaaaucaguucaggagaua

SEQ ID NO: 479436 - RNA, 19 nt, Homo sapiens
  misc_RNA (1)...(19): siRNA sense strand
gaauuugaaucuagucuca

SEQ ID NO: 479437 - RNA, 19 nt, Homo sapiens
  misc_RNA (1)...(19): siRNA sense strand
gaaauuauggccuuaagga

SEQ ID NO: 479438 - RNA, 19 nt, Homo sapiens
  misc_RNA (1)...(19): siRNA sense strand
ccaggcagaucaauuggua

SEQ ID NO: 479439 - RNA, 19 nt, Homo sapiens
  misc_RNA (1)...(19): siRNA sense strand
aaacuaaacugugugaaga

SEQ ID NO: 479440 - RNA, 19 nt, Homo sapiens
  misc_RNA (1)...(19): siRNA sense strand
caauguggcuucaauaaag

SEQ ID NO: 479441 - RNA, 19 nt, Homo sapiens
  misc_RNA (1)...(19): siRNA sense strand
uaaacugacuuaugcagaa

SEQ ID NO: 479442 - RNA, 19 nt, Homo sapiens
  misc_RNA (1)...(19): siRNA sense strand
agaagcuacugauuacuua

SEQ ID NO: 479443 - RNA, 19 nt, Homo sapiens
  misc_RNA (1)...(19): siRNA sense strand
gcagaacaguacucagcua

SEQ ID NO: 479444 - RNA, 19 nt, Homo sapiens
  misc_RNA (1)...(19): siRNA sense strand
ugaagaagaagcaguuaua

SEQ ID NO: 479445 - RNA, 19 nt, Homo sapiens
  misc_RNA (1)...(19): siRNA sense strand
uagcaaaccuaaugggaaa

SEQ ID NO: 479446 - RNA, 19 nt, Homo sapiens
  misc_RNA (1)...(19): siRNA sense strand
gaguagagccaaauucauu

SEQ ID NO: 479447 - RNA, 19 nt, Homo sapiens
  misc_RNA (1)...(19): siRNA sense strand
gaauugagcaacaguauca

SEQ ID NO: 479448 - RNA, 19 nt, Homo sapiens
  misc_RNA (1)...(19): siRNA sense strand
caacugaagccaaggaauu

SEQ ID NO: 479449 - RNA, 19 nt, Homo sapiens
  misc_RNA (1)...(19): siRNA sense strand
gaauuggguugaugagaug

SEQ ID NO: 479450 - RNA, 19 nt, Homo sapiens
  misc_RNA (1)...(19): siRNA sense strand
ggagugcaguuucagaaug

SEQ ID NO: 479451 - RNA, 19 nt, Homo sapiens
  misc_RNA (1)...(19): siRNA sense strand
caugguagauucacaacaa

SEQ ID NO: 479452 - RNA, 19 nt, Homo sapiens
  misc_RNA (1)...(19): siRNA sense strand
gcaauggagaucugaagua

SEQ ID NO: 479453 - RNA, 19 nt, Homo sapiens
  misc_RNA (1)...(19): siRNA sense strand
uaaacugugugaagaagaa

SEQ ID NO: 479454 - RNA, 19 nt, Homo sapiens
  misc_RNA (1)...(19): siRNA sense strand
ccaggaaucccaagucuuu

SEQ ID NO: 479455 - RNA, 19 nt, Homo sapiens
  misc_RNA (1)...(19): siRNA sense strand
ucccuaaccucuucuagua

SEQ ID NO: 479456 - RNA, 19 nt, Homo sapiens
  misc_RNA (1)...(19): siRNA sense strand
gaacaggagaaacuaaaga

SEQ ID NO: 479457 - RNA, 19 nt, Homo sapiens
  misc_RNA (1)...(19): siRNA sense strand
cagaauguccugacucuuu

SEQ ID NO: 479458 - RNA, 19 nt, Homo sapiens
  misc_RNA (1)...(19): siRNA sense strand
gagcaacaguaucagaaug

SEQ ID NO: 479459 - RNA, 19 nt, Homo sapiens
  misc_RNA (1)...(19): siRNA sense strand
caggauuaguuccaaauuu

SEQ ID NO: 479460 - RNA, 19 nt, Homo sapiens
  misc_RNA (1)...(19): siRNA sense strand
gcagaucaauugguacaga

SEQ ID NO: 479461 - RNA, 19 nt, Homo sapiens
  misc_RNA (1)...(19): siRNA sense strand
gaccuaaggacucgauaua

SEQ ID NO: 479462 - RNA, 19 nt, Homo sapiens
  misc_RNA (1)...(19): siRNA sense strand
gcaauguggcuucaauaaa

SEQ ID NO: 479463 - RNA, 19 nt, Homo sapiens
  misc_RNA (1)...(19): siRNA sense strand
ccaaauucauugcaaacuu

SEQ ID NO: 479464 - RNA, 19 nt, Homo sapiens
  misc_RNA (1)...(19): siRNA sense strand
guacucagcuacagugaag

SEQ ID NO: 479465 - RNA, 19 nt, Homo sapiens
  misc_RNA (1)...(19): siRNA sense strand
gcagauugacaacagguua

SEQ ID NO: 479466 - RNA, 19 nt, Homo sapiens
  misc_RNA (1)...(19): siRNA sense strand
ugggaacaaucacaaauaa

SEQ ID NO: 479467 - RNA, 19 nt, Homo sapiens
  misc_RNA (1)...(19): siRNA sense strand
gcaagaggaaucaguuuau

SEQ ID NO: 479468 - RNA, 19 nt, Homo sapiens
  misc_RNA (1)...(19): siRNA sense strand
gagugcaguuucagaauga

SEQ ID NO: 479469 - RNA, 19 nt, Homo sapiens
  misc_RNA (1)...(19): siRNA sense strand
gagcagcuacuucuagaaa

SEQ ID NO: 479470 - RNA, 19 nt, Homo sapiens
  misc_RNA (1)...(19): siRNA sense strand
guacagauucuuauugaug

SEQ ID NO: 479471 - RNA, 19 nt, Homo sapiens
  misc_RNA (1)...(19): siRNA sense strand
gaaccaagucuauucuaug

SEQ ID NO: 479472 - RNA, 19 nt, Homo sapiens
  misc_RNA (1)...(19): siRNA sense strand
ggaacaaucacaaauaagu

SEQ ID NO: 479473 - RNA, 19 nt, Homo sapiens
  misc_RNA (1)...(19): siRNA sense strand
ggaaucaguuuauaaucuc

SEQ ID NO: 479474 - RNA, 19 nt, Homo sapiens
  misc_RNA (1)...(19): siRNA sense strand
gcaguauuaucaagaacuu

SEQ ID NO: 479475 - RNA, 19 nt, Homo sapiens
  misc_RNA (1)...(19): siRNA sense strand
guugaaagccauuuagaaa

SEQ ID NO: 479476 - RNA, 19 nt, Homo sapiens
  misc_RNA (1)...(19): siRNA sense strand
gcucagauuugccaagugu

SEQ ID NO: 479477 - RNA, 19 nt, Homo sapiens
  misc_RNA (1)...(19): siRNA sense strand
gagccaaauucauugcaaa

SEQ ID NO: 479478 - RNA, 19 nt, Homo sapiens
  misc_RNA (1)...(19): siRNA sense strand
gcaaaacucuugaauacau

SEQ ID NO: 479479 - RNA, 19 nt, Homo sapiens
  misc_RNA (1)...(19): siRNA sense strand
gagaugauuugcaugaaag

SEQ ID NO: 479480 - RNA, 19 nt, Homo sapiens
  misc_RNA (1)...(19): siRNA sense strand
uuacaaagacgaugaaugu

SEQ ID NO: 479481 - RNA, 19 nt, Homo sapiens
  misc_RNA (1)...(19): siRNA sense strand
ugagagaacuugaucaaaa

SEQ ID NO: 479482 - RNA, 19 nt, Homo sapiens
  misc_RNA (1)...(19): siRNA sense strand
gaaacuaaacugugugaag

SEQ ID NO: 479483 - RNA, 19 nt, Homo sapiens
  misc_RNA (1)...(19): siRNA sense strand
ggaaucacucaaaguuuaa

SEQ ID NO: 479484 - RNA, 19 nt, Homo sapiens
  misc_RNA (1)...(19): siRNA sense strand
gaacaguacucagcuacag

SEQ ID NO: 479485 - RNA, 19 nt, Homo sapiens
  misc_RNA (1)...(19): siRNA sense strand
gaacaaucacaaauaagug

SEQ ID NO: 479486 - RNA, 19 nt, Homo sapiens
  misc_RNA (1)...(19): siRNA sense strand
gaaguacagcugugauaga

SEQ ID NO: 479487 - RNA, 19 nt, Homo sapiens
  misc_RNA (1)...(19): siRNA sense strand
gcuuaugacuggagugaga

SEQ ID NO: 479488 - RNA, 19 nt, Homo sapiens
  misc_RNA (1)...(19): siRNA sense strand
gacagcaccucuuaaacug

SEQ ID NO: 479489 - RNA, 19 nt, Homo sapiens
  misc_RNA (1)...(19): siRNA sense strand
gggcugacccagaguuuaa

SEQ ID NO: 479490 - RNA, 19 nt, Homo sapiens
  misc_RNA (1)...(19): siRNA sense strand
gaaaaccccuucuaaaguc

SEQ ID NO: 479491 - RNA, 19 nt, Homo sapiens
  misc_RNA (1)...(19): siRNA sense strand
agugaaggacuaugaauua

SEQ ID NO: 479492 - RNA, 19 nt, Homo sapiens
  misc_RNA (1)...(19): siRNA sense strand
gaaacuacucagagaaaga

SEQ ID NO: 479493 - RNA, 19 nt, Homo sapiens
  misc_RNA (1)...(19): siRNA sense strand
uggaacgacuuaaagauga

SEQ ID NO: 479494 - RNA, 19 nt, Homo sapiens
  misc_RNA (1)...(19): siRNA sense strand
cuacaucucugaaguucga

SEQ ID NO: 479495 - RNA, 19 nt, Homo sapiens
  misc_RNA (1)...(19): siRNA sense strand
gagagaaacaccaacauag

SEQ ID NO: 479496 - RNA, 19 nt, Homo sapiens
  misc_RNA (1)...(19): siRNA sense strand
ugaauuggguugaugagau

SEQ ID NO: 479497 - RNA, 19 nt, Homo sapiens
  misc_RNA (1)...(19): siRNA sense strand
gaaauuuguucaggaucuu

SEQ ID NO: 479498 - RNA, 19 nt, Homo sapiens
  misc_RNA (1)...(19): siRNA sense strand
aaauuucaguucaggagua

SEQ ID NO: 479499 - RNA, 19 nt, Homo sapiens
  misc_RNA (1)...(19): siRNA sense strand
caaauaagugugaggaguu

SEQ ID NO: 479500 - RNA, 19 nt, Homo sapiens
  misc_RNA (1)...(19): siRNA sense strand
uaacacaacuggaaaagga

SEQ ID NO: 479501 - RNA, 19 nt, Homo sapiens
  misc_RNA (1)...(19): siRNA sense strand
gagauaaccauuuacaaag

SEQ ID NO: 479502 - RNA, 19 nt, Homo sapiens
  misc_RNA (1)...(19): siRNA sense strand
ucaaagcuaucugugacua

SEQ ID NO: 479503 - RNA, 19 nt, Homo sapiens
  misc_RNA (1)...(19): siRNA sense strand
aaacuucuauuccgaucaa

SEQ ID NO: 479504 - RNA, 19 nt, Homo sapiens
  misc_RNA (1)...(19): siRNA sense strand
ugagagaaacaccaacaua

SEQ ID NO: 479505 - RNA, 19 nt, Homo sapiens
  misc_RNA (1)...(19): siRNA sense strand
caaagaagcuaaaaucagu

SEQ ID NO: 479506 - RNA, 19 nt, Homo sapiens
  misc_RNA (1)...(19): siRNA sense strand
aggaggaaguugcuuauga

SEQ ID NO: 479507 - RNA, 19 nt, Homo sapiens
  misc_RNA (1)...(19): siRNA sense strand
aggagaaacuaaagaaaga

SEQ ID NO: 479508 - RNA, 19 nt, Homo sapiens
  misc_RNA (1)...(19): siRNA sense strand
gaagaucggcugauuagac

SEQ ID NO: 479509 - RNA, 19 nt, Homo sapiens
  misc_RNA (1)...(19): siRNA sense strand
gauauaacacaacuggaaa

SEQ ID NO: 479510 - RNA, 19 nt, Homo sapiens
  misc_RNA (1)...(19): siRNA sense strand
guacagcaaaggacgcaua

SEQ ID NO: 479511 - RNA, 19 nt, Homo sapiens
  misc_RNA (1)...(19): siRNA sense strand
gaggaugaguugcagaaag

SEQ ID NO: 479512 - RNA, 19 nt, Homo sapiens
  misc_RNA (1)...(19): siRNA sense strand
caauggagaucugaaguag

SEQ ID NO: 479513 - RNA, 19 nt, Homo sapiens
  misc_RNA (1)...(19): siRNA sense strand
ugaaccaagucuauucuau

SEQ ID NO: 479514 - RNA, 19 nt, Homo sapiens
  misc_RNA (1)...(19): siRNA sense strand
cuacagacaaauugagaua

SEQ ID NO: 479515 - RNA, 19 nt, Homo sapiens
  misc_RNA (1)...(19): siRNA sense strand
gcaguggagcuggaucuua

SEQ ID NO: 479516 - RNA, 19 nt, Homo sapiens
  misc_RNA (1)...(19): siRNA sense strand
ucacucucaugacacaaua

SEQ ID NO: 479517 - RNA, 19 nt, Homo sapiens
  misc_RNA (1)...(19): siRNA sense strand
gcaaaucacugaaguacua

SEQ ID NO: 479518 - RNA, 19 nt, Homo sapiens
  misc_RNA (1)...(19): siRNA sense strand
gaaaguguguucagaauca

SEQ ID NO: 479519 - RNA, 19 nt, Homo sapiens
  misc_RNA (1)...(19): siRNA sense strand
gaacuuauuugguugaaug

SEQ ID NO: 479520 - RNA, 19 nt, Homo sapiens
  misc_RNA (1)...(19): siRNA sense strand
ggaaagagaugauuugcau

SEQ ID NO: 479521 - RNA, 19 nt, Homo sapiens
  misc_RNA (1)...(19): siRNA sense strand
ccaaagaagcuacugauua

SEQ ID NO: 479522 - RNA, 19 nt, Homo sapiens
  misc_RNA (1)...(19): siRNA sense strand
gaaggacuaugaauuacaa

SEQ ID NO: 479523 - RNA, 19 nt, Homo sapiens
  misc_RNA (1)...(19): siRNA sense strand
agacaaagcucaugauauc

SEQ ID NO: 479524 - RNA, 19 nt, Homo sapiens
  misc_RNA (1)...(19): siRNA sense strand
cagcagaucucauuauuca

SEQ ID NO: 479525 - RNA, 19 nt, Homo sapiens
  misc_RNA (1)...(19): siRNA sense strand
caaagaagcuacugauuac

SEQ ID NO: 479526 - RNA, 19 nt, Homo sapiens
  misc_RNA (1)...(19): siRNA sense strand
gaacaugaaccaagucuau

SEQ ID NO: 479527 - RNA, 19 nt, Homo sapiens
  misc_RNA (1)...(19): siRNA sense strand
caagaggaaucaguuuaua

SEQ ID NO: 479528 - RNA, 19 nt, Homo sapiens
  misc_RNA (1)...(19): siRNA sense strand
caaaugacagcaccucuua

SEQ ID NO: 479529 - RNA, 19 nt, Homo sapiens
  misc_RNA (1)...(19): siRNA sense strand
caaagacgaugaauguguu

SEQ ID NO: 479530 - RNA, 19 nt, Homo sapiens
  misc_RNA (1)...(19): siRNA sense strand
uaaauuugcuggugauuca

SEQ ID NO: 479531 - RNA, 19 nt, Homo sapiens
  misc_RNA (1)...(19): siRNA sense strand
agaaauugcuggguauaua

SEQ ID NO: 479532 - RNA, 19 nt, Homo sapiens
  misc_RNA (1)...(19): siRNA sense strand
aggaaucacucaaaguuua

SEQ ID NO: 479533 - RNA, 19 nt, Homo sapiens
  misc_RNA (1)...(19): siRNA sense strand
gaacagacaaagcucauga

SEQ ID NO: 479534 - RNA, 19 nt, Homo sapiens
  misc_RNA (1)...(19): siRNA sense strand
gguauauacuugaauguga

SEQ ID NO: 479535 - RNA, 19 nt, Homo sapiens
  misc_RNA (1)...(19): siRNA sense strand
uaaaucaguucaggagaua

SEQ ID NO: 479536 - RNA, 19 nt, Homo sapiens
  misc_RNA (1)...(19): siRNA sense strand
gaauuugaaucuagucuca

SEQ ID NO: 479537 - RNA, 19 nt, Homo sapiens
  misc_RNA (1)...(19): siRNA sense strand
gaaauuauggccuuaagga

SEQ ID NO: 479538 - RNA, 19 nt, Homo sapiens
  misc_RNA (1)...(19): siRNA sense strand
ccaggcagaucaauuggua

SEQ ID NO: 479539 - RNA, 19 nt, Homo sapiens
  misc_RNA (1)...(19): siRNA sense strand
aaacuaaacugugugaaga

SEQ ID NO: 479540 - RNA, 19 nt, Homo sapiens
  misc_RNA (1)...(19): siRNA sense strand
caauguggcuucaauaaag

SEQ ID NO: 479541 - RNA, 19 nt, Homo sapiens
  misc_RNA (1)...(19): siRNA sense strand
uaaacugacuuaugcagaa

SEQ ID NO: 479542 - RNA, 19 nt, Homo sapiens
  misc_RNA (1)...(19): siRNA sense strand
agaagcuacugauuacuua

SEQ ID NO: 479543 - RNA, 19 nt, Homo sapiens
  misc_RNA (1)...(19): siRNA sense strand
gcagaacaguacucagcua

SEQ ID NO: 479544 - RNA, 19 nt, Homo sapiens
  misc_RNA (1)...(19): siRNA sense strand
ugaagaagaagcaguuaua

SEQ ID NO: 479545 - RNA, 19 nt, Homo sapiens
  misc_RNA (1)...(19): siRNA sense strand
uagcaaaccuaaugggaaa

SEQ ID NO: 479546 - RNA, 19 nt, Homo sapiens
  misc_RNA (1)...(19): siRNA sense strand
gaguagagccaaauucauu

SEQ ID NO: 479547 - RNA, 19 nt, Homo sapiens
  misc_RNA (1)...(19): siRNA sense strand
gaauugagcaacaguauca

SEQ ID NO: 479548 - RNA, 19 nt, Homo sapiens
  misc_RNA (1)...(19): siRNA sense strand
caacugaagccaaggaauu

SEQ ID NO: 479549 - RNA, 19 nt, Homo sapiens
  misc_RNA (1)...(19): siRNA sense strand
gaauuggguugaugagaug

SEQ ID NO: 479550 - RNA, 19 nt, Homo sapiens
  misc_RNA (1)...(19): siRNA sense strand
ggagugcaguuucagaaug

SEQ ID NO: 479551 - RNA, 19 nt, Homo sapiens
  misc_RNA (1)...(19): siRNA sense strand
caugguagauucacaacaa

SEQ ID NO: 479552 - RNA, 19 nt, Homo sapiens
  misc_RNA (1)...(19): siRNA sense strand
gcaauggagaucugaagua

SEQ ID NO: 479553 - RNA, 19 nt, Homo sapiens
  misc_RNA (1)...(19): siRNA sense strand
uaaacugugugaagaagaa

SEQ ID NO: 479554 - RNA, 19 nt, Homo sapiens
  misc_RNA (1)...(19): siRNA sense strand
ccaggaaucccaagucuuu

SEQ ID NO: 479555 - RNA, 19 nt, Homo sapiens
  misc_RNA (1)...(19): siRNA sense strand
ucccuaaccucuucuagua

SEQ ID NO: 479556 - RNA, 19 nt, Homo sapiens
  misc_RNA (1)...(19): siRNA sense strand
gaacaggagaaacuaaaga

SEQ ID NO: 479557 - RNA, 19 nt, Homo sapiens
  misc_RNA (1)...(19): siRNA sense strand
cagaauguccugacucuuu

SEQ ID NO: 479558 - RNA, 19 nt, Homo sapiens
  misc_RNA (1)...(19): siRNA sense strand
gagcaacaguaucagaaug

SEQ ID NO: 479559 - RNA, 19 nt, Homo sapiens
  misc_RNA (1)...(19): siRNA sense strand
caggauuaguuccaaauuu

SEQ ID NO: 479560 - RNA, 19 nt, Homo sapiens
  misc_RNA (1)...(19): siRNA sense strand
gcagaucaauugguacaga

SEQ ID NO: 479561 - RNA, 19 nt, Homo sapiens
  misc_RNA (1)...(19): siRNA sense strand
gaccuaaggacucgauaua

SEQ ID NO: 479562 - RNA, 19 nt, Homo sapiens
  misc_RNA (1)...(19): siRNA sense strand
gcaauguggcuucaauaaa

SEQ ID NO: 479563 - RNA, 19 nt, Homo sapiens
  misc_RNA (1)...(19): siRNA sense strand
ccaaauucauugcaaacuu

SEQ ID NO: 479564 - RNA, 19 nt, Homo sapiens
  misc_RNA (1)...(19): siRNA sense strand
guacucagcuacagugaag

SEQ ID NO: 479565 - RNA, 19 nt, Homo sapiens
  misc_RNA (1)...(19): siRNA sense strand
gcagauugacaacagguua

SEQ ID NO: 479566 - RNA, 19 nt, Homo sapiens
  misc_RNA (1)...(19): siRNA sense strand
ugggaacaaucacaaauaa

SEQ ID NO: 479567 - RNA, 19 nt, Homo sapiens
  misc_RNA (1)...(19): siRNA sense strand
gcaagaggaaucaguuuau

SEQ ID NO: 479568 - RNA, 19 nt, Homo sapiens
  misc_RNA (1)...(19): siRNA sense strand
gagugcaguuucagaauga

SEQ ID NO: 479569 - RNA, 19 nt, Homo sapiens
  misc_RNA (1)...(19): siRNA sense strand
gagcagcuacuucuagaaa

SEQ ID NO: 479570 - RNA, 19 nt, Homo sapiens
  misc_RNA (1)...(19): siRNA sense strand
guacagauucuuauugaug

SEQ ID NO: 479571 - RNA, 19 nt, Homo sapiens
  misc_RNA (1)...(19): siRNA sense strand
gaaccaagucuauucuaug

SEQ ID NO: 479572 - RNA, 19 nt, Homo sapiens
  misc_RNA (1)...(19): siRNA sense strand
ggaacaaucacaaauaagu

SEQ ID NO: 479573 - RNA, 19 nt, Homo sapiens
  misc_RNA (1)...(19): siRNA sense strand
ggaaucaguuuauaaucuc

SEQ ID NO: 479574 - RNA, 19 nt, Homo sapiens
  misc_RNA (1)...(19): siRNA sense strand
gcaguauuaucaagaacuu

SEQ ID NO: 479575 - RNA, 19 nt, Homo sapiens
  misc_RNA (1)...(19): siRNA sense strand
guugaaagccauuuagaaa

SEQ ID NO: 479576 - RNA, 19 nt, Homo sapiens
  misc_RNA (1)...(19): siRNA sense strand
gcucagauuugccaagugu

SEQ ID NO: 479577 - RNA, 19 nt, Homo sapiens
  misc_RNA (1)...(19): siRNA sense strand
gagccaaauucauugcaaa

SEQ ID NO: 479578 - RNA, 19 nt, Homo sapiens
  misc_RNA (1)...(19): siRNA sense strand
gcaaaacucuugaauacau

SEQ ID NO: 479579 - RNA, 19 nt, Homo sapiens
  misc_RNA (1)...(19): siRNA sense strand
gagaugauuugcaugaaag

SEQ ID NO: 479580 - RNA, 19 nt, Homo sapiens
  misc_RNA (1)...(19): siRNA sense strand
uuacaaagacgaugaaugu

SEQ ID NO: 479581 - RNA, 19 nt, Homo sapiens
  misc_RNA (1)...(19): siRNA sense strand
ugagagaacuugaucaaaa

SEQ ID NO: 479582 - RNA, 19 nt, Homo sapiens
  misc_RNA (1)...(19): siRNA sense strand
gaaacuaaacugugugaag

SEQ ID NO: 479583 - RNA, 19 nt, Homo sapiens
  misc_RNA (1)...(19): siRNA sense strand
ggaaucacucaaaguuuaa

SEQ ID NO: 479584 - RNA, 19 nt, Homo sapiens
  misc_RNA (1)...(19): siRNA sense strand
gaacaguacucagcuacag

SEQ ID NO: 479585 - RNA, 19 nt, Homo sapiens
  misc_RNA (1)...(19): siRNA sense strand
gaacaaucacaaauaagug

SEQ ID NO: 479586 - RNA, 19 nt, Homo sapiens
  misc_RNA (1)...(19): siRNA sense strand
gaaguacagcugugauaga

SEQ ID NO: 479587 - RNA, 19 nt, Homo sapiens
  misc_RNA (1)...(19): siRNA sense strand
gcuuaugacuggagugaga

SEQ ID NO: 479588 - RNA, 19 nt, Homo sapiens
  misc_RNA (1)...(19): siRNA sense strand
gacagcaccucuuaaacug

SEQ ID NO: 479589 - RNA, 19 nt, Homo sapiens
  misc_RNA (1)...(19): siRNA sense strand
gggcugacccagaguuuaa

SEQ ID NO: 479590 - RNA, 19 nt, Homo sapiens
  misc_RNA (1)...(19): siRNA sense strand
gaaaaccccuucuaaaguc

SEQ ID NO: 479591 - RNA, 19 nt, Homo sapiens
  misc_RNA (1)...(19): siRNA sense strand
agugaaggacuaugaauua

SEQ ID NO: 479592 - RNA, 19 nt, Homo sapiens
  misc_RNA (1)...(19): siRNA sense strand
gaaacuacucagagaaaga

SEQ ID NO: 479593 - RNA, 19 nt, Homo sapiens
  misc_RNA (1)...(19): siRNA sense strand
uggaacgacuuaaagauga

SEQ ID NO: 479594 - RNA, 19 nt, Homo sapiens
  misc_RNA (1)...(19): siRNA sense strand
cuacaucucugaaguucga

SEQ ID NO: 479595 - RNA, 19 nt, Homo sapiens
  misc_RNA (1)...(19): siRNA sense strand
gagagaaacaccaacauag

SEQ ID NO: 479596 - RNA, 19 nt, Homo sapiens
  misc_RNA (1)...(19): siRNA sense strand
ugaauuggguugaugagau

SEQ ID NO: 479597 - RNA, 19 nt, Homo sapiens
  misc_RNA (1)...(19): siRNA sense strand
gaaauuuguucaggaucuu

SEQ ID NO: 479598 - RNA, 19 nt, Homo sapiens
  misc_RNA (1)...(19): siRNA sense strand
aaauuucaguucaggagua

SEQ ID NO: 479599 - RNA, 19 nt, Homo sapiens
  misc_RNA (1)...(19): siRNA sense strand
caaauaagugugaggaguu

SEQ ID NO: 479600 - RNA, 19 nt, Homo sapiens
  misc_RNA (1)...(19): siRNA sense strand
uaacacaacuggaaaagga

SEQ ID NO: 479601 - RNA, 19 nt, Homo sapiens
  misc_RNA (1)...(19): siRNA sense strand
gagauaaccauuuacaaag

SEQ ID NO: 479602 - RNA, 19 nt, Homo sapiens
  misc_RNA (1)...(19): siRNA sense strand
ucaaagcuaucugugacua

SEQ ID NO: 479603 - RNA, 19 nt, Homo sapiens
  misc_RNA (1)...(19): siRNA sense strand
aaacuucuauuccgaucaa

SEQ ID NO: 479604 - RNA, 19 nt, Homo sapiens
  misc_RNA (1)...(19): siRNA sense strand
ugagagaaacaccaacaua

SEQ ID NO: 479605 - RNA, 19 nt, Homo sapiens
  misc_RNA (1)...(19): siRNA sense strand
caaagaagcuaaaaucagu

SEQ ID NO: 479606 - RNA, 19 nt, Homo sapiens
  misc_RNA (1)...(19): siRNA sense strand
aggaggaaguugcuuauga

SEQ ID NO: 479607 - RNA, 19 nt, Homo sapiens
  misc_RNA (1)...(19): siRNA sense strand
aggagaaacuaaagaaaga

SEQ ID NO: 479608 - RNA, 19 nt, Homo sapiens
  misc_RNA (1)...(19): siRNA sense strand
gaagaucggcugauuagac

SEQ ID NO: 479609 - RNA, 19 nt, Homo sapiens
  misc_RNA (1)...(19): siRNA sense strand
gauauaacacaacuggaaa

SEQ ID NO: 479610 - RNA, 19 nt, Homo sapiens
  misc_RNA (1)...(19): siRNA sense strand
guacagcaaaggacgcaua

SEQ ID NO: 479611 - RNA, 19 nt, Homo sapiens
  misc_RNA (1)...(19): siRNA sense strand
gaggaugaguugcagaaag

SEQ ID NO: 479612 - RNA, 19 nt, Homo sapiens
  misc_RNA (1)...(19): siRNA sense strand
caauggagaucugaaguag

SEQ ID NO: 479613 - RNA, 19 nt, Homo sapiens
  misc_RNA (1)...(19): siRNA sense strand
ugaaccaagucuauucuau

SEQ ID NO: 479614 - RNA, 19 nt, Homo sapiens
  misc_RNA (1)...(19): siRNA sense strand
cuacagacaaauugagaua

SEQ ID NO: 479615 - RNA, 19 nt, Homo sapiens
  misc_RNA (1)...(19): siRNA sense strand
gcaguggagcuggaucuua

SEQ ID NO: 479616 - RNA, 19 nt, Homo sapiens
  misc_RNA (1)...(19): siRNA sense strand
ucacucucaugacacaaua

SEQ ID NO: 479617 - RNA, 19 nt, Homo sapiens
  misc_RNA (1)...(19): siRNA sense strand
gcaaaucacugaaguacua

SEQ ID NO: 479618 - RNA, 19 nt, Homo sapiens
  misc_RNA (1)...(19): siRNA sense strand
gaaaguguguucagaauca

SEQ ID NO: 479619 - RNA, 19 nt, Homo sapiens
  misc_RNA (1)...(19): siRNA sense strand
gaacuuauuugguugaaug

SEQ ID NO: 479620 - RNA, 19 nt, Homo sapiens
  misc_RNA (1)...(19): siRNA sense strand
ggaaagagaugauuugcau

SEQ ID NO: 479621 - RNA, 19 nt, Homo sapiens
  misc_RNA (1)...(19): siRNA sense strand
ccaaagaagcuacugauua

SEQ ID NO: 479622 - RNA, 19 nt, Homo sapiens
  misc_RNA (1)...(19): siRNA sense strand
gaaggacuaugaauuacaa

SEQ ID NO: 479623 - RNA, 19 nt, Homo sapiens
  misc_RNA (1)...(19): siRNA sense strand
agacaaagcucaugauauc

SEQ ID NO: 479624 - RNA, 19 nt, Homo sapiens
  misc_RNA (1)...(19): siRNA sense strand
cagcagaucucauuauuca

SEQ ID NO: 479625 - RNA, 19 nt, Homo sapiens
  misc_RNA (1)...(19): siRNA sense strand
caaagaagcuacugauuac

SEQ ID NO: 479626 - RNA, 19 nt, Homo sapiens
  misc_RNA (1)...(19): siRNA sense strand
gaacaugaaccaagucuau

SEQ ID NO: 479627 - RNA, 19 nt, Homo sapiens
  misc_RNA (1)...(19): siRNA sense strand
caagaggaaucaguuuaua

SEQ ID NO: 479628 - RNA, 19 nt, Homo sapiens
  misc_RNA (1)...(19): siRNA sense strand
caaaugacagcaccucuua

SEQ ID NO: 479629 - RNA, 19 nt, Homo sapiens
  misc_RNA (1)...(19): siRNA sense strand
caaagacgaugaauguguu

SEQ ID NO: 479630 - RNA, 19 nt, Homo sapiens
  misc_RNA (1)...(19): siRNA sense strand
uaaauuugcuggugauuca

SEQ ID NO: 479631 - RNA, 19 nt, Homo sapiens
  misc_RNA (1)...(19): siRNA sense strand
agaaauugcuggguauaua

SEQ ID NO: 479632 - RNA, 19 nt, Homo sapiens
  misc_RNA (1)...(19): siRNA sense strand
aggaaucacucaaaguuua

SEQ ID NO: 479633 - RNA, 19 nt, Homo sapiens
  misc_RNA (1)...(19): siRNA sense strand
gaacagacaaagcucauga

SEQ ID NO: 479634 - RNA, 19 nt, Homo sapiens
  misc_RNA (1)...(19): siRNA sense strand
gguauauacuugaauguga

SEQ ID NO: 479635 - RNA, 19 nt, Homo sapiens
  misc_RNA (1)...(19): siRNA sense strand
uaaaucaguucaggagaua

SEQ ID NO: 479636 - RNA, 19 nt, Homo sapiens
  misc_RNA (1)...(19): siRNA sense strand
gaauuugaaucuagucuca

SEQ ID NO: 479637 - RNA, 19 nt, Homo sapiens
  misc_RNA (1)...(19): siRNA sense strand
gaaauuauggccuuaagga

SEQ ID NO: 479638 - RNA, 19 nt, Homo sapiens
  misc_RNA (1)...(19): siRNA sense strand
ccaggcagaucaauuggua

SEQ ID NO: 479639 - RNA, 19 nt, Homo sapiens
  misc_RNA (1)...(19): siRNA sense strand
aaacuaaacugugugaaga

SEQ ID NO: 479640 - RNA, 19 nt, Homo sapiens
  misc_RNA (1)...(19): siRNA sense strand
caauguggcuucaauaaag

SEQ ID NO: 479641 - RNA, 19 nt, Homo sapiens
  misc_RNA (1)...(19): siRNA sense strand
uaaacugacuuaugcagaa

SEQ ID NO: 479642 - RNA, 19 nt, Homo sapiens
  misc_RNA (1)...(19): siRNA sense strand
agaagcuacugauuacuua

SEQ ID NO: 479643 - RNA, 19 nt, Homo sapiens
  misc_RNA (1)...(19): siRNA sense strand
gcagaacaguacucagcua

SEQ ID NO: 479644 - RNA, 19 nt, Homo sapiens
  misc_RNA (1)...(19): siRNA sense strand
ugaagaagaagcaguuaua

SEQ ID NO: 479645 - RNA, 19 nt, Homo sapiens
  misc_RNA (1)...(19): siRNA sense strand
uagcaaaccuaaugggaaa

SEQ ID NO: 479646 - RNA, 19 nt, Homo sapiens
  misc_RNA (1)...(19): siRNA sense strand
gaguagagccaaauucauu

SEQ ID NO: 479647 - RNA, 19 nt, Homo sapiens
  misc_RNA (1)...(19): siRNA sense strand
gaauugagcaacaguauca

SEQ ID NO: 479648 - RNA, 19 nt, Homo sapiens
  misc_RNA (1)...(19): siRNA sense strand
caacugaagccaaggaauu

SEQ ID NO: 479649 - RNA, 19 nt, Homo sapiens
  misc_RNA (1)...(19): siRNA sense strand
gaauuggguugaugagaug

SEQ ID NO: 479650 - RNA, 19 nt, Homo sapiens
  misc_RNA (1)...(19): siRNA sense strand
ggagugcaguuucagaaug

SEQ ID NO: 479651 - RNA, 19 nt, Homo sapiens
  misc_RNA (1)...(19): siRNA sense strand
caugguagauucacaacaa

SEQ ID NO: 479652 - RNA, 19 nt, Homo sapiens
  misc_RNA (1)...(19): siRNA sense strand
gcaauggagaucugaagua

SEQ ID NO: 479653 - RNA, 19 nt, Homo sapiens
  misc_RNA (1)...(19): siRNA sense strand
uaaacugugugaagaagaa

SEQ ID NO: 479654 - RNA, 19 nt, Homo sapiens
  misc_RNA (1)...(19): siRNA sense strand
ccaggaaucccaagucuuu

SEQ ID NO: 479655 - RNA, 19 nt, Homo sapiens
  misc_RNA (1)...(19): siRNA sense strand
ucccuaaccucuucuagua

SEQ ID NO: 479656 - RNA, 19 nt, Homo sapiens
  misc_RNA (1)...(19): siRNA sense strand
gaacaggagaaacuaaaga

SEQ ID NO: 479657 - RNA, 19 nt, Homo sapiens
  misc_RNA (1)...(19): siRNA sense strand
cagaauguccugacucuuu

SEQ ID NO: 479658 - RNA, 19 nt, Homo sapiens
  misc_RNA (1)...(19): siRNA sense strand
gagcaacaguaucagaaug

SEQ ID NO: 479659 - RNA, 19 nt, Homo sapiens
  misc_RNA (1)...(19): siRNA sense strand
caggauuaguuccaaauuu

SEQ ID NO: 479660 - RNA, 19 nt, Homo sapiens
  misc_RNA (1)...(19): siRNA sense strand
gcagaucaauugguacaga

SEQ ID NO: 479661 - RNA, 19 nt, Homo sapiens
  misc_RNA (1)...(19): siRNA sense strand
gaccuaaggacucgauaua

SEQ ID NO: 479662 - RNA, 19 nt, Homo sapiens
  misc_RNA (1)...(19): siRNA sense strand
gcaauguggcuucaauaaa

SEQ ID NO: 479663 - RNA, 19 nt, Homo sapiens
  misc_RNA (1)...(19): siRNA sense strand
ccaaauucauugcaaacuu

SEQ ID NO: 479664 - RNA, 19 nt, Homo sapiens
  misc_RNA (1)...(19): siRNA sense strand
guacucagcuacagugaag

SEQ ID NO: 479665 - RNA, 19 nt, Homo sapiens
  misc_RNA (1)...(19): siRNA sense strand
gcagauugacaacagguua

SEQ ID NO: 479666 - RNA, 19 nt, Homo sapiens
  misc_RNA (1)...(19): siRNA sense strand
ugggaacaaucacaaauaa

SEQ ID NO: 479667 - RNA, 19 nt, Homo sapiens
  misc_RNA (1)...(19): siRNA sense strand
gcaagaggaaucaguuuau

SEQ ID NO: 479668 - RNA, 19 nt, Homo sapiens
  misc_RNA (1)...(19): siRNA sense strand
gagugcaguuucagaauga

SEQ ID NO: 479669 - RNA, 19 nt, Homo sapiens
  misc_RNA (1)...(19): siRNA sense strand
gagcagcuacuucuagaaa

SEQ ID NO: 479670 - RNA, 19 nt, Homo sapiens
  misc_RNA (1)...(19): siRNA sense strand
guacagauucuuauugaug

SEQ ID NO: 479671 - RNA, 19 nt, Homo sapiens
  misc_RNA (1)...(19): siRNA sense strand
gaaccaagucuauucuaug

SEQ ID NO: 479672 - RNA, 19 nt, Homo sapiens
  misc_RNA (1)...(19): siRNA sense strand
ggaacaaucacaaauaagu

SEQ ID NO: 479673 - RNA, 19 nt, Homo sapiens
  misc_RNA (1)...(19): siRNA sense strand
ggaaucaguuuauaaucuc

SEQ ID NO: 479674 - RNA, 19 nt, Homo sapiens
  misc_RNA (1)...(19): siRNA sense strand
gcaguauuaucaagaacuu

SEQ ID NO: 479675 - RNA, 19 nt, Homo sapiens
  misc_RNA (1)...(19): siRNA sense strand
guugaaagccauuuagaaa

SEQ ID NO: 479676 - RNA, 19 nt, Homo sapiens
  misc_RNA (1)...(19): siRNA sense strand
gcucagauuugccaagugu

SEQ ID NO: 479677 - RNA, 19 nt, Homo sapiens
  misc_RNA (1)...(19): siRNA sense strand
gagccaaauucauugcaaa

SEQ ID NO: 479678 - RNA, 19 nt, Homo sapiens
  misc_RNA (1)...(19): siRNA sense strand
gcaaaacucuugaauacau

SEQ ID NO: 479679 - RNA, 19 nt, Homo sapiens
  misc_RNA (1)...(19): siRNA sense strand
gagaugauuugcaugaaag

SEQ ID NO: 479680 - RNA, 19 nt, Homo sapiens
  misc_RNA (1)...(19): siRNA sense strand
uuacaaagacgaugaaugu

SEQ ID NO: 479681 - RNA, 19 nt, Homo sapiens
  misc_RNA (1)...(19): siRNA sense strand
ugagagaacuugaucaaaa

SEQ ID NO: 479682 - RNA, 19 nt, Homo sapiens
  misc_RNA (1)...(19): siRNA sense strand
gaaacuaaacugugugaag

SEQ ID NO: 479683 - RNA, 19 nt, Homo sapiens
  misc_RNA (1)...(19): siRNA sense strand
ggaaucacucaaaguuuaa

SEQ ID NO: 479684 - RNA, 19 nt, Homo sapiens
  misc_RNA (1)...(19): siRNA sense strand
gaacaguacucagcuacag

SEQ ID NO: 479685 - RNA, 19 nt, Homo sapiens
  misc_RNA (1)...(19): siRNA sense strand
gaacaaucacaaauaagug

SEQ ID NO: 479686 - RNA, 19 nt, Homo sapiens
  misc_RNA (1)...(19): siRNA sense strand
gaaguacagcugugauaga

SEQ ID NO: 479687 - RNA, 19 nt, Homo sapiens
  misc_RNA (1)...(19): siRNA sense strand
gcuuaugacuggagugaga

SEQ ID NO: 479688 - RNA, 19 nt, Homo sapiens
  misc_RNA (1)...(19): siRNA sense strand
gacagcaccucuuaaacug

SEQ ID NO: 479689 - RNA, 19 nt, Homo sapiens
  misc_RNA (1)...(19): siRNA sense strand
gggcugacccagaguuuaa

SEQ ID NO: 479690 - RNA, 19 nt, Homo sapiens
  misc_RNA (1)...(19): siRNA sense strand
gaaaaccccuucuaaaguc

SEQ ID NO: 479691 - RNA, 19 nt, Homo sapiens
  misc_RNA (1)...(19): siRNA sense strand
agugaaggacuaugaauua

SEQ ID NO: 479692 - RNA, 19 nt, Homo sapiens
  misc_RNA (1)...(19): siRNA sense strand
gaaacuacucagagaaaga

SEQ ID NO: 479693 - RNA, 19 nt, Homo sapiens
  misc_RNA (1)...(19): siRNA sense strand
uggaacgacuuaaagauga

SEQ ID NO: 479694 - RNA, 19 nt, Homo sapiens
  misc_RNA (1)...(19): siRNA sense strand
cuacaucucugaaguucga

SEQ ID NO: 479695 - RNA, 19 nt, Homo sapiens
  misc_RNA (1)...(19): siRNA sense strand
gagagaaacaccaacauag

SEQ ID NO: 479696 - RNA, 19 nt, Homo sapiens
  misc_RNA (1)...(19): siRNA sense strand
ugaauuggguugaugagau

SEQ ID NO: 479697 - RNA, 19 nt, Homo sapiens
  misc_RNA (1)...(19): siRNA sense strand
gaaauuuguucaggaucuu

SEQ ID NO: 479698 - RNA, 19 nt, Homo sapiens
  misc_RNA (1)...(19): siRNA sense strand
aaauuucaguucaggagua

SEQ ID NO: 479699 - RNA, 19 nt, Homo sapiens
  misc_RNA (1)...(19): siRNA sense strand
caaauaagugugaggaguu

SEQ ID NO: 479700 - RNA, 19 nt, Homo sapiens
  misc_RNA (1)...(19): siRNA sense strand
uaacacaacuggaaaagga

SEQ ID NO: 479701 - RNA, 19 nt, Homo sapiens
  misc_RNA (1)...(19): siRNA sense strand
gagauaaccauuuacaaag

SEQ ID NO: 479702 - RNA, 19 nt, Homo sapiens
  misc_RNA (1)...(19): siRNA sense strand
ucaaagcuaucugugacua

SEQ ID NO: 479703 - RNA, 19 nt, Homo sapiens
  misc_RNA (1)...(19): siRNA sense strand
aaacuucuauuccgaucaa

SEQ ID NO: 479704 - RNA, 19 nt, Homo sapiens
  misc_RNA (1)...(19): siRNA sense strand
ugagagaaacaccaacaua

SEQ ID NO: 479705 - RNA, 19 nt, Homo sapiens
  misc_RNA (1)...(19): siRNA sense strand
caaagaagcuaaaaucagu

SEQ ID NO: 479706 - RNA, 19 nt, Homo sapiens
  misc_RNA (1)...(19): siRNA sense strand
aggaggaaguugcuuauga

SEQ ID NO: 479707 - RNA, 19 nt, Homo sapiens
  misc_RNA (1)...(19): siRNA sense strand
aggagaaacuaaagaaaga

SEQ ID NO: 479708 - RNA, 19 nt, Homo sapiens
  misc_RNA (1)...(19): siRNA sense strand
gaagaucggcugauuagac

SEQ ID NO: 479709 - RNA, 19 nt, Homo sapiens
  misc_RNA (1)...(19): siRNA sense strand
gauauaacacaacuggaaa

SEQ ID NO: 479710 - RNA, 19 nt, Homo sapiens
  misc_RNA (1)...(19): siRNA sense strand
guacagcaaaggacgcaua

SEQ ID NO: 479711 - RNA, 19 nt, Homo sapiens
  misc_RNA (1)...(19): siRNA sense strand
gaggaugaguugcagaaag

SEQ ID NO: 479712 - RNA, 19 nt, Homo sapiens
  misc_RNA (1)...(19): siRNA sense strand
caauggagaucugaaguag

SEQ ID NO: 479713 - RNA, 19 nt, Homo sapiens
  misc_RNA (1)...(19): siRNA sense strand
ugaaccaagucuauucuau

SEQ ID NO: 479714 - RNA, 19 nt, Homo sapiens
  misc_RNA (1)...(19): siRNA sense strand
cuacagacaaauugagaua

SEQ ID NO: 479715 - RNA, 19 nt, Homo sapiens
  misc_RNA (1)...(19): siRNA sense strand
gcaguggagcuggaucuua

SEQ ID NO: 479716 - RNA, 19 nt, Homo sapiens
  misc_RNA (1)...(19): siRNA sense strand
ucacucucaugacacaaua

SEQ ID NO: 479717 - RNA, 19 nt, Homo sapiens
  misc_RNA (1)...(19): siRNA sense strand
gaagaucugugucauauug

SEQ ID NO: 479718 - RNA, 19 nt, Homo sapiens
  misc_RNA (1)...(19): siRNA sense strand
gaaugaaauugccauguuu

SEQ ID NO: 479719 - RNA, 19 nt, Homo sapiens
  misc_RNA (1)...(19): siRNA sense strand
agaagaagcugaaauacaa

SEQ ID NO: 479720 - RNA, 19 nt, Homo sapiens
  misc_RNA (1)...(19): siRNA sense strand
gaaaguagacucuccauca

SEQ ID NO: 479721 - RNA, 19 nt, Homo sapiens
  misc_RNA (1)...(19): siRNA sense strand
ucaagaaccugcaugauga

SEQ ID NO: 479722 - RNA, 19 nt, Homo sapiens
  misc_RNA (1)...(19): siRNA sense strand
gcaaauccauggaaauugu

SEQ ID NO: 479723 - RNA, 19 nt, Homo sapiens
  misc_RNA (1)...(19): siRNA sense strand
ggacaagggcuuccaguuu

SEQ ID NO: 479724 - RNA, 19 nt, Homo sapiens
  misc_RNA (1)...(19): siRNA sense strand
gagcacaucuaccaucuga

SEQ ID NO: 479725 - RNA, 19 nt, Homo sapiens
  misc_RNA (1)...(19): siRNA sense strand
ggaacaaagugaccucuug

SEQ ID NO: 479726 - RNA, 19 nt, Homo sapiens
  misc_RNA (1)...(19): siRNA sense strand
gaauguaucgucagaauga

SEQ ID NO: 479727 - RNA, 19 nt, Homo sapiens
  misc_RNA (1)...(19): siRNA sense strand
ggacaaaggaaucuugaaa

SEQ ID NO: 479728 - RNA, 19 nt, Homo sapiens
  misc_RNA (1)...(19): siRNA sense strand
gugauaaucuuuccuuaga

SEQ ID NO: 479729 - RNA, 19 nt, Homo sapiens
  misc_RNA (1)...(19): siRNA sense strand
gaaguucuguuaucuccaa

SEQ ID NO: 479730 - RNA, 19 nt, Homo sapiens
  misc_RNA (1)...(19): siRNA sense strand
gaagggaacuuagaagaag

SEQ ID NO: 479731 - RNA, 19 nt, Homo sapiens
  misc_RNA (1)...(19): siRNA sense strand
gaacuuagaagaagcugaa

SEQ ID NO: 479732 - RNA, 19 nt, Homo sapiens
  misc_RNA (1)...(19): siRNA sense strand
gaacaacugcagagagaaa

SEQ ID NO: 479733 - RNA, 19 nt, Homo sapiens
  misc_RNA (1)...(19): siRNA sense strand
gaagcgaagucccggagaa

SEQ ID NO: 479734 - RNA, 19 nt, Homo sapiens
  misc_RNA (1)...(19): siRNA sense strand
gcgcuggaauuaaaugaaa

SEQ ID NO: 479735 - RNA, 19 nt, Homo sapiens
  misc_RNA (1)...(19): siRNA sense strand
gagagauugucaucaagaa

SEQ ID NO: 479736 - RNA, 19 nt, Homo sapiens
  misc_RNA (1)...(19): siRNA sense strand
ggaagggaacuuagaagaa

SEQ ID NO: 479737 - RNA, 19 nt, Homo sapiens
  misc_RNA (1)...(19): siRNA sense strand
agaaugaaauugccauguu

SEQ ID NO: 479738 - RNA, 19 nt, Homo sapiens
  misc_RNA (1)...(19): siRNA sense strand
ucuccaagcucuucagaaa

SEQ ID NO: 479739 - RNA, 19 nt, Homo sapiens
  misc_RNA (1)...(19): siRNA sense strand
gccaagagccaaaccgaua

SEQ ID NO: 479740 - RNA, 19 nt, Homo sapiens
  misc_RNA (1)...(19): siRNA sense strand
gcuggaagcaagccauuua

SEQ ID NO: 479741 - RNA, 19 nt, Homo sapiens
  misc_RNA (1)...(19): siRNA sense strand
aagaagaucugugucauau

SEQ ID NO: 479742 - RNA, 19 nt, Homo sapiens
  misc_RNA (1)...(19): siRNA sense strand
caagaagaucugugucaua

SEQ ID NO: 479743 - RNA, 19 nt, Homo sapiens
  misc_RNA (1)...(19): siRNA sense strand
gcaauacuauagcuucaca

SEQ ID NO: 479744 - RNA, 19 nt, Homo sapiens
  misc_RNA (1)...(19): siRNA sense strand
ccaaaccgauauagagaga

SEQ ID NO: 479745 - RNA, 19 nt, Homo sapiens
  misc_RNA (1)...(19): siRNA sense strand
caacggcaccuauuuggaa

SEQ ID NO: 479746 - RNA, 19 nt, Homo sapiens
  misc_RNA (1)...(19): siRNA sense strand
ggaaauggcaugaaagcau

SEQ ID NO: 479747 - RNA, 19 nt, Homo sapiens
  misc_RNA (1)...(19): siRNA sense strand
gcgaggagcuggaguacag

SEQ ID NO: 479748 - RNA, 19 nt, Homo sapiens
  misc_RNA (1)...(19): siRNA sense strand
cagaauguaucgucagaau

SEQ ID NO: 479749 - RNA, 19 nt, Homo sapiens
  misc_RNA (1)...(19): siRNA sense strand
gagcaauacuauagcuuca

SEQ ID NO: 479750 - RNA, 19 nt, Homo sapiens
  misc_RNA (1)...(19): siRNA sense strand
aaaccgagcucuaguucau

SEQ ID NO: 479751 - RNA, 19 nt, Homo sapiens
  misc_RNA (1)...(19): siRNA sense strand
gcaagaagaucugugucau

SEQ ID NO: 479752 - RNA, 19 nt, Homo sapiens
  misc_RNA (1)...(19): siRNA sense strand
gcaccuauuuggaacuuag

SEQ ID NO: 479753 - RNA, 19 nt, Homo sapiens
  misc_RNA (1)...(19): siRNA sense strand
gcagaggauugaacaacug

SEQ ID NO: 479754 - RNA, 19 nt, Homo sapiens
  misc_RNA (1)...(19): siRNA sense strand
gcaaaauacuggagcacua

SEQ ID NO: 479755 - RNA, 19 nt, Homo sapiens
  misc_RNA (1)...(19): siRNA sense strand
gacaagggcuuccaguuuu

SEQ ID NO: 479756 - RNA, 19 nt, Homo sapiens
  misc_RNA (1)...(19): siRNA sense strand
ggaacaacaucgggaagga

SEQ ID NO: 479757 - RNA, 19 nt, Homo sapiens
  misc_RNA (1)...(19): siRNA sense strand
gaaggucaagucagaagaa

SEQ ID NO: 479758 - RNA, 19 nt, Homo sapiens
  misc_RNA (1)...(19): siRNA sense strand
gagaagaaccuuggugugu

SEQ ID NO: 479759 - RNA, 19 nt, Homo sapiens
  misc_RNA (1)...(19): siRNA sense strand
gggcaaauccauggaaauu

SEQ ID NO: 479760 - RNA, 19 nt, Homo sapiens
  misc_RNA (1)...(19): siRNA sense strand
ggaagcaagccauuuaauc

SEQ ID NO: 479761 - RNA, 19 nt, Homo sapiens
  misc_RNA (1)...(19): siRNA sense strand
gcacuaaugcccaugagau

SEQ ID NO: 479762 - RNA, 19 nt, Homo sapiens
  misc_RNA (1)...(19): siRNA sense strand
gagcaacggcaccuauuug

SEQ ID NO: 479763 - RNA, 19 nt, Homo sapiens
  misc_RNA (1)...(19): siRNA sense strand
acaaguagcugcucuucca

SEQ ID NO: 479764 - RNA, 19 nt, Homo sapiens
  misc_RNA (1)...(19): siRNA sense strand
uugcauccauaacaucuua

SEQ ID NO: 479765 - RNA, 19 nt, Homo sapiens
  misc_RNA (1)...(19): siRNA sense strand
ucagugaugucuguaaaga

SEQ ID NO: 479766 - RNA, 19 nt, Homo sapiens
  misc_RNA (1)...(19): siRNA sense strand
cuuagaagaagcugaaaua

SEQ ID NO: 479767 - RNA, 19 nt, Homo sapiens
  misc_RNA (1)...(19): siRNA sense strand
ucagugacauaagugauaa

SEQ ID NO: 479768 - RNA, 19 nt, Homo sapiens
  misc_RNA (1)...(19): siRNA sense strand
cauauugcccauaaaguuu

SEQ ID NO: 479769 - RNA, 19 nt, Homo sapiens
  misc_RNA (1)...(19): siRNA sense strand
aagaggaaguggcccuuaa

SEQ ID NO: 479770 - RNA, 19 nt, Homo sapiens
  misc_RNA (1)...(19): siRNA sense strand
gcacaucuaccaucugaag

SEQ ID NO: 479771 - RNA, 19 nt, Homo sapiens
  misc_RNA (1)...(19): siRNA sense strand
uuaaaaggcuggcauaaga

SEQ ID NO: 479772 - RNA, 19 nt, Homo sapiens
  misc_RNA (1)...(19): siRNA sense strand
gaagaagcugaaauacaaa

SEQ ID NO: 479773 - RNA, 19 nt, Homo sapiens
  misc_RNA (1)...(19): siRNA sense strand
gauugaaggcacaguguuu

SEQ ID NO: 479774 - RNA, 19 nt, Homo sapiens
  misc_RNA (1)...(19): siRNA sense strand
ggagagauugucaucaaga

SEQ ID NO: 479775 - RNA, 19 nt, Homo sapiens
  misc_RNA (1)...(19): siRNA sense strand
aaaccgauauagagagaga

SEQ ID NO: 479776 - RNA, 19 nt, Homo sapiens
  misc_RNA (1)...(19): siRNA sense strand
ccagagguuucuagaggaa

SEQ ID NO: 479777 - RNA, 19 nt, Homo sapiens
  misc_RNA (1)...(19): siRNA sense strand
agagguggauugagcacua

SEQ ID NO: 479778 - RNA, 19 nt, Homo sapiens
  misc_RNA (1)...(19): siRNA sense strand
ggcaagaugugagauggaa

SEQ ID NO: 479779 - RNA, 19 nt, Homo sapiens
  misc_RNA (1)...(19): siRNA sense strand
ugagacacgaguuccauua

SEQ ID NO: 479780 - RNA, 19 nt, Homo sapiens
  misc_RNA (1)...(19): siRNA sense strand
agacuacacuccuccaauc

SEQ ID NO: 479781 - RNA, 19 nt, Homo sapiens
  misc_RNA (1)...(19): siRNA sense strand
gaaauccgacgaugacucu

SEQ ID NO: 479782 - RNA, 19 nt, Homo sapiens
  misc_RNA (1)...(19): siRNA sense strand
aaaacgagauuucugauga

SEQ ID NO: 479783 - RNA, 19 nt, Homo sapiens
  misc_RNA (1)...(19): siRNA sense strand
cuacacuccuccaauccua

SEQ ID NO: 479784 - RNA, 19 nt, Homo sapiens
  misc_RNA (1)...(19): siRNA sense strand
caugcugagucuagaaauu

SEQ ID NO: 479785 - RNA, 19 nt, Homo sapiens
  misc_RNA (1)...(19): siRNA sense strand
gaagcaagccauuuaaucc

SEQ ID NO: 479786 - RNA, 19 nt, Homo sapiens
  misc_RNA (1)...(19): siRNA sense strand
caagagccaaaccgauaua

SEQ ID NO: 479787 - RNA, 19 nt, Homo sapiens
  misc_RNA (1)...(19): siRNA sense strand
gacaaaggaaucuugaaau

SEQ ID NO: 479788 - RNA, 19 nt, Homo sapiens
  misc_RNA (1)...(19): siRNA sense strand
uacuauagcuucacacagu

SEQ ID NO: 479789 - RNA, 19 nt, Homo sapiens
  misc_RNA (1)...(19): siRNA sense strand
guaggaagcguagcaguau

SEQ ID NO: 479790 - RNA, 19 nt, Homo sapiens
  misc_RNA (1)...(19): siRNA sense strand
cgaaaggcuacgagcaaua

SEQ ID NO: 479791 - RNA, 19 nt, Homo sapiens
  misc_RNA (1)...(19): siRNA sense strand
caaauccuaugccgaaagg

SEQ ID NO: 479792 - RNA, 19 nt, Homo sapiens
  misc_RNA (1)...(19): siRNA sense strand
caaacuggaagcaauguau

SEQ ID NO: 479793 - RNA, 19 nt, Homo sapiens
  misc_RNA (1)...(19): siRNA sense strand
gaguggguaucgaaacuuc

SEQ ID NO: 479794 - RNA, 19 nt, Homo sapiens
  misc_RNA (1)...(19): siRNA sense strand
uugaacaacugcagagaga

SEQ ID NO: 479795 - RNA, 19 nt, Homo sapiens
  misc_RNA (1)...(19): siRNA sense strand
gaaccugcaugaugauucc

SEQ ID NO: 479796 - RNA, 19 nt, Homo sapiens
  misc_RNA (1)...(19): siRNA sense strand
acagcgagcuccuggacaa

SEQ ID NO: 479797 - RNA, 19 nt, Homo sapiens
  misc_RNA (1)...(19): siRNA sense strand
guucaucagcuuucuaaug

SEQ ID NO: 479798 - RNA, 19 nt, Homo sapiens
  misc_RNA (1)...(19): siRNA sense strand
ggagagagagaaacugaag

SEQ ID NO: 479799 - RNA, 19 nt, Homo sapiens
  misc_RNA (1)...(19): siRNA sense strand
ucauauugcccauaaaguu

SEQ ID NO: 479800 - RNA, 19 nt, Homo sapiens
  misc_RNA (1)...(19): siRNA sense strand
ugugucauauugcccauaa

SEQ ID NO: 479801 - RNA, 19 nt, Homo sapiens
  misc_RNA (1)...(19): siRNA sense strand
gagccaaaccgauauagag

SEQ ID NO: 479802 - RNA, 19 nt, Homo sapiens
  misc_RNA (1)...(19): siRNA sense strand
agacacgaguuccauuaug

SEQ ID NO: 479803 - RNA, 19 nt, Homo sapiens
  misc_RNA (1)...(19): siRNA sense strand
aaacuucgccaccacagaa

SEQ ID NO: 479804 - RNA, 19 nt, Homo sapiens
  misc_RNA (1)...(19): siRNA sense strand
ucucagugaugucuguaaa

SEQ ID NO: 479805 - RNA, 19 nt, Homo sapiens
  misc_RNA (1)...(19): siRNA sense strand
gaaaggcuacgagcaauac

SEQ ID NO: 479806 - RNA, 19 nt, Homo sapiens
  misc_RNA (1)...(19): siRNA sense strand
gcgaagucccggagaagaa

SEQ ID NO: 479807 - RNA, 19 nt, Homo sapiens
  misc_RNA (1)...(19): siRNA sense strand
uaggaagcguagcaguaua

SEQ ID NO: 479808 - RNA, 19 nt, Homo sapiens
  misc_RNA (1)...(19): siRNA sense strand
guauggagagcaaauccua

SEQ ID NO: 479809 - RNA, 19 nt, Homo sapiens
  misc_RNA (1)...(19): siRNA sense strand
acuggaccauccugucuua

SEQ ID NO: 479810 - RNA, 19 nt, Homo sapiens
  misc_RNA (1)...(19): siRNA sense strand
gcuacgagcaauacuauag

SEQ ID NO: 479811 - RNA, 19 nt, Homo sapiens
  misc_RNA (1)...(19): siRNA sense strand
cacagaauguaucgucaga

SEQ ID NO: 479812 - RNA, 19 nt, Homo sapiens
  misc_RNA (1)...(19): siRNA sense strand
ggagccaccaguucagaaa

SEQ ID NO: 479813 - RNA, 19 nt, Homo sapiens
  misc_RNA (1)...(19): siRNA sense strand
ugagcacuauggagagauu

SEQ ID NO: 479814 - RNA, 19 nt, Homo sapiens
  misc_RNA (1)...(19): siRNA sense strand
aaacgagauuucugaugau

SEQ ID NO: 479815 - RNA, 19 nt, Homo sapiens
  misc_RNA (1)...(19): siRNA sense strand
gcggagagagagaaacuga

SEQ ID NO: 479816 - RNA, 19 nt, Homo sapiens
  misc_RNA (1)...(19): siRNA sense strand
aguuugcgcuggaauuaaa

SEQ ID NO: 479817 - RNA, 19 nt, Homo sapiens
  misc_RNA (1)...(19): siRNA sense strand
gaagaucugugucauauug

SEQ ID NO: 479818 - RNA, 19 nt, Homo sapiens
  misc_RNA (1)...(19): siRNA sense strand
gaaugaaauugccauguuu

SEQ ID NO: 479819 - RNA, 19 nt, Homo sapiens
  misc_RNA (1)...(19): siRNA sense strand
agaagaagcugaaauacaa

SEQ ID NO: 479820 - RNA, 19 nt, Homo sapiens
  misc_RNA (1)...(19): siRNA sense strand
gaaaguagacucuccauca

SEQ ID NO: 479821 - RNA, 19 nt, Homo sapiens
  misc_RNA (1)...(19): siRNA sense strand
ucaagaaccugcaugauga

SEQ ID NO: 479822 - RNA, 19 nt, Homo sapiens
  misc_RNA (1)...(19): siRNA sense strand
gcaaauccauggaaauugu

SEQ ID NO: 479823 - RNA, 19 nt, Homo sapiens
  misc_RNA (1)...(19): siRNA sense strand
ggacaagggcuuccaguuu

SEQ ID NO: 479824 - RNA, 19 nt, Homo sapiens
  misc_RNA (1)...(19): siRNA sense strand
gagcacaucuaccaucuga

SEQ ID NO: 479825 - RNA, 19 nt, Homo sapiens
  misc_RNA (1)...(19): siRNA sense strand
ggaacaaagugaccucuug

SEQ ID NO: 479826 - RNA, 19 nt, Homo sapiens
  misc_RNA (1)...(19): siRNA sense strand
gaauguaucgucagaauga

SEQ ID NO: 479827 - RNA, 19 nt, Homo sapiens
  misc_RNA (1)...(19): siRNA sense strand
ggacaaaggaaucuugaaa

SEQ ID NO: 479828 - RNA, 19 nt, Homo sapiens
  misc_RNA (1)...(19): siRNA sense strand
gugauaaucuuuccuuaga

SEQ ID NO: 479829 - RNA, 19 nt, Homo sapiens
  misc_RNA (1)...(19): siRNA sense strand
gaaguucuguuaucuccaa

SEQ ID NO: 479830 - RNA, 19 nt, Homo sapiens
  misc_RNA (1)...(19): siRNA sense strand
gaagggaacuuagaagaag

SEQ ID NO: 479831 - RNA, 19 nt, Homo sapiens
  misc_RNA (1)...(19): siRNA sense strand
gaacuuagaagaagcugaa

SEQ ID NO: 479832 - RNA, 19 nt, Homo sapiens
  misc_RNA (1)...(19): siRNA sense strand
gaacaacugcagagagaaa

SEQ ID NO: 479833 - RNA, 19 nt, Homo sapiens
  misc_RNA (1)...(19): siRNA sense strand
gaagcgaagucccggagaa

SEQ ID NO: 479834 - RNA, 19 nt, Homo sapiens
  misc_RNA (1)...(19): siRNA sense strand
gcgcuggaauuaaaugaaa

SEQ ID NO: 479835 - RNA, 19 nt, Homo sapiens
  misc_RNA (1)...(19): siRNA sense strand
gagagauugucaucaagaa

SEQ ID NO: 479836 - RNA, 19 nt, Homo sapiens
  misc_RNA (1)...(19): siRNA sense strand
ggaagggaacuuagaagaa

SEQ ID NO: 479837 - RNA, 19 nt, Homo sapiens
  misc_RNA (1)...(19): siRNA sense strand
agaaugaaauugccauguu

SEQ ID NO: 479838 - RNA, 19 nt, Homo sapiens
  misc_RNA (1)...(19): siRNA sense strand
ucuccaagcucuucagaaa

SEQ ID NO: 479839 - RNA, 19 nt, Homo sapiens
  misc_RNA (1)...(19): siRNA sense strand
gccaagagccaaaccgaua

SEQ ID NO: 479840 - RNA, 19 nt, Homo sapiens
  misc_RNA (1)...(19): siRNA sense strand
gcuggaagcaagccauuua

SEQ ID NO: 479841 - RNA, 19 nt, Homo sapiens
  misc_RNA (1)...(19): siRNA sense strand
aagaagaucugugucauau

SEQ ID NO: 479842 - RNA, 19 nt, Homo sapiens
  misc_RNA (1)...(19): siRNA sense strand
caagaagaucugugucaua

SEQ ID NO: 479843 - RNA, 19 nt, Homo sapiens
  misc_RNA (1)...(19): siRNA sense strand
gcaauacuauagcuucaca

SEQ ID NO: 479844 - RNA, 19 nt, Homo sapiens
  misc_RNA (1)...(19): siRNA sense strand
ccaaaccgauauagagaga

SEQ ID NO: 479845 - RNA, 19 nt, Homo sapiens
  misc_RNA (1)...(19): siRNA sense strand
caacggcaccuauuuggaa

SEQ ID NO: 479846 - RNA, 19 nt, Homo sapiens
  misc_RNA (1)...(19): siRNA sense strand
ggaaauggcaugaaagcau

SEQ ID NO: 479847 - RNA, 19 nt, Homo sapiens
  misc_RNA (1)...(19): siRNA sense strand
gcgaggagcuggaguacag

SEQ ID NO: 479848 - RNA, 19 nt, Homo sapiens
  misc_RNA (1)...(19): siRNA sense strand
cagaauguaucgucagaau

SEQ ID NO: 479849 - RNA, 19 nt, Homo sapiens
  misc_RNA (1)...(19): siRNA sense strand
gagcaauacuauagcuuca

SEQ ID NO: 479850 - RNA, 19 nt, Homo sapiens
  misc_RNA (1)...(19): siRNA sense strand
aaaccgagcucuaguucau

SEQ ID NO: 479851 - RNA, 19 nt, Homo sapiens
  misc_RNA (1)...(19): siRNA sense strand
gcaagaagaucugugucau

SEQ ID NO: 479852 - RNA, 19 nt, Homo sapiens
  misc_RNA (1)...(19): siRNA sense strand
gcaccuauuuggaacuuag

SEQ ID NO: 479853 - RNA, 19 nt, Homo sapiens
  misc_RNA (1)...(19): siRNA sense strand
gcagaggauugaacaacug

SEQ ID NO: 479854 - RNA, 19 nt, Homo sapiens
  misc_RNA (1)...(19): siRNA sense strand
gcaaaauacuggagcacua

SEQ ID NO: 479855 - RNA, 19 nt, Homo sapiens
  misc_RNA (1)...(19): siRNA sense strand
gacaagggcuuccaguuuu

SEQ ID NO: 479856 - RNA, 19 nt, Homo sapiens
  misc_RNA (1)...(19): siRNA sense strand
ggaacaacaucgggaagga

SEQ ID NO: 479857 - RNA, 19 nt, Homo sapiens
  misc_RNA (1)...(19): siRNA sense strand
gaaggucaagucagaagaa

SEQ ID NO: 479858 - RNA, 19 nt, Homo sapiens
  misc_RNA (1)...(19): siRNA sense strand
gagaagaaccuuggugugu

SEQ ID NO: 479859 - RNA, 19 nt, Homo sapiens
  misc_RNA (1)...(19): siRNA sense strand
gggcaaauccauggaaauu

SEQ ID NO: 479860 - RNA, 19 nt, Homo sapiens
  misc_RNA (1)...(19): siRNA sense strand
ggaagcaagccauuuaauc

SEQ ID NO: 479861 - RNA, 19 nt, Homo sapiens
  misc_RNA (1)...(19): siRNA sense strand
gcacuaaugcccaugagau

SEQ ID NO: 479862 - RNA, 19 nt, Homo sapiens
  misc_RNA (1)...(19): siRNA sense strand
gagcaacggcaccuauuug

SEQ ID NO: 479863 - RNA, 19 nt, Homo sapiens
  misc_RNA (1)...(19): siRNA sense strand
acaaguagcugcucuucca

SEQ ID NO: 479864 - RNA, 19 nt, Homo sapiens
  misc_RNA (1)...(19): siRNA sense strand
uugcauccauaacaucuua

SEQ ID NO: 479865 - RNA, 19 nt, Homo sapiens
  misc_RNA (1)...(19): siRNA sense strand
ucagugaugucuguaaaga

SEQ ID NO: 479866 - RNA, 19 nt, Homo sapiens
  misc_RNA (1)...(19): siRNA sense strand
cuuagaagaagcugaaaua

SEQ ID NO: 479867 - RNA, 19 nt, Homo sapiens
  misc_RNA (1)...(19): siRNA sense strand
ucagugacauaagugauaa

SEQ ID NO: 479868 - RNA, 19 nt, Homo sapiens
  misc_RNA (1)...(19): siRNA sense strand
cauauugcccauaaaguuu

SEQ ID NO: 479869 - RNA, 19 nt, Homo sapiens
  misc_RNA (1)...(19): siRNA sense strand
aagaggaaguggcccuuaa

SEQ ID NO: 479870 - RNA, 19 nt, Homo sapiens
  misc_RNA (1)...(19): siRNA sense strand
gcacaucuaccaucugaag

SEQ ID NO: 479871 - RNA, 19 nt, Homo sapiens
  misc_RNA (1)...(19): siRNA sense strand
uuaaaaggcuggcauaaga

SEQ ID NO: 479872 - RNA, 19 nt, Homo sapiens
  misc_RNA (1)...(19): siRNA sense strand
gaagaagcugaaauacaaa

SEQ ID NO: 479873 - RNA, 19 nt, Homo sapiens
  misc_RNA (1)...(19): siRNA sense strand
gauugaaggcacaguguuu

SEQ ID NO: 479874 - RNA, 19 nt, Homo sapiens
  misc_RNA (1)...(19): siRNA sense strand
ggagagauugucaucaaga

SEQ ID NO: 479875 - RNA, 19 nt, Homo sapiens
  misc_RNA (1)...(19): siRNA sense strand
aaaccgauauagagagaga

SEQ ID NO: 479876 - RNA, 19 nt, Homo sapiens
  misc_RNA (1)...(19): siRNA sense strand
ccagagguuucuagaggaa

SEQ ID NO: 479877 - RNA, 19 nt, Homo sapiens
  misc_RNA (1)...(19): siRNA sense strand
agagguggauugagcacua

SEQ ID NO: 479878 - RNA, 19 nt, Homo sapiens
  misc_RNA (1)...(19): siRNA sense strand
ggcaagaugugagauggaa

SEQ ID NO: 479879 - RNA, 19 nt, Homo sapiens
  misc_RNA (1)...(19): siRNA sense strand
ugagacacgaguuccauua

SEQ ID NO: 479880 - RNA, 19 nt, Homo sapiens
  misc_RNA (1)...(19): siRNA sense strand
agacuacacuccuccaauc

SEQ ID NO: 479881 - RNA, 19 nt, Homo sapiens
  misc_RNA (1)...(19): siRNA sense strand
gaaauccgacgaugacucu

SEQ ID NO: 479882 - RNA, 19 nt, Homo sapiens
  misc_RNA (1)...(19): siRNA sense strand
aaaacgagauuucugauga

SEQ ID NO: 479883 - RNA, 19 nt, Homo sapiens
  misc_RNA (1)...(19): siRNA sense strand
cuacacuccuccaauccua

SEQ ID NO: 479884 - RNA, 19 nt, Homo sapiens
  misc_RNA (1)...(19): siRNA sense strand
caugcugagucuagaaauu

SEQ ID NO: 479885 - RNA, 19 nt, Homo sapiens
  misc_RNA (1)...(19): siRNA sense strand
gaagcaagccauuuaaucc

SEQ ID NO: 479886 - RNA, 19 nt, Homo sapiens
  misc_RNA (1)...(19): siRNA sense strand
caagagccaaaccgauaua

SEQ ID NO: 479887 - RNA, 19 nt, Homo sapiens
  misc_RNA (1)...(19): siRNA sense strand
gacaaaggaaucuugaaau

SEQ ID NO: 479888 - RNA, 19 nt, Homo sapiens
  misc_RNA (1)...(19): siRNA sense strand
uacuauagcuucacacagu

SEQ ID NO: 479889 - RNA, 19 nt, Homo sapiens
  misc_RNA (1)...(19): siRNA sense strand
guaggaagcguagcaguau

SEQ ID NO: 479890 - RNA, 19 nt, Homo sapiens
  misc_RNA (1)...(19): siRNA sense strand
cgaaaggcuacgagcaaua

SEQ ID NO: 479891 - RNA, 19 nt, Homo sapiens
  misc_RNA (1)...(19): siRNA sense strand
caaauccuaugccgaaagg

SEQ ID NO: 479892 - RNA, 19 nt, Homo sapiens
  misc_RNA (1)...(19): siRNA sense strand
caaacuggaagcaauguau

SEQ ID NO: 479893 - RNA, 19 nt, Homo sapiens
  misc_RNA (1)...(19): siRNA sense strand
gaguggguaucgaaacuuc

SEQ ID NO: 479894 - RNA, 19 nt, Homo sapiens
  misc_RNA (1)...(19): siRNA sense strand
uugaacaacugcagagaga

SEQ ID NO: 479895 - RNA, 19 nt, Homo sapiens
  misc_RNA (1)...(19): siRNA sense strand
gaaccugcaugaugauucc

SEQ ID NO: 479896 - RNA, 19 nt, Homo sapiens
  misc_RNA (1)...(19): siRNA sense strand
acagcgagcuccuggacaa

SEQ ID NO: 479897 - RNA, 19 nt, Homo sapiens
  misc_RNA (1)...(19): siRNA sense strand
guucaucagcuuucuaaug

SEQ ID NO: 479898 - RNA, 19 nt, Homo sapiens
  misc_RNA (1)...(19): siRNA sense strand
ggagagagagaaacugaag

SEQ ID NO: 479899 - RNA, 19 nt, Homo sapiens
  misc_RNA (1)...(19): siRNA sense strand
ucauauugcccauaaaguu

SEQ ID NO: 479900 - RNA, 19 nt, Homo sapiens
  misc_RNA (1)...(19): siRNA sense strand
ugugucauauugcccauaa

SEQ ID NO: 479901 - RNA, 19 nt, Homo sapiens
  misc_RNA (1)...(19): siRNA sense strand
gagccaaaccgauauagag

SEQ ID NO: 479902 - RNA, 19 nt, Homo sapiens
  misc_RNA (1)...(19): siRNA sense strand
agacacgaguuccauuaug

SEQ ID NO: 479903 - RNA, 19 nt, Homo sapiens
  misc_RNA (1)...(19): siRNA sense strand
aaacuucgccaccacagaa

SEQ ID NO: 479904 - RNA, 19 nt, Homo sapiens
  misc_RNA (1)...(19): siRNA sense strand
ucucagugaugucuguaaa

SEQ ID NO: 479905 - RNA, 19 nt, Homo sapiens
  misc_RNA (1)...(19): siRNA sense strand
gaaaggcuacgagcaauac

SEQ ID NO: 479906 - RNA, 19 nt, Homo sapiens
  misc_RNA (1)...(19): siRNA sense strand
gcgaagucccggagaagaa

SEQ ID NO: 479907 - RNA, 19 nt, Homo sapiens
  misc_RNA (1)...(19): siRNA sense strand
uaggaagcguagcaguaua

SEQ ID NO: 479908 - RNA, 19 nt, Homo sapiens
  misc_RNA (1)...(19): siRNA sense strand
guauggagagcaaauccua

SEQ ID NO: 479909 - RNA, 19 nt, Homo sapiens
  misc_RNA (1)...(19): siRNA sense strand
acuggaccauccugucuua

SEQ ID NO: 479910 - RNA, 19 nt, Homo sapiens
  misc_RNA (1)...(19): siRNA sense strand
gcuacgagcaauacuauag

SEQ ID NO: 479911 - RNA, 19 nt, Homo sapiens
  misc_RNA (1)...(19): siRNA sense strand
cacagaauguaucgucaga

SEQ ID NO: 479912 - RNA, 19 nt, Homo sapiens
  misc_RNA (1)...(19): siRNA sense strand
ggagccaccaguucagaaa

SEQ ID NO: 479913 - RNA, 19 nt, Homo sapiens
  misc_RNA (1)...(19): siRNA sense strand
ugagcacuauggagagauu

SEQ ID NO: 479914 - RNA, 19 nt, Homo sapiens
  misc_RNA (1)...(19): siRNA sense strand
aaacgagauuucugaugau

SEQ ID NO: 479915 - RNA, 19 nt, Homo sapiens
  misc_RNA (1)...(19): siRNA sense strand
gcggagagagagaaacuga

SEQ ID NO: 479916 - RNA, 19 nt, Homo sapiens
  misc_RNA (1)...(19): siRNA sense strand
aguuugcgcuggaauuaaa

SEQ ID NO: 479917 - RNA, 19 nt, Homo sapiens
  misc_RNA (1)...(19): siRNA sense strand
gaagaucugugucauauug

SEQ ID NO: 479918 - RNA, 19 nt, Homo sapiens
  misc_RNA (1)...(19): siRNA sense strand
gaaugaaauugccauguuu

SEQ ID NO: 479919 - RNA, 19 nt, Homo sapiens
  misc_RNA (1)...(19): siRNA sense strand
agaagaagcugaaauacaa

SEQ ID NO: 479920 - RNA, 19 nt, Homo sapiens
  misc_RNA (1)...(19): siRNA sense strand
gaaaguagacucuccauca

SEQ ID NO: 479921 - RNA, 19 nt, Homo sapiens
  misc_RNA (1)...(19): siRNA sense strand
ucaagaaccugcaugauga

SEQ ID NO: 479922 - RNA, 19 nt, Homo sapiens
  misc_RNA (1)...(19): siRNA sense strand
gcaaauccauggaaauugu

SEQ ID NO: 479923 - RNA, 19 nt, Homo sapiens
  misc_RNA (1)...(19): siRNA sense strand
ggacaagggcuuccaguuu

SEQ ID NO: 479924 - RNA, 19 nt, Homo sapiens
  misc_RNA (1)...(19): siRNA sense strand
gagcacaucuaccaucuga

SEQ ID NO: 479925 - RNA, 19 nt, Homo sapiens
  misc_RNA (1)...(19): siRNA sense strand
ggaacaaagugaccucuug

SEQ ID NO: 479926 - RNA, 19 nt, Homo sapiens
  misc_RNA (1)...(19): siRNA sense strand
gaauguaucgucagaauga

SEQ ID NO: 479927 - RNA, 19 nt, Homo sapiens
  misc_RNA (1)...(19): siRNA sense strand
ggacaaaggaaucuugaaa

SEQ ID NO: 479928 - RNA, 19 nt, Homo sapiens
  misc_RNA (1)...(19): siRNA sense strand
gugauaaucuuuccuuaga

SEQ ID NO: 479929 - RNA, 19 nt, Homo sapiens
  misc_RNA (1)...(19): siRNA sense strand
gaaguucuguuaucuccaa

SEQ ID NO: 479930 - RNA, 19 nt, Homo sapiens
  misc_RNA (1)...(19): siRNA sense strand
gaagggaacuuagaagaag

SEQ ID NO: 479931 - RNA, 19 nt, Homo sapiens
  misc_RNA (1)...(19): siRNA sense strand
gaacuuagaagaagcugaa

SEQ ID NO: 479932 - RNA, 19 nt, Homo sapiens
  misc_RNA (1)...(19): siRNA sense strand
gaacaacugcagagagaaa

SEQ ID NO: 479933 - RNA, 19 nt, Homo sapiens
  misc_RNA (1)...(19): siRNA sense strand
gaagcgaagucccggagaa

SEQ ID NO: 479934 - RNA, 19 nt, Homo sapiens
  misc_RNA (1)...(19): siRNA sense strand
gcgcuggaauuaaaugaaa

SEQ ID NO: 479935 - RNA, 19 nt, Homo sapiens
  misc_RNA (1)...(19): siRNA sense strand
gagagauugucaucaagaa

SEQ ID NO: 479936 - RNA, 19 nt, Homo sapiens
  misc_RNA (1)...(19): siRNA sense strand
ggaagggaacuuagaagaa

SEQ ID NO: 479937 - RNA, 19 nt, Homo sapiens
  misc_RNA (1)...(19): siRNA sense strand
agaaugaaauugccauguu

SEQ ID NO: 479938 - RNA, 19 nt, Homo sapiens
  misc_RNA (1)...(19): siRNA sense strand
ucuccaagcucuucagaaa

SEQ ID NO: 479939 - RNA, 19 nt, Homo sapiens
  misc_RNA (1)...(19): siRNA sense strand
gccaagagccaaaccgaua

SEQ ID NO: 479940 - RNA, 19 nt, Homo sapiens
  misc_RNA (1)...(19): siRNA sense strand
gcuggaagcaagccauuua

SEQ ID NO: 479941 - RNA, 19 nt, Homo sapiens
  misc_RNA (1)...(19): siRNA sense strand
aagaagaucugugucauau

SEQ ID NO: 479942 - RNA, 19 nt, Homo sapiens
  misc_RNA (1)...(19): siRNA sense strand
caagaagaucugugucaua

SEQ ID NO: 479943 - RNA, 19 nt, Homo sapiens
  misc_RNA (1)...(19): siRNA sense strand
gcaauacuauagcuucaca

SEQ ID NO: 479944 - RNA, 19 nt, Homo sapiens
  misc_RNA (1)...(19): siRNA sense strand
ccaaaccgauauagagaga

SEQ ID NO: 479945 - RNA, 19 nt, Homo sapiens
  misc_RNA (1)...(19): siRNA sense strand
caacggcaccuauuuggaa

SEQ ID NO: 479946 - RNA, 19 nt, Homo sapiens
  misc_RNA (1)...(19): siRNA sense strand
ggaaauggcaugaaagcau

SEQ ID NO: 479947 - RNA, 19 nt, Homo sapiens
  misc_RNA (1)...(19): siRNA sense strand
gcgaggagcuggaguacag

SEQ ID NO: 479948 - RNA, 19 nt, Homo sapiens
  misc_RNA (1)...(19): siRNA sense strand
cagaauguaucgucagaau

SEQ ID NO: 479949 - RNA, 19 nt, Homo sapiens
  misc_RNA (1)...(19): siRNA sense strand
gagcaauacuauagcuuca

SEQ ID NO: 479950 - RNA, 19 nt, Homo sapiens
  misc_RNA (1)...(19): siRNA sense strand
aaaccgagcucuaguucau

SEQ ID NO: 479951 - RNA, 19 nt, Homo sapiens
  misc_RNA (1)...(19): siRNA sense strand
gcaagaagaucugugucau

SEQ ID NO: 479952 - RNA, 19 nt, Homo sapiens
  misc_RNA (1)...(19): siRNA sense strand
gcaccuauuuggaacuuag

SEQ ID NO: 479953 - RNA, 19 nt, Homo sapiens
  misc_RNA (1)...(19): siRNA sense strand
gcagaggauugaacaacug

SEQ ID NO: 479954 - RNA, 19 nt, Homo sapiens
  misc_RNA (1)...(19): siRNA sense strand
gcaaaauacuggagcacua

SEQ ID NO: 479955 - RNA, 19 nt, Homo sapiens
  misc_RNA (1)...(19): siRNA sense strand
gacaagggcuuccaguuuu

SEQ ID NO: 479956 - RNA, 19 nt, Homo sapiens
  misc_RNA (1)...(19): siRNA sense strand
ggaacaacaucgggaagga

SEQ ID NO: 479957 - RNA, 19 nt, Homo sapiens
  misc_RNA (1)...(19): siRNA sense strand
gaaggucaagucagaagaa

SEQ ID NO: 479958 - RNA, 19 nt, Homo sapiens
  misc_RNA (1)...(19): siRNA sense strand
gagaagaaccuuggugugu

SEQ ID NO: 479959 - RNA, 19 nt, Homo sapiens
  misc_RNA (1)...(19): siRNA sense strand
gggcaaauccauggaaauu

SEQ ID NO: 479960 - RNA, 19 nt, Homo sapiens
  misc_RNA (1)...(19): siRNA sense strand
ggaagcaagccauuuaauc

SEQ ID NO: 479961 - RNA, 19 nt, Homo sapiens
  misc_RNA (1)...(19): siRNA sense strand
gcacuaaugcccaugagau

SEQ ID NO: 479962 - RNA, 19 nt, Homo sapiens
  misc_RNA (1)...(19): siRNA sense strand
gagcaacggcaccuauuug

SEQ ID NO: 479963 - RNA, 19 nt, Homo sapiens
  misc_RNA (1)...(19): siRNA sense strand
acaaguagcugcucuucca

SEQ ID NO: 479964 - RNA, 19 nt, Homo sapiens
  misc_RNA (1)...(19): siRNA sense strand
uugcauccauaacaucuua

SEQ ID NO: 479965 - RNA, 19 nt, Homo sapiens
  misc_RNA (1)...(19): siRNA sense strand
ucagugaugucuguaaaga

SEQ ID NO: 479966 - RNA, 19 nt, Homo sapiens
  misc_RNA (1)...(19): siRNA sense strand
cuuagaagaagcugaaaua

SEQ ID NO: 479967 - RNA, 19 nt, Homo sapiens
  misc_RNA (1)...(19): siRNA sense strand
ucagugacauaagugauaa

SEQ ID NO: 479968 - RNA, 19 nt, Homo sapiens
  misc_RNA (1)...(19): siRNA sense strand
cauauugcccauaaaguuu

SEQ ID NO: 479969 - RNA, 19 nt, Homo sapiens
  misc_RNA (1)...(19): siRNA sense strand
aagaggaaguggcccuuaa

SEQ ID NO: 479970 - RNA, 19 nt, Homo sapiens
  misc_RNA (1)...(19): siRNA sense strand
gcacaucuaccaucugaag

SEQ ID NO: 479971 - RNA, 19 nt, Homo sapiens
  misc_RNA (1)...(19): siRNA sense strand
uuaaaaggcuggcauaaga

SEQ ID NO: 479972 - RNA, 19 nt, Homo sapiens
  misc_RNA (1)...(19): siRNA sense strand
gaagaagcugaaauacaaa

SEQ ID NO: 479973 - RNA, 19 nt, Homo sapiens
  misc_RNA (1)...(19): siRNA sense strand
gauugaaggcacaguguuu

SEQ ID NO: 479974 - RNA, 19 nt, Homo sapiens
  misc_RNA (1)...(19): siRNA sense strand
ggagagauugucaucaaga

SEQ ID NO: 479975 - RNA, 19 nt, Homo sapiens
  misc_RNA (1)...(19): siRNA sense strand
aaaccgauauagagagaga

SEQ ID NO: 479976 - RNA, 19 nt, Homo sapiens
  misc_RNA (1)...(19): siRNA sense strand
ccagagguuucuagaggaa

SEQ ID NO: 479977 - RNA, 19 nt, Homo sapiens
  misc_RNA (1)...(19): siRNA sense strand
agagguggauugagcacua

SEQ ID NO: 479978 - RNA, 19 nt, Homo sapiens
  misc_RNA (1)...(19): siRNA sense strand
ggcaagaugugagauggaa

SEQ ID NO: 479979 - RNA, 19 nt, Homo sapiens
  misc_RNA (1)...(19): siRNA sense strand
ugagacacgaguuccauua

SEQ ID NO: 479980 - RNA, 19 nt, Homo sapiens
  misc_RNA (1)...(19): siRNA sense strand
agacuacacuccuccaauc

SEQ ID NO: 479981 - RNA, 19 nt, Homo sapiens
  misc_RNA (1)...(19): siRNA sense strand
gaaauccgacgaugacucu

SEQ ID NO: 479982 - RNA, 19 nt, Homo sapiens
  misc_RNA (1)...(19): siRNA sense strand
aaaacgagauuucugauga

SEQ ID NO: 479983 - RNA, 19 nt, Homo sapiens
  misc_RNA (1)...(19): siRNA sense strand
cuacacuccuccaauccua

SEQ ID NO: 479984 - RNA, 19 nt, Homo sapiens
  misc_RNA (1)...(19): siRNA sense strand
caugcugagucuagaaauu

SEQ ID NO: 479985 - RNA, 19 nt, Homo sapiens
  misc_RNA (1)...(19): siRNA sense strand
gaagcaagccauuuaaucc

SEQ ID NO: 479986 - RNA, 19 nt, Homo sapiens
  misc_RNA (1)...(19): siRNA sense strand
caagagccaaaccgauaua

SEQ ID NO: 479987 - RNA, 19 nt, Homo sapiens
  misc_RNA (1)...(19): siRNA sense strand
gacaaaggaaucuugaaau

SEQ ID NO: 479988 - RNA, 19 nt, Homo sapiens
  misc_RNA (1)...(19): siRNA sense strand
uacuauagcuucacacagu

SEQ ID NO: 479989 - RNA, 19 nt, Homo sapiens
  misc_RNA (1)...(19): siRNA sense strand
guaggaagcguagcaguau

SEQ ID NO: 479990 - RNA, 19 nt, Homo sapiens
  misc_RNA (1)...(19): siRNA sense strand
cgaaaggcuacgagcaaua

SEQ ID NO: 479991 - RNA, 19 nt, Homo sapiens
  misc_RNA (1)...(19): siRNA sense strand
caaauccuaugccgaaagg

SEQ ID NO: 479992 - RNA, 19 nt, Homo sapiens
  misc_RNA (1)...(19): siRNA sense strand
caaacuggaagcaauguau

SEQ ID NO: 479993 - RNA, 19 nt, Homo sapiens
  misc_RNA (1)...(19): siRNA sense strand
gaguggguaucgaaacuuc

SEQ ID NO: 479994 - RNA, 19 nt, Homo sapiens
  misc_RNA (1)...(19): siRNA sense strand
uugaacaacugcagagaga

SEQ ID NO: 479995 - RNA, 19 nt, Homo sapiens
  misc_RNA (1)...(19): siRNA sense strand
gaaccugcaugaugauucc

SEQ ID NO: 479996 - RNA, 19 nt, Homo sapiens
  misc_RNA (1)...(19): siRNA sense strand
acagcgagcuccuggacaa

SEQ ID NO: 479997 - RNA, 19 nt, Homo sapiens
  misc_RNA (1)...(19): siRNA sense strand
guucaucagcuuucuaaug

SEQ ID NO: 479998 - RNA, 19 nt, Homo sapiens
  misc_RNA (1)...(19): siRNA sense strand
ggagagagagaaacugaag

SEQ ID NO: 479999 - RNA, 19 nt, Homo sapiens
  misc_RNA (1)...(19): siRNA sense strand
ucauauugcccauaaaguu

SEQ ID NO: 480000 - RNA, 19 nt, Homo sapiens
  misc_RNA (1)...(19): siRNA sense strand
ugugucauauugcccauaa

SEQ ID NO: 480001 - RNA, 19 nt, Homo sapiens
  misc_RNA (1)...(19): siRNA sense strand
gagccaaaccgauauagag

SEQ ID NO: 480002 - RNA, 19 nt, Homo sapiens
  misc_RNA (1)...(19): siRNA sense strand
agacacgaguuccauuaug

SEQ ID NO: 480003 - RNA, 19 nt, Homo sapiens
  misc_RNA (1)...(19): siRNA sense strand
aaacuucgccaccacagaa

SEQ ID NO: 480004 - RNA, 19 nt, Homo sapiens
  misc_RNA (1)...(19): siRNA sense strand
ucucagugaugucuguaaa

SEQ ID NO: 480005 - RNA, 19 nt, Homo sapiens
  misc_RNA (1)...(19): siRNA sense strand
gaaaggcuacgagcaauac

SEQ ID NO: 480006 - RNA, 19 nt, Homo sapiens
  misc_RNA (1)...(19): siRNA sense strand
gcgaagucccggagaagaa

SEQ ID NO: 480007 - RNA, 19 nt, Homo sapiens
  misc_RNA (1)...(19): siRNA sense strand
uaggaagcguagcaguaua

SEQ ID NO: 480008 - RNA, 19 nt, Homo sapiens
  misc_RNA (1)...(19): siRNA sense strand
guauggagagcaaauccua

SEQ ID NO: 480009 - RNA, 19 nt, Homo sapiens
  misc_RNA (1)...(19): siRNA sense strand
acuggaccauccugucuua

SEQ ID NO: 480010 - RNA, 19 nt, Homo sapiens
  misc_RNA (1)...(19): siRNA sense strand
gcuacgagcaauacuauag

SEQ ID NO: 480011 - RNA, 19 nt, Homo sapiens
  misc_RNA (1)...(19): siRNA sense strand
cacagaauguaucgucaga

SEQ ID NO: 480012 - RNA, 19 nt, Homo sapiens
  misc_RNA (1)...(19): siRNA sense strand
ggagccaccaguucagaaa

SEQ ID NO: 480013 - RNA, 19 nt, Homo sapiens
  misc_RNA (1)...(19): siRNA sense strand
ugagcacuauggagagauu

SEQ ID NO: 480014 - RNA, 19 nt, Homo sapiens
  misc_RNA (1)...(19): siRNA sense strand
aaacgagauuucugaugau

SEQ ID NO: 480015 - RNA, 19 nt, Homo sapiens
  misc_RNA (1)...(19): siRNA sense strand
gcggagagagagaaacuga

SEQ ID NO: 480016 - RNA, 19 nt, Homo sapiens
  misc_RNA (1)...(19): siRNA sense strand
aguuugcgcuggaauuaaa

SEQ ID NO: 480017 - RNA, 19 nt, Homo sapiens
  misc_RNA (1)...(19): siRNA sense strand
gaagaucugugucauauug

SEQ ID NO: 480018 - RNA, 19 nt, Homo sapiens
  misc_RNA (1)...(19): siRNA sense strand
gaaugaaauugccauguuu

SEQ ID NO: 480019 - RNA, 19 nt, Homo sapiens
  misc_RNA (1)...(19): siRNA sense strand
agaagaagcugaaauacaa

SEQ ID NO: 480020 - RNA, 19 nt, Homo sapiens
  misc_RNA (1)...(19): siRNA sense strand
gaaaguagacucuccauca

SEQ ID NO: 480021 - RNA, 19 nt, Homo sapiens
  misc_RNA (1)...(19): siRNA sense strand
ucaagaaccugcaugauga

SEQ ID NO: 480022 - RNA, 19 nt, Homo sapiens
  misc_RNA (1)...(19): siRNA sense strand
gcaaauccauggaaauugu

SEQ ID NO: 480023 - RNA, 19 nt, Homo sapiens
  misc_RNA (1)...(19): siRNA sense strand
ggacaagggcuuccaguuu

SEQ ID NO: 480024 - RNA, 19 nt, Homo sapiens
  misc_RNA (1)...(19): siRNA sense strand
gagcacaucuaccaucuga

SEQ ID NO: 480025 - RNA, 19 nt, Homo sapiens
  misc_RNA (1)...(19): siRNA sense strand
ggaacaaagugaccucuug

SEQ ID NO: 480026 - RNA, 19 nt, Homo sapiens
  misc_RNA (1)...(19): siRNA sense strand
gaauguaucgucagaauga

SEQ ID NO: 480027 - RNA, 19 nt, Homo sapiens
  misc_RNA (1)...(19): siRNA sense strand
ggacaaaggaaucuugaaa

SEQ ID NO: 480028 - RNA, 19 nt, Homo sapiens
  misc_RNA (1)...(19): siRNA sense strand
gugauaaucuuuccuuaga

SEQ ID NO: 480029 - RNA, 19 nt, Homo sapiens
  misc_RNA (1)...(19): siRNA sense strand
gaaguucuguuaucuccaa

SEQ ID NO: 480030 - RNA, 19 nt, Homo sapiens
  misc_RNA (1)...(19): siRNA sense strand
gaagggaacuuagaagaag

SEQ ID NO: 480031 - RNA, 19 nt, Homo sapiens
  misc_RNA (1)...(19): siRNA sense strand
gaacuuagaagaagcugaa

SEQ ID NO: 480032 - RNA, 19 nt, Homo sapiens
  misc_RNA (1)...(19): siRNA sense strand
gaacaacugcagagagaaa

SEQ ID NO: 480033 - RNA, 19 nt, Homo sapiens
  misc_RNA (1)...(19): siRNA sense strand
gaagcgaagucccggagaa

SEQ ID NO: 480034 - RNA, 19 nt, Homo sapiens
  misc_RNA (1)...(19): siRNA sense strand
gcgcuggaauuaaaugaaa

SEQ ID NO: 480035 - RNA, 19 nt, Homo sapiens
  misc_RNA (1)...(19): siRNA sense strand
gagagauugucaucaagaa

SEQ ID NO: 480036 - RNA, 19 nt, Homo sapiens
  misc_RNA (1)...(19): siRNA sense strand
ggaagggaacuuagaagaa

SEQ ID NO: 480037 - RNA, 19 nt, Homo sapiens
  misc_RNA (1)...(19): siRNA sense strand
agaaugaaauugccauguu

SEQ ID NO: 480038 - RNA, 19 nt, Homo sapiens
  misc_RNA (1)...(19): siRNA sense strand
ucuccaagcucuucagaaa

SEQ ID NO: 480039 - RNA, 19 nt, Homo sapiens
  misc_RNA (1)...(19): siRNA sense strand
gccaagagccaaaccgaua

SEQ ID NO: 480040 - RNA, 19 nt, Homo sapiens
  misc_RNA (1)...(19): siRNA sense strand
gcuggaagcaagccauuua

SEQ ID NO: 480041 - RNA, 19 nt, Homo sapiens
  misc_RNA (1)...(19): siRNA sense strand
aagaagaucugugucauau

SEQ ID NO: 480042 - RNA, 19 nt, Homo sapiens
  misc_RNA (1)...(19): siRNA sense strand
caagaagaucugugucaua

SEQ ID NO: 480043 - RNA, 19 nt, Homo sapiens
  misc_RNA (1)...(19): siRNA sense strand
gcaauacuauagcuucaca

SEQ ID NO: 480044 - RNA, 19 nt, Homo sapiens
  misc_RNA (1)...(19): siRNA sense strand
ccaaaccgauauagagaga

SEQ ID NO: 480045 - RNA, 19 nt, Homo sapiens
  misc_RNA (1)...(19): siRNA sense strand
caacggcaccuauuuggaa

SEQ ID NO: 480046 - RNA, 19 nt, Homo sapiens
  misc_RNA (1)...(19): siRNA sense strand
ggaaauggcaugaaagcau

SEQ ID NO: 480047 - RNA, 19 nt, Homo sapiens
  misc_RNA (1)...(19): siRNA sense strand
gcgaggagcuggaguacag

SEQ ID NO: 480048 - RNA, 19 nt, Homo sapiens
  misc_RNA (1)...(19): siRNA sense strand
cagaauguaucgucagaau

SEQ ID NO: 480049 - RNA, 19 nt, Homo sapiens
  misc_RNA (1)...(19): siRNA sense strand
gagcaauacuauagcuuca

SEQ ID NO: 480050 - RNA, 19 nt, Homo sapiens
  misc_RNA (1)...(19): siRNA sense strand
aaaccgagcucuaguucau

SEQ ID NO: 480051 - RNA, 19 nt, Homo sapiens
  misc_RNA (1)...(19): siRNA sense strand
gcaagaagaucugugucau

SEQ ID NO: 480052 - RNA, 19 nt, Homo sapiens
  misc_RNA (1)...(19): siRNA sense strand
gcaccuauuuggaacuuag

SEQ ID NO: 480053 - RNA, 19 nt, Homo sapiens
  misc_RNA (1)...(19): siRNA sense strand
gcagaggauugaacaacug

SEQ ID NO: 480054 - RNA, 19 nt, Homo sapiens
  misc_RNA (1)...(19): siRNA sense strand
gcaaaauacuggagcacua

SEQ ID NO: 480055 - RNA, 19 nt, Homo sapiens
  misc_RNA (1)...(19): siRNA sense strand
gacaagggcuuccaguuuu

SEQ ID NO: 480056 - RNA, 19 nt, Homo sapiens
  misc_RNA (1)...(19): siRNA sense strand
ggaacaacaucgggaagga

SEQ ID NO: 480057 - RNA, 19 nt, Homo sapiens
  misc_RNA (1)...(19): siRNA sense strand
gaaggucaagucagaagaa

SEQ ID NO: 480058 - RNA, 19 nt, Homo sapiens
  misc_RNA (1)...(19): siRNA sense strand
gagaagaaccuuggugugu

SEQ ID NO: 480059 - RNA, 19 nt, Homo sapiens
  misc_RNA (1)...(19): siRNA sense strand
gggcaaauccauggaaauu

SEQ ID NO: 480060 - RNA, 19 nt, Homo sapiens
  misc_RNA (1)...(19): siRNA sense strand
ggaagcaagccauuuaauc

SEQ ID NO: 480061 - RNA, 19 nt, Homo sapiens
  misc_RNA (1)...(19): siRNA sense strand
gcacuaaugcccaugagau

SEQ ID NO: 480062 - RNA, 19 nt, Homo sapiens
  misc_RNA (1)...(19): siRNA sense strand
gagcaacggcaccuauuug

SEQ ID NO: 480063 - RNA, 19 nt, Homo sapiens
  misc_RNA (1)...(19): siRNA sense strand
acaaguagcugcucuucca

SEQ ID NO: 480064 - RNA, 19 nt, Homo sapiens
  misc_RNA (1)...(19): siRNA sense strand
uugcauccauaacaucuua

SEQ ID NO: 480065 - RNA, 19 nt, Homo sapiens
  misc_RNA (1)...(19): siRNA sense strand
ucagugaugucuguaaaga

SEQ ID NO: 480066 - RNA, 19 nt, Homo sapiens
  misc_RNA (1)...(19): siRNA sense strand
cuuagaagaagcugaaaua

SEQ ID NO: 480067 - RNA, 19 nt, Homo sapiens
  misc_RNA (1)...(19): siRNA sense strand
ucagugacauaagugauaa

SEQ ID NO: 480068 - RNA, 19 nt, Homo sapiens
  misc_RNA (1)...(19): siRNA sense strand
cauauugcccauaaaguuu

SEQ ID NO: 480069 - RNA, 19 nt, Homo sapiens
  misc_RNA (1)...(19): siRNA sense strand
aagaggaaguggcccuuaa

SEQ ID NO: 480070 - RNA, 19 nt, Homo sapiens
  misc_RNA (1)...(19): siRNA sense strand
gcacaucuaccaucugaag

SEQ ID NO: 480071 - RNA, 19 nt, Homo sapiens
  misc_RNA (1)...(19): siRNA sense strand
uuaaaaggcuggcauaaga

SEQ ID NO: 480072 - RNA, 19 nt, Homo sapiens
  misc_RNA (1)...(19): siRNA sense strand
gaagaagcugaaauacaaa

SEQ ID NO: 480073 - RNA, 19 nt, Homo sapiens
  misc_RNA (1)...(19): siRNA sense strand
gauugaaggcacaguguuu

SEQ ID NO: 480074 - RNA, 19 nt, Homo sapiens
  misc_RNA (1)...(19): siRNA sense strand
ggagagauugucaucaaga

SEQ ID NO: 480075 - RNA, 19 nt, Homo sapiens
  misc_RNA (1)...(19): siRNA sense strand
aaaccgauauagagagaga

SEQ ID NO: 480076 - RNA, 19 nt, Homo sapiens
  misc_RNA (1)...(19): siRNA sense strand
ccagagguuucuagaggaa

SEQ ID NO: 480077 - RNA, 19 nt, Homo sapiens
  misc_RNA (1)...(19): siRNA sense strand
agagguggauugagcacua

SEQ ID NO: 480078 - RNA, 19 nt, Homo sapiens
  misc_RNA (1)...(19): siRNA sense strand
ggcaagaugugagauggaa

SEQ ID NO: 480079 - RNA, 19 nt, Homo sapiens
  misc_RNA (1)...(19): siRNA sense strand
ugagacacgaguuccauua

SEQ ID NO: 480080 - RNA, 19 nt, Homo sapiens
  misc_RNA (1)...(19): siRNA sense strand
agacuacacuccuccaauc

SEQ ID NO: 480081 - RNA, 19 nt, Homo sapiens
  misc_RNA (1)...(19): siRNA sense strand
gaaauccgacgaugacucu

SEQ ID NO: 480082 - RNA, 19 nt, Homo sapiens
  misc_RNA (1)...(19): siRNA sense strand
aaaacgagauuucugauga

SEQ ID NO: 480083 - RNA, 19 nt, Homo sapiens
  misc_RNA (1)...(19): siRNA sense strand
cuacacuccuccaauccua

SEQ ID NO: 480084 - RNA, 19 nt, Homo sapiens
  misc_RNA (1)...(19): siRNA sense strand
caugcugagucuagaaauu

SEQ ID NO: 480085 - RNA, 19 nt, Homo sapiens
  misc_RNA (1)...(19): siRNA sense strand
gaagcaagccauuuaaucc

SEQ ID NO: 480086 - RNA, 19 nt, Homo sapiens
  misc_RNA (1)...(19): siRNA sense strand
caagagccaaaccgauaua

SEQ ID NO: 480087 - RNA, 19 nt, Homo sapiens
  misc_RNA (1)...(19): siRNA sense strand
gacaaaggaaucuugaaau

SEQ ID NO: 480088 - RNA, 19 nt, Homo sapiens
  misc_RNA (1)...(19): siRNA sense strand
uacuauagcuucacacagu

SEQ ID NO: 480089 - RNA, 19 nt, Homo sapiens
  misc_RNA (1)...(19): siRNA sense strand
guaggaagcguagcaguau

SEQ ID NO: 480090 - RNA, 19 nt, Homo sapiens
  misc_RNA (1)...(19): siRNA sense strand
cgaaaggcuacgagcaaua

SEQ ID NO: 480091 - RNA, 19 nt, Homo sapiens
  misc_RNA (1)...(19): siRNA sense strand
caaauccuaugccgaaagg

SEQ ID NO: 480092 - RNA, 19 nt, Homo sapiens
  misc_RNA (1)...(19): siRNA sense strand
caaacuggaagcaauguau

SEQ ID NO: 480093 - RNA, 19 nt, Homo sapiens
  misc_RNA (1)...(19): siRNA sense strand
gaguggguaucgaaacuuc

SEQ ID NO: 480094 - RNA, 19 nt, Homo sapiens
  misc_RNA (1)...(19): siRNA sense strand
uugaacaacugcagagaga

SEQ ID NO: 480095 - RNA, 19 nt, Homo sapiens
  misc_RNA (1)...(19): siRNA sense strand
gaaccugcaugaugauucc

SEQ ID NO: 480096 - RNA, 19 nt, Homo sapiens
  misc_RNA (1)...(19): siRNA sense strand
acagcgagcuccuggacaa

SEQ ID NO: 480097 - RNA, 19 nt, Homo sapiens
  misc_RNA (1)...(19): siRNA sense strand
guucaucagcuuucuaaug

SEQ ID NO: 480098 - RNA, 19 nt, Homo sapiens
  misc_RNA (1)...(19): siRNA sense strand
ggagagagagaaacugaag

SEQ ID NO: 480099 - RNA, 19 nt, Homo sapiens
  misc_RNA (1)...(19): siRNA sense strand
ucauauugcccauaaaguu

SEQ ID NO: 480100 - RNA, 19 nt, Homo sapiens
  misc_RNA (1)...(19): siRNA sense strand
ugugucauauugcccauaa

SEQ ID NO: 480101 - RNA, 19 nt, Homo sapiens
  misc_RNA (1)...(19): siRNA sense strand
gagccaaaccgauauagag

SEQ ID NO: 480102 - RNA, 19 nt, Homo sapiens
  misc_RNA (1)...(19): siRNA sense strand
agacacgaguuccauuaug

SEQ ID NO: 480103 - RNA, 19 nt, Homo sapiens
  misc_RNA (1)...(19): siRNA sense strand
aaacuucgccaccacagaa

SEQ ID NO: 480104 - RNA, 19 nt, Homo sapiens
  misc_RNA (1)...(19): siRNA sense strand
ucucagugaugucuguaaa

SEQ ID NO: 480105 - RNA, 19 nt, Homo sapiens
  misc_RNA (1)...(19): siRNA sense strand
gaaaggcuacgagcaauac

SEQ ID NO: 480106 - RNA, 19 nt, Homo sapiens
  misc_RNA (1)...(19): siRNA sense strand
gcgaagucccggagaagaa

SEQ ID NO: 480107 - RNA, 19 nt, Homo sapiens
  misc_RNA (1)...(19): siRNA sense strand
uaggaagcguagcaguaua

SEQ ID NO: 480108 - RNA, 19 nt, Homo sapiens
  misc_RNA (1)...(19): siRNA sense strand
guauggagagcaaauccua

SEQ ID NO: 480109 - RNA, 19 nt, Homo sapiens
  misc_RNA (1)...(19): siRNA sense strand
acuggaccauccugucuua

SEQ ID NO: 480110 - RNA, 19 nt, Homo sapiens
  misc_RNA (1)...(19): siRNA sense strand
gcuacgagcaauacuauag

SEQ ID NO: 480111 - RNA, 19 nt, Homo sapiens
  misc_RNA (1)...(19): siRNA sense strand
cacagaauguaucgucaga

SEQ ID NO: 480112 - RNA, 19 nt, Homo sapiens
  misc_RNA (1)...(19): siRNA sense strand
ggagccaccaguucagaaa

SEQ ID NO: 480113 - RNA, 19 nt, Homo sapiens
  misc_RNA (1)...(19): siRNA sense strand
ugagcacuauggagagauu

SEQ ID NO: 480114 - RNA, 19 nt, Homo sapiens
  misc_RNA (1)...(19): siRNA sense strand
aaacgagauuucugaugau

SEQ ID NO: 480115 - RNA, 19 nt, Homo sapiens
  misc_RNA (1)...(19): siRNA sense strand
gcggagagagagaaacuga

SEQ ID NO: 480116 - RNA, 19 nt, Homo sapiens
  misc_RNA (1)...(19): siRNA sense strand
aguuugcgcuggaauuaaa

SEQ ID NO: 480117 - RNA, 19 nt, Homo sapiens
  misc_RNA (1)...(19): siRNA sense strand
gaagaucugugucauauug

SEQ ID NO: 480118 - RNA, 19 nt, Homo sapiens
  misc_RNA (1)...(19): siRNA sense strand
gaaugaaauugccauguuu

SEQ ID NO: 480119 - RNA, 19 nt, Homo sapiens
  misc_RNA (1)...(19): siRNA sense strand
gaaaguagacucuccauca

SEQ ID NO: 480120 - RNA, 19 nt, Homo sapiens
  misc_RNA (1)...(19): siRNA sense strand
gagcacaucuaccaucuga

SEQ ID NO: 480121 - RNA, 19 nt, Homo sapiens
  misc_RNA (1)...(19): siRNA sense strand
gaauguaucgucagaauga

SEQ ID NO: 480122 - RNA, 19 nt, Homo sapiens
  misc_RNA (1)...(19): siRNA sense strand
ggacaaaggaaucuugaaa

SEQ ID NO: 480123 - RNA, 19 nt, Homo sapiens
  misc_RNA (1)...(19): siRNA sense strand
gugauaaucuuuccuuaga

SEQ ID NO: 480124 - RNA, 19 nt, Homo sapiens
  misc_RNA (1)...(19): siRNA sense strand
gaaguucuguuaucuccaa

SEQ ID NO: 480125 - RNA, 19 nt, Homo sapiens
  misc_RNA (1)...(19): siRNA sense strand
gaagcgaagucccggagaa

SEQ ID NO: 480126 - RNA, 19 nt, Homo sapiens
  misc_RNA (1)...(19): siRNA sense strand
agaaugaaauugccauguu

SEQ ID NO: 480127 - RNA, 19 nt, Homo sapiens
  misc_RNA (1)...(19): siRNA sense strand
ucuccaagcucuucagaaa

SEQ ID NO: 480128 - RNA, 19 nt, Homo sapiens
  misc_RNA (1)...(19): siRNA sense strand
gccaagagccaaaccgaua

SEQ ID NO: 480129 - RNA, 19 nt, Homo sapiens
  misc_RNA (1)...(19): siRNA sense strand
aagaagaucugugucauau

SEQ ID NO: 480130 - RNA, 19 nt, Homo sapiens
  misc_RNA (1)...(19): siRNA sense strand
caagaagaucugugucaua

SEQ ID NO: 480131 - RNA, 19 nt, Homo sapiens
  misc_RNA (1)...(19): siRNA sense strand
ccaaaccgauauagagaga

SEQ ID NO: 480132 - RNA, 19 nt, Homo sapiens
  misc_RNA (1)...(19): siRNA sense strand
gcgaggagcuggaguacag

SEQ ID NO: 480133 - RNA, 19 nt, Homo sapiens
  misc_RNA (1)...(19): siRNA sense strand
cagaauguaucgucagaau

SEQ ID NO: 480134 - RNA, 19 nt, Homo sapiens
  misc_RNA (1)...(19): siRNA sense strand
aaaccgagcucuaguucau

SEQ ID NO: 480135 - RNA, 19 nt, Homo sapiens
  misc_RNA (1)...(19): siRNA sense strand
gcaagaagaucugugucau

SEQ ID NO: 480136 - RNA, 19 nt, Homo sapiens
  misc_RNA (1)...(19): siRNA sense strand
ggaacaacaucgggaagga

SEQ ID NO: 480137 - RNA, 19 nt, Homo sapiens
  misc_RNA (1)...(19): siRNA sense strand
gaaggucaagucagaagaa

SEQ ID NO: 480138 - RNA, 19 nt, Homo sapiens
  misc_RNA (1)...(19): siRNA sense strand
gagaagaaccuuggugugu

SEQ ID NO: 480139 - RNA, 19 nt, Homo sapiens
  misc_RNA (1)...(19): siRNA sense strand
acaaguagcugcucuucca

SEQ ID NO: 480140 - RNA, 19 nt, Homo sapiens
  misc_RNA (1)...(19): siRNA sense strand
aagaggaaguggcccuuaa

SEQ ID NO: 480141 - RNA, 19 nt, Homo sapiens
  misc_RNA (1)...(19): siRNA sense strand
ucagugacauaagugauaa

SEQ ID NO: 480142 - RNA, 19 nt, Homo sapiens
  misc_RNA (1)...(19): siRNA sense strand
cauauugcccauaaaguuu

SEQ ID NO: 480143 - RNA, 19 nt, Homo sapiens
  misc_RNA (1)...(19): siRNA sense strand
gcacaucuaccaucugaag

SEQ ID NO: 480144 - RNA, 19 nt, Homo sapiens
  misc_RNA (1)...(19): siRNA sense strand
ucagugaugucuguaaaga

SEQ ID NO: 480145 - RNA, 19 nt, Homo sapiens
  misc_RNA (1)...(19): siRNA sense strand
uuaaaaggcuggcauaaga

SEQ ID NO: 480146 - RNA, 19 nt, Homo sapiens
  misc_RNA (1)...(19): siRNA sense strand
aaaccgauauagagagaga

SEQ ID NO: 480147 - RNA, 19 nt, Homo sapiens
  misc_RNA (1)...(19): siRNA sense strand
ugagacacgaguuccauua

SEQ ID NO: 480148 - RNA, 19 nt, Homo sapiens
  misc_RNA (1)...(19): siRNA sense strand
agacuacacuccuccaauc

SEQ ID NO: 480149 - RNA, 19 nt, Homo sapiens
  misc_RNA (1)...(19): siRNA sense strand
aaaacgagauuucugauga

SEQ ID NO: 480150 - RNA, 19 nt, Homo sapiens
  misc_RNA (1)...(19): siRNA sense strand
cuacacuccuccaauccua

SEQ ID NO: 480151 - RNA, 19 nt, Homo sapiens
  misc_RNA (1)...(19): siRNA sense strand
gacaaaggaaucuugaaau

SEQ ID NO: 480152 - RNA, 19 nt, Homo sapiens
  misc_RNA (1)...(19): siRNA sense strand
caagagccaaaccgauaua

SEQ ID NO: 480153 - RNA, 19 nt, Homo sapiens
  misc_RNA (1)...(19): siRNA sense strand
guaggaagcguagcaguau

SEQ ID NO: 480154 - RNA, 19 nt, Homo sapiens
  misc_RNA (1)...(19): siRNA sense strand
caaacuggaagcaauguau

SEQ ID NO: 480155 - RNA, 19 nt, Homo sapiens
  misc_RNA (1)...(19): siRNA sense strand
gagccaaaccgauauagag

SEQ ID NO: 480156 - RNA, 19 nt, Homo sapiens
  misc_RNA (1)...(19): siRNA sense strand
acagcgagcuccuggacaa

SEQ ID NO: 480157 - RNA, 19 nt, Homo sapiens
  misc_RNA (1)...(19): siRNA sense strand
guucaucagcuuucuaaug

SEQ ID NO: 480158 - RNA, 19 nt, Homo sapiens
  misc_RNA (1)...(19): siRNA sense strand
ggagagagagaaacugaag

SEQ ID NO: 480159 - RNA, 19 nt, Homo sapiens
  misc_RNA (1)...(19): siRNA sense strand
ucauauugcccauaaaguu

SEQ ID NO: 480160 - RNA, 19 nt, Homo sapiens
  misc_RNA (1)...(19): siRNA sense strand
ugugucauauugcccauaa

SEQ ID NO: 480161 - RNA, 19 nt, Homo sapiens
  misc_RNA (1)...(19): siRNA sense strand
agacacgaguuccauuaug

SEQ ID NO: 480162 - RNA, 19 nt, Homo sapiens
  misc_RNA (1)...(19): siRNA sense strand
aaacuucgccaccacagaa

SEQ ID NO: 480163 - RNA, 19 nt, Homo sapiens
  misc_RNA (1)...(19): siRNA sense strand
gaguggguaucgaaacuuc

SEQ ID NO: 480164 - RNA, 19 nt, Homo sapiens
  misc_RNA (1)...(19): siRNA sense strand
ucucagugaugucuguaaa

SEQ ID NO: 480165 - RNA, 19 nt, Homo sapiens
  misc_RNA (1)...(19): siRNA sense strand
gcgaagucccggagaagaa

SEQ ID NO: 480166 - RNA, 19 nt, Homo sapiens
  misc_RNA (1)...(19): siRNA sense strand
uaggaagcguagcaguaua

SEQ ID NO: 480167 - RNA, 19 nt, Homo sapiens
  misc_RNA (1)...(19): siRNA sense strand
cacagaauguaucgucaga

SEQ ID NO: 480168 - RNA, 19 nt, Homo sapiens
  misc_RNA (1)...(19): siRNA sense strand
aaacgagauuucugaugau

SEQ ID NO: 480169 - RNA, 19 nt, Homo sapiens
  misc_RNA (1)...(19): siRNA sense strand
gcggagagagagaaacuga

SEQ ID NO: 480170 - RNA, 19 nt, Homo sapiens
  misc_RNA (1)...(19): siRNA sense strand
ggagccaccaguucagaaa

SEQ ID NO: 480171 - RNA, 19 nt, Homo sapiens
  misc_RNA (1)...(19): siRNA sense strand
caaaaugcauagaccuuga

SEQ ID NO: 480172 - RNA, 19 nt, Homo sapiens
  misc_RNA (1)...(19): siRNA sense strand
ucacugacucccuuucuga

SEQ ID NO: 480173 - RNA, 19 nt, Homo sapiens
  misc_RNA (1)...(19): siRNA sense strand
gagacacgaguuccauuau

SEQ ID NO: 480174 - RNA, 19 nt, Homo sapiens
  misc_RNA (1)...(19): siRNA sense strand
ggucaagucagaagaaguc

SEQ ID NO: 480175 - RNA, 19 nt, Homo sapiens
  misc_RNA (1)...(19): siRNA sense strand
ucaggaaguucuguuaucu

SEQ ID NO: 480176 - RNA, 19 nt, Homo sapiens
  misc_RNA (1)...(19): siRNA sense strand
ccuaauuugucaacacuag

SEQ ID NO: 480177 - RNA, 19 nt, Homo sapiens
  misc_RNA (1)...(19): siRNA sense strand
gaaacuucgccaccacaga

SEQ ID NO: 480178 - RNA, 19 nt, Homo sapiens
  misc_RNA (1)...(19): siRNA sense strand
gaugucgggcucucaguga

SEQ ID NO: 480179 - RNA, 19 nt, Homo sapiens
  misc_RNA (1)...(19): siRNA sense strand
aaauugguaucaccuucaa

SEQ ID NO: 480180 - RNA, 19 nt, Homo sapiens
  misc_RNA (1)...(19): siRNA sense strand
gauuucugaugaugacuca

SEQ ID NO: 480181 - RNA, 19 nt, Homo sapiens
  misc_RNA (1)...(19): siRNA sense strand
caucacagacucuucaucu

SEQ ID NO: 480182 - RNA, 19 nt, Homo sapiens
  misc_RNA (1)...(19): siRNA sense strand
gcacaaguagcugcucuuc

SEQ ID NO: 480183 - RNA, 19 nt, Homo sapiens
  misc_RNA (1)...(19): siRNA sense strand
gaagucaucaaaaugcaua

SEQ ID NO: 480184 - RNA, 19 nt, Homo sapiens
  misc_RNA (1)...(19): siRNA sense strand
cgagauuucugaugaugac

SEQ ID NO: 480185 - RNA, 19 nt, Homo sapiens
  misc_RNA (1)...(19): siRNA sense strand
aagcguagcaguauaucaa

SEQ ID NO: 480186 - RNA, 19 nt, Homo sapiens
  misc_RNA (1)...(19): siRNA sense strand
gcucaggaaguucuguuau

SEQ ID NO: 480187 - RNA, 19 nt, Homo sapiens
  misc_RNA (1)...(19): siRNA sense strand
agugaugucuguaaagaag

SEQ ID NO: 480188 - RNA, 19 nt, Homo sapiens
  misc_RNA (1)...(19): siRNA sense strand
ucaaggagcacaaguagcu

SEQ ID NO: 480189 - RNA, 19 nt, Homo sapiens
  misc_RNA (1)...(19): siRNA sense strand
cauuaugguuacagucuuc

SEQ ID NO: 480190 - RNA, 19 nt, Homo sapiens
  misc_RNA (1)...(19): siRNA sense strand
ccaagagccaaaccgauau

SEQ ID NO: 480191 - RNA, 19 nt, Homo sapiens
  misc_RNA (1)...(19): siRNA sense strand
guagcaguauaucaaagca

SEQ ID NO: 480192 - RNA, 19 nt, Homo sapiens
  misc_RNA (1)...(19): siRNA sense strand
ugaagaacgcccugucauc

SEQ ID NO: 480193 - RNA, 19 nt, Homo sapiens
  misc_RNA (1)...(19): siRNA sense strand
gaugagugaugagaagaac

SEQ ID NO: 480194 - RNA, 19 nt, Homo sapiens
  misc_RNA (1)...(19): siRNA sense strand
gaaaaccgagcucuaguuc

SEQ ID NO: 480195 - RNA, 19 nt, Homo sapiens
  misc_RNA (1)...(19): siRNA sense strand
gaagcguagcaguauauca

SEQ ID NO: 480196 - RNA, 19 nt, Homo sapiens
  misc_RNA (1)...(19): siRNA sense strand
gaaacugaagcagcugaug

SEQ ID NO: 480197 - RNA, 19 nt, Homo sapiens
  misc_RNA (1)...(19): siRNA sense strand
aaagaggaaguggcccuua

SEQ ID NO: 480198 - RNA, 19 nt, Homo sapiens
  misc_RNA (1)...(19): siRNA sense strand
aguaggaagcguagcagua

SEQ ID NO: 480199 - RNA, 19 nt, Homo sapiens
  misc_RNA (1)...(19): siRNA sense strand
uaguucaucagcuuucuaa

SEQ ID NO: 480200 - RNA, 19 nt, Homo sapiens
  misc_RNA (1)...(19): siRNA sense strand
ggucauuggucugaagaac

SEQ ID NO: 480201 - RNA, 19 nt, Homo sapiens
  misc_RNA (1)...(19): siRNA sense strand
gcguagcaguauaucaaag

SEQ ID NO: 480202 - RNA, 19 nt, Homo sapiens
  misc_RNA (1)...(19): siRNA sense strand
ccgagcagcaguaacauca

SEQ ID NO: 480203 - RNA, 19 nt, Homo sapiens
  misc_RNA (1)...(19): siRNA sense strand
aaaguagacucuccaucac

SEQ ID NO: 480204 - RNA, 19 nt, Homo sapiens
  misc_RNA (1)...(19): siRNA sense strand
gaagugguggaaggacuga

SEQ ID NO: 480205 - RNA, 19 nt, Homo sapiens
  misc_RNA (1)...(19): siRNA sense strand
gcucuaguucaucagcuuu

SEQ ID NO: 480206 - RNA, 19 nt, Homo sapiens
  misc_RNA (1)...(19): siRNA sense strand
cuguaaagaagucaucaaa

SEQ ID NO: 480207 - RNA, 19 nt, Homo sapiens
  misc_RNA (1)...(19): siRNA sense strand
cauaagugauaaucuuucc

SEQ ID NO: 480208 - RNA, 19 nt, Homo sapiens
  misc_RNA (1)...(19): siRNA sense strand
agaggaaguggcccuuaaa

SEQ ID NO: 480209 - RNA, 19 nt, Homo sapiens
  misc_RNA (1)...(19): siRNA sense strand
gguguuugacuccauuuca

SEQ ID NO: 480210 - RNA, 19 nt, Homo sapiens
  misc_RNA (1)...(19): siRNA sense strand
acaccgaggagcacaucua

SEQ ID NO: 480211 - RNA, 19 nt, Homo sapiens
  misc_RNA (1)...(19): siRNA sense strand
ucacuuuaaggucagcuuu

SEQ ID NO: 480212 - RNA, 19 nt, Homo sapiens
  misc_RNA (1)...(19): siRNA sense strand
ucuaccaucugaaggucaa

SEQ ID NO: 480213 - RNA, 19 nt, Homo sapiens
  misc_RNA (1)...(19): siRNA sense strand
ccaugccgguggagcugaa

SEQ ID NO: 480214 - RNA, 19 nt, Homo sapiens
  misc_RNA (1)...(19): siRNA sense strand
cucaggaaguucuguuauc

SEQ ID NO: 480215 - RNA, 19 nt, Homo sapiens
  misc_RNA (1)...(19): siRNA sense strand
ucaaacuggaagcaaugua

SEQ ID NO: 480216 - RNA, 19 nt, Homo sapiens
  misc_RNA (1)...(19): siRNA sense strand
ucaaguaggaagcguagca

SEQ ID NO: 480217 - RNA, 19 nt, Homo sapiens
  misc_RNA (1)...(19): siRNA sense strand
gaagaucugugucauauug

SEQ ID NO: 480218 - RNA, 19 nt, Homo sapiens
  misc_RNA (1)...(19): siRNA sense strand
gaaugaaauugccauguuu

SEQ ID NO: 480219 - RNA, 19 nt, Homo sapiens
  misc_RNA (1)...(19): siRNA sense strand
gaaaguagacucuccauca

SEQ ID NO: 480220 - RNA, 19 nt, Homo sapiens
  misc_RNA (1)...(19): siRNA sense strand
gagcacaucuaccaucuga

SEQ ID NO: 480221 - RNA, 19 nt, Homo sapiens
  misc_RNA (1)...(19): siRNA sense strand
gaauguaucgucagaauga

SEQ ID NO: 480222 - RNA, 19 nt, Homo sapiens
  misc_RNA (1)...(19): siRNA sense strand
ggacaaaggaaucuugaaa

SEQ ID NO: 480223 - RNA, 19 nt, Homo sapiens
  misc_RNA (1)...(19): siRNA sense strand
gugauaaucuuuccuuaga

SEQ ID NO: 480224 - RNA, 19 nt, Homo sapiens
  misc_RNA (1)...(19): siRNA sense strand
gaaguucuguuaucuccaa

SEQ ID NO: 480225 - RNA, 19 nt, Homo sapiens
  misc_RNA (1)...(19): siRNA sense strand
gaagcgaagucccggagaa

SEQ ID NO: 480226 - RNA, 19 nt, Homo sapiens
  misc_RNA (1)...(19): siRNA sense strand
agaaugaaauugccauguu

SEQ ID NO: 480227 - RNA, 19 nt, Homo sapiens
  misc_RNA (1)...(19): siRNA sense strand
ucuccaagcucuucagaaa

SEQ ID NO: 480228 - RNA, 19 nt, Homo sapiens
  misc_RNA (1)...(19): siRNA sense strand
gccaagagccaaaccgaua

SEQ ID NO: 480229 - RNA, 19 nt, Homo sapiens
  misc_RNA (1)...(19): siRNA sense strand
aagaagaucugugucauau

SEQ ID NO: 480230 - RNA, 19 nt, Homo sapiens
  misc_RNA (1)...(19): siRNA sense strand
caagaagaucugugucaua

SEQ ID NO: 480231 - RNA, 19 nt, Homo sapiens
  misc_RNA (1)...(19): siRNA sense strand
ccaaaccgauauagagaga

SEQ ID NO: 480232 - RNA, 19 nt, Homo sapiens
  misc_RNA (1)...(19): siRNA sense strand
gcgaggagcuggaguacag

SEQ ID NO: 480233 - RNA, 19 nt, Homo sapiens
  misc_RNA (1)...(19): siRNA sense strand
cagaauguaucgucagaau

SEQ ID NO: 480234 - RNA, 19 nt, Homo sapiens
  misc_RNA (1)...(19): siRNA sense strand
aaaccgagcucuaguucau

SEQ ID NO: 480235 - RNA, 19 nt, Homo sapiens
  misc_RNA (1)...(19): siRNA sense strand
gcaagaagaucugugucau

SEQ ID NO: 480236 - RNA, 19 nt, Homo sapiens
  misc_RNA (1)...(19): siRNA sense strand
ggaacaacaucgggaagga

SEQ ID NO: 480237 - RNA, 19 nt, Homo sapiens
  misc_RNA (1)...(19): siRNA sense strand
gaaggucaagucagaagaa

SEQ ID NO: 480238 - RNA, 19 nt, Homo sapiens
  misc_RNA (1)...(19): siRNA sense strand
gagaagaaccuuggugugu

SEQ ID NO: 480239 - RNA, 19 nt, Homo sapiens
  misc_RNA (1)...(19): siRNA sense strand
acaaguagcugcucuucca

SEQ ID NO: 480240 - RNA, 19 nt, Homo sapiens
  misc_RNA (1)...(19): siRNA sense strand
aagaggaaguggcccuuaa

SEQ ID NO: 480241 - RNA, 19 nt, Homo sapiens
  misc_RNA (1)...(19): siRNA sense strand
ucagugacauaagugauaa

SEQ ID NO: 480242 - RNA, 19 nt, Homo sapiens
  misc_RNA (1)...(19): siRNA sense strand
cauauugcccauaaaguuu

SEQ ID NO: 480243 - RNA, 19 nt, Homo sapiens
  misc_RNA (1)...(19): siRNA sense strand
gcacaucuaccaucugaag

SEQ ID NO: 480244 - RNA, 19 nt, Homo sapiens
  misc_RNA (1)...(19): siRNA sense strand
ucagugaugucuguaaaga

SEQ ID NO: 480245 - RNA, 19 nt, Homo sapiens
  misc_RNA (1)...(19): siRNA sense strand
uuaaaaggcuggcauaaga

SEQ ID NO: 480246 - RNA, 19 nt, Homo sapiens
  misc_RNA (1)...(19): siRNA sense strand
aaaccgauauagagagaga

SEQ ID NO: 480247 - RNA, 19 nt, Homo sapiens
  misc_RNA (1)...(19): siRNA sense strand
ugagacacgaguuccauua

SEQ ID NO: 480248 - RNA, 19 nt, Homo sapiens
  misc_RNA (1)...(19): siRNA sense strand
agacuacacuccuccaauc

SEQ ID NO: 480249 - RNA, 19 nt, Homo sapiens
  misc_RNA (1)...(19): siRNA sense strand
aaaacgagauuucugauga

SEQ ID NO: 480250 - RNA, 19 nt, Homo sapiens
  misc_RNA (1)...(19): siRNA sense strand
cuacacuccuccaauccua

SEQ ID NO: 480251 - RNA, 19 nt, Homo sapiens
  misc_RNA (1)...(19): siRNA sense strand
gacaaaggaaucuugaaau

SEQ ID NO: 480252 - RNA, 19 nt, Homo sapiens
  misc_RNA (1)...(19): siRNA sense strand
caagagccaaaccgauaua

SEQ ID NO: 480253 - RNA, 19 nt, Homo sapiens
  misc_RNA (1)...(19): siRNA sense strand
guaggaagcguagcaguau

SEQ ID NO: 480254 - RNA, 19 nt, Homo sapiens
  misc_RNA (1)...(19): siRNA sense strand
caaacuggaagcaauguau

SEQ ID NO: 480255 - RNA, 19 nt, Homo sapiens
  misc_RNA (1)...(19): siRNA sense strand
gagccaaaccgauauagag

SEQ ID NO: 480256 - RNA, 19 nt, Homo sapiens
  misc_RNA (1)...(19): siRNA sense strand
acagcgagcuccuggacaa

SEQ ID NO: 480257 - RNA, 19 nt, Homo sapiens
  misc_RNA (1)...(19): siRNA sense strand
guucaucagcuuucuaaug

SEQ ID NO: 480258 - RNA, 19 nt, Homo sapiens
  misc_RNA (1)...(19): siRNA sense strand
ggagagagagaaacugaag

SEQ ID NO: 480259 - RNA, 19 nt, Homo sapiens
  misc_RNA (1)...(19): siRNA sense strand
ucauauugcccauaaaguu

SEQ ID NO: 480260 - RNA, 19 nt, Homo sapiens
  misc_RNA (1)...(19): siRNA sense strand
ugugucauauugcccauaa

SEQ ID NO: 480261 - RNA, 19 nt, Homo sapiens
  misc_RNA (1)...(19): siRNA sense strand
agacacgaguuccauuaug

SEQ ID NO: 480262 - RNA, 19 nt, Homo sapiens
  misc_RNA (1)...(19): siRNA sense strand
aaacuucgccaccacagaa

SEQ ID NO: 480263 - RNA, 19 nt, Homo sapiens
  misc_RNA (1)...(19): siRNA sense strand
gaguggguaucgaaacuuc

SEQ ID NO: 480264 - RNA, 19 nt, Homo sapiens
  misc_RNA (1)...(19): siRNA sense strand
ucucagugaugucuguaaa

SEQ ID NO: 480265 - RNA, 19 nt, Homo sapiens
  misc_RNA (1)...(19): siRNA sense strand
gcgaagucccggagaagaa

SEQ ID NO: 480266 - RNA, 19 nt, Homo sapiens
  misc_RNA (1)...(19): siRNA sense strand
uaggaagcguagcaguaua

SEQ ID NO: 480267 - RNA, 19 nt, Homo sapiens
  misc_RNA (1)...(19): siRNA sense strand
cacagaauguaucgucaga

SEQ ID NO: 480268 - RNA, 19 nt, Homo sapiens
  misc_RNA (1)...(19): siRNA sense strand
aaacgagauuucugaugau

SEQ ID NO: 480269 - RNA, 19 nt, Homo sapiens
  misc_RNA (1)...(19): siRNA sense strand
gcggagagagagaaacuga

SEQ ID NO: 480270 - RNA, 19 nt, Homo sapiens
  misc_RNA (1)...(19): siRNA sense strand
ggagccaccaguucagaaa

SEQ ID NO: 480271 - RNA, 19 nt, Homo sapiens
  misc_RNA (1)...(19): siRNA sense strand
caaaaugcauagaccuuga

SEQ ID NO: 480272 - RNA, 19 nt, Homo sapiens
  misc_RNA (1)...(19): siRNA sense strand
ucacugacucccuuucuga

SEQ ID NO: 480273 - RNA, 19 nt, Homo sapiens
  misc_RNA (1)...(19): siRNA sense strand
gagacacgaguuccauuau

SEQ ID NO: 480274 - RNA, 19 nt, Homo sapiens
  misc_RNA (1)...(19): siRNA sense strand
ggucaagucagaagaaguc

SEQ ID NO: 480275 - RNA, 19 nt, Homo sapiens
  misc_RNA (1)...(19): siRNA sense strand
ucaggaaguucuguuaucu

SEQ ID NO: 480276 - RNA, 19 nt, Homo sapiens
  misc_RNA (1)...(19): siRNA sense strand
ccuaauuugucaacacuag

SEQ ID NO: 480277 - RNA, 19 nt, Homo sapiens
  misc_RNA (1)...(19): siRNA sense strand
gaaacuucgccaccacaga

SEQ ID NO: 480278 - RNA, 19 nt, Homo sapiens
  misc_RNA (1)...(19): siRNA sense strand
gaugucgggcucucaguga

SEQ ID NO: 480279 - RNA, 19 nt, Homo sapiens
  misc_RNA (1)...(19): siRNA sense strand
aaauugguaucaccuucaa

SEQ ID NO: 480280 - RNA, 19 nt, Homo sapiens
  misc_RNA (1)...(19): siRNA sense strand
gauuucugaugaugacuca

SEQ ID NO: 480281 - RNA, 19 nt, Homo sapiens
  misc_RNA (1)...(19): siRNA sense strand
caucacagacucuucaucu

SEQ ID NO: 480282 - RNA, 19 nt, Homo sapiens
  misc_RNA (1)...(19): siRNA sense strand
gcacaaguagcugcucuuc

SEQ ID NO: 480283 - RNA, 19 nt, Homo sapiens
  misc_RNA (1)...(19): siRNA sense strand
gaagucaucaaaaugcaua

SEQ ID NO: 480284 - RNA, 19 nt, Homo sapiens
  misc_RNA (1)...(19): siRNA sense strand
cgagauuucugaugaugac

SEQ ID NO: 480285 - RNA, 19 nt, Homo sapiens
  misc_RNA (1)...(19): siRNA sense strand
aagcguagcaguauaucaa

SEQ ID NO: 480286 - RNA, 19 nt, Homo sapiens
  misc_RNA (1)...(19): siRNA sense strand
gcucaggaaguucuguuau

SEQ ID NO: 480287 - RNA, 19 nt, Homo sapiens
  misc_RNA (1)...(19): siRNA sense strand
agugaugucuguaaagaag

SEQ ID NO: 480288 - RNA, 19 nt, Homo sapiens
  misc_RNA (1)...(19): siRNA sense strand
ucaaggagcacaaguagcu

SEQ ID NO: 480289 - RNA, 19 nt, Homo sapiens
  misc_RNA (1)...(19): siRNA sense strand
cauuaugguuacagucuuc

SEQ ID NO: 480290 - RNA, 19 nt, Homo sapiens
  misc_RNA (1)...(19): siRNA sense strand
ccaagagccaaaccgauau

SEQ ID NO: 480291 - RNA, 19 nt, Homo sapiens
  misc_RNA (1)...(19): siRNA sense strand
guagcaguauaucaaagca

SEQ ID NO: 480292 - RNA, 19 nt, Homo sapiens
  misc_RNA (1)...(19): siRNA sense strand
ugaagaacgcccugucauc

SEQ ID NO: 480293 - RNA, 19 nt, Homo sapiens
  misc_RNA (1)...(19): siRNA sense strand
gaugagugaugagaagaac

SEQ ID NO: 480294 - RNA, 19 nt, Homo sapiens
  misc_RNA (1)...(19): siRNA sense strand
gaaaaccgagcucuaguuc

SEQ ID NO: 480295 - RNA, 19 nt, Homo sapiens
  misc_RNA (1)...(19): siRNA sense strand
gaagcguagcaguauauca

SEQ ID NO: 480296 - RNA, 19 nt, Homo sapiens
  misc_RNA (1)...(19): siRNA sense strand
gaaacugaagcagcugaug

SEQ ID NO: 480297 - RNA, 19 nt, Homo sapiens
  misc_RNA (1)...(19): siRNA sense strand
aaagaggaaguggcccuua

SEQ ID NO: 480298 - RNA, 19 nt, Homo sapiens
  misc_RNA (1)...(19): siRNA sense strand
aguaggaagcguagcagua

SEQ ID NO: 480299 - RNA, 19 nt, Homo sapiens
  misc_RNA (1)...(19): siRNA sense strand
uaguucaucagcuuucuaa

SEQ ID NO: 480300 - RNA, 19 nt, Homo sapiens
  misc_RNA (1)...(19): siRNA sense strand
ggucauuggucugaagaac

SEQ ID NO: 480301 - RNA, 19 nt, Homo sapiens
  misc_RNA (1)...(19): siRNA sense strand
gcguagcaguauaucaaag

SEQ ID NO: 480302 - RNA, 19 nt, Homo sapiens
  misc_RNA (1)...(19): siRNA sense strand
ccgagcagcaguaacauca

SEQ ID NO: 480303 - RNA, 19 nt, Homo sapiens
  misc_RNA (1)...(19): siRNA sense strand
aaaguagacucuccaucac

SEQ ID NO: 480304 - RNA, 19 nt, Homo sapiens
  misc_RNA (1)...(19): siRNA sense strand
gaagugguggaaggacuga

SEQ ID NO: 480305 - RNA, 19 nt, Homo sapiens
  misc_RNA (1)...(19): siRNA sense strand
gcucuaguucaucagcuuu

SEQ ID NO: 480306 - RNA, 19 nt, Homo sapiens
  misc_RNA (1)...(19): siRNA sense strand
cuguaaagaagucaucaaa

SEQ ID NO: 480307 - RNA, 19 nt, Homo sapiens
  misc_RNA (1)...(19): siRNA sense strand
cauaagugauaaucuuucc

SEQ ID NO: 480308 - RNA, 19 nt, Homo sapiens
  misc_RNA (1)...(19): siRNA sense strand
agaggaaguggcccuuaaa

SEQ ID NO: 480309 - RNA, 19 nt, Homo sapiens
  misc_RNA (1)...(19): siRNA sense strand
gguguuugacuccauuuca

SEQ ID NO: 480310 - RNA, 19 nt, Homo sapiens
  misc_RNA (1)...(19): siRNA sense strand
acaccgaggagcacaucua

SEQ ID NO: 480311 - RNA, 19 nt, Homo sapiens
  misc_RNA (1)...(19): siRNA sense strand
ucacuuuaaggucagcuuu

SEQ ID NO: 480312 - RNA, 19 nt, Homo sapiens
  misc_RNA (1)...(19): siRNA sense strand
ucuaccaucugaaggucaa

SEQ ID NO: 480313 - RNA, 19 nt, Homo sapiens
  misc_RNA (1)...(19): siRNA sense strand
ccaugccgguggagcugaa

SEQ ID NO: 480314 - RNA, 19 nt, Homo sapiens
  misc_RNA (1)...(19): siRNA sense strand
cucaggaaguucuguuauc

SEQ ID NO: 480315 - RNA, 19 nt, Homo sapiens
  misc_RNA (1)...(19): siRNA sense strand
ucaaacuggaagcaaugua

SEQ ID NO: 480316 - RNA, 19 nt, Homo sapiens
  misc_RNA (1)...(19): siRNA sense strand
ucaaguaggaagcguagca

SEQ ID NO: 480317 - RNA, 19 nt, Homo sapiens
  misc_RNA (1)...(19): siRNA sense strand
ggcaagagcugaugagguu

SEQ ID NO: 480318 - RNA, 19 nt, Homo sapiens
  misc_RNA (1)...(19): siRNA sense strand
ggacaucccagaagugguu

SEQ ID NO: 480319 - RNA, 19 nt, Homo sapiens
  misc_RNA (1)...(19): siRNA sense strand
ggaagacucugggcauucu

SEQ ID NO: 480320 - RNA, 19 nt, Homo sapiens
  misc_RNA (1)...(19): siRNA sense strand
ggagaacgucgcuauggaa

SEQ ID NO: 480321 - RNA, 19 nt, Homo sapiens
  misc_RNA (1)...(19): siRNA sense strand
gaacgucgcuauggaaccu

SEQ ID NO: 480322 - RNA, 19 nt, Homo sapiens
  misc_RNA (1)...(19): siRNA sense strand
cagcggacaucccagaagu

SEQ ID NO: 480323 - RNA, 19 nt, Homo sapiens
  misc_RNA (1)...(19): siRNA sense strand
cauccaggcucaaggaaaa

SEQ ID NO: 480324 - RNA, 19 nt, Homo sapiens
  misc_RNA (1)...(19): siRNA sense strand
cagaauaccagcgugcauu

SEQ ID NO: 480325 - RNA, 19 nt, Homo sapiens
  misc_RNA (1)...(19): siRNA sense strand
ucccagaagugguuguuuc

SEQ ID NO: 480326 - RNA, 19 nt, Homo sapiens
  misc_RNA (1)...(19): siRNA sense strand
gcauccaggcucaaggaaa

SEQ ID NO: 480327 - RNA, 19 nt, Homo sapiens
  misc_RNA (1)...(19): siRNA sense strand
gcaggagaacgucgcuaug

SEQ ID NO: 480328 - RNA, 19 nt, Homo sapiens
  misc_RNA (1)...(19): siRNA sense strand
aggagaacgucgcuaugga

SEQ ID NO: 480329 - RNA, 19 nt, Homo sapiens
  misc_RNA (1)...(19): siRNA sense strand
gcagauugcagcggacauc

SEQ ID NO: 480330 - RNA, 19 nt, Homo sapiens
  misc_RNA (1)...(19): siRNA sense strand
agaauaccagcgugcauug

SEQ ID NO: 480331 - RNA, 19 nt, Homo sapiens
  misc_RNA (1)...(19): siRNA sense strand
gggaagacucugggcauuc

SEQ ID NO: 480332 - RNA, 19 nt, Homo sapiens
  misc_RNA (1)...(19): siRNA sense strand
gcuauggaaccugcaucua

SEQ ID NO: 480333 - RNA, 19 nt, Homo sapiens
  misc_RNA (1)...(19): siRNA sense strand
cgccauccuugcugccauu

SEQ ID NO: 480334 - RNA, 19 nt, Homo sapiens
  misc_RNA (1)...(19): siRNA sense strand
gcagaauaccagcgugcau

SEQ ID NO: 480335 - RNA, 19 nt, Homo sapiens
  misc_RNA (1)...(19): siRNA sense strand
cauccuugcugccauucuc

SEQ ID NO: 480336 - RNA, 19 nt, Homo sapiens
  misc_RNA (1)...(19): siRNA sense strand
agaagaagauguugaauga

SEQ ID NO: 480337 - RNA, 19 nt, Homo sapiens
  misc_RNA (1)...(19): siRNA sense strand
gaacuaauccauaaagaga

SEQ ID NO: 480338 - RNA, 19 nt, Homo sapiens
  misc_RNA (1)...(19): siRNA sense strand
gcagaauacccuauaguua

SEQ ID NO: 480339 - RNA, 19 nt, Homo sapiens
  misc_RNA (1)...(19): siRNA sense strand
gauauggguuuguguauga

SEQ ID NO: 480340 - RNA, 19 nt, Homo sapiens
  misc_RNA (1)...(19): siRNA sense strand
ccaaaggaguaauaaauga

SEQ ID NO: 480341 - RNA, 19 nt, Homo sapiens
  misc_RNA (1)...(19): siRNA sense strand
cuacacugcucaucuauaa

SEQ ID NO: 480342 - RNA, 19 nt, Homo sapiens
  misc_RNA (1)...(19): siRNA sense strand
gcagaaagaugagcauuca

SEQ ID NO: 480343 - RNA, 19 nt, Homo sapiens
  misc_RNA (1)...(19): siRNA sense strand
cagaauacccuauaguuaa

SEQ ID NO: 480344 - RNA, 19 nt, Homo sapiens
  misc_RNA (1)...(19): siRNA sense strand
acaguuugcugaagaauuu

SEQ ID NO: 480345 - RNA, 19 nt, Homo sapiens
  misc_RNA (1)...(19): siRNA sense strand
gaacgagucagcagaaaga

SEQ ID NO: 480346 - RNA, 19 nt, Homo sapiens
  misc_RNA (1)...(19): siRNA sense strand
gaugaaaacugccuucgua

SEQ ID NO: 480347 - RNA, 19 nt, Homo sapiens
  misc_RNA (1)...(19): siRNA sense strand
gaagaucaccacaauuguu

SEQ ID NO: 480348 - RNA, 19 nt, Homo sapiens
  misc_RNA (1)...(19): siRNA sense strand
uggcaaagauucaaaggaa

SEQ ID NO: 480349 - RNA, 19 nt, Homo sapiens
  misc_RNA (1)...(19): siRNA sense strand
ucaagacagugauucaauu

SEQ ID NO: 480350 - RNA, 19 nt, Homo sapiens
  misc_RNA (1)...(19): siRNA sense strand
gauguggagucuuuccuaa

SEQ ID NO: 480351 - RNA, 19 nt, Homo sapiens
  misc_RNA (1)...(19): siRNA sense strand
gcuggaaacuggaaagcaa

SEQ ID NO: 480352 - RNA, 19 nt, Homo sapiens
  misc_RNA (1)...(19): siRNA sense strand
guacauguccuagagcaua

SEQ ID NO: 480353 - RNA, 19 nt, Homo sapiens
  misc_RNA (1)...(19): siRNA sense strand
gaaagcaauuccuagaaac

SEQ ID NO: 480354 - RNA, 19 nt, Homo sapiens
  misc_RNA (1)...(19): siRNA sense strand
gaacugaagaucaccacaa

SEQ ID NO: 480355 - RNA, 19 nt, Homo sapiens
  misc_RNA (1)...(19): siRNA sense strand
gacaguguaugcaggauau

SEQ ID NO: 480356 - RNA, 19 nt, Homo sapiens
  misc_RNA (1)...(19): siRNA sense strand
gaaagaugagcauucaaga

SEQ ID NO: 480357 - RNA, 19 nt, Homo sapiens
  misc_RNA (1)...(19): siRNA sense strand
gaguaggaauggcaaagau

SEQ ID NO: 480358 - RNA, 19 nt, Homo sapiens
  misc_RNA (1)...(19): siRNA sense strand
uaaauaccguagacagugu

SEQ ID NO: 480359 - RNA, 19 nt, Homo sapiens
  misc_RNA (1)...(19): siRNA sense strand
cgagucagcagaaagauga

SEQ ID NO: 480360 - RNA, 19 nt, Homo sapiens
  misc_RNA (1)...(19): siRNA sense strand
caaaugucuucuccucaga

SEQ ID NO: 480361 - RNA, 19 nt, Homo sapiens
  misc_RNA (1)...(19): siRNA sense strand
gcagcagaauacccuauag

SEQ ID NO: 480362 - RNA, 19 nt, Homo sapiens
  misc_RNA (1)...(19): siRNA sense strand
gaaaacugccuucguaaau

SEQ ID NO: 480363 - RNA, 19 nt, Homo sapiens
  misc_RNA (1)...(19): siRNA sense strand
cugaagaucaccacaauug

SEQ ID NO: 480364 - RNA, 19 nt, Homo sapiens
  misc_RNA (1)...(19): siRNA sense strand
aaacugccuucguaaauac

SEQ ID NO: 480365 - RNA, 19 nt, Homo sapiens
  misc_RNA (1)...(19): siRNA sense strand
gaaaaggaacugaagauca

SEQ ID NO: 480366 - RNA, 19 nt, Homo sapiens
  misc_RNA (1)...(19): siRNA sense strand
agaagaagaagauguugaa

SEQ ID NO: 480367 - RNA, 19 nt, Homo sapiens
  misc_RNA (1)...(19): siRNA sense strand
ugaacaguuugcugaagaa

SEQ ID NO: 480368 - RNA, 19 nt, Homo sapiens
  misc_RNA (1)...(19): siRNA sense strand
ggacccaaaggaguaauaa

SEQ ID NO: 480369 - RNA, 19 nt, Homo sapiens
  misc_RNA (1)...(19): siRNA sense strand
gugaugcucuaaacaguag

SEQ ID NO: 480370 - RNA, 19 nt, Homo sapiens
  misc_RNA (1)...(19): siRNA sense strand
agaauacccuauaguuaag

SEQ ID NO: 480371 - RNA, 19 nt, Homo sapiens
  misc_RNA (1)...(19): siRNA sense strand
ccuaaaugaauauggguua

SEQ ID NO: 480372 - RNA, 19 nt, Homo sapiens
  misc_RNA (1)...(19): siRNA sense strand
uggagucuuuccuaaauga

SEQ ID NO: 480373 - RNA, 19 nt, Homo sapiens
  misc_RNA (1)...(19): siRNA sense strand
uguggagucuuuccuaaau

SEQ ID NO: 480374 - RNA, 19 nt, Homo sapiens
  misc_RNA (1)...(19): siRNA sense strand
aaaacugccuucguaaaua

SEQ ID NO: 480375 - RNA, 19 nt, Homo sapiens
  misc_RNA (1)...(19): siRNA sense strand
gggaacucauaagcaauuu

SEQ ID NO: 480376 - RNA, 19 nt, Homo sapiens
  misc_RNA (1)...(19): siRNA sense strand
caagacagugauucaauuc

SEQ ID NO: 480377 - RNA, 19 nt, Homo sapiens
  misc_RNA (1)...(19): siRNA sense strand
ggauguggagucuuuccua

SEQ ID NO: 480378 - RNA, 19 nt, Homo sapiens
  misc_RNA (1)...(19): siRNA sense strand
cugaacaguuugcugaaga

SEQ ID NO: 480379 - RNA, 19 nt, Homo sapiens
  misc_RNA (1)...(19): siRNA sense strand
gguauuaaggguugugaug

SEQ ID NO: 480380 - RNA, 19 nt, Homo sapiens
  misc_RNA (1)...(19): siRNA sense strand
aaagaugagcauucaagaa

SEQ ID NO: 480381 - RNA, 19 nt, Homo sapiens
  misc_RNA (1)...(19): siRNA sense strand
ugaaagagagguacauguc

SEQ ID NO: 480382 - RNA, 19 nt, Homo sapiens
  misc_RNA (1)...(19): siRNA sense strand
cuagauauggguuugugua

SEQ ID NO: 480383 - RNA, 19 nt, Homo sapiens
  misc_RNA (1)...(19): siRNA sense strand
auaaagagaaagaggauga

SEQ ID NO: 480384 - RNA, 19 nt, Homo sapiens
  misc_RNA (1)...(19): siRNA sense strand
ucacauuuaugaagauggu

SEQ ID NO: 480385 - RNA, 19 nt, Homo sapiens
  misc_RNA (1)...(19): siRNA sense strand
uaaggguugugaugcucua

SEQ ID NO: 480386 - RNA, 19 nt, Homo sapiens
  misc_RNA (1)...(19): siRNA sense strand
gggccuagauauggguuug

SEQ ID NO: 480387 - RNA, 19 nt, Homo sapiens
  misc_RNA (1)...(19): siRNA sense strand
agagguacauguccuagag

SEQ ID NO: 480388 - RNA, 19 nt, Homo sapiens
  misc_RNA (1)...(19): siRNA sense strand
ucaauuccaccuagcaaga

SEQ ID NO: 480389 - RNA, 19 nt, Homo sapiens
  misc_RNA (1)...(19): siRNA sense strand
gagagucaagacagugauu

SEQ ID NO: 480390 - RNA, 19 nt, Homo sapiens
  misc_RNA (1)...(19): siRNA sense strand
gaagaagaagauguugaau

SEQ ID NO: 480391 - RNA, 19 nt, Homo sapiens
  misc_RNA (1)...(19): siRNA sense strand
agacagugauucaauucca

SEQ ID NO: 480392 - RNA, 19 nt, Homo sapiens
  misc_RNA (1)...(19): siRNA sense strand
aagaagaagauguugaaug

SEQ ID NO: 480393 - RNA, 19 nt, Homo sapiens
  misc_RNA (1)...(19): siRNA sense strand
uaaauuagagagucaagac

SEQ ID NO: 480394 - RNA, 19 nt, Homo sapiens
  misc_RNA (1)...(19): siRNA sense strand
cccaaaggaguaauaaaug

SEQ ID NO: 480395 - RNA, 19 nt, Homo sapiens
  misc_RNA (1)...(19): siRNA sense strand
guggagucuuuccuaaaug

SEQ ID NO: 480396 - RNA, 19 nt, Homo sapiens
  misc_RNA (1)...(19): siRNA sense strand
agaaagaugagcauucaag

SEQ ID NO: 480397 - RNA, 19 nt, Homo sapiens
  misc_RNA (1)...(19): siRNA sense strand
uagaagaagaagauguuga

SEQ ID NO: 480398 - RNA, 19 nt, Homo sapiens
  misc_RNA (1)...(19): siRNA sense strand
ggaacgagucagcagaaag

SEQ ID NO: 480399 - RNA, 19 nt, Homo sapiens
  misc_RNA (1)...(19): siRNA sense strand
gcugaacaguuugcugaag

SEQ ID NO: 480400 - RNA, 19 nt, Homo sapiens
  misc_RNA (1)...(19): siRNA sense strand
aagaucaccacaauuguug

SEQ ID NO: 480401 - RNA, 19 nt, Homo sapiens
  misc_RNA (1)...(19): siRNA sense strand
acacugcucaucuauaaag

SEQ ID NO: 480402 - RNA, 19 nt, Homo sapiens
  misc_RNA (1)...(19): siRNA sense strand
agauauggguuuguguaug

SEQ ID NO: 480403 - RNA, 19 nt, Homo sapiens
  misc_RNA (1)...(19): siRNA sense strand
ccuagagcauaccaaaaua

SEQ ID NO: 480404 - RNA, 19 nt, Homo sapiens
  misc_RNA (1)...(19): siRNA sense strand
gaacaguuugcugaagaau

SEQ ID NO: 480405 - RNA, 19 nt, Homo sapiens
  misc_RNA (1)...(19): siRNA sense strand
uuccuacacugcucaucua

SEQ ID NO: 480406 - RNA, 19 nt, Homo sapiens
  misc_RNA (1)...(19): siRNA sense strand
aaagagaaagaggaugaaa

SEQ ID NO: 480407 - RNA, 19 nt, Homo sapiens
  misc_RNA (1)...(19): siRNA sense strand
gagagguacauguccuaga

SEQ ID NO: 480408 - RNA, 19 nt, Homo sapiens
  misc_RNA (1)...(19): siRNA sense strand
aacugaagaucaccacaau

SEQ ID NO: 480409 - RNA, 19 nt, Homo sapiens
  misc_RNA (1)...(19): siRNA sense strand
gacccaaaggaguaauaaa

SEQ ID NO: 480410 - RNA, 19 nt, Homo sapiens
  misc_RNA (1)...(19): siRNA sense strand
agacaguguaugcaggaua

SEQ ID NO: 480411 - RNA, 19 nt, Homo sapiens
  misc_RNA (1)...(19): siRNA sense strand
acccaaaggaguaauaaau

SEQ ID NO: 480412 - RNA, 19 nt, Homo sapiens
  misc_RNA (1)...(19): siRNA sense strand
gucaagacagugauucaau

SEQ ID NO: 480413 - RNA, 19 nt, Homo sapiens
  misc_RNA (1)...(19): siRNA sense strand
ccauaaagagaaagaggau

SEQ ID NO: 480414 - RNA, 19 nt, Homo sapiens
  misc_RNA (1)...(19): siRNA sense strand
gagucaagacagugauuca

SEQ ID NO: 480415 - RNA, 19 nt, Homo sapiens
  misc_RNA (1)...(19): siRNA sense strand
ggaguaauaaaugauugga

SEQ ID NO: 480416 - RNA, 19 nt, Homo sapiens
  misc_RNA (1)...(19): siRNA sense strand
caauuccaccuagcaagaa

SEQ ID NO: 480417 - RNA, 19 nt, Homo sapiens
  misc_RNA (1)...(19): siRNA sense strand
uaaagagaaagaggaugaa

SEQ ID NO: 480418 - RNA, 19 nt, Homo sapiens
  misc_RNA (1)...(19): siRNA sense strand
uagagagucaagacaguga

SEQ ID NO: 480419 - RNA, 19 nt, Homo sapiens
  misc_RNA (1)...(19): siRNA sense strand
ggaaacuggaaagcaauuc

SEQ ID NO: 480420 - RNA, 19 nt, Homo sapiens
  misc_RNA (1)...(19): siRNA sense strand
gccuagauauggguuugug

SEQ ID NO: 480421 - RNA, 19 nt, Homo sapiens
  misc_RNA (1)...(19): siRNA sense strand
ccuacacugcucaucuaua

SEQ ID NO: 480422 - RNA, 19 nt, Homo sapiens
  misc_RNA (1)...(19): siRNA sense strand
aaagcaauuccuagaaaca

SEQ ID NO: 480423 - RNA, 19 nt, Homo sapiens
  misc_RNA (1)...(19): siRNA sense strand
uagauauggguuuguguau

SEQ ID NO: 480424 - RNA, 19 nt, Homo sapiens
  misc_RNA (1)...(19): siRNA sense strand
cuaaaugaauauggguuac

SEQ ID NO: 480425 - RNA, 19 nt, Homo sapiens
  misc_RNA (1)...(19): siRNA sense strand
ggguugugaugcucuaaac

SEQ ID NO: 480426 - RNA, 19 nt, Homo sapiens
  misc_RNA (1)...(19): siRNA sense strand
ugaacuaauccauaaagag

SEQ ID NO: 480427 - RNA, 19 nt, Homo sapiens
  misc_RNA (1)...(19): siRNA sense strand
ugucuucuccucagaguag

SEQ ID NO: 480428 - RNA, 19 nt, Homo sapiens
  misc_RNA (1)...(19): siRNA sense strand
ugugaugcucuaaacagua

SEQ ID NO: 480429 - RNA, 19 nt, Homo sapiens
  misc_RNA (1)...(19): siRNA sense strand
ugaagaucaccacaauugu

SEQ ID NO: 480430 - RNA, 19 nt, Homo sapiens
  misc_RNA (1)...(19): siRNA sense strand
agaagaagauguugaauga

SEQ ID NO: 480431 - RNA, 19 nt, Homo sapiens
  misc_RNA (1)...(19): siRNA sense strand
gaacuaauccauaaagaga

SEQ ID NO: 480432 - RNA, 19 nt, Homo sapiens
  misc_RNA (1)...(19): siRNA sense strand
gcagaauacccuauaguua

SEQ ID NO: 480433 - RNA, 19 nt, Homo sapiens
  misc_RNA (1)...(19): siRNA sense strand
gauauggguuuguguauga

SEQ ID NO: 480434 - RNA, 19 nt, Homo sapiens
  misc_RNA (1)...(19): siRNA sense strand
gcagaaagaugagcauuca

SEQ ID NO: 480435 - RNA, 19 nt, Homo sapiens
  misc_RNA (1)...(19): siRNA sense strand
cuacacugcucaucuauaa

SEQ ID NO: 480436 - RNA, 19 nt, Homo sapiens
  misc_RNA (1)...(19): siRNA sense strand
cagaauacccuauaguuaa

SEQ ID NO: 480437 - RNA, 19 nt, Homo sapiens
  misc_RNA (1)...(19): siRNA sense strand
acaguuugcugaagaauuu

SEQ ID NO: 480438 - RNA, 19 nt, Homo sapiens
  misc_RNA (1)...(19): siRNA sense strand
gaacgagucagcagaaaga

SEQ ID NO: 480439 - RNA, 19 nt, Homo sapiens
  misc_RNA (1)...(19): siRNA sense strand
gaugaaaacugccuucgua

SEQ ID NO: 480440 - RNA, 19 nt, Homo sapiens
  misc_RNA (1)...(19): siRNA sense strand
gaagaucaccacaauuguu

SEQ ID NO: 480441 - RNA, 19 nt, Homo sapiens
  misc_RNA (1)...(19): siRNA sense strand
uggcaaagauucaaaggaa

SEQ ID NO: 480442 - RNA, 19 nt, Homo sapiens
  misc_RNA (1)...(19): siRNA sense strand
gauguggagucuuuccuaa

SEQ ID NO: 480443 - RNA, 19 nt, Homo sapiens
  misc_RNA (1)...(19): siRNA sense strand
gcuggaaacuggaaagcaa

SEQ ID NO: 480444 - RNA, 19 nt, Homo sapiens
  misc_RNA (1)...(19): siRNA sense strand
guacauguccuagagcaua

SEQ ID NO: 480445 - RNA, 19 nt, Homo sapiens
  misc_RNA (1)...(19): siRNA sense strand
gaaagcaauuccuagaaac

SEQ ID NO: 480446 - RNA, 19 nt, Homo sapiens
  misc_RNA (1)...(19): siRNA sense strand
gaacugaagaucaccacaa

SEQ ID NO: 480447 - RNA, 19 nt, Homo sapiens
  misc_RNA (1)...(19): siRNA sense strand
gacaguguaugcaggauau

SEQ ID NO: 480448 - RNA, 19 nt, Homo sapiens
  misc_RNA (1)...(19): siRNA sense strand
gaaagaugagcauucaaga

SEQ ID NO: 480449 - RNA, 19 nt, Homo sapiens
  misc_RNA (1)...(19): siRNA sense strand
gaguaggaauggcaaagau

SEQ ID NO: 480450 - RNA, 19 nt, Homo sapiens
  misc_RNA (1)...(19): siRNA sense strand
uaaauaccguagacagugu

SEQ ID NO: 480451 - RNA, 19 nt, Homo sapiens
  misc_RNA (1)...(19): siRNA sense strand
cgagucagcagaaagauga

SEQ ID NO: 480452 - RNA, 19 nt, Homo sapiens
  misc_RNA (1)...(19): siRNA sense strand
gcagcagaauacccuauag

SEQ ID NO: 480453 - RNA, 19 nt, Homo sapiens
  misc_RNA (1)...(19): siRNA sense strand
gaaaacugccuucguaaau

SEQ ID NO: 480454 - RNA, 19 nt, Homo sapiens
  misc_RNA (1)...(19): siRNA sense strand
cugaagaucaccacaauug

SEQ ID NO: 480455 - RNA, 19 nt, Homo sapiens
  misc_RNA (1)...(19): siRNA sense strand
aaacugccuucguaaauac

SEQ ID NO: 480456 - RNA, 19 nt, Homo sapiens
  misc_RNA (1)...(19): siRNA sense strand
gaaaaggaacugaagauca

SEQ ID NO: 480457 - RNA, 19 nt, Homo sapiens
  misc_RNA (1)...(19): siRNA sense strand
agaagaagaagauguugaa

SEQ ID NO: 480458 - RNA, 19 nt, Homo sapiens
  misc_RNA (1)...(19): siRNA sense strand
ugaacaguuugcugaagaa

SEQ ID NO: 480459 - RNA, 19 nt, Homo sapiens
  misc_RNA (1)...(19): siRNA sense strand
gugaugcucuaaacaguag

SEQ ID NO: 480460 - RNA, 19 nt, Homo sapiens
  misc_RNA (1)...(19): siRNA sense strand
agaauacccuauaguuaag

SEQ ID NO: 480461 - RNA, 19 nt, Homo sapiens
  misc_RNA (1)...(19): siRNA sense strand
ccuaaaugaauauggguua

SEQ ID NO: 480462 - RNA, 19 nt, Homo sapiens
  misc_RNA (1)...(19): siRNA sense strand
uggagucuuuccuaaauga

SEQ ID NO: 480463 - RNA, 19 nt, Homo sapiens
  misc_RNA (1)...(19): siRNA sense strand
uguggagucuuuccuaaau

SEQ ID NO: 480464 - RNA, 19 nt, Homo sapiens
  misc_RNA (1)...(19): siRNA sense strand
aaaacugccuucguaaaua

SEQ ID NO: 480465 - RNA, 19 nt, Homo sapiens
  misc_RNA (1)...(19): siRNA sense strand
gggaacucauaagcaauuu

SEQ ID NO: 480466 - RNA, 19 nt, Homo sapiens
  misc_RNA (1)...(19): siRNA sense strand
gguauuaaggguugugaug

SEQ ID NO: 480467 - RNA, 19 nt, Homo sapiens
  misc_RNA (1)...(19): siRNA sense strand
ggauguggagucuuuccua

SEQ ID NO: 480468 - RNA, 19 nt, Homo sapiens
  misc_RNA (1)...(19): siRNA sense strand
cugaacaguuugcugaaga

SEQ ID NO: 480469 - RNA, 19 nt, Homo sapiens
  misc_RNA (1)...(19): siRNA sense strand
aaagaugagcauucaagaa

SEQ ID NO: 480470 - RNA, 19 nt, Homo sapiens
  misc_RNA (1)...(19): siRNA sense strand
ugaaagagagguacauguc

SEQ ID NO: 480471 - RNA, 19 nt, Homo sapiens
  misc_RNA (1)...(19): siRNA sense strand
auaaagagaaagaggauga

SEQ ID NO: 480472 - RNA, 19 nt, Homo sapiens
  misc_RNA (1)...(19): siRNA sense strand
cuagauauggguuugugua

SEQ ID NO: 480473 - RNA, 19 nt, Homo sapiens
  misc_RNA (1)...(19): siRNA sense strand
ucacauuuaugaagauggu

SEQ ID NO: 480474 - RNA, 19 nt, Homo sapiens
  misc_RNA (1)...(19): siRNA sense strand
uaaggguugugaugcucua

SEQ ID NO: 480475 - RNA, 19 nt, Homo sapiens
  misc_RNA (1)...(19): siRNA sense strand
gggccuagauauggguuug

SEQ ID NO: 480476 - RNA, 19 nt, Homo sapiens
  misc_RNA (1)...(19): siRNA sense strand
agagguacauguccuagag

SEQ ID NO: 480477 - RNA, 19 nt, Homo sapiens
  misc_RNA (1)...(19): siRNA sense strand
gaagaagaagauguugaau

SEQ ID NO: 480478 - RNA, 19 nt, Homo sapiens
  misc_RNA (1)...(19): siRNA sense strand
aagaagaagauguugaaug

SEQ ID NO: 480479 - RNA, 19 nt, Homo sapiens
  misc_RNA (1)...(19): siRNA sense strand
guggagucuuuccuaaaug

SEQ ID NO: 480480 - RNA, 19 nt, Homo sapiens
  misc_RNA (1)...(19): siRNA sense strand
agaaagaugagcauucaag

SEQ ID NO: 480481 - RNA, 19 nt, Homo sapiens
  misc_RNA (1)...(19): siRNA sense strand
uagaagaagaagauguuga

SEQ ID NO: 480482 - RNA, 19 nt, Homo sapiens
  misc_RNA (1)...(19): siRNA sense strand
ggaacgagucagcagaaag

SEQ ID NO: 480483 - RNA, 19 nt, Homo sapiens
  misc_RNA (1)...(19): siRNA sense strand
gcugaacaguuugcugaag

SEQ ID NO: 480484 - RNA, 19 nt, Homo sapiens
  misc_RNA (1)...(19): siRNA sense strand
aagaucaccacaauuguug

SEQ ID NO: 480485 - RNA, 19 nt, Homo sapiens
  misc_RNA (1)...(19): siRNA sense strand
acacugcucaucuauaaag

SEQ ID NO: 480486 - RNA, 19 nt, Homo sapiens
  misc_RNA (1)...(19): siRNA sense strand
agauauggguuuguguaug

SEQ ID NO: 480487 - RNA, 19 nt, Homo sapiens
  misc_RNA (1)...(19): siRNA sense strand
ccuagagcauaccaaaaua

SEQ ID NO: 480488 - RNA, 19 nt, Homo sapiens
  misc_RNA (1)...(19): siRNA sense strand
gaacaguuugcugaagaau

SEQ ID NO: 480489 - RNA, 19 nt, Homo sapiens
  misc_RNA (1)...(19): siRNA sense strand
uuccuacacugcucaucua

SEQ ID NO: 480490 - RNA, 19 nt, Homo sapiens
  misc_RNA (1)...(19): siRNA sense strand
aacugaagaucaccacaau

SEQ ID NO: 480491 - RNA, 19 nt, Homo sapiens
  misc_RNA (1)...(19): siRNA sense strand
gagagguacauguccuaga

SEQ ID NO: 480492 - RNA, 19 nt, Homo sapiens
  misc_RNA (1)...(19): siRNA sense strand
aaagagaaagaggaugaaa

SEQ ID NO: 480493 - RNA, 19 nt, Homo sapiens
  misc_RNA (1)...(19): siRNA sense strand
agacaguguaugcaggaua

SEQ ID NO: 480494 - RNA, 19 nt, Homo sapiens
  misc_RNA (1)...(19): siRNA sense strand
uaaagagaaagaggaugaa

SEQ ID NO: 480495 - RNA, 19 nt, Homo sapiens
  misc_RNA (1)...(19): siRNA sense strand
ccauaaagagaaagaggau

SEQ ID NO: 480496 - RNA, 19 nt, Homo sapiens
  misc_RNA (1)...(19): siRNA sense strand
ggaaacuggaaagcaauuc

SEQ ID NO: 480497 - RNA, 19 nt, Homo sapiens
  misc_RNA (1)...(19): siRNA sense strand
gccuagauauggguuugug

SEQ ID NO: 480498 - RNA, 19 nt, Homo sapiens
  misc_RNA (1)...(19): siRNA sense strand
ccuacacugcucaucuaua

SEQ ID NO: 480499 - RNA, 19 nt, Homo sapiens
  misc_RNA (1)...(19): siRNA sense strand
aaagcaauuccuagaaaca

SEQ ID NO: 480500 - RNA, 19 nt, Homo sapiens
  misc_RNA (1)...(19): siRNA sense strand
uagauauggguuuguguau

SEQ ID NO: 480501 - RNA, 19 nt, Homo sapiens
  misc_RNA (1)...(19): siRNA sense strand
cuaaaugaauauggguuac

SEQ ID NO: 480502 - RNA, 19 nt, Homo sapiens
  misc_RNA (1)...(19): siRNA sense strand
ggguugugaugcucuaaac

SEQ ID NO: 480503 - RNA, 19 nt, Homo sapiens
  misc_RNA (1)...(19): siRNA sense strand
ugaagaucaccacaauugu

SEQ ID NO: 480504 - RNA, 19 nt, Homo sapiens
  misc_RNA (1)...(19): siRNA sense strand
ugaacuaauccauaaagag

SEQ ID NO: 480505 - RNA, 19 nt, Homo sapiens
  misc_RNA (1)...(19): siRNA sense strand
ugugaugcucuaaacagua

SEQ ID NO: 480506 - RNA, 19 nt, Homo sapiens
  misc_RNA (1)...(19): siRNA sense strand
ccaacaaccugguguauga

SEQ ID NO: 480507 - RNA, 19 nt, Homo sapiens
  misc_RNA (1)...(19): siRNA sense strand
ggaaggacauggacaaggu

SEQ ID NO: 480508 - RNA, 19 nt, Homo sapiens
  misc_RNA (1)...(19): siRNA sense strand
cagcagaaauccaacuuag

SEQ ID NO: 480509 - RNA, 19 nt, Homo sapiens
  misc_RNA (1)...(19): siRNA sense strand
gcagaaauccaacuuagag

SEQ ID NO: 480510 - RNA, 19 nt, Homo sapiens
  misc_RNA (1)...(19): siRNA sense strand
ggaguaccuucaccaacaa

SEQ ID NO: 480511 - RNA, 19 nt, Homo sapiens
  misc_RNA (1)...(19): siRNA sense strand
caaacucgcacaaccauga

SEQ ID NO: 480512 - RNA, 19 nt, Homo sapiens
  misc_RNA (1)...(19): siRNA sense strand
ggacagcgaugacuaucac

SEQ ID NO: 480513 - RNA, 19 nt, Homo sapiens
  misc_RNA (1)...(19): siRNA sense strand
gcagcagaaauccaacuua

SEQ ID NO: 480514 - RNA, 19 nt, Homo sapiens
  misc_RNA (1)...(19): siRNA sense strand
ggaggaaacgcagcagaaa

SEQ ID NO: 480515 - RNA, 19 nt, Homo sapiens
  misc_RNA (1)...(19): siRNA sense strand
uggacaaggucgagacauu

SEQ ID NO: 480516 - RNA, 19 nt, Homo sapiens
  misc_RNA (1)...(19): siRNA sense strand
gcagaccuacagcaaguuu

SEQ ID NO: 480517 - RNA, 19 nt, Homo sapiens
  misc_RNA (1)...(19): siRNA sense strand
ggacaaggucgagacauuc

SEQ ID NO: 480518 - RNA, 19 nt, Homo sapiens
  misc_RNA (1)...(19): siRNA sense strand
cgaugacuaucaccuccua

SEQ ID NO: 480519 - RNA, 19 nt, Homo sapiens
  misc_RNA (1)...(19): siRNA sense strand
aagcagaccuacagcaagu

SEQ ID NO: 480520 - RNA, 19 nt, Homo sapiens
  misc_RNA (1)...(19): siRNA sense strand
acgcacugcucaagaacua

SEQ ID NO: 480521 - RNA, 19 nt, Homo sapiens
  misc_RNA (1)...(19): siRNA sense strand
aaacgcagcagaaauccaa

SEQ ID NO: 480522 - RNA, 19 nt, Homo sapiens
  misc_RNA (1)...(19): siRNA sense strand
aggaguaccuucaccaaca

SEQ ID NO: 480523 - RNA, 19 nt, Homo sapiens
  misc_RNA (1)...(19): siRNA sense strand
gaggaaacgcagcagaaau

SEQ ID NO: 480524 - RNA, 19 nt, Homo sapiens
  misc_RNA (1)...(19): siRNA sense strand
ccuaaaggaccuagaggaa

SEQ ID NO: 480525 - RNA, 19 nt, Homo sapiens
  misc_RNA (1)...(19): siRNA sense strand
ucaagcagaccuacagcaa

SEQ ID NO: 480526 - RNA, 19 nt, Homo sapiens
  misc_RNA (1)...(19): siRNA sense strand
agaggaaggcauccaaaug

SEQ ID NO: 480527 - RNA, 19 nt, Homo sapiens
  misc_RNA (1)...(19): siRNA sense strand
agaccuacagcaaguuuga

SEQ ID NO: 480528 - RNA, 19 nt, Homo sapiens
  misc_RNA (1)...(19): siRNA sense strand
ucaggaaggacauggacaa

SEQ ID NO: 480529 - RNA, 19 nt, Homo sapiens
  misc_RNA (1)...(19): siRNA sense strand
aggaaacgcagcagaaauc

SEQ ID NO: 480530 - RNA, 19 nt, Homo sapiens
  misc_RNA (1)...(19): siRNA sense strand
gacuaucaccuccuaaagg

SEQ ID NO: 480531 - RNA, 19 nt, Homo sapiens
  misc_RNA (1)...(19): siRNA sense strand
ugacugggcagacccucaa

SEQ ID NO: 480532 - RNA, 19 nt, Homo sapiens
  misc_RNA (1)...(19): siRNA sense strand
augacgcacugcucaagaa

SEQ ID NO: 480533 - RNA, 19 nt, Homo sapiens
  misc_RNA (1)...(19): siRNA sense strand
uagaggaaggcauccaaau

SEQ ID NO: 480534 - RNA, 19 nt, Homo sapiens
  misc_RNA (1)...(19): siRNA sense strand
cuacagcaaguuugacaca

SEQ ID NO: 480535 - RNA, 19 nt, Homo sapiens
  misc_RNA (1)...(19): siRNA sense strand
ccaacaaccugguguauga

SEQ ID NO: 480536 - RNA, 19 nt, Homo sapiens
  misc_RNA (1)...(19): siRNA sense strand
ggaaggacauggacaaggu

SEQ ID NO: 480537 - RNA, 19 nt, Homo sapiens
  misc_RNA (1)...(19): siRNA sense strand
cagcagaaauccaacuuag

SEQ ID NO: 480538 - RNA, 19 nt, Homo sapiens
  misc_RNA (1)...(19): siRNA sense strand
gcagaaauccaacuuagag

SEQ ID NO: 480539 - RNA, 19 nt, Homo sapiens
  misc_RNA (1)...(19): siRNA sense strand
ggaguaccuucaccaacaa

SEQ ID NO: 480540 - RNA, 19 nt, Homo sapiens
  misc_RNA (1)...(19): siRNA sense strand
caaacucgcacaaccauga

SEQ ID NO: 480541 - RNA, 19 nt, Homo sapiens
  misc_RNA (1)...(19): siRNA sense strand
ggacagcgaugacuaucac

SEQ ID NO: 480542 - RNA, 19 nt, Homo sapiens
  misc_RNA (1)...(19): siRNA sense strand
gcagcagaaauccaacuua

SEQ ID NO: 480543 - RNA, 19 nt, Homo sapiens
  misc_RNA (1)...(19): siRNA sense strand
ggaggaaacgcagcagaaa

SEQ ID NO: 480544 - RNA, 19 nt, Homo sapiens
  misc_RNA (1)...(19): siRNA sense strand
uggacaaggucgagacauu

SEQ ID NO: 480545 - RNA, 19 nt, Homo sapiens
  misc_RNA (1)...(19): siRNA sense strand
gcagaccuacagcaaguuu

SEQ ID NO: 480546 - RNA, 19 nt, Homo sapiens
  misc_RNA (1)...(19): siRNA sense strand
ggacaaggucgagacauuc

SEQ ID NO: 480547 - RNA, 19 nt, Homo sapiens
  misc_RNA (1)...(19): siRNA sense strand
cgaugacuaucaccuccua

SEQ ID NO: 480548 - RNA, 19 nt, Homo sapiens
  misc_RNA (1)...(19): siRNA sense strand
aagcagaccuacagcaagu

SEQ ID NO: 480549 - RNA, 19 nt, Homo sapiens
  misc_RNA (1)...(19): siRNA sense strand
acgcacugcucaagaacua

SEQ ID NO: 480550 - RNA, 19 nt, Homo sapiens
  misc_RNA (1)...(19): siRNA sense strand
aaacgcagcagaaauccaa

SEQ ID NO: 480551 - RNA, 19 nt, Homo sapiens
  misc_RNA (1)...(19): siRNA sense strand
aggaguaccuucaccaaca

SEQ ID NO: 480552 - RNA, 19 nt, Homo sapiens
  misc_RNA (1)...(19): siRNA sense strand
gaggaaacgcagcagaaau

SEQ ID NO: 480553 - RNA, 19 nt, Homo sapiens
  misc_RNA (1)...(19): siRNA sense strand
ccuaaaggaccuagaggaa

SEQ ID NO: 480554 - RNA, 19 nt, Homo sapiens
  misc_RNA (1)...(19): siRNA sense strand
ucaagcagaccuacagcaa

SEQ ID NO: 480555 - RNA, 19 nt, Homo sapiens
  misc_RNA (1)...(19): siRNA sense strand
agaggaaggcauccaaaug

SEQ ID NO: 480556 - RNA, 19 nt, Homo sapiens
  misc_RNA (1)...(19): siRNA sense strand
agaccuacagcaaguuuga

SEQ ID NO: 480557 - RNA, 19 nt, Homo sapiens
  misc_RNA (1)...(19): siRNA sense strand
ucaggaaggacauggacaa

SEQ ID NO: 480558 - RNA, 19 nt, Homo sapiens
  misc_RNA (1)...(19): siRNA sense strand
aggaaacgcagcagaaauc

SEQ ID NO: 480559 - RNA, 19 nt, Homo sapiens
  misc_RNA (1)...(19): siRNA sense strand
gacuaucaccuccuaaagg

SEQ ID NO: 480560 - RNA, 19 nt, Homo sapiens
  misc_RNA (1)...(19): siRNA sense strand
ugacugggcagacccucaa

SEQ ID NO: 480561 - RNA, 19 nt, Homo sapiens
  misc_RNA (1)...(19): siRNA sense strand
augacgcacugcucaagaa

SEQ ID NO: 480562 - RNA, 19 nt, Homo sapiens
  misc_RNA (1)...(19): siRNA sense strand
uagaggaaggcauccaaau

SEQ ID NO: 480563 - RNA, 19 nt, Homo sapiens
  misc_RNA (1)...(19): siRNA sense strand
cuacagcaaguuugacaca

SEQ ID NO: 480564 - RNA, 19 nt, Homo sapiens
  misc_RNA (1)...(19): siRNA sense strand
uggaggaaacgcagcagaa

SEQ ID NO: 480565 - RNA, 19 nt, Homo sapiens
  misc_RNA (1)...(19): siRNA sense strand
ccaacaaccugguguauga

SEQ ID NO: 480566 - RNA, 19 nt, Homo sapiens
  misc_RNA (1)...(19): siRNA sense strand
ggaaggacauggacaaggu

SEQ ID NO: 480567 - RNA, 19 nt, Homo sapiens
  misc_RNA (1)...(19): siRNA sense strand
cagcagaaauccaacuuag

SEQ ID NO: 480568 - RNA, 19 nt, Homo sapiens
  misc_RNA (1)...(19): siRNA sense strand
gcagaaauccaacuuagag

SEQ ID NO: 480569 - RNA, 19 nt, Homo sapiens
  misc_RNA (1)...(19): siRNA sense strand
ggaguaccuucaccaacaa

SEQ ID NO: 480570 - RNA, 19 nt, Homo sapiens
  misc_RNA (1)...(19): siRNA sense strand
caaacucgcacaaccauga

SEQ ID NO: 480571 - RNA, 19 nt, Homo sapiens
  misc_RNA (1)...(19): siRNA sense strand
ggacagcgaugacuaucac

SEQ ID NO: 480572 - RNA, 19 nt, Homo sapiens
  misc_RNA (1)...(19): siRNA sense strand
gcagcagaaauccaacuua

SEQ ID NO: 480573 - RNA, 19 nt, Homo sapiens
  misc_RNA (1)...(19): siRNA sense strand
ggaggaaacgcagcagaaa

SEQ ID NO: 480574 - RNA, 19 nt, Homo sapiens
  misc_RNA (1)...(19): siRNA sense strand
uggacaaggucgagacauu

SEQ ID NO: 480575 - RNA, 19 nt, Homo sapiens
  misc_RNA (1)...(19): siRNA sense strand
gcagaccuacagcaaguuu

SEQ ID NO: 480576 - RNA, 19 nt, Homo sapiens
  misc_RNA (1)...(19): siRNA sense strand
ggacaaggucgagacauuc

SEQ ID NO: 480577 - RNA, 19 nt, Homo sapiens
  misc_RNA (1)...(19): siRNA sense strand
cgaugacuaucaccuccua

SEQ ID NO: 480578 - RNA, 19 nt, Homo sapiens
  misc_RNA (1)...(19): siRNA sense strand
aagcagaccuacagcaagu

SEQ ID NO: 480579 - RNA, 19 nt, Homo sapiens
  misc_RNA (1)...(19): siRNA sense strand
acgcacugcucaagaacua

SEQ ID NO: 480580 - RNA, 19 nt, Homo sapiens
  misc_RNA (1)...(19): siRNA sense strand
aaacgcagcagaaauccaa

SEQ ID NO: 480581 - RNA, 19 nt, Homo sapiens
  misc_RNA (1)...(19): siRNA sense strand
aggaguaccuucaccaaca

SEQ ID NO: 480582 - RNA, 19 nt, Homo sapiens
  misc_RNA (1)...(19): siRNA sense strand
gaggaaacgcagcagaaau

SEQ ID NO: 480583 - RNA, 19 nt, Homo sapiens
  misc_RNA (1)...(19): siRNA sense strand
ccuaaaggaccuagaggaa

SEQ ID NO: 480584 - RNA, 19 nt, Homo sapiens
  misc_RNA (1)...(19): siRNA sense strand
ucaagcagaccuacagcaa

SEQ ID NO: 480585 - RNA, 19 nt, Homo sapiens
  misc_RNA (1)...(19): siRNA sense strand
agaggaaggcauccaaaug

SEQ ID NO: 480586 - RNA, 19 nt, Homo sapiens
  misc_RNA (1)...(19): siRNA sense strand
agaccuacagcaaguuuga

SEQ ID NO: 480587 - RNA, 19 nt, Homo sapiens
  misc_RNA (1)...(19): siRNA sense strand
ucaggaaggacauggacaa

SEQ ID NO: 480588 - RNA, 19 nt, Homo sapiens
  misc_RNA (1)...(19): siRNA sense strand
aggaaacgcagcagaaauc

SEQ ID NO: 480589 - RNA, 19 nt, Homo sapiens
  misc_RNA (1)...(19): siRNA sense strand
gacuaucaccuccuaaagg

SEQ ID NO: 480590 - RNA, 19 nt, Homo sapiens
  misc_RNA (1)...(19): siRNA sense strand
ugacugggcagacccucaa

SEQ ID NO: 480591 - RNA, 19 nt, Homo sapiens
  misc_RNA (1)...(19): siRNA sense strand
augacgcacugcucaagaa

SEQ ID NO: 480592 - RNA, 19 nt, Homo sapiens
  misc_RNA (1)...(19): siRNA sense strand
uagaggaaggcauccaaau

SEQ ID NO: 480593 - RNA, 19 nt, Homo sapiens
  misc_RNA (1)...(19): siRNA sense strand
cuacagcaaguuugacaca

SEQ ID NO: 480594 - RNA, 19 nt, Homo sapiens
  misc_RNA (1)...(19): siRNA sense strand
uggaggaaacgcagcagaa

SEQ ID NO: 480595 - RNA, 19 nt, Homo sapiens
  misc_RNA (1)...(19): siRNA sense strand
ccaacaaccugguguauga

SEQ ID NO: 480596 - RNA, 19 nt, Homo sapiens
  misc_RNA (1)...(19): siRNA sense strand
ggaaggacauggacaaggu

SEQ ID NO: 480597 - RNA, 19 nt, Homo sapiens
  misc_RNA (1)...(19): siRNA sense strand
cagcagaaauccaacuuag

SEQ ID NO: 480598 - RNA, 19 nt, Homo sapiens
  misc_RNA (1)...(19): siRNA sense strand
gcagaaauccaacuuagag

SEQ ID NO: 480599 - RNA, 19 nt, Homo sapiens
  misc_RNA (1)...(19): siRNA sense strand
ggaguaccuucaccaacaa

SEQ ID NO: 480600 - RNA, 19 nt, Homo sapiens
  misc_RNA (1)...(19): siRNA sense strand
caaacucgcacaaccauga

SEQ ID NO: 480601 - RNA, 19 nt, Homo sapiens
  misc_RNA (1)...(19): siRNA sense strand
ggacagcgaugacuaucac

SEQ ID NO: 480602 - RNA, 19 nt, Homo sapiens
  misc_RNA (1)...(19): siRNA sense strand
gcagcagaaauccaacuua

SEQ ID NO: 480603 - RNA, 19 nt, Homo sapiens
  misc_RNA (1)...(19): siRNA sense strand
ggaggaaacgcagcagaaa

SEQ ID NO: 480604 - RNA, 19 nt, Homo sapiens
  misc_RNA (1)...(19): siRNA sense strand
uggacaaggucgagacauu

SEQ ID NO: 480605 - RNA, 19 nt, Homo sapiens
  misc_RNA (1)...(19): siRNA sense strand
gcagaccuacagcaaguuu

SEQ ID NO: 480606 - RNA, 19 nt, Homo sapiens
  misc_RNA (1)...(19): siRNA sense strand
ggacaaggucgagacauuc

SEQ ID NO: 480607 - RNA, 19 nt, Homo sapiens
  misc_RNA (1)...(19): siRNA sense strand
cgaugacuaucaccuccua

SEQ ID NO: 480608 - RNA, 19 nt, Homo sapiens
  misc_RNA (1)...(19): siRNA sense strand
aagcagaccuacagcaagu

SEQ ID NO: 480609 - RNA, 19 nt, Homo sapiens
  misc_RNA (1)...(19): siRNA sense strand
acgcacugcucaagaacua

SEQ ID NO: 480610 - RNA, 19 nt, Homo sapiens
  misc_RNA (1)...(19): siRNA sense strand
aaacgcagcagaaauccaa

SEQ ID NO: 480611 - RNA, 19 nt, Homo sapiens
  misc_RNA (1)...(19): siRNA sense strand
aggaguaccuucaccaaca

SEQ ID NO: 480612 - RNA, 19 nt, Homo sapiens
  misc_RNA (1)...(19): siRNA sense strand
gaggaaacgcagcagaaau

SEQ ID NO: 480613 - RNA, 19 nt, Homo sapiens
  misc_RNA (1)...(19): siRNA sense strand
ccuaaaggaccuagaggaa

SEQ ID NO: 480614 - RNA, 19 nt, Homo sapiens
  misc_RNA (1)...(19): siRNA sense strand
ucaagcagaccuacagcaa

SEQ ID NO: 480615 - RNA, 19 nt, Homo sapiens
  misc_RNA (1)...(19): siRNA sense strand
agaggaaggcauccaaaug

SEQ ID NO: 480616 - RNA, 19 nt, Homo sapiens
  misc_RNA (1)...(19): siRNA sense strand
agaccuacagcaaguuuga

SEQ ID NO: 480617 - RNA, 19 nt, Homo sapiens
  misc_RNA (1)...(19): siRNA sense strand
ucaggaaggacauggacaa

SEQ ID NO: 480618 - RNA, 19 nt, Homo sapiens
  misc_RNA (1)...(19): siRNA sense strand
aggaaacgcagcagaaauc

SEQ ID NO: 480619 - RNA, 19 nt, Homo sapiens
  misc_RNA (1)...(19): siRNA sense strand
gacuaucaccuccuaaagg

SEQ ID NO: 480620 - RNA, 19 nt, Homo sapiens
  misc_RNA (1)...(19): siRNA sense strand
ugacugggcagacccucaa

SEQ ID NO: 480621 - RNA, 19 nt, Homo sapiens
  misc_RNA (1)...(19): siRNA sense strand
augacgcacugcucaagaa

SEQ ID NO: 480622 - RNA, 19 nt, Homo sapiens
  misc_RNA (1)...(19): siRNA sense strand
uagaggaaggcauccaaau

SEQ ID NO: 480623 - RNA, 19 nt, Homo sapiens
  misc_RNA (1)...(19): siRNA sense strand
cuacagcaaguuugacaca

SEQ ID NO: 480624 - RNA, 19 nt, Homo sapiens
  misc_RNA (1)...(19): siRNA sense strand
uggaggaaacgcagcagaa

SEQ ID NO: 480625 - RNA, 19 nt, Homo sapiens
  misc_RNA (1)...(19): siRNA sense strand
ccaacaaccugguguauga

SEQ ID NO: 480626 - RNA, 19 nt, Homo sapiens
  misc_RNA (1)...(19): siRNA sense strand
ggaaggacauggacaaggu

SEQ ID NO: 480627 - RNA, 19 nt, Homo sapiens
  misc_RNA (1)...(19): siRNA sense strand
cagcagaaauccaacuuag

SEQ ID NO: 480628 - RNA, 19 nt, Homo sapiens
  misc_RNA (1)...(19): siRNA sense strand
gcagaaauccaacuuagag

SEQ ID NO: 480629 - RNA, 19 nt, Homo sapiens
  misc_RNA (1)...(19): siRNA sense strand
ggaguaccuucaccaacaa

SEQ ID NO: 480630 - RNA, 19 nt, Homo sapiens
  misc_RNA (1)...(19): siRNA sense strand
caaacucgcacaaccauga

SEQ ID NO: 480631 - RNA, 19 nt, Homo sapiens
  misc_RNA (1)...(19): siRNA sense strand
ggacagcgaugacuaucac

SEQ ID NO: 480632 - RNA, 19 nt, Homo sapiens
  misc_RNA (1)...(19): siRNA sense strand
gcagcagaaauccaacuua

SEQ ID NO: 480633 - RNA, 19 nt, Homo sapiens
  misc_RNA (1)...(19): siRNA sense strand
ggaggaaacgcagcagaaa

SEQ ID NO: 480634 - RNA, 19 nt, Homo sapiens
  misc_RNA (1)...(19): siRNA sense strand
uggacaaggucgagacauu

SEQ ID NO: 480635 - RNA, 19 nt, Homo sapiens
  misc_RNA (1)...(19): siRNA sense strand
gcagaccuacagcaaguuu

SEQ ID NO: 480636 - RNA, 19 nt, Homo sapiens
  misc_RNA (1)...(19): siRNA sense strand
ggacaaggucgagacauuc

SEQ ID NO: 480637 - RNA, 19 nt, Homo sapiens
  misc_RNA (1)...(19): siRNA sense strand
cgaugacuaucaccuccua

SEQ ID NO: 480638 - RNA, 19 nt, Homo sapiens
  misc_RNA (1)...(19): siRNA sense strand
aagcagaccuacagcaagu

SEQ ID NO: 480639 - RNA, 19 nt, Homo sapiens
  misc_RNA (1)...(19): siRNA sense strand
acgcacugcucaagaacua

SEQ ID NO: 480640 - RNA, 19 nt, Homo sapiens
  misc_RNA (1)...(19): siRNA sense strand
aaacgcagcagaaauccaa

SEQ ID NO: 480641 - RNA, 19 nt, Homo sapiens
  misc_RNA (1)...(19): siRNA sense strand
aggaguaccuucaccaaca

SEQ ID NO: 480642 - RNA, 19 nt, Homo sapiens
  misc_RNA (1)...(19): siRNA sense strand
gaggaaacgcagcagaaau

SEQ ID NO: 480643 - RNA, 19 nt, Homo sapiens
  misc_RNA (1)...(19): siRNA sense strand
ccuaaaggaccuagaggaa

SEQ ID NO: 480644 - RNA, 19 nt, Homo sapiens
  misc_RNA (1)...(19): siRNA sense strand
ucaagcagaccuacagcaa

SEQ ID NO: 480645 - RNA, 19 nt, Homo sapiens
  misc_RNA (1)...(19): siRNA sense strand
agaggaaggcauccaaaug

SEQ ID NO: 480646 - RNA, 19 nt, Homo sapiens
  misc_RNA (1)...(19): siRNA sense strand
agaccuacagcaaguuuga

SEQ ID NO: 480647 - RNA, 19 nt, Homo sapiens
  misc_RNA (1)...(19): siRNA sense strand
ucaggaaggacauggacaa

SEQ ID NO: 480648 - RNA, 19 nt, Homo sapiens
  misc_RNA (1)...(19): siRNA sense strand
aggaaacgcagcagaaauc

SEQ ID NO: 480649 - RNA, 19 nt, Homo sapiens
  misc_RNA (1)...(19): siRNA sense strand
gacuaucaccuccuaaagg

SEQ ID NO: 480650 - RNA, 19 nt, Homo sapiens
  misc_RNA (1)...(19): siRNA sense strand
ugacugggcagacccucaa

SEQ ID NO: 480651 - RNA, 19 nt, Homo sapiens
  misc_RNA (1)...(19): siRNA sense strand
augacgcacugcucaagaa

SEQ ID NO: 480652 - RNA, 19 nt, Homo sapiens
  misc_RNA (1)...(19): siRNA sense strand
uagaggaaggcauccaaau

SEQ ID NO: 480653 - RNA, 19 nt, Homo sapiens
  misc_RNA (1)...(19): siRNA sense strand
cuacagcaaguuugacaca

SEQ ID NO: 480654 - RNA, 19 nt, Homo sapiens
  misc_RNA (1)...(19): siRNA sense strand
ccaacaaccugguguauga

SEQ ID NO: 480655 - RNA, 19 nt, Homo sapiens
  misc_RNA (1)...(19): siRNA sense strand
ggaaggacauggacaaggu

SEQ ID NO: 480656 - RNA, 19 nt, Homo sapiens
  misc_RNA (1)...(19): siRNA sense strand
cagcagaaauccaacuuag

SEQ ID NO: 480657 - RNA, 19 nt, Homo sapiens
  misc_RNA (1)...(19): siRNA sense strand
gcagaaauccaacuuagag

SEQ ID NO: 480658 - RNA, 19 nt, Homo sapiens
  misc_RNA (1)...(19): siRNA sense strand
ggaguaccuucaccaacaa

SEQ ID NO: 480659 - RNA, 19 nt, Homo sapiens
  misc_RNA (1)...(19): siRNA sense strand
caaacucgcacaaccauga

SEQ ID NO: 480660 - RNA, 19 nt, Homo sapiens
  misc_RNA (1)...(19): siRNA sense strand
ggacagcgaugacuaucac

SEQ ID NO: 480661 - RNA, 19 nt, Homo sapiens
  misc_RNA (1)...(19): siRNA sense strand
gcagcagaaauccaacuua

SEQ ID NO: 480662 - RNA, 19 nt, Homo sapiens
  misc_RNA (1)...(19): siRNA sense strand
ggaggaaacgcagcagaaa

SEQ ID NO: 480663 - RNA, 19 nt, Homo sapiens
  misc_RNA (1)...(19): siRNA sense strand
uggacaaggucgagacauu

SEQ ID NO: 480664 - RNA, 19 nt, Homo sapiens
  misc_RNA (1)...(19): siRNA sense strand
gcagaccuacagcaaguuu

SEQ ID NO: 480665 - RNA, 19 nt, Homo sapiens
  misc_RNA (1)...(19): siRNA sense strand
ggacaaggucgagacauuc

SEQ ID NO: 480666 - RNA, 19 nt, Homo sapiens
  misc_RNA (1)...(19): siRNA sense strand
cgaugacuaucaccuccua

SEQ ID NO: 480667 - RNA, 19 nt, Homo sapiens
  misc_RNA (1)...(19): siRNA sense strand
aagcagaccuacagcaagu

SEQ ID NO: 480668 - RNA, 19 nt, Homo sapiens
  misc_RNA (1)...(19): siRNA sense strand
acgcacugcucaagaacua

SEQ ID NO: 480669 - RNA, 19 nt, Homo sapiens
  misc_RNA (1)...(19): siRNA sense strand
aaacgcagcagaaauccaa

SEQ ID NO: 480670 - RNA, 19 nt, Homo sapiens
  misc_RNA (1)...(19): siRNA sense strand
aggaguaccuucaccaaca

SEQ ID NO: 480671 - RNA, 19 nt, Homo sapiens
  misc_RNA (1)...(19): siRNA sense strand
gaggaaacgcagcagaaau

SEQ ID NO: 480672 - RNA, 19 nt, Homo sapiens
  misc_RNA (1)...(19): siRNA sense strand
ccuaaaggaccuagaggaa

SEQ ID NO: 480673 - RNA, 19 nt, Homo sapiens
  misc_RNA (1)...(19): siRNA sense strand
ucaagcagaccuacagcaa

SEQ ID NO: 480674 - RNA, 19 nt, Homo sapiens
  misc_RNA (1)...(19): siRNA sense strand
agaggaaggcauccaaaug

SEQ ID NO: 480675 - RNA, 19 nt, Homo sapiens
  misc_RNA (1)...(19): siRNA sense strand
agaccuacagcaaguuuga

SEQ ID NO: 480676 - RNA, 19 nt, Homo sapiens
  misc_RNA (1)...(19): siRNA sense strand
ucaggaaggacauggacaa

SEQ ID NO: 480677 - RNA, 19 nt, Homo sapiens
  misc_RNA (1)...(19): siRNA sense strand
aggaaacgcagcagaaauc

SEQ ID NO: 480678 - RNA, 19 nt, Homo sapiens
  misc_RNA (1)...(19): siRNA sense strand
gacuaucaccuccuaaagg

SEQ ID NO: 480679 - RNA, 19 nt, Homo sapiens
  misc_RNA (1)...(19): siRNA sense strand
ugacugggcagacccucaa

SEQ ID NO: 480680 - RNA, 19 nt, Homo sapiens
  misc_RNA (1)...(19): siRNA sense strand
augacgcacugcucaagaa

SEQ ID NO: 480681 - RNA, 19 nt, Homo sapiens
  misc_RNA (1)...(19): siRNA sense strand
uagaggaaggcauccaaau

SEQ ID NO: 480682 - RNA, 19 nt, Homo sapiens
  misc_RNA (1)...(19): siRNA sense strand
cuacagcaaguuugacaca

SEQ ID NO: 480683 - RNA, 19 nt, Homo sapiens
  misc_RNA (1)...(19): siRNA sense strand
uggaggaaacgcagcagaa

SEQ ID NO: 480684 - RNA, 19 nt, Homo sapiens
  misc_RNA (1)...(19): siRNA sense strand
ccaacaaccugguguauga

SEQ ID NO: 480685 - RNA, 19 nt, Homo sapiens
  misc_RNA (1)...(19): siRNA sense strand
ggaaggacauggacaaggu

SEQ ID NO: 480686 - RNA, 19 nt, Homo sapiens
  misc_RNA (1)...(19): siRNA sense strand
cagcagaaauccaacuuag

SEQ ID NO: 480687 - RNA, 19 nt, Homo sapiens
  misc_RNA (1)...(19): siRNA sense strand
gcagaaauccaacuuagag

SEQ ID NO: 480688 - RNA, 19 nt, Homo sapiens
  misc_RNA (1)...(19): siRNA sense strand
ggaguaccuucaccaacaa

SEQ ID NO: 480689 - RNA, 19 nt, Homo sapiens
  misc_RNA (1)...(19): siRNA sense strand
caaacucgcacaaccauga

SEQ ID NO: 480690 - RNA, 19 nt, Homo sapiens
  misc_RNA (1)...(19): siRNA sense strand
ggacagcgaugacuaucac

SEQ ID NO: 480691 - RNA, 19 nt, Homo sapiens
  misc_RNA (1)...(19): siRNA sense strand
gcagcagaaauccaacuua

SEQ ID NO: 480692 - RNA, 19 nt, Homo sapiens
  misc_RNA (1)...(19): siRNA sense strand
ggaggaaacgcagcagaaa

SEQ ID NO: 480693 - RNA, 19 nt, Homo sapiens
  misc_RNA (1)...(19): siRNA sense strand
uggacaaggucgagacauu

SEQ ID NO: 480694 - RNA, 19 nt, Homo sapiens
  misc_RNA (1)...(19): siRNA sense strand
gcagaccuacagcaaguuu

SEQ ID NO: 480695 - RNA, 19 nt, Homo sapiens
  misc_RNA (1)...(19): siRNA sense strand
ggacaaggucgagacauuc

SEQ ID NO: 480696 - RNA, 19 nt, Homo sapiens
  misc_RNA (1)...(19): siRNA sense strand
cgaugacuaucaccuccua

SEQ ID NO: 480697 - RNA, 19 nt, Homo sapiens
  misc_RNA (1)...(19): siRNA sense strand
aagcagaccuacagcaagu

SEQ ID NO: 480698 - RNA, 19 nt, Homo sapiens
  misc_RNA (1)...(19): siRNA sense strand
acgcacugcucaagaacua

SEQ ID NO: 480699 - RNA, 19 nt, Homo sapiens
  misc_RNA (1)...(19): siRNA sense strand
aaacgcagcagaaauccaa

SEQ ID NO: 480700 - RNA, 19 nt, Homo sapiens
  misc_RNA (1)...(19): siRNA sense strand
aggaguaccuucaccaaca

SEQ ID NO: 480701 - RNA, 19 nt, Homo sapiens
  misc_RNA (1)...(19): siRNA sense strand
gaggaaacgcagcagaaau

SEQ ID NO: 480702 - RNA, 19 nt, Homo sapiens
  misc_RNA (1)...(19): siRNA sense strand
ccuaaaggaccuagaggaa

SEQ ID NO: 480703 - RNA, 19 nt, Homo sapiens
  misc_RNA (1)...(19): siRNA sense strand
ucaagcagaccuacagcaa

SEQ ID NO: 480704 - RNA, 19 nt, Homo sapiens
  misc_RNA (1)...(19): siRNA sense strand
agaggaaggcauccaaaug

SEQ ID NO: 480705 - RNA, 19 nt, Homo sapiens
  misc_RNA (1)...(19): siRNA sense strand
agaccuacagcaaguuuga

SEQ ID NO: 480706 - RNA, 19 nt, Homo sapiens
  misc_RNA (1)...(19): siRNA sense strand
ucaggaaggacauggacaa

SEQ ID NO: 480707 - RNA, 19 nt, Homo sapiens
  misc_RNA (1)...(19): siRNA sense strand
aggaaacgcagcagaaauc

SEQ ID NO: 480708 - RNA, 19 nt, Homo sapiens
  misc_RNA (1)...(19): siRNA sense strand
gacuaucaccuccuaaagg

SEQ ID NO: 480709 - RNA, 19 nt, Homo sapiens
  misc_RNA (1)...(19): siRNA sense strand
ugacugggcagacccucaa

SEQ ID NO: 480710 - RNA, 19 nt, Homo sapiens
  misc_RNA (1)...(19): siRNA sense strand
augacgcacugcucaagaa

SEQ ID NO: 480711 - RNA, 19 nt, Homo sapiens
  misc_RNA (1)...(19): siRNA sense strand
uagaggaaggcauccaaau

SEQ ID NO: 480712 - RNA, 19 nt, Homo sapiens
  misc_RNA (1)...(19): siRNA sense strand
cuacagcaaguuugacaca

SEQ ID NO: 480713 - RNA, 19 nt, Homo sapiens
  misc_RNA (1)...(19): siRNA sense strand
uggaggaaacgcagcagaa

SEQ ID NO: 480714 - RNA, 19 nt, Homo sapiens
  misc_RNA (1)...(19): siRNA sense strand
ccaacaaccugguguauga

SEQ ID NO: 480715 - RNA, 19 nt, Homo sapiens
  misc_RNA (1)...(19): siRNA sense strand
ggaaggacauggacaaggu

SEQ ID NO: 480716 - RNA, 19 nt, Homo sapiens
  misc_RNA (1)...(19): siRNA sense strand
cagcagaaauccaacuuag

SEQ ID NO: 480717 - RNA, 19 nt, Homo sapiens
  misc_RNA (1)...(19): siRNA sense strand
gcagaaauccaacuuagag

SEQ ID NO: 480718 - RNA, 19 nt, Homo sapiens
  misc_RNA (1)...(19): siRNA sense strand
ggaguaccuucaccaacaa

SEQ ID NO: 480719 - RNA, 19 nt, Homo sapiens
  misc_RNA (1)...(19): siRNA sense strand
caaacucgcacaaccauga

SEQ ID NO: 480720 - RNA, 19 nt, Homo sapiens
  misc_RNA (1)...(19): siRNA sense strand
ggacagcgaugacuaucac

SEQ ID NO: 480721 - RNA, 19 nt, Homo sapiens
  misc_RNA (1)...(19): siRNA sense strand
gcagcagaaauccaacuua

SEQ ID NO: 480722 - RNA, 19 nt, Homo sapiens
  misc_RNA (1)...(19): siRNA sense strand
ggaggaaacgcagcagaaa

SEQ ID NO: 480723 - RNA, 19 nt, Homo sapiens
  misc_RNA (1)...(19): siRNA sense strand
uggacaaggucgagacauu

SEQ ID NO: 480724 - RNA, 19 nt, Homo sapiens
  misc_RNA (1)...(19): siRNA sense strand
gcagaccuacagcaaguuu

SEQ ID NO: 480725 - RNA, 19 nt, Homo sapiens
  misc_RNA (1)...(19): siRNA sense strand
ggacaaggucgagacauuc

SEQ ID NO: 480726 - RNA, 19 nt, Homo sapiens
  misc_RNA (1)...(19): siRNA sense strand
cgaugacuaucaccuccua

SEQ ID NO: 480727 - RNA, 19 nt, Homo sapiens
  misc_RNA (1)...(19): siRNA sense strand
aagcagaccuacagcaagu

SEQ ID NO: 480728 - RNA, 19 nt, Homo sapiens
  misc_RNA (1)...(19): siRNA sense strand
acgcacugcucaagaacua

SEQ ID NO: 480729 - RNA, 19 nt, Homo sapiens
  misc_RNA (1)...(19): siRNA sense strand
aaacgcagcagaaauccaa

SEQ ID NO: 480730 - RNA, 19 nt, Homo sapiens
  misc_RNA (1)...(19): siRNA sense strand
aggaguaccuucaccaaca

SEQ ID NO: 480731 - RNA, 19 nt, Homo sapiens
  misc_RNA (1)...(19): siRNA sense strand
gaggaaacgcagcagaaau

SEQ ID NO: 480732 - RNA, 19 nt, Homo sapiens
  misc_RNA (1)...(19): siRNA sense strand
ccuaaaggaccuagaggaa

SEQ ID NO: 480733 - RNA, 19 nt, Homo sapiens
  misc_RNA (1)...(19): siRNA sense strand
ucaagcagaccuacagcaa

SEQ ID NO: 480734 - RNA, 19 nt, Homo sapiens
  misc_RNA (1)...(19): siRNA sense strand
agaggaaggcauccaaaug

SEQ ID NO: 480735 - RNA, 19 nt, Homo sapiens
  misc_RNA (1)...(19): siRNA sense strand
agaccuacagcaaguuuga

SEQ ID NO: 480736 - RNA, 19 nt, Homo sapiens
  misc_RNA (1)...(19): siRNA sense strand
ucaggaaggacauggacaa

SEQ ID NO: 480737 - RNA, 19 nt, Homo sapiens
  misc_RNA (1)...(19): siRNA sense strand
aggaaacgcagcagaaauc

SEQ ID NO: 480738 - RNA, 19 nt, Homo sapiens
  misc_RNA (1)...(19): siRNA sense strand
gacuaucaccuccuaaagg

SEQ ID NO: 480739 - RNA, 19 nt, Homo sapiens
  misc_RNA (1)...(19): siRNA sense strand
ugacugggcagacccucaa

SEQ ID NO: 480740 - RNA, 19 nt, Homo sapiens
  misc_RNA (1)...(19): siRNA sense strand
augacgcacugcucaagaa

SEQ ID NO: 480741 - RNA, 19 nt, Homo sapiens
  misc_RNA (1)...(19): siRNA sense strand
uagaggaaggcauccaaau

SEQ ID NO: 480742 - RNA, 19 nt, Homo sapiens
  misc_RNA (1)...(19): siRNA sense strand
cuacagcaaguuugacaca

SEQ ID NO: 480743 - RNA, 19 nt, Homo sapiens
  misc_RNA (1)...(19): siRNA sense strand
uggaggaaacgcagcagaa

SEQ ID NO: 480744 - RNA, 19 nt, Homo sapiens
  misc_RNA (1)...(19): siRNA sense strand
ccaacaaccugguguauga

SEQ ID NO: 480745 - RNA, 19 nt, Homo sapiens
  misc_RNA (1)...(19): siRNA sense strand
ggaaggacauggacaaggu

SEQ ID NO: 480746 - RNA, 19 nt, Homo sapiens
  misc_RNA (1)...(19): siRNA sense strand
cagcagaaauccaacuuag

SEQ ID NO: 480747 - RNA, 19 nt, Homo sapiens
  misc_RNA (1)...(19): siRNA sense strand
gcagaaauccaacuuagag

SEQ ID NO: 480748 - RNA, 19 nt, Homo sapiens
  misc_RNA (1)...(19): siRNA sense strand
ggaguaccuucaccaacaa

SEQ ID NO: 480749 - RNA, 19 nt, Homo sapiens
  misc_RNA (1)...(19): siRNA sense strand
caaacucgcacaaccauga

SEQ ID NO: 480750 - RNA, 19 nt, Homo sapiens
  misc_RNA (1)...(19): siRNA sense strand
ggacagcgaugacuaucac

SEQ ID NO: 480751 - RNA, 19 nt, Homo sapiens
  misc_RNA (1)...(19): siRNA sense strand
gcagcagaaauccaacuua

SEQ ID NO: 480752 - RNA, 19 nt, Homo sapiens
  misc_RNA (1)...(19): siRNA sense strand
ggaggaaacgcagcagaaa

SEQ ID NO: 480753 - RNA, 19 nt, Homo sapiens
  misc_RNA (1)...(19): siRNA sense strand
uggacaaggucgagacauu

SEQ ID NO: 480754 - RNA, 19 nt, Homo sapiens
  misc_RNA (1)...(19): siRNA sense strand
gcagaccuacagcaaguuu

SEQ ID NO: 480755 - RNA, 19 nt, Homo sapiens
  misc_RNA (1)...(19): siRNA sense strand
ggacaaggucgagacauuc

SEQ ID NO: 480756 - RNA, 19 nt, Homo sapiens
  misc_RNA (1)...(19): siRNA sense strand
cgaugacuaucaccuccua

SEQ ID NO: 480757 - RNA, 19 nt, Homo sapiens
  misc_RNA (1)...(19): siRNA sense strand
aagcagaccuacagcaagu

SEQ ID NO: 480758 - RNA, 19 nt, Homo sapiens
  misc_RNA (1)...(19): siRNA sense strand
acgcacugcucaagaacua

SEQ ID NO: 480759 - RNA, 19 nt, Homo sapiens
  misc_RNA (1)...(19): siRNA sense strand
aaacgcagcagaaauccaa

SEQ ID NO: 480760 - RNA, 19 nt, Homo sapiens
  misc_RNA (1)...(19): siRNA sense strand
aggaguaccuucaccaaca

SEQ ID NO: 480761 - RNA, 19 nt, Homo sapiens
  misc_RNA (1)...(19): siRNA sense strand
gaggaaacgcagcagaaau

SEQ ID NO: 480762 - RNA, 19 nt, Homo sapiens
  misc_RNA (1)...(19): siRNA sense strand
ccuaaaggaccuagaggaa

SEQ ID NO: 480763 - RNA, 19 nt, Homo sapiens
  misc_RNA (1)...(19): siRNA sense strand
ucaagcagaccuacagcaa

SEQ ID NO: 480764 - RNA, 19 nt, Homo sapiens
  misc_RNA (1)...(19): siRNA sense strand
agaggaaggcauccaaaug

SEQ ID NO: 480765 - RNA, 19 nt, Homo sapiens
  misc_RNA (1)...(19): siRNA sense strand
agaccuacagcaaguuuga

SEQ ID NO: 480766 - RNA, 19 nt, Homo sapiens
  misc_RNA (1)...(19): siRNA sense strand
ucaggaaggacauggacaa

SEQ ID NO: 480767 - RNA, 19 nt, Homo sapiens
  misc_RNA (1)...(19): siRNA sense strand
aggaaacgcagcagaaauc

SEQ ID NO: 480768 - RNA, 19 nt, Homo sapiens
  misc_RNA (1)...(19): siRNA sense strand
gacuaucaccuccuaaagg

SEQ ID NO: 480769 - RNA, 19 nt, Homo sapiens
  misc_RNA (1)...(19): siRNA sense strand
ugacugggcagacccucaa

SEQ ID NO: 480770 - RNA, 19 nt, Homo sapiens
  misc_RNA (1)...(19): siRNA sense strand
augacgcacugcucaagaa

SEQ ID NO: 480771 - RNA, 19 nt, Homo sapiens
  misc_RNA (1)...(19): siRNA sense strand
uagaggaaggcauccaaau

SEQ ID NO: 480772 - RNA, 19 nt, Homo sapiens
  misc_RNA (1)...(19): siRNA sense strand
cuacagcaaguuugacaca

SEQ ID NO: 480773 - RNA, 19 nt, Homo sapiens
  misc_RNA (1)...(19): siRNA sense strand
ccaacaaccugguguauga

SEQ ID NO: 480774 - RNA, 19 nt, Homo sapiens
  misc_RNA (1)...(19): siRNA sense strand
ggaaggacauggacaaggu

SEQ ID NO: 480775 - RNA, 19 nt, Homo sapiens
  misc_RNA (1)...(19): siRNA sense strand
cagcagaaauccaacuuag

SEQ ID NO: 480776 - RNA, 19 nt, Homo sapiens
  misc_RNA (1)...(19): siRNA sense strand
gcagaaauccaacuuagag

SEQ ID NO: 480777 - RNA, 19 nt, Homo sapiens
  misc_RNA (1)...(19): siRNA sense strand
ggaguaccuucaccaacaa

SEQ ID NO: 480778 - RNA, 19 nt, Homo sapiens
  misc_RNA (1)...(19): siRNA sense strand
caaacucgcacaaccauga

SEQ ID NO: 480779 - RNA, 19 nt, Homo sapiens
  misc_RNA (1)...(19): siRNA sense strand
ggacagcgaugacuaucac

SEQ ID NO: 480780 - RNA, 19 nt, Homo sapiens
  misc_RNA (1)...(19): siRNA sense strand
gcagcagaaauccaacuua

SEQ ID NO: 480781 - RNA, 19 nt, Homo sapiens
  misc_RNA (1)...(19): siRNA sense strand
ggaggaaacgcagcagaaa

SEQ ID NO: 480782 - RNA, 19 nt, Homo sapiens
  misc_RNA (1)...(19): siRNA sense strand
uggacaaggucgagacauu

SEQ ID NO: 480783 - RNA, 19 nt, Homo sapiens
  misc_RNA (1)...(19): siRNA sense strand
gcagaccuacagcaaguuu

SEQ ID NO: 480784 - RNA, 19 nt, Homo sapiens
  misc_RNA (1)...(19): siRNA sense strand
ggacaaggucgagacauuc

SEQ ID NO: 480785 - RNA, 19 nt, Homo sapiens
  misc_RNA (1)...(19): siRNA sense strand
cgaugacuaucaccuccua

SEQ ID NO: 480786 - RNA, 19 nt, Homo sapiens
  misc_RNA (1)...(19): siRNA sense strand
aagcagaccuacagcaagu

SEQ ID NO: 480787 - RNA, 19 nt, Homo sapiens
  misc_RNA (1)...(19): siRNA sense strand
acgcacugcucaagaacua

SEQ ID NO: 480788 - RNA, 19 nt, Homo sapiens
  misc_RNA (1)...(19): siRNA sense strand
aaacgcagcagaaauccaa

SEQ ID NO: 480789 - RNA, 19 nt, Homo sapiens
  misc_RNA (1)...(19): siRNA sense strand
aggaguaccuucaccaaca

SEQ ID NO: 480790 - RNA, 19 nt, Homo sapiens
  misc_RNA (1)...(19): siRNA sense strand
gaggaaacgcagcagaaau

SEQ ID NO: 480791 - RNA, 19 nt, Homo sapiens
  misc_RNA (1)...(19): siRNA sense strand
ccuaaaggaccuagaggaa

SEQ ID NO: 480792 - RNA, 19 nt, Homo sapiens
  misc_RNA (1)...(19): siRNA sense strand
ucaagcagaccuacagcaa

SEQ ID NO: 480793 - RNA, 19 nt, Homo sapiens
  misc_RNA (1)...(19): siRNA sense strand
agaggaaggcauccaaaug

SEQ ID NO: 480794 - RNA, 19 nt, Homo sapiens
  misc_RNA (1)...(19): siRNA sense strand
agaccuacagcaaguuuga

SEQ ID NO: 480795 - RNA, 19 nt, Homo sapiens
  misc_RNA (1)...(19): siRNA sense strand
ucaggaaggacauggacaa

SEQ ID NO: 480796 - RNA, 19 nt, Homo sapiens
  misc_RNA (1)...(19): siRNA sense strand
aggaaacgcagcagaaauc

SEQ ID NO: 480797 - RNA, 19 nt, Homo sapiens
  misc_RNA (1)...(19): siRNA sense strand
gacuaucaccuccuaaagg

SEQ ID NO: 480798 - RNA, 19 nt, Homo sapiens
  misc_RNA (1)...(19): siRNA sense strand
ugacugggcagacccucaa

SEQ ID NO: 480799 - RNA, 19 nt, Homo sapiens
  misc_RNA (1)...(19): siRNA sense strand
augacgcacugcucaagaa

SEQ ID NO: 480800 - RNA, 19 nt, Homo sapiens
  misc_RNA (1)...(19): siRNA sense strand
uagaggaaggcauccaaau

SEQ ID NO: 480801 - RNA, 19 nt, Homo sapiens
  misc_RNA (1)...(19): siRNA sense strand
cuacagcaaguuugacaca

SEQ ID NO: 480802 - RNA, 19 nt, Homo sapiens
  misc_RNA (1)...(19): siRNA sense strand
uggaggaaacgcagcagaa

SEQ ID NO: 480803 - RNA, 19 nt, Homo sapiens
  misc_RNA (1)...(19): siRNA sense strand
ccaacaaccugguguauga

SEQ ID NO: 480804 - RNA, 19 nt, Homo sapiens
  misc_RNA (1)...(19): siRNA sense strand
ggaaggacauggacaaggu

SEQ ID NO: 480805 - RNA, 19 nt, Homo sapiens
  misc_RNA (1)...(19): siRNA sense strand
cagcagaaauccaacuuag

SEQ ID NO: 480806 - RNA, 19 nt, Homo sapiens
  misc_RNA (1)...(19): siRNA sense strand
gcagaaauccaacuuagag

SEQ ID NO: 480807 - RNA, 19 nt, Homo sapiens
  misc_RNA (1)...(19): siRNA sense strand
ggaguaccuucaccaacaa

SEQ ID NO: 480808 - RNA, 19 nt, Homo sapiens
  misc_RNA (1)...(19): siRNA sense strand
caaacucgcacaaccauga

SEQ ID NO: 480809 - RNA, 19 nt, Homo sapiens
  misc_RNA (1)...(19): siRNA sense strand
ggacagcgaugacuaucac

SEQ ID NO: 480810 - RNA, 19 nt, Homo sapiens
  misc_RNA (1)...(19): siRNA sense strand
gcagcagaaauccaacuua

SEQ ID NO: 480811 - RNA, 19 nt, Homo sapiens
  misc_RNA (1)...(19): siRNA sense strand
ggaggaaacgcagcagaaa

SEQ ID NO: 480812 - RNA, 19 nt, Homo sapiens
  misc_RNA (1)...(19): siRNA sense strand
uggacaaggucgagacauu

SEQ ID NO: 480813 - RNA, 19 nt, Homo sapiens
  misc_RNA (1)...(19): siRNA sense strand
gcagaccuacagcaaguuu

SEQ ID NO: 480814 - RNA, 19 nt, Homo sapiens
  misc_RNA (1)...(19): siRNA sense strand
ggacaaggucgagacauuc

SEQ ID NO: 480815 - RNA, 19 nt, Homo sapiens
  misc_RNA (1)...(19): siRNA sense strand
cgaugacuaucaccuccua

SEQ ID NO: 480816 - RNA, 19 nt, Homo sapiens
  misc_RNA (1)...(19): siRNA sense strand
aagcagaccuacagcaagu

SEQ ID NO: 480817 - RNA, 19 nt, Homo sapiens
  misc_RNA (1)...(19): siRNA sense strand
acgcacugcucaagaacua

SEQ ID NO: 480818 - RNA, 19 nt, Homo sapiens
  misc_RNA (1)...(19): siRNA sense strand
aaacgcagcagaaauccaa

SEQ ID NO: 480819 - RNA, 19 nt, Homo sapiens
  misc_RNA (1)...(19): siRNA sense strand
aggaguaccuucaccaaca

SEQ ID NO: 480820 - RNA, 19 nt, Homo sapiens
  misc_RNA (1)...(19): siRNA sense strand
gaggaaacgcagcagaaau

SEQ ID NO: 480821 - RNA, 19 nt, Homo sapiens
  misc_RNA (1)...(19): siRNA sense strand
ccuaaaggaccuagaggaa

SEQ ID NO: 480822 - RNA, 19 nt, Homo sapiens
  misc_RNA (1)...(19): siRNA sense strand
ucaagcagaccuacagcaa

SEQ ID NO: 480823 - RNA, 19 nt, Homo sapiens
  misc_RNA (1)...(19): siRNA sense strand
agaggaaggcauccaaaug

SEQ ID NO: 480824 - RNA, 19 nt, Homo sapiens
  misc_RNA (1)...(19): siRNA sense strand
agaccuacagcaaguuuga

SEQ ID NO: 480825 - RNA, 19 nt, Homo sapiens
  misc_RNA (1)...(19): siRNA sense strand
ucaggaaggacauggacaa

SEQ ID NO: 480826 - RNA, 19 nt, Homo sapiens
  misc_RNA (1)...(19): siRNA sense strand
aggaaacgcagcagaaauc

SEQ ID NO: 480827 - RNA, 19 nt, Homo sapiens
  misc_RNA (1)...(19): siRNA sense strand
gacuaucaccuccuaaagg

SEQ ID NO: 480828 - RNA, 19 nt, Homo sapiens
  misc_RNA (1)...(19): siRNA sense strand
ugacugggcagacccucaa

SEQ ID NO: 480829 - RNA, 19 nt, Homo sapiens
  misc_RNA (1)...(19): siRNA sense strand
augacgcacugcucaagaa

SEQ ID NO: 480830 - RNA, 19 nt, Homo sapiens
  misc_RNA (1)...(19): siRNA sense strand
uagaggaaggcauccaaau

SEQ ID NO: 480831 - RNA, 19 nt, Homo sapiens
  misc_RNA (1)...(19): siRNA sense strand
cuacagcaaguuugacaca

SEQ ID NO: 480832 - RNA, 19 nt, Homo sapiens
  misc_RNA (1)...(19): siRNA sense strand
uggaggaaacgcagcagaa

SEQ ID NO: 480833 - RNA, 19 nt, Homo sapiens
  misc_RNA (1)...(19): siRNA sense strand
ccaacaaccugguguauga

SEQ ID NO: 480834 - RNA, 19 nt, Homo sapiens
  misc_RNA (1)...(19): siRNA sense strand
ggaaggacauggacaaggu

SEQ ID NO: 480835 - RNA, 19 nt, Homo sapiens
  misc_RNA (1)...(19): siRNA sense strand
cagcagaaauccaacuuag

SEQ ID NO: 480836 - RNA, 19 nt, Homo sapiens
  misc_RNA (1)...(19): siRNA sense strand
gcagaaauccaacuuagag

SEQ ID NO: 480837 - RNA, 19 nt, Homo sapiens
  misc_RNA (1)...(19): siRNA sense strand
ggaguaccuucaccaacaa

SEQ ID NO: 480838 - RNA, 19 nt, Homo sapiens
  misc_RNA (1)...(19): siRNA sense strand
caaacucgcacaaccauga

SEQ ID NO: 480839 - RNA, 19 nt, Homo sapiens
  misc_RNA (1)...(19): siRNA sense strand
ggacagcgaugacuaucac

SEQ ID NO: 480840 - RNA, 19 nt, Homo sapiens
  misc_RNA (1)...(19): siRNA sense strand
gcagcagaaauccaacuua

SEQ ID NO: 480841 - RNA, 19 nt, Homo sapiens
  misc_RNA (1)...(19): siRNA sense strand
ggaggaaacgcagcagaaa

SEQ ID NO: 480842 - RNA, 19 nt, Homo sapiens
  misc_RNA (1)...(19): siRNA sense strand
uggacaaggucgagacauu

SEQ ID NO: 480843 - RNA, 19 nt, Homo sapiens
  misc_RNA (1)...(19): siRNA sense strand
gcagaccuacagcaaguuu

SEQ ID NO: 480844 - RNA, 19 nt, Homo sapiens
  misc_RNA (1)...(19): siRNA sense strand
ggacaaggucgagacauuc

SEQ ID NO: 480845 - RNA, 19 nt, Homo sapiens
  misc_RNA (1)...(19): siRNA sense strand
cgaugacuaucaccuccua

SEQ ID NO: 480846 - RNA, 19 nt, Homo sapiens
  misc_RNA (1)...(19): siRNA sense strand
aagcagaccuacagcaagu

SEQ ID NO: 480847 - RNA, 19 nt, Homo sapiens
  misc_RNA (1)...(19): siRNA sense strand
acgcacugcucaagaacua

SEQ ID NO: 480848 - RNA, 19 nt, Homo sapiens
  misc_RNA (1)...(19): siRNA sense strand
aaacgcagcagaaauccaa

SEQ ID NO: 480849 - RNA, 19 nt, Homo sapiens
  misc_RNA (1)...(19): siRNA sense strand
aggaguaccuucaccaaca

SEQ ID NO: 480850 - RNA, 19 nt, Homo sapiens
  misc_RNA (1)...(19): siRNA sense strand
gaggaaacgcagcagaaau

SEQ ID NO: 480851 - RNA, 19 nt, Homo sapiens
  misc_RNA (1)...(19): siRNA sense strand
ccuaaaggaccuagaggaa

SEQ ID NO: 480852 - RNA, 19 nt, Homo sapiens
  misc_RNA (1)...(19): siRNA sense strand
ucaagcagaccuacagcaa

SEQ ID NO: 480853 - RNA, 19 nt, Homo sapiens
  misc_RNA (1)...(19): siRNA sense strand
agaggaaggcauccaaaug

SEQ ID NO: 480854 - RNA, 19 nt, Homo sapiens
  misc_RNA (1)...(19): siRNA sense strand
agaccuacagcaaguuuga

SEQ ID NO: 480855 - RNA, 19 nt, Homo sapiens
  misc_RNA (1)...(19): siRNA sense strand
ucaggaaggacauggacaa

SEQ ID NO: 480856 - RNA, 19 nt, Homo sapiens
  misc_RNA (1)...(19): siRNA sense strand
aggaaacgcagcagaaauc

SEQ ID NO: 480857 - RNA, 19 nt, Homo sapiens
  misc_RNA (1)...(19): siRNA sense strand
gacuaucaccuccuaaagg

SEQ ID NO: 480858 - RNA, 19 nt, Homo sapiens
  misc_RNA (1)...(19): siRNA sense strand
ugacugggcagacccucaa

SEQ ID NO: 480859 - RNA, 19 nt, Homo sapiens
  misc_RNA (1)...(19): siRNA sense strand
augacgcacugcucaagaa

SEQ ID NO: 480860 - RNA, 19 nt, Homo sapiens
  misc_RNA (1)...(19): siRNA sense strand
uagaggaaggcauccaaau

SEQ ID NO: 480861 - RNA, 19 nt, Homo sapiens
  misc_RNA (1)...(19): siRNA sense strand
cuacagcaaguuugacaca

SEQ ID NO: 480862 - RNA, 19 nt, Homo sapiens
  misc_RNA (1)...(19): siRNA sense strand
uggaggaaacgcagcagaa

SEQ ID NO: 480863 - RNA, 19 nt, Homo sapiens
  misc_RNA (1)...(19): siRNA sense strand
ccaacaaccugguguauga

SEQ ID NO: 480864 - RNA, 19 nt, Homo sapiens
  misc_RNA (1)...(19): siRNA sense strand
ggaaggacauggacaaggu

SEQ ID NO: 480865 - RNA, 19 nt, Homo sapiens
  misc_RNA (1)...(19): siRNA sense strand
cagcagaaauccaacuuag

SEQ ID NO: 480866 - RNA, 19 nt, Homo sapiens
  misc_RNA (1)...(19): siRNA sense strand
gcagaaauccaacuuagag

SEQ ID NO: 480867 - RNA, 19 nt, Homo sapiens
  misc_RNA (1)...(19): siRNA sense strand
ggaguaccuucaccaacaa

SEQ ID NO: 480868 - RNA, 19 nt, Homo sapiens
  misc_RNA (1)...(19): siRNA sense strand
caaacucgcacaaccauga

SEQ ID NO: 480869 - RNA, 19 nt, Homo sapiens
  misc_RNA (1)...(19): siRNA sense strand
ggacagcgaugacuaucac

SEQ ID NO: 480870 - RNA, 19 nt, Homo sapiens
  misc_RNA (1)...(19): siRNA sense strand
gcagcagaaauccaacuua

SEQ ID NO: 480871 - RNA, 19 nt, Homo sapiens
  misc_RNA (1)...(19): siRNA sense strand
ggaggaaacgcagcagaaa

SEQ ID NO: 480872 - RNA, 19 nt, Homo sapiens
  misc_RNA (1)...(19): siRNA sense strand
uggacaaggucgagacauu

SEQ ID NO: 480873 - RNA, 19 nt, Homo sapiens
  misc_RNA (1)...(19): siRNA sense strand
gcagaccuacagcaaguuu

SEQ ID NO: 480874 - RNA, 19 nt, Homo sapiens
  misc_RNA (1)...(19): siRNA sense strand
ggacaaggucgagacauuc

SEQ ID NO: 480875 - RNA, 19 nt, Homo sapiens
  misc_RNA (1)...(19): siRNA sense strand
cgaugacuaucaccuccua

SEQ ID NO: 480876 - RNA, 19 nt, Homo sapiens
  misc_RNA (1)...(19): siRNA sense strand
aagcagaccuacagcaagu

SEQ ID NO: 480877 - RNA, 19 nt, Homo sapiens
  misc_RNA (1)...(19): siRNA sense strand
acgcacugcucaagaacua

SEQ ID NO: 480878 - RNA, 19 nt, Homo sapiens
  misc_RNA (1)...(19): siRNA sense strand
aaacgcagcagaaauccaa

SEQ ID NO: 480879 - RNA, 19 nt, Homo sapiens
  misc_RNA (1)...(19): siRNA sense strand
aggaguaccuucaccaaca

SEQ ID NO: 480880 - RNA, 19 nt, Homo sapiens
  misc_RNA (1)...(19): siRNA sense strand
gaggaaacgcagcagaaau

SEQ ID NO: 480881 - RNA, 19 nt, Homo sapiens
  misc_RNA (1)...(19): siRNA sense strand
ccuaaaggaccuagaggaa

SEQ ID NO: 480882 - RNA, 19 nt, Homo sapiens
  misc_RNA (1)...(19): siRNA sense strand
ucaagcagaccuacagcaa

SEQ ID NO: 480883 - RNA, 19 nt, Homo sapiens
  misc_RNA (1)...(19): siRNA sense strand
agaggaaggcauccaaaug

SEQ ID NO: 480884 - RNA, 19 nt, Homo sapiens
  misc_RNA (1)...(19): siRNA sense strand
agaccuacagcaaguuuga

SEQ ID NO: 480885 - RNA, 19 nt, Homo sapiens
  misc_RNA (1)...(19): siRNA sense strand
ucaggaaggacauggacaa

SEQ ID NO: 480886 - RNA, 19 nt, Homo sapiens
  misc_RNA (1)...(19): siRNA sense strand
aggaaacgcagcagaaauc

SEQ ID NO: 480887 - RNA, 19 nt, Homo sapiens
  misc_RNA (1)...(19): siRNA sense strand
gacuaucaccuccuaaagg

SEQ ID NO: 480888 - RNA, 19 nt, Homo sapiens
  misc_RNA (1)...(19): siRNA sense strand
ugacugggcagacccucaa

SEQ ID NO: 480889 - RNA, 19 nt, Homo sapiens
  misc_RNA (1)...(19): siRNA sense strand
augacgcacugcucaagaa

SEQ ID NO: 480890 - RNA, 19 nt, Homo sapiens
  misc_RNA (1)...(19): siRNA sense strand
uagaggaaggcauccaaau

SEQ ID NO: 480891 - RNA, 19 nt, Homo sapiens
  misc_RNA (1)...(19): siRNA sense strand
cuacagcaaguuugacaca

SEQ ID NO: 480892 - RNA, 19 nt, Homo sapiens
  misc_RNA (1)...(19): siRNA sense strand
ccaacaaccugguguauga

SEQ ID NO: 480893 - RNA, 19 nt, Homo sapiens
  misc_RNA (1)...(19): siRNA sense strand
ggaaggacauggacaaggu

SEQ ID NO: 480894 - RNA, 19 nt, Homo sapiens
  misc_RNA (1)...(19): siRNA sense strand
cagcagaaauccaacuuag

SEQ ID NO: 480895 - RNA, 19 nt, Homo sapiens
  misc_RNA (1)...(19): siRNA sense strand
gcagaaauccaacuuagag

SEQ ID NO: 480896 - RNA, 19 nt, Homo sapiens
  misc_RNA (1)...(19): siRNA sense strand
ggaguaccuucaccaacaa

SEQ ID NO: 480897 - RNA, 19 nt, Homo sapiens
  misc_RNA (1)...(19): siRNA sense strand
caaacucgcacaaccauga

SEQ ID NO: 480898 - RNA, 19 nt, Homo sapiens
  misc_RNA (1)...(19): siRNA sense strand
ggacagcgaugacuaucac

SEQ ID NO: 480899 - RNA, 19 nt, Homo sapiens
  misc_RNA (1)...(19): siRNA sense strand
gcagcagaaauccaacuua

SEQ ID NO: 480900 - RNA, 19 nt, Homo sapiens
  misc_RNA (1)...(19): siRNA sense strand
ggaggaaacgcagcagaaa

SEQ ID NO: 480901 - RNA, 19 nt, Homo sapiens
  misc_RNA (1)...(19): siRNA sense strand
uggacaaggucgagacauu

SEQ ID NO: 480902 - RNA, 19 nt, Homo sapiens
  misc_RNA (1)...(19): siRNA sense strand
gcagaccuacagcaaguuu

SEQ ID NO: 480903 - RNA, 19 nt, Homo sapiens
  misc_RNA (1)...(19): siRNA sense strand
ggacaaggucgagacauuc

SEQ ID NO: 480904 - RNA, 19 nt, Homo sapiens
  misc_RNA (1)...(19): siRNA sense strand
cgaugacuaucaccuccua

SEQ ID NO: 480905 - RNA, 19 nt, Homo sapiens
  misc_RNA (1)...(19): siRNA sense strand
aagcagaccuacagcaagu

SEQ ID NO: 480906 - RNA, 19 nt, Homo sapiens
  misc_RNA (1)...(19): siRNA sense strand
acgcacugcucaagaacua

SEQ ID NO: 480907 - RNA, 19 nt, Homo sapiens
  misc_RNA (1)...(19): siRNA sense strand
aaacgcagcagaaauccaa

SEQ ID NO: 480908 - RNA, 19 nt, Homo sapiens
  misc_RNA (1)...(19): siRNA sense strand
aggaguaccuucaccaaca

SEQ ID NO: 480909 - RNA, 19 nt, Homo sapiens
  misc_RNA (1)...(19): siRNA sense strand
gaggaaacgcagcagaaau

SEQ ID NO: 480910 - RNA, 19 nt, Homo sapiens
  misc_RNA (1)...(19): siRNA sense strand
ccuaaaggaccuagaggaa

SEQ ID NO: 480911 - RNA, 19 nt, Homo sapiens
  misc_RNA (1)...(19): siRNA sense strand
ucaagcagaccuacagcaa

SEQ ID NO: 480912 - RNA, 19 nt, Homo sapiens
  misc_RNA (1)...(19): siRNA sense strand
agaggaaggcauccaaaug

SEQ ID NO: 480913 - RNA, 19 nt, Homo sapiens
  misc_RNA (1)...(19): siRNA sense strand
agaccuacagcaaguuuga

SEQ ID NO: 480914 - RNA, 19 nt, Homo sapiens
  misc_RNA (1)...(19): siRNA sense strand
ucaggaaggacauggacaa

SEQ ID NO: 480915 - RNA, 19 nt, Homo sapiens
  misc_RNA (1)...(19): siRNA sense strand
aggaaacgcagcagaaauc

SEQ ID NO: 480916 - RNA, 19 nt, Homo sapiens
  misc_RNA (1)...(19): siRNA sense strand
gacuaucaccuccuaaagg

SEQ ID NO: 480917 - RNA, 19 nt, Homo sapiens
  misc_RNA (1)...(19): siRNA sense strand
ugacugggcagacccucaa

SEQ ID NO: 480918 - RNA, 19 nt, Homo sapiens
  misc_RNA (1)...(19): siRNA sense strand
augacgcacugcucaagaa

SEQ ID NO: 480919 - RNA, 19 nt, Homo sapiens
  misc_RNA (1)...(19): siRNA sense strand
uagaggaaggcauccaaau

SEQ ID NO: 480920 - RNA, 19 nt, Homo sapiens
  misc_RNA (1)...(19): siRNA sense strand
cuacagcaaguuugacaca

SEQ ID NO: 480921 - RNA, 19 nt, Homo sapiens
  misc_RNA (1)...(19): siRNA sense strand
uggaggaaacgcagcagaa

SEQ ID NO: 480922 - RNA, 19 nt, Homo sapiens
  misc_RNA (1)...(19): siRNA sense strand
ccaacaaccugguguauga

SEQ ID NO: 480923 - RNA, 19 nt, Homo sapiens
  misc_RNA (1)...(19): siRNA sense strand
ggaaggacauggacaaggu

SEQ ID NO: 480924 - RNA, 19 nt, Homo sapiens
  misc_RNA (1)...(19): siRNA sense strand
cagcagaaauccaacuuag

SEQ ID NO: 480925 - RNA, 19 nt, Homo sapiens
  misc_RNA (1)...(19): siRNA sense strand
gcagaaauccaacuuagag

SEQ ID NO: 480926 - RNA, 19 nt, Homo sapiens
  misc_RNA (1)...(19): siRNA sense strand
ggaguaccuucaccaacaa

SEQ ID NO: 480927 - RNA, 19 nt, Homo sapiens
  misc_RNA (1)...(19): siRNA sense strand
caaacucgcacaaccauga

SEQ ID NO: 480928 - RNA, 19 nt, Homo sapiens
  misc_RNA (1)...(19): siRNA sense strand
ggacagcgaugacuaucac

SEQ ID NO: 480929 - RNA, 19 nt, Homo sapiens
  misc_RNA (1)...(19): siRNA sense strand
gcagcagaaauccaacuua

SEQ ID NO: 480930 - RNA, 19 nt, Homo sapiens
  misc_RNA (1)...(19): siRNA sense strand
ggaggaaacgcagcagaaa

SEQ ID NO: 480931 - RNA, 19 nt, Homo sapiens
  misc_RNA (1)...(19): siRNA sense strand
uggacaaggucgagacauu

SEQ ID NO: 480932 - RNA, 19 nt, Homo sapiens
  misc_RNA (1)...(19): siRNA sense strand
gcagaccuacagcaaguuu

SEQ ID NO: 480933 - RNA, 19 nt, Homo sapiens
  misc_RNA (1)...(19): siRNA sense strand
ggacaaggucgagacauuc

SEQ ID NO: 480934 - RNA, 19 nt, Homo sapiens
  misc_RNA (1)...(19): siRNA sense strand
cgaugacuaucaccuccua

SEQ ID NO: 480935 - RNA, 19 nt, Homo sapiens
  misc_RNA (1)...(19): siRNA sense strand
aagcagaccuacagcaagu

SEQ ID NO: 480936 - RNA, 19 nt, Homo sapiens
  misc_RNA (1)...(19): siRNA sense strand
acgcacugcucaagaacua

SEQ ID NO: 480937 - RNA, 19 nt, Homo sapiens
  misc_RNA (1)...(19): siRNA sense strand
aaacgcagcagaaauccaa

SEQ ID NO: 480938 - RNA, 19 nt, Homo sapiens
  misc_RNA (1)...(19): siRNA sense strand
aggaguaccuucaccaaca

SEQ ID NO: 480939 - RNA, 19 nt, Homo sapiens
  misc_RNA (1)...(19): siRNA sense strand
gaggaaacgcagcagaaau

SEQ ID NO: 480940 - RNA, 19 nt, Homo sapiens
  misc_RNA (1)...(19): siRNA sense strand
ccuaaaggaccuagaggaa

SEQ ID NO: 480941 - RNA, 19 nt, Homo sapiens
  misc_RNA (1)...(19): siRNA sense strand
ucaagcagaccuacagcaa

SEQ ID NO: 480942 - RNA, 19 nt, Homo sapiens
  misc_RNA (1)...(19): siRNA sense strand
agaggaaggcauccaaaug

SEQ ID NO: 480943 - RNA, 19 nt, Homo sapiens
  misc_RNA (1)...(19): siRNA sense strand
agaccuacagcaaguuuga

SEQ ID NO: 480944 - RNA, 19 nt, Homo sapiens
  misc_RNA (1)...(19): siRNA sense strand
ucaggaaggacauggacaa

SEQ ID NO: 480945 - RNA, 19 nt, Homo sapiens
  misc_RNA (1)...(19): siRNA sense strand
aggaaacgcagcagaaauc

SEQ ID NO: 480946 - RNA, 19 nt, Homo sapiens
  misc_RNA (1)...(19): siRNA sense strand
gacuaucaccuccuaaagg

SEQ ID NO: 480947 - RNA, 19 nt, Homo sapiens
  misc_RNA (1)...(19): siRNA sense strand
ugacugggcagacccucaa

SEQ ID NO: 480948 - RNA, 19 nt, Homo sapiens
  misc_RNA (1)...(19): siRNA sense strand
augacgcacugcucaagaa

SEQ ID NO: 480949 - RNA, 19 nt, Homo sapiens
  misc_RNA (1)...(19): siRNA sense strand
uagaggaaggcauccaaau

SEQ ID NO: 480950 - RNA, 19 nt, Homo sapiens
  misc_RNA (1)...(19): siRNA sense strand
cuacagcaaguuugacaca

SEQ ID NO: 480951 - RNA, 19 nt, Homo sapiens
  misc_RNA (1)...(19): siRNA sense strand
uggaggaaacgcagcagaa

SEQ ID NO: 480952 - RNA, 19 nt, Homo sapiens
  misc_RNA (1)...(19): siRNA sense strand
ccaacaaccugguguauga

SEQ ID NO: 480953 - RNA, 19 nt, Homo sapiens
  misc_RNA (1)...(19): siRNA sense strand
ggaaggacauggacaaggu

SEQ ID NO: 480954 - RNA, 19 nt, Homo sapiens
  misc_RNA (1)...(19): siRNA sense strand
cagcagaaauccaacuuag

SEQ ID NO: 480955 - RNA, 19 nt, Homo sapiens
  misc_RNA (1)...(19): siRNA sense strand
gcagaaauccaacuuagag

SEQ ID NO: 480956 - RNA, 19 nt, Homo sapiens
  misc_RNA (1)...(19): siRNA sense strand
ggaguaccuucaccaacaa

SEQ ID NO: 480957 - RNA, 19 nt, Homo sapiens
  misc_RNA (1)...(19): siRNA sense strand
caaacucgcacaaccauga

SEQ ID NO: 480958 - RNA, 19 nt, Homo sapiens
  misc_RNA (1)...(19): siRNA sense strand
ggacagcgaugacuaucac

SEQ ID NO: 480959 - RNA, 19 nt, Homo sapiens
  misc_RNA (1)...(19): siRNA sense strand
gcagcagaaauccaacuua

SEQ ID NO: 480960 - RNA, 19 nt, Homo sapiens
  misc_RNA (1)...(19): siRNA sense strand
ggaggaaacgcagcagaaa

SEQ ID NO: 480961 - RNA, 19 nt, Homo sapiens
  misc_RNA (1)...(19): siRNA sense strand
uggacaaggucgagacauu

SEQ ID NO: 480962 - RNA, 19 nt, Homo sapiens
  misc_RNA (1)...(19): siRNA sense strand
gcagaccuacagcaaguuu

SEQ ID NO: 480963 - RNA, 19 nt, Homo sapiens
  misc_RNA (1)...(19): siRNA sense strand
ggacaaggucgagacauuc

SEQ ID NO: 480964 - RNA, 19 nt, Homo sapiens
  misc_RNA (1)...(19): siRNA sense strand
cgaugacuaucaccuccua

SEQ ID NO: 480965 - RNA, 19 nt, Homo sapiens
  misc_RNA (1)...(19): siRNA sense strand
aagcagaccuacagcaagu

SEQ ID NO: 480966 - RNA, 19 nt, Homo sapiens
  misc_RNA (1)...(19): siRNA sense strand
acgcacugcucaagaacua

SEQ ID NO: 480967 - RNA, 19 nt, Homo sapiens
  misc_RNA (1)...(19): siRNA sense strand
aaacgcagcagaaauccaa

SEQ ID NO: 480968 - RNA, 19 nt, Homo sapiens
  misc_RNA (1)...(19): siRNA sense strand
aggaguaccuucaccaaca

SEQ ID NO: 480969 - RNA, 19 nt, Homo sapiens
  misc_RNA (1)...(19): siRNA sense strand
gaggaaacgcagcagaaau

SEQ ID NO: 480970 - RNA, 19 nt, Homo sapiens
  misc_RNA (1)...(19): siRNA sense strand
ccuaaaggaccuagaggaa

SEQ ID NO: 480971 - RNA, 19 nt, Homo sapiens
  misc_RNA (1)...(19): siRNA sense strand
ucaagcagaccuacagcaa

SEQ ID NO: 480972 - RNA, 19 nt, Homo sapiens
  misc_RNA (1)...(19): siRNA sense strand
agaggaaggcauccaaaug

SEQ ID NO: 480973 - RNA, 19 nt, Homo sapiens
  misc_RNA (1)...(19): siRNA sense strand
agaccuacagcaaguuuga

SEQ ID NO: 480974 - RNA, 19 nt, Homo sapiens
  misc_RNA (1)...(19): siRNA sense strand
ucaggaaggacauggacaa

SEQ ID NO: 480975 - RNA, 19 nt, Homo sapiens
  misc_RNA (1)...(19): siRNA sense strand
aggaaacgcagcagaaauc

SEQ ID NO: 480976 - RNA, 19 nt, Homo sapiens
  misc_RNA (1)...(19): siRNA sense strand
gacuaucaccuccuaaagg

SEQ ID NO: 480977 - RNA, 19 nt, Homo sapiens
  misc_RNA (1)...(19): siRNA sense strand
ugacugggcagacccucaa

SEQ ID NO: 480978 - RNA, 19 nt, Homo sapiens
  misc_RNA (1)...(19): siRNA sense strand
augacgcacugcucaagaa

SEQ ID NO: 480979 - RNA, 19 nt, Homo sapiens
  misc_RNA (1)...(19): siRNA sense strand
uagaggaaggcauccaaau

SEQ ID NO: 480980 - RNA, 19 nt, Homo sapiens
  misc_RNA (1)...(19): siRNA sense strand
cuacagcaaguuugacaca

SEQ ID NO: 480981 - RNA, 19 nt, Homo sapiens
  misc_RNA (1)...(19): siRNA sense strand
uggaggaaacgcagcagaa

SEQ ID NO: 480982 - RNA, 19 nt, Homo sapiens
  misc_RNA (1)...(19): siRNA sense strand
ggaaggacauggacaaggu

SEQ ID NO: 480983 - RNA, 19 nt, Homo sapiens
  misc_RNA (1)...(19): siRNA sense strand
caaacucgcacaaccauga

SEQ ID NO: 480984 - RNA, 19 nt, Homo sapiens
  misc_RNA (1)...(19): siRNA sense strand
uggacaaggucgagacauu

SEQ ID NO: 480985 - RNA, 19 nt, Homo sapiens
  misc_RNA (1)...(19): siRNA sense strand
gcagaccuacagcaaguuu

SEQ ID NO: 480986 - RNA, 19 nt, Homo sapiens
  misc_RNA (1)...(19): siRNA sense strand
ggacugggcagauccucaa

SEQ ID NO: 480987 - RNA, 19 nt, Homo sapiens
  misc_RNA (1)...(19): siRNA sense strand
ggacaaggucgagacauuc

SEQ ID NO: 480988 - RNA, 19 nt, Homo sapiens
  misc_RNA (1)...(19): siRNA sense strand
aagcagaccuacagcaagu

SEQ ID NO: 480989 - RNA, 19 nt, Homo sapiens
  misc_RNA (1)...(19): siRNA sense strand
acgcacugcucaagaacua

SEQ ID NO: 480990 - RNA, 19 nt, Homo sapiens
  misc_RNA (1)...(19): siRNA sense strand
gggcugcucuacugcuuca

SEQ ID NO: 480991 - RNA, 19 nt, Homo sapiens
  misc_RNA (1)...(19): siRNA sense strand
ucaagcagaccuacagcaa

SEQ ID NO: 480992 - RNA, 19 nt, Homo sapiens
  misc_RNA (1)...(19): siRNA sense strand
gaacuacgggcugcucuac

SEQ ID NO: 480993 - RNA, 19 nt, Homo sapiens
  misc_RNA (1)...(19): siRNA sense strand
agaccuacagcaaguuuga

SEQ ID NO: 480994 - RNA, 19 nt, Homo sapiens
  misc_RNA (1)...(19): siRNA sense strand
ucaggaaggacauggacaa

SEQ ID NO: 480995 - RNA, 19 nt, Homo sapiens
  misc_RNA (1)...(19): siRNA sense strand
augacgcacugcucaagaa

SEQ ID NO: 480996 - RNA, 19 nt, Homo sapiens
  misc_RNA (1)...(19): siRNA sense strand
acuacgggcugcucuacug

SEQ ID NO: 480997 - RNA, 19 nt, Homo sapiens
  misc_RNA (1)...(19): siRNA sense strand
cuacagcaaguuugacaca

SEQ ID NO: 480998 - RNA, 19 nt, Homo sapiens
  misc_RNA (1)...(19): siRNA sense strand
gcagaccuacagcaaguuu

SEQ ID NO: 480999 - RNA, 19 nt, Homo sapiens
  misc_RNA (1)...(19): siRNA sense strand
ggacugggcagauccucaa

SEQ ID NO: 481000 - RNA, 19 nt, Homo sapiens
  misc_RNA (1)...(19): siRNA sense strand
aagcagaccuacagcaagu

SEQ ID NO: 481001 - RNA, 19 nt, Homo sapiens
  misc_RNA (1)...(19): siRNA sense strand
ucaagcagaccuacagcaa

SEQ ID NO: 481002 - RNA, 19 nt, Homo sapiens
  misc_RNA (1)...(19): siRNA sense strand
agaccuacagcaaguuuga

SEQ ID NO: 481003 - RNA, 19 nt, Homo sapiens
  misc_RNA (1)...(19): siRNA sense strand
ggaaggacauggacaaggu

SEQ ID NO: 481004 - RNA, 19 nt, Homo sapiens
  misc_RNA (1)...(19): siRNA sense strand
caaacucgcacaaccauga

SEQ ID NO: 481005 - RNA, 19 nt, Homo sapiens
  misc_RNA (1)...(19): siRNA sense strand
uggacaaggucgagacauu

SEQ ID NO: 481006 - RNA, 19 nt, Homo sapiens
  misc_RNA (1)...(19): siRNA sense strand
gcagaccuacagcaaguuu

SEQ ID NO: 481007 - RNA, 19 nt, Homo sapiens
  misc_RNA (1)...(19): siRNA sense strand
ggacugggcagauccucaa

SEQ ID NO: 481008 - RNA, 19 nt, Homo sapiens
  misc_RNA (1)...(19): siRNA sense strand
ggacaaggucgagacauuc

SEQ ID NO: 481009 - RNA, 19 nt, Homo sapiens
  misc_RNA (1)...(19): siRNA sense strand
aagcagaccuacagcaagu

SEQ ID NO: 481010 - RNA, 19 nt, Homo sapiens
  misc_RNA (1)...(19): siRNA sense strand
acgcacugcucaagaacua

SEQ ID NO: 481011 - RNA, 19 nt, Homo sapiens
  misc_RNA (1)...(19): siRNA sense strand
gggcugcucuacugcuuca

SEQ ID NO: 481012 - RNA, 19 nt, Homo sapiens
  misc_RNA (1)...(19): siRNA sense strand
ucaagcagaccuacagcaa

SEQ ID NO: 481013 - RNA, 19 nt, Homo sapiens
  misc_RNA (1)...(19): siRNA sense strand
gaacuacgggcugcucuac

SEQ ID NO: 481014 - RNA, 19 nt, Homo sapiens
  misc_RNA (1)...(19): siRNA sense strand
agaccuacagcaaguuuga

SEQ ID NO: 481015 - RNA, 19 nt, Homo sapiens
  misc_RNA (1)...(19): siRNA sense strand
ucaggaaggacauggacaa

SEQ ID NO: 481016 - RNA, 19 nt, Homo sapiens
  misc_RNA (1)...(19): siRNA sense strand
augacgcacugcucaagaa

SEQ ID NO: 481017 - RNA, 19 nt, Homo sapiens
  misc_RNA (1)...(19): siRNA sense strand
acuacgggcugcucuacug

SEQ ID NO: 481018 - RNA, 19 nt, Homo sapiens
  misc_RNA (1)...(19): siRNA sense strand
cuacagcaaguuugacaca

SEQ ID NO: 481019 - RNA, 19 nt, Homo sapiens
  misc_RNA (1)...(19): siRNA sense strand
gcagaccuacagcaaguuu

SEQ ID NO: 481020 - RNA, 19 nt, Homo sapiens
  misc_RNA (1)...(19): siRNA sense strand
ggacugggcagauccucaa

SEQ ID NO: 481021 - RNA, 19 nt, Homo sapiens
  misc_RNA (1)...(19): siRNA sense strand
aagcagaccuacagcaagu

SEQ ID NO: 481022 - RNA, 19 nt, Homo sapiens
  misc_RNA (1)...(19): siRNA sense strand
ucaagcagaccuacagcaa

SEQ ID NO: 481023 - RNA, 19 nt, Homo sapiens
  misc_RNA (1)...(19): siRNA sense strand
agaccuacagcaaguuuga

SEQ ID NO: 481024 - RNA, 19 nt, Homo sapiens
  misc_RNA (1)...(19): siRNA sense strand
ggaaggacauggacaaggu

SEQ ID NO: 481025 - RNA, 19 nt, Homo sapiens
  misc_RNA (1)...(19): siRNA sense strand
caaacucgcacaaccauga

SEQ ID NO: 481026 - RNA, 19 nt, Homo sapiens
  misc_RNA (1)...(19): siRNA sense strand
uggacaaggucgagacauu

SEQ ID NO: 481027 - RNA, 19 nt, Homo sapiens
  misc_RNA (1)...(19): siRNA sense strand
gcagaccuacagcaaguuu

SEQ ID NO: 481028 - RNA, 19 nt, Homo sapiens
  misc_RNA (1)...(19): siRNA sense strand
ggacugggcagauccucaa

SEQ ID NO: 481029 - RNA, 19 nt, Homo sapiens
  misc_RNA (1)...(19): siRNA sense strand
ggacaaggucgagacauuc

SEQ ID NO: 481030 - RNA, 19 nt, Homo sapiens
  misc_RNA (1)...(19): siRNA sense strand
aagcagaccuacagcaagu

SEQ ID NO: 481031 - RNA, 19 nt, Homo sapiens
  misc_RNA (1)...(19): siRNA sense strand
acgcacugcucaagaacua

SEQ ID NO: 481032 - RNA, 19 nt, Homo sapiens
  misc_RNA (1)...(19): siRNA sense strand
gggcugcucuacugcuuca

SEQ ID NO: 481033 - RNA, 19 nt, Homo sapiens
  misc_RNA (1)...(19): siRNA sense strand
ucaagcagaccuacagcaa

SEQ ID NO: 481034 - RNA, 19 nt, Homo sapiens
  misc_RNA (1)...(19): siRNA sense strand
gaacuacgggcugcucuac

SEQ ID NO: 481035 - RNA, 19 nt, Homo sapiens
  misc_RNA (1)...(19): siRNA sense strand
agaccuacagcaaguuuga

SEQ ID NO: 481036 - RNA, 19 nt, Homo sapiens
  misc_RNA (1)...(19): siRNA sense strand
ucaggaaggacauggacaa

SEQ ID NO: 481037 - RNA, 19 nt, Homo sapiens
  misc_RNA (1)...(19): siRNA sense strand
augacgcacugcucaagaa

SEQ ID NO: 481038 - RNA, 19 nt, Homo sapiens
  misc_RNA (1)...(19): siRNA sense strand
acuacgggcugcucuacug

SEQ ID NO: 481039 - RNA, 19 nt, Homo sapiens
  misc_RNA (1)...(19): siRNA sense strand
cuacagcaaguuugacaca

SEQ ID NO: 481040 - RNA, 19 nt, Homo sapiens
  misc_RNA (1)...(19): siRNA sense strand
gcagaccuacagcaaguuu

SEQ ID NO: 481041 - RNA, 19 nt, Homo sapiens
  misc_RNA (1)...(19): siRNA sense strand
ggacugggcagauccucaa

SEQ ID NO: 481042 - RNA, 19 nt, Homo sapiens
  misc_RNA (1)...(19): siRNA sense strand
aagcagaccuacagcaagu

SEQ ID NO: 481043 - RNA, 19 nt, Homo sapiens
  misc_RNA (1)...(19): siRNA sense strand
ucaagcagaccuacagcaa

SEQ ID NO: 481044 - RNA, 19 nt, Homo sapiens
  misc_RNA (1)...(19): siRNA sense strand
agaccuacagcaaguuuga

SEQ ID NO: 481045 - RNA, 19 nt, Homo sapiens
  misc_RNA (1)...(19): siRNA sense strand
ggaaggacauggacaaggu

SEQ ID NO: 481046 - RNA, 19 nt, Homo sapiens
  misc_RNA (1)...(19): siRNA sense strand
caaacucgcacaaccauga

SEQ ID NO: 481047 - RNA, 19 nt, Homo sapiens
  misc_RNA (1)...(19): siRNA sense strand
uggacaaggucgagacauu

SEQ ID NO: 481048 - RNA, 19 nt, Homo sapiens
  misc_RNA (1)...(19): siRNA sense strand
gcagaccuacagcaaguuu

SEQ ID NO: 481049 - RNA, 19 nt, Homo sapiens
  misc_RNA (1)...(19): siRNA sense strand
ggacugggcagauccucaa

SEQ ID NO: 481050 - RNA, 19 nt, Homo sapiens
  misc_RNA (1)...(19): siRNA sense strand
ggacaaggucgagacauuc

SEQ ID NO: 481051 - RNA, 19 nt, Homo sapiens
  misc_RNA (1)...(19): siRNA sense strand
aagcagaccuacagcaagu

SEQ ID NO: 481052 - RNA, 19 nt, Homo sapiens
  misc_RNA (1)...(19): siRNA sense strand
acgcacugcucaagaacua

SEQ ID NO: 481053 - RNA, 19 nt, Homo sapiens
  misc_RNA (1)...(19): siRNA sense strand
gggcugcucuacugcuuca

SEQ ID NO: 481054 - RNA, 19 nt, Homo sapiens
  misc_RNA (1)...(19): siRNA sense strand
ucaagcagaccuacagcaa

SEQ ID NO: 481055 - RNA, 19 nt, Homo sapiens
  misc_RNA (1)...(19): siRNA sense strand
gaacuacgggcugcucuac

SEQ ID NO: 481056 - RNA, 19 nt, Homo sapiens
  misc_RNA (1)...(19): siRNA sense strand
agaccuacagcaaguuuga

SEQ ID NO: 481057 - RNA, 19 nt, Homo sapiens
  misc_RNA (1)...(19): siRNA sense strand
ucaggaaggacauggacaa

SEQ ID NO: 481058 - RNA, 19 nt, Homo sapiens
  misc_RNA (1)...(19): siRNA sense strand
augacgcacugcucaagaa

SEQ ID NO: 481059 - RNA, 19 nt, Homo sapiens
  misc_RNA (1)...(19): siRNA sense strand
acuacgggcugcucuacug

SEQ ID NO: 481060 - RNA, 19 nt, Homo sapiens
  misc_RNA (1)...(19): siRNA sense strand
cuacagcaaguuugacaca

SEQ ID NO: 481061 - RNA, 19 nt, Homo sapiens
  misc_RNA (1)...(19): siRNA sense strand
gcagaccuacagcaaguuu

SEQ ID NO: 481062 - RNA, 19 nt, Homo sapiens
  misc_RNA (1)...(19): siRNA sense strand
ggacugggcagauccucaa

SEQ ID NO: 481063 - RNA, 19 nt, Homo sapiens
  misc_RNA (1)...(19): siRNA sense strand
aagcagaccuacagcaagu

SEQ ID NO: 481064 - RNA, 19 nt, Homo sapiens
  misc_RNA (1)...(19): siRNA sense strand
ucaagcagaccuacagcaa

SEQ ID NO: 481065 - RNA, 19 nt, Homo sapiens
  misc_RNA (1)...(19): siRNA sense strand
agaccuacagcaaguuuga

SEQ ID NO: 481066 - RNA, 19 nt, Homo sapiens
  misc_RNA (1)...(19): siRNA sense strand
ggaaggacauggacaaggu

SEQ ID NO: 481067 - RNA, 19 nt, Homo sapiens
  misc_RNA (1)...(19): siRNA sense strand
caaacucgcacaaccauga

SEQ ID NO: 481068 - RNA, 19 nt, Homo sapiens
  misc_RNA (1)...(19): siRNA sense strand
uggacaaggucgagacauu

SEQ ID NO: 481069 - RNA, 19 nt, Homo sapiens
  misc_RNA (1)...(19): siRNA sense strand
gcagaccuacagcaaguuu

SEQ ID NO: 481070 - RNA, 19 nt, Homo sapiens
  misc_RNA (1)...(19): siRNA sense strand
ggacugggcagauccucaa

SEQ ID NO: 481071 - RNA, 19 nt, Homo sapiens
  misc_RNA (1)...(19): siRNA sense strand
ggacaaggucgagacauuc

SEQ ID NO: 481072 - RNA, 19 nt, Homo sapiens
  misc_RNA (1)...(19): siRNA sense strand
aagcagaccuacagcaagu

SEQ ID NO: 481073 - RNA, 19 nt, Homo sapiens
  misc_RNA (1)...(19): siRNA sense strand
acgcacugcucaagaacua

SEQ ID NO: 481074 - RNA, 19 nt, Homo sapiens
  misc_RNA (1)...(19): siRNA sense strand
gggcugcucuacugcuuca

SEQ ID NO: 481075 - RNA, 19 nt, Homo sapiens
  misc_RNA (1)...(19): siRNA sense strand
ucaagcagaccuacagcaa

SEQ ID NO: 481076 - RNA, 19 nt, Homo sapiens
  misc_RNA (1)...(19): siRNA sense strand
gaacuacgggcugcucuac

SEQ ID NO: 481077 - RNA, 19 nt, Homo sapiens
  misc_RNA (1)...(19): siRNA sense strand
agaccuacagcaaguuuga

SEQ ID NO: 481078 - RNA, 19 nt, Homo sapiens
  misc_RNA (1)...(19): siRNA sense strand
ucaggaaggacauggacaa

SEQ ID NO: 481079 - RNA, 19 nt, Homo sapiens
  misc_RNA (1)...(19): siRNA sense strand
augacgcacugcucaagaa

SEQ ID NO: 481080 - RNA, 19 nt, Homo sapiens
  misc_RNA (1)...(19): siRNA sense strand
acuacgggcugcucuacug

SEQ ID NO: 481081 - RNA, 19 nt, Homo sapiens
  misc_RNA (1)...(19): siRNA sense strand
cuacagcaaguuugacaca

SEQ ID NO: 481082 - RNA, 19 nt, Homo sapiens
  misc_RNA (1)...(19): siRNA sense strand
gcagaccuacagcaaguuu

SEQ ID NO: 481083 - RNA, 19 nt, Homo sapiens
  misc_RNA (1)...(19): siRNA sense strand
ggacugggcagauccucaa

SEQ ID NO: 481084 - RNA, 19 nt, Homo sapiens
  misc_RNA (1)...(19): siRNA sense strand
aagcagaccuacagcaagu

SEQ ID NO: 481085 - RNA, 19 nt, Homo sapiens
  misc_RNA (1)...(19): siRNA sense strand
ucaagcagaccuacagcaa

SEQ ID NO: 481086 - RNA, 19 nt, Homo sapiens
  misc_RNA (1)...(19): siRNA sense strand
agaccuacagcaaguuuga

SEQ ID NO: 481087 - RNA, 19 nt, Homo sapiens
  misc_RNA (1)...(19): siRNA sense strand
ggaaggacauggacaaggu

SEQ ID NO: 481088 - RNA, 19 nt, Homo sapiens
  misc_RNA (1)...(19): siRNA sense strand
caaacucgcacaaccauga

SEQ ID NO: 481089 - RNA, 19 nt, Homo sapiens
  misc_RNA (1)...(19): siRNA sense strand
uggacaaggucgagacauu

SEQ ID NO: 481090 - RNA, 19 nt, Homo sapiens
  misc_RNA (1)...(19): siRNA sense strand
gcagaccuacagcaaguuu

SEQ ID NO: 481091 - RNA, 19 nt, Homo sapiens
  misc_RNA (1)...(19): siRNA sense strand
ggacugggcagauccucaa

SEQ ID NO: 481092 - RNA, 19 nt, Homo sapiens
  misc_RNA (1)...(19): siRNA sense strand
ggacaaggucgagacauuc

SEQ ID NO: 481093 - RNA, 19 nt, Homo sapiens
  misc_RNA (1)...(19): siRNA sense strand
aagcagaccuacagcaagu

SEQ ID NO: 481094 - RNA, 19 nt, Homo sapiens
  misc_RNA (1)...(19): siRNA sense strand
acgcacugcucaagaacua

SEQ ID NO: 481095 - RNA, 19 nt, Homo sapiens
  misc_RNA (1)...(19): siRNA sense strand
gggcugcucuacugcuuca

SEQ ID NO: 481096 - RNA, 19 nt, Homo sapiens
  misc_RNA (1)...(19): siRNA sense strand
ucaagcagaccuacagcaa

SEQ ID NO: 481097 - RNA, 19 nt, Homo sapiens
  misc_RNA (1)...(19): siRNA sense strand
gaacuacgggcugcucuac

SEQ ID NO: 481098 - RNA, 19 nt, Homo sapiens
  misc_RNA (1)...(19): siRNA sense strand
agaccuacagcaaguuuga

SEQ ID NO: 481099 - RNA, 19 nt, Homo sapiens
  misc_RNA (1)...(19): siRNA sense strand
ucaggaaggacauggacaa

SEQ ID NO: 481100 - RNA, 19 nt, Homo sapiens
  misc_RNA (1)...(19): siRNA sense strand
augacgcacugcucaagaa

SEQ ID NO: 481101 - RNA, 19 nt, Homo sapiens
  misc_RNA (1)...(19): siRNA sense strand
acuacgggcugcucuacug

SEQ ID NO: 481102 - RNA, 19 nt, Homo sapiens
  misc_RNA (1)...(19): siRNA sense strand
cuacagcaaguuugacaca

SEQ ID NO: 481103 - RNA, 19 nt, Homo sapiens
  misc_RNA (1)...(19): siRNA sense strand
gcagaccuacagcaaguuu

SEQ ID NO: 481104 - RNA, 19 nt, Homo sapiens
  misc_RNA (1)...(19): siRNA sense strand
ggacugggcagauccucaa

SEQ ID NO: 481105 - RNA, 19 nt, Homo sapiens
  misc_RNA (1)...(19): siRNA sense strand
aagcagaccuacagcaagu

SEQ ID NO: 481106 - RNA, 19 nt, Homo sapiens
  misc_RNA (1)...(19): siRNA sense strand
ucaagcagaccuacagcaa

SEQ ID NO: 481107 - RNA, 19 nt, Homo sapiens
  misc_RNA (1)...(19): siRNA sense strand
agaccuacagcaaguuuga

SEQ ID NO: 481108 - RNA, 19 nt, Homo sapiens
  misc_RNA (1)...(19): siRNA sense strand
ggaaggacauggacaaggu

SEQ ID NO: 481109 - RNA, 19 nt, Homo sapiens
  misc_RNA (1)...(19): siRNA sense strand
caaacucacacaaccauga

SEQ ID NO: 481110 - RNA, 19 nt, Homo sapiens
  misc_RNA (1)...(19): siRNA sense strand
uggacaaggucgagacauu

SEQ ID NO: 481111 - RNA, 19 nt, Homo sapiens
  misc_RNA (1)...(19): siRNA sense strand
gcagaccuacagcaaguuu

SEQ ID NO: 481112 - RNA, 19 nt, Homo sapiens
  misc_RNA (1)...(19): siRNA sense strand
ggacugggcagauccucaa

SEQ ID NO: 481113 - RNA, 19 nt, Homo sapiens
  misc_RNA (1)...(19): siRNA sense strand
gaggguagcuguggcuucu

SEQ ID NO: 481114 - RNA, 19 nt, Homo sapiens
  misc_RNA (1)...(19): siRNA sense strand
ggacaaggucgagacauuc

SEQ ID NO: 481115 - RNA, 19 nt, Homo sapiens
  misc_RNA (1)...(19): siRNA sense strand
aagcagaccuacagcaagu

SEQ ID NO: 481116 - RNA, 19 nt, Homo sapiens
  misc_RNA (1)...(19): siRNA sense strand
acgcacugcucaagaacua

SEQ ID NO: 481117 - RNA, 19 nt, Homo sapiens
  misc_RNA (1)...(19): siRNA sense strand
gggcugcucuacugcuuca

SEQ ID NO: 481118 - RNA, 19 nt, Homo sapiens
  misc_RNA (1)...(19): siRNA sense strand
ggguagcuguggcuucuag

SEQ ID NO: 481119 - RNA, 19 nt, Homo sapiens
  misc_RNA (1)...(19): siRNA sense strand
ucaagcagaccuacagcaa

SEQ ID NO: 481120 - RNA, 19 nt, Homo sapiens
  misc_RNA (1)...(19): siRNA sense strand
gaacuacgggcugcucuac

SEQ ID NO: 481121 - RNA, 19 nt, Homo sapiens
  misc_RNA (1)...(19): siRNA sense strand
gugcagugccgcucuguag

SEQ ID NO: 481122 - RNA, 19 nt, Homo sapiens
  misc_RNA (1)...(19): siRNA sense strand
ucaggaaggacauggacaa

SEQ ID NO: 481123 - RNA, 19 nt, Homo sapiens
  misc_RNA (1)...(19): siRNA sense strand
agaccuacagcaaguuuga

SEQ ID NO: 481124 - RNA, 19 nt, Homo sapiens
  misc_RNA (1)...(19): siRNA sense strand
ugacacaaacucacacaac

SEQ ID NO: 481125 - RNA, 19 nt, Homo sapiens
  misc_RNA (1)...(19): siRNA sense strand
augacgcacugcucaagaa

SEQ ID NO: 481126 - RNA, 19 nt, Homo sapiens
  misc_RNA (1)...(19): siRNA sense strand
acuacgggcugcucuacug

SEQ ID NO: 481127 - RNA, 19 nt, Homo sapiens
  misc_RNA (1)...(19): siRNA sense strand
cuacagcaaguuugacaca

SEQ ID NO: 481128 - RNA, 19 nt, Homo sapiens
  misc_RNA (1)...(19): siRNA sense strand
ggaaggacauggacaaggu

SEQ ID NO: 481129 - RNA, 19 nt, Homo sapiens
  misc_RNA (1)...(19): siRNA sense strand
caaacucacacaaccauga

SEQ ID NO: 481130 - RNA, 19 nt, Homo sapiens
  misc_RNA (1)...(19): siRNA sense strand
uggacaaggucgagacauu

SEQ ID NO: 481131 - RNA, 19 nt, Homo sapiens
  misc_RNA (1)...(19): siRNA sense strand
gcagaccuacagcaaguuu

SEQ ID NO: 481132 - RNA, 19 nt, Homo sapiens
  misc_RNA (1)...(19): siRNA sense strand
ggacugggcagauccucaa

SEQ ID NO: 481133 - RNA, 19 nt, Homo sapiens
  misc_RNA (1)...(19): siRNA sense strand
gaggguagcuguggcuucu

SEQ ID NO: 481134 - RNA, 19 nt, Homo sapiens
  misc_RNA (1)...(19): siRNA sense strand
ggacaaggucgagacauuc

SEQ ID NO: 481135 - RNA, 19 nt, Homo sapiens
  misc_RNA (1)...(19): siRNA sense strand
aagcagaccuacagcaagu

SEQ ID NO: 481136 - RNA, 19 nt, Homo sapiens
  misc_RNA (1)...(19): siRNA sense strand
acgcacugcucaagaacua

SEQ ID NO: 481137 - RNA, 19 nt, Homo sapiens
  misc_RNA (1)...(19): siRNA sense strand
gggcugcucuacugcuuca

SEQ ID NO: 481138 - RNA, 19 nt, Homo sapiens
  misc_RNA (1)...(19): siRNA sense strand
ggguagcuguggcuucuag

SEQ ID NO: 481139 - RNA, 19 nt, Homo sapiens
  misc_RNA (1)...(19): siRNA sense strand
ucaagcagaccuacagcaa

SEQ ID NO: 481140 - RNA, 19 nt, Homo sapiens
  misc_RNA (1)...(19): siRNA sense strand
gaacuacgggcugcucuac

SEQ ID NO: 481141 - RNA, 19 nt, Homo sapiens
  misc_RNA (1)...(19): siRNA sense strand
gugcagugccgcucuguag

SEQ ID NO: 481142 - RNA, 19 nt, Homo sapiens
  misc_RNA (1)...(19): siRNA sense strand
ucaggaaggacauggacaa

SEQ ID NO: 481143 - RNA, 19 nt, Homo sapiens
  misc_RNA (1)...(19): siRNA sense strand
agaccuacagcaaguuuga

SEQ ID NO: 481144 - RNA, 19 nt, Homo sapiens
  misc_RNA (1)...(19): siRNA sense strand
ugacacaaacucacacaac

SEQ ID NO: 481145 - RNA, 19 nt, Homo sapiens
  misc_RNA (1)...(19): siRNA sense strand
augacgcacugcucaagaa

SEQ ID NO: 481146 - RNA, 19 nt, Homo sapiens
  misc_RNA (1)...(19): siRNA sense strand
acuacgggcugcucuacug

SEQ ID NO: 481147 - RNA, 19 nt, Homo sapiens
  misc_RNA (1)...(19): siRNA sense strand
cuacagcaaguuugacaca

SEQ ID NO: 481148 - RNA, 19 nt, Homo sapiens
  misc_RNA (1)...(19): siRNA sense strand
ggacugggcagauccucaa

SEQ ID NO: 481149 - RNA, 19 nt, Homo sapiens
  misc_RNA (1)...(19): siRNA sense strand
aagcagaccuacagcaagu

SEQ ID NO: 481150 - RNA, 19 nt, Homo sapiens
  misc_RNA (1)...(19): siRNA sense strand
ucaagcagaccuacagcaa

SEQ ID NO: 481151 - RNA, 19 nt, Homo sapiens
  misc_RNA (1)...(19): siRNA sense strand
ggaaggacauggacaaggu

SEQ ID NO: 481152 - RNA, 19 nt, Homo sapiens
  misc_RNA (1)...(19): siRNA sense strand
caaacucacacaaccauga

SEQ ID NO: 481153 - RNA, 19 nt, Homo sapiens
  misc_RNA (1)...(19): siRNA sense strand
uggacaaggucgagacauu

SEQ ID NO: 481154 - RNA, 19 nt, Homo sapiens
  misc_RNA (1)...(19): siRNA sense strand
gcagaccuacagcaaguuu

SEQ ID NO: 481155 - RNA, 19 nt, Homo sapiens
  misc_RNA (1)...(19): siRNA sense strand
ggacugggcagauccucaa

SEQ ID NO: 481156 - RNA, 19 nt, Homo sapiens
  misc_RNA (1)...(19): siRNA sense strand
gaggguagcuguggcuucu

SEQ ID NO: 481157 - RNA, 19 nt, Homo sapiens
  misc_RNA (1)...(19): siRNA sense strand
ggacaaggucgagacauuc

SEQ ID NO: 481158 - RNA, 19 nt, Homo sapiens
  misc_RNA (1)...(19): siRNA sense strand
aagcagaccuacagcaagu

SEQ ID NO: 481159 - RNA, 19 nt, Homo sapiens
  misc_RNA (1)...(19): siRNA sense strand
acgcacugcucaagaacua

SEQ ID NO: 481160 - RNA, 19 nt, Homo sapiens
  misc_RNA (1)...(19): siRNA sense strand
gggcugcucuacugcuuca

SEQ ID NO: 481161 - RNA, 19 nt, Homo sapiens
  misc_RNA (1)...(19): siRNA sense strand
ggguagcuguggcuucuag

SEQ ID NO: 481162 - RNA, 19 nt, Homo sapiens
  misc_RNA (1)...(19): siRNA sense strand
ucaagcagaccuacagcaa

SEQ ID NO: 481163 - RNA, 19 nt, Homo sapiens
  misc_RNA (1)...(19): siRNA sense strand
gaacuacgggcugcucuac

SEQ ID NO: 481164 - RNA, 19 nt, Homo sapiens
  misc_RNA (1)...(19): siRNA sense strand
gugcagugccgcucuguag

SEQ ID NO: 481165 - RNA, 19 nt, Homo sapiens
  misc_RNA (1)...(19): siRNA sense strand
ucaggaaggacauggacaa

SEQ ID NO: 481166 - RNA, 19 nt, Homo sapiens
  misc_RNA (1)...(19): siRNA sense strand
agaccuacagcaaguuuga

SEQ ID NO: 481167 - RNA, 19 nt, Homo sapiens
  misc_RNA (1)...(19): siRNA sense strand
ugacacaaacucacacaac

SEQ ID NO: 481168 - RNA, 19 nt, Homo sapiens
  misc_RNA (1)...(19): siRNA sense strand
augacgcacugcucaagaa

SEQ ID NO: 481169 - RNA, 19 nt, Homo sapiens
  misc_RNA (1)...(19): siRNA sense strand
acuacgggcugcucuacug

SEQ ID NO: 481170 - RNA, 19 nt, Homo sapiens
  misc_RNA (1)...(19): siRNA sense strand
cuacagcaaguuugacaca

SEQ ID NO: 481171 - RNA, 19 nt, Homo sapiens
  misc_RNA (1)...(19): siRNA sense strand
ggaaggacauggacaaggu

SEQ ID NO: 481172 - RNA, 19 nt, Homo sapiens
  misc_RNA (1)...(19): siRNA sense strand
caaacucacacaaccauga

SEQ ID NO: 481173 - RNA, 19 nt, Homo sapiens
  misc_RNA (1)...(19): siRNA sense strand
uggacaaggucgagacauu

SEQ ID NO: 481174 - RNA, 19 nt, Homo sapiens
  misc_RNA (1)...(19): siRNA sense strand
gcagaccuacagcaaguuu

SEQ ID NO: 481175 - RNA, 19 nt, Homo sapiens
  misc_RNA (1)...(19): siRNA sense strand
ggacugggcagauccucaa

SEQ ID NO: 481176 - RNA, 19 nt, Homo sapiens
  misc_RNA (1)...(19): siRNA sense strand
gaggguagcuguggcuucu

SEQ ID NO: 481177 - RNA, 19 nt, Homo sapiens
  misc_RNA (1)...(19): siRNA sense strand
ggacaaggucgagacauuc

SEQ ID NO: 481178 - RNA, 19 nt, Homo sapiens
  misc_RNA (1)...(19): siRNA sense strand
aagcagaccuacagcaagu

SEQ ID NO: 481179 - RNA, 19 nt, Homo sapiens
  misc_RNA (1)...(19): siRNA sense strand
acgcacugcucaagaacua

SEQ ID NO: 481180 - RNA, 19 nt, Homo sapiens
  misc_RNA (1)...(19): siRNA sense strand
gggcugcucuacugcuuca

SEQ ID NO: 481181 - RNA, 19 nt, Homo sapiens
  misc_RNA (1)...(19): siRNA sense strand
ggguagcuguggcuucuag

SEQ ID NO: 481182 - RNA, 19 nt, Homo sapiens
  misc_RNA (1)...(19): siRNA sense strand
ucaagcagaccuacagcaa

SEQ ID NO: 481183 - RNA, 19 nt, Homo sapiens
  misc_RNA (1)...(19): siRNA sense strand
gaacuacgggcugcucuac

SEQ ID NO: 481184 - RNA, 19 nt, Homo sapiens
  misc_RNA (1)...(19): siRNA sense strand
gugcagugccgcucuguag

SEQ ID NO: 481185 - RNA, 19 nt, Homo sapiens
  misc_RNA (1)...(19): siRNA sense strand
ucaggaaggacauggacaa

SEQ ID NO: 481186 - RNA, 19 nt, Homo sapiens
  misc_RNA (1)...(19): siRNA sense strand
agaccuacagcaaguuuga

SEQ ID NO: 481187 - RNA, 19 nt, Homo sapiens
  misc_RNA (1)...(19): siRNA sense strand
ugacacaaacucacacaac

SEQ ID NO: 481188 - RNA, 19 nt, Homo sapiens
  misc_RNA (1)...(19): siRNA sense strand
augacgcacugcucaagaa

SEQ ID NO: 481189 - RNA, 19 nt, Homo sapiens
  misc_RNA (1)...(19): siRNA sense strand
acuacgggcugcucuacug

SEQ ID NO: 481190 - RNA, 19 nt, Homo sapiens
  misc_RNA (1)...(19): siRNA sense strand
cuacagcaaguuugacaca

SEQ ID NO: 481191 - RNA, 19 nt, Homo sapiens
  misc_RNA (1)...(19): siRNA sense strand
ggacugggcagauccucaa

SEQ ID NO: 481192 - RNA, 19 nt, Homo sapiens
  misc_RNA (1)...(19): siRNA sense strand
aagcagaccuacagcaagu

SEQ ID NO: 481193 - RNA, 19 nt, Homo sapiens
  misc_RNA (1)...(19): siRNA sense strand
ucaagcagaccuacagcaa

SEQ ID NO: 481194 - RNA, 19 nt, Homo sapiens
  misc_RNA (1)...(19): siRNA sense strand
ggaaggacauggacaaggu

SEQ ID NO: 481195 - RNA, 19 nt, Homo sapiens
  misc_RNA (1)...(19): siRNA sense strand
caaacucacacaaccauga

SEQ ID NO: 481196 - RNA, 19 nt, Homo sapiens
  misc_RNA (1)...(19): siRNA sense strand
uggacaaggucgagacauu

SEQ ID NO: 481197 - RNA, 19 nt, Homo sapiens
  misc_RNA (1)...(19): siRNA sense strand
gcagaccuacagcaaguuu

SEQ ID NO: 481198 - RNA, 19 nt, Homo sapiens
  misc_RNA (1)...(19): siRNA sense strand
ggacugggcagauccucaa

SEQ ID NO: 481199 - RNA, 19 nt, Homo sapiens
  misc_RNA (1)...(19): siRNA sense strand
gaggguagcuguggcuucu

SEQ ID NO: 481200 - RNA, 19 nt, Homo sapiens
  misc_RNA (1)...(19): siRNA sense strand
ggacaaggucgagacauuc

SEQ ID NO: 481201 - RNA, 19 nt, Homo sapiens
  misc_RNA (1)...(19): siRNA sense strand
aagcagaccuacagcaagu

SEQ ID NO: 481202 - RNA, 19 nt, Homo sapiens
  misc_RNA (1)...(19): siRNA sense strand
acgcacugcucaagaacua

SEQ ID NO: 481203 - RNA, 19 nt, Homo sapiens
  misc_RNA (1)...(19): siRNA sense strand
gggcugcucuacugcuuca

SEQ ID NO: 481204 - RNA, 19 nt, Homo sapiens
  misc_RNA (1)...(19): siRNA sense strand
ggguagcuguggcuucuag

SEQ ID NO: 481205 - RNA, 19 nt, Homo sapiens
  misc_RNA (1)...(19): siRNA sense strand
ucaagcagaccuacagcaa

SEQ ID NO: 481206 - RNA, 19 nt, Homo sapiens
  misc_RNA (1)...(19): siRNA sense strand
gaacuacgggcugcucuac

SEQ ID NO: 481207 - RNA, 19 nt, Homo sapiens
  misc_RNA (1)...(19): siRNA sense strand
gugcagugccgcucuguag

SEQ ID NO: 481208 - RNA, 19 nt, Homo sapiens
  misc_RNA (1)...(19): siRNA sense strand
ucaggaaggacauggacaa

SEQ ID NO: 481209 - RNA, 19 nt, Homo sapiens
  misc_RNA (1)...(19): siRNA sense strand
agaccuacagcaaguuuga

SEQ ID NO: 481210 - RNA, 19 nt, Homo sapiens
  misc_RNA (1)...(19): siRNA sense strand
ugacacaaacucacacaac

SEQ ID NO: 481211 - RNA, 19 nt, Homo sapiens
  misc_RNA (1)...(19): siRNA sense strand
augacgcacugcucaagaa

SEQ ID NO: 481212 - RNA, 19 nt, Homo sapiens
  misc_RNA (1)...(19): siRNA sense strand
acuacgggcugcucuacug

SEQ ID NO: 481213 - RNA, 19 nt, Homo sapiens
  misc_RNA (1)...(19): siRNA sense strand
cuacagcaaguuugacaca

SEQ ID NO: 481214 - RNA, 19 nt, Homo sapiens
  misc_RNA (1)...(19): siRNA sense strand
ggaaggacauggacaaggu

SEQ ID NO: 481215 - RNA, 19 nt, Homo sapiens
  misc_RNA (1)...(19): siRNA sense strand
caaacucacacaaccauga

SEQ ID NO: 481216 - RNA, 19 nt, Homo sapiens
  misc_RNA (1)...(19): siRNA sense strand
uggacaaggucgagacauu

SEQ ID NO: 481217 - RNA, 19 nt, Homo sapiens
  misc_RNA (1)...(19): siRNA sense strand
gcagaccuacagcaaguuu

SEQ ID NO: 481218 - RNA, 19 nt, Homo sapiens
  misc_RNA (1)...(19): siRNA sense strand
ggacugggcagauccucaa

SEQ ID NO: 481219 - RNA, 19 nt, Homo sapiens
  misc_RNA (1)...(19): siRNA sense strand
gaggguagcuguggcuucu

SEQ ID NO: 481220 - RNA, 19 nt, Homo sapiens
  misc_RNA (1)...(19): siRNA sense strand
ggacaaggucgagacauuc

SEQ ID NO: 481221 - RNA, 19 nt, Homo sapiens
  misc_RNA (1)...(19): siRNA sense strand
aagcagaccuacagcaagu

SEQ ID NO: 481222 - RNA, 19 nt, Homo sapiens
  misc_RNA (1)...(19): siRNA sense strand
acgcacugcucaagaacua

SEQ ID NO: 481223 - RNA, 19 nt, Homo sapiens
  misc_RNA (1)...(19): siRNA sense strand
gggcugcucuacugcuuca

SEQ ID NO: 481224 - RNA, 19 nt, Homo sapiens
  misc_RNA (1)...(19): siRNA sense strand
ggguagcuguggcuucuag

SEQ ID NO: 481225 - RNA, 19 nt, Homo sapiens
  misc_RNA (1)...(19): siRNA sense strand
ucaagcagaccuacagcaa

SEQ ID NO: 481226 - RNA, 19 nt, Homo sapiens
  misc_RNA (1)...(19): siRNA sense strand
gaacuacgggcugcucuac

SEQ ID NO: 481227 - RNA, 19 nt, Homo sapiens
  misc_RNA (1)...(19): siRNA sense strand
gugcagugccgcucuguag

SEQ ID NO: 481228 - RNA, 19 nt, Homo sapiens
  misc_RNA (1)...(19): siRNA sense strand
ucaggaaggacauggacaa

SEQ ID NO: 481229 - RNA, 19 nt, Homo sapiens
  misc_RNA (1)...(19): siRNA sense strand
agaccuacagcaaguuuga

SEQ ID NO: 481230 - RNA, 19 nt, Homo sapiens
  misc_RNA (1)...(19): siRNA sense strand
ugacacaaacucacacaac

SEQ ID NO: 481231 - RNA, 19 nt, Homo sapiens
  misc_RNA (1)...(19): siRNA sense strand
augacgcacugcucaagaa

SEQ ID NO: 481232 - RNA, 19 nt, Homo sapiens
  misc_RNA (1)...(19): siRNA sense strand
acuacgggcugcucuacug

SEQ ID NO: 481233 - RNA, 19 nt, Homo sapiens
  misc_RNA (1)...(19): siRNA sense strand
cuacagcaaguuugacaca

SEQ ID NO: 481234 - RNA, 19 nt, Homo sapiens
  misc_RNA (1)...(19): siRNA sense strand
ggacugggcagauccucaa

SEQ ID NO: 481235 - RNA, 19 nt, Homo sapiens
  misc_RNA (1)...(19): siRNA sense strand
aagcagaccuacagcaagu

SEQ ID NO: 481236 - RNA, 19 nt, Homo sapiens
  misc_RNA (1)...(19): siRNA sense strand
ucaagcagaccuacagcaa

SEQ ID NO: 481237 - RNA, 19 nt, Homo sapiens
  misc_RNA (1)...(19): siRNA sense strand
gaacaacccuggcuucaug

SEQ ID NO: 481238 - RNA, 19 nt, Homo sapiens
  misc_RNA (1)...(19): siRNA sense strand
gagcauggcuucgaaccua

SEQ ID NO: 481239 - RNA, 19 nt, Homo sapiens
  misc_RNA (1)...(19): siRNA sense strand
gaaacgagcagaugaaagu

SEQ ID NO: 481240 - RNA, 19 nt, Homo sapiens
  misc_RNA (1)...(19): siRNA sense strand
gaaggaaacgagcagauga

SEQ ID NO: 481241 - RNA, 19 nt, Homo sapiens
  misc_RNA (1)...(19): siRNA sense strand
gcagaacccagaguugaua

SEQ ID NO: 481242 - RNA, 19 nt, Homo sapiens
  misc_RNA (1)...(19): siRNA sense strand
ggccguggcuuacuacaag

SEQ ID NO: 481243 - RNA, 19 nt, Homo sapiens
  misc_RNA (1)...(19): siRNA sense strand
caaguccaaccucaagaua

SEQ ID NO: 481244 - RNA, 19 nt, Homo sapiens
  misc_RNA (1)...(19): siRNA sense strand
gaaaagccaucgagcucaa

SEQ ID NO: 481245 - RNA, 19 nt, Homo sapiens
  misc_RNA (1)...(19): siRNA sense strand
cuucgaaccuaaugaacaa

SEQ ID NO: 481246 - RNA, 19 nt, Homo sapiens
  misc_RNA (1)...(19): siRNA sense strand
cagccaacgccgucuauuu

SEQ ID NO: 481247 - RNA, 19 nt, Homo sapiens
  misc_RNA (1)...(19): siRNA sense strand
acagcaaacucggcaacua

SEQ ID NO: 481248 - RNA, 19 nt, Homo sapiens
  misc_RNA (1)...(19): siRNA sense strand
caagauagcggagcugaag

SEQ ID NO: 481249 - RNA, 19 nt, Homo sapiens
  misc_RNA (1)...(19): siRNA sense strand
cagcagaacccagaguuga

SEQ ID NO: 481250 - RNA, 19 nt, Homo sapiens
  misc_RNA (1)...(19): siRNA sense strand
gguagaagacagugaccuu

SEQ ID NO: 481251 - RNA, 19 nt, Homo sapiens
  misc_RNA (1)...(19): siRNA sense strand
aagcugccgugcauuucua

SEQ ID NO: 481252 - RNA, 19 nt, Homo sapiens
  misc_RNA (1)...(19): siRNA sense strand
uggaggccguggcuuacua

SEQ ID NO: 481253 - RNA, 19 nt, Homo sapiens
  misc_RNA (1)...(19): siRNA sense strand
gcagcagaacccagaguug

SEQ ID NO: 481254 - RNA, 19 nt, Homo sapiens
  misc_RNA (1)...(19): siRNA sense strand
gcaguuugcccagcagaug

SEQ ID NO: 481255 - RNA, 19 nt, Homo sapiens
  misc_RNA (1)...(19): siRNA sense strand
gagcagaugaaaguggaaa

SEQ ID NO: 481256 - RNA, 19 nt, Homo sapiens
  misc_RNA (1)...(19): siRNA sense strand
cgaaggaaacgagcagaug

SEQ ID NO: 481257 - RNA, 19 nt, Homo sapiens
  misc_RNA (1)...(19): siRNA sense strand
ggaaacgagcagaugaaag

SEQ ID NO: 481258 - RNA, 19 nt, Homo sapiens
  misc_RNA (1)...(19): siRNA sense strand
gaagcugccgugcauuucu

SEQ ID NO: 481259 - RNA, 19 nt, Homo sapiens
  misc_RNA (1)...(19): siRNA sense strand
ccaacgccgucuauuucug

SEQ ID NO: 481260 - RNA, 19 nt, Homo sapiens
  misc_RNA (1)...(19): siRNA sense strand
agacucugccggagauauu

SEQ ID NO: 481261 - RNA, 19 nt, Homo sapiens
  misc_RNA (1)...(19): siRNA sense strand
gaacccagaguugauagag

SEQ ID NO: 481262 - RNA, 19 nt, Homo sapiens
  misc_RNA (1)...(19): siRNA sense strand
cgacaacgagacauacaag

SEQ ID NO: 481263 - RNA, 19 nt, Homo sapiens
  misc_RNA (1)...(19): siRNA sense strand
ccuacgccaucauccaguu

SEQ ID NO: 481264 - RNA, 19 nt, Homo sapiens
  misc_RNA (1)...(19): siRNA sense strand
gaccuugcgcucccucaga

SEQ ID NO: 481265 - RNA, 19 nt, Homo sapiens
  misc_RNA (1)...(19): siRNA sense strand
cagcaaacucggcaacuac

SEQ ID NO: 481266 - RNA, 19 nt, Homo sapiens
  misc_RNA (1)...(19): siRNA sense strand
uugaagcugccgugcauuu

SEQ ID NO: 481267 - RNA, 19 nt, Homo sapiens
  misc_RNA (1)...(19): siRNA sense strand
gauuucggguggcaacaac

SEQ ID NO: 481268 - RNA, 19 nt, Homo sapiens
  misc_RNA (1)...(19): siRNA sense strand
gcuucgaaccuaaugaaca

SEQ ID NO: 481269 - RNA, 19 nt, Homo sapiens
  misc_RNA (1)...(19): siRNA sense strand
ucuccagccucaacaagca

SEQ ID NO: 481270 - RNA, 19 nt, Homo sapiens
  misc_RNA (1)...(19): siRNA sense strand
agccaacgccgucuauuuc

SEQ ID NO: 481271 - RNA, 19 nt, Homo sapiens
  misc_RNA (1)...(19): siRNA sense strand
gaagguacgugcauuacuu

SEQ ID NO: 481272 - RNA, 19 nt, Homo sapiens
  misc_RNA (1)...(19): siRNA sense strand
gcaacuaccugcuguucaa

SEQ ID NO: 481273 - RNA, 19 nt, Homo sapiens
  misc_RNA (1)...(19): siRNA sense strand
gaaagaaaguggaugaaaa

SEQ ID NO: 481274 - RNA, 19 nt, Homo sapiens
  misc_RNA (1)...(19): siRNA sense strand
gcaaugugcucuucaucaa

SEQ ID NO: 481275 - RNA, 19 nt, Homo sapiens
  misc_RNA (1)...(19): siRNA sense strand
ggagacaucuugcugaagu

SEQ ID NO: 481276 - RNA, 19 nt, Homo sapiens
  misc_RNA (1)...(19): siRNA sense strand
gaagcuccaugccaaggua

SEQ ID NO: 481277 - RNA, 19 nt, Homo sapiens
  misc_RNA (1)...(19): siRNA sense strand
acagaugaaucgaaagaua

SEQ ID NO: 481278 - RNA, 19 nt, Homo sapiens
  misc_RNA (1)...(19): siRNA sense strand
guacacaucuggcaucuac

SEQ ID NO: 481279 - RNA, 19 nt, Homo sapiens
  misc_RNA (1)...(19): siRNA sense strand
caaugaagcgguucuauga

SEQ ID NO: 481280 - RNA, 19 nt, Homo sapiens
  misc_RNA (1)...(19): siRNA sense strand
gaugggagccuguaugcua

SEQ ID NO: 481281 - RNA, 19 nt, Homo sapiens
  misc_RNA (1)...(19): siRNA sense strand
gaaaguggaugaaaacaga

SEQ ID NO: 481282 - RNA, 19 nt, Homo sapiens
  misc_RNA (1)...(19): siRNA sense strand
gaugaucgauuuccagagu

SEQ ID NO: 481283 - RNA, 19 nt, Homo sapiens
  misc_RNA (1)...(19): siRNA sense strand
caaagaagguacgugcauu

SEQ ID NO: 481284 - RNA, 19 nt, Homo sapiens
  misc_RNA (1)...(19): siRNA sense strand
gggcuaaagugaaguuugu

SEQ ID NO: 481285 - RNA, 19 nt, Homo sapiens
  misc_RNA (1)...(19): siRNA sense strand
uuacucaccuuaugacuau

SEQ ID NO: 481286 - RNA, 19 nt, Homo sapiens
  misc_RNA (1)...(19): siRNA sense strand
ggaaagaaaguggaugaaa

SEQ ID NO: 481287 - RNA, 19 nt, Homo sapiens
  misc_RNA (1)...(19): siRNA sense strand
uaaccaggauuuccauuca

SEQ ID NO: 481288 - RNA, 19 nt, Homo sapiens
  misc_RNA (1)...(19): siRNA sense strand
gaggagccauugaauuuag

SEQ ID NO: 481289 - RNA, 19 nt, Homo sapiens
  misc_RNA (1)...(19): siRNA sense strand
gcaagcuggucauuccaaa

SEQ ID NO: 481290 - RNA, 19 nt, Homo sapiens
  misc_RNA (1)...(19): siRNA sense strand
gaaucacucugacugacaa

SEQ ID NO: 481291 - RNA, 19 nt, Homo sapiens
  misc_RNA (1)...(19): siRNA sense strand
gagcgugucuguggacuau

SEQ ID NO: 481292 - RNA, 19 nt, Homo sapiens
  misc_RNA (1)...(19): siRNA sense strand
ggcacuggcuuccauggua

SEQ ID NO: 481293 - RNA, 19 nt, Homo sapiens
  misc_RNA (1)...(19): siRNA sense strand
ggaggagccauugaauuua

SEQ ID NO: 481294 - RNA, 19 nt, Homo sapiens
  misc_RNA (1)...(19): siRNA sense strand
ggagcuauguggagucugu

SEQ ID NO: 481295 - RNA, 19 nt, Homo sapiens
  misc_RNA (1)...(19): siRNA sense strand
gcaaugaagcgguucuaug

SEQ ID NO: 481296 - RNA, 19 nt, Homo sapiens
  misc_RNA (1)...(19): siRNA sense strand
gcgugucuguggacuauaa

SEQ ID NO: 481297 - RNA, 19 nt, Homo sapiens
  misc_RNA (1)...(19): siRNA sense strand
caccaucguucacuucaaa

SEQ ID NO: 481298 - RNA, 19 nt, Homo sapiens
  misc_RNA (1)...(19): siRNA sense strand
gauaagauugugcccauug

SEQ ID NO: 481299 - RNA, 19 nt, Homo sapiens
  misc_RNA (1)...(19): siRNA sense strand
guacgugcauuacuucagu

SEQ ID NO: 481300 - RNA, 19 nt, Homo sapiens
  misc_RNA (1)...(19): siRNA sense strand
aaagaagguacgugcauua

SEQ ID NO: 481301 - RNA, 19 nt, Homo sapiens
  misc_RNA (1)...(19): siRNA sense strand
ggccagccaucccaaagaa

SEQ ID NO: 481302 - RNA, 19 nt, Homo sapiens
  misc_RNA (1)...(19): siRNA sense strand
gaucggagacccacacugu

SEQ ID NO: 481303 - RNA, 19 nt, Homo sapiens
  misc_RNA (1)...(19): siRNA sense strand
ggaccuugaugaugcuuuc

SEQ ID NO: 481304 - RNA, 19 nt, Homo sapiens
  misc_RNA (1)...(19): siRNA sense strand
caucaacucuguggacaug

SEQ ID NO: 481305 - RNA, 19 nt, Homo sapiens
  misc_RNA (1)...(19): siRNA sense strand
ccacaggaguuaccagaag

SEQ ID NO: 481306 - RNA, 19 nt, Homo sapiens
  misc_RNA (1)...(19): siRNA sense strand
gcauggagcaccuggagaa

SEQ ID NO: 481307 - RNA, 19 nt, Homo sapiens
  misc_RNA (1)...(19): siRNA sense strand
guuccgcucucaauccuuu

SEQ ID NO: 481308 - RNA, 19 nt, Homo sapiens
  misc_RNA (1)...(19): siRNA sense strand
gcacagccaaugaggagaa

SEQ ID NO: 481309 - RNA, 19 nt, Homo sapiens
  misc_RNA (1)...(19): siRNA sense strand
gaggaggagccauugaauu

SEQ ID NO: 481310 - RNA, 19 nt, Homo sapiens
  misc_RNA (1)...(19): siRNA sense strand
gaaacuaccagagcucuuc

SEQ ID NO: 481311 - RNA, 19 nt, Homo sapiens
  misc_RNA (1)...(19): siRNA sense strand
ggccagugauggacaguau

SEQ ID NO: 481312 - RNA, 19 nt, Homo sapiens
  misc_RNA (1)...(19): siRNA sense strand
aggaggagccauugaauuu

SEQ ID NO: 481313 - RNA, 19 nt, Homo sapiens
  misc_RNA (1)...(19): siRNA sense strand
gaguugucaucgcggcuua

SEQ ID NO: 481314 - RNA, 19 nt, Homo sapiens
  misc_RNA (1)...(19): siRNA sense strand
ccacagaugaaucgaaaga

SEQ ID NO: 481315 - RNA, 19 nt, Homo sapiens
  misc_RNA (1)...(19): siRNA sense strand
gcaggaaagagcccacuug

SEQ ID NO: 481316 - RNA, 19 nt, Homo sapiens
  misc_RNA (1)...(19): siRNA sense strand
gcugaguggcuuuggcuua

SEQ ID NO: 481317 - RNA, 19 nt, Homo sapiens
  misc_RNA (1)...(19): siRNA sense strand
augcuaaggugaagaagaa

SEQ ID NO: 481318 - RNA, 19 nt, Homo sapiens
  misc_RNA (1)...(19): siRNA sense strand
caaagaugaucgauuucca

SEQ ID NO: 481319 - RNA, 19 nt, Homo sapiens
  misc_RNA (1)...(19): siRNA sense strand
ccacuacccucucaacacu

SEQ ID NO: 481320 - RNA, 19 nt, Homo sapiens
  misc_RNA (1)...(19): siRNA sense strand
acuacucacuucagcauuu

SEQ ID NO: 481321 - RNA, 19 nt, Homo sapiens
  misc_RNA (1)...(19): siRNA sense strand
gaagcaaggcgccauguac

SEQ ID NO: 481322 - RNA, 19 nt, Homo sapiens
  misc_RNA (1)...(19): siRNA sense strand
ccaacggucuggacaaguc

SEQ ID NO: 481323 - RNA, 19 nt, Homo sapiens
  misc_RNA (1)...(19): siRNA sense strand
caucgaaacacucaauaug

SEQ ID NO: 481324 - RNA, 19 nt, Homo sapiens
  misc_RNA (1)...(19): siRNA sense strand
caaccaucaugcagcagaa

SEQ ID NO: 481325 - RNA, 19 nt, Homo sapiens
  misc_RNA (1)...(19): siRNA sense strand
ggaaaccgaggcaggauag

SEQ ID NO: 481326 - RNA, 19 nt, Homo sapiens
  misc_RNA (1)...(19): siRNA sense strand
caacgccugccaccucuuu

SEQ ID NO: 481327 - RNA, 19 nt, Homo sapiens
  misc_RNA (1)...(19): siRNA sense strand
caacuaugccaccaucaau

SEQ ID NO: 481328 - RNA, 19 nt, Homo sapiens
  misc_RNA (1)...(19): siRNA sense strand
ggucuuacucaccuuauga

SEQ ID NO: 481329 - RNA, 19 nt, Homo sapiens
  misc_RNA (1)...(19): siRNA sense strand
gggccucucuggagucugu

SEQ ID NO: 481330 - RNA, 19 nt, Homo sapiens
  misc_RNA (1)...(19): siRNA sense strand
gaagugcuaccacaagaag

SEQ ID NO: 481331 - RNA, 19 nt, Homo sapiens
  misc_RNA (1)...(19): siRNA sense strand
ggauaagauugugcccauu

SEQ ID NO: 481332 - RNA, 19 nt, Homo sapiens
  misc_RNA (1)...(19): siRNA sense strand
ugacugacaaccagagaaa

SEQ ID NO: 481333 - RNA, 19 nt, Homo sapiens
  misc_RNA (1)...(19): siRNA sense strand
ccagagaagcgaaggaugu

SEQ ID NO: 481334 - RNA, 19 nt, Homo sapiens
  misc_RNA (1)...(19): siRNA sense strand
gagcggagaccugacauca

SEQ ID NO: 481335 - RNA, 19 nt, Homo sapiens
  misc_RNA (1)...(19): siRNA sense strand
ccacaggccaucucuaaag

SEQ ID NO: 481336 - RNA, 19 nt, Homo sapiens
  misc_RNA (1)...(19): siRNA sense strand
ccagaggagucaagcucaa

SEQ ID NO: 481337 - RNA, 19 nt, Homo sapiens
  misc_RNA (1)...(19): siRNA sense strand
ggaccgguuugcaaugaag

SEQ ID NO: 481338 - RNA, 19 nt, Homo sapiens
  misc_RNA (1)...(19): siRNA sense strand
gaccugacaucacgaagcu

SEQ ID NO: 481339 - RNA, 19 nt, Homo sapiens
  misc_RNA (1)...(19): siRNA sense strand
cguacgggcuggccaugaa

SEQ ID NO: 481340 - RNA, 19 nt, Homo sapiens
  misc_RNA (1)...(19): siRNA sense strand
acaccagccuugccagaga

SEQ ID NO: 481341 - RNA, 19 nt, Homo sapiens
  misc_RNA (1)...(19): siRNA sense strand
ggacuccuacgacaacuuc

SEQ ID NO: 481342 - RNA, 19 nt, Homo sapiens
  misc_RNA (1)...(19): siRNA sense strand
gggaaaccgaggcaggaua

SEQ ID NO: 481343 - RNA, 19 nt, Homo sapiens
  misc_RNA (1)...(19): siRNA sense strand
caggaaagaaaguggauga

SEQ ID NO: 481344 - RNA, 19 nt, Homo sapiens
  misc_RNA (1)...(19): siRNA sense strand
ccacuuggagagucuugua

SEQ ID NO: 481345 - RNA, 19 nt, Homo sapiens
  misc_RNA (1)...(19): siRNA sense strand
caucuggcaucuacaacau

SEQ ID NO: 481346 - RNA, 19 nt, Homo sapiens
  misc_RNA (1)...(19): siRNA sense strand
guuaaugccacacguccua

SEQ ID NO: 481347 - RNA, 19 nt, Homo sapiens
  misc_RNA (1)...(19): siRNA sense strand
cacaggaguuaccagaaga

SEQ ID NO: 481348 - RNA, 19 nt, Homo sapiens
  misc_RNA (1)...(19): siRNA sense strand
ggccauuucuccgcaucua

SEQ ID NO: 481349 - RNA, 19 nt, Homo sapiens
  misc_RNA (1)...(19): siRNA sense strand
gaagccacauccccucgua

SEQ ID NO: 481350 - RNA, 19 nt, Homo sapiens
  misc_RNA (1)...(19): siRNA sense strand
ccagugauggacaguauga

SEQ ID NO: 481351 - RNA, 19 nt, Homo sapiens
  misc_RNA (1)...(19): siRNA sense strand
ggaaucacucugacugaca

SEQ ID NO: 481352 - RNA, 19 nt, Homo sapiens
  misc_RNA (1)...(19): siRNA sense strand
ggaccggcauguggccuau

SEQ ID NO: 481353 - RNA, 19 nt, Homo sapiens
  misc_RNA (1)...(19): siRNA sense strand
gcaggggucuaccagguuu

SEQ ID NO: 481354 - RNA, 19 nt, Homo sapiens
  misc_RNA (1)...(19): siRNA sense strand
cagcggacauccuguugca

SEQ ID NO: 481355 - RNA, 19 nt, Homo sapiens
  misc_RNA (1)...(19): siRNA sense strand
gcucuccggcuccaucaaa

SEQ ID NO: 481356 - RNA, 19 nt, Homo sapiens
  misc_RNA (1)...(19): siRNA sense strand
ucuccaaggucaugcugaa

SEQ ID NO: 481357 - RNA, 19 nt, Homo sapiens
  misc_RNA (1)...(19): siRNA sense strand
ccucugccaucgucaacuu

SEQ ID NO: 481358 - RNA, 19 nt, Homo sapiens
  misc_RNA (1)...(19): siRNA sense strand
gcccagggaaucacucuga

SEQ ID NO: 481359 - RNA, 19 nt, Homo sapiens
  misc_RNA (1)...(19): siRNA sense strand
cagaggaggagccauugaa

SEQ ID NO: 481360 - RNA, 19 nt, Homo sapiens
  misc_RNA (1)...(19): siRNA sense strand
caacuucagugggcaucga

SEQ ID NO: 481361 - RNA, 19 nt, Homo sapiens
  misc_RNA (1)...(19): siRNA sense strand
ggacacauggcucaaugca

SEQ ID NO: 481362 - RNA, 19 nt, Homo sapiens
  misc_RNA (1)...(19): siRNA sense strand
cugaagugcuaccacaaga

SEQ ID NO: 481363 - RNA, 19 nt, Homo sapiens
  misc_RNA (1)...(19): siRNA sense strand
gcucuggaccgguuugcaa

SEQ ID NO: 481364 - RNA, 19 nt, Homo sapiens
  misc_RNA (1)...(19): siRNA sense strand
ucucuaaagccacaucuga

SEQ ID NO: 481365 - RNA, 19 nt, Homo sapiens
  misc_RNA (1)...(19): siRNA sense strand
ucaacucuguggacaugga

SEQ ID NO: 481366 - RNA, 19 nt, Homo sapiens
  misc_RNA (1)...(19): siRNA sense strand
ccucugcucucaccaaagg

SEQ ID NO: 481367 - RNA, 19 nt, Homo sapiens
  misc_RNA (1)...(19): siRNA sense strand
gcacuacagcaacauuucu

SEQ ID NO: 481368 - RNA, 19 nt, Homo sapiens
  misc_RNA (1)...(19): siRNA sense strand
caaccuggccuccggucuu

SEQ ID NO: 481369 - RNA, 19 nt, Homo sapiens
  misc_RNA (1)...(19): siRNA sense strand
ccacccagccucuguugga

SEQ ID NO: 481370 - RNA, 19 nt, Homo sapiens
  misc_RNA (1)...(19): siRNA sense strand
caaugcagacccucacaau

SEQ ID NO: 481371 - RNA, 19 nt, Homo sapiens
  misc_RNA (1)...(19): siRNA sense strand
gaaagagcaugaugacaua

SEQ ID NO: 481372 - RNA, 19 nt, Homo sapiens
  misc_RNA (1)...(19): siRNA sense strand
gaacagcucugaaagcauu

SEQ ID NO: 481373 - RNA, 19 nt, Homo sapiens
  misc_RNA (1)...(19): siRNA sense strand
gagaagauguugaaaugua

SEQ ID NO: 481374 - RNA, 19 nt, Homo sapiens
  misc_RNA (1)...(19): siRNA sense strand
gaggacagcuugaggguua

SEQ ID NO: 481375 - RNA, 19 nt, Homo sapiens
  misc_RNA (1)...(19): siRNA sense strand
gaaacugaauggaagaaua

SEQ ID NO: 481376 - RNA, 19 nt, Homo sapiens
  misc_RNA (1)...(19): siRNA sense strand
aaagaaggcuguaccguua

SEQ ID NO: 481377 - RNA, 19 nt, Homo sapiens
  misc_RNA (1)...(19): siRNA sense strand
aaacacagcucuggaauaa

SEQ ID NO: 481378 - RNA, 19 nt, Homo sapiens
  misc_RNA (1)...(19): siRNA sense strand
gaaauagaacuucgaauga

SEQ ID NO: 481379 - RNA, 19 nt, Homo sapiens
  misc_RNA (1)...(19): siRNA sense strand
gcaaugauguggucuuguu

SEQ ID NO: 481380 - RNA, 19 nt, Homo sapiens
  misc_RNA (1)...(19): siRNA sense strand
gaccauauccuuaaaugua

SEQ ID NO: 481381 - RNA, 19 nt, Homo sapiens
  misc_RNA (1)...(19): siRNA sense strand
gcaaugggaugcagcuauu

SEQ ID NO: 481382 - RNA, 19 nt, Homo sapiens
  misc_RNA (1)...(19): siRNA sense strand
cagcuuaucuugcaaguga

SEQ ID NO: 481383 - RNA, 19 nt, Homo sapiens
  misc_RNA (1)...(19): siRNA sense strand
gaaguuaggcgauuagaga

SEQ ID NO: 481384 - RNA, 19 nt, Homo sapiens
  misc_RNA (1)...(19): siRNA sense strand
gacaaaggcauucaucaua

SEQ ID NO: 481385 - RNA, 19 nt, Homo sapiens
  misc_RNA (1)...(19): siRNA sense strand
gauccaagcuugauuaagg

SEQ ID NO: 481386 - RNA, 19 nt, Homo sapiens
  misc_RNA (1)...(19): siRNA sense strand
ggaagaaaguauuaaacga

SEQ ID NO: 481387 - RNA, 19 nt, Homo sapiens
  misc_RNA (1)...(19): siRNA sense strand
aaacagcucuaaaccauug

SEQ ID NO: 481388 - RNA, 19 nt, Homo sapiens
  misc_RNA (1)...(19): siRNA sense strand
ugacauguauucugaaguu

SEQ ID NO: 481389 - RNA, 19 nt, Homo sapiens
  misc_RNA (1)...(19): siRNA sense strand
gaagaccucaagaaaguua

SEQ ID NO: 481390 - RNA, 19 nt, Homo sapiens
  misc_RNA (1)...(19): siRNA sense strand
gcugaacgcaguauuguua

SEQ ID NO: 481391 - RNA, 19 nt, Homo sapiens
  misc_RNA (1)...(19): siRNA sense strand
gauggugcuuguugacuua

SEQ ID NO: 481392 - RNA, 19 nt, Homo sapiens
  misc_RNA (1)...(19): siRNA sense strand
ggacauccuuucagcaguu

SEQ ID NO: 481393 - RNA, 19 nt, Homo sapiens
  misc_RNA (1)...(19): siRNA sense strand
gaaacacagcucuggaaua

SEQ ID NO: 481394 - RNA, 19 nt, Homo sapiens
  misc_RNA (1)...(19): siRNA sense strand
ggaaauccuucaacaaucu

SEQ ID NO: 481395 - RNA, 19 nt, Homo sapiens
  misc_RNA (1)...(19): siRNA sense strand
gcagauaauugaaggaaag

SEQ ID NO: 481396 - RNA, 19 nt, Homo sapiens
  misc_RNA (1)...(19): siRNA sense strand
ugaaagcauugaagcuaua

SEQ ID NO: 481397 - RNA, 19 nt, Homo sapiens
  misc_RNA (1)...(19): siRNA sense strand
ggaaagagcaugaugacau

SEQ ID NO: 481398 - RNA, 19 nt, Homo sapiens
  misc_RNA (1)...(19): siRNA sense strand
ucacgaagcauuuaucauu

SEQ ID NO: 481399 - RNA, 19 nt, Homo sapiens
  misc_RNA (1)...(19): siRNA sense strand
gcaguucucuucucugaca

SEQ ID NO: 481400 - RNA, 19 nt, Homo sapiens
  misc_RNA (1)...(19): siRNA sense strand
uuaaagagguauuggaaga

SEQ ID NO: 481401 - RNA, 19 nt, Homo sapiens
  misc_RNA (1)...(19): siRNA sense strand
aaacugaaauucucuccaa

SEQ ID NO: 481402 - RNA, 19 nt, Homo sapiens
  misc_RNA (1)...(19): siRNA sense strand
ggcaacaacuuacaaauac

SEQ ID NO: 481403 - RNA, 19 nt, Homo sapiens
  misc_RNA (1)...(19): siRNA sense strand
gaagaccgauccauaucug

SEQ ID NO: 481404 - RNA, 19 nt, Homo sapiens
  misc_RNA (1)...(19): siRNA sense strand
ugaccggaaugaacuauuu

SEQ ID NO: 481405 - RNA, 19 nt, Homo sapiens
  misc_RNA (1)...(19): siRNA sense strand
caaugaaagcuuuagguua

SEQ ID NO: 481406 - RNA, 19 nt, Homo sapiens
  misc_RNA (1)...(19): siRNA sense strand
ggaccuuagugaauauaaa

SEQ ID NO: 481407 - RNA, 19 nt, Homo sapiens
  misc_RNA (1)...(19): siRNA sense strand
ggaaauugaugaguauauc

SEQ ID NO: 481408 - RNA, 19 nt, Homo sapiens
  misc_RNA (1)...(19): siRNA sense strand
cggaagaccucaagaaagu

SEQ ID NO: 481409 - RNA, 19 nt, Homo sapiens
  misc_RNA (1)...(19): siRNA sense strand
gcaucaaguuuauagaaga

SEQ ID NO: 481410 - RNA, 19 nt, Homo sapiens
  misc_RNA (1)...(19): siRNA sense strand
gcacccagcuuaucuugca

SEQ ID NO: 481411 - RNA, 19 nt, Homo sapiens
  misc_RNA (1)...(19): siRNA sense strand
ggaagaaucggacccaaga

SEQ ID NO: 481412 - RNA, 19 nt, Homo sapiens
  misc_RNA (1)...(19): siRNA sense strand
ugaaauccuugaugaaguu

SEQ ID NO: 481413 - RNA, 19 nt, Homo sapiens
  misc_RNA (1)...(19): siRNA sense strand
gcugauaguuucaaagcaa

SEQ ID NO: 481414 - RNA, 19 nt, Homo sapiens
  misc_RNA (1)...(19): siRNA sense strand
gagaccauauccuuaaaug

SEQ ID NO: 481415 - RNA, 19 nt, Homo sapiens
  misc_RNA (1)...(19): siRNA sense strand
uaaagaggccguuaaggaa

SEQ ID NO: 481416 - RNA, 19 nt, Homo sapiens
  misc_RNA (1)...(19): siRNA sense strand
guagauccaagcuugauua

SEQ ID NO: 481417 - RNA, 19 nt, Homo sapiens
  misc_RNA (1)...(19): siRNA sense strand
uggagaagauguugaaaug

SEQ ID NO: 481418 - RNA, 19 nt, Homo sapiens
  misc_RNA (1)...(19): siRNA sense strand
cagcaguucucuucucuga

SEQ ID NO: 481419 - RNA, 19 nt, Homo sapiens
  misc_RNA (1)...(19): siRNA sense strand
gaugacacguucuccaguu

SEQ ID NO: 481420 - RNA, 19 nt, Homo sapiens
  misc_RNA (1)...(19): siRNA sense strand
caaaggcauucaucauaga

SEQ ID NO: 481421 - RNA, 19 nt, Homo sapiens
  misc_RNA (1)...(19): siRNA sense strand
gauaugauaccggaccuua

SEQ ID NO: 481422 - RNA, 19 nt, Homo sapiens
  misc_RNA (1)...(19): siRNA sense strand
gggaugcagcuauuuauuu

SEQ ID NO: 481423 - RNA, 19 nt, Homo sapiens
  misc_RNA (1)...(19): siRNA sense strand
ccaagugacuacaagaaau

SEQ ID NO: 481424 - RNA, 19 nt, Homo sapiens
  misc_RNA (1)...(19): siRNA sense strand
ugauugacauguauucuga

SEQ ID NO: 481425 - RNA, 19 nt, Homo sapiens
  misc_RNA (1)...(19): siRNA sense strand
uaauaaagcaguagagguu

SEQ ID NO: 481426 - RNA, 19 nt, Homo sapiens
  misc_RNA (1)...(19): siRNA sense strand
cauugaagcuauaagagaa

SEQ ID NO: 481427 - RNA, 19 nt, Homo sapiens
  misc_RNA (1)...(19): siRNA sense strand
ggauucagcagauaauuga

SEQ ID NO: 481428 - RNA, 19 nt, Homo sapiens
  misc_RNA (1)...(19): siRNA sense strand
aaacuucgcuaucucauac

SEQ ID NO: 481429 - RNA, 19 nt, Homo sapiens
  misc_RNA (1)...(19): siRNA sense strand
acaaugaaaccaagaauga

SEQ ID NO: 481430 - RNA, 19 nt, Homo sapiens
  misc_RNA (1)...(19): siRNA sense strand
caaauggacccucauggaa

SEQ ID NO: 481431 - RNA, 19 nt, Homo sapiens
  misc_RNA (1)...(19): siRNA sense strand
ugaaauagaacuucgaaug

SEQ ID NO: 481432 - RNA, 19 nt, Homo sapiens
  misc_RNA (1)...(19): siRNA sense strand
uaccggaccuuagugaaua

SEQ ID NO: 481433 - RNA, 19 nt, Homo sapiens
  misc_RNA (1)...(19): siRNA sense strand
gggaacagcucugaaagca

SEQ ID NO: 481434 - RNA, 19 nt, Homo sapiens
  misc_RNA (1)...(19): siRNA sense strand
ugacaaaccuuccuuuacg

SEQ ID NO: 481435 - RNA, 19 nt, Homo sapiens
  misc_RNA (1)...(19): siRNA sense strand
gaacaacaggcugauaguu

SEQ ID NO: 481436 - RNA, 19 nt, Homo sapiens
  misc_RNA (1)...(19): siRNA sense strand
gauguucucucugauuaug

SEQ ID NO: 481437 - RNA, 19 nt, Homo sapiens
  misc_RNA (1)...(19): siRNA sense strand
gcauuuaucauucacauca

SEQ ID NO: 481438 - RNA, 19 nt, Homo sapiens
  misc_RNA (1)...(19): siRNA sense strand
ggaugcagcuauuuauuuu

SEQ ID NO: 481439 - RNA, 19 nt, Homo sapiens
  misc_RNA (1)...(19): siRNA sense strand
gaacuugaccggaaugaac

SEQ ID NO: 481440 - RNA, 19 nt, Homo sapiens
  misc_RNA (1)...(19): siRNA sense strand
ggauggugcuuguugacuu

SEQ ID NO: 481441 - RNA, 19 nt, Homo sapiens
  misc_RNA (1)...(19): siRNA sense strand
acaaaggcauucaucauag

SEQ ID NO: 481442 - RNA, 19 nt, Homo sapiens
  misc_RNA (1)...(19): siRNA sense strand
acacucaguugaaguauca

SEQ ID NO: 481443 - RNA, 19 nt, Homo sapiens
  misc_RNA (1)...(19): siRNA sense strand
gaaagugacaagcauuuua

SEQ ID NO: 481444 - RNA, 19 nt, Homo sapiens
  misc_RNA (1)...(19): siRNA sense strand
gacauugugugggaaauug

SEQ ID NO: 481445 - RNA, 19 nt, Homo sapiens
  misc_RNA (1)...(19): siRNA sense strand
ggaaguuuaccacuacaaa

SEQ ID NO: 481446 - RNA, 19 nt, Homo sapiens
  misc_RNA (1)...(19): siRNA sense strand
gcucgaauauucccaagag

SEQ ID NO: 481447 - RNA, 19 nt, Homo sapiens
  misc_RNA (1)...(19): siRNA sense strand
gaaagaugacaaaggcauu

SEQ ID NO: 481448 - RNA, 19 nt, Homo sapiens
  misc_RNA (1)...(19): siRNA sense strand
uugauguucucucugauua

SEQ ID NO: 481449 - RNA, 19 nt, Homo sapiens
  misc_RNA (1)...(19): siRNA sense strand
aaagagguauuggaagauu

SEQ ID NO: 481450 - RNA, 19 nt, Homo sapiens
  misc_RNA (1)...(19): siRNA sense strand
gggagacccuacaagaaga

SEQ ID NO: 481451 - RNA, 19 nt, Homo sapiens
  misc_RNA (1)...(19): siRNA sense strand
gaauccuaaugccaucaua

SEQ ID NO: 481452 - RNA, 19 nt, Homo sapiens
  misc_RNA (1)...(19): siRNA sense strand
agaagaucuugcagcauua

SEQ ID NO: 481453 - RNA, 19 nt, Homo sapiens
  misc_RNA (1)...(19): siRNA sense strand
caucauagaaagcuuaaga

SEQ ID NO: 481454 - RNA, 19 nt, Homo sapiens
  misc_RNA (1)...(19): siRNA sense strand
gaagaauuuucccgcuuua

SEQ ID NO: 481455 - RNA, 19 nt, Homo sapiens
  misc_RNA (1)...(19): siRNA sense strand
caguggauaucaagcuuaa

SEQ ID NO: 481456 - RNA, 19 nt, Homo sapiens
  misc_RNA (1)...(19): siRNA sense strand
gcauugaagcuauaagaga

SEQ ID NO: 481457 - RNA, 19 nt, Homo sapiens
  misc_RNA (1)...(19): siRNA sense strand
gaaagcucuucccaaugaa

SEQ ID NO: 481458 - RNA, 19 nt, Homo sapiens
  misc_RNA (1)...(19): siRNA sense strand
ugacuuaccaggugugauu

SEQ ID NO: 481459 - RNA, 19 nt, Homo sapiens
  misc_RNA (1)...(19): siRNA sense strand
ggaaaugauugcccaagcu

SEQ ID NO: 481460 - RNA, 19 nt, Homo sapiens
  misc_RNA (1)...(19): siRNA sense strand
acacagcucuggaauaaaa

SEQ ID NO: 481461 - RNA, 19 nt, Homo sapiens
  misc_RNA (1)...(19): siRNA sense strand
ugugggaaauugaugagua

SEQ ID NO: 481462 - RNA, 19 nt, Homo sapiens
  misc_RNA (1)...(19): siRNA sense strand
cuaaaccauuguaaccuuu

SEQ ID NO: 481463 - RNA, 19 nt, Homo sapiens
  misc_RNA (1)...(19): siRNA sense strand
agagcaugaugacauauuu

SEQ ID NO: 481464 - RNA, 19 nt, Homo sapiens
  misc_RNA (1)...(19): siRNA sense strand
caacucaugugauugaaaa

SEQ ID NO: 481465 - RNA, 19 nt, Homo sapiens
  misc_RNA (1)...(19): siRNA sense strand
caagugacuacaagaaauu

SEQ ID NO: 481466 - RNA, 19 nt, Homo sapiens
  misc_RNA (1)...(19): siRNA sense strand
gcuaaaggcacaccaagug

SEQ ID NO: 481467 - RNA, 19 nt, Homo sapiens
  misc_RNA (1)...(19): siRNA sense strand
gagaauaugaagaagaguu

SEQ ID NO: 481468 - RNA, 19 nt, Homo sapiens
  misc_RNA (1)...(19): siRNA sense strand
gcaguauuguuacagacuu

SEQ ID NO: 481469 - RNA, 19 nt, Homo sapiens
  misc_RNA (1)...(19): siRNA sense strand
uggaaagacuaguguguug

SEQ ID NO: 481470 - RNA, 19 nt, Homo sapiens
  misc_RNA (1)...(19): siRNA sense strand
ggagaacaaagaauugaga

SEQ ID NO: 481471 - RNA, 19 nt, Homo sapiens
  misc_RNA (1)...(19): siRNA sense strand
gaaagagcaugaugacaua

SEQ ID NO: 481472 - RNA, 19 nt, Homo sapiens
  misc_RNA (1)...(19): siRNA sense strand
gaacagcucugaaagcauu

SEQ ID NO: 481473 - RNA, 19 nt, Homo sapiens
  misc_RNA (1)...(19): siRNA sense strand
gagaagauguugaaaugua

SEQ ID NO: 481474 - RNA, 19 nt, Homo sapiens
  misc_RNA (1)...(19): siRNA sense strand
gaggacagcuugaggguua

SEQ ID NO: 481475 - RNA, 19 nt, Homo sapiens
  misc_RNA (1)...(19): siRNA sense strand
gaaacugaauggaagaaua

SEQ ID NO: 481476 - RNA, 19 nt, Homo sapiens
  misc_RNA (1)...(19): siRNA sense strand
aaagaaggcuguaccguua

SEQ ID NO: 481477 - RNA, 19 nt, Homo sapiens
  misc_RNA (1)...(19): siRNA sense strand
aaacacagcucuggaauaa

SEQ ID NO: 481478 - RNA, 19 nt, Homo sapiens
  misc_RNA (1)...(19): siRNA sense strand
gaaauagaacuucgaauga

SEQ ID NO: 481479 - RNA, 19 nt, Homo sapiens
  misc_RNA (1)...(19): siRNA sense strand
gcaaugauguggucuuguu

SEQ ID NO: 481480 - RNA, 19 nt, Homo sapiens
  misc_RNA (1)...(19): siRNA sense strand
gaccauauccuuaaaugua

SEQ ID NO: 481481 - RNA, 19 nt, Homo sapiens
  misc_RNA (1)...(19): siRNA sense strand
gcaaugggaugcagcuauu

SEQ ID NO: 481482 - RNA, 19 nt, Homo sapiens
  misc_RNA (1)...(19): siRNA sense strand
cagcuuaucuugcaaguga

SEQ ID NO: 481483 - RNA, 19 nt, Homo sapiens
  misc_RNA (1)...(19): siRNA sense strand
gaaguuaggcgauuagaga

SEQ ID NO: 481484 - RNA, 19 nt, Homo sapiens
  misc_RNA (1)...(19): siRNA sense strand
gacaaaggcauucaucaua

SEQ ID NO: 481485 - RNA, 19 nt, Homo sapiens
  misc_RNA (1)...(19): siRNA sense strand
gauccaagcuugauuaagg

SEQ ID NO: 481486 - RNA, 19 nt, Homo sapiens
  misc_RNA (1)...(19): siRNA sense strand
ggaagaaaguauuaaacga

SEQ ID NO: 481487 - RNA, 19 nt, Homo sapiens
  misc_RNA (1)...(19): siRNA sense strand
aaacagcucuaaaccauug

SEQ ID NO: 481488 - RNA, 19 nt, Homo sapiens
  misc_RNA (1)...(19): siRNA sense strand
ugacauguauucugaaguu

SEQ ID NO: 481489 - RNA, 19 nt, Homo sapiens
  misc_RNA (1)...(19): siRNA sense strand
gaagaccucaagaaaguua

SEQ ID NO: 481490 - RNA, 19 nt, Homo sapiens
  misc_RNA (1)...(19): siRNA sense strand
gcugaacgcaguauuguua

SEQ ID NO: 481491 - RNA, 19 nt, Homo sapiens
  misc_RNA (1)...(19): siRNA sense strand
gauggugcuuguugacuua

SEQ ID NO: 481492 - RNA, 19 nt, Homo sapiens
  misc_RNA (1)...(19): siRNA sense strand
ggacauccuuucagcaguu

SEQ ID NO: 481493 - RNA, 19 nt, Homo sapiens
  misc_RNA (1)...(19): siRNA sense strand
gaaacacagcucuggaaua

SEQ ID NO: 481494 - RNA, 19 nt, Homo sapiens
  misc_RNA (1)...(19): siRNA sense strand
ggaaauccuucaacaaucu

SEQ ID NO: 481495 - RNA, 19 nt, Homo sapiens
  misc_RNA (1)...(19): siRNA sense strand
gcagauaauugaaggaaag

SEQ ID NO: 481496 - RNA, 19 nt, Homo sapiens
  misc_RNA (1)...(19): siRNA sense strand
ugaaagcauugaagcuaua

SEQ ID NO: 481497 - RNA, 19 nt, Homo sapiens
  misc_RNA (1)...(19): siRNA sense strand
ggaaagagcaugaugacau

SEQ ID NO: 481498 - RNA, 19 nt, Homo sapiens
  misc_RNA (1)...(19): siRNA sense strand
ucacgaagcauuuaucauu

SEQ ID NO: 481499 - RNA, 19 nt, Homo sapiens
  misc_RNA (1)...(19): siRNA sense strand
gcaguucucuucucugaca

SEQ ID NO: 481500 - RNA, 19 nt, Homo sapiens
  misc_RNA (1)...(19): siRNA sense strand
uuaaagagguauuggaaga

SEQ ID NO: 481501 - RNA, 19 nt, Homo sapiens
  misc_RNA (1)...(19): siRNA sense strand
aaacugaaauucucuccaa

SEQ ID NO: 481502 - RNA, 19 nt, Homo sapiens
  misc_RNA (1)...(19): siRNA sense strand
ggcaacaacuuacaaauac

SEQ ID NO: 481503 - RNA, 19 nt, Homo sapiens
  misc_RNA (1)...(19): siRNA sense strand
gaagaccgauccauaucug

SEQ ID NO: 481504 - RNA, 19 nt, Homo sapiens
  misc_RNA (1)...(19): siRNA sense strand
ugaccggaaugaacuauuu

SEQ ID NO: 481505 - RNA, 19 nt, Homo sapiens
  misc_RNA (1)...(19): siRNA sense strand
caaugaaagcuuuagguua

SEQ ID NO: 481506 - RNA, 19 nt, Homo sapiens
  misc_RNA (1)...(19): siRNA sense strand
ggaccuuagugaauauaaa

SEQ ID NO: 481507 - RNA, 19 nt, Homo sapiens
  misc_RNA (1)...(19): siRNA sense strand
ggaaauugaugaguauauc

SEQ ID NO: 481508 - RNA, 19 nt, Homo sapiens
  misc_RNA (1)...(19): siRNA sense strand
cggaagaccucaagaaagu

SEQ ID NO: 481509 - RNA, 19 nt, Homo sapiens
  misc_RNA (1)...(19): siRNA sense strand
gcaucaaguuuauagaaga

SEQ ID NO: 481510 - RNA, 19 nt, Homo sapiens
  misc_RNA (1)...(19): siRNA sense strand
gcacccagcuuaucuugca

SEQ ID NO: 481511 - RNA, 19 nt, Homo sapiens
  misc_RNA (1)...(19): siRNA sense strand
ggaagaaucggacccaaga

SEQ ID NO: 481512 - RNA, 19 nt, Homo sapiens
  misc_RNA (1)...(19): siRNA sense strand
ugaaauccuugaugaaguu

SEQ ID NO: 481513 - RNA, 19 nt, Homo sapiens
  misc_RNA (1)...(19): siRNA sense strand
gcugauaguuucaaagcaa

SEQ ID NO: 481514 - RNA, 19 nt, Homo sapiens
  misc_RNA (1)...(19): siRNA sense strand
gagaccauauccuuaaaug

SEQ ID NO: 481515 - RNA, 19 nt, Homo sapiens
  misc_RNA (1)...(19): siRNA sense strand
uaaagaggccguuaaggaa

SEQ ID NO: 481516 - RNA, 19 nt, Homo sapiens
  misc_RNA (1)...(19): siRNA sense strand
guagauccaagcuugauua

SEQ ID NO: 481517 - RNA, 19 nt, Homo sapiens
  misc_RNA (1)...(19): siRNA sense strand
uggagaagauguugaaaug

SEQ ID NO: 481518 - RNA, 19 nt, Homo sapiens
  misc_RNA (1)...(19): siRNA sense strand
cagcaguucucuucucuga

SEQ ID NO: 481519 - RNA, 19 nt, Homo sapiens
  misc_RNA (1)...(19): siRNA sense strand
gaugacacguucuccaguu

SEQ ID NO: 481520 - RNA, 19 nt, Homo sapiens
  misc_RNA (1)...(19): siRNA sense strand
caaaggcauucaucauaga

SEQ ID NO: 481521 - RNA, 19 nt, Homo sapiens
  misc_RNA (1)...(19): siRNA sense strand
gauaugauaccggaccuua

SEQ ID NO: 481522 - RNA, 19 nt, Homo sapiens
  misc_RNA (1)...(19): siRNA sense strand
gggaugcagcuauuuauuu

SEQ ID NO: 481523 - RNA, 19 nt, Homo sapiens
  misc_RNA (1)...(19): siRNA sense strand
ccaagugacuacaagaaau

SEQ ID NO: 481524 - RNA, 19 nt, Homo sapiens
  misc_RNA (1)...(19): siRNA sense strand
ugauugacauguauucuga

SEQ ID NO: 481525 - RNA, 19 nt, Homo sapiens
  misc_RNA (1)...(19): siRNA sense strand
uaauaaagcaguagagguu

SEQ ID NO: 481526 - RNA, 19 nt, Homo sapiens
  misc_RNA (1)...(19): siRNA sense strand
cauugaagcuauaagagaa

SEQ ID NO: 481527 - RNA, 19 nt, Homo sapiens
  misc_RNA (1)...(19): siRNA sense strand
ggauucagcagauaauuga

SEQ ID NO: 481528 - RNA, 19 nt, Homo sapiens
  misc_RNA (1)...(19): siRNA sense strand
aaacuucgcuaucucauac

SEQ ID NO: 481529 - RNA, 19 nt, Homo sapiens
  misc_RNA (1)...(19): siRNA sense strand
acaaugaaaccaagaauga

SEQ ID NO: 481530 - RNA, 19 nt, Homo sapiens
  misc_RNA (1)...(19): siRNA sense strand
caaauggacccucauggaa

SEQ ID NO: 481531 - RNA, 19 nt, Homo sapiens
  misc_RNA (1)...(19): siRNA sense strand
ugaaauagaacuucgaaug

SEQ ID NO: 481532 - RNA, 19 nt, Homo sapiens
  misc_RNA (1)...(19): siRNA sense strand
uaccggaccuuagugaaua

SEQ ID NO: 481533 - RNA, 19 nt, Homo sapiens
  misc_RNA (1)...(19): siRNA sense strand
gggaacagcucugaaagca

SEQ ID NO: 481534 - RNA, 19 nt, Homo sapiens
  misc_RNA (1)...(19): siRNA sense strand
ugacaaaccuuccuuuacg

SEQ ID NO: 481535 - RNA, 19 nt, Homo sapiens
  misc_RNA (1)...(19): siRNA sense strand
gaacaacaggcugauaguu

SEQ ID NO: 481536 - RNA, 19 nt, Homo sapiens
  misc_RNA (1)...(19): siRNA sense strand
gauguucucucugauuaug

SEQ ID NO: 481537 - RNA, 19 nt, Homo sapiens
  misc_RNA (1)...(19): siRNA sense strand
gcauuuaucauucacauca

SEQ ID NO: 481538 - RNA, 19 nt, Homo sapiens
  misc_RNA (1)...(19): siRNA sense strand
ggaugcagcuauuuauuuu

SEQ ID NO: 481539 - RNA, 19 nt, Homo sapiens
  misc_RNA (1)...(19): siRNA sense strand
gaacuugaccggaaugaac

SEQ ID NO: 481540 - RNA, 19 nt, Homo sapiens
  misc_RNA (1)...(19): siRNA sense strand
ggauggugcuuguugacuu

SEQ ID NO: 481541 - RNA, 19 nt, Homo sapiens
  misc_RNA (1)...(19): siRNA sense strand
acaaaggcauucaucauag

SEQ ID NO: 481542 - RNA, 19 nt, Homo sapiens
  misc_RNA (1)...(19): siRNA sense strand
acacucaguugaaguauca

SEQ ID NO: 481543 - RNA, 19 nt, Homo sapiens
  misc_RNA (1)...(19): siRNA sense strand
gaaagugacaagcauuuua

SEQ ID NO: 481544 - RNA, 19 nt, Homo sapiens
  misc_RNA (1)...(19): siRNA sense strand
gacauugugugggaaauug

SEQ ID NO: 481545 - RNA, 19 nt, Homo sapiens
  misc_RNA (1)...(19): siRNA sense strand
ggaaguuuaccacuacaaa

SEQ ID NO: 481546 - RNA, 19 nt, Homo sapiens
  misc_RNA (1)...(19): siRNA sense strand
gcucgaauauucccaagag

SEQ ID NO: 481547 - RNA, 19 nt, Homo sapiens
  misc_RNA (1)...(19): siRNA sense strand
gaaagaugacaaaggcauu

SEQ ID NO: 481548 - RNA, 19 nt, Homo sapiens
  misc_RNA (1)...(19): siRNA sense strand
uugauguucucucugauua

SEQ ID NO: 481549 - RNA, 19 nt, Homo sapiens
  misc_RNA (1)...(19): siRNA sense strand
aaagagguauuggaagauu

SEQ ID NO: 481550 - RNA, 19 nt, Homo sapiens
  misc_RNA (1)...(19): siRNA sense strand
gggagacccuacaagaaga

SEQ ID NO: 481551 - RNA, 19 nt, Homo sapiens
  misc_RNA (1)...(19): siRNA sense strand
gaauccuaaugccaucaua

SEQ ID NO: 481552 - RNA, 19 nt, Homo sapiens
  misc_RNA (1)...(19): siRNA sense strand
agaagaucuugcagcauua

SEQ ID NO: 481553 - RNA, 19 nt, Homo sapiens
  misc_RNA (1)...(19): siRNA sense strand
caucauagaaagcuuaaga

SEQ ID NO: 481554 - RNA, 19 nt, Homo sapiens
  misc_RNA (1)...(19): siRNA sense strand
gaagaauuuucccgcuuua

SEQ ID NO: 481555 - RNA, 19 nt, Homo sapiens
  misc_RNA (1)...(19): siRNA sense strand
caguggauaucaagcuuaa

SEQ ID NO: 481556 - RNA, 19 nt, Homo sapiens
  misc_RNA (1)...(19): siRNA sense strand
gcauugaagcuauaagaga

SEQ ID NO: 481557 - RNA, 19 nt, Homo sapiens
  misc_RNA (1)...(19): siRNA sense strand
gaaagcucuucccaaugaa

SEQ ID NO: 481558 - RNA, 19 nt, Homo sapiens
  misc_RNA (1)...(19): siRNA sense strand
ugacuuaccaggugugauu

SEQ ID NO: 481559 - RNA, 19 nt, Homo sapiens
  misc_RNA (1)...(19): siRNA sense strand
ggaaaugauugcccaagcu

SEQ ID NO: 481560 - RNA, 19 nt, Homo sapiens
  misc_RNA (1)...(19): siRNA sense strand
acacagcucuggaauaaaa

SEQ ID NO: 481561 - RNA, 19 nt, Homo sapiens
  misc_RNA (1)...(19): siRNA sense strand
ugugggaaauugaugagua

SEQ ID NO: 481562 - RNA, 19 nt, Homo sapiens
  misc_RNA (1)...(19): siRNA sense strand
cuaaaccauuguaaccuuu

SEQ ID NO: 481563 - RNA, 19 nt, Homo sapiens
  misc_RNA (1)...(19): siRNA sense strand
agagcaugaugacauauuu

SEQ ID NO: 481564 - RNA, 19 nt, Homo sapiens
  misc_RNA (1)...(19): siRNA sense strand
caacucaugugauugaaaa

SEQ ID NO: 481565 - RNA, 19 nt, Homo sapiens
  misc_RNA (1)...(19): siRNA sense strand
caagugacuacaagaaauu

SEQ ID NO: 481566 - RNA, 19 nt, Homo sapiens
  misc_RNA (1)...(19): siRNA sense strand
gcuaaaggcacaccaagug

SEQ ID NO: 481567 - RNA, 19 nt, Homo sapiens
  misc_RNA (1)...(19): siRNA sense strand
gagaauaugaagaagaguu

SEQ ID NO: 481568 - RNA, 19 nt, Homo sapiens
  misc_RNA (1)...(19): siRNA sense strand
gcaguauuguuacagacuu

SEQ ID NO: 481569 - RNA, 19 nt, Homo sapiens
  misc_RNA (1)...(19): siRNA sense strand
uggaaagacuaguguguug

SEQ ID NO: 481570 - RNA, 19 nt, Homo sapiens
  misc_RNA (1)...(19): siRNA sense strand
ggagaacaaagaauugaga

SEQ ID NO: 481571 - RNA, 19 nt, Homo sapiens
  misc_RNA (1)...(19): siRNA sense strand
gaaagagcaugaugacaua

SEQ ID NO: 481572 - RNA, 19 nt, Homo sapiens
  misc_RNA (1)...(19): siRNA sense strand
gaacagcucugaaagcauu

SEQ ID NO: 481573 - RNA, 19 nt, Homo sapiens
  misc_RNA (1)...(19): siRNA sense strand
gagaagauguugaaaugua

SEQ ID NO: 481574 - RNA, 19 nt, Homo sapiens
  misc_RNA (1)...(19): siRNA sense strand
gaggacagcuugaggguua

SEQ ID NO: 481575 - RNA, 19 nt, Homo sapiens
  misc_RNA (1)...(19): siRNA sense strand
gaaacugaauggaagaaua

SEQ ID NO: 481576 - RNA, 19 nt, Homo sapiens
  misc_RNA (1)...(19): siRNA sense strand
aaagaaggcuguaccguua

SEQ ID NO: 481577 - RNA, 19 nt, Homo sapiens
  misc_RNA (1)...(19): siRNA sense strand
aaacacagcucuggaauaa

SEQ ID NO: 481578 - RNA, 19 nt, Homo sapiens
  misc_RNA (1)...(19): siRNA sense strand
gaaauagaacuucgaauga

SEQ ID NO: 481579 - RNA, 19 nt, Homo sapiens
  misc_RNA (1)...(19): siRNA sense strand
gcaaugauguggucuuguu

SEQ ID NO: 481580 - RNA, 19 nt, Homo sapiens
  misc_RNA (1)...(19): siRNA sense strand
gaccauauccuuaaaugua

SEQ ID NO: 481581 - RNA, 19 nt, Homo sapiens
  misc_RNA (1)...(19): siRNA sense strand
gcaaugggaugcagcuauu

SEQ ID NO: 481582 - RNA, 19 nt, Homo sapiens
  misc_RNA (1)...(19): siRNA sense strand
cagcuuaucuugcaaguga

SEQ ID NO: 481583 - RNA, 19 nt, Homo sapiens
  misc_RNA (1)...(19): siRNA sense strand
gaaguuaggcgauuagaga

SEQ ID NO: 481584 - RNA, 19 nt, Homo sapiens
  misc_RNA (1)...(19): siRNA sense strand
gacaaaggcauucaucaua

SEQ ID NO: 481585 - RNA, 19 nt, Homo sapiens
  misc_RNA (1)...(19): siRNA sense strand
gauccaagcuugauuaagg

SEQ ID NO: 481586 - RNA, 19 nt, Homo sapiens
  misc_RNA (1)...(19): siRNA sense strand
ggaagaaaguauuaaacga

SEQ ID NO: 481587 - RNA, 19 nt, Homo sapiens
  misc_RNA (1)...(19): siRNA sense strand
aaacagcucuaaaccauug

SEQ ID NO: 481588 - RNA, 19 nt, Homo sapiens
  misc_RNA (1)...(19): siRNA sense strand
ugacauguauucugaaguu

SEQ ID NO: 481589 - RNA, 19 nt, Homo sapiens
  misc_RNA (1)...(19): siRNA sense strand
gaagaccucaagaaaguua

SEQ ID NO: 481590 - RNA, 19 nt, Homo sapiens
  misc_RNA (1)...(19): siRNA sense strand
gcugaacgcaguauuguua

SEQ ID NO: 481591 - RNA, 19 nt, Homo sapiens
  misc_RNA (1)...(19): siRNA sense strand
gauggugcuuguugacuua

SEQ ID NO: 481592 - RNA, 19 nt, Homo sapiens
  misc_RNA (1)...(19): siRNA sense strand
ggacauccuuucagcaguu

SEQ ID NO: 481593 - RNA, 19 nt, Homo sapiens
  misc_RNA (1)...(19): siRNA sense strand
gaaacacagcucuggaaua

SEQ ID NO: 481594 - RNA, 19 nt, Homo sapiens
  misc_RNA (1)...(19): siRNA sense strand
ggaaauccuucaacaaucu

SEQ ID NO: 481595 - RNA, 19 nt, Homo sapiens
  misc_RNA (1)...(19): siRNA sense strand
gcagauaauugaaggaaag

SEQ ID NO: 481596 - RNA, 19 nt, Homo sapiens
  misc_RNA (1)...(19): siRNA sense strand
ugaaagcauugaagcuaua

SEQ ID NO: 481597 - RNA, 19 nt, Homo sapiens
  misc_RNA (1)...(19): siRNA sense strand
ggaaagagcaugaugacau

SEQ ID NO: 481598 - RNA, 19 nt, Homo sapiens
  misc_RNA (1)...(19): siRNA sense strand
ucacgaagcauuuaucauu

SEQ ID NO: 481599 - RNA, 19 nt, Homo sapiens
  misc_RNA (1)...(19): siRNA sense strand
gcaguucucuucucugaca

SEQ ID NO: 481600 - RNA, 19 nt, Homo sapiens
  misc_RNA (1)...(19): siRNA sense strand
uuaaagagguauuggaaga

SEQ ID NO: 481601 - RNA, 19 nt, Homo sapiens
  misc_RNA (1)...(19): siRNA sense strand
aaacugaaauucucuccaa

SEQ ID NO: 481602 - RNA, 19 nt, Homo sapiens
  misc_RNA (1)...(19): siRNA sense strand
ggcaacaacuuacaaauac

SEQ ID NO: 481603 - RNA, 19 nt, Homo sapiens
  misc_RNA (1)...(19): siRNA sense strand
gaagaccgauccauaucug

SEQ ID NO: 481604 - RNA, 19 nt, Homo sapiens
  misc_RNA (1)...(19): siRNA sense strand
ugaccggaaugaacuauuu

SEQ ID NO: 481605 - RNA, 19 nt, Homo sapiens
  misc_RNA (1)...(19): siRNA sense strand
caaugaaagcuuuagguua

SEQ ID NO: 481606 - RNA, 19 nt, Homo sapiens
  misc_RNA (1)...(19): siRNA sense strand
ggaccuuagugaauauaaa

SEQ ID NO: 481607 - RNA, 19 nt, Homo sapiens
  misc_RNA (1)...(19): siRNA sense strand
ggaaauugaugaguauauc

SEQ ID NO: 481608 - RNA, 19 nt, Homo sapiens
  misc_RNA (1)...(19): siRNA sense strand
cggaagaccucaagaaagu

SEQ ID NO: 481609 - RNA, 19 nt, Homo sapiens
  misc_RNA (1)...(19): siRNA sense strand
gcaucaaguuuauagaaga

SEQ ID NO: 481610 - RNA, 19 nt, Homo sapiens
  misc_RNA (1)...(19): siRNA sense strand
gcacccagcuuaucuugca

SEQ ID NO: 481611 - RNA, 19 nt, Homo sapiens
  misc_RNA (1)...(19): siRNA sense strand
ggaagaaucggacccaaga

SEQ ID NO: 481612 - RNA, 19 nt, Homo sapiens
  misc_RNA (1)...(19): siRNA sense strand
ugaaauccuugaugaaguu

SEQ ID NO: 481613 - RNA, 19 nt, Homo sapiens
  misc_RNA (1)...(19): siRNA sense strand
gcugauaguuucaaagcaa

SEQ ID NO: 481614 - RNA, 19 nt, Homo sapiens
  misc_RNA (1)...(19): siRNA sense strand
gagaccauauccuuaaaug

SEQ ID NO: 481615 - RNA, 19 nt, Homo sapiens
  misc_RNA (1)...(19): siRNA sense strand
uaaagaggccguuaaggaa

SEQ ID NO: 481616 - RNA, 19 nt, Homo sapiens
  misc_RNA (1)...(19): siRNA sense strand
guagauccaagcuugauua

SEQ ID NO: 481617 - RNA, 19 nt, Homo sapiens
  misc_RNA (1)...(19): siRNA sense strand
uggagaagauguugaaaug

SEQ ID NO: 481618 - RNA, 19 nt, Homo sapiens
  misc_RNA (1)...(19): siRNA sense strand
cagcaguucucuucucuga

SEQ ID NO: 481619 - RNA, 19 nt, Homo sapiens
  misc_RNA (1)...(19): siRNA sense strand
gaugacacguucuccaguu

SEQ ID NO: 481620 - RNA, 19 nt, Homo sapiens
  misc_RNA (1)...(19): siRNA sense strand
caaaggcauucaucauaga

SEQ ID NO: 481621 - RNA, 19 nt, Homo sapiens
  misc_RNA (1)...(19): siRNA sense strand
gauaugauaccggaccuua

SEQ ID NO: 481622 - RNA, 19 nt, Homo sapiens
  misc_RNA (1)...(19): siRNA sense strand
gggaugcagcuauuuauuu

SEQ ID NO: 481623 - RNA, 19 nt, Homo sapiens
  misc_RNA (1)...(19): siRNA sense strand
ccaagugacuacaagaaau

SEQ ID NO: 481624 - RNA, 19 nt, Homo sapiens
  misc_RNA (1)...(19): siRNA sense strand
ugauugacauguauucuga

SEQ ID NO: 481625 - RNA, 19 nt, Homo sapiens
  misc_RNA (1)...(19): siRNA sense strand
uaauaaagcaguagagguu

SEQ ID NO: 481626 - RNA, 19 nt, Homo sapiens
  misc_RNA (1)...(19): siRNA sense strand
cauugaagcuauaagagaa

SEQ ID NO: 481627 - RNA, 19 nt, Homo sapiens
  misc_RNA (1)...(19): siRNA sense strand
ggauucagcagauaauuga

SEQ ID NO: 481628 - RNA, 19 nt, Homo sapiens
  misc_RNA (1)...(19): siRNA sense strand
aaacuucgcuaucucauac

SEQ ID NO: 481629 - RNA, 19 nt, Homo sapiens
  misc_RNA (1)...(19): siRNA sense strand
acaaugaaaccaagaauga

SEQ ID NO: 481630 - RNA, 19 nt, Homo sapiens
  misc_RNA (1)...(19): siRNA sense strand
caaauggacccucauggaa

SEQ ID NO: 481631 - RNA, 19 nt, Homo sapiens
  misc_RNA (1)...(19): siRNA sense strand
ugaaauagaacuucgaaug

SEQ ID NO: 481632 - RNA, 19 nt, Homo sapiens
  misc_RNA (1)...(19): siRNA sense strand
uaccggaccuuagugaaua

SEQ ID NO: 481633 - RNA, 19 nt, Homo sapiens
  misc_RNA (1)...(19): siRNA sense strand
gggaacagcucugaaagca

SEQ ID NO: 481634 - RNA, 19 nt, Homo sapiens
  misc_RNA (1)...(19): siRNA sense strand
ugacaaaccuuccuuuacg

SEQ ID NO: 481635 - RNA, 19 nt, Homo sapiens
  misc_RNA (1)...(19): siRNA sense strand
gaacaacaggcugauaguu

SEQ ID NO: 481636 - RNA, 19 nt, Homo sapiens
  misc_RNA (1)...(19): siRNA sense strand
gauguucucucugauuaug

SEQ ID NO: 481637 - RNA, 19 nt, Homo sapiens
  misc_RNA (1)...(19): siRNA sense strand
gcauuuaucauucacauca

SEQ ID NO: 481638 - RNA, 19 nt, Homo sapiens
  misc_RNA (1)...(19): siRNA sense strand
ggaugcagcuauuuauuuu

SEQ ID NO: 481639 - RNA, 19 nt, Homo sapiens
  misc_RNA (1)...(19): siRNA sense strand
gaacuugaccggaaugaac

SEQ ID NO: 481640 - RNA, 19 nt, Homo sapiens
  misc_RNA (1)...(19): siRNA sense strand
ggauggugcuuguugacuu

SEQ ID NO: 481641 - RNA, 19 nt, Homo sapiens
  misc_RNA (1)...(19): siRNA sense strand
acaaaggcauucaucauag

SEQ ID NO: 481642 - RNA, 19 nt, Homo sapiens
  misc_RNA (1)...(19): siRNA sense strand
acacucaguugaaguauca

SEQ ID NO: 481643 - RNA, 19 nt, Homo sapiens
  misc_RNA (1)...(19): siRNA sense strand
gaaagugacaagcauuuua

SEQ ID NO: 481644 - RNA, 19 nt, Homo sapiens
  misc_RNA (1)...(19): siRNA sense strand
gacauugugugggaaauug

SEQ ID NO: 481645 - RNA, 19 nt, Homo sapiens
  misc_RNA (1)...(19): siRNA sense strand
ggaaguuuaccacuacaaa

SEQ ID NO: 481646 - RNA, 19 nt, Homo sapiens
  misc_RNA (1)...(19): siRNA sense strand
gcucgaauauucccaagag

SEQ ID NO: 481647 - RNA, 19 nt, Homo sapiens
  misc_RNA (1)...(19): siRNA sense strand
gaaagaugacaaaggcauu

SEQ ID NO: 481648 - RNA, 19 nt, Homo sapiens
  misc_RNA (1)...(19): siRNA sense strand
uugauguucucucugauua

SEQ ID NO: 481649 - RNA, 19 nt, Homo sapiens
  misc_RNA (1)...(19): siRNA sense strand
aaagagguauuggaagauu

SEQ ID NO: 481650 - RNA, 19 nt, Homo sapiens
  misc_RNA (1)...(19): siRNA sense strand
gggagacccuacaagaaga

SEQ ID NO: 481651 - RNA, 19 nt, Homo sapiens
  misc_RNA (1)...(19): siRNA sense strand
gaauccuaaugccaucaua

SEQ ID NO: 481652 - RNA, 19 nt, Homo sapiens
  misc_RNA (1)...(19): siRNA sense strand
agaagaucuugcagcauua

SEQ ID NO: 481653 - RNA, 19 nt, Homo sapiens
  misc_RNA (1)...(19): siRNA sense strand
caucauagaaagcuuaaga

SEQ ID NO: 481654 - RNA, 19 nt, Homo sapiens
  misc_RNA (1)...(19): siRNA sense strand
gaagaauuuucccgcuuua

SEQ ID NO: 481655 - RNA, 19 nt, Homo sapiens
  misc_RNA (1)...(19): siRNA sense strand
caguggauaucaagcuuaa

SEQ ID NO: 481656 - RNA, 19 nt, Homo sapiens
  misc_RNA (1)...(19): siRNA sense strand
gcauugaagcuauaagaga

SEQ ID NO: 481657 - RNA, 19 nt, Homo sapiens
  misc_RNA (1)...(19): siRNA sense strand
gaaagcucuucccaaugaa

SEQ ID NO: 481658 - RNA, 19 nt, Homo sapiens
  misc_RNA (1)...(19): siRNA sense strand
ugacuuaccaggugugauu

SEQ ID NO: 481659 - RNA, 19 nt, Homo sapiens
  misc_RNA (1)...(19): siRNA sense strand
ggaaaugauugcccaagcu

SEQ ID NO: 481660 - RNA, 19 nt, Homo sapiens
  misc_RNA (1)...(19): siRNA sense strand
acacagcucuggaauaaaa

SEQ ID NO: 481661 - RNA, 19 nt, Homo sapiens
  misc_RNA (1)...(19): siRNA sense strand
ugugggaaauugaugagua

SEQ ID NO: 481662 - RNA, 19 nt, Homo sapiens
  misc_RNA (1)...(19): siRNA sense strand
cuaaaccauuguaaccuuu

SEQ ID NO: 481663 - RNA, 19 nt, Homo sapiens
  misc_RNA (1)...(19): siRNA sense strand
agagcaugaugacauauuu

SEQ ID NO: 481664 - RNA, 19 nt, Homo sapiens
  misc_RNA (1)...(19): siRNA sense strand
caacucaugugauugaaaa

SEQ ID NO: 481665 - RNA, 19 nt, Homo sapiens
  misc_RNA (1)...(19): siRNA sense strand
caagugacuacaagaaauu

SEQ ID NO: 481666 - RNA, 19 nt, Homo sapiens
  misc_RNA (1)...(19): siRNA sense strand
gcuaaaggcacaccaagug

SEQ ID NO: 481667 - RNA, 19 nt, Homo sapiens
  misc_RNA (1)...(19): siRNA sense strand
gagaauaugaagaagaguu

SEQ ID NO: 481668 - RNA, 19 nt, Homo sapiens
  misc_RNA (1)...(19): siRNA sense strand
gcaguauuguuacagacuu

SEQ ID NO: 481669 - RNA, 19 nt, Homo sapiens
  misc_RNA (1)...(19): siRNA sense strand
uggaaagacuaguguguug

SEQ ID NO: 481670 - RNA, 19 nt, Homo sapiens
  misc_RNA (1)...(19): siRNA sense strand
ggagaacaaagaauugaga

SEQ ID NO: 481671 - RNA, 19 nt, Homo sapiens
  misc_RNA (1)...(19): siRNA sense strand
gaaagagcaugaugacaua

SEQ ID NO: 481672 - RNA, 19 nt, Homo sapiens
  misc_RNA (1)...(19): siRNA sense strand
gaacagcucugaaagcauu

SEQ ID NO: 481673 - RNA, 19 nt, Homo sapiens
  misc_RNA (1)...(19): siRNA sense strand
gagaagauguugaaaugua

SEQ ID NO: 481674 - RNA, 19 nt, Homo sapiens
  misc_RNA (1)...(19): siRNA sense strand
gaggacagcuugaggguua

SEQ ID NO: 481675 - RNA, 19 nt, Homo sapiens
  misc_RNA (1)...(19): siRNA sense strand
gaaacugaauggaagaaua

SEQ ID NO: 481676 - RNA, 19 nt, Homo sapiens
  misc_RNA (1)...(19): siRNA sense strand
aaagaaggcuguaccguua

SEQ ID NO: 481677 - RNA, 19 nt, Homo sapiens
  misc_RNA (1)...(19): siRNA sense strand
aaacacagcucuggaauaa

SEQ ID NO: 481678 - RNA, 19 nt, Homo sapiens
  misc_RNA (1)...(19): siRNA sense strand
gaaauagaacuucgaauga

SEQ ID NO: 481679 - RNA, 19 nt, Homo sapiens
  misc_RNA (1)...(19): siRNA sense strand
gcaaugauguggucuuguu

SEQ ID NO: 481680 - RNA, 19 nt, Homo sapiens
  misc_RNA (1)...(19): siRNA sense strand
gaccauauccuuaaaugua

SEQ ID NO: 481681 - RNA, 19 nt, Homo sapiens
  misc_RNA (1)...(19): siRNA sense strand
gcaaugggaugcagcuauu

SEQ ID NO: 481682 - RNA, 19 nt, Homo sapiens
  misc_RNA (1)...(19): siRNA sense strand
cagcuuaucuugcaaguga

SEQ ID NO: 481683 - RNA, 19 nt, Homo sapiens
  misc_RNA (1)...(19): siRNA sense strand
gaaguuaggcgauuagaga

SEQ ID NO: 481684 - RNA, 19 nt, Homo sapiens
  misc_RNA (1)...(19): siRNA sense strand
gacaaaggcauucaucaua

SEQ ID NO: 481685 - RNA, 19 nt, Homo sapiens
  misc_RNA (1)...(19): siRNA sense strand
gauccaagcuugauuaagg

SEQ ID NO: 481686 - RNA, 19 nt, Homo sapiens
  misc_RNA (1)...(19): siRNA sense strand
ggaagaaaguauuaaacga

SEQ ID NO: 481687 - RNA, 19 nt, Homo sapiens
  misc_RNA (1)...(19): siRNA sense strand
aaacagcucuaaaccauug

SEQ ID NO: 481688 - RNA, 19 nt, Homo sapiens
  misc_RNA (1)...(19): siRNA sense strand
ugacauguauucugaaguu

SEQ ID NO: 481689 - RNA, 19 nt, Homo sapiens
  misc_RNA (1)...(19): siRNA sense strand
gaagaccucaagaaaguua

SEQ ID NO: 481690 - RNA, 19 nt, Homo sapiens
  misc_RNA (1)...(19): siRNA sense strand
gcugaacgcaguauuguua

SEQ ID NO: 481691 - RNA, 19 nt, Homo sapiens
  misc_RNA (1)...(19): siRNA sense strand
gauggugcuuguugacuua

SEQ ID NO: 481692 - RNA, 19 nt, Homo sapiens
  misc_RNA (1)...(19): siRNA sense strand
ggacauccuuucagcaguu

SEQ ID NO: 481693 - RNA, 19 nt, Homo sapiens
  misc_RNA (1)...(19): siRNA sense strand
gaaacacagcucuggaaua

SEQ ID NO: 481694 - RNA, 19 nt, Homo sapiens
  misc_RNA (1)...(19): siRNA sense strand
ggaaauccuucaacaaucu

SEQ ID NO: 481695 - RNA, 19 nt, Homo sapiens
  misc_RNA (1)...(19): siRNA sense strand
gcagauaauugaaggaaag

SEQ ID NO: 481696 - RNA, 19 nt, Homo sapiens
  misc_RNA (1)...(19): siRNA sense strand
ugaaagcauugaagcuaua

SEQ ID NO: 481697 - RNA, 19 nt, Homo sapiens
  misc_RNA (1)...(19): siRNA sense strand
ggaaagagcaugaugacau

SEQ ID NO: 481698 - RNA, 19 nt, Homo sapiens
  misc_RNA (1)...(19): siRNA sense strand
ucacgaagcauuuaucauu

SEQ ID NO: 481699 - RNA, 19 nt, Homo sapiens
  misc_RNA (1)...(19): siRNA sense strand
gcaguucucuucucugaca

SEQ ID NO: 481700 - RNA, 19 nt, Homo sapiens
  misc_RNA (1)...(19): siRNA sense strand
uuaaagagguauuggaaga

SEQ ID NO: 481701 - RNA, 19 nt, Homo sapiens
  misc_RNA (1)...(19): siRNA sense strand
aaacugaaauucucuccaa

SEQ ID NO: 481702 - RNA, 19 nt, Homo sapiens
  misc_RNA (1)...(19): siRNA sense strand
ggcaacaacuuacaaauac

SEQ ID NO: 481703 - RNA, 19 nt, Homo sapiens
  misc_RNA (1)...(19): siRNA sense strand
gaagaccgauccauaucug

SEQ ID NO: 481704 - RNA, 19 nt, Homo sapiens
  misc_RNA (1)...(19): siRNA sense strand
ugaccggaaugaacuauuu

SEQ ID NO: 481705 - RNA, 19 nt, Homo sapiens
  misc_RNA (1)...(19): siRNA sense strand
caaugaaagcuuuagguua

SEQ ID NO: 481706 - RNA, 19 nt, Homo sapiens
  misc_RNA (1)...(19): siRNA sense strand
ggaccuuagugaauauaaa

SEQ ID NO: 481707 - RNA, 19 nt, Homo sapiens
  misc_RNA (1)...(19): siRNA sense strand
ggaaauugaugaguauauc

SEQ ID NO: 481708 - RNA, 19 nt, Homo sapiens
  misc_RNA (1)...(19): siRNA sense strand
cggaagaccucaagaaagu

SEQ ID NO: 481709 - RNA, 19 nt, Homo sapiens
  misc_RNA (1)...(19): siRNA sense strand
gcaucaaguuuauagaaga

SEQ ID NO: 481710 - RNA, 19 nt, Homo sapiens
  misc_RNA (1)...(19): siRNA sense strand
gcacccagcuuaucuugca

SEQ ID NO: 481711 - RNA, 19 nt, Homo sapiens
  misc_RNA (1)...(19): siRNA sense strand
ggaagaaucggacccaaga

SEQ ID NO: 481712 - RNA, 19 nt, Homo sapiens
  misc_RNA (1)...(19): siRNA sense strand
ugaaauccuugaugaaguu

SEQ ID NO: 481713 - RNA, 19 nt, Homo sapiens
  misc_RNA (1)...(19): siRNA sense strand
gcugauaguuucaaagcaa

SEQ ID NO: 481714 - RNA, 19 nt, Homo sapiens
  misc_RNA (1)...(19): siRNA sense strand
gagaccauauccuuaaaug

SEQ ID NO: 481715 - RNA, 19 nt, Homo sapiens
  misc_RNA (1)...(19): siRNA sense strand
uaaagaggccguuaaggaa

SEQ ID NO: 481716 - RNA, 19 nt, Homo sapiens
  misc_RNA (1)...(19): siRNA sense strand
guagauccaagcuugauua

SEQ ID NO: 481717 - RNA, 19 nt, Homo sapiens
  misc_RNA (1)...(19): siRNA sense strand
uggagaagauguugaaaug

SEQ ID NO: 481718 - RNA, 19 nt, Homo sapiens
  misc_RNA (1)...(19): siRNA sense strand
cagcaguucucuucucuga

SEQ ID NO: 481719 - RNA, 19 nt, Homo sapiens
  misc_RNA (1)...(19): siRNA sense strand
gaugacacguucuccaguu

SEQ ID NO: 481720 - RNA, 19 nt, Homo sapiens
  misc_RNA (1)...(19): siRNA sense strand
caaaggcauucaucauaga

SEQ ID NO: 481721 - RNA, 19 nt, Homo sapiens
  misc_RNA (1)...(19): siRNA sense strand
gauaugauaccggaccuua

SEQ ID NO: 481722 - RNA, 19 nt, Homo sapiens
  misc_RNA (1)...(19): siRNA sense strand
gggaugcagcuauuuauuu

SEQ ID NO: 481723 - RNA, 19 nt, Homo sapiens
  misc_RNA (1)...(19): siRNA sense strand
ccaagugacuacaagaaau

SEQ ID NO: 481724 - RNA, 19 nt, Homo sapiens
  misc_RNA (1)...(19): siRNA sense strand
ugauugacauguauucuga

SEQ ID NO: 481725 - RNA, 19 nt, Homo sapiens
  misc_RNA (1)...(19): siRNA sense strand
uaauaaagcaguagagguu

SEQ ID NO: 481726 - RNA, 19 nt, Homo sapiens
  misc_RNA (1)...(19): siRNA sense strand
cauugaagcuauaagagaa

SEQ ID NO: 481727 - RNA, 19 nt, Homo sapiens
  misc_RNA (1)...(19): siRNA sense strand
ggauucagcagauaauuga

SEQ ID NO: 481728 - RNA, 19 nt, Homo sapiens
  misc_RNA (1)...(19): siRNA sense strand
aaacuucgcuaucucauac

SEQ ID NO: 481729 - RNA, 19 nt, Homo sapiens
  misc_RNA (1)...(19): siRNA sense strand
acaaugaaaccaagaauga

SEQ ID NO: 481730 - RNA, 19 nt, Homo sapiens
  misc_RNA (1)...(19): siRNA sense strand
caaauggacccucauggaa

SEQ ID NO: 481731 - RNA, 19 nt, Homo sapiens
  misc_RNA (1)...(19): siRNA sense strand
ugaaauagaacuucgaaug

SEQ ID NO: 481732 - RNA, 19 nt, Homo sapiens
  misc_RNA (1)...(19): siRNA sense strand
uaccggaccuuagugaaua

SEQ ID NO: 481733 - RNA, 19 nt, Homo sapiens
  misc_RNA (1)...(19): siRNA sense strand
gggaacagcucugaaagca

SEQ ID NO: 481734 - RNA, 19 nt, Homo sapiens
  misc_RNA (1)...(19): siRNA sense strand
ugacaaaccuuccuuuacg

SEQ ID NO: 481735 - RNA, 19 nt, Homo sapiens
  misc_RNA (1)...(19): siRNA sense strand
gaacaacaggcugauaguu

SEQ ID NO: 481736 - RNA, 19 nt, Homo sapiens
  misc_RNA (1)...(19): siRNA sense strand
gauguucucucugauuaug

SEQ ID NO: 481737 - RNA, 19 nt, Homo sapiens
  misc_RNA (1)...(19): siRNA sense strand
gcauuuaucauucacauca

SEQ ID NO: 481738 - RNA, 19 nt, Homo sapiens
  misc_RNA (1)...(19): siRNA sense strand
ggaugcagcuauuuauuuu

SEQ ID NO: 481739 - RNA, 19 nt, Homo sapiens
  misc_RNA (1)...(19): siRNA sense strand
gaacuugaccggaaugaac

SEQ ID NO: 481740 - RNA, 19 nt, Homo sapiens
  misc_RNA (1)...(19): siRNA sense strand
ggauggugcuuguugacuu

SEQ ID NO: 481741 - RNA, 19 nt, Homo sapiens
  misc_RNA (1)...(19): siRNA sense strand
acaaaggcauucaucauag

SEQ ID NO: 481742 - RNA, 19 nt, Homo sapiens
  misc_RNA (1)...(19): siRNA sense strand
acacucaguugaaguauca

SEQ ID NO: 481743 - RNA, 19 nt, Homo sapiens
  misc_RNA (1)...(19): siRNA sense strand
gaaagugacaagcauuuua

SEQ ID NO: 481744 - RNA, 19 nt, Homo sapiens
  misc_RNA (1)...(19): siRNA sense strand
gacauugugugggaaauug

SEQ ID NO: 481745 - RNA, 19 nt, Homo sapiens
  misc_RNA (1)...(19): siRNA sense strand
ggaaguuuaccacuacaaa

SEQ ID NO: 481746 - RNA, 19 nt, Homo sapiens
  misc_RNA (1)...(19): siRNA sense strand
gcucgaauauucccaagag

SEQ ID NO: 481747 - RNA, 19 nt, Homo sapiens
  misc_RNA (1)...(19): siRNA sense strand
gaaagaugacaaaggcauu

SEQ ID NO: 481748 - RNA, 19 nt, Homo sapiens
  misc_RNA (1)...(19): siRNA sense strand
uugauguucucucugauua

SEQ ID NO: 481749 - RNA, 19 nt, Homo sapiens
  misc_RNA (1)...(19): siRNA sense strand
aaagagguauuggaagauu

SEQ ID NO: 481750 - RNA, 19 nt, Homo sapiens
  misc_RNA (1)...(19): siRNA sense strand
gggagacccuacaagaaga

SEQ ID NO: 481751 - RNA, 19 nt, Homo sapiens
  misc_RNA (1)...(19): siRNA sense strand
gaauccuaaugccaucaua

SEQ ID NO: 481752 - RNA, 19 nt, Homo sapiens
  misc_RNA (1)...(19): siRNA sense strand
agaagaucuugcagcauua

SEQ ID NO: 481753 - RNA, 19 nt, Homo sapiens
  misc_RNA (1)...(19): siRNA sense strand
caucauagaaagcuuaaga

SEQ ID NO: 481754 - RNA, 19 nt, Homo sapiens
  misc_RNA (1)...(19): siRNA sense strand
gaagaauuuucccgcuuua

SEQ ID NO: 481755 - RNA, 19 nt, Homo sapiens
  misc_RNA (1)...(19): siRNA sense strand
caguggauaucaagcuuaa

SEQ ID NO: 481756 - RNA, 19 nt, Homo sapiens
  misc_RNA (1)...(19): siRNA sense strand
gcauugaagcuauaagaga

SEQ ID NO: 481757 - RNA, 19 nt, Homo sapiens
  misc_RNA (1)...(19): siRNA sense strand
gaaagcucuucccaaugaa

SEQ ID NO: 481758 - RNA, 19 nt, Homo sapiens
  misc_RNA (1)...(19): siRNA sense strand
ugacuuaccaggugugauu

SEQ ID NO: 481759 - RNA, 19 nt, Homo sapiens
  misc_RNA (1)...(19): siRNA sense strand
ggaaaugauugcccaagcu

SEQ ID NO: 481760 - RNA, 19 nt, Homo sapiens
  misc_RNA (1)...(19): siRNA sense strand
acacagcucuggaauaaaa

SEQ ID NO: 481761 - RNA, 19 nt, Homo sapiens
  misc_RNA (1)...(19): siRNA sense strand
ugugggaaauugaugagua

SEQ ID NO: 481762 - RNA, 19 nt, Homo sapiens
  misc_RNA (1)...(19): siRNA sense strand
cuaaaccauuguaaccuuu

SEQ ID NO: 481763 - RNA, 19 nt, Homo sapiens
  misc_RNA (1)...(19): siRNA sense strand
agagcaugaugacauauuu

SEQ ID NO: 481764 - RNA, 19 nt, Homo sapiens
  misc_RNA (1)...(19): siRNA sense strand
caacucaugugauugaaaa

SEQ ID NO: 481765 - RNA, 19 nt, Homo sapiens
  misc_RNA (1)...(19): siRNA sense strand
caagugacuacaagaaauu

SEQ ID NO: 481766 - RNA, 19 nt, Homo sapiens
  misc_RNA (1)...(19): siRNA sense strand
gcuaaaggcacaccaagug

SEQ ID NO: 481767 - RNA, 19 nt, Homo sapiens
  misc_RNA (1)...(19): siRNA sense strand
gagaauaugaagaagaguu

SEQ ID NO: 481768 - RNA, 19 nt, Homo sapiens
  misc_RNA (1)...(19): siRNA sense strand
gcaguauuguuacagacuu

SEQ ID NO: 481769 - RNA, 19 nt, Homo sapiens
  misc_RNA (1)...(19): siRNA sense strand
uggaaagacuaguguguug

SEQ ID NO: 481770 - RNA, 19 nt, Homo sapiens
  misc_RNA (1)...(19): siRNA sense strand
ggagaacaaagaauugaga

SEQ ID NO: 481771 - RNA, 19 nt, Homo sapiens
  misc_RNA (1)...(19): siRNA sense strand
gaaagagcaugaugacaua

SEQ ID NO: 481772 - RNA, 19 nt, Homo sapiens
  misc_RNA (1)...(19): siRNA sense strand
gaacagcucugaaagcauu

SEQ ID NO: 481773 - RNA, 19 nt, Homo sapiens
  misc_RNA (1)...(19): siRNA sense strand
gagaagauguugaaaugua

SEQ ID NO: 481774 - RNA, 19 nt, Homo sapiens
  misc_RNA (1)...(19): siRNA sense strand
gaggacagcuugaggguua

SEQ ID NO: 481775 - RNA, 19 nt, Homo sapiens
  misc_RNA (1)...(19): siRNA sense strand
gaaacugaauggaagaaua

SEQ ID NO: 481776 - RNA, 19 nt, Homo sapiens
  misc_RNA (1)...(19): siRNA sense strand
aaagaaggcuguaccguua

SEQ ID NO: 481777 - RNA, 19 nt, Homo sapiens
  misc_RNA (1)...(19): siRNA sense strand
aaacacagcucuggaauaa

SEQ ID NO: 481778 - RNA, 19 nt, Homo sapiens
  misc_RNA (1)...(19): siRNA sense strand
gaaauagaacuucgaauga

SEQ ID NO: 481779 - RNA, 19 nt, Homo sapiens
  misc_RNA (1)...(19): siRNA sense strand
gcaaugauguggucuuguu

SEQ ID NO: 481780 - RNA, 19 nt, Homo sapiens
  misc_RNA (1)...(19): siRNA sense strand
gaccauauccuuaaaugua

SEQ ID NO: 481781 - RNA, 19 nt, Homo sapiens
  misc_RNA (1)...(19): siRNA sense strand
gcaaugggaugcagcuauu

SEQ ID NO: 481782 - RNA, 19 nt, Homo sapiens
  misc_RNA (1)...(19): siRNA sense strand
cagcuuaucuugcaaguga

SEQ ID NO: 481783 - RNA, 19 nt, Homo sapiens
  misc_RNA (1)...(19): siRNA sense strand
gaaguuaggcgauuagaga

SEQ ID NO: 481784 - RNA, 19 nt, Homo sapiens
  misc_RNA (1)...(19): siRNA sense strand
gacaaaggcauucaucaua

SEQ ID NO: 481785 - RNA, 19 nt, Homo sapiens
  misc_RNA (1)...(19): siRNA sense strand
gauccaagcuugauuaagg

SEQ ID NO: 481786 - RNA, 19 nt, Homo sapiens
  misc_RNA (1)...(19): siRNA sense strand
ggaagaaaguauuaaacga

SEQ ID NO: 481787 - RNA, 19 nt, Homo sapiens
  misc_RNA (1)...(19): siRNA sense strand
aaacagcucuaaaccauug

SEQ ID NO: 481788 - RNA, 19 nt, Homo sapiens
  misc_RNA (1)...(19): siRNA sense strand
ugacauguauucugaaguu

SEQ ID NO: 481789 - RNA, 19 nt, Homo sapiens
  misc_RNA (1)...(19): siRNA sense strand
gaagaccucaagaaaguua

SEQ ID NO: 481790 - RNA, 19 nt, Homo sapiens
  misc_RNA (1)...(19): siRNA sense strand
gcugaacgcaguauuguua

SEQ ID NO: 481791 - RNA, 19 nt, Homo sapiens
  misc_RNA (1)...(19): siRNA sense strand
gauggugcuuguugacuua

SEQ ID NO: 481792 - RNA, 19 nt, Homo sapiens
  misc_RNA (1)...(19): siRNA sense strand
ggacauccuuucagcaguu

SEQ ID NO: 481793 - RNA, 19 nt, Homo sapiens
  misc_RNA (1)...(19): siRNA sense strand
gaaacacagcucuggaaua

SEQ ID NO: 481794 - RNA, 19 nt, Homo sapiens
  misc_RNA (1)...(19): siRNA sense strand
ggaaauccuucaacaaucu

SEQ ID NO: 481795 - RNA, 19 nt, Homo sapiens
  misc_RNA (1)...(19): siRNA sense strand
gcagauaauugaaggaaag

SEQ ID NO: 481796 - RNA, 19 nt, Homo sapiens
  misc_RNA (1)...(19): siRNA sense strand
ugaaagcauugaagcuaua

SEQ ID NO: 481797 - RNA, 19 nt, Homo sapiens
  misc_RNA (1)...(19): siRNA sense strand
ggaaagagcaugaugacau

SEQ ID NO: 481798 - RNA, 19 nt, Homo sapiens
  misc_RNA (1)...(19): siRNA sense strand
ucacgaagcauuuaucauu

SEQ ID NO: 481799 - RNA, 19 nt, Homo sapiens
  misc_RNA (1)...(19): siRNA sense strand
gcaguucucuucucugaca

SEQ ID NO: 481800 - RNA, 19 nt, Homo sapiens
  misc_RNA (1)...(19): siRNA sense strand
uuaaagagguauuggaaga

SEQ ID NO: 481801 - RNA, 19 nt, Homo sapiens
  misc_RNA (1)...(19): siRNA sense strand
aaacugaaauucucuccaa

SEQ ID NO: 481802 - RNA, 19 nt, Homo sapiens
  misc_RNA (1)...(19): siRNA sense strand
ggcaacaacuuacaaauac

SEQ ID NO: 481803 - RNA, 19 nt, Homo sapiens
  misc_RNA (1)...(19): siRNA sense strand
gaagaccgauccauaucug

SEQ ID NO: 481804 - RNA, 19 nt, Homo sapiens
  misc_RNA (1)...(19): siRNA sense strand
ugaccggaaugaacuauuu

SEQ ID NO: 481805 - RNA, 19 nt, Homo sapiens
  misc_RNA (1)...(19): siRNA sense strand
caaugaaagcuuuagguua

SEQ ID NO: 481806 - RNA, 19 nt, Homo sapiens
  misc_RNA (1)...(19): siRNA sense strand
ggaccuuagugaauauaaa

SEQ ID NO: 481807 - RNA, 19 nt, Homo sapiens
  misc_RNA (1)...(19): siRNA sense strand
ggaaauugaugaguauauc

SEQ ID NO: 481808 - RNA, 19 nt, Homo sapiens
  misc_RNA (1)...(19): siRNA sense strand
cggaagaccucaagaaagu

SEQ ID NO: 481809 - RNA, 19 nt, Homo sapiens
  misc_RNA (1)...(19): siRNA sense strand
gcaucaaguuuauagaaga

SEQ ID NO: 481810 - RNA, 19 nt, Homo sapiens
  misc_RNA (1)...(19): siRNA sense strand
gcacccagcuuaucuugca

SEQ ID NO: 481811 - RNA, 19 nt, Homo sapiens
  misc_RNA (1)...(19): siRNA sense strand
ggaagaaucggacccaaga

SEQ ID NO: 481812 - RNA, 19 nt, Homo sapiens
  misc_RNA (1)...(19): siRNA sense strand
ugaaauccuugaugaaguu

SEQ ID NO: 481813 - RNA, 19 nt, Homo sapiens
  misc_RNA (1)...(19): siRNA sense strand
gcugauaguuucaaagcaa

SEQ ID NO: 481814 - RNA, 19 nt, Homo sapiens
  misc_RNA (1)...(19): siRNA sense strand
gagaccauauccuuaaaug

SEQ ID NO: 481815 - RNA, 19 nt, Homo sapiens
  misc_RNA (1)...(19): siRNA sense strand
uaaagaggccguuaaggaa

SEQ ID NO: 481816 - RNA, 19 nt, Homo sapiens
  misc_RNA (1)...(19): siRNA sense strand
guagauccaagcuugauua

SEQ ID NO: 481817 - RNA, 19 nt, Homo sapiens
  misc_RNA (1)...(19): siRNA sense strand
uggagaagauguugaaaug

SEQ ID NO: 481818 - RNA, 19 nt, Homo sapiens
  misc_RNA (1)...(19): siRNA sense strand
cagcaguucucuucucuga

SEQ ID NO: 481819 - RNA, 19 nt, Homo sapiens
  misc_RNA (1)...(19): siRNA sense strand
gaugacacguucuccaguu

SEQ ID NO: 481820 - RNA, 19 nt, Homo sapiens
  misc_RNA (1)...(19): siRNA sense strand
caaaggcauucaucauaga

SEQ ID NO: 481821 - RNA, 19 nt, Homo sapiens
  misc_RNA (1)...(19): siRNA sense strand
gauaugauaccggaccuua

SEQ ID NO: 481822 - RNA, 19 nt, Homo sapiens
  misc_RNA (1)...(19): siRNA sense strand
gggaugcagcuauuuauuu

SEQ ID NO: 481823 - RNA, 19 nt, Homo sapiens
  misc_RNA (1)...(19): siRNA sense strand
ccaagugacuacaagaaau

SEQ ID NO: 481824 - RNA, 19 nt, Homo sapiens
  misc_RNA (1)...(19): siRNA sense strand
ugauugacauguauucuga

SEQ ID NO: 481825 - RNA, 19 nt, Homo sapiens
  misc_RNA (1)...(19): siRNA sense strand
uaauaaagcaguagagguu

SEQ ID NO: 481826 - RNA, 19 nt, Homo sapiens
  misc_RNA (1)...(19): siRNA sense strand
cauugaagcuauaagagaa

SEQ ID NO: 481827 - RNA, 19 nt, Homo sapiens
  misc_RNA (1)...(19): siRNA sense strand
ggauucagcagauaauuga

SEQ ID NO: 481828 - RNA, 19 nt, Homo sapiens
  misc_RNA (1)...(19): siRNA sense strand
aaacuucgcuaucucauac

SEQ ID NO: 481829 - RNA, 19 nt, Homo sapiens
  misc_RNA (1)...(19): siRNA sense strand
acaaugaaaccaagaauga

SEQ ID NO: 481830 - RNA, 19 nt, Homo sapiens
  misc_RNA (1)...(19): siRNA sense strand
caaauggacccucauggaa

SEQ ID NO: 481831 - RNA, 19 nt, Homo sapiens
  misc_RNA (1)...(19): siRNA sense strand
ugaaauagaacuucgaaug

SEQ ID NO: 481832 - RNA, 19 nt, Homo sapiens
  misc_RNA (1)...(19): siRNA sense strand
uaccggaccuuagugaaua

SEQ ID NO: 481833 - RNA, 19 nt, Homo sapiens
  misc_RNA (1)...(19): siRNA sense strand
gggaacagcucugaaagca

SEQ ID NO: 481834 - RNA, 19 nt, Homo sapiens
  misc_RNA (1)...(19): siRNA sense strand
ugacaaaccuuccuuuacg

SEQ ID NO: 481835 - RNA, 19 nt, Homo sapiens
  misc_RNA (1)...(19): siRNA sense strand
gaacaacaggcugauaguu

SEQ ID NO: 481836 - RNA, 19 nt, Homo sapiens
  misc_RNA (1)...(19): siRNA sense strand
gauguucucucugauuaug

SEQ ID NO: 481837 - RNA, 19 nt, Homo sapiens
  misc_RNA (1)...(19): siRNA sense strand
gcauuuaucauucacauca

SEQ ID NO: 481838 - RNA, 19 nt, Homo sapiens
  misc_RNA (1)...(19): siRNA sense strand
ggaugcagcuauuuauuuu

SEQ ID NO: 481839 - RNA, 19 nt, Homo sapiens
  misc_RNA (1)...(19): siRNA sense strand
gaacuugaccggaaugaac

SEQ ID NO: 481840 - RNA, 19 nt, Homo sapiens
  misc_RNA (1)...(19): siRNA sense strand
ggauggugcuuguugacuu

SEQ ID NO: 481841 - RNA, 19 nt, Homo sapiens
  misc_RNA (1)...(19): siRNA sense strand
acaaaggcauucaucauag

SEQ ID NO: 481842 - RNA, 19 nt, Homo sapiens
  misc_RNA (1)...(19): siRNA sense strand
acacucaguugaaguauca

SEQ ID NO: 481843 - RNA, 19 nt, Homo sapiens
  misc_RNA (1)...(19): siRNA sense strand
gaaagugacaagcauuuua

SEQ ID NO: 481844 - RNA, 19 nt, Homo sapiens
  misc_RNA (1)...(19): siRNA sense strand
gacauugugugggaaauug

SEQ ID NO: 481845 - RNA, 19 nt, Homo sapiens
  misc_RNA (1)...(19): siRNA sense strand
ggaaguuuaccacuacaaa

SEQ ID NO: 481846 - RNA, 19 nt, Homo sapiens
  misc_RNA (1)...(19): siRNA sense strand
gcucgaauauucccaagag

SEQ ID NO: 481847 - RNA, 19 nt, Homo sapiens
  misc_RNA (1)...(19): siRNA sense strand
gaaagaugacaaaggcauu

SEQ ID NO: 481848 - RNA, 19 nt, Homo sapiens
  misc_RNA (1)...(19): siRNA sense strand
uugauguucucucugauua

SEQ ID NO: 481849 - RNA, 19 nt, Homo sapiens
  misc_RNA (1)...(19): siRNA sense strand
aaagagguauuggaagauu

SEQ ID NO: 481850 - RNA, 19 nt, Homo sapiens
  misc_RNA (1)...(19): siRNA sense strand
gggagacccuacaagaaga

SEQ ID NO: 481851 - RNA, 19 nt, Homo sapiens
  misc_RNA (1)...(19): siRNA sense strand
gaauccuaaugccaucaua

SEQ ID NO: 481852 - RNA, 19 nt, Homo sapiens
  misc_RNA (1)...(19): siRNA sense strand
agaagaucuugcagcauua

SEQ ID NO: 481853 - RNA, 19 nt, Homo sapiens
  misc_RNA (1)...(19): siRNA sense strand
caucauagaaagcuuaaga

SEQ ID NO: 481854 - RNA, 19 nt, Homo sapiens
  misc_RNA (1)...(19): siRNA sense strand
gaagaauuuucccgcuuua

SEQ ID NO: 481855 - RNA, 19 nt, Homo sapiens
  misc_RNA (1)...(19): siRNA sense strand
caguggauaucaagcuuaa

SEQ ID NO: 481856 - RNA, 19 nt, Homo sapiens
  misc_RNA (1)...(19): siRNA sense strand
gcauugaagcuauaagaga

SEQ ID NO: 481857 - RNA, 19 nt, Homo sapiens
  misc_RNA (1)...(19): siRNA sense strand
gaaagcucuucccaaugaa

SEQ ID NO: 481858 - RNA, 19 nt, Homo sapiens
  misc_RNA (1)...(19): siRNA sense strand
ugacuuaccaggugugauu

SEQ ID NO: 481859 - RNA, 19 nt, Homo sapiens
  misc_RNA (1)...(19): siRNA sense strand
ggaaaugauugcccaagcu

SEQ ID NO: 481860 - RNA, 19 nt, Homo sapiens
  misc_RNA (1)...(19): siRNA sense strand
acacagcucuggaauaaaa

SEQ ID NO: 481861 - RNA, 19 nt, Homo sapiens
  misc_RNA (1)...(19): siRNA sense strand
ugugggaaauugaugagua

SEQ ID NO: 481862 - RNA, 19 nt, Homo sapiens
  misc_RNA (1)...(19): siRNA sense strand
cuaaaccauuguaaccuuu

SEQ ID NO: 481863 - RNA, 19 nt, Homo sapiens
  misc_RNA (1)...(19): siRNA sense strand
agagcaugaugacauauuu

SEQ ID NO: 481864 - RNA, 19 nt, Homo sapiens
  misc_RNA (1)...(19): siRNA sense strand
caacucaugugauugaaaa

SEQ ID NO: 481865 - RNA, 19 nt, Homo sapiens
  misc_RNA (1)...(19): siRNA sense strand
caagugacuacaagaaauu

SEQ ID NO: 481866 - RNA, 19 nt, Homo sapiens
  misc_RNA (1)...(19): siRNA sense strand
gcuaaaggcacaccaagug

SEQ ID NO: 481867 - RNA, 19 nt, Homo sapiens
  misc_RNA (1)...(19): siRNA sense strand
gagaauaugaagaagaguu

SEQ ID NO: 481868 - RNA, 19 nt, Homo sapiens
  misc_RNA (1)...(19): siRNA sense strand
gcaguauuguuacagacuu

SEQ ID NO: 481869 - RNA, 19 nt, Homo sapiens
  misc_RNA (1)...(19): siRNA sense strand
uggaaagacuaguguguug

SEQ ID NO: 481870 - RNA, 19 nt, Homo sapiens
  misc_RNA (1)...(19): siRNA sense strand
ggagaacaaagaauugaga

SEQ ID NO: 481871 - RNA, 19 nt, Homo sapiens
  misc_RNA (1)...(19): siRNA sense strand
gaaagagcaugaugacaua

SEQ ID NO: 481872 - RNA, 19 nt, Homo sapiens
  misc_RNA (1)...(19): siRNA sense strand
gaacagcucugaaagcauu

SEQ ID NO: 481873 - RNA, 19 nt, Homo sapiens
  misc_RNA (1)...(19): siRNA sense strand
gagaagauguugaaaugua

SEQ ID NO: 481874 - RNA, 19 nt, Homo sapiens
  misc_RNA (1)...(19): siRNA sense strand
gaggacagcuugaggguua

SEQ ID NO: 481875 - RNA, 19 nt, Homo sapiens
  misc_RNA (1)...(19): siRNA sense strand
gaaacugaauggaagaaua

SEQ ID NO: 481876 - RNA, 19 nt, Homo sapiens
  misc_RNA (1)...(19): siRNA sense strand
aaagaaggcuguaccguua

SEQ ID NO: 481877 - RNA, 19 nt, Homo sapiens
  misc_RNA (1)...(19): siRNA sense strand
aaacacagcucuggaauaa

SEQ ID NO: 481878 - RNA, 19 nt, Homo sapiens
  misc_RNA (1)...(19): siRNA sense strand
gaaauagaacuucgaauga

SEQ ID NO: 481879 - RNA, 19 nt, Homo sapiens
  misc_RNA (1)...(19): siRNA sense strand
gcaaugauguggucuuguu

SEQ ID NO: 481880 - RNA, 19 nt, Homo sapiens
  misc_RNA (1)...(19): siRNA sense strand
gaccauauccuuaaaugua

SEQ ID NO: 481881 - RNA, 19 nt, Homo sapiens
  misc_RNA (1)...(19): siRNA sense strand
gcaaugggaugcagcuauu

SEQ ID NO: 481882 - RNA, 19 nt, Homo sapiens
  misc_RNA (1)...(19): siRNA sense strand
cagcuuaucuugcaaguga

SEQ ID NO: 481883 - RNA, 19 nt, Homo sapiens
  misc_RNA (1)...(19): siRNA sense strand
gaaguuaggcgauuagaga

SEQ ID NO: 481884 - RNA, 19 nt, Homo sapiens
  misc_RNA (1)...(19): siRNA sense strand
gacaaaggcauucaucaua

SEQ ID NO: 481885 - RNA, 19 nt, Homo sapiens
  misc_RNA (1)...(19): siRNA sense strand
gauccaagcuugauuaagg

SEQ ID NO: 481886 - RNA, 19 nt, Homo sapiens
  misc_RNA (1)...(19): siRNA sense strand
ggaagaaaguauuaaacga

SEQ ID NO: 481887 - RNA, 19 nt, Homo sapiens
  misc_RNA (1)...(19): siRNA sense strand
aaacagcucuaaaccauug

SEQ ID NO: 481888 - RNA, 19 nt, Homo sapiens
  misc_RNA (1)...(19): siRNA sense strand
ugacauguauucugaaguu

SEQ ID NO: 481889 - RNA, 19 nt, Homo sapiens
  misc_RNA (1)...(19): siRNA sense strand
gaagaccucaagaaaguua

SEQ ID NO: 481890 - RNA, 19 nt, Homo sapiens
  misc_RNA (1)...(19): siRNA sense strand
gcugaacgcaguauuguua

SEQ ID NO: 481891 - RNA, 19 nt, Homo sapiens
  misc_RNA (1)...(19): siRNA sense strand
gauggugcuuguugacuua

SEQ ID NO: 481892 - RNA, 19 nt, Homo sapiens
  misc_RNA (1)...(19): siRNA sense strand
ggacauccuuucagcaguu

SEQ ID NO: 481893 - RNA, 19 nt, Homo sapiens
  misc_RNA (1)...(19): siRNA sense strand
gaaacacagcucuggaaua

SEQ ID NO: 481894 - RNA, 19 nt, Homo sapiens
  misc_RNA (1)...(19): siRNA sense strand
ggaaauccuucaacaaucu

SEQ ID NO: 481895 - RNA, 19 nt, Homo sapiens
  misc_RNA (1)...(19): siRNA sense strand
gcagauaauugaaggaaag

SEQ ID NO: 481896 - RNA, 19 nt, Homo sapiens
  misc_RNA (1)...(19): siRNA sense strand
ugaaagcauugaagcuaua

SEQ ID NO: 481897 - RNA, 19 nt, Homo sapiens
  misc_RNA (1)...(19): siRNA sense strand
ggaaagagcaugaugacau

SEQ ID NO: 481898 - RNA, 19 nt, Homo sapiens
  misc_RNA (1)...(19): siRNA sense strand
ucacgaagcauuuaucauu

SEQ ID NO: 481899 - RNA, 19 nt, Homo sapiens
  misc_RNA (1)...(19): siRNA sense strand
gcaguucucuucucugaca

SEQ ID NO: 481900 - RNA, 19 nt, Homo sapiens
  misc_RNA (1)...(19): siRNA sense strand
uuaaagagguauuggaaga

SEQ ID NO: 481901 - RNA, 19 nt, Homo sapiens
  misc_RNA (1)...(19): siRNA sense strand
aaacugaaauucucuccaa

SEQ ID NO: 481902 - RNA, 19 nt, Homo sapiens
  misc_RNA (1)...(19): siRNA sense strand
ggcaacaacuuacaaauac

SEQ ID NO: 481903 - RNA, 19 nt, Homo sapiens
  misc_RNA (1)...(19): siRNA sense strand
gaagaccgauccauaucug

SEQ ID NO: 481904 - RNA, 19 nt, Homo sapiens
  misc_RNA (1)...(19): siRNA sense strand
ugaccggaaugaacuauuu

SEQ ID NO: 481905 - RNA, 19 nt, Homo sapiens
  misc_RNA (1)...(19): siRNA sense strand
caaugaaagcuuuagguua

SEQ ID NO: 481906 - RNA, 19 nt, Homo sapiens
  misc_RNA (1)...(19): siRNA sense strand
ggaccuuagugaauauaaa

SEQ ID NO: 481907 - RNA, 19 nt, Homo sapiens
  misc_RNA (1)...(19): siRNA sense strand
ggaaauugaugaguauauc

SEQ ID NO: 481908 - RNA, 19 nt, Homo sapiens
  misc_RNA (1)...(19): siRNA sense strand
cggaagaccucaagaaagu

SEQ ID NO: 481909 - RNA, 19 nt, Homo sapiens
  misc_RNA (1)...(19): siRNA sense strand
gcaucaaguuuauagaaga

SEQ ID NO: 481910 - RNA, 19 nt, Homo sapiens
  misc_RNA (1)...(19): siRNA sense strand
gcacccagcuuaucuugca

SEQ ID NO: 481911 - RNA, 19 nt, Homo sapiens
  misc_RNA (1)...(19): siRNA sense strand
ggaagaaucggacccaaga

SEQ ID NO: 481912 - RNA, 19 nt, Homo sapiens
  misc_RNA (1)...(19): siRNA sense strand
ugaaauccuugaugaaguu

SEQ ID NO: 481913 - RNA, 19 nt, Homo sapiens
  misc_RNA (1)...(19): siRNA sense strand
gcugauaguuucaaagcaa

SEQ ID NO: 481914 - RNA, 19 nt, Homo sapiens
  misc_RNA (1)...(19): siRNA sense strand
gagaccauauccuuaaaug

SEQ ID NO: 481915 - RNA, 19 nt, Homo sapiens
  misc_RNA (1)...(19): siRNA sense strand
uaaagaggccguuaaggaa

SEQ ID NO: 481916 - RNA, 19 nt, Homo sapiens
  misc_RNA (1)...(19): siRNA sense strand
guagauccaagcuugauua

SEQ ID NO: 481917 - RNA, 19 nt, Homo sapiens
  misc_RNA (1)...(19): siRNA sense strand
uggagaagauguugaaaug

SEQ ID NO: 481918 - RNA, 19 nt, Homo sapiens
  misc_RNA (1)...(19): siRNA sense strand
cagcaguucucuucucuga

SEQ ID NO: 481919 - RNA, 19 nt, Homo sapiens
  misc_RNA (1)...(19): siRNA sense strand
gaugacacguucuccaguu

SEQ ID NO: 481920 - RNA, 19 nt, Homo sapiens
  misc_RNA (1)...(19): siRNA sense strand
caaaggcauucaucauaga

SEQ ID NO: 481921 - RNA, 19 nt, Homo sapiens
  misc_RNA (1)...(19): siRNA sense strand
gauaugauaccggaccuua

SEQ ID NO: 481922 - RNA, 19 nt, Homo sapiens
  misc_RNA (1)...(19): siRNA sense strand
gggaugcagcuauuuauuu

SEQ ID NO: 481923 - RNA, 19 nt, Homo sapiens
  misc_RNA (1)...(19): siRNA sense strand
ccaagugacuacaagaaau

SEQ ID NO: 481924 - RNA, 19 nt, Homo sapiens
  misc_RNA (1)...(19): siRNA sense strand
ugauugacauguauucuga

SEQ ID NO: 481925 - RNA, 19 nt, Homo sapiens
  misc_RNA (1)...(19): siRNA sense strand
uaauaaagcaguagagguu

SEQ ID NO: 481926 - RNA, 19 nt, Homo sapiens
  misc_RNA (1)...(19): siRNA sense strand
cauugaagcuauaagagaa

SEQ ID NO: 481927 - RNA, 19 nt, Homo sapiens
  misc_RNA (1)...(19): siRNA sense strand
ggauucagcagauaauuga

SEQ ID NO: 481928 - RNA, 19 nt, Homo sapiens
  misc_RNA (1)...(19): siRNA sense strand
aaacuucgcuaucucauac

SEQ ID NO: 481929 - RNA, 19 nt, Homo sapiens
  misc_RNA (1)...(19): siRNA sense strand
acaaugaaaccaagaauga

SEQ ID NO: 481930 - RNA, 19 nt, Homo sapiens
  misc_RNA (1)...(19): siRNA sense strand
caaauggacccucauggaa

SEQ ID NO: 481931 - RNA, 19 nt, Homo sapiens
  misc_RNA (1)...(19): siRNA sense strand
ugaaauagaacuucgaaug

SEQ ID NO: 481932 - RNA, 19 nt, Homo sapiens
  misc_RNA (1)...(19): siRNA sense strand
uaccggaccuuagugaaua

SEQ ID NO: 481933 - RNA, 19 nt, Homo sapiens
  misc_RNA (1)...(19): siRNA sense strand
gggaacagcucugaaagca

SEQ ID NO: 481934 - RNA, 19 nt, Homo sapiens
  misc_RNA (1)...(19): siRNA sense strand
ugacaaaccuuccuuuacg

SEQ ID NO: 481935 - RNA, 19 nt, Homo sapiens
  misc_RNA (1)...(19): siRNA sense strand
gaacaacaggcugauaguu

SEQ ID NO: 481936 - RNA, 19 nt, Homo sapiens
  misc_RNA (1)...(19): siRNA sense strand
gauguucucucugauuaug

SEQ ID NO: 481937 - RNA, 19 nt, Homo sapiens
  misc_RNA (1)...(19): siRNA sense strand
gcauuuaucauucacauca

SEQ ID NO: 481938 - RNA, 19 nt, Homo sapiens
  misc_RNA (1)...(19): siRNA sense strand
ggaugcagcuauuuauuuu

SEQ ID NO: 481939 - RNA, 19 nt, Homo sapiens
  misc_RNA (1)...(19): siRNA sense strand
gaacuugaccggaaugaac

SEQ ID NO: 481940 - RNA, 19 nt, Homo sapiens
  misc_RNA (1)...(19): siRNA sense strand
ggauggugcuuguugacuu

SEQ ID NO: 481941 - RNA, 19 nt, Homo sapiens
  misc_RNA (1)...(19): siRNA sense strand
acaaaggcauucaucauag

SEQ ID NO: 481942 - RNA, 19 nt, Homo sapiens
  misc_RNA (1)...(19): siRNA sense strand
acacucaguugaaguauca

SEQ ID NO: 481943 - RNA, 19 nt, Homo sapiens
  misc_RNA (1)...(19): siRNA sense strand
gaaagugacaagcauuuua

SEQ ID NO: 481944 - RNA, 19 nt, Homo sapiens
  misc_RNA (1)...(19): siRNA sense strand
gacauugugugggaaauug

SEQ ID NO: 481945 - RNA, 19 nt, Homo sapiens
  misc_RNA (1)...(19): siRNA sense strand
ggaaguuuaccacuacaaa

SEQ ID NO: 481946 - RNA, 19 nt, Homo sapiens
  misc_RNA (1)...(19): siRNA sense strand
gcucgaauauucccaagag

SEQ ID NO: 481947 - RNA, 19 nt, Homo sapiens
  misc_RNA (1)...(19): siRNA sense strand
gaaagaugacaaaggcauu

SEQ ID NO: 481948 - RNA, 19 nt, Homo sapiens
  misc_RNA (1)...(19): siRNA sense strand
uugauguucucucugauua

SEQ ID NO: 481949 - RNA, 19 nt, Homo sapiens
  misc_RNA (1)...(19): siRNA sense strand
aaagagguauuggaagauu

SEQ ID NO: 481950 - RNA, 19 nt, Homo sapiens
  misc_RNA (1)...(19): siRNA sense strand
gggagacccuacaagaaga

SEQ ID NO: 481951 - RNA, 19 nt, Homo sapiens
  misc_RNA (1)...(19): siRNA sense strand
gaauccuaaugccaucaua

SEQ ID NO: 481952 - RNA, 19 nt, Homo sapiens
  misc_RNA (1)...(19): siRNA sense strand
agaagaucuugcagcauua

SEQ ID NO: 481953 - RNA, 19 nt, Homo sapiens
  misc_RNA (1)...(19): siRNA sense strand
caucauagaaagcuuaaga

SEQ ID NO: 481954 - RNA, 19 nt, Homo sapiens
  misc_RNA (1)...(19): siRNA sense strand
gaagaauuuucccgcuuua

SEQ ID NO: 481955 - RNA, 19 nt, Homo sapiens
  misc_RNA (1)...(19): siRNA sense strand
caguggauaucaagcuuaa

SEQ ID NO: 481956 - RNA, 19 nt, Homo sapiens
  misc_RNA (1)...(19): siRNA sense strand
gcauugaagcuauaagaga

SEQ ID NO: 481957 - RNA, 19 nt, Homo sapiens
  misc_RNA (1)...(19): siRNA sense strand
gaaagcucuucccaaugaa

SEQ ID NO: 481958 - RNA, 19 nt, Homo sapiens
  misc_RNA (1)...(19): siRNA sense strand
ugacuuaccaggugugauu

SEQ ID NO: 481959 - RNA, 19 nt, Homo sapiens
  misc_RNA (1)...(19): siRNA sense strand
ggaaaugauugcccaagcu

SEQ ID NO: 481960 - RNA, 19 nt, Homo sapiens
  misc_RNA (1)...(19): siRNA sense strand
acacagcucuggaauaaaa

SEQ ID NO: 481961 - RNA, 19 nt, Homo sapiens
  misc_RNA (1)...(19): siRNA sense strand
ugugggaaauugaugagua

SEQ ID NO: 481962 - RNA, 19 nt, Homo sapiens
  misc_RNA (1)...(19): siRNA sense strand
cuaaaccauuguaaccuuu

SEQ ID NO: 481963 - RNA, 19 nt, Homo sapiens
  misc_RNA (1)...(19): siRNA sense strand
agagcaugaugacauauuu

SEQ ID NO: 481964 - RNA, 19 nt, Homo sapiens
  misc_RNA (1)...(19): siRNA sense strand
caacucaugugauugaaaa

SEQ ID NO: 481965 - RNA, 19 nt, Homo sapiens
  misc_RNA (1)...(19): siRNA sense strand
caagugacuacaagaaauu

SEQ ID NO: 481966 - RNA, 19 nt, Homo sapiens
  misc_RNA (1)...(19): siRNA sense strand
gcuaaaggcacaccaagug

SEQ ID NO: 481967 - RNA, 19 nt, Homo sapiens
  misc_RNA (1)...(19): siRNA sense strand
gagaauaugaagaagaguu

SEQ ID NO: 481968 - RNA, 19 nt, Homo sapiens
  misc_RNA (1)...(19): siRNA sense strand
gcaguauuguuacagacuu

SEQ ID NO: 481969 - RNA, 19 nt, Homo sapiens
  misc_RNA (1)...(19): siRNA sense strand
uggaaagacuaguguguug

SEQ ID NO: 481970 - RNA, 19 nt, Homo sapiens
  misc_RNA (1)...(19): siRNA sense strand
ggagaacaaagaauugaga

SEQ ID NO: 481971 - RNA, 19 nt, Homo sapiens
  misc_RNA (1)...(19): siRNA sense strand
gaaagagcaugaugacaua

SEQ ID NO: 481972 - RNA, 19 nt, Homo sapiens
  misc_RNA (1)...(19): siRNA sense strand
gaacagcucugaaagcauu

SEQ ID NO: 481973 - RNA, 19 nt, Homo sapiens
  misc_RNA (1)...(19): siRNA sense strand
gagaagauguugaaaugua

SEQ ID NO: 481974 - RNA, 19 nt, Homo sapiens
  misc_RNA (1)...(19): siRNA sense strand
gaggacagcuugaggguua

SEQ ID NO: 481975 - RNA, 19 nt, Homo sapiens
  misc_RNA (1)...(19): siRNA sense strand
gaaacugaauggaagaaua

SEQ ID NO: 481976 - RNA, 19 nt, Homo sapiens
  misc_RNA (1)...(19): siRNA sense strand
aaagaaggcuguaccguua

SEQ ID NO: 481977 - RNA, 19 nt, Homo sapiens
  misc_RNA (1)...(19): siRNA sense strand
aaacacagcucuggaauaa

SEQ ID NO: 481978 - RNA, 19 nt, Homo sapiens
  misc_RNA (1)...(19): siRNA sense strand
gaaauagaacuucgaauga

SEQ ID NO: 481979 - RNA, 19 nt, Homo sapiens
  misc_RNA (1)...(19): siRNA sense strand
gcaaugauguggucuuguu

SEQ ID NO: 481980 - RNA, 19 nt, Homo sapiens
  misc_RNA (1)...(19): siRNA sense strand
gaccauauccuuaaaugua

SEQ ID NO: 481981 - RNA, 19 nt, Homo sapiens
  misc_RNA (1)...(19): siRNA sense strand
gcaaugggaugcagcuauu

SEQ ID NO: 481982 - RNA, 19 nt, Homo sapiens
  misc_RNA (1)...(19): siRNA sense strand
cagcuuaucuugcaaguga

SEQ ID NO: 481983 - RNA, 19 nt, Homo sapiens
  misc_RNA (1)...(19): siRNA sense strand
gaaguuaggcgauuagaga

SEQ ID NO: 481984 - RNA, 19 nt, Homo sapiens
  misc_RNA (1)...(19): siRNA sense strand
gacaaaggcauucaucaua

SEQ ID NO: 481985 - RNA, 19 nt, Homo sapiens
  misc_RNA (1)...(19): siRNA sense strand
gauccaagcuugauuaagg

SEQ ID NO: 481986 - RNA, 19 nt, Homo sapiens
  misc_RNA (1)...(19): siRNA sense strand
ggaagaaaguauuaaacga

SEQ ID NO: 481987 - RNA, 19 nt, Homo sapiens
  misc_RNA (1)...(19): siRNA sense strand
aaacagcucuaaaccauug

SEQ ID NO: 481988 - RNA, 19 nt, Homo sapiens
  misc_RNA (1)...(19): siRNA sense strand
ugacauguauucugaaguu

SEQ ID NO: 481989 - RNA, 19 nt, Homo sapiens
  misc_RNA (1)...(19): siRNA sense strand
gaagaccucaagaaaguua

SEQ ID NO: 481990 - RNA, 19 nt, Homo sapiens
  misc_RNA (1)...(19): siRNA sense strand
gcugaacgcaguauuguua

SEQ ID NO: 481991 - RNA, 19 nt, Homo sapiens
  misc_RNA (1)...(19): siRNA sense strand
gauggugcuuguugacuua

SEQ ID NO: 481992 - RNA, 19 nt, Homo sapiens
  misc_RNA (1)...(19): siRNA sense strand
ggacauccuuucagcaguu

SEQ ID NO: 481993 - RNA, 19 nt, Homo sapiens
  misc_RNA (1)...(19): siRNA sense strand
gaaacacagcucuggaaua

SEQ ID NO: 481994 - RNA, 19 nt, Homo sapiens
  misc_RNA (1)...(19): siRNA sense strand
ggaaauccuucaacaaucu

SEQ ID NO: 481995 - RNA, 19 nt, Homo sapiens
  misc_RNA (1)...(19): siRNA sense strand
gcagauaauugaaggaaag

SEQ ID NO: 481996 - RNA, 19 nt, Homo sapiens
  misc_RNA (1)...(19): siRNA sense strand
ugaaagcauugaagcuaua

SEQ ID NO: 481997 - RNA, 19 nt, Homo sapiens
  misc_RNA (1)...(19): siRNA sense strand
ggaaagagcaugaugacau

SEQ ID NO: 481998 - RNA, 19 nt, Homo sapiens
  misc_RNA (1)...(19): siRNA sense strand
ucacgaagcauuuaucauu

SEQ ID NO: 481999 - RNA, 19 nt, Homo sapiens
  misc_RNA (1)...(19): siRNA sense strand
gcaguucucuucucugaca

SEQ ID NO: 482000 - RNA, 19 nt, Homo sapiens
  misc_RNA (1)...(19): siRNA sense strand
uuaaagagguauuggaaga

SEQ ID NO: 482001 - RNA, 19 nt, Homo sapiens
  misc_RNA (1)...(19): siRNA sense strand
aaacugaaauucucuccaa

SEQ ID NO: 482002 - RNA, 19 nt, Homo sapiens
  misc_RNA (1)...(19): siRNA sense strand
ggcaacaacuuacaaauac

SEQ ID NO: 482003 - RNA, 19 nt, Homo sapiens
  misc_RNA (1)...(19): siRNA sense strand
gaagaccgauccauaucug

SEQ ID NO: 482004 - RNA, 19 nt, Homo sapiens
  misc_RNA (1)...(19): siRNA sense strand
ugaccggaaugaacuauuu

SEQ ID NO: 482005 - RNA, 19 nt, Homo sapiens
  misc_RNA (1)...(19): siRNA sense strand
caaugaaagcuuuagguua

SEQ ID NO: 482006 - RNA, 19 nt, Homo sapiens
  misc_RNA (1)...(19): siRNA sense strand
ggaccuuagugaauauaaa

SEQ ID NO: 482007 - RNA, 19 nt, Homo sapiens
  misc_RNA (1)...(19): siRNA sense strand
ggaaauugaugaguauauc

SEQ ID NO: 482008 - RNA, 19 nt, Homo sapiens
  misc_RNA (1)...(19): siRNA sense strand
cggaagaccucaagaaagu

SEQ ID NO: 482009 - RNA, 19 nt, Homo sapiens
  misc_RNA (1)...(19): siRNA sense strand
gcaucaaguuuauagaaga

SEQ ID NO: 482010 - RNA, 19 nt, Homo sapiens
  misc_RNA (1)...(19): siRNA sense strand
gcacccagcuuaucuugca

SEQ ID NO: 482011 - RNA, 19 nt, Homo sapiens
  misc_RNA (1)...(19): siRNA sense strand
ggaagaaucggacccaaga

SEQ ID NO: 482012 - RNA, 19 nt, Homo sapiens
  misc_RNA (1)...(19): siRNA sense strand
ugaaauccuugaugaaguu

SEQ ID NO: 482013 - RNA, 19 nt, Homo sapiens
  misc_RNA (1)...(19): siRNA sense strand
gcugauaguuucaaagcaa

SEQ ID NO: 482014 - RNA, 19 nt, Homo sapiens
  misc_RNA (1)...(19): siRNA sense strand
gagaccauauccuuaaaug

SEQ ID NO: 482015 - RNA, 19 nt, Homo sapiens
  misc_RNA (1)...(19): siRNA sense strand
uaaagaggccguuaaggaa

SEQ ID NO: 482016 - RNA, 19 nt, Homo sapiens
  misc_RNA (1)...(19): siRNA sense strand
guagauccaagcuugauua

SEQ ID NO: 482017 - RNA, 19 nt, Homo sapiens
  misc_RNA (1)...(19): siRNA sense strand
uggagaagauguugaaaug

SEQ ID NO: 482018 - RNA, 19 nt, Homo sapiens
  misc_RNA (1)...(19): siRNA sense strand
cagcaguucucuucucuga

SEQ ID NO: 482019 - RNA, 19 nt, Homo sapiens
  misc_RNA (1)...(19): siRNA sense strand
gaugacacguucuccaguu

SEQ ID NO: 482020 - RNA, 19 nt, Homo sapiens
  misc_RNA (1)...(19): siRNA sense strand
caaaggcauucaucauaga

SEQ ID NO: 482021 - RNA, 19 nt, Homo sapiens
  misc_RNA (1)...(19): siRNA sense strand
gauaugauaccggaccuua

SEQ ID NO: 482022 - RNA, 19 nt, Homo sapiens
  misc_RNA (1)...(19): siRNA sense strand
gggaugcagcuauuuauuu

SEQ ID NO: 482023 - RNA, 19 nt, Homo sapiens
  misc_RNA (1)...(19): siRNA sense strand
ccaagugacuacaagaaau

SEQ ID NO: 482024 - RNA, 19 nt, Homo sapiens
  misc_RNA (1)...(19): siRNA sense strand
ugauugacauguauucuga

SEQ ID NO: 482025 - RNA, 19 nt, Homo sapiens
  misc_RNA (1)...(19): siRNA sense strand
uaauaaagcaguagagguu

SEQ ID NO: 482026 - RNA, 19 nt, Homo sapiens
  misc_RNA (1)...(19): siRNA sense strand
cauugaagcuauaagagaa

SEQ ID NO: 482027 - RNA, 19 nt, Homo sapiens
  misc_RNA (1)...(19): siRNA sense strand
ggauucagcagauaauuga

SEQ ID NO: 482028 - RNA, 19 nt, Homo sapiens
  misc_RNA (1)...(19): siRNA sense strand
aaacuucgcuaucucauac

SEQ ID NO: 482029 - RNA, 19 nt, Homo sapiens
  misc_RNA (1)...(19): siRNA sense strand
acaaugaaaccaagaauga

SEQ ID NO: 482030 - RNA, 19 nt, Homo sapiens
  misc_RNA (1)...(19): siRNA sense strand
caaauggacccucauggaa

SEQ ID NO: 482031 - RNA, 19 nt, Homo sapiens
  misc_RNA (1)...(19): siRNA sense strand
ugaaauagaacuucgaaug

SEQ ID NO: 482032 - RNA, 19 nt, Homo sapiens
  misc_RNA (1)...(19): siRNA sense strand
uaccggaccuuagugaaua

SEQ ID NO: 482033 - RNA, 19 nt, Homo sapiens
  misc_RNA (1)...(19): siRNA sense strand
gggaacagcucugaaagca

SEQ ID NO: 482034 - RNA, 19 nt, Homo sapiens
  misc_RNA (1)...(19): siRNA sense strand
ugacaaaccuuccuuuacg

SEQ ID NO: 482035 - RNA, 19 nt, Homo sapiens
  misc_RNA (1)...(19): siRNA sense strand
gaacaacaggcugauaguu

SEQ ID NO: 482036 - RNA, 19 nt, Homo sapiens
  misc_RNA (1)...(19): siRNA sense strand
gauguucucucugauuaug

SEQ ID NO: 482037 - RNA, 19 nt, Homo sapiens
  misc_RNA (1)...(19): siRNA sense strand
gcauuuaucauucacauca

SEQ ID NO: 482038 - RNA, 19 nt, Homo sapiens
  misc_RNA (1)...(19): siRNA sense strand
ggaugcagcuauuuauuuu

SEQ ID NO: 482039 - RNA, 19 nt, Homo sapiens
  misc_RNA (1)...(19): siRNA sense strand
gaacuugaccggaaugaac

SEQ ID NO: 482040 - RNA, 19 nt, Homo sapiens
  misc_RNA (1)...(19): siRNA sense strand
ggauggugcuuguugacuu

SEQ ID NO: 482041 - RNA, 19 nt, Homo sapiens
  misc_RNA (1)...(19): siRNA sense strand
acaaaggcauucaucauag

SEQ ID NO: 482042 - RNA, 19 nt, Homo sapiens
  misc_RNA (1)...(19): siRNA sense strand
acacucaguugaaguauca

SEQ ID NO: 482043 - RNA, 19 nt, Homo sapiens
  misc_RNA (1)...(19): siRNA sense strand
gaaagugacaagcauuuua

SEQ ID NO: 482044 - RNA, 19 nt, Homo sapiens
  misc_RNA (1)...(19): siRNA sense strand
gacauugugugggaaauug

SEQ ID NO: 482045 - RNA, 19 nt, Homo sapiens
  misc_RNA (1)...(19): siRNA sense strand
ggaaguuuaccacuacaaa

SEQ ID NO: 482046 - RNA, 19 nt, Homo sapiens
  misc_RNA (1)...(19): siRNA sense strand
gcucgaauauucccaagag

SEQ ID NO: 482047 - RNA, 19 nt, Homo sapiens
  misc_RNA (1)...(19): siRNA sense strand
gaaagaugacaaaggcauu

SEQ ID NO: 482048 - RNA, 19 nt, Homo sapiens
  misc_RNA (1)...(19): siRNA sense strand
uugauguucucucugauua

SEQ ID NO: 482049 - RNA, 19 nt, Homo sapiens
  misc_RNA (1)...(19): siRNA sense strand
aaagagguauuggaagauu

SEQ ID NO: 482050 - RNA, 19 nt, Homo sapiens
  misc_RNA (1)...(19): siRNA sense strand
gggagacccuacaagaaga

SEQ ID NO: 482051 - RNA, 19 nt, Homo sapiens
  misc_RNA (1)...(19): siRNA sense strand
gaauccuaaugccaucaua

SEQ ID NO: 482052 - RNA, 19 nt, Homo sapiens
  misc_RNA (1)...(19): siRNA sense strand
agaagaucuugcagcauua

SEQ ID NO: 482053 - RNA, 19 nt, Homo sapiens
  misc_RNA (1)...(19): siRNA sense strand
caucauagaaagcuuaaga

SEQ ID NO: 482054 - RNA, 19 nt, Homo sapiens
  misc_RNA (1)...(19): siRNA sense strand
gaagaauuuucccgcuuua

SEQ ID NO: 482055 - RNA, 19 nt, Homo sapiens
  misc_RNA (1)...(19): siRNA sense strand
caguggauaucaagcuuaa

SEQ ID NO: 482056 - RNA, 19 nt, Homo sapiens
  misc_RNA (1)...(19): siRNA sense strand
gcauugaagcuauaagaga

SEQ ID NO: 482057 - RNA, 19 nt, Homo sapiens
  misc_RNA (1)...(19): siRNA sense strand
gaaagcucuucccaaugaa

SEQ ID NO: 482058 - RNA, 19 nt, Homo sapiens
  misc_RNA (1)...(19): siRNA sense strand
ugacuuaccaggugugauu

SEQ ID NO: 482059 - RNA, 19 nt, Homo sapiens
  misc_RNA (1)...(19): siRNA sense strand
ggaaaugauugcccaagcu

SEQ ID NO: 482060 - RNA, 19 nt, Homo sapiens
  misc_RNA (1)...(19): siRNA sense strand
acacagcucuggaauaaaa

SEQ ID NO: 482061 - RNA, 19 nt, Homo sapiens
  misc_RNA (1)...(19): siRNA sense strand
ugugggaaauugaugagua

SEQ ID NO: 482062 - RNA, 19 nt, Homo sapiens
  misc_RNA (1)...(19): siRNA sense strand
cuaaaccauuguaaccuuu

SEQ ID NO: 482063 - RNA, 19 nt, Homo sapiens
  misc_RNA (1)...(19): siRNA sense strand
agagcaugaugacauauuu

SEQ ID NO: 482064 - RNA, 19 nt, Homo sapiens
  misc_RNA (1)...(19): siRNA sense strand
caacucaugugauugaaaa

SEQ ID NO: 482065 - RNA, 19 nt, Homo sapiens
  misc_RNA (1)...(19): siRNA sense strand
caagugacuacaagaaauu

SEQ ID NO: 482066 - RNA, 19 nt, Homo sapiens
  misc_RNA (1)...(19): siRNA sense strand
gcuaaaggcacaccaagug

SEQ ID NO: 482067 - RNA, 19 nt, Homo sapiens
  misc_RNA (1)...(19): siRNA sense strand
gagaauaugaagaagaguu

SEQ ID NO: 482068 - RNA, 19 nt, Homo sapiens
  misc_RNA (1)...(19): siRNA sense strand
gcaguauuguuacagacuu

SEQ ID NO: 482069 - RNA, 19 nt, Homo sapiens
  misc_RNA (1)...(19): siRNA sense strand
uggaaagacuaguguguug

SEQ ID NO: 482070 - RNA, 19 nt, Homo sapiens
  misc_RNA (1)...(19): siRNA sense strand
ggagaacaaagaauugaga

SEQ ID NO: 482071 - RNA, 19 nt, Homo sapiens
  misc_RNA (1)...(19): siRNA sense strand
gaaagagcaugaugacaua

SEQ ID NO: 482072 - RNA, 19 nt, Homo sapiens
  misc_RNA (1)...(19): siRNA sense strand
gaacagcucugaaagcauu

SEQ ID NO: 482073 - RNA, 19 nt, Homo sapiens
  misc_RNA (1)...(19): siRNA sense strand
gagaagauguugaaaugua

SEQ ID NO: 482074 - RNA, 19 nt, Homo sapiens
  misc_RNA (1)...(19): siRNA sense strand
gaggacagcuugaggguua

SEQ ID NO: 482075 - RNA, 19 nt, Homo sapiens
  misc_RNA (1)...(19): siRNA sense strand
gaaacugaauggaagaaua

SEQ ID NO: 482076 - RNA, 19 nt, Homo sapiens
  misc_RNA (1)...(19): siRNA sense strand
aaagaaggcuguaccguua

SEQ ID NO: 482077 - RNA, 19 nt, Homo sapiens
  misc_RNA (1)...(19): siRNA sense strand
aaacacagcucuggaauaa

SEQ ID NO: 482078 - RNA, 19 nt, Homo sapiens
  misc_RNA (1)...(19): siRNA sense strand
gaaauagaacuucgaauga

SEQ ID NO: 482079 - RNA, 19 nt, Homo sapiens
  misc_RNA (1)...(19): siRNA sense strand
gcaaugauguggucuuguu

SEQ ID NO: 482080 - RNA, 19 nt, Homo sapiens
  misc_RNA (1)...(19): siRNA sense strand
gaccauauccuuaaaugua

SEQ ID NO: 482081 - RNA, 19 nt, Homo sapiens
  misc_RNA (1)...(19): siRNA sense strand
gcaaugggaugcagcuauu

SEQ ID NO: 482082 - RNA, 19 nt, Homo sapiens
  misc_RNA (1)...(19): siRNA sense strand
cagcuuaucuugcaaguga

SEQ ID NO: 482083 - RNA, 19 nt, Homo sapiens
  misc_RNA (1)...(19): siRNA sense strand
gaaguuaggcgauuagaga

SEQ ID NO: 482084 - RNA, 19 nt, Homo sapiens
  misc_RNA (1)...(19): siRNA sense strand
gacaaaggcauucaucaua

SEQ ID NO: 482085 - RNA, 19 nt, Homo sapiens
  misc_RNA (1)...(19): siRNA sense strand
gauccaagcuugauuaagg

SEQ ID NO: 482086 - RNA, 19 nt, Homo sapiens
  misc_RNA (1)...(19): siRNA sense strand
ggaagaaaguauuaaacga

SEQ ID NO: 482087 - RNA, 19 nt, Homo sapiens
  misc_RNA (1)...(19): siRNA sense strand
aaacagcucuaaaccauug

SEQ ID NO: 482088 - RNA, 19 nt, Homo sapiens
  misc_RNA (1)...(19): siRNA sense strand
ugacauguauucugaaguu

SEQ ID NO: 482089 - RNA, 19 nt, Homo sapiens
  misc_RNA (1)...(19): siRNA sense strand
gaagaccucaagaaaguua

SEQ ID NO: 482090 - RNA, 19 nt, Homo sapiens
  misc_RNA (1)...(19): siRNA sense strand
gcugaacgcaguauuguua

SEQ ID NO: 482091 - RNA, 19 nt, Homo sapiens
  misc_RNA (1)...(19): siRNA sense strand
gauggugcuuguugacuua

SEQ ID NO: 482092 - RNA, 19 nt, Homo sapiens
  misc_RNA (1)...(19): siRNA sense strand
ggacauccuuucagcaguu

SEQ ID NO: 482093 - RNA, 19 nt, Homo sapiens
  misc_RNA (1)...(19): siRNA sense strand
gaaacacagcucuggaaua

SEQ ID NO: 482094 - RNA, 19 nt, Homo sapiens
  misc_RNA (1)...(19): siRNA sense strand
ggaaauccuucaacaaucu

SEQ ID NO: 482095 - RNA, 19 nt, Homo sapiens
  misc_RNA (1)...(19): siRNA sense strand
gcagauaauugaaggaaag

SEQ ID NO: 482096 - RNA, 19 nt, Homo sapiens
  misc_RNA (1)...(19): siRNA sense strand
ugaaagcauugaagcuaua

SEQ ID NO: 482097 - RNA, 19 nt, Homo sapiens
  misc_RNA (1)...(19): siRNA sense strand
ggaaagagcaugaugacau

SEQ ID NO: 482098 - RNA, 19 nt, Homo sapiens
  misc_RNA (1)...(19): siRNA sense strand
ucacgaagcauuuaucauu

SEQ ID NO: 482099 - RNA, 19 nt, Homo sapiens
  misc_RNA (1)...(19): siRNA sense strand
gcaguucucuucucugaca

SEQ ID NO: 482100 - RNA, 19 nt, Homo sapiens
  misc_RNA (1)...(19): siRNA sense strand
uuaaagagguauuggaaga

SEQ ID NO: 482101 - RNA, 19 nt, Homo sapiens
  misc_RNA (1)...(19): siRNA sense strand
aaacugaaauucucuccaa

SEQ ID NO: 482102 - RNA, 19 nt, Homo sapiens
  misc_RNA (1)...(19): siRNA sense strand
ggcaacaacuuacaaauac

SEQ ID NO: 482103 - RNA, 19 nt, Homo sapiens
  misc_RNA (1)...(19): siRNA sense strand
gaagaccgauccauaucug

SEQ ID NO: 482104 - RNA, 19 nt, Homo sapiens
  misc_RNA (1)...(19): siRNA sense strand
ugaccggaaugaacuauuu

SEQ ID NO: 482105 - RNA, 19 nt, Homo sapiens
  misc_RNA (1)...(19): siRNA sense strand
caaugaaagcuuuagguua

SEQ ID NO: 482106 - RNA, 19 nt, Homo sapiens
  misc_RNA (1)...(19): siRNA sense strand
ggaccuuagugaauauaaa

SEQ ID NO: 482107 - RNA, 19 nt, Homo sapiens
  misc_RNA (1)...(19): siRNA sense strand
ggaaauugaugaguauauc

SEQ ID NO: 482108 - RNA, 19 nt, Homo sapiens
  misc_RNA (1)...(19): siRNA sense strand
cggaagaccucaagaaagu

SEQ ID NO: 482109 - RNA, 19 nt, Homo sapiens
  misc_RNA (1)...(19): siRNA sense strand
gcaucaaguuuauagaaga

SEQ ID NO: 482110 - RNA, 19 nt, Homo sapiens
  misc_RNA (1)...(19): siRNA sense strand
gcacccagcuuaucuugca

SEQ ID NO: 482111 - RNA, 19 nt, Homo sapiens
  misc_RNA (1)...(19): siRNA sense strand
ggaagaaucggacccaaga

SEQ ID NO: 482112 - RNA, 19 nt, Homo sapiens
  misc_RNA (1)...(19): siRNA sense strand
ugaaauccuugaugaaguu

SEQ ID NO: 482113 - RNA, 19 nt, Homo sapiens
  misc_RNA (1)...(19): siRNA sense strand
gcugauaguuucaaagcaa

SEQ ID NO: 482114 - RNA, 19 nt, Homo sapiens
  misc_RNA (1)...(19): siRNA sense strand
gagaccauauccuuaaaug

SEQ ID NO: 482115 - RNA, 19 nt, Homo sapiens
  misc_RNA (1)...(19): siRNA sense strand
uaaagaggccguuaaggaa

SEQ ID NO: 482116 - RNA, 19 nt, Homo sapiens
  misc_RNA (1)...(19): siRNA sense strand
guagauccaagcuugauua

SEQ ID NO: 482117 - RNA, 19 nt, Homo sapiens
  misc_RNA (1)...(19): siRNA sense strand
uggagaagauguugaaaug

SEQ ID NO: 482118 - RNA, 19 nt, Homo sapiens
  misc_RNA (1)...(19): siRNA sense strand
cagcaguucucuucucuga

SEQ ID NO: 482119 - RNA, 19 nt, Homo sapiens
  misc_RNA (1)...(19): siRNA sense strand
gaugacacguucuccaguu

SEQ ID NO: 482120 - RNA, 19 nt, Homo sapiens
  misc_RNA (1)...(19): siRNA sense strand
caaaggcauucaucauaga

SEQ ID NO: 482121 - RNA, 19 nt, Homo sapiens
  misc_RNA (1)...(19): siRNA sense strand
gauaugauaccggaccuua

SEQ ID NO: 482122 - RNA, 19 nt, Homo sapiens
  misc_RNA (1)...(19): siRNA sense strand
gggaugcagcuauuuauuu

SEQ ID NO: 482123 - RNA, 19 nt, Homo sapiens
  misc_RNA (1)...(19): siRNA sense strand
ccaagugacuacaagaaau

SEQ ID NO: 482124 - RNA, 19 nt, Homo sapiens
  misc_RNA (1)...(19): siRNA sense strand
ugauugacauguauucuga

SEQ ID NO: 482125 - RNA, 19 nt, Homo sapiens
  misc_RNA (1)...(19): siRNA sense strand
uaauaaagcaguagagguu

SEQ ID NO: 482126 - RNA, 19 nt, Homo sapiens
  misc_RNA (1)...(19): siRNA sense strand
cauugaagcuauaagagaa

SEQ ID NO: 482127 - RNA, 19 nt, Homo sapiens
  misc_RNA (1)...(19): siRNA sense strand
ggauucagcagauaauuga

SEQ ID NO: 482128 - RNA, 19 nt, Homo sapiens
  misc_RNA (1)...(19): siRNA sense strand
aaacuucgcuaucucauac

SEQ ID NO: 482129 - RNA, 19 nt, Homo sapiens
  misc_RNA (1)...(19): siRNA sense strand
acaaugaaaccaagaauga

SEQ ID NO: 482130 - RNA, 19 nt, Homo sapiens
  misc_RNA (1)...(19): siRNA sense strand
caaauggacccucauggaa

SEQ ID NO: 482131 - RNA, 19 nt, Homo sapiens
  misc_RNA (1)...(19): siRNA sense strand
ugaaauagaacuucgaaug

SEQ ID NO: 482132 - RNA, 19 nt, Homo sapiens
  misc_RNA (1)...(19): siRNA sense strand
uaccggaccuuagugaaua

SEQ ID NO: 482133 - RNA, 19 nt, Homo sapiens
  misc_RNA (1)...(19): siRNA sense strand
gggaacagcucugaaagca

SEQ ID NO: 482134 - RNA, 19 nt, Homo sapiens
  misc_RNA (1)...(19): siRNA sense strand
ugacaaaccuuccuuuacg

SEQ ID NO: 482135 - RNA, 19 nt, Homo sapiens
  misc_RNA (1)...(19): siRNA sense strand
gaacaacaggcugauaguu

SEQ ID NO: 482136 - RNA, 19 nt, Homo sapiens
  misc_RNA (1)...(19): siRNA sense strand
gauguucucucugauuaug

SEQ ID NO: 482137 - RNA, 19 nt, Homo sapiens
  misc_RNA (1)...(19): siRNA sense strand
gcauuuaucauucacauca

SEQ ID NO: 482138 - RNA, 19 nt, Homo sapiens
  misc_RNA (1)...(19): siRNA sense strand
ggaugcagcuauuuauuuu

SEQ ID NO: 482139 - RNA, 19 nt, Homo sapiens
  misc_RNA (1)...(19): siRNA sense strand
gaacuugaccggaaugaac

SEQ ID NO: 482140 - RNA, 19 nt, Homo sapiens
  misc_RNA (1)...(19): siRNA sense strand
ggauggugcuuguugacuu

SEQ ID NO: 482141 - RNA, 19 nt, Homo sapiens
  misc_RNA (1)...(19): siRNA sense strand
acaaaggcauucaucauag

SEQ ID NO: 482142 - RNA, 19 nt, Homo sapiens
  misc_RNA (1)...(19): siRNA sense strand
acacucaguugaaguauca

SEQ ID NO: 482143 - RNA, 19 nt, Homo sapiens
  misc_RNA (1)...(19): siRNA sense strand
gaaagugacaagcauuuua

SEQ ID NO: 482144 - RNA, 19 nt, Homo sapiens
  misc_RNA (1)...(19): siRNA sense strand
gacauugugugggaaauug

SEQ ID NO: 482145 - RNA, 19 nt, Homo sapiens
  misc_RNA (1)...(19): siRNA sense strand
ggaaguuuaccacuacaaa

SEQ ID NO: 482146 - RNA, 19 nt, Homo sapiens
  misc_RNA (1)...(19): siRNA sense strand
gcucgaauauucccaagag

SEQ ID NO: 482147 - RNA, 19 nt, Homo sapiens
  misc_RNA (1)...(19): siRNA sense strand
gaaagaugacaaaggcauu

SEQ ID NO: 482148 - RNA, 19 nt, Homo sapiens
  misc_RNA (1)...(19): siRNA sense strand
uugauguucucucugauua

SEQ ID NO: 482149 - RNA, 19 nt, Homo sapiens
  misc_RNA (1)...(19): siRNA sense strand
aaagagguauuggaagauu

SEQ ID NO: 482150 - RNA, 19 nt, Homo sapiens
  misc_RNA (1)...(19): siRNA sense strand
gggagacccuacaagaaga

SEQ ID NO: 482151 - RNA, 19 nt, Homo sapiens
  misc_RNA (1)...(19): siRNA sense strand
gaauccuaaugccaucaua

SEQ ID NO: 482152 - RNA, 19 nt, Homo sapiens
  misc_RNA (1)...(19): siRNA sense strand
agaagaucuugcagcauua

SEQ ID NO: 482153 - RNA, 19 nt, Homo sapiens
  misc_RNA (1)...(19): siRNA sense strand
caucauagaaagcuuaaga

SEQ ID NO: 482154 - RNA, 19 nt, Homo sapiens
  misc_RNA (1)...(19): siRNA sense strand
gaagaauuuucccgcuuua

SEQ ID NO: 482155 - RNA, 19 nt, Homo sapiens
  misc_RNA (1)...(19): siRNA sense strand
caguggauaucaagcuuaa

SEQ ID NO: 482156 - RNA, 19 nt, Homo sapiens
  misc_RNA (1)...(19): siRNA sense strand
gcauugaagcuauaagaga

SEQ ID NO: 482157 - RNA, 19 nt, Homo sapiens
  misc_RNA (1)...(19): siRNA sense strand
gaaagcucuucccaaugaa

SEQ ID NO: 482158 - RNA, 19 nt, Homo sapiens
  misc_RNA (1)...(19): siRNA sense strand
ugacuuaccaggugugauu

SEQ ID NO: 482159 - RNA, 19 nt, Homo sapiens
  misc_RNA (1)...(19): siRNA sense strand
ggaaaugauugcccaagcu

SEQ ID NO: 482160 - RNA, 19 nt, Homo sapiens
  misc_RNA (1)...(19): siRNA sense strand
acacagcucuggaauaaaa

SEQ ID NO: 482161 - RNA, 19 nt, Homo sapiens
  misc_RNA (1)...(19): siRNA sense strand
ugugggaaauugaugagua

SEQ ID NO: 482162 - RNA, 19 nt, Homo sapiens
  misc_RNA (1)...(19): siRNA sense strand
cuaaaccauuguaaccuuu

SEQ ID NO: 482163 - RNA, 19 nt, Homo sapiens
  misc_RNA (1)...(19): siRNA sense strand
agagcaugaugacauauuu

SEQ ID NO: 482164 - RNA, 19 nt, Homo sapiens
  misc_RNA (1)...(19): siRNA sense strand
caacucaugugauugaaaa

SEQ ID NO: 482165 - RNA, 19 nt, Homo sapiens
  misc_RNA (1)...(19): siRNA sense strand
caagugacuacaagaaauu

SEQ ID NO: 482166 - RNA, 19 nt, Homo sapiens
  misc_RNA (1)...(19): siRNA sense strand
gcuaaaggcacaccaagug

SEQ ID NO: 482167 - RNA, 19 nt, Homo sapiens
  misc_RNA (1)...(19): siRNA sense strand
gagaauaugaagaagaguu

SEQ ID NO: 482168 - RNA, 19 nt, Homo sapiens
  misc_RNA (1)...(19): siRNA sense strand
gcaguauuguuacagacuu

SEQ ID NO: 482169 - RNA, 19 nt, Homo sapiens
  misc_RNA (1)...(19): siRNA sense strand
uggaaagacuaguguguug

SEQ ID NO: 482170 - RNA, 19 nt, Homo sapiens
  misc_RNA (1)...(19): siRNA sense strand
ggagaacaaagaauugaga

SEQ ID NO: 482171 - RNA, 19 nt, Homo sapiens
  misc_RNA (1)...(19): siRNA sense strand
gcacugaugucucuucuua

SEQ ID NO: 482172 - RNA, 19 nt, Homo sapiens
  misc_RNA (1)...(19): siRNA sense strand
gaaaggaguucuuccauau

SEQ ID NO: 482173 - RNA, 19 nt, Homo sapiens
  misc_RNA (1)...(19): siRNA sense strand
ucaaggagcugaagaaauu

SEQ ID NO: 482174 - RNA, 19 nt, Homo sapiens
  misc_RNA (1)...(19): siRNA sense strand
gcaguggugugaagaauua

SEQ ID NO: 482175 - RNA, 19 nt, Homo sapiens
  misc_RNA (1)...(19): siRNA sense strand
cagaauaucuccagacuuu

SEQ ID NO: 482176 - RNA, 19 nt, Homo sapiens
  misc_RNA (1)...(19): siRNA sense strand
gaaagagcaugaagauauu

SEQ ID NO: 482177 - RNA, 19 nt, Homo sapiens
  misc_RNA (1)...(19): siRNA sense strand
gagaguaccuuccuacauu

SEQ ID NO: 482178 - RNA, 19 nt, Homo sapiens
  misc_RNA (1)...(19): siRNA sense strand
caagaggacuuacuagaaa

SEQ ID NO: 482179 - RNA, 19 nt, Homo sapiens
  misc_RNA (1)...(19): siRNA sense strand
gcacuuaccucacccauca

SEQ ID NO: 482180 - RNA, 19 nt, Homo sapiens
  misc_RNA (1)...(19): siRNA sense strand
caaacuuccugcaagauua

SEQ ID NO: 482181 - RNA, 19 nt, Homo sapiens
  misc_RNA (1)...(19): siRNA sense strand
ggguguaucuaaccuauua

SEQ ID NO: 482182 - RNA, 19 nt, Homo sapiens
  misc_RNA (1)...(19): siRNA sense strand
gaacagcuauugagucaca

SEQ ID NO: 482183 - RNA, 19 nt, Homo sapiens
  misc_RNA (1)...(19): siRNA sense strand
gagggaagauugaguuuga

SEQ ID NO: 482184 - RNA, 19 nt, Homo sapiens
  misc_RNA (1)...(19): siRNA sense strand
gguuguaacuuguuccuua

SEQ ID NO: 482185 - RNA, 19 nt, Homo sapiens
  misc_RNA (1)...(19): siRNA sense strand
gaaauggaauucucuucuu

SEQ ID NO: 482186 - RNA, 19 nt, Homo sapiens
  misc_RNA (1)...(19): siRNA sense strand
acaguuggcucccuacuua

SEQ ID NO: 482187 - RNA, 19 nt, Homo sapiens
  misc_RNA (1)...(19): siRNA sense strand
aaacaacaaugcuuccaua

SEQ ID NO: 482188 - RNA, 19 nt, Homo sapiens
  misc_RNA (1)...(19): siRNA sense strand
caagcaaccugaagccaua

SEQ ID NO: 482189 - RNA, 19 nt, Homo sapiens
  misc_RNA (1)...(19): siRNA sense strand
gcgaaaggaugcuugcuaa

SEQ ID NO: 482190 - RNA, 19 nt, Homo sapiens
  misc_RNA (1)...(19): siRNA sense strand
caacaugggcagcuauuua

SEQ ID NO: 482191 - RNA, 19 nt, Homo sapiens
  misc_RNA (1)...(19): siRNA sense strand
caucuaagguuucuuucua

SEQ ID NO: 482192 - RNA, 19 nt, Homo sapiens
  misc_RNA (1)...(19): siRNA sense strand
uaacguauaucucaaagga

SEQ ID NO: 482193 - RNA, 19 nt, Homo sapiens
  misc_RNA (1)...(19): siRNA sense strand
gcagcuauuuaaccauuua

SEQ ID NO: 482194 - RNA, 19 nt, Homo sapiens
  misc_RNA (1)...(19): siRNA sense strand
gagagguaauggcuacuua

SEQ ID NO: 482195 - RNA, 19 nt, Homo sapiens
  misc_RNA (1)...(19): siRNA sense strand
acacuguggucucuuauua

SEQ ID NO: 482196 - RNA, 19 nt, Homo sapiens
  misc_RNA (1)...(19): siRNA sense strand
ggagagcuauuacauggaa

SEQ ID NO: 482197 - RNA, 19 nt, Homo sapiens
  misc_RNA (1)...(19): siRNA sense strand
guacacaacuauuuaaugg

SEQ ID NO: 482198 - RNA, 19 nt, Homo sapiens
  misc_RNA (1)...(19): siRNA sense strand
agaaagaugucaccacaaa

SEQ ID NO: 482199 - RNA, 19 nt, Homo sapiens
  misc_RNA (1)...(19): siRNA sense strand
uaauacaacugccuucaaa

SEQ ID NO: 482200 - RNA, 19 nt, Homo sapiens
  misc_RNA (1)...(19): siRNA sense strand
gguacuggguguaaauaua

SEQ ID NO: 482201 - RNA, 19 nt, Homo sapiens
  misc_RNA (1)...(19): siRNA sense strand
ugaaaggaguucuuccaua

SEQ ID NO: 482202 - RNA, 19 nt, Homo sapiens
  misc_RNA (1)...(19): siRNA sense strand
uagauuugcugaugagaua

SEQ ID NO: 482203 - RNA, 19 nt, Homo sapiens
  misc_RNA (1)...(19): siRNA sense strand
gaagaaagagcaugaagau

SEQ ID NO: 482204 - RNA, 19 nt, Homo sapiens
  misc_RNA (1)...(19): siRNA sense strand
agccaaaccucuugaaaua

SEQ ID NO: 482205 - RNA, 19 nt, Homo sapiens
  misc_RNA (1)...(19): siRNA sense strand
aaacacauuugccagauuu

SEQ ID NO: 482206 - RNA, 19 nt, Homo sapiens
  misc_RNA (1)...(19): siRNA sense strand
gaauggaaguauuauggaa

SEQ ID NO: 482207 - RNA, 19 nt, Homo sapiens
  misc_RNA (1)...(19): siRNA sense strand
gagaaaggaaacagucuua

SEQ ID NO: 482208 - RNA, 19 nt, Homo sapiens
  misc_RNA (1)...(19): siRNA sense strand
caguugaggucccaaauaa

SEQ ID NO: 482209 - RNA, 19 nt, Homo sapiens
  misc_RNA (1)...(19): siRNA sense strand
gaggaagcauccaaaguga

SEQ ID NO: 482210 - RNA, 19 nt, Homo sapiens
  misc_RNA (1)...(19): siRNA sense strand
gcucucugguguaaauuua

SEQ ID NO: 482211 - RNA, 19 nt, Homo sapiens
  misc_RNA (1)...(19): siRNA sense strand
agacguauauguugaaaga

SEQ ID NO: 482212 - RNA, 19 nt, Homo sapiens
  misc_RNA (1)...(19): siRNA sense strand
uuagauaacccaccuauuu

SEQ ID NO: 482213 - RNA, 19 nt, Homo sapiens
  misc_RNA (1)...(19): siRNA sense strand
caacaaugcuuccauacca

SEQ ID NO: 482214 - RNA, 19 nt, Homo sapiens
  misc_RNA (1)...(19): siRNA sense strand
caucacaaauccaaaguug

SEQ ID NO: 482215 - RNA, 19 nt, Homo sapiens
  misc_RNA (1)...(19): siRNA sense strand
caucagaauggaaguauua

SEQ ID NO: 482216 - RNA, 19 nt, Homo sapiens
  misc_RNA (1)...(19): siRNA sense strand
cuucaaagcugcaucauca

SEQ ID NO: 482217 - RNA, 19 nt, Homo sapiens
  misc_RNA (1)...(19): siRNA sense strand
aaacaaagaugugucugaa

SEQ ID NO: 482218 - RNA, 19 nt, Homo sapiens
  misc_RNA (1)...(19): siRNA sense strand
gaacagugccuggauuuau

SEQ ID NO: 482219 - RNA, 19 nt, Homo sapiens
  misc_RNA (1)...(19): siRNA sense strand
ccgaagagcucauugaagu

SEQ ID NO: 482220 - RNA, 19 nt, Homo sapiens
  misc_RNA (1)...(19): siRNA sense strand
gaaagaauuuagugcucaa

SEQ ID NO: 482221 - RNA, 19 nt, Homo sapiens
  misc_RNA (1)...(19): siRNA sense strand
gaaaggaaacagucuuaga

SEQ ID NO: 482222 - RNA, 19 nt, Homo sapiens
  misc_RNA (1)...(19): siRNA sense strand
cagauugucuuuguaauga

SEQ ID NO: 482223 - RNA, 19 nt, Homo sapiens
  misc_RNA (1)...(19): siRNA sense strand
gaaaaggcauguccuaguu

SEQ ID NO: 482224 - RNA, 19 nt, Homo sapiens
  misc_RNA (1)...(19): siRNA sense strand
caacaucuaagguuucuuu

SEQ ID NO: 482225 - RNA, 19 nt, Homo sapiens
  misc_RNA (1)...(19): siRNA sense strand
gaaauugacagucuuguag

SEQ ID NO: 482226 - RNA, 19 nt, Homo sapiens
  misc_RNA (1)...(19): siRNA sense strand
agaaagagcaugaagauau

SEQ ID NO: 482227 - RNA, 19 nt, Homo sapiens
  misc_RNA (1)...(19): siRNA sense strand
gaaaggaugcuugcuaaug

SEQ ID NO: 482228 - RNA, 19 nt, Homo sapiens
  misc_RNA (1)...(19): siRNA sense strand
ggaagagauugaacagaug

SEQ ID NO: 482229 - RNA, 19 nt, Homo sapiens
  misc_RNA (1)...(19): siRNA sense strand
gagauuacuuugccuuuua

SEQ ID NO: 482230 - RNA, 19 nt, Homo sapiens
  misc_RNA (1)...(19): siRNA sense strand
gcaaguaugucagcagugu

SEQ ID NO: 482231 - RNA, 19 nt, Homo sapiens
  misc_RNA (1)...(19): siRNA sense strand
caucacagcuucgggcuuu

SEQ ID NO: 482232 - RNA, 19 nt, Homo sapiens
  misc_RNA (1)...(19): siRNA sense strand
auacggagaugaagaagaa

SEQ ID NO: 482233 - RNA, 19 nt, Homo sapiens
  misc_RNA (1)...(19): siRNA sense strand
gggcagcuauuuaaccauu

SEQ ID NO: 482234 - RNA, 19 nt, Homo sapiens
  misc_RNA (1)...(19): siRNA sense strand
gaacagaugcucgucaaug

SEQ ID NO: 482235 - RNA, 19 nt, Homo sapiens
  misc_RNA (1)...(19): siRNA sense strand
gaaagaggaagcauccaaa

SEQ ID NO: 482236 - RNA, 19 nt, Homo sapiens
  misc_RNA (1)...(19): siRNA sense strand
gcugcaggaucaucuuaua

SEQ ID NO: 482237 - RNA, 19 nt, Homo sapiens
  misc_RNA (1)...(19): siRNA sense strand
gaauuuagugcucaaugua

SEQ ID NO: 482238 - RNA, 19 nt, Homo sapiens
  misc_RNA (1)...(19): siRNA sense strand
gaacaagcagcgaacuaaa

SEQ ID NO: 482239 - RNA, 19 nt, Homo sapiens
  misc_RNA (1)...(19): siRNA sense strand
ggaaccauguguacagaga

SEQ ID NO: 482240 - RNA, 19 nt, Homo sapiens
  misc_RNA (1)...(19): siRNA sense strand
aggcuuagcuuuauggaaa

SEQ ID NO: 482241 - RNA, 19 nt, Homo sapiens
  misc_RNA (1)...(19): siRNA sense strand
ccacuggguucaauaauag

SEQ ID NO: 482242 - RNA, 19 nt, Homo sapiens
  misc_RNA (1)...(19): siRNA sense strand
ucacaaacuuccugcaaga

SEQ ID NO: 482243 - RNA, 19 nt, Homo sapiens
  misc_RNA (1)...(19): siRNA sense strand
gauugaaggcugggaauua

SEQ ID NO: 482244 - RNA, 19 nt, Homo sapiens
  misc_RNA (1)...(19): siRNA sense strand
gggaaagacugucagagau

SEQ ID NO: 482245 - RNA, 19 nt, Homo sapiens
  misc_RNA (1)...(19): siRNA sense strand
gggucuagcuacugucaua

SEQ ID NO: 482246 - RNA, 19 nt, Homo sapiens
  misc_RNA (1)...(19): siRNA sense strand
gguaauacgucgggccuuu

SEQ ID NO: 482247 - RNA, 19 nt, Homo sapiens
  misc_RNA (1)...(19): siRNA sense strand
caagugugcugcaggauca

SEQ ID NO: 482248 - RNA, 19 nt, Homo sapiens
  misc_RNA (1)...(19): siRNA sense strand
acaaacaaguacacaacua

SEQ ID NO: 482249 - RNA, 19 nt, Homo sapiens
  misc_RNA (1)...(19): siRNA sense strand
gaaaauaauugcagaacug

SEQ ID NO: 482250 - RNA, 19 nt, Homo sapiens
  misc_RNA (1)...(19): siRNA sense strand
gguauuaucccaacauguu

SEQ ID NO: 482251 - RNA, 19 nt, Homo sapiens
  misc_RNA (1)...(19): siRNA sense strand
gauggacucuucuaagcuu

SEQ ID NO: 482252 - RNA, 19 nt, Homo sapiens
  misc_RNA (1)...(19): siRNA sense strand
ugaaauagccaagcuugua

SEQ ID NO: 482253 - RNA, 19 nt, Homo sapiens
  misc_RNA (1)...(19): siRNA sense strand
gcucgucaaugaucaguug

SEQ ID NO: 482254 - RNA, 19 nt, Homo sapiens
  misc_RNA (1)...(19): siRNA sense strand
cagauucgcucagcuuauu

SEQ ID NO: 482255 - RNA, 19 nt, Homo sapiens
  misc_RNA (1)...(19): siRNA sense strand
ggaagaaagagaagcuaaa

SEQ ID NO: 482256 - RNA, 19 nt, Homo sapiens
  misc_RNA (1)...(19): siRNA sense strand
guggauagauuuacaagca

SEQ ID NO: 482257 - RNA, 19 nt, Homo sapiens
  misc_RNA (1)...(19): siRNA sense strand
gcaguugaggucccaaaua

SEQ ID NO: 482258 - RNA, 19 nt, Homo sapiens
  misc_RNA (1)...(19): siRNA sense strand
ugggauaccuucucacuug

SEQ ID NO: 482259 - RNA, 19 nt, Homo sapiens
  misc_RNA (1)...(19): siRNA sense strand
uaugauaacuuacguguac

SEQ ID NO: 482260 - RNA, 19 nt, Homo sapiens
  misc_RNA (1)...(19): siRNA sense strand
gauguggccuauaacuauu

SEQ ID NO: 482261 - RNA, 19 nt, Homo sapiens
  misc_RNA (1)...(19): siRNA sense strand
ugaaagcagugacucauca

SEQ ID NO: 482262 - RNA, 19 nt, Homo sapiens
  misc_RNA (1)...(19): siRNA sense strand
auaaugagcuugauucucu

SEQ ID NO: 482263 - RNA, 19 nt, Homo sapiens
  misc_RNA (1)...(19): siRNA sense strand
gaagaaagagaagcuaaau

SEQ ID NO: 482264 - RNA, 19 nt, Homo sapiens
  misc_RNA (1)...(19): siRNA sense strand
gagguaauggcuacuuaua

SEQ ID NO: 482265 - RNA, 19 nt, Homo sapiens
  misc_RNA (1)...(19): siRNA sense strand
cuccagacuuuguuaaaua

SEQ ID NO: 482266 - RNA, 19 nt, Homo sapiens
  misc_RNA (1)...(19): siRNA sense strand
gcuauugagucacaaacuu

SEQ ID NO: 482267 - RNA, 19 nt, Homo sapiens
  misc_RNA (1)...(19): siRNA sense strand
ccacaacucuggauaccau

SEQ ID NO: 482268 - RNA, 19 nt, Homo sapiens
  misc_RNA (1)...(19): siRNA sense strand
cauaauauccuggaagaaa

SEQ ID NO: 482269 - RNA, 19 nt, Homo sapiens
  misc_RNA (1)...(19): siRNA sense strand
ggucuuaauugcacugaga

SEQ ID NO: 482270 - RNA, 19 nt, Homo sapiens
  misc_RNA (1)...(19): siRNA sense strand
acaaaugguuuacaucuag

SEQ ID NO: 482271 - RNA, 19 nt, Homo sapiens
  misc_RNA (1)...(19): siRNA sense strand
uaacagacauuaaggauga

SEQ ID NO: 482272 - RNA, 19 nt, Homo sapiens
  misc_RNA (1)...(19): siRNA sense strand
gaugaagaguucuggaaua

SEQ ID NO: 482273 - RNA, 19 nt, Homo sapiens
  misc_RNA (1)...(19): siRNA sense strand
gaaagagccaacaacguua

SEQ ID NO: 482274 - RNA, 19 nt, Homo sapiens
  misc_RNA (1)...(19): siRNA sense strand
gaaccaggcaggcuacuuu

SEQ ID NO: 482275 - RNA, 19 nt, Homo sapiens
  misc_RNA (1)...(19): siRNA sense strand
gaagaguucuggaauaggu

SEQ ID NO: 482276 - RNA, 19 nt, Homo sapiens
  misc_RNA (1)...(19): siRNA sense strand
gaugaauccugcugcauga

SEQ ID NO: 482277 - RNA, 19 nt, Homo sapiens
  misc_RNA (1)...(19): siRNA sense strand
caaggacucuuacgacuuc

SEQ ID NO: 482278 - RNA, 19 nt, Homo sapiens
  misc_RNA (1)...(19): siRNA sense strand
gaagaggaggugauugaaa

SEQ ID NO: 482279 - RNA, 19 nt, Homo sapiens
  misc_RNA (1)...(19): siRNA sense strand
ugaaagagccaacaacguu

SEQ ID NO: 482280 - RNA, 19 nt, Homo sapiens
  misc_RNA (1)...(19): siRNA sense strand
ccuuguagcucauauauag

SEQ ID NO: 482281 - RNA, 19 nt, Homo sapiens
  misc_RNA (1)...(19): siRNA sense strand
ugaaccagguggcggauuu

SEQ ID NO: 482282 - RNA, 19 nt, Homo sapiens
  misc_RNA (1)...(19): siRNA sense strand
gggagucgcuggucugauc

SEQ ID NO: 482283 - RNA, 19 nt, Homo sapiens
  misc_RNA (1)...(19): siRNA sense strand
caagaauccugccaucauc

SEQ ID NO: 482284 - RNA, 19 nt, Homo sapiens
  misc_RNA (1)...(19): siRNA sense strand
ccaacaacguuaaguaugg

SEQ ID NO: 482285 - RNA, 19 nt, Homo sapiens
  misc_RNA (1)...(19): siRNA sense strand
gcaagaauccugccaucau

SEQ ID NO: 482286 - RNA, 19 nt, Homo sapiens
  misc_RNA (1)...(19): siRNA sense strand
gaauuugccacucuacuug

SEQ ID NO: 482287 - RNA, 19 nt, Homo sapiens
  misc_RNA (1)...(19): siRNA sense strand
gagccaacaacguuaagua

SEQ ID NO: 482288 - RNA, 19 nt, Homo sapiens
  misc_RNA (1)...(19): siRNA sense strand
ggaauuugccacucuacuu

SEQ ID NO: 482289 - RNA, 19 nt, Homo sapiens
  misc_RNA (1)...(19): siRNA sense strand
ugugcaaacuccuggauaa

SEQ ID NO: 482290 - RNA, 19 nt, Homo sapiens
  misc_RNA (1)...(19): siRNA sense strand
gcaaacuccuggauaaagc

SEQ ID NO: 482291 - RNA, 19 nt, Homo sapiens
  misc_RNA (1)...(19): siRNA sense strand
gcaagaaccauggacauuc

SEQ ID NO: 482292 - RNA, 19 nt, Homo sapiens
  misc_RNA (1)...(19): siRNA sense strand
caaccuggaugagugcauu

SEQ ID NO: 482293 - RNA, 19 nt, Homo sapiens
  misc_RNA (1)...(19): siRNA sense strand
gugagggaguggauaaguu

SEQ ID NO: 482294 - RNA, 19 nt, Homo sapiens
  misc_RNA (1)...(19): siRNA sense strand
gugaagaggaggugauuga

SEQ ID NO: 482295 - RNA, 19 nt, Homo sapiens
  misc_RNA (1)...(19): siRNA sense strand
gauaacagacauuaaggau

SEQ ID NO: 482296 - RNA, 19 nt, Homo sapiens
  misc_RNA (1)...(19): siRNA sense strand
gcugaaggugcccaaauuu

SEQ ID NO: 482297 - RNA, 19 nt, Homo sapiens
  misc_RNA (1)...(19): siRNA sense strand
caucaccguuaaacacuga

SEQ ID NO: 482298 - RNA, 19 nt, Homo sapiens
  misc_RNA (1)...(19): siRNA sense strand
aagaggaggugauugaaag

SEQ ID NO: 482299 - RNA, 19 nt, Homo sapiens
  misc_RNA (1)...(19): siRNA sense strand
ggauaaagcagguguucca

SEQ ID NO: 482300 - RNA, 19 nt, Homo sapiens
  misc_RNA (1)...(19): siRNA sense strand
gagcugaaccuuccuuucg

SEQ ID NO: 482301 - RNA, 19 nt, Homo sapiens
  misc_RNA (1)...(19): siRNA sense strand
ggugauaacagacauuaag

SEQ ID NO: 482302 - RNA, 19 nt, Homo sapiens
  misc_RNA (1)...(19): siRNA sense strand
ucaaaaccaucaccguuaa

SEQ ID NO: 482303 - RNA, 19 nt, Homo sapiens
  misc_RNA (1)...(19): siRNA sense strand
caagaaccauggacauucc

SEQ ID NO: 482304 - RNA, 19 nt, Homo sapiens
  misc_RNA (1)...(19): siRNA sense strand
ggaugaagaguucuggaau

SEQ ID NO: 482305 - RNA, 19 nt, Homo sapiens
  misc_RNA (1)...(19): siRNA sense strand
uugcugaccuggaagauag

SEQ ID NO: 482306 - RNA, 19 nt, Homo sapiens
  misc_RNA (1)...(19): siRNA sense strand
guagagagggagccaagga

SEQ ID NO: 482307 - RNA, 19 nt, Homo sapiens
  misc_RNA (1)...(19): siRNA sense strand
cuucuucacugagaucaaa

SEQ ID NO: 482308 - RNA, 19 nt, Homo sapiens
  misc_RNA (1)...(19): siRNA sense strand
gcucacggguccugaacca

SEQ ID NO: 482309 - RNA, 19 nt, Homo sapiens
  misc_RNA (1)...(19): siRNA sense strand
gggaugaagaguucuggaa

SEQ ID NO: 482310 - RNA, 19 nt, Homo sapiens
  misc_RNA (1)...(19): siRNA sense strand
aaagagccaacaacguuaa

SEQ ID NO: 482311 - RNA, 19 nt, Homo sapiens
  misc_RNA (1)...(19): siRNA sense strand
cugcaugacggaagagaua

SEQ ID NO: 482312 - RNA, 19 nt, Homo sapiens
  misc_RNA (1)...(19): siRNA sense strand
gaauccugccaucaucuuu

SEQ ID NO: 482313 - RNA, 19 nt, Homo sapiens
  misc_RNA (1)...(19): siRNA sense strand
gcagggaacacugugauag

SEQ ID NO: 482314 - RNA, 19 nt, Homo sapiens
  misc_RNA (1)...(19): siRNA sense strand
ggcaagaaccauggacauu

SEQ ID NO: 482315 - RNA, 19 nt, Homo sapiens
  misc_RNA (1)...(19): siRNA sense strand
gcggugagggaguggauaa

SEQ ID NO: 482316 - RNA, 19 nt, Homo sapiens
  misc_RNA (1)...(19): siRNA sense strand
uguggucaauauuguguuu

SEQ ID NO: 482317 - RNA, 19 nt, Homo sapiens
  misc_RNA (1)...(19): siRNA sense strand
ccagguguggucaauauug

SEQ ID NO: 482318 - RNA, 19 nt, Homo sapiens
  misc_RNA (1)...(19): siRNA sense strand
ccaggcaggcuacuuuaug

SEQ ID NO: 482319 - RNA, 19 nt, Homo sapiens
  misc_RNA (1)...(19): siRNA sense strand
ugcugaaggugcccaaauu

SEQ ID NO: 482320 - RNA, 19 nt, Homo sapiens
  misc_RNA (1)...(19): siRNA sense strand
cagguguggucaauauugu

SEQ ID NO: 482321 - RNA, 19 nt, Homo sapiens
  misc_RNA (1)...(19): siRNA sense strand
gagccaaggacucuuacga

SEQ ID NO: 482322 - RNA, 19 nt, Homo sapiens
  misc_RNA (1)...(19): siRNA sense strand
gcaugacggaagagauauu

SEQ ID NO: 482323 - RNA, 19 nt, Homo sapiens
  misc_RNA (1)...(19): siRNA sense strand
ugagggaguggauaaguug

SEQ ID NO: 482324 - RNA, 19 nt, Homo sapiens
  misc_RNA (1)...(19): siRNA sense strand
ccaaggacucuuacgacuu

SEQ ID NO: 482325 - RNA, 19 nt, Homo sapiens
  misc_RNA (1)...(19): siRNA sense strand
gccaacaacguuaaguaug

SEQ ID NO: 482326 - RNA, 19 nt, Homo sapiens
  misc_RNA (1)...(19): siRNA sense strand
ucuacuugcugaccuggaa

SEQ ID NO: 482327 - RNA, 19 nt, Homo sapiens
  misc_RNA (1)...(19): siRNA sense strand
ggacucuuacgacuucuuc

SEQ ID NO: 482328 - RNA, 19 nt, Homo sapiens
  misc_RNA (1)...(19): siRNA sense strand
cuuacgacuucuucacuga

SEQ ID NO: 482329 - RNA, 19 nt, Homo sapiens
  misc_RNA (1)...(19): siRNA sense strand
gaaccagguggcggauuug

SEQ ID NO: 482330 - RNA, 19 nt, Homo sapiens
  misc_RNA (1)...(19): siRNA sense strand
caugacggaagagauauuu

SEQ ID NO: 482331 - RNA, 19 nt, Homo sapiens
  misc_RNA (1)...(19): siRNA sense strand
ccuggaauuugccacucua

SEQ ID NO: 482332 - RNA, 19 nt, Homo sapiens
  misc_RNA (1)...(19): siRNA sense strand
cugcguggauguugugcaa

SEQ ID NO: 482333 - RNA, 19 nt, Homo sapiens
  misc_RNA (1)...(19): siRNA sense strand
ucacugagaucaaaaccau

SEQ ID NO: 482334 - RNA, 19 nt, Homo sapiens
  misc_RNA (1)...(19): siRNA sense strand
augaagaguucuggaauag

SEQ ID NO: 482335 - RNA, 19 nt, Homo sapiens
  misc_RNA (1)...(19): siRNA sense strand
cagaaguuacgucaagaga

SEQ ID NO: 482336 - RNA, 19 nt, Homo sapiens
  misc_RNA (1)...(19): siRNA sense strand
gugcaaacuccuggauaaa

SEQ ID NO: 482337 - RNA, 19 nt, Homo sapiens
  misc_RNA (1)...(19): siRNA sense strand
caacaggggaaguguauug

SEQ ID NO: 482338 - RNA, 19 nt, Homo sapiens
  misc_RNA (1)...(19): siRNA sense strand
ccacggugauaacagacau

SEQ ID NO: 482339 - RNA, 19 nt, Homo sapiens
  misc_RNA (1)...(19): siRNA sense strand
ggucaauauuguguuugga

SEQ ID NO: 482340 - RNA, 19 nt, Homo sapiens
  misc_RNA (1)...(19): siRNA sense strand
gcguggauguugugcaaac

SEQ ID NO: 482341 - RNA, 19 nt, Homo sapiens
  misc_RNA (1)...(19): siRNA sense strand
caggcaggcuacuuuaugc

SEQ ID NO: 482342 - RNA, 19 nt, Homo sapiens
  misc_RNA (1)...(19): siRNA sense strand
gucaauauuguguuuggaa

SEQ ID NO: 482343 - RNA, 19 nt, Homo sapiens
  misc_RNA (1)...(19): siRNA sense strand
ggagcugaaccuuccuuuc

SEQ ID NO: 482344 - RNA, 19 nt, Homo sapiens
  misc_RNA (1)...(19): siRNA sense strand
cuggaaaacuucauagaug

SEQ ID NO: 482345 - RNA, 19 nt, Homo sapiens
  misc_RNA (1)...(19): siRNA sense strand
gagauauuugguccaguga

SEQ ID NO: 482346 - RNA, 19 nt, Homo sapiens
  misc_RNA (1)...(19): siRNA sense strand
ugacggaagagauauuugg

SEQ ID NO: 482347 - RNA, 19 nt, Homo sapiens
  misc_RNA (1)...(19): siRNA sense strand
gucagaaguuacgucaaga

SEQ ID NO: 482348 - RNA, 19 nt, Homo sapiens
  misc_RNA (1)...(19): siRNA sense strand
uacgacuucuucacugaga

SEQ ID NO: 482349 - RNA, 19 nt, Homo sapiens
  misc_RNA (1)...(19): siRNA sense strand
guucuggaauagguagaga

SEQ ID NO: 482350 - RNA, 19 nt, Homo sapiens
  misc_RNA (1)...(19): siRNA sense strand
cugaaggugcccaaauuug

SEQ ID NO: 482351 - RNA, 19 nt, Homo sapiens
  misc_RNA (1)...(19): siRNA sense strand
aaccaggcaggcuacuuua

SEQ ID NO: 482352 - RNA, 19 nt, Homo sapiens
  misc_RNA (1)...(19): siRNA sense strand
ugauaacagacauuaagga

SEQ ID NO: 482353 - RNA, 19 nt, Homo sapiens
  misc_RNA (1)...(19): siRNA sense strand
gaucagccccuggaauuug

SEQ ID NO: 482354 - RNA, 19 nt, Homo sapiens
  misc_RNA (1)...(19): siRNA sense strand
ugaagaggaggugauugaa

SEQ ID NO: 482355 - RNA, 19 nt, Homo sapiens
  misc_RNA (1)...(19): siRNA sense strand
ggaaccaggcaggcuacuu

SEQ ID NO: 482356 - RNA, 19 nt, Homo sapiens
  misc_RNA (1)...(19): siRNA sense strand
uaccuuguagcucauauau

SEQ ID NO: 482357 - RNA, 19 nt, Homo sapiens
  misc_RNA (1)...(19): siRNA sense strand
agcagucccuggaggaguu

SEQ ID NO: 482358 - RNA, 19 nt, Homo sapiens
  misc_RNA (1)...(19): siRNA sense strand
uaacagacauuaaggauga

SEQ ID NO: 482359 - RNA, 19 nt, Homo sapiens
  misc_RNA (1)...(19): siRNA sense strand
gaugaagaguucuggaaua

SEQ ID NO: 482360 - RNA, 19 nt, Homo sapiens
  misc_RNA (1)...(19): siRNA sense strand
gaaagagccaacaacguua

SEQ ID NO: 482361 - RNA, 19 nt, Homo sapiens
  misc_RNA (1)...(19): siRNA sense strand
gaaccaggcaggcuacuuu

SEQ ID NO: 482362 - RNA, 19 nt, Homo sapiens
  misc_RNA (1)...(19): siRNA sense strand
gaagaguucuggaauaggu

SEQ ID NO: 482363 - RNA, 19 nt, Homo sapiens
  misc_RNA (1)...(19): siRNA sense strand
gaugaauccugcugcauga

SEQ ID NO: 482364 - RNA, 19 nt, Homo sapiens
  misc_RNA (1)...(19): siRNA sense strand
caaggacucuuacgacuuc

SEQ ID NO: 482365 - RNA, 19 nt, Homo sapiens
  misc_RNA (1)...(19): siRNA sense strand
gaagaggaggugauugaaa

SEQ ID NO: 482366 - RNA, 19 nt, Homo sapiens
  misc_RNA (1)...(19): siRNA sense strand
ugaaagagccaacaacguu

SEQ ID NO: 482367 - RNA, 19 nt, Homo sapiens
  misc_RNA (1)...(19): siRNA sense strand
ccuuguagcucauauauag

SEQ ID NO: 482368 - RNA, 19 nt, Homo sapiens
  misc_RNA (1)...(19): siRNA sense strand
ugaaccagguggcggauuu

SEQ ID NO: 482369 - RNA, 19 nt, Homo sapiens
  misc_RNA (1)...(19): siRNA sense strand
gggagucgcuggucugauc

SEQ ID NO: 482370 - RNA, 19 nt, Homo sapiens
  misc_RNA (1)...(19): siRNA sense strand
caagaauccugccaucauc

SEQ ID NO: 482371 - RNA, 19 nt, Homo sapiens
  misc_RNA (1)...(19): siRNA sense strand
ccaacaacguuaaguaugg

SEQ ID NO: 482372 - RNA, 19 nt, Homo sapiens
  misc_RNA (1)...(19): siRNA sense strand
gcaagaauccugccaucau

SEQ ID NO: 482373 - RNA, 19 nt, Homo sapiens
  misc_RNA (1)...(19): siRNA sense strand
gaauuugccacucuacuug

SEQ ID NO: 482374 - RNA, 19 nt, Homo sapiens
  misc_RNA (1)...(19): siRNA sense strand
gagccaacaacguuaagua

SEQ ID NO: 482375 - RNA, 19 nt, Homo sapiens
  misc_RNA (1)...(19): siRNA sense strand
ggaauuugccacucuacuu

SEQ ID NO: 482376 - RNA, 19 nt, Homo sapiens
  misc_RNA (1)...(19): siRNA sense strand
ugugcaaacuccuggauaa

SEQ ID NO: 482377 - RNA, 19 nt, Homo sapiens
  misc_RNA (1)...(19): siRNA sense strand
gcaaacuccuggauaaagc

SEQ ID NO: 482378 - RNA, 19 nt, Homo sapiens
  misc_RNA (1)...(19): siRNA sense strand
gcaagaaccauggacauuc

SEQ ID NO: 482379 - RNA, 19 nt, Homo sapiens
  misc_RNA (1)...(19): siRNA sense strand
caaccuggaugagugcauu

SEQ ID NO: 482380 - RNA, 19 nt, Homo sapiens
  misc_RNA (1)...(19): siRNA sense strand
gugagggaguggauaaguu

SEQ ID NO: 482381 - RNA, 19 nt, Homo sapiens
  misc_RNA (1)...(19): siRNA sense strand
gugaagaggaggugauuga

SEQ ID NO: 482382 - RNA, 19 nt, Homo sapiens
  misc_RNA (1)...(19): siRNA sense strand
gauaacagacauuaaggau

SEQ ID NO: 482383 - RNA, 19 nt, Homo sapiens
  misc_RNA (1)...(19): siRNA sense strand
gcugaaggugcccaaauuu

SEQ ID NO: 482384 - RNA, 19 nt, Homo sapiens
  misc_RNA (1)...(19): siRNA sense strand
caucaccguuaaacacuga

SEQ ID NO: 482385 - RNA, 19 nt, Homo sapiens
  misc_RNA (1)...(19): siRNA sense strand
aagaggaggugauugaaag

SEQ ID NO: 482386 - RNA, 19 nt, Homo sapiens
  misc_RNA (1)...(19): siRNA sense strand
ggauaaagcagguguucca

SEQ ID NO: 482387 - RNA, 19 nt, Homo sapiens
  misc_RNA (1)...(19): siRNA sense strand
gagcugaaccuuccuuucg

SEQ ID NO: 482388 - RNA, 19 nt, Homo sapiens
  misc_RNA (1)...(19): siRNA sense strand
ggugauaacagacauuaag

SEQ ID NO: 482389 - RNA, 19 nt, Homo sapiens
  misc_RNA (1)...(19): siRNA sense strand
ucaaaaccaucaccguuaa

SEQ ID NO: 482390 - RNA, 19 nt, Homo sapiens
  misc_RNA (1)...(19): siRNA sense strand
caagaaccauggacauucc

SEQ ID NO: 482391 - RNA, 19 nt, Homo sapiens
  misc_RNA (1)...(19): siRNA sense strand
ggaugaagaguucuggaau

SEQ ID NO: 482392 - RNA, 19 nt, Homo sapiens
  misc_RNA (1)...(19): siRNA sense strand
uugcugaccuggaagauag

SEQ ID NO: 482393 - RNA, 19 nt, Homo sapiens
  misc_RNA (1)...(19): siRNA sense strand
guagagagggagccaagga

SEQ ID NO: 482394 - RNA, 19 nt, Homo sapiens
  misc_RNA (1)...(19): siRNA sense strand
cuucuucacugagaucaaa

SEQ ID NO: 482395 - RNA, 19 nt, Homo sapiens
  misc_RNA (1)...(19): siRNA sense strand
gcucacggguccugaacca

SEQ ID NO: 482396 - RNA, 19 nt, Homo sapiens
  misc_RNA (1)...(19): siRNA sense strand
gggaugaagaguucuggaa

SEQ ID NO: 482397 - RNA, 19 nt, Homo sapiens
  misc_RNA (1)...(19): siRNA sense strand
aaagagccaacaacguuaa

SEQ ID NO: 482398 - RNA, 19 nt, Homo sapiens
  misc_RNA (1)...(19): siRNA sense strand
cugcaugacggaagagaua

SEQ ID NO: 482399 - RNA, 19 nt, Homo sapiens
  misc_RNA (1)...(19): siRNA sense strand
gaauccugccaucaucuuu

SEQ ID NO: 482400 - RNA, 19 nt, Homo sapiens
  misc_RNA (1)...(19): siRNA sense strand
gcagggaacacugugauag

SEQ ID NO: 482401 - RNA, 19 nt, Homo sapiens
  misc_RNA (1)...(19): siRNA sense strand
ggcaagaaccauggacauu

SEQ ID NO: 482402 - RNA, 19 nt, Homo sapiens
  misc_RNA (1)...(19): siRNA sense strand
gcggugagggaguggauaa

SEQ ID NO: 482403 - RNA, 19 nt, Homo sapiens
  misc_RNA (1)...(19): siRNA sense strand
uguggucaauauuguguuu

SEQ ID NO: 482404 - RNA, 19 nt, Homo sapiens
  misc_RNA (1)...(19): siRNA sense strand
ccagguguggucaauauug

SEQ ID NO: 482405 - RNA, 19 nt, Homo sapiens
  misc_RNA (1)...(19): siRNA sense strand
ccaggcaggcuacuuuaug

SEQ ID NO: 482406 - RNA, 19 nt, Homo sapiens
  misc_RNA (1)...(19): siRNA sense strand
ugcugaaggugcccaaauu

SEQ ID NO: 482407 - RNA, 19 nt, Homo sapiens
  misc_RNA (1)...(19): siRNA sense strand
cagguguggucaauauugu

SEQ ID NO: 482408 - RNA, 19 nt, Homo sapiens
  misc_RNA (1)...(19): siRNA sense strand
gagccaaggacucuuacga

SEQ ID NO: 482409 - RNA, 19 nt, Homo sapiens
  misc_RNA (1)...(19): siRNA sense strand
gcaugacggaagagauauu

SEQ ID NO: 482410 - RNA, 19 nt, Homo sapiens
  misc_RNA (1)...(19): siRNA sense strand
ugagggaguggauaaguug

SEQ ID NO: 482411 - RNA, 19 nt, Homo sapiens
  misc_RNA (1)...(19): siRNA sense strand
ccaaggacucuuacgacuu

SEQ ID NO: 482412 - RNA, 19 nt, Homo sapiens
  misc_RNA (1)...(19): siRNA sense strand
gccaacaacguuaaguaug

SEQ ID NO: 482413 - RNA, 19 nt, Homo sapiens
  misc_RNA (1)...(19): siRNA sense strand
ucuacuugcugaccuggaa

SEQ ID NO: 482414 - RNA, 19 nt, Homo sapiens
  misc_RNA (1)...(19): siRNA sense strand
ggacucuuacgacuucuuc

SEQ ID NO: 482415 - RNA, 19 nt, Homo sapiens
  misc_RNA (1)...(19): siRNA sense strand
cuuacgacuucuucacuga

SEQ ID NO: 482416 - RNA, 19 nt, Homo sapiens
  misc_RNA (1)...(19): siRNA sense strand
gaaccagguggcggauuug

SEQ ID NO: 482417 - RNA, 19 nt, Homo sapiens
  misc_RNA (1)...(19): siRNA sense strand
caugacggaagagauauuu

SEQ ID NO: 482418 - RNA, 19 nt, Homo sapiens
  misc_RNA (1)...(19): siRNA sense strand
ccuggaauuugccacucua

SEQ ID NO: 482419 - RNA, 19 nt, Homo sapiens
  misc_RNA (1)...(19): siRNA sense strand
cugcguggauguugugcaa

SEQ ID NO: 482420 - RNA, 19 nt, Homo sapiens
  misc_RNA (1)...(19): siRNA sense strand
ucacugagaucaaaaccau

SEQ ID NO: 482421 - RNA, 19 nt, Homo sapiens
  misc_RNA (1)...(19): siRNA sense strand
augaagaguucuggaauag

SEQ ID NO: 482422 - RNA, 19 nt, Homo sapiens
  misc_RNA (1)...(19): siRNA sense strand
cagaaguuacgucaagaga

SEQ ID NO: 482423 - RNA, 19 nt, Homo sapiens
  misc_RNA (1)...(19): siRNA sense strand
gugcaaacuccuggauaaa

SEQ ID NO: 482424 - RNA, 19 nt, Homo sapiens
  misc_RNA (1)...(19): siRNA sense strand
caacaggggaaguguauug

SEQ ID NO: 482425 - RNA, 19 nt, Homo sapiens
  misc_RNA (1)...(19): siRNA sense strand
ccacggugauaacagacau

SEQ ID NO: 482426 - RNA, 19 nt, Homo sapiens
  misc_RNA (1)...(19): siRNA sense strand
ggucaauauuguguuugga

SEQ ID NO: 482427 - RNA, 19 nt, Homo sapiens
  misc_RNA (1)...(19): siRNA sense strand
gcguggauguugugcaaac

SEQ ID NO: 482428 - RNA, 19 nt, Homo sapiens
  misc_RNA (1)...(19): siRNA sense strand
caggcaggcuacuuuaugc

SEQ ID NO: 482429 - RNA, 19 nt, Homo sapiens
  misc_RNA (1)...(19): siRNA sense strand
gucaauauuguguuuggaa

SEQ ID NO: 482430 - RNA, 19 nt, Homo sapiens
  misc_RNA (1)...(19): siRNA sense strand
ggagcugaaccuuccuuuc

SEQ ID NO: 482431 - RNA, 19 nt, Homo sapiens
  misc_RNA (1)...(19): siRNA sense strand
cuggaaaacuucauagaug

SEQ ID NO: 482432 - RNA, 19 nt, Homo sapiens
  misc_RNA (1)...(19): siRNA sense strand
gagauauuugguccaguga

SEQ ID NO: 482433 - RNA, 19 nt, Homo sapiens
  misc_RNA (1)...(19): siRNA sense strand
ugacggaagagauauuugg

SEQ ID NO: 482434 - RNA, 19 nt, Homo sapiens
  misc_RNA (1)...(19): siRNA sense strand
gucagaaguuacgucaaga

SEQ ID NO: 482435 - RNA, 19 nt, Homo sapiens
  misc_RNA (1)...(19): siRNA sense strand
uacgacuucuucacugaga

SEQ ID NO: 482436 - RNA, 19 nt, Homo sapiens
  misc_RNA (1)...(19): siRNA sense strand
guucuggaauagguagaga

SEQ ID NO: 482437 - RNA, 19 nt, Homo sapiens
  misc_RNA (1)...(19): siRNA sense strand
cugaaggugcccaaauuug

SEQ ID NO: 482438 - RNA, 19 nt, Homo sapiens
  misc_RNA (1)...(19): siRNA sense strand
aaccaggcaggcuacuuua

SEQ ID NO: 482439 - RNA, 19 nt, Homo sapiens
  misc_RNA (1)...(19): siRNA sense strand
ugauaacagacauuaagga

SEQ ID NO: 482440 - RNA, 19 nt, Homo sapiens
  misc_RNA (1)...(19): siRNA sense strand
gaucagccccuggaauuug

SEQ ID NO: 482441 - RNA, 19 nt, Homo sapiens
  misc_RNA (1)...(19): siRNA sense strand
ugaagaggaggugauugaa

SEQ ID NO: 482442 - RNA, 19 nt, Homo sapiens
  misc_RNA (1)...(19): siRNA sense strand
ggaaccaggcaggcuacuu

SEQ ID NO: 482443 - RNA, 19 nt, Homo sapiens
  misc_RNA (1)...(19): siRNA sense strand
uaccuuguagcucauauau

SEQ ID NO: 482444 - RNA, 19 nt, Homo sapiens
  misc_RNA (1)...(19): siRNA sense strand
agcagucccuggaggaguu

SEQ ID NO: 482445 - RNA, 19 nt, Homo sapiens
  misc_RNA (1)...(19): siRNA sense strand
gggaagagcuagagaaguu

SEQ ID NO: 482446 - RNA, 19 nt, Homo sapiens
  misc_RNA (1)...(19): siRNA sense strand
gcacggagcuggccaucaa

SEQ ID NO: 482447 - RNA, 19 nt, Homo sapiens
  misc_RNA (1)...(19): siRNA sense strand
ggccacagcugacaagauu

SEQ ID NO: 482448 - RNA, 19 nt, Homo sapiens
  misc_RNA (1)...(19): siRNA sense strand
agaaggaugucucagauga

SEQ ID NO: 482449 - RNA, 19 nt, Homo sapiens
  misc_RNA (1)...(19): siRNA sense strand
ggucaaggcuuugcuucuu

SEQ ID NO: 482450 - RNA, 19 nt, Homo sapiens
  misc_RNA (1)...(19): siRNA sense strand
ggagcaaacuggcacuaag

SEQ ID NO: 482451 - RNA, 19 nt, Homo sapiens
  misc_RNA (1)...(19): siRNA sense strand
ggaugacaaucaccaggaa

SEQ ID NO: 482452 - RNA, 19 nt, Homo sapiens
  misc_RNA (1)...(19): siRNA sense strand
gagcugaaccgaggagauu

SEQ ID NO: 482453 - RNA, 19 nt, Homo sapiens
  misc_RNA (1)...(19): siRNA sense strand
gagcugagccucguauugu

SEQ ID NO: 482454 - RNA, 19 nt, Homo sapiens
  misc_RNA (1)...(19): siRNA sense strand
uggcagauuuggaagauug

SEQ ID NO: 482455 - RNA, 19 nt, Homo sapiens
  misc_RNA (1)...(19): siRNA sense strand
guggagaucugcaugaaac

SEQ ID NO: 482456 - RNA, 19 nt, Homo sapiens
  misc_RNA (1)...(19): siRNA sense strand
gcacgagccuaugguugug

SEQ ID NO: 482457 - RNA, 19 nt, Homo sapiens
  misc_RNA (1)...(19): siRNA sense strand
gcaugaaacaacauaacaa

SEQ ID NO: 482458 - RNA, 19 nt, Homo sapiens
  misc_RNA (1)...(19): siRNA sense strand
acagaaggaugucucagau

SEQ ID NO: 482459 - RNA, 19 nt, Homo sapiens
  misc_RNA (1)...(19): siRNA sense strand
gagcaagaaaucacccauu

SEQ ID NO: 482460 - RNA, 19 nt, Homo sapiens
  misc_RNA (1)...(19): siRNA sense strand
gcccauggcccucaguuug

SEQ ID NO: 482461 - RNA, 19 nt, Homo sapiens
  misc_RNA (1)...(19): siRNA sense strand
agcaagaaaucacccauug

SEQ ID NO: 482462 - RNA, 19 nt, Homo sapiens
  misc_RNA (1)...(19): siRNA sense strand
ccauggcccucaguuugua

SEQ ID NO: 482463 - RNA, 19 nt, Homo sapiens
  misc_RNA (1)...(19): siRNA sense strand
agcagaaggucaaggcuuu

SEQ ID NO: 482464 - RNA, 19 nt, Homo sapiens
  misc_RNA (1)...(19): siRNA sense strand
ucuacaaggccaagaauga

SEQ ID NO: 482465 - RNA, 19 nt, Homo sapiens
  misc_RNA (1)...(19): siRNA sense strand
caaauacgaagccaagaag

SEQ ID NO: 482466 - RNA, 19 nt, Homo sapiens
  misc_RNA (1)...(19): siRNA sense strand
guaagcaucaggagcuaga

SEQ ID NO: 482467 - RNA, 19 nt, Homo sapiens
  misc_RNA (1)...(19): siRNA sense strand
gaaggucaaggcuuugcuu

SEQ ID NO: 482468 - RNA, 19 nt, Homo sapiens
  misc_RNA (1)...(19): siRNA sense strand
aauacgaagccaagaagua

SEQ ID NO: 482469 - RNA, 19 nt, Homo sapiens
  misc_RNA (1)...(19): siRNA sense strand
gcagcuggcacgugacuuc

SEQ ID NO: 482470 - RNA, 19 nt, Homo sapiens
  misc_RNA (1)...(19): siRNA sense strand
acaaauacgaagccaagaa

SEQ ID NO: 482471 - RNA, 19 nt, Homo sapiens
  misc_RNA (1)...(19): siRNA sense strand
ggaagagcuagagaaguuu

SEQ ID NO: 482472 - RNA, 19 nt, Homo sapiens
  misc_RNA (1)...(19): siRNA sense strand
ggaagauugggaagagcua

SEQ ID NO: 482473 - RNA, 19 nt, Homo sapiens
  misc_RNA (1)...(19): siRNA sense strand
acaaucaggaugacaauca

SEQ ID NO: 482474 - RNA, 19 nt, Homo sapiens
  misc_RNA (1)...(19): siRNA sense strand
ccacagcugacaagauuca

SEQ ID NO: 482475 - RNA, 19 nt, Homo sapiens
  misc_RNA (1)...(19): siRNA sense strand
gcaacagaaggaugucuca

SEQ ID NO: 482476 - RNA, 19 nt, Homo sapiens
  misc_RNA (1)...(19): siRNA sense strand
gcaagaaaucacccauugg

SEQ ID NO: 482477 - RNA, 19 nt, Homo sapiens
  misc_RNA (1)...(19): siRNA sense strand
gcagguaccccuucuccua

SEQ ID NO: 482478 - RNA, 19 nt, Homo sapiens
  misc_RNA (1)...(19): siRNA sense strand
ucaugacccuucggaauca

SEQ ID NO: 482479 - RNA, 19 nt, Homo sapiens
  misc_RNA (1)...(19): siRNA sense strand
cuagagaaguuuuccaaga

SEQ ID NO: 482480 - RNA, 19 nt, Homo sapiens
  misc_RNA (1)...(19): siRNA sense strand
gcaaacuggcacuaagcaa

SEQ ID NO: 482481 - RNA, 19 nt, Homo sapiens
  misc_RNA (1)...(19): siRNA sense strand
ggagaucugcaugaaacaa

SEQ ID NO: 482482 - RNA, 19 nt, Homo sapiens
  misc_RNA (1)...(19): siRNA sense strand
guuaccacccucauucuug

SEQ ID NO: 482483 - RNA, 19 nt, Homo sapiens
  misc_RNA (1)...(19): siRNA sense strand
acaguuaccacccucauuc

SEQ ID NO: 482484 - RNA, 19 nt, Homo sapiens
  misc_RNA (1)...(19): siRNA sense strand
ccacauccgagccagcuau

SEQ ID NO: 482485 - RNA, 19 nt, Homo sapiens
  misc_RNA (1)...(19): siRNA sense strand
caaggccaagaaugaguuu

SEQ ID NO: 482486 - RNA, 19 nt, Homo sapiens
  misc_RNA (1)...(19): siRNA sense strand
gcagaaggucaaggcuuug

SEQ ID NO: 482487 - RNA, 19 nt, Homo sapiens
  misc_RNA (1)...(19): siRNA sense strand
gaagagcuagagaaguuuu

SEQ ID NO: 482488 - RNA, 19 nt, Homo sapiens
  misc_RNA (1)...(19): siRNA sense strand
gagcaaacuggcacuaagc

SEQ ID NO: 482489 - RNA, 19 nt, Homo sapiens
  misc_RNA (1)...(19): siRNA sense strand
ccaaggcuacagaggauca

SEQ ID NO: 482490 - RNA, 19 nt, Homo sapiens
  misc_RNA (1)...(19): siRNA sense strand
ggccaagaaugaguuugca

SEQ ID NO: 482491 - RNA, 19 nt, Homo sapiens
  misc_RNA (1)...(19): siRNA sense strand
ugagcugagccucguauug

SEQ ID NO: 482492 - RNA, 19 nt, Homo sapiens
  misc_RNA (1)...(19): siRNA sense strand
ggcuacagaggaucaaaug

SEQ ID NO: 482493 - RNA, 19 nt, Homo sapiens
  misc_RNA (1)...(19): siRNA sense strand
ccuggcagauuuggaagau

SEQ ID NO: 482494 - RNA, 19 nt, Homo sapiens
  misc_RNA (1)...(19): siRNA sense strand
gaggagcaaacuggcacua

SEQ ID NO: 482495 - RNA, 19 nt, Homo sapiens
  misc_RNA (1)...(19): siRNA sense strand
gggaagagcuagagaaguu

SEQ ID NO: 482496 - RNA, 19 nt, Homo sapiens
  misc_RNA (1)...(19): siRNA sense strand
gcacggagcuggccaucaa

SEQ ID NO: 482497 - RNA, 19 nt, Homo sapiens
  misc_RNA (1)...(19): siRNA sense strand
ggccacagcugacaagauu

SEQ ID NO: 482498 - RNA, 19 nt, Homo sapiens
  misc_RNA (1)...(19): siRNA sense strand
agaaggaugucucagauga

SEQ ID NO: 482499 - RNA, 19 nt, Homo sapiens
  misc_RNA (1)...(19): siRNA sense strand
ggucaaggcuuugcuucuu

SEQ ID NO: 482500 - RNA, 19 nt, Homo sapiens
  misc_RNA (1)...(19): siRNA sense strand
ggagcaaacuggcacuaag

SEQ ID NO: 482501 - RNA, 19 nt, Homo sapiens
  misc_RNA (1)...(19): siRNA sense strand
ggaugacaaucaccaggaa

SEQ ID NO: 482502 - RNA, 19 nt, Homo sapiens
  misc_RNA (1)...(19): siRNA sense strand
gagcugaaccgaggagauu

SEQ ID NO: 482503 - RNA, 19 nt, Homo sapiens
  misc_RNA (1)...(19): siRNA sense strand
gagcugagccucguauugu

SEQ ID NO: 482504 - RNA, 19 nt, Homo sapiens
  misc_RNA (1)...(19): siRNA sense strand
uggcagauuuggaagauug

SEQ ID NO: 482505 - RNA, 19 nt, Homo sapiens
  misc_RNA (1)...(19): siRNA sense strand
guggagaucugcaugaaac

SEQ ID NO: 482506 - RNA, 19 nt, Homo sapiens
  misc_RNA (1)...(19): siRNA sense strand
gcacgagccuaugguugug

SEQ ID NO: 482507 - RNA, 19 nt, Homo sapiens
  misc_RNA (1)...(19): siRNA sense strand
gcaugaaacaacauaacaa

SEQ ID NO: 482508 - RNA, 19 nt, Homo sapiens
  misc_RNA (1)...(19): siRNA sense strand
acagaaggaugucucagau

SEQ ID NO: 482509 - RNA, 19 nt, Homo sapiens
  misc_RNA (1)...(19): siRNA sense strand
gagcaagaaaucacccauu

SEQ ID NO: 482510 - RNA, 19 nt, Homo sapiens
  misc_RNA (1)...(19): siRNA sense strand
gcccauggcccucaguuug

SEQ ID NO: 482511 - RNA, 19 nt, Homo sapiens
  misc_RNA (1)...(19): siRNA sense strand
agcaagaaaucacccauug

SEQ ID NO: 482512 - RNA, 19 nt, Homo sapiens
  misc_RNA (1)...(19): siRNA sense strand
ccauggcccucaguuugua

SEQ ID NO: 482513 - RNA, 19 nt, Homo sapiens
  misc_RNA (1)...(19): siRNA sense strand
agcagaaggucaaggcuuu

SEQ ID NO: 482514 - RNA, 19 nt, Homo sapiens
  misc_RNA (1)...(19): siRNA sense strand
ucuacaaggccaagaauga

SEQ ID NO: 482515 - RNA, 19 nt, Homo sapiens
  misc_RNA (1)...(19): siRNA sense strand
caaauacgaagccaagaag

SEQ ID NO: 482516 - RNA, 19 nt, Homo sapiens
  misc_RNA (1)...(19): siRNA sense strand
guaagcaucaggagcuaga

SEQ ID NO: 482517 - RNA, 19 nt, Homo sapiens
  misc_RNA (1)...(19): siRNA sense strand
gaaggucaaggcuuugcuu

SEQ ID NO: 482518 - RNA, 19 nt, Homo sapiens
  misc_RNA (1)...(19): siRNA sense strand
aauacgaagccaagaagua

SEQ ID NO: 482519 - RNA, 19 nt, Homo sapiens
  misc_RNA (1)...(19): siRNA sense strand
gcagcuggcacgugacuuc

SEQ ID NO: 482520 - RNA, 19 nt, Homo sapiens
  misc_RNA (1)...(19): siRNA sense strand
acaaauacgaagccaagaa

SEQ ID NO: 482521 - RNA, 19 nt, Homo sapiens
  misc_RNA (1)...(19): siRNA sense strand
ggaagagcuagagaaguuu

SEQ ID NO: 482522 - RNA, 19 nt, Homo sapiens
  misc_RNA (1)...(19): siRNA sense strand
ggaagauugggaagagcua

SEQ ID NO: 482523 - RNA, 19 nt, Homo sapiens
  misc_RNA (1)...(19): siRNA sense strand
acaaucaggaugacaauca

SEQ ID NO: 482524 - RNA, 19 nt, Homo sapiens
  misc_RNA (1)...(19): siRNA sense strand
ccacagcugacaagauuca

SEQ ID NO: 482525 - RNA, 19 nt, Homo sapiens
  misc_RNA (1)...(19): siRNA sense strand
gcaacagaaggaugucuca

SEQ ID NO: 482526 - RNA, 19 nt, Homo sapiens
  misc_RNA (1)...(19): siRNA sense strand
gcaagaaaucacccauugg

SEQ ID NO: 482527 - RNA, 19 nt, Homo sapiens
  misc_RNA (1)...(19): siRNA sense strand
gcagguaccccuucuccua

SEQ ID NO: 482528 - RNA, 19 nt, Homo sapiens
  misc_RNA (1)...(19): siRNA sense strand
ucaugacccuucggaauca

SEQ ID NO: 482529 - RNA, 19 nt, Homo sapiens
  misc_RNA (1)...(19): siRNA sense strand
cuagagaaguuuuccaaga

SEQ ID NO: 482530 - RNA, 19 nt, Homo sapiens
  misc_RNA (1)...(19): siRNA sense strand
gcaaacuggcacuaagcaa

SEQ ID NO: 482531 - RNA, 19 nt, Homo sapiens
  misc_RNA (1)...(19): siRNA sense strand
ggagaucugcaugaaacaa

SEQ ID NO: 482532 - RNA, 19 nt, Homo sapiens
  misc_RNA (1)...(19): siRNA sense strand
guuaccacccucauucuug

SEQ ID NO: 482533 - RNA, 19 nt, Homo sapiens
  misc_RNA (1)...(19): siRNA sense strand
acaguuaccacccucauuc

SEQ ID NO: 482534 - RNA, 19 nt, Homo sapiens
  misc_RNA (1)...(19): siRNA sense strand
ccacauccgagccagcuau

SEQ ID NO: 482535 - RNA, 19 nt, Homo sapiens
  misc_RNA (1)...(19): siRNA sense strand
caaggccaagaaugaguuu

SEQ ID NO: 482536 - RNA, 19 nt, Homo sapiens
  misc_RNA (1)...(19): siRNA sense strand
gcagaaggucaaggcuuug

SEQ ID NO: 482537 - RNA, 19 nt, Homo sapiens
  misc_RNA (1)...(19): siRNA sense strand
gaagagcuagagaaguuuu

SEQ ID NO: 482538 - RNA, 19 nt, Homo sapiens
  misc_RNA (1)...(19): siRNA sense strand
gagcaaacuggcacuaagc

SEQ ID NO: 482539 - RNA, 19 nt, Homo sapiens
  misc_RNA (1)...(19): siRNA sense strand
ccaaggcuacagaggauca

SEQ ID NO: 482540 - RNA, 19 nt, Homo sapiens
  misc_RNA (1)...(19): siRNA sense strand
ggccaagaaugaguuugca

SEQ ID NO: 482541 - RNA, 19 nt, Homo sapiens
  misc_RNA (1)...(19): siRNA sense strand
ugagcugagccucguauug

SEQ ID NO: 482542 - RNA, 19 nt, Homo sapiens
  misc_RNA (1)...(19): siRNA sense strand
ggcuacagaggaucaaaug

SEQ ID NO: 482543 - RNA, 19 nt, Homo sapiens
  misc_RNA (1)...(19): siRNA sense strand
ccuggcagauuuggaagau

SEQ ID NO: 482544 - RNA, 19 nt, Homo sapiens
  misc_RNA (1)...(19): siRNA sense strand
gaggagcaaacuggcacua

SEQ ID NO: 482545 - RNA, 19 nt, Homo sapiens
  misc_RNA (1)...(19): siRNA sense strand
gggaagagcuagagaaguu

SEQ ID NO: 482546 - RNA, 19 nt, Homo sapiens
  misc_RNA (1)...(19): siRNA sense strand
ggccacagcugacaagauu

SEQ ID NO: 482547 - RNA, 19 nt, Homo sapiens
  misc_RNA (1)...(19): siRNA sense strand
ggucaaggcuuugcuucuu

SEQ ID NO: 482548 - RNA, 19 nt, Homo sapiens
  misc_RNA (1)...(19): siRNA sense strand
ggagcaaacuggcacuaag

SEQ ID NO: 482549 - RNA, 19 nt, Homo sapiens
  misc_RNA (1)...(19): siRNA sense strand
ggaugacaaucaccaggaa

SEQ ID NO: 482550 - RNA, 19 nt, Homo sapiens
  misc_RNA (1)...(19): siRNA sense strand
gagcugaaccgaggagauu

SEQ ID NO: 482551 - RNA, 19 nt, Homo sapiens
  misc_RNA (1)...(19): siRNA sense strand
gagcugagccucguauugu

SEQ ID NO: 482552 - RNA, 19 nt, Homo sapiens
  misc_RNA (1)...(19): siRNA sense strand
uggcagauuuggaagauug

SEQ ID NO: 482553 - RNA, 19 nt, Homo sapiens
  misc_RNA (1)...(19): siRNA sense strand
guggagaucugcaugaaac

SEQ ID NO: 482554 - RNA, 19 nt, Homo sapiens
  misc_RNA (1)...(19): siRNA sense strand
gcaugaaacaacauaacaa

SEQ ID NO: 482555 - RNA, 19 nt, Homo sapiens
  misc_RNA (1)...(19): siRNA sense strand
gagcaagaaaucacccauu

SEQ ID NO: 482556 - RNA, 19 nt, Homo sapiens
  misc_RNA (1)...(19): siRNA sense strand
gcccauggcccucaguuug

SEQ ID NO: 482557 - RNA, 19 nt, Homo sapiens
  misc_RNA (1)...(19): siRNA sense strand
agcaagaaaucacccauug

SEQ ID NO: 482558 - RNA, 19 nt, Homo sapiens
  misc_RNA (1)...(19): siRNA sense strand
ccauggcccucaguuugua

SEQ ID NO: 482559 - RNA, 19 nt, Homo sapiens
  misc_RNA (1)...(19): siRNA sense strand
agcagaaggucaaggcuuu

SEQ ID NO: 482560 - RNA, 19 nt, Homo sapiens
  misc_RNA (1)...(19): siRNA sense strand
ucuacaaggccaagaauga

SEQ ID NO: 482561 - RNA, 19 nt, Homo sapiens
  misc_RNA (1)...(19): siRNA sense strand
caaauacgaagccaagaag

SEQ ID NO: 482562 - RNA, 19 nt, Homo sapiens
  misc_RNA (1)...(19): siRNA sense strand
guaagcaucaggagcuaga

SEQ ID NO: 482563 - RNA, 19 nt, Homo sapiens
  misc_RNA (1)...(19): siRNA sense strand
gaaggucaaggcuuugcuu

SEQ ID NO: 482564 - RNA, 19 nt, Homo sapiens
  misc_RNA (1)...(19): siRNA sense strand
aauacgaagccaagaagua

SEQ ID NO: 482565 - RNA, 19 nt, Homo sapiens
  misc_RNA (1)...(19): siRNA sense strand
gcagcuggcacgugacuuc

SEQ ID NO: 482566 - RNA, 19 nt, Homo sapiens
  misc_RNA (1)...(19): siRNA sense strand
acaaauacgaagccaagaa

SEQ ID NO: 482567 - RNA, 19 nt, Homo sapiens
  misc_RNA (1)...(19): siRNA sense strand
ggaagagcuagagaaguuu

SEQ ID NO: 482568 - RNA, 19 nt, Homo sapiens
  misc_RNA (1)...(19): siRNA sense strand
ggaagauugggaagagcua

SEQ ID NO: 482569 - RNA, 19 nt, Homo sapiens
  misc_RNA (1)...(19): siRNA sense strand
acaaucaggaugacaauca

SEQ ID NO: 482570 - RNA, 19 nt, Homo sapiens
  misc_RNA (1)...(19): siRNA sense strand
ccacagcugacaagauuca

SEQ ID NO: 482571 - RNA, 19 nt, Homo sapiens
  misc_RNA (1)...(19): siRNA sense strand
ucaugacccuucggaauca

SEQ ID NO: 482572 - RNA, 19 nt, Homo sapiens
  misc_RNA (1)...(19): siRNA sense strand
gcagguaccccuucuccua

SEQ ID NO: 482573 - RNA, 19 nt, Homo sapiens
  misc_RNA (1)...(19): siRNA sense strand
gcaagaaaucacccauugg

SEQ ID NO: 482574 - RNA, 19 nt, Homo sapiens
  misc_RNA (1)...(19): siRNA sense strand
cuagagaaguuuuccaaga

SEQ ID NO: 482575 - RNA, 19 nt, Homo sapiens
  misc_RNA (1)...(19): siRNA sense strand
guuaccacccucauucuug

SEQ ID NO: 482576 - RNA, 19 nt, Homo sapiens
  misc_RNA (1)...(19): siRNA sense strand
ggagaucugcaugaaacaa

SEQ ID NO: 482577 - RNA, 19 nt, Homo sapiens
  misc_RNA (1)...(19): siRNA sense strand
gcaaacuggcacuaagcaa

SEQ ID NO: 482578 - RNA, 19 nt, Homo sapiens
  misc_RNA (1)...(19): siRNA sense strand
acaguuaccacccucauuc

SEQ ID NO: 482579 - RNA, 19 nt, Homo sapiens
  misc_RNA (1)...(19): siRNA sense strand
ccacauccgagccagcuau

SEQ ID NO: 482580 - RNA, 19 nt, Homo sapiens
  misc_RNA (1)...(19): siRNA sense strand
caaggccaagaaugaguuu

SEQ ID NO: 482581 - RNA, 19 nt, Homo sapiens
  misc_RNA (1)...(19): siRNA sense strand
gcagaaggucaaggcuuug

SEQ ID NO: 482582 - RNA, 19 nt, Homo sapiens
  misc_RNA (1)...(19): siRNA sense strand
gaagagcuagagaaguuuu

SEQ ID NO: 482583 - RNA, 19 nt, Homo sapiens
  misc_RNA (1)...(19): siRNA sense strand
ccaaggcuacagaggauca

SEQ ID NO: 482584 - RNA, 19 nt, Homo sapiens
  misc_RNA (1)...(19): siRNA sense strand
gagcaaacuggcacuaagc

SEQ ID NO: 482585 - RNA, 19 nt, Homo sapiens
  misc_RNA (1)...(19): siRNA sense strand
ggccaagaaugaguuugca

SEQ ID NO: 482586 - RNA, 19 nt, Homo sapiens
  misc_RNA (1)...(19): siRNA sense strand
ugagcugagccucguauug

SEQ ID NO: 482587 - RNA, 19 nt, Homo sapiens
  misc_RNA (1)...(19): siRNA sense strand
ggcuacagaggaucaaaug

SEQ ID NO: 482588 - RNA, 19 nt, Homo sapiens
  misc_RNA (1)...(19): siRNA sense strand
ccuggcagauuuggaagau

SEQ ID NO: 482589 - RNA, 19 nt, Homo sapiens
  misc_RNA (1)...(19): siRNA sense strand
gaggagcaaacuggcacua

SEQ ID NO: 482590 - RNA, 19 nt, Homo sapiens
  misc_RNA (1)...(19): siRNA sense strand
gugaaacccuccgagcuua

SEQ ID NO: 482591 - RNA, 19 nt, Homo sapiens
  misc_RNA (1)...(19): siRNA sense strand
guacagcacuggaacuucu

SEQ ID NO: 482592 - RNA, 19 nt, Homo sapiens
  misc_RNA (1)...(19): siRNA sense strand
guucagcacuagaugauau

SEQ ID NO: 482593 - RNA, 19 nt, Homo sapiens
  misc_RNA (1)...(19): siRNA sense strand
cuuagaaacucugcaaauu

SEQ ID NO: 482594 - RNA, 19 nt, Homo sapiens
  misc_RNA (1)...(19): siRNA sense strand
gcagaagccuuagaaacuc

SEQ ID NO: 482595 - RNA, 19 nt, Homo sapiens
  misc_RNA (1)...(19): siRNA sense strand
ggagugcccuuaaugaaaa

SEQ ID NO: 482596 - RNA, 19 nt, Homo sapiens
  misc_RNA (1)...(19): siRNA sense strand
gaaacucugcaaauuauca

SEQ ID NO: 482597 - RNA, 19 nt, Homo sapiens
  misc_RNA (1)...(19): siRNA sense strand
uaaagcagaagccuuagaa

SEQ ID NO: 482598 - RNA, 19 nt, Homo sapiens
  misc_RNA (1)...(19): siRNA sense strand
ccuccgagcuuagcaaaga

SEQ ID NO: 482599 - RNA, 19 nt, Homo sapiens
  misc_RNA (1)...(19): siRNA sense strand
acccagggcuucauaauca

SEQ ID NO: 482600 - RNA, 19 nt, Homo sapiens
  misc_RNA (1)...(19): siRNA sense strand
gauaugcugguacaucuga

SEQ ID NO: 482601 - RNA, 19 nt, Homo sapiens
  misc_RNA (1)...(19): siRNA sense strand
cauaaucaccuucuguuca

SEQ ID NO: 482602 - RNA, 19 nt, Homo sapiens
  misc_RNA (1)...(19): siRNA sense strand
ggugaaacccuccgagcuu

SEQ ID NO: 482603 - RNA, 19 nt, Homo sapiens
  misc_RNA (1)...(19): siRNA sense strand
gaaugucucacaaauaaac

SEQ ID NO: 482604 - RNA, 19 nt, Homo sapiens
  misc_RNA (1)...(19): siRNA sense strand
gaagacguuccgcuuugaa

SEQ ID NO: 482605 - RNA, 19 nt, Homo sapiens
  misc_RNA (1)...(19): siRNA sense strand
caaauaaaccaagauaugc

SEQ ID NO: 482606 - RNA, 19 nt, Homo sapiens
  misc_RNA (1)...(19): siRNA sense strand
caccuucuguucagcacua

SEQ ID NO: 482607 - RNA, 19 nt, Homo sapiens
  misc_RNA (1)...(19): siRNA sense strand
gcaaauuaucagaagagaa

SEQ ID NO: 482608 - RNA, 19 nt, Homo sapiens
  misc_RNA (1)...(19): siRNA sense strand
ucucacaaauaaaccaaga

SEQ ID NO: 482609 - RNA, 19 nt, Homo sapiens
  misc_RNA (1)...(19): siRNA sense strand
gcauacccagggcuucaua

SEQ ID NO: 482610 - RNA, 19 nt, Homo sapiens
  misc_RNA (1)...(19): siRNA sense strand
gcacuagaugauauucuug

SEQ ID NO: 482611 - RNA, 19 nt, Homo sapiens
  misc_RNA (1)...(19): siRNA sense strand
caagauaugcugguacauc

SEQ ID NO: 482612 - RNA, 19 nt, Homo sapiens
  misc_RNA (1)...(19): siRNA sense strand
gguggagugcccuuaauga

SEQ ID NO: 482613 - RNA, 19 nt, Homo sapiens
  misc_RNA (1)...(19): siRNA sense strand
caucugagucacacaagaa

SEQ ID NO: 482614 - RNA, 19 nt, Homo sapiens
  misc_RNA (1)...(19): siRNA sense strand
guacaucugagucacacaa

SEQ ID NO: 482615 - RNA, 19 nt, Homo sapiens
  misc_RNA (1)...(19): siRNA sense strand
gagcauacccagggcuuca

SEQ ID NO: 482616 - RNA, 19 nt, Homo sapiens
  misc_RNA (1)...(19): siRNA sense strand
uggagugcccuuaaugaaa

SEQ ID NO: 482617 - RNA, 19 nt, Homo sapiens
  misc_RNA (1)...(19): siRNA sense strand
gcagcgggauuuggugagu

SEQ ID NO: 482618 - RNA, 19 nt, Homo sapiens
  misc_RNA (1)...(19): siRNA sense strand
guggagugcccuuaaugaa

SEQ ID NO: 482619 - RNA, 19 nt, Homo sapiens
  misc_RNA (1)...(19): siRNA sense strand
gacguuccgcuuugaaaug

SEQ ID NO: 482620 - RNA, 19 nt, Homo sapiens
  misc_RNA (1)...(19): siRNA sense strand
cagaagccuuagaaacucu

SEQ ID NO: 482621 - RNA, 19 nt, Homo sapiens
  misc_RNA (1)...(19): siRNA sense strand
auaaucaccuucuguucag

SEQ ID NO: 482622 - RNA, 19 nt, Homo sapiens
  misc_RNA (1)...(19): siRNA sense strand
agcacuagaugauauucuu

SEQ ID NO: 482623 - RNA, 19 nt, Homo sapiens
  misc_RNA (1)...(19): siRNA sense strand
ccuuagaaacucugcaaau

SEQ ID NO: 482624 - RNA, 19 nt, Homo sapiens
  misc_RNA (1)...(19): siRNA sense strand
agcgggauuuggugaguuu

SEQ ID NO: 482625 - RNA, 19 nt, Homo sapiens
  misc_RNA (1)...(19): siRNA sense strand
cagcgggauuuggugaguu

SEQ ID NO: 482626 - RNA, 19 nt, Homo sapiens
  misc_RNA (1)...(19): siRNA sense strand
aucuaaagcagaagccuua

SEQ ID NO: 482627 - RNA, 19 nt, Homo sapiens
  misc_RNA (1)...(19): siRNA sense strand
ccagacugcugaggaacuc

SEQ ID NO: 482628 - RNA, 19 nt, Homo sapiens
  misc_RNA (1)...(19): siRNA sense strand
gugaaacccuccgagcuua

SEQ ID NO: 482629 - RNA, 19 nt, Homo sapiens
  misc_RNA (1)...(19): siRNA sense strand
guacagcacuggaacuucu

SEQ ID NO: 482630 - RNA, 19 nt, Homo sapiens
  misc_RNA (1)...(19): siRNA sense strand
guucagcacuagaugauau

SEQ ID NO: 482631 - RNA, 19 nt, Homo sapiens
  misc_RNA (1)...(19): siRNA sense strand
cuuagaaacucugcaaauu

SEQ ID NO: 482632 - RNA, 19 nt, Homo sapiens
  misc_RNA (1)...(19): siRNA sense strand
gcagaagccuuagaaacuc

SEQ ID NO: 482633 - RNA, 19 nt, Homo sapiens
  misc_RNA (1)...(19): siRNA sense strand
ggagugcccuuaaugaaaa

SEQ ID NO: 482634 - RNA, 19 nt, Homo sapiens
  misc_RNA (1)...(19): siRNA sense strand
gaaacucugcaaauuauca

SEQ ID NO: 482635 - RNA, 19 nt, Homo sapiens
  misc_RNA (1)...(19): siRNA sense strand
uaaagcagaagccuuagaa

SEQ ID NO: 482636 - RNA, 19 nt, Homo sapiens
  misc_RNA (1)...(19): siRNA sense strand
ccuccgagcuuagcaaaga

SEQ ID NO: 482637 - RNA, 19 nt, Homo sapiens
  misc_RNA (1)...(19): siRNA sense strand
acccagggcuucauaauca

SEQ ID NO: 482638 - RNA, 19 nt, Homo sapiens
  misc_RNA (1)...(19): siRNA sense strand
gauaugcugguacaucuga

SEQ ID NO: 482639 - RNA, 19 nt, Homo sapiens
  misc_RNA (1)...(19): siRNA sense strand
cauaaucaccuucuguuca

SEQ ID NO: 482640 - RNA, 19 nt, Homo sapiens
  misc_RNA (1)...(19): siRNA sense strand
ggugaaacccuccgagcuu

SEQ ID NO: 482641 - RNA, 19 nt, Homo sapiens
  misc_RNA (1)...(19): siRNA sense strand
gaaugucucacaaauaaac

SEQ ID NO: 482642 - RNA, 19 nt, Homo sapiens
  misc_RNA (1)...(19): siRNA sense strand
gaagacguuccgcuuugaa

SEQ ID NO: 482643 - RNA, 19 nt, Homo sapiens
  misc_RNA (1)...(19): siRNA sense strand
caaauaaaccaagauaugc

SEQ ID NO: 482644 - RNA, 19 nt, Homo sapiens
  misc_RNA (1)...(19): siRNA sense strand
caccuucuguucagcacua

SEQ ID NO: 482645 - RNA, 19 nt, Homo sapiens
  misc_RNA (1)...(19): siRNA sense strand
gcaaauuaucagaagagaa

SEQ ID NO: 482646 - RNA, 19 nt, Homo sapiens
  misc_RNA (1)...(19): siRNA sense strand
ucucacaaauaaaccaaga

SEQ ID NO: 482647 - RNA, 19 nt, Homo sapiens
  misc_RNA (1)...(19): siRNA sense strand
gcauacccagggcuucaua

SEQ ID NO: 482648 - RNA, 19 nt, Homo sapiens
  misc_RNA (1)...(19): siRNA sense strand
gcacuagaugauauucuug

SEQ ID NO: 482649 - RNA, 19 nt, Homo sapiens
  misc_RNA (1)...(19): siRNA sense strand
caagauaugcugguacauc

SEQ ID NO: 482650 - RNA, 19 nt, Homo sapiens
  misc_RNA (1)...(19): siRNA sense strand
gguggagugcccuuaauga

SEQ ID NO: 482651 - RNA, 19 nt, Homo sapiens
  misc_RNA (1)...(19): siRNA sense strand
caucugagucacacaagaa

SEQ ID NO: 482652 - RNA, 19 nt, Homo sapiens
  misc_RNA (1)...(19): siRNA sense strand
guacaucugagucacacaa

SEQ ID NO: 482653 - RNA, 19 nt, Homo sapiens
  misc_RNA (1)...(19): siRNA sense strand
gagcauacccagggcuuca

SEQ ID NO: 482654 - RNA, 19 nt, Homo sapiens
  misc_RNA (1)...(19): siRNA sense strand
uggagugcccuuaaugaaa

SEQ ID NO: 482655 - RNA, 19 nt, Homo sapiens
  misc_RNA (1)...(19): siRNA sense strand
gcagcgggauuuggugagu

SEQ ID NO: 482656 - RNA, 19 nt, Homo sapiens
  misc_RNA (1)...(19): siRNA sense strand
guggagugcccuuaaugaa

SEQ ID NO: 482657 - RNA, 19 nt, Homo sapiens
  misc_RNA (1)...(19): siRNA sense strand
gacguuccgcuuugaaaug

SEQ ID NO: 482658 - RNA, 19 nt, Homo sapiens
  misc_RNA (1)...(19): siRNA sense strand
cagaagccuuagaaacucu

SEQ ID NO: 482659 - RNA, 19 nt, Homo sapiens
  misc_RNA (1)...(19): siRNA sense strand
auaaucaccuucuguucag

SEQ ID NO: 482660 - RNA, 19 nt, Homo sapiens
  misc_RNA (1)...(19): siRNA sense strand
agcacuagaugauauucuu

SEQ ID NO: 482661 - RNA, 19 nt, Homo sapiens
  misc_RNA (1)...(19): siRNA sense strand
ccuuagaaacucugcaaau

SEQ ID NO: 482662 - RNA, 19 nt, Homo sapiens
  misc_RNA (1)...(19): siRNA sense strand
agcgggauuuggugaguuu

SEQ ID NO: 482663 - RNA, 19 nt, Homo sapiens
  misc_RNA (1)...(19): siRNA sense strand
cagcgggauuuggugaguu

SEQ ID NO: 482664 - RNA, 19 nt, Homo sapiens
  misc_RNA (1)...(19): siRNA sense strand
aucuaaagcagaagccuua

SEQ ID NO: 482665 - RNA, 19 nt, Homo sapiens
  misc_RNA (1)...(19): siRNA sense strand
ccagacugcugaggaacuc

SEQ ID NO: 482666 - RNA, 19 nt, Homo sapiens
  misc_RNA (1)...(19): siRNA sense strand
gugaaacccuccgagcuua

SEQ ID NO: 482667 - RNA, 19 nt, Homo sapiens
  misc_RNA (1)...(19): siRNA sense strand
guacagcacuggaacuucu

SEQ ID NO: 482668 - RNA, 19 nt, Homo sapiens
  misc_RNA (1)...(19): siRNA sense strand
guucagcacuagaugauau

SEQ ID NO: 482669 - RNA, 19 nt, Homo sapiens
  misc_RNA (1)...(19): siRNA sense strand
cuuagaaacucugcaaauu

SEQ ID NO: 482670 - RNA, 19 nt, Homo sapiens
  misc_RNA (1)...(19): siRNA sense strand
gcagaagccuuagaaacuc

SEQ ID NO: 482671 - RNA, 19 nt, Homo sapiens
  misc_RNA (1)...(19): siRNA sense strand
ggagugcccuuaaugaaaa

SEQ ID NO: 482672 - RNA, 19 nt, Homo sapiens
  misc_RNA (1)...(19): siRNA sense strand
gaaacucugcaaauuauca

SEQ ID NO: 482673 - RNA, 19 nt, Homo sapiens
  misc_RNA (1)...(19): siRNA sense strand
uaaagcagaagccuuagaa

SEQ ID NO: 482674 - RNA, 19 nt, Homo sapiens
  misc_RNA (1)...(19): siRNA sense strand
ccuccgagcuuagcaaaga

SEQ ID NO: 482675 - RNA, 19 nt, Homo sapiens
  misc_RNA (1)...(19): siRNA sense strand
acccagggcuucauaauca

SEQ ID NO: 482676 - RNA, 19 nt, Homo sapiens
  misc_RNA (1)...(19): siRNA sense strand
gauaugcugguacaucuga

SEQ ID NO: 482677 - RNA, 19 nt, Homo sapiens
  misc_RNA (1)...(19): siRNA sense strand
cauaaucaccuucuguuca

SEQ ID NO: 482678 - RNA, 19 nt, Homo sapiens
  misc_RNA (1)...(19): siRNA sense strand
ggugaaacccuccgagcuu

SEQ ID NO: 482679 - RNA, 19 nt, Homo sapiens
  misc_RNA (1)...(19): siRNA sense strand
gaaugucucacaaauaaac

SEQ ID NO: 482680 - RNA, 19 nt, Homo sapiens
  misc_RNA (1)...(19): siRNA sense strand
gaagacguuccgcuuugaa

SEQ ID NO: 482681 - RNA, 19 nt, Homo sapiens
  misc_RNA (1)...(19): siRNA sense strand
caaauaaaccaagauaugc

SEQ ID NO: 482682 - RNA, 19 nt, Homo sapiens
  misc_RNA (1)...(19): siRNA sense strand
caccuucuguucagcacua

SEQ ID NO: 482683 - RNA, 19 nt, Homo sapiens
  misc_RNA (1)...(19): siRNA sense strand
gcaaauuaucagaagagaa

SEQ ID NO: 482684 - RNA, 19 nt, Homo sapiens
  misc_RNA (1)...(19): siRNA sense strand
ucucacaaauaaaccaaga

SEQ ID NO: 482685 - RNA, 19 nt, Homo sapiens
  misc_RNA (1)...(19): siRNA sense strand
gcauacccagggcuucaua

SEQ ID NO: 482686 - RNA, 19 nt, Homo sapiens
  misc_RNA (1)...(19): siRNA sense strand
gcacuagaugauauucuug

SEQ ID NO: 482687 - RNA, 19 nt, Homo sapiens
  misc_RNA (1)...(19): siRNA sense strand
caagauaugcugguacauc

SEQ ID NO: 482688 - RNA, 19 nt, Homo sapiens
  misc_RNA (1)...(19): siRNA sense strand
gguggagugcccuuaauga

SEQ ID NO: 482689 - RNA, 19 nt, Homo sapiens
  misc_RNA (1)...(19): siRNA sense strand
caucugagucacacaagaa

SEQ ID NO: 482690 - RNA, 19 nt, Homo sapiens
  misc_RNA (1)...(19): siRNA sense strand
guacaucugagucacacaa

SEQ ID NO: 482691 - RNA, 19 nt, Homo sapiens
  misc_RNA (1)...(19): siRNA sense strand
gagcauacccagggcuuca

SEQ ID NO: 482692 - RNA, 19 nt, Homo sapiens
  misc_RNA (1)...(19): siRNA sense strand
uggagugcccuuaaugaaa

SEQ ID NO: 482693 - RNA, 19 nt, Homo sapiens
  misc_RNA (1)...(19): siRNA sense strand
gcagcgggauuuggugagu

SEQ ID NO: 482694 - RNA, 19 nt, Homo sapiens
  misc_RNA (1)...(19): siRNA sense strand
guggagugcccuuaaugaa

SEQ ID NO: 482695 - RNA, 19 nt, Homo sapiens
  misc_RNA (1)...(19): siRNA sense strand
gacguuccgcuuugaaaug

SEQ ID NO: 482696 - RNA, 19 nt, Homo sapiens
  misc_RNA (1)...(19): siRNA sense strand
cagaagccuuagaaacucu

SEQ ID NO: 482697 - RNA, 19 nt, Homo sapiens
  misc_RNA (1)...(19): siRNA sense strand
auaaucaccuucuguucag

SEQ ID NO: 482698 - RNA, 19 nt, Homo sapiens
  misc_RNA (1)...(19): siRNA sense strand
agcacuagaugauauucuu

SEQ ID NO: 482699 - RNA, 19 nt, Homo sapiens
  misc_RNA (1)...(19): siRNA sense strand
ccuuagaaacucugcaaau

SEQ ID NO: 482700 - RNA, 19 nt, Homo sapiens
  misc_RNA (1)...(19): siRNA sense strand
agcgggauuuggugaguuu

SEQ ID NO: 482701 - RNA, 19 nt, Homo sapiens
  misc_RNA (1)...(19): siRNA sense strand
cagcgggauuuggugaguu

SEQ ID NO: 482702 - RNA, 19 nt, Homo sapiens
  misc_RNA (1)...(19): siRNA sense strand
aucuaaagcagaagccuua

SEQ ID NO: 482703 - RNA, 19 nt, Homo sapiens
  misc_RNA (1)...(19): siRNA sense strand
ccagacugcugaggaacuc

SEQ ID NO: 482704 - RNA, 19 nt, Homo sapiens
  misc_RNA (1)...(19): siRNA sense strand
gcucaugccugugcugaau

SEQ ID NO: 482705 - RNA, 19 nt, Homo sapiens
  misc_RNA (1)...(19): siRNA sense strand
ucaugccugugcugaauca

SEQ ID NO: 482706 - RNA, 19 nt, Homo sapiens
  misc_RNA (1)...(19): siRNA sense strand
caaaguuucuuacggcaua

SEQ ID NO: 482707 - RNA, 19 nt, Homo sapiens
  misc_RNA (1)...(19): siRNA sense strand
gagccuggauuaagaagaa

SEQ ID NO: 482708 - RNA, 19 nt, Homo sapiens
  misc_RNA (1)...(19): siRNA sense strand
ggaagaagccccagauaua

SEQ ID NO: 482709 - RNA, 19 nt, Homo sapiens
  misc_RNA (1)...(19): siRNA sense strand
gaagaaaggauuagauugg

SEQ ID NO: 482710 - RNA, 19 nt, Homo sapiens
  misc_RNA (1)...(19): siRNA sense strand
gggaugagcucaggacaga

SEQ ID NO: 482711 - RNA, 19 nt, Homo sapiens
  misc_RNA (1)...(19): siRNA sense strand
gcgcugggaugaagccuuu

SEQ ID NO: 482712 - RNA, 19 nt, Homo sapiens
  misc_RNA (1)...(19): siRNA sense strand
gaugaagccuuucgcaagu

SEQ ID NO: 482713 - RNA, 19 nt, Homo sapiens
  misc_RNA (1)...(19): siRNA sense strand
gaacaaacuaccagcugaa

SEQ ID NO: 482714 - RNA, 19 nt, Homo sapiens
  misc_RNA (1)...(19): siRNA sense strand
gagaccaaauguucagaga

SEQ ID NO: 482715 - RNA, 19 nt, Homo sapiens
  misc_RNA (1)...(19): siRNA sense strand
gauauacugugccuucaag

SEQ ID NO: 482716 - RNA, 19 nt, Homo sapiens
  misc_RNA (1)...(19): siRNA sense strand
ggauuaagaagaaaggauu

SEQ ID NO: 482717 - RNA, 19 nt, Homo sapiens
  misc_RNA (1)...(19): siRNA sense strand
gaucugcucuuggaaugug

SEQ ID NO: 482718 - RNA, 19 nt, Homo sapiens
  misc_RNA (1)...(19): siRNA sense strand
caaacuaccagcugaacuu

SEQ ID NO: 482719 - RNA, 19 nt, Homo sapiens
  misc_RNA (1)...(19): siRNA sense strand
cuucgagccuggauuaaga

SEQ ID NO: 482720 - RNA, 19 nt, Homo sapiens
  misc_RNA (1)...(19): siRNA sense strand
uaacagcauauguaccuaa

SEQ ID NO: 482721 - RNA, 19 nt, Homo sapiens
  misc_RNA (1)...(19): siRNA sense strand
uagauuggguaaaggaaga

SEQ ID NO: 482722 - RNA, 19 nt, Homo sapiens
  misc_RNA (1)...(19): siRNA sense strand
ucuguuaccugcauugugu

SEQ ID NO: 482723 - RNA, 19 nt, Homo sapiens
  misc_RNA (1)...(19): siRNA sense strand
ggagcugccuggacucucu

SEQ ID NO: 482724 - RNA, 19 nt, Homo sapiens
  misc_RNA (1)...(19): siRNA sense strand
gauuguggcugaauuugac

SEQ ID NO: 482725 - RNA, 19 nt, Homo sapiens
  misc_RNA (1)...(19): siRNA sense strand
ggucagcuccuucggacaa

SEQ ID NO: 482726 - RNA, 19 nt, Homo sapiens
  misc_RNA (1)...(19): siRNA sense strand
gaauguggaugggcuucga

SEQ ID NO: 482727 - RNA, 19 nt, Homo sapiens
  misc_RNA (1)...(19): siRNA sense strand
ccagaggccaagaagagua

SEQ ID NO: 482728 - RNA, 19 nt, Homo sapiens
  misc_RNA (1)...(19): siRNA sense strand
ccuggacucucucaucaau

SEQ ID NO: 482729 - RNA, 19 nt, Homo sapiens
  misc_RNA (1)...(19): siRNA sense strand
ggugauuguggcugaauuu

SEQ ID NO: 482730 - RNA, 19 nt, Homo sapiens
  misc_RNA (1)...(19): siRNA sense strand
guaacagcauauguaccua

SEQ ID NO: 482731 - RNA, 19 nt, Homo sapiens
  misc_RNA (1)...(19): siRNA sense strand
ggcugaauuugacucguuu

SEQ ID NO: 482732 - RNA, 19 nt, Homo sapiens
  misc_RNA (1)...(19): siRNA sense strand
uggcugaauuugacucguu

SEQ ID NO: 482733 - RNA, 19 nt, Homo sapiens
  misc_RNA (1)...(19): siRNA sense strand
gcaaaccugccacacucaa

SEQ ID NO: 482734 - RNA, 19 nt, Homo sapiens
  misc_RNA (1)...(19): siRNA sense strand
guuggcgccuugauuacuu

SEQ ID NO: 482735 - RNA, 19 nt, Homo sapiens
  misc_RNA (1)...(19): siRNA sense strand
ggacaaggaaggguacagu

SEQ ID NO: 482736 - RNA, 19 nt, Homo sapiens
  misc_RNA (1)...(19): siRNA sense strand
ugaaugcucgauccaagaa

SEQ ID NO: 482737 - RNA, 19 nt, Homo sapiens
  misc_RNA (1)...(19): siRNA sense strand
agaagaaaggauuagauug

SEQ ID NO: 482738 - RNA, 19 nt, Homo sapiens
  misc_RNA (1)...(19): siRNA sense strand
cagaggccaagaagaguaa

SEQ ID NO: 482739 - RNA, 19 nt, Homo sapiens
  misc_RNA (1)...(19): siRNA sense strand
gauuagauuggguaaagga

SEQ ID NO: 482740 - RNA, 19 nt, Homo sapiens
  misc_RNA (1)...(19): siRNA sense strand
aggauuagauuggguaaag

SEQ ID NO: 482741 - RNA, 19 nt, Homo sapiens
  misc_RNA (1)...(19): siRNA sense strand
uggacucucucaucaauac

SEQ ID NO: 482742 - RNA, 19 nt, Homo sapiens
  misc_RNA (1)...(19): siRNA sense strand
ugaagccuuucgcaaguuc

SEQ ID NO: 482743 - RNA, 19 nt, Homo sapiens
  misc_RNA (1)...(19): siRNA sense strand
ucaagagaccaaauguuca

SEQ ID NO: 482744 - RNA, 19 nt, Homo sapiens
  misc_RNA (1)...(19): siRNA sense strand
guugucccacucucuguua

SEQ ID NO: 482745 - RNA, 19 nt, Homo sapiens
  misc_RNA (1)...(19): siRNA sense strand
uugguuggcgccuugauua

SEQ ID NO: 482746 - RNA, 19 nt, Homo sapiens
  misc_RNA (1)...(19): siRNA sense strand
gggugauuguggcugaauu

SEQ ID NO: 482747 - RNA, 19 nt, Homo sapiens
  misc_RNA (1)...(19): siRNA sense strand
ugccuggacucucucauca

SEQ ID NO: 482748 - RNA, 19 nt, Homo sapiens
  misc_RNA (1)...(19): siRNA sense strand
ugacucguuugugcuggua

SEQ ID NO: 482749 - RNA, 19 nt, Homo sapiens
  misc_RNA (1)...(19): siRNA sense strand
aaugcucgauccaagaaug

SEQ ID NO: 482750 - RNA, 19 nt, Homo sapiens
  misc_RNA (1)...(19): siRNA sense strand
cagauauacugugccuuca

SEQ ID NO: 482751 - RNA, 19 nt, Homo sapiens
  misc_RNA (1)...(19): siRNA sense strand
caagagaccaaauguucag

SEQ ID NO: 482752 - RNA, 19 nt, Homo sapiens
  misc_RNA (1)...(19): siRNA sense strand
auacugugccuucaagaga

SEQ ID NO: 482753 - RNA, 19 nt, Homo sapiens
  misc_RNA (1)...(19): siRNA sense strand
aaaccugccacacucaaga

SEQ ID NO: 482754 - RNA, 19 nt, Homo sapiens
  misc_RNA (1)...(19): siRNA sense strand
uucaagagaccaaauguuc

SEQ ID NO: 482755 - RNA, 19 nt, Homo sapiens
  misc_RNA (1)...(19): siRNA sense strand
acagcaagauccguuccaa

SEQ ID NO: 482756 - RNA, 19 nt, Homo sapiens
  misc_RNA (1)...(19): siRNA sense strand
gaagaagccccagauauac

SEQ ID NO: 482757 - RNA, 19 nt, Homo sapiens
  misc_RNA (1)...(19): siRNA sense strand
uuaccugcauugugugaca

SEQ ID NO: 482758 - RNA, 19 nt, Homo sapiens
  misc_RNA (1)...(19): siRNA sense strand
ggauuagauuggguaaagg

SEQ ID NO: 482759 - RNA, 19 nt, Homo sapiens
  misc_RNA (1)...(19): siRNA sense strand
ugauuguggcugaauuuga

SEQ ID NO: 482760 - RNA, 19 nt, Homo sapiens
  misc_RNA (1)...(19): siRNA sense strand
aacagcauauguaccuaau

SEQ ID NO: 482761 - RNA, 19 nt, Homo sapiens
  misc_RNA (1)...(19): siRNA sense strand
gcucgauccaagaauguug

SEQ ID NO: 482762 - RNA, 19 nt, Homo sapiens
  misc_RNA (1)...(19): siRNA sense strand
caauacuggucagcuccuu

SEQ ID NO: 482763 - RNA, 19 nt, Homo sapiens
  misc_RNA (1)...(19): siRNA sense strand
caaaguuucuuacggcaua

SEQ ID NO: 482764 - RNA, 19 nt, Homo sapiens
  misc_RNA (1)...(19): siRNA sense strand
gagccuggauuaagaagaa

SEQ ID NO: 482765 - RNA, 19 nt, Homo sapiens
  misc_RNA (1)...(19): siRNA sense strand
ggaagaagccccagauaua

SEQ ID NO: 482766 - RNA, 19 nt, Homo sapiens
  misc_RNA (1)...(19): siRNA sense strand
gaagaaaggauuagauugg

SEQ ID NO: 482767 - RNA, 19 nt, Homo sapiens
  misc_RNA (1)...(19): siRNA sense strand
gggaugagcucaggacaga

SEQ ID NO: 482768 - RNA, 19 nt, Homo sapiens
  misc_RNA (1)...(19): siRNA sense strand
gcgcugggaugaagccuuu

SEQ ID NO: 482769 - RNA, 19 nt, Homo sapiens
  misc_RNA (1)...(19): siRNA sense strand
gaugaagccuuucgcaagu

SEQ ID NO: 482770 - RNA, 19 nt, Homo sapiens
  misc_RNA (1)...(19): siRNA sense strand
gaacaaacuaccagcugaa

SEQ ID NO: 482771 - RNA, 19 nt, Homo sapiens
  misc_RNA (1)...(19): siRNA sense strand
gagaccaaauguucagaga

SEQ ID NO: 482772 - RNA, 19 nt, Homo sapiens
  misc_RNA (1)...(19): siRNA sense strand
gauauacugugccuucaag

SEQ ID NO: 482773 - RNA, 19 nt, Homo sapiens
  misc_RNA (1)...(19): siRNA sense strand
ggauuaagaagaaaggauu

SEQ ID NO: 482774 - RNA, 19 nt, Homo sapiens
  misc_RNA (1)...(19): siRNA sense strand
gaucugcucuuggaaugug

SEQ ID NO: 482775 - RNA, 19 nt, Homo sapiens
  misc_RNA (1)...(19): siRNA sense strand
caaacuaccagcugaacuu

SEQ ID NO: 482776 - RNA, 19 nt, Homo sapiens
  misc_RNA (1)...(19): siRNA sense strand
cuucgagccuggauuaaga

SEQ ID NO: 482777 - RNA, 19 nt, Homo sapiens
  misc_RNA (1)...(19): siRNA sense strand
uaacagcauauguaccuaa

SEQ ID NO: 482778 - RNA, 19 nt, Homo sapiens
  misc_RNA (1)...(19): siRNA sense strand
uagauuggguaaaggaaga

SEQ ID NO: 482779 - RNA, 19 nt, Homo sapiens
  misc_RNA (1)...(19): siRNA sense strand
ucuguuaccugcauugugu

SEQ ID NO: 482780 - RNA, 19 nt, Homo sapiens
  misc_RNA (1)...(19): siRNA sense strand
ggagcugccuggacucucu

SEQ ID NO: 482781 - RNA, 19 nt, Homo sapiens
  misc_RNA (1)...(19): siRNA sense strand
gauuguggcugaauuugac

SEQ ID NO: 482782 - RNA, 19 nt, Homo sapiens
  misc_RNA (1)...(19): siRNA sense strand
ggucagcuccuucggacaa

SEQ ID NO: 482783 - RNA, 19 nt, Homo sapiens
  misc_RNA (1)...(19): siRNA sense strand
gaauguggaugggcuucga

SEQ ID NO: 482784 - RNA, 19 nt, Homo sapiens
  misc_RNA (1)...(19): siRNA sense strand
ccagaggccaagaagagua

SEQ ID NO: 482785 - RNA, 19 nt, Homo sapiens
  misc_RNA (1)...(19): siRNA sense strand
ccuggacucucucaucaau

SEQ ID NO: 482786 - RNA, 19 nt, Homo sapiens
  misc_RNA (1)...(19): siRNA sense strand
ggugauuguggcugaauuu

SEQ ID NO: 482787 - RNA, 19 nt, Homo sapiens
  misc_RNA (1)...(19): siRNA sense strand
guaacagcauauguaccua

SEQ ID NO: 482788 - RNA, 19 nt, Homo sapiens
  misc_RNA (1)...(19): siRNA sense strand
ggcugaauuugacucguuu

SEQ ID NO: 482789 - RNA, 19 nt, Homo sapiens
  misc_RNA (1)...(19): siRNA sense strand
uggcugaauuugacucguu

SEQ ID NO: 482790 - RNA, 19 nt, Homo sapiens
  misc_RNA (1)...(19): siRNA sense strand
gcaaaccugccacacucaa

SEQ ID NO: 482791 - RNA, 19 nt, Homo sapiens
  misc_RNA (1)...(19): siRNA sense strand
guuggcgccuugauuacuu

SEQ ID NO: 482792 - RNA, 19 nt, Homo sapiens
  misc_RNA (1)...(19): siRNA sense strand
ggacaaggaaggguacagu

SEQ ID NO: 482793 - RNA, 19 nt, Homo sapiens
  misc_RNA (1)...(19): siRNA sense strand
ugaaugcucgauccaagaa

SEQ ID NO: 482794 - RNA, 19 nt, Homo sapiens
  misc_RNA (1)...(19): siRNA sense strand
agaagaaaggauuagauug

SEQ ID NO: 482795 - RNA, 19 nt, Homo sapiens
  misc_RNA (1)...(19): siRNA sense strand
cagaggccaagaagaguaa

SEQ ID NO: 482796 - RNA, 19 nt, Homo sapiens
  misc_RNA (1)...(19): siRNA sense strand
gauuagauuggguaaagga

SEQ ID NO: 482797 - RNA, 19 nt, Homo sapiens
  misc_RNA (1)...(19): siRNA sense strand
aggauuagauuggguaaag

SEQ ID NO: 482798 - RNA, 19 nt, Homo sapiens
  misc_RNA (1)...(19): siRNA sense strand
uggacucucucaucaauac

SEQ ID NO: 482799 - RNA, 19 nt, Homo sapiens
  misc_RNA (1)...(19): siRNA sense strand
ugaagccuuucgcaaguuc

SEQ ID NO: 482800 - RNA, 19 nt, Homo sapiens
  misc_RNA (1)...(19): siRNA sense strand
ucaagagaccaaauguuca

SEQ ID NO: 482801 - RNA, 19 nt, Homo sapiens
  misc_RNA (1)...(19): siRNA sense strand
guugucccacucucuguua

SEQ ID NO: 482802 - RNA, 19 nt, Homo sapiens
  misc_RNA (1)...(19): siRNA sense strand
uugguuggcgccuugauua

SEQ ID NO: 482803 - RNA, 19 nt, Homo sapiens
  misc_RNA (1)...(19): siRNA sense strand
gggugauuguggcugaauu

SEQ ID NO: 482804 - RNA, 19 nt, Homo sapiens
  misc_RNA (1)...(19): siRNA sense strand
ugccuggacucucucauca

SEQ ID NO: 482805 - RNA, 19 nt, Homo sapiens
  misc_RNA (1)...(19): siRNA sense strand
ugacucguuugugcuggua

SEQ ID NO: 482806 - RNA, 19 nt, Homo sapiens
  misc_RNA (1)...(19): siRNA sense strand
aaugcucgauccaagaaug

SEQ ID NO: 482807 - RNA, 19 nt, Homo sapiens
  misc_RNA (1)...(19): siRNA sense strand
cagauauacugugccuuca

SEQ ID NO: 482808 - RNA, 19 nt, Homo sapiens
  misc_RNA (1)...(19): siRNA sense strand
caagagaccaaauguucag

SEQ ID NO: 482809 - RNA, 19 nt, Homo sapiens
  misc_RNA (1)...(19): siRNA sense strand
auacugugccuucaagaga

SEQ ID NO: 482810 - RNA, 19 nt, Homo sapiens
  misc_RNA (1)...(19): siRNA sense strand
aaaccugccacacucaaga

SEQ ID NO: 482811 - RNA, 19 nt, Homo sapiens
  misc_RNA (1)...(19): siRNA sense strand
uucaagagaccaaauguuc

SEQ ID NO: 482812 - RNA, 19 nt, Homo sapiens
  misc_RNA (1)...(19): siRNA sense strand
acagcaagauccguuccaa

SEQ ID NO: 482813 - RNA, 19 nt, Homo sapiens
  misc_RNA (1)...(19): siRNA sense strand
gaagaagccccagauauac

SEQ ID NO: 482814 - RNA, 19 nt, Homo sapiens
  misc_RNA (1)...(19): siRNA sense strand
uuaccugcauugugugaca

SEQ ID NO: 482815 - RNA, 19 nt, Homo sapiens
  misc_RNA (1)...(19): siRNA sense strand
ggauuagauuggguaaagg

SEQ ID NO: 482816 - RNA, 19 nt, Homo sapiens
  misc_RNA (1)...(19): siRNA sense strand
ugauuguggcugaauuuga

SEQ ID NO: 482817 - RNA, 19 nt, Homo sapiens
  misc_RNA (1)...(19): siRNA sense strand
aacagcauauguaccuaau

SEQ ID NO: 482818 - RNA, 19 nt, Homo sapiens
  misc_RNA (1)...(19): siRNA sense strand
gcucgauccaagaauguug

SEQ ID NO: 482819 - RNA, 19 nt, Homo sapiens
  misc_RNA (1)...(19): siRNA sense strand
caauacuggucagcuccuu

SEQ ID NO: 482820 - RNA, 19 nt, Homo sapiens
  misc_RNA (1)...(19): siRNA sense strand
caaaguuucuuacggcaua

SEQ ID NO: 482821 - RNA, 19 nt, Homo sapiens
  misc_RNA (1)...(19): siRNA sense strand
gagccuggauuaagaagaa

SEQ ID NO: 482822 - RNA, 19 nt, Homo sapiens
  misc_RNA (1)...(19): siRNA sense strand
ggaagaagccccagauaua

SEQ ID NO: 482823 - RNA, 19 nt, Homo sapiens
  misc_RNA (1)...(19): siRNA sense strand
gaagaaaggauuagauugg

SEQ ID NO: 482824 - RNA, 19 nt, Homo sapiens
  misc_RNA (1)...(19): siRNA sense strand
gggaugagcucaggacaga

SEQ ID NO: 482825 - RNA, 19 nt, Homo sapiens
  misc_RNA (1)...(19): siRNA sense strand
gcgcugggaugaagccuuu

SEQ ID NO: 482826 - RNA, 19 nt, Homo sapiens
  misc_RNA (1)...(19): siRNA sense strand
gaugaagccuuucgcaagu

SEQ ID NO: 482827 - RNA, 19 nt, Homo sapiens
  misc_RNA (1)...(19): siRNA sense strand
gaacaaacuaccagcugaa

SEQ ID NO: 482828 - RNA, 19 nt, Homo sapiens
  misc_RNA (1)...(19): siRNA sense strand
gagaccaaauguucagaga

SEQ ID NO: 482829 - RNA, 19 nt, Homo sapiens
  misc_RNA (1)...(19): siRNA sense strand
gauauacugugccuucaag

SEQ ID NO: 482830 - RNA, 19 nt, Homo sapiens
  misc_RNA (1)...(19): siRNA sense strand
ggauuaagaagaaaggauu

SEQ ID NO: 482831 - RNA, 19 nt, Homo sapiens
  misc_RNA (1)...(19): siRNA sense strand
gaucugcucuuggaaugug

SEQ ID NO: 482832 - RNA, 19 nt, Homo sapiens
  misc_RNA (1)...(19): siRNA sense strand
caaacuaccagcugaacuu

SEQ ID NO: 482833 - RNA, 19 nt, Homo sapiens
  misc_RNA (1)...(19): siRNA sense strand
cuucgagccuggauuaaga

SEQ ID NO: 482834 - RNA, 19 nt, Homo sapiens
  misc_RNA (1)...(19): siRNA sense strand
uaacagcauauguaccuaa

SEQ ID NO: 482835 - RNA, 19 nt, Homo sapiens
  misc_RNA (1)...(19): siRNA sense strand
uagauuggguaaaggaaga

SEQ ID NO: 482836 - RNA, 19 nt, Homo sapiens
  misc_RNA (1)...(19): siRNA sense strand
ucuguuaccugcauugugu

SEQ ID NO: 482837 - RNA, 19 nt, Homo sapiens
  misc_RNA (1)...(19): siRNA sense strand
ggagcugccuggacucucu

SEQ ID NO: 482838 - RNA, 19 nt, Homo sapiens
  misc_RNA (1)...(19): siRNA sense strand
gauuguggcugaauuugac

SEQ ID NO: 482839 - RNA, 19 nt, Homo sapiens
  misc_RNA (1)...(19): siRNA sense strand
ggucagcuccuucggacaa

SEQ ID NO: 482840 - RNA, 19 nt, Homo sapiens
  misc_RNA (1)...(19): siRNA sense strand
gaauguggaugggcuucga

SEQ ID NO: 482841 - RNA, 19 nt, Homo sapiens
  misc_RNA (1)...(19): siRNA sense strand
ccagaggccaagaagagua

SEQ ID NO: 482842 - RNA, 19 nt, Homo sapiens
  misc_RNA (1)...(19): siRNA sense strand
ccuggacucucucaucaau

SEQ ID NO: 482843 - RNA, 19 nt, Homo sapiens
  misc_RNA (1)...(19): siRNA sense strand
ggugauuguggcugaauuu

SEQ ID NO: 482844 - RNA, 19 nt, Homo sapiens
  misc_RNA (1)...(19): siRNA sense strand
guaacagcauauguaccua

SEQ ID NO: 482845 - RNA, 19 nt, Homo sapiens
  misc_RNA (1)...(19): siRNA sense strand
ggcugaauuugacucguuu

SEQ ID NO: 482846 - RNA, 19 nt, Homo sapiens
  misc_RNA (1)...(19): siRNA sense strand
uggcugaauuugacucguu

SEQ ID NO: 482847 - RNA, 19 nt, Homo sapiens
  misc_RNA (1)...(19): siRNA sense strand
gcaaaccugccacacucaa

SEQ ID NO: 482848 - RNA, 19 nt, Homo sapiens
  misc_RNA (1)...(19): siRNA sense strand
guuggcgccuugauuacuu

SEQ ID NO: 482849 - RNA, 19 nt, Homo sapiens
  misc_RNA (1)...(19): siRNA sense strand
ggacaaggaaggguacagu

SEQ ID NO: 482850 - RNA, 19 nt, Homo sapiens
  misc_RNA (1)...(19): siRNA sense strand
ugaaugcucgauccaagaa

SEQ ID NO: 482851 - RNA, 19 nt, Homo sapiens
  misc_RNA (1)...(19): siRNA sense strand
agaagaaaggauuagauug

SEQ ID NO: 482852 - RNA, 19 nt, Homo sapiens
  misc_RNA (1)...(19): siRNA sense strand
cagaggccaagaagaguaa

SEQ ID NO: 482853 - RNA, 19 nt, Homo sapiens
  misc_RNA (1)...(19): siRNA sense strand
gauuagauuggguaaagga

SEQ ID NO: 482854 - RNA, 19 nt, Homo sapiens
  misc_RNA (1)...(19): siRNA sense strand
aggauuagauuggguaaag

SEQ ID NO: 482855 - RNA, 19 nt, Homo sapiens
  misc_RNA (1)...(19): siRNA sense strand
uggacucucucaucaauac

SEQ ID NO: 482856 - RNA, 19 nt, Homo sapiens
  misc_RNA (1)...(19): siRNA sense strand
ugaagccuuucgcaaguuc

SEQ ID NO: 482857 - RNA, 19 nt, Homo sapiens
  misc_RNA (1)...(19): siRNA sense strand
ucaagagaccaaauguuca

SEQ ID NO: 482858 - RNA, 19 nt, Homo sapiens
  misc_RNA (1)...(19): siRNA sense strand
guugucccacucucuguua

SEQ ID NO: 482859 - RNA, 19 nt, Homo sapiens
  misc_RNA (1)...(19): siRNA sense strand
uugguuggcgccuugauua

SEQ ID NO: 482860 - RNA, 19 nt, Homo sapiens
  misc_RNA (1)...(19): siRNA sense strand
gggugauuguggcugaauu

SEQ ID NO: 482861 - RNA, 19 nt, Homo sapiens
  misc_RNA (1)...(19): siRNA sense strand
ugccuggacucucucauca

SEQ ID NO: 482862 - RNA, 19 nt, Homo sapiens
  misc_RNA (1)...(19): siRNA sense strand
ugacucguuugugcuggua

SEQ ID NO: 482863 - RNA, 19 nt, Homo sapiens
  misc_RNA (1)...(19): siRNA sense strand
aaugcucgauccaagaaug

SEQ ID NO: 482864 - RNA, 19 nt, Homo sapiens
  misc_RNA (1)...(19): siRNA sense strand
cagauauacugugccuuca

SEQ ID NO: 482865 - RNA, 19 nt, Homo sapiens
  misc_RNA (1)...(19): siRNA sense strand
caagagaccaaauguucag

SEQ ID NO: 482866 - RNA, 19 nt, Homo sapiens
  misc_RNA (1)...(19): siRNA sense strand
auacugugccuucaagaga

SEQ ID NO: 482867 - RNA, 19 nt, Homo sapiens
  misc_RNA (1)...(19): siRNA sense strand
aaaccugccacacucaaga

SEQ ID NO: 482868 - RNA, 19 nt, Homo sapiens
  misc_RNA (1)...(19): siRNA sense strand
uucaagagaccaaauguuc

SEQ ID NO: 482869 - RNA, 19 nt, Homo sapiens
  misc_RNA (1)...(19): siRNA sense strand
acagcaagauccguuccaa

SEQ ID NO: 482870 - RNA, 19 nt, Homo sapiens
  misc_RNA (1)...(19): siRNA sense strand
gaagaagccccagauauac

SEQ ID NO: 482871 - RNA, 19 nt, Homo sapiens
  misc_RNA (1)...(19): siRNA sense strand
uuaccugcauugugugaca

SEQ ID NO: 482872 - RNA, 19 nt, Homo sapiens
  misc_RNA (1)...(19): siRNA sense strand
ggauuagauuggguaaagg

SEQ ID NO: 482873 - RNA, 19 nt, Homo sapiens
  misc_RNA (1)...(19): siRNA sense strand
ugauuguggcugaauuuga

SEQ ID NO: 482874 - RNA, 19 nt, Homo sapiens
  misc_RNA (1)...(19): siRNA sense strand
aacagcauauguaccuaau

SEQ ID NO: 482875 - RNA, 19 nt, Homo sapiens
  misc_RNA (1)...(19): siRNA sense strand
gcucgauccaagaauguug

SEQ ID NO: 482876 - RNA, 19 nt, Homo sapiens
  misc_RNA (1)...(19): siRNA sense strand
caauacuggucagcuccuu

SEQ ID NO: 482877 - RNA, 19 nt, Homo sapiens
  misc_RNA (1)...(19): siRNA sense strand
ggaagaagauguauuucaa

SEQ ID NO: 482878 - RNA, 19 nt, Homo sapiens
  misc_RNA (1)...(19): siRNA sense strand
ggaagaaacucugccagua

SEQ ID NO: 482879 - RNA, 19 nt, Homo sapiens
  misc_RNA (1)...(19): siRNA sense strand
gcagauccgcaaacgauua

SEQ ID NO: 482880 - RNA, 19 nt, Homo sapiens
  misc_RNA (1)...(19): siRNA sense strand
caacugccauucuggauuc

SEQ ID NO: 482881 - RNA, 19 nt, Homo sapiens
  misc_RNA (1)...(19): siRNA sense strand
ucacugaccugccuuugug

SEQ ID NO: 482882 - RNA, 19 nt, Homo sapiens
  misc_RNA (1)...(19): siRNA sense strand
gaagaaacucugccaguac

SEQ ID NO: 482883 - RNA, 19 nt, Homo sapiens
  misc_RNA (1)...(19): siRNA sense strand
ucaaacuuguccgauguua

SEQ ID NO: 482884 - RNA, 19 nt, Homo sapiens
  misc_RNA (1)...(19): siRNA sense strand
aaagagcaguauggagaua

SEQ ID NO: 482885 - RNA, 19 nt, Homo sapiens
  misc_RNA (1)...(19): siRNA sense strand
caaacacugucacauccuu

SEQ ID NO: 482886 - RNA, 19 nt, Homo sapiens
  misc_RNA (1)...(19): siRNA sense strand
cgcaaacgauuaauucugu

SEQ ID NO: 482887 - RNA, 19 nt, Homo sapiens
  misc_RNA (1)...(19): siRNA sense strand
uguuggagcugauagcaaa

SEQ ID NO: 482888 - RNA, 19 nt, Homo sapiens
  misc_RNA (1)...(19): siRNA sense strand
acaaagggcagcuggauug

SEQ ID NO: 482889 - RNA, 19 nt, Homo sapiens
  misc_RNA (1)...(19): siRNA sense strand
agacuggacuucucaacug

SEQ ID NO: 482890 - RNA, 19 nt, Homo sapiens
  misc_RNA (1)...(19): siRNA sense strand
gugcuggucgggaacauua

SEQ ID NO: 482891 - RNA, 19 nt, Homo sapiens
  misc_RNA (1)...(19): siRNA sense strand
guacacugguccaaagagu

SEQ ID NO: 482892 - RNA, 19 nt, Homo sapiens
  misc_RNA (1)...(19): siRNA sense strand
gaaagagcaguauggagau

SEQ ID NO: 482893 - RNA, 19 nt, Homo sapiens
  misc_RNA (1)...(19): siRNA sense strand
caacagacuggacuucuca

SEQ ID NO: 482894 - RNA, 19 nt, Homo sapiens
  misc_RNA (1)...(19): siRNA sense strand
ggacuucucaacugccauu

SEQ ID NO: 482895 - RNA, 19 nt, Homo sapiens
  misc_RNA (1)...(19): siRNA sense strand
aagggcagcuggauuggaa

SEQ ID NO: 482896 - RNA, 19 nt, Homo sapiens
  misc_RNA (1)...(19): siRNA sense strand
gauccgcaaacgauuaauu

SEQ ID NO: 482897 - RNA, 19 nt, Homo sapiens
  misc_RNA (1)...(19): siRNA sense strand
gauguuacccaaggaaaga

SEQ ID NO: 482898 - RNA, 19 nt, Homo sapiens
  misc_RNA (1)...(19): siRNA sense strand
caaagucacagcucacauc

SEQ ID NO: 482899 - RNA, 19 nt, Homo sapiens
  misc_RNA (1)...(19): siRNA sense strand
ccaaagagucggcaagucu

SEQ ID NO: 482900 - RNA, 19 nt, Homo sapiens
  misc_RNA (1)...(19): siRNA sense strand
gaagaccagcaaaacauua

SEQ ID NO: 482901 - RNA, 19 nt, Homo sapiens
  misc_RNA (1)...(19): siRNA sense strand
ccaggacuuuaucaacuug

SEQ ID NO: 482902 - RNA, 19 nt, Homo sapiens
  misc_RNA (1)...(19): siRNA sense strand
cagcuggauuggaagaaga

SEQ ID NO: 482903 - RNA, 19 nt, Homo sapiens
  misc_RNA (1)...(19): siRNA sense strand
guacugaaaguccuugaag

SEQ ID NO: 482904 - RNA, 19 nt, Homo sapiens
  misc_RNA (1)...(19): siRNA sense strand
gacaaagggcagcuggauu

SEQ ID NO: 482905 - RNA, 19 nt, Homo sapiens
  misc_RNA (1)...(19): siRNA sense strand
ccagaagauuuaacuacgu

SEQ ID NO: 482906 - RNA, 19 nt, Homo sapiens
  misc_RNA (1)...(19): siRNA sense strand
uauguacacugguccaaag

SEQ ID NO: 482907 - RNA, 19 nt, Homo sapiens
  misc_RNA (1)...(19): siRNA sense strand
caaggaaagagcaguaugg

SEQ ID NO: 482908 - RNA, 19 nt, Homo sapiens
  misc_RNA (1)...(19): siRNA sense strand
gcagcuggauuggaagaag

SEQ ID NO: 482909 - RNA, 19 nt, Homo sapiens
  misc_RNA (1)...(19): siRNA sense strand
cagauccgcaaacgauuaa

SEQ ID NO: 482910 - RNA, 19 nt, Homo sapiens
  misc_RNA (1)...(19): siRNA sense strand
gggaagcuuucaacagacu

SEQ ID NO: 482911 - RNA, 19 nt, Homo sapiens
  misc_RNA (1)...(19): siRNA sense strand
cggcagauccgcaaacgau

SEQ ID NO: 482912 - RNA, 19 nt, Homo sapiens
  misc_RNA (1)...(19): siRNA sense strand
uuucaaacuuguccgaugu

SEQ ID NO: 482913 - RNA, 19 nt, Homo sapiens
  misc_RNA (1)...(19): siRNA sense strand
cccaggacuuuaucaacuu

SEQ ID NO: 482914 - RNA, 19 nt, Homo sapiens
  misc_RNA (1)...(19): siRNA sense strand
gacccucuacacauccuua

SEQ ID NO: 482915 - RNA, 19 nt, Homo sapiens
  misc_RNA (1)...(19): siRNA sense strand
ucaacagacuggacuucuc

SEQ ID NO: 482916 - RNA, 19 nt, Homo sapiens
  misc_RNA (1)...(19): siRNA sense strand
gccuacaacugaacaucau

SEQ ID NO: 482917 - RNA, 19 nt, Homo sapiens
  misc_RNA (1)...(19): siRNA sense strand
uacugaaaguccuugaaga

SEQ ID NO: 482918 - RNA, 19 nt, Homo sapiens
  misc_RNA (1)...(19): siRNA sense strand
uggaagaagauguauuuca

SEQ ID NO: 482919 - RNA, 19 nt, Homo sapiens
  misc_RNA (1)...(19): siRNA sense strand
uggauuggaagaagaugua

SEQ ID NO: 482920 - RNA, 19 nt, Homo sapiens
  misc_RNA (1)...(19): siRNA sense strand
aagaccggcugcuguggaa

SEQ ID NO: 482921 - RNA, 19 nt, Homo sapiens
  misc_RNA (1)...(19): siRNA sense strand
cuucagcucugcaaacacu

SEQ ID NO: 482922 - RNA, 19 nt, Homo sapiens
  misc_RNA (1)...(19): siRNA sense strand
ggacuuuaucaacuuguuc

SEQ ID NO: 482923 - RNA, 19 nt, Homo sapiens
  misc_RNA (1)...(19): siRNA sense strand
caaacgauuaauucuguca

SEQ ID NO: 482924 - RNA, 19 nt, Homo sapiens
  misc_RNA (1)...(19): siRNA sense strand
gcugcuccguuucacuuuc

SEQ ID NO: 482925 - RNA, 19 nt, Homo sapiens
  misc_RNA (1)...(19): siRNA sense strand
ucaacugccauucuggauu

SEQ ID NO: 482926 - RNA, 19 nt, Homo sapiens
  misc_RNA (1)...(19): siRNA sense strand
cuucucaacugccauucug

SEQ ID NO: 482927 - RNA, 19 nt, Homo sapiens
  misc_RNA (1)...(19): siRNA sense strand
gaccggcugcuguggaaga

SEQ ID NO: 482928 - RNA, 19 nt, Homo sapiens
  misc_RNA (1)...(19): siRNA sense strand
ggucgggaacauuaacaug

SEQ ID NO: 482929 - RNA, 19 nt, Homo sapiens
  misc_RNA (1)...(19): siRNA sense strand
gauuggaagaagauguauu

SEQ ID NO: 482930 - RNA, 19 nt, Homo sapiens
  misc_RNA (1)...(19): siRNA sense strand
uccagacccucuacacauc

SEQ ID NO: 482931 - RNA, 19 nt, Homo sapiens
  misc_RNA (1)...(19): siRNA sense strand
ccaaggaaagagcaguaug

SEQ ID NO: 482932 - RNA, 19 nt, Homo sapiens
  misc_RNA (1)...(19): siRNA sense strand
gcaaagucacagcucacau

SEQ ID NO: 482933 - RNA, 19 nt, Homo sapiens
  misc_RNA (1)...(19): siRNA sense strand
aaacacugucacauccuuu

SEQ ID NO: 482934 - RNA, 19 nt, Homo sapiens
  misc_RNA (1)...(19): siRNA sense strand
ccaaaagaacuucaugaau

SEQ ID NO: 482935 - RNA, 19 nt, Homo sapiens
  misc_RNA (1)...(19): siRNA sense strand
ggaagaagauguauuucaa

SEQ ID NO: 482936 - RNA, 19 nt, Homo sapiens
  misc_RNA (1)...(19): siRNA sense strand
ggaagaaacucugccagua

SEQ ID NO: 482937 - RNA, 19 nt, Homo sapiens
  misc_RNA (1)...(19): siRNA sense strand
gcagauccgcaaacgauua

SEQ ID NO: 482938 - RNA, 19 nt, Homo sapiens
  misc_RNA (1)...(19): siRNA sense strand
ucacugaccugccuuugug

SEQ ID NO: 482939 - RNA, 19 nt, Homo sapiens
  misc_RNA (1)...(19): siRNA sense strand
gaagaaacucugccaguac

SEQ ID NO: 482940 - RNA, 19 nt, Homo sapiens
  misc_RNA (1)...(19): siRNA sense strand
ucaaacuuguccgauguua

SEQ ID NO: 482941 - RNA, 19 nt, Homo sapiens
  misc_RNA (1)...(19): siRNA sense strand
aaagagcaguauggagaua

SEQ ID NO: 482942 - RNA, 19 nt, Homo sapiens
  misc_RNA (1)...(19): siRNA sense strand
caaacacugucacauccuu

SEQ ID NO: 482943 - RNA, 19 nt, Homo sapiens
  misc_RNA (1)...(19): siRNA sense strand
cgcaaacgauuaauucugu

SEQ ID NO: 482944 - RNA, 19 nt, Homo sapiens
  misc_RNA (1)...(19): siRNA sense strand
gugcuggucgggaacauua

SEQ ID NO: 482945 - RNA, 19 nt, Homo sapiens
  misc_RNA (1)...(19): siRNA sense strand
acaaagggcagcuggauug

SEQ ID NO: 482946 - RNA, 19 nt, Homo sapiens
  misc_RNA (1)...(19): siRNA sense strand
guacacugguccaaagagu

SEQ ID NO: 482947 - RNA, 19 nt, Homo sapiens
  misc_RNA (1)...(19): siRNA sense strand
gaaagagcaguauggagau

SEQ ID NO: 482948 - RNA, 19 nt, Homo sapiens
  misc_RNA (1)...(19): siRNA sense strand
aagggcagcuggauuggaa

SEQ ID NO: 482949 - RNA, 19 nt, Homo sapiens
  misc_RNA (1)...(19): siRNA sense strand
gauccgcaaacgauuaauu

SEQ ID NO: 482950 - RNA, 19 nt, Homo sapiens
  misc_RNA (1)...(19): siRNA sense strand
gauguuacccaaggaaaga

SEQ ID NO: 482951 - RNA, 19 nt, Homo sapiens
  misc_RNA (1)...(19): siRNA sense strand
ccaaagagucggcaagucu

SEQ ID NO: 482952 - RNA, 19 nt, Homo sapiens
  misc_RNA (1)...(19): siRNA sense strand
gaagaccagcaaaacauua

SEQ ID NO: 482953 - RNA, 19 nt, Homo sapiens
  misc_RNA (1)...(19): siRNA sense strand
ccaggacuuuaucaacuug

SEQ ID NO: 482954 - RNA, 19 nt, Homo sapiens
  misc_RNA (1)...(19): siRNA sense strand
cagcuggauuggaagaaga

SEQ ID NO: 482955 - RNA, 19 nt, Homo sapiens
  misc_RNA (1)...(19): siRNA sense strand
gacaaagggcagcuggauu

SEQ ID NO: 482956 - RNA, 19 nt, Homo sapiens
  misc_RNA (1)...(19): siRNA sense strand
guacugaaaguccuugaag

SEQ ID NO: 482957 - RNA, 19 nt, Homo sapiens
  misc_RNA (1)...(19): siRNA sense strand
uauguacacugguccaaag

SEQ ID NO: 482958 - RNA, 19 nt, Homo sapiens
  misc_RNA (1)...(19): siRNA sense strand
caaggaaagagcaguaugg

SEQ ID NO: 482959 - RNA, 19 nt, Homo sapiens
  misc_RNA (1)...(19): siRNA sense strand
gcagcuggauuggaagaag

SEQ ID NO: 482960 - RNA, 19 nt, Homo sapiens
  misc_RNA (1)...(19): siRNA sense strand
cagauccgcaaacgauuaa

SEQ ID NO: 482961 - RNA, 19 nt, Homo sapiens
  misc_RNA (1)...(19): siRNA sense strand
cggcagauccgcaaacgau

SEQ ID NO: 482962 - RNA, 19 nt, Homo sapiens
  misc_RNA (1)...(19): siRNA sense strand
uuucaaacuuguccgaugu

SEQ ID NO: 482963 - RNA, 19 nt, Homo sapiens
  misc_RNA (1)...(19): siRNA sense strand
cccaggacuuuaucaacuu

SEQ ID NO: 482964 - RNA, 19 nt, Homo sapiens
  misc_RNA (1)...(19): siRNA sense strand
gacccucuacacauccuua

SEQ ID NO: 482965 - RNA, 19 nt, Homo sapiens
  misc_RNA (1)...(19): siRNA sense strand
gccuacaacugaacaucau

SEQ ID NO: 482966 - RNA, 19 nt, Homo sapiens
  misc_RNA (1)...(19): siRNA sense strand
aagaccggcugcuguggaa

SEQ ID NO: 482967 - RNA, 19 nt, Homo sapiens
  misc_RNA (1)...(19): siRNA sense strand
uggaagaagauguauuuca

SEQ ID NO: 482968 - RNA, 19 nt, Homo sapiens
  misc_RNA (1)...(19): siRNA sense strand
uggauuggaagaagaugua

SEQ ID NO: 482969 - RNA, 19 nt, Homo sapiens
  misc_RNA (1)...(19): siRNA sense strand
uacugaaaguccuugaaga

SEQ ID NO: 482970 - RNA, 19 nt, Homo sapiens
  misc_RNA (1)...(19): siRNA sense strand
cuucagcucugcaaacacu

SEQ ID NO: 482971 - RNA, 19 nt, Homo sapiens
  misc_RNA (1)...(19): siRNA sense strand
ggacuuuaucaacuuguuc

SEQ ID NO: 482972 - RNA, 19 nt, Homo sapiens
  misc_RNA (1)...(19): siRNA sense strand
caaacgauuaauucuguca

SEQ ID NO: 482973 - RNA, 19 nt, Homo sapiens
  misc_RNA (1)...(19): siRNA sense strand
gcugcuccguuucacuuuc

SEQ ID NO: 482974 - RNA, 19 nt, Homo sapiens
  misc_RNA (1)...(19): siRNA sense strand
ggucgggaacauuaacaug

SEQ ID NO: 482975 - RNA, 19 nt, Homo sapiens
  misc_RNA (1)...(19): siRNA sense strand
gaccggcugcuguggaaga

SEQ ID NO: 482976 - RNA, 19 nt, Homo sapiens
  misc_RNA (1)...(19): siRNA sense strand
gauuggaagaagauguauu

SEQ ID NO: 482977 - RNA, 19 nt, Homo sapiens
  misc_RNA (1)...(19): siRNA sense strand
uccagacccucuacacauc

SEQ ID NO: 482978 - RNA, 19 nt, Homo sapiens
  misc_RNA (1)...(19): siRNA sense strand
ccaaggaaagagcaguaug

SEQ ID NO: 482979 - RNA, 19 nt, Homo sapiens
  misc_RNA (1)...(19): siRNA sense strand
aaacacugucacauccuuu

SEQ ID NO: 482980 - RNA, 19 nt, Homo sapiens
  misc_RNA (1)...(19): siRNA sense strand
caagaaaggcaaagaaaua

SEQ ID NO: 482981 - RNA, 19 nt, Homo sapiens
  misc_RNA (1)...(19): siRNA sense strand
caaagaguauccacaccua

SEQ ID NO: 482982 - RNA, 19 nt, Homo sapiens
  misc_RNA (1)...(19): siRNA sense strand
gaaauaccauuagccaguu

SEQ ID NO: 482983 - RNA, 19 nt, Homo sapiens
  misc_RNA (1)...(19): siRNA sense strand
caccacaaauuccacaaua

SEQ ID NO: 482984 - RNA, 19 nt, Homo sapiens
  misc_RNA (1)...(19): siRNA sense strand
gggaauugauggcgugaaa

SEQ ID NO: 482985 - RNA, 19 nt, Homo sapiens
  misc_RNA (1)...(19): siRNA sense strand
ugggauaccuggaauuaaa

SEQ ID NO: 482986 - RNA, 19 nt, Homo sapiens
  misc_RNA (1)...(19): siRNA sense strand
gaacaacgagcccgugaug

SEQ ID NO: 482987 - RNA, 19 nt, Homo sapiens
  misc_RNA (1)...(19): siRNA sense strand
gcaaagaaauaccauuagc

SEQ ID NO: 482988 - RNA, 19 nt, Homo sapiens
  misc_RNA (1)...(19): siRNA sense strand
ucaaauuccuccucagaug

SEQ ID NO: 482989 - RNA, 19 nt, Homo sapiens
  misc_RNA (1)...(19): siRNA sense strand
ggagugcugcuuaccauuu

SEQ ID NO: 482990 - RNA, 19 nt, Homo sapiens
  misc_RNA (1)...(19): siRNA sense strand
caaaggagaaggugggauu

SEQ ID NO: 482991 - RNA, 19 nt, Homo sapiens
  misc_RNA (1)...(19): siRNA sense strand
ggagaaaggaccaauaggu

SEQ ID NO: 482992 - RNA, 19 nt, Homo sapiens
  misc_RNA (1)...(19): siRNA sense strand
cccaauauaugaaggaaau

SEQ ID NO: 482993 - RNA, 19 nt, Homo sapiens
  misc_RNA (1)...(19): siRNA sense strand
acaacgagcccgugaugua

SEQ ID NO: 482994 - RNA, 19 nt, Homo sapiens
  misc_RNA (1)...(19): siRNA sense strand
caugggauaccuggaauua

SEQ ID NO: 482995 - RNA, 19 nt, Homo sapiens
  misc_RNA (1)...(19): siRNA sense strand
ucagaugccaccacaaauu

SEQ ID NO: 482996 - RNA, 19 nt, Homo sapiens
  misc_RNA (1)...(19): siRNA sense strand
gcuaagaaaggcaagaaug

SEQ ID NO: 482997 - RNA, 19 nt, Homo sapiens
  misc_RNA (1)...(19): siRNA sense strand
aggcaaagaaauaccauua

SEQ ID NO: 482998 - RNA, 19 nt, Homo sapiens
  misc_RNA (1)...(19): siRNA sense strand
gcaaggagaugccccacuu

SEQ ID NO: 482999 - RNA, 19 nt, Homo sapiens
  misc_RNA (1)...(19): siRNA sense strand
ggguugcucuauucaagaa

SEQ ID NO: 483000 - RNA, 19 nt, Homo sapiens
  misc_RNA (1)...(19): siRNA sense strand
acagggauauccaggaguu

SEQ ID NO: 483001 - RNA, 19 nt, Homo sapiens
  misc_RNA (1)...(19): siRNA sense strand
gaauggagggccagccuau

SEQ ID NO: 483002 - RNA, 19 nt, Homo sapiens
  misc_RNA (1)...(19): siRNA sense strand
gaaaggcaaagaaauacca

SEQ ID NO: 483003 - RNA, 19 nt, Homo sapiens
  misc_RNA (1)...(19): siRNA sense strand
ggaguuggaaagccaggua

SEQ ID NO: 483004 - RNA, 19 nt, Homo sapiens
  misc_RNA (1)...(19): siRNA sense strand
ccucagaugccaccacaaa

SEQ ID NO: 483005 - RNA, 19 nt, Homo sapiens
  misc_RNA (1)...(19): siRNA sense strand
ccaagaaaggcaaagaaau

SEQ ID NO: 483006 - RNA, 19 nt, Homo sapiens
  misc_RNA (1)...(19): siRNA sense strand
gagugcugcuuaccauuuc

SEQ ID NO: 483007 - RNA, 19 nt, Homo sapiens
  misc_RNA (1)...(19): siRNA sense strand
aggagaaggugggauugua

SEQ ID NO: 483008 - RNA, 19 nt, Homo sapiens
  misc_RNA (1)...(19): siRNA sense strand
gggcaaaccaggagugaca

SEQ ID NO: 483009 - RNA, 19 nt, Homo sapiens
  misc_RNA (1)...(19): siRNA sense strand
ggucaugggauaccuggaa

SEQ ID NO: 483010 - RNA, 19 nt, Homo sapiens
  misc_RNA (1)...(19): siRNA sense strand
uaccuggaauuaaaggaaa

SEQ ID NO: 483011 - RNA, 19 nt, Homo sapiens
  misc_RNA (1)...(19): siRNA sense strand
aggagaaauuggacagaaa

SEQ ID NO: 483012 - RNA, 19 nt, Homo sapiens
  misc_RNA (1)...(19): siRNA sense strand
ggagaaauuggacagaaag

SEQ ID NO: 483013 - RNA, 19 nt, Homo sapiens
  misc_RNA (1)...(19): siRNA sense strand
gcauuuaccgccgagcuaa

SEQ ID NO: 483014 - RNA, 19 nt, Homo sapiens
  misc_RNA (1)...(19): siRNA sense strand
ggagaaggugggauuguag

SEQ ID NO: 483015 - RNA, 19 nt, Homo sapiens
  misc_RNA (1)...(19): siRNA sense strand
gcaguauggcaaagaguau

SEQ ID NO: 483016 - RNA, 19 nt, Homo sapiens
  misc_RNA (1)...(19): siRNA sense strand
ggaagccguacccaagaaa

SEQ ID NO: 483017 - RNA, 19 nt, Homo sapiens
  misc_RNA (1)...(19): siRNA sense strand
aaggagaaauuggacagaa

SEQ ID NO: 483018 - RNA, 19 nt, Homo sapiens
  misc_RNA (1)...(19): siRNA sense strand
ugaggucccuggugucuac

SEQ ID NO: 483019 - RNA, 19 nt, Homo sapiens
  misc_RNA (1)...(19): siRNA sense strand
gggauacccggaauuggaa

SEQ ID NO: 483020 - RNA, 19 nt, Homo sapiens
  misc_RNA (1)...(19): siRNA sense strand
gaacuacaacccgcagaca

SEQ ID NO: 483021 - RNA, 19 nt, Homo sapiens
  misc_RNA (1)...(19): siRNA sense strand
aaauaccauuagccaguuu

SEQ ID NO: 483022 - RNA, 19 nt, Homo sapiens
  misc_RNA (1)...(19): siRNA sense strand
uggagagccuggcccaaga

SEQ ID NO: 483023 - RNA, 19 nt, Homo sapiens
  misc_RNA (1)...(19): siRNA sense strand
uaagaaaggcaagaaugga

SEQ ID NO: 483024 - RNA, 19 nt, Homo sapiens
  misc_RNA (1)...(19): siRNA sense strand
cguguggguugcucuauuc

SEQ ID NO: 483025 - RNA, 19 nt, Homo sapiens
  misc_RNA (1)...(19): siRNA sense strand
cagaugccaccacaaauuc

SEQ ID NO: 483026 - RNA, 19 nt, Homo sapiens
  misc_RNA (1)...(19): siRNA sense strand
ucauggacuuccuggcauu

SEQ ID NO: 483027 - RNA, 19 nt, Homo sapiens
  misc_RNA (1)...(19): siRNA sense strand
guggguugcucuauucaag

SEQ ID NO: 483028 - RNA, 19 nt, Homo sapiens
  misc_RNA (1)...(19): siRNA sense strand
ggacagaaaggggaaauug

SEQ ID NO: 483029 - RNA, 19 nt, Homo sapiens
  misc_RNA (1)...(19): siRNA sense strand
ccuggugucuacuacuuug

SEQ ID NO: 483030 - RNA, 19 nt, Homo sapiens
  misc_RNA (1)...(19): siRNA sense strand
uaagggagagccaggaauc

SEQ ID NO: 483031 - RNA, 19 nt, Homo sapiens
  misc_RNA (1)...(19): siRNA sense strand
ggaguggcaggacuucaug

SEQ ID NO: 483032 - RNA, 19 nt, Homo sapiens
  misc_RNA (1)...(19): siRNA sense strand
guauguccacuccuccuuu

SEQ ID NO: 483033 - RNA, 19 nt, Homo sapiens
  misc_RNA (1)...(19): siRNA sense strand
cauaccacguucacugcaa

SEQ ID NO: 483034 - RNA, 19 nt, Homo sapiens
  misc_RNA (1)...(19): siRNA sense strand
cccaagaaaggcaaagaaa

SEQ ID NO: 483035 - RNA, 19 nt, Homo sapiens
  misc_RNA (1)...(19): siRNA sense strand
ccucaaauuccuccucaga

SEQ ID NO: 483036 - RNA, 19 nt, Homo sapiens
  misc_RNA (1)...(19): siRNA sense strand
ggacuaccaggaccucaag

SEQ ID NO: 483037 - RNA, 19 nt, Homo sapiens
  misc_RNA (1)...(19): siRNA sense strand
cuacuuugcauaccacguu

SEQ ID NO: 483038 - RNA, 19 nt, Homo sapiens
  misc_RNA (1)...(19): siRNA sense strand
ggagggccagccuaugaga

SEQ ID NO: 483039 - RNA, 19 nt, Homo sapiens
  misc_RNA (1)...(19): siRNA sense strand
cuaagaaaggcaagaaugg

SEQ ID NO: 483040 - RNA, 19 nt, Homo sapiens
  misc_RNA (1)...(19): siRNA sense strand
aggaagccguacccaagaa

SEQ ID NO: 483041 - RNA, 19 nt, Homo sapiens
  misc_RNA (1)...(19): siRNA sense strand
cgagcuaaccgcaccuuuc

SEQ ID NO: 483042 - RNA, 19 nt, Homo sapiens
  misc_RNA (1)...(19): siRNA sense strand
gggcuaagaaaggcaagaa

SEQ ID NO: 483043 - RNA, 19 nt, Homo sapiens
  misc_RNA (1)...(19): siRNA sense strand
gaucccaggaccacaagga

SEQ ID NO: 483044 - RNA, 19 nt, Homo sapiens
  misc_RNA (1)...(19): siRNA sense strand
aaccagggccacagggaua

SEQ ID NO: 483045 - RNA, 19 nt, Homo sapiens
  misc_RNA (1)...(19): siRNA sense strand
caacgagcccgugauguac

SEQ ID NO: 483046 - RNA, 19 nt, Homo sapiens
  misc_RNA (1)...(19): siRNA sense strand
ggcaaagaaauaccauuag

SEQ ID NO: 483047 - RNA, 19 nt, Homo sapiens
  misc_RNA (1)...(19): siRNA sense strand
ccagaugcccucagaacag

SEQ ID NO: 483048 - RNA, 19 nt, Homo sapiens
  misc_RNA (1)...(19): siRNA sense strand
aaagccagguuuccuuggu

SEQ ID NO: 483049 - RNA, 19 nt, Homo sapiens
  misc_RNA (1)...(19): siRNA sense strand
ggaaucccagguccuaugg

SEQ ID NO: 483050 - RNA, 19 nt, Homo sapiens
  misc_RNA (1)...(19): siRNA sense strand
ucgaggacccaaaggacua

SEQ ID NO: 483051 - RNA, 19 nt, Homo sapiens
  misc_RNA (1)...(19): siRNA sense strand
ugggauacccggaauugga

SEQ ID NO: 483052 - RNA, 19 nt, Homo sapiens
  misc_RNA (1)...(19): siRNA sense strand
gccaagaaugggcaaggaa

SEQ ID NO: 483053 - RNA, 19 nt, Homo sapiens
  misc_RNA (1)...(19): siRNA sense strand
gagcuaaccgcaccuuucc

SEQ ID NO: 483054 - RNA, 19 nt, Homo sapiens
  misc_RNA (1)...(19): siRNA sense strand
ggguuugccaggucccaua

SEQ ID NO: 483055 - RNA, 19 nt, Homo sapiens
  misc_RNA (1)...(19): siRNA sense strand
ggucagcaaguaccucaca

SEQ ID NO: 483056 - RNA, 19 nt, Homo sapiens
  misc_RNA (1)...(19): siRNA sense strand
uuugccaggucaugggaua

SEQ ID NO: 483057 - RNA, 19 nt, Homo sapiens
  misc_RNA (1)...(19): siRNA sense strand
guugcucuauucaagaaca

SEQ ID NO: 483058 - RNA, 19 nt, Homo sapiens
  misc_RNA (1)...(19): siRNA sense strand
gaagccuggugcccuuggu

SEQ ID NO: 483059 - RNA, 19 nt, Homo sapiens
  misc_RNA (1)...(19): siRNA sense strand
cugcugggagugcugcuua

SEQ ID NO: 483060 - RNA, 19 nt, Homo sapiens
  misc_RNA (1)...(19): siRNA sense strand
ccacaccuaccccaauaua

SEQ ID NO: 483061 - RNA, 19 nt, Homo sapiens
  misc_RNA (1)...(19): siRNA sense strand
gucaugggauaccuggaau

SEQ ID NO: 483062 - RNA, 19 nt, Homo sapiens
  misc_RNA (1)...(19): siRNA sense strand
guaccucacaugccuuugg

SEQ ID NO: 483063 - RNA, 19 nt, Homo sapiens
  misc_RNA (1)...(19): siRNA sense strand
ucccuggugucuacuacuu

SEQ ID NO: 483064 - RNA, 19 nt, Homo sapiens
  misc_RNA (1)...(19): siRNA sense strand
ccaggugcgccagguguaa

SEQ ID NO: 483065 - RNA, 19 nt, Homo sapiens
  misc_RNA (1)...(19): siRNA sense strand
caagaaaggcaaagaaaua

SEQ ID NO: 483066 - RNA, 19 nt, Homo sapiens
  misc_RNA (1)...(19): siRNA sense strand
caaagaguauccacaccua

SEQ ID NO: 483067 - RNA, 19 nt, Homo sapiens
  misc_RNA (1)...(19): siRNA sense strand
gaaauaccauuagccaguu

SEQ ID NO: 483068 - RNA, 19 nt, Homo sapiens
  misc_RNA (1)...(19): siRNA sense strand
caccacaaauuccacaaua

SEQ ID NO: 483069 - RNA, 19 nt, Homo sapiens
  misc_RNA (1)...(19): siRNA sense strand
gggaauugauggcgugaaa

SEQ ID NO: 483070 - RNA, 19 nt, Homo sapiens
  misc_RNA (1)...(19): siRNA sense strand
ugggauaccuggaauuaaa

SEQ ID NO: 483071 - RNA, 19 nt, Homo sapiens
  misc_RNA (1)...(19): siRNA sense strand
gaacaacgagcccgugaug

SEQ ID NO: 483072 - RNA, 19 nt, Homo sapiens
  misc_RNA (1)...(19): siRNA sense strand
gcaaagaaauaccauuagc

SEQ ID NO: 483073 - RNA, 19 nt, Homo sapiens
  misc_RNA (1)...(19): siRNA sense strand
ucaaauuccuccucagaug

SEQ ID NO: 483074 - RNA, 19 nt, Homo sapiens
  misc_RNA (1)...(19): siRNA sense strand
ggagugcugcuuaccauuu

SEQ ID NO: 483075 - RNA, 19 nt, Homo sapiens
  misc_RNA (1)...(19): siRNA sense strand
caaaggagaaggugggauu

SEQ ID NO: 483076 - RNA, 19 nt, Homo sapiens
  misc_RNA (1)...(19): siRNA sense strand
ggagaaaggaccaauaggu

SEQ ID NO: 483077 - RNA, 19 nt, Homo sapiens
  misc_RNA (1)...(19): siRNA sense strand
cccaauauaugaaggaaau

SEQ ID NO: 483078 - RNA, 19 nt, Homo sapiens
  misc_RNA (1)...(19): siRNA sense strand
acaacgagcccgugaugua

SEQ ID NO: 483079 - RNA, 19 nt, Homo sapiens
  misc_RNA (1)...(19): siRNA sense strand
caugggauaccuggaauua

SEQ ID NO: 483080 - RNA, 19 nt, Homo sapiens
  misc_RNA (1)...(19): siRNA sense strand
ucagaugccaccacaaauu

SEQ ID NO: 483081 - RNA, 19 nt, Homo sapiens
  misc_RNA (1)...(19): siRNA sense strand
gcuaagaaaggcaagaaug

SEQ ID NO: 483082 - RNA, 19 nt, Homo sapiens
  misc_RNA (1)...(19): siRNA sense strand
aggcaaagaaauaccauua

SEQ ID NO: 483083 - RNA, 19 nt, Homo sapiens
  misc_RNA (1)...(19): siRNA sense strand
gcaaggagaugccccacuu

SEQ ID NO: 483084 - RNA, 19 nt, Homo sapiens
  misc_RNA (1)...(19): siRNA sense strand
ggguugcucuauucaagaa

SEQ ID NO: 483085 - RNA, 19 nt, Homo sapiens
  misc_RNA (1)...(19): siRNA sense strand
acagggauauccaggaguu

SEQ ID NO: 483086 - RNA, 19 nt, Homo sapiens
  misc_RNA (1)...(19): siRNA sense strand
gaauggagggccagccuau

SEQ ID NO: 483087 - RNA, 19 nt, Homo sapiens
  misc_RNA (1)...(19): siRNA sense strand
gaaaggcaaagaaauacca

SEQ ID NO: 483088 - RNA, 19 nt, Homo sapiens
  misc_RNA (1)...(19): siRNA sense strand
ggaguuggaaagccaggua

SEQ ID NO: 483089 - RNA, 19 nt, Homo sapiens
  misc_RNA (1)...(19): siRNA sense strand
ccucagaugccaccacaaa

SEQ ID NO: 483090 - RNA, 19 nt, Homo sapiens
  misc_RNA (1)...(19): siRNA sense strand
ccaagaaaggcaaagaaau

SEQ ID NO: 483091 - RNA, 19 nt, Homo sapiens
  misc_RNA (1)...(19): siRNA sense strand
gagugcugcuuaccauuuc

SEQ ID NO: 483092 - RNA, 19 nt, Homo sapiens
  misc_RNA (1)...(19): siRNA sense strand
aggagaaggugggauugua

SEQ ID NO: 483093 - RNA, 19 nt, Homo sapiens
  misc_RNA (1)...(19): siRNA sense strand
gggcaaaccaggagugaca

SEQ ID NO: 483094 - RNA, 19 nt, Homo sapiens
  misc_RNA (1)...(19): siRNA sense strand
ggucaugggauaccuggaa

SEQ ID NO: 483095 - RNA, 19 nt, Homo sapiens
  misc_RNA (1)...(19): siRNA sense strand
uaccuggaauuaaaggaaa

SEQ ID NO: 483096 - RNA, 19 nt, Homo sapiens
  misc_RNA (1)...(19): siRNA sense strand
aggagaaauuggacagaaa

SEQ ID NO: 483097 - RNA, 19 nt, Homo sapiens
  misc_RNA (1)...(19): siRNA sense strand
ggagaaauuggacagaaag

SEQ ID NO: 483098 - RNA, 19 nt, Homo sapiens
  misc_RNA (1)...(19): siRNA sense strand
gcauuuaccgccgagcuaa

SEQ ID NO: 483099 - RNA, 19 nt, Homo sapiens
  misc_RNA (1)...(19): siRNA sense strand
ggagaaggugggauuguag

SEQ ID NO: 483100 - RNA, 19 nt, Homo sapiens
  misc_RNA (1)...(19): siRNA sense strand
gcaguauggcaaagaguau

SEQ ID NO: 483101 - RNA, 19 nt, Homo sapiens
  misc_RNA (1)...(19): siRNA sense strand
ggaagccguacccaagaaa

SEQ ID NO: 483102 - RNA, 19 nt, Homo sapiens
  misc_RNA (1)...(19): siRNA sense strand
aaggagaaauuggacagaa

SEQ ID NO: 483103 - RNA, 19 nt, Homo sapiens
  misc_RNA (1)...(19): siRNA sense strand
ugaggucccuggugucuac

SEQ ID NO: 483104 - RNA, 19 nt, Homo sapiens
  misc_RNA (1)...(19): siRNA sense strand
gggauacccggaauuggaa

SEQ ID NO: 483105 - RNA, 19 nt, Homo sapiens
  misc_RNA (1)...(19): siRNA sense strand
gaacuacaacccgcagaca

SEQ ID NO: 483106 - RNA, 19 nt, Homo sapiens
  misc_RNA (1)...(19): siRNA sense strand
aaauaccauuagccaguuu

SEQ ID NO: 483107 - RNA, 19 nt, Homo sapiens
  misc_RNA (1)...(19): siRNA sense strand
uggagagccuggcccaaga

SEQ ID NO: 483108 - RNA, 19 nt, Homo sapiens
  misc_RNA (1)...(19): siRNA sense strand
uaagaaaggcaagaaugga

SEQ ID NO: 483109 - RNA, 19 nt, Homo sapiens
  misc_RNA (1)...(19): siRNA sense strand
cguguggguugcucuauuc

SEQ ID NO: 483110 - RNA, 19 nt, Homo sapiens
  misc_RNA (1)...(19): siRNA sense strand
cagaugccaccacaaauuc

SEQ ID NO: 483111 - RNA, 19 nt, Homo sapiens
  misc_RNA (1)...(19): siRNA sense strand
ucauggacuuccuggcauu

SEQ ID NO: 483112 - RNA, 19 nt, Homo sapiens
  misc_RNA (1)...(19): siRNA sense strand
guggguugcucuauucaag

SEQ ID NO: 483113 - RNA, 19 nt, Homo sapiens
  misc_RNA (1)...(19): siRNA sense strand
ggacagaaaggggaaauug

SEQ ID NO: 483114 - RNA, 19 nt, Homo sapiens
  misc_RNA (1)...(19): siRNA sense strand
ccuggugucuacuacuuug

SEQ ID NO: 483115 - RNA, 19 nt, Homo sapiens
  misc_RNA (1)...(19): siRNA sense strand
uaagggagagccaggaauc

SEQ ID NO: 483116 - RNA, 19 nt, Homo sapiens
  misc_RNA (1)...(19): siRNA sense strand
ggaguggcaggacuucaug

SEQ ID NO: 483117 - RNA, 19 nt, Homo sapiens
  misc_RNA (1)...(19): siRNA sense strand
guauguccacuccuccuuu

SEQ ID NO: 483118 - RNA, 19 nt, Homo sapiens
  misc_RNA (1)...(19): siRNA sense strand
cauaccacguucacugcaa

SEQ ID NO: 483119 - RNA, 19 nt, Homo sapiens
  misc_RNA (1)...(19): siRNA sense strand
cccaagaaaggcaaagaaa

SEQ ID NO: 483120 - RNA, 19 nt, Homo sapiens
  misc_RNA (1)...(19): siRNA sense strand
ccucaaauuccuccucaga

SEQ ID NO: 483121 - RNA, 19 nt, Homo sapiens
  misc_RNA (1)...(19): siRNA sense strand
ggacuaccaggaccucaag

SEQ ID NO: 483122 - RNA, 19 nt, Homo sapiens
  misc_RNA (1)...(19): siRNA sense strand
cuacuuugcauaccacguu

SEQ ID NO: 483123 - RNA, 19 nt, Homo sapiens
  misc_RNA (1)...(19): siRNA sense strand
ggagggccagccuaugaga

SEQ ID NO: 483124 - RNA, 19 nt, Homo sapiens
  misc_RNA (1)...(19): siRNA sense strand
cuaagaaaggcaagaaugg

SEQ ID NO: 483125 - RNA, 19 nt, Homo sapiens
  misc_RNA (1)...(19): siRNA sense strand
aggaagccguacccaagaa

SEQ ID NO: 483126 - RNA, 19 nt, Homo sapiens
  misc_RNA (1)...(19): siRNA sense strand
cgagcuaaccgcaccuuuc

SEQ ID NO: 483127 - RNA, 19 nt, Homo sapiens
  misc_RNA (1)...(19): siRNA sense strand
gggcuaagaaaggcaagaa

SEQ ID NO: 483128 - RNA, 19 nt, Homo sapiens
  misc_RNA (1)...(19): siRNA sense strand
gaucccaggaccacaagga

SEQ ID NO: 483129 - RNA, 19 nt, Homo sapiens
  misc_RNA (1)...(19): siRNA sense strand
aaccagggccacagggaua

SEQ ID NO: 483130 - RNA, 19 nt, Homo sapiens
  misc_RNA (1)...(19): siRNA sense strand
caacgagcccgugauguac

SEQ ID NO: 483131 - RNA, 19 nt, Homo sapiens
  misc_RNA (1)...(19): siRNA sense strand
ggcaaagaaauaccauuag

SEQ ID NO: 483132 - RNA, 19 nt, Homo sapiens
  misc_RNA (1)...(19): siRNA sense strand
ccagaugcccucagaacag

SEQ ID NO: 483133 - RNA, 19 nt, Homo sapiens
  misc_RNA (1)...(19): siRNA sense strand
aaagccagguuuccuuggu

SEQ ID NO: 483134 - RNA, 19 nt, Homo sapiens
  misc_RNA (1)...(19): siRNA sense strand
ggaaucccagguccuaugg

SEQ ID NO: 483135 - RNA, 19 nt, Homo sapiens
  misc_RNA (1)...(19): siRNA sense strand
ucgaggacccaaaggacua

SEQ ID NO: 483136 - RNA, 19 nt, Homo sapiens
  misc_RNA (1)...(19): siRNA sense strand
ugggauacccggaauugga

SEQ ID NO: 483137 - RNA, 19 nt, Homo sapiens
  misc_RNA (1)...(19): siRNA sense strand
gccaagaaugggcaaggaa

SEQ ID NO: 483138 - RNA, 19 nt, Homo sapiens
  misc_RNA (1)...(19): siRNA sense strand
gagcuaaccgcaccuuucc

SEQ ID NO: 483139 - RNA, 19 nt, Homo sapiens
  misc_RNA (1)...(19): siRNA sense strand
ggguuugccaggucccaua

SEQ ID NO: 483140 - RNA, 19 nt, Homo sapiens
  misc_RNA (1)...(19): siRNA sense strand
ggucagcaaguaccucaca

SEQ ID NO: 483141 - RNA, 19 nt, Homo sapiens
  misc_RNA (1)...(19): siRNA sense strand
uuugccaggucaugggaua

SEQ ID NO: 483142 - RNA, 19 nt, Homo sapiens
  misc_RNA (1)...(19): siRNA sense strand
guugcucuauucaagaaca

SEQ ID NO: 483143 - RNA, 19 nt, Homo sapiens
  misc_RNA (1)...(19): siRNA sense strand
gaagccuggugcccuuggu

SEQ ID NO: 483144 - RNA, 19 nt, Homo sapiens
  misc_RNA (1)...(19): siRNA sense strand
cugcugggagugcugcuua

SEQ ID NO: 483145 - RNA, 19 nt, Homo sapiens
  misc_RNA (1)...(19): siRNA sense strand
ccacaccuaccccaauaua

SEQ ID NO: 483146 - RNA, 19 nt, Homo sapiens
  misc_RNA (1)...(19): siRNA sense strand
gucaugggauaccuggaau

SEQ ID NO: 483147 - RNA, 19 nt, Homo sapiens
  misc_RNA (1)...(19): siRNA sense strand
guaccucacaugccuuugg

SEQ ID NO: 483148 - RNA, 19 nt, Homo sapiens
  misc_RNA (1)...(19): siRNA sense strand
ucccuggugucuacuacuu

SEQ ID NO: 483149 - RNA, 19 nt, Homo sapiens
  misc_RNA (1)...(19): siRNA sense strand
ccaggugcgccagguguaa

SEQ ID NO: 483150 - RNA, 19 nt, Homo sapiens
  misc_RNA (1)...(19): siRNA sense strand
gaacaagugugauugcaaa

SEQ ID NO: 483151 - RNA, 19 nt, Homo sapiens
  misc_RNA (1)...(19): siRNA sense strand
caagacaccggaagaaaua

SEQ ID NO: 483152 - RNA, 19 nt, Homo sapiens
  misc_RNA (1)...(19): siRNA sense strand
gaugaagaccucagugaua

SEQ ID NO: 483153 - RNA, 19 nt, Homo sapiens
  misc_RNA (1)...(19): siRNA sense strand
ugaaagggcuguuuaucug

SEQ ID NO: 483154 - RNA, 19 nt, Homo sapiens
  misc_RNA (1)...(19): siRNA sense strand
gcucagugcuggucaagau

SEQ ID NO: 483155 - RNA, 19 nt, Homo sapiens
  misc_RNA (1)...(19): siRNA sense strand
cggaagaaauagaaagauu

SEQ ID NO: 483156 - RNA, 19 nt, Homo sapiens
  misc_RNA (1)...(19): siRNA sense strand
ggaagaaauagaaagauug

SEQ ID NO: 483157 - RNA, 19 nt, Homo sapiens
  misc_RNA (1)...(19): siRNA sense strand
gaagaccucagugauauug

SEQ ID NO: 483158 - RNA, 19 nt, Homo sapiens
  misc_RNA (1)...(19): siRNA sense strand
ccaaggaacaagugugauu

SEQ ID NO: 483159 - RNA, 19 nt, Homo sapiens
  misc_RNA (1)...(19): siRNA sense strand
gauugacagucgaugaaga

SEQ ID NO: 483160 - RNA, 19 nt, Homo sapiens
  misc_RNA (1)...(19): siRNA sense strand
gcgauggauuucagucaga

SEQ ID NO: 483161 - RNA, 19 nt, Homo sapiens
  misc_RNA (1)...(19): siRNA sense strand
cgacagaaucccacugaga

SEQ ID NO: 483162 - RNA, 19 nt, Homo sapiens
  misc_RNA (1)...(19): siRNA sense strand
ggaacaagugugauugcaa

SEQ ID NO: 483163 - RNA, 19 nt, Homo sapiens
  misc_RNA (1)...(19): siRNA sense strand
ucaagacaccggaagaaau

SEQ ID NO: 483164 - RNA, 19 nt, Homo sapiens
  misc_RNA (1)...(19): siRNA sense strand
agaccucagugauauugaa

SEQ ID NO: 483165 - RNA, 19 nt, Homo sapiens
  misc_RNA (1)...(19): siRNA sense strand
augaagaccucagugauau

SEQ ID NO: 483166 - RNA, 19 nt, Homo sapiens
  misc_RNA (1)...(19): siRNA sense strand
gauauugaaagggcuguuu

SEQ ID NO: 483167 - RNA, 19 nt, Homo sapiens
  misc_RNA (1)...(19): siRNA sense strand
caagauguccaaggaacaa

SEQ ID NO: 483168 - RNA, 19 nt, Homo sapiens
  misc_RNA (1)...(19): siRNA sense strand
caaggaacaagugugauug

SEQ ID NO: 483169 - RNA, 19 nt, Homo sapiens
  misc_RNA (1)...(19): siRNA sense strand
aaagauugacagucgauga

SEQ ID NO: 483170 - RNA, 19 nt, Homo sapiens
  misc_RNA (1)...(19): siRNA sense strand
ugcaggagcucaccaucau

SEQ ID NO: 483171 - RNA, 19 nt, Homo sapiens
  misc_RNA (1)...(19): siRNA sense strand
cgauggauuucagucagaa

SEQ ID NO: 483172 - RNA, 19 nt, Homo sapiens
  misc_RNA (1)...(19): siRNA sense strand
guccaaggaacaaguguga

SEQ ID NO: 483173 - RNA, 19 nt, Homo sapiens
  misc_RNA (1)...(19): siRNA sense strand
gaccucagugauauugaaa

SEQ ID NO: 483174 - RNA, 19 nt, Homo sapiens
  misc_RNA (1)...(19): siRNA sense strand
ccucagugauauugaaagg

SEQ ID NO: 483175 - RNA, 19 nt, Homo sapiens
  misc_RNA (1)...(19): siRNA sense strand
ggucaagauguccaaggaa

SEQ ID NO: 483176 - RNA, 19 nt, Homo sapiens
  misc_RNA (1)...(19): siRNA sense strand
ggagaguguugccaaaagu

SEQ ID NO: 483177 - RNA, 19 nt, Homo sapiens
  misc_RNA (1)...(19): siRNA sense strand
auauugaaagggcuguuua

SEQ ID NO: 483178 - RNA, 19 nt, Homo sapiens
  misc_RNA (1)...(19): siRNA sense strand
uggucaagauguccaagga

SEQ ID NO: 483179 - RNA, 19 nt, Homo sapiens
  misc_RNA (1)...(19): siRNA sense strand
ugaagaccucagugauauu

SEQ ID NO: 483180 - RNA, 19 nt, Homo sapiens
  misc_RNA (1)...(19): siRNA sense strand
gacaccggaagaaauagaa

SEQ ID NO: 483181 - RNA, 19 nt, Homo sapiens
  misc_RNA (1)...(19): siRNA sense strand
aagauugacagucgaugaa

SEQ ID NO: 483182 - RNA, 19 nt, Homo sapiens
  misc_RNA (1)...(19): siRNA sense strand
ucgaugaagaccucaguga

SEQ ID NO: 483183 - RNA, 19 nt, Homo sapiens
  misc_RNA (1)...(19): siRNA sense strand
cgaugaagaccucagugau

SEQ ID NO: 483184 - RNA, 19 nt, Homo sapiens
  misc_RNA (1)...(19): siRNA sense strand
gaacaagugugauugcaaa

SEQ ID NO: 483185 - RNA, 19 nt, Homo sapiens
  misc_RNA (1)...(19): siRNA sense strand
caagacaccggaagaaaua

SEQ ID NO: 483186 - RNA, 19 nt, Homo sapiens
  misc_RNA (1)...(19): siRNA sense strand
gaugaagaccucagugaua

SEQ ID NO: 483187 - RNA, 19 nt, Homo sapiens
  misc_RNA (1)...(19): siRNA sense strand
ugaaagggcuguuuaucug

SEQ ID NO: 483188 - RNA, 19 nt, Homo sapiens
  misc_RNA (1)...(19): siRNA sense strand
gcucagugcuggucaagau

SEQ ID NO: 483189 - RNA, 19 nt, Homo sapiens
  misc_RNA (1)...(19): siRNA sense strand
cggaagaaauagaaagauu

SEQ ID NO: 483190 - RNA, 19 nt, Homo sapiens
  misc_RNA (1)...(19): siRNA sense strand
ggaagaaauagaaagauug

SEQ ID NO: 483191 - RNA, 19 nt, Homo sapiens
  misc_RNA (1)...(19): siRNA sense strand
gaagaccucagugauauug

SEQ ID NO: 483192 - RNA, 19 nt, Homo sapiens
  misc_RNA (1)...(19): siRNA sense strand
ccaaggaacaagugugauu

SEQ ID NO: 483193 - RNA, 19 nt, Homo sapiens
  misc_RNA (1)...(19): siRNA sense strand
gauugacagucgaugaaga

SEQ ID NO: 483194 - RNA, 19 nt, Homo sapiens
  misc_RNA (1)...(19): siRNA sense strand
gcgauggauuucagucaga

SEQ ID NO: 483195 - RNA, 19 nt, Homo sapiens
  misc_RNA (1)...(19): siRNA sense strand
cgacagaaucccacugaga

SEQ ID NO: 483196 - RNA, 19 nt, Homo sapiens
  misc_RNA (1)...(19): siRNA sense strand
ggaacaagugugauugcaa

SEQ ID NO: 483197 - RNA, 19 nt, Homo sapiens
  misc_RNA (1)...(19): siRNA sense strand
ucaagacaccggaagaaau

SEQ ID NO: 483198 - RNA, 19 nt, Homo sapiens
  misc_RNA (1)...(19): siRNA sense strand
agaccucagugauauugaa

SEQ ID NO: 483199 - RNA, 19 nt, Homo sapiens
  misc_RNA (1)...(19): siRNA sense strand
augaagaccucagugauau

SEQ ID NO: 483200 - RNA, 19 nt, Homo sapiens
  misc_RNA (1)...(19): siRNA sense strand
gauauugaaagggcuguuu

SEQ ID NO: 483201 - RNA, 19 nt, Homo sapiens
  misc_RNA (1)...(19): siRNA sense strand
caagauguccaaggaacaa

SEQ ID NO: 483202 - RNA, 19 nt, Homo sapiens
  misc_RNA (1)...(19): siRNA sense strand
caaggaacaagugugauug

SEQ ID NO: 483203 - RNA, 19 nt, Homo sapiens
  misc_RNA (1)...(19): siRNA sense strand
aaagauugacagucgauga

SEQ ID NO: 483204 - RNA, 19 nt, Homo sapiens
  misc_RNA (1)...(19): siRNA sense strand
ugcaggagcucaccaucau

SEQ ID NO: 483205 - RNA, 19 nt, Homo sapiens
  misc_RNA (1)...(19): siRNA sense strand
cgauggauuucagucagaa

SEQ ID NO: 483206 - RNA, 19 nt, Homo sapiens
  misc_RNA (1)...(19): siRNA sense strand
guccaaggaacaaguguga

SEQ ID NO: 483207 - RNA, 19 nt, Homo sapiens
  misc_RNA (1)...(19): siRNA sense strand
gaccucagugauauugaaa

SEQ ID NO: 483208 - RNA, 19 nt, Homo sapiens
  misc_RNA (1)...(19): siRNA sense strand
ccucagugauauugaaagg

SEQ ID NO: 483209 - RNA, 19 nt, Homo sapiens
  misc_RNA (1)...(19): siRNA sense strand
ggucaagauguccaaggaa

SEQ ID NO: 483210 - RNA, 19 nt, Homo sapiens
  misc_RNA (1)...(19): siRNA sense strand
ggagaguguugccaaaagu

SEQ ID NO: 483211 - RNA, 19 nt, Homo sapiens
  misc_RNA (1)...(19): siRNA sense strand
auauugaaagggcuguuua

SEQ ID NO: 483212 - RNA, 19 nt, Homo sapiens
  misc_RNA (1)...(19): siRNA sense strand
uggucaagauguccaagga

SEQ ID NO: 483213 - RNA, 19 nt, Homo sapiens
  misc_RNA (1)...(19): siRNA sense strand
ugaagaccucagugauauu

SEQ ID NO: 483214 - RNA, 19 nt, Homo sapiens
  misc_RNA (1)...(19): siRNA sense strand
gacaccggaagaaauagaa

SEQ ID NO: 483215 - RNA, 19 nt, Homo sapiens
  misc_RNA (1)...(19): siRNA sense strand
aagauugacagucgaugaa

SEQ ID NO: 483216 - RNA, 19 nt, Homo sapiens
  misc_RNA (1)...(19): siRNA sense strand
ucgaugaagaccucaguga

SEQ ID NO: 483217 - RNA, 19 nt, Homo sapiens
  misc_RNA (1)...(19): siRNA sense strand
cgaugaagaccucagugau

SEQ ID NO: 483218 - RNA, 19 nt, Homo sapiens
  misc_RNA (1)...(19): siRNA sense strand
ccagagagaugaaguaauu

SEQ ID NO: 483219 - RNA, 19 nt, Homo sapiens
  misc_RNA (1)...(19): siRNA sense strand
ucaaacggcucuauaauga

SEQ ID NO: 483220 - RNA, 19 nt, Homo sapiens
  misc_RNA (1)...(19): siRNA sense strand
gagauugucuuuccuguug

SEQ ID NO: 483221 - RNA, 19 nt, Homo sapiens
  misc_RNA (1)...(19): siRNA sense strand
gcaaccaacuucugcaauu

SEQ ID NO: 483222 - RNA, 19 nt, Homo sapiens
  misc_RNA (1)...(19): siRNA sense strand
gcaagcagaccucuacuaa

SEQ ID NO: 483223 - RNA, 19 nt, Homo sapiens
  misc_RNA (1)...(19): siRNA sense strand
gaaucaaacggcucuauaa

SEQ ID NO: 483224 - RNA, 19 nt, Homo sapiens
  misc_RNA (1)...(19): siRNA sense strand
gaaagugaaugugcggaaa

SEQ ID NO: 483225 - RNA, 19 nt, Homo sapiens
  misc_RNA (1)...(19): siRNA sense strand
gaagauaaugucucagaaa

SEQ ID NO: 483226 - RNA, 19 nt, Homo sapiens
  misc_RNA (1)...(19): siRNA sense strand
gagcccaucucaacauuug

SEQ ID NO: 483227 - RNA, 19 nt, Homo sapiens
  misc_RNA (1)...(19): siRNA sense strand
ugagagaauuccaguacua

SEQ ID NO: 483228 - RNA, 19 nt, Homo sapiens
  misc_RNA (1)...(19): siRNA sense strand
gaauugggaucuucacaca

SEQ ID NO: 483229 - RNA, 19 nt, Homo sapiens
  misc_RNA (1)...(19): siRNA sense strand
ggaaucaaacggcucuaua

SEQ ID NO: 483230 - RNA, 19 nt, Homo sapiens
  misc_RNA (1)...(19): siRNA sense strand
gagaaacucauuccugauu

SEQ ID NO: 483231 - RNA, 19 nt, Homo sapiens
  misc_RNA (1)...(19): siRNA sense strand
caaaguagaggaaauggaa

SEQ ID NO: 483232 - RNA, 19 nt, Homo sapiens
  misc_RNA (1)...(19): siRNA sense strand
ugaggaagaugagagaauu

SEQ ID NO: 483233 - RNA, 19 nt, Homo sapiens
  misc_RNA (1)...(19): siRNA sense strand
gcaacuacuucacuguaug

SEQ ID NO: 483234 - RNA, 19 nt, Homo sapiens
  misc_RNA (1)...(19): siRNA sense strand
ccaagacuguugaggaaga

SEQ ID NO: 483235 - RNA, 19 nt, Homo sapiens
  misc_RNA (1)...(19): siRNA sense strand
gcacaucaccuuucuacuc

SEQ ID NO: 483236 - RNA, 19 nt, Homo sapiens
  misc_RNA (1)...(19): siRNA sense strand
guggaugacuucuaugaug

SEQ ID NO: 483237 - RNA, 19 nt, Homo sapiens
  misc_RNA (1)...(19): siRNA sense strand
gagaauggagagaauuauu

SEQ ID NO: 483238 - RNA, 19 nt, Homo sapiens
  misc_RNA (1)...(19): siRNA sense strand
ugaauuccguuuaugucua

SEQ ID NO: 483239 - RNA, 19 nt, Homo sapiens
  misc_RNA (1)...(19): siRNA sense strand
aagcagaccucuacuaaac

SEQ ID NO: 483240 - RNA, 19 nt, Homo sapiens
  misc_RNA (1)...(19): siRNA sense strand
gaaacucauuccugauugg

SEQ ID NO: 483241 - RNA, 19 nt, Homo sapiens
  misc_RNA (1)...(19): siRNA sense strand
ccaaaauacuugaguugua

SEQ ID NO: 483242 - RNA, 19 nt, Homo sapiens
  misc_RNA (1)...(19): siRNA sense strand
gaagugccagucagaggua

SEQ ID NO: 483243 - RNA, 19 nt, Homo sapiens
  misc_RNA (1)...(19): siRNA sense strand
ucacacagccacaccauug

SEQ ID NO: 483244 - RNA, 19 nt, Homo sapiens
  misc_RNA (1)...(19): siRNA sense strand
gauaaugucucagaaaaug

SEQ ID NO: 483245 - RNA, 19 nt, Homo sapiens
  misc_RNA (1)...(19): siRNA sense strand
gaaaaugccuucaaaucag

SEQ ID NO: 483246 - RNA, 19 nt, Homo sapiens
  misc_RNA (1)...(19): siRNA sense strand
caaccaacuucugcaauuc

SEQ ID NO: 483247 - RNA, 19 nt, Homo sapiens
  misc_RNA (1)...(19): siRNA sense strand
ggaaaaugccuucaaauca

SEQ ID NO: 483248 - RNA, 19 nt, Homo sapiens
  misc_RNA (1)...(19): siRNA sense strand
ggcuuucucuuacaauuga

SEQ ID NO: 483249 - RNA, 19 nt, Homo sapiens
  misc_RNA (1)...(19): siRNA sense strand
gagagaauuccaguacuaa

SEQ ID NO: 483250 - RNA, 19 nt, Homo sapiens
  misc_RNA (1)...(19): siRNA sense strand
aaacucaaguaccaauuca

SEQ ID NO: 483251 - RNA, 19 nt, Homo sapiens
  misc_RNA (1)...(19): siRNA sense strand
aaacggcucuauaaugaag

SEQ ID NO: 483252 - RNA, 19 nt, Homo sapiens
  misc_RNA (1)...(19): siRNA sense strand
ugacuucuaugauggaauc

SEQ ID NO: 483253 - RNA, 19 nt, Homo sapiens
  misc_RNA (1)...(19): siRNA sense strand
guauugcaaucagcuguuu

SEQ ID NO: 483254 - RNA, 19 nt, Homo sapiens
  misc_RNA (1)...(19): siRNA sense strand
ugaagauaaugucucagaa

SEQ ID NO: 483255 - RNA, 19 nt, Homo sapiens
  misc_RNA (1)...(19): siRNA sense strand
gcccagacuucuccaagga

SEQ ID NO: 483256 - RNA, 19 nt, Homo sapiens
  misc_RNA (1)...(19): siRNA sense strand
gaauuccguuuaugucuac

SEQ ID NO: 483257 - RNA, 19 nt, Homo sapiens
  misc_RNA (1)...(19): siRNA sense strand
gcucccaguugauccauug

SEQ ID NO: 483258 - RNA, 19 nt, Homo sapiens
  misc_RNA (1)...(19): siRNA sense strand
cguaaaggcucauccaaaa

SEQ ID NO: 483259 - RNA, 19 nt, Homo sapiens
  misc_RNA (1)...(19): siRNA sense strand
gaugagagaauuccaguac

SEQ ID NO: 483260 - RNA, 19 nt, Homo sapiens
  misc_RNA (1)...(19): siRNA sense strand
auggauagcucccaguuga

SEQ ID NO: 483261 - RNA, 19 nt, Homo sapiens
  misc_RNA (1)...(19): siRNA sense strand
uaaagguauuggcaagaga

SEQ ID NO: 483262 - RNA, 19 nt, Homo sapiens
  misc_RNA (1)...(19): siRNA sense strand
ccugauuggcuuucucuua

SEQ ID NO: 483263 - RNA, 19 nt, Homo sapiens
  misc_RNA (1)...(19): siRNA sense strand
uaaaggcucauccaaaaua

SEQ ID NO: 483264 - RNA, 19 nt, Homo sapiens
  misc_RNA (1)...(19): siRNA sense strand
agaaacucauuccugauug

SEQ ID NO: 483265 - RNA, 19 nt, Homo sapiens
  misc_RNA (1)...(19): siRNA sense strand
gagaauuccaguacuaaag

SEQ ID NO: 483266 - RNA, 19 nt, Homo sapiens
  misc_RNA (1)...(19): siRNA sense strand
ugccaagacuguugaggaa

SEQ ID NO: 483267 - RNA, 19 nt, Homo sapiens
  misc_RNA (1)...(19): siRNA sense strand
caagcagaccucuacuaaa

SEQ ID NO: 483268 - RNA, 19 nt, Homo sapiens
  misc_RNA (1)...(19): siRNA sense strand
ggugaccugugacaaagga

SEQ ID NO: 483269 - RNA, 19 nt, Homo sapiens
  misc_RNA (1)...(19): siRNA sense strand
caacauuuggcaguccuua

SEQ ID NO: 483270 - RNA, 19 nt, Homo sapiens
  misc_RNA (1)...(19): siRNA sense strand
gauuacaucccuccucugu

SEQ ID NO: 483271 - RNA, 19 nt, Homo sapiens
  misc_RNA (1)...(19): siRNA sense strand
gauuggcuuucucuuacaa

SEQ ID NO: 483272 - RNA, 19 nt, Homo sapiens
  misc_RNA (1)...(19): siRNA sense strand
caaacucaaguaccaauuc

SEQ ID NO: 483273 - RNA, 19 nt, Homo sapiens
  misc_RNA (1)...(19): siRNA sense strand
cagaaagcacagauggaua

SEQ ID NO: 483274 - RNA, 19 nt, Homo sapiens
  misc_RNA (1)...(19): siRNA sense strand
ggccaugguuagucuggaa

SEQ ID NO: 483275 - RNA, 19 nt, Homo sapiens
  misc_RNA (1)...(19): siRNA sense strand
cacaucaccuuucuacucu

SEQ ID NO: 483276 - RNA, 19 nt, Homo sapiens
  misc_RNA (1)...(19): siRNA sense strand
gaauuccaguacuaaaggu

SEQ ID NO: 483277 - RNA, 19 nt, Homo sapiens
  misc_RNA (1)...(19): siRNA sense strand
uaaguugaauugggaucuu

SEQ ID NO: 483278 - RNA, 19 nt, Homo sapiens
  misc_RNA (1)...(19): siRNA sense strand
gcaaaguagaggaaaugga

SEQ ID NO: 483279 - RNA, 19 nt, Homo sapiens
  misc_RNA (1)...(19): siRNA sense strand
ccauugcagugucaacuag

SEQ ID NO: 483280 - RNA, 19 nt, Homo sapiens
  misc_RNA (1)...(19): siRNA sense strand
agaaagcacagauggauag

SEQ ID NO: 483281 - RNA, 19 nt, Homo sapiens
  misc_RNA (1)...(19): siRNA sense strand
gaccucuacuaaacgcaaa

SEQ ID NO: 483282 - RNA, 19 nt, Homo sapiens
  misc_RNA (1)...(19): siRNA sense strand
uuucuacucugcagucuuc

SEQ ID NO: 483283 - RNA, 19 nt, Homo sapiens
  misc_RNA (1)...(19): siRNA sense strand
cugauuggcuuucucuuac

SEQ ID NO: 483284 - RNA, 19 nt, Homo sapiens
  misc_RNA (1)...(19): siRNA sense strand
gaugacuucuaugauggaa

SEQ ID NO: 483285 - RNA, 19 nt, Homo sapiens
  misc_RNA (1)...(19): siRNA sense strand
aguaccaauucaaccuuua

SEQ ID NO: 483286 - RNA, 19 nt, Homo sapiens
  misc_RNA (1)...(19): siRNA sense strand
caaacggcucuauaaugaa

SEQ ID NO: 483287 - RNA, 19 nt, Homo sapiens
  misc_RNA (1)...(19): siRNA sense strand
aagcaacuacuucacugua

SEQ ID NO: 483288 - RNA, 19 nt, Homo sapiens
  misc_RNA (1)...(19): siRNA sense strand
uugagaauggagagaauua

SEQ ID NO: 483289 - RNA, 19 nt, Homo sapiens
  misc_RNA (1)...(19): siRNA sense strand
cuaaagguauuggcaagag

SEQ ID NO: 483290 - RNA, 19 nt, Homo sapiens
  misc_RNA (1)...(19): siRNA sense strand
cagccacaccauuggauuu

SEQ ID NO: 483291 - RNA, 19 nt, Homo sapiens
  misc_RNA (1)...(19): siRNA sense strand
gauugucuuuccuguugga

SEQ ID NO: 483292 - RNA, 19 nt, Homo sapiens
  misc_RNA (1)...(19): siRNA sense strand
ucagaaagcacagauggau

SEQ ID NO: 483293 - RNA, 19 nt, Homo sapiens
  misc_RNA (1)...(19): siRNA sense strand
cuucaaaucagaauguuuc

SEQ ID NO: 483294 - RNA, 19 nt, Homo sapiens
  misc_RNA (1)...(19): siRNA sense strand
ccguaaaggcucauccaaa

SEQ ID NO: 483295 - RNA, 19 nt, Homo sapiens
  misc_RNA (1)...(19): siRNA sense strand
aaguaccaauucaaccuuu

SEQ ID NO: 483296 - RNA, 19 nt, Homo sapiens
  misc_RNA (1)...(19): siRNA sense strand
ggauagcucccaguugauc

SEQ ID NO: 483297 - RNA, 19 nt, Homo sapiens
  misc_RNA (1)...(19): siRNA sense strand
ggagaaacucauuccugau

SEQ ID NO: 483298 - RNA, 19 nt, Homo sapiens
  misc_RNA (1)...(19): siRNA sense strand
aaucaaacggcucuauaau

SEQ ID NO: 483299 - RNA, 19 nt, Homo sapiens
  misc_RNA (1)...(19): siRNA sense strand
gcagccuguuucugucaug

SEQ ID NO: 483300 - RNA, 19 nt, Homo sapiens
  misc_RNA (1)...(19): siRNA sense strand
caagacuguugaggaagau

SEQ ID NO: 483301 - RNA, 19 nt, Homo sapiens
  misc_RNA (1)...(19): siRNA sense strand
ggcaaucacuagggaagca

SEQ ID NO: 483302 - RNA, 19 nt, Homo sapiens
  misc_RNA (1)...(19): siRNA sense strand
uggccaaacucaaguacca

SEQ ID NO: 483303 - RNA, 19 nt, Homo sapiens
  misc_RNA (1)...(19): siRNA sense strand
ccucugaauuccguuuaug

SEQ ID NO: 483304 - RNA, 19 nt, Homo sapiens
  misc_RNA (1)...(19): siRNA sense strand
agucuucccugccucugaa

SEQ ID NO: 483305 - RNA, 19 nt, Homo sapiens
  misc_RNA (1)...(19): siRNA sense strand
aaccagagauugucuuucc

SEQ ID NO: 483306 - RNA, 19 nt, Homo sapiens
  misc_RNA (1)...(19): siRNA sense strand
uggcaguccuuaccaagca

SEQ ID NO: 483307 - RNA, 19 nt, Homo sapiens
  misc_RNA (1)...(19): siRNA sense strand
caaguaccaauucaaccuu

SEQ ID NO: 483308 - RNA, 19 nt, Homo sapiens
  misc_RNA (1)...(19): siRNA sense strand
gccauugcagugucaacua

SEQ ID NO: 483309 - RNA, 19 nt, Homo sapiens
  misc_RNA (1)...(19): siRNA sense strand
ccaaacucaaguaccaauu

SEQ ID NO: 483310 - RNA, 19 nt, Homo sapiens
  misc_RNA (1)...(19): siRNA sense strand
uaaacgcaaaguagaggaa

SEQ ID NO: 483311 - RNA, 19 nt, Homo sapiens
  misc_RNA (1)...(19): siRNA sense strand
ccuggugaccugugacaaa

SEQ ID NO: 483312 - RNA, 19 nt, Homo sapiens
  misc_RNA (1)...(19): siRNA sense strand
gauggauagcucccaguug

SEQ ID NO: 483313 - RNA, 19 nt, Homo sapiens
  misc_RNA (1)...(19): siRNA sense strand
caacuacuucacuguaugg

SEQ ID NO: 483314 - RNA, 19 nt, Homo sapiens
  misc_RNA (1)...(19): siRNA sense strand
gcucuggcuagcagucuuu

SEQ ID NO: 483315 - RNA, 19 nt, Homo sapiens
  misc_RNA (1)...(19): siRNA sense strand
gaaguuuccagggccuuug

SEQ ID NO: 483316 - RNA, 19 nt, Homo sapiens
  misc_RNA (1)...(19): siRNA sense strand
ccauuggauuuucuucaua

SEQ ID NO: 483317 - RNA, 19 nt, Homo sapiens
  misc_RNA (1)...(19): siRNA sense strand
gguauuggcaagagacagu

SEQ ID NO: 483318 - RNA, 19 nt, Homo sapiens
  misc_RNA (1)...(19): siRNA sense strand
ggaccacgcugcccaaguu

SEQ ID NO: 483319 - RNA, 19 nt, Homo sapiens
  misc_RNA (1)...(19): siRNA sense strand
agacagaccugguguacau

SEQ ID NO: 483320 - RNA, 19 nt, Homo sapiens
  misc_RNA (1)...(19): siRNA sense strand
ucaugaaccugcauaacaa

SEQ ID NO: 483321 - RNA, 19 nt, Homo sapiens
  misc_RNA (1)...(19): siRNA sense strand
gagccaacaucaucugcaa

SEQ ID NO: 483322 - RNA, 19 nt, Homo sapiens
  misc_RNA (1)...(19): siRNA sense strand
cuacguguuucucugcuuu

SEQ ID NO: 483323 - RNA, 19 nt, Homo sapiens
  misc_RNA (1)...(19): siRNA sense strand
gcgagaagcagggcuacua

SEQ ID NO: 483324 - RNA, 19 nt, Homo sapiens
  misc_RNA (1)...(19): siRNA sense strand
gaaccugcauaacaaugag

SEQ ID NO: 483325 - RNA, 19 nt, Homo sapiens
  misc_RNA (1)...(19): siRNA sense strand
gaccugguguacauugaga

SEQ ID NO: 483326 - RNA, 19 nt, Homo sapiens
  misc_RNA (1)...(19): siRNA sense strand
gcuacaacacccaccagua

SEQ ID NO: 483327 - RNA, 19 nt, Homo sapiens
  misc_RNA (1)...(19): siRNA sense strand
aacaucaucugcaacaaga

SEQ ID NO: 483328 - RNA, 19 nt, Homo sapiens
  misc_RNA (1)...(19): siRNA sense strand
caacaucaucugcaacaag

SEQ ID NO: 483329 - RNA, 19 nt, Homo sapiens
  misc_RNA (1)...(19): siRNA sense strand
gcaaguggauuuucuacgu

SEQ ID NO: 483330 - RNA, 19 nt, Homo sapiens
  misc_RNA (1)...(19): siRNA sense strand
caagggaaccugagcaacu

SEQ ID NO: 483331 - RNA, 19 nt, Homo sapiens
  misc_RNA (1)...(19): siRNA sense strand
gcagggcuacuacaaccaa

SEQ ID NO: 483332 - RNA, 19 nt, Homo sapiens
  misc_RNA (1)...(19): siRNA sense strand
cucgggagaucaagaagaa

SEQ ID NO: 483333 - RNA, 19 nt, Homo sapiens
  misc_RNA (1)...(19): siRNA sense strand
agaagucgcccaacuacug

SEQ ID NO: 483334 - RNA, 19 nt, Homo sapiens
  misc_RNA (1)...(19): siRNA sense strand
cuacaacacccaccaguac

SEQ ID NO: 483335 - RNA, 19 nt, Homo sapiens
  misc_RNA (1)...(19): siRNA sense strand
gaagcagggcuacuacaac

SEQ ID NO: 483336 - RNA, 19 nt, Homo sapiens
  misc_RNA (1)...(19): siRNA sense strand
ggagacagaccugguguac

SEQ ID NO: 483337 - RNA, 19 nt, Homo sapiens
  misc_RNA (1)...(19): siRNA sense strand
agaagcccauggagacaga

SEQ ID NO: 483338 - RNA, 19 nt, Homo sapiens
  misc_RNA (1)...(19): siRNA sense strand
gggcaagagcuccgaguag

SEQ ID NO: 483339 - RNA, 19 nt, Homo sapiens
  misc_RNA (1)...(19): siRNA sense strand
cagaccugguguacauuga

SEQ ID NO: 483340 - RNA, 19 nt, Homo sapiens
  misc_RNA (1)...(19): siRNA sense strand
ugaaccugcauaacaauga

SEQ ID NO: 483341 - RNA, 19 nt, Homo sapiens
  misc_RNA (1)...(19): siRNA sense strand
gccaacaucaucugcaaca

SEQ ID NO: 483342 - RNA, 19 nt, Homo sapiens
  misc_RNA (1)...(19): siRNA sense strand
gccaccugcugaaggagaa

SEQ ID NO: 483343 - RNA, 19 nt, Homo sapiens
  misc_RNA (1)...(19): siRNA sense strand
agaagcagggcuacuacaa

SEQ ID NO: 483344 - RNA, 19 nt, Homo sapiens
  misc_RNA (1)...(19): siRNA sense strand
gcuaucagaagcccaugga

SEQ ID NO: 483345 - RNA, 19 nt, Homo sapiens
  misc_RNA (1)...(19): siRNA sense strand
gagaagcagggcuacuaca

SEQ ID NO: 483346 - RNA, 19 nt, Homo sapiens
  misc_RNA (1)...(19): siRNA sense strand
caucaacgagugccaguac

SEQ ID NO: 483347 - RNA, 19 nt, Homo sapiens
  misc_RNA (1)...(19): siRNA sense strand
gcucgggagaucaagaaga

SEQ ID NO: 483348 - RNA, 19 nt, Homo sapiens
  misc_RNA (1)...(19): siRNA sense strand
ccaacaucaucugcaacaa

SEQ ID NO: 483349 - RNA, 19 nt, Homo sapiens
  misc_RNA (1)...(19): siRNA sense strand
aagggaaccugagcaacug

SEQ ID NO: 483350 - RNA, 19 nt, Homo sapiens
  misc_RNA (1)...(19): siRNA sense strand
uugagaagucgcccaacua

SEQ ID NO: 483351 - RNA, 19 nt, Homo sapiens
  misc_RNA (1)...(19): siRNA sense strand
gccaagggaaccugagcaa

SEQ ID NO: 483352 - RNA, 19 nt, Homo sapiens
  misc_RNA (1)...(19): siRNA sense strand
ggugcugcuucgucaagug

SEQ ID NO: 483353 - RNA, 19 nt, Homo sapiens
  misc_RNA (1)...(19): siRNA sense strand
ugagaagucgcccaacuac

SEQ ID NO: 483354 - RNA, 19 nt, Homo sapiens
  misc_RNA (1)...(19): siRNA sense strand
cucaugaaccugcauaaca

SEQ ID NO: 483355 - RNA, 19 nt, Homo sapiens
  misc_RNA (1)...(19): siRNA sense strand
gaaccuaacacgaaaguuu

SEQ ID NO: 483356 - RNA, 19 nt, Homo sapiens
  misc_RNA (1)...(19): siRNA sense strand
uaaggaugcuugauuauga

SEQ ID NO: 483357 - RNA, 19 nt, Homo sapiens
  misc_RNA (1)...(19): siRNA sense strand
gcuaauaccuuggacuuug

SEQ ID NO: 483358 - RNA, 19 nt, Homo sapiens
  misc_RNA (1)...(19): siRNA sense strand
gaaaacagcugaugaaggu

SEQ ID NO: 483359 - RNA, 19 nt, Homo sapiens
  misc_RNA (1)...(19): siRNA sense strand
gaagguacaaauacaagua

SEQ ID NO: 483360 - RNA, 19 nt, Homo sapiens
  misc_RNA (1)...(19): siRNA sense strand
aaacucgaauucaaccuua

SEQ ID NO: 483361 - RNA, 19 nt, Homo sapiens
  misc_RNA (1)...(19): siRNA sense strand
gaauggagcuauggacguu

SEQ ID NO: 483362 - RNA, 19 nt, Homo sapiens
  misc_RNA (1)...(19): siRNA sense strand
gggaaugccuuaugaccuu

SEQ ID NO: 483363 - RNA, 19 nt, Homo sapiens
  misc_RNA (1)...(19): siRNA sense strand
gcacuuggaacuuaaagaa

SEQ ID NO: 483364 - RNA, 19 nt, Homo sapiens
  misc_RNA (1)...(19): siRNA sense strand
ggccaagggucuacaauuc

SEQ ID NO: 483365 - RNA, 19 nt, Homo sapiens
  misc_RNA (1)...(19): siRNA sense strand
gaaggacaucugacaauga

SEQ ID NO: 483366 - RNA, 19 nt, Homo sapiens
  misc_RNA (1)...(19): siRNA sense strand
gcaaucaggccuaccagaa

SEQ ID NO: 483367 - RNA, 19 nt, Homo sapiens
  misc_RNA (1)...(19): siRNA sense strand
gcaaggggcugauagagaa

SEQ ID NO: 483368 - RNA, 19 nt, Homo sapiens
  misc_RNA (1)...(19): siRNA sense strand
cuuaugaccuugccauuga

SEQ ID NO: 483369 - RNA, 19 nt, Homo sapiens
  misc_RNA (1)...(19): siRNA sense strand
ccaaugagguagaucagau

SEQ ID NO: 483370 - RNA, 19 nt, Homo sapiens
  misc_RNA (1)...(19): siRNA sense strand
uuaaugagguuuacuaugc

SEQ ID NO: 483371 - RNA, 19 nt, Homo sapiens
  misc_RNA (1)...(19): siRNA sense strand
gcaauuuccugcuccucuu

SEQ ID NO: 483372 - RNA, 19 nt, Homo sapiens
  misc_RNA (1)...(19): siRNA sense strand
gcagugcaaucaagauagu

SEQ ID NO: 483373 - RNA, 19 nt, Homo sapiens
  misc_RNA (1)...(19): siRNA sense strand
gacaggaguuugugugcaa

SEQ ID NO: 483374 - RNA, 19 nt, Homo sapiens
  misc_RNA (1)...(19): siRNA sense strand
gagcuauggacguuaauuu

SEQ ID NO: 483375 - RNA, 19 nt, Homo sapiens
  misc_RNA (1)...(19): siRNA sense strand
gcugaugaagguacaaaua

SEQ ID NO: 483376 - RNA, 19 nt, Homo sapiens
  misc_RNA (1)...(19): siRNA sense strand
gaaguucaaagaccucauu

SEQ ID NO: 483377 - RNA, 19 nt, Homo sapiens
  misc_RNA (1)...(19): siRNA sense strand
aaaaguggauggaucguua

SEQ ID NO: 483378 - RNA, 19 nt, Homo sapiens
  misc_RNA (1)...(19): siRNA sense strand
gauggcacuuggaacuuaa

SEQ ID NO: 483379 - RNA, 19 nt, Homo sapiens
  misc_RNA (1)...(19): siRNA sense strand
ggcagaggauauaccagua

SEQ ID NO: 483380 - RNA, 19 nt, Homo sapiens
  misc_RNA (1)...(19): siRNA sense strand
gaaucaagcacagauagaa

SEQ ID NO: 483381 - RNA, 19 nt, Homo sapiens
  misc_RNA (1)...(19): siRNA sense strand
gaauucaaccuuauuaugc

SEQ ID NO: 483382 - RNA, 19 nt, Homo sapiens
  misc_RNA (1)...(19): siRNA sense strand
guucaaagaccucauuuua

SEQ ID NO: 483383 - RNA, 19 nt, Homo sapiens
  misc_RNA (1)...(19): siRNA sense strand
cuacauagugcauuugaaa

SEQ ID NO: 483384 - RNA, 19 nt, Homo sapiens
  misc_RNA (1)...(19): siRNA sense strand
gaacuuaguaucauucacu

SEQ ID NO: 483385 - RNA, 19 nt, Homo sapiens
  misc_RNA (1)...(19): siRNA sense strand
gcacugaagcuccuacaca

SEQ ID NO: 483386 - RNA, 19 nt, Homo sapiens
  misc_RNA (1)...(19): siRNA sense strand
uaacauucuuggaguggaa

SEQ ID NO: 483387 - RNA, 19 nt, Homo sapiens
  misc_RNA (1)...(19): siRNA sense strand
aaacucauccuguucaaga

SEQ ID NO: 483388 - RNA, 19 nt, Homo sapiens
  misc_RNA (1)...(19): siRNA sense strand
gcuauggacguuaauuuga

SEQ ID NO: 483389 - RNA, 19 nt, Homo sapiens
  misc_RNA (1)...(19): siRNA sense strand
agauggcacuuggaacuua

SEQ ID NO: 483390 - RNA, 19 nt, Homo sapiens
  misc_RNA (1)...(19): siRNA sense strand
ugagguagaucagaugaau

SEQ ID NO: 483391 - RNA, 19 nt, Homo sapiens
  misc_RNA (1)...(19): siRNA sense strand
ugaaggacaucugacaaug

SEQ ID NO: 483392 - RNA, 19 nt, Homo sapiens
  misc_RNA (1)...(19): siRNA sense strand
gaacuuaaagaagaccaaa

SEQ ID NO: 483393 - RNA, 19 nt, Homo sapiens
  misc_RNA (1)...(19): siRNA sense strand
ccaggaacccguaaacuuc

SEQ ID NO: 483394 - RNA, 19 nt, Homo sapiens
  misc_RNA (1)...(19): siRNA sense strand
ucaaagaccucauuuuaag

SEQ ID NO: 483395 - RNA, 19 nt, Homo sapiens
  misc_RNA (1)...(19): siRNA sense strand
uuacaugacugaaggacau

SEQ ID NO: 483396 - RNA, 19 nt, Homo sapiens
  misc_RNA (1)...(19): siRNA sense strand
uggcaguucuugucaguug

SEQ ID NO: 483397 - RNA, 19 nt, Homo sapiens
  misc_RNA (1)...(19): siRNA sense strand
ccaagagacuggcauagcu

SEQ ID NO: 483398 - RNA, 19 nt, Homo sapiens
  misc_RNA (1)...(19): siRNA sense strand
cgaauucaaccuuauuaug

SEQ ID NO: 483399 - RNA, 19 nt, Homo sapiens
  misc_RNA (1)...(19): siRNA sense strand
uacggucgcugacuacuug

SEQ ID NO: 483400 - RNA, 19 nt, Homo sapiens
  misc_RNA (1)...(19): siRNA sense strand
caaacgcagugcaaucaag

SEQ ID NO: 483401 - RNA, 19 nt, Homo sapiens
  misc_RNA (1)...(19): siRNA sense strand
ggacauccaacauaccaau

SEQ ID NO: 483402 - RNA, 19 nt, Homo sapiens
  misc_RNA (1)...(19): siRNA sense strand
ccguaaacuucauaacauu

SEQ ID NO: 483403 - RNA, 19 nt, Homo sapiens
  misc_RNA (1)...(19): siRNA sense strand
gacagguuguaaaggcaua

SEQ ID NO: 483404 - RNA, 19 nt, Homo sapiens
  misc_RNA (1)...(19): siRNA sense strand
gcacauuacaugacugaag

SEQ ID NO: 483405 - RNA, 19 nt, Homo sapiens
  misc_RNA (1)...(19): siRNA sense strand
ccaccaccauggacaacaa

SEQ ID NO: 483406 - RNA, 19 nt, Homo sapiens
  misc_RNA (1)...(19): siRNA sense strand
gcagcacaguuucuucaag

SEQ ID NO: 483407 - RNA, 19 nt, Homo sapiens
  misc_RNA (1)...(19): siRNA sense strand
cauuugaaacgccacuuua

SEQ ID NO: 483408 - RNA, 19 nt, Homo sapiens
  misc_RNA (1)...(19): siRNA sense strand
gaugaagguacaaauacaa

SEQ ID NO: 483409 - RNA, 19 nt, Homo sapiens
  misc_RNA (1)...(19): siRNA sense strand
gcauuugaaacgccacuuu

SEQ ID NO: 483410 - RNA, 19 nt, Homo sapiens
  misc_RNA (1)...(19): siRNA sense strand
gaacccguaaacuucauaa

SEQ ID NO: 483411 - RNA, 19 nt, Homo sapiens
  misc_RNA (1)...(19): siRNA sense strand
gaaaguuugcgcaacagau

SEQ ID NO: 483412 - RNA, 19 nt, Homo sapiens
  misc_RNA (1)...(19): siRNA sense strand
ugaugaagguacaaauaca

SEQ ID NO: 483413 - RNA, 19 nt, Homo sapiens
  misc_RNA (1)...(19): siRNA sense strand
ggagagacuucagcaugca

SEQ ID NO: 483414 - RNA, 19 nt, Homo sapiens
  misc_RNA (1)...(19): siRNA sense strand
cacgaaaguuugcgcaaca

SEQ ID NO: 483415 - RNA, 19 nt, Homo sapiens
  misc_RNA (1)...(19): siRNA sense strand
caaguaauaguguaucuac

SEQ ID NO: 483416 - RNA, 19 nt, Homo sapiens
  misc_RNA (1)...(19): siRNA sense strand
acuuggaacuuaaagaaga

SEQ ID NO: 483417 - RNA, 19 nt, Homo sapiens
  misc_RNA (1)...(19): siRNA sense strand
gagguagaucagaugaaua

SEQ ID NO: 483418 - RNA, 19 nt, Homo sapiens
  misc_RNA (1)...(19): siRNA sense strand
agguagaucagaugaauaa

SEQ ID NO: 483419 - RNA, 19 nt, Homo sapiens
  misc_RNA (1)...(19): siRNA sense strand
caacgaauagcuccucuac

SEQ ID NO: 483420 - RNA, 19 nt, Homo sapiens
  misc_RNA (1)...(19): siRNA sense strand
uuaaagaagaccaaagaug

SEQ ID NO: 483421 - RNA, 19 nt, Homo sapiens
  misc_RNA (1)...(19): siRNA sense strand
gguauuccaccugcucaua

SEQ ID NO: 483422 - RNA, 19 nt, Homo sapiens
  misc_RNA (1)...(19): siRNA sense strand
cccguaaacuucauaacau

SEQ ID NO: 483423 - RNA, 19 nt, Homo sapiens
  misc_RNA (1)...(19): siRNA sense strand
ccaagggucuacaauucuc

SEQ ID NO: 483424 - RNA, 19 nt, Homo sapiens
  misc_RNA (1)...(19): siRNA sense strand
ugaaacgccacuuuauguu

SEQ ID NO: 483425 - RNA, 19 nt, Homo sapiens
  misc_RNA (1)...(19): siRNA sense strand
aaucaggccuaccagaauc

SEQ ID NO: 483426 - RNA, 19 nt, Homo sapiens
  misc_RNA (1)...(19): siRNA sense strand
cagauucagcaaccucuaa

SEQ ID NO: 483427 - RNA, 19 nt, Homo sapiens
  misc_RNA (1)...(19): siRNA sense strand
ccaagauucuauggagguu

SEQ ID NO: 483428 - RNA, 19 nt, Homo sapiens
  misc_RNA (1)...(19): siRNA sense strand
uaaugagguuuacuaugca

SEQ ID NO: 483429 - RNA, 19 nt, Homo sapiens
  misc_RNA (1)...(19): siRNA sense strand
ggacagaauggagcuaugg

SEQ ID NO: 483430 - RNA, 19 nt, Homo sapiens
  misc_RNA (1)...(19): siRNA sense strand
caaucaggccuaccagaau

SEQ ID NO: 483431 - RNA, 19 nt, Homo sapiens
  misc_RNA (1)...(19): siRNA sense strand
uguugaaacucauccuguu

SEQ ID NO: 483432 - RNA, 19 nt, Homo sapiens
  misc_RNA (1)...(19): siRNA sense strand
caagaaaacagcugaugaa

SEQ ID NO: 483433 - RNA, 19 nt, Homo sapiens
  misc_RNA (1)...(19): siRNA sense strand
gcauauuaaugagguuuac

SEQ ID NO: 483434 - RNA, 19 nt, Homo sapiens
  misc_RNA (1)...(19): siRNA sense strand
ggaacccguaaacuucaua

SEQ ID NO: 483435 - RNA, 19 nt, Homo sapiens
  misc_RNA (1)...(19): siRNA sense strand
gaguacaaaccaccaggaa

SEQ ID NO: 483436 - RNA, 19 nt, Homo sapiens
  misc_RNA (1)...(19): siRNA sense strand
aaagaagaccaaagaugga

SEQ ID NO: 483437 - RNA, 19 nt, Homo sapiens
  misc_RNA (1)...(19): siRNA sense strand
uuugagaaguugccagaug

SEQ ID NO: 483438 - RNA, 19 nt, Homo sapiens
  misc_RNA (1)...(19): siRNA sense strand
uauuccaccugcucauauu

SEQ ID NO: 483439 - RNA, 19 nt, Homo sapiens
  misc_RNA (1)...(19): siRNA sense strand
ugaaaugcacacuggagaa

SEQ ID NO: 483440 - RNA, 19 nt, Homo sapiens
  misc_RNA (1)...(19): siRNA sense strand
ucagcaaccucuaacuaac

SEQ ID NO: 483441 - RNA, 19 nt, Homo sapiens
  misc_RNA (1)...(19): siRNA sense strand
uaguggaaguucuggguau

SEQ ID NO: 483442 - RNA, 19 nt, Homo sapiens
  misc_RNA (1)...(19): siRNA sense strand
gaaaugcacacuggagaac

SEQ ID NO: 483443 - RNA, 19 nt, Homo sapiens
  misc_RNA (1)...(19): siRNA sense strand
cagaggugcuacugggaau

SEQ ID NO: 483444 - RNA, 19 nt, Homo sapiens
  misc_RNA (1)...(19): siRNA sense strand
cggaagguuuacaaugaug

SEQ ID NO: 483445 - RNA, 19 nt, Homo sapiens
  misc_RNA (1)...(19): siRNA sense strand
aaggacaucugacaaugag

SEQ ID NO: 483446 - RNA, 19 nt, Homo sapiens
  misc_RNA (1)...(19): siRNA sense strand
caugcaaaccuucaucugu

SEQ ID NO: 483447 - RNA, 19 nt, Homo sapiens
  misc_RNA (1)...(19): siRNA sense strand
guauuccaccugcucauau

SEQ ID NO: 483448 - RNA, 19 nt, Homo sapiens
  misc_RNA (1)...(19): siRNA sense strand
cuaauaccuuggacuuugg

SEQ ID NO: 483449 - RNA, 19 nt, Homo sapiens
  misc_RNA (1)...(19): siRNA sense strand
aaacgcagugcaaucaaga

SEQ ID NO: 483450 - RNA, 19 nt, Homo sapiens
  misc_RNA (1)...(19): siRNA sense strand
gccacuuuauguuucgaaa

SEQ ID NO: 483451 - RNA, 19 nt, Homo sapiens
  misc_RNA (1)...(19): siRNA sense strand
uugaaacgccacuuuaugu

SEQ ID NO: 483452 - RNA, 19 nt, Homo sapiens
  misc_RNA (1)...(19): siRNA sense strand
uacugggaaugccuuauga

SEQ ID NO: 483453 - RNA, 19 nt, Homo sapiens
  misc_RNA (1)...(19): siRNA sense strand
ggagcuauggacguuaauu

SEQ ID NO: 483454 - RNA, 19 nt, Homo sapiens
  misc_RNA (1)...(19): siRNA sense strand
cauccaacauaccaauuuu

SEQ ID NO: 483455 - RNA, 19 nt, Homo sapiens
  misc_RNA (1)...(19): siRNA sense strand
gaaccuaacacgaaaguuu

SEQ ID NO: 483456 - RNA, 19 nt, Homo sapiens
  misc_RNA (1)...(19): siRNA sense strand
uaaggaugcuugauuauga

SEQ ID NO: 483457 - RNA, 19 nt, Homo sapiens
  misc_RNA (1)...(19): siRNA sense strand
gaaaacagcugaugaaggu

SEQ ID NO: 483458 - RNA, 19 nt, Homo sapiens
  misc_RNA (1)...(19): siRNA sense strand
gaagguacaaauacaagua

SEQ ID NO: 483459 - RNA, 19 nt, Homo sapiens
  misc_RNA (1)...(19): siRNA sense strand
aaacucgaauucaaccuua

SEQ ID NO: 483460 - RNA, 19 nt, Homo sapiens
  misc_RNA (1)...(19): siRNA sense strand
gggaaugccuuaugaccuu

SEQ ID NO: 483461 - RNA, 19 nt, Homo sapiens
  misc_RNA (1)...(19): siRNA sense strand
gcacuuggaacuuaaagaa

SEQ ID NO: 483462 - RNA, 19 nt, Homo sapiens
  misc_RNA (1)...(19): siRNA sense strand
cuuaugaccuugccauuga

SEQ ID NO: 483463 - RNA, 19 nt, Homo sapiens
  misc_RNA (1)...(19): siRNA sense strand
ccaaugagguagaucagau

SEQ ID NO: 483464 - RNA, 19 nt, Homo sapiens
  misc_RNA (1)...(19): siRNA sense strand
uuaaugagguuuacuaugc

SEQ ID NO: 483465 - RNA, 19 nt, Homo sapiens
  misc_RNA (1)...(19): siRNA sense strand
gcagugcaaucaagauagu

SEQ ID NO: 483466 - RNA, 19 nt, Homo sapiens
  misc_RNA (1)...(19): siRNA sense strand
gcugaugaagguacaaaua

SEQ ID NO: 483467 - RNA, 19 nt, Homo sapiens
  misc_RNA (1)...(19): siRNA sense strand
gaaguucaaagaccucauu

SEQ ID NO: 483468 - RNA, 19 nt, Homo sapiens
  misc_RNA (1)...(19): siRNA sense strand
aaaaguggauggaucguua

SEQ ID NO: 483469 - RNA, 19 nt, Homo sapiens
  misc_RNA (1)...(19): siRNA sense strand
gauggcacuuggaacuuaa

SEQ ID NO: 483470 - RNA, 19 nt, Homo sapiens
  misc_RNA (1)...(19): siRNA sense strand
ggcagaggauauaccagua

SEQ ID NO: 483471 - RNA, 19 nt, Homo sapiens
  misc_RNA (1)...(19): siRNA sense strand
gaaucaagcacagauagaa

SEQ ID NO: 483472 - RNA, 19 nt, Homo sapiens
  misc_RNA (1)...(19): siRNA sense strand
gaauucaaccuuauuaugc

SEQ ID NO: 483473 - RNA, 19 nt, Homo sapiens
  misc_RNA (1)...(19): siRNA sense strand
guucaaagaccucauuuua

SEQ ID NO: 483474 - RNA, 19 nt, Homo sapiens
  misc_RNA (1)...(19): siRNA sense strand
cuacauagugcauuugaaa

SEQ ID NO: 483475 - RNA, 19 nt, Homo sapiens
  misc_RNA (1)...(19): siRNA sense strand
gaacuuaguaucauucacu

SEQ ID NO: 483476 - RNA, 19 nt, Homo sapiens
  misc_RNA (1)...(19): siRNA sense strand
uaacauucuuggaguggaa

SEQ ID NO: 483477 - RNA, 19 nt, Homo sapiens
  misc_RNA (1)...(19): siRNA sense strand
agauggcacuuggaacuua

SEQ ID NO: 483478 - RNA, 19 nt, Homo sapiens
  misc_RNA (1)...(19): siRNA sense strand
ugagguagaucagaugaau

SEQ ID NO: 483479 - RNA, 19 nt, Homo sapiens
  misc_RNA (1)...(19): siRNA sense strand
gaacuuaaagaagaccaaa

SEQ ID NO: 483480 - RNA, 19 nt, Homo sapiens
  misc_RNA (1)...(19): siRNA sense strand
ccaggaacccguaaacuuc

SEQ ID NO: 483481 - RNA, 19 nt, Homo sapiens
  misc_RNA (1)...(19): siRNA sense strand
ucaaagaccucauuuuaag

SEQ ID NO: 483482 - RNA, 19 nt, Homo sapiens
  misc_RNA (1)...(19): siRNA sense strand
uggcaguucuugucaguug

SEQ ID NO: 483483 - RNA, 19 nt, Homo sapiens
  misc_RNA (1)...(19): siRNA sense strand
cgaauucaaccuuauuaug

SEQ ID NO: 483484 - RNA, 19 nt, Homo sapiens
  misc_RNA (1)...(19): siRNA sense strand
uacggucgcugacuacuug

SEQ ID NO: 483485 - RNA, 19 nt, Homo sapiens
  misc_RNA (1)...(19): siRNA sense strand
caaacgcagugcaaucaag

SEQ ID NO: 483486 - RNA, 19 nt, Homo sapiens
  misc_RNA (1)...(19): siRNA sense strand
ccguaaacuucauaacauu

SEQ ID NO: 483487 - RNA, 19 nt, Homo sapiens
  misc_RNA (1)...(19): siRNA sense strand
gacagguuguaaaggcaua

SEQ ID NO: 483488 - RNA, 19 nt, Homo sapiens
  misc_RNA (1)...(19): siRNA sense strand
gcagcacaguuucuucaag

SEQ ID NO: 483489 - RNA, 19 nt, Homo sapiens
  misc_RNA (1)...(19): siRNA sense strand
cauuugaaacgccacuuua

SEQ ID NO: 483490 - RNA, 19 nt, Homo sapiens
  misc_RNA (1)...(19): siRNA sense strand
gaugaagguacaaauacaa

SEQ ID NO: 483491 - RNA, 19 nt, Homo sapiens
  misc_RNA (1)...(19): siRNA sense strand
gcauuugaaacgccacuuu

SEQ ID NO: 483492 - RNA, 19 nt, Homo sapiens
  misc_RNA (1)...(19): siRNA sense strand
gaacccguaaacuucauaa

SEQ ID NO: 483493 - RNA, 19 nt, Homo sapiens
  misc_RNA (1)...(19): siRNA sense strand
gaaaguuugcgcaacagau

SEQ ID NO: 483494 - RNA, 19 nt, Homo sapiens
  misc_RNA (1)...(19): siRNA sense strand
ggagagacuucagcaugca

SEQ ID NO: 483495 - RNA, 19 nt, Homo sapiens
  misc_RNA (1)...(19): siRNA sense strand
ugaugaagguacaaauaca

SEQ ID NO: 483496 - RNA, 19 nt, Homo sapiens
  misc_RNA (1)...(19): siRNA sense strand
cacgaaaguuugcgcaaca

SEQ ID NO: 483497 - RNA, 19 nt, Homo sapiens
  misc_RNA (1)...(19): siRNA sense strand
caaguaauaguguaucuac

SEQ ID NO: 483498 - RNA, 19 nt, Homo sapiens
  misc_RNA (1)...(19): siRNA sense strand
acuuggaacuuaaagaaga

SEQ ID NO: 483499 - RNA, 19 nt, Homo sapiens
  misc_RNA (1)...(19): siRNA sense strand
gagguagaucagaugaaua

SEQ ID NO: 483500 - RNA, 19 nt, Homo sapiens
  misc_RNA (1)...(19): siRNA sense strand
agguagaucagaugaauaa

SEQ ID NO: 483501 - RNA, 19 nt, Homo sapiens
  misc_RNA (1)...(19): siRNA sense strand
uuaaagaagaccaaagaug

SEQ ID NO: 483502 - RNA, 19 nt, Homo sapiens
  misc_RNA (1)...(19): siRNA sense strand
gguauuccaccugcucaua

SEQ ID NO: 483503 - RNA, 19 nt, Homo sapiens
  misc_RNA (1)...(19): siRNA sense strand
cccguaaacuucauaacau

SEQ ID NO: 483504 - RNA, 19 nt, Homo sapiens
  misc_RNA (1)...(19): siRNA sense strand
ugaaacgccacuuuauguu

SEQ ID NO: 483505 - RNA, 19 nt, Homo sapiens
  misc_RNA (1)...(19): siRNA sense strand
cagauucagcaaccucuaa

SEQ ID NO: 483506 - RNA, 19 nt, Homo sapiens
  misc_RNA (1)...(19): siRNA sense strand
uaaugagguuuacuaugca

SEQ ID NO: 483507 - RNA, 19 nt, Homo sapiens
  misc_RNA (1)...(19): siRNA sense strand
caagaaaacagcugaugaa

SEQ ID NO: 483508 - RNA, 19 nt, Homo sapiens
  misc_RNA (1)...(19): siRNA sense strand
ggaacccguaaacuucaua

SEQ ID NO: 483509 - RNA, 19 nt, Homo sapiens
  misc_RNA (1)...(19): siRNA sense strand
gaguacaaaccaccaggaa

SEQ ID NO: 483510 - RNA, 19 nt, Homo sapiens
  misc_RNA (1)...(19): siRNA sense strand
aaagaagaccaaagaugga

SEQ ID NO: 483511 - RNA, 19 nt, Homo sapiens
  misc_RNA (1)...(19): siRNA sense strand
gcauauuaaugagguuuac

SEQ ID NO: 483512 - RNA, 19 nt, Homo sapiens
  misc_RNA (1)...(19): siRNA sense strand
uuugagaaguugccagaug

SEQ ID NO: 483513 - RNA, 19 nt, Homo sapiens
  misc_RNA (1)...(19): siRNA sense strand
uauuccaccugcucauauu

SEQ ID NO: 483514 - RNA, 19 nt, Homo sapiens
  misc_RNA (1)...(19): siRNA sense strand
ugaaaugcacacuggagaa

SEQ ID NO: 483515 - RNA, 19 nt, Homo sapiens
  misc_RNA (1)...(19): siRNA sense strand
ucagcaaccucuaacuaac

SEQ ID NO: 483516 - RNA, 19 nt, Homo sapiens
  misc_RNA (1)...(19): siRNA sense strand
uaguggaaguucuggguau

SEQ ID NO: 483517 - RNA, 19 nt, Homo sapiens
  misc_RNA (1)...(19): siRNA sense strand
gaaaugcacacuggagaac

SEQ ID NO: 483518 - RNA, 19 nt, Homo sapiens
  misc_RNA (1)...(19): siRNA sense strand
cagaggugcuacugggaau

SEQ ID NO: 483519 - RNA, 19 nt, Homo sapiens
  misc_RNA (1)...(19): siRNA sense strand
caugcaaaccuucaucugu

SEQ ID NO: 483520 - RNA, 19 nt, Homo sapiens
  misc_RNA (1)...(19): siRNA sense strand
cggaagguuuacaaugaug

SEQ ID NO: 483521 - RNA, 19 nt, Homo sapiens
  misc_RNA (1)...(19): siRNA sense strand
guauuccaccugcucauau

SEQ ID NO: 483522 - RNA, 19 nt, Homo sapiens
  misc_RNA (1)...(19): siRNA sense strand
uugaaacgccacuuuaugu

SEQ ID NO: 483523 - RNA, 19 nt, Homo sapiens
  misc_RNA (1)...(19): siRNA sense strand
uacugggaaugccuuauga

SEQ ID NO: 483524 - RNA, 19 nt, Homo sapiens
  misc_RNA (1)...(19): siRNA sense strand
aaacgcagugcaaucaaga

SEQ ID NO: 483525 - RNA, 19 nt, Homo sapiens
  misc_RNA (1)...(19): siRNA sense strand
gccacuuuauguuucgaaa

SEQ ID NO: 483526 - RNA, 19 nt, Homo sapiens
  misc_RNA (1)...(19): siRNA sense strand
cuuugaaccuaacacgaaa

SEQ ID NO: 483527 - RNA, 19 nt, Homo sapiens
  misc_RNA (1)...(19): siRNA sense strand
ggcaccaccuccaguacau

SEQ ID NO: 483528 - RNA, 19 nt, Homo sapiens
  misc_RNA (1)...(19): siRNA sense strand
guucaguggugccaaugag

SEQ ID NO: 483529 - RNA, 19 nt, Homo sapiens
  misc_RNA (1)...(19): siRNA sense strand
auaguugacuuuggcaguu

SEQ ID NO: 483530 - RNA, 19 nt, Homo sapiens
  misc_RNA (1)...(19): siRNA sense strand
uccagaacuuaguaucauu

SEQ ID NO: 483531 - RNA, 19 nt, Homo sapiens
  misc_RNA (1)...(19): siRNA sense strand
aaaguuugcgcaacagaug

SEQ ID NO: 483532 - RNA, 19 nt, Homo sapiens
  misc_RNA (1)...(19): siRNA sense strand
ugaaucaagcacagauaga

SEQ ID NO: 483533 - RNA, 19 nt, Homo sapiens
  misc_RNA (1)...(19): siRNA sense strand
ccagauggcacuuggaacu

SEQ ID NO: 483534 - RNA, 19 nt, Homo sapiens
  misc_RNA (1)...(19): siRNA sense strand
gaccuugccauugauaugu

SEQ ID NO: 483535 - RNA, 19 nt, Homo sapiens
  misc_RNA (1)...(19): siRNA sense strand
ccagaacuuaguaucauuc

SEQ ID NO: 483536 - RNA, 19 nt, Homo sapiens
  misc_RNA (1)...(19): siRNA sense strand
cuacugggaaugccuuaug

SEQ ID NO: 483537 - RNA, 19 nt, Homo sapiens
  misc_RNA (1)...(19): siRNA sense strand
gaucaaaacauacaagcau

SEQ ID NO: 483538 - RNA, 19 nt, Homo sapiens
  misc_RNA (1)...(19): siRNA sense strand
caagcauauuaaugagguu

SEQ ID NO: 483539 - RNA, 19 nt, Homo sapiens
  misc_RNA (1)...(19): siRNA sense strand
gaagaccaaagauggaaaa

SEQ ID NO: 483540 - RNA, 19 nt, Homo sapiens
  misc_RNA (1)...(19): siRNA sense strand
gcgacuccagaacuuagua

SEQ ID NO: 483541 - RNA, 19 nt, Homo sapiens
  misc_RNA (1)...(19): siRNA sense strand
ccccaaaacucgaauucaa

SEQ ID NO: 483542 - RNA, 19 nt, Homo sapiens
  misc_RNA (1)...(19): siRNA sense strand
uuaaggaugcuugauuaug

SEQ ID NO: 483543 - RNA, 19 nt, Homo sapiens
  misc_RNA (1)...(19): siRNA sense strand
gaagcgaagacaccaacag

SEQ ID NO: 483544 - RNA, 19 nt, Homo sapiens
  misc_RNA (1)...(19): siRNA sense strand
caccugcucauauucuuga

SEQ ID NO: 483545 - RNA, 19 nt, Homo sapiens
  misc_RNA (1)...(19): siRNA sense strand
acgcagugcaaucaagaua

SEQ ID NO: 483546 - RNA, 19 nt, Homo sapiens
  misc_RNA (1)...(19): siRNA sense strand
ucuuugaaccuaacacgaa

SEQ ID NO: 483547 - RNA, 19 nt, Homo sapiens
  misc_RNA (1)...(19): siRNA sense strand
uucagcaaccucuaacuaa

SEQ ID NO: 483548 - RNA, 19 nt, Homo sapiens
  misc_RNA (1)...(19): siRNA sense strand
caggaacccguaaacuuca

SEQ ID NO: 483549 - RNA, 19 nt, Homo sapiens
  misc_RNA (1)...(19): siRNA sense strand
acuuaaagaagaccaaaga

SEQ ID NO: 483550 - RNA, 19 nt, Homo sapiens
  misc_RNA (1)...(19): siRNA sense strand
caaugagguagaucagaug

SEQ ID NO: 483551 - RNA, 19 nt, Homo sapiens
  misc_RNA (1)...(19): siRNA sense strand
ggaacuuaaagaagaccaa

SEQ ID NO: 483552 - RNA, 19 nt, Homo sapiens
  misc_RNA (1)...(19): siRNA sense strand
ccaaacgcagugcaaucaa

SEQ ID NO: 483553 - RNA, 19 nt, Homo sapiens
  misc_RNA (1)...(19): siRNA sense strand
gcaugcaaaccuucaucug

SEQ ID NO: 483554 - RNA, 19 nt, Homo sapiens
  misc_RNA (1)...(19): siRNA sense strand
ugaccuugccauugauaug

SEQ ID NO: 483555 - RNA, 19 nt, Homo sapiens
  misc_RNA (1)...(19): siRNA sense strand
gaaccuaacacgaaaguuu

SEQ ID NO: 483556 - RNA, 19 nt, Homo sapiens
  misc_RNA (1)...(19): siRNA sense strand
uaaggaugcuugauuauga

SEQ ID NO: 483557 - RNA, 19 nt, Homo sapiens
  misc_RNA (1)...(19): siRNA sense strand
gcuaauaccuuggacuuug

SEQ ID NO: 483558 - RNA, 19 nt, Homo sapiens
  misc_RNA (1)...(19): siRNA sense strand
gaaaacagcugaugaaggu

SEQ ID NO: 483559 - RNA, 19 nt, Homo sapiens
  misc_RNA (1)...(19): siRNA sense strand
gaagguacaaauacaagua

SEQ ID NO: 483560 - RNA, 19 nt, Homo sapiens
  misc_RNA (1)...(19): siRNA sense strand
aaacucgaauucaaccuua

SEQ ID NO: 483561 - RNA, 19 nt, Homo sapiens
  misc_RNA (1)...(19): siRNA sense strand
gaauggagcuauggacguu

SEQ ID NO: 483562 - RNA, 19 nt, Homo sapiens
  misc_RNA (1)...(19): siRNA sense strand
gggaaugccuuaugaccuu

SEQ ID NO: 483563 - RNA, 19 nt, Homo sapiens
  misc_RNA (1)...(19): siRNA sense strand
gcacuuggaacuuaaagaa

SEQ ID NO: 483564 - RNA, 19 nt, Homo sapiens
  misc_RNA (1)...(19): siRNA sense strand
ggccaagggucuacaauuc

SEQ ID NO: 483565 - RNA, 19 nt, Homo sapiens
  misc_RNA (1)...(19): siRNA sense strand
gaaggacaucugacaauga

SEQ ID NO: 483566 - RNA, 19 nt, Homo sapiens
  misc_RNA (1)...(19): siRNA sense strand
gcaaucaggccuaccagaa

SEQ ID NO: 483567 - RNA, 19 nt, Homo sapiens
  misc_RNA (1)...(19): siRNA sense strand
gcaaggggcugauagagaa

SEQ ID NO: 483568 - RNA, 19 nt, Homo sapiens
  misc_RNA (1)...(19): siRNA sense strand
cuuaugaccuugccauuga

SEQ ID NO: 483569 - RNA, 19 nt, Homo sapiens
  misc_RNA (1)...(19): siRNA sense strand
ccaaugagguagaucagau

SEQ ID NO: 483570 - RNA, 19 nt, Homo sapiens
  misc_RNA (1)...(19): siRNA sense strand
uuaaugagguuuacuaugc

SEQ ID NO: 483571 - RNA, 19 nt, Homo sapiens
  misc_RNA (1)...(19): siRNA sense strand
gcaauuuccugcuccucuu

SEQ ID NO: 483572 - RNA, 19 nt, Homo sapiens
  misc_RNA (1)...(19): siRNA sense strand
gcagugcaaucaagauagu

SEQ ID NO: 483573 - RNA, 19 nt, Homo sapiens
  misc_RNA (1)...(19): siRNA sense strand
gacaggaguuugugugcaa

SEQ ID NO: 483574 - RNA, 19 nt, Homo sapiens
  misc_RNA (1)...(19): siRNA sense strand
gagcuauggacguuaauuu

SEQ ID NO: 483575 - RNA, 19 nt, Homo sapiens
  misc_RNA (1)...(19): siRNA sense strand
gcugaugaagguacaaaua

SEQ ID NO: 483576 - RNA, 19 nt, Homo sapiens
  misc_RNA (1)...(19): siRNA sense strand
gaaguucaaagaccucauu

SEQ ID NO: 483577 - RNA, 19 nt, Homo sapiens
  misc_RNA (1)...(19): siRNA sense strand
aaaaguggauggaucguua

SEQ ID NO: 483578 - RNA, 19 nt, Homo sapiens
  misc_RNA (1)...(19): siRNA sense strand
gauggcacuuggaacuuaa

SEQ ID NO: 483579 - RNA, 19 nt, Homo sapiens
  misc_RNA (1)...(19): siRNA sense strand
ggcagaggauauaccagua

SEQ ID NO: 483580 - RNA, 19 nt, Homo sapiens
  misc_RNA (1)...(19): siRNA sense strand
gaaucaagcacagauagaa

SEQ ID NO: 483581 - RNA, 19 nt, Homo sapiens
  misc_RNA (1)...(19): siRNA sense strand
gaauucaaccuuauuaugc

SEQ ID NO: 483582 - RNA, 19 nt, Homo sapiens
  misc_RNA (1)...(19): siRNA sense strand
guucaaagaccucauuuua

SEQ ID NO: 483583 - RNA, 19 nt, Homo sapiens
  misc_RNA (1)...(19): siRNA sense strand
cuacauagugcauuugaaa

SEQ ID NO: 483584 - RNA, 19 nt, Homo sapiens
  misc_RNA (1)...(19): siRNA sense strand
gaacuuaguaucauucacu

SEQ ID NO: 483585 - RNA, 19 nt, Homo sapiens
  misc_RNA (1)...(19): siRNA sense strand
gcacugaagcuccuacaca

SEQ ID NO: 483586 - RNA, 19 nt, Homo sapiens
  misc_RNA (1)...(19): siRNA sense strand
uaacauucuuggaguggaa

SEQ ID NO: 483587 - RNA, 19 nt, Homo sapiens
  misc_RNA (1)...(19): siRNA sense strand
aaacucauccuguucaaga

SEQ ID NO: 483588 - RNA, 19 nt, Homo sapiens
  misc_RNA (1)...(19): siRNA sense strand
gcuauggacguuaauuuga

SEQ ID NO: 483589 - RNA, 19 nt, Homo sapiens
  misc_RNA (1)...(19): siRNA sense strand
agauggcacuuggaacuua

SEQ ID NO: 483590 - RNA, 19 nt, Homo sapiens
  misc_RNA (1)...(19): siRNA sense strand
ugagguagaucagaugaau

SEQ ID NO: 483591 - RNA, 19 nt, Homo sapiens
  misc_RNA (1)...(19): siRNA sense strand
ugaaggacaucugacaaug

SEQ ID NO: 483592 - RNA, 19 nt, Homo sapiens
  misc_RNA (1)...(19): siRNA sense strand
gaacuuaaagaagaccaaa

SEQ ID NO: 483593 - RNA, 19 nt, Homo sapiens
  misc_RNA (1)...(19): siRNA sense strand
ccaggaacccguaaacuuc

SEQ ID NO: 483594 - RNA, 19 nt, Homo sapiens
  misc_RNA (1)...(19): siRNA sense strand
ucaaagaccucauuuuaag

SEQ ID NO: 483595 - RNA, 19 nt, Homo sapiens
  misc_RNA (1)...(19): siRNA sense strand
uuacaugacugaaggacau

SEQ ID NO: 483596 - RNA, 19 nt, Homo sapiens
  misc_RNA (1)...(19): siRNA sense strand
uggcaguucuugucaguug

SEQ ID NO: 483597 - RNA, 19 nt, Homo sapiens
  misc_RNA (1)...(19): siRNA sense strand
ccaagagacuggcauagcu

SEQ ID NO: 483598 - RNA, 19 nt, Homo sapiens
  misc_RNA (1)...(19): siRNA sense strand
cgaauucaaccuuauuaug

SEQ ID NO: 483599 - RNA, 19 nt, Homo sapiens
  misc_RNA (1)...(19): siRNA sense strand
uacggucgcugacuacuug

SEQ ID NO: 483600 - RNA, 19 nt, Homo sapiens
  misc_RNA (1)...(19): siRNA sense strand
caaacgcagugcaaucaag

SEQ ID NO: 483601 - RNA, 19 nt, Homo sapiens
  misc_RNA (1)...(19): siRNA sense strand
ggacauccaacauaccaau

SEQ ID NO: 483602 - RNA, 19 nt, Homo sapiens
  misc_RNA (1)...(19): siRNA sense strand
ccguaaacuucauaacauu

SEQ ID NO: 483603 - RNA, 19 nt, Homo sapiens
  misc_RNA (1)...(19): siRNA sense strand
gacagguuguaaaggcaua

SEQ ID NO: 483604 - RNA, 19 nt, Homo sapiens
  misc_RNA (1)...(19): siRNA sense strand
gcacauuacaugacugaag

SEQ ID NO: 483605 - RNA, 19 nt, Homo sapiens
  misc_RNA (1)...(19): siRNA sense strand
ccaccaccauggacaacaa

SEQ ID NO: 483606 - RNA, 19 nt, Homo sapiens
  misc_RNA (1)...(19): siRNA sense strand
gcagcacaguuucuucaag

SEQ ID NO: 483607 - RNA, 19 nt, Homo sapiens
  misc_RNA (1)...(19): siRNA sense strand
cauuugaaacgccacuuua

SEQ ID NO: 483608 - RNA, 19 nt, Homo sapiens
  misc_RNA (1)...(19): siRNA sense strand
gaugaagguacaaauacaa

SEQ ID NO: 483609 - RNA, 19 nt, Homo sapiens
  misc_RNA (1)...(19): siRNA sense strand
gcauuugaaacgccacuuu

SEQ ID NO: 483610 - RNA, 19 nt, Homo sapiens
  misc_RNA (1)...(19): siRNA sense strand
gaacccguaaacuucauaa

SEQ ID NO: 483611 - RNA, 19 nt, Homo sapiens
  misc_RNA (1)...(19): siRNA sense strand
gaaaguuugcgcaacagau

SEQ ID NO: 483612 - RNA, 19 nt, Homo sapiens
  misc_RNA (1)...(19): siRNA sense strand
ugaugaagguacaaauaca

SEQ ID NO: 483613 - RNA, 19 nt, Homo sapiens
  misc_RNA (1)...(19): siRNA sense strand
ggagagacuucagcaugca

SEQ ID NO: 483614 - RNA, 19 nt, Homo sapiens
  misc_RNA (1)...(19): siRNA sense strand
cacgaaaguuugcgcaaca

SEQ ID NO: 483615 - RNA, 19 nt, Homo sapiens
  misc_RNA (1)...(19): siRNA sense strand
caaguaauaguguaucuac

SEQ ID NO: 483616 - RNA, 19 nt, Homo sapiens
  misc_RNA (1)...(19): siRNA sense strand
acuuggaacuuaaagaaga

SEQ ID NO: 483617 - RNA, 19 nt, Homo sapiens
  misc_RNA (1)...(19): siRNA sense strand
gagguagaucagaugaaua

SEQ ID NO: 483618 - RNA, 19 nt, Homo sapiens
  misc_RNA (1)...(19): siRNA sense strand
agguagaucagaugaauaa

SEQ ID NO: 483619 - RNA, 19 nt, Homo sapiens
  misc_RNA (1)...(19): siRNA sense strand
caacgaauagcuccucuac

SEQ ID NO: 483620 - RNA, 19 nt, Homo sapiens
  misc_RNA (1)...(19): siRNA sense strand
uuaaagaagaccaaagaug

SEQ ID NO: 483621 - RNA, 19 nt, Homo sapiens
  misc_RNA (1)...(19): siRNA sense strand
gguauuccaccugcucaua

SEQ ID NO: 483622 - RNA, 19 nt, Homo sapiens
  misc_RNA (1)...(19): siRNA sense strand
cccguaaacuucauaacau

SEQ ID NO: 483623 - RNA, 19 nt, Homo sapiens
  misc_RNA (1)...(19): siRNA sense strand
ccaagggucuacaauucuc

SEQ ID NO: 483624 - RNA, 19 nt, Homo sapiens
  misc_RNA (1)...(19): siRNA sense strand
ugaaacgccacuuuauguu

SEQ ID NO: 483625 - RNA, 19 nt, Homo sapiens
  misc_RNA (1)...(19): siRNA sense strand
aaucaggccuaccagaauc

SEQ ID NO: 483626 - RNA, 19 nt, Homo sapiens
  misc_RNA (1)...(19): siRNA sense strand
cagauucagcaaccucuaa

SEQ ID NO: 483627 - RNA, 19 nt, Homo sapiens
  misc_RNA (1)...(19): siRNA sense strand
ccaagauucuauggagguu

SEQ ID NO: 483628 - RNA, 19 nt, Homo sapiens
  misc_RNA (1)...(19): siRNA sense strand
uaaugagguuuacuaugca

SEQ ID NO: 483629 - RNA, 19 nt, Homo sapiens
  misc_RNA (1)...(19): siRNA sense strand
ggacagaauggagcuaugg

SEQ ID NO: 483630 - RNA, 19 nt, Homo sapiens
  misc_RNA (1)...(19): siRNA sense strand
caaucaggccuaccagaau

SEQ ID NO: 483631 - RNA, 19 nt, Homo sapiens
  misc_RNA (1)...(19): siRNA sense strand
uguugaaacucauccuguu

SEQ ID NO: 483632 - RNA, 19 nt, Homo sapiens
  misc_RNA (1)...(19): siRNA sense strand
caagaaaacagcugaugaa

SEQ ID NO: 483633 - RNA, 19 nt, Homo sapiens
  misc_RNA (1)...(19): siRNA sense strand
gcauauuaaugagguuuac

SEQ ID NO: 483634 - RNA, 19 nt, Homo sapiens
  misc_RNA (1)...(19): siRNA sense strand
ggaacccguaaacuucaua

SEQ ID NO: 483635 - RNA, 19 nt, Homo sapiens
  misc_RNA (1)...(19): siRNA sense strand
gaguacaaaccaccaggaa

SEQ ID NO: 483636 - RNA, 19 nt, Homo sapiens
  misc_RNA (1)...(19): siRNA sense strand
aaagaagaccaaagaugga

SEQ ID NO: 483637 - RNA, 19 nt, Homo sapiens
  misc_RNA (1)...(19): siRNA sense strand
uuugagaaguugccagaug

SEQ ID NO: 483638 - RNA, 19 nt, Homo sapiens
  misc_RNA (1)...(19): siRNA sense strand
uauuccaccugcucauauu

SEQ ID NO: 483639 - RNA, 19 nt, Homo sapiens
  misc_RNA (1)...(19): siRNA sense strand
ugaaaugcacacuggagaa

SEQ ID NO: 483640 - RNA, 19 nt, Homo sapiens
  misc_RNA (1)...(19): siRNA sense strand
ucagcaaccucuaacuaac

SEQ ID NO: 483641 - RNA, 19 nt, Homo sapiens
  misc_RNA (1)...(19): siRNA sense strand
uaguggaaguucuggguau

SEQ ID NO: 483642 - RNA, 19 nt, Homo sapiens
  misc_RNA (1)...(19): siRNA sense strand
gaaaugcacacuggagaac

SEQ ID NO: 483643 - RNA, 19 nt, Homo sapiens
  misc_RNA (1)...(19): siRNA sense strand
cagaggugcuacugggaau

SEQ ID NO: 483644 - RNA, 19 nt, Homo sapiens
  misc_RNA (1)...(19): siRNA sense strand
cggaagguuuacaaugaug

SEQ ID NO: 483645 - RNA, 19 nt, Homo sapiens
  misc_RNA (1)...(19): siRNA sense strand
aaggacaucugacaaugag

SEQ ID NO: 483646 - RNA, 19 nt, Homo sapiens
  misc_RNA (1)...(19): siRNA sense strand
caugcaaaccuucaucugu

SEQ ID NO: 483647 - RNA, 19 nt, Homo sapiens
  misc_RNA (1)...(19): siRNA sense strand
guauuccaccugcucauau

SEQ ID NO: 483648 - RNA, 19 nt, Homo sapiens
  misc_RNA (1)...(19): siRNA sense strand
cuaauaccuuggacuuugg

SEQ ID NO: 483649 - RNA, 19 nt, Homo sapiens
  misc_RNA (1)...(19): siRNA sense strand
aaacgcagugcaaucaaga

SEQ ID NO: 483650 - RNA, 19 nt, Homo sapiens
  misc_RNA (1)...(19): siRNA sense strand
gccacuuuauguuucgaaa

SEQ ID NO: 483651 - RNA, 19 nt, Homo sapiens
  misc_RNA (1)...(19): siRNA sense strand
uugaaacgccacuuuaugu

SEQ ID NO: 483652 - RNA, 19 nt, Homo sapiens
  misc_RNA (1)...(19): siRNA sense strand
uacugggaaugccuuauga

SEQ ID NO: 483653 - RNA, 19 nt, Homo sapiens
  misc_RNA (1)...(19): siRNA sense strand
ggagcuauggacguuaauu

SEQ ID NO: 483654 - RNA, 19 nt, Homo sapiens
  misc_RNA (1)...(19): siRNA sense strand
cauccaacauaccaauuuu

SEQ ID NO: 483655 - RNA, 19 nt, Homo sapiens
  misc_RNA (1)...(19): siRNA sense strand
gaaccuaacacgaaaguuu

SEQ ID NO: 483656 - RNA, 19 nt, Homo sapiens
  misc_RNA (1)...(19): siRNA sense strand
uaaggaugcuugauuauga

SEQ ID NO: 483657 - RNA, 19 nt, Homo sapiens
  misc_RNA (1)...(19): siRNA sense strand
gaaaacagcugaugaaggu

SEQ ID NO: 483658 - RNA, 19 nt, Homo sapiens
  misc_RNA (1)...(19): siRNA sense strand
gaagguacaaauacaagua

SEQ ID NO: 483659 - RNA, 19 nt, Homo sapiens
  misc_RNA (1)...(19): siRNA sense strand
aaacucgaauucaaccuua

SEQ ID NO: 483660 - RNA, 19 nt, Homo sapiens
  misc_RNA (1)...(19): siRNA sense strand
gggaaugccuuaugaccuu

SEQ ID NO: 483661 - RNA, 19 nt, Homo sapiens
  misc_RNA (1)...(19): siRNA sense strand
gcacuuggaacuuaaagaa

SEQ ID NO: 483662 - RNA, 19 nt, Homo sapiens
  misc_RNA (1)...(19): siRNA sense strand
cuuaugaccuugccauuga

SEQ ID NO: 483663 - RNA, 19 nt, Homo sapiens
  misc_RNA (1)...(19): siRNA sense strand
ccaaugagguagaucagau

SEQ ID NO: 483664 - RNA, 19 nt, Homo sapiens
  misc_RNA (1)...(19): siRNA sense strand
uuaaugagguuuacuaugc

SEQ ID NO: 483665 - RNA, 19 nt, Homo sapiens
  misc_RNA (1)...(19): siRNA sense strand
gcagugcaaucaagauagu

SEQ ID NO: 483666 - RNA, 19 nt, Homo sapiens
  misc_RNA (1)...(19): siRNA sense strand
gcugaugaagguacaaaua

SEQ ID NO: 483667 - RNA, 19 nt, Homo sapiens
  misc_RNA (1)...(19): siRNA sense strand
gaaguucaaagaccucauu

SEQ ID NO: 483668 - RNA, 19 nt, Homo sapiens
  misc_RNA (1)...(19): siRNA sense strand
aaaaguggauggaucguua

SEQ ID NO: 483669 - RNA, 19 nt, Homo sapiens
  misc_RNA (1)...(19): siRNA sense strand
gauggcacuuggaacuuaa

SEQ ID NO: 483670 - RNA, 19 nt, Homo sapiens
  misc_RNA (1)...(19): siRNA sense strand
ggcagaggauauaccagua

SEQ ID NO: 483671 - RNA, 19 nt, Homo sapiens
  misc_RNA (1)...(19): siRNA sense strand
gaaucaagcacagauagaa

SEQ ID NO: 483672 - RNA, 19 nt, Homo sapiens
  misc_RNA (1)...(19): siRNA sense strand
gaauucaaccuuauuaugc

SEQ ID NO: 483673 - RNA, 19 nt, Homo sapiens
  misc_RNA (1)...(19): siRNA sense strand
guucaaagaccucauuuua

SEQ ID NO: 483674 - RNA, 19 nt, Homo sapiens
  misc_RNA (1)...(19): siRNA sense strand
cuacauagugcauuugaaa

SEQ ID NO: 483675 - RNA, 19 nt, Homo sapiens
  misc_RNA (1)...(19): siRNA sense strand
gaacuuaguaucauucacu

SEQ ID NO: 483676 - RNA, 19 nt, Homo sapiens
  misc_RNA (1)...(19): siRNA sense strand
uaacauucuuggaguggaa

SEQ ID NO: 483677 - RNA, 19 nt, Homo sapiens
  misc_RNA (1)...(19): siRNA sense strand
agauggcacuuggaacuua

SEQ ID NO: 483678 - RNA, 19 nt, Homo sapiens
  misc_RNA (1)...(19): siRNA sense strand
ugagguagaucagaugaau

SEQ ID NO: 483679 - RNA, 19 nt, Homo sapiens
  misc_RNA (1)...(19): siRNA sense strand
gaacuuaaagaagaccaaa

SEQ ID NO: 483680 - RNA, 19 nt, Homo sapiens
  misc_RNA (1)...(19): siRNA sense strand
ccaggaacccguaaacuuc

SEQ ID NO: 483681 - RNA, 19 nt, Homo sapiens
  misc_RNA (1)...(19): siRNA sense strand
ucaaagaccucauuuuaag

SEQ ID NO: 483682 - RNA, 19 nt, Homo sapiens
  misc_RNA (1)...(19): siRNA sense strand
uggcaguucuugucaguug

SEQ ID NO: 483683 - RNA, 19 nt, Homo sapiens
  misc_RNA (1)...(19): siRNA sense strand
cgaauucaaccuuauuaug

SEQ ID NO: 483684 - RNA, 19 nt, Homo sapiens
  misc_RNA (1)...(19): siRNA sense strand
uacggucgcugacuacuug

SEQ ID NO: 483685 - RNA, 19 nt, Homo sapiens
  misc_RNA (1)...(19): siRNA sense strand
caaacgcagugcaaucaag

SEQ ID NO: 483686 - RNA, 19 nt, Homo sapiens
  misc_RNA (1)...(19): siRNA sense strand
ccguaaacuucauaacauu

SEQ ID NO: 483687 - RNA, 19 nt, Homo sapiens
  misc_RNA (1)...(19): siRNA sense strand
gacagguuguaaaggcaua

SEQ ID NO: 483688 - RNA, 19 nt, Homo sapiens
  misc_RNA (1)...(19): siRNA sense strand
gcagcacaguuucuucaag

SEQ ID NO: 483689 - RNA, 19 nt, Homo sapiens
  misc_RNA (1)...(19): siRNA sense strand
cauuugaaacgccacuuua

SEQ ID NO: 483690 - RNA, 19 nt, Homo sapiens
  misc_RNA (1)...(19): siRNA sense strand
gaugaagguacaaauacaa

SEQ ID NO: 483691 - RNA, 19 nt, Homo sapiens
  misc_RNA (1)...(19): siRNA sense strand
gcauuugaaacgccacuuu

SEQ ID NO: 483692 - RNA, 19 nt, Homo sapiens
  misc_RNA (1)...(19): siRNA sense strand
gaacccguaaacuucauaa

SEQ ID NO: 483693 - RNA, 19 nt, Homo sapiens
  misc_RNA (1)...(19): siRNA sense strand
gaaaguuugcgcaacagau

SEQ ID NO: 483694 - RNA, 19 nt, Homo sapiens
  misc_RNA (1)...(19): siRNA sense strand
ggagagacuucagcaugca

SEQ ID NO: 483695 - RNA, 19 nt, Homo sapiens
  misc_RNA (1)...(19): siRNA sense strand
ugaugaagguacaaauaca

SEQ ID NO: 483696 - RNA, 19 nt, Homo sapiens
  misc_RNA (1)...(19): siRNA sense strand
cacgaaaguuugcgcaaca

SEQ ID NO: 483697 - RNA, 19 nt, Homo sapiens
  misc_RNA (1)...(19): siRNA sense strand
caaguaauaguguaucuac

SEQ ID NO: 483698 - RNA, 19 nt, Homo sapiens
  misc_RNA (1)...(19): siRNA sense strand
acuuggaacuuaaagaaga

SEQ ID NO: 483699 - RNA, 19 nt, Homo sapiens
  misc_RNA (1)...(19): siRNA sense strand
gagguagaucagaugaaua

SEQ ID NO: 483700 - RNA, 19 nt, Homo sapiens
  misc_RNA (1)...(19): siRNA sense strand
agguagaucagaugaauaa

SEQ ID NO: 483701 - RNA, 19 nt, Homo sapiens
  misc_RNA (1)...(19): siRNA sense strand
uuaaagaagaccaaagaug

SEQ ID NO: 483702 - RNA, 19 nt, Homo sapiens
  misc_RNA (1)...(19): siRNA sense strand
gguauuccaccugcucaua

SEQ ID NO: 483703 - RNA, 19 nt, Homo sapiens
  misc_RNA (1)...(19): siRNA sense strand
cccguaaacuucauaacau

SEQ ID NO: 483704 - RNA, 19 nt, Homo sapiens
  misc_RNA (1)...(19): siRNA sense strand
ugaaacgccacuuuauguu

SEQ ID NO: 483705 - RNA, 19 nt, Homo sapiens
  misc_RNA (1)...(19): siRNA sense strand
cagauucagcaaccucuaa

SEQ ID NO: 483706 - RNA, 19 nt, Homo sapiens
  misc_RNA (1)...(19): siRNA sense strand
uaaugagguuuacuaugca

SEQ ID NO: 483707 - RNA, 19 nt, Homo sapiens
  misc_RNA (1)...(19): siRNA sense strand
caagaaaacagcugaugaa

SEQ ID NO: 483708 - RNA, 19 nt, Homo sapiens
  misc_RNA (1)...(19): siRNA sense strand
ggaacccguaaacuucaua

SEQ ID NO: 483709 - RNA, 19 nt, Homo sapiens
  misc_RNA (1)...(19): siRNA sense strand
gaguacaaaccaccaggaa

SEQ ID NO: 483710 - RNA, 19 nt, Homo sapiens
  misc_RNA (1)...(19): siRNA sense strand
aaagaagaccaaagaugga

SEQ ID NO: 483711 - RNA, 19 nt, Homo sapiens
  misc_RNA (1)...(19): siRNA sense strand
gcauauuaaugagguuuac

SEQ ID NO: 483712 - RNA, 19 nt, Homo sapiens
  misc_RNA (1)...(19): siRNA sense strand
uuugagaaguugccagaug

SEQ ID NO: 483713 - RNA, 19 nt, Homo sapiens
  misc_RNA (1)...(19): siRNA sense strand
uauuccaccugcucauauu

SEQ ID NO: 483714 - RNA, 19 nt, Homo sapiens
  misc_RNA (1)...(19): siRNA sense strand
ugaaaugcacacuggagaa

SEQ ID NO: 483715 - RNA, 19 nt, Homo sapiens
  misc_RNA (1)...(19): siRNA sense strand
ucagcaaccucuaacuaac

SEQ ID NO: 483716 - RNA, 19 nt, Homo sapiens
  misc_RNA (1)...(19): siRNA sense strand
uaguggaaguucuggguau

SEQ ID NO: 483717 - RNA, 19 nt, Homo sapiens
  misc_RNA (1)...(19): siRNA sense strand
gaaaugcacacuggagaac

SEQ ID NO: 483718 - RNA, 19 nt, Homo sapiens
  misc_RNA (1)...(19): siRNA sense strand
cagaggugcuacugggaau

SEQ ID NO: 483719 - RNA, 19 nt, Homo sapiens
  misc_RNA (1)...(19): siRNA sense strand
caugcaaaccuucaucugu

SEQ ID NO: 483720 - RNA, 19 nt, Homo sapiens
  misc_RNA (1)...(19): siRNA sense strand
cggaagguuuacaaugaug

SEQ ID NO: 483721 - RNA, 19 nt, Homo sapiens
  misc_RNA (1)...(19): siRNA sense strand
guauuccaccugcucauau

SEQ ID NO: 483722 - RNA, 19 nt, Homo sapiens
  misc_RNA (1)...(19): siRNA sense strand
uugaaacgccacuuuaugu

SEQ ID NO: 483723 - RNA, 19 nt, Homo sapiens
  misc_RNA (1)...(19): siRNA sense strand
uacugggaaugccuuauga

SEQ ID NO: 483724 - RNA, 19 nt, Homo sapiens
  misc_RNA (1)...(19): siRNA sense strand
aaacgcagugcaaucaaga

SEQ ID NO: 483725 - RNA, 19 nt, Homo sapiens
  misc_RNA (1)...(19): siRNA sense strand
gccacuuuauguuucgaaa

SEQ ID NO: 483726 - RNA, 19 nt, Homo sapiens
  misc_RNA (1)...(19): siRNA sense strand
cuuugaaccuaacacgaaa

SEQ ID NO: 483727 - RNA, 19 nt, Homo sapiens
  misc_RNA (1)...(19): siRNA sense strand
ggcaccaccuccaguacau

SEQ ID NO: 483728 - RNA, 19 nt, Homo sapiens
  misc_RNA (1)...(19): siRNA sense strand
guucaguggugccaaugag

SEQ ID NO: 483729 - RNA, 19 nt, Homo sapiens
  misc_RNA (1)...(19): siRNA sense strand
auaguugacuuuggcaguu

SEQ ID NO: 483730 - RNA, 19 nt, Homo sapiens
  misc_RNA (1)...(19): siRNA sense strand
uccagaacuuaguaucauu

SEQ ID NO: 483731 - RNA, 19 nt, Homo sapiens
  misc_RNA (1)...(19): siRNA sense strand
aaaguuugcgcaacagaug

SEQ ID NO: 483732 - RNA, 19 nt, Homo sapiens
  misc_RNA (1)...(19): siRNA sense strand
ugaaucaagcacagauaga

SEQ ID NO: 483733 - RNA, 19 nt, Homo sapiens
  misc_RNA (1)...(19): siRNA sense strand
ccagauggcacuuggaacu

SEQ ID NO: 483734 - RNA, 19 nt, Homo sapiens
  misc_RNA (1)...(19): siRNA sense strand
gaccuugccauugauaugu

SEQ ID NO: 483735 - RNA, 19 nt, Homo sapiens
  misc_RNA (1)...(19): siRNA sense strand
ccagaacuuaguaucauuc

SEQ ID NO: 483736 - RNA, 19 nt, Homo sapiens
  misc_RNA (1)...(19): siRNA sense strand
cuacugggaaugccuuaug

SEQ ID NO: 483737 - RNA, 19 nt, Homo sapiens
  misc_RNA (1)...(19): siRNA sense strand
gaucaaaacauacaagcau

SEQ ID NO: 483738 - RNA, 19 nt, Homo sapiens
  misc_RNA (1)...(19): siRNA sense strand
caagcauauuaaugagguu

SEQ ID NO: 483739 - RNA, 19 nt, Homo sapiens
  misc_RNA (1)...(19): siRNA sense strand
gaagaccaaagauggaaaa

SEQ ID NO: 483740 - RNA, 19 nt, Homo sapiens
  misc_RNA (1)...(19): siRNA sense strand
gcgacuccagaacuuagua

SEQ ID NO: 483741 - RNA, 19 nt, Homo sapiens
  misc_RNA (1)...(19): siRNA sense strand
ccccaaaacucgaauucaa

SEQ ID NO: 483742 - RNA, 19 nt, Homo sapiens
  misc_RNA (1)...(19): siRNA sense strand
uuaaggaugcuugauuaug

SEQ ID NO: 483743 - RNA, 19 nt, Homo sapiens
  misc_RNA (1)...(19): siRNA sense strand
gaagcgaagacaccaacag

SEQ ID NO: 483744 - RNA, 19 nt, Homo sapiens
  misc_RNA (1)...(19): siRNA sense strand
caccugcucauauucuuga

SEQ ID NO: 483745 - RNA, 19 nt, Homo sapiens
  misc_RNA (1)...(19): siRNA sense strand
acgcagugcaaucaagaua

SEQ ID NO: 483746 - RNA, 19 nt, Homo sapiens
  misc_RNA (1)...(19): siRNA sense strand
ucuuugaaccuaacacgaa

SEQ ID NO: 483747 - RNA, 19 nt, Homo sapiens
  misc_RNA (1)...(19): siRNA sense strand
uucagcaaccucuaacuaa

SEQ ID NO: 483748 - RNA, 19 nt, Homo sapiens
  misc_RNA (1)...(19): siRNA sense strand
caggaacccguaaacuuca

SEQ ID NO: 483749 - RNA, 19 nt, Homo sapiens
  misc_RNA (1)...(19): siRNA sense strand
acuuaaagaagaccaaaga

SEQ ID NO: 483750 - RNA, 19 nt, Homo sapiens
  misc_RNA (1)...(19): siRNA sense strand
caaugagguagaucagaug

SEQ ID NO: 483751 - RNA, 19 nt, Homo sapiens
  misc_RNA (1)...(19): siRNA sense strand
ggaacuuaaagaagaccaa

SEQ ID NO: 483752 - RNA, 19 nt, Homo sapiens
  misc_RNA (1)...(19): siRNA sense strand
ccaaacgcagugcaaucaa

SEQ ID NO: 483753 - RNA, 19 nt, Homo sapiens
  misc_RNA (1)...(19): siRNA sense strand
gcaugcaaaccuucaucug

SEQ ID NO: 483754 - RNA, 19 nt, Homo sapiens
  misc_RNA (1)...(19): siRNA sense strand
ugaccuugccauugauaug

SEQ ID NO: 483755 - RNA, 19 nt, Homo sapiens
  misc_RNA (1)...(19): siRNA sense strand
gaaccuaacacgaaaguuu

SEQ ID NO: 483756 - RNA, 19 nt, Homo sapiens
  misc_RNA (1)...(19): siRNA sense strand
uaaggaugcuugauuauga

SEQ ID NO: 483757 - RNA, 19 nt, Homo sapiens
  misc_RNA (1)...(19): siRNA sense strand
gaaaacagcugaugaaggu

SEQ ID NO: 483758 - RNA, 19 nt, Homo sapiens
  misc_RNA (1)...(19): siRNA sense strand
gaagguacaaauacaagua

SEQ ID NO: 483759 - RNA, 19 nt, Homo sapiens
  misc_RNA (1)...(19): siRNA sense strand
aaacucgaauucaaccuua

SEQ ID NO: 483760 - RNA, 19 nt, Homo sapiens
  misc_RNA (1)...(19): siRNA sense strand
gggaaugccuuaugaccuu

SEQ ID NO: 483761 - RNA, 19 nt, Homo sapiens
  misc_RNA (1)...(19): siRNA sense strand
gcacuuggaacuuaaagaa

SEQ ID NO: 483762 - RNA, 19 nt, Homo sapiens
  misc_RNA (1)...(19): siRNA sense strand
cuuaugaccuugccauuga

SEQ ID NO: 483763 - RNA, 19 nt, Homo sapiens
  misc_RNA (1)...(19): siRNA sense strand
ccaaugagguagaucagau

SEQ ID NO: 483764 - RNA, 19 nt, Homo sapiens
  misc_RNA (1)...(19): siRNA sense strand
uuaaugagguuuacuaugc

SEQ ID NO: 483765 - RNA, 19 nt, Homo sapiens
  misc_RNA (1)...(19): siRNA sense strand
gcaauuuccugcuccucuu

SEQ ID NO: 483766 - RNA, 19 nt, Homo sapiens
  misc_RNA (1)...(19): siRNA sense strand
gcagugcaaucaagauagu

SEQ ID NO: 483767 - RNA, 19 nt, Homo sapiens
  misc_RNA (1)...(19): siRNA sense strand
gcugaugaagguacaaaua

SEQ ID NO: 483768 - RNA, 19 nt, Homo sapiens
  misc_RNA (1)...(19): siRNA sense strand
gaaguucaaagaccucauu

SEQ ID NO: 483769 - RNA, 19 nt, Homo sapiens
  misc_RNA (1)...(19): siRNA sense strand
aaaaguggauggaucguua

SEQ ID NO: 483770 - RNA, 19 nt, Homo sapiens
  misc_RNA (1)...(19): siRNA sense strand
gauggcacuuggaacuuaa

SEQ ID NO: 483771 - RNA, 19 nt, Homo sapiens
  misc_RNA (1)...(19): siRNA sense strand
ggcagaggauauaccagua

SEQ ID NO: 483772 - RNA, 19 nt, Homo sapiens
  misc_RNA (1)...(19): siRNA sense strand
gaaucaagcacagauagaa

SEQ ID NO: 483773 - RNA, 19 nt, Homo sapiens
  misc_RNA (1)...(19): siRNA sense strand
gaauucaaccuuauuaugc

SEQ ID NO: 483774 - RNA, 19 nt, Homo sapiens
  misc_RNA (1)...(19): siRNA sense strand
guucaaagaccucauuuua

SEQ ID NO: 483775 - RNA, 19 nt, Homo sapiens
  misc_RNA (1)...(19): siRNA sense strand
cuacauagugcauuugaaa

SEQ ID NO: 483776 - RNA, 19 nt, Homo sapiens
  misc_RNA (1)...(19): siRNA sense strand
gaacuuaguaucauucacu

SEQ ID NO: 483777 - RNA, 19 nt, Homo sapiens
  misc_RNA (1)...(19): siRNA sense strand
uaacauucuuggaguggaa

SEQ ID NO: 483778 - RNA, 19 nt, Homo sapiens
  misc_RNA (1)...(19): siRNA sense strand
agauggcacuuggaacuua

SEQ ID NO: 483779 - RNA, 19 nt, Homo sapiens
  misc_RNA (1)...(19): siRNA sense strand
ugagguagaucagaugaau

SEQ ID NO: 483780 - RNA, 19 nt, Homo sapiens
  misc_RNA (1)...(19): siRNA sense strand
gaacuuaaagaagaccaaa

SEQ ID NO: 483781 - RNA, 19 nt, Homo sapiens
  misc_RNA (1)...(19): siRNA sense strand
ccaggaacccguaaacuuc

SEQ ID NO: 483782 - RNA, 19 nt, Homo sapiens
  misc_RNA (1)...(19): siRNA sense strand
ucaaagaccucauuuuaag

SEQ ID NO: 483783 - RNA, 19 nt, Homo sapiens
  misc_RNA (1)...(19): siRNA sense strand
uggcaguucuugucaguug

SEQ ID NO: 483784 - RNA, 19 nt, Homo sapiens
  misc_RNA (1)...(19): siRNA sense strand
cgaauucaaccuuauuaug

SEQ ID NO: 483785 - RNA, 19 nt, Homo sapiens
  misc_RNA (1)...(19): siRNA sense strand
uacggucgcugacuacuug

SEQ ID NO: 483786 - RNA, 19 nt, Homo sapiens
  misc_RNA (1)...(19): siRNA sense strand
caaacgcagugcaaucaag

SEQ ID NO: 483787 - RNA, 19 nt, Homo sapiens
  misc_RNA (1)...(19): siRNA sense strand
ccguaaacuucauaacauu

SEQ ID NO: 483788 - RNA, 19 nt, Homo sapiens
  misc_RNA (1)...(19): siRNA sense strand
gacagguuguaaaggcaua

SEQ ID NO: 483789 - RNA, 19 nt, Homo sapiens
  misc_RNA (1)...(19): siRNA sense strand
gcagcacaguuucuucaag

SEQ ID NO: 483790 - RNA, 19 nt, Homo sapiens
  misc_RNA (1)...(19): siRNA sense strand
cauuugaaacgccacuuua

SEQ ID NO: 483791 - RNA, 19 nt, Homo sapiens
  misc_RNA (1)...(19): siRNA sense strand
gaugaagguacaaauacaa

SEQ ID NO: 483792 - RNA, 19 nt, Homo sapiens
  misc_RNA (1)...(19): siRNA sense strand
gcauuugaaacgccacuuu

SEQ ID NO: 483793 - RNA, 19 nt, Homo sapiens
  misc_RNA (1)...(19): siRNA sense strand
gaacccguaaacuucauaa

SEQ ID NO: 483794 - RNA, 19 nt, Homo sapiens
  misc_RNA (1)...(19): siRNA sense strand
gaaaguuugcgcaacagau

SEQ ID NO: 483795 - RNA, 19 nt, Homo sapiens
  misc_RNA (1)...(19): siRNA sense strand
ggagagacuucagcaugca

SEQ ID NO: 483796 - RNA, 19 nt, Homo sapiens
  misc_RNA (1)...(19): siRNA sense strand
ugaugaagguacaaauaca

SEQ ID NO: 483797 - RNA, 19 nt, Homo sapiens
  misc_RNA (1)...(19): siRNA sense strand
cacgaaaguuugcgcaaca

SEQ ID NO: 483798 - RNA, 19 nt, Homo sapiens
  misc_RNA (1)...(19): siRNA sense strand
caaguaauaguguaucuac

SEQ ID NO: 483799 - RNA, 19 nt, Homo sapiens
  misc_RNA (1)...(19): siRNA sense strand
acuuggaacuuaaagaaga

SEQ ID NO: 483800 - RNA, 19 nt, Homo sapiens
  misc_RNA (1)...(19): siRNA sense strand
gagguagaucagaugaaua

SEQ ID NO: 483801 - RNA, 19 nt, Homo sapiens
  misc_RNA (1)...(19): siRNA sense strand
agguagaucagaugaauaa

SEQ ID NO: 483802 - RNA, 19 nt, Homo sapiens
  misc_RNA (1)...(19): siRNA sense strand
uuaaagaagaccaaagaug

SEQ ID NO: 483803 - RNA, 19 nt, Homo sapiens
  misc_RNA (1)...(19): siRNA sense strand
gguauuccaccugcucaua

SEQ ID NO: 483804 - RNA, 19 nt, Homo sapiens
  misc_RNA (1)...(19): siRNA sense strand
cccguaaacuucauaacau

SEQ ID NO: 483805 - RNA, 19 nt, Homo sapiens
  misc_RNA (1)...(19): siRNA sense strand
ugaaacgccacuuuauguu

SEQ ID NO: 483806 - RNA, 19 nt, Homo sapiens
  misc_RNA (1)...(19): siRNA sense strand
cagauucagcaaccucuaa

SEQ ID NO: 483807 - RNA, 19 nt, Homo sapiens
  misc_RNA (1)...(19): siRNA sense strand
uaaugagguuuacuaugca

SEQ ID NO: 483808 - RNA, 19 nt, Homo sapiens
  misc_RNA (1)...(19): siRNA sense strand
gcauauuaaugagguuuac

SEQ ID NO: 483809 - RNA, 19 nt, Homo sapiens
  misc_RNA (1)...(19): siRNA sense strand
caagaaaacagcugaugaa

SEQ ID NO: 483810 - RNA, 19 nt, Homo sapiens
  misc_RNA (1)...(19): siRNA sense strand
ggaacccguaaacuucaua

SEQ ID NO: 483811 - RNA, 19 nt, Homo sapiens
  misc_RNA (1)...(19): siRNA sense strand
gaguacaaaccaccaggaa

SEQ ID NO: 483812 - RNA, 19 nt, Homo sapiens
  misc_RNA (1)...(19): siRNA sense strand
aaagaagaccaaagaugga

SEQ ID NO: 483813 - RNA, 19 nt, Homo sapiens
  misc_RNA (1)...(19): siRNA sense strand
uuugagaaguugccagaug

SEQ ID NO: 483814 - RNA, 19 nt, Homo sapiens
  misc_RNA (1)...(19): siRNA sense strand
uauuccaccugcucauauu

SEQ ID NO: 483815 - RNA, 19 nt, Homo sapiens
  misc_RNA (1)...(19): siRNA sense strand
ugaaaugcacacuggagaa

SEQ ID NO: 483816 - RNA, 19 nt, Homo sapiens
  misc_RNA (1)...(19): siRNA sense strand
cagaggugcuacugggaau

SEQ ID NO: 483817 - RNA, 19 nt, Homo sapiens
  misc_RNA (1)...(19): siRNA sense strand
ucagcaaccucuaacuaac

SEQ ID NO: 483818 - RNA, 19 nt, Homo sapiens
  misc_RNA (1)...(19): siRNA sense strand
uaguggaaguucuggguau

SEQ ID NO: 483819 - RNA, 19 nt, Homo sapiens
  misc_RNA (1)...(19): siRNA sense strand
gaaaugcacacuggagaac

SEQ ID NO: 483820 - RNA, 19 nt, Homo sapiens
  misc_RNA (1)...(19): siRNA sense strand
guauuccaccugcucauau

SEQ ID NO: 483821 - RNA, 19 nt, Homo sapiens
  misc_RNA (1)...(19): siRNA sense strand
caugcaaaccuucaucugu

SEQ ID NO: 483822 - RNA, 19 nt, Homo sapiens
  misc_RNA (1)...(19): siRNA sense strand
cggaagguuuacaaugaug

SEQ ID NO: 483823 - RNA, 19 nt, Homo sapiens
  misc_RNA (1)...(19): siRNA sense strand
uugaaacgccacuuuaugu

SEQ ID NO: 483824 - RNA, 19 nt, Homo sapiens
  misc_RNA (1)...(19): siRNA sense strand
uacugggaaugccuuauga

SEQ ID NO: 483825 - RNA, 19 nt, Homo sapiens
  misc_RNA (1)...(19): siRNA sense strand
aaacgcagugcaaucaaga

SEQ ID NO: 483826 - RNA, 19 nt, Homo sapiens
  misc_RNA (1)...(19): siRNA sense strand
gccacuuuauguuucgaaa

SEQ ID NO: 483827 - RNA, 19 nt, Homo sapiens
  misc_RNA (1)...(19): siRNA sense strand
cuuugaaccuaacacgaaa

SEQ ID NO: 483828 - RNA, 19 nt, Homo sapiens
  misc_RNA (1)...(19): siRNA sense strand
ggcaccaccuccaguacau

SEQ ID NO: 483829 - RNA, 19 nt, Homo sapiens
  misc_RNA (1)...(19): siRNA sense strand
guucaguggugccaaugag

SEQ ID NO: 483830 - RNA, 19 nt, Homo sapiens
  misc_RNA (1)...(19): siRNA sense strand
auaguugacuuuggcaguu

SEQ ID NO: 483831 - RNA, 19 nt, Homo sapiens
  misc_RNA (1)...(19): siRNA sense strand
uccagaacuuaguaucauu

SEQ ID NO: 483832 - RNA, 19 nt, Homo sapiens
  misc_RNA (1)...(19): siRNA sense strand
aaaguuugcgcaacagaug

SEQ ID NO: 483833 - RNA, 19 nt, Homo sapiens
  misc_RNA (1)...(19): siRNA sense strand
ugaaucaagcacagauaga

SEQ ID NO: 483834 - RNA, 19 nt, Homo sapiens
  misc_RNA (1)...(19): siRNA sense strand
ccagauggcacuuggaacu

SEQ ID NO: 483835 - RNA, 19 nt, Homo sapiens
  misc_RNA (1)...(19): siRNA sense strand
gaccuugccauugauaugu

SEQ ID NO: 483836 - RNA, 19 nt, Homo sapiens
  misc_RNA (1)...(19): siRNA sense strand
ccagaacuuaguaucauuc

SEQ ID NO: 483837 - RNA, 19 nt, Homo sapiens
  misc_RNA (1)...(19): siRNA sense strand
cuacugggaaugccuuaug

SEQ ID NO: 483838 - RNA, 19 nt, Homo sapiens
  misc_RNA (1)...(19): siRNA sense strand
caagcauauuaaugagguu

SEQ ID NO: 483839 - RNA, 19 nt, Homo sapiens
  misc_RNA (1)...(19): siRNA sense strand
gaucaaaacauacaagcau

SEQ ID NO: 483840 - RNA, 19 nt, Homo sapiens
  misc_RNA (1)...(19): siRNA sense strand
gaagaccaaagauggaaaa

SEQ ID NO: 483841 - RNA, 19 nt, Homo sapiens
  misc_RNA (1)...(19): siRNA sense strand
gcgacuccagaacuuagua

SEQ ID NO: 483842 - RNA, 19 nt, Homo sapiens
  misc_RNA (1)...(19): siRNA sense strand
ccccaaaacucgaauucaa

SEQ ID NO: 483843 - RNA, 19 nt, Homo sapiens
  misc_RNA (1)...(19): siRNA sense strand
uuaaggaugcuugauuaug

SEQ ID NO: 483844 - RNA, 19 nt, Homo sapiens
  misc_RNA (1)...(19): siRNA sense strand
caccugcucauauucuuga

SEQ ID NO: 483845 - RNA, 19 nt, Homo sapiens
  misc_RNA (1)...(19): siRNA sense strand
gaagcgaagacaccaacag

SEQ ID NO: 483846 - RNA, 19 nt, Homo sapiens
  misc_RNA (1)...(19): siRNA sense strand
acgcagugcaaucaagaua

SEQ ID NO: 483847 - RNA, 19 nt, Homo sapiens
  misc_RNA (1)...(19): siRNA sense strand
ucuuugaaccuaacacgaa

SEQ ID NO: 483848 - RNA, 19 nt, Homo sapiens
  misc_RNA (1)...(19): siRNA sense strand
caggaacccguaaacuuca

SEQ ID NO: 483849 - RNA, 19 nt, Homo sapiens
  misc_RNA (1)...(19): siRNA sense strand
acuuaaagaagaccaaaga

SEQ ID NO: 483850 - RNA, 19 nt, Homo sapiens
  misc_RNA (1)...(19): siRNA sense strand
uucagcaaccucuaacuaa

SEQ ID NO: 483851 - RNA, 19 nt, Homo sapiens
  misc_RNA (1)...(19): siRNA sense strand
caaugagguagaucagaug

SEQ ID NO: 483852 - RNA, 19 nt, Homo sapiens
  misc_RNA (1)...(19): siRNA sense strand
ggaacuuaaagaagaccaa

SEQ ID NO: 483853 - RNA, 19 nt, Homo sapiens
  misc_RNA (1)...(19): siRNA sense strand
ugaccuugccauugauaug

SEQ ID NO: 483854 - RNA, 19 nt, Homo sapiens
  misc_RNA (1)...(19): siRNA sense strand
gcaugcaaaccuucaucug

SEQ ID NO: 483855 - RNA, 19 nt, Homo sapiens
  misc_RNA (1)...(19): siRNA sense strand
gaagaaggguuuaaaggua

SEQ ID NO: 483856 - RNA, 19 nt, Homo sapiens
  misc_RNA (1)...(19): siRNA sense strand
gcaggaugcucaagaauuu

SEQ ID NO: 483857 - RNA, 19 nt, Homo sapiens
  misc_RNA (1)...(19): siRNA sense strand
ggaagaagcuaaaccagau

SEQ ID NO: 483858 - RNA, 19 nt, Homo sapiens
  misc_RNA (1)...(19): siRNA sense strand
agacuucucucccaaauuu

SEQ ID NO: 483859 - RNA, 19 nt, Homo sapiens
  misc_RNA (1)...(19): siRNA sense strand
gaagauacuuugucuaaac

SEQ ID NO: 483860 - RNA, 19 nt, Homo sapiens
  misc_RNA (1)...(19): siRNA sense strand
gaugaacgguagcaccuua

SEQ ID NO: 483861 - RNA, 19 nt, Homo sapiens
  misc_RNA (1)...(19): siRNA sense strand
uaaggaauguguaguagaa

SEQ ID NO: 483862 - RNA, 19 nt, Homo sapiens
  misc_RNA (1)...(19): siRNA sense strand
caaauuuguuccaggauaa

SEQ ID NO: 483863 - RNA, 19 nt, Homo sapiens
  misc_RNA (1)...(19): siRNA sense strand
ggaagaaaaugaagccuua

SEQ ID NO: 483864 - RNA, 19 nt, Homo sapiens
  misc_RNA (1)...(19): siRNA sense strand
gaacaaagcaacggaaaga

SEQ ID NO: 483865 - RNA, 19 nt, Homo sapiens
  misc_RNA (1)...(19): siRNA sense strand
gggaagaaauuacaacuag

SEQ ID NO: 483866 - RNA, 19 nt, Homo sapiens
  misc_RNA (1)...(19): siRNA sense strand
ugaagaggauaucugaaua

SEQ ID NO: 483867 - RNA, 19 nt, Homo sapiens
  misc_RNA (1)...(19): siRNA sense strand
gaaauuacaacuagggauu

SEQ ID NO: 483868 - RNA, 19 nt, Homo sapiens
  misc_RNA (1)...(19): siRNA sense strand
caacacauuucuucaagug

SEQ ID NO: 483869 - RNA, 19 nt, Homo sapiens
  misc_RNA (1)...(19): siRNA sense strand
ccaaauuuguuccaggaua

SEQ ID NO: 483870 - RNA, 19 nt, Homo sapiens
  misc_RNA (1)...(19): siRNA sense strand
gcaagauggugaugcagaa

SEQ ID NO: 483871 - RNA, 19 nt, Homo sapiens
  misc_RNA (1)...(19): siRNA sense strand
gagcugagcccuaugaguu

SEQ ID NO: 483872 - RNA, 19 nt, Homo sapiens
  misc_RNA (1)...(19): siRNA sense strand
gaggagugguguauugaaa

SEQ ID NO: 483873 - RNA, 19 nt, Homo sapiens
  misc_RNA (1)...(19): siRNA sense strand
gauguaaacccuucagaaa

SEQ ID NO: 483874 - RNA, 19 nt, Homo sapiens
  misc_RNA (1)...(19): siRNA sense strand
agacgaaacugcaaaggaa

SEQ ID NO: 483875 - RNA, 19 nt, Homo sapiens
  misc_RNA (1)...(19): siRNA sense strand
uaaagaggcuuggagcaaa

SEQ ID NO: 483876 - RNA, 19 nt, Homo sapiens
  misc_RNA (1)...(19): siRNA sense strand
gaaggcugaugaaccaauu

SEQ ID NO: 483877 - RNA, 19 nt, Homo sapiens
  misc_RNA (1)...(19): siRNA sense strand
gcaaaggaaauccgaauug

SEQ ID NO: 483878 - RNA, 19 nt, Homo sapiens
  misc_RNA (1)...(19): siRNA sense strand
ggugaaugguauaaguuua

SEQ ID NO: 483879 - RNA, 19 nt, Homo sapiens
  misc_RNA (1)...(19): siRNA sense strand
gguagcaccuuaaauaaag

SEQ ID NO: 483880 - RNA, 19 nt, Homo sapiens
  misc_RNA (1)...(19): siRNA sense strand
guagaacguugucgcauau

SEQ ID NO: 483881 - RNA, 19 nt, Homo sapiens
  misc_RNA (1)...(19): siRNA sense strand
ggaagauacuuugucuaaa

SEQ ID NO: 483882 - RNA, 19 nt, Homo sapiens
  misc_RNA (1)...(19): siRNA sense strand
gaacagugcucuuuugugu

SEQ ID NO: 483883 - RNA, 19 nt, Homo sapiens
  misc_RNA (1)...(19): siRNA sense strand
ugaggaagaucuagcagaa

SEQ ID NO: 483884 - RNA, 19 nt, Homo sapiens
  misc_RNA (1)...(19): siRNA sense strand
gaagaguggcggaaauuug

SEQ ID NO: 483885 - RNA, 19 nt, Homo sapiens
  misc_RNA (1)...(19): siRNA sense strand
ggacaaggaagaagcuaaa

SEQ ID NO: 483886 - RNA, 19 nt, Homo sapiens
  misc_RNA (1)...(19): siRNA sense strand
ggagugguguauugaaaug

SEQ ID NO: 483887 - RNA, 19 nt, Homo sapiens
  misc_RNA (1)...(19): siRNA sense strand
uccaaaggcuccugaguuu

SEQ ID NO: 483888 - RNA, 19 nt, Homo sapiens
  misc_RNA (1)...(19): siRNA sense strand
gaaggcuuguuucuaaaga

SEQ ID NO: 483889 - RNA, 19 nt, Homo sapiens
  misc_RNA (1)...(19): siRNA sense strand
guacuuguuugccuuguug

SEQ ID NO: 483890 - RNA, 19 nt, Homo sapiens
  misc_RNA (1)...(19): siRNA sense strand
uuaaggagcuguaccaaag

SEQ ID NO: 483891 - RNA, 19 nt, Homo sapiens
  misc_RNA (1)...(19): siRNA sense strand
caaacagaaugcaacaaga

SEQ ID NO: 483892 - RNA, 19 nt, Homo sapiens
  misc_RNA (1)...(19): siRNA sense strand
cgagaacugucaaagcaaa

SEQ ID NO: 483893 - RNA, 19 nt, Homo sapiens
  misc_RNA (1)...(19): siRNA sense strand
gaagaaccaacuaaaugaa

SEQ ID NO: 483894 - RNA, 19 nt, Homo sapiens
  misc_RNA (1)...(19): siRNA sense strand
cuaccaaaccuauugauaa

SEQ ID NO: 483895 - RNA, 19 nt, Homo sapiens
  misc_RNA (1)...(19): siRNA sense strand
cacaaacaguuaacagauu

SEQ ID NO: 483896 - RNA, 19 nt, Homo sapiens
  misc_RNA (1)...(19): siRNA sense strand
ggaaagauuuuaagugaug

SEQ ID NO: 483897 - RNA, 19 nt, Homo sapiens
  misc_RNA (1)...(19): siRNA sense strand
caucgugucucaguucuuu

SEQ ID NO: 483898 - RNA, 19 nt, Homo sapiens
  misc_RNA (1)...(19): siRNA sense strand
caaagcaacggaaagauga

SEQ ID NO: 483899 - RNA, 19 nt, Homo sapiens
  misc_RNA (1)...(19): siRNA sense strand
cuacaucgcccacgugaaa

SEQ ID NO: 483900 - RNA, 19 nt, Homo sapiens
  misc_RNA (1)...(19): siRNA sense strand
gcacucuacuuauguccaa

SEQ ID NO: 483901 - RNA, 19 nt, Homo sapiens
  misc_RNA (1)...(19): siRNA sense strand
gaauugaagugggagaugu

SEQ ID NO: 483902 - RNA, 19 nt, Homo sapiens
  misc_RNA (1)...(19): siRNA sense strand
acucugaacuugcagcuaa

SEQ ID NO: 483903 - RNA, 19 nt, Homo sapiens
  misc_RNA (1)...(19): siRNA sense strand
acaaacaguuaacagauug

SEQ ID NO: 483904 - RNA, 19 nt, Homo sapiens
  misc_RNA (1)...(19): siRNA sense strand
uggagaauaugccuaugua

SEQ ID NO: 483905 - RNA, 19 nt, Homo sapiens
  misc_RNA (1)...(19): siRNA sense strand
guaauaggcgauacauuga

SEQ ID NO: 483906 - RNA, 19 nt, Homo sapiens
  misc_RNA (1)...(19): siRNA sense strand
agagggaccugcgugaaua

SEQ ID NO: 483907 - RNA, 19 nt, Homo sapiens
  misc_RNA (1)...(19): siRNA sense strand
guagaagaguggcggaaau

SEQ ID NO: 483908 - RNA, 19 nt, Homo sapiens
  misc_RNA (1)...(19): siRNA sense strand
gaaaaugaagccuuacaua

SEQ ID NO: 483909 - RNA, 19 nt, Homo sapiens
  misc_RNA (1)...(19): siRNA sense strand
gaauaugccuauguaacug

SEQ ID NO: 483910 - RNA, 19 nt, Homo sapiens
  misc_RNA (1)...(19): siRNA sense strand
uuagaaagccuacaagaug

SEQ ID NO: 483911 - RNA, 19 nt, Homo sapiens
  misc_RNA (1)...(19): siRNA sense strand
ugaagaaccaacuaaauga

SEQ ID NO: 483912 - RNA, 19 nt, Homo sapiens
  misc_RNA (1)...(19): siRNA sense strand
ugaaagcccuguguaagga

SEQ ID NO: 483913 - RNA, 19 nt, Homo sapiens
  misc_RNA (1)...(19): siRNA sense strand
ggaggagguccaagacuaa

SEQ ID NO: 483914 - RNA, 19 nt, Homo sapiens
  misc_RNA (1)...(19): siRNA sense strand
cuccugaguuuccaaguua

SEQ ID NO: 483915 - RNA, 19 nt, Homo sapiens
  misc_RNA (1)...(19): siRNA sense strand
uaaagguacuggucuucuu

SEQ ID NO: 483916 - RNA, 19 nt, Homo sapiens
  misc_RNA (1)...(19): siRNA sense strand
uguaaacccuucagaaaca

SEQ ID NO: 483917 - RNA, 19 nt, Homo sapiens
  misc_RNA (1)...(19): siRNA sense strand
uggaagauacuuugucuaa

SEQ ID NO: 483918 - RNA, 19 nt, Homo sapiens
  misc_RNA (1)...(19): siRNA sense strand
guaagcaaaguguggauaa

SEQ ID NO: 483919 - RNA, 19 nt, Homo sapiens
  misc_RNA (1)...(19): siRNA sense strand
ggaacucauugcucucgaa

SEQ ID NO: 483920 - RNA, 19 nt, Homo sapiens
  misc_RNA (1)...(19): siRNA sense strand
gcaaacagaaugcaacaag

SEQ ID NO: 483921 - RNA, 19 nt, Homo sapiens
  misc_RNA (1)...(19): siRNA sense strand
gugagcaucuccaguacuu

SEQ ID NO: 483922 - RNA, 19 nt, Homo sapiens
  misc_RNA (1)...(19): siRNA sense strand
gucaauugauggaaagauu

SEQ ID NO: 483923 - RNA, 19 nt, Homo sapiens
  misc_RNA (1)...(19): siRNA sense strand
gagaaggcuuauuguguca

SEQ ID NO: 483924 - RNA, 19 nt, Homo sapiens
  misc_RNA (1)...(19): siRNA sense strand
gcauauugcgucugaagaa

SEQ ID NO: 483925 - RNA, 19 nt, Homo sapiens
  misc_RNA (1)...(19): siRNA sense strand
ggagcuguaccaaagguua

SEQ ID NO: 483926 - RNA, 19 nt, Homo sapiens
  misc_RNA (1)...(19): siRNA sense strand
ccgaauugcuugguuggua

SEQ ID NO: 483927 - RNA, 19 nt, Homo sapiens
  misc_RNA (1)...(19): siRNA sense strand
aaacagaggaggacaagga

SEQ ID NO: 483928 - RNA, 19 nt, Homo sapiens
  misc_RNA (1)...(19): siRNA sense strand
gaaugugaguaguucugaa

SEQ ID NO: 483929 - RNA, 19 nt, Homo sapiens
  misc_RNA (1)...(19): siRNA sense strand
gaaaagaagaggaggaauu

SEQ ID NO: 483930 - RNA, 19 nt, Homo sapiens
  misc_RNA (1)...(19): siRNA sense strand
uuaauaaucugcugaaagc

SEQ ID NO: 483931 - RNA, 19 nt, Homo sapiens
  misc_RNA (1)...(19): siRNA sense strand
gguccaagacuaacuguga

SEQ ID NO: 483932 - RNA, 19 nt, Homo sapiens
  misc_RNA (1)...(19): siRNA sense strand
gcaaacuggacauaagaaa

SEQ ID NO: 483933 - RNA, 19 nt, Homo sapiens
  misc_RNA (1)...(19): siRNA sense strand
ccaaggccacaaacaguua

SEQ ID NO: 483934 - RNA, 19 nt, Homo sapiens
  misc_RNA (1)...(19): siRNA sense strand
ggcaggcacucuacuuaug

SEQ ID NO: 483935 - RNA, 19 nt, Homo sapiens
  misc_RNA (1)...(19): siRNA sense strand
gcggaaauuuguuagaaag

SEQ ID NO: 483936 - RNA, 19 nt, Homo sapiens
  misc_RNA (1)...(19): siRNA sense strand
uaagcaaaguguggauaaa

SEQ ID NO: 483937 - RNA, 19 nt, Homo sapiens
  misc_RNA (1)...(19): siRNA sense strand
gcuaaugcguuuugucuuu

SEQ ID NO: 483938 - RNA, 19 nt, Homo sapiens
  misc_RNA (1)...(19): siRNA sense strand
ggcagagagucuaagcuuu

SEQ ID NO: 483939 - RNA, 19 nt, Homo sapiens
  misc_RNA (1)...(19): siRNA sense strand
ccagaugugcgcaauauug

SEQ ID NO: 483940 - RNA, 19 nt, Homo sapiens
  misc_RNA (1)...(19): siRNA sense strand
gagacggcauccaagaaga

SEQ ID NO: 483941 - RNA, 19 nt, Homo sapiens
  misc_RNA (1)...(19): siRNA sense strand
ggcggaaauuuguuagaaa

SEQ ID NO: 483942 - RNA, 19 nt, Homo sapiens
  misc_RNA (1)...(19): siRNA sense strand
gcuccugaguuuccaaguu

SEQ ID NO: 483943 - RNA, 19 nt, Homo sapiens
  misc_RNA (1)...(19): siRNA sense strand
aguagaacguugucgcaua

SEQ ID NO: 483944 - RNA, 19 nt, Homo sapiens
  misc_RNA (1)...(19): siRNA sense strand
gaaugcaacaagaaagauu

SEQ ID NO: 483945 - RNA, 19 nt, Homo sapiens
  misc_RNA (1)...(19): siRNA sense strand
aaacagaaugcaacaagaa

SEQ ID NO: 483946 - RNA, 19 nt, Homo sapiens
  misc_RNA (1)...(19): siRNA sense strand
guauugaaauggcugagau

SEQ ID NO: 483947 - RNA, 19 nt, Homo sapiens
  misc_RNA (1)...(19): siRNA sense strand
acuuauagcucucauaugg

SEQ ID NO: 483948 - RNA, 19 nt, Homo sapiens
  misc_RNA (1)...(19): siRNA sense strand
ccagcuagcucuugaacag

SEQ ID NO: 483949 - RNA, 19 nt, Homo sapiens
  misc_RNA (1)...(19): siRNA sense strand
gaguuugucucucuggaau

SEQ ID NO: 483950 - RNA, 19 nt, Homo sapiens
  misc_RNA (1)...(19): siRNA sense strand
gcagagaaggcuuauugug

SEQ ID NO: 483951 - RNA, 19 nt, Homo sapiens
  misc_RNA (1)...(19): siRNA sense strand
ggauacggauguccucuac

SEQ ID NO: 483952 - RNA, 19 nt, Homo sapiens
  misc_RNA (1)...(19): siRNA sense strand
cauggugaguuaugcauau

SEQ ID NO: 483953 - RNA, 19 nt, Homo sapiens
  misc_RNA (1)...(19): siRNA sense strand
aagaagaggaggaauuaaa

SEQ ID NO: 483954 - RNA, 19 nt, Homo sapiens
  misc_RNA (1)...(19): siRNA sense strand
gaauaugcagcugacauuu

SEQ ID NO: 483955 - RNA, 19 nt, Homo sapiens
  misc_RNA (1)...(19): siRNA sense strand
gaucaacuauuucuucaga

SEQ ID NO: 483956 - RNA, 19 nt, Homo sapiens
  misc_RNA (1)...(19): siRNA sense strand
gaaguggacaauauaagua

SEQ ID NO: 483957 - RNA, 19 nt, Homo sapiens
  misc_RNA (1)...(19): siRNA sense strand
gaacauggcuacgccucuu

SEQ ID NO: 483958 - RNA, 19 nt, Homo sapiens
  misc_RNA (1)...(19): siRNA sense strand
ugaagaagcugaaagaaaa

SEQ ID NO: 483959 - RNA, 19 nt, Homo sapiens
  misc_RNA (1)...(19): siRNA sense strand
gcacacaacacuugguuug

SEQ ID NO: 483960 - RNA, 19 nt, Homo sapiens
  misc_RNA (1)...(19): siRNA sense strand
ggagaaguggacaauauaa

SEQ ID NO: 483961 - RNA, 19 nt, Homo sapiens
  misc_RNA (1)...(19): siRNA sense strand
ccaaagcacacaucaagaa

SEQ ID NO: 483962 - RNA, 19 nt, Homo sapiens
  misc_RNA (1)...(19): siRNA sense strand
ggaacgagaacagagauuu

SEQ ID NO: 483963 - RNA, 19 nt, Homo sapiens
  misc_RNA (1)...(19): siRNA sense strand
gagcucaucugcgccuuug

SEQ ID NO: 483964 - RNA, 19 nt, Homo sapiens
  misc_RNA (1)...(19): siRNA sense strand
caccagcacugccaacaga

SEQ ID NO: 483965 - RNA, 19 nt, Homo sapiens
  misc_RNA (1)...(19): siRNA sense strand
caaagcacacaucaagaaa

SEQ ID NO: 483966 - RNA, 19 nt, Homo sapiens
  misc_RNA (1)...(19): siRNA sense strand
ggagauggaacgaauacga

SEQ ID NO: 483967 - RNA, 19 nt, Homo sapiens
  misc_RNA (1)...(19): siRNA sense strand
gagauggaacgaauacgaa

SEQ ID NO: 483968 - RNA, 19 nt, Homo sapiens
  misc_RNA (1)...(19): siRNA sense strand
agcaccagcucgagaauuu

SEQ ID NO: 483969 - RNA, 19 nt, Homo sapiens
  misc_RNA (1)...(19): siRNA sense strand
ugaaguggauguugaaagc

SEQ ID NO: 483970 - RNA, 19 nt, Homo sapiens
  misc_RNA (1)...(19): siRNA sense strand
caucugcgccuuuguuuag

SEQ ID NO: 483971 - RNA, 19 nt, Homo sapiens
  misc_RNA (1)...(19): siRNA sense strand
ucaacuauuucuucagauc

SEQ ID NO: 483972 - RNA, 19 nt, Homo sapiens
  misc_RNA (1)...(19): siRNA sense strand
agauugaaguggauguuga

SEQ ID NO: 483973 - RNA, 19 nt, Homo sapiens
  misc_RNA (1)...(19): siRNA sense strand
auggagaaguggacaauau

SEQ ID NO: 483974 - RNA, 19 nt, Homo sapiens
  misc_RNA (1)...(19): siRNA sense strand
acacuugguuugcucaaca

SEQ ID NO: 483975 - RNA, 19 nt, Homo sapiens
  misc_RNA (1)...(19): siRNA sense strand
gaacgagaacagagauuuu

SEQ ID NO: 483976 - RNA, 19 nt, Homo sapiens
  misc_RNA (1)...(19): siRNA sense strand
gaaacuugaagaagcugaa

SEQ ID NO: 483977 - RNA, 19 nt, Homo sapiens
  misc_RNA (1)...(19): siRNA sense strand
gcucaucugcgccuuuguu

SEQ ID NO: 483978 - RNA, 19 nt, Homo sapiens
  misc_RNA (1)...(19): siRNA sense strand
uggagaaguggacaauaua

SEQ ID NO: 483979 - RNA, 19 nt, Homo sapiens
  misc_RNA (1)...(19): siRNA sense strand
uugaagaagcugaaagaaa

SEQ ID NO: 483980 - RNA, 19 nt, Homo sapiens
  misc_RNA (1)...(19): siRNA sense strand
aagcacacaucaagaaacu

SEQ ID NO: 483981 - RNA, 19 nt, Homo sapiens
  misc_RNA (1)...(19): siRNA sense strand
gcucgagaauuuggaacga

SEQ ID NO: 483982 - RNA, 19 nt, Homo sapiens
  misc_RNA (1)...(19): siRNA sense strand
gucaaacuuucauucacuu

SEQ ID NO: 483983 - RNA, 19 nt, Homo sapiens
  misc_RNA (1)...(19): siRNA sense strand
gagaaguggacaauauaag

SEQ ID NO: 483984 - RNA, 19 nt, Homo sapiens
  misc_RNA (1)...(19): siRNA sense strand
uggaucaacuauuucuuca

SEQ ID NO: 483985 - RNA, 19 nt, Homo sapiens
  misc_RNA (1)...(19): siRNA sense strand
uaaaguggcgacuggaaca

SEQ ID NO: 483986 - RNA, 19 nt, Homo sapiens
  misc_RNA (1)...(19): siRNA sense strand
gauugaaguggauguugaa

SEQ ID NO: 483987 - RNA, 19 nt, Homo sapiens
  misc_RNA (1)...(19): siRNA sense strand
gagauugaaguggauguug

SEQ ID NO: 483988 - RNA, 19 nt, Homo sapiens
  misc_RNA (1)...(19): siRNA sense strand
ugucaaacuuucauucacu

SEQ ID NO: 483989 - RNA, 19 nt, Homo sapiens
  misc_RNA (1)...(19): siRNA sense strand
uggcuacgccucuucauuc

SEQ ID NO: 483990 - RNA, 19 nt, Homo sapiens
  misc_RNA (1)...(19): siRNA sense strand
gaauuuggaacgagaacag

SEQ ID NO: 483991 - RNA, 19 nt, Homo sapiens
  misc_RNA (1)...(19): siRNA sense strand
guaccaccagcaucaguga

SEQ ID NO: 483992 - RNA, 19 nt, Homo sapiens
  misc_RNA (1)...(19): siRNA sense strand
agaaguggacaauauaagu

SEQ ID NO: 483993 - RNA, 19 nt, Homo sapiens
  misc_RNA (1)...(19): siRNA sense strand
ggagauugaaguggauguu

SEQ ID NO: 483994 - RNA, 19 nt, Homo sapiens
  misc_RNA (1)...(19): siRNA sense strand
gauggaacgaauacgaaug

SEQ ID NO: 483995 - RNA, 19 nt, Homo sapiens
  misc_RNA (1)...(19): siRNA sense strand
auaaguaccaccagcauca

SEQ ID NO: 483996 - RNA, 19 nt, Homo sapiens
  misc_RNA (1)...(19): siRNA sense strand
cucaggagauggaacgaau

SEQ ID NO: 483997 - RNA, 19 nt, Homo sapiens
  misc_RNA (1)...(19): siRNA sense strand
caaacuuucauucacuuca

SEQ ID NO: 483998 - RNA, 19 nt, Homo sapiens
  misc_RNA (1)...(19): siRNA sense strand
acacaacacuugguuugcu

SEQ ID NO: 483999 - RNA, 19 nt, Homo sapiens
  misc_RNA (1)...(19): siRNA sense strand
gugccagugucaaacuuuc

SEQ ID NO: 484000 - RNA, 19 nt, Homo sapiens
  misc_RNA (1)...(19): siRNA sense strand
ucaggagauggaacgaaua

SEQ ID NO: 484001 - RNA, 19 nt, Homo sapiens
  misc_RNA (1)...(19): siRNA sense strand
gcucaacaaagccaaagca

SEQ ID NO: 484002 - RNA, 19 nt, Homo sapiens
  misc_RNA (1)...(19): siRNA sense strand
gccaaagcacacaucaaga

SEQ ID NO: 484003 - RNA, 19 nt, Homo sapiens
  misc_RNA (1)...(19): siRNA sense strand
ucaucugcgccuuuguuua

SEQ ID NO: 484004 - RNA, 19 nt, Homo sapiens
  misc_RNA (1)...(19): siRNA sense strand
gcgagaggagauugaagug

SEQ ID NO: 484005 - RNA, 19 nt, Homo sapiens
  misc_RNA (1)...(19): siRNA sense strand
gcaccagcucgagaauuug

SEQ ID NO: 484006 - RNA, 19 nt, Homo sapiens
  misc_RNA (1)...(19): siRNA sense strand
gaucaacuauuucuucaga

SEQ ID NO: 484007 - RNA, 19 nt, Homo sapiens
  misc_RNA (1)...(19): siRNA sense strand
gaaguggacaauauaagua

SEQ ID NO: 484008 - RNA, 19 nt, Homo sapiens
  misc_RNA (1)...(19): siRNA sense strand
ugaagaagcugaaagaaaa

SEQ ID NO: 484009 - RNA, 19 nt, Homo sapiens
  misc_RNA (1)...(19): siRNA sense strand
gcacacaacacuugguuug

SEQ ID NO: 484010 - RNA, 19 nt, Homo sapiens
  misc_RNA (1)...(19): siRNA sense strand
ggagaaguggacaauauaa

SEQ ID NO: 484011 - RNA, 19 nt, Homo sapiens
  misc_RNA (1)...(19): siRNA sense strand
ccaaagcacacaucaagaa

SEQ ID NO: 484012 - RNA, 19 nt, Homo sapiens
  misc_RNA (1)...(19): siRNA sense strand
ggaacgagaacagagauuu

SEQ ID NO: 484013 - RNA, 19 nt, Homo sapiens
  misc_RNA (1)...(19): siRNA sense strand
gagcucaucugcgccuuug

SEQ ID NO: 484014 - RNA, 19 nt, Homo sapiens
  misc_RNA (1)...(19): siRNA sense strand
caccagcacugccaacaga

SEQ ID NO: 484015 - RNA, 19 nt, Homo sapiens
  misc_RNA (1)...(19): siRNA sense strand
caaagcacacaucaagaaa

SEQ ID NO: 484016 - RNA, 19 nt, Homo sapiens
  misc_RNA (1)...(19): siRNA sense strand
ggagauggaacgaauacga

SEQ ID NO: 484017 - RNA, 19 nt, Homo sapiens
  misc_RNA (1)...(19): siRNA sense strand
gagauggaacgaauacgaa

SEQ ID NO: 484018 - RNA, 19 nt, Homo sapiens
  misc_RNA (1)...(19): siRNA sense strand
agcaccagcucgagaauuu

SEQ ID NO: 484019 - RNA, 19 nt, Homo sapiens
  misc_RNA (1)...(19): siRNA sense strand
ugaaguggauguugaaagc

SEQ ID NO: 484020 - RNA, 19 nt, Homo sapiens
  misc_RNA (1)...(19): siRNA sense strand
caucugcgccuuuguuuag

SEQ ID NO: 484021 - RNA, 19 nt, Homo sapiens
  misc_RNA (1)...(19): siRNA sense strand
ucaacuauuucuucagauc

SEQ ID NO: 484022 - RNA, 19 nt, Homo sapiens
  misc_RNA (1)...(19): siRNA sense strand
agauugaaguggauguuga

SEQ ID NO: 484023 - RNA, 19 nt, Homo sapiens
  misc_RNA (1)...(19): siRNA sense strand
auggagaaguggacaauau

SEQ ID NO: 484024 - RNA, 19 nt, Homo sapiens
  misc_RNA (1)...(19): siRNA sense strand
acacuugguuugcucaaca

SEQ ID NO: 484025 - RNA, 19 nt, Homo sapiens
  misc_RNA (1)...(19): siRNA sense strand
gcucaucugcgccuuuguu

SEQ ID NO: 484026 - RNA, 19 nt, Homo sapiens
  misc_RNA (1)...(19): siRNA sense strand
gaacgagaacagagauuuu

SEQ ID NO: 484027 - RNA, 19 nt, Homo sapiens
  misc_RNA (1)...(19): siRNA sense strand
gaaacuugaagaagcugaa

SEQ ID NO: 484028 - RNA, 19 nt, Homo sapiens
  misc_RNA (1)...(19): siRNA sense strand
uggagaaguggacaauaua

SEQ ID NO: 484029 - RNA, 19 nt, Homo sapiens
  misc_RNA (1)...(19): siRNA sense strand
uugaagaagcugaaagaaa

SEQ ID NO: 484030 - RNA, 19 nt, Homo sapiens
  misc_RNA (1)...(19): siRNA sense strand
aagcacacaucaagaaacu

SEQ ID NO: 484031 - RNA, 19 nt, Homo sapiens
  misc_RNA (1)...(19): siRNA sense strand
gcucgagaauuuggaacga

SEQ ID NO: 484032 - RNA, 19 nt, Homo sapiens
  misc_RNA (1)...(19): siRNA sense strand
gucaaacuuucauucacuu

SEQ ID NO: 484033 - RNA, 19 nt, Homo sapiens
  misc_RNA (1)...(19): siRNA sense strand
gagaaguggacaauauaag

SEQ ID NO: 484034 - RNA, 19 nt, Homo sapiens
  misc_RNA (1)...(19): siRNA sense strand
uggaucaacuauuucuuca

SEQ ID NO: 484035 - RNA, 19 nt, Homo sapiens
  misc_RNA (1)...(19): siRNA sense strand
uaaaguggcgacuggaaca

SEQ ID NO: 484036 - RNA, 19 nt, Homo sapiens
  misc_RNA (1)...(19): siRNA sense strand
gauugaaguggauguugaa

SEQ ID NO: 484037 - RNA, 19 nt, Homo sapiens
  misc_RNA (1)...(19): siRNA sense strand
gagauugaaguggauguug

SEQ ID NO: 484038 - RNA, 19 nt, Homo sapiens
  misc_RNA (1)...(19): siRNA sense strand
ugucaaacuuucauucacu

SEQ ID NO: 484039 - RNA, 19 nt, Homo sapiens
  misc_RNA (1)...(19): siRNA sense strand
gaauuuggaacgagaacag

SEQ ID NO: 484040 - RNA, 19 nt, Homo sapiens
  misc_RNA (1)...(19): siRNA sense strand
guaccaccagcaucaguga

SEQ ID NO: 484041 - RNA, 19 nt, Homo sapiens
  misc_RNA (1)...(19): siRNA sense strand
agaaguggacaauauaagu

SEQ ID NO: 484042 - RNA, 19 nt, Homo sapiens
  misc_RNA (1)...(19): siRNA sense strand
ggagauugaaguggauguu

SEQ ID NO: 484043 - RNA, 19 nt, Homo sapiens
  misc_RNA (1)...(19): siRNA sense strand
gauggaacgaauacgaaug

SEQ ID NO: 484044 - RNA, 19 nt, Homo sapiens
  misc_RNA (1)...(19): siRNA sense strand
auaaguaccaccagcauca

SEQ ID NO: 484045 - RNA, 19 nt, Homo sapiens
  misc_RNA (1)...(19): siRNA sense strand
cucaggagauggaacgaau

SEQ ID NO: 484046 - RNA, 19 nt, Homo sapiens
  misc_RNA (1)...(19): siRNA sense strand
caaacuuucauucacuuca

SEQ ID NO: 484047 - RNA, 19 nt, Homo sapiens
  misc_RNA (1)...(19): siRNA sense strand
acacaacacuugguuugcu

SEQ ID NO: 484048 - RNA, 19 nt, Homo sapiens
  misc_RNA (1)...(19): siRNA sense strand
gugccagugucaaacuuuc

SEQ ID NO: 484049 - RNA, 19 nt, Homo sapiens
  misc_RNA (1)...(19): siRNA sense strand
ucaggagauggaacgaaua

SEQ ID NO: 484050 - RNA, 19 nt, Homo sapiens
  misc_RNA (1)...(19): siRNA sense strand
gcucaacaaagccaaagca

SEQ ID NO: 484051 - RNA, 19 nt, Homo sapiens
  misc_RNA (1)...(19): siRNA sense strand
gccaaagcacacaucaaga

SEQ ID NO: 484052 - RNA, 19 nt, Homo sapiens
  misc_RNA (1)...(19): siRNA sense strand
gcaccagcucgagaauuug

SEQ ID NO: 484053 - RNA, 19 nt, Homo sapiens
  misc_RNA (1)...(19): siRNA sense strand
ucaucugcgccuuuguuua

SEQ ID NO: 484054 - RNA, 19 nt, Homo sapiens
  misc_RNA (1)...(19): siRNA sense strand
gcgagaggagauugaagug

SEQ ID NO: 484055 - RNA, 19 nt, Homo sapiens
  misc_RNA (1)...(19): siRNA sense strand
gaaaagggauuccaaauua

SEQ ID NO: 484056 - RNA, 19 nt, Homo sapiens
  misc_RNA (1)...(19): siRNA sense strand
gaagaugacuccaggauga

SEQ ID NO: 484057 - RNA, 19 nt, Homo sapiens
  misc_RNA (1)...(19): siRNA sense strand
ggaaagagcuagacaucaa

SEQ ID NO: 484058 - RNA, 19 nt, Homo sapiens
  misc_RNA (1)...(19): siRNA sense strand
gagaaagagucuaguuuaa

SEQ ID NO: 484059 - RNA, 19 nt, Homo sapiens
  misc_RNA (1)...(19): siRNA sense strand
gaacaugcaucuucauuag

SEQ ID NO: 484060 - RNA, 19 nt, Homo sapiens
  misc_RNA (1)...(19): siRNA sense strand
ggaaacagcuggaggagau

SEQ ID NO: 484061 - RNA, 19 nt, Homo sapiens
  misc_RNA (1)...(19): siRNA sense strand
acacagauguccuuucaua

SEQ ID NO: 484062 - RNA, 19 nt, Homo sapiens
  misc_RNA (1)...(19): siRNA sense strand
gaagagaucaaacaaauug

SEQ ID NO: 484063 - RNA, 19 nt, Homo sapiens
  misc_RNA (1)...(19): siRNA sense strand
ggaauugucugccuccaaa

SEQ ID NO: 484064 - RNA, 19 nt, Homo sapiens
  misc_RNA (1)...(19): siRNA sense strand
ugaaagaacugcagagaga

SEQ ID NO: 484065 - RNA, 19 nt, Homo sapiens
  misc_RNA (1)...(19): siRNA sense strand
ucaaggagguggagaauga

SEQ ID NO: 484066 - RNA, 19 nt, Homo sapiens
  misc_RNA (1)...(19): siRNA sense strand
uaagggaucuugaggauga

SEQ ID NO: 484067 - RNA, 19 nt, Homo sapiens
  misc_RNA (1)...(19): siRNA sense strand
acaaagaccugaaagagaa

SEQ ID NO: 484068 - RNA, 19 nt, Homo sapiens
  misc_RNA (1)...(19): siRNA sense strand
gaaauggagcugagaauug

SEQ ID NO: 484069 - RNA, 19 nt, Homo sapiens
  misc_RNA (1)...(19): siRNA sense strand
ggaaagacuagaagagaua

SEQ ID NO: 484070 - RNA, 19 nt, Homo sapiens
  misc_RNA (1)...(19): siRNA sense strand
caaauuggaagcacaguua

SEQ ID NO: 484071 - RNA, 19 nt, Homo sapiens
  misc_RNA (1)...(19): siRNA sense strand
gaaagaacagcgagaaaga

SEQ ID NO: 484072 - RNA, 19 nt, Homo sapiens
  misc_RNA (1)...(19): siRNA sense strand
ccacacagauguccuuuca

SEQ ID NO: 484073 - RNA, 19 nt, Homo sapiens
  misc_RNA (1)...(19): siRNA sense strand
uaaaacagcucgauaaaga

SEQ ID NO: 484074 - RNA, 19 nt, Homo sapiens
  misc_RNA (1)...(19): siRNA sense strand
gaucuuccaugaacaguau

SEQ ID NO: 484075 - RNA, 19 nt, Homo sapiens
  misc_RNA (1)...(19): siRNA sense strand
ggaacuggaugccaccaaa

SEQ ID NO: 484076 - RNA, 19 nt, Homo sapiens
  misc_RNA (1)...(19): siRNA sense strand
gaagaagagaucaaacaaa

SEQ ID NO: 484077 - RNA, 19 nt, Homo sapiens
  misc_RNA (1)...(19): siRNA sense strand
gaaagaggaauguagcaaa

SEQ ID NO: 484078 - RNA, 19 nt, Homo sapiens
  misc_RNA (1)...(19): siRNA sense strand
ugagaaagagucuaguuua

SEQ ID NO: 484079 - RNA, 19 nt, Homo sapiens
  misc_RNA (1)...(19): siRNA sense strand
gaugagauccagauguuaa

SEQ ID NO: 484080 - RNA, 19 nt, Homo sapiens
  misc_RNA (1)...(19): siRNA sense strand
gaacaaagaccugaaagag

SEQ ID NO: 484081 - RNA, 19 nt, Homo sapiens
  misc_RNA (1)...(19): siRNA sense strand
aagagaaggucaaugcuuu

SEQ ID NO: 484082 - RNA, 19 nt, Homo sapiens
  misc_RNA (1)...(19): siRNA sense strand
gaaauagccauugaacaaa

SEQ ID NO: 484083 - RNA, 19 nt, Homo sapiens
  misc_RNA (1)...(19): siRNA sense strand
caagaacaaucaccaaucu

SEQ ID NO: 484084 - RNA, 19 nt, Homo sapiens
  misc_RNA (1)...(19): siRNA sense strand
gcagauagaggaacugaug

SEQ ID NO: 484085 - RNA, 19 nt, Homo sapiens
  misc_RNA (1)...(19): siRNA sense strand
gagagagucuugaggaaag

SEQ ID NO: 484086 - RNA, 19 nt, Homo sapiens
  misc_RNA (1)...(19): siRNA sense strand
caagaacaacuuagggaua

SEQ ID NO: 484087 - RNA, 19 nt, Homo sapiens
  misc_RNA (1)...(19): siRNA sense strand
aaauggagcugagaauuga

SEQ ID NO: 484088 - RNA, 19 nt, Homo sapiens
  misc_RNA (1)...(19): siRNA sense strand
gaugaggguuucccaugaa

SEQ ID NO: 484089 - RNA, 19 nt, Homo sapiens
  misc_RNA (1)...(19): siRNA sense strand
gcagacaacuaugaugaug

SEQ ID NO: 484090 - RNA, 19 nt, Homo sapiens
  misc_RNA (1)...(19): siRNA sense strand
agaaauagccauugaacaa

SEQ ID NO: 484091 - RNA, 19 nt, Homo sapiens
  misc_RNA (1)...(19): siRNA sense strand
aagaacaacuuagggauaa

SEQ ID NO: 484092 - RNA, 19 nt, Homo sapiens
  misc_RNA (1)...(19): siRNA sense strand
ugaaauucgugacaugaaa

SEQ ID NO: 484093 - RNA, 19 nt, Homo sapiens
  misc_RNA (1)...(19): siRNA sense strand
cuugagauguugcaaagua

SEQ ID NO: 484094 - RNA, 19 nt, Homo sapiens
  misc_RNA (1)...(19): siRNA sense strand
gagaaggagagaauaauug

SEQ ID NO: 484095 - RNA, 19 nt, Homo sapiens
  misc_RNA (1)...(19): siRNA sense strand
gcagacggauuccaguaau

SEQ ID NO: 484096 - RNA, 19 nt, Homo sapiens
  misc_RNA (1)...(19): siRNA sense strand
gaacagcgagaaagagaug

SEQ ID NO: 484097 - RNA, 19 nt, Homo sapiens
  misc_RNA (1)...(19): siRNA sense strand
cgaaggcucuccagacugu

SEQ ID NO: 484098 - RNA, 19 nt, Homo sapiens
  misc_RNA (1)...(19): siRNA sense strand
uagaagagauagaauccuu

SEQ ID NO: 484099 - RNA, 19 nt, Homo sapiens
  misc_RNA (1)...(19): siRNA sense strand
aaaagucacuccaaguuua

SEQ ID NO: 484100 - RNA, 19 nt, Homo sapiens
  misc_RNA (1)...(19): siRNA sense strand
gaaggucaaugcuuuacag

SEQ ID NO: 484101 - RNA, 19 nt, Homo sapiens
  misc_RNA (1)...(19): siRNA sense strand
aaauugggaucuuccauga

SEQ ID NO: 484102 - RNA, 19 nt, Homo sapiens
  misc_RNA (1)...(19): siRNA sense strand
aaagaggaauguagcaaau

SEQ ID NO: 484103 - RNA, 19 nt, Homo sapiens
  misc_RNA (1)...(19): siRNA sense strand
gccaaggucuccucguuug

SEQ ID NO: 484104 - RNA, 19 nt, Homo sapiens
  misc_RNA (1)...(19): siRNA sense strand
gauaaagacaagcaacuga

SEQ ID NO: 484105 - RNA, 19 nt, Homo sapiens
  misc_RNA (1)...(19): siRNA sense strand
gaacuucuugccuuacaaa

SEQ ID NO: 484106 - RNA, 19 nt, Homo sapiens
  misc_RNA (1)...(19): siRNA sense strand
cauaagggaucuugaggau

SEQ ID NO: 484107 - RNA, 19 nt, Homo sapiens
  misc_RNA (1)...(19): siRNA sense strand
gaauugaaacgcagaaaca

SEQ ID NO: 484108 - RNA, 19 nt, Homo sapiens
  misc_RNA (1)...(19): siRNA sense strand
ggaaauggagcugagaauu

SEQ ID NO: 484109 - RNA, 19 nt, Homo sapiens
  misc_RNA (1)...(19): siRNA sense strand
gggaagggcuacaaaucga

SEQ ID NO: 484110 - RNA, 19 nt, Homo sapiens
  misc_RNA (1)...(19): siRNA sense strand
gggaaagacuagaagagau

SEQ ID NO: 484111 - RNA, 19 nt, Homo sapiens
  misc_RNA (1)...(19): siRNA sense strand
uaauugagcgcuugaaaga

SEQ ID NO: 484112 - RNA, 19 nt, Homo sapiens
  misc_RNA (1)...(19): siRNA sense strand
gcacaauguuagaucuuca

SEQ ID NO: 484113 - RNA, 19 nt, Homo sapiens
  misc_RNA (1)...(19): siRNA sense strand
ggaagacauuagaggaaau

SEQ ID NO: 484114 - RNA, 19 nt, Homo sapiens
  misc_RNA (1)...(19): siRNA sense strand
agaggaauguagcaaauug

SEQ ID NO: 484115 - RNA, 19 nt, Homo sapiens
  misc_RNA (1)...(19): siRNA sense strand
aaaucgagcuguauaugga

SEQ ID NO: 484116 - RNA, 19 nt, Homo sapiens
  misc_RNA (1)...(19): siRNA sense strand
uagaggaacugaugaaugc

SEQ ID NO: 484117 - RNA, 19 nt, Homo sapiens
  misc_RNA (1)...(19): siRNA sense strand
cagacggauuccaguaaua

SEQ ID NO: 484118 - RNA, 19 nt, Homo sapiens
  misc_RNA (1)...(19): siRNA sense strand
guaaaggcuugccauccaa

SEQ ID NO: 484119 - RNA, 19 nt, Homo sapiens
  misc_RNA (1)...(19): siRNA sense strand
gaaacccucagcaaucaaa

SEQ ID NO: 484120 - RNA, 19 nt, Homo sapiens
  misc_RNA (1)...(19): siRNA sense strand
gaaacaggaagcacuacuu

SEQ ID NO: 484121 - RNA, 19 nt, Homo sapiens
  misc_RNA (1)...(19): siRNA sense strand
gguaagagacagcacaaug

SEQ ID NO: 484122 - RNA, 19 nt, Homo sapiens
  misc_RNA (1)...(19): siRNA sense strand
gaugaaacaggaagcacua

SEQ ID NO: 484123 - RNA, 19 nt, Homo sapiens
  misc_RNA (1)...(19): siRNA sense strand
ggagaagaccagacaggaa

SEQ ID NO: 484124 - RNA, 19 nt, Homo sapiens
  misc_RNA (1)...(19): siRNA sense strand
ggaagugcaagaacaauca

SEQ ID NO: 484125 - RNA, 19 nt, Homo sapiens
  misc_RNA (1)...(19): siRNA sense strand
gacacuggccggugaaauu

SEQ ID NO: 484126 - RNA, 19 nt, Homo sapiens
  misc_RNA (1)...(19): siRNA sense strand
uacaggaccucacagaaga

SEQ ID NO: 484127 - RNA, 19 nt, Homo sapiens
  misc_RNA (1)...(19): siRNA sense strand
caucaaggacagcaaauug

SEQ ID NO: 484128 - RNA, 19 nt, Homo sapiens
  misc_RNA (1)...(19): siRNA sense strand
caacuaugaugaugaccau

SEQ ID NO: 484129 - RNA, 19 nt, Homo sapiens
  misc_RNA (1)...(19): siRNA sense strand
uaaagcagcagacccagaa

SEQ ID NO: 484130 - RNA, 19 nt, Homo sapiens
  misc_RNA (1)...(19): siRNA sense strand
ucgcagaacuggagagcuu

SEQ ID NO: 484131 - RNA, 19 nt, Homo sapiens
  misc_RNA (1)...(19): siRNA sense strand
gcaacugaccaaccugaaa

SEQ ID NO: 484132 - RNA, 19 nt, Homo sapiens
  misc_RNA (1)...(19): siRNA sense strand
acagagggcugccauccuu

SEQ ID NO: 484133 - RNA, 19 nt, Homo sapiens
  misc_RNA (1)...(19): siRNA sense strand
ccaaaagccuggaggauga

SEQ ID NO: 484134 - RNA, 19 nt, Homo sapiens
  misc_RNA (1)...(19): siRNA sense strand
guaagagacagcacaaugu

SEQ ID NO: 484135 - RNA, 19 nt, Homo sapiens
  misc_RNA (1)...(19): siRNA sense strand
ccugggaggucgcaacauu

SEQ ID NO: 484136 - RNA, 19 nt, Homo sapiens
  misc_RNA (1)...(19): siRNA sense strand
cgacuaguacaucaauuaa

SEQ ID NO: 484137 - RNA, 19 nt, Homo sapiens
  misc_RNA (1)...(19): siRNA sense strand
gcaagaacaaucaccaauc

SEQ ID NO: 484138 - RNA, 19 nt, Homo sapiens
  misc_RNA (1)...(19): siRNA sense strand
gaucagaaagagaaggaaa

SEQ ID NO: 484139 - RNA, 19 nt, Homo sapiens
  misc_RNA (1)...(19): siRNA sense strand
ggagagagucuugaggaaa

SEQ ID NO: 484140 - RNA, 19 nt, Homo sapiens
  misc_RNA (1)...(19): siRNA sense strand
gcggaugucuguccucaag

SEQ ID NO: 484141 - RNA, 19 nt, Homo sapiens
  misc_RNA (1)...(19): siRNA sense strand
ucacagcauuugcagauag

SEQ ID NO: 484142 - RNA, 19 nt, Homo sapiens
  misc_RNA (1)...(19): siRNA sense strand
ucagagaaggagagaauaa

SEQ ID NO: 484143 - RNA, 19 nt, Homo sapiens
  misc_RNA (1)...(19): siRNA sense strand
gaaagagaaggaaaacaua

SEQ ID NO: 484144 - RNA, 19 nt, Homo sapiens
  misc_RNA (1)...(19): siRNA sense strand
cgagaugagucaauuaaaa

SEQ ID NO: 484145 - RNA, 19 nt, Homo sapiens
  misc_RNA (1)...(19): siRNA sense strand
gaggaagacauuagaggaa

SEQ ID NO: 484146 - RNA, 19 nt, Homo sapiens
  misc_RNA (1)...(19): siRNA sense strand
gcaagcaacacauugaagu

SEQ ID NO: 484147 - RNA, 19 nt, Homo sapiens
  misc_RNA (1)...(19): siRNA sense strand
ccauguaucugagugauca

SEQ ID NO: 484148 - RNA, 19 nt, Homo sapiens
  misc_RNA (1)...(19): siRNA sense strand
gcacauaauauugaagaug

SEQ ID NO: 484149 - RNA, 19 nt, Homo sapiens
  misc_RNA (1)...(19): siRNA sense strand
guauggaagugcaagaaca

SEQ ID NO: 484150 - RNA, 19 nt, Homo sapiens
  misc_RNA (1)...(19): siRNA sense strand
aggcugaacugacugagaa

SEQ ID NO: 484151 - RNA, 19 nt, Homo sapiens
  misc_RNA (1)...(19): siRNA sense strand
agaacaugcaucuucauua

SEQ ID NO: 484152 - RNA, 19 nt, Homo sapiens
  misc_RNA (1)...(19): siRNA sense strand
ccgacuaguacaucaauua

SEQ ID NO: 484153 - RNA, 19 nt, Homo sapiens
  misc_RNA (1)...(19): siRNA sense strand
ucaggcauaugaaagauca

SEQ ID NO: 484154 - RNA, 19 nt, Homo sapiens
  misc_RNA (1)...(19): siRNA sense strand
acaagaagaucgcagaacu

SEQ ID NO: 484155 - RNA, 19 nt, Homo sapiens
  misc_RNA (1)...(19): siRNA sense strand
ggaaacaacugagaacaua

SEQ ID NO: 484156 - RNA, 19 nt, Homo sapiens
  misc_RNA (1)...(19): siRNA sense strand
ggagacaguugguguguuu

SEQ ID NO: 484157 - RNA, 19 nt, Homo sapiens
  misc_RNA (1)...(19): siRNA sense strand
gcucgugacugcccacaua

SEQ ID NO: 484158 - RNA, 19 nt, Homo sapiens
  misc_RNA (1)...(19): siRNA sense strand
caacaugaacucuuugaaa

SEQ ID NO: 484159 - RNA, 19 nt, Homo sapiens
  misc_RNA (1)...(19): siRNA sense strand
gagcggcacuggaggauau

SEQ ID NO: 484160 - RNA, 19 nt, Homo sapiens
  misc_RNA (1)...(19): siRNA sense strand
cauccaacaugaacucuuu

SEQ ID NO: 484161 - RNA, 19 nt, Homo sapiens
  misc_RNA (1)...(19): siRNA sense strand
ccucaggccuucacuggua

SEQ ID NO: 484162 - RNA, 19 nt, Homo sapiens
  misc_RNA (1)...(19): siRNA sense strand
ucagagaucucagacagaa

SEQ ID NO: 484163 - RNA, 19 nt, Homo sapiens
  misc_RNA (1)...(19): siRNA sense strand
caauaaagaugagaagaca

SEQ ID NO: 484164 - RNA, 19 nt, Homo sapiens
  misc_RNA (1)...(19): siRNA sense strand
gggcagggaaccaguguua

SEQ ID NO: 484165 - RNA, 19 nt, Homo sapiens
  misc_RNA (1)...(19): siRNA sense strand
uggagaaccuugacaguga

SEQ ID NO: 484166 - RNA, 19 nt, Homo sapiens
  misc_RNA (1)...(19): siRNA sense strand
ggaaagcaauaaagaugag

SEQ ID NO: 484167 - RNA, 19 nt, Homo sapiens
  misc_RNA (1)...(19): siRNA sense strand
gcaaaguguuggagacagu

SEQ ID NO: 484168 - RNA, 19 nt, Homo sapiens
  misc_RNA (1)...(19): siRNA sense strand
ccacuuugauguucggauu

SEQ ID NO: 484169 - RNA, 19 nt, Homo sapiens
  misc_RNA (1)...(19): siRNA sense strand
ccugauggcucccacuuug

SEQ ID NO: 484170 - RNA, 19 nt, Homo sapiens
  misc_RNA (1)...(19): siRNA sense strand
cuaagggccuggcaagaga

SEQ ID NO: 484171 - RNA, 19 nt, Homo sapiens
  misc_RNA (1)...(19): siRNA sense strand
gcaaaacucacacuuacua

SEQ ID NO: 484172 - RNA, 19 nt, Homo sapiens
  misc_RNA (1)...(19): siRNA sense strand
aaacucacacuuacuauca

SEQ ID NO: 484173 - RNA, 19 nt, Homo sapiens
  misc_RNA (1)...(19): siRNA sense strand
ggagaaccuugacagugau

SEQ ID NO: 484174 - RNA, 19 nt, Homo sapiens
  misc_RNA (1)...(19): siRNA sense strand
gggaaccaguguuauccaa

SEQ ID NO: 484175 - RNA, 19 nt, Homo sapiens
  misc_RNA (1)...(19): siRNA sense strand
gcagggaaccaguguuauc

SEQ ID NO: 484176 - RNA, 19 nt, Homo sapiens
  misc_RNA (1)...(19): siRNA sense strand
cagccugcguuccaguaua

SEQ ID NO: 484177 - RNA, 19 nt, Homo sapiens
  misc_RNA (1)...(19): siRNA sense strand
gcaauaaagaugagaagac

SEQ ID NO: 484178 - RNA, 19 nt, Homo sapiens
  misc_RNA (1)...(19): siRNA sense strand
gaccagagggcaaaguguu

SEQ ID NO: 484179 - RNA, 19 nt, Homo sapiens
  misc_RNA (1)...(19): siRNA sense strand
gcgcuacuguauccguuug

SEQ ID NO: 484180 - RNA, 19 nt, Homo sapiens
  misc_RNA (1)...(19): siRNA sense strand
gggcagcuuuuccuucaua

SEQ ID NO: 484181 - RNA, 19 nt, Homo sapiens
  misc_RNA (1)...(19): siRNA sense strand
uaugagaccgggcagcuuu

SEQ ID NO: 484182 - RNA, 19 nt, Homo sapiens
  misc_RNA (1)...(19): siRNA sense strand
ugagggaagcccagaauuc

SEQ ID NO: 484183 - RNA, 19 nt, Homo sapiens
  misc_RNA (1)...(19): siRNA sense strand
gggaaacaacugagaacau

SEQ ID NO: 484184 - RNA, 19 nt, Homo sapiens
  misc_RNA (1)...(19): siRNA sense strand
uggaggauauucagucucu

SEQ ID NO: 484185 - RNA, 19 nt, Homo sapiens
  misc_RNA (1)...(19): siRNA sense strand
ccuugacagugauguggua

SEQ ID NO: 484186 - RNA, 19 nt, Homo sapiens
  misc_RNA (1)...(19): siRNA sense strand
ggacuaugucagccaugaa

SEQ ID NO: 484187 - RNA, 19 nt, Homo sapiens
  misc_RNA (1)...(19): siRNA sense strand
gaaccuugacagugaugug

SEQ ID NO: 484188 - RNA, 19 nt, Homo sapiens
  misc_RNA (1)...(19): siRNA sense strand
ugacugcccacauauaucu

SEQ ID NO: 484189 - RNA, 19 nt, Homo sapiens
  misc_RNA (1)...(19): siRNA sense strand
gaaacaacugagaacauac

SEQ ID NO: 484190 - RNA, 19 nt, Homo sapiens
  misc_RNA (1)...(19): siRNA sense strand
gcuaagggccuggcaagag

SEQ ID NO: 484191 - RNA, 19 nt, Homo sapiens
  misc_RNA (1)...(19): siRNA sense strand
cuucuuggcuaaccaugau

SEQ ID NO: 484192 - RNA, 19 nt, Homo sapiens
  misc_RNA (1)...(19): siRNA sense strand
uggaaagcaauaaagauga

SEQ ID NO: 484193 - RNA, 19 nt, Homo sapiens
  misc_RNA (1)...(19): siRNA sense strand
gaaagcaauaaagaugaga

SEQ ID NO: 484194 - RNA, 19 nt, Homo sapiens
  misc_RNA (1)...(19): siRNA sense strand
guauagcagccacgucuca

SEQ ID NO: 484195 - RNA, 19 nt, Homo sapiens
  misc_RNA (1)...(19): siRNA sense strand
cgugacugcccacauauau

SEQ ID NO: 484196 - RNA, 19 nt, Homo sapiens
  misc_RNA (1)...(19): siRNA sense strand
gggccuggcaagagaagaa

SEQ ID NO: 484197 - RNA, 19 nt, Homo sapiens
  misc_RNA (1)...(19): siRNA sense strand
uggacuaugucagccauga

SEQ ID NO: 484198 - RNA, 19 nt, Homo sapiens
  misc_RNA (1)...(19): siRNA sense strand
cuggaaagcaauaaagaug

SEQ ID NO: 484199 - RNA, 19 nt, Homo sapiens
  misc_RNA (1)...(19): siRNA sense strand
guacugguggcgcuacugu

SEQ ID NO: 484200 - RNA, 19 nt, Homo sapiens
  misc_RNA (1)...(19): siRNA sense strand
gaggauauucagucucucu

SEQ ID NO: 484201 - RNA, 19 nt, Homo sapiens
  misc_RNA (1)...(19): siRNA sense strand
ggcuaaccaugaugacagu

SEQ ID NO: 484202 - RNA, 19 nt, Homo sapiens
  misc_RNA (1)...(19): siRNA sense strand
ugacagugaugugguacag

SEQ ID NO: 484203 - RNA, 19 nt, Homo sapiens
  misc_RNA (1)...(19): siRNA sense strand
gcuacuguauccguuugga

SEQ ID NO: 484204 - RNA, 19 nt, Homo sapiens
  misc_RNA (1)...(19): siRNA sense strand
ccagaauucccacguguac

SEQ ID NO: 484205 - RNA, 19 nt, Homo sapiens
  misc_RNA (1)...(19): siRNA sense strand
gaagacauccuccccuaca

SEQ ID NO: 484206 - RNA, 19 nt, Homo sapiens
  misc_RNA (1)...(19): siRNA sense strand
ggagcggcacuggaggaua

SEQ ID NO: 484207 - RNA, 19 nt, Homo sapiens
  misc_RNA (1)...(19): siRNA sense strand
agacaguugguguguuuga

SEQ ID NO: 484208 - RNA, 19 nt, Homo sapiens
  misc_RNA (1)...(19): siRNA sense strand
ccaacaugaacucuuugaa

SEQ ID NO: 484209 - RNA, 19 nt, Homo sapiens
  misc_RNA (1)...(19): siRNA sense strand
gaccugauggcucccacuu

SEQ ID NO: 484210 - RNA, 19 nt, Homo sapiens
  misc_RNA (1)...(19): siRNA sense strand
caaggaggugaaaggcaaa

SEQ ID NO: 484211 - RNA, 19 nt, Homo sapiens
  misc_RNA (1)...(19): siRNA sense strand
caugagggaagcccagaau

SEQ ID NO: 484212 - RNA, 19 nt, Homo sapiens
  misc_RNA (1)...(19): siRNA sense strand
acugagaacauacguguca

SEQ ID NO: 484213 - RNA, 19 nt, Homo sapiens
  misc_RNA (1)...(19): siRNA sense strand
ucccaggcuuggacuaugu

SEQ ID NO: 484214 - RNA, 19 nt, Homo sapiens
  misc_RNA (1)...(19): siRNA sense strand
gaaccuagcucccgugaag

SEQ ID NO: 484215 - RNA, 19 nt, Homo sapiens
  misc_RNA (1)...(19): siRNA sense strand
gaaauaaucagcuucaagu

SEQ ID NO: 484216 - RNA, 19 nt, Homo sapiens
  misc_RNA (1)...(19): siRNA sense strand
gagucuggaugaagaguuu

SEQ ID NO: 484217 - RNA, 19 nt, Homo sapiens
  misc_RNA (1)...(19): siRNA sense strand
gaagaaccaguuacagauc

SEQ ID NO: 484218 - RNA, 19 nt, Homo sapiens
  misc_RNA (1)...(19): siRNA sense strand
gugaagaaccaguuacaga

SEQ ID NO: 484219 - RNA, 19 nt, Homo sapiens
  misc_RNA (1)...(19): siRNA sense strand
ugaagaaccaguuacagau

SEQ ID NO: 484220 - RNA, 19 nt, Homo sapiens
  misc_RNA (1)...(19): siRNA sense strand
cgaaauaaucagcuucaag

SEQ ID NO: 484221 - RNA, 19 nt, Homo sapiens
  misc_RNA (1)...(19): siRNA sense strand
uggugagucuggaugaaga

SEQ ID NO: 484222 - RNA, 19 nt, Homo sapiens
  misc_RNA (1)...(19): siRNA sense strand
ggaacuacaacgccaagac

SEQ ID NO: 484223 - RNA, 19 nt, Homo sapiens
  misc_RNA (1)...(19): siRNA sense strand
ugaagaguuugaggaccuu

SEQ ID NO: 484224 - RNA, 19 nt, Homo sapiens
  misc_RNA (1)...(19): siRNA sense strand
gaaccuagcucccgugaag

SEQ ID NO: 484225 - RNA, 19 nt, Homo sapiens
  misc_RNA (1)...(19): siRNA sense strand
gaaauaaucagcuucaagu

SEQ ID NO: 484226 - RNA, 19 nt, Homo sapiens
  misc_RNA (1)...(19): siRNA sense strand
gagucuggaugaagaguuu

SEQ ID NO: 484227 - RNA, 19 nt, Homo sapiens
  misc_RNA (1)...(19): siRNA sense strand
gaagaaccaguuacagauc

SEQ ID NO: 484228 - RNA, 19 nt, Homo sapiens
  misc_RNA (1)...(19): siRNA sense strand
gugaagaaccaguuacaga

SEQ ID NO: 484229 - RNA, 19 nt, Homo sapiens
  misc_RNA (1)...(19): siRNA sense strand
ugaagaaccaguuacagau

SEQ ID NO: 484230 - RNA, 19 nt, Homo sapiens
  misc_RNA (1)...(19): siRNA sense strand
cgaaauaaucagcuucaag

SEQ ID NO: 484231 - RNA, 19 nt, Homo sapiens
  misc_RNA (1)...(19): siRNA sense strand
uggugagucuggaugaaga

SEQ ID NO: 484232 - RNA, 19 nt, Homo sapiens
  misc_RNA (1)...(19): siRNA sense strand
ggaacuacaacgccaagac

SEQ ID NO: 484233 - RNA, 19 nt, Homo sapiens
  misc_RNA (1)...(19): siRNA sense strand
ugaagaguuugaggaccuu

SEQ ID NO: 484234 - RNA, 19 nt, Homo sapiens
  misc_RNA (1)...(19): siRNA sense strand
ccaagaagcugaugacaug

SEQ ID NO: 484235 - RNA, 19 nt, Homo sapiens
  misc_RNA (1)...(19): siRNA sense strand
gaauccaccuuguuucuga

SEQ ID NO: 484236 - RNA, 19 nt, Homo sapiens
  misc_RNA (1)...(19): siRNA sense strand
gagcacaucucagcugaaa

SEQ ID NO: 484237 - RNA, 19 nt, Homo sapiens
  misc_RNA (1)...(19): siRNA sense strand
aaacccagcugaagucauu

SEQ ID NO: 484238 - RNA, 19 nt, Homo sapiens
  misc_RNA (1)...(19): siRNA sense strand
gaaauauguuggugaacug

SEQ ID NO: 484239 - RNA, 19 nt, Homo sapiens
  misc_RNA (1)...(19): siRNA sense strand
gcugauguauacacguuua

SEQ ID NO: 484240 - RNA, 19 nt, Homo sapiens
  misc_RNA (1)...(19): siRNA sense strand
gagaaucagcuucaagaaa

SEQ ID NO: 484241 - RNA, 19 nt, Homo sapiens
  misc_RNA (1)...(19): siRNA sense strand
ggaaauauguuggugaacu

SEQ ID NO: 484242 - RNA, 19 nt, Homo sapiens
  misc_RNA (1)...(19): siRNA sense strand
gagauccagucuaugauga

SEQ ID NO: 484243 - RNA, 19 nt, Homo sapiens
  misc_RNA (1)...(19): siRNA sense strand
ugaccgagauccagucuau

SEQ ID NO: 484244 - RNA, 19 nt, Homo sapiens
  misc_RNA (1)...(19): siRNA sense strand
ccugaaagaugucucauuc

SEQ ID NO: 484245 - RNA, 19 nt, Homo sapiens
  misc_RNA (1)...(19): siRNA sense strand
gaaaggcuucugagagauu

SEQ ID NO: 484246 - RNA, 19 nt, Homo sapiens
  misc_RNA (1)...(19): siRNA sense strand
cagcugaagucauuagaga

SEQ ID NO: 484247 - RNA, 19 nt, Homo sapiens
  misc_RNA (1)...(19): siRNA sense strand
aaaccaaacugaucucucu

SEQ ID NO: 484248 - RNA, 19 nt, Homo sapiens
  misc_RNA (1)...(19): siRNA sense strand
gaaagaugucucauucaga

SEQ ID NO: 484249 - RNA, 19 nt, Homo sapiens
  misc_RNA (1)...(19): siRNA sense strand
gauauugcaccaaguagaa

SEQ ID NO: 484250 - RNA, 19 nt, Homo sapiens
  misc_RNA (1)...(19): siRNA sense strand
gcaaucuguucugaaauga

SEQ ID NO: 484251 - RNA, 19 nt, Homo sapiens
  misc_RNA (1)...(19): siRNA sense strand
ggagacugaucuuuauaag

SEQ ID NO: 484252 - RNA, 19 nt, Homo sapiens
  misc_RNA (1)...(19): siRNA sense strand
guacugaugaggaaaguga

SEQ ID NO: 484253 - RNA, 19 nt, Homo sapiens
  misc_RNA (1)...(19): siRNA sense strand
gaacccaguauaacucauu

SEQ ID NO: 484254 - RNA, 19 nt, Homo sapiens
  misc_RNA (1)...(19): siRNA sense strand
ugagaguacugaugaggaa

SEQ ID NO: 484255 - RNA, 19 nt, Homo sapiens
  misc_RNA (1)...(19): siRNA sense strand
aaacugcaaucuguucuga

SEQ ID NO: 484256 - RNA, 19 nt, Homo sapiens
  misc_RNA (1)...(19): siRNA sense strand
gacagcgaaugcaaagaaa

SEQ ID NO: 484257 - RNA, 19 nt, Homo sapiens
  misc_RNA (1)...(19): siRNA sense strand
aaaugcagcucaagaacga

SEQ ID NO: 484258 - RNA, 19 nt, Homo sapiens
  misc_RNA (1)...(19): siRNA sense strand
cagcugauguauacacguu

SEQ ID NO: 484259 - RNA, 19 nt, Homo sapiens
  misc_RNA (1)...(19): siRNA sense strand
agaaucagcuucaagaaaa

SEQ ID NO: 484260 - RNA, 19 nt, Homo sapiens
  misc_RNA (1)...(19): siRNA sense strand
uaaggaagcuuuggagacu

SEQ ID NO: 484261 - RNA, 19 nt, Homo sapiens
  misc_RNA (1)...(19): siRNA sense strand
augaaaggcuucugagaga

SEQ ID NO: 484262 - RNA, 19 nt, Homo sapiens
  misc_RNA (1)...(19): siRNA sense strand
gguguugaaugagaagaaa

SEQ ID NO: 484263 - RNA, 19 nt, Homo sapiens
  misc_RNA (1)...(19): siRNA sense strand
ucagagauuucccaagaag

SEQ ID NO: 484264 - RNA, 19 nt, Homo sapiens
  misc_RNA (1)...(19): siRNA sense strand
ccucuuugaugagauuuaa

SEQ ID NO: 484265 - RNA, 19 nt, Homo sapiens
  misc_RNA (1)...(19): siRNA sense strand
gaaaaugaaaggcuucuga

SEQ ID NO: 484266 - RNA, 19 nt, Homo sapiens
  misc_RNA (1)...(19): siRNA sense strand
ggaaucugguuuuguuauu

SEQ ID NO: 484267 - RNA, 19 nt, Homo sapiens
  misc_RNA (1)...(19): siRNA sense strand
ggagaaucagcuucaagaa

SEQ ID NO: 484268 - RNA, 19 nt, Homo sapiens
  misc_RNA (1)...(19): siRNA sense strand
agacagcgaaugcaaagaa

SEQ ID NO: 484269 - RNA, 19 nt, Homo sapiens
  misc_RNA (1)...(19): siRNA sense strand
gauccagucuaugaugaga

SEQ ID NO: 484270 - RNA, 19 nt, Homo sapiens
  misc_RNA (1)...(19): siRNA sense strand
gagcaggaccagcugaugu

SEQ ID NO: 484271 - RNA, 19 nt, Homo sapiens
  misc_RNA (1)...(19): siRNA sense strand
guuauuacacuuacugaug

SEQ ID NO: 484272 - RNA, 19 nt, Homo sapiens
  misc_RNA (1)...(19): siRNA sense strand
aaaaggacaucaaacaaga

SEQ ID NO: 484273 - RNA, 19 nt, Homo sapiens
  misc_RNA (1)...(19): siRNA sense strand
ggagacagcgaaugcaaag

SEQ ID NO: 484274 - RNA, 19 nt, Homo sapiens
  misc_RNA (1)...(19): siRNA sense strand
ugcaaucuguucugaaaug

SEQ ID NO: 484275 - RNA, 19 nt, Homo sapiens
  misc_RNA (1)...(19): siRNA sense strand
acugcaaucuguucugaaa

SEQ ID NO: 484276 - RNA, 19 nt, Homo sapiens
  misc_RNA (1)...(19): siRNA sense strand
gagauuggaaugauguuca

SEQ ID NO: 484277 - RNA, 19 nt, Homo sapiens
  misc_RNA (1)...(19): siRNA sense strand
gaaacagcagcccagaaga

SEQ ID NO: 484278 - RNA, 19 nt, Homo sapiens
  misc_RNA (1)...(19): siRNA sense strand
gguuuauucugguguugaa

SEQ ID NO: 484279 - RNA, 19 nt, Homo sapiens
  misc_RNA (1)...(19): siRNA sense strand
ugggacaguuucugaauca

SEQ ID NO: 484280 - RNA, 19 nt, Homo sapiens
  misc_RNA (1)...(19): siRNA sense strand
caucucagcugaaaacaug

SEQ ID NO: 484281 - RNA, 19 nt, Homo sapiens
  misc_RNA (1)...(19): siRNA sense strand
gaugacauggcaauggaaa

SEQ ID NO: 484282 - RNA, 19 nt, Homo sapiens
  misc_RNA (1)...(19): siRNA sense strand
gagaaacagcagcccagaa

SEQ ID NO: 484283 - RNA, 19 nt, Homo sapiens
  misc_RNA (1)...(19): siRNA sense strand
gagcaccugcagaaagaaa

SEQ ID NO: 484284 - RNA, 19 nt, Homo sapiens
  misc_RNA (1)...(19): siRNA sense strand
gaaaaggacaucaaacaag

SEQ ID NO: 484285 - RNA, 19 nt, Homo sapiens
  misc_RNA (1)...(19): siRNA sense strand
agaccucuuugaugagauu

SEQ ID NO: 484286 - RNA, 19 nt, Homo sapiens
  misc_RNA (1)...(19): siRNA sense strand
agggaaauauguuggugaa

SEQ ID NO: 484287 - RNA, 19 nt, Homo sapiens
  misc_RNA (1)...(19): siRNA sense strand
gauguucaaggacgauuug

SEQ ID NO: 484288 - RNA, 19 nt, Homo sapiens
  misc_RNA (1)...(19): siRNA sense strand
ggacaccauugcagaaaau

SEQ ID NO: 484289 - RNA, 19 nt, Homo sapiens
  misc_RNA (1)...(19): siRNA sense strand
gcagaauccaccuuguuuc

SEQ ID NO: 484290 - RNA, 19 nt, Homo sapiens
  misc_RNA (1)...(19): siRNA sense strand
uuuggagacugaucuuuau

SEQ ID NO: 484291 - RNA, 19 nt, Homo sapiens
  misc_RNA (1)...(19): siRNA sense strand
gagaaaaggacaucaaaca

SEQ ID NO: 484292 - RNA, 19 nt, Homo sapiens
  misc_RNA (1)...(19): siRNA sense strand
gucuugaugucacugauau

SEQ ID NO: 484293 - RNA, 19 nt, Homo sapiens
  misc_RNA (1)...(19): siRNA sense strand
uagaaacucugagaaacag

SEQ ID NO: 484294 - RNA, 19 nt, Homo sapiens
  misc_RNA (1)...(19): siRNA sense strand
ugaugucacugauauugca

SEQ ID NO: 484295 - RNA, 19 nt, Homo sapiens
  misc_RNA (1)...(19): siRNA sense strand
gagaaaagcauuguuguca

SEQ ID NO: 484296 - RNA, 19 nt, Homo sapiens
  misc_RNA (1)...(19): siRNA sense strand
uaagcagaauccaccuugu

SEQ ID NO: 484297 - RNA, 19 nt, Homo sapiens
  misc_RNA (1)...(19): siRNA sense strand
gggaaacugcaaucuguuc

SEQ ID NO: 484298 - RNA, 19 nt, Homo sapiens
  misc_RNA (1)...(19): siRNA sense strand
uggagacugaucuuuauaa

SEQ ID NO: 484299 - RNA, 19 nt, Homo sapiens
  misc_RNA (1)...(19): siRNA sense strand
cuuuggagacugaucuuua

SEQ ID NO: 484300 - RNA, 19 nt, Homo sapiens
  misc_RNA (1)...(19): siRNA sense strand
aggaagcuuuggagacuga

SEQ ID NO: 484301 - RNA, 19 nt, Homo sapiens
  misc_RNA (1)...(19): siRNA sense strand
augagcaccugcagaaaga

SEQ ID NO: 484302 - RNA, 19 nt, Homo sapiens
  misc_RNA (1)...(19): siRNA sense strand
aggaccagcugauguauac

SEQ ID NO: 484303 - RNA, 19 nt, Homo sapiens
  misc_RNA (1)...(19): siRNA sense strand
cugaugacauggcaaugga

SEQ ID NO: 484304 - RNA, 19 nt, Homo sapiens
  misc_RNA (1)...(19): siRNA sense strand
ucugagagauuggaaugau

SEQ ID NO: 484305 - RNA, 19 nt, Homo sapiens
  misc_RNA (1)...(19): siRNA sense strand
gaaacugcaaucuguucug

SEQ ID NO: 484306 - RNA, 19 nt, Homo sapiens
  misc_RNA (1)...(19): siRNA sense strand
agaaacagcagcccagaag

SEQ ID NO: 484307 - RNA, 19 nt, Homo sapiens
  misc_RNA (1)...(19): siRNA sense strand
cgagauccagucuaugaug

SEQ ID NO: 484308 - RNA, 19 nt, Homo sapiens
  misc_RNA (1)...(19): siRNA sense strand
cagcgaaugcaaagaaauc

SEQ ID NO: 484309 - RNA, 19 nt, Homo sapiens
  misc_RNA (1)...(19): siRNA sense strand
aaaggcuucugagagauug

SEQ ID NO: 484310 - RNA, 19 nt, Homo sapiens
  misc_RNA (1)...(19): siRNA sense strand
gaucuuuauaagcgguuua

SEQ ID NO: 484311 - RNA, 19 nt, Homo sapiens
  misc_RNA (1)...(19): siRNA sense strand
caggaccagcugauguaua

SEQ ID NO: 484312 - RNA, 19 nt, Homo sapiens
  misc_RNA (1)...(19): siRNA sense strand
uuagaaacucugagaaaca

SEQ ID NO: 484313 - RNA, 19 nt, Homo sapiens
  misc_RNA (1)...(19): siRNA sense strand
agauuggaaugauguucaa

SEQ ID NO: 484314 - RNA, 19 nt, Homo sapiens
  misc_RNA (1)...(19): siRNA sense strand
ugaaaggcuucugagagau

SEQ ID NO: 484315 - RNA, 19 nt, Homo sapiens
  misc_RNA (1)...(19): siRNA sense strand
aaaaugagcaccugcagaa

SEQ ID NO: 484316 - RNA, 19 nt, Homo sapiens
  misc_RNA (1)...(19): siRNA sense strand
ugagagauuggaaugaugu

SEQ ID NO: 484317 - RNA, 19 nt, Homo sapiens
  misc_RNA (1)...(19): siRNA sense strand
aagcagaauccaccuuguu

SEQ ID NO: 484318 - RNA, 19 nt, Homo sapiens
  misc_RNA (1)...(19): siRNA sense strand
aacccaguauaacucauuu

SEQ ID NO: 484319 - RNA, 19 nt, Homo sapiens
  misc_RNA (1)...(19): siRNA sense strand
gauggucauucagcaugga

SEQ ID NO: 484320 - RNA, 19 nt, Homo sapiens
  misc_RNA (1)...(19): siRNA sense strand
cuuuagaaacucugagaaa

SEQ ID NO: 484321 - RNA, 19 nt, Homo sapiens
  misc_RNA (1)...(19): siRNA sense strand
cugaaaacaugucuuuaga

SEQ ID NO: 484322 - RNA, 19 nt, Homo sapiens
  misc_RNA (1)...(19): siRNA sense strand
uuggaaugauguucaagga

SEQ ID NO: 484323 - RNA, 19 nt, Homo sapiens
  misc_RNA (1)...(19): siRNA sense strand
agcagaauccaccuuguuu

SEQ ID NO: 484324 - RNA, 19 nt, Homo sapiens
  misc_RNA (1)...(19): siRNA sense strand
ucaggagaaucagcuucaa

SEQ ID NO: 484325 - RNA, 19 nt, Homo sapiens
  misc_RNA (1)...(19): siRNA sense strand
gaguacugaugaggaaagu

SEQ ID NO: 484326 - RNA, 19 nt, Homo sapiens
  misc_RNA (1)...(19): siRNA sense strand
ggaaacugcaaucuguucu

SEQ ID NO: 484327 - RNA, 19 nt, Homo sapiens
  misc_RNA (1)...(19): siRNA sense strand
gcagcucaagaacgagaaa

SEQ ID NO: 484328 - RNA, 19 nt, Homo sapiens
  misc_RNA (1)...(19): siRNA sense strand
ugagugcuaaggaagcuuu

SEQ ID NO: 484329 - RNA, 19 nt, Homo sapiens
  misc_RNA (1)...(19): siRNA sense strand
aaaugaaaggcuucugaga

SEQ ID NO: 484330 - RNA, 19 nt, Homo sapiens
  misc_RNA (1)...(19): siRNA sense strand
gcaggaccagcugauguau

SEQ ID NO: 484331 - RNA, 19 nt, Homo sapiens
  misc_RNA (1)...(19): siRNA sense strand
aggagaaucagcuucaaga

SEQ ID NO: 484332 - RNA, 19 nt, Homo sapiens
  misc_RNA (1)...(19): siRNA sense strand
acugauauugcaccaagua

SEQ ID NO: 484333 - RNA, 19 nt, Homo sapiens
  misc_RNA (1)...(19): siRNA sense strand
aaucuguucugaaaugacu

SEQ ID NO: 484334 - RNA, 19 nt, Homo sapiens
  misc_RNA (1)...(19): siRNA sense strand
ccaagaagcugaugacaug

SEQ ID NO: 484335 - RNA, 19 nt, Homo sapiens
  misc_RNA (1)...(19): siRNA sense strand
gaauccaccuuguuucuga

SEQ ID NO: 484336 - RNA, 19 nt, Homo sapiens
  misc_RNA (1)...(19): siRNA sense strand
gagcacaucucagcugaaa

SEQ ID NO: 484337 - RNA, 19 nt, Homo sapiens
  misc_RNA (1)...(19): siRNA sense strand
aaacccagcugaagucauu

SEQ ID NO: 484338 - RNA, 19 nt, Homo sapiens
  misc_RNA (1)...(19): siRNA sense strand
gaaauauguuggugaacug

SEQ ID NO: 484339 - RNA, 19 nt, Homo sapiens
  misc_RNA (1)...(19): siRNA sense strand
gcugauguauacacguuua

SEQ ID NO: 484340 - RNA, 19 nt, Homo sapiens
  misc_RNA (1)...(19): siRNA sense strand
gagaaucagcuucaagaaa

SEQ ID NO: 484341 - RNA, 19 nt, Homo sapiens
  misc_RNA (1)...(19): siRNA sense strand
ggaaauauguuggugaacu

SEQ ID NO: 484342 - RNA, 19 nt, Homo sapiens
  misc_RNA (1)...(19): siRNA sense strand
gagauccagucuaugauga

SEQ ID NO: 484343 - RNA, 19 nt, Homo sapiens
  misc_RNA (1)...(19): siRNA sense strand
ugaccgagauccagucuau

SEQ ID NO: 484344 - RNA, 19 nt, Homo sapiens
  misc_RNA (1)...(19): siRNA sense strand
ccugaaagaugucucauuc

SEQ ID NO: 484345 - RNA, 19 nt, Homo sapiens
  misc_RNA (1)...(19): siRNA sense strand
gaaaggcuucugagagauu

SEQ ID NO: 484346 - RNA, 19 nt, Homo sapiens
  misc_RNA (1)...(19): siRNA sense strand
cagcugaagucauuagaga

SEQ ID NO: 484347 - RNA, 19 nt, Homo sapiens
  misc_RNA (1)...(19): siRNA sense strand
aaaccaaacugaucucucu

SEQ ID NO: 484348 - RNA, 19 nt, Homo sapiens
  misc_RNA (1)...(19): siRNA sense strand
gaaagaugucucauucaga

SEQ ID NO: 484349 - RNA, 19 nt, Homo sapiens
  misc_RNA (1)...(19): siRNA sense strand
gauauugcaccaaguagaa

SEQ ID NO: 484350 - RNA, 19 nt, Homo sapiens
  misc_RNA (1)...(19): siRNA sense strand
gcaaucuguucugaaauga

SEQ ID NO: 484351 - RNA, 19 nt, Homo sapiens
  misc_RNA (1)...(19): siRNA sense strand
ggagacugaucuuuauaag

SEQ ID NO: 484352 - RNA, 19 nt, Homo sapiens
  misc_RNA (1)...(19): siRNA sense strand
guacugaugaggaaaguga

SEQ ID NO: 484353 - RNA, 19 nt, Homo sapiens
  misc_RNA (1)...(19): siRNA sense strand
gaacccaguauaacucauu

SEQ ID NO: 484354 - RNA, 19 nt, Homo sapiens
  misc_RNA (1)...(19): siRNA sense strand
ugagaguacugaugaggaa

SEQ ID NO: 484355 - RNA, 19 nt, Homo sapiens
  misc_RNA (1)...(19): siRNA sense strand
aaacugcaaucuguucuga

SEQ ID NO: 484356 - RNA, 19 nt, Homo sapiens
  misc_RNA (1)...(19): siRNA sense strand
gacagcgaaugcaaagaaa

SEQ ID NO: 484357 - RNA, 19 nt, Homo sapiens
  misc_RNA (1)...(19): siRNA sense strand
aaaugcagcucaagaacga

SEQ ID NO: 484358 - RNA, 19 nt, Homo sapiens
  misc_RNA (1)...(19): siRNA sense strand
cagcugauguauacacguu

SEQ ID NO: 484359 - RNA, 19 nt, Homo sapiens
  misc_RNA (1)...(19): siRNA sense strand
agaaucagcuucaagaaaa

SEQ ID NO: 484360 - RNA, 19 nt, Homo sapiens
  misc_RNA (1)...(19): siRNA sense strand
uaaggaagcuuuggagacu

SEQ ID NO: 484361 - RNA, 19 nt, Homo sapiens
  misc_RNA (1)...(19): siRNA sense strand
augaaaggcuucugagaga

SEQ ID NO: 484362 - RNA, 19 nt, Homo sapiens
  misc_RNA (1)...(19): siRNA sense strand
gguguugaaugagaagaaa

SEQ ID NO: 484363 - RNA, 19 nt, Homo sapiens
  misc_RNA (1)...(19): siRNA sense strand
ucagagauuucccaagaag

SEQ ID NO: 484364 - RNA, 19 nt, Homo sapiens
  misc_RNA (1)...(19): siRNA sense strand
ccucuuugaugagauuuaa

SEQ ID NO: 484365 - RNA, 19 nt, Homo sapiens
  misc_RNA (1)...(19): siRNA sense strand
gaaaaugaaaggcuucuga

SEQ ID NO: 484366 - RNA, 19 nt, Homo sapiens
  misc_RNA (1)...(19): siRNA sense strand
ggaaucugguuuuguuauu

SEQ ID NO: 484367 - RNA, 19 nt, Homo sapiens
  misc_RNA (1)...(19): siRNA sense strand
ggagaaucagcuucaagaa

SEQ ID NO: 484368 - RNA, 19 nt, Homo sapiens
  misc_RNA (1)...(19): siRNA sense strand
agacagcgaaugcaaagaa

SEQ ID NO: 484369 - RNA, 19 nt, Homo sapiens
  misc_RNA (1)...(19): siRNA sense strand
gauccagucuaugaugaga

SEQ ID NO: 484370 - RNA, 19 nt, Homo sapiens
  misc_RNA (1)...(19): siRNA sense strand
gagcaggaccagcugaugu

SEQ ID NO: 484371 - RNA, 19 nt, Homo sapiens
  misc_RNA (1)...(19): siRNA sense strand
guuauuacacuuacugaug

SEQ ID NO: 484372 - RNA, 19 nt, Homo sapiens
  misc_RNA (1)...(19): siRNA sense strand
aaaaggacaucaaacaaga

SEQ ID NO: 484373 - RNA, 19 nt, Homo sapiens
  misc_RNA (1)...(19): siRNA sense strand
ggagacagcgaaugcaaag

SEQ ID NO: 484374 - RNA, 19 nt, Homo sapiens
  misc_RNA (1)...(19): siRNA sense strand
ugcaaucuguucugaaaug

SEQ ID NO: 484375 - RNA, 19 nt, Homo sapiens
  misc_RNA (1)...(19): siRNA sense strand
acugcaaucuguucugaaa

SEQ ID NO: 484376 - RNA, 19 nt, Homo sapiens
  misc_RNA (1)...(19): siRNA sense strand
gagauuggaaugauguuca

SEQ ID NO: 484377 - RNA, 19 nt, Homo sapiens
  misc_RNA (1)...(19): siRNA sense strand
gaaacagcagcccagaaga

SEQ ID NO: 484378 - RNA, 19 nt, Homo sapiens
  misc_RNA (1)...(19): siRNA sense strand
gguuuauucugguguugaa

SEQ ID NO: 484379 - RNA, 19 nt, Homo sapiens
  misc_RNA (1)...(19): siRNA sense strand
ugggacaguuucugaauca

SEQ ID NO: 484380 - RNA, 19 nt, Homo sapiens
  misc_RNA (1)...(19): siRNA sense strand
caucucagcugaaaacaug

SEQ ID NO: 484381 - RNA, 19 nt, Homo sapiens
  misc_RNA (1)...(19): siRNA sense strand
gaugacauggcaauggaaa

SEQ ID NO: 484382 - RNA, 19 nt, Homo sapiens
  misc_RNA (1)...(19): siRNA sense strand
gagaaacagcagcccagaa

SEQ ID NO: 484383 - RNA, 19 nt, Homo sapiens
  misc_RNA (1)...(19): siRNA sense strand
gagcaccugcagaaagaaa

SEQ ID NO: 484384 - RNA, 19 nt, Homo sapiens
  misc_RNA (1)...(19): siRNA sense strand
gaaaaggacaucaaacaag

SEQ ID NO: 484385 - RNA, 19 nt, Homo sapiens
  misc_RNA (1)...(19): siRNA sense strand
agaccucuuugaugagauu

SEQ ID NO: 484386 - RNA, 19 nt, Homo sapiens
  misc_RNA (1)...(19): siRNA sense strand
agggaaauauguuggugaa

SEQ ID NO: 484387 - RNA, 19 nt, Homo sapiens
  misc_RNA (1)...(19): siRNA sense strand
gauguucaaggacgauuug

SEQ ID NO: 484388 - RNA, 19 nt, Homo sapiens
  misc_RNA (1)...(19): siRNA sense strand
ggacaccauugcagaaaau

SEQ ID NO: 484389 - RNA, 19 nt, Homo sapiens
  misc_RNA (1)...(19): siRNA sense strand
gcagaauccaccuuguuuc

SEQ ID NO: 484390 - RNA, 19 nt, Homo sapiens
  misc_RNA (1)...(19): siRNA sense strand
uuuggagacugaucuuuau

SEQ ID NO: 484391 - RNA, 19 nt, Homo sapiens
  misc_RNA (1)...(19): siRNA sense strand
gagaaaaggacaucaaaca

SEQ ID NO: 484392 - RNA, 19 nt, Homo sapiens
  misc_RNA (1)...(19): siRNA sense strand
gucuugaugucacugauau

SEQ ID NO: 484393 - RNA, 19 nt, Homo sapiens
  misc_RNA (1)...(19): siRNA sense strand
uagaaacucugagaaacag

SEQ ID NO: 484394 - RNA, 19 nt, Homo sapiens
  misc_RNA (1)...(19): siRNA sense strand
ugaugucacugauauugca

SEQ ID NO: 484395 - RNA, 19 nt, Homo sapiens
  misc_RNA (1)...(19): siRNA sense strand
gagaaaagcauuguuguca

SEQ ID NO: 484396 - RNA, 19 nt, Homo sapiens
  misc_RNA (1)...(19): siRNA sense strand
uaagcagaauccaccuugu

SEQ ID NO: 484397 - RNA, 19 nt, Homo sapiens
  misc_RNA (1)...(19): siRNA sense strand
gggaaacugcaaucuguuc

SEQ ID NO: 484398 - RNA, 19 nt, Homo sapiens
  misc_RNA (1)...(19): siRNA sense strand
uggagacugaucuuuauaa

SEQ ID NO: 484399 - RNA, 19 nt, Homo sapiens
  misc_RNA (1)...(19): siRNA sense strand
cuuuggagacugaucuuua

SEQ ID NO: 484400 - RNA, 19 nt, Homo sapiens
  misc_RNA (1)...(19): siRNA sense strand
aggaagcuuuggagacuga

SEQ ID NO: 484401 - RNA, 19 nt, Homo sapiens
  misc_RNA (1)...(19): siRNA sense strand
augagcaccugcagaaaga

SEQ ID NO: 484402 - RNA, 19 nt, Homo sapiens
  misc_RNA (1)...(19): siRNA sense strand
aggaccagcugauguauac

SEQ ID NO: 484403 - RNA, 19 nt, Homo sapiens
  misc_RNA (1)...(19): siRNA sense strand
cugaugacauggcaaugga

SEQ ID NO: 484404 - RNA, 19 nt, Homo sapiens
  misc_RNA (1)...(19): siRNA sense strand
ucugagagauuggaaugau

SEQ ID NO: 484405 - RNA, 19 nt, Homo sapiens
  misc_RNA (1)...(19): siRNA sense strand
gaaacugcaaucuguucug

SEQ ID NO: 484406 - RNA, 19 nt, Homo sapiens
  misc_RNA (1)...(19): siRNA sense strand
agaaacagcagcccagaag

SEQ ID NO: 484407 - RNA, 19 nt, Homo sapiens
  misc_RNA (1)...(19): siRNA sense strand
cgagauccagucuaugaug

SEQ ID NO: 484408 - RNA, 19 nt, Homo sapiens
  misc_RNA (1)...(19): siRNA sense strand
cagcgaaugcaaagaaauc

SEQ ID NO: 484409 - RNA, 19 nt, Homo sapiens
  misc_RNA (1)...(19): siRNA sense strand
aaaggcuucugagagauug

SEQ ID NO: 484410 - RNA, 19 nt, Homo sapiens
  misc_RNA (1)...(19): siRNA sense strand
gaucuuuauaagcgguuua

SEQ ID NO: 484411 - RNA, 19 nt, Homo sapiens
  misc_RNA (1)...(19): siRNA sense strand
caggaccagcugauguaua

SEQ ID NO: 484412 - RNA, 19 nt, Homo sapiens
  misc_RNA (1)...(19): siRNA sense strand
uuagaaacucugagaaaca

SEQ ID NO: 484413 - RNA, 19 nt, Homo sapiens
  misc_RNA (1)...(19): siRNA sense strand
agauuggaaugauguucaa

SEQ ID NO: 484414 - RNA, 19 nt, Homo sapiens
  misc_RNA (1)...(19): siRNA sense strand
ugaaaggcuucugagagau

SEQ ID NO: 484415 - RNA, 19 nt, Homo sapiens
  misc_RNA (1)...(19): siRNA sense strand
aaaaugagcaccugcagaa

SEQ ID NO: 484416 - RNA, 19 nt, Homo sapiens
  misc_RNA (1)...(19): siRNA sense strand
ugagagauuggaaugaugu

SEQ ID NO: 484417 - RNA, 19 nt, Homo sapiens
  misc_RNA (1)...(19): siRNA sense strand
aagcagaauccaccuuguu

SEQ ID NO: 484418 - RNA, 19 nt, Homo sapiens
  misc_RNA (1)...(19): siRNA sense strand
aacccaguauaacucauuu

SEQ ID NO: 484419 - RNA, 19 nt, Homo sapiens
  misc_RNA (1)...(19): siRNA sense strand
gauggucauucagcaugga

SEQ ID NO: 484420 - RNA, 19 nt, Homo sapiens
  misc_RNA (1)...(19): siRNA sense strand
cuuuagaaacucugagaaa

SEQ ID NO: 484421 - RNA, 19 nt, Homo sapiens
  misc_RNA (1)...(19): siRNA sense strand
cugaaaacaugucuuuaga

SEQ ID NO: 484422 - RNA, 19 nt, Homo sapiens
  misc_RNA (1)...(19): siRNA sense strand
uuggaaugauguucaagga

SEQ ID NO: 484423 - RNA, 19 nt, Homo sapiens
  misc_RNA (1)...(19): siRNA sense strand
agcagaauccaccuuguuu

SEQ ID NO: 484424 - RNA, 19 nt, Homo sapiens
  misc_RNA (1)...(19): siRNA sense strand
ucaggagaaucagcuucaa

SEQ ID NO: 484425 - RNA, 19 nt, Homo sapiens
  misc_RNA (1)...(19): siRNA sense strand
gaguacugaugaggaaagu

SEQ ID NO: 484426 - RNA, 19 nt, Homo sapiens
  misc_RNA (1)...(19): siRNA sense strand
ggaaacugcaaucuguucu

SEQ ID NO: 484427 - RNA, 19 nt, Homo sapiens
  misc_RNA (1)...(19): siRNA sense strand
gcagcucaagaacgagaaa

SEQ ID NO: 484428 - RNA, 19 nt, Homo sapiens
  misc_RNA (1)...(19): siRNA sense strand
ugagugcuaaggaagcuuu

SEQ ID NO: 484429 - RNA, 19 nt, Homo sapiens
  misc_RNA (1)...(19): siRNA sense strand
aaaugaaaggcuucugaga

SEQ ID NO: 484430 - RNA, 19 nt, Homo sapiens
  misc_RNA (1)...(19): siRNA sense strand
gcaggaccagcugauguau

SEQ ID NO: 484431 - RNA, 19 nt, Homo sapiens
  misc_RNA (1)...(19): siRNA sense strand
aggagaaucagcuucaaga

SEQ ID NO: 484432 - RNA, 19 nt, Homo sapiens
  misc_RNA (1)...(19): siRNA sense strand
acugauauugcaccaagua

SEQ ID NO: 484433 - RNA, 19 nt, Homo sapiens
  misc_RNA (1)...(19): siRNA sense strand
aaucuguucugaaaugacu

SEQ ID NO: 484434 - RNA, 19 nt, Homo sapiens
  misc_RNA (1)...(19): siRNA sense strand
ccaagaagcugaugacaug

SEQ ID NO: 484435 - RNA, 19 nt, Homo sapiens
  misc_RNA (1)...(19): siRNA sense strand
gaauccaccuuguuucuga

SEQ ID NO: 484436 - RNA, 19 nt, Homo sapiens
  misc_RNA (1)...(19): siRNA sense strand
gagcacaucucagcugaaa

SEQ ID NO: 484437 - RNA, 19 nt, Homo sapiens
  misc_RNA (1)...(19): siRNA sense strand
aaacccagcugaagucauu

SEQ ID NO: 484438 - RNA, 19 nt, Homo sapiens
  misc_RNA (1)...(19): siRNA sense strand
gaaauauguuggugaacug

SEQ ID NO: 484439 - RNA, 19 nt, Homo sapiens
  misc_RNA (1)...(19): siRNA sense strand
gcugauguauacacguuua

SEQ ID NO: 484440 - RNA, 19 nt, Homo sapiens
  misc_RNA (1)...(19): siRNA sense strand
gagaaucagcuucaagaaa

SEQ ID NO: 484441 - RNA, 19 nt, Homo sapiens
  misc_RNA (1)...(19): siRNA sense strand
ggaaauauguuggugaacu

SEQ ID NO: 484442 - RNA, 19 nt, Homo sapiens
  misc_RNA (1)...(19): siRNA sense strand
gagauccagucuaugauga

SEQ ID NO: 484443 - RNA, 19 nt, Homo sapiens
  misc_RNA (1)...(19): siRNA sense strand
ugaccgagauccagucuau

SEQ ID NO: 484444 - RNA, 19 nt, Homo sapiens
  misc_RNA (1)...(19): siRNA sense strand
ccugaaagaugucucauuc

SEQ ID NO: 484445 - RNA, 19 nt, Homo sapiens
  misc_RNA (1)...(19): siRNA sense strand
gaaaggcuucugagagauu

SEQ ID NO: 484446 - RNA, 19 nt, Homo sapiens
  misc_RNA (1)...(19): siRNA sense strand
cagcugaagucauuagaga

SEQ ID NO: 484447 - RNA, 19 nt, Homo sapiens
  misc_RNA (1)...(19): siRNA sense strand
aaaccaaacugaucucucu

SEQ ID NO: 484448 - RNA, 19 nt, Homo sapiens
  misc_RNA (1)...(19): siRNA sense strand
gaaagaugucucauucaga

SEQ ID NO: 484449 - RNA, 19 nt, Homo sapiens
  misc_RNA (1)...(19): siRNA sense strand
gauauugcaccaaguagaa

SEQ ID NO: 484450 - RNA, 19 nt, Homo sapiens
  misc_RNA (1)...(19): siRNA sense strand
gcaaucuguucugaaauga

SEQ ID NO: 484451 - RNA, 19 nt, Homo sapiens
  misc_RNA (1)...(19): siRNA sense strand
ggagacugaucuuuauaag

SEQ ID NO: 484452 - RNA, 19 nt, Homo sapiens
  misc_RNA (1)...(19): siRNA sense strand
guacugaugaggaaaguga

SEQ ID NO: 484453 - RNA, 19 nt, Homo sapiens
  misc_RNA (1)...(19): siRNA sense strand
gaacccaguauaacucauu

SEQ ID NO: 484454 - RNA, 19 nt, Homo sapiens
  misc_RNA (1)...(19): siRNA sense strand
ugagaguacugaugaggaa

SEQ ID NO: 484455 - RNA, 19 nt, Homo sapiens
  misc_RNA (1)...(19): siRNA sense strand
aaacugcaaucuguucuga

SEQ ID NO: 484456 - RNA, 19 nt, Homo sapiens
  misc_RNA (1)...(19): siRNA sense strand
gacagcgaaugcaaagaaa

SEQ ID NO: 484457 - RNA, 19 nt, Homo sapiens
  misc_RNA (1)...(19): siRNA sense strand
aaaugcagcucaagaacga

SEQ ID NO: 484458 - RNA, 19 nt, Homo sapiens
  misc_RNA (1)...(19): siRNA sense strand
cagcugauguauacacguu

SEQ ID NO: 484459 - RNA, 19 nt, Homo sapiens
  misc_RNA (1)...(19): siRNA sense strand
agaaucagcuucaagaaaa

SEQ ID NO: 484460 - RNA, 19 nt, Homo sapiens
  misc_RNA (1)...(19): siRNA sense strand
uaaggaagcuuuggagacu

SEQ ID NO: 484461 - RNA, 19 nt, Homo sapiens
  misc_RNA (1)...(19): siRNA sense strand
augaaaggcuucugagaga

SEQ ID NO: 484462 - RNA, 19 nt, Homo sapiens
  misc_RNA (1)...(19): siRNA sense strand
gguguugaaugagaagaaa

SEQ ID NO: 484463 - RNA, 19 nt, Homo sapiens
  misc_RNA (1)...(19): siRNA sense strand
ucagagauuucccaagaag

SEQ ID NO: 484464 - RNA, 19 nt, Homo sapiens
  misc_RNA (1)...(19): siRNA sense strand
ccucuuugaugagauuuaa

SEQ ID NO: 484465 - RNA, 19 nt, Homo sapiens
  misc_RNA (1)...(19): siRNA sense strand
gaaaaugaaaggcuucuga

SEQ ID NO: 484466 - RNA, 19 nt, Homo sapiens
  misc_RNA (1)...(19): siRNA sense strand
ggaaucugguuuuguuauu

SEQ ID NO: 484467 - RNA, 19 nt, Homo sapiens
  misc_RNA (1)...(19): siRNA sense strand
ggagaaucagcuucaagaa

SEQ ID NO: 484468 - RNA, 19 nt, Homo sapiens
  misc_RNA (1)...(19): siRNA sense strand
agacagcgaaugcaaagaa

SEQ ID NO: 484469 - RNA, 19 nt, Homo sapiens
  misc_RNA (1)...(19): siRNA sense strand
gauccagucuaugaugaga

SEQ ID NO: 484470 - RNA, 19 nt, Homo sapiens
  misc_RNA (1)...(19): siRNA sense strand
gagcaggaccagcugaugu

SEQ ID NO: 484471 - RNA, 19 nt, Homo sapiens
  misc_RNA (1)...(19): siRNA sense strand
guuauuacacuuacugaug

SEQ ID NO: 484472 - RNA, 19 nt, Homo sapiens
  misc_RNA (1)...(19): siRNA sense strand
aaaaggacaucaaacaaga

SEQ ID NO: 484473 - RNA, 19 nt, Homo sapiens
  misc_RNA (1)...(19): siRNA sense strand
ggagacagcgaaugcaaag

SEQ ID NO: 484474 - RNA, 19 nt, Homo sapiens
  misc_RNA (1)...(19): siRNA sense strand
ugcaaucuguucugaaaug

SEQ ID NO: 484475 - RNA, 19 nt, Homo sapiens
  misc_RNA (1)...(19): siRNA sense strand
acugcaaucuguucugaaa

SEQ ID NO: 484476 - RNA, 19 nt, Homo sapiens
  misc_RNA (1)...(19): siRNA sense strand
gagauuggaaugauguuca

SEQ ID NO: 484477 - RNA, 19 nt, Homo sapiens
  misc_RNA (1)...(19): siRNA sense strand
gaaacagcagcccagaaga

SEQ ID NO: 484478 - RNA, 19 nt, Homo sapiens
  misc_RNA (1)...(19): siRNA sense strand
gguuuauucugguguugaa

SEQ ID NO: 484479 - RNA, 19 nt, Homo sapiens
  misc_RNA (1)...(19): siRNA sense strand
ugggacaguuucugaauca

SEQ ID NO: 484480 - RNA, 19 nt, Homo sapiens
  misc_RNA (1)...(19): siRNA sense strand
caucucagcugaaaacaug

SEQ ID NO: 484481 - RNA, 19 nt, Homo sapiens
  misc_RNA (1)...(19): siRNA sense strand
gaugacauggcaauggaaa

SEQ ID NO: 484482 - RNA, 19 nt, Homo sapiens
  misc_RNA (1)...(19): siRNA sense strand
gagaaacagcagcccagaa

SEQ ID NO: 484483 - RNA, 19 nt, Homo sapiens
  misc_RNA (1)...(19): siRNA sense strand
gagcaccugcagaaagaaa

SEQ ID NO: 484484 - RNA, 19 nt, Homo sapiens
  misc_RNA (1)...(19): siRNA sense strand
gaaaaggacaucaaacaag

SEQ ID NO: 484485 - RNA, 19 nt, Homo sapiens
  misc_RNA (1)...(19): siRNA sense strand
agaccucuuugaugagauu

SEQ ID NO: 484486 - RNA, 19 nt, Homo sapiens
  misc_RNA (1)...(19): siRNA sense strand
agggaaauauguuggugaa

SEQ ID NO: 484487 - RNA, 19 nt, Homo sapiens
  misc_RNA (1)...(19): siRNA sense strand
gauguucaaggacgauuug

SEQ ID NO: 484488 - RNA, 19 nt, Homo sapiens
  misc_RNA (1)...(19): siRNA sense strand
ggacaccauugcagaaaau

SEQ ID NO: 484489 - RNA, 19 nt, Homo sapiens
  misc_RNA (1)...(19): siRNA sense strand
gcagaauccaccuuguuuc

SEQ ID NO: 484490 - RNA, 19 nt, Homo sapiens
  misc_RNA (1)...(19): siRNA sense strand
uuuggagacugaucuuuau

SEQ ID NO: 484491 - RNA, 19 nt, Homo sapiens
  misc_RNA (1)...(19): siRNA sense strand
gagaaaaggacaucaaaca

SEQ ID NO: 484492 - RNA, 19 nt, Homo sapiens
  misc_RNA (1)...(19): siRNA sense strand
gucuugaugucacugauau

SEQ ID NO: 484493 - RNA, 19 nt, Homo sapiens
  misc_RNA (1)...(19): siRNA sense strand
uagaaacucugagaaacag

SEQ ID NO: 484494 - RNA, 19 nt, Homo sapiens
  misc_RNA (1)...(19): siRNA sense strand
ugaugucacugauauugca

SEQ ID NO: 484495 - RNA, 19 nt, Homo sapiens
  misc_RNA (1)...(19): siRNA sense strand
gagaaaagcauuguuguca

SEQ ID NO: 484496 - RNA, 19 nt, Homo sapiens
  misc_RNA (1)...(19): siRNA sense strand
uaagcagaauccaccuugu

SEQ ID NO: 484497 - RNA, 19 nt, Homo sapiens
  misc_RNA (1)...(19): siRNA sense strand
gggaaacugcaaucuguuc

SEQ ID NO: 484498 - RNA, 19 nt, Homo sapiens
  misc_RNA (1)...(19): siRNA sense strand
uggagacugaucuuuauaa

SEQ ID NO: 484499 - RNA, 19 nt, Homo sapiens
  misc_RNA (1)...(19): siRNA sense strand
cuuuggagacugaucuuua

SEQ ID NO: 484500 - RNA, 19 nt, Homo sapiens
  misc_RNA (1)...(19): siRNA sense strand
aggaagcuuuggagacuga

SEQ ID NO: 484501 - RNA, 19 nt, Homo sapiens
  misc_RNA (1)...(19): siRNA sense strand
augagcaccugcagaaaga

SEQ ID NO: 484502 - RNA, 19 nt, Homo sapiens
  misc_RNA (1)...(19): siRNA sense strand
aggaccagcugauguauac

SEQ ID NO: 484503 - RNA, 19 nt, Homo sapiens
  misc_RNA (1)...(19): siRNA sense strand
cugaugacauggcaaugga

SEQ ID NO: 484504 - RNA, 19 nt, Homo sapiens
  misc_RNA (1)...(19): siRNA sense strand
ucugagagauuggaaugau

SEQ ID NO: 484505 - RNA, 19 nt, Homo sapiens
  misc_RNA (1)...(19): siRNA sense strand
gaaacugcaaucuguucug

SEQ ID NO: 484506 - RNA, 19 nt, Homo sapiens
  misc_RNA (1)...(19): siRNA sense strand
agaaacagcagcccagaag

SEQ ID NO: 484507 - RNA, 19 nt, Homo sapiens
  misc_RNA (1)...(19): siRNA sense strand
cgagauccagucuaugaug

SEQ ID NO: 484508 - RNA, 19 nt, Homo sapiens
  misc_RNA (1)...(19): siRNA sense strand
cagcgaaugcaaagaaauc

SEQ ID NO: 484509 - RNA, 19 nt, Homo sapiens
  misc_RNA (1)...(19): siRNA sense strand
aaaggcuucugagagauug

SEQ ID NO: 484510 - RNA, 19 nt, Homo sapiens
  misc_RNA (1)...(19): siRNA sense strand
gaucuuuauaagcgguuua

SEQ ID NO: 484511 - RNA, 19 nt, Homo sapiens
  misc_RNA (1)...(19): siRNA sense strand
caggaccagcugauguaua

SEQ ID NO: 484512 - RNA, 19 nt, Homo sapiens
  misc_RNA (1)...(19): siRNA sense strand
uuagaaacucugagaaaca

SEQ ID NO: 484513 - RNA, 19 nt, Homo sapiens
  misc_RNA (1)...(19): siRNA sense strand
agauuggaaugauguucaa

SEQ ID NO: 484514 - RNA, 19 nt, Homo sapiens
  misc_RNA (1)...(19): siRNA sense strand
ugaaaggcuucugagagau

SEQ ID NO: 484515 - RNA, 19 nt, Homo sapiens
  misc_RNA (1)...(19): siRNA sense strand
aaaaugagcaccugcagaa

SEQ ID NO: 484516 - RNA, 19 nt, Homo sapiens
  misc_RNA (1)...(19): siRNA sense strand
ugagagauuggaaugaugu

SEQ ID NO: 484517 - RNA, 19 nt, Homo sapiens
  misc_RNA (1)...(19): siRNA sense strand
aagcagaauccaccuuguu

SEQ ID NO: 484518 - RNA, 19 nt, Homo sapiens
  misc_RNA (1)...(19): siRNA sense strand
aacccaguauaacucauuu

SEQ ID NO: 484519 - RNA, 19 nt, Homo sapiens
  misc_RNA (1)...(19): siRNA sense strand
gauggucauucagcaugga

SEQ ID NO: 484520 - RNA, 19 nt, Homo sapiens
  misc_RNA (1)...(19): siRNA sense strand
cuuuagaaacucugagaaa

SEQ ID NO: 484521 - RNA, 19 nt, Homo sapiens
  misc_RNA (1)...(19): siRNA sense strand
cugaaaacaugucuuuaga

SEQ ID NO: 484522 - RNA, 19 nt, Homo sapiens
  misc_RNA (1)...(19): siRNA sense strand
uuggaaugauguucaagga

SEQ ID NO: 484523 - RNA, 19 nt, Homo sapiens
  misc_RNA (1)...(19): siRNA sense strand
agcagaauccaccuuguuu

SEQ ID NO: 484524 - RNA, 19 nt, Homo sapiens
  misc_RNA (1)...(19): siRNA sense strand
ucaggagaaucagcuucaa

SEQ ID NO: 484525 - RNA, 19 nt, Homo sapiens
  misc_RNA (1)...(19): siRNA sense strand
gaguacugaugaggaaagu

SEQ ID NO: 484526 - RNA, 19 nt, Homo sapiens
  misc_RNA (1)...(19): siRNA sense strand
ggaaacugcaaucuguucu

SEQ ID NO: 484527 - RNA, 19 nt, Homo sapiens
  misc_RNA (1)...(19): siRNA sense strand
gcagcucaagaacgagaaa

SEQ ID NO: 484528 - RNA, 19 nt, Homo sapiens
  misc_RNA (1)...(19): siRNA sense strand
ugagugcuaaggaagcuuu

SEQ ID NO: 484529 - RNA, 19 nt, Homo sapiens
  misc_RNA (1)...(19): siRNA sense strand
aaaugaaaggcuucugaga

SEQ ID NO: 484530 - RNA, 19 nt, Homo sapiens
  misc_RNA (1)...(19): siRNA sense strand
gcaggaccagcugauguau

SEQ ID NO: 484531 - RNA, 19 nt, Homo sapiens
  misc_RNA (1)...(19): siRNA sense strand
aggagaaucagcuucaaga

SEQ ID NO: 484532 - RNA, 19 nt, Homo sapiens
  misc_RNA (1)...(19): siRNA sense strand
acugauauugcaccaagua

SEQ ID NO: 484533 - RNA, 19 nt, Homo sapiens
  misc_RNA (1)...(19): siRNA sense strand
aaucuguucugaaaugacu

SEQ ID NO: 484534 - RNA, 19 nt, Homo sapiens
  misc_RNA (1)...(19): siRNA sense strand
gaacaacaaggagcagaua

SEQ ID NO: 484535 - RNA, 19 nt, Homo sapiens
  misc_RNA (1)...(19): siRNA sense strand
ggagcgaacugucaaagag

SEQ ID NO: 484536 - RNA, 19 nt, Homo sapiens
  misc_RNA (1)...(19): siRNA sense strand
cacagcagcuucaggcaaa

SEQ ID NO: 484537 - RNA, 19 nt, Homo sapiens
  misc_RNA (1)...(19): siRNA sense strand
gagcagauacagaagauca

SEQ ID NO: 484538 - RNA, 19 nt, Homo sapiens
  misc_RNA (1)...(19): siRNA sense strand
acaaggagcagauacagaa

SEQ ID NO: 484539 - RNA, 19 nt, Homo sapiens
  misc_RNA (1)...(19): siRNA sense strand
gaagccagcagccaaggaa

SEQ ID NO: 484540 - RNA, 19 nt, Homo sapiens
  misc_RNA (1)...(19): siRNA sense strand
cagcugaguuggagaugga

SEQ ID NO: 484541 - RNA, 19 nt, Homo sapiens
  misc_RNA (1)...(19): siRNA sense strand
ugaaggagguagaugaaac

SEQ ID NO: 484542 - RNA, 19 nt, Homo sapiens
  misc_RNA (1)...(19): siRNA sense strand
aagaggugcugcccgcuuu

SEQ ID NO: 484543 - RNA, 19 nt, Homo sapiens
  misc_RNA (1)...(19): siRNA sense strand
gcagauacagaagaucauu

SEQ ID NO: 484544 - RNA, 19 nt, Homo sapiens
  misc_RNA (1)...(19): siRNA sense strand
ggugauugcuggcuucaac

SEQ ID NO: 484545 - RNA, 19 nt, Homo sapiens
  misc_RNA (1)...(19): siRNA sense strand
guagaugaaacucguaagu

SEQ ID NO: 484546 - RNA, 19 nt, Homo sapiens
  misc_RNA (1)...(19): siRNA sense strand
gaaggagguagaugaaacu

SEQ ID NO: 484547 - RNA, 19 nt, Homo sapiens
  misc_RNA (1)...(19): siRNA sense strand
auacagaagaucauugaga

SEQ ID NO: 484548 - RNA, 19 nt, Homo sapiens
  misc_RNA (1)...(19): siRNA sense strand
gggaaaagaacuaaaugaa

SEQ ID NO: 484549 - RNA, 19 nt, Homo sapiens
  misc_RNA (1)...(19): siRNA sense strand
uaagugcuaccgcaugguu

SEQ ID NO: 484550 - RNA, 19 nt, Homo sapiens
  misc_RNA (1)...(19): siRNA sense strand
agauacagaagaucauuga

SEQ ID NO: 484551 - RNA, 19 nt, Homo sapiens
  misc_RNA (1)...(19): siRNA sense strand
aguuggagauggaguugaa

SEQ ID NO: 484552 - RNA, 19 nt, Homo sapiens
  misc_RNA (1)...(19): siRNA sense strand
gaaugagcacagccuagug

SEQ ID NO: 484553 - RNA, 19 nt, Homo sapiens
  misc_RNA (1)...(19): siRNA sense strand
gcaaagggaaaagaacuaa

SEQ ID NO: 484554 - RNA, 19 nt, Homo sapiens
  misc_RNA (1)...(19): siRNA sense strand
aaugagcacagccuaguga

SEQ ID NO: 484555 - RNA, 19 nt, Homo sapiens
  misc_RNA (1)...(19): siRNA sense strand
gaucauugagacacugaca

SEQ ID NO: 484556 - RNA, 19 nt, Homo sapiens
  misc_RNA (1)...(19): siRNA sense strand
caaccgccuucggcaggaa

SEQ ID NO: 484557 - RNA, 19 nt, Homo sapiens
  misc_RNA (1)...(19): siRNA sense strand
aggagcagauacagaagau

SEQ ID NO: 484558 - RNA, 19 nt, Homo sapiens
  misc_RNA (1)...(19): siRNA sense strand
caacaaggagcagauacag

SEQ ID NO: 484559 - RNA, 19 nt, Homo sapiens
  misc_RNA (1)...(19): siRNA sense strand
ggagauggaguugaaugag

SEQ ID NO: 484560 - RNA, 19 nt, Homo sapiens
  misc_RNA (1)...(19): siRNA sense strand
ccgcagagcaggugauugc

SEQ ID NO: 484561 - RNA, 19 nt, Homo sapiens
  misc_RNA (1)...(19): siRNA sense strand
uagaugaaacucguaagug

SEQ ID NO: 484562 - RNA, 19 nt, Homo sapiens
  misc_RNA (1)...(19): siRNA sense strand
gagguagaugaaacucgua

SEQ ID NO: 484563 - RNA, 19 nt, Homo sapiens
  misc_RNA (1)...(19): siRNA sense strand
cagauacagaagaucauug

SEQ ID NO: 484564 - RNA, 19 nt, Homo sapiens
  misc_RNA (1)...(19): siRNA sense strand
auccaaagcagcugaguug

SEQ ID NO: 484565 - RNA, 19 nt, Homo sapiens
  misc_RNA (1)...(19): siRNA sense strand
ugaaugagcacagccuagu

SEQ ID NO: 484566 - RNA, 19 nt, Homo sapiens
  misc_RNA (1)...(19): siRNA sense strand
ucacagagcugaaggaaga

SEQ ID NO: 484567 - RNA, 19 nt, Homo sapiens
  misc_RNA (1)...(19): siRNA sense strand
gaaggaagaaauagaagua

SEQ ID NO: 484568 - RNA, 19 nt, Homo sapiens
  misc_RNA (1)...(19): siRNA sense strand
gaugaugauugcuuaauga

SEQ ID NO: 484569 - RNA, 19 nt, Homo sapiens
  misc_RNA (1)...(19): siRNA sense strand
gaaggcggcugcagaagau

SEQ ID NO: 484570 - RNA, 19 nt, Homo sapiens
  misc_RNA (1)...(19): siRNA sense strand
gaugauugcuuaaugauac

SEQ ID NO: 484571 - RNA, 19 nt, Homo sapiens
  misc_RNA (1)...(19): siRNA sense strand
agaagaaauugacgccuua

SEQ ID NO: 484572 - RNA, 19 nt, Homo sapiens
  misc_RNA (1)...(19): siRNA sense strand
gaagaaggcggcugcagaa

SEQ ID NO: 484573 - RNA, 19 nt, Homo sapiens
  misc_RNA (1)...(19): siRNA sense strand
gcagaagaugucaauguua

SEQ ID NO: 484574 - RNA, 19 nt, Homo sapiens
  misc_RNA (1)...(19): siRNA sense strand
gaaauugacgccuuagaau

SEQ ID NO: 484575 - RNA, 19 nt, Homo sapiens
  misc_RNA (1)...(19): siRNA sense strand
gcaagaaauguuagaagaa

SEQ ID NO: 484576 - RNA, 19 nt, Homo sapiens
  misc_RNA (1)...(19): siRNA sense strand
gaauacaaguagaaucaca

SEQ ID NO: 484577 - RNA, 19 nt, Homo sapiens
  misc_RNA (1)...(19): siRNA sense strand
ucaaauuggugaugucuuc

SEQ ID NO: 484578 - RNA, 19 nt, Homo sapiens
  misc_RNA (1)...(19): siRNA sense strand
aaacaaauuugcacggaau

SEQ ID NO: 484579 - RNA, 19 nt, Homo sapiens
  misc_RNA (1)...(19): siRNA sense strand
caagaaauguuagaagaag

SEQ ID NO: 484580 - RNA, 19 nt, Homo sapiens
  misc_RNA (1)...(19): siRNA sense strand
ggagcaacauaaaccuuga

SEQ ID NO: 484581 - RNA, 19 nt, Homo sapiens
  misc_RNA (1)...(19): siRNA sense strand
gaagaaacgcaagaaaugu

SEQ ID NO: 484582 - RNA, 19 nt, Homo sapiens
  misc_RNA (1)...(19): siRNA sense strand
gcacggaauacaaguagaa

SEQ ID NO: 484583 - RNA, 19 nt, Homo sapiens
  misc_RNA (1)...(19): siRNA sense strand
cgcaagaaauguuagaaga

SEQ ID NO: 484584 - RNA, 19 nt, Homo sapiens
  misc_RNA (1)...(19): siRNA sense strand
cagaagaugucaauguuac

SEQ ID NO: 484585 - RNA, 19 nt, Homo sapiens
  misc_RNA (1)...(19): siRNA sense strand
guuagcagauuugaaaguu

SEQ ID NO: 484586 - RNA, 19 nt, Homo sapiens
  misc_RNA (1)...(19): siRNA sense strand
ugaagcugaugaaaguuaa

SEQ ID NO: 484587 - RNA, 19 nt, Homo sapiens
  misc_RNA (1)...(19): siRNA sense strand
gaagaugcuugugaugaca

SEQ ID NO: 484588 - RNA, 19 nt, Homo sapiens
  misc_RNA (1)...(19): siRNA sense strand
caauguuacuuucgaagau

SEQ ID NO: 484589 - RNA, 19 nt, Homo sapiens
  misc_RNA (1)...(19): siRNA sense strand
caacauaaaccuugaagcu

SEQ ID NO: 484590 - RNA, 19 nt, Homo sapiens
  misc_RNA (1)...(19): siRNA sense strand
caagaagaaacgcaagaaa

SEQ ID NO: 484591 - RNA, 19 nt, Homo sapiens
  misc_RNA (1)...(19): siRNA sense strand
ccuugaagcugaugaaagu

SEQ ID NO: 484592 - RNA, 19 nt, Homo sapiens
  misc_RNA (1)...(19): siRNA sense strand
guuagaagaagcaaagaaa

SEQ ID NO: 484593 - RNA, 19 nt, Homo sapiens
  misc_RNA (1)...(19): siRNA sense strand
agaagaaacgcaagaaaug

SEQ ID NO: 484594 - RNA, 19 nt, Homo sapiens
  misc_RNA (1)...(19): siRNA sense strand
gcugaaggaagaaauagaa

SEQ ID NO: 484595 - RNA, 19 nt, Homo sapiens
  misc_RNA (1)...(19): siRNA sense strand
gaagaugucaauguuacuu

SEQ ID NO: 484596 - RNA, 19 nt, Homo sapiens
  misc_RNA (1)...(19): siRNA sense strand
aaaguucaguuguaugcaa

SEQ ID NO: 484597 - RNA, 19 nt, Homo sapiens
  misc_RNA (1)...(19): siRNA sense strand
agaaacgcaagaaauguua

SEQ ID NO: 484598 - RNA, 19 nt, Homo sapiens
  misc_RNA (1)...(19): siRNA sense strand
ugcagaagaugucaauguu

SEQ ID NO: 484599 - RNA, 19 nt, Homo sapiens
  misc_RNA (1)...(19): siRNA sense strand
ccuagaagaugcuugugau

SEQ ID NO: 484600 - RNA, 19 nt, Homo sapiens
  misc_RNA (1)...(19): siRNA sense strand
ugcagaugaugauugcuua

SEQ ID NO: 484601 - RNA, 19 nt, Homo sapiens
  misc_RNA (1)...(19): siRNA sense strand
agaaauugacgccuuagaa

SEQ ID NO: 484602 - RNA, 19 nt, Homo sapiens
  misc_RNA (1)...(19): siRNA sense strand
cggaauacaaguagaauca

SEQ ID NO: 484603 - RNA, 19 nt, Homo sapiens
  misc_RNA (1)...(19): siRNA sense strand
uagaagaugcuugugauga

SEQ ID NO: 484604 - RNA, 19 nt, Homo sapiens
  misc_RNA (1)...(19): siRNA sense strand
cagcgaguguuagcagauu

SEQ ID NO: 484605 - RNA, 19 nt, Homo sapiens
  misc_RNA (1)...(19): siRNA sense strand
gcagaugaugauugcuuaa

SEQ ID NO: 484606 - RNA, 19 nt, Homo sapiens
  misc_RNA (1)...(19): siRNA sense strand
agaugaugauugcuuaaug

SEQ ID NO: 484607 - RNA, 19 nt, Homo sapiens
  misc_RNA (1)...(19): siRNA sense strand
aagaagaaacgcaagaaau

SEQ ID NO: 484608 - RNA, 19 nt, Homo sapiens
  misc_RNA (1)...(19): siRNA sense strand
aguguuagcagauuugaaa

SEQ ID NO: 484609 - RNA, 19 nt, Homo sapiens
  misc_RNA (1)...(19): siRNA sense strand
cauaaaccuugaagcugau

SEQ ID NO: 484610 - RNA, 19 nt, Homo sapiens
  misc_RNA (1)...(19): siRNA sense strand
uugaagcugaugaaaguua

SEQ ID NO: 484611 - RNA, 19 nt, Homo sapiens
  misc_RNA (1)...(19): siRNA sense strand
gaaacaacuccaaaaccua

SEQ ID NO: 484612 - RNA, 19 nt, Homo sapiens
  misc_RNA (1)...(19): siRNA sense strand
aagaaacgcaagaaauguu

SEQ ID NO: 484613 - RNA, 19 nt, Homo sapiens
  misc_RNA (1)...(19): siRNA sense strand
agaagaugcuugugaugac

SEQ ID NO: 484614 - RNA, 19 nt, Homo sapiens
  misc_RNA (1)...(19): siRNA sense strand
ucaagaagaaacgcaagaa

SEQ ID NO: 484615 - RNA, 19 nt, Homo sapiens
  misc_RNA (1)...(19): siRNA sense strand
aaaccuagaagaugcuugu

SEQ ID NO: 484616 - RNA, 19 nt, Homo sapiens
  misc_RNA (1)...(19): siRNA sense strand
gagcaacauaaaccuugaa

SEQ ID NO: 484617 - RNA, 19 nt, Homo sapiens
  misc_RNA (1)...(19): siRNA sense strand
gaaacgcaagaaauguuag

SEQ ID NO: 484618 - RNA, 19 nt, Homo sapiens
  misc_RNA (1)...(19): siRNA sense strand
agaaggcggcugcagaaga

SEQ ID NO: 484619 - RNA, 19 nt, Homo sapiens
  misc_RNA (1)...(19): siRNA sense strand
ucaauguuacuuucgaaga

SEQ ID NO: 484620 - RNA, 19 nt, Homo sapiens
  misc_RNA (1)...(19): siRNA sense strand
agagcugaaggaagaaaua

SEQ ID NO: 484621 - RNA, 19 nt, Homo sapiens
  misc_RNA (1)...(19): siRNA sense strand
agaugucaauguuacuuuc

SEQ ID NO: 484622 - RNA, 19 nt, Homo sapiens
  misc_RNA (1)...(19): siRNA sense strand
ugucaauguuacuuucgaa

SEQ ID NO: 484623 - RNA, 19 nt, Homo sapiens
  misc_RNA (1)...(19): siRNA sense strand
aauuggugaugucuucauu

SEQ ID NO: 484624 - RNA, 19 nt, Homo sapiens
  misc_RNA (1)...(19): siRNA sense strand
caaauuugcacggaauaca

SEQ ID NO: 484625 - RNA, 19 nt, Homo sapiens
  misc_RNA (1)...(19): siRNA sense strand
gcuugcagaugaugauugc

SEQ ID NO: 484626 - RNA, 19 nt, Homo sapiens
  misc_RNA (1)...(19): siRNA sense strand
gagcugaaggaagaaauag

SEQ ID NO: 484627 - RNA, 19 nt, Homo sapiens
  misc_RNA (1)...(19): siRNA sense strand
ucaguuguaugcaaaauuc

SEQ ID NO: 484628 - RNA, 19 nt, Homo sapiens
  misc_RNA (1)...(19): siRNA sense strand
aaguucaguuguaugcaaa

SEQ ID NO: 484629 - RNA, 19 nt, Homo sapiens
  misc_RNA (1)...(19): siRNA sense strand
uuggugaugucuucauuag

SEQ ID NO: 484630 - RNA, 19 nt, Homo sapiens
  misc_RNA (1)...(19): siRNA sense strand
gaaucacagagcugaagga

SEQ ID NO: 484631 - RNA, 19 nt, Homo sapiens
  misc_RNA (1)...(19): siRNA sense strand
aaauucgggagcaacauaa

SEQ ID NO: 484632 - RNA, 19 nt, Homo sapiens
  misc_RNA (1)...(19): siRNA sense strand
aaauuugcacggaauacaa

SEQ ID NO: 484633 - RNA, 19 nt, Homo sapiens
  misc_RNA (1)...(19): siRNA sense strand
aaauugacgccuuagaauc

SEQ ID NO: 484634 - RNA, 19 nt, Homo sapiens
  misc_RNA (1)...(19): siRNA sense strand
cugcagaagaugucaaugu

SEQ ID NO: 484635 - RNA, 19 nt, Homo sapiens
  misc_RNA (1)...(19): siRNA sense strand
aaacgcaagaaauguuaga

SEQ ID NO: 484636 - RNA, 19 nt, Homo sapiens
  misc_RNA (1)...(19): siRNA sense strand
gcgaguguuagcagauuug

SEQ ID NO: 484637 - RNA, 19 nt, Homo sapiens
  misc_RNA (1)...(19): siRNA sense strand
gaagaaauugacgccuuag

SEQ ID NO: 484638 - RNA, 19 nt, Homo sapiens
  misc_RNA (1)...(19): siRNA sense strand
ucauuagccauucucaaga

SEQ ID NO: 484639 - RNA, 19 nt, Homo sapiens
  misc_RNA (1)...(19): siRNA sense strand
ugaaggaagaaauagaagu

SEQ ID NO: 484640 - RNA, 19 nt, Homo sapiens
  misc_RNA (1)...(19): siRNA sense strand
uuagcagauuugaaaguuc

SEQ ID NO: 484641 - RNA, 19 nt, Homo sapiens
  misc_RNA (1)...(19): siRNA sense strand
gaugucuucauuagccauu

SEQ ID NO: 484642 - RNA, 19 nt, Homo sapiens
  misc_RNA (1)...(19): siRNA sense strand
gggcagaucuucaaucagu

SEQ ID NO: 484643 - RNA, 19 nt, Homo sapiens
  misc_RNA (1)...(19): siRNA sense strand
ggaaggacauggacaaggu

SEQ ID NO: 484644 - RNA, 19 nt, Homo sapiens
  misc_RNA (1)...(19): siRNA sense strand
aaacgcagcagaaaucuaa

SEQ ID NO: 484645 - RNA, 19 nt, Homo sapiens
  misc_RNA (1)...(19): siRNA sense strand
uguaccagcuggcauauga

SEQ ID NO: 484646 - RNA, 19 nt, Homo sapiens
  misc_RNA (1)...(19): siRNA sense strand
ggacugggcagaucuucaa

SEQ ID NO: 484647 - RNA, 19 nt, Homo sapiens
  misc_RNA (1)...(19): siRNA sense strand
ugacaccuaucaggaguuu

SEQ ID NO: 484648 - RNA, 19 nt, Homo sapiens
  misc_RNA (1)...(19): siRNA sense strand
gggcagcuguggcuucuag

SEQ ID NO: 484649 - RNA, 19 nt, Homo sapiens
  misc_RNA (1)...(19): siRNA sense strand
ccaacagccugguguaugg

SEQ ID NO: 484650 - RNA, 19 nt, Homo sapiens
  misc_RNA (1)...(19): siRNA sense strand
uggacaaggucgagacauu

SEQ ID NO: 484651 - RNA, 19 nt, Homo sapiens
  misc_RNA (1)...(19): siRNA sense strand
ggacaaggucgagacauuc

SEQ ID NO: 484652 - RNA, 19 nt, Homo sapiens
  misc_RNA (1)...(19): siRNA sense strand
gcuggcauaugacaccuau

SEQ ID NO: 484653 - RNA, 19 nt, Homo sapiens
  misc_RNA (1)...(19): siRNA sense strand
gggcugcucuacugcuuca

SEQ ID NO: 484654 - RNA, 19 nt, Homo sapiens
  misc_RNA (1)...(19): siRNA sense strand
cugggcagaucuucaauca

SEQ ID NO: 484655 - RNA, 19 nt, Homo sapiens
  misc_RNA (1)...(19): siRNA sense strand
gcagcagaaaucuaaccua

SEQ ID NO: 484656 - RNA, 19 nt, Homo sapiens
  misc_RNA (1)...(19): siRNA sense strand
gaacuacgggcugcucuac

SEQ ID NO: 484657 - RNA, 19 nt, Homo sapiens
  misc_RNA (1)...(19): siRNA sense strand
gagggcagcuguggcuucu

SEQ ID NO: 484658 - RNA, 19 nt, Homo sapiens
  misc_RNA (1)...(19): siRNA sense strand
gcagugccuucccaaccau

SEQ ID NO: 484659 - RNA, 19 nt, Homo sapiens
  misc_RNA (1)...(19): siRNA sense strand
uggcauaugacaccuauca

SEQ ID NO: 484660 - RNA, 19 nt, Homo sapiens
  misc_RNA (1)...(19): siRNA sense strand
ucaaucaguccuacagcaa

SEQ ID NO: 484661 - RNA, 19 nt, Homo sapiens
  misc_RNA (1)...(19): siRNA sense strand
ccugaaggaccuagaggaa

SEQ ID NO: 484662 - RNA, 19 nt, Homo sapiens
  misc_RNA (1)...(19): siRNA sense strand
ucaggaaggacauggacaa

SEQ ID NO: 484663 - RNA, 19 nt, Homo sapiens
  misc_RNA (1)...(19): siRNA sense strand
gccaacagccugguguaug

SEQ ID NO: 484664 - RNA, 19 nt, Homo sapiens
  misc_RNA (1)...(19): siRNA sense strand
gcaucucccugcugcucau

SEQ ID NO: 484665 - RNA, 19 nt, Homo sapiens
  misc_RNA (1)...(19): siRNA sense strand
cgucccugcuccuggcuuu

SEQ ID NO: 484666 - RNA, 19 nt, Homo sapiens
  misc_RNA (1)...(19): siRNA sense strand
gccuguaccagcuggcaua

SEQ ID NO: 484667 - RNA, 19 nt, Homo sapiens
  misc_RNA (1)...(19): siRNA sense strand
aaucaguccuacagcaagu

SEQ ID NO: 484668 - RNA, 19 nt, Homo sapiens
  misc_RNA (1)...(19): siRNA sense strand
acuacgggcugcucuacug

SEQ ID NO: 484669 - RNA, 19 nt, Homo sapiens
  misc_RNA (1)...(19): siRNA sense strand
ugaaaacgcagcagaaauc

SEQ ID NO: 484670 - RNA, 19 nt, Homo sapiens
  misc_RNA (1)...(19): siRNA sense strand
ucccaaccauucccuuauc

SEQ ID NO: 484671 - RNA, 19 nt, Homo sapiens
  misc_RNA (1)...(19): siRNA sense strand
gggcagaucuucaaucagu

SEQ ID NO: 484672 - RNA, 19 nt, Homo sapiens
  misc_RNA (1)...(19): siRNA sense strand
ggaaggacauggacaaggu

SEQ ID NO: 484673 - RNA, 19 nt, Homo sapiens
  misc_RNA (1)...(19): siRNA sense strand
aaacgcagcagaaaucuaa

SEQ ID NO: 484674 - RNA, 19 nt, Homo sapiens
  misc_RNA (1)...(19): siRNA sense strand
uguaccagcuggcauauga

SEQ ID NO: 484675 - RNA, 19 nt, Homo sapiens
  misc_RNA (1)...(19): siRNA sense strand
ggacugggcagaucuucaa

SEQ ID NO: 484676 - RNA, 19 nt, Homo sapiens
  misc_RNA (1)...(19): siRNA sense strand
ugacaccuaucaggaguuu

SEQ ID NO: 484677 - RNA, 19 nt, Homo sapiens
  misc_RNA (1)...(19): siRNA sense strand
gggcagcuguggcuucuag

SEQ ID NO: 484678 - RNA, 19 nt, Homo sapiens
  misc_RNA (1)...(19): siRNA sense strand
ccaacagccugguguaugg

SEQ ID NO: 484679 - RNA, 19 nt, Homo sapiens
  misc_RNA (1)...(19): siRNA sense strand
uggacaaggucgagacauu

SEQ ID NO: 484680 - RNA, 19 nt, Homo sapiens
  misc_RNA (1)...(19): siRNA sense strand
ggacaaggucgagacauuc

SEQ ID NO: 484681 - RNA, 19 nt, Homo sapiens
  misc_RNA (1)...(19): siRNA sense strand
gcuggcauaugacaccuau

SEQ ID NO: 484682 - RNA, 19 nt, Homo sapiens
  misc_RNA (1)...(19): siRNA sense strand
gggcugcucuacugcuuca

SEQ ID NO: 484683 - RNA, 19 nt, Homo sapiens
  misc_RNA (1)...(19): siRNA sense strand
cugggcagaucuucaauca

SEQ ID NO: 484684 - RNA, 19 nt, Homo sapiens
  misc_RNA (1)...(19): siRNA sense strand
gcagcagaaaucuaaccua

SEQ ID NO: 484685 - RNA, 19 nt, Homo sapiens
  misc_RNA (1)...(19): siRNA sense strand
gaacuacgggcugcucuac

SEQ ID NO: 484686 - RNA, 19 nt, Homo sapiens
  misc_RNA (1)...(19): siRNA sense strand
gagggcagcuguggcuucu

SEQ ID NO: 484687 - RNA, 19 nt, Homo sapiens
  misc_RNA (1)...(19): siRNA sense strand
gcagugccuucccaaccau

SEQ ID NO: 484688 - RNA, 19 nt, Homo sapiens
  misc_RNA (1)...(19): siRNA sense strand
uggcauaugacaccuauca

SEQ ID NO: 484689 - RNA, 19 nt, Homo sapiens
  misc_RNA (1)...(19): siRNA sense strand
ucaaucaguccuacagcaa

SEQ ID NO: 484690 - RNA, 19 nt, Homo sapiens
  misc_RNA (1)...(19): siRNA sense strand
ccugaaggaccuagaggaa

SEQ ID NO: 484691 - RNA, 19 nt, Homo sapiens
  misc_RNA (1)...(19): siRNA sense strand
ucaggaaggacauggacaa

SEQ ID NO: 484692 - RNA, 19 nt, Homo sapiens
  misc_RNA (1)...(19): siRNA sense strand
gccaacagccugguguaug

SEQ ID NO: 484693 - RNA, 19 nt, Homo sapiens
  misc_RNA (1)...(19): siRNA sense strand
gcaucucccugcugcucau

SEQ ID NO: 484694 - RNA, 19 nt, Homo sapiens
  misc_RNA (1)...(19): siRNA sense strand
cgucccugcuccuggcuuu

SEQ ID NO: 484695 - RNA, 19 nt, Homo sapiens
  misc_RNA (1)...(19): siRNA sense strand
gccuguaccagcuggcaua

SEQ ID NO: 484696 - RNA, 19 nt, Homo sapiens
  misc_RNA (1)...(19): siRNA sense strand
aaucaguccuacagcaagu

SEQ ID NO: 484697 - RNA, 19 nt, Homo sapiens
  misc_RNA (1)...(19): siRNA sense strand
acuacgggcugcucuacug

SEQ ID NO: 484698 - RNA, 19 nt, Homo sapiens
  misc_RNA (1)...(19): siRNA sense strand
ugaaaacgcagcagaaauc

SEQ ID NO: 484699 - RNA, 19 nt, Homo sapiens
  misc_RNA (1)...(19): siRNA sense strand
ucccaaccauucccuuauc

SEQ ID NO: 484700 - RNA, 19 nt, Homo sapiens
  misc_RNA (1)...(19): siRNA sense strand
gggcagaucuucaaucagu

SEQ ID NO: 484701 - RNA, 19 nt, Homo sapiens
  misc_RNA (1)...(19): siRNA sense strand
aaacgcagcagaaaucuaa

SEQ ID NO: 484702 - RNA, 19 nt, Homo sapiens
  misc_RNA (1)...(19): siRNA sense strand
uguaccagcuggcauauga

SEQ ID NO: 484703 - RNA, 19 nt, Homo sapiens
  misc_RNA (1)...(19): siRNA sense strand
ggacugggcagaucuucaa

SEQ ID NO: 484704 - RNA, 19 nt, Homo sapiens
  misc_RNA (1)...(19): siRNA sense strand
ugacaccuaucaggaguuu

SEQ ID NO: 484705 - RNA, 19 nt, Homo sapiens
  misc_RNA (1)...(19): siRNA sense strand
ccaacagccugguguaugg

SEQ ID NO: 484706 - RNA, 19 nt, Homo sapiens
  misc_RNA (1)...(19): siRNA sense strand
gcuggcauaugacaccuau

SEQ ID NO: 484707 - RNA, 19 nt, Homo sapiens
  misc_RNA (1)...(19): siRNA sense strand
cugggcagaucuucaauca

SEQ ID NO: 484708 - RNA, 19 nt, Homo sapiens
  misc_RNA (1)...(19): siRNA sense strand
gcagcagaaaucuaaccua

SEQ ID NO: 484709 - RNA, 19 nt, Homo sapiens
  misc_RNA (1)...(19): siRNA sense strand
gcagugccuucccaaccau

SEQ ID NO: 484710 - RNA, 19 nt, Homo sapiens
  misc_RNA (1)...(19): siRNA sense strand
uggcauaugacaccuauca

SEQ ID NO: 484711 - RNA, 19 nt, Homo sapiens
  misc_RNA (1)...(19): siRNA sense strand
ucaaucaguccuacagcaa

SEQ ID NO: 484712 - RNA, 19 nt, Homo sapiens
  misc_RNA (1)...(19): siRNA sense strand
ccugaaggaccuagaggaa

SEQ ID NO: 484713 - RNA, 19 nt, Homo sapiens
  misc_RNA (1)...(19): siRNA sense strand
gccaacagccugguguaug

SEQ ID NO: 484714 - RNA, 19 nt, Homo sapiens
  misc_RNA (1)...(19): siRNA sense strand
gcaucucccugcugcucau

SEQ ID NO: 484715 - RNA, 19 nt, Homo sapiens
  misc_RNA (1)...(19): siRNA sense strand
cgucccugcuccuggcuuu

SEQ ID NO: 484716 - RNA, 19 nt, Homo sapiens
  misc_RNA (1)...(19): siRNA sense strand
gccuguaccagcuggcaua

SEQ ID NO: 484717 - RNA, 19 nt, Homo sapiens
  misc_RNA (1)...(19): siRNA sense strand
aaucaguccuacagcaagu

SEQ ID NO: 484718 - RNA, 19 nt, Homo sapiens
  misc_RNA (1)...(19): siRNA sense strand
ugaaaacgcagcagaaauc

SEQ ID NO: 484719 - RNA, 19 nt, Homo sapiens
  misc_RNA (1)...(19): siRNA sense strand
ucccaaccauucccuuauc

SEQ ID NO: 484720 - RNA, 19 nt, Homo sapiens
  misc_RNA (1)...(19): siRNA sense strand
gggcagaucuucaaucagu

SEQ ID NO: 484721 - RNA, 19 nt, Homo sapiens
  misc_RNA (1)...(19): siRNA sense strand
ggaaggacauggacaaggu

SEQ ID NO: 484722 - RNA, 19 nt, Homo sapiens
  misc_RNA (1)...(19): siRNA sense strand
aaacgcagcagaaaucuaa

SEQ ID NO: 484723 - RNA, 19 nt, Homo sapiens
  misc_RNA (1)...(19): siRNA sense strand
uguaccagcuggcauauga

SEQ ID NO: 484724 - RNA, 19 nt, Homo sapiens
  misc_RNA (1)...(19): siRNA sense strand
ggacugggcagaucuucaa

SEQ ID NO: 484725 - RNA, 19 nt, Homo sapiens
  misc_RNA (1)...(19): siRNA sense strand
ugacaccuaucaggaguuu

SEQ ID NO: 484726 - RNA, 19 nt, Homo sapiens
  misc_RNA (1)...(19): siRNA sense strand
gggcagcuguggcuucuag

SEQ ID NO: 484727 - RNA, 19 nt, Homo sapiens
  misc_RNA (1)...(19): siRNA sense strand
ccaacagccugguguaugg

SEQ ID NO: 484728 - RNA, 19 nt, Homo sapiens
  misc_RNA (1)...(19): siRNA sense strand
uggacaaggucgagacauu

SEQ ID NO: 484729 - RNA, 19 nt, Homo sapiens
  misc_RNA (1)...(19): siRNA sense strand
ggacaaggucgagacauuc

SEQ ID NO: 484730 - RNA, 19 nt, Homo sapiens
  misc_RNA (1)...(19): siRNA sense strand
gcuggcauaugacaccuau

SEQ ID NO: 484731 - RNA, 19 nt, Homo sapiens
  misc_RNA (1)...(19): siRNA sense strand
gggcugcucuacugcuuca

SEQ ID NO: 484732 - RNA, 19 nt, Homo sapiens
  misc_RNA (1)...(19): siRNA sense strand
cugggcagaucuucaauca

SEQ ID NO: 484733 - RNA, 19 nt, Homo sapiens
  misc_RNA (1)...(19): siRNA sense strand
gcagcagaaaucuaaccua

SEQ ID NO: 484734 - RNA, 19 nt, Homo sapiens
  misc_RNA (1)...(19): siRNA sense strand
gaacuacgggcugcucuac

SEQ ID NO: 484735 - RNA, 19 nt, Homo sapiens
  misc_RNA (1)...(19): siRNA sense strand
gagggcagcuguggcuucu

SEQ ID NO: 484736 - RNA, 19 nt, Homo sapiens
  misc_RNA (1)...(19): siRNA sense strand
gcagugccuucccaaccau

SEQ ID NO: 484737 - RNA, 19 nt, Homo sapiens
  misc_RNA (1)...(19): siRNA sense strand
uggcauaugacaccuauca

SEQ ID NO: 484738 - RNA, 19 nt, Homo sapiens
  misc_RNA (1)...(19): siRNA sense strand
ucaaucaguccuacagcaa

SEQ ID NO: 484739 - RNA, 19 nt, Homo sapiens
  misc_RNA (1)...(19): siRNA sense strand
ccugaaggaccuagaggaa

SEQ ID NO: 484740 - RNA, 19 nt, Homo sapiens
  misc_RNA (1)...(19): siRNA sense strand
ucaggaaggacauggacaa

SEQ ID NO: 484741 - RNA, 19 nt, Homo sapiens
  misc_RNA (1)...(19): siRNA sense strand
gccaacagccugguguaug

SEQ ID NO: 484742 - RNA, 19 nt, Homo sapiens
  misc_RNA (1)...(19): siRNA sense strand
gcaucucccugcugcucau

SEQ ID NO: 484743 - RNA, 19 nt, Homo sapiens
  misc_RNA (1)...(19): siRNA sense strand
cgucccugcuccuggcuuu

SEQ ID NO: 484744 - RNA, 19 nt, Homo sapiens
  misc_RNA (1)...(19): siRNA sense strand
gccuguaccagcuggcaua

SEQ ID NO: 484745 - RNA, 19 nt, Homo sapiens
  misc_RNA (1)...(19): siRNA sense strand
aaucaguccuacagcaagu

SEQ ID NO: 484746 - RNA, 19 nt, Homo sapiens
  misc_RNA (1)...(19): siRNA sense strand
acuacgggcugcucuacug

SEQ ID NO: 484747 - RNA, 19 nt, Homo sapiens
  misc_RNA (1)...(19): siRNA sense strand
ugaaaacgcagcagaaauc

SEQ ID NO: 484748 - RNA, 19 nt, Homo sapiens
  misc_RNA (1)...(19): siRNA sense strand
ucccaaccauucccuuauc

SEQ ID NO: 484749 - RNA, 19 nt, Homo sapiens
  misc_RNA (1)...(19): siRNA sense strand
gggcagaucuucaaucagu

SEQ ID NO: 484750 - RNA, 19 nt, Homo sapiens
  misc_RNA (1)...(19): siRNA sense strand
ggaaggacauggacaaggu

SEQ ID NO: 484751 - RNA, 19 nt, Homo sapiens
  misc_RNA (1)...(19): siRNA sense strand
aaacgcagcagaaaucuaa

SEQ ID NO: 484752 - RNA, 19 nt, Homo sapiens
  misc_RNA (1)...(19): siRNA sense strand
uguaccagcuggcauauga

SEQ ID NO: 484753 - RNA, 19 nt, Homo sapiens
  misc_RNA (1)...(19): siRNA sense strand
ggacugggcagaucuucaa

SEQ ID NO: 484754 - RNA, 19 nt, Homo sapiens
  misc_RNA (1)...(19): siRNA sense strand
ugacaccuaucaggaguuu

SEQ ID NO: 484755 - RNA, 19 nt, Homo sapiens
  misc_RNA (1)...(19): siRNA sense strand
gggcagcuguggcuucuag

SEQ ID NO: 484756 - RNA, 19 nt, Homo sapiens
  misc_RNA (1)...(19): siRNA sense strand
ccaacagccugguguaugg

SEQ ID NO: 484757 - RNA, 19 nt, Homo sapiens
  misc_RNA (1)...(19): siRNA sense strand
uggacaaggucgagacauu

SEQ ID NO: 484758 - RNA, 19 nt, Homo sapiens
  misc_RNA (1)...(19): siRNA sense strand
ggacaaggucgagacauuc

SEQ ID NO: 484759 - RNA, 19 nt, Homo sapiens
  misc_RNA (1)...(19): siRNA sense strand
gcuggcauaugacaccuau

SEQ ID NO: 484760 - RNA, 19 nt, Homo sapiens
  misc_RNA (1)...(19): siRNA sense strand
gggcugcucuacugcuuca

SEQ ID NO: 484761 - RNA, 19 nt, Homo sapiens
  misc_RNA (1)...(19): siRNA sense strand
cugggcagaucuucaauca

SEQ ID NO: 484762 - RNA, 19 nt, Homo sapiens
  misc_RNA (1)...(19): siRNA sense strand
gcagcagaaaucuaaccua

SEQ ID NO: 484763 - RNA, 19 nt, Homo sapiens
  misc_RNA (1)...(19): siRNA sense strand
gaacuacgggcugcucuac

SEQ ID NO: 484764 - RNA, 19 nt, Homo sapiens
  misc_RNA (1)...(19): siRNA sense strand
gagggcagcuguggcuucu

SEQ ID NO: 484765 - RNA, 19 nt, Homo sapiens
  misc_RNA (1)...(19): siRNA sense strand
gcagugccuucccaaccau

SEQ ID NO: 484766 - RNA, 19 nt, Homo sapiens
  misc_RNA (1)...(19): siRNA sense strand
uggcauaugacaccuauca

SEQ ID NO: 484767 - RNA, 19 nt, Homo sapiens
  misc_RNA (1)...(19): siRNA sense strand
ucaaucaguccuacagcaa

SEQ ID NO: 484768 - RNA, 19 nt, Homo sapiens
  misc_RNA (1)...(19): siRNA sense strand
ccugaaggaccuagaggaa

SEQ ID NO: 484769 - RNA, 19 nt, Homo sapiens
  misc_RNA (1)...(19): siRNA sense strand
ucaggaaggacauggacaa

SEQ ID NO: 484770 - RNA, 19 nt, Homo sapiens
  misc_RNA (1)...(19): siRNA sense strand
gccaacagccugguguaug

SEQ ID NO: 484771 - RNA, 19 nt, Homo sapiens
  misc_RNA (1)...(19): siRNA sense strand
gcaucucccugcugcucau

SEQ ID NO: 484772 - RNA, 19 nt, Homo sapiens
  misc_RNA (1)...(19): siRNA sense strand
cgucccugcuccuggcuuu

SEQ ID NO: 484773 - RNA, 19 nt, Homo sapiens
  misc_RNA (1)...(19): siRNA sense strand
gccuguaccagcuggcaua

SEQ ID NO: 484774 - RNA, 19 nt, Homo sapiens
  misc_RNA (1)...(19): siRNA sense strand
aaucaguccuacagcaagu

SEQ ID NO: 484775 - RNA, 19 nt, Homo sapiens
  misc_RNA (1)...(19): siRNA sense strand
acuacgggcugcucuacug

SEQ ID NO: 484776 - RNA, 19 nt, Homo sapiens
  misc_RNA (1)...(19): siRNA sense strand
ugaaaacgcagcagaaauc

SEQ ID NO: 484777 - RNA, 19 nt, Homo sapiens
  misc_RNA (1)...(19): siRNA sense strand
ucccaaccauucccuuauc

SEQ ID NO: 484778 - RNA, 19 nt, Homo sapiens
  misc_RNA (1)...(19): siRNA sense strand
gggcagaucuucaaucagu

SEQ ID NO: 484779 - RNA, 19 nt, Homo sapiens
  misc_RNA (1)...(19): siRNA sense strand
ggaaggacauggacaaggu

SEQ ID NO: 484780 - RNA, 19 nt, Homo sapiens
  misc_RNA (1)...(19): siRNA sense strand
aaacgcagcagaaaucuaa

SEQ ID NO: 484781 - RNA, 19 nt, Homo sapiens
  misc_RNA (1)...(19): siRNA sense strand
uguaccagcuggcauauga

SEQ ID NO: 484782 - RNA, 19 nt, Homo sapiens
  misc_RNA (1)...(19): siRNA sense strand
ggacugggcagaucuucaa

SEQ ID NO: 484783 - RNA, 19 nt, Homo sapiens
  misc_RNA (1)...(19): siRNA sense strand
ugacaccuaucaggaguuu

SEQ ID NO: 484784 - RNA, 19 nt, Homo sapiens
  misc_RNA (1)...(19): siRNA sense strand
gggcagcuguggcuucuag

SEQ ID NO: 484785 - RNA, 19 nt, Homo sapiens
  misc_RNA (1)...(19): siRNA sense strand
ccaacagccugguguaugg

SEQ ID NO: 484786 - RNA, 19 nt, Homo sapiens
  misc_RNA (1)...(19): siRNA sense strand
uggacaaggucgagacauu

SEQ ID NO: 484787 - RNA, 19 nt, Homo sapiens
  misc_RNA (1)...(19): siRNA sense strand
ggacaaggucgagacauuc

SEQ ID NO: 484788 - RNA, 19 nt, Homo sapiens
  misc_RNA (1)...(19): siRNA sense strand
gcuggcauaugacaccuau

SEQ ID NO: 484789 - RNA, 19 nt, Homo sapiens
  misc_RNA (1)...(19): siRNA sense strand
gggcugcucuacugcuuca

SEQ ID NO: 484790 - RNA, 19 nt, Homo sapiens
  misc_RNA (1)...(19): siRNA sense strand
cugggcagaucuucaauca

SEQ ID NO: 484791 - RNA, 19 nt, Homo sapiens
  misc_RNA (1)...(19): siRNA sense strand
gcagcagaaaucuaaccua

SEQ ID NO: 484792 - RNA, 19 nt, Homo sapiens
  misc_RNA (1)...(19): siRNA sense strand
gaacuacgggcugcucuac

SEQ ID NO: 484793 - RNA, 19 nt, Homo sapiens
  misc_RNA (1)...(19): siRNA sense strand
gagggcagcuguggcuucu

SEQ ID NO: 484794 - RNA, 19 nt, Homo sapiens
  misc_RNA (1)...(19): siRNA sense strand
gcagugccuucccaaccau

SEQ ID NO: 484795 - RNA, 19 nt, Homo sapiens
  misc_RNA (1)...(19): siRNA sense strand
uggcauaugacaccuauca

SEQ ID NO: 484796 - RNA, 19 nt, Homo sapiens
  misc_RNA (1)...(19): siRNA sense strand
ucaaucaguccuacagcaa

SEQ ID NO: 484797 - RNA, 19 nt, Homo sapiens
  misc_RNA (1)...(19): siRNA sense strand
ccugaaggaccuagaggaa

SEQ ID NO: 484798 - RNA, 19 nt, Homo sapiens
  misc_RNA (1)...(19): siRNA sense strand
ucaggaaggacauggacaa

SEQ ID NO: 484799 - RNA, 19 nt, Homo sapiens
  misc_RNA (1)...(19): siRNA sense strand
gccaacagccugguguaug

SEQ ID NO: 484800 - RNA, 19 nt, Homo sapiens
  misc_RNA (1)...(19): siRNA sense strand
gcaucucccugcugcucau

SEQ ID NO: 484801 - RNA, 19 nt, Homo sapiens
  misc_RNA (1)...(19): siRNA sense strand
cgucccugcuccuggcuuu

SEQ ID NO: 484802 - RNA, 19 nt, Homo sapiens
  misc_RNA (1)...(19): siRNA sense strand
gccuguaccagcuggcaua

SEQ ID NO: 484803 - RNA, 19 nt, Homo sapiens
  misc_RNA (1)...(19): siRNA sense strand
aaucaguccuacagcaagu

SEQ ID NO: 484804 - RNA, 19 nt, Homo sapiens
  misc_RNA (1)...(19): siRNA sense strand
acuacgggcugcucuacug

SEQ ID NO: 484805 - RNA, 19 nt, Homo sapiens
  misc_RNA (1)...(19): siRNA sense strand
ugaaaacgcagcagaaauc

SEQ ID NO: 484806 - RNA, 19 nt, Homo sapiens
  misc_RNA (1)...(19): siRNA sense strand
ucccaaccauucccuuauc

SEQ ID NO: 484807 - RNA, 19 nt, Homo sapiens
  misc_RNA (1)...(19): siRNA sense strand
gggcagaucuucaaucagu

SEQ ID NO: 484808 - RNA, 19 nt, Homo sapiens
  misc_RNA (1)...(19): siRNA sense strand
aaacgcagcagaaaucuaa

SEQ ID NO: 484809 - RNA, 19 nt, Homo sapiens
  misc_RNA (1)...(19): siRNA sense strand
uguaccagcuggcauauga

SEQ ID NO: 484810 - RNA, 19 nt, Homo sapiens
  misc_RNA (1)...(19): siRNA sense strand
ggacugggcagaucuucaa

SEQ ID NO: 484811 - RNA, 19 nt, Homo sapiens
  misc_RNA (1)...(19): siRNA sense strand
ugacaccuaucaggaguuu

SEQ ID NO: 484812 - RNA, 19 nt, Homo sapiens
  misc_RNA (1)...(19): siRNA sense strand
ccaacagccugguguaugg

SEQ ID NO: 484813 - RNA, 19 nt, Homo sapiens
  misc_RNA (1)...(19): siRNA sense strand
gcuggcauaugacaccuau

SEQ ID NO: 484814 - RNA, 19 nt, Homo sapiens
  misc_RNA (1)...(19): siRNA sense strand
cugggcagaucuucaauca

SEQ ID NO: 484815 - RNA, 19 nt, Homo sapiens
  misc_RNA (1)...(19): siRNA sense strand
gcagcagaaaucuaaccua

SEQ ID NO: 484816 - RNA, 19 nt, Homo sapiens
  misc_RNA (1)...(19): siRNA sense strand
gcagugccuucccaaccau

SEQ ID NO: 484817 - RNA, 19 nt, Homo sapiens
  misc_RNA (1)...(19): siRNA sense strand
uggcauaugacaccuauca

SEQ ID NO: 484818 - RNA, 19 nt, Homo sapiens
  misc_RNA (1)...(19): siRNA sense strand
ucaaucaguccuacagcaa

SEQ ID NO: 484819 - RNA, 19 nt, Homo sapiens
  misc_RNA (1)...(19): siRNA sense strand
ccugaaggaccuagaggaa

SEQ ID NO: 484820 - RNA, 19 nt, Homo sapiens
  misc_RNA (1)...(19): siRNA sense strand
gccaacagccugguguaug

SEQ ID NO: 484821 - RNA, 19 nt, Homo sapiens
  misc_RNA (1)...(19): siRNA sense strand
gcaucucccugcugcucau

SEQ ID NO: 484822 - RNA, 19 nt, Homo sapiens
  misc_RNA (1)...(19): siRNA sense strand
cgucccugcuccuggcuuu

SEQ ID NO: 484823 - RNA, 19 nt, Homo sapiens
  misc_RNA (1)...(19): siRNA sense strand
gccuguaccagcuggcaua

SEQ ID NO: 484824 - RNA, 19 nt, Homo sapiens
  misc_RNA (1)...(19): siRNA sense strand
aaucaguccuacagcaagu

SEQ ID NO: 484825 - RNA, 19 nt, Homo sapiens
  misc_RNA (1)...(19): siRNA sense strand
ugaaaacgcagcagaaauc

SEQ ID NO: 484826 - RNA, 19 nt, Homo sapiens
  misc_RNA (1)...(19): siRNA sense strand
ucccaaccauucccuuauc

SEQ ID NO: 484827 - RNA, 19 nt, Homo sapiens
  misc_RNA (1)...(19): siRNA sense strand
gggcagaucuucaaucagu

SEQ ID NO: 484828 - RNA, 19 nt, Homo sapiens
  misc_RNA (1)...(19): siRNA sense strand
ggaaggacauggacaaggu

SEQ ID NO: 484829 - RNA, 19 nt, Homo sapiens
  misc_RNA (1)...(19): siRNA sense strand
aaacgcagcagaaaucuaa

SEQ ID NO: 484830 - RNA, 19 nt, Homo sapiens
  misc_RNA (1)...(19): siRNA sense strand
uguaccagcuggcauauga

SEQ ID NO: 484831 - RNA, 19 nt, Homo sapiens
  misc_RNA (1)...(19): siRNA sense strand
ggacugggcagaucuucaa

SEQ ID NO: 484832 - RNA, 19 nt, Homo sapiens
  misc_RNA (1)...(19): siRNA sense strand
ugacaccuaucaggaguuu

SEQ ID NO: 484833 - RNA, 19 nt, Homo sapiens
  misc_RNA (1)...(19): siRNA sense strand
gggcagcuguggcuucuag

SEQ ID NO: 484834 - RNA, 19 nt, Homo sapiens
  misc_RNA (1)...(19): siRNA sense strand
ccaacagccugguguaugg

SEQ ID NO: 484835 - RNA, 19 nt, Homo sapiens
  misc_RNA (1)...(19): siRNA sense strand
uggacaaggucgagacauu

SEQ ID NO: 484836 - RNA, 19 nt, Homo sapiens
  misc_RNA (1)...(19): siRNA sense strand
ggacaaggucgagacauuc

SEQ ID NO: 484837 - RNA, 19 nt, Homo sapiens
  misc_RNA (1)...(19): siRNA sense strand
gcuggcauaugacaccuau

SEQ ID NO: 484838 - RNA, 19 nt, Homo sapiens
  misc_RNA (1)...(19): siRNA sense strand
gggcugcucuacugcuuca

SEQ ID NO: 484839 - RNA, 19 nt, Homo sapiens
  misc_RNA (1)...(19): siRNA sense strand
cugggcagaucuucaauca

SEQ ID NO: 484840 - RNA, 19 nt, Homo sapiens
  misc_RNA (1)...(19): siRNA sense strand
gcagcagaaaucuaaccua

SEQ ID NO: 484841 - RNA, 19 nt, Homo sapiens
  misc_RNA (1)...(19): siRNA sense strand
gaacuacgggcugcucuac

SEQ ID NO: 484842 - RNA, 19 nt, Homo sapiens
  misc_RNA (1)...(19): siRNA sense strand
gagggcagcuguggcuucu

SEQ ID NO: 484843 - RNA, 19 nt, Homo sapiens
  misc_RNA (1)...(19): siRNA sense strand
gcagugccuucccaaccau

SEQ ID NO: 484844 - RNA, 19 nt, Homo sapiens
  misc_RNA (1)...(19): siRNA sense strand
uggcauaugacaccuauca

SEQ ID NO: 484845 - RNA, 19 nt, Homo sapiens
  misc_RNA (1)...(19): siRNA sense strand
ucaaucaguccuacagcaa

SEQ ID NO: 484846 - RNA, 19 nt, Homo sapiens
  misc_RNA (1)...(19): siRNA sense strand
ccugaaggaccuagaggaa

SEQ ID NO: 484847 - RNA, 19 nt, Homo sapiens
  misc_RNA (1)...(19): siRNA sense strand
ucaggaaggacauggacaa

SEQ ID NO: 484848 - RNA, 19 nt, Homo sapiens
  misc_RNA (1)...(19): siRNA sense strand
gccaacagccugguguaug

SEQ ID NO: 484849 - RNA, 19 nt, Homo sapiens
  misc_RNA (1)...(19): siRNA sense strand
gcaucucccugcugcucau

SEQ ID NO: 484850 - RNA, 19 nt, Homo sapiens
  misc_RNA (1)...(19): siRNA sense strand
cgucccugcuccuggcuuu

SEQ ID NO: 484851 - RNA, 19 nt, Homo sapiens
  misc_RNA (1)...(19): siRNA sense strand
gccuguaccagcuggcaua

SEQ ID NO: 484852 - RNA, 19 nt, Homo sapiens
  misc_RNA (1)...(19): siRNA sense strand
aaucaguccuacagcaagu

SEQ ID NO: 484853 - RNA, 19 nt, Homo sapiens
  misc_RNA (1)...(19): siRNA sense strand
acuacgggcugcucuacug

SEQ ID NO: 484854 - RNA, 19 nt, Homo sapiens
  misc_RNA (1)...(19): siRNA sense strand
ugaaaacgcagcagaaauc

SEQ ID NO: 484855 - RNA, 19 nt, Homo sapiens
  misc_RNA (1)...(19): siRNA sense strand
ucccaaccauucccuuauc

SEQ ID NO: 484856 - RNA, 19 nt, Homo sapiens
  misc_RNA (1)...(19): siRNA sense strand
gggcagaucuucaaucagu

SEQ ID NO: 484857 - RNA, 19 nt, Homo sapiens
  misc_RNA (1)...(19): siRNA sense strand
ggaaggacauggacaaggu

SEQ ID NO: 484858 - RNA, 19 nt, Homo sapiens
  misc_RNA (1)...(19): siRNA sense strand
aaacgcagcagaaaucuaa

SEQ ID NO: 484859 - RNA, 19 nt, Homo sapiens
  misc_RNA (1)...(19): siRNA sense strand
uguaccagcuggcauauga

SEQ ID NO: 484860 - RNA, 19 nt, Homo sapiens
  misc_RNA (1)...(19): siRNA sense strand
ggacugggcagaucuucaa

SEQ ID NO: 484861 - RNA, 19 nt, Homo sapiens
  misc_RNA (1)...(19): siRNA sense strand
ugacaccuaucaggaguuu

SEQ ID NO: 484862 - RNA, 19 nt, Homo sapiens
  misc_RNA (1)...(19): siRNA sense strand
gggcagcuguggcuucuag

SEQ ID NO: 484863 - RNA, 19 nt, Homo sapiens
  misc_RNA (1)...(19): siRNA sense strand
ccaacagccugguguaugg

SEQ ID NO: 484864 - RNA, 19 nt, Homo sapiens
  misc_RNA (1)...(19): siRNA sense strand
uggacaaggucgagacauu

SEQ ID NO: 484865 - RNA, 19 nt, Homo sapiens
  misc_RNA (1)...(19): siRNA sense strand
ggacaaggucgagacauuc

SEQ ID NO: 484866 - RNA, 19 nt, Homo sapiens
  misc_RNA (1)...(19): siRNA sense strand
gcuggcauaugacaccuau

SEQ ID NO: 484867 - RNA, 19 nt, Homo sapiens
  misc_RNA (1)...(19): siRNA sense strand
gggcugcucuacugcuuca

SEQ ID NO: 484868 - RNA, 19 nt, Homo sapiens
  misc_RNA (1)...(19): siRNA sense strand
cugggcagaucuucaauca

SEQ ID NO: 484869 - RNA, 19 nt, Homo sapiens
  misc_RNA (1)...(19): siRNA sense strand
gcagcagaaaucuaaccua

SEQ ID NO: 484870 - RNA, 19 nt, Homo sapiens
  misc_RNA (1)...(19): siRNA sense strand
gaacuacgggcugcucuac

SEQ ID NO: 484871 - RNA, 19 nt, Homo sapiens
  misc_RNA (1)...(19): siRNA sense strand
gagggcagcuguggcuucu

SEQ ID NO: 484872 - RNA, 19 nt, Homo sapiens
  misc_RNA (1)...(19): siRNA sense strand
gcagugccuucccaaccau

SEQ ID NO: 484873 - RNA, 19 nt, Homo sapiens
  misc_RNA (1)...(19): siRNA sense strand
uggcauaugacaccuauca

SEQ ID NO: 484874 - RNA, 19 nt, Homo sapiens
  misc_RNA (1)...(19): siRNA sense strand
ucaaucaguccuacagcaa

SEQ ID NO: 484875 - RNA, 19 nt, Homo sapiens
  misc_RNA (1)...(19): siRNA sense strand
ccugaaggaccuagaggaa

SEQ ID NO: 484876 - RNA, 19 nt, Homo sapiens
  misc_RNA (1)...(19): siRNA sense strand
ucaggaaggacauggacaa

SEQ ID NO: 484877 - RNA, 19 nt, Homo sapiens
  misc_RNA (1)...(19): siRNA sense strand
gccaacagccugguguaug

SEQ ID NO: 484878 - RNA, 19 nt, Homo sapiens
  misc_RNA (1)...(19): siRNA sense strand
gcaucucccugcugcucau

SEQ ID NO: 484879 - RNA, 19 nt, Homo sapiens
  misc_RNA (1)...(19): siRNA sense strand
cgucccugcuccuggcuuu

SEQ ID NO: 484880 - RNA, 19 nt, Homo sapiens
  misc_RNA (1)...(19): siRNA sense strand
gccuguaccagcuggcaua

SEQ ID NO: 484881 - RNA, 19 nt, Homo sapiens
  misc_RNA (1)...(19): siRNA sense strand
aaucaguccuacagcaagu

SEQ ID NO: 484882 - RNA, 19 nt, Homo sapiens
  misc_RNA (1)...(19): siRNA sense strand
acuacgggcugcucuacug

SEQ ID NO: 484883 - RNA, 19 nt, Homo sapiens
  misc_RNA (1)...(19): siRNA sense strand
ugaaaacgcagcagaaauc

SEQ ID NO: 484884 - RNA, 19 nt, Homo sapiens
  misc_RNA (1)...(19): siRNA sense strand
ucccaaccauucccuuauc

SEQ ID NO: 484885 - RNA, 19 nt, Homo sapiens
  misc_RNA (1)...(19): siRNA sense strand
gggcagaucuucaaucagu

SEQ ID NO: 484886 - RNA, 19 nt, Homo sapiens
  misc_RNA (1)...(19): siRNA sense strand
ggaaggacauggacaaggu

SEQ ID NO: 484887 - RNA, 19 nt, Homo sapiens
  misc_RNA (1)...(19): siRNA sense strand
aaacgcagcagaaaucuaa

SEQ ID NO: 484888 - RNA, 19 nt, Homo sapiens
  misc_RNA (1)...(19): siRNA sense strand
uguaccagcuggcauauga

SEQ ID NO: 484889 - RNA, 19 nt, Homo sapiens
  misc_RNA (1)...(19): siRNA sense strand
ggacugggcagaucuucaa

SEQ ID NO: 484890 - RNA, 19 nt, Homo sapiens
  misc_RNA (1)...(19): siRNA sense strand
ugacaccuaucaggaguuu

SEQ ID NO: 484891 - RNA, 19 nt, Homo sapiens
  misc_RNA (1)...(19): siRNA sense strand
gggcagcuguggcuucuag

SEQ ID NO: 484892 - RNA, 19 nt, Homo sapiens
  misc_RNA (1)...(19): siRNA sense strand
ccaacagccugguguaugg

SEQ ID NO: 484893 - RNA, 19 nt, Homo sapiens
  misc_RNA (1)...(19): siRNA sense strand
uggacaaggucgagacauu

SEQ ID NO: 484894 - RNA, 19 nt, Homo sapiens
  misc_RNA (1)...(19): siRNA sense strand
ggacaaggucgagacauuc

SEQ ID NO: 484895 - RNA, 19 nt, Homo sapiens
  misc_RNA (1)...(19): siRNA sense strand
gcuggcauaugacaccuau

SEQ ID NO: 484896 - RNA, 19 nt, Homo sapiens
  misc_RNA (1)...(19): siRNA sense strand
gggcugcucuacugcuuca

SEQ ID NO: 484897 - RNA, 19 nt, Homo sapiens
  misc_RNA (1)...(19): siRNA sense strand
cugggcagaucuucaauca

SEQ ID NO: 484898 - RNA, 19 nt, Homo sapiens
  misc_RNA (1)...(19): siRNA sense strand
gcagcagaaaucuaaccua

SEQ ID NO: 484899 - RNA, 19 nt, Homo sapiens
  misc_RNA (1)...(19): siRNA sense strand
gaacuacgggcugcucuac

SEQ ID NO: 484900 - RNA, 19 nt, Homo sapiens
  misc_RNA (1)...(19): siRNA sense strand
gagggcagcuguggcuucu

SEQ ID NO: 484901 - RNA, 19 nt, Homo sapiens
  misc_RNA (1)...(19): siRNA sense strand
gcagugccuucccaaccau

SEQ ID NO: 484902 - RNA, 19 nt, Homo sapiens
  misc_RNA (1)...(19): siRNA sense strand
uggcauaugacaccuauca

SEQ ID NO: 484903 - RNA, 19 nt, Homo sapiens
  misc_RNA (1)...(19): siRNA sense strand
ucaaucaguccuacagcaa

SEQ ID NO: 484904 - RNA, 19 nt, Homo sapiens
  misc_RNA (1)...(19): siRNA sense strand
ccugaaggaccuagaggaa

SEQ ID NO: 484905 - RNA, 19 nt, Homo sapiens
  misc_RNA (1)...(19): siRNA sense strand
ucaggaaggacauggacaa

SEQ ID NO: 484906 - RNA, 19 nt, Homo sapiens
  misc_RNA (1)...(19): siRNA sense strand
gccaacagccugguguaug

SEQ ID NO: 484907 - RNA, 19 nt, Homo sapiens
  misc_RNA (1)...(19): siRNA sense strand
gcaucucccugcugcucau

SEQ ID NO: 484908 - RNA, 19 nt, Homo sapiens
  misc_RNA (1)...(19): siRNA sense strand
cgucccugcuccuggcuuu

SEQ ID NO: 484909 - RNA, 19 nt, Homo sapiens
  misc_RNA (1)...(19): siRNA sense strand
gccuguaccagcuggcaua

SEQ ID NO: 484910 - RNA, 19 nt, Homo sapiens
  misc_RNA (1)...(19): siRNA sense strand
aaucaguccuacagcaagu

SEQ ID NO: 484911 - RNA, 19 nt, Homo sapiens
  misc_RNA (1)...(19): siRNA sense strand
acuacgggcugcucuacug

SEQ ID NO: 484912 - RNA, 19 nt, Homo sapiens
  misc_RNA (1)...(19): siRNA sense strand
ugaaaacgcagcagaaauc

SEQ ID NO: 484913 - RNA, 19 nt, Homo sapiens
  misc_RNA (1)...(19): siRNA sense strand
ucccaaccauucccuuauc

SEQ ID NO: 484914 - RNA, 19 nt, Homo sapiens
  misc_RNA (1)...(19): siRNA sense strand
gggcagaucuucaaucagu

SEQ ID NO: 484915 - RNA, 19 nt, Homo sapiens
  misc_RNA (1)...(19): siRNA sense strand
aaacgcagcagaaaucuaa

SEQ ID NO: 484916 - RNA, 19 nt, Homo sapiens
  misc_RNA (1)...(19): siRNA sense strand
uguaccagcuggcauauga

SEQ ID NO: 484917 - RNA, 19 nt, Homo sapiens
  misc_RNA (1)...(19): siRNA sense strand
ggacugggcagaucuucaa

SEQ ID NO: 484918 - RNA, 19 nt, Homo sapiens
  misc_RNA (1)...(19): siRNA sense strand
ugacaccuaucaggaguuu

SEQ ID NO: 484919 - RNA, 19 nt, Homo sapiens
  misc_RNA (1)...(19): siRNA sense strand
ccaacagccugguguaugg

SEQ ID NO: 484920 - RNA, 19 nt, Homo sapiens
  misc_RNA (1)...(19): siRNA sense strand
gcuggcauaugacaccuau

SEQ ID NO: 484921 - RNA, 19 nt, Homo sapiens
  misc_RNA (1)...(19): siRNA sense strand
cugggcagaucuucaauca

SEQ ID NO: 484922 - RNA, 19 nt, Homo sapiens
  misc_RNA (1)...(19): siRNA sense strand
gcagcagaaaucuaaccua

SEQ ID NO: 484923 - RNA, 19 nt, Homo sapiens
  misc_RNA (1)...(19): siRNA sense strand
gcagugccuucccaaccau

SEQ ID NO: 484924 - RNA, 19 nt, Homo sapiens
  misc_RNA (1)...(19): siRNA sense strand
uggcauaugacaccuauca

SEQ ID NO: 484925 - RNA, 19 nt, Homo sapiens
  misc_RNA (1)...(19): siRNA sense strand
ucaaucaguccuacagcaa

SEQ ID NO: 484926 - RNA, 19 nt, Homo sapiens
  misc_RNA (1)...(19): siRNA sense strand
ccugaaggaccuagaggaa

SEQ ID NO: 484927 - RNA, 19 nt, Homo sapiens
  misc_RNA (1)...(19): siRNA sense strand
gccaacagccugguguaug

SEQ ID NO: 484928 - RNA, 19 nt, Homo sapiens
  misc_RNA (1)...(19): siRNA sense strand
gcaucucccugcugcucau

SEQ ID NO: 484929 - RNA, 19 nt, Homo sapiens
  misc_RNA (1)...(19): siRNA sense strand
cgucccugcuccuggcuuu

SEQ ID NO: 484930 - RNA, 19 nt, Homo sapiens
  misc_RNA (1)...(19): siRNA sense strand
gccuguaccagcuggcaua

SEQ ID NO: 484931 - RNA, 19 nt, Homo sapiens
  misc_RNA (1)...(19): siRNA sense strand
aaucaguccuacagcaagu

SEQ ID NO: 484932 - RNA, 19 nt, Homo sapiens
  misc_RNA (1)...(19): siRNA sense strand
ugaaaacgcagcagaaauc

SEQ ID NO: 484933 - RNA, 19 nt, Homo sapiens
  misc_RNA (1)...(19): siRNA sense strand
ucccaaccauucccuuauc

SEQ ID NO: 484934 - RNA, 19 nt, Homo sapiens
  misc_RNA (1)...(19): siRNA sense strand
gggcagaucuucaaucagu

SEQ ID NO: 484935 - RNA, 19 nt, Homo sapiens
  misc_RNA (1)...(19): siRNA sense strand
ggaaggacauggacaaggu

SEQ ID NO: 484936 - RNA, 19 nt, Homo sapiens
  misc_RNA (1)...(19): siRNA sense strand
aaacgcagcagaaaucuaa

SEQ ID NO: 484937 - RNA, 19 nt, Homo sapiens
  misc_RNA (1)...(19): siRNA sense strand
uguaccagcuggcauauga

SEQ ID NO: 484938 - RNA, 19 nt, Homo sapiens
  misc_RNA (1)...(19): siRNA sense strand
ggacugggcagaucuucaa

SEQ ID NO: 484939 - RNA, 19 nt, Homo sapiens
  misc_RNA (1)...(19): siRNA sense strand
ugacaccuaucaggaguuu

SEQ ID NO: 484940 - RNA, 19 nt, Homo sapiens
  misc_RNA (1)...(19): siRNA sense strand
gggcagcuguggcuucuag

SEQ ID NO: 484941 - RNA, 19 nt, Homo sapiens
  misc_RNA (1)...(19): siRNA sense strand
ccaacagccugguguaugg

SEQ ID NO: 484942 - RNA, 19 nt, Homo sapiens
  misc_RNA (1)...(19): siRNA sense strand
uggacaaggucgagacauu

SEQ ID NO: 484943 - RNA, 19 nt, Homo sapiens
  misc_RNA (1)...(19): siRNA sense strand
ggacaaggucgagacauuc

SEQ ID NO: 484944 - RNA, 19 nt, Homo sapiens
  misc_RNA (1)...(19): siRNA sense strand
gcuggcauaugacaccuau

SEQ ID NO: 484945 - RNA, 19 nt, Homo sapiens
  misc_RNA (1)...(19): siRNA sense strand
gggcugcucuacugcuuca

SEQ ID NO: 484946 - RNA, 19 nt, Homo sapiens
  misc_RNA (1)...(19): siRNA sense strand
cugggcagaucuucaauca

SEQ ID NO: 484947 - RNA, 19 nt, Homo sapiens
  misc_RNA (1)...(19): siRNA sense strand
gcagcagaaaucuaaccua

SEQ ID NO: 484948 - RNA, 19 nt, Homo sapiens
  misc_RNA (1)...(19): siRNA sense strand
gaacuacgggcugcucuac

SEQ ID NO: 484949 - RNA, 19 nt, Homo sapiens
  misc_RNA (1)...(19): siRNA sense strand
gagggcagcuguggcuucu

SEQ ID NO: 484950 - RNA, 19 nt, Homo sapiens
  misc_RNA (1)...(19): siRNA sense strand
gcagugccuucccaaccau

SEQ ID NO: 484951 - RNA, 19 nt, Homo sapiens
  misc_RNA (1)...(19): siRNA sense strand
uggcauaugacaccuauca

SEQ ID NO: 484952 - RNA, 19 nt, Homo sapiens
  misc_RNA (1)...(19): siRNA sense strand
ucaaucaguccuacagcaa

SEQ ID NO: 484953 - RNA, 19 nt, Homo sapiens
  misc_RNA (1)...(19): siRNA sense strand
ccugaaggaccuagaggaa

SEQ ID NO: 484954 - RNA, 19 nt, Homo sapiens
  misc_RNA (1)...(19): siRNA sense strand
ucaggaaggacauggacaa

SEQ ID NO: 484955 - RNA, 19 nt, Homo sapiens
  misc_RNA (1)...(19): siRNA sense strand
gccaacagccugguguaug

SEQ ID NO: 484956 - RNA, 19 nt, Homo sapiens
  misc_RNA (1)...(19): siRNA sense strand
gcaucucccugcugcucau

SEQ ID NO: 484957 - RNA, 19 nt, Homo sapiens
  misc_RNA (1)...(19): siRNA sense strand
cgucccugcuccuggcuuu

SEQ ID NO: 484958 - RNA, 19 nt, Homo sapiens
  misc_RNA (1)...(19): siRNA sense strand
gccuguaccagcuggcaua

SEQ ID NO: 484959 - RNA, 19 nt, Homo sapiens
  misc_RNA (1)...(19): siRNA sense strand
aaucaguccuacagcaagu

SEQ ID NO: 484960 - RNA, 19 nt, Homo sapiens
  misc_RNA (1)...(19): siRNA sense strand
acuacgggcugcucuacug

SEQ ID NO: 484961 - RNA, 19 nt, Homo sapiens
  misc_RNA (1)...(19): siRNA sense strand
ugaaaacgcagcagaaauc

SEQ ID NO: 484962 - RNA, 19 nt, Homo sapiens
  misc_RNA (1)...(19): siRNA sense strand
ucccaaccauucccuuauc

SEQ ID NO: 484963 - RNA, 19 nt, Homo sapiens
  misc_RNA (1)...(19): siRNA sense strand
ggaaggacauggacaaggu

SEQ ID NO: 484964 - RNA, 19 nt, Homo sapiens
  misc_RNA (1)...(19): siRNA sense strand
ggacugggcagaucuucaa

SEQ ID NO: 484965 - RNA, 19 nt, Homo sapiens
  misc_RNA (1)...(19): siRNA sense strand
gggcagcuguggcuucuag

SEQ ID NO: 484966 - RNA, 19 nt, Homo sapiens
  misc_RNA (1)...(19): siRNA sense strand
uggacaaggucgagacauu

SEQ ID NO: 484967 - RNA, 19 nt, Homo sapiens
  misc_RNA (1)...(19): siRNA sense strand
ggacaaggucgagacauuc

SEQ ID NO: 484968 - RNA, 19 nt, Homo sapiens
  misc_RNA (1)...(19): siRNA sense strand
aagcagaccuacagcaagu

SEQ ID NO: 484969 - RNA, 19 nt, Homo sapiens
  misc_RNA (1)...(19): siRNA sense strand
gggcugcucuacugcuuca

SEQ ID NO: 484970 - RNA, 19 nt, Homo sapiens
  misc_RNA (1)...(19): siRNA sense strand
ucaagcagaccuacagcaa

SEQ ID NO: 484971 - RNA, 19 nt, Homo sapiens
  misc_RNA (1)...(19): siRNA sense strand
gaacuacgggcugcucuac

SEQ ID NO: 484972 - RNA, 19 nt, Homo sapiens
  misc_RNA (1)...(19): siRNA sense strand
gagggcagcuguggcuucu

SEQ ID NO: 484973 - RNA, 19 nt, Homo sapiens
  misc_RNA (1)...(19): siRNA sense strand
ucaggaaggacauggacaa

SEQ ID NO: 484974 - RNA, 19 nt, Homo sapiens
  misc_RNA (1)...(19): siRNA sense strand
acuacgggcugcucuacug

SEQ ID NO: 484975 - RNA, 19 nt, Homo sapiens
  misc_RNA (1)...(19): siRNA sense strand
ggaaggacauggacaaggu

SEQ ID NO: 484976 - RNA, 19 nt, Homo sapiens
  misc_RNA (1)...(19): siRNA sense strand
ggacugggcagaucuucaa

SEQ ID NO: 484977 - RNA, 19 nt, Homo sapiens
  misc_RNA (1)...(19): siRNA sense strand
gggcagcuguggcuucuag

SEQ ID NO: 484978 - RNA, 19 nt, Homo sapiens
  misc_RNA (1)...(19): siRNA sense strand
uggacaaggucgagacauu

SEQ ID NO: 484979 - RNA, 19 nt, Homo sapiens
  misc_RNA (1)...(19): siRNA sense strand
ggacaaggucgagacauuc

SEQ ID NO: 484980 - RNA, 19 nt, Homo sapiens
  misc_RNA (1)...(19): siRNA sense strand
aagcagaccuacagcaagu

SEQ ID NO: 484981 - RNA, 19 nt, Homo sapiens
  misc_RNA (1)...(19): siRNA sense strand
gggcugcucuacugcuuca

SEQ ID NO: 484982 - RNA, 19 nt, Homo sapiens
  misc_RNA (1)...(19): siRNA sense strand
ucaagcagaccuacagcaa

SEQ ID NO: 484983 - RNA, 19 nt, Homo sapiens
  misc_RNA (1)...(19): siRNA sense strand
gaacuacgggcugcucuac

SEQ ID NO: 484984 - RNA, 19 nt, Homo sapiens
  misc_RNA (1)...(19): siRNA sense strand
gagggcagcuguggcuucu

SEQ ID NO: 484985 - RNA, 19 nt, Homo sapiens
  misc_RNA (1)...(19): siRNA sense strand
ucaggaaggacauggacaa

SEQ ID NO: 484986 - RNA, 19 nt, Homo sapiens
  misc_RNA (1)...(19): siRNA sense strand
acuacgggcugcucuacug

SEQ ID NO: 484987 - RNA, 19 nt, Homo sapiens
  misc_RNA (1)...(19): siRNA sense strand
ggaaggacauggacaaggu

SEQ ID NO: 484988 - RNA, 19 nt, Homo sapiens
  misc_RNA (1)...(19): siRNA sense strand
ggacugggcagaucuucaa

SEQ ID NO: 484989 - RNA, 19 nt, Homo sapiens
  misc_RNA (1)...(19): siRNA sense strand
gggcagcuguggcuucuag

SEQ ID NO: 484990 - RNA, 19 nt, Homo sapiens
  misc_RNA (1)...(19): siRNA sense strand
uggacaaggucgagacauu

SEQ ID NO: 484991 - RNA, 19 nt, Homo sapiens
  misc_RNA (1)...(19): siRNA sense strand
ggacaaggucgagacauuc

SEQ ID NO: 484992 - RNA, 19 nt, Homo sapiens
  misc_RNA (1)...(19): siRNA sense strand
aagcagaccuacagcaagu

SEQ ID NO: 484993 - RNA, 19 nt, Homo sapiens
  misc_RNA (1)...(19): siRNA sense strand
gggcugcucuacugcuuca

SEQ ID NO: 484994 - RNA, 19 nt, Homo sapiens
  misc_RNA (1)...(19): siRNA sense strand
ucaagcagaccuacagcaa

SEQ ID NO: 484995 - RNA, 19 nt, Homo sapiens
  misc_RNA (1)...(19): siRNA sense strand
gaacuacgggcugcucuac

SEQ ID NO: 484996 - RNA, 19 nt, Homo sapiens
  misc_RNA (1)...(19): siRNA sense strand
gagggcagcuguggcuucu

SEQ ID NO: 484997 - RNA, 19 nt, Homo sapiens
  misc_RNA (1)...(19): siRNA sense strand
ucaggaaggacauggacaa

SEQ ID NO: 484998 - RNA, 19 nt, Homo sapiens
  misc_RNA (1)...(19): siRNA sense strand
acuacgggcugcucuacug

SEQ ID NO: 484999 - RNA, 19 nt, Homo sapiens
  misc_RNA (1)...(19): siRNA sense strand
ggaaggacauggacaaggu

SEQ ID NO: 485000 - RNA, 19 nt, Homo sapiens
  misc_RNA (1)...(19): siRNA sense strand
ggacugggcagaucuucaa

SEQ ID NO: 485001 - RNA, 19 nt, Homo sapiens
  misc_RNA (1)...(19): siRNA sense strand
gggcagcuguggcuucuag

SEQ ID NO: 485002 - RNA, 19 nt, Homo sapiens
  misc_RNA (1)...(19): siRNA sense strand
uggacaaggucgagacauu

SEQ ID NO: 485003 - RNA, 19 nt, Homo sapiens
  misc_RNA (1)...(19): siRNA sense strand
ggacaaggucgagacauuc

SEQ ID NO: 485004 - RNA, 19 nt, Homo sapiens
  misc_RNA (1)...(19): siRNA sense strand
aagcagaccuacagcaagu

SEQ ID NO: 485005 - RNA, 19 nt, Homo sapiens
  misc_RNA (1)...(19): siRNA sense strand
gggcugcucuacugcuuca

SEQ ID NO: 485006 - RNA, 19 nt, Homo sapiens
  misc_RNA (1)...(19): siRNA sense strand
ucaagcagaccuacagcaa

SEQ ID NO: 485007 - RNA, 19 nt, Homo sapiens
  misc_RNA (1)...(19): siRNA sense strand
gaacuacgggcugcucuac

SEQ ID NO: 485008 - RNA, 19 nt, Homo sapiens
  misc_RNA (1)...(19): siRNA sense strand
gagggcagcuguggcuucu

SEQ ID NO: 485009 - RNA, 19 nt, Homo sapiens
  misc_RNA (1)...(19): siRNA sense strand
ucaggaaggacauggacaa

SEQ ID NO: 485010 - RNA, 19 nt, Homo sapiens
  misc_RNA (1)...(19): siRNA sense strand
acuacgggcugcucuacug

SEQ ID NO: 485011 - RNA, 19 nt, Homo sapiens
  misc_RNA (1)...(19): siRNA sense strand
ggacugggcagaucuucaa

SEQ ID NO: 485012 - RNA, 19 nt, Homo sapiens
  misc_RNA (1)...(19): siRNA sense strand
aagcagaccuacagcaagu

SEQ ID NO: 485013 - RNA, 19 nt, Homo sapiens
  misc_RNA (1)...(19): siRNA sense strand
ucaagcagaccuacagcaa

SEQ ID NO: 485014 - RNA, 19 nt, Homo sapiens
  misc_RNA (1)...(19): siRNA sense strand
ggaaggacauggacaaggu

SEQ ID NO: 485015 - RNA, 19 nt, Homo sapiens
  misc_RNA (1)...(19): siRNA sense strand
ggacugggcagaucuucaa

SEQ ID NO: 485016 - RNA, 19 nt, Homo sapiens
  misc_RNA (1)...(19): siRNA sense strand
gggcagcuguggcuucuag

SEQ ID NO: 485017 - RNA, 19 nt, Homo sapiens
  misc_RNA (1)...(19): siRNA sense strand
uggacaaggucgagacauu

SEQ ID NO: 485018 - RNA, 19 nt, Homo sapiens
  misc_RNA (1)...(19): siRNA sense strand
ggacaaggucgagacauuc

SEQ ID NO: 485019 - RNA, 19 nt, Homo sapiens
  misc_RNA (1)...(19): siRNA sense strand
aagcagaccuacagcaagu

SEQ ID NO: 485020 - RNA, 19 nt, Homo sapiens
  misc_RNA (1)...(19): siRNA sense strand
gggcugcucuacugcuuca

SEQ ID NO: 485021 - RNA, 19 nt, Homo sapiens
  misc_RNA (1)...(19): siRNA sense strand
ucaagcagaccuacagcaa

SEQ ID NO: 485022 - RNA, 19 nt, Homo sapiens
  misc_RNA (1)...(19): siRNA sense strand
gaacuacgggcugcucuac

SEQ ID NO: 485023 - RNA, 19 nt, Homo sapiens
  misc_RNA (1)...(19): siRNA sense strand
gagggcagcuguggcuucu

SEQ ID NO: 485024 - RNA, 19 nt, Homo sapiens
  misc_RNA (1)...(19): siRNA sense strand
ucaggaaggacauggacaa

SEQ ID NO: 485025 - RNA, 19 nt, Homo sapiens
  misc_RNA (1)...(19): siRNA sense strand
acuacgggcugcucuacug

SEQ ID NO: 485026 - RNA, 19 nt, Homo sapiens
  misc_RNA (1)...(19): siRNA sense strand
ggaaggacauggacaaggu

SEQ ID NO: 485027 - RNA, 19 nt, Homo sapiens
  misc_RNA (1)...(19): siRNA sense strand
ggacugggcagaucuucaa

SEQ ID NO: 485028 - RNA, 19 nt, Homo sapiens
  misc_RNA (1)...(19): siRNA sense strand
gggcagcuguggcuucuag

SEQ ID NO: 485029 - RNA, 19 nt, Homo sapiens
  misc_RNA (1)...(19): siRNA sense strand
uggacaaggucgagacauu

SEQ ID NO: 485030 - RNA, 19 nt, Homo sapiens
  misc_RNA (1)...(19): siRNA sense strand
ggacaaggucgagacauuc

SEQ ID NO: 485031 - RNA, 19 nt, Homo sapiens
  misc_RNA (1)...(19): siRNA sense strand
aagcagaccuacagcaagu

SEQ ID NO: 485032 - RNA, 19 nt, Homo sapiens
  misc_RNA (1)...(19): siRNA sense strand
gggcugcucuacugcuuca

SEQ ID NO: 485033 - RNA, 19 nt, Homo sapiens
  misc_RNA (1)...(19): siRNA sense strand
ucaagcagaccuacagcaa

SEQ ID NO: 485034 - RNA, 19 nt, Homo sapiens
  misc_RNA (1)...(19): siRNA sense strand
gaacuacgggcugcucuac

SEQ ID NO: 485035 - RNA, 19 nt, Homo sapiens
  misc_RNA (1)...(19): siRNA sense strand
gagggcagcuguggcuucu

SEQ ID NO: 485036 - RNA, 19 nt, Homo sapiens
  misc_RNA (1)...(19): siRNA sense strand
ucaggaaggacauggacaa

SEQ ID NO: 485037 - RNA, 19 nt, Homo sapiens
  misc_RNA (1)...(19): siRNA sense strand
acuacgggcugcucuacug

SEQ ID NO: 485038 - RNA, 19 nt, Homo sapiens
  misc_RNA (1)...(19): siRNA sense strand
ggaaggacauggacaaggu

SEQ ID NO: 485039 - RNA, 19 nt, Homo sapiens
  misc_RNA (1)...(19): siRNA sense strand
ggacugggcagaucuucaa

SEQ ID NO: 485040 - RNA, 19 nt, Homo sapiens
  misc_RNA (1)...(19): siRNA sense strand
gggcagcuguggcuucuag

SEQ ID NO: 485041 - RNA, 19 nt, Homo sapiens
  misc_RNA (1)...(19): siRNA sense strand
uggacaaggucgagacauu

SEQ ID NO: 485042 - RNA, 19 nt, Homo sapiens
  misc_RNA (1)...(19): siRNA sense strand
ggacaaggucgagacauuc

SEQ ID NO: 485043 - RNA, 19 nt, Homo sapiens
  misc_RNA (1)...(19): siRNA sense strand
aagcagaccuacagcaagu

SEQ ID NO: 485044 - RNA, 19 nt, Homo sapiens
  misc_RNA (1)...(19): siRNA sense strand
gggcugcucuacugcuuca

SEQ ID NO: 485045 - RNA, 19 nt, Homo sapiens
  misc_RNA (1)...(19): siRNA sense strand
ucaagcagaccuacagcaa

SEQ ID NO: 485046 - RNA, 19 nt, Homo sapiens
  misc_RNA (1)...(19): siRNA sense strand
gaacuacgggcugcucuac

SEQ ID NO: 485047 - RNA, 19 nt, Homo sapiens
  misc_RNA (1)...(19): siRNA sense strand
gagggcagcuguggcuucu

SEQ ID NO: 485048 - RNA, 19 nt, Homo sapiens
  misc_RNA (1)...(19): siRNA sense strand
ucaggaaggacauggacaa

SEQ ID NO: 485049 - RNA, 19 nt, Homo sapiens
  misc_RNA (1)...(19): siRNA sense strand
acuacgggcugcucuacug

SEQ ID NO: 485050 - RNA, 19 nt, Homo sapiens
  misc_RNA (1)...(19): siRNA sense strand
ggaaggacauggacaaggu

SEQ ID NO: 485051 - RNA, 19 nt, Homo sapiens
  misc_RNA (1)...(19): siRNA sense strand
ggacugggcagaucuucaa

SEQ ID NO: 485052 - RNA, 19 nt, Homo sapiens
  misc_RNA (1)...(19): siRNA sense strand
gggcagcuguggcuucuag

SEQ ID NO: 485053 - RNA, 19 nt, Homo sapiens
  misc_RNA (1)...(19): siRNA sense strand
uggacaaggucgagacauu

SEQ ID NO: 485054 - RNA, 19 nt, Homo sapiens
  misc_RNA (1)...(19): siRNA sense strand
ggacaaggucgagacauuc

SEQ ID NO: 485055 - RNA, 19 nt, Homo sapiens
  misc_RNA (1)...(19): siRNA sense strand
aagcagaccuacagcaagu

SEQ ID NO: 485056 - RNA, 19 nt, Homo sapiens
  misc_RNA (1)...(19): siRNA sense strand
gggcugcucuacugcuuca

SEQ ID NO: 485057 - RNA, 19 nt, Homo sapiens
  misc_RNA (1)...(19): siRNA sense strand
ucaagcagaccuacagcaa

SEQ ID NO: 485058 - RNA, 19 nt, Homo sapiens
  misc_RNA (1)...(19): siRNA sense strand
gaacuacgggcugcucuac

SEQ ID NO: 485059 - RNA, 19 nt, Homo sapiens
  misc_RNA (1)...(19): siRNA sense strand
gagggcagcuguggcuucu

SEQ ID NO: 485060 - RNA, 19 nt, Homo sapiens
  misc_RNA (1)...(19): siRNA sense strand
ucaggaaggacauggacaa

SEQ ID NO: 485061 - RNA, 19 nt, Homo sapiens
  misc_RNA (1)...(19): siRNA sense strand
acuacgggcugcucuacug

SEQ ID NO: 485062 - RNA, 19 nt, Homo sapiens
  misc_RNA (1)...(19): siRNA sense strand
ggacugggcagaucuucaa

SEQ ID NO: 485063 - RNA, 19 nt, Homo sapiens
  misc_RNA (1)...(19): siRNA sense strand
aagcagaccuacagcaagu

SEQ ID NO: 485064 - RNA, 19 nt, Homo sapiens
  misc_RNA (1)...(19): siRNA sense strand
ucaagcagaccuacagcaa

SEQ ID NO: 485065 - RNA, 19 nt, Homo sapiens
  misc_RNA (1)...(19): siRNA sense strand
ggaaggacauggacaaggu

SEQ ID NO: 485066 - RNA, 19 nt, Homo sapiens
  misc_RNA (1)...(19): siRNA sense strand
ggacugggcagaucuucaa

SEQ ID NO: 485067 - RNA, 19 nt, Homo sapiens
  misc_RNA (1)...(19): siRNA sense strand
gggcagcuguggcuucuag

SEQ ID NO: 485068 - RNA, 19 nt, Homo sapiens
  misc_RNA (1)...(19): siRNA sense strand
uggacaaggucgagacauu

SEQ ID NO: 485069 - RNA, 19 nt, Homo sapiens
  misc_RNA (1)...(19): siRNA sense strand
ggacaaggucgagacauuc

SEQ ID NO: 485070 - RNA, 19 nt, Homo sapiens
  misc_RNA (1)...(19): siRNA sense strand
aagcagaccuacagcaagu

SEQ ID NO: 485071 - RNA, 19 nt, Homo sapiens
  misc_RNA (1)...(19): siRNA sense strand
gggcugcucuacugcuuca

SEQ ID NO: 485072 - RNA, 19 nt, Homo sapiens
  misc_RNA (1)...(19): siRNA sense strand
ucaagcagaccuacagcaa

SEQ ID NO: 485073 - RNA, 19 nt, Homo sapiens
  misc_RNA (1)...(19): siRNA sense strand
gaacuacgggcugcucuac

SEQ ID NO: 485074 - RNA, 19 nt, Homo sapiens
  misc_RNA (1)...(19): siRNA sense strand
gagggcagcuguggcuucu

SEQ ID NO: 485075 - RNA, 19 nt, Homo sapiens
  misc_RNA (1)...(19): siRNA sense strand
ucaggaaggacauggacaa

SEQ ID NO: 485076 - RNA, 19 nt, Homo sapiens
  misc_RNA (1)...(19): siRNA sense strand
acuacgggcugcucuacug

SEQ ID NO: 485077 - RNA, 19 nt, Homo sapiens
  misc_RNA (1)...(19): siRNA sense strand
ggaaggacauggacaaggu

SEQ ID NO: 485078 - RNA, 19 nt, Homo sapiens
  misc_RNA (1)...(19): siRNA sense strand
ggacugggcagaucuucaa

SEQ ID NO: 485079 - RNA, 19 nt, Homo sapiens
  misc_RNA (1)...(19): siRNA sense strand
gggcagcuguggcuucuag

SEQ ID NO: 485080 - RNA, 19 nt, Homo sapiens
  misc_RNA (1)...(19): siRNA sense strand
uggacaaggucgagacauu

SEQ ID NO: 485081 - RNA, 19 nt, Homo sapiens
  misc_RNA (1)...(19): siRNA sense strand
ggacaaggucgagacauuc

SEQ ID NO: 485082 - RNA, 19 nt, Homo sapiens
  misc_RNA (1)...(19): siRNA sense strand
aagcagaccuacagcaagu

SEQ ID NO: 485083 - RNA, 19 nt, Homo sapiens
  misc_RNA (1)...(19): siRNA sense strand
gggcugcucuacugcuuca

SEQ ID NO: 485084 - RNA, 19 nt, Homo sapiens
  misc_RNA (1)...(19): siRNA sense strand
ucaagcagaccuacagcaa

SEQ ID NO: 485085 - RNA, 19 nt, Homo sapiens
  misc_RNA (1)...(19): siRNA sense strand
gaacuacgggcugcucuac

SEQ ID NO: 485086 - RNA, 19 nt, Homo sapiens
  misc_RNA (1)...(19): siRNA sense strand
gagggcagcuguggcuucu

SEQ ID NO: 485087 - RNA, 19 nt, Homo sapiens
  misc_RNA (1)...(19): siRNA sense strand
ucaggaaggacauggacaa

SEQ ID NO: 485088 - RNA, 19 nt, Homo sapiens
  misc_RNA (1)...(19): siRNA sense strand
acuacgggcugcucuacug

SEQ ID NO: 485089 - RNA, 19 nt, Homo sapiens
  misc_RNA (1)...(19): siRNA sense strand
ggaaggacauggacaaggu

SEQ ID NO: 485090 - RNA, 19 nt, Homo sapiens
  misc_RNA (1)...(19): siRNA sense strand
ggacugggcagaucuucaa

SEQ ID NO: 485091 - RNA, 19 nt, Homo sapiens
  misc_RNA (1)...(19): siRNA sense strand
gggcagcuguggcuucuag

SEQ ID NO: 485092 - RNA, 19 nt, Homo sapiens
  misc_RNA (1)...(19): siRNA sense strand
uggacaaggucgagacauu

SEQ ID NO: 485093 - RNA, 19 nt, Homo sapiens
  misc_RNA (1)...(19): siRNA sense strand
ggacaaggucgagacauuc

SEQ ID NO: 485094 - RNA, 19 nt, Homo sapiens
  misc_RNA (1)...(19): siRNA sense strand
aagcagaccuacagcaagu

SEQ ID NO: 485095 - RNA, 19 nt, Homo sapiens
  misc_RNA (1)...(19): siRNA sense strand
gggcugcucuacugcuuca

SEQ ID NO: 485096 - RNA, 19 nt, Homo sapiens
  misc_RNA (1)...(19): siRNA sense strand
ucaagcagaccuacagcaa

SEQ ID NO: 485097 - RNA, 19 nt, Homo sapiens
  misc_RNA (1)...(19): siRNA sense strand
gaacuacgggcugcucuac

SEQ ID NO: 485098 - RNA, 19 nt, Homo sapiens
  misc_RNA (1)...(19): siRNA sense strand
gagggcagcuguggcuucu

SEQ ID NO: 485099 - RNA, 19 nt, Homo sapiens
  misc_RNA (1)...(19): siRNA sense strand
ucaggaaggacauggacaa

SEQ ID NO: 485100 - RNA, 19 nt, Homo sapiens
  misc_RNA (1)...(19): siRNA sense strand
acuacgggcugcucuacug

SEQ ID NO: 485101 - RNA, 19 nt, Homo sapiens
  misc_RNA (1)...(19): siRNA sense strand
ggaaggacauggacaaggu

SEQ ID NO: 485102 - RNA, 19 nt, Homo sapiens
  misc_RNA (1)...(19): siRNA sense strand
ggacugggcagaucuucaa

SEQ ID NO: 485103 - RNA, 19 nt, Homo sapiens
  misc_RNA (1)...(19): siRNA sense strand
gggcagcuguggcuucuag

SEQ ID NO: 485104 - RNA, 19 nt, Homo sapiens
  misc_RNA (1)...(19): siRNA sense strand
uggacaaggucgagacauu

SEQ ID NO: 485105 - RNA, 19 nt, Homo sapiens
  misc_RNA (1)...(19): siRNA sense strand
ggacaaggucgagacauuc

SEQ ID NO: 485106 - RNA, 19 nt, Homo sapiens
  misc_RNA (1)...(19): siRNA sense strand
aagcagaccuacagcaagu

SEQ ID NO: 485107 - RNA, 19 nt, Homo sapiens
  misc_RNA (1)...(19): siRNA sense strand
gggcugcucuacugcuuca

SEQ ID NO: 485108 - RNA, 19 nt, Homo sapiens
  misc_RNA (1)...(19): siRNA sense strand
ucaagcagaccuacagcaa

SEQ ID NO: 485109 - RNA, 19 nt, Homo sapiens
  misc_RNA (1)...(19): siRNA sense strand
gaacuacgggcugcucuac

SEQ ID NO: 485110 - RNA, 19 nt, Homo sapiens
  misc_RNA (1)...(19): siRNA sense strand
gagggcagcuguggcuucu

SEQ ID NO: 485111 - RNA, 19 nt, Homo sapiens
  misc_RNA (1)...(19): siRNA sense strand
ucaggaaggacauggacaa

SEQ ID NO: 485112 - RNA, 19 nt, Homo sapiens
  misc_RNA (1)...(19): siRNA sense strand
acuacgggcugcucuacug

SEQ ID NO: 485113 - RNA, 19 nt, Homo sapiens
  misc_RNA (1)...(19): siRNA sense strand
ggacugggcagaucuucaa

SEQ ID NO: 485114 - RNA, 19 nt, Homo sapiens
  misc_RNA (1)...(19): siRNA sense strand
aagcagaccuacagcaagu

SEQ ID NO: 485115 - RNA, 19 nt, Homo sapiens
  misc_RNA (1)...(19): siRNA sense strand
ucaagcagaccuacagcaa

SEQ ID NO: 485116 - RNA, 19 nt, Homo sapiens
  misc_RNA (1)...(19): siRNA sense strand
ggaaggacauggacaaggu

SEQ ID NO: 485117 - RNA, 19 nt, Homo sapiens
  misc_RNA (1)...(19): siRNA sense strand
ggacugggcagaucuucaa

SEQ ID NO: 485118 - RNA, 19 nt, Homo sapiens
  misc_RNA (1)...(19): siRNA sense strand
gggcagcuguggcuucuag

SEQ ID NO: 485119 - RNA, 19 nt, Homo sapiens
  misc_RNA (1)...(19): siRNA sense strand
uggacaaggucgagacauu

SEQ ID NO: 485120 - RNA, 19 nt, Homo sapiens
  misc_RNA (1)...(19): siRNA sense strand
ggacaaggucgagacauuc

SEQ ID NO: 485121 - RNA, 19 nt, Homo sapiens
  misc_RNA (1)...(19): siRNA sense strand
aagcagaccuacagcaagu

SEQ ID NO: 485122 - RNA, 19 nt, Homo sapiens
  misc_RNA (1)...(19): siRNA sense strand
gggcugcucuacugcuuca

SEQ ID NO: 485123 - RNA, 19 nt, Homo sapiens
  misc_RNA (1)...(19): siRNA sense strand
ucaagcagaccuacagcaa

SEQ ID NO: 485124 - RNA, 19 nt, Homo sapiens
  misc_RNA (1)...(19): siRNA sense strand
gaacuacgggcugcucuac

SEQ ID NO: 485125 - RNA, 19 nt, Homo sapiens
  misc_RNA (1)...(19): siRNA sense strand
gagggcagcuguggcuucu

SEQ ID NO: 485126 - RNA, 19 nt, Homo sapiens
  misc_RNA (1)...(19): siRNA sense strand
ucaggaaggacauggacaa

SEQ ID NO: 485127 - RNA, 19 nt, Homo sapiens
  misc_RNA (1)...(19): siRNA sense strand
acuacgggcugcucuacug

SEQ ID NO: 485128 - RNA, 19 nt, Homo sapiens
  misc_RNA (1)...(19): siRNA sense strand
ggaaggacauggacaaggu

SEQ ID NO: 485129 - RNA, 19 nt, Homo sapiens
  misc_RNA (1)...(19): siRNA sense strand
ggacugggcagaucuucaa

SEQ ID NO: 485130 - RNA, 19 nt, Homo sapiens
  misc_RNA (1)...(19): siRNA sense strand
gggcagcuguggcuucuag

SEQ ID NO: 485131 - RNA, 19 nt, Homo sapiens
  misc_RNA (1)...(19): siRNA sense strand
uggacaaggucgagacauu

SEQ ID NO: 485132 - RNA, 19 nt, Homo sapiens
  misc_RNA (1)...(19): siRNA sense strand
ggacaaggucgagacauuc

SEQ ID NO: 485133 - RNA, 19 nt, Homo sapiens
  misc_RNA (1)...(19): siRNA sense strand
aagcagaccuacagcaagu

SEQ ID NO: 485134 - RNA, 19 nt, Homo sapiens
  misc_RNA (1)...(19): siRNA sense strand
gggcugcucuacugcuuca

SEQ ID NO: 485135 - RNA, 19 nt, Homo sapiens
  misc_RNA (1)...(19): siRNA sense strand
ucaagcagaccuacagcaa

SEQ ID NO: 485136 - RNA, 19 nt, Homo sapiens
  misc_RNA (1)...(19): siRNA sense strand
gaacuacgggcugcucuac

SEQ ID NO: 485137 - RNA, 19 nt, Homo sapiens
  misc_RNA (1)...(19): siRNA sense strand
gagggcagcuguggcuucu

SEQ ID NO: 485138 - RNA, 19 nt, Homo sapiens
  misc_RNA (1)...(19): siRNA sense strand
ucaggaaggacauggacaa

SEQ ID NO: 485139 - RNA, 19 nt, Homo sapiens
  misc_RNA (1)...(19): siRNA sense strand
acuacgggcugcucuacug

SEQ ID NO: 485140 - RNA, 19 nt, Homo sapiens
  misc_RNA (1)...(19): siRNA sense strand
ggaaggacauggacaaggu

SEQ ID NO: 485141 - RNA, 19 nt, Homo sapiens
  misc_RNA (1)...(19): siRNA sense strand
ggacugggcagaucuucaa

SEQ ID NO: 485142 - RNA, 19 nt, Homo sapiens
  misc_RNA (1)...(19): siRNA sense strand
gggcagcuguggcuucuag

SEQ ID NO: 485143 - RNA, 19 nt, Homo sapiens
  misc_RNA (1)...(19): siRNA sense strand
uggacaaggucgagacauu

SEQ ID NO: 485144 - RNA, 19 nt, Homo sapiens
  misc_RNA (1)...(19): siRNA sense strand
ggacaaggucgagacauuc

SEQ ID NO: 485145 - RNA, 19 nt, Homo sapiens
  misc_RNA (1)...(19): siRNA sense strand
aagcagaccuacagcaagu

SEQ ID NO: 485146 - RNA, 19 nt, Homo sapiens
  misc_RNA (1)...(19): siRNA sense strand
gggcugcucuacugcuuca

SEQ ID NO: 485147 - RNA, 19 nt, Homo sapiens
  misc_RNA (1)...(19): siRNA sense strand
ucaagcagaccuacagcaa

SEQ ID NO: 485148 - RNA, 19 nt, Homo sapiens
  misc_RNA (1)...(19): siRNA sense strand
gaacuacgggcugcucuac

SEQ ID NO: 485149 - RNA, 19 nt, Homo sapiens
  misc_RNA (1)...(19): siRNA sense strand
gagggcagcuguggcuucu

SEQ ID NO: 485150 - RNA, 19 nt, Homo sapiens
  misc_RNA (1)...(19): siRNA sense strand
ucaggaaggacauggacaa

SEQ ID NO: 485151 - RNA, 19 nt, Homo sapiens
  misc_RNA (1)...(19): siRNA sense strand
acuacgggcugcucuacug

SEQ ID NO: 485152 - RNA, 19 nt, Homo sapiens
  misc_RNA (1)...(19): siRNA sense strand
ggaaggacauggacaaggu

SEQ ID NO: 485153 - RNA, 19 nt, Homo sapiens
  misc_RNA (1)...(19): siRNA sense strand
ggacugggcagaucuucaa

SEQ ID NO: 485154 - RNA, 19 nt, Homo sapiens
  misc_RNA (1)...(19): siRNA sense strand
gggcagcuguggcuucuag

SEQ ID NO: 485155 - RNA, 19 nt, Homo sapiens
  misc_RNA (1)...(19): siRNA sense strand
uggacaaggucgagacauu

SEQ ID NO: 485156 - RNA, 19 nt, Homo sapiens
  misc_RNA (1)...(19): siRNA sense strand
ggacaaggucgagacauuc

SEQ ID NO: 485157 - RNA, 19 nt, Homo sapiens
  misc_RNA (1)...(19): siRNA sense strand
aagcagaccuacagcaagu

SEQ ID NO: 485158 - RNA, 19 nt, Homo sapiens
  misc_RNA (1)...(19): siRNA sense strand
gggcugcucuacugcuuca

SEQ ID NO: 485159 - RNA, 19 nt, Homo sapiens
  misc_RNA (1)...(19): siRNA sense strand
ucaagcagaccuacagcaa

SEQ ID NO: 485160 - RNA, 19 nt, Homo sapiens
  misc_RNA (1)...(19): siRNA sense strand
gaacuacgggcugcucuac

SEQ ID NO: 485161 - RNA, 19 nt, Homo sapiens
  misc_RNA (1)...(19): siRNA sense strand
gagggcagcuguggcuucu

SEQ ID NO: 485162 - RNA, 19 nt, Homo sapiens
  misc_RNA (1)...(19): siRNA sense strand
ucaggaaggacauggacaa

SEQ ID NO: 485163 - RNA, 19 nt, Homo sapiens
  misc_RNA (1)...(19): siRNA sense strand
acuacgggcugcucuacug

SEQ ID NO: 485164 - RNA, 19 nt, Homo sapiens
  misc_RNA (1)...(19): siRNA sense strand
ggacugggcagaucuucaa

SEQ ID NO: 485165 - RNA, 19 nt, Homo sapiens
  misc_RNA (1)...(19): siRNA sense strand
aagcagaccuacagcaagu

SEQ ID NO: 485166 - RNA, 19 nt, Homo sapiens
  misc_RNA (1)...(19): siRNA sense strand
ucaagcagaccuacagcaa

SEQ ID NO: 485167 - RNA, 19 nt, Homo sapiens
  misc_RNA (1)...(19): siRNA sense strand
gcacaucacuuacaguaua

SEQ ID NO: 485168 - RNA, 19 nt, Homo sapiens
  misc_RNA (1)...(19): siRNA sense strand
gaacguaacuccaaaagua

SEQ ID NO: 485169 - RNA, 19 nt, Homo sapiens
  misc_RNA (1)...(19): siRNA sense strand
gaacggagcaguauuucaa

SEQ ID NO: 485170 - RNA, 19 nt, Homo sapiens
  misc_RNA (1)...(19): siRNA sense strand
gaauguaacuccucugaca

SEQ ID NO: 485171 - RNA, 19 nt, Homo sapiens
  misc_RNA (1)...(19): siRNA sense strand
ggacagcucucccuuugau

SEQ ID NO: 485172 - RNA, 19 nt, Homo sapiens
  misc_RNA (1)...(19): siRNA sense strand
ggaaacagacaacuucaaa

SEQ ID NO: 485173 - RNA, 19 nt, Homo sapiens
  misc_RNA (1)...(19): siRNA sense strand
uaacuccucugacauuuga

SEQ ID NO: 485174 - RNA, 19 nt, Homo sapiens
  misc_RNA (1)...(19): siRNA sense strand
gaaguucccuacagugaau

SEQ ID NO: 485175 - RNA, 19 nt, Homo sapiens
  misc_RNA (1)...(19): siRNA sense strand
gcauuaacaugacaggaaa

SEQ ID NO: 485176 - RNA, 19 nt, Homo sapiens
  misc_RNA (1)...(19): siRNA sense strand
gacaagagguagcuccaaa

SEQ ID NO: 485177 - RNA, 19 nt, Homo sapiens
  misc_RNA (1)...(19): siRNA sense strand
agagguagcuccaaauuuc

SEQ ID NO: 485178 - RNA, 19 nt, Homo sapiens
  misc_RNA (1)...(19): siRNA sense strand
uaaagaacguaacuccaaa

SEQ ID NO: 485179 - RNA, 19 nt, Homo sapiens
  misc_RNA (1)...(19): siRNA sense strand
gaaacacaauugacuggau

SEQ ID NO: 485180 - RNA, 19 nt, Homo sapiens
  misc_RNA (1)...(19): siRNA sense strand
caaacuaccuaaugaugau

SEQ ID NO: 485181 - RNA, 19 nt, Homo sapiens
  misc_RNA (1)...(19): siRNA sense strand
acaauugacuggaugaaga

SEQ ID NO: 485182 - RNA, 19 nt, Homo sapiens
  misc_RNA (1)...(19): siRNA sense strand
cgaaagcgauaugcauuga

SEQ ID NO: 485183 - RNA, 19 nt, Homo sapiens
  misc_RNA (1)...(19): siRNA sense strand
ggauacccaaugcaaauua

SEQ ID NO: 485184 - RNA, 19 nt, Homo sapiens
  misc_RNA (1)...(19): siRNA sense strand
caaacgugauguggauaua

SEQ ID NO: 485185 - RNA, 19 nt, Homo sapiens
  misc_RNA (1)...(19): siRNA sense strand
cagcaguucuauggcauua

SEQ ID NO: 485186 - RNA, 19 nt, Homo sapiens
  misc_RNA (1)...(19): siRNA sense strand
gaugagccauggacacuag

SEQ ID NO: 485187 - RNA, 19 nt, Homo sapiens
  misc_RNA (1)...(19): siRNA sense strand
caagagguagcuccaaauu

SEQ ID NO: 485188 - RNA, 19 nt, Homo sapiens
  misc_RNA (1)...(19): siRNA sense strand
ugaagaaguucccuacagu

SEQ ID NO: 485189 - RNA, 19 nt, Homo sapiens
  misc_RNA (1)...(19): siRNA sense strand
ugacuuauuucuuguagca

SEQ ID NO: 485190 - RNA, 19 nt, Homo sapiens
  misc_RNA (1)...(19): siRNA sense strand
gcggaacggagcaguauuu

SEQ ID NO: 485191 - RNA, 19 nt, Homo sapiens
  misc_RNA (1)...(19): siRNA sense strand
acagacaacuucaaacuac

SEQ ID NO: 485192 - RNA, 19 nt, Homo sapiens
  misc_RNA (1)...(19): siRNA sense strand
ggagcaguauuucaaugug

SEQ ID NO: 485193 - RNA, 19 nt, Homo sapiens
  misc_RNA (1)...(19): siRNA sense strand
uaguaucgaugcaguuuau

SEQ ID NO: 485194 - RNA, 19 nt, Homo sapiens
  misc_RNA (1)...(19): siRNA sense strand
gauguggauauaaccauua

SEQ ID NO: 485195 - RNA, 19 nt, Homo sapiens
  misc_RNA (1)...(19): siRNA sense strand
caauguggagguuugguua

SEQ ID NO: 485196 - RNA, 19 nt, Homo sapiens
  misc_RNA (1)...(19): siRNA sense strand
gcaguucuauggcauuaac

SEQ ID NO: 485197 - RNA, 19 nt, Homo sapiens
  misc_RNA (1)...(19): siRNA sense strand
caagauuccuccaccuaca

SEQ ID NO: 485198 - RNA, 19 nt, Homo sapiens
  misc_RNA (1)...(19): siRNA sense strand
gcaaacgugauguggauau

SEQ ID NO: 485199 - RNA, 19 nt, Homo sapiens
  misc_RNA (1)...(19): siRNA sense strand
cacaucacuuacaguauaa

SEQ ID NO: 485200 - RNA, 19 nt, Homo sapiens
  misc_RNA (1)...(19): siRNA sense strand
gaaacaacagggugaugga

SEQ ID NO: 485201 - RNA, 19 nt, Homo sapiens
  misc_RNA (1)...(19): siRNA sense strand
gaagacgguuggauuucgu

SEQ ID NO: 485202 - RNA, 19 nt, Homo sapiens
  misc_RNA (1)...(19): siRNA sense strand
gaaaauagcgacgggaauu

SEQ ID NO: 485203 - RNA, 19 nt, Homo sapiens
  misc_RNA (1)...(19): siRNA sense strand
gacaagauuccuccaccua

SEQ ID NO: 485204 - RNA, 19 nt, Homo sapiens
  misc_RNA (1)...(19): siRNA sense strand
ggaagacgguuggauuucg

SEQ ID NO: 485205 - RNA, 19 nt, Homo sapiens
  misc_RNA (1)...(19): siRNA sense strand
gggcuugccuccuaguauc

SEQ ID NO: 485206 - RNA, 19 nt, Homo sapiens
  misc_RNA (1)...(19): siRNA sense strand
ucaaacuaccuaaugauga

SEQ ID NO: 485207 - RNA, 19 nt, Homo sapiens
  misc_RNA (1)...(19): siRNA sense strand
acagggugauggauggaua

SEQ ID NO: 485208 - RNA, 19 nt, Homo sapiens
  misc_RNA (1)...(19): siRNA sense strand
gaaaauggcaaacgugaug

SEQ ID NO: 485209 - RNA, 19 nt, Homo sapiens
  misc_RNA (1)...(19): siRNA sense strand
caagaccucuaccgacagu

SEQ ID NO: 485210 - RNA, 19 nt, Homo sapiens
  misc_RNA (1)...(19): siRNA sense strand
aaagcgauaugcauugaca

SEQ ID NO: 485211 - RNA, 19 nt, Homo sapiens
  misc_RNA (1)...(19): siRNA sense strand
aagcacaucacuuacagua

SEQ ID NO: 485212 - RNA, 19 nt, Homo sapiens
  misc_RNA (1)...(19): siRNA sense strand
ggcauuaacaugacaggaa

SEQ ID NO: 485213 - RNA, 19 nt, Homo sapiens
  misc_RNA (1)...(19): siRNA sense strand
ggacagaaacacaauugac

SEQ ID NO: 485214 - RNA, 19 nt, Homo sapiens
  misc_RNA (1)...(19): siRNA sense strand
gacaugcucugggauugga

SEQ ID NO: 485215 - RNA, 19 nt, Homo sapiens
  misc_RNA (1)...(19): siRNA sense strand
ugauguggauauaaccauu

SEQ ID NO: 485216 - RNA, 19 nt, Homo sapiens
  misc_RNA (1)...(19): siRNA sense strand
uggcaaacgugauguggau

SEQ ID NO: 485217 - RNA, 19 nt, Homo sapiens
  misc_RNA (1)...(19): siRNA sense strand
gauguguggcagaauguaa

SEQ ID NO: 485218 - RNA, 19 nt, Homo sapiens
  misc_RNA (1)...(19): siRNA sense strand
ggauggauacccaaugcaa

SEQ ID NO: 485219 - RNA, 19 nt, Homo sapiens
  misc_RNA (1)...(19): siRNA sense strand
gggacaugcucugggauug

SEQ ID NO: 485220 - RNA, 19 nt, Homo sapiens
  misc_RNA (1)...(19): siRNA sense strand
ggaaauccuaaucaugaug

SEQ ID NO: 485221 - RNA, 19 nt, Homo sapiens
  misc_RNA (1)...(19): siRNA sense strand
auaaagaacguaacuccaa

SEQ ID NO: 485222 - RNA, 19 nt, Homo sapiens
  misc_RNA (1)...(19): siRNA sense strand
gauggauacccaaugcaaa

SEQ ID NO: 485223 - RNA, 19 nt, Homo sapiens
  misc_RNA (1)...(19): siRNA sense strand
aaacagacaacuucaaacu

SEQ ID NO: 485224 - RNA, 19 nt, Homo sapiens
  misc_RNA (1)...(19): siRNA sense strand
ucugacauuugaagaaguu

SEQ ID NO: 485225 - RNA, 19 nt, Homo sapiens
  misc_RNA (1)...(19): siRNA sense strand
caggaaaaguggacagaaa

SEQ ID NO: 485226 - RNA, 19 nt, Homo sapiens
  misc_RNA (1)...(19): siRNA sense strand
gauacccaaugcaaauuac

SEQ ID NO: 485227 - RNA, 19 nt, Homo sapiens
  misc_RNA (1)...(19): siRNA sense strand
cuuuaacacucuagcuauu

SEQ ID NO: 485228 - RNA, 19 nt, Homo sapiens
  misc_RNA (1)...(19): siRNA sense strand
gagccaaacccaacaucug

SEQ ID NO: 485229 - RNA, 19 nt, Homo sapiens
  misc_RNA (1)...(19): siRNA sense strand
ugauggagagggaggauuu

SEQ ID NO: 485230 - RNA, 19 nt, Homo sapiens
  misc_RNA (1)...(19): siRNA sense strand
gguuggauuucgugcauca

SEQ ID NO: 485231 - RNA, 19 nt, Homo sapiens
  misc_RNA (1)...(19): siRNA sense strand
agaaauggcagcacaagca

SEQ ID NO: 485232 - RNA, 19 nt, Homo sapiens
  misc_RNA (1)...(19): siRNA sense strand
gcauugacaggacagaaau

SEQ ID NO: 485233 - RNA, 19 nt, Homo sapiens
  misc_RNA (1)...(19): siRNA sense strand
guauuucaauguggagguu

SEQ ID NO: 485234 - RNA, 19 nt, Homo sapiens
  misc_RNA (1)...(19): siRNA sense strand
ccaaacccaacaucuguga

SEQ ID NO: 485235 - RNA, 19 nt, Homo sapiens
  misc_RNA (1)...(19): siRNA sense strand
caacuucaaacuaccuaau

SEQ ID NO: 485236 - RNA, 19 nt, Homo sapiens
  misc_RNA (1)...(19): siRNA sense strand
cauggaaacagacaacuuc

SEQ ID NO: 485237 - RNA, 19 nt, Homo sapiens
  misc_RNA (1)...(19): siRNA sense strand
ucccuacagugaauuagaa

SEQ ID NO: 485238 - RNA, 19 nt, Homo sapiens
  misc_RNA (1)...(19): siRNA sense strand
gcuauucgccgugccuuug

SEQ ID NO: 485239 - RNA, 19 nt, Homo sapiens
  misc_RNA (1)...(19): siRNA sense strand
agcacaagcacaucacuua

SEQ ID NO: 485240 - RNA, 19 nt, Homo sapiens
  misc_RNA (1)...(19): siRNA sense strand
caauugacuggaugaagaa

SEQ ID NO: 485241 - RNA, 19 nt, Homo sapiens
  misc_RNA (1)...(19): siRNA sense strand
guaucgaugcaguuuauga

SEQ ID NO: 485242 - RNA, 19 nt, Homo sapiens
  misc_RNA (1)...(19): siRNA sense strand
uguaacuccucugacauuu

SEQ ID NO: 485243 - RNA, 19 nt, Homo sapiens
  misc_RNA (1)...(19): siRNA sense strand
gcacaagcacaucacuuac

SEQ ID NO: 485244 - RNA, 19 nt, Homo sapiens
  misc_RNA (1)...(19): siRNA sense strand
aagaaguucccuacaguga

SEQ ID NO: 485245 - RNA, 19 nt, Homo sapiens
  misc_RNA (1)...(19): siRNA sense strand
gaggagauacccauuuuga

SEQ ID NO: 485246 - RNA, 19 nt, Homo sapiens
  misc_RNA (1)...(19): siRNA sense strand
gacagaaacacaauugacu

SEQ ID NO: 485247 - RNA, 19 nt, Homo sapiens
  misc_RNA (1)...(19): siRNA sense strand
acuucaaacuaccuaauga

SEQ ID NO: 485248 - RNA, 19 nt, Homo sapiens
  misc_RNA (1)...(19): siRNA sense strand
gaaacagacaacuucaaac

SEQ ID NO: 485249 - RNA, 19 nt, Homo sapiens
  misc_RNA (1)...(19): siRNA sense strand
guaacuccucugacauuug

SEQ ID NO: 485250 - RNA, 19 nt, Homo sapiens
  misc_RNA (1)...(19): siRNA sense strand
gcuccaaauuucauauucg

SEQ ID NO: 485251 - RNA, 19 nt, Homo sapiens
  misc_RNA (1)...(19): siRNA sense strand
aaacgugauguggauauaa

SEQ ID NO: 485252 - RNA, 19 nt, Homo sapiens
  misc_RNA (1)...(19): siRNA sense strand
ggaacggagcaguauuuca

SEQ ID NO: 485253 - RNA, 19 nt, Homo sapiens
  misc_RNA (1)...(19): siRNA sense strand
acaagcacaucacuuacag

SEQ ID NO: 485254 - RNA, 19 nt, Homo sapiens
  misc_RNA (1)...(19): siRNA sense strand
accaguacauggaaacaga

SEQ ID NO: 485255 - RNA, 19 nt, Homo sapiens
  misc_RNA (1)...(19): siRNA sense strand
guggacagaaacacaauug

SEQ ID NO: 485256 - RNA, 19 nt, Homo sapiens
  misc_RNA (1)...(19): siRNA sense strand
gucgaaagcgauaugcauu

SEQ ID NO: 485257 - RNA, 19 nt, Homo sapiens
  misc_RNA (1)...(19): siRNA sense strand
uaucgaugcaguuuaugaa

SEQ ID NO: 485258 - RNA, 19 nt, Homo sapiens
  misc_RNA (1)...(19): siRNA sense strand
cgguguaccugaccagaca

SEQ ID NO: 485259 - RNA, 19 nt, Homo sapiens
  misc_RNA (1)...(19): siRNA sense strand
ccucugacauuugaagaag

SEQ ID NO: 485260 - RNA, 19 nt, Homo sapiens
  misc_RNA (1)...(19): siRNA sense strand
gguagcuccaaauuucaua

SEQ ID NO: 485261 - RNA, 19 nt, Homo sapiens
  misc_RNA (1)...(19): siRNA sense strand
aagagguagcuccaaauuu

SEQ ID NO: 485262 - RNA, 19 nt, Homo sapiens
  misc_RNA (1)...(19): siRNA sense strand
gcuauucuucgucgugaga

SEQ ID NO: 485263 - RNA, 19 nt, Homo sapiens
  misc_RNA (1)...(19): siRNA sense strand
cgacgggaauuuuguguuc

SEQ ID NO: 485264 - RNA, 19 nt, Homo sapiens
  misc_RNA (1)...(19): siRNA sense strand
acccaaugcaaauuacuua

SEQ ID NO: 485265 - RNA, 19 nt, Homo sapiens
  misc_RNA (1)...(19): siRNA sense strand
gagaaacaacagggugaug

SEQ ID NO: 485266 - RNA, 19 nt, Homo sapiens
  misc_RNA (1)...(19): siRNA sense strand
cgucgugagauguuuguuu

SEQ ID NO: 485267 - RNA, 19 nt, Homo sapiens
  misc_RNA (1)...(19): siRNA sense strand
gcacaucacuuacaguaua

SEQ ID NO: 485268 - RNA, 19 nt, Homo sapiens
  misc_RNA (1)...(19): siRNA sense strand
gaacguaacuccaaaagua

SEQ ID NO: 485269 - RNA, 19 nt, Homo sapiens
  misc_RNA (1)...(19): siRNA sense strand
gaacggagcaguauuucaa

SEQ ID NO: 485270 - RNA, 19 nt, Homo sapiens
  misc_RNA (1)...(19): siRNA sense strand
gaauguaacuccucugaca

SEQ ID NO: 485271 - RNA, 19 nt, Homo sapiens
  misc_RNA (1)...(19): siRNA sense strand
ggacagcucucccuuugau

SEQ ID NO: 485272 - RNA, 19 nt, Homo sapiens
  misc_RNA (1)...(19): siRNA sense strand
ggaaacagacaacuucaaa

SEQ ID NO: 485273 - RNA, 19 nt, Homo sapiens
  misc_RNA (1)...(19): siRNA sense strand
uaacuccucugacauuuga

SEQ ID NO: 485274 - RNA, 19 nt, Homo sapiens
  misc_RNA (1)...(19): siRNA sense strand
gaaguucccuacagugaau

SEQ ID NO: 485275 - RNA, 19 nt, Homo sapiens
  misc_RNA (1)...(19): siRNA sense strand
gcauuaacaugacaggaaa

SEQ ID NO: 485276 - RNA, 19 nt, Homo sapiens
  misc_RNA (1)...(19): siRNA sense strand
gacaagagguagcuccaaa

SEQ ID NO: 485277 - RNA, 19 nt, Homo sapiens
  misc_RNA (1)...(19): siRNA sense strand
agagguagcuccaaauuuc

SEQ ID NO: 485278 - RNA, 19 nt, Homo sapiens
  misc_RNA (1)...(19): siRNA sense strand
uaaagaacguaacuccaaa

SEQ ID NO: 485279 - RNA, 19 nt, Homo sapiens
  misc_RNA (1)...(19): siRNA sense strand
gaaacacaauugacuggau

SEQ ID NO: 485280 - RNA, 19 nt, Homo sapiens
  misc_RNA (1)...(19): siRNA sense strand
caaacuaccuaaugaugau

SEQ ID NO: 485281 - RNA, 19 nt, Homo sapiens
  misc_RNA (1)...(19): siRNA sense strand
acaauugacuggaugaaga

SEQ ID NO: 485282 - RNA, 19 nt, Homo sapiens
  misc_RNA (1)...(19): siRNA sense strand
cgaaagcgauaugcauuga

SEQ ID NO: 485283 - RNA, 19 nt, Homo sapiens
  misc_RNA (1)...(19): siRNA sense strand
ggauacccaaugcaaauua

SEQ ID NO: 485284 - RNA, 19 nt, Homo sapiens
  misc_RNA (1)...(19): siRNA sense strand
caaacgugauguggauaua

SEQ ID NO: 485285 - RNA, 19 nt, Homo sapiens
  misc_RNA (1)...(19): siRNA sense strand
cagcaguucuauggcauua

SEQ ID NO: 485286 - RNA, 19 nt, Homo sapiens
  misc_RNA (1)...(19): siRNA sense strand
gaugagccauggacacuag

SEQ ID NO: 485287 - RNA, 19 nt, Homo sapiens
  misc_RNA (1)...(19): siRNA sense strand
caagagguagcuccaaauu

SEQ ID NO: 485288 - RNA, 19 nt, Homo sapiens
  misc_RNA (1)...(19): siRNA sense strand
ugaagaaguucccuacagu

SEQ ID NO: 485289 - RNA, 19 nt, Homo sapiens
  misc_RNA (1)...(19): siRNA sense strand
ugacuuauuucuuguagca

SEQ ID NO: 485290 - RNA, 19 nt, Homo sapiens
  misc_RNA (1)...(19): siRNA sense strand
gcggaacggagcaguauuu

SEQ ID NO: 485291 - RNA, 19 nt, Homo sapiens
  misc_RNA (1)...(19): siRNA sense strand
acagacaacuucaaacuac

SEQ ID NO: 485292 - RNA, 19 nt, Homo sapiens
  misc_RNA (1)...(19): siRNA sense strand
ggagcaguauuucaaugug

SEQ ID NO: 485293 - RNA, 19 nt, Homo sapiens
  misc_RNA (1)...(19): siRNA sense strand
uaguaucgaugcaguuuau

SEQ ID NO: 485294 - RNA, 19 nt, Homo sapiens
  misc_RNA (1)...(19): siRNA sense strand
gauguggauauaaccauua

SEQ ID NO: 485295 - RNA, 19 nt, Homo sapiens
  misc_RNA (1)...(19): siRNA sense strand
caauguggagguuugguua

SEQ ID NO: 485296 - RNA, 19 nt, Homo sapiens
  misc_RNA (1)...(19): siRNA sense strand
gcaguucuauggcauuaac

SEQ ID NO: 485297 - RNA, 19 nt, Homo sapiens
  misc_RNA (1)...(19): siRNA sense strand
caagauuccuccaccuaca

SEQ ID NO: 485298 - RNA, 19 nt, Homo sapiens
  misc_RNA (1)...(19): siRNA sense strand
gcaaacgugauguggauau

SEQ ID NO: 485299 - RNA, 19 nt, Homo sapiens
  misc_RNA (1)...(19): siRNA sense strand
cacaucacuuacaguauaa

SEQ ID NO: 485300 - RNA, 19 nt, Homo sapiens
  misc_RNA (1)...(19): siRNA sense strand
gaaacaacagggugaugga

SEQ ID NO: 485301 - RNA, 19 nt, Homo sapiens
  misc_RNA (1)...(19): siRNA sense strand
gaagacgguuggauuucgu

SEQ ID NO: 485302 - RNA, 19 nt, Homo sapiens
  misc_RNA (1)...(19): siRNA sense strand
gaaaauagcgacgggaauu

SEQ ID NO: 485303 - RNA, 19 nt, Homo sapiens
  misc_RNA (1)...(19): siRNA sense strand
gacaagauuccuccaccua

SEQ ID NO: 485304 - RNA, 19 nt, Homo sapiens
  misc_RNA (1)...(19): siRNA sense strand
ggaagacgguuggauuucg

SEQ ID NO: 485305 - RNA, 19 nt, Homo sapiens
  misc_RNA (1)...(19): siRNA sense strand
gggcuugccuccuaguauc

SEQ ID NO: 485306 - RNA, 19 nt, Homo sapiens
  misc_RNA (1)...(19): siRNA sense strand
ucaaacuaccuaaugauga

SEQ ID NO: 485307 - RNA, 19 nt, Homo sapiens
  misc_RNA (1)...(19): siRNA sense strand
acagggugauggauggaua

SEQ ID NO: 485308 - RNA, 19 nt, Homo sapiens
  misc_RNA (1)...(19): siRNA sense strand
gaaaauggcaaacgugaug

SEQ ID NO: 485309 - RNA, 19 nt, Homo sapiens
  misc_RNA (1)...(19): siRNA sense strand
caagaccucuaccgacagu

SEQ ID NO: 485310 - RNA, 19 nt, Homo sapiens
  misc_RNA (1)...(19): siRNA sense strand
aaagcgauaugcauugaca

SEQ ID NO: 485311 - RNA, 19 nt, Homo sapiens
  misc_RNA (1)...(19): siRNA sense strand
aagcacaucacuuacagua

SEQ ID NO: 485312 - RNA, 19 nt, Homo sapiens
  misc_RNA (1)...(19): siRNA sense strand
ggcauuaacaugacaggaa

SEQ ID NO: 485313 - RNA, 19 nt, Homo sapiens
  misc_RNA (1)...(19): siRNA sense strand
ggacagaaacacaauugac

SEQ ID NO: 485314 - RNA, 19 nt, Homo sapiens
  misc_RNA (1)...(19): siRNA sense strand
gacaugcucugggauugga

SEQ ID NO: 485315 - RNA, 19 nt, Homo sapiens
  misc_RNA (1)...(19): siRNA sense strand
ugauguggauauaaccauu

SEQ ID NO: 485316 - RNA, 19 nt, Homo sapiens
  misc_RNA (1)...(19): siRNA sense strand
uggcaaacgugauguggau

SEQ ID NO: 485317 - RNA, 19 nt, Homo sapiens
  misc_RNA (1)...(19): siRNA sense strand
gauguguggcagaauguaa

SEQ ID NO: 485318 - RNA, 19 nt, Homo sapiens
  misc_RNA (1)...(19): siRNA sense strand
ggauggauacccaaugcaa

SEQ ID NO: 485319 - RNA, 19 nt, Homo sapiens
  misc_RNA (1)...(19): siRNA sense strand
gggacaugcucugggauug

SEQ ID NO: 485320 - RNA, 19 nt, Homo sapiens
  misc_RNA (1)...(19): siRNA sense strand
ggaaauccuaaucaugaug

SEQ ID NO: 485321 - RNA, 19 nt, Homo sapiens
  misc_RNA (1)...(19): siRNA sense strand
auaaagaacguaacuccaa

SEQ ID NO: 485322 - RNA, 19 nt, Homo sapiens
  misc_RNA (1)...(19): siRNA sense strand
gauggauacccaaugcaaa

SEQ ID NO: 485323 - RNA, 19 nt, Homo sapiens
  misc_RNA (1)...(19): siRNA sense strand
aaacagacaacuucaaacu

SEQ ID NO: 485324 - RNA, 19 nt, Homo sapiens
  misc_RNA (1)...(19): siRNA sense strand
ucugacauuugaagaaguu

SEQ ID NO: 485325 - RNA, 19 nt, Homo sapiens
  misc_RNA (1)...(19): siRNA sense strand
caggaaaaguggacagaaa

SEQ ID NO: 485326 - RNA, 19 nt, Homo sapiens
  misc_RNA (1)...(19): siRNA sense strand
gauacccaaugcaaauuac

SEQ ID NO: 485327 - RNA, 19 nt, Homo sapiens
  misc_RNA (1)...(19): siRNA sense strand
cuuuaacacucuagcuauu

SEQ ID NO: 485328 - RNA, 19 nt, Homo sapiens
  misc_RNA (1)...(19): siRNA sense strand
gagccaaacccaacaucug

SEQ ID NO: 485329 - RNA, 19 nt, Homo sapiens
  misc_RNA (1)...(19): siRNA sense strand
ugauggagagggaggauuu

SEQ ID NO: 485330 - RNA, 19 nt, Homo sapiens
  misc_RNA (1)...(19): siRNA sense strand
gguuggauuucgugcauca

SEQ ID NO: 485331 - RNA, 19 nt, Homo sapiens
  misc_RNA (1)...(19): siRNA sense strand
agaaauggcagcacaagca

SEQ ID NO: 485332 - RNA, 19 nt, Homo sapiens
  misc_RNA (1)...(19): siRNA sense strand
gcauugacaggacagaaau

SEQ ID NO: 485333 - RNA, 19 nt, Homo sapiens
  misc_RNA (1)...(19): siRNA sense strand
guauuucaauguggagguu

SEQ ID NO: 485334 - RNA, 19 nt, Homo sapiens
  misc_RNA (1)...(19): siRNA sense strand
ccaaacccaacaucuguga

SEQ ID NO: 485335 - RNA, 19 nt, Homo sapiens
  misc_RNA (1)...(19): siRNA sense strand
caacuucaaacuaccuaau

SEQ ID NO: 485336 - RNA, 19 nt, Homo sapiens
  misc_RNA (1)...(19): siRNA sense strand
cauggaaacagacaacuuc

SEQ ID NO: 485337 - RNA, 19 nt, Homo sapiens
  misc_RNA (1)...(19): siRNA sense strand
ucccuacagugaauuagaa

SEQ ID NO: 485338 - RNA, 19 nt, Homo sapiens
  misc_RNA (1)...(19): siRNA sense strand
gcuauucgccgugccuuug

SEQ ID NO: 485339 - RNA, 19 nt, Homo sapiens
  misc_RNA (1)...(19): siRNA sense strand
agcacaagcacaucacuua

SEQ ID NO: 485340 - RNA, 19 nt, Homo sapiens
  misc_RNA (1)...(19): siRNA sense strand
caauugacuggaugaagaa

SEQ ID NO: 485341 - RNA, 19 nt, Homo sapiens
  misc_RNA (1)...(19): siRNA sense strand
guaucgaugcaguuuauga

SEQ ID NO: 485342 - RNA, 19 nt, Homo sapiens
  misc_RNA (1)...(19): siRNA sense strand
uguaacuccucugacauuu

SEQ ID NO: 485343 - RNA, 19 nt, Homo sapiens
  misc_RNA (1)...(19): siRNA sense strand
gcacaagcacaucacuuac

SEQ ID NO: 485344 - RNA, 19 nt, Homo sapiens
  misc_RNA (1)...(19): siRNA sense strand
aagaaguucccuacaguga

SEQ ID NO: 485345 - RNA, 19 nt, Homo sapiens
  misc_RNA (1)...(19): siRNA sense strand
gaggagauacccauuuuga

SEQ ID NO: 485346 - RNA, 19 nt, Homo sapiens
  misc_RNA (1)...(19): siRNA sense strand
gacagaaacacaauugacu

SEQ ID NO: 485347 - RNA, 19 nt, Homo sapiens
  misc_RNA (1)...(19): siRNA sense strand
acuucaaacuaccuaauga

SEQ ID NO: 485348 - RNA, 19 nt, Homo sapiens
  misc_RNA (1)...(19): siRNA sense strand
gaaacagacaacuucaaac

SEQ ID NO: 485349 - RNA, 19 nt, Homo sapiens
  misc_RNA (1)...(19): siRNA sense strand
guaacuccucugacauuug

SEQ ID NO: 485350 - RNA, 19 nt, Homo sapiens
  misc_RNA (1)...(19): siRNA sense strand
gcuccaaauuucauauucg

SEQ ID NO: 485351 - RNA, 19 nt, Homo sapiens
  misc_RNA (1)...(19): siRNA sense strand
aaacgugauguggauauaa

SEQ ID NO: 485352 - RNA, 19 nt, Homo sapiens
  misc_RNA (1)...(19): siRNA sense strand
ggaacggagcaguauuuca

SEQ ID NO: 485353 - RNA, 19 nt, Homo sapiens
  misc_RNA (1)...(19): siRNA sense strand
acaagcacaucacuuacag

SEQ ID NO: 485354 - RNA, 19 nt, Homo sapiens
  misc_RNA (1)...(19): siRNA sense strand
accaguacauggaaacaga

SEQ ID NO: 485355 - RNA, 19 nt, Homo sapiens
  misc_RNA (1)...(19): siRNA sense strand
guggacagaaacacaauug

SEQ ID NO: 485356 - RNA, 19 nt, Homo sapiens
  misc_RNA (1)...(19): siRNA sense strand
gucgaaagcgauaugcauu

SEQ ID NO: 485357 - RNA, 19 nt, Homo sapiens
  misc_RNA (1)...(19): siRNA sense strand
uaucgaugcaguuuaugaa

SEQ ID NO: 485358 - RNA, 19 nt, Homo sapiens
  misc_RNA (1)...(19): siRNA sense strand
cgguguaccugaccagaca

SEQ ID NO: 485359 - RNA, 19 nt, Homo sapiens
  misc_RNA (1)...(19): siRNA sense strand
ccucugacauuugaagaag

SEQ ID NO: 485360 - RNA, 19 nt, Homo sapiens
  misc_RNA (1)...(19): siRNA sense strand
gguagcuccaaauuucaua

SEQ ID NO: 485361 - RNA, 19 nt, Homo sapiens
  misc_RNA (1)...(19): siRNA sense strand
aagagguagcuccaaauuu

SEQ ID NO: 485362 - RNA, 19 nt, Homo sapiens
  misc_RNA (1)...(19): siRNA sense strand
gcuauucuucgucgugaga

SEQ ID NO: 485363 - RNA, 19 nt, Homo sapiens
  misc_RNA (1)...(19): siRNA sense strand
cgacgggaauuuuguguuc

SEQ ID NO: 485364 - RNA, 19 nt, Homo sapiens
  misc_RNA (1)...(19): siRNA sense strand
acccaaugcaaauuacuua

SEQ ID NO: 485365 - RNA, 19 nt, Homo sapiens
  misc_RNA (1)...(19): siRNA sense strand
gagaaacaacagggugaug

SEQ ID NO: 485366 - RNA, 19 nt, Homo sapiens
  misc_RNA (1)...(19): siRNA sense strand
cgucgugagauguuuguuu

SEQ ID NO: 485367 - RNA, 19 nt, Homo sapiens
  misc_RNA (1)...(19): siRNA sense strand
ggacaaaccuggccacaca

SEQ ID NO: 485368 - RNA, 19 nt, Homo sapiens
  misc_RNA (1)...(19): siRNA sense strand
ccaaagaacaacaaagaug

SEQ ID NO: 485369 - RNA, 19 nt, Homo sapiens
  misc_RNA (1)...(19): siRNA sense strand
caaagaacaacaaagaugu

SEQ ID NO: 485370 - RNA, 19 nt, Homo sapiens
  misc_RNA (1)...(19): siRNA sense strand
acaggguacucuccagaaa

SEQ ID NO: 485371 - RNA, 19 nt, Homo sapiens
  misc_RNA (1)...(19): siRNA sense strand
ucaccaaccuccucacaac

SEQ ID NO: 485372 - RNA, 19 nt, Homo sapiens
  misc_RNA (1)...(19): siRNA sense strand
cuacccagccucacaaaga

SEQ ID NO: 485373 - RNA, 19 nt, Homo sapiens
  misc_RNA (1)...(19): siRNA sense strand
ccaaccuccucacaacuga

SEQ ID NO: 485374 - RNA, 19 nt, Homo sapiens
  misc_RNA (1)...(19): siRNA sense strand
gcagacauugugcgugcua

SEQ ID NO: 485375 - RNA, 19 nt, Homo sapiens
  misc_RNA (1)...(19): siRNA sense strand
gguacucuccagaaagaaa

SEQ ID NO: 485376 - RNA, 19 nt, Homo sapiens
  misc_RNA (1)...(19): siRNA sense strand
aggguacucuccagaaaga

SEQ ID NO: 485377 - RNA, 19 nt, Homo sapiens
  misc_RNA (1)...(19): siRNA sense strand
gaggcggguuaccggcuaa

SEQ ID NO: 485378 - RNA, 19 nt, Homo sapiens
  misc_RNA (1)...(19): siRNA sense strand
aaaaugagccaaagaacaa

SEQ ID NO: 485379 - RNA, 19 nt, Homo sapiens
  misc_RNA (1)...(19): siRNA sense strand
gaaaacaccaugggcacua

SEQ ID NO: 485380 - RNA, 19 nt, Homo sapiens
  misc_RNA (1)...(19): siRNA sense strand
agccaaagaacaacaaaga

SEQ ID NO: 485381 - RNA, 19 nt, Homo sapiens
  misc_RNA (1)...(19): siRNA sense strand
aaaguccucagccaugaaa

SEQ ID NO: 485382 - RNA, 19 nt, Homo sapiens
  misc_RNA (1)...(19): siRNA sense strand
agccagcacucaaggacaa

SEQ ID NO: 485383 - RNA, 19 nt, Homo sapiens
  misc_RNA (1)...(19): siRNA sense strand
caaaguggaccccauccua

SEQ ID NO: 485384 - RNA, 19 nt, Homo sapiens
  misc_RNA (1)...(19): siRNA sense strand
acccaguccugcagacauu

SEQ ID NO: 485385 - RNA, 19 nt, Homo sapiens
  misc_RNA (1)...(19): siRNA sense strand
gccaaagaacaacaaagau

SEQ ID NO: 485386 - RNA, 19 nt, Homo sapiens
  misc_RNA (1)...(19): siRNA sense strand
aaagaacaacaaagaugug

SEQ ID NO: 485387 - RNA, 19 nt, Homo sapiens
  misc_RNA (1)...(19): siRNA sense strand
gugacucccuuugauccaa

SEQ ID NO: 485388 - RNA, 19 nt, Homo sapiens
  misc_RNA (1)...(19): siRNA sense strand
gcccugugacucccuuuga

SEQ ID NO: 485389 - RNA, 19 nt, Homo sapiens
  misc_RNA (1)...(19): siRNA sense strand
aaauaagcaucaccaaccu

SEQ ID NO: 485390 - RNA, 19 nt, Homo sapiens
  misc_RNA (1)...(19): siRNA sense strand
agaagaagauguugaauga

SEQ ID NO: 485391 - RNA, 19 nt, Homo sapiens
  misc_RNA (1)...(19): siRNA sense strand
gaacuaauccauaaagaga

SEQ ID NO: 485392 - RNA, 19 nt, Homo sapiens
  misc_RNA (1)...(19): siRNA sense strand
gcagaauacccuauaguua

SEQ ID NO: 485393 - RNA, 19 nt, Homo sapiens
  misc_RNA (1)...(19): siRNA sense strand
gauauggguuuguguauga

SEQ ID NO: 485394 - RNA, 19 nt, Homo sapiens
  misc_RNA (1)...(19): siRNA sense strand
ccaaaggaguaauaaauga

SEQ ID NO: 485395 - RNA, 19 nt, Homo sapiens
  misc_RNA (1)...(19): siRNA sense strand
cuacacugcucaucuauaa

SEQ ID NO: 485396 - RNA, 19 nt, Homo sapiens
  misc_RNA (1)...(19): siRNA sense strand
gcagaaagaugagcauuca

SEQ ID NO: 485397 - RNA, 19 nt, Homo sapiens
  misc_RNA (1)...(19): siRNA sense strand
cagaauacccuauaguuaa

SEQ ID NO: 485398 - RNA, 19 nt, Homo sapiens
  misc_RNA (1)...(19): siRNA sense strand
acaguuugcugaagaauuu

SEQ ID NO: 485399 - RNA, 19 nt, Homo sapiens
  misc_RNA (1)...(19): siRNA sense strand
gaacgagucagcagaaaga

SEQ ID NO: 485400 - RNA, 19 nt, Homo sapiens
  misc_RNA (1)...(19): siRNA sense strand
gaugaaaacugccuucgua

SEQ ID NO: 485401 - RNA, 19 nt, Homo sapiens
  misc_RNA (1)...(19): siRNA sense strand
gaagaucaccacaauuguu

SEQ ID NO: 485402 - RNA, 19 nt, Homo sapiens
  misc_RNA (1)...(19): siRNA sense strand
uggcaaagauucaaaggaa

SEQ ID NO: 485403 - RNA, 19 nt, Homo sapiens
  misc_RNA (1)...(19): siRNA sense strand
ucaagacagugauucaauu

SEQ ID NO: 485404 - RNA, 19 nt, Homo sapiens
  misc_RNA (1)...(19): siRNA sense strand
gauguggagucuuuccuaa

SEQ ID NO: 485405 - RNA, 19 nt, Homo sapiens
  misc_RNA (1)...(19): siRNA sense strand
gcuggaaacuggaaagcaa

SEQ ID NO: 485406 - RNA, 19 nt, Homo sapiens
  misc_RNA (1)...(19): siRNA sense strand
guacauguccuagagcaua

SEQ ID NO: 485407 - RNA, 19 nt, Homo sapiens
  misc_RNA (1)...(19): siRNA sense strand
gaaagcaauuccuagaaac

SEQ ID NO: 485408 - RNA, 19 nt, Homo sapiens
  misc_RNA (1)...(19): siRNA sense strand
gaacugaagaucaccacaa

SEQ ID NO: 485409 - RNA, 19 nt, Homo sapiens
  misc_RNA (1)...(19): siRNA sense strand
gacaguguaugcaggauau

SEQ ID NO: 485410 - RNA, 19 nt, Homo sapiens
  misc_RNA (1)...(19): siRNA sense strand
gaaagaugagcauucaaga

SEQ ID NO: 485411 - RNA, 19 nt, Homo sapiens
  misc_RNA (1)...(19): siRNA sense strand
gaguaggaauggcaaagau

SEQ ID NO: 485412 - RNA, 19 nt, Homo sapiens
  misc_RNA (1)...(19): siRNA sense strand
uaaauaccguagacagugu

SEQ ID NO: 485413 - RNA, 19 nt, Homo sapiens
  misc_RNA (1)...(19): siRNA sense strand
cgagucagcagaaagauga

SEQ ID NO: 485414 - RNA, 19 nt, Homo sapiens
  misc_RNA (1)...(19): siRNA sense strand
caaaugucuucuccucaga

SEQ ID NO: 485415 - RNA, 19 nt, Homo sapiens
  misc_RNA (1)...(19): siRNA sense strand
gcagcagaauacccuauag

SEQ ID NO: 485416 - RNA, 19 nt, Homo sapiens
  misc_RNA (1)...(19): siRNA sense strand
gaaaacugccuucguaaau

SEQ ID NO: 485417 - RNA, 19 nt, Homo sapiens
  misc_RNA (1)...(19): siRNA sense strand
cugaagaucaccacaauug

SEQ ID NO: 485418 - RNA, 19 nt, Homo sapiens
  misc_RNA (1)...(19): siRNA sense strand
aaacugccuucguaaauac

SEQ ID NO: 485419 - RNA, 19 nt, Homo sapiens
  misc_RNA (1)...(19): siRNA sense strand
gaaaaggaacugaagauca

SEQ ID NO: 485420 - RNA, 19 nt, Homo sapiens
  misc_RNA (1)...(19): siRNA sense strand
agaagaagaagauguugaa

SEQ ID NO: 485421 - RNA, 19 nt, Homo sapiens
  misc_RNA (1)...(19): siRNA sense strand
ugaacaguuugcugaagaa

SEQ ID NO: 485422 - RNA, 19 nt, Homo sapiens
  misc_RNA (1)...(19): siRNA sense strand
ggacccaaaggaguaauaa

SEQ ID NO: 485423 - RNA, 19 nt, Homo sapiens
  misc_RNA (1)...(19): siRNA sense strand
gugaugcucuaaacaguag

SEQ ID NO: 485424 - RNA, 19 nt, Homo sapiens
  misc_RNA (1)...(19): siRNA sense strand
agaauacccuauaguuaag

SEQ ID NO: 485425 - RNA, 19 nt, Homo sapiens
  misc_RNA (1)...(19): siRNA sense strand
ccuaaaugaauauggguua

SEQ ID NO: 485426 - RNA, 19 nt, Homo sapiens
  misc_RNA (1)...(19): siRNA sense strand
uggagucuuuccuaaauga

SEQ ID NO: 485427 - RNA, 19 nt, Homo sapiens
  misc_RNA (1)...(19): siRNA sense strand
uguggagucuuuccuaaau

SEQ ID NO: 485428 - RNA, 19 nt, Homo sapiens
  misc_RNA (1)...(19): siRNA sense strand
aaaacugccuucguaaaua

SEQ ID NO: 485429 - RNA, 19 nt, Homo sapiens
  misc_RNA (1)...(19): siRNA sense strand
gggaacucauaagcaauuu

SEQ ID NO: 485430 - RNA, 19 nt, Homo sapiens
  misc_RNA (1)...(19): siRNA sense strand
caagacagugauucaauuc

SEQ ID NO: 485431 - RNA, 19 nt, Homo sapiens
  misc_RNA (1)...(19): siRNA sense strand
ggauguggagucuuuccua

SEQ ID NO: 485432 - RNA, 19 nt, Homo sapiens
  misc_RNA (1)...(19): siRNA sense strand
cugaacaguuugcugaaga

SEQ ID NO: 485433 - RNA, 19 nt, Homo sapiens
  misc_RNA (1)...(19): siRNA sense strand
gguauuaaggguugugaug

SEQ ID NO: 485434 - RNA, 19 nt, Homo sapiens
  misc_RNA (1)...(19): siRNA sense strand
aaagaugagcauucaagaa

SEQ ID NO: 485435 - RNA, 19 nt, Homo sapiens
  misc_RNA (1)...(19): siRNA sense strand
ugaaagagagguacauguc

SEQ ID NO: 485436 - RNA, 19 nt, Homo sapiens
  misc_RNA (1)...(19): siRNA sense strand
cuagauauggguuugugua

SEQ ID NO: 485437 - RNA, 19 nt, Homo sapiens
  misc_RNA (1)...(19): siRNA sense strand
auaaagagaaagaggauga

SEQ ID NO: 485438 - RNA, 19 nt, Homo sapiens
  misc_RNA (1)...(19): siRNA sense strand
ucacauuuaugaagauggu

SEQ ID NO: 485439 - RNA, 19 nt, Homo sapiens
  misc_RNA (1)...(19): siRNA sense strand
uaaggguugugaugcucua

SEQ ID NO: 485440 - RNA, 19 nt, Homo sapiens
  misc_RNA (1)...(19): siRNA sense strand
gggccuagauauggguuug

SEQ ID NO: 485441 - RNA, 19 nt, Homo sapiens
  misc_RNA (1)...(19): siRNA sense strand
agagguacauguccuagag

SEQ ID NO: 485442 - RNA, 19 nt, Homo sapiens
  misc_RNA (1)...(19): siRNA sense strand
ucaauuccaccuagcaaga

SEQ ID NO: 485443 - RNA, 19 nt, Homo sapiens
  misc_RNA (1)...(19): siRNA sense strand
gagagucaagacagugauu

SEQ ID NO: 485444 - RNA, 19 nt, Homo sapiens
  misc_RNA (1)...(19): siRNA sense strand
gaagaagaagauguugaau

SEQ ID NO: 485445 - RNA, 19 nt, Homo sapiens
  misc_RNA (1)...(19): siRNA sense strand
agacagugauucaauucca

SEQ ID NO: 485446 - RNA, 19 nt, Homo sapiens
  misc_RNA (1)...(19): siRNA sense strand
aagaagaagauguugaaug

SEQ ID NO: 485447 - RNA, 19 nt, Homo sapiens
  misc_RNA (1)...(19): siRNA sense strand
uaaauuagagagucaagac

SEQ ID NO: 485448 - RNA, 19 nt, Homo sapiens
  misc_RNA (1)...(19): siRNA sense strand
cccaaaggaguaauaaaug

SEQ ID NO: 485449 - RNA, 19 nt, Homo sapiens
  misc_RNA (1)...(19): siRNA sense strand
guggagucuuuccuaaaug

SEQ ID NO: 485450 - RNA, 19 nt, Homo sapiens
  misc_RNA (1)...(19): siRNA sense strand
agaaagaugagcauucaag

SEQ ID NO: 485451 - RNA, 19 nt, Homo sapiens
  misc_RNA (1)...(19): siRNA sense strand
uagaagaagaagauguuga

SEQ ID NO: 485452 - RNA, 19 nt, Homo sapiens
  misc_RNA (1)...(19): siRNA sense strand
ggaacgagucagcagaaag

SEQ ID NO: 485453 - RNA, 19 nt, Homo sapiens
  misc_RNA (1)...(19): siRNA sense strand
gcugaacaguuugcugaag

SEQ ID NO: 485454 - RNA, 19 nt, Homo sapiens
  misc_RNA (1)...(19): siRNA sense strand
aagaucaccacaauuguug

SEQ ID NO: 485455 - RNA, 19 nt, Homo sapiens
  misc_RNA (1)...(19): siRNA sense strand
acacugcucaucuauaaag

SEQ ID NO: 485456 - RNA, 19 nt, Homo sapiens
  misc_RNA (1)...(19): siRNA sense strand
agauauggguuuguguaug

SEQ ID NO: 485457 - RNA, 19 nt, Homo sapiens
  misc_RNA (1)...(19): siRNA sense strand
ccuagagcauaccaaaaua

SEQ ID NO: 485458 - RNA, 19 nt, Homo sapiens
  misc_RNA (1)...(19): siRNA sense strand
gaacaguuugcugaagaau

SEQ ID NO: 485459 - RNA, 19 nt, Homo sapiens
  misc_RNA (1)...(19): siRNA sense strand
uuccuacacugcucaucua

SEQ ID NO: 485460 - RNA, 19 nt, Homo sapiens
  misc_RNA (1)...(19): siRNA sense strand
aaagagaaagaggaugaaa

SEQ ID NO: 485461 - RNA, 19 nt, Homo sapiens
  misc_RNA (1)...(19): siRNA sense strand
gagagguacauguccuaga

SEQ ID NO: 485462 - RNA, 19 nt, Homo sapiens
  misc_RNA (1)...(19): siRNA sense strand
aacugaagaucaccacaau

SEQ ID NO: 485463 - RNA, 19 nt, Homo sapiens
  misc_RNA (1)...(19): siRNA sense strand
gacccaaaggaguaauaaa

SEQ ID NO: 485464 - RNA, 19 nt, Homo sapiens
  misc_RNA (1)...(19): siRNA sense strand
agacaguguaugcaggaua

SEQ ID NO: 485465 - RNA, 19 nt, Homo sapiens
  misc_RNA (1)...(19): siRNA sense strand
acccaaaggaguaauaaau

SEQ ID NO: 485466 - RNA, 19 nt, Homo sapiens
  misc_RNA (1)...(19): siRNA sense strand
gucaagacagugauucaau

SEQ ID NO: 485467 - RNA, 19 nt, Homo sapiens
  misc_RNA (1)...(19): siRNA sense strand
ccauaaagagaaagaggau

SEQ ID NO: 485468 - RNA, 19 nt, Homo sapiens
  misc_RNA (1)...(19): siRNA sense strand
gagucaagacagugauuca

SEQ ID NO: 485469 - RNA, 19 nt, Homo sapiens
  misc_RNA (1)...(19): siRNA sense strand
ggaguaauaaaugauugga

SEQ ID NO: 485470 - RNA, 19 nt, Homo sapiens
  misc_RNA (1)...(19): siRNA sense strand
caauuccaccuagcaagaa

SEQ ID NO: 485471 - RNA, 19 nt, Homo sapiens
  misc_RNA (1)...(19): siRNA sense strand
uaaagagaaagaggaugaa

SEQ ID NO: 485472 - RNA, 19 nt, Homo sapiens
  misc_RNA (1)...(19): siRNA sense strand
uagagagucaagacaguga

SEQ ID NO: 485473 - RNA, 19 nt, Homo sapiens
  misc_RNA (1)...(19): siRNA sense strand
ggaaacuggaaagcaauuc

SEQ ID NO: 485474 - RNA, 19 nt, Homo sapiens
  misc_RNA (1)...(19): siRNA sense strand
gccuagauauggguuugug

SEQ ID NO: 485475 - RNA, 19 nt, Homo sapiens
  misc_RNA (1)...(19): siRNA sense strand
ccuacacugcucaucuaua

SEQ ID NO: 485476 - RNA, 19 nt, Homo sapiens
  misc_RNA (1)...(19): siRNA sense strand
aaagcaauuccuagaaaca

SEQ ID NO: 485477 - RNA, 19 nt, Homo sapiens
  misc_RNA (1)...(19): siRNA sense strand
uagauauggguuuguguau

SEQ ID NO: 485478 - RNA, 19 nt, Homo sapiens
  misc_RNA (1)...(19): siRNA sense strand
cuaaaugaauauggguuac

SEQ ID NO: 485479 - RNA, 19 nt, Homo sapiens
  misc_RNA (1)...(19): siRNA sense strand
ggguugugaugcucuaaac

SEQ ID NO: 485480 - RNA, 19 nt, Homo sapiens
  misc_RNA (1)...(19): siRNA sense strand
ugaacuaauccauaaagag

SEQ ID NO: 485481 - RNA, 19 nt, Homo sapiens
  misc_RNA (1)...(19): siRNA sense strand
ugucuucuccucagaguag

SEQ ID NO: 485482 - RNA, 19 nt, Homo sapiens
  misc_RNA (1)...(19): siRNA sense strand
ugugaugcucuaaacagua

SEQ ID NO: 485483 - RNA, 19 nt, Homo sapiens
  misc_RNA (1)...(19): siRNA sense strand
ugaagaucaccacaauugu

SEQ ID NO: 485484 - RNA, 19 nt, Homo sapiens
  misc_RNA (1)...(19): siRNA sense strand
agaagaagauguugaauga

SEQ ID NO: 485485 - RNA, 19 nt, Homo sapiens
  misc_RNA (1)...(19): siRNA sense strand
gaacuaauccauaaagaga

SEQ ID NO: 485486 - RNA, 19 nt, Homo sapiens
  misc_RNA (1)...(19): siRNA sense strand
gcagaauacccuauaguua

SEQ ID NO: 485487 - RNA, 19 nt, Homo sapiens
  misc_RNA (1)...(19): siRNA sense strand
gauauggguuuguguauga

SEQ ID NO: 485488 - RNA, 19 nt, Homo sapiens
  misc_RNA (1)...(19): siRNA sense strand
gcagaaagaugagcauuca

SEQ ID NO: 485489 - RNA, 19 nt, Homo sapiens
  misc_RNA (1)...(19): siRNA sense strand
cuacacugcucaucuauaa

SEQ ID NO: 485490 - RNA, 19 nt, Homo sapiens
  misc_RNA (1)...(19): siRNA sense strand
cagaauacccuauaguuaa

SEQ ID NO: 485491 - RNA, 19 nt, Homo sapiens
  misc_RNA (1)...(19): siRNA sense strand
acaguuugcugaagaauuu

SEQ ID NO: 485492 - RNA, 19 nt, Homo sapiens
  misc_RNA (1)...(19): siRNA sense strand
gaacgagucagcagaaaga

SEQ ID NO: 485493 - RNA, 19 nt, Homo sapiens
  misc_RNA (1)...(19): siRNA sense strand
gaugaaaacugccuucgua

SEQ ID NO: 485494 - RNA, 19 nt, Homo sapiens
  misc_RNA (1)...(19): siRNA sense strand
gaagaucaccacaauuguu

SEQ ID NO: 485495 - RNA, 19 nt, Homo sapiens
  misc_RNA (1)...(19): siRNA sense strand
uggcaaagauucaaaggaa

SEQ ID NO: 485496 - RNA, 19 nt, Homo sapiens
  misc_RNA (1)...(19): siRNA sense strand
gauguggagucuuuccuaa

SEQ ID NO: 485497 - RNA, 19 nt, Homo sapiens
  misc_RNA (1)...(19): siRNA sense strand
gcuggaaacuggaaagcaa

SEQ ID NO: 485498 - RNA, 19 nt, Homo sapiens
  misc_RNA (1)...(19): siRNA sense strand
guacauguccuagagcaua

SEQ ID NO: 485499 - RNA, 19 nt, Homo sapiens
  misc_RNA (1)...(19): siRNA sense strand
gaaagcaauuccuagaaac

SEQ ID NO: 485500 - RNA, 19 nt, Homo sapiens
  misc_RNA (1)...(19): siRNA sense strand
gaacugaagaucaccacaa

SEQ ID NO: 485501 - RNA, 19 nt, Homo sapiens
  misc_RNA (1)...(19): siRNA sense strand
gacaguguaugcaggauau

SEQ ID NO: 485502 - RNA, 19 nt, Homo sapiens
  misc_RNA (1)...(19): siRNA sense strand
gaaagaugagcauucaaga

SEQ ID NO: 485503 - RNA, 19 nt, Homo sapiens
  misc_RNA (1)...(19): siRNA sense strand
gaguaggaauggcaaagau

SEQ ID NO: 485504 - RNA, 19 nt, Homo sapiens
  misc_RNA (1)...(19): siRNA sense strand
uaaauaccguagacagugu

SEQ ID NO: 485505 - RNA, 19 nt, Homo sapiens
  misc_RNA (1)...(19): siRNA sense strand
cgagucagcagaaagauga

SEQ ID NO: 485506 - RNA, 19 nt, Homo sapiens
  misc_RNA (1)...(19): siRNA sense strand
gcagcagaauacccuauag

SEQ ID NO: 485507 - RNA, 19 nt, Homo sapiens
  misc_RNA (1)...(19): siRNA sense strand
gaaaacugccuucguaaau

SEQ ID NO: 485508 - RNA, 19 nt, Homo sapiens
  misc_RNA (1)...(19): siRNA sense strand
cugaagaucaccacaauug

SEQ ID NO: 485509 - RNA, 19 nt, Homo sapiens
  misc_RNA (1)...(19): siRNA sense strand
aaacugccuucguaaauac

SEQ ID NO: 485510 - RNA, 19 nt, Homo sapiens
  misc_RNA (1)...(19): siRNA sense strand
gaaaaggaacugaagauca

SEQ ID NO: 485511 - RNA, 19 nt, Homo sapiens
  misc_RNA (1)...(19): siRNA sense strand
agaagaagaagauguugaa

SEQ ID NO: 485512 - RNA, 19 nt, Homo sapiens
  misc_RNA (1)...(19): siRNA sense strand
ugaacaguuugcugaagaa

SEQ ID NO: 485513 - RNA, 19 nt, Homo sapiens
  misc_RNA (1)...(19): siRNA sense strand
gugaugcucuaaacaguag

SEQ ID NO: 485514 - RNA, 19 nt, Homo sapiens
  misc_RNA (1)...(19): siRNA sense strand
agaauacccuauaguuaag

SEQ ID NO: 485515 - RNA, 19 nt, Homo sapiens
  misc_RNA (1)...(19): siRNA sense strand
ccuaaaugaauauggguua

SEQ ID NO: 485516 - RNA, 19 nt, Homo sapiens
  misc_RNA (1)...(19): siRNA sense strand
uggagucuuuccuaaauga

SEQ ID NO: 485517 - RNA, 19 nt, Homo sapiens
  misc_RNA (1)...(19): siRNA sense strand
uguggagucuuuccuaaau

SEQ ID NO: 485518 - RNA, 19 nt, Homo sapiens
  misc_RNA (1)...(19): siRNA sense strand
aaaacugccuucguaaaua

SEQ ID NO: 485519 - RNA, 19 nt, Homo sapiens
  misc_RNA (1)...(19): siRNA sense strand
gggaacucauaagcaauuu

SEQ ID NO: 485520 - RNA, 19 nt, Homo sapiens
  misc_RNA (1)...(19): siRNA sense strand
gguauuaaggguugugaug

SEQ ID NO: 485521 - RNA, 19 nt, Homo sapiens
  misc_RNA (1)...(19): siRNA sense strand
ggauguggagucuuuccua

SEQ ID NO: 485522 - RNA, 19 nt, Homo sapiens
  misc_RNA (1)...(19): siRNA sense strand
cugaacaguuugcugaaga

SEQ ID NO: 485523 - RNA, 19 nt, Homo sapiens
  misc_RNA (1)...(19): siRNA sense strand
aaagaugagcauucaagaa

SEQ ID NO: 485524 - RNA, 19 nt, Homo sapiens
  misc_RNA (1)...(19): siRNA sense strand
ugaaagagagguacauguc

SEQ ID NO: 485525 - RNA, 19 nt, Homo sapiens
  misc_RNA (1)...(19): siRNA sense strand
auaaagagaaagaggauga

SEQ ID NO: 485526 - RNA, 19 nt, Homo sapiens
  misc_RNA (1)...(19): siRNA sense strand
cuagauauggguuugugua

SEQ ID NO: 485527 - RNA, 19 nt, Homo sapiens
  misc_RNA (1)...(19): siRNA sense strand
ucacauuuaugaagauggu

SEQ ID NO: 485528 - RNA, 19 nt, Homo sapiens
  misc_RNA (1)...(19): siRNA sense strand
uaaggguugugaugcucua

SEQ ID NO: 485529 - RNA, 19 nt, Homo sapiens
  misc_RNA (1)...(19): siRNA sense strand
gggccuagauauggguuug

SEQ ID NO: 485530 - RNA, 19 nt, Homo sapiens
  misc_RNA (1)...(19): siRNA sense strand
agagguacauguccuagag

SEQ ID NO: 485531 - RNA, 19 nt, Homo sapiens
  misc_RNA (1)...(19): siRNA sense strand
gaagaagaagauguugaau

SEQ ID NO: 485532 - RNA, 19 nt, Homo sapiens
  misc_RNA (1)...(19): siRNA sense strand
aagaagaagauguugaaug

SEQ ID NO: 485533 - RNA, 19 nt, Homo sapiens
  misc_RNA (1)...(19): siRNA sense strand
guggagucuuuccuaaaug

SEQ ID NO: 485534 - RNA, 19 nt, Homo sapiens
  misc_RNA (1)...(19): siRNA sense strand
agaaagaugagcauucaag

SEQ ID NO: 485535 - RNA, 19 nt, Homo sapiens
  misc_RNA (1)...(19): siRNA sense strand
uagaagaagaagauguuga

SEQ ID NO: 485536 - RNA, 19 nt, Homo sapiens
  misc_RNA (1)...(19): siRNA sense strand
ggaacgagucagcagaaag

SEQ ID NO: 485537 - RNA, 19 nt, Homo sapiens
  misc_RNA (1)...(19): siRNA sense strand
gcugaacaguuugcugaag

SEQ ID NO: 485538 - RNA, 19 nt, Homo sapiens
  misc_RNA (1)...(19): siRNA sense strand
aagaucaccacaauuguug

SEQ ID NO: 485539 - RNA, 19 nt, Homo sapiens
  misc_RNA (1)...(19): siRNA sense strand
acacugcucaucuauaaag

SEQ ID NO: 485540 - RNA, 19 nt, Homo sapiens
  misc_RNA (1)...(19): siRNA sense strand
agauauggguuuguguaug

SEQ ID NO: 485541 - RNA, 19 nt, Homo sapiens
  misc_RNA (1)...(19): siRNA sense strand
ccuagagcauaccaaaaua

SEQ ID NO: 485542 - RNA, 19 nt, Homo sapiens
  misc_RNA (1)...(19): siRNA sense strand
gaacaguuugcugaagaau

SEQ ID NO: 485543 - RNA, 19 nt, Homo sapiens
  misc_RNA (1)...(19): siRNA sense strand
uuccuacacugcucaucua

SEQ ID NO: 485544 - RNA, 19 nt, Homo sapiens
  misc_RNA (1)...(19): siRNA sense strand
aacugaagaucaccacaau

SEQ ID NO: 485545 - RNA, 19 nt, Homo sapiens
  misc_RNA (1)...(19): siRNA sense strand
gagagguacauguccuaga

SEQ ID NO: 485546 - RNA, 19 nt, Homo sapiens
  misc_RNA (1)...(19): siRNA sense strand
aaagagaaagaggaugaaa

SEQ ID NO: 485547 - RNA, 19 nt, Homo sapiens
  misc_RNA (1)...(19): siRNA sense strand
agacaguguaugcaggaua

SEQ ID NO: 485548 - RNA, 19 nt, Homo sapiens
  misc_RNA (1)...(19): siRNA sense strand
uaaagagaaagaggaugaa

SEQ ID NO: 485549 - RNA, 19 nt, Homo sapiens
  misc_RNA (1)...(19): siRNA sense strand
ccauaaagagaaagaggau

SEQ ID NO: 485550 - RNA, 19 nt, Homo sapiens
  misc_RNA (1)...(19): siRNA sense strand
ggaaacuggaaagcaauuc

SEQ ID NO: 485551 - RNA, 19 nt, Homo sapiens
  misc_RNA (1)...(19): siRNA sense strand
gccuagauauggguuugug

SEQ ID NO: 485552 - RNA, 19 nt, Homo sapiens
  misc_RNA (1)...(19): siRNA sense strand
ccuacacugcucaucuaua

SEQ ID NO: 485553 - RNA, 19 nt, Homo sapiens
  misc_RNA (1)...(19): siRNA sense strand
aaagcaauuccuagaaaca

SEQ ID NO: 485554 - RNA, 19 nt, Homo sapiens
  misc_RNA (1)...(19): siRNA sense strand
uagauauggguuuguguau

SEQ ID NO: 485555 - RNA, 19 nt, Homo sapiens
  misc_RNA (1)...(19): siRNA sense strand
cuaaaugaauauggguuac

SEQ ID NO: 485556 - RNA, 19 nt, Homo sapiens
  misc_RNA (1)...(19): siRNA sense strand
ggguugugaugcucuaaac

SEQ ID NO: 485557 - RNA, 19 nt, Homo sapiens
  misc_RNA (1)...(19): siRNA sense strand
ugaagaucaccacaauugu

SEQ ID NO: 485558 - RNA, 19 nt, Homo sapiens
  misc_RNA (1)...(19): siRNA sense strand
ugaacuaauccauaaagag

SEQ ID NO: 485559 - RNA, 19 nt, Homo sapiens
  misc_RNA (1)...(19): siRNA sense strand
ugugaugcucuaaacagua

SEQ ID NO: 485560 - RNA, 19 nt, Homo sapiens
  misc_RNA (1)...(19): siRNA sense strand
ggaaugagcucuucaacaa

SEQ ID NO: 485561 - RNA, 19 nt, Homo sapiens
  misc_RNA (1)...(19): siRNA sense strand
ggaaaggucucagaugaaa

SEQ ID NO: 485562 - RNA, 19 nt, Homo sapiens
  misc_RNA (1)...(19): siRNA sense strand
ggaagaagcuacagcaucu

SEQ ID NO: 485563 - RNA, 19 nt, Homo sapiens
  misc_RNA (1)...(19): siRNA sense strand
caaagauucugacugauga

SEQ ID NO: 485564 - RNA, 19 nt, Homo sapiens
  misc_RNA (1)...(19): siRNA sense strand
gagagaagccaaacaaaga

SEQ ID NO: 485565 - RNA, 19 nt, Homo sapiens
  misc_RNA (1)...(19): siRNA sense strand
gcagagagcaaaccaauca

SEQ ID NO: 485566 - RNA, 19 nt, Homo sapiens
  misc_RNA (1)...(19): siRNA sense strand
ggaggacgcugcaggaaca

SEQ ID NO: 485567 - RNA, 19 nt, Homo sapiens
  misc_RNA (1)...(19): siRNA sense strand
gaaagagaggguacaacua

SEQ ID NO: 485568 - RNA, 19 nt, Homo sapiens
  misc_RNA (1)...(19): siRNA sense strand
aaggaaaggucucagauga

SEQ ID NO: 485569 - RNA, 19 nt, Homo sapiens
  misc_RNA (1)...(19): siRNA sense strand
gaaagaagaggcagcaaca

SEQ ID NO: 485570 - RNA, 19 nt, Homo sapiens
  misc_RNA (1)...(19): siRNA sense strand
aaagagaggguacaacuaa

SEQ ID NO: 485571 - RNA, 19 nt, Homo sapiens
  misc_RNA (1)...(19): siRNA sense strand
gaagauagaggugaggaaa

SEQ ID NO: 485572 - RNA, 19 nt, Homo sapiens
  misc_RNA (1)...(19): siRNA sense strand
cuaaggagaccacccguua

SEQ ID NO: 485573 - RNA, 19 nt, Homo sapiens
  misc_RNA (1)...(19): siRNA sense strand
ccaacuugcuguaucagaa

SEQ ID NO: 485574 - RNA, 19 nt, Homo sapiens
  misc_RNA (1)...(19): siRNA sense strand
gcagaaagaggaggaagaa

SEQ ID NO: 485575 - RNA, 19 nt, Homo sapiens
  misc_RNA (1)...(19): siRNA sense strand
ggaaugaugcagaugagaa

SEQ ID NO: 485576 - RNA, 19 nt, Homo sapiens
  misc_RNA (1)...(19): siRNA sense strand
gaaggagaaugguaucacu

SEQ ID NO: 485577 - RNA, 19 nt, Homo sapiens
  misc_RNA (1)...(19): siRNA sense strand
gaagcuacagcaucugaaa

SEQ ID NO: 485578 - RNA, 19 nt, Homo sapiens
  misc_RNA (1)...(19): siRNA sense strand
caacuaaagggaaugagaa

SEQ ID NO: 485579 - RNA, 19 nt, Homo sapiens
  misc_RNA (1)...(19): siRNA sense strand
gaaggaaaggucucagaug

SEQ ID NO: 485580 - RNA, 19 nt, Homo sapiens
  misc_RNA (1)...(19): siRNA sense strand
ugaaaggaaugaugcagau

SEQ ID NO: 485581 - RNA, 19 nt, Homo sapiens
  misc_RNA (1)...(19): siRNA sense strand
ggagagaagccaaacaaag

SEQ ID NO: 485582 - RNA, 19 nt, Homo sapiens
  misc_RNA (1)...(19): siRNA sense strand
ccaaggaguucacaaacca

SEQ ID NO: 485583 - RNA, 19 nt, Homo sapiens
  misc_RNA (1)...(19): siRNA sense strand
ggacuugaaccuagaagau

SEQ ID NO: 485584 - RNA, 19 nt, Homo sapiens
  misc_RNA (1)...(19): siRNA sense strand
acacaaggcugcccgucuu

SEQ ID NO: 485585 - RNA, 19 nt, Homo sapiens
  misc_RNA (1)...(19): siRNA sense strand
gcaggauggaguacagaua

SEQ ID NO: 485586 - RNA, 19 nt, Homo sapiens
  misc_RNA (1)...(19): siRNA sense strand
ccaaagauucugacugaug

SEQ ID NO: 485587 - RNA, 19 nt, Homo sapiens
  misc_RNA (1)...(19): siRNA sense strand
gacaugacccugccaagga

SEQ ID NO: 485588 - RNA, 19 nt, Homo sapiens
  misc_RNA (1)...(19): siRNA sense strand
ggagaccacccguuauaau

SEQ ID NO: 485589 - RNA, 19 nt, Homo sapiens
  misc_RNA (1)...(19): siRNA sense strand
gauucugacugaugagaug

SEQ ID NO: 485590 - RNA, 19 nt, Homo sapiens
  misc_RNA (1)...(19): siRNA sense strand
caggauggaguacagauaa

SEQ ID NO: 485591 - RNA, 19 nt, Homo sapiens
  misc_RNA (1)...(19): siRNA sense strand
gggugacacugaagcaaga

SEQ ID NO: 485592 - RNA, 19 nt, Homo sapiens
  misc_RNA (1)...(19): siRNA sense strand
gacuugaaccuagaagaua

SEQ ID NO: 485593 - RNA, 19 nt, Homo sapiens
  misc_RNA (1)...(19): siRNA sense strand
guagagagcagggcauaug

SEQ ID NO: 485594 - RNA, 19 nt, Homo sapiens
  misc_RNA (1)...(19): siRNA sense strand
gagaagcacccagaacaug

SEQ ID NO: 485595 - RNA, 19 nt, Homo sapiens
  misc_RNA (1)...(19): siRNA sense strand
uggauggacucaaggcaaa

SEQ ID NO: 485596 - RNA, 19 nt, Homo sapiens
  misc_RNA (1)...(19): siRNA sense strand
ccaugcagccgaagaaaga

SEQ ID NO: 485597 - RNA, 19 nt, Homo sapiens
  misc_RNA (1)...(19): siRNA sense strand
aaggagaccacccguuaua

SEQ ID NO: 485598 - RNA, 19 nt, Homo sapiens
  misc_RNA (1)...(19): siRNA sense strand
gaaagaggaggaagaagcu

SEQ ID NO: 485599 - RNA, 19 nt, Homo sapiens
  misc_RNA (1)...(19): siRNA sense strand
gaagccaaacaaagacuug

SEQ ID NO: 485600 - RNA, 19 nt, Homo sapiens
  misc_RNA (1)...(19): siRNA sense strand
gagaccacccguuauaauc

SEQ ID NO: 485601 - RNA, 19 nt, Homo sapiens
  misc_RNA (1)...(19): siRNA sense strand
cuuccuggcucgucucaaa

SEQ ID NO: 485602 - RNA, 19 nt, Homo sapiens
  misc_RNA (1)...(19): siRNA sense strand
aagcauggauggacucaag

SEQ ID NO: 485603 - RNA, 19 nt, Homo sapiens
  misc_RNA (1)...(19): siRNA sense strand
ggaggaggacuugaaccua

SEQ ID NO: 485604 - RNA, 19 nt, Homo sapiens
  misc_RNA (1)...(19): siRNA sense strand
aaaggaaugaugcagauga

SEQ ID NO: 485605 - RNA, 19 nt, Homo sapiens
  misc_RNA (1)...(19): siRNA sense strand
aaaggucucagaugaaaga

SEQ ID NO: 485606 - RNA, 19 nt, Homo sapiens
  misc_RNA (1)...(19): siRNA sense strand
gaaaaggcgacaucaagaa

SEQ ID NO: 485607 - RNA, 19 nt, Homo sapiens
  misc_RNA (1)...(19): siRNA sense strand
caagcuugcucgccuagag

SEQ ID NO: 485608 - RNA, 19 nt, Homo sapiens
  misc_RNA (1)...(19): siRNA sense strand
gcagagagcagagcaugca

SEQ ID NO: 485609 - RNA, 19 nt, Homo sapiens
  misc_RNA (1)...(19): siRNA sense strand
cuaaagggaaugagaagga

SEQ ID NO: 485610 - RNA, 19 nt, Homo sapiens
  misc_RNA (1)...(19): siRNA sense strand
aagagaggguacaacuaaa

SEQ ID NO: 485611 - RNA, 19 nt, Homo sapiens
  misc_RNA (1)...(19): siRNA sense strand
ggguacaacuaaagggaau

SEQ ID NO: 485612 - RNA, 19 nt, Homo sapiens
  misc_RNA (1)...(19): siRNA sense strand
ggagcggacccagcaauga

SEQ ID NO: 485613 - RNA, 19 nt, Homo sapiens
  misc_RNA (1)...(19): siRNA sense strand
guacaacuaaagggaauga

SEQ ID NO: 485614 - RNA, 19 nt, Homo sapiens
  misc_RNA (1)...(19): siRNA sense strand
uacagcaucugaaaggaau

SEQ ID NO: 485615 - RNA, 19 nt, Homo sapiens
  misc_RNA (1)...(19): siRNA sense strand
ccaaucagucccucaggaa

SEQ ID NO: 485616 - RNA, 19 nt, Homo sapiens
  misc_RNA (1)...(19): siRNA sense strand
gaccacccguuauaaucau

SEQ ID NO: 485617 - RNA, 19 nt, Homo sapiens
  misc_RNA (1)...(19): siRNA sense strand
gaaugaugcagaugagaag

SEQ ID NO: 485618 - RNA, 19 nt, Homo sapiens
  misc_RNA (1)...(19): siRNA sense strand
guggagagaagccaaacaa

SEQ ID NO: 485619 - RNA, 19 nt, Homo sapiens
  misc_RNA (1)...(19): siRNA sense strand
ugaaagagaggguacaacu

SEQ ID NO: 485620 - RNA, 19 nt, Homo sapiens
  misc_RNA (1)...(19): siRNA sense strand
cgucuugggaucacaauga

SEQ ID NO: 485621 - RNA, 19 nt, Homo sapiens
  misc_RNA (1)...(19): siRNA sense strand
ccccaaagauucugacuga

SEQ ID NO: 485622 - RNA, 19 nt, Homo sapiens
  misc_RNA (1)...(19): siRNA sense strand
gaaaggaaugaugcagaug

SEQ ID NO: 485623 - RNA, 19 nt, Homo sapiens
  misc_RNA (1)...(19): siRNA sense strand
uagcagagagcaaaccaau

SEQ ID NO: 485624 - RNA, 19 nt, Homo sapiens
  misc_RNA (1)...(19): siRNA sense strand
gaugaaagagaggguacaa

SEQ ID NO: 485625 - RNA, 19 nt, Homo sapiens
  misc_RNA (1)...(19): siRNA sense strand
gcuacagcaucugaaagga

SEQ ID NO: 485626 - RNA, 19 nt, Homo sapiens
  misc_RNA (1)...(19): siRNA sense strand
cuacagcaucugaaaggaa

SEQ ID NO: 485627 - RNA, 19 nt, Homo sapiens
  misc_RNA (1)...(19): siRNA sense strand
caaucagucccucaggaaa

SEQ ID NO: 485628 - RNA, 19 nt, Homo sapiens
  misc_RNA (1)...(19): siRNA sense strand
gauggaguacagauaagga

SEQ ID NO: 485629 - RNA, 19 nt, Homo sapiens
  misc_RNA (1)...(19): siRNA sense strand
agauagaggugaggaaacu

SEQ ID NO: 485630 - RNA, 19 nt, Homo sapiens
  misc_RNA (1)...(19): siRNA sense strand
gaagaaaaggcgacaucaa

SEQ ID NO: 485631 - RNA, 19 nt, Homo sapiens
  misc_RNA (1)...(19): siRNA sense strand
uaaggagaccacccguuau

SEQ ID NO: 485632 - RNA, 19 nt, Homo sapiens
  misc_RNA (1)...(19): siRNA sense strand
gucuugggaucacaaugaa

SEQ ID NO: 485633 - RNA, 19 nt, Homo sapiens
  misc_RNA (1)...(19): siRNA sense strand
gaaugagcucuucaacaag

SEQ ID NO: 485634 - RNA, 19 nt, Homo sapiens
  misc_RNA (1)...(19): siRNA sense strand
aaggcgacaucaagaagga

SEQ ID NO: 485635 - RNA, 19 nt, Homo sapiens
  misc_RNA (1)...(19): siRNA sense strand
agaccacccguuauaauca

SEQ ID NO: 485636 - RNA, 19 nt, Homo sapiens
  misc_RNA (1)...(19): siRNA sense strand
ggacgcugcaggaacaagu

SEQ ID NO: 485637 - RNA, 19 nt, Homo sapiens
  misc_RNA (1)...(19): siRNA sense strand
caagagucgugggaugaag

SEQ ID NO: 485638 - RNA, 19 nt, Homo sapiens
  misc_RNA (1)...(19): siRNA sense strand
ggaggacuugaaccuagaa

SEQ ID NO: 485639 - RNA, 19 nt, Homo sapiens
  misc_RNA (1)...(19): siRNA sense strand
ggcagaaagaggaggaaga

SEQ ID NO: 485640 - RNA, 19 nt, Homo sapiens
  misc_RNA (1)...(19): siRNA sense strand
auagaggugaggaaacuuu

SEQ ID NO: 485641 - RNA, 19 nt, Homo sapiens
  misc_RNA (1)...(19): siRNA sense strand
uugaauagcagagagcaaa

SEQ ID NO: 485642 - RNA, 19 nt, Homo sapiens
  misc_RNA (1)...(19): siRNA sense strand
acaacuaaagggaaugaga

SEQ ID NO: 485643 - RNA, 19 nt, Homo sapiens
  misc_RNA (1)...(19): siRNA sense strand
aagaagcuacagcaucuga

SEQ ID NO: 485644 - RNA, 19 nt, Homo sapiens
  misc_RNA (1)...(19): siRNA sense strand
gucaagagucgugggauga

SEQ ID NO: 485645 - RNA, 19 nt, Homo sapiens
  misc_RNA (1)...(19): siRNA sense strand
ggaggaggaggacuugaac

SEQ ID NO: 485646 - RNA, 19 nt, Homo sapiens
  misc_RNA (1)...(19): siRNA sense strand
gacccaugcagccgaagaa

SEQ ID NO: 485647 - RNA, 19 nt, Homo sapiens
  misc_RNA (1)...(19): siRNA sense strand
gagaggguacaacuaaagg

SEQ ID NO: 485648 - RNA, 19 nt, Homo sapiens
  misc_RNA (1)...(19): siRNA sense strand
gaaaggucucagaugaaag

SEQ ID NO: 485649 - RNA, 19 nt, Homo sapiens
  misc_RNA (1)...(19): siRNA sense strand
gaugagaagcacccagaac

SEQ ID NO: 485650 - RNA, 19 nt, Homo sapiens
  misc_RNA (1)...(19): siRNA sense strand
gccaaggaguucacaaacc

SEQ ID NO: 485651 - RNA, 19 nt, Homo sapiens
  misc_RNA (1)...(19): siRNA sense strand
caacuugcuguaucagaag

SEQ ID NO: 485652 - RNA, 19 nt, Homo sapiens
  misc_RNA (1)...(19): siRNA sense strand
acuugaaccuagaagauag

SEQ ID NO: 485653 - RNA, 19 nt, Homo sapiens
  misc_RNA (1)...(19): siRNA sense strand
ggccggaaggagaauggua

SEQ ID NO: 485654 - RNA, 19 nt, Homo sapiens
  misc_RNA (1)...(19): siRNA sense strand
gagcggacccagcaaugac

SEQ ID NO: 485655 - RNA, 19 nt, Homo sapiens
  misc_RNA (1)...(19): siRNA sense strand
aggaggacuugaaccuaga

SEQ ID NO: 485656 - RNA, 19 nt, Homo sapiens
  misc_RNA (1)...(19): siRNA sense strand
aagcccaacuugcuguauc

SEQ ID NO: 485657 - RNA, 19 nt, Homo sapiens
  misc_RNA (1)...(19): siRNA sense strand
acaagacugcggccaacuu

SEQ ID NO: 485658 - RNA, 19 nt, Homo sapiens
  misc_RNA (1)...(19): siRNA sense strand
gggaauugaauagcagaga

SEQ ID NO: 485659 - RNA, 19 nt, Homo sapiens
  misc_RNA (1)...(19): siRNA sense strand
gguggaaugagcucuucaa

SEQ ID NO: 485660 - RNA, 19 nt, Homo sapiens
  misc_RNA (1)...(19): siRNA sense strand
ggaaugagcucuucaacaa

SEQ ID NO: 485661 - RNA, 19 nt, Homo sapiens
  misc_RNA (1)...(19): siRNA sense strand
cuaaggagaccacccguua

SEQ ID NO: 485662 - RNA, 19 nt, Homo sapiens
  misc_RNA (1)...(19): siRNA sense strand
ccaacuugcuguaucagaa

SEQ ID NO: 485663 - RNA, 19 nt, Homo sapiens
  misc_RNA (1)...(19): siRNA sense strand
gaaggagaaugguaucacu

SEQ ID NO: 485664 - RNA, 19 nt, Homo sapiens
  misc_RNA (1)...(19): siRNA sense strand
ccaaggaguucacaaacca

SEQ ID NO: 485665 - RNA, 19 nt, Homo sapiens
  misc_RNA (1)...(19): siRNA sense strand
gcaggauggaguacagaua

SEQ ID NO: 485666 - RNA, 19 nt, Homo sapiens
  misc_RNA (1)...(19): siRNA sense strand
gacaugacccugccaagga

SEQ ID NO: 485667 - RNA, 19 nt, Homo sapiens
  misc_RNA (1)...(19): siRNA sense strand
ggagaccacccguuauaau

SEQ ID NO: 485668 - RNA, 19 nt, Homo sapiens
  misc_RNA (1)...(19): siRNA sense strand
caggauggaguacagauaa

SEQ ID NO: 485669 - RNA, 19 nt, Homo sapiens
  misc_RNA (1)...(19): siRNA sense strand
gggugacacugaagcaaga

SEQ ID NO: 485670 - RNA, 19 nt, Homo sapiens
  misc_RNA (1)...(19): siRNA sense strand
uggauggacucaaggcaaa

SEQ ID NO: 485671 - RNA, 19 nt, Homo sapiens
  misc_RNA (1)...(19): siRNA sense strand
aaggagaccacccguuaua

SEQ ID NO: 485672 - RNA, 19 nt, Homo sapiens
  misc_RNA (1)...(19): siRNA sense strand
gagaccacccguuauaauc

SEQ ID NO: 485673 - RNA, 19 nt, Homo sapiens
  misc_RNA (1)...(19): siRNA sense strand
aagcauggauggacucaag

SEQ ID NO: 485674 - RNA, 19 nt, Homo sapiens
  misc_RNA (1)...(19): siRNA sense strand
gaccacccguuauaaucau

SEQ ID NO: 485675 - RNA, 19 nt, Homo sapiens
  misc_RNA (1)...(19): siRNA sense strand
gauggaguacagauaagga

SEQ ID NO: 485676 - RNA, 19 nt, Homo sapiens
  misc_RNA (1)...(19): siRNA sense strand
uaaggagaccacccguuau

SEQ ID NO: 485677 - RNA, 19 nt, Homo sapiens
  misc_RNA (1)...(19): siRNA sense strand
gaaugagcucuucaacaag

SEQ ID NO: 485678 - RNA, 19 nt, Homo sapiens
  misc_RNA (1)...(19): siRNA sense strand
agaccacccguuauaauca

SEQ ID NO: 485679 - RNA, 19 nt, Homo sapiens
  misc_RNA (1)...(19): siRNA sense strand
caagagucgugggaugaag

SEQ ID NO: 485680 - RNA, 19 nt, Homo sapiens
  misc_RNA (1)...(19): siRNA sense strand
gccaaggaguucacaaacc

SEQ ID NO: 485681 - RNA, 19 nt, Homo sapiens
  misc_RNA (1)...(19): siRNA sense strand
gucaagagucgugggauga

SEQ ID NO: 485682 - RNA, 19 nt, Homo sapiens
  misc_RNA (1)...(19): siRNA sense strand
ggccggaaggagaauggua

SEQ ID NO: 485683 - RNA, 19 nt, Homo sapiens
  misc_RNA (1)...(19): siRNA sense strand
caacuugcuguaucagaag

SEQ ID NO: 485684 - RNA, 19 nt, Homo sapiens
  misc_RNA (1)...(19): siRNA sense strand
gguggaaugagcucuucaa

SEQ ID NO: 485685 - RNA, 19 nt, Homo sapiens
  misc_RNA (1)...(19): siRNA sense strand
aagcccaacuugcuguauc

SEQ ID NO: 485686 - RNA, 19 nt, Homo sapiens
  misc_RNA (1)...(19): siRNA sense strand
gccggaaggagaaugguau

SEQ ID NO: 485687 - RNA, 19 nt, Homo sapiens
  misc_RNA (1)...(19): siRNA sense strand
acaagacugcggccaacuu

SEQ ID NO: 485688 - RNA, 19 nt, Homo sapiens
  misc_RNA (1)...(19): siRNA sense strand
ggaaugagcucuucaacaa

SEQ ID NO: 485689 - RNA, 19 nt, Homo sapiens
  misc_RNA (1)...(19): siRNA sense strand
ggaaaggucucagaugaaa

SEQ ID NO: 485690 - RNA, 19 nt, Homo sapiens
  misc_RNA (1)...(19): siRNA sense strand
ggaagaagcuacagcaucu

SEQ ID NO: 485691 - RNA, 19 nt, Homo sapiens
  misc_RNA (1)...(19): siRNA sense strand
caaagauucugacugauga

SEQ ID NO: 485692 - RNA, 19 nt, Homo sapiens
  misc_RNA (1)...(19): siRNA sense strand
gagagaagccaaacaaaga

SEQ ID NO: 485693 - RNA, 19 nt, Homo sapiens
  misc_RNA (1)...(19): siRNA sense strand
gcagagagcaaaccaauca

SEQ ID NO: 485694 - RNA, 19 nt, Homo sapiens
  misc_RNA (1)...(19): siRNA sense strand
ggaggacgcugcaggaaca

SEQ ID NO: 485695 - RNA, 19 nt, Homo sapiens
  misc_RNA (1)...(19): siRNA sense strand
gaaagagaggguacaacua

SEQ ID NO: 485696 - RNA, 19 nt, Homo sapiens
  misc_RNA (1)...(19): siRNA sense strand
aaggaaaggucucagauga

SEQ ID NO: 485697 - RNA, 19 nt, Homo sapiens
  misc_RNA (1)...(19): siRNA sense strand
gaaagaagaggcagcaaca

SEQ ID NO: 485698 - RNA, 19 nt, Homo sapiens
  misc_RNA (1)...(19): siRNA sense strand
aaagagaggguacaacuaa

SEQ ID NO: 485699 - RNA, 19 nt, Homo sapiens
  misc_RNA (1)...(19): siRNA sense strand
gaagauagaggugaggaaa

SEQ ID NO: 485700 - RNA, 19 nt, Homo sapiens
  misc_RNA (1)...(19): siRNA sense strand
cuaaggagaccacccguua

SEQ ID NO: 485701 - RNA, 19 nt, Homo sapiens
  misc_RNA (1)...(19): siRNA sense strand
ccaacuugcuguaucagaa

SEQ ID NO: 485702 - RNA, 19 nt, Homo sapiens
  misc_RNA (1)...(19): siRNA sense strand
gcagaaagaggaggaagaa

SEQ ID NO: 485703 - RNA, 19 nt, Homo sapiens
  misc_RNA (1)...(19): siRNA sense strand
ggaaugaugcagaugagaa

SEQ ID NO: 485704 - RNA, 19 nt, Homo sapiens
  misc_RNA (1)...(19): siRNA sense strand
gaaggagaaugguaucacu

SEQ ID NO: 485705 - RNA, 19 nt, Homo sapiens
  misc_RNA (1)...(19): siRNA sense strand
gaagcuacagcaucugaaa

SEQ ID NO: 485706 - RNA, 19 nt, Homo sapiens
  misc_RNA (1)...(19): siRNA sense strand
caacuaaagggaaugagaa

SEQ ID NO: 485707 - RNA, 19 nt, Homo sapiens
  misc_RNA (1)...(19): siRNA sense strand
gaaggaaaggucucagaug

SEQ ID NO: 485708 - RNA, 19 nt, Homo sapiens
  misc_RNA (1)...(19): siRNA sense strand
ugaaaggaaugaugcagau

SEQ ID NO: 485709 - RNA, 19 nt, Homo sapiens
  misc_RNA (1)...(19): siRNA sense strand
ggagagaagccaaacaaag

SEQ ID NO: 485710 - RNA, 19 nt, Homo sapiens
  misc_RNA (1)...(19): siRNA sense strand
ccaaggaguucacaaacca

SEQ ID NO: 485711 - RNA, 19 nt, Homo sapiens
  misc_RNA (1)...(19): siRNA sense strand
ggacuugaaccuagaagau

SEQ ID NO: 485712 - RNA, 19 nt, Homo sapiens
  misc_RNA (1)...(19): siRNA sense strand
acacaaggcugcccgucuu

SEQ ID NO: 485713 - RNA, 19 nt, Homo sapiens
  misc_RNA (1)...(19): siRNA sense strand
gcaggauggaguacagaua

SEQ ID NO: 485714 - RNA, 19 nt, Homo sapiens
  misc_RNA (1)...(19): siRNA sense strand
ccaaagauucugacugaug

SEQ ID NO: 485715 - RNA, 19 nt, Homo sapiens
  misc_RNA (1)...(19): siRNA sense strand
gacaugacccugccaagga

SEQ ID NO: 485716 - RNA, 19 nt, Homo sapiens
  misc_RNA (1)...(19): siRNA sense strand
ggagaccacccguuauaau

SEQ ID NO: 485717 - RNA, 19 nt, Homo sapiens
  misc_RNA (1)...(19): siRNA sense strand
gauucugacugaugagaug

SEQ ID NO: 485718 - RNA, 19 nt, Homo sapiens
  misc_RNA (1)...(19): siRNA sense strand
caggauggaguacagauaa

SEQ ID NO: 485719 - RNA, 19 nt, Homo sapiens
  misc_RNA (1)...(19): siRNA sense strand
gggugacacugaagcaaga

SEQ ID NO: 485720 - RNA, 19 nt, Homo sapiens
  misc_RNA (1)...(19): siRNA sense strand
gacuugaaccuagaagaua

SEQ ID NO: 485721 - RNA, 19 nt, Homo sapiens
  misc_RNA (1)...(19): siRNA sense strand
guagagagcagggcauaug

SEQ ID NO: 485722 - RNA, 19 nt, Homo sapiens
  misc_RNA (1)...(19): siRNA sense strand
gagaagcacccagaacaug

SEQ ID NO: 485723 - RNA, 19 nt, Homo sapiens
  misc_RNA (1)...(19): siRNA sense strand
uggauggacucaaggcaaa

SEQ ID NO: 485724 - RNA, 19 nt, Homo sapiens
  misc_RNA (1)...(19): siRNA sense strand
ccaugcagccgaagaaaga

SEQ ID NO: 485725 - RNA, 19 nt, Homo sapiens
  misc_RNA (1)...(19): siRNA sense strand
aaggagaccacccguuaua

SEQ ID NO: 485726 - RNA, 19 nt, Homo sapiens
  misc_RNA (1)...(19): siRNA sense strand
gaaagaggaggaagaagcu

SEQ ID NO: 485727 - RNA, 19 nt, Homo sapiens
  misc_RNA (1)...(19): siRNA sense strand
gaagccaaacaaagacuug

SEQ ID NO: 485728 - RNA, 19 nt, Homo sapiens
  misc_RNA (1)...(19): siRNA sense strand
gagaccacccguuauaauc

SEQ ID NO: 485729 - RNA, 19 nt, Homo sapiens
  misc_RNA (1)...(19): siRNA sense strand
cuuccuggcucgucucaaa

SEQ ID NO: 485730 - RNA, 19 nt, Homo sapiens
  misc_RNA (1)...(19): siRNA sense strand
ggaggaggacuugaaccua

SEQ ID NO: 485731 - RNA, 19 nt, Homo sapiens
  misc_RNA (1)...(19): siRNA sense strand
aagcauggauggacucaag

SEQ ID NO: 485732 - RNA, 19 nt, Homo sapiens
  misc_RNA (1)...(19): siRNA sense strand
aaaggaaugaugcagauga

SEQ ID NO: 485733 - RNA, 19 nt, Homo sapiens
  misc_RNA (1)...(19): siRNA sense strand
aaaggucucagaugaaaga

SEQ ID NO: 485734 - RNA, 19 nt, Homo sapiens
  misc_RNA (1)...(19): siRNA sense strand
gaaaaggcgacaucaagaa

SEQ ID NO: 485735 - RNA, 19 nt, Homo sapiens
  misc_RNA (1)...(19): siRNA sense strand
caagcuugcucgccuagag

SEQ ID NO: 485736 - RNA, 19 nt, Homo sapiens
  misc_RNA (1)...(19): siRNA sense strand
gcagagagcagagcaugca

SEQ ID NO: 485737 - RNA, 19 nt, Homo sapiens
  misc_RNA (1)...(19): siRNA sense strand
cuaaagggaaugagaagga

SEQ ID NO: 485738 - RNA, 19 nt, Homo sapiens
  misc_RNA (1)...(19): siRNA sense strand
aagagaggguacaacuaaa

SEQ ID NO: 485739 - RNA, 19 nt, Homo sapiens
  misc_RNA (1)...(19): siRNA sense strand
ggguacaacuaaagggaau

SEQ ID NO: 485740 - RNA, 19 nt, Homo sapiens
  misc_RNA (1)...(19): siRNA sense strand
uacagcaucugaaaggaau

SEQ ID NO: 485741 - RNA, 19 nt, Homo sapiens
  misc_RNA (1)...(19): siRNA sense strand
guacaacuaaagggaauga

SEQ ID NO: 485742 - RNA, 19 nt, Homo sapiens
  misc_RNA (1)...(19): siRNA sense strand
ccaaucagucccucaggaa

SEQ ID NO: 485743 - RNA, 19 nt, Homo sapiens
  misc_RNA (1)...(19): siRNA sense strand
gaccacccguuauaaucau

SEQ ID NO: 485744 - RNA, 19 nt, Homo sapiens
  misc_RNA (1)...(19): siRNA sense strand
gaaugaugcagaugagaag

SEQ ID NO: 485745 - RNA, 19 nt, Homo sapiens
  misc_RNA (1)...(19): siRNA sense strand
guggagagaagccaaacaa

SEQ ID NO: 485746 - RNA, 19 nt, Homo sapiens
  misc_RNA (1)...(19): siRNA sense strand
ugaaagagaggguacaacu

SEQ ID NO: 485747 - RNA, 19 nt, Homo sapiens
  misc_RNA (1)...(19): siRNA sense strand
cgucuugggaucacaauga

SEQ ID NO: 485748 - RNA, 19 nt, Homo sapiens
  misc_RNA (1)...(19): siRNA sense strand
ccccaaagauucugacuga

SEQ ID NO: 485749 - RNA, 19 nt, Homo sapiens
  misc_RNA (1)...(19): siRNA sense strand
gaaaggaaugaugcagaug

SEQ ID NO: 485750 - RNA, 19 nt, Homo sapiens
  misc_RNA (1)...(19): siRNA sense strand
uagcagagagcaaaccaau

SEQ ID NO: 485751 - RNA, 19 nt, Homo sapiens
  misc_RNA (1)...(19): siRNA sense strand
gaugaaagagaggguacaa

SEQ ID NO: 485752 - RNA, 19 nt, Homo sapiens
  misc_RNA (1)...(19): siRNA sense strand
gcuacagcaucugaaagga

SEQ ID NO: 485753 - RNA, 19 nt, Homo sapiens
  misc_RNA (1)...(19): siRNA sense strand
cuacagcaucugaaaggaa

SEQ ID NO: 485754 - RNA, 19 nt, Homo sapiens
  misc_RNA (1)...(19): siRNA sense strand
caaucagucccucaggaaa

SEQ ID NO: 485755 - RNA, 19 nt, Homo sapiens
  misc_RNA (1)...(19): siRNA sense strand
gauggaguacagauaagga

SEQ ID NO: 485756 - RNA, 19 nt, Homo sapiens
  misc_RNA (1)...(19): siRNA sense strand
agauagaggugaggaaacu

SEQ ID NO: 485757 - RNA, 19 nt, Homo sapiens
  misc_RNA (1)...(19): siRNA sense strand
gaagaaaaggcgacaucaa

SEQ ID NO: 485758 - RNA, 19 nt, Homo sapiens
  misc_RNA (1)...(19): siRNA sense strand
uaaggagaccacccguuau

SEQ ID NO: 485759 - RNA, 19 nt, Homo sapiens
  misc_RNA (1)...(19): siRNA sense strand
gucuugggaucacaaugaa

SEQ ID NO: 485760 - RNA, 19 nt, Homo sapiens
  misc_RNA (1)...(19): siRNA sense strand
aaggcgacaucaagaagga

SEQ ID NO: 485761 - RNA, 19 nt, Homo sapiens
  misc_RNA (1)...(19): siRNA sense strand
gaaugagcucuucaacaag

SEQ ID NO: 485762 - RNA, 19 nt, Homo sapiens
  misc_RNA (1)...(19): siRNA sense strand
agaccacccguuauaauca

SEQ ID NO: 485763 - RNA, 19 nt, Homo sapiens
  misc_RNA (1)...(19): siRNA sense strand
ggacgcugcaggaacaagu

SEQ ID NO: 485764 - RNA, 19 nt, Homo sapiens
  misc_RNA (1)...(19): siRNA sense strand
caagagucgugggaugaag

SEQ ID NO: 485765 - RNA, 19 nt, Homo sapiens
  misc_RNA (1)...(19): siRNA sense strand
ggaggacuugaaccuagaa

SEQ ID NO: 485766 - RNA, 19 nt, Homo sapiens
  misc_RNA (1)...(19): siRNA sense strand
ggcagaaagaggaggaaga

SEQ ID NO: 485767 - RNA, 19 nt, Homo sapiens
  misc_RNA (1)...(19): siRNA sense strand
auagaggugaggaaacuuu

SEQ ID NO: 485768 - RNA, 19 nt, Homo sapiens
  misc_RNA (1)...(19): siRNA sense strand
uugaauagcagagagcaaa

SEQ ID NO: 485769 - RNA, 19 nt, Homo sapiens
  misc_RNA (1)...(19): siRNA sense strand
acaacuaaagggaaugaga

SEQ ID NO: 485770 - RNA, 19 nt, Homo sapiens
  misc_RNA (1)...(19): siRNA sense strand
aagaagcuacagcaucuga

SEQ ID NO: 485771 - RNA, 19 nt, Homo sapiens
  misc_RNA (1)...(19): siRNA sense strand
gaugagaagcacccagaac

SEQ ID NO: 485772 - RNA, 19 nt, Homo sapiens
  misc_RNA (1)...(19): siRNA sense strand
ggaggaggaggacuugaac

SEQ ID NO: 485773 - RNA, 19 nt, Homo sapiens
  misc_RNA (1)...(19): siRNA sense strand
gacccaugcagccgaagaa

SEQ ID NO: 485774 - RNA, 19 nt, Homo sapiens
  misc_RNA (1)...(19): siRNA sense strand
gucaagagucgugggauga

SEQ ID NO: 485775 - RNA, 19 nt, Homo sapiens
  misc_RNA (1)...(19): siRNA sense strand
gagaggguacaacuaaagg

SEQ ID NO: 485776 - RNA, 19 nt, Homo sapiens
  misc_RNA (1)...(19): siRNA sense strand
gccaaggaguucacaaacc

SEQ ID NO: 485777 - RNA, 19 nt, Homo sapiens
  misc_RNA (1)...(19): siRNA sense strand
gaaaggucucagaugaaag

SEQ ID NO: 485778 - RNA, 19 nt, Homo sapiens
  misc_RNA (1)...(19): siRNA sense strand
ggccggaaggagaauggua

SEQ ID NO: 485779 - RNA, 19 nt, Homo sapiens
  misc_RNA (1)...(19): siRNA sense strand
acuugaaccuagaagauag

SEQ ID NO: 485780 - RNA, 19 nt, Homo sapiens
  misc_RNA (1)...(19): siRNA sense strand
caacuugcuguaucagaag

SEQ ID NO: 485781 - RNA, 19 nt, Homo sapiens
  misc_RNA (1)...(19): siRNA sense strand
aagcccaacuugcuguauc

SEQ ID NO: 485782 - RNA, 19 nt, Homo sapiens
  misc_RNA (1)...(19): siRNA sense strand
aggaggacuugaaccuaga

SEQ ID NO: 485783 - RNA, 19 nt, Homo sapiens
  misc_RNA (1)...(19): siRNA sense strand
gggaauugaauagcagaga

SEQ ID NO: 485784 - RNA, 19 nt, Homo sapiens
  misc_RNA (1)...(19): siRNA sense strand
gguggaaugagcucuucaa

SEQ ID NO: 485785 - RNA, 19 nt, Homo sapiens
  misc_RNA (1)...(19): siRNA sense strand
acaagacugcggccaacuu

SEQ ID NO: 485786 - RNA, 19 nt, Homo sapiens
  misc_RNA (1)...(19): siRNA sense strand
gccggaaggagaaugguau

SEQ ID NO: 485787 - RNA, 19 nt, Homo sapiens
  misc_RNA (1)...(19): siRNA sense strand
ggaaugagcucuucaacaa

SEQ ID NO: 485788 - RNA, 19 nt, Homo sapiens
  misc_RNA (1)...(19): siRNA sense strand
ggaaaggucucagaugaaa

SEQ ID NO: 485789 - RNA, 19 nt, Homo sapiens
  misc_RNA (1)...(19): siRNA sense strand
ggaagaagcuacagcaucu

SEQ ID NO: 485790 - RNA, 19 nt, Homo sapiens
  misc_RNA (1)...(19): siRNA sense strand
caaagauucugacugauga

SEQ ID NO: 485791 - RNA, 19 nt, Homo sapiens
  misc_RNA (1)...(19): siRNA sense strand
gagagaagccaaacaaaga

SEQ ID NO: 485792 - RNA, 19 nt, Homo sapiens
  misc_RNA (1)...(19): siRNA sense strand
gcagagagcaaaccaauca

SEQ ID NO: 485793 - RNA, 19 nt, Homo sapiens
  misc_RNA (1)...(19): siRNA sense strand
ggaggacgcugcaggaaca

SEQ ID NO: 485794 - RNA, 19 nt, Homo sapiens
  misc_RNA (1)...(19): siRNA sense strand
gaaagagaggguacaacua

SEQ ID NO: 485795 - RNA, 19 nt, Homo sapiens
  misc_RNA (1)...(19): siRNA sense strand
aaggaaaggucucagauga

SEQ ID NO: 485796 - RNA, 19 nt, Homo sapiens
  misc_RNA (1)...(19): siRNA sense strand
gaaagaagaggcagcaaca

SEQ ID NO: 485797 - RNA, 19 nt, Homo sapiens
  misc_RNA (1)...(19): siRNA sense strand
aaagagaggguacaacuaa

SEQ ID NO: 485798 - RNA, 19 nt, Homo sapiens
  misc_RNA (1)...(19): siRNA sense strand
gaagauagaggugaggaaa

SEQ ID NO: 485799 - RNA, 19 nt, Homo sapiens
  misc_RNA (1)...(19): siRNA sense strand
cuaaggagaccacccguua

SEQ ID NO: 485800 - RNA, 19 nt, Homo sapiens
  misc_RNA (1)...(19): siRNA sense strand
ccaacuugcuguaucagaa

SEQ ID NO: 485801 - RNA, 19 nt, Homo sapiens
  misc_RNA (1)...(19): siRNA sense strand
gcagaaagaggaggaagaa

SEQ ID NO: 485802 - RNA, 19 nt, Homo sapiens
  misc_RNA (1)...(19): siRNA sense strand
ggaaugaugcagaugagaa

SEQ ID NO: 485803 - RNA, 19 nt, Homo sapiens
  misc_RNA (1)...(19): siRNA sense strand
gaaggagaaugguaucacu

SEQ ID NO: 485804 - RNA, 19 nt, Homo sapiens
  misc_RNA (1)...(19): siRNA sense strand
gaagcuacagcaucugaaa

SEQ ID NO: 485805 - RNA, 19 nt, Homo sapiens
  misc_RNA (1)...(19): siRNA sense strand
caacuaaagggaaugagaa

SEQ ID NO: 485806 - RNA, 19 nt, Homo sapiens
  misc_RNA (1)...(19): siRNA sense strand
gaaggaaaggucucagaug

SEQ ID NO: 485807 - RNA, 19 nt, Homo sapiens
  misc_RNA (1)...(19): siRNA sense strand
ugaaaggaaugaugcagau

SEQ ID NO: 485808 - RNA, 19 nt, Homo sapiens
  misc_RNA (1)...(19): siRNA sense strand
ggagagaagccaaacaaag

SEQ ID NO: 485809 - RNA, 19 nt, Homo sapiens
  misc_RNA (1)...(19): siRNA sense strand
ccaaggaguucacaaacca

SEQ ID NO: 485810 - RNA, 19 nt, Homo sapiens
  misc_RNA (1)...(19): siRNA sense strand
ggacuugaaccuagaagau

SEQ ID NO: 485811 - RNA, 19 nt, Homo sapiens
  misc_RNA (1)...(19): siRNA sense strand
acacaaggcugcccgucuu

SEQ ID NO: 485812 - RNA, 19 nt, Homo sapiens
  misc_RNA (1)...(19): siRNA sense strand
gcaggauggaguacagaua

SEQ ID NO: 485813 - RNA, 19 nt, Homo sapiens
  misc_RNA (1)...(19): siRNA sense strand
ccaaagauucugacugaug

SEQ ID NO: 485814 - RNA, 19 nt, Homo sapiens
  misc_RNA (1)...(19): siRNA sense strand
gacaugacccugccaagga

SEQ ID NO: 485815 - RNA, 19 nt, Homo sapiens
  misc_RNA (1)...(19): siRNA sense strand
ggagaccacccguuauaau

SEQ ID NO: 485816 - RNA, 19 nt, Homo sapiens
  misc_RNA (1)...(19): siRNA sense strand
gauucugacugaugagaug

SEQ ID NO: 485817 - RNA, 19 nt, Homo sapiens
  misc_RNA (1)...(19): siRNA sense strand
caggauggaguacagauaa

SEQ ID NO: 485818 - RNA, 19 nt, Homo sapiens
  misc_RNA (1)...(19): siRNA sense strand
gggugacacugaagcaaga

SEQ ID NO: 485819 - RNA, 19 nt, Homo sapiens
  misc_RNA (1)...(19): siRNA sense strand
gacuugaaccuagaagaua

SEQ ID NO: 485820 - RNA, 19 nt, Homo sapiens
  misc_RNA (1)...(19): siRNA sense strand
guagagagcagggcauaug

SEQ ID NO: 485821 - RNA, 19 nt, Homo sapiens
  misc_RNA (1)...(19): siRNA sense strand
gagaagcacccagaacaug

SEQ ID NO: 485822 - RNA, 19 nt, Homo sapiens
  misc_RNA (1)...(19): siRNA sense strand
uggauggacucaaggcaaa

SEQ ID NO: 485823 - RNA, 19 nt, Homo sapiens
  misc_RNA (1)...(19): siRNA sense strand
ccaugcagccgaagaaaga

SEQ ID NO: 485824 - RNA, 19 nt, Homo sapiens
  misc_RNA (1)...(19): siRNA sense strand
aaggagaccacccguuaua

SEQ ID NO: 485825 - RNA, 19 nt, Homo sapiens
  misc_RNA (1)...(19): siRNA sense strand
gaaagaggaggaagaagcu

SEQ ID NO: 485826 - RNA, 19 nt, Homo sapiens
  misc_RNA (1)...(19): siRNA sense strand
gaagccaaacaaagacuug

SEQ ID NO: 485827 - RNA, 19 nt, Homo sapiens
  misc_RNA (1)...(19): siRNA sense strand
gagaccacccguuauaauc

SEQ ID NO: 485828 - RNA, 19 nt, Homo sapiens
  misc_RNA (1)...(19): siRNA sense strand
cuuccuggcucgucucaaa

SEQ ID NO: 485829 - RNA, 19 nt, Homo sapiens
  misc_RNA (1)...(19): siRNA sense strand
aagcauggauggacucaag

SEQ ID NO: 485830 - RNA, 19 nt, Homo sapiens
  misc_RNA (1)...(19): siRNA sense strand
ggaggaggacuugaaccua

SEQ ID NO: 485831 - RNA, 19 nt, Homo sapiens
  misc_RNA (1)...(19): siRNA sense strand
aaaggaaugaugcagauga

SEQ ID NO: 485832 - RNA, 19 nt, Homo sapiens
  misc_RNA (1)...(19): siRNA sense strand
aaaggucucagaugaaaga

SEQ ID NO: 485833 - RNA, 19 nt, Homo sapiens
  misc_RNA (1)...(19): siRNA sense strand
gaaaaggcgacaucaagaa

SEQ ID NO: 485834 - RNA, 19 nt, Homo sapiens
  misc_RNA (1)...(19): siRNA sense strand
caagcuugcucgccuagag

SEQ ID NO: 485835 - RNA, 19 nt, Homo sapiens
  misc_RNA (1)...(19): siRNA sense strand
gcagagagcagagcaugca

SEQ ID NO: 485836 - RNA, 19 nt, Homo sapiens
  misc_RNA (1)...(19): siRNA sense strand
cuaaagggaaugagaagga

SEQ ID NO: 485837 - RNA, 19 nt, Homo sapiens
  misc_RNA (1)...(19): siRNA sense strand
aagagaggguacaacuaaa

SEQ ID NO: 485838 - RNA, 19 nt, Homo sapiens
  misc_RNA (1)...(19): siRNA sense strand
ggguacaacuaaagggaau

SEQ ID NO: 485839 - RNA, 19 nt, Homo sapiens
  misc_RNA (1)...(19): siRNA sense strand
uacagcaucugaaaggaau

SEQ ID NO: 485840 - RNA, 19 nt, Homo sapiens
  misc_RNA (1)...(19): siRNA sense strand
guacaacuaaagggaauga

SEQ ID NO: 485841 - RNA, 19 nt, Homo sapiens
  misc_RNA (1)...(19): siRNA sense strand
ggagcggacccagcaauga

SEQ ID NO: 485842 - RNA, 19 nt, Homo sapiens
  misc_RNA (1)...(19): siRNA sense strand
ccaaucagucccucaggaa

SEQ ID NO: 485843 - RNA, 19 nt, Homo sapiens
  misc_RNA (1)...(19): siRNA sense strand
gaccacccguuauaaucau

SEQ ID NO: 485844 - RNA, 19 nt, Homo sapiens
  misc_RNA (1)...(19): siRNA sense strand
gaaugaugcagaugagaag

SEQ ID NO: 485845 - RNA, 19 nt, Homo sapiens
  misc_RNA (1)...(19): siRNA sense strand
guggagagaagccaaacaa

SEQ ID NO: 485846 - RNA, 19 nt, Homo sapiens
  misc_RNA (1)...(19): siRNA sense strand
ugaaagagaggguacaacu

SEQ ID NO: 485847 - RNA, 19 nt, Homo sapiens
  misc_RNA (1)...(19): siRNA sense strand
cgucuugggaucacaauga

SEQ ID NO: 485848 - RNA, 19 nt, Homo sapiens
  misc_RNA (1)...(19): siRNA sense strand
ccccaaagauucugacuga

SEQ ID NO: 485849 - RNA, 19 nt, Homo sapiens
  misc_RNA (1)...(19): siRNA sense strand
gaaaggaaugaugcagaug

SEQ ID NO: 485850 - RNA, 19 nt, Homo sapiens
  misc_RNA (1)...(19): siRNA sense strand
uagcagagagcaaaccaau

SEQ ID NO: 485851 - RNA, 19 nt, Homo sapiens
  misc_RNA (1)...(19): siRNA sense strand
gaugaaagagaggguacaa

SEQ ID NO: 485852 - RNA, 19 nt, Homo sapiens
  misc_RNA (1)...(19): siRNA sense strand
gcuacagcaucugaaagga

SEQ ID NO: 485853 - RNA, 19 nt, Homo sapiens
  misc_RNA (1)...(19): siRNA sense strand
cuacagcaucugaaaggaa

SEQ ID NO: 485854 - RNA, 19 nt, Homo sapiens
  misc_RNA (1)...(19): siRNA sense strand
caaucagucccucaggaaa

SEQ ID NO: 485855 - RNA, 19 nt, Homo sapiens
  misc_RNA (1)...(19): siRNA sense strand
gauggaguacagauaagga

SEQ ID NO: 485856 - RNA, 19 nt, Homo sapiens
  misc_RNA (1)...(19): siRNA sense strand
agauagaggugaggaaacu

SEQ ID NO: 485857 - RNA, 19 nt, Homo sapiens
  misc_RNA (1)...(19): siRNA sense strand
gaagaaaaggcgacaucaa

SEQ ID NO: 485858 - RNA, 19 nt, Homo sapiens
  misc_RNA (1)...(19): siRNA sense strand
caagucagguccggcacau

SEQ ID NO: 485859 - RNA, 19 nt, Homo sapiens
  misc_RNA (1)...(19): siRNA sense strand
uaaggagaccacccguuau

SEQ ID NO: 485860 - RNA, 19 nt, Homo sapiens
  misc_RNA (1)...(19): siRNA sense strand
gucuugggaucacaaugaa

SEQ ID NO: 485861 - RNA, 19 nt, Homo sapiens
  misc_RNA (1)...(19): siRNA sense strand
gaaugagcucuucaacaag

SEQ ID NO: 485862 - RNA, 19 nt, Homo sapiens
  misc_RNA (1)...(19): siRNA sense strand
aaggcgacaucaagaagga

SEQ ID NO: 485863 - RNA, 19 nt, Homo sapiens
  misc_RNA (1)...(19): siRNA sense strand
agaccacccguuauaauca

SEQ ID NO: 485864 - RNA, 19 nt, Homo sapiens
  misc_RNA (1)...(19): siRNA sense strand
caagagucgugggaugaag

SEQ ID NO: 485865 - RNA, 19 nt, Homo sapiens
  misc_RNA (1)...(19): siRNA sense strand
ggacgcugcaggaacaagu

SEQ ID NO: 485866 - RNA, 19 nt, Homo sapiens
  misc_RNA (1)...(19): siRNA sense strand
ucagguccggcacauguuu

SEQ ID NO: 485867 - RNA, 19 nt, Homo sapiens
  misc_RNA (1)...(19): siRNA sense strand
ggaggacuugaaccuagaa

SEQ ID NO: 485868 - RNA, 19 nt, Homo sapiens
  misc_RNA (1)...(19): siRNA sense strand
ggcagaaagaggaggaaga

SEQ ID NO: 485869 - RNA, 19 nt, Homo sapiens
  misc_RNA (1)...(19): siRNA sense strand
auagaggugaggaaacuuu

SEQ ID NO: 485870 - RNA, 19 nt, Homo sapiens
  misc_RNA (1)...(19): siRNA sense strand
uugaauagcagagagcaaa

SEQ ID NO: 485871 - RNA, 19 nt, Homo sapiens
  misc_RNA (1)...(19): siRNA sense strand
acaacuaaagggaaugaga

SEQ ID NO: 485872 - RNA, 19 nt, Homo sapiens
  misc_RNA (1)...(19): siRNA sense strand
aagaagcuacagcaucuga

SEQ ID NO: 485873 - RNA, 19 nt, Homo sapiens
  misc_RNA (1)...(19): siRNA sense strand
gaugagaagcacccagaac

SEQ ID NO: 485874 - RNA, 19 nt, Homo sapiens
  misc_RNA (1)...(19): siRNA sense strand
ggaggaggaggacuugaac

SEQ ID NO: 485875 - RNA, 19 nt, Homo sapiens
  misc_RNA (1)...(19): siRNA sense strand
gacccaugcagccgaagaa

SEQ ID NO: 485876 - RNA, 19 nt, Homo sapiens
  misc_RNA (1)...(19): siRNA sense strand
gagaggguacaacuaaagg

SEQ ID NO: 485877 - RNA, 19 nt, Homo sapiens
  misc_RNA (1)...(19): siRNA sense strand
gucaagagucgugggauga

SEQ ID NO: 485878 - RNA, 19 nt, Homo sapiens
  misc_RNA (1)...(19): siRNA sense strand
gccaaggaguucacaaacc

SEQ ID NO: 485879 - RNA, 19 nt, Homo sapiens
  misc_RNA (1)...(19): siRNA sense strand
gaaaggucucagaugaaag

SEQ ID NO: 485880 - RNA, 19 nt, Homo sapiens
  misc_RNA (1)...(19): siRNA sense strand
caacuugcuguaucagaag

SEQ ID NO: 485881 - RNA, 19 nt, Homo sapiens
  misc_RNA (1)...(19): siRNA sense strand
acuugaaccuagaagauag

SEQ ID NO: 485882 - RNA, 19 nt, Homo sapiens
  misc_RNA (1)...(19): siRNA sense strand
ggccggaaggagaauggua

SEQ ID NO: 485883 - RNA, 19 nt, Homo sapiens
  misc_RNA (1)...(19): siRNA sense strand
gguggaaugagcucuucaa

SEQ ID NO: 485884 - RNA, 19 nt, Homo sapiens
  misc_RNA (1)...(19): siRNA sense strand
aggaggacuugaaccuaga

SEQ ID NO: 485885 - RNA, 19 nt, Homo sapiens
  misc_RNA (1)...(19): siRNA sense strand
gagcggacccagcaaugac

SEQ ID NO: 485886 - RNA, 19 nt, Homo sapiens
  misc_RNA (1)...(19): siRNA sense strand
gggaauugaauagcagaga

SEQ ID NO: 485887 - RNA, 19 nt, Homo sapiens
  misc_RNA (1)...(19): siRNA sense strand
aaagaucacugacaacaug

SEQ ID NO: 485888 - RNA, 19 nt, Homo sapiens
  misc_RNA (1)...(19): siRNA sense strand
caagauacguccuguggau

SEQ ID NO: 485889 - RNA, 19 nt, Homo sapiens
  misc_RNA (1)...(19): siRNA sense strand
caggaaagaucacugacaa

SEQ ID NO: 485890 - RNA, 19 nt, Homo sapiens
  misc_RNA (1)...(19): siRNA sense strand
ccaggagucuuccaagguu

SEQ ID NO: 485891 - RNA, 19 nt, Homo sapiens
  misc_RNA (1)...(19): siRNA sense strand
ggaaagaucacugacaaca

SEQ ID NO: 485892 - RNA, 19 nt, Homo sapiens
  misc_RNA (1)...(19): siRNA sense strand
gggaaguuguccacucuau

SEQ ID NO: 485893 - RNA, 19 nt, Homo sapiens
  misc_RNA (1)...(19): siRNA sense strand
guugaagggcccacaauaa

SEQ ID NO: 485894 - RNA, 19 nt, Homo sapiens
  misc_RNA (1)...(19): siRNA sense strand
ccaagguucucaacaccaa

SEQ ID NO: 485895 - RNA, 19 nt, Homo sapiens
  misc_RNA (1)...(19): siRNA sense strand
gaaacaauccgaaaauaug

SEQ ID NO: 485896 - RNA, 19 nt, Homo sapiens
  misc_RNA (1)...(19): siRNA sense strand
gaaccacgaccaugacauc

SEQ ID NO: 485897 - RNA, 19 nt, Homo sapiens
  misc_RNA (1)...(19): siRNA sense strand
gagggaaguuguccacucu

SEQ ID NO: 485898 - RNA, 19 nt, Homo sapiens
  misc_RNA (1)...(19): siRNA sense strand
gaugaggagugucgucaag

SEQ ID NO: 485899 - RNA, 19 nt, Homo sapiens
  misc_RNA (1)...(19): siRNA sense strand
cgucaagucuacccaggaa

SEQ ID NO: 485900 - RNA, 19 nt, Homo sapiens
  misc_RNA (1)...(19): siRNA sense strand
gaaagaucacugacaacau

SEQ ID NO: 485901 - RNA, 19 nt, Homo sapiens
  misc_RNA (1)...(19): siRNA sense strand
gcucacaggcuacauccaa

SEQ ID NO: 485902 - RNA, 19 nt, Homo sapiens
  misc_RNA (1)...(19): siRNA sense strand
gguugaagggcccacaaua

SEQ ID NO: 485903 - RNA, 19 nt, Homo sapiens
  misc_RNA (1)...(19): siRNA sense strand
ggagugucgucaagucuac

SEQ ID NO: 485904 - RNA, 19 nt, Homo sapiens
  misc_RNA (1)...(19): siRNA sense strand
gugaaacaauccgaaaaua

SEQ ID NO: 485905 - RNA, 19 nt, Homo sapiens
  misc_RNA (1)...(19): siRNA sense strand
guggauccgugaaacaauc

SEQ ID NO: 485906 - RNA, 19 nt, Homo sapiens
  misc_RNA (1)...(19): siRNA sense strand
uaugaaacccagcagcaaa

SEQ ID NO: 485907 - RNA, 19 nt, Homo sapiens
  misc_RNA (1)...(19): siRNA sense strand
gaaguuguccacucuaucc

SEQ ID NO: 485908 - RNA, 19 nt, Homo sapiens
  misc_RNA (1)...(19): siRNA sense strand
ccccaaaacucuacaaugu

SEQ ID NO: 485909 - RNA, 19 nt, Homo sapiens
  misc_RNA (1)...(19): siRNA sense strand
aggaggggcucaaaguuua

SEQ ID NO: 485910 - RNA, 19 nt, Homo sapiens
  misc_RNA (1)...(19): siRNA sense strand
caaugggaccaguggguuu

SEQ ID NO: 485911 - RNA, 19 nt, Homo sapiens
  misc_RNA (1)...(19): siRNA sense strand
ugaggagugucgucaaguc

SEQ ID NO: 485912 - RNA, 19 nt, Homo sapiens
  misc_RNA (1)...(19): siRNA sense strand
ugaccggccuggugucuac

SEQ ID NO: 485913 - RNA, 19 nt, Homo sapiens
  misc_RNA (1)...(19): siRNA sense strand
gagcaggugagggaaguug

SEQ ID NO: 485914 - RNA, 19 nt, Homo sapiens
  misc_RNA (1)...(19): siRNA sense strand
cauccaacuucgcucagau

SEQ ID NO: 485915 - RNA, 19 nt, Homo sapiens
  misc_RNA (1)...(19): siRNA sense strand
caaaagaggguggcaaaga

SEQ ID NO: 485916 - RNA, 19 nt, Homo sapiens
  misc_RNA (1)...(19): siRNA sense strand
ggaaguuguccacucuauc

SEQ ID NO: 485917 - RNA, 19 nt, Homo sapiens
  misc_RNA (1)...(19): siRNA sense strand
ccaggaaagaucacugaca

SEQ ID NO: 485918 - RNA, 19 nt, Homo sapiens
  misc_RNA (1)...(19): siRNA sense strand
gugagcaggugagggaagu

SEQ ID NO: 485919 - RNA, 19 nt, Homo sapiens
  misc_RNA (1)...(19): siRNA sense strand
gccgcacacugucuaaagg

SEQ ID NO: 485920 - RNA, 19 nt, Homo sapiens
  misc_RNA (1)...(19): siRNA sense strand
ucaagucuacccaggaaag

SEQ ID NO: 485921 - RNA, 19 nt, Homo sapiens
  misc_RNA (1)...(19): siRNA sense strand
aaggagagaugguggauua

SEQ ID NO: 485922 - RNA, 19 nt, Homo sapiens
  misc_RNA (1)...(19): siRNA sense strand
cagcugggcuuccugguuu

SEQ ID NO: 485923 - RNA, 19 nt, Homo sapiens
  misc_RNA (1)...(19): siRNA sense strand
ccaaagacaucuccaggau

SEQ ID NO: 485924 - RNA, 19 nt, Homo sapiens
  misc_RNA (1)...(19): siRNA sense strand
gagagaugguggauuacaa

SEQ ID NO: 485925 - RNA, 19 nt, Homo sapiens
  misc_RNA (1)...(19): siRNA sense strand
aaagggaccucgcgguaaa

SEQ ID NO: 485926 - RNA, 19 nt, Homo sapiens
  misc_RNA (1)...(19): siRNA sense strand
gaugguggauuacaaugga

SEQ ID NO: 485927 - RNA, 19 nt, Homo sapiens
  misc_RNA (1)...(19): siRNA sense strand
ggauuacaauggaaacauc

SEQ ID NO: 485928 - RNA, 19 nt, Homo sapiens
  misc_RNA (1)...(19): siRNA sense strand
caagggagaaccagggaaa

SEQ ID NO: 485929 - RNA, 19 nt, Homo sapiens
  misc_RNA (1)...(19): siRNA sense strand
ggaagcaggacuagaugga

SEQ ID NO: 485930 - RNA, 19 nt, Homo sapiens
  misc_RNA (1)...(19): siRNA sense strand
caaggcugcuggaacaagu

SEQ ID NO: 485931 - RNA, 19 nt, Homo sapiens
  misc_RNA (1)...(19): siRNA sense strand
gggagaagcaggugucgau

SEQ ID NO: 485932 - RNA, 19 nt, Homo sapiens
  misc_RNA (1)...(19): siRNA sense strand
ggagaacagggaccagaug

SEQ ID NO: 485933 - RNA, 19 nt, Homo sapiens
  misc_RNA (1)...(19): siRNA sense strand
acaauggaaacaucaauga

SEQ ID NO: 485934 - RNA, 19 nt, Homo sapiens
  misc_RNA (1)...(19): siRNA sense strand
gaaaggagagaugguggau

SEQ ID NO: 485935 - RNA, 19 nt, Homo sapiens
  misc_RNA (1)...(19): siRNA sense strand
cuagagguuucccuggauu

SEQ ID NO: 485936 - RNA, 19 nt, Homo sapiens
  misc_RNA (1)...(19): siRNA sense strand
gcaaauggagacggcuauu

SEQ ID NO: 485937 - RNA, 19 nt, Homo sapiens
  misc_RNA (1)...(19): siRNA sense strand
gaaaggcuuccagggagaa

SEQ ID NO: 485938 - RNA, 19 nt, Homo sapiens
  misc_RNA (1)...(19): siRNA sense strand
gcagcugggcuuccugguu

SEQ ID NO: 485939 - RNA, 19 nt, Homo sapiens
  misc_RNA (1)...(19): siRNA sense strand
ggagagaugguggauuaca

SEQ ID NO: 485940 - RNA, 19 nt, Homo sapiens
  misc_RNA (1)...(19): siRNA sense strand
gaugcuggcaacuccauug

SEQ ID NO: 485941 - RNA, 19 nt, Homo sapiens
  misc_RNA (1)...(19): siRNA sense strand
gcguggagcagcuggagaa

SEQ ID NO: 485942 - RNA, 19 nt, Homo sapiens
  misc_RNA (1)...(19): siRNA sense strand
uggagcagcuggagaacag

SEQ ID NO: 485943 - RNA, 19 nt, Homo sapiens
  misc_RNA (1)...(19): siRNA sense strand
ggauuuccgggucccauug

SEQ ID NO: 485944 - RNA, 19 nt, Homo sapiens
  misc_RNA (1)...(19): siRNA sense strand
gagaugguggauuacaaug

SEQ ID NO: 485945 - RNA, 19 nt, Homo sapiens
  misc_RNA (1)...(19): siRNA sense strand
uagcggagcgcacccacaa

SEQ ID NO: 485946 - RNA, 19 nt, Homo sapiens
  misc_RNA (1)...(19): siRNA sense strand
gggagaaccagggaaagga

SEQ ID NO: 485947 - RNA, 19 nt, Homo sapiens
  misc_RNA (1)...(19): siRNA sense strand
gagccaggccagcauccaa

SEQ ID NO: 485948 - RNA, 19 nt, Homo sapiens
  misc_RNA (1)...(19): siRNA sense strand
gguacuccaggaccaauug

SEQ ID NO: 485949 - RNA, 19 nt, Homo sapiens
  misc_RNA (1)...(19): siRNA sense strand
aaaggagacccugggauga

SEQ ID NO: 485950 - RNA, 19 nt, Homo sapiens
  misc_RNA (1)...(19): siRNA sense strand
gagccagggaucccaggaa

SEQ ID NO: 485951 - RNA, 19 nt, Homo sapiens
  misc_RNA (1)...(19): siRNA sense strand
gaaccagggaaaggagaga

SEQ ID NO: 485952 - RNA, 19 nt, Homo sapiens
  misc_RNA (1)...(19): siRNA sense strand
gauuacaauggaaacauca

SEQ ID NO: 485953 - RNA, 19 nt, Homo sapiens
  misc_RNA (1)...(19): siRNA sense strand
ggucaaccaggaacuagag

SEQ ID NO: 485954 - RNA, 19 nt, Homo sapiens
  misc_RNA (1)...(19): siRNA sense strand
aaggagagaugguggauua

SEQ ID NO: 485955 - RNA, 19 nt, Homo sapiens
  misc_RNA (1)...(19): siRNA sense strand
cagcugggcuuccugguuu

SEQ ID NO: 485956 - RNA, 19 nt, Homo sapiens
  misc_RNA (1)...(19): siRNA sense strand
ccaaagacaucuccaggau

SEQ ID NO: 485957 - RNA, 19 nt, Homo sapiens
  misc_RNA (1)...(19): siRNA sense strand
gagagaugguggauuacaa

SEQ ID NO: 485958 - RNA, 19 nt, Homo sapiens
  misc_RNA (1)...(19): siRNA sense strand
aaagggaccucgcgguaaa

SEQ ID NO: 485959 - RNA, 19 nt, Homo sapiens
  misc_RNA (1)...(19): siRNA sense strand
gaugguggauuacaaugga

SEQ ID NO: 485960 - RNA, 19 nt, Homo sapiens
  misc_RNA (1)...(19): siRNA sense strand
ggauuacaauggaaacauc

SEQ ID NO: 485961 - RNA, 19 nt, Homo sapiens
  misc_RNA (1)...(19): siRNA sense strand
caagggagaaccagggaaa

SEQ ID NO: 485962 - RNA, 19 nt, Homo sapiens
  misc_RNA (1)...(19): siRNA sense strand
ggaagcaggacuagaugga

SEQ ID NO: 485963 - RNA, 19 nt, Homo sapiens
  misc_RNA (1)...(19): siRNA sense strand
caaggcugcuggaacaagu

SEQ ID NO: 485964 - RNA, 19 nt, Homo sapiens
  misc_RNA (1)...(19): siRNA sense strand
gggagaagcaggugucgau

SEQ ID NO: 485965 - RNA, 19 nt, Homo sapiens
  misc_RNA (1)...(19): siRNA sense strand
ggagaacagggaccagaug

SEQ ID NO: 485966 - RNA, 19 nt, Homo sapiens
  misc_RNA (1)...(19): siRNA sense strand
acaauggaaacaucaauga

SEQ ID NO: 485967 - RNA, 19 nt, Homo sapiens
  misc_RNA (1)...(19): siRNA sense strand
gaaaggagagaugguggau

SEQ ID NO: 485968 - RNA, 19 nt, Homo sapiens
  misc_RNA (1)...(19): siRNA sense strand
cuagagguuucccuggauu

SEQ ID NO: 485969 - RNA, 19 nt, Homo sapiens
  misc_RNA (1)...(19): siRNA sense strand
gcaaauggagacggcuauu

SEQ ID NO: 485970 - RNA, 19 nt, Homo sapiens
  misc_RNA (1)...(19): siRNA sense strand
gaaaggcuuccagggagaa

SEQ ID NO: 485971 - RNA, 19 nt, Homo sapiens
  misc_RNA (1)...(19): siRNA sense strand
gcagcugggcuuccugguu

SEQ ID NO: 485972 - RNA, 19 nt, Homo sapiens
  misc_RNA (1)...(19): siRNA sense strand
ggagagaugguggauuaca

SEQ ID NO: 485973 - RNA, 19 nt, Homo sapiens
  misc_RNA (1)...(19): siRNA sense strand
gaugcuggcaacuccauug

SEQ ID NO: 485974 - RNA, 19 nt, Homo sapiens
  misc_RNA (1)...(19): siRNA sense strand
gcguggagcagcuggagaa

SEQ ID NO: 485975 - RNA, 19 nt, Homo sapiens
  misc_RNA (1)...(19): siRNA sense strand
uggagcagcuggagaacag

SEQ ID NO: 485976 - RNA, 19 nt, Homo sapiens
  misc_RNA (1)...(19): siRNA sense strand
ggauuuccgggucccauug

SEQ ID NO: 485977 - RNA, 19 nt, Homo sapiens
  misc_RNA (1)...(19): siRNA sense strand
gagaugguggauuacaaug

SEQ ID NO: 485978 - RNA, 19 nt, Homo sapiens
  misc_RNA (1)...(19): siRNA sense strand
uagcggagcgcacccacaa

SEQ ID NO: 485979 - RNA, 19 nt, Homo sapiens
  misc_RNA (1)...(19): siRNA sense strand
gggagaaccagggaaagga

SEQ ID NO: 485980 - RNA, 19 nt, Homo sapiens
  misc_RNA (1)...(19): siRNA sense strand
gagccaggccagcauccaa

SEQ ID NO: 485981 - RNA, 19 nt, Homo sapiens
  misc_RNA (1)...(19): siRNA sense strand
gguacuccaggaccaauug

SEQ ID NO: 485982 - RNA, 19 nt, Homo sapiens
  misc_RNA (1)...(19): siRNA sense strand
aaaggagacccugggauga

SEQ ID NO: 485983 - RNA, 19 nt, Homo sapiens
  misc_RNA (1)...(19): siRNA sense strand
gagccagggaucccaggaa

SEQ ID NO: 485984 - RNA, 19 nt, Homo sapiens
  misc_RNA (1)...(19): siRNA sense strand
gaaccagggaaaggagaga

SEQ ID NO: 485985 - RNA, 19 nt, Homo sapiens
  misc_RNA (1)...(19): siRNA sense strand
gauuacaauggaaacauca

SEQ ID NO: 485986 - RNA, 19 nt, Homo sapiens
  misc_RNA (1)...(19): siRNA sense strand
ggucaaccaggaacuagag

SEQ ID NO: 485987 - RNA, 19 nt, Homo sapiens
  misc_RNA (1)...(19): siRNA sense strand
aaggagagaugguggauua

SEQ ID NO: 485988 - RNA, 19 nt, Homo sapiens
  misc_RNA (1)...(19): siRNA sense strand
cagcugggcuuccugguuu

SEQ ID NO: 485989 - RNA, 19 nt, Homo sapiens
  misc_RNA (1)...(19): siRNA sense strand
ccaaagacaucuccaggau

SEQ ID NO: 485990 - RNA, 19 nt, Homo sapiens
  misc_RNA (1)...(19): siRNA sense strand
gagagaugguggauuacaa

SEQ ID NO: 485991 - RNA, 19 nt, Homo sapiens
  misc_RNA (1)...(19): siRNA sense strand
aaagggaccucgcgguaaa

SEQ ID NO: 485992 - RNA, 19 nt, Homo sapiens
  misc_RNA (1)...(19): siRNA sense strand
gaugguggauuacaaugga

SEQ ID NO: 485993 - RNA, 19 nt, Homo sapiens
  misc_RNA (1)...(19): siRNA sense strand
ggauuacaauggaaacauc

SEQ ID NO: 485994 - RNA, 19 nt, Homo sapiens
  misc_RNA (1)...(19): siRNA sense strand
caagggagaaccagggaaa

SEQ ID NO: 485995 - RNA, 19 nt, Homo sapiens
  misc_RNA (1)...(19): siRNA sense strand
ggaagcaggacuagaugga

SEQ ID NO: 485996 - RNA, 19 nt, Homo sapiens
  misc_RNA (1)...(19): siRNA sense strand
caaggcugcuggaacaagu

SEQ ID NO: 485997 - RNA, 19 nt, Homo sapiens
  misc_RNA (1)...(19): siRNA sense strand
gggagaagcaggugucgau

SEQ ID NO: 485998 - RNA, 19 nt, Homo sapiens
  misc_RNA (1)...(19): siRNA sense strand
ggagaacagggaccagaug

SEQ ID NO: 485999 - RNA, 19 nt, Homo sapiens
  misc_RNA (1)...(19): siRNA sense strand
acaauggaaacaucaauga

SEQ ID NO: 486000 - RNA, 19 nt, Homo sapiens
  misc_RNA (1)...(19): siRNA sense strand
gaaaggagagaugguggau

SEQ ID NO: 486001 - RNA, 19 nt, Homo sapiens
  misc_RNA (1)...(19): siRNA sense strand
cuagagguuucccuggauu

SEQ ID NO: 486002 - RNA, 19 nt, Homo sapiens
  misc_RNA (1)...(19): siRNA sense strand
gcaaauggagacggcuauu

SEQ ID NO: 486003 - RNA, 19 nt, Homo sapiens
  misc_RNA (1)...(19): siRNA sense strand
gaaaggcuuccagggagaa

SEQ ID NO: 486004 - RNA, 19 nt, Homo sapiens
  misc_RNA (1)...(19): siRNA sense strand
gcagcugggcuuccugguu

SEQ ID NO: 486005 - RNA, 19 nt, Homo sapiens
  misc_RNA (1)...(19): siRNA sense strand
ggagagaugguggauuaca

SEQ ID NO: 486006 - RNA, 19 nt, Homo sapiens
  misc_RNA (1)...(19): siRNA sense strand
gaugcuggcaacuccauug

SEQ ID NO: 486007 - RNA, 19 nt, Homo sapiens
  misc_RNA (1)...(19): siRNA sense strand
gcguggagcagcuggagaa

SEQ ID NO: 486008 - RNA, 19 nt, Homo sapiens
  misc_RNA (1)...(19): siRNA sense strand
uggagcagcuggagaacag

SEQ ID NO: 486009 - RNA, 19 nt, Homo sapiens
  misc_RNA (1)...(19): siRNA sense strand
ggauuuccgggucccauug

SEQ ID NO: 486010 - RNA, 19 nt, Homo sapiens
  misc_RNA (1)...(19): siRNA sense strand
gagaugguggauuacaaug

SEQ ID NO: 486011 - RNA, 19 nt, Homo sapiens
  misc_RNA (1)...(19): siRNA sense strand
uagcggagcgcacccacaa

SEQ ID NO: 486012 - RNA, 19 nt, Homo sapiens
  misc_RNA (1)...(19): siRNA sense strand
gggagaaccagggaaagga

SEQ ID NO: 486013 - RNA, 19 nt, Homo sapiens
  misc_RNA (1)...(19): siRNA sense strand
gagccaggccagcauccaa

SEQ ID NO: 486014 - RNA, 19 nt, Homo sapiens
  misc_RNA (1)...(19): siRNA sense strand
gguacuccaggaccaauug

SEQ ID NO: 486015 - RNA, 19 nt, Homo sapiens
  misc_RNA (1)...(19): siRNA sense strand
aaaggagacccugggauga

SEQ ID NO: 486016 - RNA, 19 nt, Homo sapiens
  misc_RNA (1)...(19): siRNA sense strand
gagccagggaucccaggaa

SEQ ID NO: 486017 - RNA, 19 nt, Homo sapiens
  misc_RNA (1)...(19): siRNA sense strand
gaaccagggaaaggagaga

SEQ ID NO: 486018 - RNA, 19 nt, Homo sapiens
  misc_RNA (1)...(19): siRNA sense strand
gauuacaauggaaacauca

SEQ ID NO: 486019 - RNA, 19 nt, Homo sapiens
  misc_RNA (1)...(19): siRNA sense strand
ggucaaccaggaacuagag

SEQ ID NO: 486020 - RNA, 19 nt, Homo sapiens
  misc_RNA (1)...(19): siRNA sense strand
aaggagagaugguggauua

SEQ ID NO: 486021 - RNA, 19 nt, Homo sapiens
  misc_RNA (1)...(19): siRNA sense strand
cagcugggcuuccugguuu

SEQ ID NO: 486022 - RNA, 19 nt, Homo sapiens
  misc_RNA (1)...(19): siRNA sense strand
ccaaagacaucuccaggau

SEQ ID NO: 486023 - RNA, 19 nt, Homo sapiens
  misc_RNA (1)...(19): siRNA sense strand
gagagaugguggauuacaa

SEQ ID NO: 486024 - RNA, 19 nt, Homo sapiens
  misc_RNA (1)...(19): siRNA sense strand
aaagggaccucgcgguaaa

SEQ ID NO: 486025 - RNA, 19 nt, Homo sapiens
  misc_RNA (1)...(19): siRNA sense strand
gaugguggauuacaaugga

SEQ ID NO: 486026 - RNA, 19 nt, Homo sapiens
  misc_RNA (1)...(19): siRNA sense strand
ggauuacaauggaaacauc

SEQ ID NO: 486027 - RNA, 19 nt, Homo sapiens
  misc_RNA (1)...(19): siRNA sense strand
caagggagaaccagggaaa

SEQ ID NO: 486028 - RNA, 19 nt, Homo sapiens
  misc_RNA (1)...(19): siRNA sense strand
ggaagcaggacuagaugga

SEQ ID NO: 486029 - RNA, 19 nt, Homo sapiens
  misc_RNA (1)...(19): siRNA sense strand
caaggcugcuggaacaagu

SEQ ID NO: 486030 - RNA, 19 nt, Homo sapiens
  misc_RNA (1)...(19): siRNA sense strand
gggagaagcaggugucgau

SEQ ID NO: 486031 - RNA, 19 nt, Homo sapiens
  misc_RNA (1)...(19): siRNA sense strand
ggagaacagggaccagaug

SEQ ID NO: 486032 - RNA, 19 nt, Homo sapiens
  misc_RNA (1)...(19): siRNA sense strand
acaauggaaacaucaauga

SEQ ID NO: 486033 - RNA, 19 nt, Homo sapiens
  misc_RNA (1)...(19): siRNA sense strand
gaaaggagagaugguggau

SEQ ID NO: 486034 - RNA, 19 nt, Homo sapiens
  misc_RNA (1)...(19): siRNA sense strand
cuagagguuucccuggauu

SEQ ID NO: 486035 - RNA, 19 nt, Homo sapiens
  misc_RNA (1)...(19): siRNA sense strand
gcaaauggagacggcuauu

SEQ ID NO: 486036 - RNA, 19 nt, Homo sapiens
  misc_RNA (1)...(19): siRNA sense strand
gaaaggcuuccagggagaa

SEQ ID NO: 486037 - RNA, 19 nt, Homo sapiens
  misc_RNA (1)...(19): siRNA sense strand
gcagcugggcuuccugguu

SEQ ID NO: 486038 - RNA, 19 nt, Homo sapiens
  misc_RNA (1)...(19): siRNA sense strand
ggagagaugguggauuaca

SEQ ID NO: 486039 - RNA, 19 nt, Homo sapiens
  misc_RNA (1)...(19): siRNA sense strand
gaugcuggcaacuccauug

SEQ ID NO: 486040 - RNA, 19 nt, Homo sapiens
  misc_RNA (1)...(19): siRNA sense strand
gcguggagcagcuggagaa

SEQ ID NO: 486041 - RNA, 19 nt, Homo sapiens
  misc_RNA (1)...(19): siRNA sense strand
uggagcagcuggagaacag

SEQ ID NO: 486042 - RNA, 19 nt, Homo sapiens
  misc_RNA (1)...(19): siRNA sense strand
ggauuuccgggucccauug

SEQ ID NO: 486043 - RNA, 19 nt, Homo sapiens
  misc_RNA (1)...(19): siRNA sense strand
gagaugguggauuacaaug

SEQ ID NO: 486044 - RNA, 19 nt, Homo sapiens
  misc_RNA (1)...(19): siRNA sense strand
uagcggagcgcacccacaa

SEQ ID NO: 486045 - RNA, 19 nt, Homo sapiens
  misc_RNA (1)...(19): siRNA sense strand
gggagaaccagggaaagga

SEQ ID NO: 486046 - RNA, 19 nt, Homo sapiens
  misc_RNA (1)...(19): siRNA sense strand
gagccaggccagcauccaa

SEQ ID NO: 486047 - RNA, 19 nt, Homo sapiens
  misc_RNA (1)...(19): siRNA sense strand
gguacuccaggaccaauug

SEQ ID NO: 486048 - RNA, 19 nt, Homo sapiens
  misc_RNA (1)...(19): siRNA sense strand
aaaggagacccugggauga

SEQ ID NO: 486049 - RNA, 19 nt, Homo sapiens
  misc_RNA (1)...(19): siRNA sense strand
gagccagggaucccaggaa

SEQ ID NO: 486050 - RNA, 19 nt, Homo sapiens
  misc_RNA (1)...(19): siRNA sense strand
gaaccagggaaaggagaga

SEQ ID NO: 486051 - RNA, 19 nt, Homo sapiens
  misc_RNA (1)...(19): siRNA sense strand
gauuacaauggaaacauca

SEQ ID NO: 486052 - RNA, 19 nt, Homo sapiens
  misc_RNA (1)...(19): siRNA sense strand
ggucaaccaggaacuagag

SEQ ID NO: 486053 - RNA, 19 nt, Homo sapiens
  misc_RNA (1)...(19): siRNA sense strand
aaggagagaugguggauua

SEQ ID NO: 486054 - RNA, 19 nt, Homo sapiens
  misc_RNA (1)...(19): siRNA sense strand
cagcugggcuuccugguuu

SEQ ID NO: 486055 - RNA, 19 nt, Homo sapiens
  misc_RNA (1)...(19): siRNA sense strand
ccaaagacaucuccaggau

SEQ ID NO: 486056 - RNA, 19 nt, Homo sapiens
  misc_RNA (1)...(19): siRNA sense strand
gagagaugguggauuacaa

SEQ ID NO: 486057 - RNA, 19 nt, Homo sapiens
  misc_RNA (1)...(19): siRNA sense strand
aaagggaccucgcgguaaa

SEQ ID NO: 486058 - RNA, 19 nt, Homo sapiens
  misc_RNA (1)...(19): siRNA sense strand
gaugguggauuacaaugga

SEQ ID NO: 486059 - RNA, 19 nt, Homo sapiens
  misc_RNA (1)...(19): siRNA sense strand
ggauuacaauggaaacauc

SEQ ID NO: 486060 - RNA, 19 nt, Homo sapiens
  misc_RNA (1)...(19): siRNA sense strand
caagggagaaccagggaaa

SEQ ID NO: 486061 - RNA, 19 nt, Homo sapiens
  misc_RNA (1)...(19): siRNA sense strand
ggaagcaggacuagaugga

SEQ ID NO: 486062 - RNA, 19 nt, Homo sapiens
  misc_RNA (1)...(19): siRNA sense strand
caaggcugcuggaacaagu

SEQ ID NO: 486063 - RNA, 19 nt, Homo sapiens
  misc_RNA (1)...(19): siRNA sense strand
gggagaagcaggugucgau

SEQ ID NO: 486064 - RNA, 19 nt, Homo sapiens
  misc_RNA (1)...(19): siRNA sense strand
ggagaacagggaccagaug

SEQ ID NO: 486065 - RNA, 19 nt, Homo sapiens
  misc_RNA (1)...(19): siRNA sense strand
acaauggaaacaucaauga

SEQ ID NO: 486066 - RNA, 19 nt, Homo sapiens
  misc_RNA (1)...(19): siRNA sense strand
gaaaggagagaugguggau

SEQ ID NO: 486067 - RNA, 19 nt, Homo sapiens
  misc_RNA (1)...(19): siRNA sense strand
cuagagguuucccuggauu

SEQ ID NO: 486068 - RNA, 19 nt, Homo sapiens
  misc_RNA (1)...(19): siRNA sense strand
gcaaauggagacggcuauu

SEQ ID NO: 486069 - RNA, 19 nt, Homo sapiens
  misc_RNA (1)...(19): siRNA sense strand
gaaaggcuuccagggagaa

SEQ ID NO: 486070 - RNA, 19 nt, Homo sapiens
  misc_RNA (1)...(19): siRNA sense strand
gcagcugggcuuccugguu

SEQ ID NO: 486071 - RNA, 19 nt, Homo sapiens
  misc_RNA (1)...(19): siRNA sense strand
ggagagaugguggauuaca

SEQ ID NO: 486072 - RNA, 19 nt, Homo sapiens
  misc_RNA (1)...(19): siRNA sense strand
gaugcuggcaacuccauug

SEQ ID NO: 486073 - RNA, 19 nt, Homo sapiens
  misc_RNA (1)...(19): siRNA sense strand
gcguggagcagcuggagaa

SEQ ID NO: 486074 - RNA, 19 nt, Homo sapiens
  misc_RNA (1)...(19): siRNA sense strand
uggagcagcuggagaacag

SEQ ID NO: 486075 - RNA, 19 nt, Homo sapiens
  misc_RNA (1)...(19): siRNA sense strand
ggauuuccgggucccauug

SEQ ID NO: 486076 - RNA, 19 nt, Homo sapiens
  misc_RNA (1)...(19): siRNA sense strand
gagaugguggauuacaaug

SEQ ID NO: 486077 - RNA, 19 nt, Homo sapiens
  misc_RNA (1)...(19): siRNA sense strand
uagcggagcgcacccacaa

SEQ ID NO: 486078 - RNA, 19 nt, Homo sapiens
  misc_RNA (1)...(19): siRNA sense strand
gggagaaccagggaaagga

SEQ ID NO: 486079 - RNA, 19 nt, Homo sapiens
  misc_RNA (1)...(19): siRNA sense strand
gagccaggccagcauccaa

SEQ ID NO: 486080 - RNA, 19 nt, Homo sapiens
  misc_RNA (1)...(19): siRNA sense strand
gguacuccaggaccaauug

SEQ ID NO: 486081 - RNA, 19 nt, Homo sapiens
  misc_RNA (1)...(19): siRNA sense strand
aaaggagacccugggauga

SEQ ID NO: 486082 - RNA, 19 nt, Homo sapiens
  misc_RNA (1)...(19): siRNA sense strand
gagccagggaucccaggaa

SEQ ID NO: 486083 - RNA, 19 nt, Homo sapiens
  misc_RNA (1)...(19): siRNA sense strand
gaaccagggaaaggagaga

SEQ ID NO: 486084 - RNA, 19 nt, Homo sapiens
  misc_RNA (1)...(19): siRNA sense strand
gauuacaauggaaacauca

SEQ ID NO: 486085 - RNA, 19 nt, Homo sapiens
  misc_RNA (1)...(19): siRNA sense strand
ggucaaccaggaacuagag

SEQ ID NO: 486086 - RNA, 19 nt, Homo sapiens
  misc_RNA (1)...(19): siRNA sense strand
aaggagagaugguggauua

SEQ ID NO: 486087 - RNA, 19 nt, Homo sapiens
  misc_RNA (1)...(19): siRNA sense strand
cagcugggcuuccugguuu

SEQ ID NO: 486088 - RNA, 19 nt, Homo sapiens
  misc_RNA (1)...(19): siRNA sense strand
ccaaagacaucuccaggau

SEQ ID NO: 486089 - RNA, 19 nt, Homo sapiens
  misc_RNA (1)...(19): siRNA sense strand
gagagaugguggauuacaa

SEQ ID NO: 486090 - RNA, 19 nt, Homo sapiens
  misc_RNA (1)...(19): siRNA sense strand
aaagggaccucgcgguaaa

SEQ ID NO: 486091 - RNA, 19 nt, Homo sapiens
  misc_RNA (1)...(19): siRNA sense strand
gaugguggauuacaaugga

SEQ ID NO: 486092 - RNA, 19 nt, Homo sapiens
  misc_RNA (1)...(19): siRNA sense strand
ggauuacaauggaaacauc

SEQ ID NO: 486093 - RNA, 19 nt, Homo sapiens
  misc_RNA (1)...(19): siRNA sense strand
caagggagaaccagggaaa

SEQ ID NO: 486094 - RNA, 19 nt, Homo sapiens
  misc_RNA (1)...(19): siRNA sense strand
ggaagcaggacuagaugga

SEQ ID NO: 486095 - RNA, 19 nt, Homo sapiens
  misc_RNA (1)...(19): siRNA sense strand
caaggcugcuggaacaagu

SEQ ID NO: 486096 - RNA, 19 nt, Homo sapiens
  misc_RNA (1)...(19): siRNA sense strand
gggagaagcaggugucgau

SEQ ID NO: 486097 - RNA, 19 nt, Homo sapiens
  misc_RNA (1)...(19): siRNA sense strand
ggagaacagggaccagaug

SEQ ID NO: 486098 - RNA, 19 nt, Homo sapiens
  misc_RNA (1)...(19): siRNA sense strand
acaauggaaacaucaauga

SEQ ID NO: 486099 - RNA, 19 nt, Homo sapiens
  misc_RNA (1)...(19): siRNA sense strand
gaaaggagagaugguggau

SEQ ID NO: 486100 - RNA, 19 nt, Homo sapiens
  misc_RNA (1)...(19): siRNA sense strand
cuagagguuucccuggauu

SEQ ID NO: 486101 - RNA, 19 nt, Homo sapiens
  misc_RNA (1)...(19): siRNA sense strand
gcaaauggagacggcuauu

SEQ ID NO: 486102 - RNA, 19 nt, Homo sapiens
  misc_RNA (1)...(19): siRNA sense strand
gaaaggcuuccagggagaa

SEQ ID NO: 486103 - RNA, 19 nt, Homo sapiens
  misc_RNA (1)...(19): siRNA sense strand
gcagcugggcuuccugguu

SEQ ID NO: 486104 - RNA, 19 nt, Homo sapiens
  misc_RNA (1)...(19): siRNA sense strand
ggagagaugguggauuaca

SEQ ID NO: 486105 - RNA, 19 nt, Homo sapiens
  misc_RNA (1)...(19): siRNA sense strand
gaugcuggcaacuccauug

SEQ ID NO: 486106 - RNA, 19 nt, Homo sapiens
  misc_RNA (1)...(19): siRNA sense strand
gcguggagcagcuggagaa

SEQ ID NO: 486107 - RNA, 19 nt, Homo sapiens
  misc_RNA (1)...(19): siRNA sense strand
uggagcagcuggagaacag

SEQ ID NO: 486108 - RNA, 19 nt, Homo sapiens
  misc_RNA (1)...(19): siRNA sense strand
ggauuuccgggucccauug

SEQ ID NO: 486109 - RNA, 19 nt, Homo sapiens
  misc_RNA (1)...(19): siRNA sense strand
gagaugguggauuacaaug

SEQ ID NO: 486110 - RNA, 19 nt, Homo sapiens
  misc_RNA (1)...(19): siRNA sense strand
uagcggagcgcacccacaa

SEQ ID NO: 486111 - RNA, 19 nt, Homo sapiens
  misc_RNA (1)...(19): siRNA sense strand
gggagaaccagggaaagga

SEQ ID NO: 486112 - RNA, 19 nt, Homo sapiens
  misc_RNA (1)...(19): siRNA sense strand
gagccaggccagcauccaa

SEQ ID NO: 486113 - RNA, 19 nt, Homo sapiens
  misc_RNA (1)...(19): siRNA sense strand
gguacuccaggaccaauug

SEQ ID NO: 486114 - RNA, 19 nt, Homo sapiens
  misc_RNA (1)...(19): siRNA sense strand
aaaggagacccugggauga

SEQ ID NO: 486115 - RNA, 19 nt, Homo sapiens
  misc_RNA (1)...(19): siRNA sense strand
gagccagggaucccaggaa

SEQ ID NO: 486116 - RNA, 19 nt, Homo sapiens
  misc_RNA (1)...(19): siRNA sense strand
gaaccagggaaaggagaga

SEQ ID NO: 486117 - RNA, 19 nt, Homo sapiens
  misc_RNA (1)...(19): siRNA sense strand
gauuacaauggaaacauca

SEQ ID NO: 486118 - RNA, 19 nt, Homo sapiens
  misc_RNA (1)...(19): siRNA sense strand
ggucaaccaggaacuagag

SEQ ID NO: 486119 - RNA, 19 nt, Homo sapiens
  misc_RNA (1)...(19): siRNA sense strand
aaggagagaugguggauua

SEQ ID NO: 486120 - RNA, 19 nt, Homo sapiens
  misc_RNA (1)...(19): siRNA sense strand
cagcugggcuuccugguuu

SEQ ID NO: 486121 - RNA, 19 nt, Homo sapiens
  misc_RNA (1)...(19): siRNA sense strand
ccaaagacaucuccaggau

SEQ ID NO: 486122 - RNA, 19 nt, Homo sapiens
  misc_RNA (1)...(19): siRNA sense strand
gagagaugguggauuacaa

SEQ ID NO: 486123 - RNA, 19 nt, Homo sapiens
  misc_RNA (1)...(19): siRNA sense strand
aaagggaccucgcgguaaa

SEQ ID NO: 486124 - RNA, 19 nt, Homo sapiens
  misc_RNA (1)...(19): siRNA sense strand
gaugguggauuacaaugga

SEQ ID NO: 486125 - RNA, 19 nt, Homo sapiens
  misc_RNA (1)...(19): siRNA sense strand
ggauuacaauggaaacauc

SEQ ID NO: 486126 - RNA, 19 nt, Homo sapiens
  misc_RNA (1)...(19): siRNA sense strand
caagggagaaccagggaaa

SEQ ID NO: 486127 - RNA, 19 nt, Homo sapiens
  misc_RNA (1)...(19): siRNA sense strand
ggaagcaggacuagaugga

SEQ ID NO: 486128 - RNA, 19 nt, Homo sapiens
  misc_RNA (1)...(19): siRNA sense strand
caaggcugcuggaacaagu

SEQ ID NO: 486129 - RNA, 19 nt, Homo sapiens
  misc_RNA (1)...(19): siRNA sense strand
gggagaagcaggugucgau

SEQ ID NO: 486130 - RNA, 19 nt, Homo sapiens
  misc_RNA (1)...(19): siRNA sense strand
ggagaacagggaccagaug

SEQ ID NO: 486131 - RNA, 19 nt, Homo sapiens
  misc_RNA (1)...(19): siRNA sense strand
acaauggaaacaucaauga

SEQ ID NO: 486132 - RNA, 19 nt, Homo sapiens
  misc_RNA (1)...(19): siRNA sense strand
gaaaggagagaugguggau

SEQ ID NO: 486133 - RNA, 19 nt, Homo sapiens
  misc_RNA (1)...(19): siRNA sense strand
cuagagguuucccuggauu

SEQ ID NO: 486134 - RNA, 19 nt, Homo sapiens
  misc_RNA (1)...(19): siRNA sense strand
gcaaauggagacggcuauu

SEQ ID NO: 486135 - RNA, 19 nt, Homo sapiens
  misc_RNA (1)...(19): siRNA sense strand
gaaaggcuuccagggagaa

SEQ ID NO: 486136 - RNA, 19 nt, Homo sapiens
  misc_RNA (1)...(19): siRNA sense strand
gcagcugggcuuccugguu

SEQ ID NO: 486137 - RNA, 19 nt, Homo sapiens
  misc_RNA (1)...(19): siRNA sense strand
ggagagaugguggauuaca

SEQ ID NO: 486138 - RNA, 19 nt, Homo sapiens
  misc_RNA (1)...(19): siRNA sense strand
gaugcuggcaacuccauug

SEQ ID NO: 486139 - RNA, 19 nt, Homo sapiens
  misc_RNA (1)...(19): siRNA sense strand
gcguggagcagcuggagaa

SEQ ID NO: 486140 - RNA, 19 nt, Homo sapiens
  misc_RNA (1)...(19): siRNA sense strand
uggagcagcuggagaacag

SEQ ID NO: 486141 - RNA, 19 nt, Homo sapiens
  misc_RNA (1)...(19): siRNA sense strand
ggauuuccgggucccauug

SEQ ID NO: 486142 - RNA, 19 nt, Homo sapiens
  misc_RNA (1)...(19): siRNA sense strand
gagaugguggauuacaaug

SEQ ID NO: 486143 - RNA, 19 nt, Homo sapiens
  misc_RNA (1)...(19): siRNA sense strand
uagcggagcgcacccacaa

SEQ ID NO: 486144 - RNA, 19 nt, Homo sapiens
  misc_RNA (1)...(19): siRNA sense strand
gggagaaccagggaaagga

SEQ ID NO: 486145 - RNA, 19 nt, Homo sapiens
  misc_RNA (1)...(19): siRNA sense strand
gagccaggccagcauccaa

SEQ ID NO: 486146 - RNA, 19 nt, Homo sapiens
  misc_RNA (1)...(19): siRNA sense strand
gguacuccaggaccaauug

SEQ ID NO: 486147 - RNA, 19 nt, Homo sapiens
  misc_RNA (1)...(19): siRNA sense strand
aaaggagacccugggauga

SEQ ID NO: 486148 - RNA, 19 nt, Homo sapiens
  misc_RNA (1)...(19): siRNA sense strand
gagccagggaucccaggaa

SEQ ID NO: 486149 - RNA, 19 nt, Homo sapiens
  misc_RNA (1)...(19): siRNA sense strand
gaaccagggaaaggagaga

SEQ ID NO: 486150 - RNA, 19 nt, Homo sapiens
  misc_RNA (1)...(19): siRNA sense strand
gauuacaauggaaacauca

SEQ ID NO: 486151 - RNA, 19 nt, Homo sapiens
  misc_RNA (1)...(19): siRNA sense strand
ggucaaccaggaacuagag

SEQ ID NO: 486152 - RNA, 19 nt, Homo sapiens
  misc_RNA (1)...(19): siRNA sense strand
aaggagagaugguggauua

SEQ ID NO: 486153 - RNA, 19 nt, Homo sapiens
  misc_RNA (1)...(19): siRNA sense strand
cagcugggcuuccugguuu

SEQ ID NO: 486154 - RNA, 19 nt, Homo sapiens
  misc_RNA (1)...(19): siRNA sense strand
ccaaagacaucuccaggau

SEQ ID NO: 486155 - RNA, 19 nt, Homo sapiens
  misc_RNA (1)...(19): siRNA sense strand
gagagaugguggauuacaa

SEQ ID NO: 486156 - RNA, 19 nt, Homo sapiens
  misc_RNA (1)...(19): siRNA sense strand
aaagggaccucgcgguaaa

SEQ ID NO: 486157 - RNA, 19 nt, Homo sapiens
  misc_RNA (1)...(19): siRNA sense strand
gaugguggauuacaaugga

SEQ ID NO: 486158 - RNA, 19 nt, Homo sapiens
  misc_RNA (1)...(19): siRNA sense strand
ggauuacaauggaaacauc

SEQ ID NO: 486159 - RNA, 19 nt, Homo sapiens
  misc_RNA (1)...(19): siRNA sense strand
caagggagaaccagggaaa

SEQ ID NO: 486160 - RNA, 19 nt, Homo sapiens
  misc_RNA (1)...(19): siRNA sense strand
ggaagcaggacuagaugga

SEQ ID NO: 486161 - RNA, 19 nt, Homo sapiens
  misc_RNA (1)...(19): siRNA sense strand
caaggcugcuggaacaagu

SEQ ID NO: 486162 - RNA, 19 nt, Homo sapiens
  misc_RNA (1)...(19): siRNA sense strand
gggagaagcaggugucgau

SEQ ID NO: 486163 - RNA, 19 nt, Homo sapiens
  misc_RNA (1)...(19): siRNA sense strand
ggagaacagggaccagaug

SEQ ID NO: 486164 - RNA, 19 nt, Homo sapiens
  misc_RNA (1)...(19): siRNA sense strand
acaauggaaacaucaauga

SEQ ID NO: 486165 - RNA, 19 nt, Homo sapiens
  misc_RNA (1)...(19): siRNA sense strand
gaaaggagagaugguggau

SEQ ID NO: 486166 - RNA, 19 nt, Homo sapiens
  misc_RNA (1)...(19): siRNA sense strand
cuagagguuucccuggauu

SEQ ID NO: 486167 - RNA, 19 nt, Homo sapiens
  misc_RNA (1)...(19): siRNA sense strand
gcaaauggagacggcuauu

SEQ ID NO: 486168 - RNA, 19 nt, Homo sapiens
  misc_RNA (1)...(19): siRNA sense strand
gaaaggcuuccagggagaa

SEQ ID NO: 486169 - RNA, 19 nt, Homo sapiens
  misc_RNA (1)...(19): siRNA sense strand
gcagcugggcuuccugguu

SEQ ID NO: 486170 - RNA, 19 nt, Homo sapiens
  misc_RNA (1)...(19): siRNA sense strand
ggagagaugguggauuaca

SEQ ID NO: 486171 - RNA, 19 nt, Homo sapiens
  misc_RNA (1)...(19): siRNA sense strand
gaugcuggcaacuccauug

SEQ ID NO: 486172 - RNA, 19 nt, Homo sapiens
  misc_RNA (1)...(19): siRNA sense strand
gcguggagcagcuggagaa

SEQ ID NO: 486173 - RNA, 19 nt, Homo sapiens
  misc_RNA (1)...(19): siRNA sense strand
uggagcagcuggagaacag

SEQ ID NO: 486174 - RNA, 19 nt, Homo sapiens
  misc_RNA (1)...(19): siRNA sense strand
ggauuuccgggucccauug

SEQ ID NO: 486175 - RNA, 19 nt, Homo sapiens
  misc_RNA (1)...(19): siRNA sense strand
gagaugguggauuacaaug

SEQ ID NO: 486176 - RNA, 19 nt, Homo sapiens
  misc_RNA (1)...(19): siRNA sense strand
uagcggagcgcacccacaa

SEQ ID NO: 486177 - RNA, 19 nt, Homo sapiens
  misc_RNA (1)...(19): siRNA sense strand
gggagaaccagggaaagga

SEQ ID NO: 486178 - RNA, 19 nt, Homo sapiens
  misc_RNA (1)...(19): siRNA sense strand
gagccaggccagcauccaa

SEQ ID NO: 486179 - RNA, 19 nt, Homo sapiens
  misc_RNA (1)...(19): siRNA sense strand
gguacuccaggaccaauug

SEQ ID NO: 486180 - RNA, 19 nt, Homo sapiens
  misc_RNA (1)...(19): siRNA sense strand
aaaggagacccugggauga

SEQ ID NO: 486181 - RNA, 19 nt, Homo sapiens
  misc_RNA (1)...(19): siRNA sense strand
gagccagggaucccaggaa

SEQ ID NO: 486182 - RNA, 19 nt, Homo sapiens
  misc_RNA (1)...(19): siRNA sense strand
gaaccagggaaaggagaga

SEQ ID NO: 486183 - RNA, 19 nt, Homo sapiens
  misc_RNA (1)...(19): siRNA sense strand
gauuacaauggaaacauca

SEQ ID NO: 486184 - RNA, 19 nt, Homo sapiens
  misc_RNA (1)...(19): siRNA sense strand
ggucaaccaggaacuagag

SEQ ID NO: 486185 - RNA, 19 nt, Homo sapiens
  misc_RNA (1)...(19): siRNA sense strand
aaggagagaugguggauua

SEQ ID NO: 486186 - RNA, 19 nt, Homo sapiens
  misc_RNA (1)...(19): siRNA sense strand
cagcugggcuuccugguuu

SEQ ID NO: 486187 - RNA, 19 nt, Homo sapiens
  misc_RNA (1)...(19): siRNA sense strand
ccaaagacaucuccaggau

SEQ ID NO: 486188 - RNA, 19 nt, Homo sapiens
  misc_RNA (1)...(19): siRNA sense strand
gagagaugguggauuacaa

SEQ ID NO: 486189 - RNA, 19 nt, Homo sapiens
  misc_RNA (1)...(19): siRNA sense strand
aaagggaccucgcgguaaa

SEQ ID NO: 486190 - RNA, 19 nt, Homo sapiens
  misc_RNA (1)...(19): siRNA sense strand
gaugguggauuacaaugga

SEQ ID NO: 486191 - RNA, 19 nt, Homo sapiens
  misc_RNA (1)...(19): siRNA sense strand
ggauuacaauggaaacauc

SEQ ID NO: 486192 - RNA, 19 nt, Homo sapiens
  misc_RNA (1)...(19): siRNA sense strand
caagggagaaccagggaaa

SEQ ID NO: 486193 - RNA, 19 nt, Homo sapiens
  misc_RNA (1)...(19): siRNA sense strand
ggaagcaggacuagaugga

SEQ ID NO: 486194 - RNA, 19 nt, Homo sapiens
  misc_RNA (1)...(19): siRNA sense strand
caaggcugcuggaacaagu

SEQ ID NO: 486195 - RNA, 19 nt, Homo sapiens
  misc_RNA (1)...(19): siRNA sense strand
gggagaagcaggugucgau

SEQ ID NO: 486196 - RNA, 19 nt, Homo sapiens
  misc_RNA (1)...(19): siRNA sense strand
ggagaacagggaccagaug

SEQ ID NO: 486197 - RNA, 19 nt, Homo sapiens
  misc_RNA (1)...(19): siRNA sense strand
acaauggaaacaucaauga

SEQ ID NO: 486198 - RNA, 19 nt, Homo sapiens
  misc_RNA (1)...(19): siRNA sense strand
gaaaggagagaugguggau

SEQ ID NO: 486199 - RNA, 19 nt, Homo sapiens
  misc_RNA (1)...(19): siRNA sense strand
cuagagguuucccuggauu

SEQ ID NO: 486200 - RNA, 19 nt, Homo sapiens
  misc_RNA (1)...(19): siRNA sense strand
gcaaauggagacggcuauu

SEQ ID NO: 486201 - RNA, 19 nt, Homo sapiens
  misc_RNA (1)...(19): siRNA sense strand
gaaaggcuuccagggagaa

SEQ ID NO: 486202 - RNA, 19 nt, Homo sapiens
  misc_RNA (1)...(19): siRNA sense strand
gcagcugggcuuccugguu

SEQ ID NO: 486203 - RNA, 19 nt, Homo sapiens
  misc_RNA (1)...(19): siRNA sense strand
ggagagaugguggauuaca

SEQ ID NO: 486204 - RNA, 19 nt, Homo sapiens
  misc_RNA (1)...(19): siRNA sense strand
gaugcuggcaacuccauug

SEQ ID NO: 486205 - RNA, 19 nt, Homo sapiens
  misc_RNA (1)...(19): siRNA sense strand
gcguggagcagcuggagaa

SEQ ID NO: 486206 - RNA, 19 nt, Homo sapiens
  misc_RNA (1)...(19): siRNA sense strand
uggagcagcuggagaacag

SEQ ID NO: 486207 - RNA, 19 nt, Homo sapiens
  misc_RNA (1)...(19): siRNA sense strand
ggauuuccgggucccauug

SEQ ID NO: 486208 - RNA, 19 nt, Homo sapiens
  misc_RNA (1)...(19): siRNA sense strand
gagaugguggauuacaaug

SEQ ID NO: 486209 - RNA, 19 nt, Homo sapiens
  misc_RNA (1)...(19): siRNA sense strand
uagcggagcgcacccacaa

SEQ ID NO: 486210 - RNA, 19 nt, Homo sapiens
  misc_RNA (1)...(19): siRNA sense strand
gggagaaccagggaaagga

SEQ ID NO: 486211 - RNA, 19 nt, Homo sapiens
  misc_RNA (1)...(19): siRNA sense strand
gagccaggccagcauccaa

SEQ ID NO: 486212 - RNA, 19 nt, Homo sapiens
  misc_RNA (1)...(19): siRNA sense strand
gguacuccaggaccaauug

SEQ ID NO: 486213 - RNA, 19 nt, Homo sapiens
  misc_RNA (1)...(19): siRNA sense strand
aaaggagacccugggauga

SEQ ID NO: 486214 - RNA, 19 nt, Homo sapiens
  misc_RNA (1)...(19): siRNA sense strand
gagccagggaucccaggaa

SEQ ID NO: 486215 - RNA, 19 nt, Homo sapiens
  misc_RNA (1)...(19): siRNA sense strand
gaaccagggaaaggagaga

SEQ ID NO: 486216 - RNA, 19 nt, Homo sapiens
  misc_RNA (1)...(19): siRNA sense strand
gauuacaauggaaacauca

SEQ ID NO: 486217 - RNA, 19 nt, Homo sapiens
  misc_RNA (1)...(19): siRNA sense strand
ggucaaccaggaacuagag

SEQ ID NO: 486218 - RNA, 19 nt, Homo sapiens
  misc_RNA (1)...(19): siRNA sense strand
aaggagagaugguggauua

SEQ ID NO: 486219 - RNA, 19 nt, Homo sapiens
  misc_RNA (1)...(19): siRNA sense strand
cagcugggcuuccugguuu

SEQ ID NO: 486220 - RNA, 19 nt, Homo sapiens
  misc_RNA (1)...(19): siRNA sense strand
ccaaagacaucuccaggau

SEQ ID NO: 486221 - RNA, 19 nt, Homo sapiens
  misc_RNA (1)...(19): siRNA sense strand
gagagaugguggauuacaa

SEQ ID NO: 486222 - RNA, 19 nt, Homo sapiens
  misc_RNA (1)...(19): siRNA sense strand
aaagggaccucgcgguaaa

SEQ ID NO: 486223 - RNA, 19 nt, Homo sapiens
  misc_RNA (1)...(19): siRNA sense strand
gaugguggauuacaaugga

SEQ ID NO: 486224 - RNA, 19 nt, Homo sapiens
  misc_RNA (1)...(19): siRNA sense strand
ggauuacaauggaaacauc

SEQ ID NO: 486225 - RNA, 19 nt, Homo sapiens
  misc_RNA (1)...(19): siRNA sense strand
caagggagaaccagggaaa

SEQ ID NO: 486226 - RNA, 19 nt, Homo sapiens
  misc_RNA (1)...(19): siRNA sense strand
ggaagcaggacuagaugga

SEQ ID NO: 486227 - RNA, 19 nt, Homo sapiens
  misc_RNA (1)...(19): siRNA sense strand
caaggcugcuggaacaagu

SEQ ID NO: 486228 - RNA, 19 nt, Homo sapiens
  misc_RNA (1)...(19): siRNA sense strand
gggagaagcaggugucgau

SEQ ID NO: 486229 - RNA, 19 nt, Homo sapiens
  misc_RNA (1)...(19): siRNA sense strand
ggagaacagggaccagaug

SEQ ID NO: 486230 - RNA, 19 nt, Homo sapiens
  misc_RNA (1)...(19): siRNA sense strand
acaauggaaacaucaauga

SEQ ID NO: 486231 - RNA, 19 nt, Homo sapiens
  misc_RNA (1)...(19): siRNA sense strand
gaaaggagagaugguggau

SEQ ID NO: 486232 - RNA, 19 nt, Homo sapiens
  misc_RNA (1)...(19): siRNA sense strand
cuagagguuucccuggauu

SEQ ID NO: 486233 - RNA, 19 nt, Homo sapiens
  misc_RNA (1)...(19): siRNA sense strand
gcaaauggagacggcuauu

SEQ ID NO: 486234 - RNA, 19 nt, Homo sapiens
  misc_RNA (1)...(19): siRNA sense strand
gaaaggcuuccagggagaa

SEQ ID NO: 486235 - RNA, 19 nt, Homo sapiens
  misc_RNA (1)...(19): siRNA sense strand
gcagcugggcuuccugguu

SEQ ID NO: 486236 - RNA, 19 nt, Homo sapiens
  misc_RNA (1)...(19): siRNA sense strand
ggagagaugguggauuaca

SEQ ID NO: 486237 - RNA, 19 nt, Homo sapiens
  misc_RNA (1)...(19): siRNA sense strand
gaugcuggcaacuccauug

SEQ ID NO: 486238 - RNA, 19 nt, Homo sapiens
  misc_RNA (1)...(19): siRNA sense strand
gcguggagcagcuggagaa

SEQ ID NO: 486239 - RNA, 19 nt, Homo sapiens
  misc_RNA (1)...(19): siRNA sense strand
uggagcagcuggagaacag

SEQ ID NO: 486240 - RNA, 19 nt, Homo sapiens
  misc_RNA (1)...(19): siRNA sense strand
ggauuuccgggucccauug

SEQ ID NO: 486241 - RNA, 19 nt, Homo sapiens
  misc_RNA (1)...(19): siRNA sense strand
gagaugguggauuacaaug

SEQ ID NO: 486242 - RNA, 19 nt, Homo sapiens
  misc_RNA (1)...(19): siRNA sense strand
uagcggagcgcacccacaa

SEQ ID NO: 486243 - RNA, 19 nt, Homo sapiens
  misc_RNA (1)...(19): siRNA sense strand
gggagaaccagggaaagga

SEQ ID NO: 486244 - RNA, 19 nt, Homo sapiens
  misc_RNA (1)...(19): siRNA sense strand
gagccaggccagcauccaa

SEQ ID NO: 486245 - RNA, 19 nt, Homo sapiens
  misc_RNA (1)...(19): siRNA sense strand
gguacuccaggaccaauug

SEQ ID NO: 486246 - RNA, 19 nt, Homo sapiens
  misc_RNA (1)...(19): siRNA sense strand
aaaggagacccugggauga

SEQ ID NO: 486247 - RNA, 19 nt, Homo sapiens
  misc_RNA (1)...(19): siRNA sense strand
gagccagggaucccaggaa

SEQ ID NO: 486248 - RNA, 19 nt, Homo sapiens
  misc_RNA (1)...(19): siRNA sense strand
gaaccagggaaaggagaga

SEQ ID NO: 486249 - RNA, 19 nt, Homo sapiens
  misc_RNA (1)...(19): siRNA sense strand
gauuacaauggaaacauca

SEQ ID NO: 486250 - RNA, 19 nt, Homo sapiens
  misc_RNA (1)...(19): siRNA sense strand
ggucaaccaggaacuagag

SEQ ID NO: 486251 - RNA, 19 nt, Homo sapiens
  misc_RNA (1)...(19): siRNA sense strand
aaggagagaugguggauua

SEQ ID NO: 486252 - RNA, 19 nt, Homo sapiens
  misc_RNA (1)...(19): siRNA sense strand
cagcugggcuuccugguuu

SEQ ID NO: 486253 - RNA, 19 nt, Homo sapiens
  misc_RNA (1)...(19): siRNA sense strand
ccaaagacaucuccaggau

SEQ ID NO: 486254 - RNA, 19 nt, Homo sapiens
  misc_RNA (1)...(19): siRNA sense strand
gagagaugguggauuacaa

SEQ ID NO: 486255 - RNA, 19 nt, Homo sapiens
  misc_RNA (1)...(19): siRNA sense strand
aaagggaccucgcgguaaa

SEQ ID NO: 486256 - RNA, 19 nt, Homo sapiens
  misc_RNA (1)...(19): siRNA sense strand
gaugguggauuacaaugga

SEQ ID NO: 486257 - RNA, 19 nt, Homo sapiens
  misc_RNA (1)...(19): siRNA sense strand
ggauuacaauggaaacauc

SEQ ID NO: 486258 - RNA, 19 nt, Homo sapiens
  misc_RNA (1)...(19): siRNA sense strand
caagggagaaccagggaaa

SEQ ID NO: 486259 - RNA, 19 nt, Homo sapiens
  misc_RNA (1)...(19): siRNA sense strand
ggaagcaggacuagaugga

SEQ ID NO: 486260 - RNA, 19 nt, Homo sapiens
  misc_RNA (1)...(19): siRNA sense strand
caaggcugcuggaacaagu

SEQ ID NO: 486261 - RNA, 19 nt, Homo sapiens
  misc_RNA (1)...(19): siRNA sense strand
gggagaagcaggugucgau

SEQ ID NO: 486262 - RNA, 19 nt, Homo sapiens
  misc_RNA (1)...(19): siRNA sense strand
ggagaacagggaccagaug

SEQ ID NO: 486263 - RNA, 19 nt, Homo sapiens
  misc_RNA (1)...(19): siRNA sense strand
acaauggaaacaucaauga

SEQ ID NO: 486264 - RNA, 19 nt, Homo sapiens
  misc_RNA (1)...(19): siRNA sense strand
gaaaggagagaugguggau

SEQ ID NO: 486265 - RNA, 19 nt, Homo sapiens
  misc_RNA (1)...(19): siRNA sense strand
cuagagguuucccuggauu

SEQ ID NO: 486266 - RNA, 19 nt, Homo sapiens
  misc_RNA (1)...(19): siRNA sense strand
gcaaauggagacggcuauu

SEQ ID NO: 486267 - RNA, 19 nt, Homo sapiens
  misc_RNA (1)...(19): siRNA sense strand
gaaaggcuuccagggagaa

SEQ ID NO: 486268 - RNA, 19 nt, Homo sapiens
  misc_RNA (1)...(19): siRNA sense strand
gcagcugggcuuccugguu

SEQ ID NO: 486269 - RNA, 19 nt, Homo sapiens
  misc_RNA (1)...(19): siRNA sense strand
ggagagaugguggauuaca

SEQ ID NO: 486270 - RNA, 19 nt, Homo sapiens
  misc_RNA (1)...(19): siRNA sense strand
gaugcuggcaacuccauug

SEQ ID NO: 486271 - RNA, 19 nt, Homo sapiens
  misc_RNA (1)...(19): siRNA sense strand
gcguggagcagcuggagaa

SEQ ID NO: 486272 - RNA, 19 nt, Homo sapiens
  misc_RNA (1)...(19): siRNA sense strand
uggagcagcuggagaacag

SEQ ID NO: 486273 - RNA, 19 nt, Homo sapiens
  misc_RNA (1)...(19): siRNA sense strand
ggauuuccgggucccauug

SEQ ID NO: 486274 - RNA, 19 nt, Homo sapiens
  misc_RNA (1)...(19): siRNA sense strand
gagaugguggauuacaaug

SEQ ID NO: 486275 - RNA, 19 nt, Homo sapiens
  misc_RNA (1)...(19): siRNA sense strand
uagcggagcgcacccacaa

SEQ ID NO: 486276 - RNA, 19 nt, Homo sapiens
  misc_RNA (1)...(19): siRNA sense strand
gggagaaccagggaaagga

SEQ ID NO: 486277 - RNA, 19 nt, Homo sapiens
  misc_RNA (1)...(19): siRNA sense strand
gagccaggccagcauccaa

SEQ ID NO: 486278 - RNA, 19 nt, Homo sapiens
  misc_RNA (1)...(19): siRNA sense strand
gguacuccaggaccaauug

SEQ ID NO: 486279 - RNA, 19 nt, Homo sapiens
  misc_RNA (1)...(19): siRNA sense strand
aaaggagacccugggauga

SEQ ID NO: 486280 - RNA, 19 nt, Homo sapiens
  misc_RNA (1)...(19): siRNA sense strand
gagccagggaucccaggaa

SEQ ID NO: 486281 - RNA, 19 nt, Homo sapiens
  misc_RNA (1)...(19): siRNA sense strand
gaaccagggaaaggagaga

SEQ ID NO: 486282 - RNA, 19 nt, Homo sapiens
  misc_RNA (1)...(19): siRNA sense strand
gauuacaauggaaacauca

SEQ ID NO: 486283 - RNA, 19 nt, Homo sapiens
  misc_RNA (1)...(19): siRNA sense strand
ggucaaccaggaacuagag

SEQ ID NO: 486284 - RNA, 19 nt, Homo sapiens
  misc_RNA (1)...(19): siRNA sense strand
aaggagagaugguggauua

SEQ ID NO: 486285 - RNA, 19 nt, Homo sapiens
  misc_RNA (1)...(19): siRNA sense strand
cagcugggcuuccugguuu

SEQ ID NO: 486286 - RNA, 19 nt, Homo sapiens
  misc_RNA (1)...(19): siRNA sense strand
ccaaagacaucuccaggau

SEQ ID NO: 486287 - RNA, 19 nt, Homo sapiens
  misc_RNA (1)...(19): siRNA sense strand
gagagaugguggauuacaa

SEQ ID NO: 486288 - RNA, 19 nt, Homo sapiens
  misc_RNA (1)...(19): siRNA sense strand
aaagggaccucgcgguaaa

SEQ ID NO: 486289 - RNA, 19 nt, Homo sapiens
  misc_RNA (1)...(19): siRNA sense strand
gaugguggauuacaaugga

SEQ ID NO: 486290 - RNA, 19 nt, Homo sapiens
  misc_RNA (1)...(19): siRNA sense strand
ggauuacaauggaaacauc

SEQ ID NO: 486291 - RNA, 19 nt, Homo sapiens
  misc_RNA (1)...(19): siRNA sense strand
caagggagaaccagggaaa

SEQ ID NO: 486292 - RNA, 19 nt, Homo sapiens
  misc_RNA (1)...(19): siRNA sense strand
ggaagcaggacuagaugga

SEQ ID NO: 486293 - RNA, 19 nt, Homo sapiens
  misc_RNA (1)...(19): siRNA sense strand
caaggcugcuggaacaagu

SEQ ID NO: 486294 - RNA, 19 nt, Homo sapiens
  misc_RNA (1)...(19): siRNA sense strand
gggagaagcaggugucgau

SEQ ID NO: 486295 - RNA, 19 nt, Homo sapiens
  misc_RNA (1)...(19): siRNA sense strand
ggagaacagggaccagaug

SEQ ID NO: 486296 - RNA, 19 nt, Homo sapiens
  misc_RNA (1)...(19): siRNA sense strand
acaauggaaacaucaauga

SEQ ID NO: 486297 - RNA, 19 nt, Homo sapiens
  misc_RNA (1)...(19): siRNA sense strand
gaaaggagagaugguggau

SEQ ID NO: 486298 - RNA, 19 nt, Homo sapiens
  misc_RNA (1)...(19): siRNA sense strand
cuagagguuucccuggauu

SEQ ID NO: 486299 - RNA, 19 nt, Homo sapiens
  misc_RNA (1)...(19): siRNA sense strand
gcaaauggagacggcuauu

SEQ ID NO: 486300 - RNA, 19 nt, Homo sapiens
  misc_RNA (1)...(19): siRNA sense strand
gaaaggcuuccagggagaa

SEQ ID NO: 486301 - RNA, 19 nt, Homo sapiens
  misc_RNA (1)...(19): siRNA sense strand
gcagcugggcuuccugguu

SEQ ID NO: 486302 - RNA, 19 nt, Homo sapiens
  misc_RNA (1)...(19): siRNA sense strand
ggagagaugguggauuaca

SEQ ID NO: 486303 - RNA, 19 nt, Homo sapiens
  misc_RNA (1)...(19): siRNA sense strand
gaugcuggcaacuccauug

SEQ ID NO: 486304 - RNA, 19 nt, Homo sapiens
  misc_RNA (1)...(19): siRNA sense strand
gcguggagcagcuggagaa

SEQ ID NO: 486305 - RNA, 19 nt, Homo sapiens
  misc_RNA (1)...(19): siRNA sense strand
uggagcagcuggagaacag

SEQ ID NO: 486306 - RNA, 19 nt, Homo sapiens
  misc_RNA (1)...(19): siRNA sense strand
ggauuuccgggucccauug

SEQ ID NO: 486307 - RNA, 19 nt, Homo sapiens
  misc_RNA (1)...(19): siRNA sense strand
gagaugguggauuacaaug

SEQ ID NO: 486308 - RNA, 19 nt, Homo sapiens
  misc_RNA (1)...(19): siRNA sense strand
uagcggagcgcacccacaa

SEQ ID NO: 486309 - RNA, 19 nt, Homo sapiens
  misc_RNA (1)...(19): siRNA sense strand
gggagaaccagggaaagga

SEQ ID NO: 486310 - RNA, 19 nt, Homo sapiens
  misc_RNA (1)...(19): siRNA sense strand
gagccaggccagcauccaa

SEQ ID NO: 486311 - RNA, 19 nt, Homo sapiens
  misc_RNA (1)...(19): siRNA sense strand
gguacuccaggaccaauug

SEQ ID NO: 486312 - RNA, 19 nt, Homo sapiens
  misc_RNA (1)...(19): siRNA sense strand
aaaggagacccugggauga

SEQ ID NO: 486313 - RNA, 19 nt, Homo sapiens
  misc_RNA (1)...(19): siRNA sense strand
gagccagggaucccaggaa

SEQ ID NO: 486314 - RNA, 19 nt, Homo sapiens
  misc_RNA (1)...(19): siRNA sense strand
gaaccagggaaaggagaga

SEQ ID NO: 486315 - RNA, 19 nt, Homo sapiens
  misc_RNA (1)...(19): siRNA sense strand
gauuacaauggaaacauca

SEQ ID NO: 486316 - RNA, 19 nt, Homo sapiens
  misc_RNA (1)...(19): siRNA sense strand
ggucaaccaggaacuagag

SEQ ID NO: 486317 - RNA, 19 nt, Homo sapiens
  misc_RNA (1)...(19): siRNA sense strand
aaggagagaugguggauua

SEQ ID NO: 486318 - RNA, 19 nt, Homo sapiens
  misc_RNA (1)...(19): siRNA sense strand
cagcugggcuuccugguuu

SEQ ID NO: 486319 - RNA, 19 nt, Homo sapiens
  misc_RNA (1)...(19): siRNA sense strand
ccaaagacaucuccaggau

SEQ ID NO: 486320 - RNA, 19 nt, Homo sapiens
  misc_RNA (1)...(19): siRNA sense strand
gagagaugguggauuacaa

SEQ ID NO: 486321 - RNA, 19 nt, Homo sapiens
  misc_RNA (1)...(19): siRNA sense strand
aaagggaccucgcgguaaa

SEQ ID NO: 486322 - RNA, 19 nt, Homo sapiens
  misc_RNA (1)...(19): siRNA sense strand
gaugguggauuacaaugga

SEQ ID NO: 486323 - RNA, 19 nt, Homo sapiens
  misc_RNA (1)...(19): siRNA sense strand
ggauuacaauggaaacauc

SEQ ID NO: 486324 - RNA, 19 nt, Homo sapiens
  misc_RNA (1)...(19): siRNA sense strand
caagggagaaccagggaaa

SEQ ID NO: 486325 - RNA, 19 nt, Homo sapiens
  misc_RNA (1)...(19): siRNA sense strand
ggaagcaggacuagaugga

SEQ ID NO: 486326 - RNA, 19 nt, Homo sapiens
  misc_RNA (1)...(19): siRNA sense strand
caaggcugcuggaacaagu

SEQ ID NO: 486327 - RNA, 19 nt, Homo sapiens
  misc_RNA (1)...(19): siRNA sense strand
gggagaagcaggugucgau

SEQ ID NO: 486328 - RNA, 19 nt, Homo sapiens
  misc_RNA (1)...(19): siRNA sense strand
ggagaacagggaccagaug

SEQ ID NO: 486329 - RNA, 19 nt, Homo sapiens
  misc_RNA (1)...(19): siRNA sense strand
acaauggaaacaucaauga

SEQ ID NO: 486330 - RNA, 19 nt, Homo sapiens
  misc_RNA (1)...(19): siRNA sense strand
gaaaggagagaugguggau

SEQ ID NO: 486331 - RNA, 19 nt, Homo sapiens
  misc_RNA (1)...(19): siRNA sense strand
cuagagguuucccuggauu

SEQ ID NO: 486332 - RNA, 19 nt, Homo sapiens
  misc_RNA (1)...(19): siRNA sense strand
gcaaauggagacggcuauu

SEQ ID NO: 486333 - RNA, 19 nt, Homo sapiens
  misc_RNA (1)...(19): siRNA sense strand
gaaaggcuuccagggagaa

SEQ ID NO: 486334 - RNA, 19 nt, Homo sapiens
  misc_RNA (1)...(19): siRNA sense strand
gcagcugggcuuccugguu

SEQ ID NO: 486335 - RNA, 19 nt, Homo sapiens
  misc_RNA (1)...(19): siRNA sense strand
ggagagaugguggauuaca

SEQ ID NO: 486336 - RNA, 19 nt, Homo sapiens
  misc_RNA (1)...(19): siRNA sense strand
gaugcuggcaacuccauug

SEQ ID NO: 486337 - RNA, 19 nt, Homo sapiens
  misc_RNA (1)...(19): siRNA sense strand
gcguggagcagcuggagaa

SEQ ID NO: 486338 - RNA, 19 nt, Homo sapiens
  misc_RNA (1)...(19): siRNA sense strand
uggagcagcuggagaacag

SEQ ID NO: 486339 - RNA, 19 nt, Homo sapiens
  misc_RNA (1)...(19): siRNA sense strand
ggauuuccgggucccauug

SEQ ID NO: 486340 - RNA, 19 nt, Homo sapiens
  misc_RNA (1)...(19): siRNA sense strand
gagaugguggauuacaaug

SEQ ID NO: 486341 - RNA, 19 nt, Homo sapiens
  misc_RNA (1)...(19): siRNA sense strand
uagcggagcgcacccacaa

SEQ ID NO: 486342 - RNA, 19 nt, Homo sapiens
  misc_RNA (1)...(19): siRNA sense strand
gggagaaccagggaaagga

SEQ ID NO: 486343 - RNA, 19 nt, Homo sapiens
  misc_RNA (1)...(19): siRNA sense strand
gagccaggccagcauccaa

SEQ ID NO: 486344 - RNA, 19 nt, Homo sapiens
  misc_RNA (1)...(19): siRNA sense strand
gguacuccaggaccaauug

SEQ ID NO: 486345 - RNA, 19 nt, Homo sapiens
  misc_RNA (1)...(19): siRNA sense strand
aaaggagacccugggauga

SEQ ID NO: 486346 - RNA, 19 nt, Homo sapiens
  misc_RNA (1)...(19): siRNA sense strand
gagccagggaucccaggaa

SEQ ID NO: 486347 - RNA, 19 nt, Homo sapiens
  misc_RNA (1)...(19): siRNA sense strand
gaaccagggaaaggagaga

SEQ ID NO: 486348 - RNA, 19 nt, Homo sapiens
  misc_RNA (1)...(19): siRNA sense strand
gauuacaauggaaacauca

SEQ ID NO: 486349 - RNA, 19 nt, Homo sapiens
  misc_RNA (1)...(19): siRNA sense strand
ggucaaccaggaacuagag

SEQ ID NO: 486350 - RNA, 19 nt, Homo sapiens
  misc_RNA (1)...(19): siRNA sense strand
aaggagagaugguggauua

SEQ ID NO: 486351 - RNA, 19 nt, Homo sapiens
  misc_RNA (1)...(19): siRNA sense strand
cagcugggcuuccugguuu

SEQ ID NO: 486352 - RNA, 19 nt, Homo sapiens
  misc_RNA (1)...(19): siRNA sense strand
ccaaagacaucuccaggau

SEQ ID NO: 486353 - RNA, 19 nt, Homo sapiens
  misc_RNA (1)...(19): siRNA sense strand
gagagaugguggauuacaa

SEQ ID NO: 486354 - RNA, 19 nt, Homo sapiens
  misc_RNA (1)...(19): siRNA sense strand
aaagggaccucgcgguaaa

SEQ ID NO: 486355 - RNA, 19 nt, Homo sapiens
  misc_RNA (1)...(19): siRNA sense strand
gaugguggauuacaaugga

SEQ ID NO: 486356 - RNA, 19 nt, Homo sapiens
  misc_RNA (1)...(19): siRNA sense strand
ggauuacaauggaaacauc

SEQ ID NO: 486357 - RNA, 19 nt, Homo sapiens
  misc_RNA (1)...(19): siRNA sense strand
caagggagaaccagggaaa

SEQ ID NO: 486358 - RNA, 19 nt, Homo sapiens
  misc_RNA (1)...(19): siRNA sense strand
ggaagcaggacuagaugga

SEQ ID NO: 486359 - RNA, 19 nt, Homo sapiens
  misc_RNA (1)...(19): siRNA sense strand
caaggcugcuggaacaagu

SEQ ID NO: 486360 - RNA, 19 nt, Homo sapiens
  misc_RNA (1)...(19): siRNA sense strand
gggagaagcaggugucgau

SEQ ID NO: 486361 - RNA, 19 nt, Homo sapiens
  misc_RNA (1)...(19): siRNA sense strand
ggagaacagggaccagaug

SEQ ID NO: 486362 - RNA, 19 nt, Homo sapiens
  misc_RNA (1)...(19): siRNA sense strand
acaauggaaacaucaauga

SEQ ID NO: 486363 - RNA, 19 nt, Homo sapiens
  misc_RNA (1)...(19): siRNA sense strand
gaaaggagagaugguggau

SEQ ID NO: 486364 - RNA, 19 nt, Homo sapiens
  misc_RNA (1)...(19): siRNA sense strand
cuagagguuucccuggauu

SEQ ID NO: 486365 - RNA, 19 nt, Homo sapiens
  misc_RNA (1)...(19): siRNA sense strand
gcaaauggagacggcuauu

SEQ ID NO: 486366 - RNA, 19 nt, Homo sapiens
  misc_RNA (1)...(19): siRNA sense strand
gaaaggcuuccagggagaa

SEQ ID NO: 486367 - RNA, 19 nt, Homo sapiens
  misc_RNA (1)...(19): siRNA sense strand
gcagcugggcuuccugguu

SEQ ID NO: 486368 - RNA, 19 nt, Homo sapiens
  misc_RNA (1)...(19): siRNA sense strand
ggagagaugguggauuaca

SEQ ID NO: 486369 - RNA, 19 nt, Homo sapiens
  misc_RNA (1)...(19): siRNA sense strand
gaugcuggcaacuccauug

SEQ ID NO: 486370 - RNA, 19 nt, Homo sapiens
  misc_RNA (1)...(19): siRNA sense strand
gcguggagcagcuggagaa

SEQ ID NO: 486371 - RNA, 19 nt, Homo sapiens
  misc_RNA (1)...(19): siRNA sense strand
uggagcagcuggagaacag

SEQ ID NO: 486372 - RNA, 19 nt, Homo sapiens
  misc_RNA (1)...(19): siRNA sense strand
ggauuuccgggucccauug

SEQ ID NO: 486373 - RNA, 19 nt, Homo sapiens
  misc_RNA (1)...(19): siRNA sense strand
gagaugguggauuacaaug

SEQ ID NO: 486374 - RNA, 19 nt, Homo sapiens
  misc_RNA (1)...(19): siRNA sense strand
uagcggagcgcacccacaa

SEQ ID NO: 486375 - RNA, 19 nt, Homo sapiens
  misc_RNA (1)...(19): siRNA sense strand
gggagaaccagggaaagga

SEQ ID NO: 486376 - RNA, 19 nt, Homo sapiens
  misc_RNA (1)...(19): siRNA sense strand
gagccaggccagcauccaa

SEQ ID NO: 486377 - RNA, 19 nt, Homo sapiens
  misc_RNA (1)...(19): siRNA sense strand
gguacuccaggaccaauug

SEQ ID NO: 486378 - RNA, 19 nt, Homo sapiens
  misc_RNA (1)...(19): siRNA sense strand
aaaggagacccugggauga

SEQ ID NO: 486379 - RNA, 19 nt, Homo sapiens
  misc_RNA (1)...(19): siRNA sense strand
gagccagggaucccaggaa

SEQ ID NO: 486380 - RNA, 19 nt, Homo sapiens
  misc_RNA (1)...(19): siRNA sense strand
gaaccagggaaaggagaga

SEQ ID NO: 486381 - RNA, 19 nt, Homo sapiens
  misc_RNA (1)...(19): siRNA sense strand
gauuacaauggaaacauca

SEQ ID NO: 486382 - RNA, 19 nt, Homo sapiens
  misc_RNA (1)...(19): siRNA sense strand
ggucaaccaggaacuagag

SEQ ID NO: 486383 - RNA, 19 nt, Homo sapiens
  misc_RNA (1)...(19): siRNA sense strand
aaggagagaugguggauua

SEQ ID NO: 486384 - RNA, 19 nt, Homo sapiens
  misc_RNA (1)...(19): siRNA sense strand
cagcugggcuuccugguuu

SEQ ID NO: 486385 - RNA, 19 nt, Homo sapiens
  misc_RNA (1)...(19): siRNA sense strand
ccaaagacaucuccaggau

SEQ ID NO: 486386 - RNA, 19 nt, Homo sapiens
  misc_RNA (1)...(19): siRNA sense strand
gagagaugguggauuacaa

SEQ ID NO: 486387 - RNA, 19 nt, Homo sapiens
  misc_RNA (1)...(19): siRNA sense strand
aaagggaccucgcgguaaa

SEQ ID NO: 486388 - RNA, 19 nt, Homo sapiens
  misc_RNA (1)...(19): siRNA sense strand
gaugguggauuacaaugga

SEQ ID NO: 486389 - RNA, 19 nt, Homo sapiens
  misc_RNA (1)...(19): siRNA sense strand
ggauuacaauggaaacauc

SEQ ID NO: 486390 - RNA, 19 nt, Homo sapiens
  misc_RNA (1)...(19): siRNA sense strand
caagggagaaccagggaaa

SEQ ID NO: 486391 - RNA, 19 nt, Homo sapiens
  misc_RNA (1)...(19): siRNA sense strand
ggaagcaggacuagaugga

SEQ ID NO: 486392 - RNA, 19 nt, Homo sapiens
  misc_RNA (1)...(19): siRNA sense strand
caaggcugcuggaacaagu

SEQ ID NO: 486393 - RNA, 19 nt, Homo sapiens
  misc_RNA (1)...(19): siRNA sense strand
gggagaagcaggugucgau

SEQ ID NO: 486394 - RNA, 19 nt, Homo sapiens
  misc_RNA (1)...(19): siRNA sense strand
ggagaacagggaccagaug

SEQ ID NO: 486395 - RNA, 19 nt, Homo sapiens
  misc_RNA (1)...(19): siRNA sense strand
acaauggaaacaucaauga

SEQ ID NO: 486396 - RNA, 19 nt, Homo sapiens
  misc_RNA (1)...(19): siRNA sense strand
gaaaggagagaugguggau

SEQ ID NO: 486397 - RNA, 19 nt, Homo sapiens
  misc_RNA (1)...(19): siRNA sense strand
cuagagguuucccuggauu

SEQ ID NO: 486398 - RNA, 19 nt, Homo sapiens
  misc_RNA (1)...(19): siRNA sense strand
gcaaauggagacggcuauu

SEQ ID NO: 486399 - RNA, 19 nt, Homo sapiens
  misc_RNA (1)...(19): siRNA sense strand
gaaaggcuuccagggagaa

SEQ ID NO: 486400 - RNA, 19 nt, Homo sapiens
  misc_RNA (1)...(19): siRNA sense strand
gcagcugggcuuccugguu

SEQ ID NO: 486401 - RNA, 19 nt, Homo sapiens
  misc_RNA (1)...(19): siRNA sense strand
ggagagaugguggauuaca

SEQ ID NO: 486402 - RNA, 19 nt, Homo sapiens
  misc_RNA (1)...(19): siRNA sense strand
gaugcuggcaacuccauug

SEQ ID NO: 486403 - RNA, 19 nt, Homo sapiens
  misc_RNA (1)...(19): siRNA sense strand
gcguggagcagcuggagaa

SEQ ID NO: 486404 - RNA, 19 nt, Homo sapiens
  misc_RNA (1)...(19): siRNA sense strand
uggagcagcuggagaacag

SEQ ID NO: 486405 - RNA, 19 nt, Homo sapiens
  misc_RNA (1)...(19): siRNA sense strand
ggauuuccgggucccauug

SEQ ID NO: 486406 - RNA, 19 nt, Homo sapiens
  misc_RNA (1)...(19): siRNA sense strand
gagaugguggauuacaaug

SEQ ID NO: 486407 - RNA, 19 nt, Homo sapiens
  misc_RNA (1)...(19): siRNA sense strand
uagcggagcgcacccacaa

SEQ ID NO: 486408 - RNA, 19 nt, Homo sapiens
  misc_RNA (1)...(19): siRNA sense strand
gggagaaccagggaaagga

SEQ ID NO: 486409 - RNA, 19 nt, Homo sapiens
  misc_RNA (1)...(19): siRNA sense strand
gagccaggccagcauccaa

SEQ ID NO: 486410 - RNA, 19 nt, Homo sapiens
  misc_RNA (1)...(19): siRNA sense strand
gguacuccaggaccaauug

SEQ ID NO: 486411 - RNA, 19 nt, Homo sapiens
  misc_RNA (1)...(19): siRNA sense strand
aaaggagacccugggauga

SEQ ID NO: 486412 - RNA, 19 nt, Homo sapiens
  misc_RNA (1)...(19): siRNA sense strand
gagccagggaucccaggaa

SEQ ID NO: 486413 - RNA, 19 nt, Homo sapiens
  misc_RNA (1)...(19): siRNA sense strand
gaaccagggaaaggagaga

SEQ ID NO: 486414 - RNA, 19 nt, Homo sapiens
  misc_RNA (1)...(19): siRNA sense strand
gauuacaauggaaacauca

SEQ ID NO: 486415 - RNA, 19 nt, Homo sapiens
  misc_RNA (1)...(19): siRNA sense strand
ggucaaccaggaacuagag

SEQ ID NO: 486416 - RNA, 19 nt, Homo sapiens
  misc_RNA (1)...(19): siRNA sense strand
aaggagagaugguggauua

SEQ ID NO: 486417 - RNA, 19 nt, Homo sapiens
  misc_RNA (1)...(19): siRNA sense strand
cagcugggcuuccugguuu

SEQ ID NO: 486418 - RNA, 19 nt, Homo sapiens
  misc_RNA (1)...(19): siRNA sense strand
ccaaagacaucuccaggau

SEQ ID NO: 486419 - RNA, 19 nt, Homo sapiens
  misc_RNA (1)...(19): siRNA sense strand
gagagaugguggauuacaa

SEQ ID NO: 486420 - RNA, 19 nt, Homo sapiens
  misc_RNA (1)...(19): siRNA sense strand
aaagggaccucgcgguaaa

SEQ ID NO: 486421 - RNA, 19 nt, Homo sapiens
  misc_RNA (1)...(19): siRNA sense strand
gaugguggauuacaaugga

SEQ ID NO: 486422 - RNA, 19 nt, Homo sapiens
  misc_RNA (1)...(19): siRNA sense strand
ggauuacaauggaaacauc

SEQ ID NO: 486423 - RNA, 19 nt, Homo sapiens
  misc_RNA (1)...(19): siRNA sense strand
caagggagaaccagggaaa

SEQ ID NO: 486424 - RNA, 19 nt, Homo sapiens
  misc_RNA (1)...(19): siRNA sense strand
ggaagcaggacuagaugga

SEQ ID NO: 486425 - RNA, 19 nt, Homo sapiens
  misc_RNA (1)...(19): siRNA sense strand
caaggcugcuggaacaagu

SEQ ID NO: 486426 - RNA, 19 nt, Homo sapiens
  misc_RNA (1)...(19): siRNA sense strand
gggagaagcaggugucgau

SEQ ID NO: 486427 - RNA, 19 nt, Homo sapiens
  misc_RNA (1)...(19): siRNA sense strand
ggagaacagggaccagaug

SEQ ID NO: 486428 - RNA, 19 nt, Homo sapiens
  misc_RNA (1)...(19): siRNA sense strand
acaauggaaacaucaauga

SEQ ID NO: 486429 - RNA, 19 nt, Homo sapiens
  misc_RNA (1)...(19): siRNA sense strand
gaaaggagagaugguggau

SEQ ID NO: 486430 - RNA, 19 nt, Homo sapiens
  misc_RNA (1)...(19): siRNA sense strand
cuagagguuucccuggauu

SEQ ID NO: 486431 - RNA, 19 nt, Homo sapiens
  misc_RNA (1)...(19): siRNA sense strand
gcaaauggagacggcuauu

SEQ ID NO: 486432 - RNA, 19 nt, Homo sapiens
  misc_RNA (1)...(19): siRNA sense strand
gaaaggcuuccagggagaa

SEQ ID NO: 486433 - RNA, 19 nt, Homo sapiens
  misc_RNA (1)...(19): siRNA sense strand
gcagcugggcuuccugguu

SEQ ID NO: 486434 - RNA, 19 nt, Homo sapiens
  misc_RNA (1)...(19): siRNA sense strand
ggagagaugguggauuaca

SEQ ID NO: 486435 - RNA, 19 nt, Homo sapiens
  misc_RNA (1)...(19): siRNA sense strand
gaugcuggcaacuccauug

SEQ ID NO: 486436 - RNA, 19 nt, Homo sapiens
  misc_RNA (1)...(19): siRNA sense strand
gcguggagcagcuggagaa

SEQ ID NO: 486437 - RNA, 19 nt, Homo sapiens
  misc_RNA (1)...(19): siRNA sense strand
uggagcagcuggagaacag

SEQ ID NO: 486438 - RNA, 19 nt, Homo sapiens
  misc_RNA (1)...(19): siRNA sense strand
ggauuuccgggucccauug

SEQ ID NO: 486439 - RNA, 19 nt, Homo sapiens
  misc_RNA (1)...(19): siRNA sense strand
gagaugguggauuacaaug

SEQ ID NO: 486440 - RNA, 19 nt, Homo sapiens
  misc_RNA (1)...(19): siRNA sense strand
uagcggagcgcacccacaa

SEQ ID NO: 486441 - RNA, 19 nt, Homo sapiens
  misc_RNA (1)...(19): siRNA sense strand
gggagaaccagggaaagga

SEQ ID NO: 486442 - RNA, 19 nt, Homo sapiens
  misc_RNA (1)...(19): siRNA sense strand
gagccaggccagcauccaa

SEQ ID NO: 486443 - RNA, 19 nt, Homo sapiens
  misc_RNA (1)...(19): siRNA sense strand
gguacuccaggaccaauug

SEQ ID NO: 486444 - RNA, 19 nt, Homo sapiens
  misc_RNA (1)...(19): siRNA sense strand
aaaggagacccugggauga

SEQ ID NO: 486445 - RNA, 19 nt, Homo sapiens
  misc_RNA (1)...(19): siRNA sense strand
gagccagggaucccaggaa

SEQ ID NO: 486446 - RNA, 19 nt, Homo sapiens
  misc_RNA (1)...(19): siRNA sense strand
gaaccagggaaaggagaga

SEQ ID NO: 486447 - RNA, 19 nt, Homo sapiens
  misc_RNA (1)...(19): siRNA sense strand
gauuacaauggaaacauca

SEQ ID NO: 486448 - RNA, 19 nt, Homo sapiens
  misc_RNA (1)...(19): siRNA sense strand
ggucaaccaggaacuagag

SEQ ID NO: 486449 - RNA, 19 nt, Homo sapiens
  misc_RNA (1)...(19): siRNA sense strand
aaggagagaugguggauua

SEQ ID NO: 486450 - RNA, 19 nt, Homo sapiens
  misc_RNA (1)...(19): siRNA sense strand
cagcugggcuuccugguuu

SEQ ID NO: 486451 - RNA, 19 nt, Homo sapiens
  misc_RNA (1)...(19): siRNA sense strand
ccaaagacaucuccaggau

SEQ ID NO: 486452 - RNA, 19 nt, Homo sapiens
  misc_RNA (1)...(19): siRNA sense strand
gagagaugguggauuacaa

SEQ ID NO: 486453 - RNA, 19 nt, Homo sapiens
  misc_RNA (1)...(19): siRNA sense strand
aaagggaccucgcgguaaa

SEQ ID NO: 486454 - RNA, 19 nt, Homo sapiens
  misc_RNA (1)...(19): siRNA sense strand
gaugguggauuacaaugga

SEQ ID NO: 486455 - RNA, 19 nt, Homo sapiens
  misc_RNA (1)...(19): siRNA sense strand
ggauuacaauggaaacauc

SEQ ID NO: 486456 - RNA, 19 nt, Homo sapiens
  misc_RNA (1)...(19): siRNA sense strand
caagggagaaccagggaaa

SEQ ID NO: 486457 - RNA, 19 nt, Homo sapiens
  misc_RNA (1)...(19): siRNA sense strand
ggaagcaggacuagaugga

SEQ ID NO: 486458 - RNA, 19 nt, Homo sapiens
  misc_RNA (1)...(19): siRNA sense strand
caaggcugcuggaacaagu

SEQ ID NO: 486459 - RNA, 19 nt, Homo sapiens
  misc_RNA (1)...(19): siRNA sense strand
gggagaagcaggugucgau

SEQ ID NO: 486460 - RNA, 19 nt, Homo sapiens
  misc_RNA (1)...(19): siRNA sense strand
ggagaacagggaccagaug

SEQ ID NO: 486461 - RNA, 19 nt, Homo sapiens
  misc_RNA (1)...(19): siRNA sense strand
acaauggaaacaucaauga

SEQ ID NO: 486462 - RNA, 19 nt, Homo sapiens
  misc_RNA (1)...(19): siRNA sense strand
gaaaggagagaugguggau

SEQ ID NO: 486463 - RNA, 19 nt, Homo sapiens
  misc_RNA (1)...(19): siRNA sense strand
cuagagguuucccuggauu

SEQ ID NO: 486464 - RNA, 19 nt, Homo sapiens
  misc_RNA (1)...(19): siRNA sense strand
gcaaauggagacggcuauu

SEQ ID NO: 486465 - RNA, 19 nt, Homo sapiens
  misc_RNA (1)...(19): siRNA sense strand
gaaaggcuuccagggagaa

SEQ ID NO: 486466 - RNA, 19 nt, Homo sapiens
  misc_RNA (1)...(19): siRNA sense strand
gcagcugggcuuccugguu

SEQ ID NO: 486467 - RNA, 19 nt, Homo sapiens
  misc_RNA (1)...(19): siRNA sense strand
ggagagaugguggauuaca

SEQ ID NO: 486468 - RNA, 19 nt, Homo sapiens
  misc_RNA (1)...(19): siRNA sense strand
gaugcuggcaacuccauug

SEQ ID NO: 486469 - RNA, 19 nt, Homo sapiens
  misc_RNA (1)...(19): siRNA sense strand
gcguggagcagcuggagaa

SEQ ID NO: 486470 - RNA, 19 nt, Homo sapiens
  misc_RNA (1)...(19): siRNA sense strand
uggagcagcuggagaacag

SEQ ID NO: 486471 - RNA, 19 nt, Homo sapiens
  misc_RNA (1)...(19): siRNA sense strand
ggauuuccgggucccauug

SEQ ID NO: 486472 - RNA, 19 nt, Homo sapiens
  misc_RNA (1)...(19): siRNA sense strand
gagaugguggauuacaaug

SEQ ID NO: 486473 - RNA, 19 nt, Homo sapiens
  misc_RNA (1)...(19): siRNA sense strand
uagcggagcgcacccacaa

SEQ ID NO: 486474 - RNA, 19 nt, Homo sapiens
  misc_RNA (1)...(19): siRNA sense strand
gggagaaccagggaaagga

SEQ ID NO: 486475 - RNA, 19 nt, Homo sapiens
  misc_RNA (1)...(19): siRNA sense strand
gagccaggccagcauccaa

SEQ ID NO: 486476 - RNA, 19 nt, Homo sapiens
  misc_RNA (1)...(19): siRNA sense strand
gguacuccaggaccaauug

SEQ ID NO: 486477 - RNA, 19 nt, Homo sapiens
  misc_RNA (1)...(19): siRNA sense strand
aaaggagacccugggauga

SEQ ID NO: 486478 - RNA, 19 nt, Homo sapiens
  misc_RNA (1)...(19): siRNA sense strand
gagccagggaucccaggaa

SEQ ID NO: 486479 - RNA, 19 nt, Homo sapiens
  misc_RNA (1)...(19): siRNA sense strand
gaaccagggaaaggagaga

SEQ ID NO: 486480 - RNA, 19 nt, Homo sapiens
  misc_RNA (1)...(19): siRNA sense strand
gauuacaauggaaacauca

SEQ ID NO: 486481 - RNA, 19 nt, Homo sapiens
  misc_RNA (1)...(19): siRNA sense strand
ggucaaccaggaacuagag

SEQ ID NO: 486482 - RNA, 19 nt, Homo sapiens
  misc_RNA (1)...(19): siRNA sense strand
aaggagagaugguggauua

SEQ ID NO: 486483 - RNA, 19 nt, Homo sapiens
  misc_RNA (1)...(19): siRNA sense strand
cagcugggcuuccugguuu

SEQ ID NO: 486484 - RNA, 19 nt, Homo sapiens
  misc_RNA (1)...(19): siRNA sense strand
ccaaagacaucuccaggau

SEQ ID NO: 486485 - RNA, 19 nt, Homo sapiens
  misc_RNA (1)...(19): siRNA sense strand
gagagaugguggauuacaa

SEQ ID NO: 486486 - RNA, 19 nt, Homo sapiens
  misc_RNA (1)...(19): siRNA sense strand
aaagggaccucgcgguaaa

SEQ ID NO: 486487 - RNA, 19 nt, Homo sapiens
  misc_RNA (1)...(19): siRNA sense strand
gaugguggauuacaaugga

SEQ ID NO: 486488 - RNA, 19 nt, Homo sapiens
  misc_RNA (1)...(19): siRNA sense strand
ggauuacaauggaaacauc

SEQ ID NO: 486489 - RNA, 19 nt, Homo sapiens
  misc_RNA (1)...(19): siRNA sense strand
caagggagaaccagggaaa

SEQ ID NO: 486490 - RNA, 19 nt, Homo sapiens
  misc_RNA (1)...(19): siRNA sense strand
ggaagcaggacuagaugga

SEQ ID NO: 486491 - RNA, 19 nt, Homo sapiens
  misc_RNA (1)...(19): siRNA sense strand
caaggcugcuggaacaagu

SEQ ID NO: 486492 - RNA, 19 nt, Homo sapiens
  misc_RNA (1)...(19): siRNA sense strand
gggagaagcaggugucgau

SEQ ID NO: 486493 - RNA, 19 nt, Homo sapiens
  misc_RNA (1)...(19): siRNA sense strand
ggagaacagggaccagaug

SEQ ID NO: 486494 - RNA, 19 nt, Homo sapiens
  misc_RNA (1)...(19): siRNA sense strand
acaauggaaacaucaauga

SEQ ID NO: 486495 - RNA, 19 nt, Homo sapiens
  misc_RNA (1)...(19): siRNA sense strand
gaaaggagagaugguggau

SEQ ID NO: 486496 - RNA, 19 nt, Homo sapiens
  misc_RNA (1)...(19): siRNA sense strand
cuagagguuucccuggauu

SEQ ID NO: 486497 - RNA, 19 nt, Homo sapiens
  misc_RNA (1)...(19): siRNA sense strand
gcaaauggagacggcuauu

SEQ ID NO: 486498 - RNA, 19 nt, Homo sapiens
  misc_RNA (1)...(19): siRNA sense strand
gaaaggcuuccagggagaa

SEQ ID NO: 486499 - RNA, 19 nt, Homo sapiens
  misc_RNA (1)...(19): siRNA sense strand
gcagcugggcuuccugguu

SEQ ID NO: 486500 - RNA, 19 nt, Homo sapiens
  misc_RNA (1)...(19): siRNA sense strand
ggagagaugguggauuaca

SEQ ID NO: 486501 - RNA, 19 nt, Homo sapiens
  misc_RNA (1)...(19): siRNA sense strand
gaugcuggcaacuccauug

SEQ ID NO: 486502 - RNA, 19 nt, Homo sapiens
  misc_RNA (1)...(19): siRNA sense strand
gcguggagcagcuggagaa

SEQ ID NO: 486503 - RNA, 19 nt, Homo sapiens
  misc_RNA (1)...(19): siRNA sense strand
uggagcagcuggagaacag

SEQ ID NO: 486504 - RNA, 19 nt, Homo sapiens
  misc_RNA (1)...(19): siRNA sense strand
ggauuuccgggucccauug

SEQ ID NO: 486505 - RNA, 19 nt, Homo sapiens
  misc_RNA (1)...(19): siRNA sense strand
gagaugguggauuacaaug

SEQ ID NO: 486506 - RNA, 19 nt, Homo sapiens
  misc_RNA (1)...(19): siRNA sense strand
uagcggagcgcacccacaa

SEQ ID NO: 486507 - RNA, 19 nt, Homo sapiens
  misc_RNA (1)...(19): siRNA sense strand
gggagaaccagggaaagga

SEQ ID NO: 486508 - RNA, 19 nt, Homo sapiens
  misc_RNA (1)...(19): siRNA sense strand
gagccaggccagcauccaa

SEQ ID NO: 486509 - RNA, 19 nt, Homo sapiens
  misc_RNA (1)...(19): siRNA sense strand
gguacuccaggaccaauug

SEQ ID NO: 486510 - RNA, 19 nt, Homo sapiens
  misc_RNA (1)...(19): siRNA sense strand
aaaggagacccugggauga

SEQ ID NO: 486511 - RNA, 19 nt, Homo sapiens
  misc_RNA (1)...(19): siRNA sense strand
gagccagggaucccaggaa

SEQ ID NO: 486512 - RNA, 19 nt, Homo sapiens
  misc_RNA (1)...(19): siRNA sense strand
gaaccagggaaaggagaga

SEQ ID NO: 486513 - RNA, 19 nt, Homo sapiens
  misc_RNA (1)...(19): siRNA sense strand
gauuacaauggaaacauca

SEQ ID NO: 486514 - RNA, 19 nt, Homo sapiens
  misc_RNA (1)...(19): siRNA sense strand
ggucaaccaggaacuagag

SEQ ID NO: 486515 - RNA, 19 nt, Homo sapiens
  misc_RNA (1)...(19): siRNA sense strand
aaggagagaugguggauua

SEQ ID NO: 486516 - RNA, 19 nt, Homo sapiens
  misc_RNA (1)...(19): siRNA sense strand
cagcugggcuuccugguuu

SEQ ID NO: 486517 - RNA, 19 nt, Homo sapiens
  misc_RNA (1)...(19): siRNA sense strand
ccaaagacaucuccaggau

SEQ ID NO: 486518 - RNA, 19 nt, Homo sapiens
  misc_RNA (1)...(19): siRNA sense strand
gagagaugguggauuacaa

SEQ ID NO: 486519 - RNA, 19 nt, Homo sapiens
  misc_RNA (1)...(19): siRNA sense strand
aaagggaccucgcgguaaa

SEQ ID NO: 486520 - RNA, 19 nt, Homo sapiens
  misc_RNA (1)...(19): siRNA sense strand
gaugguggauuacaaugga

SEQ ID NO: 486521 - RNA, 19 nt, Homo sapiens
  misc_RNA (1)...(19): siRNA sense strand
ggauuacaauggaaacauc

SEQ ID NO: 486522 - RNA, 19 nt, Homo sapiens
  misc_RNA (1)...(19): siRNA sense strand
gggcgaagauggcuuacca

SEQ ID NO: 486523 - RNA, 19 nt, Homo sapiens
  misc_RNA (1)...(19): siRNA sense strand
caagggagaaccagggaaa

SEQ ID NO: 486524 - RNA, 19 nt, Homo sapiens
  misc_RNA (1)...(19): siRNA sense strand
ggaagcaggacuagaugga

SEQ ID NO: 486525 - RNA, 19 nt, Homo sapiens
  misc_RNA (1)...(19): siRNA sense strand
caaggcugcuggaacaagu

SEQ ID NO: 486526 - RNA, 19 nt, Homo sapiens
  misc_RNA (1)...(19): siRNA sense strand
gggagaagcaggugucgau

SEQ ID NO: 486527 - RNA, 19 nt, Homo sapiens
  misc_RNA (1)...(19): siRNA sense strand
ggagaacagggaccagaug

SEQ ID NO: 486528 - RNA, 19 nt, Homo sapiens
  misc_RNA (1)...(19): siRNA sense strand
acaauggaaacaucaauga

SEQ ID NO: 486529 - RNA, 19 nt, Homo sapiens
  misc_RNA (1)...(19): siRNA sense strand
gaaaggagagaugguggau

SEQ ID NO: 486530 - RNA, 19 nt, Homo sapiens
  misc_RNA (1)...(19): siRNA sense strand
cuagagguuucccuggauu

SEQ ID NO: 486531 - RNA, 19 nt, Homo sapiens
  misc_RNA (1)...(19): siRNA sense strand
gcaaauggagacggcuauu

SEQ ID NO: 486532 - RNA, 19 nt, Homo sapiens
  misc_RNA (1)...(19): siRNA sense strand
gaaaggcuuccagggagaa

SEQ ID NO: 486533 - RNA, 19 nt, Homo sapiens
  misc_RNA (1)...(19): siRNA sense strand
gcagcugggcuuccugguu

SEQ ID NO: 486534 - RNA, 19 nt, Homo sapiens
  misc_RNA (1)...(19): siRNA sense strand
ggagagaugguggauuaca

SEQ ID NO: 486535 - RNA, 19 nt, Homo sapiens
  misc_RNA (1)...(19): siRNA sense strand
gaugcuggcaacuccauug

SEQ ID NO: 486536 - RNA, 19 nt, Homo sapiens
  misc_RNA (1)...(19): siRNA sense strand
gcguggagcagcuggagaa

SEQ ID NO: 486537 - RNA, 19 nt, Homo sapiens
  misc_RNA (1)...(19): siRNA sense strand
uggagcagcuggagaacag

SEQ ID NO: 486538 - RNA, 19 nt, Homo sapiens
  misc_RNA (1)...(19): siRNA sense strand
ggauuuccgggucccauug

SEQ ID NO: 486539 - RNA, 19 nt, Homo sapiens
  misc_RNA (1)...(19): siRNA sense strand
gagaugguggauuacaaug

SEQ ID NO: 486540 - RNA, 19 nt, Homo sapiens
  misc_RNA (1)...(19): siRNA sense strand
uagcggagcgcacccacaa

SEQ ID NO: 486541 - RNA, 19 nt, Homo sapiens
  misc_RNA (1)...(19): siRNA sense strand
gggagaaccagggaaagga

SEQ ID NO: 486542 - RNA, 19 nt, Homo sapiens
  misc_RNA (1)...(19): siRNA sense strand
gagccaggccagcauccaa

SEQ ID NO: 486543 - RNA, 19 nt, Homo sapiens
  misc_RNA (1)...(19): siRNA sense strand
gguacuccaggaccaauug

SEQ ID NO: 486544 - RNA, 19 nt, Homo sapiens
  misc_RNA (1)...(19): siRNA sense strand
aaaggagacccugggauga

SEQ ID NO: 486545 - RNA, 19 nt, Homo sapiens
  misc_RNA (1)...(19): siRNA sense strand
gagccagggaucccaggaa

SEQ ID NO: 486546 - RNA, 19 nt, Homo sapiens
  misc_RNA (1)...(19): siRNA sense strand
gaaccagggaaaggagaga

SEQ ID NO: 486547 - RNA, 19 nt, Homo sapiens
  misc_RNA (1)...(19): siRNA sense strand
gauuacaauggaaacauca

SEQ ID NO: 486548 - RNA, 19 nt, Homo sapiens
  misc_RNA (1)...(19): siRNA sense strand
ggucaaccaggaacuagag

SEQ ID NO: 486549 - RNA, 19 nt, Homo sapiens
  misc_RNA (1)...(19): siRNA sense strand
aaggagagaugguggauua

SEQ ID NO: 486550 - RNA, 19 nt, Homo sapiens
  misc_RNA (1)...(19): siRNA sense strand
cagcugggcuuccugguuu

SEQ ID NO: 486551 - RNA, 19 nt, Homo sapiens
  misc_RNA (1)...(19): siRNA sense strand
ccaaagacaucuccaggau

SEQ ID NO: 486552 - RNA, 19 nt, Homo sapiens
  misc_RNA (1)...(19): siRNA sense strand
gagagaugguggauuacaa

SEQ ID NO: 486553 - RNA, 19 nt, Homo sapiens
  misc_RNA (1)...(19): siRNA sense strand
aaagggaccucgcgguaaa

SEQ ID NO: 486554 - RNA, 19 nt, Homo sapiens
  misc_RNA (1)...(19): siRNA sense strand
gaugguggauuacaaugga

SEQ ID NO: 486555 - RNA, 19 nt, Homo sapiens
  misc_RNA (1)...(19): siRNA sense strand
ggauuacaauggaaacauc

SEQ ID NO: 486556 - RNA, 19 nt, Homo sapiens
  misc_RNA (1)...(19): siRNA sense strand
caagggagaaccagggaaa

SEQ ID NO: 486557 - RNA, 19 nt, Homo sapiens
  misc_RNA (1)...(19): siRNA sense strand
ggaagcaggacuagaugga

SEQ ID NO: 486558 - RNA, 19 nt, Homo sapiens
  misc_RNA (1)...(19): siRNA sense strand
caaggcugcuggaacaagu

SEQ ID NO: 486559 - RNA, 19 nt, Homo sapiens
  misc_RNA (1)...(19): siRNA sense strand
gggagaagcaggugucgau

SEQ ID NO: 486560 - RNA, 19 nt, Homo sapiens
  misc_RNA (1)...(19): siRNA sense strand
ggagaacagggaccagaug

SEQ ID NO: 486561 - RNA, 19 nt, Homo sapiens
  misc_RNA (1)...(19): siRNA sense strand
acaauggaaacaucaauga

SEQ ID NO: 486562 - RNA, 19 nt, Homo sapiens
  misc_RNA (1)...(19): siRNA sense strand
gaaaggagagaugguggau

SEQ ID NO: 486563 - RNA, 19 nt, Homo sapiens
  misc_RNA (1)...(19): siRNA sense strand
cuagagguuucccuggauu

SEQ ID NO: 486564 - RNA, 19 nt, Homo sapiens
  misc_RNA (1)...(19): siRNA sense strand
gcaaauggagacggcuauu

SEQ ID NO: 486565 - RNA, 19 nt, Homo sapiens
  misc_RNA (1)...(19): siRNA sense strand
gaaaggcuuccagggagaa

SEQ ID NO: 486566 - RNA, 19 nt, Homo sapiens
  misc_RNA (1)...(19): siRNA sense strand
gcagcugggcuuccugguu

SEQ ID NO: 486567 - RNA, 19 nt, Homo sapiens
  misc_RNA (1)...(19): siRNA sense strand
ggagagaugguggauuaca

SEQ ID NO: 486568 - RNA, 19 nt, Homo sapiens
  misc_RNA (1)...(19): siRNA sense strand
gaugcuggcaacuccauug

SEQ ID NO: 486569 - RNA, 19 nt, Homo sapiens
  misc_RNA (1)...(19): siRNA sense strand
gcguggagcagcuggagaa

SEQ ID NO: 486570 - RNA, 19 nt, Homo sapiens
  misc_RNA (1)...(19): siRNA sense strand
uggagcagcuggagaacag

SEQ ID NO: 486571 - RNA, 19 nt, Homo sapiens
  misc_RNA (1)...(19): siRNA sense strand
ggauuuccgggucccauug

SEQ ID NO: 486572 - RNA, 19 nt, Homo sapiens
  misc_RNA (1)...(19): siRNA sense strand
gagaugguggauuacaaug

SEQ ID NO: 486573 - RNA, 19 nt, Homo sapiens
  misc_RNA (1)...(19): siRNA sense strand
uagcggagcgcacccacaa

SEQ ID NO: 486574 - RNA, 19 nt, Homo sapiens
  misc_RNA (1)...(19): siRNA sense strand
gggagaaccagggaaagga

SEQ ID NO: 486575 - RNA, 19 nt, Homo sapiens
  misc_RNA (1)...(19): siRNA sense strand
gagccaggccagcauccaa

SEQ ID NO: 486576 - RNA, 19 nt, Homo sapiens
  misc_RNA (1)...(19): siRNA sense strand
gguacuccaggaccaauug

SEQ ID NO: 486577 - RNA, 19 nt, Homo sapiens
  misc_RNA (1)...(19): siRNA sense strand
aaaggagacccugggauga

SEQ ID NO: 486578 - RNA, 19 nt, Homo sapiens
  misc_RNA (1)...(19): siRNA sense strand
gagccagggaucccaggaa

SEQ ID NO: 486579 - RNA, 19 nt, Homo sapiens
  misc_RNA (1)...(19): siRNA sense strand
gaaccagggaaaggagaga

SEQ ID NO: 486580 - RNA, 19 nt, Homo sapiens
  misc_RNA (1)...(19): siRNA sense strand
gauuacaauggaaacauca

SEQ ID NO: 486581 - RNA, 19 nt, Homo sapiens
  misc_RNA (1)...(19): siRNA sense strand
ggucaaccaggaacuagag

SEQ ID NO: 486582 - RNA, 19 nt, Homo sapiens
  misc_RNA (1)...(19): siRNA sense strand
aaggagagaugguggauua

SEQ ID NO: 486583 - RNA, 19 nt, Homo sapiens
  misc_RNA (1)...(19): siRNA sense strand
cagcugggcuuccugguuu

SEQ ID NO: 486584 - RNA, 19 nt, Homo sapiens
  misc_RNA (1)...(19): siRNA sense strand
ccaaagacaucuccaggau

SEQ ID NO: 486585 - RNA, 19 nt, Homo sapiens
  misc_RNA (1)...(19): siRNA sense strand
gagagaugguggauuacaa

SEQ ID NO: 486586 - RNA, 19 nt, Homo sapiens
  misc_RNA (1)...(19): siRNA sense strand
aaagggaccucgcgguaaa

SEQ ID NO: 486587 - RNA, 19 nt, Homo sapiens
  misc_RNA (1)...(19): siRNA sense strand
gaugguggauuacaaugga

SEQ ID NO: 486588 - RNA, 19 nt, Homo sapiens
  misc_RNA (1)...(19): siRNA sense strand
ggauuacaauggaaacauc

SEQ ID NO: 486589 - RNA, 19 nt, Homo sapiens
  misc_RNA (1)...(19): siRNA sense strand
caagggagaaccagggaaa

SEQ ID NO: 486590 - RNA, 19 nt, Homo sapiens
  misc_RNA (1)...(19): siRNA sense strand
ggaagcaggacuagaugga

SEQ ID NO: 486591 - RNA, 19 nt, Homo sapiens
  misc_RNA (1)...(19): siRNA sense strand
caaggcugcuggaacaagu

SEQ ID NO: 486592 - RNA, 19 nt, Homo sapiens
  misc_RNA (1)...(19): siRNA sense strand
gggagaagcaggugucgau

SEQ ID NO: 486593 - RNA, 19 nt, Homo sapiens
  misc_RNA (1)...(19): siRNA sense strand
ggagaacagggaccagaug

SEQ ID NO: 486594 - RNA, 19 nt, Homo sapiens
  misc_RNA (1)...(19): siRNA sense strand
acaauggaaacaucaauga

SEQ ID NO: 486595 - RNA, 19 nt, Homo sapiens
  misc_RNA (1)...(19): siRNA sense strand
gaaaggagagaugguggau

SEQ ID NO: 486596 - RNA, 19 nt, Homo sapiens
  misc_RNA (1)...(19): siRNA sense strand
cuagagguuucccuggauu

SEQ ID NO: 486597 - RNA, 19 nt, Homo sapiens
  misc_RNA (1)...(19): siRNA sense strand
gcaaauggagacggcuauu

SEQ ID NO: 486598 - RNA, 19 nt, Homo sapiens
  misc_RNA (1)...(19): siRNA sense strand
gaaaggcuuccagggagaa

SEQ ID NO: 486599 - RNA, 19 nt, Homo sapiens
  misc_RNA (1)...(19): siRNA sense strand
gcagcugggcuuccugguu

SEQ ID NO: 486600 - RNA, 19 nt, Homo sapiens
  misc_RNA (1)...(19): siRNA sense strand
ggagagaugguggauuaca

SEQ ID NO: 486601 - RNA, 19 nt, Homo sapiens
  misc_RNA (1)...(19): siRNA sense strand
gaugcuggcaacuccauug

SEQ ID NO: 486602 - RNA, 19 nt, Homo sapiens
  misc_RNA (1)...(19): siRNA sense strand
gcguggagcagcuggagaa

SEQ ID NO: 486603 - RNA, 19 nt, Homo sapiens
  misc_RNA (1)...(19): siRNA sense strand
uggagcagcuggagaacag

SEQ ID NO: 486604 - RNA, 19 nt, Homo sapiens
  misc_RNA (1)...(19): siRNA sense strand
ggauuuccgggucccauug

SEQ ID NO: 486605 - RNA, 19 nt, Homo sapiens
  misc_RNA (1)...(19): siRNA sense strand
gagaugguggauuacaaug

SEQ ID NO: 486606 - RNA, 19 nt, Homo sapiens
  misc_RNA (1)...(19): siRNA sense strand
uagcggagcgcacccacaa

SEQ ID NO: 486607 - RNA, 19 nt, Homo sapiens
  misc_RNA (1)...(19): siRNA sense strand
gggagaaccagggaaagga

SEQ ID NO: 486608 - RNA, 19 nt, Homo sapiens
  misc_RNA (1)...(19): siRNA sense strand
gagccaggccagcauccaa

SEQ ID NO: 486609 - RNA, 19 nt, Homo sapiens
  misc_RNA (1)...(19): siRNA sense strand
gguacuccaggaccaauug

SEQ ID NO: 486610 - RNA, 19 nt, Homo sapiens
  misc_RNA (1)...(19): siRNA sense strand
aaaggagacccugggauga

SEQ ID NO: 486611 - RNA, 19 nt, Homo sapiens
  misc_RNA (1)...(19): siRNA sense strand
gagccagggaucccaggaa

SEQ ID NO: 486612 - RNA, 19 nt, Homo sapiens
  misc_RNA (1)...(19): siRNA sense strand
gaaccagggaaaggagaga

SEQ ID NO: 486613 - RNA, 19 nt, Homo sapiens
  misc_RNA (1)...(19): siRNA sense strand
gauuacaauggaaacauca

SEQ ID NO: 486614 - RNA, 19 nt, Homo sapiens
  misc_RNA (1)...(19): siRNA sense strand
ggucaaccaggaacuagag

SEQ ID NO: 486615 - RNA, 19 nt, Homo sapiens
  misc_RNA (1)...(19): siRNA sense strand
aaggagagaugguggauua

SEQ ID NO: 486616 - RNA, 19 nt, Homo sapiens
  misc_RNA (1)...(19): siRNA sense strand
cagcugggcuuccugguuu

SEQ ID NO: 486617 - RNA, 19 nt, Homo sapiens
  misc_RNA (1)...(19): siRNA sense strand
ccaaagacaucuccaggau

SEQ ID NO: 486618 - RNA, 19 nt, Homo sapiens
  misc_RNA (1)...(19): siRNA sense strand
gagagaugguggauuacaa

SEQ ID NO: 486619 - RNA, 19 nt, Homo sapiens
  misc_RNA (1)...(19): siRNA sense strand
aaagggaccucgcgguaaa

SEQ ID NO: 486620 - RNA, 19 nt, Homo sapiens
  misc_RNA (1)...(19): siRNA sense strand
gaugguggauuacaaugga

SEQ ID NO: 486621 - RNA, 19 nt, Homo sapiens
  misc_RNA (1)...(19): siRNA sense strand
ggauuacaauggaaacauc

SEQ ID NO: 486622 - RNA, 19 nt, Homo sapiens
  misc_RNA (1)...(19): siRNA sense strand
caagggagaaccagggaaa

SEQ ID NO: 486623 - RNA, 19 nt, Homo sapiens
  misc_RNA (1)...(19): siRNA sense strand
ggaagcaggacuagaugga

SEQ ID NO: 486624 - RNA, 19 nt, Homo sapiens
  misc_RNA (1)...(19): siRNA sense strand
caaggcugcuggaacaagu

SEQ ID NO: 486625 - RNA, 19 nt, Homo sapiens
  misc_RNA (1)...(19): siRNA sense strand
gggagaagcaggugucgau

SEQ ID NO: 486626 - RNA, 19 nt, Homo sapiens
  misc_RNA (1)...(19): siRNA sense strand
ggagaacagggaccagaug

SEQ ID NO: 486627 - RNA, 19 nt, Homo sapiens
  misc_RNA (1)...(19): siRNA sense strand
acaauggaaacaucaauga

SEQ ID NO: 486628 - RNA, 19 nt, Homo sapiens
  misc_RNA (1)...(19): siRNA sense strand
gaaaggagagaugguggau

SEQ ID NO: 486629 - RNA, 19 nt, Homo sapiens
  misc_RNA (1)...(19): siRNA sense strand
cuagagguuucccuggauu

SEQ ID NO: 486630 - RNA, 19 nt, Homo sapiens
  misc_RNA (1)...(19): siRNA sense strand
gcaaauggagacggcuauu

SEQ ID NO: 486631 - RNA, 19 nt, Homo sapiens
  misc_RNA (1)...(19): siRNA sense strand
gaaaggcuuccagggagaa

SEQ ID NO: 486632 - RNA, 19 nt, Homo sapiens
  misc_RNA (1)...(19): siRNA sense strand
gcagcugggcuuccugguu

SEQ ID NO: 486633 - RNA, 19 nt, Homo sapiens
  misc_RNA (1)...(19): siRNA sense strand
ggagagaugguggauuaca

SEQ ID NO: 486634 - RNA, 19 nt, Homo sapiens
  misc_RNA (1)...(19): siRNA sense strand
gaugcuggcaacuccauug

SEQ ID NO: 486635 - RNA, 19 nt, Homo sapiens
  misc_RNA (1)...(19): siRNA sense strand
gcguggagcagcuggagaa

SEQ ID NO: 486636 - RNA, 19 nt, Homo sapiens
  misc_RNA (1)...(19): siRNA sense strand
uggagcagcuggagaacag

SEQ ID NO: 486637 - RNA, 19 nt, Homo sapiens
  misc_RNA (1)...(19): siRNA sense strand
ggauuuccgggucccauug

SEQ ID NO: 486638 - RNA, 19 nt, Homo sapiens
  misc_RNA (1)...(19): siRNA sense strand
gagaugguggauuacaaug

SEQ ID NO: 486639 - RNA, 19 nt, Homo sapiens
  misc_RNA (1)...(19): siRNA sense strand
uagcggagcgcacccacaa

SEQ ID NO: 486640 - RNA, 19 nt, Homo sapiens
  misc_RNA (1)...(19): siRNA sense strand
gggagaaccagggaaagga

SEQ ID NO: 486641 - RNA, 19 nt, Homo sapiens
  misc_RNA (1)...(19): siRNA sense strand
gagccaggccagcauccaa

SEQ ID NO: 486642 - RNA, 19 nt, Homo sapiens
  misc_RNA (1)...(19): siRNA sense strand
gguacuccaggaccaauug

SEQ ID NO: 486643 - RNA, 19 nt, Homo sapiens
  misc_RNA (1)...(19): siRNA sense strand
aaaggagacccugggauga

SEQ ID NO: 486644 - RNA, 19 nt, Homo sapiens
  misc_RNA (1)...(19): siRNA sense strand
gagccagggaucccaggaa

SEQ ID NO: 486645 - RNA, 19 nt, Homo sapiens
  misc_RNA (1)...(19): siRNA sense strand
gaaccagggaaaggagaga

SEQ ID NO: 486646 - RNA, 19 nt, Homo sapiens
  misc_RNA (1)...(19): siRNA sense strand
gauuacaauggaaacauca

SEQ ID NO: 486647 - RNA, 19 nt, Homo sapiens
  misc_RNA (1)...(19): siRNA sense strand
ggucaaccaggaacuagag

SEQ ID NO: 486648 - RNA, 19 nt, Homo sapiens
  misc_RNA (1)...(19): siRNA sense strand
aaggagagaugguggauua

SEQ ID NO: 486649 - RNA, 19 nt, Homo sapiens
  misc_RNA (1)...(19): siRNA sense strand
cagcugggcuuccugguuu

SEQ ID NO: 486650 - RNA, 19 nt, Homo sapiens
  misc_RNA (1)...(19): siRNA sense strand
ccaaagacaucuccaggau

SEQ ID NO: 486651 - RNA, 19 nt, Homo sapiens
  misc_RNA (1)...(19): siRNA sense strand
gagagaugguggauuacaa

SEQ ID NO: 486652 - RNA, 19 nt, Homo sapiens
  misc_RNA (1)...(19): siRNA sense strand
aaagggaccucgcgguaaa

SEQ ID NO: 486653 - RNA, 19 nt, Homo sapiens
  misc_RNA (1)...(19): siRNA sense strand
gaugguggauuacaaugga

SEQ ID NO: 486654 - RNA, 19 nt, Homo sapiens
  misc_RNA (1)...(19): siRNA sense strand
ggauuacaauggaaacauc

SEQ ID NO: 486655 - RNA, 19 nt, Homo sapiens
  misc_RNA (1)...(19): siRNA sense strand
caagggagaaccagggaaa

SEQ ID NO: 486656 - RNA, 19 nt, Homo sapiens
  misc_RNA (1)...(19): siRNA sense strand
ggaagcaggacuagaugga

SEQ ID NO: 486657 - RNA, 19 nt, Homo sapiens
  misc_RNA (1)...(19): siRNA sense strand
caaggcugcuggaacaagu

SEQ ID NO: 486658 - RNA, 19 nt, Homo sapiens
  misc_RNA (1)...(19): siRNA sense strand
gggagaagcaggugucgau

SEQ ID NO: 486659 - RNA, 19 nt, Homo sapiens
  misc_RNA (1)...(19): siRNA sense strand
ggagaacagggaccagaug

SEQ ID NO: 486660 - RNA, 19 nt, Homo sapiens
  misc_RNA (1)...(19): siRNA sense strand
acaauggaaacaucaauga

SEQ ID NO: 486661 - RNA, 19 nt, Homo sapiens
  misc_RNA (1)...(19): siRNA sense strand
gaaaggagagaugguggau

SEQ ID NO: 486662 - RNA, 19 nt, Homo sapiens
  misc_RNA (1)...(19): siRNA sense strand
cuagagguuucccuggauu

SEQ ID NO: 486663 - RNA, 19 nt, Homo sapiens
  misc_RNA (1)...(19): siRNA sense strand
gcaaauggagacggcuauu

SEQ ID NO: 486664 - RNA, 19 nt, Homo sapiens
  misc_RNA (1)...(19): siRNA sense strand
gaaaggcuuccagggagaa

SEQ ID NO: 486665 - RNA, 19 nt, Homo sapiens
  misc_RNA (1)...(19): siRNA sense strand
gcagcugggcuuccugguu

SEQ ID NO: 486666 - RNA, 19 nt, Homo sapiens
  misc_RNA (1)...(19): siRNA sense strand
ggagagaugguggauuaca

SEQ ID NO: 486667 - RNA, 19 nt, Homo sapiens
  misc_RNA (1)...(19): siRNA sense strand
gaugcuggcaacuccauug

SEQ ID NO: 486668 - RNA, 19 nt, Homo sapiens
  misc_RNA (1)...(19): siRNA sense strand
gcguggagcagcuggagaa

SEQ ID NO: 486669 - RNA, 19 nt, Homo sapiens
  misc_RNA (1)...(19): siRNA sense strand
uggagcagcuggagaacag

SEQ ID NO: 486670 - RNA, 19 nt, Homo sapiens
  misc_RNA (1)...(19): siRNA sense strand
ggauuuccgggucccauug

SEQ ID NO: 486671 - RNA, 19 nt, Homo sapiens
  misc_RNA (1)...(19): siRNA sense strand
gagaugguggauuacaaug

SEQ ID NO: 486672 - RNA, 19 nt, Homo sapiens
  misc_RNA (1)...(19): siRNA sense strand
uagcggagcgcacccacaa

SEQ ID NO: 486673 - RNA, 19 nt, Homo sapiens
  misc_RNA (1)...(19): siRNA sense strand
gggagaaccagggaaagga

SEQ ID NO: 486674 - RNA, 19 nt, Homo sapiens
  misc_RNA (1)...(19): siRNA sense strand
gagccaggccagcauccaa

SEQ ID NO: 486675 - RNA, 19 nt, Homo sapiens
  misc_RNA (1)...(19): siRNA sense strand
gguacuccaggaccaauug

SEQ ID NO: 486676 - RNA, 19 nt, Homo sapiens
  misc_RNA (1)...(19): siRNA sense strand
aaaggagacccugggauga

SEQ ID NO: 486677 - RNA, 19 nt, Homo sapiens
  misc_RNA (1)...(19): siRNA sense strand
gagccagggaucccaggaa

SEQ ID NO: 486678 - RNA, 19 nt, Homo sapiens
  misc_RNA (1)...(19): siRNA sense strand
gaaccagggaaaggagaga

SEQ ID NO: 486679 - RNA, 19 nt, Homo sapiens
  misc_RNA (1)...(19): siRNA sense strand
gauuacaauggaaacauca

SEQ ID NO: 486680 - RNA, 19 nt, Homo sapiens
  misc_RNA (1)...(19): siRNA sense strand
ggucaaccaggaacuagag

SEQ ID NO: 486681 - RNA, 19 nt, Homo sapiens
  misc_RNA (1)...(19): siRNA sense strand
aaggagagaugguggauua

SEQ ID NO: 486682 - RNA, 19 nt, Homo sapiens
  misc_RNA (1)...(19): siRNA sense strand
cagcugggcuuccugguuu

SEQ ID NO: 486683 - RNA, 19 nt, Homo sapiens
  misc_RNA (1)...(19): siRNA sense strand
ccaaagacaucuccaggau

SEQ ID NO: 486684 - RNA, 19 nt, Homo sapiens
  misc_RNA (1)...(19): siRNA sense strand
gagagaugguggauuacaa

SEQ ID NO: 486685 - RNA, 19 nt, Homo sapiens
  misc_RNA (1)...(19): siRNA sense strand
aaagggaccucgcgguaaa

SEQ ID NO: 486686 - RNA, 19 nt, Homo sapiens
  misc_RNA (1)...(19): siRNA sense strand
gaugguggauuacaaugga

SEQ ID NO: 486687 - RNA, 19 nt, Homo sapiens
  misc_RNA (1)...(19): siRNA sense strand
ggauuacaauggaaacauc

SEQ ID NO: 486688 - RNA, 19 nt, Homo sapiens
  misc_RNA (1)...(19): siRNA sense strand
caagggagaaccagggaaa

SEQ ID NO: 486689 - RNA, 19 nt, Homo sapiens
  misc_RNA (1)...(19): siRNA sense strand
ggaagcaggacuagaugga

SEQ ID NO: 486690 - RNA, 19 nt, Homo sapiens
  misc_RNA (1)...(19): siRNA sense strand
caaggcugcuggaacaagu

SEQ ID NO: 486691 - RNA, 19 nt, Homo sapiens
  misc_RNA (1)...(19): siRNA sense strand
gggagaagcaggugucgau

SEQ ID NO: 486692 - RNA, 19 nt, Homo sapiens
  misc_RNA (1)...(19): siRNA sense strand
ggagaacagggaccagaug

SEQ ID NO: 486693 - RNA, 19 nt, Homo sapiens
  misc_RNA (1)...(19): siRNA sense strand
acaauggaaacaucaauga

SEQ ID NO: 486694 - RNA, 19 nt, Homo sapiens
  misc_RNA (1)...(19): siRNA sense strand
gaaaggagagaugguggau

SEQ ID NO: 486695 - RNA, 19 nt, Homo sapiens
  misc_RNA (1)...(19): siRNA sense strand
cuagagguuucccuggauu

SEQ ID NO: 486696 - RNA, 19 nt, Homo sapiens
  misc_RNA (1)...(19): siRNA sense strand
gcaaauggagacggcuauu

SEQ ID NO: 486697 - RNA, 19 nt, Homo sapiens
  misc_RNA (1)...(19): siRNA sense strand
gaaaggcuuccagggagaa

SEQ ID NO: 486698 - RNA, 19 nt, Homo sapiens
  misc_RNA (1)...(19): siRNA sense strand
gcagcugggcuuccugguu

SEQ ID NO: 486699 - RNA, 19 nt, Homo sapiens
  misc_RNA (1)...(19): siRNA sense strand
ggagagaugguggauuaca

SEQ ID NO: 486700 - RNA, 19 nt, Homo sapiens
  misc_RNA (1)...(19): siRNA sense strand
gaugcuggcaacuccauug

SEQ ID NO: 486701 - RNA, 19 nt, Homo sapiens
  misc_RNA (1)...(19): siRNA sense strand
gcguggagcagcuggagaa

SEQ ID NO: 486702 - RNA, 19 nt, Homo sapiens
  misc_RNA (1)...(19): siRNA sense strand
uggagcagcuggagaacag

SEQ ID NO: 486703 - RNA, 19 nt, Homo sapiens
  misc_RNA (1)...(19): siRNA sense strand
ggauuuccgggucccauug

SEQ ID NO: 486704 - RNA, 19 nt, Homo sapiens
  misc_RNA (1)...(19): siRNA sense strand
gagaugguggauuacaaug

SEQ ID NO: 486705 - RNA, 19 nt, Homo sapiens
  misc_RNA (1)...(19): siRNA sense strand
uagcggagcgcacccacaa

SEQ ID NO: 486706 - RNA, 19 nt, Homo sapiens
  misc_RNA (1)...(19): siRNA sense strand
gggagaaccagggaaagga

SEQ ID NO: 486707 - RNA, 19 nt, Homo sapiens
  misc_RNA (1)...(19): siRNA sense strand
gagccaggccagcauccaa

SEQ ID NO: 486708 - RNA, 19 nt, Homo sapiens
  misc_RNA (1)...(19): siRNA sense strand
gguacuccaggaccaauug

SEQ ID NO: 486709 - RNA, 19 nt, Homo sapiens
  misc_RNA (1)...(19): siRNA sense strand
aaaggagacccugggauga

SEQ ID NO: 486710 - RNA, 19 nt, Homo sapiens
  misc_RNA (1)...(19): siRNA sense strand
gagccagggaucccaggaa

SEQ ID NO: 486711 - RNA, 19 nt, Homo sapiens
  misc_RNA (1)...(19): siRNA sense strand
gaaccagggaaaggagaga

SEQ ID NO: 486712 - RNA, 19 nt, Homo sapiens
  misc_RNA (1)...(19): siRNA sense strand
gauuacaauggaaacauca

SEQ ID NO: 486713 - RNA, 19 nt, Homo sapiens
  misc_RNA (1)...(19): siRNA sense strand
ggucaaccaggaacuagag

SEQ ID NO: 486714 - RNA, 19 nt, Homo sapiens
  misc_RNA (1)...(19): siRNA sense strand
aaggagagaugguggauua

SEQ ID NO: 486715 - RNA, 19 nt, Homo sapiens
  misc_RNA (1)...(19): siRNA sense strand
cagcugggcuuccugguuu

SEQ ID NO: 486716 - RNA, 19 nt, Homo sapiens
  misc_RNA (1)...(19): siRNA sense strand
ccaaagacaucuccaggau

SEQ ID NO: 486717 - RNA, 19 nt, Homo sapiens
  misc_RNA (1)...(19): siRNA sense strand
gagagaugguggauuacaa

SEQ ID NO: 486718 - RNA, 19 nt, Homo sapiens
  misc_RNA (1)...(19): siRNA sense strand
aaagggaccucgcgguaaa

SEQ ID NO: 486719 - RNA, 19 nt, Homo sapiens
  misc_RNA (1)...(19): siRNA sense strand
gaugguggauuacaaugga

SEQ ID NO: 486720 - RNA, 19 nt, Homo sapiens
  misc_RNA (1)...(19): siRNA sense strand
ggauuacaauggaaacauc

SEQ ID NO: 486721 - RNA, 19 nt, Homo sapiens
  misc_RNA (1)...(19): siRNA sense strand
caagggagaaccagggaaa

SEQ ID NO: 486722 - RNA, 19 nt, Homo sapiens
  misc_RNA (1)...(19): siRNA sense strand
ggaagcaggacuagaugga

SEQ ID NO: 486723 - RNA, 19 nt, Homo sapiens
  misc_RNA (1)...(19): siRNA sense strand
caaggcugcuggaacaagu

SEQ ID NO: 486724 - RNA, 19 nt, Homo sapiens
  misc_RNA (1)...(19): siRNA sense strand
gggagaagcaggugucgau

SEQ ID NO: 486725 - RNA, 19 nt, Homo sapiens
  misc_RNA (1)...(19): siRNA sense strand
ggagaacagggaccagaug

SEQ ID NO: 486726 - RNA, 19 nt, Homo sapiens
  misc_RNA (1)...(19): siRNA sense strand
acaauggaaacaucaauga

SEQ ID NO: 486727 - RNA, 19 nt, Homo sapiens
  misc_RNA (1)...(19): siRNA sense strand
gaaaggagagaugguggau

SEQ ID NO: 486728 - RNA, 19 nt, Homo sapiens
  misc_RNA (1)...(19): siRNA sense strand
cuagagguuucccuggauu

SEQ ID NO: 486729 - RNA, 19 nt, Homo sapiens
  misc_RNA (1)...(19): siRNA sense strand
gcaaauggagacggcuauu

SEQ ID NO: 486730 - RNA, 19 nt, Homo sapiens
  misc_RNA (1)...(19): siRNA sense strand
gaaaggcuuccagggagaa

SEQ ID NO: 486731 - RNA, 19 nt, Homo sapiens
  misc_RNA (1)...(19): siRNA sense strand
gcagcugggcuuccugguu

SEQ ID NO: 486732 - RNA, 19 nt, Homo sapiens
  misc_RNA (1)...(19): siRNA sense strand
ggagagaugguggauuaca

SEQ ID NO: 486733 - RNA, 19 nt, Homo sapiens
  misc_RNA (1)...(19): siRNA sense strand
gaugcuggcaacuccauug

SEQ ID NO: 486734 - RNA, 19 nt, Homo sapiens
  misc_RNA (1)...(19): siRNA sense strand
gcguggagcagcuggagaa

SEQ ID NO: 486735 - RNA, 19 nt, Homo sapiens
  misc_RNA (1)...(19): siRNA sense strand
uggagcagcuggagaacag

SEQ ID NO: 486736 - RNA, 19 nt, Homo sapiens
  misc_RNA (1)...(19): siRNA sense strand
ggauuuccgggucccauug

SEQ ID NO: 486737 - RNA, 19 nt, Homo sapiens
  misc_RNA (1)...(19): siRNA sense strand
gagaugguggauuacaaug

SEQ ID NO: 486738 - RNA, 19 nt, Homo sapiens
  misc_RNA (1)...(19): siRNA sense strand
uagcggagcgcacccacaa

SEQ ID NO: 486739 - RNA, 19 nt, Homo sapiens
  misc_RNA (1)...(19): siRNA sense strand
gggagaaccagggaaagga

SEQ ID NO: 486740 - RNA, 19 nt, Homo sapiens
  misc_RNA (1)...(19): siRNA sense strand
gagccaggccagcauccaa

SEQ ID NO: 486741 - RNA, 19 nt, Homo sapiens
  misc_RNA (1)...(19): siRNA sense strand
gguacuccaggaccaauug

SEQ ID NO: 486742 - RNA, 19 nt, Homo sapiens
  misc_RNA (1)...(19): siRNA sense strand
aaaggagacccugggauga

SEQ ID NO: 486743 - RNA, 19 nt, Homo sapiens
  misc_RNA (1)...(19): siRNA sense strand
gagccagggaucccaggaa

SEQ ID NO: 486744 - RNA, 19 nt, Homo sapiens
  misc_RNA (1)...(19): siRNA sense strand
gaaccagggaaaggagaga

SEQ ID NO: 486745 - RNA, 19 nt, Homo sapiens
  misc_RNA (1)...(19): siRNA sense strand
gauuacaauggaaacauca

SEQ ID NO: 486746 - RNA, 19 nt, Homo sapiens
  misc_RNA (1)...(19): siRNA sense strand
ggucaaccaggaacuagag

SEQ ID NO: 486747 - RNA, 19 nt, Homo sapiens
  misc_RNA (1)...(19): siRNA sense strand
aaggagagaugguggauua

SEQ ID NO: 486748 - RNA, 19 nt, Homo sapiens
  misc_RNA (1)...(19): siRNA sense strand
cagcugggcuuccugguuu

SEQ ID NO: 486749 - RNA, 19 nt, Homo sapiens
  misc_RNA (1)...(19): siRNA sense strand
ccaaagacaucuccaggau

SEQ ID NO: 486750 - RNA, 19 nt, Homo sapiens
  misc_RNA (1)...(19): siRNA sense strand
gagagaugguggauuacaa

SEQ ID NO: 486751 - RNA, 19 nt, Homo sapiens
  misc_RNA (1)...(19): siRNA sense strand
aaagggaccucgcgguaaa

SEQ ID NO: 486752 - RNA, 19 nt, Homo sapiens
  misc_RNA (1)...(19): siRNA sense strand
gaugguggauuacaaugga

SEQ ID NO: 486753 - RNA, 19 nt, Homo sapiens
  misc_RNA (1)...(19): siRNA sense strand
ggauuacaauggaaacauc

SEQ ID NO: 486754 - RNA, 19 nt, Homo sapiens
  misc_RNA (1)...(19): siRNA sense strand
caagggagaaccagggaaa

SEQ ID NO: 486755 - RNA, 19 nt, Homo sapiens
  misc_RNA (1)...(19): siRNA sense strand
ggaagcaggacuagaugga

SEQ ID NO: 486756 - RNA, 19 nt, Homo sapiens
  misc_RNA (1)...(19): siRNA sense strand
caaggcugcuggaacaagu

SEQ ID NO: 486757 - RNA, 19 nt, Homo sapiens
  misc_RNA (1)...(19): siRNA sense strand
gggagaagcaggugucgau

SEQ ID NO: 486758 - RNA, 19 nt, Homo sapiens
  misc_RNA (1)...(19): siRNA sense strand
ggagaacagggaccagaug

SEQ ID NO: 486759 - RNA, 19 nt, Homo sapiens
  misc_RNA (1)...(19): siRNA sense strand
acaauggaaacaucaauga

SEQ ID NO: 486760 - RNA, 19 nt, Homo sapiens
  misc_RNA (1)...(19): siRNA sense strand
gaaaggagagaugguggau

SEQ ID NO: 486761 - RNA, 19 nt, Homo sapiens
  misc_RNA (1)...(19): siRNA sense strand
cuagagguuucccuggauu

SEQ ID NO: 486762 - RNA, 19 nt, Homo sapiens
  misc_RNA (1)...(19): siRNA sense strand
gcaaauggagacggcuauu

SEQ ID NO: 486763 - RNA, 19 nt, Homo sapiens
  misc_RNA (1)...(19): siRNA sense strand
gaaaggcuuccagggagaa

SEQ ID NO: 486764 - RNA, 19 nt, Homo sapiens
  misc_RNA (1)...(19): siRNA sense strand
gcagcugggcuuccugguu

SEQ ID NO: 486765 - RNA, 19 nt, Homo sapiens
  misc_RNA (1)...(19): siRNA sense strand
ggagagaugguggauuaca

SEQ ID NO: 486766 - RNA, 19 nt, Homo sapiens
  misc_RNA (1)...(19): siRNA sense strand
gaugcuggcaacuccauug

SEQ ID NO: 486767 - RNA, 19 nt, Homo sapiens
  misc_RNA (1)...(19): siRNA sense strand
gcguggagcagcuggagaa

SEQ ID NO: 486768 - RNA, 19 nt, Homo sapiens
  misc_RNA (1)...(19): siRNA sense strand
uggagcagcuggagaacag

SEQ ID NO: 486769 - RNA, 19 nt, Homo sapiens
  misc_RNA (1)...(19): siRNA sense strand
ggauuuccgggucccauug

SEQ ID NO: 486770 - RNA, 19 nt, Homo sapiens
  misc_RNA (1)...(19): siRNA sense strand
gagaugguggauuacaaug

SEQ ID NO: 486771 - RNA, 19 nt, Homo sapiens
  misc_RNA (1)...(19): siRNA sense strand
uagcggagcgcacccacaa

SEQ ID NO: 486772 - RNA, 19 nt, Homo sapiens
  misc_RNA (1)...(19): siRNA sense strand
gggagaaccagggaaagga

SEQ ID NO: 486773 - RNA, 19 nt, Homo sapiens
  misc_RNA (1)...(19): siRNA sense strand
gagccaggccagcauccaa

SEQ ID NO: 486774 - RNA, 19 nt, Homo sapiens
  misc_RNA (1)...(19): siRNA sense strand
gguacuccaggaccaauug

SEQ ID NO: 486775 - RNA, 19 nt, Homo sapiens
  misc_RNA (1)...(19): siRNA sense strand
aaaggagacccugggauga

SEQ ID NO: 486776 - RNA, 19 nt, Homo sapiens
  misc_RNA (1)...(19): siRNA sense strand
gagccagggaucccaggaa

SEQ ID NO: 486777 - RNA, 19 nt, Homo sapiens
  misc_RNA (1)...(19): siRNA sense strand
gaaccagggaaaggagaga

SEQ ID NO: 486778 - RNA, 19 nt, Homo sapiens
  misc_RNA (1)...(19): siRNA sense strand
gauuacaauggaaacauca

SEQ ID NO: 486779 - RNA, 19 nt, Homo sapiens
  misc_RNA (1)...(19): siRNA sense strand
ggucaaccaggaacuagag

SEQ ID NO: 486780 - RNA, 19 nt, Homo sapiens
  misc_RNA (1)...(19): siRNA sense strand
aaggagagaugguggauua

SEQ ID NO: 486781 - RNA, 19 nt, Homo sapiens
  misc_RNA (1)...(19): siRNA sense strand
cagcugggcuuccugguuu

SEQ ID NO: 486782 - RNA, 19 nt, Homo sapiens
  misc_RNA (1)...(19): siRNA sense strand
ccaaagacaucuccaggau

SEQ ID NO: 486783 - RNA, 19 nt, Homo sapiens
  misc_RNA (1)...(19): siRNA sense strand
gagagaugguggauuacaa

SEQ ID NO: 486784 - RNA, 19 nt, Homo sapiens
  misc_RNA (1)...(19): siRNA sense strand
aaagggaccucgcgguaaa

SEQ ID NO: 486785 - RNA, 19 nt, Homo sapiens
  misc_RNA (1)...(19): siRNA sense strand
gaugguggauuacaaugga

SEQ ID NO: 486786 - RNA, 19 nt, Homo sapiens
  misc_RNA (1)...(19): siRNA sense strand
ggauuacaauggaaacauc

SEQ ID NO: 486787 - RNA, 19 nt, Homo sapiens
  misc_RNA (1)...(19): siRNA sense strand
caagggagaaccagggaaa

SEQ ID NO: 486788 - RNA, 19 nt, Homo sapiens
  misc_RNA (1)...(19): siRNA sense strand
ggaagcaggacuagaugga

SEQ ID NO: 486789 - RNA, 19 nt, Homo sapiens
  misc_RNA (1)...(19): siRNA sense strand
caaggcugcuggaacaagu

SEQ ID NO: 486790 - RNA, 19 nt, Homo sapiens
  misc_RNA (1)...(19): siRNA sense strand
gggagaagcaggugucgau

SEQ ID NO: 486791 - RNA, 19 nt, Homo sapiens
  misc_RNA (1)...(19): siRNA sense strand
ggagaacagggaccagaug

SEQ ID NO: 486792 - RNA, 19 nt, Homo sapiens
  misc_RNA (1)...(19): siRNA sense strand
acaauggaaacaucaauga

SEQ ID NO: 486793 - RNA, 19 nt, Homo sapiens
  misc_RNA (1)...(19): siRNA sense strand
gaaaggagagaugguggau

SEQ ID NO: 486794 - RNA, 19 nt, Homo sapiens
  misc_RNA (1)...(19): siRNA sense strand
cuagagguuucccuggauu

SEQ ID NO: 486795 - RNA, 19 nt, Homo sapiens
  misc_RNA (1)...(19): siRNA sense strand
gcaaauggagacggcuauu

SEQ ID NO: 486796 - RNA, 19 nt, Homo sapiens
  misc_RNA (1)...(19): siRNA sense strand
gaaaggcuuccagggagaa

SEQ ID NO: 486797 - RNA, 19 nt, Homo sapiens
  misc_RNA (1)...(19): siRNA sense strand
gcagcugggcuuccugguu

SEQ ID NO: 486798 - RNA, 19 nt, Homo sapiens
  misc_RNA (1)...(19): siRNA sense strand
ggagagaugguggauuaca

SEQ ID NO: 486799 - RNA, 19 nt, Homo sapiens
  misc_RNA (1)...(19): siRNA sense strand
gaugcuggcaacuccauug

SEQ ID NO: 486800 - RNA, 19 nt, Homo sapiens
  misc_RNA (1)...(19): siRNA sense strand
gcguggagcagcuggagaa

SEQ ID NO: 486801 - RNA, 19 nt, Homo sapiens
  misc_RNA (1)...(19): siRNA sense strand
uggagcagcuggagaacag

SEQ ID NO: 486802 - RNA, 19 nt, Homo sapiens
  misc_RNA (1)...(19): siRNA sense strand
ggauuuccgggucccauug

SEQ ID NO: 486803 - RNA, 19 nt, Homo sapiens
  misc_RNA (1)...(19): siRNA sense strand
gagaugguggauuacaaug

SEQ ID NO: 486804 - RNA, 19 nt, Homo sapiens
  misc_RNA (1)...(19): siRNA sense strand
uagcggagcgcacccacaa

SEQ ID NO: 486805 - RNA, 19 nt, Homo sapiens
  misc_RNA (1)...(19): siRNA sense strand
gggagaaccagggaaagga

SEQ ID NO: 486806 - RNA, 19 nt, Homo sapiens
  misc_RNA (1)...(19): siRNA sense strand
gagccaggccagcauccaa

SEQ ID NO: 486807 - RNA, 19 nt, Homo sapiens
  misc_RNA (1)...(19): siRNA sense strand
gguacuccaggaccaauug

SEQ ID NO: 486808 - RNA, 19 nt, Homo sapiens
  misc_RNA (1)...(19): siRNA sense strand
aaaggagacccugggauga

SEQ ID NO: 486809 - RNA, 19 nt, Homo sapiens
  misc_RNA (1)...(19): siRNA sense strand
gagccagggaucccaggaa

SEQ ID NO: 486810 - RNA, 19 nt, Homo sapiens
  misc_RNA (1)...(19): siRNA sense strand
gaaccagggaaaggagaga

SEQ ID NO: 486811 - RNA, 19 nt, Homo sapiens
  misc_RNA (1)...(19): siRNA sense strand
gauuacaauggaaacauca

SEQ ID NO: 486812 - RNA, 19 nt, Homo sapiens
  misc_RNA (1)...(19): siRNA sense strand
ggucaaccaggaacuagag

SEQ ID NO: 486813 - RNA, 19 nt, Homo sapiens
  misc_RNA (1)...(19): siRNA sense strand
aaggagagaugguggauua

SEQ ID NO: 486814 - RNA, 19 nt, Homo sapiens
  misc_RNA (1)...(19): siRNA sense strand
cagcugggcuuccugguuu

SEQ ID NO: 486815 - RNA, 19 nt, Homo sapiens
  misc_RNA (1)...(19): siRNA sense strand
ccaaagacaucuccaggau

SEQ ID NO: 486816 - RNA, 19 nt, Homo sapiens
  misc_RNA (1)...(19): siRNA sense strand
gagagaugguggauuacaa

SEQ ID NO: 486817 - RNA, 19 nt, Homo sapiens
  misc_RNA (1)...(19): siRNA sense strand
aaagggaccucgcgguaaa

SEQ ID NO: 486818 - RNA, 19 nt, Homo sapiens
  misc_RNA (1)...(19): siRNA sense strand
gaugguggauuacaaugga

SEQ ID NO: 486819 - RNA, 19 nt, Homo sapiens
  misc_RNA (1)...(19): siRNA sense strand
ggauuacaauggaaacauc

SEQ ID NO: 486820 - RNA, 19 nt, Homo sapiens
  misc_RNA (1)...(19): siRNA sense strand
caagggagaaccagggaaa

SEQ ID NO: 486821 - RNA, 19 nt, Homo sapiens
  misc_RNA (1)...(19): siRNA sense strand
ggaagcaggacuagaugga

SEQ ID NO: 486822 - RNA, 19 nt, Homo sapiens
  misc_RNA (1)...(19): siRNA sense strand
caaggcugcuggaacaagu

SEQ ID NO: 486823 - RNA, 19 nt, Homo sapiens
  misc_RNA (1)...(19): siRNA sense strand
gggagaagcaggugucgau

SEQ ID NO: 486824 - RNA, 19 nt, Homo sapiens
  misc_RNA (1)...(19): siRNA sense strand
ggagaacagggaccagaug

SEQ ID NO: 486825 - RNA, 19 nt, Homo sapiens
  misc_RNA (1)...(19): siRNA sense strand
acaauggaaacaucaauga

SEQ ID NO: 486826 - RNA, 19 nt, Homo sapiens
  misc_RNA (1)...(19): siRNA sense strand
gaaaggagagaugguggau

SEQ ID NO: 486827 - RNA, 19 nt, Homo sapiens
  misc_RNA (1)...(19): siRNA sense strand
cuagagguuucccuggauu

SEQ ID NO: 486828 - RNA, 19 nt, Homo sapiens
  misc_RNA (1)...(19): siRNA sense strand
gcaaauggagacggcuauu

SEQ ID NO: 486829 - RNA, 19 nt, Homo sapiens
  misc_RNA (1)...(19): siRNA sense strand
gaaaggcuuccagggagaa

SEQ ID NO: 486830 - RNA, 19 nt, Homo sapiens
  misc_RNA (1)...(19): siRNA sense strand
gcagcugggcuuccugguu

SEQ ID NO: 486831 - RNA, 19 nt, Homo sapiens
  misc_RNA (1)...(19): siRNA sense strand
ggagagaugguggauuaca

SEQ ID NO: 486832 - RNA, 19 nt, Homo sapiens
  misc_RNA (1)...(19): siRNA sense strand
gaugcuggcaacuccauug

SEQ ID NO: 486833 - RNA, 19 nt, Homo sapiens
  misc_RNA (1)...(19): siRNA sense strand
gcguggagcagcuggagaa

SEQ ID NO: 486834 - RNA, 19 nt, Homo sapiens
  misc_RNA (1)...(19): siRNA sense strand
uggagcagcuggagaacag

SEQ ID NO: 486835 - RNA, 19 nt, Homo sapiens
  misc_RNA (1)...(19): siRNA sense strand
ggauuuccgggucccauug

SEQ ID NO: 486836 - RNA, 19 nt, Homo sapiens
  misc_RNA (1)...(19): siRNA sense strand
gagaugguggauuacaaug

SEQ ID NO: 486837 - RNA, 19 nt, Homo sapiens
  misc_RNA (1)...(19): siRNA sense strand
uagcggagcgcacccacaa

SEQ ID NO: 486838 - RNA, 19 nt, Homo sapiens
  misc_RNA (1)...(19): siRNA sense strand
gggagaaccagggaaagga

SEQ ID NO: 486839 - RNA, 19 nt, Homo sapiens
  misc_RNA (1)...(19): siRNA sense strand
gagccaggccagcauccaa

SEQ ID NO: 486840 - RNA, 19 nt, Homo sapiens
  misc_RNA (1)...(19): siRNA sense strand
gguacuccaggaccaauug

SEQ ID NO: 486841 - RNA, 19 nt, Homo sapiens
  misc_RNA (1)...(19): siRNA sense strand
aaaggagacccugggauga

SEQ ID NO: 486842 - RNA, 19 nt, Homo sapiens
  misc_RNA (1)...(19): siRNA sense strand
gagccagggaucccaggaa

SEQ ID NO: 486843 - RNA, 19 nt, Homo sapiens
  misc_RNA (1)...(19): siRNA sense strand
gaaccagggaaaggagaga

SEQ ID NO: 486844 - RNA, 19 nt, Homo sapiens
  misc_RNA (1)...(19): siRNA sense strand
gauuacaauggaaacauca

SEQ ID NO: 486845 - RNA, 19 nt, Homo sapiens
  misc_RNA (1)...(19): siRNA sense strand
ggucaaccaggaacuagag

SEQ ID NO: 486846 - RNA, 19 nt, Homo sapiens
  misc_RNA (1)...(19): siRNA sense strand
aaggagagaugguggauua

SEQ ID NO: 486847 - RNA, 19 nt, Homo sapiens
  misc_RNA (1)...(19): siRNA sense strand
cagcugggcuuccugguuu

SEQ ID NO: 486848 - RNA, 19 nt, Homo sapiens
  misc_RNA (1)...(19): siRNA sense strand
ccaaagacaucuccaggau

SEQ ID NO: 486849 - RNA, 19 nt, Homo sapiens
  misc_RNA (1)...(19): siRNA sense strand
gagagaugguggauuacaa

SEQ ID NO: 486850 - RNA, 19 nt, Homo sapiens
  misc_RNA (1)...(19): siRNA sense strand
aaagggaccucgcgguaaa

SEQ ID NO: 486851 - RNA, 19 nt, Homo sapiens
  misc_RNA (1)...(19): siRNA sense strand
gaugguggauuacaaugga

SEQ ID NO: 486852 - RNA, 19 nt, Homo sapiens
  misc_RNA (1)...(19): siRNA sense strand
ggauuacaauggaaacauc

SEQ ID NO: 486853 - RNA, 19 nt, Homo sapiens
  misc_RNA (1)...(19): siRNA sense strand
caagggagaaccagggaaa

SEQ ID NO: 486854 - RNA, 19 nt, Homo sapiens
  misc_RNA (1)...(19): siRNA sense strand
ggaagcaggacuagaugga

SEQ ID NO: 486855 - RNA, 19 nt, Homo sapiens
  misc_RNA (1)...(19): siRNA sense strand
caaggcugcuggaacaagu

SEQ ID NO: 486856 - RNA, 19 nt, Homo sapiens
  misc_RNA (1)...(19): siRNA sense strand
gggagaagcaggugucgau

SEQ ID NO: 486857 - RNA, 19 nt, Homo sapiens
  misc_RNA (1)...(19): siRNA sense strand
ggagaacagggaccagaug

SEQ ID NO: 486858 - RNA, 19 nt, Homo sapiens
  misc_RNA (1)...(19): siRNA sense strand
acaauggaaacaucaauga

SEQ ID NO: 486859 - RNA, 19 nt, Homo sapiens
  misc_RNA (1)...(19): siRNA sense strand
gaaaggagagaugguggau

SEQ ID NO: 486860 - RNA, 19 nt, Homo sapiens
  misc_RNA (1)...(19): siRNA sense strand
cuagagguuucccuggauu

SEQ ID NO: 486861 - RNA, 19 nt, Homo sapiens
  misc_RNA (1)...(19): siRNA sense strand
gcaaauggagacggcuauu

SEQ ID NO: 486862 - RNA, 19 nt, Homo sapiens
  misc_RNA (1)...(19): siRNA sense strand
gaaaggcuuccagggagaa

SEQ ID NO: 486863 - RNA, 19 nt, Homo sapiens
  misc_RNA (1)...(19): siRNA sense strand
gcagcugggcuuccugguu

SEQ ID NO: 486864 - RNA, 19 nt, Homo sapiens
  misc_RNA (1)...(19): siRNA sense strand
ggagagaugguggauuaca

SEQ ID NO: 486865 - RNA, 19 nt, Homo sapiens
  misc_RNA (1)...(19): siRNA sense strand
gaugcuggcaacuccauug

SEQ ID NO: 486866 - RNA, 19 nt, Homo sapiens
  misc_RNA (1)...(19): siRNA sense strand
gcguggagcagcuggagaa

SEQ ID NO: 486867 - RNA, 19 nt, Homo sapiens
  misc_RNA (1)...(19): siRNA sense strand
uggagcagcuggagaacag

SEQ ID NO: 486868 - RNA, 19 nt, Homo sapiens
  misc_RNA (1)...(19): siRNA sense strand
ggauuuccgggucccauug

SEQ ID NO: 486869 - RNA, 19 nt, Homo sapiens
  misc_RNA (1)...(19): siRNA sense strand
gagaugguggauuacaaug

SEQ ID NO: 486870 - RNA, 19 nt, Homo sapiens
  misc_RNA (1)...(19): siRNA sense strand
uagcggagcgcacccacaa

SEQ ID NO: 486871 - RNA, 19 nt, Homo sapiens
  misc_RNA (1)...(19): siRNA sense strand
gggagaaccagggaaagga

SEQ ID NO: 486872 - RNA, 19 nt, Homo sapiens
  misc_RNA (1)...(19): siRNA sense strand
gagccaggccagcauccaa

SEQ ID NO: 486873 - RNA, 19 nt, Homo sapiens
  misc_RNA (1)...(19): siRNA sense strand
gguacuccaggaccaauug

SEQ ID NO: 486874 - RNA, 19 nt, Homo sapiens
  misc_RNA (1)...(19): siRNA sense strand
aaaggagacccugggauga

SEQ ID NO: 486875 - RNA, 19 nt, Homo sapiens
  misc_RNA (1)...(19): siRNA sense strand
gagccagggaucccaggaa

SEQ ID NO: 486876 - RNA, 19 nt, Homo sapiens
  misc_RNA (1)...(19): siRNA sense strand
gaaccagggaaaggagaga

SEQ ID NO: 486877 - RNA, 19 nt, Homo sapiens
  misc_RNA (1)...(19): siRNA sense strand
gauuacaauggaaacauca

SEQ ID NO: 486878 - RNA, 19 nt, Homo sapiens
  misc_RNA (1)...(19): siRNA sense strand
ggucaaccaggaacuagag

SEQ ID NO: 486879 - RNA, 19 nt, Homo sapiens
  misc_RNA (1)...(19): siRNA sense strand
aaggagagaugguggauua

SEQ ID NO: 486880 - RNA, 19 nt, Homo sapiens
  misc_RNA (1)...(19): siRNA sense strand
cagcugggcuuccugguuu

SEQ ID NO: 486881 - RNA, 19 nt, Homo sapiens
  misc_RNA (1)...(19): siRNA sense strand
ccaaagacaucuccaggau

SEQ ID NO: 486882 - RNA, 19 nt, Homo sapiens
  misc_RNA (1)...(19): siRNA sense strand
gagagaugguggauuacaa

SEQ ID NO: 486883 - RNA, 19 nt, Homo sapiens
  misc_RNA (1)...(19): siRNA sense strand
aaagggaccucgcgguaaa

SEQ ID NO: 486884 - RNA, 19 nt, Homo sapiens
  misc_RNA (1)...(19): siRNA sense strand
gaugguggauuacaaugga

SEQ ID NO: 486885 - RNA, 19 nt, Homo sapiens
  misc_RNA (1)...(19): siRNA sense strand
ggauuacaauggaaacauc

SEQ ID NO: 486886 - RNA, 19 nt, Homo sapiens
  misc_RNA (1)...(19): siRNA sense strand
caagggagaaccagggaaa

SEQ ID NO: 486887 - RNA, 19 nt, Homo sapiens
  misc_RNA (1)...(19): siRNA sense strand
ggaagcaggacuagaugga

SEQ ID NO: 486888 - RNA, 19 nt, Homo sapiens
  misc_RNA (1)...(19): siRNA sense strand
caaggcugcuggaacaagu

SEQ ID NO: 486889 - RNA, 19 nt, Homo sapiens
  misc_RNA (1)...(19): siRNA sense strand
gggagaagcaggugucgau

SEQ ID NO: 486890 - RNA, 19 nt, Homo sapiens
  misc_RNA (1)...(19): siRNA sense strand
ggagaacagggaccagaug

SEQ ID NO: 486891 - RNA, 19 nt, Homo sapiens
  misc_RNA (1)...(19): siRNA sense strand
acaauggaaacaucaauga

SEQ ID NO: 486892 - RNA, 19 nt, Homo sapiens
  misc_RNA (1)...(19): siRNA sense strand
gaaaggagagaugguggau

SEQ ID NO: 486893 - RNA, 19 nt, Homo sapiens
  misc_RNA (1)...(19): siRNA sense strand
cuagagguuucccuggauu

SEQ ID NO: 486894 - RNA, 19 nt, Homo sapiens
  misc_RNA (1)...(19): siRNA sense strand
gcaaauggagacggcuauu

SEQ ID NO: 486895 - RNA, 19 nt, Homo sapiens
  misc_RNA (1)...(19): siRNA sense strand
gaaaggcuuccagggagaa

SEQ ID NO: 486896 - RNA, 19 nt, Homo sapiens
  misc_RNA (1)...(19): siRNA sense strand
gcagcugggcuuccugguu

SEQ ID NO: 486897 - RNA, 19 nt, Homo sapiens
  misc_RNA (1)...(19): siRNA sense strand
ggagagaugguggauuaca

SEQ ID NO: 486898 - RNA, 19 nt, Homo sapiens
  misc_RNA (1)...(19): siRNA sense strand
gaugcuggcaacuccauug

SEQ ID NO: 486899 - RNA, 19 nt, Homo sapiens
  misc_RNA (1)...(19): siRNA sense strand
gcguggagcagcuggagaa

SEQ ID NO: 486900 - RNA, 19 nt, Homo sapiens
  misc_RNA (1)...(19): siRNA sense strand
uggagcagcuggagaacag

SEQ ID NO: 486901 - RNA, 19 nt, Homo sapiens
  misc_RNA (1)...(19): siRNA sense strand
ggauuuccgggucccauug

SEQ ID NO: 486902 - RNA, 19 nt, Homo sapiens
  misc_RNA (1)...(19): siRNA sense strand
gagaugguggauuacaaug

SEQ ID NO: 486903 - RNA, 19 nt, Homo sapiens
  misc_RNA (1)...(19): siRNA sense strand
uagcggagcgcacccacaa

SEQ ID NO: 486904 - RNA, 19 nt, Homo sapiens
  misc_RNA (1)...(19): siRNA sense strand
gggagaaccagggaaagga

SEQ ID NO: 486905 - RNA, 19 nt, Homo sapiens
  misc_RNA (1)...(19): siRNA sense strand
gagccaggccagcauccaa

SEQ ID NO: 486906 - RNA, 19 nt, Homo sapiens
  misc_RNA (1)...(19): siRNA sense strand
gguacuccaggaccaauug

SEQ ID NO: 486907 - RNA, 19 nt, Homo sapiens
  misc_RNA (1)...(19): siRNA sense strand
aaaggagacccugggauga

SEQ ID NO: 486908 - RNA, 19 nt, Homo sapiens
  misc_RNA (1)...(19): siRNA sense strand
gagccagggaucccaggaa

SEQ ID NO: 486909 - RNA, 19 nt, Homo sapiens
  misc_RNA (1)...(19): siRNA sense strand
gaaccagggaaaggagaga

SEQ ID NO: 486910 - RNA, 19 nt, Homo sapiens
  misc_RNA (1)...(19): siRNA sense strand
gauuacaauggaaacauca

SEQ ID NO: 486911 - RNA, 19 nt, Homo sapiens
  misc_RNA (1)...(19): siRNA sense strand
ggucaaccaggaacuagag

SEQ ID NO: 486912 - RNA, 19 nt, Homo sapiens
  misc_RNA (1)...(19): siRNA sense strand
aaggagagaugguggauua

SEQ ID NO: 486913 - RNA, 19 nt, Homo sapiens
  misc_RNA (1)...(19): siRNA sense strand
cagcugggcuuccugguuu

SEQ ID NO: 486914 - RNA, 19 nt, Homo sapiens
  misc_RNA (1)...(19): siRNA sense strand
ccaaagacaucuccaggau

SEQ ID NO: 486915 - RNA, 19 nt, Homo sapiens
  misc_RNA (1)...(19): siRNA sense strand
gagagaugguggauuacaa

SEQ ID NO: 486916 - RNA, 19 nt, Homo sapiens
  misc_RNA (1)...(19): siRNA sense strand
aaagggaccucgcgguaaa

SEQ ID NO: 486917 - RNA, 19 nt, Homo sapiens
  misc_RNA (1)...(19): siRNA sense strand
gaugguggauuacaaugga

SEQ ID NO: 486918 - RNA, 19 nt, Homo sapiens
  misc_RNA (1)...(19): siRNA sense strand
ggauuacaauggaaacauc

SEQ ID NO: 486919 - RNA, 19 nt, Homo sapiens
  misc_RNA (1)...(19): siRNA sense strand
caagggagaaccagggaaa

SEQ ID NO: 486920 - RNA, 19 nt, Homo sapiens
  misc_RNA (1)...(19): siRNA sense strand
ggaagcaggacuagaugga

SEQ ID NO: 486921 - RNA, 19 nt, Homo sapiens
  misc_RNA (1)...(19): siRNA sense strand
caaggcugcuggaacaagu

SEQ ID NO: 486922 - RNA, 19 nt, Homo sapiens
  misc_RNA (1)...(19): siRNA sense strand
gggagaagcaggugucgau

SEQ ID NO: 486923 - RNA, 19 nt, Homo sapiens
  misc_RNA (1)...(19): siRNA sense strand
ggagaacagggaccagaug

SEQ ID NO: 486924 - RNA, 19 nt, Homo sapiens
  misc_RNA (1)...(19): siRNA sense strand
acaauggaaacaucaauga

SEQ ID NO: 486925 - RNA, 19 nt, Homo sapiens
  misc_RNA (1)...(19): siRNA sense strand
gaaaggagagaugguggau

SEQ ID NO: 486926 - RNA, 19 nt, Homo sapiens
  misc_RNA (1)...(19): siRNA sense strand
cuagagguuucccuggauu

SEQ ID NO: 486927 - RNA, 19 nt, Homo sapiens
  misc_RNA (1)...(19): siRNA sense strand
gcaaauggagacggcuauu

SEQ ID NO: 486928 - RNA, 19 nt, Homo sapiens
  misc_RNA (1)...(19): siRNA sense strand
gaaaggcuuccagggagaa

SEQ ID NO: 486929 - RNA, 19 nt, Homo sapiens
  misc_RNA (1)...(19): siRNA sense strand
gcagcugggcuuccugguu

SEQ ID NO: 486930 - RNA, 19 nt, Homo sapiens
  misc_RNA (1)...(19): siRNA sense strand
ggagagaugguggauuaca

SEQ ID NO: 486931 - RNA, 19 nt, Homo sapiens
  misc_RNA (1)...(19): siRNA sense strand
gaugcuggcaacuccauug

SEQ ID NO: 486932 - RNA, 19 nt, Homo sapiens
  misc_RNA (1)...(19): siRNA sense strand
gcguggagcagcuggagaa

SEQ ID NO: 486933 - RNA, 19 nt, Homo sapiens
  misc_RNA (1)...(19): siRNA sense strand
uggagcagcuggagaacag

SEQ ID NO: 486934 - RNA, 19 nt, Homo sapiens
  misc_RNA (1)...(19): siRNA sense strand
ggauuuccgggucccauug

SEQ ID NO: 486935 - RNA, 19 nt, Homo sapiens
  misc_RNA (1)...(19): siRNA sense strand
gagaugguggauuacaaug

SEQ ID NO: 486936 - RNA, 19 nt, Homo sapiens
  misc_RNA (1)...(19): siRNA sense strand
uagcggagcgcacccacaa

SEQ ID NO: 486937 - RNA, 19 nt, Homo sapiens
  misc_RNA (1)...(19): siRNA sense strand
gggagaaccagggaaagga

SEQ ID NO: 486938 - RNA, 19 nt, Homo sapiens
  misc_RNA (1)...(19): siRNA sense strand
gagccaggccagcauccaa

SEQ ID NO: 486939 - RNA, 19 nt, Homo sapiens
  misc_RNA (1)...(19): siRNA sense strand
gguacuccaggaccaauug

SEQ ID NO: 486940 - RNA, 19 nt, Homo sapiens
  misc_RNA (1)...(19): siRNA sense strand
aaaggagacccugggauga

SEQ ID NO: 486941 - RNA, 19 nt, Homo sapiens
  misc_RNA (1)...(19): siRNA sense strand
gagccagggaucccaggaa

SEQ ID NO: 486942 - RNA, 19 nt, Homo sapiens
  misc_RNA (1)...(19): siRNA sense strand
gaaccagggaaaggagaga

SEQ ID NO: 486943 - RNA, 19 nt, Homo sapiens
  misc_RNA (1)...(19): siRNA sense strand
gauuacaauggaaacauca

SEQ ID NO: 486944 - RNA, 19 nt, Homo sapiens
  misc_RNA (1)...(19): siRNA sense strand
ggucaaccaggaacuagag

SEQ ID NO: 486945 - RNA, 19 nt, Homo sapiens
  misc_RNA (1)...(19): siRNA sense strand
aaggagagaugguggauua

SEQ ID NO: 486946 - RNA, 19 nt, Homo sapiens
  misc_RNA (1)...(19): siRNA sense strand
cagcugggcuuccugguuu

SEQ ID NO: 486947 - RNA, 19 nt, Homo sapiens
  misc_RNA (1)...(19): siRNA sense strand
ccaaagacaucuccaggau

SEQ ID NO: 486948 - RNA, 19 nt, Homo sapiens
  misc_RNA (1)...(19): siRNA sense strand
gagagaugguggauuacaa

SEQ ID NO: 486949 - RNA, 19 nt, Homo sapiens
  misc_RNA (1)...(19): siRNA sense strand
aaagggaccucgcgguaaa

SEQ ID NO: 486950 - RNA, 19 nt, Homo sapiens
  misc_RNA (1)...(19): siRNA sense strand
gaugguggauuacaaugga

SEQ ID NO: 486951 - RNA, 19 nt, Homo sapiens
  misc_RNA (1)...(19): siRNA sense strand
ggauuacaauggaaacauc

SEQ ID NO: 486952 - RNA, 19 nt, Homo sapiens
  misc_RNA (1)...(19): siRNA sense strand
caagggagaaccagggaaa

SEQ ID NO: 486953 - RNA, 19 nt, Homo sapiens
  misc_RNA (1)...(19): siRNA sense strand
ggaagcaggacuagaugga

SEQ ID NO: 486954 - RNA, 19 nt, Homo sapiens
  misc_RNA (1)...(19): siRNA sense strand
caaggcugcuggaacaagu

SEQ ID NO: 486955 - RNA, 19 nt, Homo sapiens
  misc_RNA (1)...(19): siRNA sense strand
gggagaagcaggugucgau

SEQ ID NO: 486956 - RNA, 19 nt, Homo sapiens
  misc_RNA (1)...(19): siRNA sense strand
ggagaacagggaccagaug

SEQ ID NO: 486957 - RNA, 19 nt, Homo sapiens
  misc_RNA (1)...(19): siRNA sense strand
acaauggaaacaucaauga

SEQ ID NO: 486958 - RNA, 19 nt, Homo sapiens
  misc_RNA (1)...(19): siRNA sense strand
gaaaggagagaugguggau

SEQ ID NO: 486959 - RNA, 19 nt, Homo sapiens
  misc_RNA (1)...(19): siRNA sense strand
cuagagguuucccuggauu

SEQ ID NO: 486960 - RNA, 19 nt, Homo sapiens
  misc_RNA (1)...(19): siRNA sense strand
gcaaauggagacggcuauu

SEQ ID NO: 486961 - RNA, 19 nt, Homo sapiens
  misc_RNA (1)...(19): siRNA sense strand
gaaaggcuuccagggagaa

SEQ ID NO: 486962 - RNA, 19 nt, Homo sapiens
  misc_RNA (1)...(19): siRNA sense strand
gcagcugggcuuccugguu

SEQ ID NO: 486963 - RNA, 19 nt, Homo sapiens
  misc_RNA (1)...(19): siRNA sense strand
ggagagaugguggauuaca

SEQ ID NO: 486964 - RNA, 19 nt, Homo sapiens
  misc_RNA (1)...(19): siRNA sense strand
gaugcuggcaacuccauug

SEQ ID NO: 486965 - RNA, 19 nt, Homo sapiens
  misc_RNA (1)...(19): siRNA sense strand
gcguggagcagcuggagaa

SEQ ID NO: 486966 - RNA, 19 nt, Homo sapiens
  misc_RNA (1)...(19): siRNA sense strand
uggagcagcuggagaacag

SEQ ID NO: 486967 - RNA, 19 nt, Homo sapiens
  misc_RNA (1)...(19): siRNA sense strand
ggauuuccgggucccauug

SEQ ID NO: 486968 - RNA, 19 nt, Homo sapiens
  misc_RNA (1)...(19): siRNA sense strand
gagaugguggauuacaaug

SEQ ID NO: 486969 - RNA, 19 nt, Homo sapiens
  misc_RNA (1)...(19): siRNA sense strand
uagcggagcgcacccacaa

SEQ ID NO: 486970 - RNA, 19 nt, Homo sapiens
  misc_RNA (1)...(19): siRNA sense strand
gggagaaccagggaaagga

SEQ ID NO: 486971 - RNA, 19 nt, Homo sapiens
  misc_RNA (1)...(19): siRNA sense strand
gagccaggccagcauccaa

SEQ ID NO: 486972 - RNA, 19 nt, Homo sapiens
  misc_RNA (1)...(19): siRNA sense strand
gguacuccaggaccaauug

SEQ ID NO: 486973 - RNA, 19 nt, Homo sapiens
  misc_RNA (1)...(19): siRNA sense strand
aaaggagacccugggauga

SEQ ID NO: 486974 - RNA, 19 nt, Homo sapiens
  misc_RNA (1)...(19): siRNA sense strand
gagccagggaucccaggaa

SEQ ID NO: 486975 - RNA, 19 nt, Homo sapiens
  misc_RNA (1)...(19): siRNA sense strand
gaaccagggaaaggagaga

SEQ ID NO: 486976 - RNA, 19 nt, Homo sapiens
  misc_RNA (1)...(19): siRNA sense strand
gauuacaauggaaacauca

SEQ ID NO: 486977 - RNA, 19 nt, Homo sapiens
  misc_RNA (1)...(19): siRNA sense strand
ggucaaccaggaacuagag

SEQ ID NO: 486978 - RNA, 19 nt, Homo sapiens
  misc_RNA (1)...(19): siRNA sense strand
aaggagagaugguggauua

SEQ ID NO: 486979 - RNA, 19 nt, Homo sapiens
  misc_RNA (1)...(19): siRNA sense strand
cagcugggcuuccugguuu

SEQ ID NO: 486980 - RNA, 19 nt, Homo sapiens
  misc_RNA (1)...(19): siRNA sense strand
ccaaagacaucuccaggau

SEQ ID NO: 486981 - RNA, 19 nt, Homo sapiens
  misc_RNA (1)...(19): siRNA sense strand
gagagaugguggauuacaa

SEQ ID NO: 486982 - RNA, 19 nt, Homo sapiens
  misc_RNA (1)...(19): siRNA sense strand
aaagggaccucgcgguaaa

SEQ ID NO: 486983 - RNA, 19 nt, Homo sapiens
  misc_RNA (1)...(19): siRNA sense strand
gaugguggauuacaaugga

SEQ ID NO: 486984 - RNA, 19 nt, Homo sapiens
  misc_RNA (1)...(19): siRNA sense strand
ggauuacaauggaaacauc

SEQ ID NO: 486985 - RNA, 19 nt, Homo sapiens
  misc_RNA (1)...(19): siRNA sense strand
caagggagaaccagggaaa

SEQ ID NO: 486986 - RNA, 19 nt, Homo sapiens
  misc_RNA (1)...(19): siRNA sense strand
ggaagcaggacuagaugga

SEQ ID NO: 486987 - RNA, 19 nt, Homo sapiens
  misc_RNA (1)...(19): siRNA sense strand
caaggcugcuggaacaagu

SEQ ID NO: 486988 - RNA, 19 nt, Homo sapiens
  misc_RNA (1)...(19): siRNA sense strand
gggagaagcaggugucgau

SEQ ID NO: 486989 - RNA, 19 nt, Homo sapiens
  misc_RNA (1)...(19): siRNA sense strand
ggagaacagggaccagaug

SEQ ID NO: 486990 - RNA, 19 nt, Homo sapiens
  misc_RNA (1)...(19): siRNA sense strand
acaauggaaacaucaauga

SEQ ID NO: 486991 - RNA, 19 nt, Homo sapiens
  misc_RNA (1)...(19): siRNA sense strand
gaaaggagagaugguggau

SEQ ID NO: 486992 - RNA, 19 nt, Homo sapiens
  misc_RNA (1)...(19): siRNA sense strand
cuagagguuucccuggauu

SEQ ID NO: 486993 - RNA, 19 nt, Homo sapiens
  misc_RNA (1)...(19): siRNA sense strand
gcaaauggagacggcuauu

SEQ ID NO: 486994 - RNA, 19 nt, Homo sapiens
  misc_RNA (1)...(19): siRNA sense strand
gaaaggcuuccagggagaa

SEQ ID NO: 486995 - RNA, 19 nt, Homo sapiens
  misc_RNA (1)...(19): siRNA sense strand
gcagcugggcuuccugguu

SEQ ID NO: 486996 - RNA, 19 nt, Homo sapiens
  misc_RNA (1)...(19): siRNA sense strand
ggagagaugguggauuaca

SEQ ID NO: 486997 - RNA, 19 nt, Homo sapiens
  misc_RNA (1)...(19): siRNA sense strand
gaugcuggcaacuccauug

SEQ ID NO: 486998 - RNA, 19 nt, Homo sapiens
  misc_RNA (1)...(19): siRNA sense strand
gcguggagcagcuggagaa

SEQ ID NO: 486999 - RNA, 19 nt, Homo sapiens
  misc_RNA (1)...(19): siRNA sense strand
uggagcagcuggagaacag

SEQ ID NO: 487000 - RNA, 19 nt, Homo sapiens
  misc_RNA (1)...(19): siRNA sense strand
ggauuuccgggucccauug

SEQ ID NO: 487001 - RNA, 19 nt, Homo sapiens
  misc_RNA (1)...(19): siRNA sense strand
gagaugguggauuacaaug

SEQ ID NO: 487002 - RNA, 19 nt, Homo sapiens
  misc_RNA (1)...(19): siRNA sense strand
uagcggagcgcacccacaa

SEQ ID NO: 487003 - RNA, 19 nt, Homo sapiens
  misc_RNA (1)...(19): siRNA sense strand
gggagaaccagggaaagga

SEQ ID NO: 487004 - RNA, 19 nt, Homo sapiens
  misc_RNA (1)...(19): siRNA sense strand
gagccaggccagcauccaa

SEQ ID NO: 487005 - RNA, 19 nt, Homo sapiens
  misc_RNA (1)...(19): siRNA sense strand
gguacuccaggaccaauug

SEQ ID NO: 487006 - RNA, 19 nt, Homo sapiens
  misc_RNA (1)...(19): siRNA sense strand
aaaggagacccugggauga

SEQ ID NO: 487007 - RNA, 19 nt, Homo sapiens
  misc_RNA (1)...(19): siRNA sense strand
gagccagggaucccaggaa

SEQ ID NO: 487008 - RNA, 19 nt, Homo sapiens
  misc_RNA (1)...(19): siRNA sense strand
gaaccagggaaaggagaga

SEQ ID NO: 487009 - RNA, 19 nt, Homo sapiens
  misc_RNA (1)...(19): siRNA sense strand
gauuacaauggaaacauca

SEQ ID NO: 487010 - RNA, 19 nt, Homo sapiens
  misc_RNA (1)...(19): siRNA sense strand
ggucaaccaggaacuagag

SEQ ID NO: 487011 - RNA, 19 nt, Homo sapiens
  misc_RNA (1)...(19): siRNA sense strand
aaggagagaugguggauua

SEQ ID NO: 487012 - RNA, 19 nt, Homo sapiens
  misc_RNA (1)...(19): siRNA sense strand
cagcugggcuuccugguuu

SEQ ID NO: 487013 - RNA, 19 nt, Homo sapiens
  misc_RNA (1)...(19): siRNA sense strand
ccaaagacaucuccaggau

SEQ ID NO: 487014 - RNA, 19 nt, Homo sapiens
  misc_RNA (1)...(19): siRNA sense strand
gagagaugguggauuacaa

SEQ ID NO: 487015 - RNA, 19 nt, Homo sapiens
  misc_RNA (1)...(19): siRNA sense strand
aaagggaccucgcgguaaa

SEQ ID NO: 487016 - RNA, 19 nt, Homo sapiens
  misc_RNA (1)...(19): siRNA sense strand
gaugguggauuacaaugga

SEQ ID NO: 487017 - RNA, 19 nt, Homo sapiens
  misc_RNA (1)...(19): siRNA sense strand
ggauuacaauggaaacauc

SEQ ID NO: 487018 - RNA, 19 nt, Homo sapiens
  misc_RNA (1)...(19): siRNA sense strand
caagggagaaccagggaaa

SEQ ID NO: 487019 - RNA, 19 nt, Homo sapiens
  misc_RNA (1)...(19): siRNA sense strand
ggaagcaggacuagaugga

SEQ ID NO: 487020 - RNA, 19 nt, Homo sapiens
  misc_RNA (1)...(19): siRNA sense strand
caaggcugcuggaacaagu

SEQ ID NO: 487021 - RNA, 19 nt, Homo sapiens
  misc_RNA (1)...(19): siRNA sense strand
gggagaagcaggugucgau

SEQ ID NO: 487022 - RNA, 19 nt, Homo sapiens
  misc_RNA (1)...(19): siRNA sense strand
ggagaacagggaccagaug

SEQ ID NO: 487023 - RNA, 19 nt, Homo sapiens
  misc_RNA (1)...(19): siRNA sense strand
acaauggaaacaucaauga

SEQ ID NO: 487024 - RNA, 19 nt, Homo sapiens
  misc_RNA (1)...(19): siRNA sense strand
gaaaggagagaugguggau

SEQ ID NO: 487025 - RNA, 19 nt, Homo sapiens
  misc_RNA (1)...(19): siRNA sense strand
cuagagguuucccuggauu

SEQ ID NO: 487026 - RNA, 19 nt, Homo sapiens
  misc_RNA (1)...(19): siRNA sense strand
gcaaauggagacggcuauu

SEQ ID NO: 487027 - RNA, 19 nt, Homo sapiens
  misc_RNA (1)...(19): siRNA sense strand
gaaaggcuuccagggagaa

SEQ ID NO: 487028 - RNA, 19 nt, Homo sapiens
  misc_RNA (1)...(19): siRNA sense strand
gcagcugggcuuccugguu

SEQ ID NO: 487029 - RNA, 19 nt, Homo sapiens
  misc_RNA (1)...(19): siRNA sense strand
ggagagaugguggauuaca

SEQ ID NO: 487030 - RNA, 19 nt, Homo sapiens
  misc_RNA (1)...(19): siRNA sense strand
gaugcuggcaacuccauug

SEQ ID NO: 487031 - RNA, 19 nt, Homo sapiens
  misc_RNA (1)...(19): siRNA sense strand
gcguggagcagcuggagaa

SEQ ID NO: 487032 - RNA, 19 nt, Homo sapiens
  misc_RNA (1)...(19): siRNA sense strand
uggagcagcuggagaacag

SEQ ID NO: 487033 - RNA, 19 nt, Homo sapiens
  misc_RNA (1)...(19): siRNA sense strand
ggauuuccgggucccauug

SEQ ID NO: 487034 - RNA, 19 nt, Homo sapiens
  misc_RNA (1)...(19): siRNA sense strand
gagaugguggauuacaaug

SEQ ID NO: 487035 - RNA, 19 nt, Homo sapiens
  misc_RNA (1)...(19): siRNA sense strand
uagcggagcgcacccacaa

SEQ ID NO: 487036 - RNA, 19 nt, Homo sapiens
  misc_RNA (1)...(19): siRNA sense strand
gggagaaccagggaaagga

SEQ ID NO: 487037 - RNA, 19 nt, Homo sapiens
  misc_RNA (1)...(19): siRNA sense strand
gagccaggccagcauccaa

SEQ ID NO: 487038 - RNA, 19 nt, Homo sapiens
  misc_RNA (1)...(19): siRNA sense strand
gguacuccaggaccaauug

SEQ ID NO: 487039 - RNA, 19 nt, Homo sapiens
  misc_RNA (1)...(19): siRNA sense strand
aaaggagacccugggauga

SEQ ID NO: 487040 - RNA, 19 nt, Homo sapiens
  misc_RNA (1)...(19): siRNA sense strand
gagccagggaucccaggaa

SEQ ID NO: 487041 - RNA, 19 nt, Homo sapiens
  misc_RNA (1)...(19): siRNA sense strand
gaaccagggaaaggagaga

SEQ ID NO: 487042 - RNA, 19 nt, Homo sapiens
  misc_RNA (1)...(19): siRNA sense strand
gauuacaauggaaacauca

SEQ ID NO: 487043 - RNA, 19 nt, Homo sapiens
  misc_RNA (1)...(19): siRNA sense strand
ggucaaccaggaacuagag

SEQ ID NO: 487044 - RNA, 19 nt, Homo sapiens
  misc_RNA (1)...(19): siRNA sense strand
aaggagagaugguggauua

SEQ ID NO: 487045 - RNA, 19 nt, Homo sapiens
  misc_RNA (1)...(19): siRNA sense strand
cagcugggcuuccugguuu

SEQ ID NO: 487046 - RNA, 19 nt, Homo sapiens
  misc_RNA (1)...(19): siRNA sense strand
ccaaagacaucuccaggau

SEQ ID NO: 487047 - RNA, 19 nt, Homo sapiens
  misc_RNA (1)...(19): siRNA sense strand
gagagaugguggauuacaa

SEQ ID NO: 487048 - RNA, 19 nt, Homo sapiens
  misc_RNA (1)...(19): siRNA sense strand
aaagggaccucgcgguaaa

SEQ ID NO: 487049 - RNA, 19 nt, Homo sapiens
  misc_RNA (1)...(19): siRNA sense strand
gaugguggauuacaaugga

SEQ ID NO: 487050 - RNA, 19 nt, Homo sapiens
  misc_RNA (1)...(19): siRNA sense strand
ggauuacaauggaaacauc

SEQ ID NO: 487051 - RNA, 19 nt, Homo sapiens
  misc_RNA (1)...(19): siRNA sense strand
caagggagaaccagggaaa

SEQ ID NO: 487052 - RNA, 19 nt, Homo sapiens
  misc_RNA (1)...(19): siRNA sense strand
ggaagcaggacuagaugga

SEQ ID NO: 487053 - RNA, 19 nt, Homo sapiens
  misc_RNA (1)...(19): siRNA sense strand
caaggcugcuggaacaagu

SEQ ID NO: 487054 - RNA, 19 nt, Homo sapiens
  misc_RNA (1)...(19): siRNA sense strand
gggagaagcaggugucgau

SEQ ID NO: 487055 - RNA, 19 nt, Homo sapiens
  misc_RNA (1)...(19): siRNA sense strand
ggagaacagggaccagaug

SEQ ID NO: 487056 - RNA, 19 nt, Homo sapiens
  misc_RNA (1)...(19): siRNA sense strand
acaauggaaacaucaauga

SEQ ID NO: 487057 - RNA, 19 nt, Homo sapiens
  misc_RNA (1)...(19): siRNA sense strand
gaaaggagagaugguggau

SEQ ID NO: 487058 - RNA, 19 nt, Homo sapiens
  misc_RNA (1)...(19): siRNA sense strand
cuagagguuucccuggauu

SEQ ID NO: 487059 - RNA, 19 nt, Homo sapiens
  misc_RNA (1)...(19): siRNA sense strand
gcaaauggagacggcuauu

SEQ ID NO: 487060 - RNA, 19 nt, Homo sapiens
  misc_RNA (1)...(19): siRNA sense strand
gaaaggcuuccagggagaa

SEQ ID NO: 487061 - RNA, 19 nt, Homo sapiens
  misc_RNA (1)...(19): siRNA sense strand
gcagcugggcuuccugguu

SEQ ID NO: 487062 - RNA, 19 nt, Homo sapiens
  misc_RNA (1)...(19): siRNA sense strand
ggagagaugguggauuaca

SEQ ID NO: 487063 - RNA, 19 nt, Homo sapiens
  misc_RNA (1)...(19): siRNA sense strand
gaugcuggcaacuccauug

SEQ ID NO: 487064 - RNA, 19 nt, Homo sapiens
  misc_RNA (1)...(19): siRNA sense strand
gcguggagcagcuggagaa

SEQ ID NO: 487065 - RNA, 19 nt, Homo sapiens
  misc_RNA (1)...(19): siRNA sense strand
uggagcagcuggagaacag

SEQ ID NO: 487066 - RNA, 19 nt, Homo sapiens
  misc_RNA (1)...(19): siRNA sense strand
ggauuuccgggucccauug

SEQ ID NO: 487067 - RNA, 19 nt, Homo sapiens
  misc_RNA (1)...(19): siRNA sense strand
gagaugguggauuacaaug

SEQ ID NO: 487068 - RNA, 19 nt, Homo sapiens
  misc_RNA (1)...(19): siRNA sense strand
uagcggagcgcacccacaa

SEQ ID NO: 487069 - RNA, 19 nt, Homo sapiens
  misc_RNA (1)...(19): siRNA sense strand
gggagaaccagggaaagga

SEQ ID NO: 487070 - RNA, 19 nt, Homo sapiens
  misc_RNA (1)...(19): siRNA sense strand
gagccaggccagcauccaa

SEQ ID NO: 487071 - RNA, 19 nt, Homo sapiens
  misc_RNA (1)...(19): siRNA sense strand
gguacuccaggaccaauug

SEQ ID NO: 487072 - RNA, 19 nt, Homo sapiens
  misc_RNA (1)...(19): siRNA sense strand
aaaggagacccugggauga

SEQ ID NO: 487073 - RNA, 19 nt, Homo sapiens
  misc_RNA (1)...(19): siRNA sense strand
gagccagggaucccaggaa

SEQ ID NO: 487074 - RNA, 19 nt, Homo sapiens
  misc_RNA (1)...(19): siRNA sense strand
gaaccagggaaaggagaga

SEQ ID NO: 487075 - RNA, 19 nt, Homo sapiens
  misc_RNA (1)...(19): siRNA sense strand
gauuacaauggaaacauca

SEQ ID NO: 487076 - RNA, 19 nt, Homo sapiens
  misc_RNA (1)...(19): siRNA sense strand
ggucaaccaggaacuagag

SEQ ID NO: 487077 - RNA, 19 nt, Homo sapiens
  misc_RNA (1)...(19): siRNA sense strand
aaggagagaugguggauua

SEQ ID NO: 487078 - RNA, 19 nt, Homo sapiens
  misc_RNA (1)...(19): siRNA sense strand
cagcugggcuuccugguuu

SEQ ID NO: 487079 - RNA, 19 nt, Homo sapiens
  misc_RNA (1)...(19): siRNA sense strand
ccaaagacaucuccaggau

SEQ ID NO: 487080 - RNA, 19 nt, Homo sapiens
  misc_RNA (1)...(19): siRNA sense strand
gagagaugguggauuacaa

SEQ ID NO: 487081 - RNA, 19 nt, Homo sapiens
  misc_RNA (1)...(19): siRNA sense strand
aaagggaccucgcgguaaa

SEQ ID NO: 487082 - RNA, 19 nt, Homo sapiens
  misc_RNA (1)...(19): siRNA sense strand
gaugguggauuacaaugga

SEQ ID NO: 487083 - RNA, 19 nt, Homo sapiens
  misc_RNA (1)...(19): siRNA sense strand
ggauuacaauggaaacauc

SEQ ID NO: 487084 - RNA, 19 nt, Homo sapiens
  misc_RNA (1)...(19): siRNA sense strand
caagggagaaccagggaaa

SEQ ID NO: 487085 - RNA, 19 nt, Homo sapiens
  misc_RNA (1)...(19): siRNA sense strand
ggaagcaggacuagaugga

SEQ ID NO: 487086 - RNA, 19 nt, Homo sapiens
  misc_RNA (1)...(19): siRNA sense strand
caaggcugcuggaacaagu

SEQ ID NO: 487087 - RNA, 19 nt, Homo sapiens
  misc_RNA (1)...(19): siRNA sense strand
gggagaagcaggugucgau

SEQ ID NO: 487088 - RNA, 19 nt, Homo sapiens
  misc_RNA (1)...(19): siRNA sense strand
ggagaacagggaccagaug

SEQ ID NO: 487089 - RNA, 19 nt, Homo sapiens
  misc_RNA (1)...(19): siRNA sense strand
acaauggaaacaucaauga

SEQ ID NO: 487090 - RNA, 19 nt, Homo sapiens
  misc_RNA (1)...(19): siRNA sense strand
gaaaggagagaugguggau

SEQ ID NO: 487091 - RNA, 19 nt, Homo sapiens
  misc_RNA (1)...(19): siRNA sense strand
cuagagguuucccuggauu

SEQ ID NO: 487092 - RNA, 19 nt, Homo sapiens
  misc_RNA (1)...(19): siRNA sense strand
gcaaauggagacggcuauu

SEQ ID NO: 487093 - RNA, 19 nt, Homo sapiens
  misc_RNA (1)...(19): siRNA sense strand
gaaaggcuuccagggagaa

SEQ ID NO: 487094 - RNA, 19 nt, Homo sapiens
  misc_RNA (1)...(19): siRNA sense strand
gcagcugggcuuccugguu

SEQ ID NO: 487095 - RNA, 19 nt, Homo sapiens
  misc_RNA (1)...(19): siRNA sense strand
ggagagaugguggauuaca

SEQ ID NO: 487096 - RNA, 19 nt, Homo sapiens
  misc_RNA (1)...(19): siRNA sense strand
gaugcuggcaacuccauug

SEQ ID NO: 487097 - RNA, 19 nt, Homo sapiens
  misc_RNA (1)...(19): siRNA sense strand
gcguggagcagcuggagaa

SEQ ID NO: 487098 - RNA, 19 nt, Homo sapiens
  misc_RNA (1)...(19): siRNA sense strand
uggagcagcuggagaacag

SEQ ID NO: 487099 - RNA, 19 nt, Homo sapiens
  misc_RNA (1)...(19): siRNA sense strand
ggauuuccgggucccauug

SEQ ID NO: 487100 - RNA, 19 nt, Homo sapiens
  misc_RNA (1)...(19): siRNA sense strand
gagaugguggauuacaaug

SEQ ID NO: 487101 - RNA, 19 nt, Homo sapiens
  misc_RNA (1)...(19): siRNA sense strand
uagcggagcgcacccacaa

SEQ ID NO: 487102 - RNA, 19 nt, Homo sapiens
  misc_RNA (1)...(19): siRNA sense strand
gggagaaccagggaaagga

SEQ ID NO: 487103 - RNA, 19 nt, Homo sapiens
  misc_RNA (1)...(19): siRNA sense strand
gagccaggccagcauccaa

SEQ ID NO: 487104 - RNA, 19 nt, Homo sapiens
  misc_RNA (1)...(19): siRNA sense strand
gguacuccaggaccaauug

SEQ ID NO: 487105 - RNA, 19 nt, Homo sapiens
  misc_RNA (1)...(19): siRNA sense strand
aaaggagacccugggauga

SEQ ID NO: 487106 - RNA, 19 nt, Homo sapiens
  misc_RNA (1)...(19): siRNA sense strand
gagccagggaucccaggaa

SEQ ID NO: 487107 - RNA, 19 nt, Homo sapiens
  misc_RNA (1)...(19): siRNA sense strand
gaaccagggaaaggagaga

SEQ ID NO: 487108 - RNA, 19 nt, Homo sapiens
  misc_RNA (1)...(19): siRNA sense strand
gauuacaauggaaacauca

SEQ ID NO: 487109 - RNA, 19 nt, Homo sapiens
  misc_RNA (1)...(19): siRNA sense strand
ggucaaccaggaacuagag

SEQ ID NO: 487110 - RNA, 19 nt, Homo sapiens
  misc_RNA (1)...(19): siRNA sense strand
aaggagagaugguggauua

SEQ ID NO: 487111 - RNA, 19 nt, Homo sapiens
  misc_RNA (1)...(19): siRNA sense strand
cagcugggcuuccugguuu

SEQ ID NO: 487112 - RNA, 19 nt, Homo sapiens
  misc_RNA (1)...(19): siRNA sense strand
ccaaagacaucuccaggau

SEQ ID NO: 487113 - RNA, 19 nt, Homo sapiens
  misc_RNA (1)...(19): siRNA sense strand
gagagaugguggauuacaa

SEQ ID NO: 487114 - RNA, 19 nt, Homo sapiens
  misc_RNA (1)...(19): siRNA sense strand
aaagggaccucgcgguaaa

SEQ ID NO: 487115 - RNA, 19 nt, Homo sapiens
  misc_RNA (1)...(19): siRNA sense strand
gaugguggauuacaaugga

SEQ ID NO: 487116 - RNA, 19 nt, Homo sapiens
  misc_RNA (1)...(19): siRNA sense strand
ggauuacaauggaaacauc

SEQ ID NO: 487117 - RNA, 19 nt, Homo sapiens
  misc_RNA (1)...(19): siRNA sense strand
caagggagaaccagggaaa

SEQ ID NO: 487118 - RNA, 19 nt, Homo sapiens
  misc_RNA (1)...(19): siRNA sense strand
ggaagcaggacuagaugga

SEQ ID NO: 487119 - RNA, 19 nt, Homo sapiens
  misc_RNA (1)...(19): siRNA sense strand
caaggcugcuggaacaagu

SEQ ID NO: 487120 - RNA, 19 nt, Homo sapiens
  misc_RNA (1)...(19): siRNA sense strand
gggagaagcaggugucgau

SEQ ID NO: 487121 - RNA, 19 nt, Homo sapiens
  misc_RNA (1)...(19): siRNA sense strand
ggagaacagggaccagaug

SEQ ID NO: 487122 - RNA, 19 nt, Homo sapiens
  misc_RNA (1)...(19): siRNA sense strand
acaauggaaacaucaauga

SEQ ID NO: 487123 - RNA, 19 nt, Homo sapiens
  misc_RNA (1)...(19): siRNA sense strand
gaaaggagagaugguggau

SEQ ID NO: 487124 - RNA, 19 nt, Homo sapiens
  misc_RNA (1)...(19): siRNA sense strand
cuagagguuucccuggauu

SEQ ID NO: 487125 - RNA, 19 nt, Homo sapiens
  misc_RNA (1)...(19): siRNA sense strand
gcaaauggagacggcuauu

SEQ ID NO: 487126 - RNA, 19 nt, Homo sapiens
  misc_RNA (1)...(19): siRNA sense strand
gaaaggcuuccagggagaa

SEQ ID NO: 487127 - RNA, 19 nt, Homo sapiens
  misc_RNA (1)...(19): siRNA sense strand
gcagcugggcuuccugguu

SEQ ID NO: 487128 - RNA, 19 nt, Homo sapiens
  misc_RNA (1)...(19): siRNA sense strand
ggagagaugguggauuaca

SEQ ID NO: 487129 - RNA, 19 nt, Homo sapiens
  misc_RNA (1)...(19): siRNA sense strand
gaugcuggcaacuccauug

SEQ ID NO: 487130 - RNA, 19 nt, Homo sapiens
  misc_RNA (1)...(19): siRNA sense strand
gcguggagcagcuggagaa

SEQ ID NO: 487131 - RNA, 19 nt, Homo sapiens
  misc_RNA (1)...(19): siRNA sense strand
uggagcagcuggagaacag

SEQ ID NO: 487132 - RNA, 19 nt, Homo sapiens
  misc_RNA (1)...(19): siRNA sense strand
ggauuuccgggucccauug

SEQ ID NO: 487133 - RNA, 19 nt, Homo sapiens
  misc_RNA (1)...(19): siRNA sense strand
gagaugguggauuacaaug

SEQ ID NO: 487134 - RNA, 19 nt, Homo sapiens
  misc_RNA (1)...(19): siRNA sense strand
uagcggagcgcacccacaa

SEQ ID NO: 487135 - RNA, 19 nt, Homo sapiens
  misc_RNA (1)...(19): siRNA sense strand
gggagaaccagggaaagga

SEQ ID NO: 487136 - RNA, 19 nt, Homo sapiens
  misc_RNA (1)...(19): siRNA sense strand
gagccaggccagcauccaa

SEQ ID NO: 487137 - RNA, 19 nt, Homo sapiens
  misc_RNA (1)...(19): siRNA sense strand
gguacuccaggaccaauug

SEQ ID NO: 487138 - RNA, 19 nt, Homo sapiens
  misc_RNA (1)...(19): siRNA sense strand
aaaggagacccugggauga

SEQ ID NO: 487139 - RNA, 19 nt, Homo sapiens
  misc_RNA (1)...(19): siRNA sense strand
gagccagggaucccaggaa

SEQ ID NO: 487140 - RNA, 19 nt, Homo sapiens
  misc_RNA (1)...(19): siRNA sense strand
gaaccagggaaaggagaga

SEQ ID NO: 487141 - RNA, 19 nt, Homo sapiens
  misc_RNA (1)...(19): siRNA sense strand
gauuacaauggaaacauca

SEQ ID NO: 487142 - RNA, 19 nt, Homo sapiens
  misc_RNA (1)...(19): siRNA sense strand
ggucaaccaggaacuagag

SEQ ID NO: 487143 - RNA, 19 nt, Homo sapiens
  misc_RNA (1)...(19): siRNA sense strand
aaggagagaugguggauua

SEQ ID NO: 487144 - RNA, 19 nt, Homo sapiens
  misc_RNA (1)...(19): siRNA sense strand
cagcugggcuuccugguuu

SEQ ID NO: 487145 - RNA, 19 nt, Homo sapiens
  misc_RNA (1)...(19): siRNA sense strand
ccaaagacaucuccaggau

SEQ ID NO: 487146 - RNA, 19 nt, Homo sapiens
  misc_RNA (1)...(19): siRNA sense strand
gagagaugguggauuacaa

SEQ ID NO: 487147 - RNA, 19 nt, Homo sapiens
  misc_RNA (1)...(19): siRNA sense strand
aaagggaccucgcgguaaa

SEQ ID NO: 487148 - RNA, 19 nt, Homo sapiens
  misc_RNA (1)...(19): siRNA sense strand
gaugguggauuacaaugga

SEQ ID NO: 487149 - RNA, 19 nt, Homo sapiens
  misc_RNA (1)...(19): siRNA sense strand
ggauuacaauggaaacauc

SEQ ID NO: 487150 - RNA, 19 nt, Homo sapiens
  misc_RNA (1)...(19): siRNA sense strand
gggcgaagauggcuuacca

SEQ ID NO: 487151 - RNA, 19 nt, Homo sapiens
  misc_RNA (1)...(19): siRNA sense strand
caagggagaaccagggaaa

SEQ ID NO: 487152 - RNA, 19 nt, Homo sapiens
  misc_RNA (1)...(19): siRNA sense strand
ggaagcaggacuagaugga

SEQ ID NO: 487153 - RNA, 19 nt, Homo sapiens
  misc_RNA (1)...(19): siRNA sense strand
caaggcugcuggaacaagu

SEQ ID NO: 487154 - RNA, 19 nt, Homo sapiens
  misc_RNA (1)...(19): siRNA sense strand
gggagaagcaggugucgau

SEQ ID NO: 487155 - RNA, 19 nt, Homo sapiens
  misc_RNA (1)...(19): siRNA sense strand
ggagaacagggaccagaug

SEQ ID NO: 487156 - RNA, 19 nt, Homo sapiens
  misc_RNA (1)...(19): siRNA sense strand
acaauggaaacaucaauga

SEQ ID NO: 487157 - RNA, 19 nt, Homo sapiens
  misc_RNA (1)...(19): siRNA sense strand
gaaaggagagaugguggau

SEQ ID NO: 487158 - RNA, 19 nt, Homo sapiens
  misc_RNA (1)...(19): siRNA sense strand
cuagagguuucccuggauu

SEQ ID NO: 487159 - RNA, 19 nt, Homo sapiens
  misc_RNA (1)...(19): siRNA sense strand
gcaaauggagacggcuauu

SEQ ID NO: 487160 - RNA, 19 nt, Homo sapiens
  misc_RNA (1)...(19): siRNA sense strand
gaaaggcuuccagggagaa

SEQ ID NO: 487161 - RNA, 19 nt, Homo sapiens
  misc_RNA (1)...(19): siRNA sense strand
gcagcugggcuuccugguu

SEQ ID NO: 487162 - RNA, 19 nt, Homo sapiens
  misc_RNA (1)...(19): siRNA sense strand
ggagagaugguggauuaca

SEQ ID NO: 487163 - RNA, 19 nt, Homo sapiens
  misc_RNA (1)...(19): siRNA sense strand
gaugcuggcaacuccauug

SEQ ID NO: 487164 - RNA, 19 nt, Homo sapiens
  misc_RNA (1)...(19): siRNA sense strand
gcguggagcagcuggagaa

SEQ ID NO: 487165 - RNA, 19 nt, Homo sapiens
  misc_RNA (1)...(19): siRNA sense strand
uggagcagcuggagaacag

SEQ ID NO: 487166 - RNA, 19 nt, Homo sapiens
  misc_RNA (1)...(19): siRNA sense strand
ggauuuccgggucccauug

SEQ ID NO: 487167 - RNA, 19 nt, Homo sapiens
  misc_RNA (1)...(19): siRNA sense strand
gagaugguggauuacaaug

SEQ ID NO: 487168 - RNA, 19 nt, Homo sapiens
  misc_RNA (1)...(19): siRNA sense strand
uagcggagcgcacccacaa

SEQ ID NO: 487169 - RNA, 19 nt, Homo sapiens
  misc_RNA (1)...(19): siRNA sense strand
gggagaaccagggaaagga

SEQ ID NO: 487170 - RNA, 19 nt, Homo sapiens
  misc_RNA (1)...(19): siRNA sense strand
gagccaggccagcauccaa

SEQ ID NO: 487171 - RNA, 19 nt, Homo sapiens
  misc_RNA (1)...(19): siRNA sense strand
gguacuccaggaccaauug

SEQ ID NO: 487172 - RNA, 19 nt, Homo sapiens
  misc_RNA (1)...(19): siRNA sense strand
aaaggagacccugggauga

SEQ ID NO: 487173 - RNA, 19 nt, Homo sapiens
  misc_RNA (1)...(19): siRNA sense strand
gagccagggaucccaggaa

SEQ ID NO: 487174 - RNA, 19 nt, Homo sapiens
  misc_RNA (1)...(19): siRNA sense strand
gaaccagggaaaggagaga

SEQ ID NO: 487175 - RNA, 19 nt, Homo sapiens
  misc_RNA (1)...(19): siRNA sense strand
gauuacaauggaaacauca

SEQ ID NO: 487176 - RNA, 19 nt, Homo sapiens
  misc_RNA (1)...(19): siRNA sense strand
ggucaaccaggaacuagag

SEQ ID NO: 487177 - RNA, 19 nt, Homo sapiens
  misc_RNA (1)...(19): siRNA sense strand
gaaaggccauugggaaaua

SEQ ID NO: 487178 - RNA, 19 nt, Homo sapiens
  misc_RNA (1)...(19): siRNA sense strand
gcacgaggccgcauacuau

SEQ ID NO: 487179 - RNA, 19 nt, Homo sapiens
  misc_RNA (1)...(19): siRNA sense strand
gaacaucgacgccuauauc

SEQ ID NO: 487180 - RNA, 19 nt, Homo sapiens
  misc_RNA (1)...(19): siRNA sense strand
caacaaaucccgagagaca

SEQ ID NO: 487181 - RNA, 19 nt, Homo sapiens
  misc_RNA (1)...(19): siRNA sense strand
caggcaggcugauuagaua

SEQ ID NO: 487182 - RNA, 19 nt, Homo sapiens
  misc_RNA (1)...(19): siRNA sense strand
gcacaucgccuccaagaag

SEQ ID NO: 487183 - RNA, 19 nt, Homo sapiens
  misc_RNA (1)...(19): siRNA sense strand
uuagauaccugaaauacga

SEQ ID NO: 487184 - RNA, 19 nt, Homo sapiens
  misc_RNA (1)...(19): siRNA sense strand
gaacacaucgacagcuuug

SEQ ID NO: 487185 - RNA, 19 nt, Homo sapiens
  misc_RNA (1)...(19): siRNA sense strand
gcaguucugugaguucgua

SEQ ID NO: 487186 - RNA, 19 nt, Homo sapiens
  misc_RNA (1)...(19): siRNA sense strand
caaguacggugcugacauc

SEQ ID NO: 487187 - RNA, 19 nt, Homo sapiens
  misc_RNA (1)...(19): siRNA sense strand
gauaaaggccaucaaggau

SEQ ID NO: 487188 - RNA, 19 nt, Homo sapiens
  misc_RNA (1)...(19): siRNA sense strand
ggacugggccgucaucaag

SEQ ID NO: 487189 - RNA, 19 nt, Homo sapiens
  misc_RNA (1)...(19): siRNA sense strand
ugaagaccaugaucaagga

SEQ ID NO: 487190 - RNA, 19 nt, Homo sapiens
  misc_RNA (1)...(19): siRNA sense strand
gaaggcagaaccuccaaga

SEQ ID NO: 487191 - RNA, 19 nt, Homo sapiens
  misc_RNA (1)...(19): siRNA sense strand
guacggugcugacaucaac

SEQ ID NO: 487192 - RNA, 19 nt, Homo sapiens
  misc_RNA (1)...(19): siRNA sense strand
ccaacaagaccaacaagga

SEQ ID NO: 487193 - RNA, 19 nt, Homo sapiens
  misc_RNA (1)...(19): siRNA sense strand
caacgcgucugcccucuac

SEQ ID NO: 487194 - RNA, 19 nt, Homo sapiens
  misc_RNA (1)...(19): siRNA sense strand
gcucgcggcugaaggaaca

SEQ ID NO: 487195 - RNA, 19 nt, Homo sapiens
  misc_RNA (1)...(19): siRNA sense strand
ucgcagagcccaacaagga

SEQ ID NO: 487196 - RNA, 19 nt, Homo sapiens
  misc_RNA (1)...(19): siRNA sense strand
gccugucgcugcucaaguu

SEQ ID NO: 487197 - RNA, 19 nt, Homo sapiens
  misc_RNA (1)...(19): siRNA sense strand
ccggacaucuccaacaaau

SEQ ID NO: 487198 - RNA, 19 nt, Homo sapiens
  misc_RNA (1)...(19): siRNA sense strand
ggacaucuccaacaaaucc

SEQ ID NO: 487199 - RNA, 19 nt, Homo sapiens
  misc_RNA (1)...(19): siRNA sense strand
agacaccgcucuacaaagc

SEQ ID NO: 487200 - RNA, 19 nt, Homo sapiens
  misc_RNA (1)...(19): siRNA sense strand
cugauuagauaccugaaau

SEQ ID NO: 487201 - RNA, 19 nt, Homo sapiens
  misc_RNA (1)...(19): siRNA sense strand
ggaacacaucgacagcuuu

SEQ ID NO: 487202 - RNA, 19 nt, Homo sapiens
  misc_RNA (1)...(19): siRNA sense strand
cuacgaggccugcaagaau

SEQ ID NO: 487203 - RNA, 19 nt, Homo sapiens
  misc_RNA (1)...(19): siRNA sense strand
uacgaggccugcaagaaug

SEQ ID NO: 487204 - RNA, 19 nt, Homo sapiens
  misc_RNA (1)...(19): siRNA sense strand
gaugaagaggccuugaaga

SEQ ID NO: 487205 - RNA, 19 nt, Homo sapiens
  misc_RNA (1)...(19): siRNA sense strand
gaucaaggaagggaagaau

SEQ ID NO: 487206 - RNA, 19 nt, Homo sapiens
  misc_RNA (1)...(19): siRNA sense strand
ucaaggauggcgaugaaga

SEQ ID NO: 487207 - RNA, 19 nt, Homo sapiens
  misc_RNA (1)...(19): siRNA sense strand
gauuagauaccugaaauac

SEQ ID NO: 487208 - RNA, 19 nt, Homo sapiens
  misc_RNA (1)...(19): siRNA sense strand
gcgaugaagaggccuugaa

SEQ ID NO: 487209 - RNA, 19 nt, Homo sapiens
  misc_RNA (1)...(19): siRNA sense strand
ucgaaaggccauugggaaa

SEQ ID NO: 487210 - RNA, 19 nt, Homo sapiens
  misc_RNA (1)...(19): siRNA sense strand
ccaggcaggcugauuagau

SEQ ID NO: 487211 - RNA, 19 nt, Homo sapiens
  misc_RNA (1)...(19): siRNA sense strand
uccaacaaaucccgagaga

SEQ ID NO: 487212 - RNA, 19 nt, Homo sapiens
  misc_RNA (1)...(19): siRNA sense strand
augaggaggugguggaguu

SEQ ID NO: 487213 - RNA, 19 nt, Homo sapiens
  misc_RNA (1)...(19): siRNA sense strand
ugagguucuuagccaagua

SEQ ID NO: 487214 - RNA, 19 nt, Homo sapiens
  misc_RNA (1)...(19): siRNA sense strand
gagucugugucucgcaaug

SEQ ID NO: 487215 - RNA, 19 nt, Homo sapiens
  misc_RNA (1)...(19): siRNA sense strand
ucaaggaagggaagaaucu

SEQ ID NO: 487216 - RNA, 19 nt, Homo sapiens
  misc_RNA (1)...(19): siRNA sense strand
cgaaaggccauugggaaau

SEQ ID NO: 487217 - RNA, 19 nt, Homo sapiens
  misc_RNA (1)...(19): siRNA sense strand
gcggaggccgugaagauuc

SEQ ID NO: 487218 - RNA, 19 nt, Homo sapiens
  misc_RNA (1)...(19): siRNA sense strand
aauacgagaacacccagua

SEQ ID NO: 487219 - RNA, 19 nt, Homo sapiens
  misc_RNA (1)...(19): siRNA sense strand
gcgaacaucgacgccuaua

SEQ ID NO: 487220 - RNA, 19 nt, Homo sapiens
  misc_RNA (1)...(19): siRNA sense strand
ccaagaagggcaacuacag

SEQ ID NO: 487221 - RNA, 19 nt, Homo sapiens
  misc_RNA (1)...(19): siRNA sense strand
gaagaccaugaucaaggaa

SEQ ID NO: 487222 - RNA, 19 nt, Homo sapiens
  misc_RNA (1)...(19): siRNA sense strand
aaauacagcagcagcuugu

SEQ ID NO: 487223 - RNA, 19 nt, Homo sapiens
  misc_RNA (1)...(19): siRNA sense strand
gcugauuagauaccugaaa

SEQ ID NO: 487224 - RNA, 19 nt, Homo sapiens
  misc_RNA (1)...(19): siRNA sense strand
gggccgucaucaaggagaa

SEQ ID NO: 487225 - RNA, 19 nt, Homo sapiens
  misc_RNA (1)...(19): siRNA sense strand
aggaacacaucgacagcuu

SEQ ID NO: 487226 - RNA, 19 nt, Homo sapiens
  misc_RNA (1)...(19): siRNA sense strand
ucgcgguggucaacaacaa

SEQ ID NO: 487227 - RNA, 19 nt, Homo sapiens
  misc_RNA (1)...(19): siRNA sense strand
ccuggacugucuccuguca

SEQ ID NO: 487228 - RNA, 19 nt, Homo sapiens
  misc_RNA (1)...(19): siRNA sense strand
gagaaggcagaaccuccaa

SEQ ID NO: 487229 - RNA, 19 nt, Homo sapiens
  misc_RNA (1)...(19): siRNA sense strand
agccggacaucuccaacaa

SEQ ID NO: 487230 - RNA, 19 nt, Homo sapiens
  misc_RNA (1)...(19): siRNA sense strand
ggucaacaacaacguguac

SEQ ID NO: 487231 - RNA, 19 nt, Homo sapiens
  misc_RNA (1)...(19): siRNA sense strand
uggaguuucugcugucaca

SEQ ID NO: 487232 - RNA, 19 nt, Homo sapiens
  misc_RNA (1)...(19): siRNA sense strand
caaggauggcgaugaagag

SEQ ID NO: 487233 - RNA, 19 nt, Homo sapiens
  misc_RNA (1)...(19): siRNA sense strand
guggugcaguucugugagu

SEQ ID NO: 487234 - RNA, 19 nt, Homo sapiens
  misc_RNA (1)...(19): siRNA sense strand
ggcgagcccugcuucucau

SEQ ID NO: 487235 - RNA, 19 nt, Homo sapiens
  misc_RNA (1)...(19): siRNA sense strand
gagccggacaucuccaaca

SEQ ID NO: 487236 - RNA, 19 nt, Homo sapiens
  misc_RNA (1)...(19): siRNA sense strand
auacgagaacacccaguaa

SEQ ID NO: 487237 - RNA, 19 nt, Homo sapiens
  misc_RNA (1)...(19): siRNA sense strand
gaggagccaagguggaauc

SEQ ID NO: 487238 - RNA, 19 nt, Homo sapiens
  misc_RNA (1)...(19): siRNA sense strand
gaaagaugauggaaacaug

SEQ ID NO: 487239 - RNA, 19 nt, Homo sapiens
  misc_RNA (1)...(19): siRNA sense strand
ugugguagcuugugacuuu

SEQ ID NO: 487240 - RNA, 19 nt, Homo sapiens
  misc_RNA (1)...(19): siRNA sense strand
ggauaaauacaccaugaua

SEQ ID NO: 487241 - RNA, 19 nt, Homo sapiens
  misc_RNA (1)...(19): siRNA sense strand
gaguuucucucguaucgua

SEQ ID NO: 487242 - RNA, 19 nt, Homo sapiens
  misc_RNA (1)...(19): siRNA sense strand
gcuacugcaucuuaugaua

SEQ ID NO: 487243 - RNA, 19 nt, Homo sapiens
  misc_RNA (1)...(19): siRNA sense strand
ggucagagauuuaacuuuu

SEQ ID NO: 487244 - RNA, 19 nt, Homo sapiens
  misc_RNA (1)...(19): siRNA sense strand
uaugggaccugaaagauga

SEQ ID NO: 487245 - RNA, 19 nt, Homo sapiens
  misc_RNA (1)...(19): siRNA sense strand
gagaauugaugaggauuau

SEQ ID NO: 487246 - RNA, 19 nt, Homo sapiens
  misc_RNA (1)...(19): siRNA sense strand
ggaaacaugaugaaaguau

SEQ ID NO: 487247 - RNA, 19 nt, Homo sapiens
  misc_RNA (1)...(19): siRNA sense strand
ggagaauugaugaggauua

SEQ ID NO: 487248 - RNA, 19 nt, Homo sapiens
  misc_RNA (1)...(19): siRNA sense strand
gaaguggucagagauuuaa

SEQ ID NO: 487249 - RNA, 19 nt, Homo sapiens
  misc_RNA (1)...(19): siRNA sense strand
guacagcugugcauucucu

SEQ ID NO: 487250 - RNA, 19 nt, Homo sapiens
  misc_RNA (1)...(19): siRNA sense strand
ggaauuugggcaccuguuu

SEQ ID NO: 487251 - RNA, 19 nt, Homo sapiens
  misc_RNA (1)...(19): siRNA sense strand
gaaaacuccuccuuaacuu

SEQ ID NO: 487252 - RNA, 19 nt, Homo sapiens
  misc_RNA (1)...(19): siRNA sense strand
ugaaguggucagagauuua

SEQ ID NO: 487253 - RNA, 19 nt, Homo sapiens
  misc_RNA (1)...(19): siRNA sense strand
uaucugggauccacauaau

SEQ ID NO: 487254 - RNA, 19 nt, Homo sapiens
  misc_RNA (1)...(19): siRNA sense strand
gaugauggaaacaugauga

SEQ ID NO: 487255 - RNA, 19 nt, Homo sapiens
  misc_RNA (1)...(19): siRNA sense strand
gguacgaucuguaucuuuu

SEQ ID NO: 487256 - RNA, 19 nt, Homo sapiens
  misc_RNA (1)...(19): siRNA sense strand
ucccuagccugcaacauuu

SEQ ID NO: 487257 - RNA, 19 nt, Homo sapiens
  misc_RNA (1)...(19): siRNA sense strand
ccugaaagaugauggaaac

SEQ ID NO: 487258 - RNA, 19 nt, Homo sapiens
  misc_RNA (1)...(19): siRNA sense strand
aagccuugcugaugauaaa

SEQ ID NO: 487259 - RNA, 19 nt, Homo sapiens
  misc_RNA (1)...(19): siRNA sense strand
gauggaaacaugaugaaag

SEQ ID NO: 487260 - RNA, 19 nt, Homo sapiens
  misc_RNA (1)...(19): siRNA sense strand
uagaaggacaucaccauga

SEQ ID NO: 487261 - RNA, 19 nt, Homo sapiens
  misc_RNA (1)...(19): siRNA sense strand
gcugugccuucucuacuga

SEQ ID NO: 487262 - RNA, 19 nt, Homo sapiens
  misc_RNA (1)...(19): siRNA sense strand
gaguaugggaccugaaaga

SEQ ID NO: 487263 - RNA, 19 nt, Homo sapiens
  misc_RNA (1)...(19): siRNA sense strand
gauaaauacaccaugauac

SEQ ID NO: 487264 - RNA, 19 nt, Homo sapiens
  misc_RNA (1)...(19): siRNA sense strand
cuugguagaucauacugaa

SEQ ID NO: 487265 - RNA, 19 nt, Homo sapiens
  misc_RNA (1)...(19): siRNA sense strand
ccaccuacuccaauauuug

SEQ ID NO: 487266 - RNA, 19 nt, Homo sapiens
  misc_RNA (1)...(19): siRNA sense strand
cagaguaugggaccugaaa

SEQ ID NO: 487267 - RNA, 19 nt, Homo sapiens
  misc_RNA (1)...(19): siRNA sense strand
ccgauuccuuccaagcuuu

SEQ ID NO: 487268 - RNA, 19 nt, Homo sapiens
  misc_RNA (1)...(19): siRNA sense strand
gucccuagccugcaacauu

SEQ ID NO: 487269 - RNA, 19 nt, Homo sapiens
  misc_RNA (1)...(19): siRNA sense strand
guaugggaccugaaagaug

SEQ ID NO: 487270 - RNA, 19 nt, Homo sapiens
  misc_RNA (1)...(19): siRNA sense strand
gguagaucauacugaagug

SEQ ID NO: 487271 - RNA, 19 nt, Homo sapiens
  misc_RNA (1)...(19): siRNA sense strand
gauuauccagugcaaguug

SEQ ID NO: 487272 - RNA, 19 nt, Homo sapiens
  misc_RNA (1)...(19): siRNA sense strand
gaauuugggcaccuguuuc

SEQ ID NO: 487273 - RNA, 19 nt, Homo sapiens
  misc_RNA (1)...(19): siRNA sense strand
ugacggaaguguguauuuu

SEQ ID NO: 487274 - RNA, 19 nt, Homo sapiens
  misc_RNA (1)...(19): siRNA sense strand
aaagaugauggaaacauga

SEQ ID NO: 487275 - RNA, 19 nt, Homo sapiens
  misc_RNA (1)...(19): siRNA sense strand
gccgauuccuuccaagcuu

SEQ ID NO: 487276 - RNA, 19 nt, Homo sapiens
  misc_RNA (1)...(19): siRNA sense strand
gaaacuagaaggacaucac

SEQ ID NO: 487277 - RNA, 19 nt, Homo sapiens
  misc_RNA (1)...(19): siRNA sense strand
caugauacggaaacuagaa

SEQ ID NO: 487278 - RNA, 19 nt, Homo sapiens
  misc_RNA (1)...(19): siRNA sense strand
ggaaaacuccuccuuaacu

SEQ ID NO: 487279 - RNA, 19 nt, Homo sapiens
  misc_RNA (1)...(19): siRNA sense strand
auggaaacaugaugaaagu

SEQ ID NO: 487280 - RNA, 19 nt, Homo sapiens
  misc_RNA (1)...(19): siRNA sense strand
gcaugucaauccgaagagu

SEQ ID NO: 487281 - RNA, 19 nt, Homo sapiens
  misc_RNA (1)...(19): siRNA sense strand
cccaccuacuccaauauuu

SEQ ID NO: 487282 - RNA, 19 nt, Homo sapiens
  misc_RNA (1)...(19): siRNA sense strand
caucagaauuggguguaca

SEQ ID NO: 487283 - RNA, 19 nt, Homo sapiens
  misc_RNA (1)...(19): siRNA sense strand
acucuucuaugcuguguuc

SEQ ID NO: 487284 - RNA, 19 nt, Homo sapiens
  misc_RNA (1)...(19): siRNA sense strand
gaugcccacccaagaaguu

SEQ ID NO: 487285 - RNA, 19 nt, Homo sapiens
  misc_RNA (1)...(19): siRNA sense strand
ggaccugaaagaugaugga

SEQ ID NO: 487286 - RNA, 19 nt, Homo sapiens
  misc_RNA (1)...(19): siRNA sense strand
gagugaugcccacccaaga

SEQ ID NO: 487287 - RNA, 19 nt, Homo sapiens
  misc_RNA (1)...(19): siRNA sense strand
gauacggaaacuagaagga

SEQ ID NO: 487288 - RNA, 19 nt, Homo sapiens
  misc_RNA (1)...(19): siRNA sense strand
guguacagcugugcauucu

SEQ ID NO: 487289 - RNA, 19 nt, Homo sapiens
  misc_RNA (1)...(19): siRNA sense strand
guucaggagcugccgauuc

SEQ ID NO: 487290 - RNA, 19 nt, Homo sapiens
  misc_RNA (1)...(19): siRNA sense strand
ggucuuugcugugccuucu

SEQ ID NO: 487291 - RNA, 19 nt, Homo sapiens
  misc_RNA (1)...(19): siRNA sense strand
ggaauauggauaaauacac

SEQ ID NO: 487292 - RNA, 19 nt, Homo sapiens
  misc_RNA (1)...(19): siRNA sense strand
ugaaagaugauggaaacau

SEQ ID NO: 487293 - RNA, 19 nt, Homo sapiens
  misc_RNA (1)...(19): siRNA sense strand
ucucucguaucguauuuag

SEQ ID NO: 487294 - RNA, 19 nt, Homo sapiens
  misc_RNA (1)...(19): siRNA sense strand
gguguacagcugugcauuc

SEQ ID NO: 487295 - RNA, 19 nt, Homo sapiens
  misc_RNA (1)...(19): siRNA sense strand
ucuccugacucuucuaugc

SEQ ID NO: 487296 - RNA, 19 nt, Homo sapiens
  misc_RNA (1)...(19): siRNA sense strand
auggagacauucugaugga

SEQ ID NO: 487297 - RNA, 19 nt, Homo sapiens
  misc_RNA (1)...(19): siRNA sense strand
cuggagaauugaugaggau

SEQ ID NO: 487298 - RNA, 19 nt, Homo sapiens
  misc_RNA (1)...(19): siRNA sense strand
ggguacgaucuguaucuuu

SEQ ID NO: 487299 - RNA, 19 nt, Homo sapiens
  misc_RNA (1)...(19): siRNA sense strand
cuccuuaacuugguagauc

SEQ ID NO: 487300 - RNA, 19 nt, Homo sapiens
  misc_RNA (1)...(19): siRNA sense strand
ugcauucucuccugacucu

SEQ ID NO: 487301 - RNA, 19 nt, Homo sapiens
  misc_RNA (1)...(19): siRNA sense strand
gaaagaugauggaaacaug

SEQ ID NO: 487302 - RNA, 19 nt, Homo sapiens
  misc_RNA (1)...(19): siRNA sense strand
ggucagagauuuaacuuuu

SEQ ID NO: 487303 - RNA, 19 nt, Homo sapiens
  misc_RNA (1)...(19): siRNA sense strand
uaugggaccugaaagauga

SEQ ID NO: 487304 - RNA, 19 nt, Homo sapiens
  misc_RNA (1)...(19): siRNA sense strand
ggaaacaugaugaaaguau

SEQ ID NO: 487305 - RNA, 19 nt, Homo sapiens
  misc_RNA (1)...(19): siRNA sense strand
gaaguggucagagauuuaa

SEQ ID NO: 487306 - RNA, 19 nt, Homo sapiens
  misc_RNA (1)...(19): siRNA sense strand
guacagcugugcauucucu

SEQ ID NO: 487307 - RNA, 19 nt, Homo sapiens
  misc_RNA (1)...(19): siRNA sense strand
gaaaacuccuccuuaacuu

SEQ ID NO: 487308 - RNA, 19 nt, Homo sapiens
  misc_RNA (1)...(19): siRNA sense strand
ugaaguggucagagauuua

SEQ ID NO: 487309 - RNA, 19 nt, Homo sapiens
  misc_RNA (1)...(19): siRNA sense strand
gaugauggaaacaugauga

SEQ ID NO: 487310 - RNA, 19 nt, Homo sapiens
  misc_RNA (1)...(19): siRNA sense strand
ccugaaagaugauggaaac

SEQ ID NO: 487311 - RNA, 19 nt, Homo sapiens
  misc_RNA (1)...(19): siRNA sense strand
gauggaaacaugaugaaag

SEQ ID NO: 487312 - RNA, 19 nt, Homo sapiens
  misc_RNA (1)...(19): siRNA sense strand
gaguaugggaccugaaaga

SEQ ID NO: 487313 - RNA, 19 nt, Homo sapiens
  misc_RNA (1)...(19): siRNA sense strand
cuugguagaucauacugaa

SEQ ID NO: 487314 - RNA, 19 nt, Homo sapiens
  misc_RNA (1)...(19): siRNA sense strand
cagaguaugggaccugaaa

SEQ ID NO: 487315 - RNA, 19 nt, Homo sapiens
  misc_RNA (1)...(19): siRNA sense strand
gguagaucauacugaagug

SEQ ID NO: 487316 - RNA, 19 nt, Homo sapiens
  misc_RNA (1)...(19): siRNA sense strand
guaugggaccugaaagaug

SEQ ID NO: 487317 - RNA, 19 nt, Homo sapiens
  misc_RNA (1)...(19): siRNA sense strand
aaagaugauggaaacauga

SEQ ID NO: 487318 - RNA, 19 nt, Homo sapiens
  misc_RNA (1)...(19): siRNA sense strand
ggaaaacuccuccuuaacu

SEQ ID NO: 487319 - RNA, 19 nt, Homo sapiens
  misc_RNA (1)...(19): siRNA sense strand
auggaaacaugaugaaagu

SEQ ID NO: 487320 - RNA, 19 nt, Homo sapiens
  misc_RNA (1)...(19): siRNA sense strand
caucagaauuggguguaca

SEQ ID NO: 487321 - RNA, 19 nt, Homo sapiens
  misc_RNA (1)...(19): siRNA sense strand
acucuucuaugcuguguuc

SEQ ID NO: 487322 - RNA, 19 nt, Homo sapiens
  misc_RNA (1)...(19): siRNA sense strand
ggaccugaaagaugaugga

SEQ ID NO: 487323 - RNA, 19 nt, Homo sapiens
  misc_RNA (1)...(19): siRNA sense strand
guguacagcugugcauucu

SEQ ID NO: 487324 - RNA, 19 nt, Homo sapiens
  misc_RNA (1)...(19): siRNA sense strand
ugaaagaugauggaaacau

SEQ ID NO: 487325 - RNA, 19 nt, Homo sapiens
  misc_RNA (1)...(19): siRNA sense strand
gguguacagcugugcauuc

SEQ ID NO: 487326 - RNA, 19 nt, Homo sapiens
  misc_RNA (1)...(19): siRNA sense strand
ucuccugacucuucuaugc

SEQ ID NO: 487327 - RNA, 19 nt, Homo sapiens
  misc_RNA (1)...(19): siRNA sense strand
cuccuuaacuugguagauc

SEQ ID NO: 487328 - RNA, 19 nt, Homo sapiens
  misc_RNA (1)...(19): siRNA sense strand
ugcauucucuccugacucu

SEQ ID NO: 487329 - RNA, 19 nt, Homo sapiens
  misc_RNA (1)...(19): siRNA sense strand
gaaagaugauggaaacaug

SEQ ID NO: 487330 - RNA, 19 nt, Homo sapiens
  misc_RNA (1)...(19): siRNA sense strand
ugugguagcuugugacuuu

SEQ ID NO: 487331 - RNA, 19 nt, Homo sapiens
  misc_RNA (1)...(19): siRNA sense strand
ggauaaauacaccaugaua

SEQ ID NO: 487332 - RNA, 19 nt, Homo sapiens
  misc_RNA (1)...(19): siRNA sense strand
gaguuucucucguaucgua

SEQ ID NO: 487333 - RNA, 19 nt, Homo sapiens
  misc_RNA (1)...(19): siRNA sense strand
gcuacugcaucuuaugaua

SEQ ID NO: 487334 - RNA, 19 nt, Homo sapiens
  misc_RNA (1)...(19): siRNA sense strand
ggucagagauuuaacuuuu

SEQ ID NO: 487335 - RNA, 19 nt, Homo sapiens
  misc_RNA (1)...(19): siRNA sense strand
uaugggaccugaaagauga

SEQ ID NO: 487336 - RNA, 19 nt, Homo sapiens
  misc_RNA (1)...(19): siRNA sense strand
gagaauugaugaggauuau

SEQ ID NO: 487337 - RNA, 19 nt, Homo sapiens
  misc_RNA (1)...(19): siRNA sense strand
ggaaacaugaugaaaguau

SEQ ID NO: 487338 - RNA, 19 nt, Homo sapiens
  misc_RNA (1)...(19): siRNA sense strand
ggagaauugaugaggauua

SEQ ID NO: 487339 - RNA, 19 nt, Homo sapiens
  misc_RNA (1)...(19): siRNA sense strand
gaaguggucagagauuuaa

SEQ ID NO: 487340 - RNA, 19 nt, Homo sapiens
  misc_RNA (1)...(19): siRNA sense strand
guacagcugugcauucucu

SEQ ID NO: 487341 - RNA, 19 nt, Homo sapiens
  misc_RNA (1)...(19): siRNA sense strand
ggaauuugggcaccuguuu

SEQ ID NO: 487342 - RNA, 19 nt, Homo sapiens
  misc_RNA (1)...(19): siRNA sense strand
gaaaacuccuccuuaacuu

SEQ ID NO: 487343 - RNA, 19 nt, Homo sapiens
  misc_RNA (1)...(19): siRNA sense strand
ugaaguggucagagauuua

SEQ ID NO: 487344 - RNA, 19 nt, Homo sapiens
  misc_RNA (1)...(19): siRNA sense strand
uaucugggauccacauaau

SEQ ID NO: 487345 - RNA, 19 nt, Homo sapiens
  misc_RNA (1)...(19): siRNA sense strand
gaugauggaaacaugauga

SEQ ID NO: 487346 - RNA, 19 nt, Homo sapiens
  misc_RNA (1)...(19): siRNA sense strand
gguacgaucuguaucuuuu

SEQ ID NO: 487347 - RNA, 19 nt, Homo sapiens
  misc_RNA (1)...(19): siRNA sense strand
ucccuagccugcaacauuu

SEQ ID NO: 487348 - RNA, 19 nt, Homo sapiens
  misc_RNA (1)...(19): siRNA sense strand
ccugaaagaugauggaaac

SEQ ID NO: 487349 - RNA, 19 nt, Homo sapiens
  misc_RNA (1)...(19): siRNA sense strand
aagccuugcugaugauaaa

SEQ ID NO: 487350 - RNA, 19 nt, Homo sapiens
  misc_RNA (1)...(19): siRNA sense strand
gauggaaacaugaugaaag

SEQ ID NO: 487351 - RNA, 19 nt, Homo sapiens
  misc_RNA (1)...(19): siRNA sense strand
uagaaggacaucaccauga

SEQ ID NO: 487352 - RNA, 19 nt, Homo sapiens
  misc_RNA (1)...(19): siRNA sense strand
gcugugccuucucuacuga

SEQ ID NO: 487353 - RNA, 19 nt, Homo sapiens
  misc_RNA (1)...(19): siRNA sense strand
gaguaugggaccugaaaga

SEQ ID NO: 487354 - RNA, 19 nt, Homo sapiens
  misc_RNA (1)...(19): siRNA sense strand
gauaaauacaccaugauac

SEQ ID NO: 487355 - RNA, 19 nt, Homo sapiens
  misc_RNA (1)...(19): siRNA sense strand
cuugguagaucauacugaa

SEQ ID NO: 487356 - RNA, 19 nt, Homo sapiens
  misc_RNA (1)...(19): siRNA sense strand
ccaccuacuccaauauuug

SEQ ID NO: 487357 - RNA, 19 nt, Homo sapiens
  misc_RNA (1)...(19): siRNA sense strand
cagaguaugggaccugaaa

SEQ ID NO: 487358 - RNA, 19 nt, Homo sapiens
  misc_RNA (1)...(19): siRNA sense strand
ccgauuccuuccaagcuuu

SEQ ID NO: 487359 - RNA, 19 nt, Homo sapiens
  misc_RNA (1)...(19): siRNA sense strand
gucccuagccugcaacauu

SEQ ID NO: 487360 - RNA, 19 nt, Homo sapiens
  misc_RNA (1)...(19): siRNA sense strand
guaugggaccugaaagaug

SEQ ID NO: 487361 - RNA, 19 nt, Homo sapiens
  misc_RNA (1)...(19): siRNA sense strand
gauuauccagugcaaguug

SEQ ID NO: 487362 - RNA, 19 nt, Homo sapiens
  misc_RNA (1)...(19): siRNA sense strand
gaauuugggcaccuguuuc

SEQ ID NO: 487363 - RNA, 19 nt, Homo sapiens
  misc_RNA (1)...(19): siRNA sense strand
gguagaucauacugaagug

SEQ ID NO: 487364 - RNA, 19 nt, Homo sapiens
  misc_RNA (1)...(19): siRNA sense strand
ugacggaaguguguauuuu

SEQ ID NO: 487365 - RNA, 19 nt, Homo sapiens
  misc_RNA (1)...(19): siRNA sense strand
aaagaugauggaaacauga

SEQ ID NO: 487366 - RNA, 19 nt, Homo sapiens
  misc_RNA (1)...(19): siRNA sense strand
gccgauuccuuccaagcuu

SEQ ID NO: 487367 - RNA, 19 nt, Homo sapiens
  misc_RNA (1)...(19): siRNA sense strand
gaaacuagaaggacaucac

SEQ ID NO: 487368 - RNA, 19 nt, Homo sapiens
  misc_RNA (1)...(19): siRNA sense strand
caugauacggaaacuagaa

SEQ ID NO: 487369 - RNA, 19 nt, Homo sapiens
  misc_RNA (1)...(19): siRNA sense strand
ggaaaacuccuccuuaacu

SEQ ID NO: 487370 - RNA, 19 nt, Homo sapiens
  misc_RNA (1)...(19): siRNA sense strand
auggaaacaugaugaaagu

SEQ ID NO: 487371 - RNA, 19 nt, Homo sapiens
  misc_RNA (1)...(19): siRNA sense strand
gcaugucaauccgaagagu

SEQ ID NO: 487372 - RNA, 19 nt, Homo sapiens
  misc_RNA (1)...(19): siRNA sense strand
cccaccuacuccaauauuu

SEQ ID NO: 487373 - RNA, 19 nt, Homo sapiens
  misc_RNA (1)...(19): siRNA sense strand
caucagaauuggguguaca

SEQ ID NO: 487374 - RNA, 19 nt, Homo sapiens
  misc_RNA (1)...(19): siRNA sense strand
acucuucuaugcuguguuc

SEQ ID NO: 487375 - RNA, 19 nt, Homo sapiens
  misc_RNA (1)...(19): siRNA sense strand
gaugcccacccaagaaguu

SEQ ID NO: 487376 - RNA, 19 nt, Homo sapiens
  misc_RNA (1)...(19): siRNA sense strand
ggaccugaaagaugaugga

SEQ ID NO: 487377 - RNA, 19 nt, Homo sapiens
  misc_RNA (1)...(19): siRNA sense strand
gagugaugcccacccaaga

SEQ ID NO: 487378 - RNA, 19 nt, Homo sapiens
  misc_RNA (1)...(19): siRNA sense strand
gauacggaaacuagaagga

SEQ ID NO: 487379 - RNA, 19 nt, Homo sapiens
  misc_RNA (1)...(19): siRNA sense strand
ggucaacgagaaagagauc

SEQ ID NO: 487380 - RNA, 19 nt, Homo sapiens
  misc_RNA (1)...(19): siRNA sense strand
guguacagcugugcauucu

SEQ ID NO: 487381 - RNA, 19 nt, Homo sapiens
  misc_RNA (1)...(19): siRNA sense strand
guucaggagcugccgauuc

SEQ ID NO: 487382 - RNA, 19 nt, Homo sapiens
  misc_RNA (1)...(19): siRNA sense strand
ggucuuugcugugccuucu

SEQ ID NO: 487383 - RNA, 19 nt, Homo sapiens
  misc_RNA (1)...(19): siRNA sense strand
ggaauauggauaaauacac

SEQ ID NO: 487384 - RNA, 19 nt, Homo sapiens
  misc_RNA (1)...(19): siRNA sense strand
ugaaagaugauggaaacau

SEQ ID NO: 487385 - RNA, 19 nt, Homo sapiens
  misc_RNA (1)...(19): siRNA sense strand
ucucucguaucguauuuag

SEQ ID NO: 487386 - RNA, 19 nt, Homo sapiens
  misc_RNA (1)...(19): siRNA sense strand
gguguacagcugugcauuc

SEQ ID NO: 487387 - RNA, 19 nt, Homo sapiens
  misc_RNA (1)...(19): siRNA sense strand
ucuccugacucuucuaugc

SEQ ID NO: 487388 - RNA, 19 nt, Homo sapiens
  misc_RNA (1)...(19): siRNA sense strand
auggagacauucugaugga

SEQ ID NO: 487389 - RNA, 19 nt, Homo sapiens
  misc_RNA (1)...(19): siRNA sense strand
cuggagaauugaugaggau

SEQ ID NO: 487390 - RNA, 19 nt, Homo sapiens
  misc_RNA (1)...(19): siRNA sense strand
ggguacgaucuguaucuuu

SEQ ID NO: 487391 - RNA, 19 nt, Homo sapiens
  misc_RNA (1)...(19): siRNA sense strand
ugcauucucuccugacucu

SEQ ID NO: 487392 - RNA, 19 nt, Homo sapiens
  misc_RNA (1)...(19): siRNA sense strand
cuccuuaacuugguagauc

SEQ ID NO: 487393 - RNA, 19 nt, Homo sapiens
  misc_RNA (1)...(19): siRNA sense strand
ggcaggaccuuuacuguua

SEQ ID NO: 487394 - RNA, 19 nt, Homo sapiens
  misc_RNA (1)...(19): siRNA sense strand
ggaaaucuuugccauugau

SEQ ID NO: 487395 - RNA, 19 nt, Homo sapiens
  misc_RNA (1)...(19): siRNA sense strand
agacauggcuggaaagauc

SEQ ID NO: 487396 - RNA, 19 nt, Homo sapiens
  misc_RNA (1)...(19): siRNA sense strand
ggaagaagacagacggaaa

SEQ ID NO: 487397 - RNA, 19 nt, Homo sapiens
  misc_RNA (1)...(19): siRNA sense strand
gaacgauguuaaaguugga

SEQ ID NO: 487398 - RNA, 19 nt, Homo sapiens
  misc_RNA (1)...(19): siRNA sense strand
agaaggagauggagagcaa

SEQ ID NO: 487399 - RNA, 19 nt, Homo sapiens
  misc_RNA (1)...(19): siRNA sense strand
gcacagcccgcucacgauu

SEQ ID NO: 487400 - RNA, 19 nt, Homo sapiens
  misc_RNA (1)...(19): siRNA sense strand
guacgaaggccacgugaau

SEQ ID NO: 487401 - RNA, 19 nt, Homo sapiens
  misc_RNA (1)...(19): siRNA sense strand
gggaaaucuuugccauuga

SEQ ID NO: 487402 - RNA, 19 nt, Homo sapiens
  misc_RNA (1)...(19): siRNA sense strand
agugaacgauguuaaaguu

SEQ ID NO: 487403 - RNA, 19 nt, Homo sapiens
  misc_RNA (1)...(19): siRNA sense strand
ccacccgccuguuucauga

SEQ ID NO: 487404 - RNA, 19 nt, Homo sapiens
  misc_RNA (1)...(19): siRNA sense strand
gaucugcguuguggaaauc

SEQ ID NO: 487405 - RNA, 19 nt, Homo sapiens
  misc_RNA (1)...(19): siRNA sense strand
cuucagacauggcuggaaa

SEQ ID NO: 487406 - RNA, 19 nt, Homo sapiens
  misc_RNA (1)...(19): siRNA sense strand
gggcaggaccuuuacuguu

SEQ ID NO: 487407 - RNA, 19 nt, Homo sapiens
  misc_RNA (1)...(19): siRNA sense strand
gaagaagacagacggaaaa

SEQ ID NO: 487408 - RNA, 19 nt, Homo sapiens
  misc_RNA (1)...(19): siRNA sense strand
gcacgaggaagaaggaauc

SEQ ID NO: 487409 - RNA, 19 nt, Homo sapiens
  misc_RNA (1)...(19): siRNA sense strand
ggagauggagagcaagaga

SEQ ID NO: 487410 - RNA, 19 nt, Homo sapiens
  misc_RNA (1)...(19): siRNA sense strand
cgaagugcguaaggcagua

SEQ ID NO: 487411 - RNA, 19 nt, Homo sapiens
  misc_RNA (1)...(19): siRNA sense strand
ccaaguaugguaucaucaa

SEQ ID NO: 487412 - RNA, 19 nt, Homo sapiens
  misc_RNA (1)...(19): siRNA sense strand
gugcggauccuccaagaug

SEQ ID NO: 487413 - RNA, 19 nt, Homo sapiens
  misc_RNA (1)...(19): siRNA sense strand
ggggaaaucuuugccauug

SEQ ID NO: 487414 - RNA, 19 nt, Homo sapiens
  misc_RNA (1)...(19): siRNA sense strand
gcaggaccuuuacuguuac

SEQ ID NO: 487415 - RNA, 19 nt, Homo sapiens
  misc_RNA (1)...(19): siRNA sense strand
ccacggugaugacgagucu

SEQ ID NO: 487416 - RNA, 19 nt, Homo sapiens
  misc_RNA (1)...(19): siRNA sense strand
ucaucaaccugcaaagucu

SEQ ID NO: 487417 - RNA, 19 nt, Homo sapiens
  misc_RNA (1)...(19): siRNA sense strand
caaguaugguaucaucaac

SEQ ID NO: 487418 - RNA, 19 nt, Homo sapiens
  misc_RNA (1)...(19): siRNA sense strand
caggacugcuacacgagaa

SEQ ID NO: 487419 - RNA, 19 nt, Homo sapiens
  misc_RNA (1)...(19): siRNA sense strand
gaaggccacgugaaugagu

SEQ ID NO: 487420 - RNA, 19 nt, Homo sapiens
  misc_RNA (1)...(19): siRNA sense strand
gcacgaaaaccucuacuuc

SEQ ID NO: 487421 - RNA, 19 nt, Homo sapiens
  misc_RNA (1)...(19): siRNA sense strand
caacagugaccggcucuuc

SEQ ID NO: 487422 - RNA, 19 nt, Homo sapiens
  misc_RNA (1)...(19): siRNA sense strand
gcuccucugcuguuuaaug

SEQ ID NO: 487423 - RNA, 19 nt, Homo sapiens
  misc_RNA (1)...(19): siRNA sense strand
gguaucaucaaccugcaaa

SEQ ID NO: 487424 - RNA, 19 nt, Homo sapiens
  misc_RNA (1)...(19): siRNA sense strand
cacagugaacgauguuaaa

SEQ ID NO: 487425 - RNA, 19 nt, Homo sapiens
  misc_RNA (1)...(19): siRNA sense strand
ccuccaagaugagcaauac

SEQ ID NO: 487426 - RNA, 19 nt, Homo sapiens
  misc_RNA (1)...(19): siRNA sense strand
acgaaggccacgugaauga

SEQ ID NO: 487427 - RNA, 19 nt, Homo sapiens
  misc_RNA (1)...(19): siRNA sense strand
gaccugaggaccacgaagu

SEQ ID NO: 487428 - RNA, 19 nt, Homo sapiens
  misc_RNA (1)...(19): siRNA sense strand
aaggccacgugaaugagua

SEQ ID NO: 487429 - RNA, 19 nt, Homo sapiens
  misc_RNA (1)...(19): siRNA sense strand
cagcugggaccuccucugu

SEQ ID NO: 487430 - RNA, 19 nt, Homo sapiens
  misc_RNA (1)...(19): siRNA sense strand
gcaugugcacgaggaagaa

SEQ ID NO: 487431 - RNA, 19 nt, Homo sapiens
  misc_RNA (1)...(19): siRNA sense strand
gcuccaggaagaagacaga

SEQ ID NO: 487432 - RNA, 19 nt, Homo sapiens
  misc_RNA (1)...(19): siRNA sense strand
cuccaaguaugguaucauc

SEQ ID NO: 487433 - RNA, 19 nt, Homo sapiens
  misc_RNA (1)...(19): siRNA sense strand
gaaaucuuugccauugauc

SEQ ID NO: 487434 - RNA, 19 nt, Homo sapiens
  misc_RNA (1)...(19): siRNA sense strand
ugaucugcguuguggaaau

SEQ ID NO: 487435 - RNA, 19 nt, Homo sapiens
  misc_RNA (1)...(19): siRNA sense strand
ggcaggaccuuuacuguua

SEQ ID NO: 487436 - RNA, 19 nt, Homo sapiens
  misc_RNA (1)...(19): siRNA sense strand
ggaaaucuuugccauugau

SEQ ID NO: 487437 - RNA, 19 nt, Homo sapiens
  misc_RNA (1)...(19): siRNA sense strand
agacauggcuggaaagauc

SEQ ID NO: 487438 - RNA, 19 nt, Homo sapiens
  misc_RNA (1)...(19): siRNA sense strand
ggaagaagacagacggaaa

SEQ ID NO: 487439 - RNA, 19 nt, Homo sapiens
  misc_RNA (1)...(19): siRNA sense strand
gaacgauguuaaaguugga

SEQ ID NO: 487440 - RNA, 19 nt, Homo sapiens
  misc_RNA (1)...(19): siRNA sense strand
guacgaaggccacgugaau

SEQ ID NO: 487441 - RNA, 19 nt, Homo sapiens
  misc_RNA (1)...(19): siRNA sense strand
gggaaaucuuugccauuga

SEQ ID NO: 487442 - RNA, 19 nt, Homo sapiens
  misc_RNA (1)...(19): siRNA sense strand
agugaacgauguuaaaguu

SEQ ID NO: 487443 - RNA, 19 nt, Homo sapiens
  misc_RNA (1)...(19): siRNA sense strand
ccacccgccuguuucauga

SEQ ID NO: 487444 - RNA, 19 nt, Homo sapiens
  misc_RNA (1)...(19): siRNA sense strand
gaucugcguuguggaaauc

SEQ ID NO: 487445 - RNA, 19 nt, Homo sapiens
  misc_RNA (1)...(19): siRNA sense strand
cuucagacauggcuggaaa

SEQ ID NO: 487446 - RNA, 19 nt, Homo sapiens
  misc_RNA (1)...(19): siRNA sense strand
gggcaggaccuuuacuguu

SEQ ID NO: 487447 - RNA, 19 nt, Homo sapiens
  misc_RNA (1)...(19): siRNA sense strand
gaagaagacagacggaaaa

SEQ ID NO: 487448 - RNA, 19 nt, Homo sapiens
  misc_RNA (1)...(19): siRNA sense strand
gcacgaggaagaaggaauc

SEQ ID NO: 487449 - RNA, 19 nt, Homo sapiens
  misc_RNA (1)...(19): siRNA sense strand
cgaagugcguaaggcagua

SEQ ID NO: 487450 - RNA, 19 nt, Homo sapiens
  misc_RNA (1)...(19): siRNA sense strand
ccaaguaugguaucaucaa

SEQ ID NO: 487451 - RNA, 19 nt, Homo sapiens
  misc_RNA (1)...(19): siRNA sense strand
gugcggauccuccaagaug

SEQ ID NO: 487452 - RNA, 19 nt, Homo sapiens
  misc_RNA (1)...(19): siRNA sense strand
ggggaaaucuuugccauug

SEQ ID NO: 487453 - RNA, 19 nt, Homo sapiens
  misc_RNA (1)...(19): siRNA sense strand
gcaggaccuuuacuguuac

SEQ ID NO: 487454 - RNA, 19 nt, Homo sapiens
  misc_RNA (1)...(19): siRNA sense strand
ucaucaaccugcaaagucu

SEQ ID NO: 487455 - RNA, 19 nt, Homo sapiens
  misc_RNA (1)...(19): siRNA sense strand
caaguaugguaucaucaac

SEQ ID NO: 487456 - RNA, 19 nt, Homo sapiens
  misc_RNA (1)...(19): siRNA sense strand
caggacugcuacacgagaa

SEQ ID NO: 487457 - RNA, 19 nt, Homo sapiens
  misc_RNA (1)...(19): siRNA sense strand
gaaggccacgugaaugagu

SEQ ID NO: 487458 - RNA, 19 nt, Homo sapiens
  misc_RNA (1)...(19): siRNA sense strand
gcacgaaaaccucuacuuc

SEQ ID NO: 487459 - RNA, 19 nt, Homo sapiens
  misc_RNA (1)...(19): siRNA sense strand
gguaucaucaaccugcaaa

SEQ ID NO: 487460 - RNA, 19 nt, Homo sapiens
  misc_RNA (1)...(19): siRNA sense strand
caacagugaccggcucuuc

SEQ ID NO: 487461 - RNA, 19 nt, Homo sapiens
  misc_RNA (1)...(19): siRNA sense strand
gcuccucugcuguuuaaug

SEQ ID NO: 487462 - RNA, 19 nt, Homo sapiens
  misc_RNA (1)...(19): siRNA sense strand
ccuccaagaugagcaauac

SEQ ID NO: 487463 - RNA, 19 nt, Homo sapiens
  misc_RNA (1)...(19): siRNA sense strand
cacagugaacgauguuaaa

SEQ ID NO: 487464 - RNA, 19 nt, Homo sapiens
  misc_RNA (1)...(19): siRNA sense strand
acgaaggccacgugaauga

SEQ ID NO: 487465 - RNA, 19 nt, Homo sapiens
  misc_RNA (1)...(19): siRNA sense strand
gaccugaggaccacgaagu

SEQ ID NO: 487466 - RNA, 19 nt, Homo sapiens
  misc_RNA (1)...(19): siRNA sense strand
aaggccacgugaaugagua

SEQ ID NO: 487467 - RNA, 19 nt, Homo sapiens
  misc_RNA (1)...(19): siRNA sense strand
gcaugugcacgaggaagaa

SEQ ID NO: 487468 - RNA, 19 nt, Homo sapiens
  misc_RNA (1)...(19): siRNA sense strand
gcuccaggaagaagacaga

SEQ ID NO: 487469 - RNA, 19 nt, Homo sapiens
  misc_RNA (1)...(19): siRNA sense strand
cuccaaguaugguaucauc

SEQ ID NO: 487470 - RNA, 19 nt, Homo sapiens
  misc_RNA (1)...(19): siRNA sense strand
gaaaucuuugccauugauc

SEQ ID NO: 487471 - RNA, 19 nt, Homo sapiens
  misc_RNA (1)...(19): siRNA sense strand
ugaucugcguuguggaaau

SEQ ID NO: 487472 - RNA, 19 nt, Homo sapiens
  misc_RNA (1)...(19): siRNA sense strand
ggcaggaccuuuacuguua

SEQ ID NO: 487473 - RNA, 19 nt, Homo sapiens
  misc_RNA (1)...(19): siRNA sense strand
ggaaaucuuugccauugau

SEQ ID NO: 487474 - RNA, 19 nt, Homo sapiens
  misc_RNA (1)...(19): siRNA sense strand
agacauggcuggaaagauc

SEQ ID NO: 487475 - RNA, 19 nt, Homo sapiens
  misc_RNA (1)...(19): siRNA sense strand
ggaagaagacagacggaaa

SEQ ID NO: 487476 - RNA, 19 nt, Homo sapiens
  misc_RNA (1)...(19): siRNA sense strand
gaacgauguuaaaguugga

SEQ ID NO: 487477 - RNA, 19 nt, Homo sapiens
  misc_RNA (1)...(19): siRNA sense strand
agaaggagauggagagcaa

SEQ ID NO: 487478 - RNA, 19 nt, Homo sapiens
  misc_RNA (1)...(19): siRNA sense strand
gcacagcccgcucacgauu

SEQ ID NO: 487479 - RNA, 19 nt, Homo sapiens
  misc_RNA (1)...(19): siRNA sense strand
guacgaaggccacgugaau

SEQ ID NO: 487480 - RNA, 19 nt, Homo sapiens
  misc_RNA (1)...(19): siRNA sense strand
gggaaaucuuugccauuga

SEQ ID NO: 487481 - RNA, 19 nt, Homo sapiens
  misc_RNA (1)...(19): siRNA sense strand
agugaacgauguuaaaguu

SEQ ID NO: 487482 - RNA, 19 nt, Homo sapiens
  misc_RNA (1)...(19): siRNA sense strand
ccacccgccuguuucauga

SEQ ID NO: 487483 - RNA, 19 nt, Homo sapiens
  misc_RNA (1)...(19): siRNA sense strand
gaucugcguuguggaaauc

SEQ ID NO: 487484 - RNA, 19 nt, Homo sapiens
  misc_RNA (1)...(19): siRNA sense strand
cuucagacauggcuggaaa

SEQ ID NO: 487485 - RNA, 19 nt, Homo sapiens
  misc_RNA (1)...(19): siRNA sense strand
gggcaggaccuuuacuguu

SEQ ID NO: 487486 - RNA, 19 nt, Homo sapiens
  misc_RNA (1)...(19): siRNA sense strand
gaagaagacagacggaaaa

SEQ ID NO: 487487 - RNA, 19 nt, Homo sapiens
  misc_RNA (1)...(19): siRNA sense strand
gcacgaggaagaaggaauc

SEQ ID NO: 487488 - RNA, 19 nt, Homo sapiens
  misc_RNA (1)...(19): siRNA sense strand
ggagauggagagcaagaga

SEQ ID NO: 487489 - RNA, 19 nt, Homo sapiens
  misc_RNA (1)...(19): siRNA sense strand
cgaagugcguaaggcagua

SEQ ID NO: 487490 - RNA, 19 nt, Homo sapiens
  misc_RNA (1)...(19): siRNA sense strand
ccaaguaugguaucaucaa

SEQ ID NO: 487491 - RNA, 19 nt, Homo sapiens
  misc_RNA (1)...(19): siRNA sense strand
gugcggauccuccaagaug

SEQ ID NO: 487492 - RNA, 19 nt, Homo sapiens
  misc_RNA (1)...(19): siRNA sense strand
ggggaaaucuuugccauug

SEQ ID NO: 487493 - RNA, 19 nt, Homo sapiens
  misc_RNA (1)...(19): siRNA sense strand
gcaggaccuuuacuguuac

SEQ ID NO: 487494 - RNA, 19 nt, Homo sapiens
  misc_RNA (1)...(19): siRNA sense strand
ccacggugaugacgagucu

SEQ ID NO: 487495 - RNA, 19 nt, Homo sapiens
  misc_RNA (1)...(19): siRNA sense strand
ucaucaaccugcaaagucu

SEQ ID NO: 487496 - RNA, 19 nt, Homo sapiens
  misc_RNA (1)...(19): siRNA sense strand
caaguaugguaucaucaac

SEQ ID NO: 487497 - RNA, 19 nt, Homo sapiens
  misc_RNA (1)...(19): siRNA sense strand
caggacugcuacacgagaa

SEQ ID NO: 487498 - RNA, 19 nt, Homo sapiens
  misc_RNA (1)...(19): siRNA sense strand
gaaggccacgugaaugagu

SEQ ID NO: 487499 - RNA, 19 nt, Homo sapiens
  misc_RNA (1)...(19): siRNA sense strand
gcacgaaaaccucuacuuc

SEQ ID NO: 487500 - RNA, 19 nt, Homo sapiens
  misc_RNA (1)...(19): siRNA sense strand
caacagugaccggcucuuc

SEQ ID NO: 487501 - RNA, 19 nt, Homo sapiens
  misc_RNA (1)...(19): siRNA sense strand
gcuccucugcuguuuaaug

SEQ ID NO: 487502 - RNA, 19 nt, Homo sapiens
  misc_RNA (1)...(19): siRNA sense strand
gguaucaucaaccugcaaa

SEQ ID NO: 487503 - RNA, 19 nt, Homo sapiens
  misc_RNA (1)...(19): siRNA sense strand
cacagugaacgauguuaaa

SEQ ID NO: 487504 - RNA, 19 nt, Homo sapiens
  misc_RNA (1)...(19): siRNA sense strand
ccuccaagaugagcaauac

SEQ ID NO: 487505 - RNA, 19 nt, Homo sapiens
  misc_RNA (1)...(19): siRNA sense strand
acgaaggccacgugaauga

SEQ ID NO: 487506 - RNA, 19 nt, Homo sapiens
  misc_RNA (1)...(19): siRNA sense strand
gaccugaggaccacgaagu

SEQ ID NO: 487507 - RNA, 19 nt, Homo sapiens
  misc_RNA (1)...(19): siRNA sense strand
aaggccacgugaaugagua

SEQ ID NO: 487508 - RNA, 19 nt, Homo sapiens
  misc_RNA (1)...(19): siRNA sense strand
cagcugggaccuccucugu

SEQ ID NO: 487509 - RNA, 19 nt, Homo sapiens
  misc_RNA (1)...(19): siRNA sense strand
gcaugugcacgaggaagaa

SEQ ID NO: 487510 - RNA, 19 nt, Homo sapiens
  misc_RNA (1)...(19): siRNA sense strand
gcuccaggaagaagacaga

SEQ ID NO: 487511 - RNA, 19 nt, Homo sapiens
  misc_RNA (1)...(19): siRNA sense strand
cuccaaguaugguaucauc

SEQ ID NO: 487512 - RNA, 19 nt, Homo sapiens
  misc_RNA (1)...(19): siRNA sense strand
gaaaucuuugccauugauc

SEQ ID NO: 487513 - RNA, 19 nt, Homo sapiens
  misc_RNA (1)...(19): siRNA sense strand
ugaucugcguuguggaaau

SEQ ID NO: 487514 - RNA, 19 nt, Homo sapiens
  misc_RNA (1)...(19): siRNA sense strand
gaagaaggcuuguauuaua

SEQ ID NO: 487515 - RNA, 19 nt, Homo sapiens
  misc_RNA (1)...(19): siRNA sense strand
gaacauugcuucuuaauug

SEQ ID NO: 487516 - RNA, 19 nt, Homo sapiens
  misc_RNA (1)...(19): siRNA sense strand
gaagagcgcuguagacuug

SEQ ID NO: 487517 - RNA, 19 nt, Homo sapiens
  misc_RNA (1)...(19): siRNA sense strand
gaaucaggcugcugcauua

SEQ ID NO: 487518 - RNA, 19 nt, Homo sapiens
  misc_RNA (1)...(19): siRNA sense strand
gaaagucaacucucuguua

SEQ ID NO: 487519 - RNA, 19 nt, Homo sapiens
  misc_RNA (1)...(19): siRNA sense strand
gaaaugccuucuucaguuu

SEQ ID NO: 487520 - RNA, 19 nt, Homo sapiens
  misc_RNA (1)...(19): siRNA sense strand
ugaagaaacugaagacaaa

SEQ ID NO: 487521 - RNA, 19 nt, Homo sapiens
  misc_RNA (1)...(19): siRNA sense strand
gaaaugauguggauguugu

SEQ ID NO: 487522 - RNA, 19 nt, Homo sapiens
  misc_RNA (1)...(19): siRNA sense strand
gagagcaacugcaaauaaa

SEQ ID NO: 487523 - RNA, 19 nt, Homo sapiens
  misc_RNA (1)...(19): siRNA sense strand
ggacaugguugaaagaguu

SEQ ID NO: 487524 - RNA, 19 nt, Homo sapiens
  misc_RNA (1)...(19): siRNA sense strand
gcaaagccaugauacuuau

SEQ ID NO: 487525 - RNA, 19 nt, Homo sapiens
  misc_RNA (1)...(19): siRNA sense strand
ucaaaggccuauuauguuu

SEQ ID NO: 487526 - RNA, 19 nt, Homo sapiens
  misc_RNA (1)...(19): siRNA sense strand
agaaggagcuuauagaaga

SEQ ID NO: 487527 - RNA, 19 nt, Homo sapiens
  misc_RNA (1)...(19): siRNA sense strand
gcaagauuaugcuccguua

SEQ ID NO: 487528 - RNA, 19 nt, Homo sapiens
  misc_RNA (1)...(19): siRNA sense strand
gaaauacggaagagcauua

SEQ ID NO: 487529 - RNA, 19 nt, Homo sapiens
  misc_RNA (1)...(19): siRNA sense strand
gaaggacucucuuacuaga

SEQ ID NO: 487530 - RNA, 19 nt, Homo sapiens
  misc_RNA (1)...(19): siRNA sense strand
uaacuggaauugacuauug

SEQ ID NO: 487531 - RNA, 19 nt, Homo sapiens
  misc_RNA (1)...(19): siRNA sense strand
gcagucagcuuacgucuca

SEQ ID NO: 487532 - RNA, 19 nt, Homo sapiens
  misc_RNA (1)...(19): siRNA sense strand
cgaaaugccuucuucaguu

SEQ ID NO: 487533 - RNA, 19 nt, Homo sapiens
  misc_RNA (1)...(19): siRNA sense strand
ccaugagucuucagaaaua

SEQ ID NO: 487534 - RNA, 19 nt, Homo sapiens
  misc_RNA (1)...(19): siRNA sense strand
gaaacacuauggaacuauu

SEQ ID NO: 487535 - RNA, 19 nt, Homo sapiens
  misc_RNA (1)...(19): siRNA sense strand
gaaaugaaauugguguguu

SEQ ID NO: 487536 - RNA, 19 nt, Homo sapiens
  misc_RNA (1)...(19): siRNA sense strand
gcacagggaucagcuuuau

SEQ ID NO: 487537 - RNA, 19 nt, Homo sapiens
  misc_RNA (1)...(19): siRNA sense strand
aaagagcacugguaucaaa

SEQ ID NO: 487538 - RNA, 19 nt, Homo sapiens
  misc_RNA (1)...(19): siRNA sense strand
gagcacgcauuccagcuua

SEQ ID NO: 487539 - RNA, 19 nt, Homo sapiens
  misc_RNA (1)...(19): siRNA sense strand
ccaauuacaugcuuucaga

SEQ ID NO: 487540 - RNA, 19 nt, Homo sapiens
  misc_RNA (1)...(19): siRNA sense strand
cagaagaaggcuuguauua

SEQ ID NO: 487541 - RNA, 19 nt, Homo sapiens
  misc_RNA (1)...(19): siRNA sense strand
gcaaagagcacugguauca

SEQ ID NO: 487542 - RNA, 19 nt, Homo sapiens
  misc_RNA (1)...(19): siRNA sense strand
gagaagaagugaugaaacu

SEQ ID NO: 487543 - RNA, 19 nt, Homo sapiens
  misc_RNA (1)...(19): siRNA sense strand
caacugauuugucuacaga

SEQ ID NO: 487544 - RNA, 19 nt, Homo sapiens
  misc_RNA (1)...(19): siRNA sense strand
gaagaugaauccucaagag

SEQ ID NO: 487545 - RNA, 19 nt, Homo sapiens
  misc_RNA (1)...(19): siRNA sense strand
gggaucagcuuuauuucuu

SEQ ID NO: 487546 - RNA, 19 nt, Homo sapiens
  misc_RNA (1)...(19): siRNA sense strand
gcaacaugaugaugaagaa

SEQ ID NO: 487547 - RNA, 19 nt, Homo sapiens
  misc_RNA (1)...(19): siRNA sense strand
gcaaagcaguagcuauaau

SEQ ID NO: 487548 - RNA, 19 nt, Homo sapiens
  misc_RNA (1)...(19): siRNA sense strand
aaacugcuaucuucaacua

SEQ ID NO: 487549 - RNA, 19 nt, Homo sapiens
  misc_RNA (1)...(19): siRNA sense strand
cagaaucuccuuuaaauga

SEQ ID NO: 487550 - RNA, 19 nt, Homo sapiens
  misc_RNA (1)...(19): siRNA sense strand
gagccgagcuguggugaaa

SEQ ID NO: 487551 - RNA, 19 nt, Homo sapiens
  misc_RNA (1)...(19): siRNA sense strand
ucaauuggaugaaccuaaa

SEQ ID NO: 487552 - RNA, 19 nt, Homo sapiens
  misc_RNA (1)...(19): siRNA sense strand
gaagaugacacaauucuca

SEQ ID NO: 487553 - RNA, 19 nt, Homo sapiens
  misc_RNA (1)...(19): siRNA sense strand
gcacuccaaucccguuaaa

SEQ ID NO: 487554 - RNA, 19 nt, Homo sapiens
  misc_RNA (1)...(19): siRNA sense strand
uagaugagcuagauauuca

SEQ ID NO: 487555 - RNA, 19 nt, Homo sapiens
  misc_RNA (1)...(19): siRNA sense strand
ggaagagcauuacgauaca

SEQ ID NO: 487556 - RNA, 19 nt, Homo sapiens
  misc_RNA (1)...(19): siRNA sense strand
ccauuaaacugcuaucuuc

SEQ ID NO: 487557 - RNA, 19 nt, Homo sapiens
  misc_RNA (1)...(19): siRNA sense strand
gaaggagcuuauagaagaa

SEQ ID NO: 487558 - RNA, 19 nt, Homo sapiens
  misc_RNA (1)...(19): siRNA sense strand
gaauagcaauguuggaaag

SEQ ID NO: 487559 - RNA, 19 nt, Homo sapiens
  misc_RNA (1)...(19): siRNA sense strand
cagcacaccuugaagaguu

SEQ ID NO: 487560 - RNA, 19 nt, Homo sapiens
  misc_RNA (1)...(19): siRNA sense strand
gaaaauggauccuauagca

SEQ ID NO: 487561 - RNA, 19 nt, Homo sapiens
  misc_RNA (1)...(19): siRNA sense strand
ggaaggcucaugcggauuu

SEQ ID NO: 487562 - RNA, 19 nt, Homo sapiens
  misc_RNA (1)...(19): siRNA sense strand
gcaguuuagugacuugaaa

SEQ ID NO: 487563 - RNA, 19 nt, Homo sapiens
  misc_RNA (1)...(19): siRNA sense strand
cuaaugaaaucuugcaguu

SEQ ID NO: 487564 - RNA, 19 nt, Homo sapiens
  misc_RNA (1)...(19): siRNA sense strand
guucagaucagacaaauga

SEQ ID NO: 487565 - RNA, 19 nt, Homo sapiens
  misc_RNA (1)...(19): siRNA sense strand
caucaaaggccuauuaugu

SEQ ID NO: 487566 - RNA, 19 nt, Homo sapiens
  misc_RNA (1)...(19): siRNA sense strand
gccgagcuguggugaaaua

SEQ ID NO: 487567 - RNA, 19 nt, Homo sapiens
  misc_RNA (1)...(19): siRNA sense strand
gaagugcuguuguuucucu

SEQ ID NO: 487568 - RNA, 19 nt, Homo sapiens
  misc_RNA (1)...(19): siRNA sense strand
ugaaagcgcuaaggucauu

SEQ ID NO: 487569 - RNA, 19 nt, Homo sapiens
  misc_RNA (1)...(19): siRNA sense strand
ggaauauucuauggacauu

SEQ ID NO: 487570 - RNA, 19 nt, Homo sapiens
  misc_RNA (1)...(19): siRNA sense strand
ugaugaaacuccucaguau

SEQ ID NO: 487571 - RNA, 19 nt, Homo sapiens
  misc_RNA (1)...(19): siRNA sense strand
gaugaaaguuauagugaag

SEQ ID NO: 487572 - RNA, 19 nt, Homo sapiens
  misc_RNA (1)...(19): siRNA sense strand
aaucaagucuguuggagaa

SEQ ID NO: 487573 - RNA, 19 nt, Homo sapiens
  misc_RNA (1)...(19): siRNA sense strand
gaaacuccucaguauauuu

SEQ ID NO: 487574 - RNA, 19 nt, Homo sapiens
  misc_RNA (1)...(19): siRNA sense strand
gaugaaacuccucaguaua

SEQ ID NO: 487575 - RNA, 19 nt, Homo sapiens
  misc_RNA (1)...(19): siRNA sense strand
gaauuuggccagccuaaga

SEQ ID NO: 487576 - RNA, 19 nt, Homo sapiens
  misc_RNA (1)...(19): siRNA sense strand
agaacacuauguacaagua

SEQ ID NO: 487577 - RNA, 19 nt, Homo sapiens
  misc_RNA (1)...(19): siRNA sense strand
guuaugaggcugcuaauga

SEQ ID NO: 487578 - RNA, 19 nt, Homo sapiens
  misc_RNA (1)...(19): siRNA sense strand
gagcaaagagcacugguau

SEQ ID NO: 487579 - RNA, 19 nt, Homo sapiens
  misc_RNA (1)...(19): siRNA sense strand
caaagaaggacauaccuau

SEQ ID NO: 487580 - RNA, 19 nt, Homo sapiens
  misc_RNA (1)...(19): siRNA sense strand
gcuccaacaugcccauauu

SEQ ID NO: 487581 - RNA, 19 nt, Homo sapiens
  misc_RNA (1)...(19): siRNA sense strand
aggaaggacucucuuacua

SEQ ID NO: 487582 - RNA, 19 nt, Homo sapiens
  misc_RNA (1)...(19): siRNA sense strand
gggaauuguccacuacuua

SEQ ID NO: 487583 - RNA, 19 nt, Homo sapiens
  misc_RNA (1)...(19): siRNA sense strand
ccaauaugcuuuccgaagu

SEQ ID NO: 487584 - RNA, 19 nt, Homo sapiens
  misc_RNA (1)...(19): siRNA sense strand
caacaaaccaauuaaugug

SEQ ID NO: 487585 - RNA, 19 nt, Homo sapiens
  misc_RNA (1)...(19): siRNA sense strand
ugagcuagauauucaagaa

SEQ ID NO: 487586 - RNA, 19 nt, Homo sapiens
  misc_RNA (1)...(19): siRNA sense strand
ugagagcaacugcaaauaa

SEQ ID NO: 487587 - RNA, 19 nt, Homo sapiens
  misc_RNA (1)...(19): siRNA sense strand
gaacugagcacgcauucca

SEQ ID NO: 487588 - RNA, 19 nt, Homo sapiens
  misc_RNA (1)...(19): siRNA sense strand
uaaaagacauugcacagaa

SEQ ID NO: 487589 - RNA, 19 nt, Homo sapiens
  misc_RNA (1)...(19): siRNA sense strand
aaaccaacaagcacauuua

SEQ ID NO: 487590 - RNA, 19 nt, Homo sapiens
  misc_RNA (1)...(19): siRNA sense strand
caacucuacagcaagauua

SEQ ID NO: 487591 - RNA, 19 nt, Homo sapiens
  misc_RNA (1)...(19): siRNA sense strand
gcccagaaugcaaauaaua

SEQ ID NO: 487592 - RNA, 19 nt, Homo sapiens
  misc_RNA (1)...(19): siRNA sense strand
gcaguacaccgcauaggaa

SEQ ID NO: 487593 - RNA, 19 nt, Homo sapiens
  misc_RNA (1)...(19): siRNA sense strand
gagcauuacgauacauuaa

SEQ ID NO: 487594 - RNA, 19 nt, Homo sapiens
  misc_RNA (1)...(19): siRNA sense strand
acagggaucagcuuuauuu

SEQ ID NO: 487595 - RNA, 19 nt, Homo sapiens
  misc_RNA (1)...(19): siRNA sense strand
gaacuaucaguaccagaaa

SEQ ID NO: 487596 - RNA, 19 nt, Homo sapiens
  misc_RNA (1)...(19): siRNA sense strand
ugagaauucugaugaaagu

SEQ ID NO: 487597 - RNA, 19 nt, Homo sapiens
  misc_RNA (1)...(19): siRNA sense strand
cauggcauaugacuuuauu

SEQ ID NO: 487598 - RNA, 19 nt, Homo sapiens
  misc_RNA (1)...(19): siRNA sense strand
gcuauguucuagaggguuu

SEQ ID NO: 487599 - RNA, 19 nt, Homo sapiens
  misc_RNA (1)...(19): siRNA sense strand
guaggcauccucaaauuau

SEQ ID NO: 487600 - RNA, 19 nt, Homo sapiens
  misc_RNA (1)...(19): siRNA sense strand
cagcaggaaucguccaguu

SEQ ID NO: 487601 - RNA, 19 nt, Homo sapiens
  misc_RNA (1)...(19): siRNA sense strand
gaguacagcuagagagagu

SEQ ID NO: 487602 - RNA, 19 nt, Homo sapiens
  misc_RNA (1)...(19): siRNA sense strand
agaagcagauggccuuguu

SEQ ID NO: 487603 - RNA, 19 nt, Homo sapiens
  misc_RNA (1)...(19): siRNA sense strand
ucucagggauaacaacaaa

SEQ ID NO: 487604 - RNA, 19 nt, Homo sapiens
  misc_RNA (1)...(19): siRNA sense strand
caacaugcccauauuugga

SEQ ID NO: 487605 - RNA, 19 nt, Homo sapiens
  misc_RNA (1)...(19): siRNA sense strand
ggaaggacucucuuacuag

SEQ ID NO: 487606 - RNA, 19 nt, Homo sapiens
  misc_RNA (1)...(19): siRNA sense strand
aaagucaacucucuguuag

SEQ ID NO: 487607 - RNA, 19 nt, Homo sapiens
  misc_RNA (1)...(19): siRNA sense strand
gagcagcacaccuugaaga

SEQ ID NO: 487608 - RNA, 19 nt, Homo sapiens
  misc_RNA (1)...(19): siRNA sense strand
caucaaaucagacccaguu

SEQ ID NO: 487609 - RNA, 19 nt, Homo sapiens
  misc_RNA (1)...(19): siRNA sense strand
gacauugcacagaauauuu

SEQ ID NO: 487610 - RNA, 19 nt, Homo sapiens
  misc_RNA (1)...(19): siRNA sense strand
gaaaugauaaagacagaag

SEQ ID NO: 487611 - RNA, 19 nt, Homo sapiens
  misc_RNA (1)...(19): siRNA sense strand
ggaauuguacagaaauaug

SEQ ID NO: 487612 - RNA, 19 nt, Homo sapiens
  misc_RNA (1)...(19): siRNA sense strand
gcuauaaucaagucuguug

SEQ ID NO: 487613 - RNA, 19 nt, Homo sapiens
  misc_RNA (1)...(19): siRNA sense strand
ggaaagaaucaacguuauc

SEQ ID NO: 487614 - RNA, 19 nt, Homo sapiens
  misc_RNA (1)...(19): siRNA sense strand
caacgugccuuauuccaua

SEQ ID NO: 487615 - RNA, 19 nt, Homo sapiens
  misc_RNA (1)...(19): siRNA sense strand
ugaaggagaugcuaaguuu

SEQ ID NO: 487616 - RNA, 19 nt, Homo sapiens
  misc_RNA (1)...(19): siRNA sense strand
ggaagaauaugacaaagug

SEQ ID NO: 487617 - RNA, 19 nt, Homo sapiens
  misc_RNA (1)...(19): siRNA sense strand
gaaaucaaaugugcacuuu

SEQ ID NO: 487618 - RNA, 19 nt, Homo sapiens
  misc_RNA (1)...(19): siRNA sense strand
gcacuuugcucuccacauu

SEQ ID NO: 487619 - RNA, 19 nt, Homo sapiens
  misc_RNA (1)...(19): siRNA sense strand
ggaaagagaccuaguacuu

SEQ ID NO: 487620 - RNA, 19 nt, Homo sapiens
  misc_RNA (1)...(19): siRNA sense strand
caaagacuauugcaaagaa

SEQ ID NO: 487621 - RNA, 19 nt, Homo sapiens
  misc_RNA (1)...(19): siRNA sense strand
aaacacaacugcuucugua

SEQ ID NO: 487622 - RNA, 19 nt, Homo sapiens
  misc_RNA (1)...(19): siRNA sense strand
ucagaaagauuguauggaa

SEQ ID NO: 487623 - RNA, 19 nt, Homo sapiens
  misc_RNA (1)...(19): siRNA sense strand
ugaagaugcucuccuuuaa

SEQ ID NO: 487624 - RNA, 19 nt, Homo sapiens
  misc_RNA (1)...(19): siRNA sense strand
gagaacagccagagucuuu

SEQ ID NO: 487625 - RNA, 19 nt, Homo sapiens
  misc_RNA (1)...(19): siRNA sense strand
ggaaaacucuacaaaauug

SEQ ID NO: 487626 - RNA, 19 nt, Homo sapiens
  misc_RNA (1)...(19): siRNA sense strand
gaacaagugccucuguaaa

SEQ ID NO: 487627 - RNA, 19 nt, Homo sapiens
  misc_RNA (1)...(19): siRNA sense strand
gcagaaagcacaaacacaa

SEQ ID NO: 487628 - RNA, 19 nt, Homo sapiens
  misc_RNA (1)...(19): siRNA sense strand
ggaaguuacuggaggaaau

SEQ ID NO: 487629 - RNA, 19 nt, Homo sapiens
  misc_RNA (1)...(19): siRNA sense strand
ggaaagauuaugaaaguga

SEQ ID NO: 487630 - RNA, 19 nt, Homo sapiens
  misc_RNA (1)...(19): siRNA sense strand
ggaagaaauggauggguua

SEQ ID NO: 487631 - RNA, 19 nt, Homo sapiens
  misc_RNA (1)...(19): siRNA sense strand
gaugaaagaggacugcuaa

SEQ ID NO: 487632 - RNA, 19 nt, Homo sapiens
  misc_RNA (1)...(19): siRNA sense strand
ggucacaucuugggauuug

SEQ ID NO: 487633 - RNA, 19 nt, Homo sapiens
  misc_RNA (1)...(19): siRNA sense strand
acaaagcaguggcaagaaa

SEQ ID NO: 487634 - RNA, 19 nt, Homo sapiens
  misc_RNA (1)...(19): siRNA sense strand
gaaagagaccuaguacuuc

SEQ ID NO: 487635 - RNA, 19 nt, Homo sapiens
  misc_RNA (1)...(19): siRNA sense strand
gggcagguauucuugauca

SEQ ID NO: 487636 - RNA, 19 nt, Homo sapiens
  misc_RNA (1)...(19): siRNA sense strand
gugaacaaguggacagaaa

SEQ ID NO: 487637 - RNA, 19 nt, Homo sapiens
  misc_RNA (1)...(19): siRNA sense strand
gauggaagaauaugacaaa

SEQ ID NO: 487638 - RNA, 19 nt, Homo sapiens
  misc_RNA (1)...(19): siRNA sense strand
uugcagaacuccacagaaa

SEQ ID NO: 487639 - RNA, 19 nt, Homo sapiens
  misc_RNA (1)...(19): siRNA sense strand
gaggacaacugcucuuugg

SEQ ID NO: 487640 - RNA, 19 nt, Homo sapiens
  misc_RNA (1)...(19): siRNA sense strand
gaagagaucagcagaaagc

SEQ ID NO: 487641 - RNA, 19 nt, Homo sapiens
  misc_RNA (1)...(19): siRNA sense strand
ccucaugaccacauucuua

SEQ ID NO: 487642 - RNA, 19 nt, Homo sapiens
  misc_RNA (1)...(19): siRNA sense strand
uggaagagaucagcagaaa

SEQ ID NO: 487643 - RNA, 19 nt, Homo sapiens
  misc_RNA (1)...(19): siRNA sense strand
gcaaaguccugugacaaag

SEQ ID NO: 487644 - RNA, 19 nt, Homo sapiens
  misc_RNA (1)...(19): siRNA sense strand
ugauuacacuggaugauau

SEQ ID NO: 487645 - RNA, 19 nt, Homo sapiens
  misc_RNA (1)...(19): siRNA sense strand
gauagacaucccacugaua

SEQ ID NO: 487646 - RNA, 19 nt, Homo sapiens
  misc_RNA (1)...(19): siRNA sense strand
ugacaugacaucuuacuug

SEQ ID NO: 487647 - RNA, 19 nt, Homo sapiens
  misc_RNA (1)...(19): siRNA sense strand
gguacaaccugcacagaca

SEQ ID NO: 487648 - RNA, 19 nt, Homo sapiens
  misc_RNA (1)...(19): siRNA sense strand
gaugguggguugugcuuuc

SEQ ID NO: 487649 - RNA, 19 nt, Homo sapiens
  misc_RNA (1)...(19): siRNA sense strand
gaagggagcggagcaagga

SEQ ID NO: 487650 - RNA, 19 nt, Homo sapiens
  misc_RNA (1)...(19): siRNA sense strand
cacaacugcuucuguauuc

SEQ ID NO: 487651 - RNA, 19 nt, Homo sapiens
  misc_RNA (1)...(19): siRNA sense strand
agaaacauccgcagaguga

SEQ ID NO: 487652 - RNA, 19 nt, Homo sapiens
  misc_RNA (1)...(19): siRNA sense strand
gaacaaguggacagaaaca

SEQ ID NO: 487653 - RNA, 19 nt, Homo sapiens
  misc_RNA (1)...(19): siRNA sense strand
gaagaaauggauggguuaa

SEQ ID NO: 487654 - RNA, 19 nt, Homo sapiens
  misc_RNA (1)...(19): siRNA sense strand
ggaaaucaaaugugcacuu

SEQ ID NO: 487655 - RNA, 19 nt, Homo sapiens
  misc_RNA (1)...(19): siRNA sense strand
acaccaaguugauuugaga

SEQ ID NO: 487656 - RNA, 19 nt, Homo sapiens
  misc_RNA (1)...(19): siRNA sense strand
uggaccagauggaagaaua

SEQ ID NO: 487657 - RNA, 19 nt, Homo sapiens
  misc_RNA (1)...(19): siRNA sense strand
gaggccauauuccagguuu

SEQ ID NO: 487658 - RNA, 19 nt, Homo sapiens
  misc_RNA (1)...(19): siRNA sense strand
ggguugugcuuuccagauu

SEQ ID NO: 487659 - RNA, 19 nt, Homo sapiens
  misc_RNA (1)...(19): siRNA sense strand
guauggaagcuacguguuu

SEQ ID NO: 487660 - RNA, 19 nt, Homo sapiens
  misc_RNA (1)...(19): siRNA sense strand
ccagaauucuacagauaau

SEQ ID NO: 487661 - RNA, 19 nt, Homo sapiens
  misc_RNA (1)...(19): siRNA sense strand
uaacgauacuguguucaga

SEQ ID NO: 487662 - RNA, 19 nt, Homo sapiens
  misc_RNA (1)...(19): siRNA sense strand
cagagucuuucuugaaguu

SEQ ID NO: 487663 - RNA, 19 nt, Homo sapiens
  misc_RNA (1)...(19): siRNA sense strand
gaaaguuguauguguccua

SEQ ID NO: 487664 - RNA, 19 nt, Homo sapiens
  misc_RNA (1)...(19): siRNA sense strand
gaauaaagggaggagauga

SEQ ID NO: 487665 - RNA, 19 nt, Homo sapiens
  misc_RNA (1)...(19): siRNA sense strand
agaaauggauggguuaagu

SEQ ID NO: 487666 - RNA, 19 nt, Homo sapiens
  misc_RNA (1)...(19): siRNA sense strand
agccagaauucuacagaua

SEQ ID NO: 487667 - RNA, 19 nt, Homo sapiens
  misc_RNA (1)...(19): siRNA sense strand
ccgaacaagugccucugua

SEQ ID NO: 487668 - RNA, 19 nt, Homo sapiens
  misc_RNA (1)...(19): siRNA sense strand
agagagaagucuuggaaag

SEQ ID NO: 487669 - RNA, 19 nt, Homo sapiens
  misc_RNA (1)...(19): siRNA sense strand
ugacaaagcaguggcaaga

SEQ ID NO: 487670 - RNA, 19 nt, Homo sapiens
  misc_RNA (1)...(19): siRNA sense strand
agacaucccacugauauaa

SEQ ID NO: 487671 - RNA, 19 nt, Homo sapiens
  misc_RNA (1)...(19): siRNA sense strand
gcagaugugcuguggauag

SEQ ID NO: 487672 - RNA, 19 nt, Homo sapiens
  misc_RNA (1)...(19): siRNA sense strand
gaaauggauggguuaagug

SEQ ID NO: 487673 - RNA, 19 nt, Homo sapiens
  misc_RNA (1)...(19): siRNA sense strand
uggaugauauggaagaaau

SEQ ID NO: 487674 - RNA, 19 nt, Homo sapiens
  misc_RNA (1)...(19): siRNA sense strand
cugaagaugcucuccuuua

SEQ ID NO: 487675 - RNA, 19 nt, Homo sapiens
  misc_RNA (1)...(19): siRNA sense strand
ucagaggaccagcaucuaa

SEQ ID NO: 487676 - RNA, 19 nt, Homo sapiens
  misc_RNA (1)...(19): siRNA sense strand
gccagaauucuacagauaa

SEQ ID NO: 487677 - RNA, 19 nt, Homo sapiens
  misc_RNA (1)...(19): siRNA sense strand
gaugugcuguggauagaca

SEQ ID NO: 487678 - RNA, 19 nt, Homo sapiens
  misc_RNA (1)...(19): siRNA sense strand
ugagagagaagucuuggaa

SEQ ID NO: 487679 - RNA, 19 nt, Homo sapiens
  misc_RNA (1)...(19): siRNA sense strand
gcuccaggcucugucgaaa

SEQ ID NO: 487680 - RNA, 19 nt, Homo sapiens
  misc_RNA (1)...(19): siRNA sense strand
ggggaaagauuaugaaagu

SEQ ID NO: 487681 - RNA, 19 nt, Homo sapiens
  misc_RNA (1)...(19): siRNA sense strand
gccagagucuuucuugaag

SEQ ID NO: 487682 - RNA, 19 nt, Homo sapiens
  misc_RNA (1)...(19): siRNA sense strand
aaagggaggagaugaaaga

SEQ ID NO: 487683 - RNA, 19 nt, Homo sapiens
  misc_RNA (1)...(19): siRNA sense strand
agaagguuaugugaagaua

SEQ ID NO: 487684 - RNA, 19 nt, Homo sapiens
  misc_RNA (1)...(19): siRNA sense strand
cgaacaagugccucuguaa

SEQ ID NO: 487685 - RNA, 19 nt, Homo sapiens
  misc_RNA (1)...(19): siRNA sense strand
ucauggaggugucuguguu

SEQ ID NO: 487686 - RNA, 19 nt, Homo sapiens
  misc_RNA (1)...(19): siRNA sense strand
gacccagacucacaaugga

SEQ ID NO: 487687 - RNA, 19 nt, Homo sapiens
  misc_RNA (1)...(19): siRNA sense strand
uggagaagaugaacuaggu

SEQ ID NO: 487688 - RNA, 19 nt, Homo sapiens
  misc_RNA (1)...(19): siRNA sense strand
gaagaugcucuccuuuaag

SEQ ID NO: 487689 - RNA, 19 nt, Homo sapiens
  misc_RNA (1)...(19): siRNA sense strand
ucgcauuccaucccaauua

SEQ ID NO: 487690 - RNA, 19 nt, Homo sapiens
  misc_RNA (1)...(19): siRNA sense strand
gguugugcuuuccagauuu

SEQ ID NO: 487691 - RNA, 19 nt, Homo sapiens
  misc_RNA (1)...(19): siRNA sense strand
aauggaaaguuguaugugu

SEQ ID NO: 487692 - RNA, 19 nt, Homo sapiens
  misc_RNA (1)...(19): siRNA sense strand
aggagaaggugccugaaug

SEQ ID NO: 487693 - RNA, 19 nt, Homo sapiens
  misc_RNA (1)...(19): siRNA sense strand
ggaggacaacugcucuuug

SEQ ID NO: 487694 - RNA, 19 nt, Homo sapiens
  misc_RNA (1)...(19): siRNA sense strand
caagaacggugggcuaucg

SEQ ID NO: 487695 - RNA, 19 nt, Homo sapiens
  misc_RNA (1)...(19): siRNA sense strand
ggaauaaagggaggagaug

SEQ ID NO: 487696 - RNA, 19 nt, Homo sapiens
  misc_RNA (1)...(19): siRNA sense strand
gaccagggcagguauucuu

SEQ ID NO: 487697 - RNA, 19 nt, Homo sapiens
  misc_RNA (1)...(19): siRNA sense strand
uauggaagcuacguguuug

SEQ ID NO: 487698 - RNA, 19 nt, Homo sapiens
  misc_RNA (1)...(19): siRNA sense strand
cagaugugcuguggauaga

SEQ ID NO: 487699 - RNA, 19 nt, Homo sapiens
  misc_RNA (1)...(19): siRNA sense strand
aaaagaagguuaugugaag

SEQ ID NO: 487700 - RNA, 19 nt, Homo sapiens
  misc_RNA (1)...(19): siRNA sense strand
gaagaugaacuaggugaag

SEQ ID NO: 487701 - RNA, 19 nt, Homo sapiens
  misc_RNA (1)...(19): siRNA sense strand
gguuaugugaagauacuua

SEQ ID NO: 487702 - RNA, 19 nt, Homo sapiens
  misc_RNA (1)...(19): siRNA sense strand
caucuuacuugcuggaucu

SEQ ID NO: 487703 - RNA, 19 nt, Homo sapiens
  misc_RNA (1)...(19): siRNA sense strand
gaaggagaugcuaaguuug

SEQ ID NO: 487704 - RNA, 19 nt, Homo sapiens
  misc_RNA (1)...(19): siRNA sense strand
gagagagaagucuuggaaa

SEQ ID NO: 487705 - RNA, 19 nt, Homo sapiens
  misc_RNA (1)...(19): siRNA sense strand
cagaucaucagccagaauu

SEQ ID NO: 487706 - RNA, 19 nt, Homo sapiens
  misc_RNA (1)...(19): siRNA sense strand
gaaagcacaaacacaacug

SEQ ID NO: 487707 - RNA, 19 nt, Homo sapiens
  misc_RNA (1)...(19): siRNA sense strand
ccagcaaaguccugugaca

SEQ ID NO: 487708 - RNA, 19 nt, Homo sapiens
  misc_RNA (1)...(19): siRNA sense strand
cagccagagucuuucuuga

SEQ ID NO: 487709 - RNA, 19 nt, Homo sapiens
  misc_RNA (1)...(19): siRNA sense strand
gaacagccagagucuuucu

SEQ ID NO: 487710 - RNA, 19 nt, Homo sapiens
  misc_RNA (1)...(19): siRNA sense strand
ccaaguugauuugagaaca

SEQ ID NO: 487711 - RNA, 19 nt, Homo sapiens
  misc_RNA (1)...(19): siRNA sense strand
gaagauacuuaccccugaa

SEQ ID NO: 487712 - RNA, 19 nt, Homo sapiens
  misc_RNA (1)...(19): siRNA sense strand
aaagaagguuaugugaaga

SEQ ID NO: 487713 - RNA, 19 nt, Homo sapiens
  misc_RNA (1)...(19): siRNA sense strand
acacaacugcuucuguauu

SEQ ID NO: 487714 - RNA, 19 nt, Homo sapiens
  misc_RNA (1)...(19): siRNA sense strand
ggaagaagaagccauauaa

SEQ ID NO: 487715 - RNA, 19 nt, Homo sapiens
  misc_RNA (1)...(19): siRNA sense strand
gcaggucacuggcuucuuu

SEQ ID NO: 487716 - RNA, 19 nt, Homo sapiens
  misc_RNA (1)...(19): siRNA sense strand
gaaagaagagcauuaagga

SEQ ID NO: 487717 - RNA, 19 nt, Homo sapiens
  misc_RNA (1)...(19): siRNA sense strand
guaagaauuuccaguggua

SEQ ID NO: 487718 - RNA, 19 nt, Homo sapiens
  misc_RNA (1)...(19): siRNA sense strand
guaaggagcucaaguacuc

SEQ ID NO: 487719 - RNA, 19 nt, Homo sapiens
  misc_RNA (1)...(19): siRNA sense strand
ccacacaccugcugaagga

SEQ ID NO: 487720 - RNA, 19 nt, Homo sapiens
  misc_RNA (1)...(19): siRNA sense strand
gaaccacacagcaauauug

SEQ ID NO: 487721 - RNA, 19 nt, Homo sapiens
  misc_RNA (1)...(19): siRNA sense strand
ucaaagugcuguugguguu

SEQ ID NO: 487722 - RNA, 19 nt, Homo sapiens
  misc_RNA (1)...(19): siRNA sense strand
acaauaauaccguugcuua

SEQ ID NO: 487723 - RNA, 19 nt, Homo sapiens
  misc_RNA (1)...(19): siRNA sense strand
gaacugggaaucaagguau

SEQ ID NO: 487724 - RNA, 19 nt, Homo sapiens
  misc_RNA (1)...(19): siRNA sense strand
ggagaaccacacagcaaua

SEQ ID NO: 487725 - RNA, 19 nt, Homo sapiens
  misc_RNA (1)...(19): siRNA sense strand
cugaauggcuuauccaaau

SEQ ID NO: 487726 - RNA, 19 nt, Homo sapiens
  misc_RNA (1)...(19): siRNA sense strand
ggugaugucuccgaaagaa

SEQ ID NO: 487727 - RNA, 19 nt, Homo sapiens
  misc_RNA (1)...(19): siRNA sense strand
caucaaacaggacaacuuu

SEQ ID NO: 487728 - RNA, 19 nt, Homo sapiens
  misc_RNA (1)...(19): siRNA sense strand
agaagaagccauauaauag

SEQ ID NO: 487729 - RNA, 19 nt, Homo sapiens
  misc_RNA (1)...(19): siRNA sense strand
gaagaagaagccauauaau

SEQ ID NO: 487730 - RNA, 19 nt, Homo sapiens
  misc_RNA (1)...(19): siRNA sense strand
ccacacagcaauauuguau

SEQ ID NO: 487731 - RNA, 19 nt, Homo sapiens
  misc_RNA (1)...(19): siRNA sense strand
gauuacaagucucaugugu

SEQ ID NO: 487732 - RNA, 19 nt, Homo sapiens
  misc_RNA (1)...(19): siRNA sense strand
gaaguauggcuacaauuca

SEQ ID NO: 487733 - RNA, 19 nt, Homo sapiens
  misc_RNA (1)...(19): siRNA sense strand
aagaagagcauuaaggaaa

SEQ ID NO: 487734 - RNA, 19 nt, Homo sapiens
  misc_RNA (1)...(19): siRNA sense strand
gauggacgauuacaagucu

SEQ ID NO: 487735 - RNA, 19 nt, Homo sapiens
  misc_RNA (1)...(19): siRNA sense strand
ugagaaguauggcuacaau

SEQ ID NO: 487736 - RNA, 19 nt, Homo sapiens
  misc_RNA (1)...(19): siRNA sense strand
ugaaauuggucuucuggau

SEQ ID NO: 487737 - RNA, 19 nt, Homo sapiens
  misc_RNA (1)...(19): siRNA sense strand
gaccauguuuacccagaaa

SEQ ID NO: 487738 - RNA, 19 nt, Homo sapiens
  misc_RNA (1)...(19): siRNA sense strand
ggaccauguuuacccagaa

SEQ ID NO: 487739 - RNA, 19 nt, Homo sapiens
  misc_RNA (1)...(19): siRNA sense strand
ggaaaucauucugguggau

SEQ ID NO: 487740 - RNA, 19 nt, Homo sapiens
  misc_RNA (1)...(19): siRNA sense strand
uacaagcgcuggaacuuca

SEQ ID NO: 487741 - RNA, 19 nt, Homo sapiens
  misc_RNA (1)...(19): siRNA sense strand
gaagagggaaggccugauc

SEQ ID NO: 487742 - RNA, 19 nt, Homo sapiens
  misc_RNA (1)...(19): siRNA sense strand
ggaacuucauccagaaugg

SEQ ID NO: 487743 - RNA, 19 nt, Homo sapiens
  misc_RNA (1)...(19): siRNA sense strand
uuaagaacuccaucaagua

SEQ ID NO: 487744 - RNA, 19 nt, Homo sapiens
  misc_RNA (1)...(19): siRNA sense strand
agaggaguauguccacaaa

SEQ ID NO: 487745 - RNA, 19 nt, Homo sapiens
  misc_RNA (1)...(19): siRNA sense strand
ggauguauacggaggagaa

SEQ ID NO: 487746 - RNA, 19 nt, Homo sapiens
  misc_RNA (1)...(19): siRNA sense strand
gauccgcgcucgcauugag

SEQ ID NO: 487747 - RNA, 19 nt, Homo sapiens
  misc_RNA (1)...(19): siRNA sense strand
gaagaagccauauaauagc

SEQ ID NO: 487748 - RNA, 19 nt, Homo sapiens
  misc_RNA (1)...(19): siRNA sense strand
uggugaaggugguaagaaa

SEQ ID NO: 487749 - RNA, 19 nt, Homo sapiens
  misc_RNA (1)...(19): siRNA sense strand
uaagaacuccaucaaguag

SEQ ID NO: 487750 - RNA, 19 nt, Homo sapiens
  misc_RNA (1)...(19): siRNA sense strand
auuaagaacuccaucaagu

SEQ ID NO: 487751 - RNA, 19 nt, Homo sapiens
  misc_RNA (1)...(19): siRNA sense strand
acccagaaaugagaagaua

SEQ ID NO: 487752 - RNA, 19 nt, Homo sapiens
  misc_RNA (1)...(19): siRNA sense strand
gucacuggcuucuuugaug

SEQ ID NO: 487753 - RNA, 19 nt, Homo sapiens
  misc_RNA (1)...(19): siRNA sense strand
gagcuguggugcauguaca

SEQ ID NO: 487754 - RNA, 19 nt, Homo sapiens
  misc_RNA (1)...(19): siRNA sense strand
gagaaccacacagcaauau

SEQ ID NO: 487755 - RNA, 19 nt, Homo sapiens
  misc_RNA (1)...(19): siRNA sense strand
cgaaagaagagcauuaagg

SEQ ID NO: 487756 - RNA, 19 nt, Homo sapiens
  misc_RNA (1)...(19): siRNA sense strand
agaaguauggcuacaauuc

SEQ ID NO: 487757 - RNA, 19 nt, Homo sapiens
  misc_RNA (1)...(19): siRNA sense strand
acauugagcggaagaagaa

SEQ ID NO: 487758 - RNA, 19 nt, Homo sapiens
  misc_RNA (1)...(19): siRNA sense strand
caaaucccuugggcucauu

SEQ ID NO: 487759 - RNA, 19 nt, Homo sapiens
  misc_RNA (1)...(19): siRNA sense strand
cggaagaagaagccauaua

SEQ ID NO: 487760 - RNA, 19 nt, Homo sapiens
  misc_RNA (1)...(19): siRNA sense strand
guucuucggugaaauuggu

SEQ ID NO: 487761 - RNA, 19 nt, Homo sapiens
  misc_RNA (1)...(19): siRNA sense strand
gccauauaauagcaacauu

SEQ ID NO: 487762 - RNA, 19 nt, Homo sapiens
  misc_RNA (1)...(19): siRNA sense strand
gcugggagcuguggugcau

SEQ ID NO: 487763 - RNA, 19 nt, Homo sapiens
  misc_RNA (1)...(19): siRNA sense strand
agagguggaccauuaagaa

SEQ ID NO: 487764 - RNA, 19 nt, Homo sapiens
  misc_RNA (1)...(19): siRNA sense strand
gcugaauggcuuauccaaa

SEQ ID NO: 487765 - RNA, 19 nt, Homo sapiens
  misc_RNA (1)...(19): siRNA sense strand
ccagaaaugagaagauaca

SEQ ID NO: 487766 - RNA, 19 nt, Homo sapiens
  misc_RNA (1)...(19): siRNA sense strand
ugaauggcuuauccaaauc

SEQ ID NO: 487767 - RNA, 19 nt, Homo sapiens
  misc_RNA (1)...(19): siRNA sense strand
ccauauaauagcaacauug

SEQ ID NO: 487768 - RNA, 19 nt, Homo sapiens
  misc_RNA (1)...(19): siRNA sense strand
gcuggagaauccgggaauu

SEQ ID NO: 487769 - RNA, 19 nt, Homo sapiens
  misc_RNA (1)...(19): siRNA sense strand
gagaauccgggaauugaca

SEQ ID NO: 487770 - RNA, 19 nt, Homo sapiens
  misc_RNA (1)...(19): siRNA sense strand
gagaaguauggcuacaauu

SEQ ID NO: 487771 - RNA, 19 nt, Homo sapiens
  misc_RNA (1)...(19): siRNA sense strand
aaagugcuguugguguuga

SEQ ID NO: 487772 - RNA, 19 nt, Homo sapiens
  misc_RNA (1)...(19): siRNA sense strand
ugaaggugguaagaaauca

SEQ ID NO: 487773 - RNA, 19 nt, Homo sapiens
  misc_RNA (1)...(19): siRNA sense strand
aagaagccauauaauagca

SEQ ID NO: 487774 - RNA, 19 nt, Homo sapiens
  misc_RNA (1)...(19): siRNA sense strand
guacaagcgcuggaacuuc

SEQ ID NO: 487775 - RNA, 19 nt, Homo sapiens
  misc_RNA (1)...(19): siRNA sense strand
caaaagacgucugcuugga

SEQ ID NO: 487776 - RNA, 19 nt, Homo sapiens
  misc_RNA (1)...(19): siRNA sense strand
aaagaagagcauuaaggaa

SEQ ID NO: 487777 - RNA, 19 nt, Homo sapiens
  misc_RNA (1)...(19): siRNA sense strand
ggaaccugccgcuggagaa

SEQ ID NO: 487778 - RNA, 19 nt, Homo sapiens
  misc_RNA (1)...(19): siRNA sense strand
accguuccauuccggauua

SEQ ID NO: 487779 - RNA, 19 nt, Homo sapiens
  misc_RNA (1)...(19): siRNA sense strand
gguggaccauuaagaacuc

SEQ ID NO: 487780 - RNA, 19 nt, Homo sapiens
  misc_RNA (1)...(19): siRNA sense strand
gcagcugaauggcuuaucc

SEQ ID NO: 487781 - RNA, 19 nt, Homo sapiens
  misc_RNA (1)...(19): siRNA sense strand
uagcaacauuggcuucuac

SEQ ID NO: 487782 - RNA, 19 nt, Homo sapiens
  misc_RNA (1)...(19): siRNA sense strand
aggucuggauggacgauua

SEQ ID NO: 487783 - RNA, 19 nt, Homo sapiens
  misc_RNA (1)...(19): siRNA sense strand
gaaccugccgcuggagaau

SEQ ID NO: 487784 - RNA, 19 nt, Homo sapiens
  misc_RNA (1)...(19): siRNA sense strand
guaccuggaccauguuuac

SEQ ID NO: 487785 - RNA, 19 nt, Homo sapiens
  misc_RNA (1)...(19): siRNA sense strand
agaagagcauuaaggaaaa

SEQ ID NO: 487786 - RNA, 19 nt, Homo sapiens
  misc_RNA (1)...(19): siRNA sense strand
aguguaaggagcucaagua

SEQ ID NO: 487787 - RNA, 19 nt, Homo sapiens
  misc_RNA (1)...(19): siRNA sense strand
ccauuaagaacuccaucaa

SEQ ID NO: 487788 - RNA, 19 nt, Homo sapiens
  misc_RNA (1)...(19): siRNA sense strand
acacagcaauauuguaucc

SEQ ID NO: 487789 - RNA, 19 nt, Homo sapiens
  misc_RNA (1)...(19): siRNA sense strand
ggauggacgauuacaaguc

SEQ ID NO: 487790 - RNA, 19 nt, Homo sapiens
  misc_RNA (1)...(19): siRNA sense strand
cauauaauagcaacauugg

SEQ ID NO: 487791 - RNA, 19 nt, Homo sapiens
  misc_RNA (1)...(19): siRNA sense strand
ccaaggaccugccccagau

SEQ ID NO: 487792 - RNA, 19 nt, Homo sapiens
  misc_RNA (1)...(19): siRNA sense strand
ugaugucuccgaaagaaga

SEQ ID NO: 487793 - RNA, 19 nt, Homo sapiens
  misc_RNA (1)...(19): siRNA sense strand
uaucgucccaccaagugua

SEQ ID NO: 487794 - RNA, 19 nt, Homo sapiens
  misc_RNA (1)...(19): siRNA sense strand
gagucaaagugcuguuggu

SEQ ID NO: 487795 - RNA, 19 nt, Homo sapiens
  misc_RNA (1)...(19): siRNA sense strand
gagaagauacaauaauacc

SEQ ID NO: 487796 - RNA, 19 nt, Homo sapiens
  misc_RNA (1)...(19): siRNA sense strand
gagacgccuuccacgagau

SEQ ID NO: 487797 - RNA, 19 nt, Homo sapiens
  misc_RNA (1)...(19): siRNA sense strand
uggagaauccgggaauuga

SEQ ID NO: 487798 - RNA, 19 nt, Homo sapiens
  misc_RNA (1)...(19): siRNA sense strand
gaagagucaaagugcuguu

SEQ ID NO: 487799 - RNA, 19 nt, Homo sapiens
  misc_RNA (1)...(19): siRNA sense strand
gugaaggugguaagaaauc

SEQ ID NO: 487800 - RNA, 19 nt, Homo sapiens
  misc_RNA (1)...(19): siRNA sense strand
ggugaaggugguaagaaau

SEQ ID NO: 487801 - RNA, 19 nt, Homo sapiens
  misc_RNA (1)...(19): siRNA sense strand
ugacaacagcgacgaagag

SEQ ID NO: 487802 - RNA, 19 nt, Homo sapiens
  misc_RNA (1)...(19): siRNA sense strand
ugaacugggaaucaaggua

SEQ ID NO: 487803 - RNA, 19 nt, Homo sapiens
  misc_RNA (1)...(19): siRNA sense strand
gucaagagcagccuguaca

SEQ ID NO: 487804 - RNA, 19 nt, Homo sapiens
  misc_RNA (1)...(19): siRNA sense strand
cauguuuacccagaaauga

SEQ ID NO: 487805 - RNA, 19 nt, Homo sapiens
  misc_RNA (1)...(19): siRNA sense strand
aaguauggcuacaauucau

SEQ ID NO: 487806 - RNA, 19 nt, Homo sapiens
  misc_RNA (1)...(19): siRNA sense strand
acacaccugcugaaggaaa

SEQ ID NO: 487807 - RNA, 19 nt, Homo sapiens
  misc_RNA (1)...(19): siRNA sense strand
cggauuaucgucccaccaa

SEQ ID NO: 487808 - RNA, 19 nt, Homo sapiens
  misc_RNA (1)...(19): siRNA sense strand
gcaacaacaaggcaaaaga

SEQ ID NO: 487809 - RNA, 19 nt, Homo sapiens
  misc_RNA (1)...(19): siRNA sense strand
caauaauaccguugcuuac

SEQ ID NO: 487810 - RNA, 19 nt, Homo sapiens
  misc_RNA (1)...(19): siRNA sense strand
ggccuuccggcuacucuuu

SEQ ID NO: 487811 - RNA, 19 nt, Homo sapiens
  misc_RNA (1)...(19): siRNA sense strand
gaaaaccggaagcguguga

SEQ ID NO: 487812 - RNA, 19 nt, Homo sapiens
  misc_RNA (1)...(19): siRNA sense strand
ucaagagcagccuguacaa

SEQ ID NO: 487813 - RNA, 19 nt, Homo sapiens
  misc_RNA (1)...(19): siRNA sense strand
cagagguggaccauuaaga

SEQ ID NO: 487814 - RNA, 19 nt, Homo sapiens
  misc_RNA (1)...(19): siRNA sense strand
ggaauuaccuguccaucuu

SEQ ID NO: 487815 - RNA, 19 nt, Homo sapiens
  misc_RNA (1)...(19): siRNA sense strand
ccacggaacugcugucaaa

SEQ ID NO: 487816 - RNA, 19 nt, Homo sapiens
  misc_RNA (1)...(19): siRNA sense strand
ggaacaacguggacccaua

SEQ ID NO: 487817 - RNA, 19 nt, Homo sapiens
  misc_RNA (1)...(19): siRNA sense strand
ggccagagcuuccagaaug

SEQ ID NO: 487818 - RNA, 19 nt, Homo sapiens
  misc_RNA (1)...(19): siRNA sense strand
gaaggccuaugccaaggua

SEQ ID NO: 487819 - RNA, 19 nt, Homo sapiens
  misc_RNA (1)...(19): siRNA sense strand
ggacacagaucuggaugga

SEQ ID NO: 487820 - RNA, 19 nt, Homo sapiens
  misc_RNA (1)...(19): siRNA sense strand
ggaaccgcauccggaauua

SEQ ID NO: 487821 - RNA, 19 nt, Homo sapiens
  misc_RNA (1)...(19): siRNA sense strand
gaacaacguggacccauau

SEQ ID NO: 487822 - RNA, 19 nt, Homo sapiens
  misc_RNA (1)...(19): siRNA sense strand
gaacaccacacucuacgaa

SEQ ID NO: 487823 - RNA, 19 nt, Homo sapiens
  misc_RNA (1)...(19): siRNA sense strand
ucaauaggaucaucagcaa

SEQ ID NO: 487824 - RNA, 19 nt, Homo sapiens
  misc_RNA (1)...(19): siRNA sense strand
ggagcgcccugcuugagaa

SEQ ID NO: 487825 - RNA, 19 nt, Homo sapiens
  misc_RNA (1)...(19): siRNA sense strand
ggauggaguugugaccuuu

SEQ ID NO: 487826 - RNA, 19 nt, Homo sapiens
  misc_RNA (1)...(19): siRNA sense strand
aagaggagauugacgagaa

SEQ ID NO: 487827 - RNA, 19 nt, Homo sapiens
  misc_RNA (1)...(19): siRNA sense strand
ccagugaccucuaccagau

SEQ ID NO: 487828 - RNA, 19 nt, Homo sapiens
  misc_RNA (1)...(19): siRNA sense strand
ggccaugccuacucuguga

SEQ ID NO: 487829 - RNA, 19 nt, Homo sapiens
  misc_RNA (1)...(19): siRNA sense strand
caacguggacccauaugaa

SEQ ID NO: 487830 - RNA, 19 nt, Homo sapiens
  misc_RNA (1)...(19): siRNA sense strand
gaagggccaugccuacucu

SEQ ID NO: 487831 - RNA, 19 nt, Homo sapiens
  misc_RNA (1)...(19): siRNA sense strand
gaucaucagcaaacacaaa

SEQ ID NO: 487832 - RNA, 19 nt, Homo sapiens
  misc_RNA (1)...(19): siRNA sense strand
ggccaucacuuucaagaag

SEQ ID NO: 487833 - RNA, 19 nt, Homo sapiens
  misc_RNA (1)...(19): siRNA sense strand
gaaacuacccagccaccuu

SEQ ID NO: 487834 - RNA, 19 nt, Homo sapiens
  misc_RNA (1)...(19): siRNA sense strand
gguugcagcugaccauguu

SEQ ID NO: 487835 - RNA, 19 nt, Homo sapiens
  misc_RNA (1)...(19): siRNA sense strand
gggccaagcaggugaacua

SEQ ID NO: 487836 - RNA, 19 nt, Homo sapiens
  misc_RNA (1)...(19): siRNA sense strand
acaaagaccugcggaccaa

SEQ ID NO: 487837 - RNA, 19 nt, Homo sapiens
  misc_RNA (1)...(19): siRNA sense strand
gaacuucaaggcccucuuc

SEQ ID NO: 487838 - RNA, 19 nt, Homo sapiens
  misc_RNA (1)...(19): siRNA sense strand
caacaaggagggcgacuuc

SEQ ID NO: 487839 - RNA, 19 nt, Homo sapiens
  misc_RNA (1)...(19): siRNA sense strand
ggucgacuuugacaauuuc

SEQ ID NO: 487840 - RNA, 19 nt, Homo sapiens
  misc_RNA (1)...(19): siRNA sense strand
caagaccuauggcaucaag

SEQ ID NO: 487841 - RNA, 19 nt, Homo sapiens
  misc_RNA (1)...(19): siRNA sense strand
ggacuguggagcuggauga

SEQ ID NO: 487842 - RNA, 19 nt, Homo sapiens
  misc_RNA (1)...(19): siRNA sense strand
uagagaccauguuccgauu

SEQ ID NO: 487843 - RNA, 19 nt, Homo sapiens
  misc_RNA (1)...(19): siRNA sense strand
gcaaauggaacaccacacu

SEQ ID NO: 487844 - RNA, 19 nt, Homo sapiens
  misc_RNA (1)...(19): siRNA sense strand
ugaaggaguugcggacaau

SEQ ID NO: 487845 - RNA, 19 nt, Homo sapiens
  misc_RNA (1)...(19): siRNA sense strand
gugaaggaguugcggacaa

SEQ ID NO: 487846 - RNA, 19 nt, Homo sapiens
  misc_RNA (1)...(19): siRNA sense strand
ccuauggcaucaaguggaa

SEQ ID NO: 487847 - RNA, 19 nt, Homo sapiens
  misc_RNA (1)...(19): siRNA sense strand
ggagcuacccgcacagaca

SEQ ID NO: 487848 - RNA, 19 nt, Homo sapiens
  misc_RNA (1)...(19): siRNA sense strand
gcggucgacuuugacaauu

SEQ ID NO: 487849 - RNA, 19 nt, Homo sapiens
  misc_RNA (1)...(19): siRNA sense strand
ggacgggaagcuaguguuc

SEQ ID NO: 487850 - RNA, 19 nt, Homo sapiens
  misc_RNA (1)...(19): siRNA sense strand
agacaucuccagcguucua

SEQ ID NO: 487851 - RNA, 19 nt, Homo sapiens
  misc_RNA (1)...(19): siRNA sense strand
gagaccauguuccgauuuu

SEQ ID NO: 487852 - RNA, 19 nt, Homo sapiens
  misc_RNA (1)...(19): siRNA sense strand
cugcugggcugcuccauag

SEQ ID NO: 487853 - RNA, 19 nt, Homo sapiens
  misc_RNA (1)...(19): siRNA sense strand
ggagauugacgagaacuuc

SEQ ID NO: 487854 - RNA, 19 nt, Homo sapiens
  misc_RNA (1)...(19): siRNA sense strand
cggaugacccggacgacua

SEQ ID NO: 487855 - RNA, 19 nt, Homo sapiens
  misc_RNA (1)...(19): siRNA sense strand
gggacccucuuccgugaug

SEQ ID NO: 487856 - RNA, 19 nt, Homo sapiens
  misc_RNA (1)...(19): siRNA sense strand
guugugaccuuugacuugu

SEQ ID NO: 487857 - RNA, 19 nt, Homo sapiens
  misc_RNA (1)...(19): siRNA sense strand
gggaggacauggagaucag

SEQ ID NO: 487858 - RNA, 19 nt, Homo sapiens
  misc_RNA (1)...(19): siRNA sense strand
cggucgacuuugacaauuu

SEQ ID NO: 487859 - RNA, 19 nt, Homo sapiens
  misc_RNA (1)...(19): siRNA sense strand
ccaauuccuccaagaccua

SEQ ID NO: 487860 - RNA, 19 nt, Homo sapiens
  misc_RNA (1)...(19): siRNA sense strand
caugagugccuacgagaug

SEQ ID NO: 487861 - RNA, 19 nt, Homo sapiens
  misc_RNA (1)...(19): siRNA sense strand
ggucccaauuccuccaaga

SEQ ID NO: 487862 - RNA, 19 nt, Homo sapiens
  misc_RNA (1)...(19): siRNA sense strand
gccgcgacauggagacuau

SEQ ID NO: 487863 - RNA, 19 nt, Homo sapiens
  misc_RNA (1)...(19): siRNA sense strand
caucaaggacgggaagcua

SEQ ID NO: 487864 - RNA, 19 nt, Homo sapiens
  misc_RNA (1)...(19): siRNA sense strand
ugugaccuuugacuuguuu

SEQ ID NO: 487865 - RNA, 19 nt, Homo sapiens
  misc_RNA (1)...(19): siRNA sense strand
ggagaucugcaaccucaca

SEQ ID NO: 487866 - RNA, 19 nt, Homo sapiens
  misc_RNA (1)...(19): siRNA sense strand
gagauugacgagaacuuca

SEQ ID NO: 487867 - RNA, 19 nt, Homo sapiens
  misc_RNA (1)...(19): siRNA sense strand
cgacuuugacaauuucguu

SEQ ID NO: 487868 - RNA, 19 nt, Homo sapiens
  misc_RNA (1)...(19): siRNA sense strand
gagaugcggauggccauug

SEQ ID NO: 487869 - RNA, 19 nt, Homo sapiens
  misc_RNA (1)...(19): siRNA sense strand
augagaaugccaucaagua

SEQ ID NO: 487870 - RNA, 19 nt, Homo sapiens
  misc_RNA (1)...(19): siRNA sense strand
ccaugagaaugccaucaag

SEQ ID NO: 487871 - RNA, 19 nt, Homo sapiens
  misc_RNA (1)...(19): siRNA sense strand
agaugcggauggccauuga

SEQ ID NO: 487872 - RNA, 19 nt, Homo sapiens
  misc_RNA (1)...(19): siRNA sense strand
gaauuaccuguccaucuuc

SEQ ID NO: 487873 - RNA, 19 nt, Homo sapiens
  misc_RNA (1)...(19): siRNA sense strand
cagagggcuuugaggacuu

SEQ ID NO: 487874 - RNA, 19 nt, Homo sapiens
  misc_RNA (1)...(19): siRNA sense strand
ucaacaagaagcuguacga

SEQ ID NO: 487875 - RNA, 19 nt, Homo sapiens
  misc_RNA (1)...(19): siRNA sense strand
gccaugagaaugccaucaa

SEQ ID NO: 487876 - RNA, 19 nt, Homo sapiens
  misc_RNA (1)...(19): siRNA sense strand
gaggccaucacuuucaaga

SEQ ID NO: 487877 - RNA, 19 nt, Homo sapiens
  misc_RNA (1)...(19): siRNA sense strand
gaugucauuccgagacuuc

SEQ ID NO: 487878 - RNA, 19 nt, Homo sapiens
  misc_RNA (1)...(19): siRNA sense strand
uccaagaccuauggcauca

SEQ ID NO: 487879 - RNA, 19 nt, Homo sapiens
  misc_RNA (1)...(19): siRNA sense strand
ggaagcgucccacggaacu

SEQ ID NO: 487880 - RNA, 19 nt, Homo sapiens
  misc_RNA (1)...(19): siRNA sense strand
gaaguuugaccuggacaag

SEQ ID NO: 487881 - RNA, 19 nt, Homo sapiens
  misc_RNA (1)...(19): siRNA sense strand
ggaaguuugaccuggacaa

SEQ ID NO: 487882 - RNA, 19 nt, Homo sapiens
  misc_RNA (1)...(19): siRNA sense strand
gccagagcuuccagaaugg

SEQ ID NO: 487883 - RNA, 19 nt, Homo sapiens
  misc_RNA (1)...(19): siRNA sense strand
uggaggccaucacuuucaa

SEQ ID NO: 487884 - RNA, 19 nt, Homo sapiens
  misc_RNA (1)...(19): siRNA sense strand
uggauggaguugugaccuu

SEQ ID NO: 487885 - RNA, 19 nt, Homo sapiens
  misc_RNA (1)...(19): siRNA sense strand
uuccagcuguggcaauuug

SEQ ID NO: 487886 - RNA, 19 nt, Homo sapiens
  misc_RNA (1)...(19): siRNA sense strand
uggaaccgcauccggaauu

SEQ ID NO: 487887 - RNA, 19 nt, Homo sapiens
  misc_RNA (1)...(19): siRNA sense strand
acauggagaucagcgugaa

SEQ ID NO: 487888 - RNA, 19 nt, Homo sapiens
  misc_RNA (1)...(19): siRNA sense strand
gaccagauccaggccaauc

SEQ ID NO: 487889 - RNA, 19 nt, Homo sapiens
  misc_RNA (1)...(19): siRNA sense strand
gaucaucacgccgguguac

SEQ ID NO: 487890 - RNA, 19 nt, Homo sapiens
  misc_RNA (1)...(19): siRNA sense strand
gcagcauggugaaccucau

SEQ ID NO: 487891 - RNA, 19 nt, Homo sapiens
  misc_RNA (1)...(19): siRNA sense strand
caauaggaucaucagcaaa

SEQ ID NO: 487892 - RNA, 19 nt, Homo sapiens
  misc_RNA (1)...(19): siRNA sense strand
gcuucgugcucgcccuuau

SEQ ID NO: 487893 - RNA, 19 nt, Homo sapiens
  misc_RNA (1)...(19): siRNA sense strand
ggaacaccacacucuacga

SEQ ID NO: 487894 - RNA, 19 nt, Homo sapiens
  misc_RNA (1)...(19): siRNA sense strand
ggaugucauuccgagacuu

SEQ ID NO: 487895 - RNA, 19 nt, Homo sapiens
  misc_RNA (1)...(19): siRNA sense strand
gggcugcuccauagacauc

SEQ ID NO: 487896 - RNA, 19 nt, Homo sapiens
  misc_RNA (1)...(19): siRNA sense strand
cagcugaccauguuugcau

SEQ ID NO: 487897 - RNA, 19 nt, Homo sapiens
  misc_RNA (1)...(19): siRNA sense strand
gacuuugacaauuucguuu

SEQ ID NO: 487898 - RNA, 19 nt, Homo sapiens
  misc_RNA (1)...(19): siRNA sense strand
gacaagucgggcagcauga

SEQ ID NO: 487899 - RNA, 19 nt, Homo sapiens
  misc_RNA (1)...(19): siRNA sense strand
uugcggacaauccucaaua

SEQ ID NO: 487900 - RNA, 19 nt, Homo sapiens
  misc_RNA (1)...(19): siRNA sense strand
gaucagcgugaaggaguug

SEQ ID NO: 487901 - RNA, 19 nt, Homo sapiens
  misc_RNA (1)...(19): siRNA sense strand
gagcuacccgcacagacau

SEQ ID NO: 487902 - RNA, 19 nt, Homo sapiens
  misc_RNA (1)...(19): siRNA sense strand
gagacuucaugcgggaguu

SEQ ID NO: 487903 - RNA, 19 nt, Homo sapiens
  misc_RNA (1)...(19): siRNA sense strand
cagcccaagugcagaagca

SEQ ID NO: 487904 - RNA, 19 nt, Homo sapiens
  misc_RNA (1)...(19): siRNA sense strand
cuccagcguucuagacaug

SEQ ID NO: 487905 - RNA, 19 nt, Homo sapiens
  misc_RNA (1)...(19): siRNA sense strand
ugagaaugccaucaaguac

SEQ ID NO: 487906 - RNA, 19 nt, Homo sapiens
  misc_RNA (1)...(19): siRNA sense strand
ugaccuuugacuuguuuaa

SEQ ID NO: 487907 - RNA, 19 nt, Homo sapiens
  misc_RNA (1)...(19): siRNA sense strand
gagcuuccagaauggcuau

SEQ ID NO: 487908 - RNA, 19 nt, Homo sapiens
  misc_RNA (1)...(19): siRNA sense strand
gcaugagugccuacgagau

SEQ ID NO: 487909 - RNA, 19 nt, Homo sapiens
  misc_RNA (1)...(19): siRNA sense strand
aguuugaccuggacaaguc

SEQ ID NO: 487910 - RNA, 19 nt, Homo sapiens
  misc_RNA (1)...(19): siRNA sense strand
agaaugccaucaaguaccu

SEQ ID NO: 487911 - RNA, 19 nt, Homo sapiens
  misc_RNA (1)...(19): siRNA sense strand
uguacgagcucaucaucac

SEQ ID NO: 487912 - RNA, 19 nt, Homo sapiens
  misc_RNA (1)...(19): siRNA sense strand
uggacguggucguggauga

SEQ ID NO: 487913 - RNA, 19 nt, Homo sapiens
  misc_RNA (1)...(19): siRNA sense strand
cagagcaguucaucaaccu

SEQ ID NO: 487914 - RNA, 19 nt, Homo sapiens
  misc_RNA (1)...(19): siRNA sense strand
gaaccuagcucccgugaag

SEQ ID NO: 487915 - RNA, 19 nt, Homo sapiens
  misc_RNA (1)...(19): siRNA sense strand
gaaauaaucagcuucaagu

SEQ ID NO: 487916 - RNA, 19 nt, Homo sapiens
  misc_RNA (1)...(19): siRNA sense strand
gagucuggaugaagaguuu

SEQ ID NO: 487917 - RNA, 19 nt, Homo sapiens
  misc_RNA (1)...(19): siRNA sense strand
gaagaaccaguuacagauc

SEQ ID NO: 487918 - RNA, 19 nt, Homo sapiens
  misc_RNA (1)...(19): siRNA sense strand
gugaagaaccaguuacaga

SEQ ID NO: 487919 - RNA, 19 nt, Homo sapiens
  misc_RNA (1)...(19): siRNA sense strand
ugaagaaccaguuacagau

SEQ ID NO: 487920 - RNA, 19 nt, Homo sapiens
  misc_RNA (1)...(19): siRNA sense strand
cgaaauaaucagcuucaag

SEQ ID NO: 487921 - RNA, 19 nt, Homo sapiens
  misc_RNA (1)...(19): siRNA sense strand
uggugagucuggaugaaga

SEQ ID NO: 487922 - RNA, 19 nt, Homo sapiens
  misc_RNA (1)...(19): siRNA sense strand
ggaacuacaacgccaagac

SEQ ID NO: 487923 - RNA, 19 nt, Homo sapiens
  misc_RNA (1)...(19): siRNA sense strand
ugaagaguuugaggaccuu

SEQ ID NO: 487924 - RNA, 19 nt, Homo sapiens
  misc_RNA (1)...(19): siRNA sense strand
gaaccuagcucccgugaag

SEQ ID NO: 487925 - RNA, 19 nt, Homo sapiens
  misc_RNA (1)...(19): siRNA sense strand
gaaauaaucagcuucaagu

SEQ ID NO: 487926 - RNA, 19 nt, Homo sapiens
  misc_RNA (1)...(19): siRNA sense strand
gagucuggaugaagaguuu

SEQ ID NO: 487927 - RNA, 19 nt, Homo sapiens
  misc_RNA (1)...(19): siRNA sense strand
gaagaaccaguuacagauc

SEQ ID NO: 487928 - RNA, 19 nt, Homo sapiens
  misc_RNA (1)...(19): siRNA sense strand
gugaagaaccaguuacaga

SEQ ID NO: 487929 - RNA, 19 nt, Homo sapiens
  misc_RNA (1)...(19): siRNA sense strand
ugaagaaccaguuacagau

SEQ ID NO: 487930 - RNA, 19 nt, Homo sapiens
  misc_RNA (1)...(19): siRNA sense strand
cgaaauaaucagcuucaag

SEQ ID NO: 487931 - RNA, 19 nt, Homo sapiens
  misc_RNA (1)...(19): siRNA sense strand
uggugagucuggaugaaga

SEQ ID NO: 487932 - RNA, 19 nt, Homo sapiens
  misc_RNA (1)...(19): siRNA sense strand
ggaacuacaacgccaagac

SEQ ID NO: 487933 - RNA, 19 nt, Homo sapiens
  misc_RNA (1)...(19): siRNA sense strand
ugaagaguuugaggaccuu

SEQ ID NO: 487934 - RNA, 19 nt, Homo sapiens
  misc_RNA (1)...(19): siRNA sense strand
ggacaucuaugacaaauau

SEQ ID NO: 487935 - RNA, 19 nt, Homo sapiens
  misc_RNA (1)...(19): siRNA sense strand
ugaagaagauggccaguua

SEQ ID NO: 487936 - RNA, 19 nt, Homo sapiens
  misc_RNA (1)...(19): siRNA sense strand
ugacaaauauggcaaagaa

SEQ ID NO: 487937 - RNA, 19 nt, Homo sapiens
  misc_RNA (1)...(19): siRNA sense strand
gaaguggcauccagauaaa

SEQ ID NO: 487938 - RNA, 19 nt, Homo sapiens
  misc_RNA (1)...(19): siRNA sense strand
cgagaacggucaagaaaga

SEQ ID NO: 487939 - RNA, 19 nt, Homo sapiens
  misc_RNA (1)...(19): siRNA sense strand
caaagagaauugucgagaa

SEQ ID NO: 487940 - RNA, 19 nt, Homo sapiens
  misc_RNA (1)...(19): siRNA sense strand
gaagauggccaguuaaagu

SEQ ID NO: 487941 - RNA, 19 nt, Homo sapiens
  misc_RNA (1)...(19): siRNA sense strand
gaguagaaguugaagaaga

SEQ ID NO: 487942 - RNA, 19 nt, Homo sapiens
  misc_RNA (1)...(19): siRNA sense strand
ggauuacuaugaaguucua

SEQ ID NO: 487943 - RNA, 19 nt, Homo sapiens
  misc_RNA (1)...(19): siRNA sense strand
ucaaaucgauaucaacuuc

SEQ ID NO: 487944 - RNA, 19 nt, Homo sapiens
  misc_RNA (1)...(19): siRNA sense strand
gaugaugucuucagggaau

SEQ ID NO: 487945 - RNA, 19 nt, Homo sapiens
  misc_RNA (1)...(19): siRNA sense strand
gcaaguagcggaggcauau

SEQ ID NO: 487946 - RNA, 19 nt, Homo sapiens
  misc_RNA (1)...(19): siRNA sense strand
uaacccagaugaugucuuc

SEQ ID NO: 487947 - RNA, 19 nt, Homo sapiens
  misc_RNA (1)...(19): siRNA sense strand
ugaaguggcauccagauaa

SEQ ID NO: 487948 - RNA, 19 nt, Homo sapiens
  misc_RNA (1)...(19): siRNA sense strand
gaagugcugucggaugcua

SEQ ID NO: 487949 - RNA, 19 nt, Homo sapiens
  misc_RNA (1)...(19): siRNA sense strand
ugacaguccauuugaauuu

SEQ ID NO: 487950 - RNA, 19 nt, Homo sapiens
  misc_RNA (1)...(19): siRNA sense strand
uaaagaagaagcagagaga

SEQ ID NO: 487951 - RNA, 19 nt, Homo sapiens
  misc_RNA (1)...(19): siRNA sense strand
caagaaagaguagaaguug

SEQ ID NO: 487952 - RNA, 19 nt, Homo sapiens
  misc_RNA (1)...(19): siRNA sense strand
gcaaagaaggauuaaaugg

SEQ ID NO: 487953 - RNA, 19 nt, Homo sapiens
  misc_RNA (1)...(19): siRNA sense strand
gaacggucaagaaagagua

SEQ ID NO: 487954 - RNA, 19 nt, Homo sapiens
  misc_RNA (1)...(19): siRNA sense strand
gaagaagauggccaguuaa

SEQ ID NO: 487955 - RNA, 19 nt, Homo sapiens
  misc_RNA (1)...(19): siRNA sense strand
gcugucggaugcuaagaaa

SEQ ID NO: 487956 - RNA, 19 nt, Homo sapiens
  misc_RNA (1)...(19): siRNA sense strand
gauacaggauuuacuucau

SEQ ID NO: 487957 - RNA, 19 nt, Homo sapiens
  misc_RNA (1)...(19): siRNA sense strand
cgauaucaacuucaacuaa

SEQ ID NO: 487958 - RNA, 19 nt, Homo sapiens
  misc_RNA (1)...(19): siRNA sense strand
caacuaaaaugguuaaugg

SEQ ID NO: 487959 - RNA, 19 nt, Homo sapiens
  misc_RNA (1)...(19): siRNA sense strand
uaagaaacgggacaucuau

SEQ ID NO: 487960 - RNA, 19 nt, Homo sapiens
  misc_RNA (1)...(19): siRNA sense strand
gacaguccauuugaauuug

SEQ ID NO: 487961 - RNA, 19 nt, Homo sapiens
  misc_RNA (1)...(19): siRNA sense strand
ucaguggauuuccgucuuu

SEQ ID NO: 487962 - RNA, 19 nt, Homo sapiens
  misc_RNA (1)...(19): siRNA sense strand
caaagaaggauuaaauggu

SEQ ID NO: 487963 - RNA, 19 nt, Homo sapiens
  misc_RNA (1)...(19): siRNA sense strand
ucaagaaagaguagaaguu

SEQ ID NO: 487964 - RNA, 19 nt, Homo sapiens
  misc_RNA (1)...(19): siRNA sense strand
cuaagaaacgggacaucua

SEQ ID NO: 487965 - RNA, 19 nt, Homo sapiens
  misc_RNA (1)...(19): siRNA sense strand
gaagggacccauuuucauu

SEQ ID NO: 487966 - RNA, 19 nt, Homo sapiens
  misc_RNA (1)...(19): siRNA sense strand
agaaagaguagaaguugaa

SEQ ID NO: 487967 - RNA, 19 nt, Homo sapiens
  misc_RNA (1)...(19): siRNA sense strand
uggcaaagaaggauuaaau

SEQ ID NO: 487968 - RNA, 19 nt, Homo sapiens
  misc_RNA (1)...(19): siRNA sense strand
aagaaagaguagaaguuga

SEQ ID NO: 487969 - RNA, 19 nt, Homo sapiens
  misc_RNA (1)...(19): siRNA sense strand
aaagagaauugucgagaac

SEQ ID NO: 487970 - RNA, 19 nt, Homo sapiens
  misc_RNA (1)...(19): siRNA sense strand
aagaguagaaguugaagaa

SEQ ID NO: 487971 - RNA, 19 nt, Homo sapiens
  misc_RNA (1)...(19): siRNA sense strand
aguagaaguugaagaagau

SEQ ID NO: 487972 - RNA, 19 nt, Homo sapiens
  misc_RNA (1)...(19): siRNA sense strand
agaaacgggacaucuauga

SEQ ID NO: 487973 - RNA, 19 nt, Homo sapiens
  misc_RNA (1)...(19): siRNA sense strand
gggccucacuucauucucu

SEQ ID NO: 487974 - RNA, 19 nt, Homo sapiens
  misc_RNA (1)...(19): siRNA sense strand
ggaggagguggaagucauu

SEQ ID NO: 487975 - RNA, 19 nt, Homo sapiens
  misc_RNA (1)...(19): siRNA sense strand
caaauauggcaaagaagga

SEQ ID NO: 487976 - RNA, 19 nt, Homo sapiens
  misc_RNA (1)...(19): siRNA sense strand
gggcaacuucaaaucgaua

SEQ ID NO: 487977 - RNA, 19 nt, Homo sapiens
  misc_RNA (1)...(19): siRNA sense strand
ggcaaagaaggauuaaaug

SEQ ID NO: 487978 - RNA, 19 nt, Homo sapiens
  misc_RNA (1)...(19): siRNA sense strand
aagaagauggccaguuaaa

SEQ ID NO: 487979 - RNA, 19 nt, Homo sapiens
  misc_RNA (1)...(19): siRNA sense strand
caacuucaaaucgauauca

SEQ ID NO: 487980 - RNA, 19 nt, Homo sapiens
  misc_RNA (1)...(19): siRNA sense strand
aagaagaagcagagagaaa

SEQ ID NO: 487981 - RNA, 19 nt, Homo sapiens
  misc_RNA (1)...(19): siRNA sense strand
ggacuucuuugggaaucga

SEQ ID NO: 487982 - RNA, 19 nt, Homo sapiens
  misc_RNA (1)...(19): siRNA sense strand
guaguggcaugggcaacuu

SEQ ID NO: 487983 - RNA, 19 nt, Homo sapiens
  misc_RNA (1)...(19): siRNA sense strand
gucgagaacggucaagaaa

SEQ ID NO: 487984 - RNA, 19 nt, Homo sapiens
  misc_RNA (1)...(19): siRNA sense strand
aaacgggacaucuaugaca

SEQ ID NO: 487985 - RNA, 19 nt, Homo sapiens
  misc_RNA (1)...(19): siRNA sense strand
gaggacuucuuugggaauc

SEQ ID NO: 487986 - RNA, 19 nt, Homo sapiens
  misc_RNA (1)...(19): siRNA sense strand
gcuaagaaacgggacaucu

SEQ ID NO: 487987 - RNA, 19 nt, Homo sapiens
  misc_RNA (1)...(19): siRNA sense strand
uggcaugggcaacuucaaa

SEQ ID NO: 487988 - RNA, 19 nt, Homo sapiens
  misc_RNA (1)...(19): siRNA sense strand
gguggauuacuaugaaguu

SEQ ID NO: 487989 - RNA, 19 nt, Homo sapiens
  misc_RNA (1)...(19): siRNA sense strand
gaaacgggacaucuaugac

SEQ ID NO: 487990 - RNA, 19 nt, Homo sapiens
  misc_RNA (1)...(19): siRNA sense strand
aaaggcauaucggaaacug

SEQ ID NO: 487991 - RNA, 19 nt, Homo sapiens
  misc_RNA (1)...(19): siRNA sense strand
cgggacaucuaugacaaau

SEQ ID NO: 487992 - RNA, 19 nt, Homo sapiens
  misc_RNA (1)...(19): siRNA sense strand
gaaagaguagaaguugaag

SEQ ID NO: 487993 - RNA, 19 nt, Homo sapiens
  misc_RNA (1)...(19): siRNA sense strand
gcaugggcaacuucaaauc

SEQ ID NO: 487994 - RNA, 19 nt, Homo sapiens
  misc_RNA (1)...(19): siRNA sense strand
uaucggaaacuggcacuga

SEQ ID NO: 487995 - RNA, 19 nt, Homo sapiens
  misc_RNA (1)...(19): siRNA sense strand
gagaaaauucaagcaagua

SEQ ID NO: 487996 - RNA, 19 nt, Homo sapiens
  misc_RNA (1)...(19): siRNA sense strand
guggauuacuaugaaguuc

SEQ ID NO: 487997 - RNA, 19 nt, Homo sapiens
  misc_RNA (1)...(19): siRNA sense strand
gaggagguggaagucauuu

SEQ ID NO: 487998 - RNA, 19 nt, Homo sapiens
  misc_RNA (1)...(19): siRNA sense strand
gggacaucuaugacaaaua

SEQ ID NO: 487999 - RNA, 19 nt, Homo sapiens
  misc_RNA (1)...(19): siRNA sense strand
aacgggacaucuaugacaa

SEQ ID NO: 488000 - RNA, 19 nt, Homo sapiens
  misc_RNA (1)...(19): siRNA sense strand
ugauacaggauuuacuuca

SEQ ID NO: 488001 - RNA, 19 nt, Homo sapiens
  misc_RNA (1)...(19): siRNA sense strand
ggcaugggcaacuucaaau

SEQ ID NO: 488002 - RNA, 19 nt, Homo sapiens
  misc_RNA (1)...(19): siRNA sense strand
cugaaguggcauccagaua

SEQ ID NO: 488003 - RNA, 19 nt, Homo sapiens
  misc_RNA (1)...(19): siRNA sense strand
ggccucacuucauucucuu

SEQ ID NO: 488004 - RNA, 19 nt, Homo sapiens
  misc_RNA (1)...(19): siRNA sense strand
gaagaagcagagagaaaau

SEQ ID NO: 488005 - RNA, 19 nt, Homo sapiens
  misc_RNA (1)...(19): siRNA sense strand
ggagguggaagucauuuug

SEQ ID NO: 488006 - RNA, 19 nt, Homo sapiens
  misc_RNA (1)...(19): siRNA sense strand
ggacaucuaugacaaauau

SEQ ID NO: 488007 - RNA, 19 nt, Homo sapiens
  misc_RNA (1)...(19): siRNA sense strand
ugaagaagauggccaguua

SEQ ID NO: 488008 - RNA, 19 nt, Homo sapiens
  misc_RNA (1)...(19): siRNA sense strand
ugacaaauauggcaaagaa

SEQ ID NO: 488009 - RNA, 19 nt, Homo sapiens
  misc_RNA (1)...(19): siRNA sense strand
gaaguggcauccagauaaa

SEQ ID NO: 488010 - RNA, 19 nt, Homo sapiens
  misc_RNA (1)...(19): siRNA sense strand
cgagaacggucaagaaaga

SEQ ID NO: 488011 - RNA, 19 nt, Homo sapiens
  misc_RNA (1)...(19): siRNA sense strand
caaagagaauugucgagaa

SEQ ID NO: 488012 - RNA, 19 nt, Homo sapiens
  misc_RNA (1)...(19): siRNA sense strand
gaagauggccaguuaaagu

SEQ ID NO: 488013 - RNA, 19 nt, Homo sapiens
  misc_RNA (1)...(19): siRNA sense strand
gaguagaaguugaagaaga

SEQ ID NO: 488014 - RNA, 19 nt, Homo sapiens
  misc_RNA (1)...(19): siRNA sense strand
ggauuacuaugaaguucua

SEQ ID NO: 488015 - RNA, 19 nt, Homo sapiens
  misc_RNA (1)...(19): siRNA sense strand
ucaaaucgauaucaacuuc

SEQ ID NO: 488016 - RNA, 19 nt, Homo sapiens
  misc_RNA (1)...(19): siRNA sense strand
gaugaugucuucagggaau

SEQ ID NO: 488017 - RNA, 19 nt, Homo sapiens
  misc_RNA (1)...(19): siRNA sense strand
gcaaguagcggaggcauau

SEQ ID NO: 488018 - RNA, 19 nt, Homo sapiens
  misc_RNA (1)...(19): siRNA sense strand
uaacccagaugaugucuuc

SEQ ID NO: 488019 - RNA, 19 nt, Homo sapiens
  misc_RNA (1)...(19): siRNA sense strand
ugaaguggcauccagauaa

SEQ ID NO: 488020 - RNA, 19 nt, Homo sapiens
  misc_RNA (1)...(19): siRNA sense strand
gaagugcugucggaugcua

SEQ ID NO: 488021 - RNA, 19 nt, Homo sapiens
  misc_RNA (1)...(19): siRNA sense strand
ugacaguccauuugaauuu

SEQ ID NO: 488022 - RNA, 19 nt, Homo sapiens
  misc_RNA (1)...(19): siRNA sense strand
uaaagaagaagcagagaga

SEQ ID NO: 488023 - RNA, 19 nt, Homo sapiens
  misc_RNA (1)...(19): siRNA sense strand
caagaaagaguagaaguug

SEQ ID NO: 488024 - RNA, 19 nt, Homo sapiens
  misc_RNA (1)...(19): siRNA sense strand
gcaaagaaggauuaaaugg

SEQ ID NO: 488025 - RNA, 19 nt, Homo sapiens
  misc_RNA (1)...(19): siRNA sense strand
gaacggucaagaaagagua

SEQ ID NO: 488026 - RNA, 19 nt, Homo sapiens
  misc_RNA (1)...(19): siRNA sense strand
gaagaagauggccaguuaa

SEQ ID NO: 488027 - RNA, 19 nt, Homo sapiens
  misc_RNA (1)...(19): siRNA sense strand
gcugucggaugcuaagaaa

SEQ ID NO: 488028 - RNA, 19 nt, Homo sapiens
  misc_RNA (1)...(19): siRNA sense strand
gauacaggauuuacuucau

SEQ ID NO: 488029 - RNA, 19 nt, Homo sapiens
  misc_RNA (1)...(19): siRNA sense strand
cgauaucaacuucaacuaa

SEQ ID NO: 488030 - RNA, 19 nt, Homo sapiens
  misc_RNA (1)...(19): siRNA sense strand
caacuaaaaugguuaaugg

SEQ ID NO: 488031 - RNA, 19 nt, Homo sapiens
  misc_RNA (1)...(19): siRNA sense strand
uaagaaacgggacaucuau

SEQ ID NO: 488032 - RNA, 19 nt, Homo sapiens
  misc_RNA (1)...(19): siRNA sense strand
gacaguccauuugaauuug

SEQ ID NO: 488033 - RNA, 19 nt, Homo sapiens
  misc_RNA (1)...(19): siRNA sense strand
ucaguggauuuccgucuuu

SEQ ID NO: 488034 - RNA, 19 nt, Homo sapiens
  misc_RNA (1)...(19): siRNA sense strand
caaagaaggauuaaauggu

SEQ ID NO: 488035 - RNA, 19 nt, Homo sapiens
  misc_RNA (1)...(19): siRNA sense strand
ucaagaaagaguagaaguu

SEQ ID NO: 488036 - RNA, 19 nt, Homo sapiens
  misc_RNA (1)...(19): siRNA sense strand
cuaagaaacgggacaucua

SEQ ID NO: 488037 - RNA, 19 nt, Homo sapiens
  misc_RNA (1)...(19): siRNA sense strand
gaagggacccauuuucauu

SEQ ID NO: 488038 - RNA, 19 nt, Homo sapiens
  misc_RNA (1)...(19): siRNA sense strand
agaaagaguagaaguugaa

SEQ ID NO: 488039 - RNA, 19 nt, Homo sapiens
  misc_RNA (1)...(19): siRNA sense strand
uggcaaagaaggauuaaau

SEQ ID NO: 488040 - RNA, 19 nt, Homo sapiens
  misc_RNA (1)...(19): siRNA sense strand
aagaaagaguagaaguuga

SEQ ID NO: 488041 - RNA, 19 nt, Homo sapiens
  misc_RNA (1)...(19): siRNA sense strand
aaagagaauugucgagaac

SEQ ID NO: 488042 - RNA, 19 nt, Homo sapiens
  misc_RNA (1)...(19): siRNA sense strand
aagaguagaaguugaagaa

SEQ ID NO: 488043 - RNA, 19 nt, Homo sapiens
  misc_RNA (1)...(19): siRNA sense strand
aguagaaguugaagaagau

SEQ ID NO: 488044 - RNA, 19 nt, Homo sapiens
  misc_RNA (1)...(19): siRNA sense strand
agaaacgggacaucuauga

SEQ ID NO: 488045 - RNA, 19 nt, Homo sapiens
  misc_RNA (1)...(19): siRNA sense strand
gggccucacuucauucucu

SEQ ID NO: 488046 - RNA, 19 nt, Homo sapiens
  misc_RNA (1)...(19): siRNA sense strand
ggaggagguggaagucauu

SEQ ID NO: 488047 - RNA, 19 nt, Homo sapiens
  misc_RNA (1)...(19): siRNA sense strand
caaauauggcaaagaagga

SEQ ID NO: 488048 - RNA, 19 nt, Homo sapiens
  misc_RNA (1)...(19): siRNA sense strand
gggcaacuucaaaucgaua

SEQ ID NO: 488049 - RNA, 19 nt, Homo sapiens
  misc_RNA (1)...(19): siRNA sense strand
ggcaaagaaggauuaaaug

SEQ ID NO: 488050 - RNA, 19 nt, Homo sapiens
  misc_RNA (1)...(19): siRNA sense strand
aagaagauggccaguuaaa

SEQ ID NO: 488051 - RNA, 19 nt, Homo sapiens
  misc_RNA (1)...(19): siRNA sense strand
caacuucaaaucgauauca

SEQ ID NO: 488052 - RNA, 19 nt, Homo sapiens
  misc_RNA (1)...(19): siRNA sense strand
aagaagaagcagagagaaa

SEQ ID NO: 488053 - RNA, 19 nt, Homo sapiens
  misc_RNA (1)...(19): siRNA sense strand
ggacuucuuugggaaucga

SEQ ID NO: 488054 - RNA, 19 nt, Homo sapiens
  misc_RNA (1)...(19): siRNA sense strand
guaguggcaugggcaacuu

SEQ ID NO: 488055 - RNA, 19 nt, Homo sapiens
  misc_RNA (1)...(19): siRNA sense strand
gucgagaacggucaagaaa

SEQ ID NO: 488056 - RNA, 19 nt, Homo sapiens
  misc_RNA (1)...(19): siRNA sense strand
aaacgggacaucuaugaca

SEQ ID NO: 488057 - RNA, 19 nt, Homo sapiens
  misc_RNA (1)...(19): siRNA sense strand
gaggacuucuuugggaauc

SEQ ID NO: 488058 - RNA, 19 nt, Homo sapiens
  misc_RNA (1)...(19): siRNA sense strand
gcuaagaaacgggacaucu

SEQ ID NO: 488059 - RNA, 19 nt, Homo sapiens
  misc_RNA (1)...(19): siRNA sense strand
uggcaugggcaacuucaaa

SEQ ID NO: 488060 - RNA, 19 nt, Homo sapiens
  misc_RNA (1)...(19): siRNA sense strand
gguggauuacuaugaaguu

SEQ ID NO: 488061 - RNA, 19 nt, Homo sapiens
  misc_RNA (1)...(19): siRNA sense strand
gaaacgggacaucuaugac

SEQ ID NO: 488062 - RNA, 19 nt, Homo sapiens
  misc_RNA (1)...(19): siRNA sense strand
aaaggcauaucggaaacug

SEQ ID NO: 488063 - RNA, 19 nt, Homo sapiens
  misc_RNA (1)...(19): siRNA sense strand
cgggacaucuaugacaaau

SEQ ID NO: 488064 - RNA, 19 nt, Homo sapiens
  misc_RNA (1)...(19): siRNA sense strand
gaaagaguagaaguugaag

SEQ ID NO: 488065 - RNA, 19 nt, Homo sapiens
  misc_RNA (1)...(19): siRNA sense strand
gcaugggcaacuucaaauc

SEQ ID NO: 488066 - RNA, 19 nt, Homo sapiens
  misc_RNA (1)...(19): siRNA sense strand
uaucggaaacuggcacuga

SEQ ID NO: 488067 - RNA, 19 nt, Homo sapiens
  misc_RNA (1)...(19): siRNA sense strand
gagaaaauucaagcaagua

SEQ ID NO: 488068 - RNA, 19 nt, Homo sapiens
  misc_RNA (1)...(19): siRNA sense strand
guggauuacuaugaaguuc

SEQ ID NO: 488069 - RNA, 19 nt, Homo sapiens
  misc_RNA (1)...(19): siRNA sense strand
gaggagguggaagucauuu

SEQ ID NO: 488070 - RNA, 19 nt, Homo sapiens
  misc_RNA (1)...(19): siRNA sense strand
gggacaucuaugacaaaua

SEQ ID NO: 488071 - RNA, 19 nt, Homo sapiens
  misc_RNA (1)...(19): siRNA sense strand
aacgggacaucuaugacaa

SEQ ID NO: 488072 - RNA, 19 nt, Homo sapiens
  misc_RNA (1)...(19): siRNA sense strand
ugauacaggauuuacuuca

SEQ ID NO: 488073 - RNA, 19 nt, Homo sapiens
  misc_RNA (1)...(19): siRNA sense strand
ggcaugggcaacuucaaau

SEQ ID NO: 488074 - RNA, 19 nt, Homo sapiens
  misc_RNA (1)...(19): siRNA sense strand
cugaaguggcauccagaua

SEQ ID NO: 488075 - RNA, 19 nt, Homo sapiens
  misc_RNA (1)...(19): siRNA sense strand
ggccucacuucauucucuu

SEQ ID NO: 488076 - RNA, 19 nt, Homo sapiens
  misc_RNA (1)...(19): siRNA sense strand
gaagaagcagagagaaaau

SEQ ID NO: 488077 - RNA, 19 nt, Homo sapiens
  misc_RNA (1)...(19): siRNA sense strand
ggagguggaagucauuuug

SEQ ID NO: 488078 - RNA, 19 nt, Homo sapiens
  misc_RNA (1)...(19): siRNA sense strand
gcacagacauccuauuuca

SEQ ID NO: 488079 - RNA, 19 nt, Homo sapiens
  misc_RNA (1)...(19): siRNA sense strand
gcagggaccuucuauauca

SEQ ID NO: 488080 - RNA, 19 nt, Homo sapiens
  misc_RNA (1)...(19): siRNA sense strand
gaacagcuauauucacaga

SEQ ID NO: 488081 - RNA, 19 nt, Homo sapiens
  misc_RNA (1)...(19): siRNA sense strand
ggacagaacagcuauauuc

SEQ ID NO: 488082 - RNA, 19 nt, Homo sapiens
  misc_RNA (1)...(19): siRNA sense strand
ggugaaauguacccaguua

SEQ ID NO: 488083 - RNA, 19 nt, Homo sapiens
  misc_RNA (1)...(19): siRNA sense strand
gaaauuacggauuccaaua

SEQ ID NO: 488084 - RNA, 19 nt, Homo sapiens
  misc_RNA (1)...(19): siRNA sense strand
ggaauggccucaacaucaa

SEQ ID NO: 488085 - RNA, 19 nt, Homo sapiens
  misc_RNA (1)...(19): siRNA sense strand
ggaagaggcugcaugucaa

SEQ ID NO: 488086 - RNA, 19 nt, Homo sapiens
  misc_RNA (1)...(19): siRNA sense strand
guacaaaccaacagugaua

SEQ ID NO: 488087 - RNA, 19 nt, Homo sapiens
  misc_RNA (1)...(19): siRNA sense strand
uagaugagcuaacacauga

SEQ ID NO: 488088 - RNA, 19 nt, Homo sapiens
  misc_RNA (1)...(19): siRNA sense strand
gaaaauaccuaucgcaaau

SEQ ID NO: 488089 - RNA, 19 nt, Homo sapiens
  misc_RNA (1)...(19): siRNA sense strand
ccauacaucugauaauuug

SEQ ID NO: 488090 - RNA, 19 nt, Homo sapiens
  misc_RNA (1)...(19): siRNA sense strand
uuauauagcugcccaggua

SEQ ID NO: 488091 - RNA, 19 nt, Homo sapiens
  misc_RNA (1)...(19): siRNA sense strand
agacacagcucuucugaug

SEQ ID NO: 488092 - RNA, 19 nt, Homo sapiens
  misc_RNA (1)...(19): siRNA sense strand
acacugcgauuguuuauau

SEQ ID NO: 488093 - RNA, 19 nt, Homo sapiens
  misc_RNA (1)...(19): siRNA sense strand
gaaauguacccaguuagua

SEQ ID NO: 488094 - RNA, 19 nt, Homo sapiens
  misc_RNA (1)...(19): siRNA sense strand
acacaugaguuucuacaaa

SEQ ID NO: 488095 - RNA, 19 nt, Homo sapiens
  misc_RNA (1)...(19): siRNA sense strand
ucucucagcuuacaauaaa

SEQ ID NO: 488096 - RNA, 19 nt, Homo sapiens
  misc_RNA (1)...(19): siRNA sense strand
ucacagaccugacaaaauu

SEQ ID NO: 488097 - RNA, 19 nt, Homo sapiens
  misc_RNA (1)...(19): siRNA sense strand
gccaguaccucuaaauuca

SEQ ID NO: 488098 - RNA, 19 nt, Homo sapiens
  misc_RNA (1)...(19): siRNA sense strand
gcagagaccauaaggagaa

SEQ ID NO: 488099 - RNA, 19 nt, Homo sapiens
  misc_RNA (1)...(19): siRNA sense strand
cauucaagcccacauauua

SEQ ID NO: 488100 - RNA, 19 nt, Homo sapiens
  misc_RNA (1)...(19): siRNA sense strand
acacagcucuucugaugaa

SEQ ID NO: 488101 - RNA, 19 nt, Homo sapiens
  misc_RNA (1)...(19): siRNA sense strand
ucacugaaauuacggauuc

SEQ ID NO: 488102 - RNA, 19 nt, Homo sapiens
  misc_RNA (1)...(19): siRNA sense strand
gcaccauucuuucaccaaa

SEQ ID NO: 488103 - RNA, 19 nt, Homo sapiens
  misc_RNA (1)...(19): siRNA sense strand
gcacaugcuugucuucauc

SEQ ID NO: 488104 - RNA, 19 nt, Homo sapiens
  misc_RNA (1)...(19): siRNA sense strand
ggagaucccuguaucaacu

SEQ ID NO: 488105 - RNA, 19 nt, Homo sapiens
  misc_RNA (1)...(19): siRNA sense strand
caacaggaaugccaaguac

SEQ ID NO: 488106 - RNA, 19 nt, Homo sapiens
  misc_RNA (1)...(19): siRNA sense strand
cagaacagcuauauucaca

SEQ ID NO: 488107 - RNA, 19 nt, Homo sapiens
  misc_RNA (1)...(19): siRNA sense strand
ggaaagcauuggugggaau

SEQ ID NO: 488108 - RNA, 19 nt, Homo sapiens
  misc_RNA (1)...(19): siRNA sense strand
gauguaagggaucauuaua

SEQ ID NO: 488109 - RNA, 19 nt, Homo sapiens
  misc_RNA (1)...(19): siRNA sense strand
caacagugauagcaugugu

SEQ ID NO: 488110 - RNA, 19 nt, Homo sapiens
  misc_RNA (1)...(19): siRNA sense strand
gcaacaggaaugccaagua

SEQ ID NO: 488111 - RNA, 19 nt, Homo sapiens
  misc_RNA (1)...(19): siRNA sense strand
gaacugguuauacuugaaa

SEQ ID NO: 488112 - RNA, 19 nt, Homo sapiens
  misc_RNA (1)...(19): siRNA sense strand
aauaucgucuacugcauua

SEQ ID NO: 488113 - RNA, 19 nt, Homo sapiens
  misc_RNA (1)...(19): siRNA sense strand
cagcagcgguggcaguaaa

SEQ ID NO: 488114 - RNA, 19 nt, Homo sapiens
  misc_RNA (1)...(19): siRNA sense strand
cucaaugucucucagcuua

SEQ ID NO: 488115 - RNA, 19 nt, Homo sapiens
  misc_RNA (1)...(19): siRNA sense strand
ccucuaaauucaggaaaua

SEQ ID NO: 488116 - RNA, 19 nt, Homo sapiens
  misc_RNA (1)...(19): siRNA sense strand
aaaaguagauggacaggua

SEQ ID NO: 488117 - RNA, 19 nt, Homo sapiens
  misc_RNA (1)...(19): siRNA sense strand
gaaaccauaaugcuacaaa

SEQ ID NO: 488118 - RNA, 19 nt, Homo sapiens
  misc_RNA (1)...(19): siRNA sense strand
gaacauguuaucaaaguag

SEQ ID NO: 488119 - RNA, 19 nt, Homo sapiens
  misc_RNA (1)...(19): siRNA sense strand
gccagcagcaguucuguua

SEQ ID NO: 488120 - RNA, 19 nt, Homo sapiens
  misc_RNA (1)...(19): siRNA sense strand
ucacuggugugccuacaaa

SEQ ID NO: 488121 - RNA, 19 nt, Homo sapiens
  misc_RNA (1)...(19): siRNA sense strand
gaaacuggagggcuaauca

SEQ ID NO: 488122 - RNA, 19 nt, Homo sapiens
  misc_RNA (1)...(19): siRNA sense strand
gcuaacacaugaguuucua

SEQ ID NO: 488123 - RNA, 19 nt, Homo sapiens
  misc_RNA (1)...(19): siRNA sense strand
uaaaugugaugcuuaccuu

SEQ ID NO: 488124 - RNA, 19 nt, Homo sapiens
  misc_RNA (1)...(19): siRNA sense strand
ucuguuacuucucccauua

SEQ ID NO: 488125 - RNA, 19 nt, Homo sapiens
  misc_RNA (1)...(19): siRNA sense strand
acacagugccgacggaaua

SEQ ID NO: 488126 - RNA, 19 nt, Homo sapiens
  misc_RNA (1)...(19): siRNA sense strand
ccaauaccacccacugaua

SEQ ID NO: 488127 - RNA, 19 nt, Homo sapiens
  misc_RNA (1)...(19): siRNA sense strand
ugaagaagauucgaaacug

SEQ ID NO: 488128 - RNA, 19 nt, Homo sapiens
  misc_RNA (1)...(19): siRNA sense strand
caauaccacccacugauaa

SEQ ID NO: 488129 - RNA, 19 nt, Homo sapiens
  misc_RNA (1)...(19): siRNA sense strand
cagcagggaccuucuauau

SEQ ID NO: 488130 - RNA, 19 nt, Homo sapiens
  misc_RNA (1)...(19): siRNA sense strand
caucuuugguccagaauuc

SEQ ID NO: 488131 - RNA, 19 nt, Homo sapiens
  misc_RNA (1)...(19): siRNA sense strand
caucaagacucagcaagga

SEQ ID NO: 488132 - RNA, 19 nt, Homo sapiens
  misc_RNA (1)...(19): siRNA sense strand
cacaugaguuucuacaaau

SEQ ID NO: 488133 - RNA, 19 nt, Homo sapiens
  misc_RNA (1)...(19): siRNA sense strand
gagcaaaaguuccaaaagu

SEQ ID NO: 488134 - RNA, 19 nt, Homo sapiens
  misc_RNA (1)...(19): siRNA sense strand
cauauuagcagagaccaua

SEQ ID NO: 488135 - RNA, 19 nt, Homo sapiens
  misc_RNA (1)...(19): siRNA sense strand
gggaacagcuggagaacac

SEQ ID NO: 488136 - RNA, 19 nt, Homo sapiens
  misc_RNA (1)...(19): siRNA sense strand
agaaacaggagacaucuuu

SEQ ID NO: 488137 - RNA, 19 nt, Homo sapiens
  misc_RNA (1)...(19): siRNA sense strand
acagcuauauucacagaaa

SEQ ID NO: 488138 - RNA, 19 nt, Homo sapiens
  misc_RNA (1)...(19): siRNA sense strand
cuaauagguugaagaagau

SEQ ID NO: 488139 - RNA, 19 nt, Homo sapiens
  misc_RNA (1)...(19): siRNA sense strand
gauacuaaaugugaugcuu

SEQ ID NO: 488140 - RNA, 19 nt, Homo sapiens
  misc_RNA (1)...(19): siRNA sense strand
ggaauaccacccacuguuc

SEQ ID NO: 488141 - RNA, 19 nt, Homo sapiens
  misc_RNA (1)...(19): siRNA sense strand
gaaagcauuggugggaaua

SEQ ID NO: 488142 - RNA, 19 nt, Homo sapiens
  misc_RNA (1)...(19): siRNA sense strand
uaagagcaagcaaggauuu

SEQ ID NO: 488143 - RNA, 19 nt, Homo sapiens
  misc_RNA (1)...(19): siRNA sense strand
aaauguacccaguuaguaa

SEQ ID NO: 488144 - RNA, 19 nt, Homo sapiens
  misc_RNA (1)...(19): siRNA sense strand
gaacagcagcacaaacaag

SEQ ID NO: 488145 - RNA, 19 nt, Homo sapiens
  misc_RNA (1)...(19): siRNA sense strand
caacugauggaaagcauug

SEQ ID NO: 488146 - RNA, 19 nt, Homo sapiens
  misc_RNA (1)...(19): siRNA sense strand
gaaugccaaguacuucaua

SEQ ID NO: 488147 - RNA, 19 nt, Homo sapiens
  misc_RNA (1)...(19): siRNA sense strand
gaguggaggcggauaaaga

SEQ ID NO: 488148 - RNA, 19 nt, Homo sapiens
  misc_RNA (1)...(19): siRNA sense strand
ucagaaaccaucuacauca

SEQ ID NO: 488149 - RNA, 19 nt, Homo sapiens
  misc_RNA (1)...(19): siRNA sense strand
ucagagacaccacuucuug

SEQ ID NO: 488150 - RNA, 19 nt, Homo sapiens
  misc_RNA (1)...(19): siRNA sense strand
ucaacagacucaagaacug

SEQ ID NO: 488151 - RNA, 19 nt, Homo sapiens
  misc_RNA (1)...(19): siRNA sense strand
gaacacccacacacagaug

SEQ ID NO: 488152 - RNA, 19 nt, Homo sapiens
  misc_RNA (1)...(19): siRNA sense strand
guucaucuuugguccagaa

SEQ ID NO: 488153 - RNA, 19 nt, Homo sapiens
  misc_RNA (1)...(19): siRNA sense strand
gcuugcaaaugguccaauu

SEQ ID NO: 488154 - RNA, 19 nt, Homo sapiens
  misc_RNA (1)...(19): siRNA sense strand
ucgugaaacuggacaagaa

SEQ ID NO: 488155 - RNA, 19 nt, Homo sapiens
  misc_RNA (1)...(19): siRNA sense strand
gaaacaggagacaucuuug

SEQ ID NO: 488156 - RNA, 19 nt, Homo sapiens
  misc_RNA (1)...(19): siRNA sense strand
ugagcuaacacaugaguuu

SEQ ID NO: 488157 - RNA, 19 nt, Homo sapiens
  misc_RNA (1)...(19): siRNA sense strand
ucuucucgcugguucuuua

SEQ ID NO: 488158 - RNA, 19 nt, Homo sapiens
  misc_RNA (1)...(19): siRNA sense strand
gcacaaacaagggcaguca

SEQ ID NO: 488159 - RNA, 19 nt, Homo sapiens
  misc_RNA (1)...(19): siRNA sense strand
gccauacaucugauaauuu

SEQ ID NO: 488160 - RNA, 19 nt, Homo sapiens
  misc_RNA (1)...(19): siRNA sense strand
gguccagaauuccauuuua

SEQ ID NO: 488161 - RNA, 19 nt, Homo sapiens
  misc_RNA (1)...(19): siRNA sense strand
caaggaagaggcugcaugu

SEQ ID NO: 488162 - RNA, 19 nt, Homo sapiens
  misc_RNA (1)...(19): siRNA sense strand
aaacauucaagcccacaua

SEQ ID NO: 488163 - RNA, 19 nt, Homo sapiens
  misc_RNA (1)...(19): siRNA sense strand
gagaaaagcguaaacuaga

SEQ ID NO: 488164 - RNA, 19 nt, Homo sapiens
  misc_RNA (1)...(19): siRNA sense strand
uaaacaccaugggccaauu

SEQ ID NO: 488165 - RNA, 19 nt, Homo sapiens
  misc_RNA (1)...(19): siRNA sense strand
uggcacagacauccuauuu

SEQ ID NO: 488166 - RNA, 19 nt, Homo sapiens
  misc_RNA (1)...(19): siRNA sense strand
gauaaaagcgccaguaaag

SEQ ID NO: 488167 - RNA, 19 nt, Homo sapiens
  misc_RNA (1)...(19): siRNA sense strand
gcaaggacagaacagcuau

SEQ ID NO: 488168 - RNA, 19 nt, Homo sapiens
  misc_RNA (1)...(19): siRNA sense strand
caagacagccauacaucug

SEQ ID NO: 488169 - RNA, 19 nt, Homo sapiens
  misc_RNA (1)...(19): siRNA sense strand
gcauucauuuggcuugcaa

SEQ ID NO: 488170 - RNA, 19 nt, Homo sapiens
  misc_RNA (1)...(19): siRNA sense strand
cuuacaaccuucugucuuc

SEQ ID NO: 488171 - RNA, 19 nt, Homo sapiens
  misc_RNA (1)...(19): siRNA sense strand
acagacauccuauuucaug

SEQ ID NO: 488172 - RNA, 19 nt, Homo sapiens
  misc_RNA (1)...(19): siRNA sense strand
ccaacagucugcaucuuac

SEQ ID NO: 488173 - RNA, 19 nt, Homo sapiens
  misc_RNA (1)...(19): siRNA sense strand
uagaacagcagcacaaaca

SEQ ID NO: 488174 - RNA, 19 nt, Homo sapiens
  misc_RNA (1)...(19): siRNA sense strand
agccauacaucugauaauu

SEQ ID NO: 488175 - RNA, 19 nt, Homo sapiens
  misc_RNA (1)...(19): siRNA sense strand
gugauggcauuuccucuag

SEQ ID NO: 488176 - RNA, 19 nt, Homo sapiens
  misc_RNA (1)...(19): siRNA sense strand
ucacaaccaccacuccaaa

SEQ ID NO: 488177 - RNA, 19 nt, Homo sapiens
  misc_RNA (1)...(19): siRNA sense strand
gaagaggcugcaugucaau

SEQ ID NO: 488178 - RNA, 19 nt, Homo sapiens
  misc_RNA (1)...(19): siRNA sense strand
gcacagacauccuauuuca

SEQ ID NO: 488179 - RNA, 19 nt, Homo sapiens
  misc_RNA (1)...(19): siRNA sense strand
gcagggaccuucuauauca

SEQ ID NO: 488180 - RNA, 19 nt, Homo sapiens
  misc_RNA (1)...(19): siRNA sense strand
gaacagcuauauucacaga

SEQ ID NO: 488181 - RNA, 19 nt, Homo sapiens
  misc_RNA (1)...(19): siRNA sense strand
ggacagaacagcuauauuc

SEQ ID NO: 488182 - RNA, 19 nt, Homo sapiens
  misc_RNA (1)...(19): siRNA sense strand
ggugaaauguacccaguua

SEQ ID NO: 488183 - RNA, 19 nt, Homo sapiens
  misc_RNA (1)...(19): siRNA sense strand
gaaauuacggauuccaaua

SEQ ID NO: 488184 - RNA, 19 nt, Homo sapiens
  misc_RNA (1)...(19): siRNA sense strand
ggaauggccucaacaucaa

SEQ ID NO: 488185 - RNA, 19 nt, Homo sapiens
  misc_RNA (1)...(19): siRNA sense strand
ggaagaggcugcaugucaa

SEQ ID NO: 488186 - RNA, 19 nt, Homo sapiens
  misc_RNA (1)...(19): siRNA sense strand
guacaaaccaacagugaua

SEQ ID NO: 488187 - RNA, 19 nt, Homo sapiens
  misc_RNA (1)...(19): siRNA sense strand
uagaugagcuaacacauga

SEQ ID NO: 488188 - RNA, 19 nt, Homo sapiens
  misc_RNA (1)...(19): siRNA sense strand
gaaaauaccuaucgcaaau

SEQ ID NO: 488189 - RNA, 19 nt, Homo sapiens
  misc_RNA (1)...(19): siRNA sense strand
ccauacaucugauaauuug

SEQ ID NO: 488190 - RNA, 19 nt, Homo sapiens
  misc_RNA (1)...(19): siRNA sense strand
uuauauagcugcccaggua

SEQ ID NO: 488191 - RNA, 19 nt, Homo sapiens
  misc_RNA (1)...(19): siRNA sense strand
agacacagcucuucugaug

SEQ ID NO: 488192 - RNA, 19 nt, Homo sapiens
  misc_RNA (1)...(19): siRNA sense strand
acacugcgauuguuuauau

SEQ ID NO: 488193 - RNA, 19 nt, Homo sapiens
  misc_RNA (1)...(19): siRNA sense strand
gaaauguacccaguuagua

SEQ ID NO: 488194 - RNA, 19 nt, Homo sapiens
  misc_RNA (1)...(19): siRNA sense strand
acacaugaguuucuacaaa

SEQ ID NO: 488195 - RNA, 19 nt, Homo sapiens
  misc_RNA (1)...(19): siRNA sense strand
ucucucagcuuacaauaaa

SEQ ID NO: 488196 - RNA, 19 nt, Homo sapiens
  misc_RNA (1)...(19): siRNA sense strand
ucacagaccugacaaaauu

SEQ ID NO: 488197 - RNA, 19 nt, Homo sapiens
  misc_RNA (1)...(19): siRNA sense strand
gccaguaccucuaaauuca

SEQ ID NO: 488198 - RNA, 19 nt, Homo sapiens
  misc_RNA (1)...(19): siRNA sense strand
gcagagaccauaaggagaa

SEQ ID NO: 488199 - RNA, 19 nt, Homo sapiens
  misc_RNA (1)...(19): siRNA sense strand
cauucaagcccacauauua

SEQ ID NO: 488200 - RNA, 19 nt, Homo sapiens
  misc_RNA (1)...(19): siRNA sense strand
acacagcucuucugaugaa

SEQ ID NO: 488201 - RNA, 19 nt, Homo sapiens
  misc_RNA (1)...(19): siRNA sense strand
ucacugaaauuacggauuc

SEQ ID NO: 488202 - RNA, 19 nt, Homo sapiens
  misc_RNA (1)...(19): siRNA sense strand
gcaccauucuuucaccaaa

SEQ ID NO: 488203 - RNA, 19 nt, Homo sapiens
  misc_RNA (1)...(19): siRNA sense strand
gcacaugcuugucuucauc

SEQ ID NO: 488204 - RNA, 19 nt, Homo sapiens
  misc_RNA (1)...(19): siRNA sense strand
ggagaucccuguaucaacu

SEQ ID NO: 488205 - RNA, 19 nt, Homo sapiens
  misc_RNA (1)...(19): siRNA sense strand
caacaggaaugccaaguac

SEQ ID NO: 488206 - RNA, 19 nt, Homo sapiens
  misc_RNA (1)...(19): siRNA sense strand
cagaacagcuauauucaca

SEQ ID NO: 488207 - RNA, 19 nt, Homo sapiens
  misc_RNA (1)...(19): siRNA sense strand
ggaaagcauuggugggaau

SEQ ID NO: 488208 - RNA, 19 nt, Homo sapiens
  misc_RNA (1)...(19): siRNA sense strand
gauguaagggaucauuaua

SEQ ID NO: 488209 - RNA, 19 nt, Homo sapiens
  misc_RNA (1)...(19): siRNA sense strand
caacagugauagcaugugu

SEQ ID NO: 488210 - RNA, 19 nt, Homo sapiens
  misc_RNA (1)...(19): siRNA sense strand
gcaacaggaaugccaagua

SEQ ID NO: 488211 - RNA, 19 nt, Homo sapiens
  misc_RNA (1)...(19): siRNA sense strand
gaacugguuauacuugaaa

SEQ ID NO: 488212 - RNA, 19 nt, Homo sapiens
  misc_RNA (1)...(19): siRNA sense strand
aauaucgucuacugcauua

SEQ ID NO: 488213 - RNA, 19 nt, Homo sapiens
  misc_RNA (1)...(19): siRNA sense strand
cagcagcgguggcaguaaa

SEQ ID NO: 488214 - RNA, 19 nt, Homo sapiens
  misc_RNA (1)...(19): siRNA sense strand
cucaaugucucucagcuua

SEQ ID NO: 488215 - RNA, 19 nt, Homo sapiens
  misc_RNA (1)...(19): siRNA sense strand
ccucuaaauucaggaaaua

SEQ ID NO: 488216 - RNA, 19 nt, Homo sapiens
  misc_RNA (1)...(19): siRNA sense strand
aaaaguagauggacaggua

SEQ ID NO: 488217 - RNA, 19 nt, Homo sapiens
  misc_RNA (1)...(19): siRNA sense strand
gaaaccauaaugcuacaaa

SEQ ID NO: 488218 - RNA, 19 nt, Homo sapiens
  misc_RNA (1)...(19): siRNA sense strand
gaacauguuaucaaaguag

SEQ ID NO: 488219 - RNA, 19 nt, Homo sapiens
  misc_RNA (1)...(19): siRNA sense strand
gccagcagcaguucuguua

SEQ ID NO: 488220 - RNA, 19 nt, Homo sapiens
  misc_RNA (1)...(19): siRNA sense strand
ucacuggugugccuacaaa

SEQ ID NO: 488221 - RNA, 19 nt, Homo sapiens
  misc_RNA (1)...(19): siRNA sense strand
gaaacuggagggcuaauca

SEQ ID NO: 488222 - RNA, 19 nt, Homo sapiens
  misc_RNA (1)...(19): siRNA sense strand
gcuaacacaugaguuucua

SEQ ID NO: 488223 - RNA, 19 nt, Homo sapiens
  misc_RNA (1)...(19): siRNA sense strand
uaaaugugaugcuuaccuu

SEQ ID NO: 488224 - RNA, 19 nt, Homo sapiens
  misc_RNA (1)...(19): siRNA sense strand
ucuguuacuucucccauua

SEQ ID NO: 488225 - RNA, 19 nt, Homo sapiens
  misc_RNA (1)...(19): siRNA sense strand
acacagugccgacggaaua

SEQ ID NO: 488226 - RNA, 19 nt, Homo sapiens
  misc_RNA (1)...(19): siRNA sense strand
ccaauaccacccacugaua

SEQ ID NO: 488227 - RNA, 19 nt, Homo sapiens
  misc_RNA (1)...(19): siRNA sense strand
ugaagaagauucgaaacug

SEQ ID NO: 488228 - RNA, 19 nt, Homo sapiens
  misc_RNA (1)...(19): siRNA sense strand
caauaccacccacugauaa

SEQ ID NO: 488229 - RNA, 19 nt, Homo sapiens
  misc_RNA (1)...(19): siRNA sense strand
cagcagggaccuucuauau

SEQ ID NO: 488230 - RNA, 19 nt, Homo sapiens
  misc_RNA (1)...(19): siRNA sense strand
caucuuugguccagaauuc

SEQ ID NO: 488231 - RNA, 19 nt, Homo sapiens
  misc_RNA (1)...(19): siRNA sense strand
caucaagacucagcaagga

SEQ ID NO: 488232 - RNA, 19 nt, Homo sapiens
  misc_RNA (1)...(19): siRNA sense strand
cacaugaguuucuacaaau

SEQ ID NO: 488233 - RNA, 19 nt, Homo sapiens
  misc_RNA (1)...(19): siRNA sense strand
gagcaaaaguuccaaaagu

SEQ ID NO: 488234 - RNA, 19 nt, Homo sapiens
  misc_RNA (1)...(19): siRNA sense strand
cauauuagcagagaccaua

SEQ ID NO: 488235 - RNA, 19 nt, Homo sapiens
  misc_RNA (1)...(19): siRNA sense strand
gggaacagcuggagaacac

SEQ ID NO: 488236 - RNA, 19 nt, Homo sapiens
  misc_RNA (1)...(19): siRNA sense strand
agaaacaggagacaucuuu

SEQ ID NO: 488237 - RNA, 19 nt, Homo sapiens
  misc_RNA (1)...(19): siRNA sense strand
acagcuauauucacagaaa

SEQ ID NO: 488238 - RNA, 19 nt, Homo sapiens
  misc_RNA (1)...(19): siRNA sense strand
cuaauagguugaagaagau

SEQ ID NO: 488239 - RNA, 19 nt, Homo sapiens
  misc_RNA (1)...(19): siRNA sense strand
caaagacacauucgacaug

SEQ ID NO: 488240 - RNA, 19 nt, Homo sapiens
  misc_RNA (1)...(19): siRNA sense strand
caacgguccugaugccaau

SEQ ID NO: 488241 - RNA, 19 nt, Homo sapiens
  misc_RNA (1)...(19): siRNA sense strand
gauacuaaaugugaugcuu

SEQ ID NO: 488242 - RNA, 19 nt, Homo sapiens
  misc_RNA (1)...(19): siRNA sense strand
cccaaggaaugaacaugua

SEQ ID NO: 488243 - RNA, 19 nt, Homo sapiens
  misc_RNA (1)...(19): siRNA sense strand
ggaauaccacccacuguuc

SEQ ID NO: 488244 - RNA, 19 nt, Homo sapiens
  misc_RNA (1)...(19): siRNA sense strand
gaaagcauuggugggaaua

SEQ ID NO: 488245 - RNA, 19 nt, Homo sapiens
  misc_RNA (1)...(19): siRNA sense strand
uaagagcaagcaaggauuu

SEQ ID NO: 488246 - RNA, 19 nt, Homo sapiens
  misc_RNA (1)...(19): siRNA sense strand
aaauguacccaguuaguaa

SEQ ID NO: 488247 - RNA, 19 nt, Homo sapiens
  misc_RNA (1)...(19): siRNA sense strand
gaacagcagcacaaacaag

SEQ ID NO: 488248 - RNA, 19 nt, Homo sapiens
  misc_RNA (1)...(19): siRNA sense strand
caacugauggaaagcauug

SEQ ID NO: 488249 - RNA, 19 nt, Homo sapiens
  misc_RNA (1)...(19): siRNA sense strand
gaaugccaaguacuucaua

SEQ ID NO: 488250 - RNA, 19 nt, Homo sapiens
  misc_RNA (1)...(19): siRNA sense strand
gaguggaggcggauaaaga

SEQ ID NO: 488251 - RNA, 19 nt, Homo sapiens
  misc_RNA (1)...(19): siRNA sense strand
ucagaaaccaucuacauca

SEQ ID NO: 488252 - RNA, 19 nt, Homo sapiens
  misc_RNA (1)...(19): siRNA sense strand
ucagagacaccacuucuug

SEQ ID NO: 488253 - RNA, 19 nt, Homo sapiens
  misc_RNA (1)...(19): siRNA sense strand
ucaacagacucaagaacug

SEQ ID NO: 488254 - RNA, 19 nt, Homo sapiens
  misc_RNA (1)...(19): siRNA sense strand
ggacuacaaagacacauuc

SEQ ID NO: 488255 - RNA, 19 nt, Homo sapiens
  misc_RNA (1)...(19): siRNA sense strand
gcagccagcauauggacua

SEQ ID NO: 488256 - RNA, 19 nt, Homo sapiens
  misc_RNA (1)...(19): siRNA sense strand
gaacacccacacacagaug

SEQ ID NO: 488257 - RNA, 19 nt, Homo sapiens
  misc_RNA (1)...(19): siRNA sense strand
cauauggacuacaaagaca

SEQ ID NO: 488258 - RNA, 19 nt, Homo sapiens
  misc_RNA (1)...(19): siRNA sense strand
guucaucuuugguccagaa

SEQ ID NO: 488259 - RNA, 19 nt, Homo sapiens
  misc_RNA (1)...(19): siRNA sense strand
gcuugcaaaugguccaauu

SEQ ID NO: 488260 - RNA, 19 nt, Homo sapiens
  misc_RNA (1)...(19): siRNA sense strand
guacaagcagccagcauau

SEQ ID NO: 488261 - RNA, 19 nt, Homo sapiens
  misc_RNA (1)...(19): siRNA sense strand
ucgugaaacuggacaagaa

SEQ ID NO: 488262 - RNA, 19 nt, Homo sapiens
  misc_RNA (1)...(19): siRNA sense strand
gaaacaggagacaucuuug

SEQ ID NO: 488263 - RNA, 19 nt, Homo sapiens
  misc_RNA (1)...(19): siRNA sense strand
ugagcuaacacaugaguuu

SEQ ID NO: 488264 - RNA, 19 nt, Homo sapiens
  misc_RNA (1)...(19): siRNA sense strand
gccagcauauggacuacaa

SEQ ID NO: 488265 - RNA, 19 nt, Homo sapiens
  misc_RNA (1)...(19): siRNA sense strand
ucuucucgcugguucuuua

SEQ ID NO: 488266 - RNA, 19 nt, Homo sapiens
  misc_RNA (1)...(19): siRNA sense strand
gcacaaacaagggcaguca

SEQ ID NO: 488267 - RNA, 19 nt, Homo sapiens
  misc_RNA (1)...(19): siRNA sense strand
gccauacaucugauaauuu

SEQ ID NO: 488268 - RNA, 19 nt, Homo sapiens
  misc_RNA (1)...(19): siRNA sense strand
gguccagaauuccauuuua

SEQ ID NO: 488269 - RNA, 19 nt, Homo sapiens
  misc_RNA (1)...(19): siRNA sense strand
caugcuggacucacuguua

SEQ ID NO: 488270 - RNA, 19 nt, Homo sapiens
  misc_RNA (1)...(19): siRNA sense strand
caaggaagaggcugcaugu

SEQ ID NO: 488271 - RNA, 19 nt, Homo sapiens
  misc_RNA (1)...(19): siRNA sense strand
aaacauucaagcccacaua

SEQ ID NO: 488272 - RNA, 19 nt, Homo sapiens
  misc_RNA (1)...(19): siRNA sense strand
gagaaaagcguaaacuaga

SEQ ID NO: 488273 - RNA, 19 nt, Homo sapiens
  misc_RNA (1)...(19): siRNA sense strand
uaaacaccaugggccaauu

SEQ ID NO: 488274 - RNA, 19 nt, Homo sapiens
  misc_RNA (1)...(19): siRNA sense strand
gcauucauuuggcuugcaa

SEQ ID NO: 488275 - RNA, 19 nt, Homo sapiens
  misc_RNA (1)...(19): siRNA sense strand
gauaaaagcgccaguaaag

SEQ ID NO: 488276 - RNA, 19 nt, Homo sapiens
  misc_RNA (1)...(19): siRNA sense strand
gcaaggacagaacagcuau

SEQ ID NO: 488277 - RNA, 19 nt, Homo sapiens
  misc_RNA (1)...(19): siRNA sense strand
caagacagccauacaucug

SEQ ID NO: 488278 - RNA, 19 nt, Homo sapiens
  misc_RNA (1)...(19): siRNA sense strand
gaacaaauaugaggaugaa

SEQ ID NO: 488279 - RNA, 19 nt, Homo sapiens
  misc_RNA (1)...(19): siRNA sense strand
gaacaagguugaacugcaa

SEQ ID NO: 488280 - RNA, 19 nt, Homo sapiens
  misc_RNA (1)...(19): siRNA sense strand
ggaagcagcuacuccuaug

SEQ ID NO: 488281 - RNA, 19 nt, Homo sapiens
  misc_RNA (1)...(19): siRNA sense strand
ucaagacccucaacaacaa

SEQ ID NO: 488282 - RNA, 19 nt, Homo sapiens
  misc_RNA (1)...(19): siRNA sense strand
gcacagcagcagagaauga

SEQ ID NO: 488283 - RNA, 19 nt, Homo sapiens
  misc_RNA (1)...(19): siRNA sense strand
gcaguuccaccaucaagua

SEQ ID NO: 488284 - RNA, 19 nt, Homo sapiens
  misc_RNA (1)...(19): siRNA sense strand
ggagauggcccucaaggau

SEQ ID NO: 488285 - RNA, 19 nt, Homo sapiens
  misc_RNA (1)...(19): siRNA sense strand
gcagagaaugaauuuguga

SEQ ID NO: 488286 - RNA, 19 nt, Homo sapiens
  misc_RNA (1)...(19): siRNA sense strand
gaagaaggauguggaugcu

SEQ ID NO: 488287 - RNA, 19 nt, Homo sapiens
  misc_RNA (1)...(19): siRNA sense strand
ggagauugcugagaucaac

SEQ ID NO: 488288 - RNA, 19 nt, Homo sapiens
  misc_RNA (1)...(19): siRNA sense strand
cagcagagaaugaauuugu

SEQ ID NO: 488289 - RNA, 19 nt, Homo sapiens
  misc_RNA (1)...(19): siRNA sense strand
caucaucgcugaggucaag

SEQ ID NO: 488290 - RNA, 19 nt, Homo sapiens
  misc_RNA (1)...(19): siRNA sense strand
gaucaagacccucaacaac

SEQ ID NO: 488291 - RNA, 19 nt, Homo sapiens
  misc_RNA (1)...(19): siRNA sense strand
gcaggagauugcugagauc

SEQ ID NO: 488292 - RNA, 19 nt, Homo sapiens
  misc_RNA (1)...(19): siRNA sense strand
gcgcacagcagcagagaau

SEQ ID NO: 488293 - RNA, 19 nt, Homo sapiens
  misc_RNA (1)...(19): siRNA sense strand
cgaaggcguuggacaaguc

SEQ ID NO: 488294 - RNA, 19 nt, Homo sapiens
  misc_RNA (1)...(19): siRNA sense strand
caaauaugaggaugaaauc

SEQ ID NO: 488295 - RNA, 19 nt, Homo sapiens
  misc_RNA (1)...(19): siRNA sense strand
ggucaaggcccaauaugag

SEQ ID NO: 488296 - RNA, 19 nt, Homo sapiens
  misc_RNA (1)...(19): siRNA sense strand
agaaugaauuugugacucu

SEQ ID NO: 488297 - RNA, 19 nt, Homo sapiens
  misc_RNA (1)...(19): siRNA sense strand
gcugagaucaaccgcauga

SEQ ID NO: 488298 - RNA, 19 nt, Homo sapiens
  misc_RNA (1)...(19): siRNA sense strand
ccaagacugugaggcagaa

SEQ ID NO: 488299 - RNA, 19 nt, Homo sapiens
  misc_RNA (1)...(19): siRNA sense strand
gaauuugugacucugaaga

SEQ ID NO: 488300 - RNA, 19 nt, Homo sapiens
  misc_RNA (1)...(19): siRNA sense strand
acaacaaguuugccuccuu

SEQ ID NO: 488301 - RNA, 19 nt, Homo sapiens
  misc_RNA (1)...(19): siRNA sense strand
augcagagcugucccagau

SEQ ID NO: 488302 - RNA, 19 nt, Homo sapiens
  misc_RNA (1)...(19): siRNA sense strand
caaguuugccuccuucauc

SEQ ID NO: 488303 - RNA, 19 nt, Homo sapiens
  misc_RNA (1)...(19): siRNA sense strand
cugagagccuuguaugaug

SEQ ID NO: 488304 - RNA, 19 nt, Homo sapiens
  misc_RNA (1)...(19): siRNA sense strand
gaugcugccuacaugaaca

SEQ ID NO: 488305 - RNA, 19 nt, Homo sapiens
  misc_RNA (1)...(19): siRNA sense strand
uccaagaggucacugucaa

SEQ ID NO: 488306 - RNA, 19 nt, Homo sapiens
  misc_RNA (1)...(19): siRNA sense strand
gaggagugcaggcugaaug

SEQ ID NO: 488307 - RNA, 19 nt, Homo sapiens
  misc_RNA (1)...(19): siRNA sense strand
ggcccaauaugaggagauu

SEQ ID NO: 488308 - RNA, 19 nt, Homo sapiens
  misc_RNA (1)...(19): siRNA sense strand
ccacaucucagacacaucu

SEQ ID NO: 488309 - RNA, 19 nt, Homo sapiens
  misc_RNA (1)...(19): siRNA sense strand
cagcagcagagaaugaauu

SEQ ID NO: 488310 - RNA, 19 nt, Homo sapiens
  misc_RNA (1)...(19): siRNA sense strand
caagaacaaauaugaggau

SEQ ID NO: 488311 - RNA, 19 nt, Homo sapiens
  misc_RNA (1)...(19): siRNA sense strand
cggccuugcugguggcuuu

SEQ ID NO: 488312 - RNA, 19 nt, Homo sapiens
  misc_RNA (1)...(19): siRNA sense strand
gcgaaggcguuggacaagu

SEQ ID NO: 488313 - RNA, 19 nt, Homo sapiens
  misc_RNA (1)...(19): siRNA sense strand
gagcgugagcagaucaaga

SEQ ID NO: 488314 - RNA, 19 nt, Homo sapiens
  misc_RNA (1)...(19): siRNA sense strand
gcacauccaccaccaucag

SEQ ID NO: 488315 - RNA, 19 nt, Homo sapiens
  misc_RNA (1)...(19): siRNA sense strand
gaauggcgaaggcguugga

SEQ ID NO: 488316 - RNA, 19 nt, Homo sapiens
  misc_RNA (1)...(19): siRNA sense strand
gcagagccagagcgagcua

SEQ ID NO: 488317 - RNA, 19 nt, Homo sapiens
  misc_RNA (1)...(19): siRNA sense strand
gacccucaacaacaaguuu

SEQ ID NO: 488318 - RNA, 19 nt, Homo sapiens
  misc_RNA (1)...(19): siRNA sense strand
ggaccuggacagcaucauc

SEQ ID NO: 488319 - RNA, 19 nt, Homo sapiens
  misc_RNA (1)...(19): siRNA sense strand
uguggaugcugccuacaug

SEQ ID NO: 488320 - RNA, 19 nt, Homo sapiens
  misc_RNA (1)...(19): siRNA sense strand
agagcgagcuauggcuuug

SEQ ID NO: 488321 - RNA, 19 nt, Homo sapiens
  misc_RNA (1)...(19): siRNA sense strand
uccaagaggaucuccauug

SEQ ID NO: 488322 - RNA, 19 nt, Homo sapiens
  misc_RNA (1)...(19): siRNA sense strand
caacaccaagcaggagauu

SEQ ID NO: 488323 - RNA, 19 nt, Homo sapiens
  misc_RNA (1)...(19): siRNA sense strand
gggaguggauuugguuucg

SEQ ID NO: 488324 - RNA, 19 nt, Homo sapiens
  misc_RNA (1)...(19): siRNA sense strand
ggcggcaguuccaccauca

SEQ ID NO: 488325 - RNA, 19 nt, Homo sapiens
  misc_RNA (1)...(19): siRNA sense strand
ccugagagccuuguaugau

SEQ ID NO: 488326 - RNA, 19 nt, Homo sapiens
  misc_RNA (1)...(19): siRNA sense strand
agaacaaauaugaggauga

SEQ ID NO: 488327 - RNA, 19 nt, Homo sapiens
  misc_RNA (1)...(19): siRNA sense strand
gggagauggcccucaagga

SEQ ID NO: 488328 - RNA, 19 nt, Homo sapiens
  misc_RNA (1)...(19): siRNA sense strand
ugaggucaaggcccaauau

SEQ ID NO: 488329 - RNA, 19 nt, Homo sapiens
  misc_RNA (1)...(19): siRNA sense strand
caucuguggugcuguccau

SEQ ID NO: 488330 - RNA, 19 nt, Homo sapiens
  misc_RNA (1)...(19): siRNA sense strand
ccgaggagcgugagcagau

SEQ ID NO: 488331 - RNA, 19 nt, Homo sapiens
  misc_RNA (1)...(19): siRNA sense strand
gaggucaaggcccaauaug

SEQ ID NO: 488332 - RNA, 19 nt, Homo sapiens
  misc_RNA (1)...(19): siRNA sense strand
cagagcgagcuauggcuuu

SEQ ID NO: 488333 - RNA, 19 nt, Homo sapiens
  misc_RNA (1)...(19): siRNA sense strand
gaaggcguuggacaaguca

SEQ ID NO: 488334 - RNA, 19 nt, Homo sapiens
  misc_RNA (1)...(19): siRNA sense strand
gcaacaccaagcaggagau

SEQ ID NO: 488335 - RNA, 19 nt, Homo sapiens
  misc_RNA (1)...(19): siRNA sense strand
cccggcugcugaaggagua

SEQ ID NO: 488336 - RNA, 19 nt, Homo sapiens
  misc_RNA (1)...(19): siRNA sense strand
gcagaaauauaugagauga

SEQ ID NO: 488337 - RNA, 19 nt, Homo sapiens
  misc_RNA (1)...(19): siRNA sense strand
gaaaagcgguggaaagaga

SEQ ID NO: 488338 - RNA, 19 nt, Homo sapiens
  misc_RNA (1)...(19): siRNA sense strand
agaugaagcugcaagugua

SEQ ID NO: 488339 - RNA, 19 nt, Homo sapiens
  misc_RNA (1)...(19): siRNA sense strand
gagccagacucaguaauug

SEQ ID NO: 488340 - RNA, 19 nt, Homo sapiens
  misc_RNA (1)...(19): siRNA sense strand
caauagauguagggaaaga

SEQ ID NO: 488341 - RNA, 19 nt, Homo sapiens
  misc_RNA (1)...(19): siRNA sense strand
gaucagcauugccaacaca

SEQ ID NO: 488342 - RNA, 19 nt, Homo sapiens
  misc_RNA (1)...(19): siRNA sense strand
gucaauaagcaguggauua

SEQ ID NO: 488343 - RNA, 19 nt, Homo sapiens
  misc_RNA (1)...(19): siRNA sense strand
ucacagcucugguuguaag

SEQ ID NO: 488344 - RNA, 19 nt, Homo sapiens
  misc_RNA (1)...(19): siRNA sense strand
cucaauagauguagggaaa

SEQ ID NO: 488345 - RNA, 19 nt, Homo sapiens
  misc_RNA (1)...(19): siRNA sense strand
gauuacauuucagcacuuu

SEQ ID NO: 488346 - RNA, 19 nt, Homo sapiens
  misc_RNA (1)...(19): siRNA sense strand
gcacuuuagcuuccucaaa

SEQ ID NO: 488347 - RNA, 19 nt, Homo sapiens
  misc_RNA (1)...(19): siRNA sense strand
cacaaguucuuacaucuuc

SEQ ID NO: 488348 - RNA, 19 nt, Homo sapiens
  misc_RNA (1)...(19): siRNA sense strand
ggacagaucagcccauugc

SEQ ID NO: 488349 - RNA, 19 nt, Homo sapiens
  misc_RNA (1)...(19): siRNA sense strand
acucacagcucugguugua

SEQ ID NO: 488350 - RNA, 19 nt, Homo sapiens
  misc_RNA (1)...(19): siRNA sense strand
gagaugaagcugcaagugu

SEQ ID NO: 488351 - RNA, 19 nt, Homo sapiens
  misc_RNA (1)...(19): siRNA sense strand
gaaaaggaauugauagaac

SEQ ID NO: 488352 - RNA, 19 nt, Homo sapiens
  misc_RNA (1)...(19): siRNA sense strand
ccaaagcagaaauauauga

SEQ ID NO: 488353 - RNA, 19 nt, Homo sapiens
  misc_RNA (1)...(19): siRNA sense strand
ucaggaaugucaauaagca

SEQ ID NO: 488354 - RNA, 19 nt, Homo sapiens
  misc_RNA (1)...(19): siRNA sense strand
gcaguuuccucauuucaac

SEQ ID NO: 488355 - RNA, 19 nt, Homo sapiens
  misc_RNA (1)...(19): siRNA sense strand
ccacaaccagcaaguaaga

SEQ ID NO: 488356 - RNA, 19 nt, Homo sapiens
  misc_RNA (1)...(19): siRNA sense strand
ggauuacauuucagcacuu

SEQ ID NO: 488357 - RNA, 19 nt, Homo sapiens
  misc_RNA (1)...(19): siRNA sense strand
ccuggcaguuuccucauuu

SEQ ID NO: 488358 - RNA, 19 nt, Homo sapiens
  misc_RNA (1)...(19): siRNA sense strand
agccaaagcagaaauauau

SEQ ID NO: 488359 - RNA, 19 nt, Homo sapiens
  misc_RNA (1)...(19): siRNA sense strand
uagcaucuccuuuccuuga

SEQ ID NO: 488360 - RNA, 19 nt, Homo sapiens
  misc_RNA (1)...(19): siRNA sense strand
ccucacaaguucuuacauc

SEQ ID NO: 488361 - RNA, 19 nt, Homo sapiens
  misc_RNA (1)...(19): siRNA sense strand
ugaagacucaauagaugua

SEQ ID NO: 488362 - RNA, 19 nt, Homo sapiens
  misc_RNA (1)...(19): siRNA sense strand
ucaagccaaagcagaaaua

SEQ ID NO: 488363 - RNA, 19 nt, Homo sapiens
  misc_RNA (1)...(19): siRNA sense strand
ccagaaagccaaaugaaaa

SEQ ID NO: 488364 - RNA, 19 nt, Homo sapiens
  misc_RNA (1)...(19): siRNA sense strand
ucuuacaucuucucaggaa

SEQ ID NO: 488365 - RNA, 19 nt, Homo sapiens
  misc_RNA (1)...(19): siRNA sense strand
aauaagcaguggauuacau

SEQ ID NO: 488366 - RNA, 19 nt, Homo sapiens
  misc_RNA (1)...(19): siRNA sense strand
caaacucacagcucugguu

SEQ ID NO: 488367 - RNA, 19 nt, Homo sapiens
  misc_RNA (1)...(19): siRNA sense strand
ggacuccccucacaaguuc

SEQ ID NO: 488368 - RNA, 19 nt, Homo sapiens
  misc_RNA (1)...(19): siRNA sense strand
gaguugccauucugaccuu

SEQ ID NO: 488369 - RNA, 19 nt, Homo sapiens
  misc_RNA (1)...(19): siRNA sense strand
gcugccaacuccaucaauc

SEQ ID NO: 488370 - RNA, 19 nt, Homo sapiens
  misc_RNA (1)...(19): siRNA sense strand
gaaccaguagcaucuccuu

SEQ ID NO: 488371 - RNA, 19 nt, Homo sapiens
  misc_RNA (1)...(19): siRNA sense strand
gaauaggacaaagaacaga

SEQ ID NO: 488372 - RNA, 19 nt, Homo sapiens
  misc_RNA (1)...(19): siRNA sense strand
gcagcuggauuugcauugg

SEQ ID NO: 488373 - RNA, 19 nt, Homo sapiens
  misc_RNA (1)...(19): siRNA sense strand
ucucaggaaugucaauaag

SEQ ID NO: 488374 - RNA, 19 nt, Homo sapiens
  misc_RNA (1)...(19): siRNA sense strand
guggacagaucagcccauu

SEQ ID NO: 488375 - RNA, 19 nt, Homo sapiens
  misc_RNA (1)...(19): siRNA sense strand
aaacaugaauaggacaaag

SEQ ID NO: 488376 - RNA, 19 nt, Homo sapiens
  misc_RNA (1)...(19): siRNA sense strand
gccuaucuuuguccagaaa

SEQ ID NO: 488377 - RNA, 19 nt, Homo sapiens
  misc_RNA (1)...(19): siRNA sense strand
cacuuuagcuuccucaaac

SEQ ID NO: 488378 - RNA, 19 nt, Homo sapiens
  misc_RNA (1)...(19): siRNA sense strand
cagacucaguaauugaaga

SEQ ID NO: 488379 - RNA, 19 nt, Homo sapiens
  misc_RNA (1)...(19): siRNA sense strand
ucaauaagcaguggauuac

SEQ ID NO: 488380 - RNA, 19 nt, Homo sapiens
  misc_RNA (1)...(19): siRNA sense strand
aguagcaucuccuuuccuu

SEQ ID NO: 488381 - RNA, 19 nt, Homo sapiens
  misc_RNA (1)...(19): siRNA sense strand
caucuucucaggaauguca

SEQ ID NO: 488382 - RNA, 19 nt, Homo sapiens
  misc_RNA (1)...(19): siRNA sense strand
gcucgacuauccaaaauca

SEQ ID NO: 488383 - RNA, 19 nt, Homo sapiens
  misc_RNA (1)...(19): siRNA sense strand
gaugaagcugcaaguguau

SEQ ID NO: 488384 - RNA, 19 nt, Homo sapiens
  misc_RNA (1)...(19): siRNA sense strand
ggcucugucugguaucuug

SEQ ID NO: 488385 - RNA, 19 nt, Homo sapiens
  misc_RNA (1)...(19): siRNA sense strand
ucacaaguucuuacaucuu

SEQ ID NO: 488386 - RNA, 19 nt, Homo sapiens
  misc_RNA (1)...(19): siRNA sense strand
aggaggcucugucugguau

SEQ ID NO: 488387 - RNA, 19 nt, Homo sapiens
  misc_RNA (1)...(19): siRNA sense strand
agagccagacucaguaauu

SEQ ID NO: 488388 - RNA, 19 nt, Homo sapiens
  misc_RNA (1)...(19): siRNA sense strand
ggaauugauagaacuagag

SEQ ID NO: 488389 - RNA, 19 nt, Homo sapiens
  misc_RNA (1)...(19): siRNA sense strand
aagccaaagcagaaauaua

SEQ ID NO: 488390 - RNA, 19 nt, Homo sapiens
  misc_RNA (1)...(19): siRNA sense strand
ccuguuuccugcuuacuuc

SEQ ID NO: 488391 - RNA, 19 nt, Homo sapiens
  misc_RNA (1)...(19): siRNA sense strand
gaaagagacaaaagaggaa

SEQ ID NO: 488392 - RNA, 19 nt, Homo sapiens
  misc_RNA (1)...(19): siRNA sense strand
gccagacucaguaauugaa

SEQ ID NO: 488393 - RNA, 19 nt, Homo sapiens
  misc_RNA (1)...(19): siRNA sense strand
agcaguggauuacauuuca

SEQ ID NO: 488394 - RNA, 19 nt, Homo sapiens
  misc_RNA (1)...(19): siRNA sense strand
acagaucagcccauugcua

SEQ ID NO: 488395 - RNA, 19 nt, Homo sapiens
  misc_RNA (1)...(19): siRNA sense strand
uguaugauuugccaggaau

SEQ ID NO: 488396 - RNA, 19 nt, Homo sapiens
  misc_RNA (1)...(19): siRNA sense strand
ggucaagccaaagcagaaa

SEQ ID NO: 488397 - RNA, 19 nt, Homo sapiens
  misc_RNA (1)...(19): siRNA sense strand
guguaugauuugccaggaa

SEQ ID NO: 488398 - RNA, 19 nt, Homo sapiens
  misc_RNA (1)...(19): siRNA sense strand
gcugcaaguguaugauuug

SEQ ID NO: 488399 - RNA, 19 nt, Homo sapiens
  misc_RNA (1)...(19): siRNA sense strand
caaagcagaaauauaugag

SEQ ID NO: 488400 - RNA, 19 nt, Homo sapiens
  misc_RNA (1)...(19): siRNA sense strand
guccagaaagccaaaugaa

SEQ ID NO: 488401 - RNA, 19 nt, Homo sapiens
  misc_RNA (1)...(19): siRNA sense strand
ccucuacuccuggcaguuu

SEQ ID NO: 488402 - RNA, 19 nt, Homo sapiens
  misc_RNA (1)...(19): siRNA sense strand
ugaagcugcaaguguauga

SEQ ID NO: 488403 - RNA, 19 nt, Homo sapiens
  misc_RNA (1)...(19): siRNA sense strand
uccagaaagccaaaugaaa

SEQ ID NO: 488404 - RNA, 19 nt, Homo sapiens
  misc_RNA (1)...(19): siRNA sense strand
caaacaugaauaggacaaa

SEQ ID NO: 488405 - RNA, 19 nt, Homo sapiens
  misc_RNA (1)...(19): siRNA sense strand
agaacuagagccagacuca

SEQ ID NO: 488406 - RNA, 19 nt, Homo sapiens
  misc_RNA (1)...(19): siRNA sense strand
gggccuccgugaagacuac

SEQ ID NO: 488407 - RNA, 19 nt, Homo sapiens
  misc_RNA (1)...(19): siRNA sense strand
acaugaauaggacaaagaa

SEQ ID NO: 488408 - RNA, 19 nt, Homo sapiens
  misc_RNA (1)...(19): siRNA sense strand
uuacaucuucucaggaaug

SEQ ID NO: 488409 - RNA, 19 nt, Homo sapiens
  misc_RNA (1)...(19): siRNA sense strand
uaagcaguggauuacauuu

SEQ ID NO: 488410 - RNA, 19 nt, Homo sapiens
  misc_RNA (1)...(19): siRNA sense strand
cuugaaagaagaacuauac

SEQ ID NO: 488411 - RNA, 19 nt, Homo sapiens
  misc_RNA (1)...(19): siRNA sense strand
gcaguggauuacauuucag

SEQ ID NO: 488412 - RNA, 19 nt, Homo sapiens
  misc_RNA (1)...(19): siRNA sense strand
gacucaaacaugaauagga

SEQ ID NO: 488413 - RNA, 19 nt, Homo sapiens
  misc_RNA (1)...(19): siRNA sense strand
cagcucugguuguaaguac

SEQ ID NO: 488414 - RNA, 19 nt, Homo sapiens
  misc_RNA (1)...(19): siRNA sense strand
cucaguaauugaagacuca

SEQ ID NO: 488415 - RNA, 19 nt, Homo sapiens
  misc_RNA (1)...(19): siRNA sense strand
aggaauugauagaacuaga

SEQ ID NO: 488416 - RNA, 19 nt, Homo sapiens
  misc_RNA (1)...(19): siRNA sense strand
cuagagccagacucaguaa

SEQ ID NO: 488417 - RNA, 19 nt, Homo sapiens
  misc_RNA (1)...(19): siRNA sense strand
auugcuagcuguguccuuu

SEQ ID NO: 488418 - RNA, 19 nt, Homo sapiens
  misc_RNA (1)...(19): siRNA sense strand
ucaaacaugaauaggacaa

SEQ ID NO: 488419 - RNA, 19 nt, Homo sapiens
  misc_RNA (1)...(19): siRNA sense strand
uaugauuugccaggaauuu

SEQ ID NO: 488420 - RNA, 19 nt, Homo sapiens
  misc_RNA (1)...(19): siRNA sense strand
uuacauuucagcacuuuag

SEQ ID NO: 488421 - RNA, 19 nt, Homo sapiens
  misc_RNA (1)...(19): siRNA sense strand
gccagaaccaguagcaucu

SEQ ID NO: 488422 - RNA, 19 nt, Homo sapiens
  misc_RNA (1)...(19): siRNA sense strand
ugaaagaagaacuauacag

SEQ ID NO: 488423 - RNA, 19 nt, Homo sapiens
  misc_RNA (1)...(19): siRNA sense strand
caagccaaagcagaaauau

SEQ ID NO: 488424 - RNA, 19 nt, Homo sapiens
  misc_RNA (1)...(19): siRNA sense strand
gcuguguccuuugccacuu

SEQ ID NO: 488425 - RNA, 19 nt, Homo sapiens
  misc_RNA (1)...(19): siRNA sense strand
gcugguucguggacagauc

SEQ ID NO: 488426 - RNA, 19 nt, Homo sapiens
  misc_RNA (1)...(19): siRNA sense strand
auaagcaguggauuacauu

SEQ ID NO: 488427 - RNA, 19 nt, Homo sapiens
  misc_RNA (1)...(19): siRNA sense strand
uaccacugcagcuggauuu

SEQ ID NO: 488428 - RNA, 19 nt, Homo sapiens
  misc_RNA (1)...(19): siRNA sense strand
gaggcucugucugguaucu

SEQ ID NO: 488429 - RNA, 19 nt, Homo sapiens
  misc_RNA (1)...(19): siRNA sense strand
gaagccacaaccagcaagu

SEQ ID NO: 488430 - RNA, 19 nt, Homo sapiens
  misc_RNA (1)...(19): siRNA sense strand
gaaccucccugauuacuau

SEQ ID NO: 488431 - RNA, 19 nt, Homo sapiens
  misc_RNA (1)...(19): siRNA sense strand
gaaaugcgcuuugccaaga

SEQ ID NO: 488432 - RNA, 19 nt, Homo sapiens
  misc_RNA (1)...(19): siRNA sense strand
uaaaugagcuacccacaga

SEQ ID NO: 488433 - RNA, 19 nt, Homo sapiens
  misc_RNA (1)...(19): siRNA sense strand
gaaaagcucuucuugcaaa

SEQ ID NO: 488434 - RNA, 19 nt, Homo sapiens
  misc_RNA (1)...(19): siRNA sense strand
gcaagccuauguccuauga

SEQ ID NO: 488435 - RNA, 19 nt, Homo sapiens
  misc_RNA (1)...(19): siRNA sense strand
gaagaaaccgagaucauga

SEQ ID NO: 488436 - RNA, 19 nt, Homo sapiens
  misc_RNA (1)...(19): siRNA sense strand
ugagaaaguugaugugauu

SEQ ID NO: 488437 - RNA, 19 nt, Homo sapiens
  misc_RNA (1)...(19): siRNA sense strand
ugagaaaucugccaguaau

SEQ ID NO: 488438 - RNA, 19 nt, Homo sapiens
  misc_RNA (1)...(19): siRNA sense strand
gagaugacauagucuuaau

SEQ ID NO: 488439 - RNA, 19 nt, Homo sapiens
  misc_RNA (1)...(19): siRNA sense strand
ggaaugcucaggaauguau

SEQ ID NO: 488440 - RNA, 19 nt, Homo sapiens
  misc_RNA (1)...(19): siRNA sense strand
guacaacccuccugaccau

SEQ ID NO: 488441 - RNA, 19 nt, Homo sapiens
  misc_RNA (1)...(19): siRNA sense strand
acuagaaacuucccaaaug

SEQ ID NO: 488442 - RNA, 19 nt, Homo sapiens
  misc_RNA (1)...(19): siRNA sense strand
gauaugggaacaauaaaga

SEQ ID NO: 488443 - RNA, 19 nt, Homo sapiens
  misc_RNA (1)...(19): siRNA sense strand
caacaagccuggagaugac

SEQ ID NO: 488444 - RNA, 19 nt, Homo sapiens
  misc_RNA (1)...(19): siRNA sense strand
gcagaacaaaccaaagaaa

SEQ ID NO: 488445 - RNA, 19 nt, Homo sapiens
  misc_RNA (1)...(19): siRNA sense strand
ggacgugggaggaaagaaa

SEQ ID NO: 488446 - RNA, 19 nt, Homo sapiens
  misc_RNA (1)...(19): siRNA sense strand
cuagaaacuucccaaaugu

SEQ ID NO: 488447 - RNA, 19 nt, Homo sapiens
  misc_RNA (1)...(19): siRNA sense strand
aaaccgagaucaugauagu

SEQ ID NO: 488448 - RNA, 19 nt, Homo sapiens
  misc_RNA (1)...(19): siRNA sense strand
gggauggacuagaaacuuc

SEQ ID NO: 488449 - RNA, 19 nt, Homo sapiens
  misc_RNA (1)...(19): siRNA sense strand
ggagaugacauagucuuaa

SEQ ID NO: 488450 - RNA, 19 nt, Homo sapiens
  misc_RNA (1)...(19): siRNA sense strand
ggagauguuugccaagaag

SEQ ID NO: 488451 - RNA, 19 nt, Homo sapiens
  misc_RNA (1)...(19): siRNA sense strand
ugagcacaaucaagucuaa

SEQ ID NO: 488452 - RNA, 19 nt, Homo sapiens
  misc_RNA (1)...(19): siRNA sense strand
ggaaguggaagagaauaaa

SEQ ID NO: 488453 - RNA, 19 nt, Homo sapiens
  misc_RNA (1)...(19): siRNA sense strand
cgacuacugugacaucauc

SEQ ID NO: 488454 - RNA, 19 nt, Homo sapiens
  misc_RNA (1)...(19): siRNA sense strand
gcucaagacacuauggaaa

SEQ ID NO: 488455 - RNA, 19 nt, Homo sapiens
  misc_RNA (1)...(19): siRNA sense strand
cagcagaacaaaccaaaga

SEQ ID NO: 488456 - RNA, 19 nt, Homo sapiens
  misc_RNA (1)...(19): siRNA sense strand
aagaggaaguggaagagaa

SEQ ID NO: 488457 - RNA, 19 nt, Homo sapiens
  misc_RNA (1)...(19): siRNA sense strand
ggacuagaaacuucccaaa

SEQ ID NO: 488458 - RNA, 19 nt, Homo sapiens
  misc_RNA (1)...(19): siRNA sense strand
gacaugagcacaaucaagu

SEQ ID NO: 488459 - RNA, 19 nt, Homo sapiens
  misc_RNA (1)...(19): siRNA sense strand
ugugaaaccuccaaagaag

SEQ ID NO: 488460 - RNA, 19 nt, Homo sapiens
  misc_RNA (1)...(19): siRNA sense strand
gaagaggacgugggaggaa

SEQ ID NO: 488461 - RNA, 19 nt, Homo sapiens
  misc_RNA (1)...(19): siRNA sense strand
agaagggagugaagaggaa

SEQ ID NO: 488462 - RNA, 19 nt, Homo sapiens
  misc_RNA (1)...(19): siRNA sense strand
uaaagaagcgcuuggaaaa

SEQ ID NO: 488463 - RNA, 19 nt, Homo sapiens
  misc_RNA (1)...(19): siRNA sense strand
agcugaaccucccugauua

SEQ ID NO: 488464 - RNA, 19 nt, Homo sapiens
  misc_RNA (1)...(19): siRNA sense strand
gcaaugugagcaagaagga

SEQ ID NO: 488465 - RNA, 19 nt, Homo sapiens
  misc_RNA (1)...(19): siRNA sense strand
gaaaagaggaaguggaaga

SEQ ID NO: 488466 - RNA, 19 nt, Homo sapiens
  misc_RNA (1)...(19): siRNA sense strand
gaaacuucccaaaugucua

SEQ ID NO: 488467 - RNA, 19 nt, Homo sapiens
  misc_RNA (1)...(19): siRNA sense strand
uuacuggaaugcucaggaa

SEQ ID NO: 488468 - RNA, 19 nt, Homo sapiens
  misc_RNA (1)...(19): siRNA sense strand
aagcugaaccucccugauu

SEQ ID NO: 488469 - RNA, 19 nt, Homo sapiens
  misc_RNA (1)...(19): siRNA sense strand
cagcgaagacuccgaaaca

SEQ ID NO: 488470 - RNA, 19 nt, Homo sapiens
  misc_RNA (1)...(19): siRNA sense strand
ugcaauaccugcucagagu

SEQ ID NO: 488471 - RNA, 19 nt, Homo sapiens
  misc_RNA (1)...(19): siRNA sense strand
ggacaugagcacaaucaag

SEQ ID NO: 488472 - RNA, 19 nt, Homo sapiens
  misc_RNA (1)...(19): siRNA sense strand
ucaagacacuauggaaaca

SEQ ID NO: 488473 - RNA, 19 nt, Homo sapiens
  misc_RNA (1)...(19): siRNA sense strand
gaguccagcuccucugaca

SEQ ID NO: 488474 - RNA, 19 nt, Homo sapiens
  misc_RNA (1)...(19): siRNA sense strand
auaaagaagcgcuuggaaa

SEQ ID NO: 488475 - RNA, 19 nt, Homo sapiens
  misc_RNA (1)...(19): siRNA sense strand
acaacaagccuggagauga

SEQ ID NO: 488476 - RNA, 19 nt, Homo sapiens
  misc_RNA (1)...(19): siRNA sense strand
gaugacauagucuuaaugg

SEQ ID NO: 488477 - RNA, 19 nt, Homo sapiens
  misc_RNA (1)...(19): siRNA sense strand
gagcuacccacagaagaaa

SEQ ID NO: 488478 - RNA, 19 nt, Homo sapiens
  misc_RNA (1)...(19): siRNA sense strand
agaccaaccaacugcaaua

SEQ ID NO: 488479 - RNA, 19 nt, Homo sapiens
  misc_RNA (1)...(19): siRNA sense strand
gcuccaggauguguucgaa

SEQ ID NO: 488480 - RNA, 19 nt, Homo sapiens
  misc_RNA (1)...(19): siRNA sense strand
cuacacgacuacugugaca

SEQ ID NO: 488481 - RNA, 19 nt, Homo sapiens
  misc_RNA (1)...(19): siRNA sense strand
caaagaagggagugaagag

SEQ ID NO: 488482 - RNA, 19 nt, Homo sapiens
  misc_RNA (1)...(19): siRNA sense strand
guaccaaacacaacucaag

SEQ ID NO: 488483 - RNA, 19 nt, Homo sapiens
  misc_RNA (1)...(19): siRNA sense strand
agaaaccgagaucaugaua

SEQ ID NO: 488484 - RNA, 19 nt, Homo sapiens
  misc_RNA (1)...(19): siRNA sense strand
gauguucuccaacugcuau

SEQ ID NO: 488485 - RNA, 19 nt, Homo sapiens
  misc_RNA (1)...(19): siRNA sense strand
gcuaugucaccuccuguuu

SEQ ID NO: 488486 - RNA, 19 nt, Homo sapiens
  misc_RNA (1)...(19): siRNA sense strand
gagcuggagcgcuauguca

SEQ ID NO: 488487 - RNA, 19 nt, Homo sapiens
  misc_RNA (1)...(19): siRNA sense strand
gaaaagcacaaaagaaaag

SEQ ID NO: 488488 - RNA, 19 nt, Homo sapiens
  misc_RNA (1)...(19): siRNA sense strand
ggauaugggaacaauaaag

SEQ ID NO: 488489 - RNA, 19 nt, Homo sapiens
  misc_RNA (1)...(19): siRNA sense strand
gugcaagccuauguccuau

SEQ ID NO: 488490 - RNA, 19 nt, Homo sapiens
  misc_RNA (1)...(19): siRNA sense strand
gcacccagcaccagagaag

SEQ ID NO: 488491 - RNA, 19 nt, Homo sapiens
  misc_RNA (1)...(19): siRNA sense strand
gacuagaaacuucccaaau

SEQ ID NO: 488492 - RNA, 19 nt, Homo sapiens
  misc_RNA (1)...(19): siRNA sense strand
agaagaaaccgagaucaug

SEQ ID NO: 488493 - RNA, 19 nt, Homo sapiens
  misc_RNA (1)...(19): siRNA sense strand
gccuggagaugacauaguc

SEQ ID NO: 488494 - RNA, 19 nt, Homo sapiens
  misc_RNA (1)...(19): siRNA sense strand
gaauguauccaggacuuca

SEQ ID NO: 488495 - RNA, 19 nt, Homo sapiens
  misc_RNA (1)...(19): siRNA sense strand
ugaaaccuccaaagaagga

SEQ ID NO: 488496 - RNA, 19 nt, Homo sapiens
  misc_RNA (1)...(19): siRNA sense strand
gcugagaaaguugauguga

SEQ ID NO: 488497 - RNA, 19 nt, Homo sapiens
  misc_RNA (1)...(19): siRNA sense strand
aaggagauguuugccaaga

SEQ ID NO: 488498 - RNA, 19 nt, Homo sapiens
  misc_RNA (1)...(19): siRNA sense strand
gcacaaucaagucuaaacu

SEQ ID NO: 488499 - RNA, 19 nt, Homo sapiens
  misc_RNA (1)...(19): siRNA sense strand
gacaagugcaagccuaugu

SEQ ID NO: 488500 - RNA, 19 nt, Homo sapiens
  misc_RNA (1)...(19): siRNA sense strand
cgauugauguucuccaacu

SEQ ID NO: 488501 - RNA, 19 nt, Homo sapiens
  misc_RNA (1)...(19): siRNA sense strand
ccaaccaacugcaauaccu

SEQ ID NO: 488502 - RNA, 19 nt, Homo sapiens
  misc_RNA (1)...(19): siRNA sense strand
acagcaaugugagcaagaa

SEQ ID NO: 488503 - RNA, 19 nt, Homo sapiens
  misc_RNA (1)...(19): siRNA sense strand
gaagggagugaagaggaaa

SEQ ID NO: 488504 - RNA, 19 nt, Homo sapiens
  misc_RNA (1)...(19): siRNA sense strand
aaagaaacagggacagcaa

SEQ ID NO: 488505 - RNA, 19 nt, Homo sapiens
  misc_RNA (1)...(19): siRNA sense strand
gaaaccgagaucaugauag

SEQ ID NO: 488506 - RNA, 19 nt, Homo sapiens
  misc_RNA (1)...(19): siRNA sense strand
gagaaaucugccaguaaug

SEQ ID NO: 488507 - RNA, 19 nt, Homo sapiens
  misc_RNA (1)...(19): siRNA sense strand
gaggaaguggaagagaaua

SEQ ID NO: 488508 - RNA, 19 nt, Homo sapiens
  misc_RNA (1)...(19): siRNA sense strand
uccaggauguguucgaaau

SEQ ID NO: 488509 - RNA, 19 nt, Homo sapiens
  misc_RNA (1)...(19): siRNA sense strand
cagaagaaaccgagaucau

SEQ ID NO: 488510 - RNA, 19 nt, Homo sapiens
  misc_RNA (1)...(19): siRNA sense strand
ugagcuacccacagaagaa

SEQ ID NO: 488511 - RNA, 19 nt, Homo sapiens
  misc_RNA (1)...(19): siRNA sense strand
auccaggacuucaacacua

SEQ ID NO: 488512 - RNA, 19 nt, Homo sapiens
  misc_RNA (1)...(19): siRNA sense strand
uuaaaacgccuauggauau

SEQ ID NO: 488513 - RNA, 19 nt, Homo sapiens
  misc_RNA (1)...(19): siRNA sense strand
caacugcuauaaguacaac

SEQ ID NO: 488514 - RNA, 19 nt, Homo sapiens
  misc_RNA (1)...(19): siRNA sense strand
gcugacguccgauugaugu

SEQ ID NO: 488515 - RNA, 19 nt, Homo sapiens
  misc_RNA (1)...(19): siRNA sense strand
uggagaugacauagucuua

SEQ ID NO: 488516 - RNA, 19 nt, Homo sapiens
  misc_RNA (1)...(19): siRNA sense strand
aggaauguauccaggacuu

SEQ ID NO: 488517 - RNA, 19 nt, Homo sapiens
  misc_RNA (1)...(19): siRNA sense strand
caauaaagaagcgcuugga

SEQ ID NO: 488518 - RNA, 19 nt, Homo sapiens
  misc_RNA (1)...(19): siRNA sense strand
gcacaaaagaaaagaggaa

SEQ ID NO: 488519 - RNA, 19 nt, Homo sapiens
  misc_RNA (1)...(19): siRNA sense strand
cccgcaagcuccaggaugu

SEQ ID NO: 488520 - RNA, 19 nt, Homo sapiens
  misc_RNA (1)...(19): siRNA sense strand
ccugugaaaccuccaaaga

SEQ ID NO: 488521 - RNA, 19 nt, Homo sapiens
  misc_RNA (1)...(19): siRNA sense strand
uccaggacuucaacacuau

SEQ ID NO: 488522 - RNA, 19 nt, Homo sapiens
  misc_RNA (1)...(19): siRNA sense strand
ccaagaggcagaccaacca

SEQ ID NO: 488523 - RNA, 19 nt, Homo sapiens
  misc_RNA (1)...(19): siRNA sense strand
cguaugagucggaggaaga

SEQ ID NO: 488524 - RNA, 19 nt, Homo sapiens
  misc_RNA (1)...(19): siRNA sense strand
gcaacagcaaugugagcaa

SEQ ID NO: 488525 - RNA, 19 nt, Homo sapiens
  misc_RNA (1)...(19): siRNA sense strand
gauugauguucuccaacug

SEQ ID NO: 488526 - RNA, 19 nt, Homo sapiens
  misc_RNA (1)...(19): siRNA sense strand
aagaggacgugggaggaaa

SEQ ID NO: 488527 - RNA, 19 nt, Homo sapiens
  misc_RNA (1)...(19): siRNA sense strand
auugagaaaucugccagua

SEQ ID NO: 488528 - RNA, 19 nt, Homo sapiens
  misc_RNA (1)...(19): siRNA sense strand
uggaaaagcucuucuugca

SEQ ID NO: 488529 - RNA, 19 nt, Homo sapiens
  misc_RNA (1)...(19): siRNA sense strand
cugagaaaguugaugugau

SEQ ID NO: 488530 - RNA, 19 nt, Homo sapiens
  misc_RNA (1)...(19): siRNA sense strand
gaaccucccugauuacuau

SEQ ID NO: 488531 - RNA, 19 nt, Homo sapiens
  misc_RNA (1)...(19): siRNA sense strand
gaaaugcgcuuugccaaga

SEQ ID NO: 488532 - RNA, 19 nt, Homo sapiens
  misc_RNA (1)...(19): siRNA sense strand
uaaaugagcuacccacaga

SEQ ID NO: 488533 - RNA, 19 nt, Homo sapiens
  misc_RNA (1)...(19): siRNA sense strand
gaaaagcucuucuugcaaa

SEQ ID NO: 488534 - RNA, 19 nt, Homo sapiens
  misc_RNA (1)...(19): siRNA sense strand
gcaagccuauguccuauga

SEQ ID NO: 488535 - RNA, 19 nt, Homo sapiens
  misc_RNA (1)...(19): siRNA sense strand
gaagaaaccgagaucauga

SEQ ID NO: 488536 - RNA, 19 nt, Homo sapiens
  misc_RNA (1)...(19): siRNA sense strand
ugagaaaguugaugugauu

SEQ ID NO: 488537 - RNA, 19 nt, Homo sapiens
  misc_RNA (1)...(19): siRNA sense strand
ugagaaaucugccaguaau

SEQ ID NO: 488538 - RNA, 19 nt, Homo sapiens
  misc_RNA (1)...(19): siRNA sense strand
gagaugacauagucuuaau

SEQ ID NO: 488539 - RNA, 19 nt, Homo sapiens
  misc_RNA (1)...(19): siRNA sense strand
ggaaugcucaggaauguau

SEQ ID NO: 488540 - RNA, 19 nt, Homo sapiens
  misc_RNA (1)...(19): siRNA sense strand
guacaacccuccugaccau

SEQ ID NO: 488541 - RNA, 19 nt, Homo sapiens
  misc_RNA (1)...(19): siRNA sense strand
acuagaaacuucccaaaug

SEQ ID NO: 488542 - RNA, 19 nt, Homo sapiens
  misc_RNA (1)...(19): siRNA sense strand
gauaugggaacaauaaaga

SEQ ID NO: 488543 - RNA, 19 nt, Homo sapiens
  misc_RNA (1)...(19): siRNA sense strand
caacaagccuggagaugac

SEQ ID NO: 488544 - RNA, 19 nt, Homo sapiens
  misc_RNA (1)...(19): siRNA sense strand
gcagaacaaaccaaagaaa

SEQ ID NO: 488545 - RNA, 19 nt, Homo sapiens
  misc_RNA (1)...(19): siRNA sense strand
ggacgugggaggaaagaaa

SEQ ID NO: 488546 - RNA, 19 nt, Homo sapiens
  misc_RNA (1)...(19): siRNA sense strand
cuagaaacuucccaaaugu

SEQ ID NO: 488547 - RNA, 19 nt, Homo sapiens
  misc_RNA (1)...(19): siRNA sense strand
aaaccgagaucaugauagu

SEQ ID NO: 488548 - RNA, 19 nt, Homo sapiens
  misc_RNA (1)...(19): siRNA sense strand
gggauggacuagaaacuuc

SEQ ID NO: 488549 - RNA, 19 nt, Homo sapiens
  misc_RNA (1)...(19): siRNA sense strand
ggagaugacauagucuuaa

SEQ ID NO: 488550 - RNA, 19 nt, Homo sapiens
  misc_RNA (1)...(19): siRNA sense strand
ggagauguuugccaagaag

SEQ ID NO: 488551 - RNA, 19 nt, Homo sapiens
  misc_RNA (1)...(19): siRNA sense strand
ugagcacaaucaagucuaa

SEQ ID NO: 488552 - RNA, 19 nt, Homo sapiens
  misc_RNA (1)...(19): siRNA sense strand
ggaaguggaagagaauaaa

SEQ ID NO: 488553 - RNA, 19 nt, Homo sapiens
  misc_RNA (1)...(19): siRNA sense strand
cgacuacugugacaucauc

SEQ ID NO: 488554 - RNA, 19 nt, Homo sapiens
  misc_RNA (1)...(19): siRNA sense strand
gcucaagacacuauggaaa

SEQ ID NO: 488555 - RNA, 19 nt, Homo sapiens
  misc_RNA (1)...(19): siRNA sense strand
cagcagaacaaaccaaaga

SEQ ID NO: 488556 - RNA, 19 nt, Homo sapiens
  misc_RNA (1)...(19): siRNA sense strand
aagaggaaguggaagagaa

SEQ ID NO: 488557 - RNA, 19 nt, Homo sapiens
  misc_RNA (1)...(19): siRNA sense strand
ggacuagaaacuucccaaa

SEQ ID NO: 488558 - RNA, 19 nt, Homo sapiens
  misc_RNA (1)...(19): siRNA sense strand
gacaugagcacaaucaagu

SEQ ID NO: 488559 - RNA, 19 nt, Homo sapiens
  misc_RNA (1)...(19): siRNA sense strand
ugugaaaccuccaaagaag

SEQ ID NO: 488560 - RNA, 19 nt, Homo sapiens
  misc_RNA (1)...(19): siRNA sense strand
gaagaggacgugggaggaa

SEQ ID NO: 488561 - RNA, 19 nt, Homo sapiens
  misc_RNA (1)...(19): siRNA sense strand
agaagggagugaagaggaa

SEQ ID NO: 488562 - RNA, 19 nt, Homo sapiens
  misc_RNA (1)...(19): siRNA sense strand
uaaagaagcgcuuggaaaa

SEQ ID NO: 488563 - RNA, 19 nt, Homo sapiens
  misc_RNA (1)...(19): siRNA sense strand
agcugaaccucccugauua

SEQ ID NO: 488564 - RNA, 19 nt, Homo sapiens
  misc_RNA (1)...(19): siRNA sense strand
gcaaugugagcaagaagga

SEQ ID NO: 488565 - RNA, 19 nt, Homo sapiens
  misc_RNA (1)...(19): siRNA sense strand
gaaaagaggaaguggaaga

SEQ ID NO: 488566 - RNA, 19 nt, Homo sapiens
  misc_RNA (1)...(19): siRNA sense strand
gaaacuucccaaaugucua

SEQ ID NO: 488567 - RNA, 19 nt, Homo sapiens
  misc_RNA (1)...(19): siRNA sense strand
uuacuggaaugcucaggaa

SEQ ID NO: 488568 - RNA, 19 nt, Homo sapiens
  misc_RNA (1)...(19): siRNA sense strand
aagcugaaccucccugauu

SEQ ID NO: 488569 - RNA, 19 nt, Homo sapiens
  misc_RNA (1)...(19): siRNA sense strand
cagcgaagacuccgaaaca

SEQ ID NO: 488570 - RNA, 19 nt, Homo sapiens
  misc_RNA (1)...(19): siRNA sense strand
ugcaauaccugcucagagu

SEQ ID NO: 488571 - RNA, 19 nt, Homo sapiens
  misc_RNA (1)...(19): siRNA sense strand
ggacaugagcacaaucaag

SEQ ID NO: 488572 - RNA, 19 nt, Homo sapiens
  misc_RNA (1)...(19): siRNA sense strand
ucaagacacuauggaaaca

SEQ ID NO: 488573 - RNA, 19 nt, Homo sapiens
  misc_RNA (1)...(19): siRNA sense strand
gaguccagcuccucugaca

SEQ ID NO: 488574 - RNA, 19 nt, Homo sapiens
  misc_RNA (1)...(19): siRNA sense strand
auaaagaagcgcuuggaaa

SEQ ID NO: 488575 - RNA, 19 nt, Homo sapiens
  misc_RNA (1)...(19): siRNA sense strand
acaacaagccuggagauga

SEQ ID NO: 488576 - RNA, 19 nt, Homo sapiens
  misc_RNA (1)...(19): siRNA sense strand
gaugacauagucuuaaugg

SEQ ID NO: 488577 - RNA, 19 nt, Homo sapiens
  misc_RNA (1)...(19): siRNA sense strand
gagcuacccacagaagaaa

SEQ ID NO: 488578 - RNA, 19 nt, Homo sapiens
  misc_RNA (1)...(19): siRNA sense strand
agaccaaccaacugcaaua

SEQ ID NO: 488579 - RNA, 19 nt, Homo sapiens
  misc_RNA (1)...(19): siRNA sense strand
gcuccaggauguguucgaa

SEQ ID NO: 488580 - RNA, 19 nt, Homo sapiens
  misc_RNA (1)...(19): siRNA sense strand
cuacacgacuacugugaca

SEQ ID NO: 488581 - RNA, 19 nt, Homo sapiens
  misc_RNA (1)...(19): siRNA sense strand
caaagaagggagugaagag

SEQ ID NO: 488582 - RNA, 19 nt, Homo sapiens
  misc_RNA (1)...(19): siRNA sense strand
guaccaaacacaacucaag

SEQ ID NO: 488583 - RNA, 19 nt, Homo sapiens
  misc_RNA (1)...(19): siRNA sense strand
agaaaccgagaucaugaua

SEQ ID NO: 488584 - RNA, 19 nt, Homo sapiens
  misc_RNA (1)...(19): siRNA sense strand
gauguucuccaacugcuau

SEQ ID NO: 488585 - RNA, 19 nt, Homo sapiens
  misc_RNA (1)...(19): siRNA sense strand
gcuaugucaccuccuguuu

SEQ ID NO: 488586 - RNA, 19 nt, Homo sapiens
  misc_RNA (1)...(19): siRNA sense strand
gagcuggagcgcuauguca

SEQ ID NO: 488587 - RNA, 19 nt, Homo sapiens
  misc_RNA (1)...(19): siRNA sense strand
gaaaagcacaaaagaaaag

SEQ ID NO: 488588 - RNA, 19 nt, Homo sapiens
  misc_RNA (1)...(19): siRNA sense strand
ggauaugggaacaauaaag

SEQ ID NO: 488589 - RNA, 19 nt, Homo sapiens
  misc_RNA (1)...(19): siRNA sense strand
gugcaagccuauguccuau

SEQ ID NO: 488590 - RNA, 19 nt, Homo sapiens
  misc_RNA (1)...(19): siRNA sense strand
gcacccagcaccagagaag

SEQ ID NO: 488591 - RNA, 19 nt, Homo sapiens
  misc_RNA (1)...(19): siRNA sense strand
gacuagaaacuucccaaau

SEQ ID NO: 488592 - RNA, 19 nt, Homo sapiens
  misc_RNA (1)...(19): siRNA sense strand
agaagaaaccgagaucaug

SEQ ID NO: 488593 - RNA, 19 nt, Homo sapiens
  misc_RNA (1)...(19): siRNA sense strand
gccuggagaugacauaguc

SEQ ID NO: 488594 - RNA, 19 nt, Homo sapiens
  misc_RNA (1)...(19): siRNA sense strand
gaauguauccaggacuuca

SEQ ID NO: 488595 - RNA, 19 nt, Homo sapiens
  misc_RNA (1)...(19): siRNA sense strand
ugaaaccuccaaagaagga

SEQ ID NO: 488596 - RNA, 19 nt, Homo sapiens
  misc_RNA (1)...(19): siRNA sense strand
gcugagaaaguugauguga

SEQ ID NO: 488597 - RNA, 19 nt, Homo sapiens
  misc_RNA (1)...(19): siRNA sense strand
aaggagauguuugccaaga

SEQ ID NO: 488598 - RNA, 19 nt, Homo sapiens
  misc_RNA (1)...(19): siRNA sense strand
gcacaaucaagucuaaacu

SEQ ID NO: 488599 - RNA, 19 nt, Homo sapiens
  misc_RNA (1)...(19): siRNA sense strand
gacaagugcaagccuaugu

SEQ ID NO: 488600 - RNA, 19 nt, Homo sapiens
  misc_RNA (1)...(19): siRNA sense strand
cgauugauguucuccaacu

SEQ ID NO: 488601 - RNA, 19 nt, Homo sapiens
  misc_RNA (1)...(19): siRNA sense strand
ccaaccaacugcaauaccu

SEQ ID NO: 488602 - RNA, 19 nt, Homo sapiens
  misc_RNA (1)...(19): siRNA sense strand
acagcaaugugagcaagaa

SEQ ID NO: 488603 - RNA, 19 nt, Homo sapiens
  misc_RNA (1)...(19): siRNA sense strand
gaagggagugaagaggaaa

SEQ ID NO: 488604 - RNA, 19 nt, Homo sapiens
  misc_RNA (1)...(19): siRNA sense strand
aaagaaacagggacagcaa

SEQ ID NO: 488605 - RNA, 19 nt, Homo sapiens
  misc_RNA (1)...(19): siRNA sense strand
gaaaccgagaucaugauag

SEQ ID NO: 488606 - RNA, 19 nt, Homo sapiens
  misc_RNA (1)...(19): siRNA sense strand
gagaaaucugccaguaaug

SEQ ID NO: 488607 - RNA, 19 nt, Homo sapiens
  misc_RNA (1)...(19): siRNA sense strand
gaggaaguggaagagaaua

SEQ ID NO: 488608 - RNA, 19 nt, Homo sapiens
  misc_RNA (1)...(19): siRNA sense strand
uccaggauguguucgaaau

SEQ ID NO: 488609 - RNA, 19 nt, Homo sapiens
  misc_RNA (1)...(19): siRNA sense strand
cagaagaaaccgagaucau

SEQ ID NO: 488610 - RNA, 19 nt, Homo sapiens
  misc_RNA (1)...(19): siRNA sense strand
ugagcuacccacagaagaa

SEQ ID NO: 488611 - RNA, 19 nt, Homo sapiens
  misc_RNA (1)...(19): siRNA sense strand
auccaggacuucaacacua

SEQ ID NO: 488612 - RNA, 19 nt, Homo sapiens
  misc_RNA (1)...(19): siRNA sense strand
uuaaaacgccuauggauau

SEQ ID NO: 488613 - RNA, 19 nt, Homo sapiens
  misc_RNA (1)...(19): siRNA sense strand
caacugcuauaaguacaac

SEQ ID NO: 488614 - RNA, 19 nt, Homo sapiens
  misc_RNA (1)...(19): siRNA sense strand
gcugacguccgauugaugu

SEQ ID NO: 488615 - RNA, 19 nt, Homo sapiens
  misc_RNA (1)...(19): siRNA sense strand
uggagaugacauagucuua

SEQ ID NO: 488616 - RNA, 19 nt, Homo sapiens
  misc_RNA (1)...(19): siRNA sense strand
aggaauguauccaggacuu

SEQ ID NO: 488617 - RNA, 19 nt, Homo sapiens
  misc_RNA (1)...(19): siRNA sense strand
caauaaagaagcgcuugga

SEQ ID NO: 488618 - RNA, 19 nt, Homo sapiens
  misc_RNA (1)...(19): siRNA sense strand
gcacaaaagaaaagaggaa

SEQ ID NO: 488619 - RNA, 19 nt, Homo sapiens
  misc_RNA (1)...(19): siRNA sense strand
cccgcaagcuccaggaugu

SEQ ID NO: 488620 - RNA, 19 nt, Homo sapiens
  misc_RNA (1)...(19): siRNA sense strand
ccugugaaaccuccaaaga

SEQ ID NO: 488621 - RNA, 19 nt, Homo sapiens
  misc_RNA (1)...(19): siRNA sense strand
uccaggacuucaacacuau

SEQ ID NO: 488622 - RNA, 19 nt, Homo sapiens
  misc_RNA (1)...(19): siRNA sense strand
ccaagaggcagaccaacca

SEQ ID NO: 488623 - RNA, 19 nt, Homo sapiens
  misc_RNA (1)...(19): siRNA sense strand
cguaugagucggaggaaga

SEQ ID NO: 488624 - RNA, 19 nt, Homo sapiens
  misc_RNA (1)...(19): siRNA sense strand
gcaacagcaaugugagcaa

SEQ ID NO: 488625 - RNA, 19 nt, Homo sapiens
  misc_RNA (1)...(19): siRNA sense strand
gauugauguucuccaacug

SEQ ID NO: 488626 - RNA, 19 nt, Homo sapiens
  misc_RNA (1)...(19): siRNA sense strand
aagaggacgugggaggaaa

SEQ ID NO: 488627 - RNA, 19 nt, Homo sapiens
  misc_RNA (1)...(19): siRNA sense strand
auugagaaaucugccagua

SEQ ID NO: 488628 - RNA, 19 nt, Homo sapiens
  misc_RNA (1)...(19): siRNA sense strand
uggaaaagcucuucuugca

SEQ ID NO: 488629 - RNA, 19 nt, Homo sapiens
  misc_RNA (1)...(19): siRNA sense strand
cugagaaaguugaugugau

SEQ ID NO: 488630 - RNA, 19 nt, Homo sapiens
  misc_RNA (1)...(19): siRNA sense strand
gaaaggaucuccaaacucu

SEQ ID NO: 488631 - RNA, 19 nt, Homo sapiens
  misc_RNA (1)...(19): siRNA sense strand
cagagagacuuccuucaua

SEQ ID NO: 488632 - RNA, 19 nt, Homo sapiens
  misc_RNA (1)...(19): siRNA sense strand
gugaacaauuuccugauaa

SEQ ID NO: 488633 - RNA, 19 nt, Homo sapiens
  misc_RNA (1)...(19): siRNA sense strand
gcugaggccuuccuuccua

SEQ ID NO: 488634 - RNA, 19 nt, Homo sapiens
  misc_RNA (1)...(19): siRNA sense strand
gcuguacggucaaguguga

SEQ ID NO: 488635 - RNA, 19 nt, Homo sapiens
  misc_RNA (1)...(19): siRNA sense strand
ccagagcccugaugaaucu

SEQ ID NO: 488636 - RNA, 19 nt, Homo sapiens
  misc_RNA (1)...(19): siRNA sense strand
gaggaaaacugaggucaua

SEQ ID NO: 488637 - RNA, 19 nt, Homo sapiens
  misc_RNA (1)...(19): siRNA sense strand
uaucugaccuacacgacua

SEQ ID NO: 488638 - RNA, 19 nt, Homo sapiens
  misc_RNA (1)...(19): siRNA sense strand
gcagugagagccaccauga

SEQ ID NO: 488639 - RNA, 19 nt, Homo sapiens
  misc_RNA (1)...(19): siRNA sense strand
gggaaaggaucuccaaacu

SEQ ID NO: 488640 - RNA, 19 nt, Homo sapiens
  misc_RNA (1)...(19): siRNA sense strand
uagcaugggugacuucgaa

SEQ ID NO: 488641 - RNA, 19 nt, Homo sapiens
  misc_RNA (1)...(19): siRNA sense strand
ggagucauguacaucauca

SEQ ID NO: 488642 - RNA, 19 nt, Homo sapiens
  misc_RNA (1)...(19): siRNA sense strand
cagcgacaauguggaauuu

SEQ ID NO: 488643 - RNA, 19 nt, Homo sapiens
  misc_RNA (1)...(19): siRNA sense strand
gagacuuccuucauacaug

SEQ ID NO: 488644 - RNA, 19 nt, Homo sapiens
  misc_RNA (1)...(19): siRNA sense strand
ggagaugggagacuaccua

SEQ ID NO: 488645 - RNA, 19 nt, Homo sapiens
  misc_RNA (1)...(19): siRNA sense strand
ccuggucagugaacaauuu

SEQ ID NO: 488646 - RNA, 19 nt, Homo sapiens
  misc_RNA (1)...(19): siRNA sense strand
agugaacaauuuccugaua

SEQ ID NO: 488647 - RNA, 19 nt, Homo sapiens
  misc_RNA (1)...(19): siRNA sense strand
ggagugcaaguuccaguuu

SEQ ID NO: 488648 - RNA, 19 nt, Homo sapiens
  misc_RNA (1)...(19): siRNA sense strand
gaugggagacuaccuaaag

SEQ ID NO: 488649 - RNA, 19 nt, Homo sapiens
  misc_RNA (1)...(19): siRNA sense strand
gggcagcucugggcauaug

SEQ ID NO: 488650 - RNA, 19 nt, Homo sapiens
  misc_RNA (1)...(19): siRNA sense strand
ggucgugagugccuacaga

SEQ ID NO: 488651 - RNA, 19 nt, Homo sapiens
  misc_RNA (1)...(19): siRNA sense strand
gagugcaaguuccaguuug

SEQ ID NO: 488652 - RNA, 19 nt, Homo sapiens
  misc_RNA (1)...(19): siRNA sense strand
guaggcauguggugagcaa

SEQ ID NO: 488653 - RNA, 19 nt, Homo sapiens
  misc_RNA (1)...(19): siRNA sense strand
caaaugucauggcaucucu

SEQ ID NO: 488654 - RNA, 19 nt, Homo sapiens
  misc_RNA (1)...(19): siRNA sense strand
gcgacaauguggaauuugg

SEQ ID NO: 488655 - RNA, 19 nt, Homo sapiens
  misc_RNA (1)...(19): siRNA sense strand
ugugaugggucaaacaaug

SEQ ID NO: 488656 - RNA, 19 nt, Homo sapiens
  misc_RNA (1)...(19): siRNA sense strand
ucauguacaucaucaccaa

SEQ ID NO: 488657 - RNA, 19 nt, Homo sapiens
  misc_RNA (1)...(19): siRNA sense strand
gagaugggagacuaccuaa

SEQ ID NO: 488658 - RNA, 19 nt, Homo sapiens
  misc_RNA (1)...(19): siRNA sense strand
gcagcgacaauguggaauu

SEQ ID NO: 488659 - RNA, 19 nt, Homo sapiens
  misc_RNA (1)...(19): siRNA sense strand
gaacaauuuccugauaaca

SEQ ID NO: 488660 - RNA, 19 nt, Homo sapiens
  misc_RNA (1)...(19): siRNA sense strand
ggcauguggugagcaagua

SEQ ID NO: 488661 - RNA, 19 nt, Homo sapiens
  misc_RNA (1)...(19): siRNA sense strand
ccagagagacuuccuucau

SEQ ID NO: 488662 - RNA, 19 nt, Homo sapiens
  misc_RNA (1)...(19): siRNA sense strand
cuacagaacagccacaaca

SEQ ID NO: 488663 - RNA, 19 nt, Homo sapiens
  misc_RNA (1)...(19): siRNA sense strand
agagagacuuccuucauac

SEQ ID NO: 488664 - RNA, 19 nt, Homo sapiens
  misc_RNA (1)...(19): siRNA sense strand
ucugggagcugcagcauac

SEQ ID NO: 488665 - RNA, 19 nt, Homo sapiens
  misc_RNA (1)...(19): siRNA sense strand
ggaaaggaucuccaaacuc

SEQ ID NO: 488666 - RNA, 19 nt, Homo sapiens
  misc_RNA (1)...(19): siRNA sense strand
gaacugcccugaaaaugcu

SEQ ID NO: 488667 - RNA, 19 nt, Homo sapiens
  misc_RNA (1)...(19): siRNA sense strand
aaggaucuccaaacucuuu

SEQ ID NO: 488668 - RNA, 19 nt, Homo sapiens
  misc_RNA (1)...(19): siRNA sense strand
agugagagccaccaugaaa

SEQ ID NO: 488669 - RNA, 19 nt, Homo sapiens
  misc_RNA (1)...(19): siRNA sense strand
cgcuggaacugcccugaaa

SEQ ID NO: 488670 - RNA, 19 nt, Homo sapiens
  misc_RNA (1)...(19): siRNA sense strand
cacaacaggcugagaagug

SEQ ID NO: 488671 - RNA, 19 nt, Homo sapiens
  misc_RNA (1)...(19): siRNA sense strand
ugaacaauuuccugauaac

SEQ ID NO: 488672 - RNA, 19 nt, Homo sapiens
  misc_RNA (1)...(19): siRNA sense strand
ugagaagugcuaccagaga

SEQ ID NO: 488673 - RNA, 19 nt, Homo sapiens
  misc_RNA (1)...(19): siRNA sense strand
aaauuccaguggugcugua

SEQ ID NO: 488674 - RNA, 19 nt, Homo sapiens
  misc_RNA (1)...(19): siRNA sense strand
gaggucauaagcagcugua

SEQ ID NO: 488675 - RNA, 19 nt, Homo sapiens
  misc_RNA (1)...(19): siRNA sense strand
gcugugaugggucaaacaa

SEQ ID NO: 488676 - RNA, 19 nt, Homo sapiens
  misc_RNA (1)...(19): siRNA sense strand
gcagguggaagagaggaaa

SEQ ID NO: 488677 - RNA, 19 nt, Homo sapiens
  misc_RNA (1)...(19): siRNA sense strand
cagaacagccacaacacau

SEQ ID NO: 488678 - RNA, 19 nt, Homo sapiens
  misc_RNA (1)...(19): siRNA sense strand
gagagacuuccuucauaca

SEQ ID NO: 488679 - RNA, 19 nt, Homo sapiens
  misc_RNA (1)...(19): siRNA sense strand
gcaaaugucauggcaucuc

SEQ ID NO: 488680 - RNA, 19 nt, Homo sapiens
  misc_RNA (1)...(19): siRNA sense strand
gaugccagagcccugauga

SEQ ID NO: 488681 - RNA, 19 nt, Homo sapiens
  misc_RNA (1)...(19): siRNA sense strand
cugggcagcucugggcaua

SEQ ID NO: 488682 - RNA, 19 nt, Homo sapiens
  misc_RNA (1)...(19): siRNA sense strand
gcuggagucauguacauca

SEQ ID NO: 488683 - RNA, 19 nt, Homo sapiens
  misc_RNA (1)...(19): siRNA sense strand
gccucugccuggucaguga

SEQ ID NO: 488684 - RNA, 19 nt, Homo sapiens
  misc_RNA (1)...(19): siRNA sense strand
caucgaggagugcaaguuc

SEQ ID NO: 488685 - RNA, 19 nt, Homo sapiens
  misc_RNA (1)...(19): siRNA sense strand
cuaccuaaaggccaaguau

SEQ ID NO: 488686 - RNA, 19 nt, Homo sapiens
  misc_RNA (1)...(19): siRNA sense strand
cagcuguaacugcaaauuc

SEQ ID NO: 488687 - RNA, 19 nt, Homo sapiens
  misc_RNA (1)...(19): siRNA sense strand
gucauaagcagcuguaacu

SEQ ID NO: 488688 - RNA, 19 nt, Homo sapiens
  misc_RNA (1)...(19): siRNA sense strand
gcaucgaggagugcaaguu

SEQ ID NO: 488689 - RNA, 19 nt, Homo sapiens
  misc_RNA (1)...(19): siRNA sense strand
gugagugccuacagaacag

SEQ ID NO: 488690 - RNA, 19 nt, Homo sapiens
  misc_RNA (1)...(19): siRNA sense strand
gcugaaaauugaaauggau

SEQ ID NO: 488691 - RNA, 19 nt, Homo sapiens
  misc_RNA (1)...(19): siRNA sense strand
gcucugcuggagucaugua

SEQ ID NO: 488692 - RNA, 19 nt, Homo sapiens
  misc_RNA (1)...(19): siRNA sense strand
uguacaucaucaccaagaa

SEQ ID NO: 488693 - RNA, 19 nt, Homo sapiens
  misc_RNA (1)...(19): siRNA sense strand
accuaaaggccaaguauga

SEQ ID NO: 488694 - RNA, 19 nt, Homo sapiens
  misc_RNA (1)...(19): siRNA sense strand
gcugcagcauacagacaug

SEQ ID NO: 488695 - RNA, 19 nt, Homo sapiens
  misc_RNA (1)...(19): siRNA sense strand
gccagagcccugaugaauc

SEQ ID NO: 488696 - RNA, 19 nt, Homo sapiens
  misc_RNA (1)...(19): siRNA sense strand
caucaucaccaagaacugu

SEQ ID NO: 488697 - RNA, 19 nt, Homo sapiens
  misc_RNA (1)...(19): siRNA sense strand
gagcugcagcauacagaca

SEQ ID NO: 488698 - RNA, 19 nt, Homo sapiens
  misc_RNA (1)...(19): siRNA sense strand
ccaaggccuaucugaccua

SEQ ID NO: 488699 - RNA, 19 nt, Homo sapiens
  misc_RNA (1)...(19): siRNA sense strand
gguuuggggucuauaucua

SEQ ID NO: 488700 - RNA, 19 nt, Homo sapiens
  misc_RNA (1)...(19): siRNA sense strand
gaccaggcgcugaaaauug

SEQ ID NO: 488701 - RNA, 19 nt, Homo sapiens
  misc_RNA (1)...(19): siRNA sense strand
gaaaggaucuccaaacucu

SEQ ID NO: 488702 - RNA, 19 nt, Homo sapiens
  misc_RNA (1)...(19): siRNA sense strand
cagagagacuuccuucaua

SEQ ID NO: 488703 - RNA, 19 nt, Homo sapiens
  misc_RNA (1)...(19): siRNA sense strand
gugaacaauuuccugauaa

SEQ ID NO: 488704 - RNA, 19 nt, Homo sapiens
  misc_RNA (1)...(19): siRNA sense strand
gcugaggccuuccuuccua

SEQ ID NO: 488705 - RNA, 19 nt, Homo sapiens
  misc_RNA (1)...(19): siRNA sense strand
ccagagcccugaugaaucu

SEQ ID NO: 488706 - RNA, 19 nt, Homo sapiens
  misc_RNA (1)...(19): siRNA sense strand
gaggaaaacugaggucaua

SEQ ID NO: 488707 - RNA, 19 nt, Homo sapiens
  misc_RNA (1)...(19): siRNA sense strand
uaucugaccuacacgacua

SEQ ID NO: 488708 - RNA, 19 nt, Homo sapiens
  misc_RNA (1)...(19): siRNA sense strand
gcagugagagccaccauga

SEQ ID NO: 488709 - RNA, 19 nt, Homo sapiens
  misc_RNA (1)...(19): siRNA sense strand
gggaaaggaucuccaaacu

SEQ ID NO: 488710 - RNA, 19 nt, Homo sapiens
  misc_RNA (1)...(19): siRNA sense strand
uagcaugggugacuucgaa

SEQ ID NO: 488711 - RNA, 19 nt, Homo sapiens
  misc_RNA (1)...(19): siRNA sense strand
ggagucauguacaucauca

SEQ ID NO: 488712 - RNA, 19 nt, Homo sapiens
  misc_RNA (1)...(19): siRNA sense strand
cagcgacaauguggaauuu

SEQ ID NO: 488713 - RNA, 19 nt, Homo sapiens
  misc_RNA (1)...(19): siRNA sense strand
gagacuuccuucauacaug

SEQ ID NO: 488714 - RNA, 19 nt, Homo sapiens
  misc_RNA (1)...(19): siRNA sense strand
ggagaugggagacuaccua

SEQ ID NO: 488715 - RNA, 19 nt, Homo sapiens
  misc_RNA (1)...(19): siRNA sense strand
ccuggucagugaacaauuu

SEQ ID NO: 488716 - RNA, 19 nt, Homo sapiens
  misc_RNA (1)...(19): siRNA sense strand
agugaacaauuuccugaua

SEQ ID NO: 488717 - RNA, 19 nt, Homo sapiens
  misc_RNA (1)...(19): siRNA sense strand
ggagugcaaguuccaguuu

SEQ ID NO: 488718 - RNA, 19 nt, Homo sapiens
  misc_RNA (1)...(19): siRNA sense strand
gaugggagacuaccuaaag

SEQ ID NO: 488719 - RNA, 19 nt, Homo sapiens
  misc_RNA (1)...(19): siRNA sense strand
gggcagcucugggcauaug

SEQ ID NO: 488720 - RNA, 19 nt, Homo sapiens
  misc_RNA (1)...(19): siRNA sense strand
ggucgugagugccuacaga

SEQ ID NO: 488721 - RNA, 19 nt, Homo sapiens
  misc_RNA (1)...(19): siRNA sense strand
gagugcaaguuccaguuug

SEQ ID NO: 488722 - RNA, 19 nt, Homo sapiens
  misc_RNA (1)...(19): siRNA sense strand
guaggcauguggugagcaa

SEQ ID NO: 488723 - RNA, 19 nt, Homo sapiens
  misc_RNA (1)...(19): siRNA sense strand
caaaugucauggcaucucu

SEQ ID NO: 488724 - RNA, 19 nt, Homo sapiens
  misc_RNA (1)...(19): siRNA sense strand
gcgacaauguggaauuugg

SEQ ID NO: 488725 - RNA, 19 nt, Homo sapiens
  misc_RNA (1)...(19): siRNA sense strand
ugugaugggucaaacaaug

SEQ ID NO: 488726 - RNA, 19 nt, Homo sapiens
  misc_RNA (1)...(19): siRNA sense strand
ucauguacaucaucaccaa

SEQ ID NO: 488727 - RNA, 19 nt, Homo sapiens
  misc_RNA (1)...(19): siRNA sense strand
gagaugggagacuaccuaa

SEQ ID NO: 488728 - RNA, 19 nt, Homo sapiens
  misc_RNA (1)...(19): siRNA sense strand
gcagcgacaauguggaauu

SEQ ID NO: 488729 - RNA, 19 nt, Homo sapiens
  misc_RNA (1)...(19): siRNA sense strand
gaacaauuuccugauaaca

SEQ ID NO: 488730 - RNA, 19 nt, Homo sapiens
  misc_RNA (1)...(19): siRNA sense strand
ggcauguggugagcaagua

SEQ ID NO: 488731 - RNA, 19 nt, Homo sapiens
  misc_RNA (1)...(19): siRNA sense strand
ccagagagacuuccuucau

SEQ ID NO: 488732 - RNA, 19 nt, Homo sapiens
  misc_RNA (1)...(19): siRNA sense strand
cuacagaacagccacaaca

SEQ ID NO: 488733 - RNA, 19 nt, Homo sapiens
  misc_RNA (1)...(19): siRNA sense strand
agagagacuuccuucauac

SEQ ID NO: 488734 - RNA, 19 nt, Homo sapiens
  misc_RNA (1)...(19): siRNA sense strand
ucugggagcugcagcauac

SEQ ID NO: 488735 - RNA, 19 nt, Homo sapiens
  misc_RNA (1)...(19): siRNA sense strand
ggaaaggaucuccaaacuc

SEQ ID NO: 488736 - RNA, 19 nt, Homo sapiens
  misc_RNA (1)...(19): siRNA sense strand
gaacugcccugaaaaugcu

SEQ ID NO: 488737 - RNA, 19 nt, Homo sapiens
  misc_RNA (1)...(19): siRNA sense strand
aaggaucuccaaacucuuu

SEQ ID NO: 488738 - RNA, 19 nt, Homo sapiens
  misc_RNA (1)...(19): siRNA sense strand
agugagagccaccaugaaa

SEQ ID NO: 488739 - RNA, 19 nt, Homo sapiens
  misc_RNA (1)...(19): siRNA sense strand
cgcuggaacugcccugaaa

SEQ ID NO: 488740 - RNA, 19 nt, Homo sapiens
  misc_RNA (1)...(19): siRNA sense strand
cacaacaggcugagaagug

SEQ ID NO: 488741 - RNA, 19 nt, Homo sapiens
  misc_RNA (1)...(19): siRNA sense strand
ugaacaauuuccugauaac

SEQ ID NO: 488742 - RNA, 19 nt, Homo sapiens
  misc_RNA (1)...(19): siRNA sense strand
ugagaagugcuaccagaga

SEQ ID NO: 488743 - RNA, 19 nt, Homo sapiens
  misc_RNA (1)...(19): siRNA sense strand
aaauuccaguggugcugua

SEQ ID NO: 488744 - RNA, 19 nt, Homo sapiens
  misc_RNA (1)...(19): siRNA sense strand
gaggucauaagcagcugua

SEQ ID NO: 488745 - RNA, 19 nt, Homo sapiens
  misc_RNA (1)...(19): siRNA sense strand
gcugugaugggucaaacaa

SEQ ID NO: 488746 - RNA, 19 nt, Homo sapiens
  misc_RNA (1)...(19): siRNA sense strand
gcagguggaagagaggaaa

SEQ ID NO: 488747 - RNA, 19 nt, Homo sapiens
  misc_RNA (1)...(19): siRNA sense strand
cagaacagccacaacacau

SEQ ID NO: 488748 - RNA, 19 nt, Homo sapiens
  misc_RNA (1)...(19): siRNA sense strand
gagagacuuccuucauaca

SEQ ID NO: 488749 - RNA, 19 nt, Homo sapiens
  misc_RNA (1)...(19): siRNA sense strand
gcaaaugucauggcaucuc

SEQ ID NO: 488750 - RNA, 19 nt, Homo sapiens
  misc_RNA (1)...(19): siRNA sense strand
gaugccagagcccugauga

SEQ ID NO: 488751 - RNA, 19 nt, Homo sapiens
  misc_RNA (1)...(19): siRNA sense strand
cugggcagcucugggcaua

SEQ ID NO: 488752 - RNA, 19 nt, Homo sapiens
  misc_RNA (1)...(19): siRNA sense strand
gcuggagucauguacauca

SEQ ID NO: 488753 - RNA, 19 nt, Homo sapiens
  misc_RNA (1)...(19): siRNA sense strand
gccucugccuggucaguga

SEQ ID NO: 488754 - RNA, 19 nt, Homo sapiens
  misc_RNA (1)...(19): siRNA sense strand
caucgaggagugcaaguuc

SEQ ID NO: 488755 - RNA, 19 nt, Homo sapiens
  misc_RNA (1)...(19): siRNA sense strand
cuaccuaaaggccaaguau

SEQ ID NO: 488756 - RNA, 19 nt, Homo sapiens
  misc_RNA (1)...(19): siRNA sense strand
cagcuguaacugcaaauuc

SEQ ID NO: 488757 - RNA, 19 nt, Homo sapiens
  misc_RNA (1)...(19): siRNA sense strand
gucauaagcagcuguaacu

SEQ ID NO: 488758 - RNA, 19 nt, Homo sapiens
  misc_RNA (1)...(19): siRNA sense strand
gcucugcuggagucaugua

SEQ ID NO: 488759 - RNA, 19 nt, Homo sapiens
  misc_RNA (1)...(19): siRNA sense strand
gugagugccuacagaacag

SEQ ID NO: 488760 - RNA, 19 nt, Homo sapiens
  misc_RNA (1)...(19): siRNA sense strand
gcugaaaauugaaauggau

SEQ ID NO: 488761 - RNA, 19 nt, Homo sapiens
  misc_RNA (1)...(19): siRNA sense strand
gcaucgaggagugcaaguu

SEQ ID NO: 488762 - RNA, 19 nt, Homo sapiens
  misc_RNA (1)...(19): siRNA sense strand
uguacaucaucaccaagaa

SEQ ID NO: 488763 - RNA, 19 nt, Homo sapiens
  misc_RNA (1)...(19): siRNA sense strand
accuaaaggccaaguauga

SEQ ID NO: 488764 - RNA, 19 nt, Homo sapiens
  misc_RNA (1)...(19): siRNA sense strand
gcugcagcauacagacaug

SEQ ID NO: 488765 - RNA, 19 nt, Homo sapiens
  misc_RNA (1)...(19): siRNA sense strand
gccagagcccugaugaauc

SEQ ID NO: 488766 - RNA, 19 nt, Homo sapiens
  misc_RNA (1)...(19): siRNA sense strand
caucaucaccaagaacugu

SEQ ID NO: 488767 - RNA, 19 nt, Homo sapiens
  misc_RNA (1)...(19): siRNA sense strand
gagcugcagcauacagaca

SEQ ID NO: 488768 - RNA, 19 nt, Homo sapiens
  misc_RNA (1)...(19): siRNA sense strand
gaccaggcgcugaaaauug

SEQ ID NO: 488769 - RNA, 19 nt, Homo sapiens
  misc_RNA (1)...(19): siRNA sense strand
ccaaggccuaucugaccua

SEQ ID NO: 488770 - RNA, 19 nt, Homo sapiens
  misc_RNA (1)...(19): siRNA sense strand
caacacagccuaucuaaua

SEQ ID NO: 488771 - RNA, 19 nt, Homo sapiens
  misc_RNA (1)...(19): siRNA sense strand
gacaagagcuuccuucaaa

SEQ ID NO: 488772 - RNA, 19 nt, Homo sapiens
  misc_RNA (1)...(19): siRNA sense strand
ggaagaaggcuaugauuau

SEQ ID NO: 488773 - RNA, 19 nt, Homo sapiens
  misc_RNA (1)...(19): siRNA sense strand
ccaagcauuucaaggauua

SEQ ID NO: 488774 - RNA, 19 nt, Homo sapiens
  misc_RNA (1)...(19): siRNA sense strand
gaagaaggcuaugauuauc

SEQ ID NO: 488775 - RNA, 19 nt, Homo sapiens
  misc_RNA (1)...(19): siRNA sense strand
caaaguggcaucugcauaa

SEQ ID NO: 488776 - RNA, 19 nt, Homo sapiens
  misc_RNA (1)...(19): siRNA sense strand
ucacgacacucuuauuuca

SEQ ID NO: 488777 - RNA, 19 nt, Homo sapiens
  misc_RNA (1)...(19): siRNA sense strand
gcugaagacacacuuguua

SEQ ID NO: 488778 - RNA, 19 nt, Homo sapiens
  misc_RNA (1)...(19): siRNA sense strand
gagacgaaauggacaaagu

SEQ ID NO: 488779 - RNA, 19 nt, Homo sapiens
  misc_RNA (1)...(19): siRNA sense strand
caaccaguaugaggcaaua

SEQ ID NO: 488780 - RNA, 19 nt, Homo sapiens
  misc_RNA (1)...(19): siRNA sense strand
ucccuaaaccugugaauua

SEQ ID NO: 488781 - RNA, 19 nt, Homo sapiens
  misc_RNA (1)...(19): siRNA sense strand
uaacaacacagccuaucua

SEQ ID NO: 488782 - RNA, 19 nt, Homo sapiens
  misc_RNA (1)...(19): siRNA sense strand
cggaagaaggcuaugauua

SEQ ID NO: 488783 - RNA, 19 nt, Homo sapiens
  misc_RNA (1)...(19): siRNA sense strand
cagccuaucuaauauacaa

SEQ ID NO: 488784 - RNA, 19 nt, Homo sapiens
  misc_RNA (1)...(19): siRNA sense strand
caaggguucuggcugauuc

SEQ ID NO: 488785 - RNA, 19 nt, Homo sapiens
  misc_RNA (1)...(19): siRNA sense strand
ucaaguacaaccaguauga

SEQ ID NO: 488786 - RNA, 19 nt, Homo sapiens
  misc_RNA (1)...(19): siRNA sense strand
gaagacacacuuguuaaca

SEQ ID NO: 488787 - RNA, 19 nt, Homo sapiens
  misc_RNA (1)...(19): siRNA sense strand
caugccaagugguguauuu

SEQ ID NO: 488788 - RNA, 19 nt, Homo sapiens
  misc_RNA (1)...(19): siRNA sense strand
gaaaguauggacacaccaa

SEQ ID NO: 488789 - RNA, 19 nt, Homo sapiens
  misc_RNA (1)...(19): siRNA sense strand
agacacacuuguuaacaga

SEQ ID NO: 488790 - RNA, 19 nt, Homo sapiens
  misc_RNA (1)...(19): siRNA sense strand
ucaaacugcucccuuccuu

SEQ ID NO: 488791 - RNA, 19 nt, Homo sapiens
  misc_RNA (1)...(19): siRNA sense strand
uaucacgacacucuuauuu

SEQ ID NO: 488792 - RNA, 19 nt, Homo sapiens
  misc_RNA (1)...(19): siRNA sense strand
uaaauuaucacgacacucu

SEQ ID NO: 488793 - RNA, 19 nt, Homo sapiens
  misc_RNA (1)...(19): siRNA sense strand
gaucaugccaaguggugua

SEQ ID NO: 488794 - RNA, 19 nt, Homo sapiens
  misc_RNA (1)...(19): siRNA sense strand
gguucuggcugauucauuc

SEQ ID NO: 488795 - RNA, 19 nt, Homo sapiens
  misc_RNA (1)...(19): siRNA sense strand
acacacuuguuaacagaaa

SEQ ID NO: 488796 - RNA, 19 nt, Homo sapiens
  misc_RNA (1)...(19): siRNA sense strand
gaauuacagcagaaaguau

SEQ ID NO: 488797 - RNA, 19 nt, Homo sapiens
  misc_RNA (1)...(19): siRNA sense strand
agaaguggaggauucauuu

SEQ ID NO: 488798 - RNA, 19 nt, Homo sapiens
  misc_RNA (1)...(19): siRNA sense strand
caaacugcucccuuccuua

SEQ ID NO: 488799 - RNA, 19 nt, Homo sapiens
  misc_RNA (1)...(19): siRNA sense strand
ugaauuacagcagaaagua

SEQ ID NO: 488800 - RNA, 19 nt, Homo sapiens
  misc_RNA (1)...(19): siRNA sense strand
gaaguggaggauucauuug

SEQ ID NO: 488801 - RNA, 19 nt, Homo sapiens
  misc_RNA (1)...(19): siRNA sense strand
aguggaggauucauuugua

SEQ ID NO: 488802 - RNA, 19 nt, Homo sapiens
  misc_RNA (1)...(19): siRNA sense strand
cuaugaaagcuguaaguaa

SEQ ID NO: 488803 - RNA, 19 nt, Homo sapiens
  misc_RNA (1)...(19): siRNA sense strand
acacagccuaucuaauaua

SEQ ID NO: 488804 - RNA, 19 nt, Homo sapiens
  misc_RNA (1)...(19): siRNA sense strand
gcauuucaaggauuaguau

SEQ ID NO: 488805 - RNA, 19 nt, Homo sapiens
  misc_RNA (1)...(19): siRNA sense strand
ggccagcucaucagagauu

SEQ ID NO: 488806 - RNA, 19 nt, Homo sapiens
  misc_RNA (1)...(19): siRNA sense strand
uuaccaagcauuucaagga

SEQ ID NO: 488807 - RNA, 19 nt, Homo sapiens
  misc_RNA (1)...(19): siRNA sense strand
gacauguauuggagaccua

SEQ ID NO: 488808 - RNA, 19 nt, Homo sapiens
  misc_RNA (1)...(19): siRNA sense strand
cuuaccaugucuacaauau

SEQ ID NO: 488809 - RNA, 19 nt, Homo sapiens
  misc_RNA (1)...(19): siRNA sense strand
acaaaguggcaucugcaua

SEQ ID NO: 488810 - RNA, 19 nt, Homo sapiens
  misc_RNA (1)...(19): siRNA sense strand
uaccaagcauuucaaggau

SEQ ID NO: 488811 - RNA, 19 nt, Homo sapiens
  misc_RNA (1)...(19): siRNA sense strand
gcaucugcauaacuuucaa

SEQ ID NO: 488812 - RNA, 19 nt, Homo sapiens
  misc_RNA (1)...(19): siRNA sense strand
cagaaguggaggauucauu

SEQ ID NO: 488813 - RNA, 19 nt, Homo sapiens
  misc_RNA (1)...(19): siRNA sense strand
aacacagccuaucuaauau

SEQ ID NO: 488814 - RNA, 19 nt, Homo sapiens
  misc_RNA (1)...(19): siRNA sense strand
aauagauucucagcucuug

SEQ ID NO: 488815 - RNA, 19 nt, Homo sapiens
  misc_RNA (1)...(19): siRNA sense strand
ucauuuguacccagaauug

SEQ ID NO: 488816 - RNA, 19 nt, Homo sapiens
  misc_RNA (1)...(19): siRNA sense strand
aguggcaucugcauaacuu

SEQ ID NO: 488817 - RNA, 19 nt, Homo sapiens
  misc_RNA (1)...(19): siRNA sense strand
aauuaucacgacacucuua

SEQ ID NO: 488818 - RNA, 19 nt, Homo sapiens
  misc_RNA (1)...(19): siRNA sense strand
cugaagacacacuuguuaa

SEQ ID NO: 488819 - RNA, 19 nt, Homo sapiens
  misc_RNA (1)...(19): siRNA sense strand
cgacacucuuauuucaguu

SEQ ID NO: 488820 - RNA, 19 nt, Homo sapiens
  misc_RNA (1)...(19): siRNA sense strand
guaacaacacagccuaucu

SEQ ID NO: 488821 - RNA, 19 nt, Homo sapiens
  misc_RNA (1)...(19): siRNA sense strand
aagguuuacugcuguggaa

SEQ ID NO: 488822 - RNA, 19 nt, Homo sapiens
  misc_RNA (1)...(19): siRNA sense strand
agacaagagcuuccuucaa

SEQ ID NO: 488823 - RNA, 19 nt, Homo sapiens
  misc_RNA (1)...(19): siRNA sense strand
accaggagcucauucacau

SEQ ID NO: 488824 - RNA, 19 nt, Homo sapiens
  misc_RNA (1)...(19): siRNA sense strand
caauagauucucagcucuu

SEQ ID NO: 488825 - RNA, 19 nt, Homo sapiens
  misc_RNA (1)...(19): siRNA sense strand
cacagccuaucuaauauac

SEQ ID NO: 488826 - RNA, 19 nt, Homo sapiens
  misc_RNA (1)...(19): siRNA sense strand
acaaugauggagucccuaa

SEQ ID NO: 488827 - RNA, 19 nt, Homo sapiens
  misc_RNA (1)...(19): siRNA sense strand
ggacacaccaaagguuuac

SEQ ID NO: 488828 - RNA, 19 nt, Homo sapiens
  misc_RNA (1)...(19): siRNA sense strand
agaaggcuaugauuaucca

SEQ ID NO: 488829 - RNA, 19 nt, Homo sapiens
  misc_RNA (1)...(19): siRNA sense strand
caagagcuuccuucaaacu

SEQ ID NO: 488830 - RNA, 19 nt, Homo sapiens
  misc_RNA (1)...(19): siRNA sense strand
guggaggauucauuuguac

SEQ ID NO: 488831 - RNA, 19 nt, Homo sapiens
  misc_RNA (1)...(19): siRNA sense strand
aaacugcucccuuccuuac

SEQ ID NO: 488832 - RNA, 19 nt, Homo sapiens
  misc_RNA (1)...(19): siRNA sense strand
caccagggccagcucauca

SEQ ID NO: 488833 - RNA, 19 nt, Homo sapiens
  misc_RNA (1)...(19): siRNA sense strand
ccacaccaagccuucagaa

SEQ ID NO: 488834 - RNA, 19 nt, Homo sapiens
  misc_RNA (1)...(19): siRNA sense strand
aacaacacagccuaucuaa

SEQ ID NO: 488835 - RNA, 19 nt, Homo sapiens
  misc_RNA (1)...(19): siRNA sense strand
cucaacggcugaagacaca

SEQ ID NO: 488836 - RNA, 19 nt, Homo sapiens
  misc_RNA (1)...(19): siRNA sense strand
gcaggcuccucaccacacu

SEQ ID NO: 488837 - RNA, 19 nt, Homo sapiens
  misc_RNA (1)...(19): siRNA sense strand
uggacacaccaaagguuua

SEQ ID NO: 488838 - RNA, 19 nt, Homo sapiens
  misc_RNA (1)...(19): siRNA sense strand
gugaauuacagcagaaagu

SEQ ID NO: 488839 - RNA, 19 nt, Homo sapiens
  misc_RNA (1)...(19): siRNA sense strand
aagacacacuuguuaacag

SEQ ID NO: 488840 - RNA, 19 nt, Homo sapiens
  misc_RNA (1)...(19): siRNA sense strand
agggccagcucaucagaga

SEQ ID NO: 488841 - RNA, 19 nt, Homo sapiens
  misc_RNA (1)...(19): siRNA sense strand
acgacacucuuauuucagu

SEQ ID NO: 488842 - RNA, 19 nt, Homo sapiens
  misc_RNA (1)...(19): siRNA sense strand
gaguaacaacacagccuau

SEQ ID NO: 488843 - RNA, 19 nt, Homo sapiens
  misc_RNA (1)...(19): siRNA sense strand
caguaugaggcaauagauu

SEQ ID NO: 488844 - RNA, 19 nt, Homo sapiens
  misc_RNA (1)...(19): siRNA sense strand
aguaugaggcaauagauuc

SEQ ID NO: 488845 - RNA, 19 nt, Homo sapiens
  misc_RNA (1)...(19): siRNA sense strand
agacgaaauggacaaagug

SEQ ID NO: 488846 - RNA, 19 nt, Homo sapiens
  misc_RNA (1)...(19): siRNA sense strand
acuaugaaagcuguaagua

SEQ ID NO: 488847 - RNA, 19 nt, Homo sapiens
  misc_RNA (1)...(19): siRNA sense strand
accaagcauuucaaggauu

SEQ ID NO: 488848 - RNA, 19 nt, Homo sapiens
  misc_RNA (1)...(19): siRNA sense strand
acaagagcuuccuucaaac

SEQ ID NO: 488849 - RNA, 19 nt, Homo sapiens
  misc_RNA (1)...(19): siRNA sense strand
ugaagacacacuuguuaac

SEQ ID NO: 488850 - RNA, 19 nt, Homo sapiens
  misc_RNA (1)...(19): siRNA sense strand
gacaagagcuuccuucaaa

SEQ ID NO: 488851 - RNA, 19 nt, Homo sapiens
  misc_RNA (1)...(19): siRNA sense strand
ccaagcauuucaaggauua

SEQ ID NO: 488852 - RNA, 19 nt, Homo sapiens
  misc_RNA (1)...(19): siRNA sense strand
ucacgacacucuuauuuca

SEQ ID NO: 488853 - RNA, 19 nt, Homo sapiens
  misc_RNA (1)...(19): siRNA sense strand
gcugaagacacacuuguua

SEQ ID NO: 488854 - RNA, 19 nt, Homo sapiens
  misc_RNA (1)...(19): siRNA sense strand
gaagacacacuuguuaaca

SEQ ID NO: 488855 - RNA, 19 nt, Homo sapiens
  misc_RNA (1)...(19): siRNA sense strand
caugccaagugguguauuu

SEQ ID NO: 488856 - RNA, 19 nt, Homo sapiens
  misc_RNA (1)...(19): siRNA sense strand
agacacacuuguuaacaga

SEQ ID NO: 488857 - RNA, 19 nt, Homo sapiens
  misc_RNA (1)...(19): siRNA sense strand
ucaaacugcucccuuccuu

SEQ ID NO: 488858 - RNA, 19 nt, Homo sapiens
  misc_RNA (1)...(19): siRNA sense strand
uaucacgacacucuuauuu

SEQ ID NO: 488859 - RNA, 19 nt, Homo sapiens
  misc_RNA (1)...(19): siRNA sense strand
uaaauuaucacgacacucu

SEQ ID NO: 488860 - RNA, 19 nt, Homo sapiens
  misc_RNA (1)...(19): siRNA sense strand
gaucaugccaaguggugua

SEQ ID NO: 488861 - RNA, 19 nt, Homo sapiens
  misc_RNA (1)...(19): siRNA sense strand
acacacuuguuaacagaaa

SEQ ID NO: 488862 - RNA, 19 nt, Homo sapiens
  misc_RNA (1)...(19): siRNA sense strand
caaacugcucccuuccuua

SEQ ID NO: 488863 - RNA, 19 nt, Homo sapiens
  misc_RNA (1)...(19): siRNA sense strand
agaaguggaggauucauuu

SEQ ID NO: 488864 - RNA, 19 nt, Homo sapiens
  misc_RNA (1)...(19): siRNA sense strand
gaaguggaggauucauuug

SEQ ID NO: 488865 - RNA, 19 nt, Homo sapiens
  misc_RNA (1)...(19): siRNA sense strand
aguggaggauucauuugua

SEQ ID NO: 488866 - RNA, 19 nt, Homo sapiens
  misc_RNA (1)...(19): siRNA sense strand
cuaugaaagcuguaaguaa

SEQ ID NO: 488867 - RNA, 19 nt, Homo sapiens
  misc_RNA (1)...(19): siRNA sense strand
gcauuucaaggauuaguau

SEQ ID NO: 488868 - RNA, 19 nt, Homo sapiens
  misc_RNA (1)...(19): siRNA sense strand
ggccagcucaucagagauu

SEQ ID NO: 488869 - RNA, 19 nt, Homo sapiens
  misc_RNA (1)...(19): siRNA sense strand
uuaccaagcauuucaagga

SEQ ID NO: 488870 - RNA, 19 nt, Homo sapiens
  misc_RNA (1)...(19): siRNA sense strand
gacauguauuggagaccua

SEQ ID NO: 488871 - RNA, 19 nt, Homo sapiens
  misc_RNA (1)...(19): siRNA sense strand
cuuaccaugucuacaauau

SEQ ID NO: 488872 - RNA, 19 nt, Homo sapiens
  misc_RNA (1)...(19): siRNA sense strand
uaccaagcauuucaaggau

SEQ ID NO: 488873 - RNA, 19 nt, Homo sapiens
  misc_RNA (1)...(19): siRNA sense strand
cagaaguggaggauucauu

SEQ ID NO: 488874 - RNA, 19 nt, Homo sapiens
  misc_RNA (1)...(19): siRNA sense strand
ucauuuguacccagaauug

SEQ ID NO: 488875 - RNA, 19 nt, Homo sapiens
  misc_RNA (1)...(19): siRNA sense strand
aauuaucacgacacucuua

SEQ ID NO: 488876 - RNA, 19 nt, Homo sapiens
  misc_RNA (1)...(19): siRNA sense strand
cugaagacacacuuguuaa

SEQ ID NO: 488877 - RNA, 19 nt, Homo sapiens
  misc_RNA (1)...(19): siRNA sense strand
cgacacucuuauuucaguu

SEQ ID NO: 488878 - RNA, 19 nt, Homo sapiens
  misc_RNA (1)...(19): siRNA sense strand
agacaagagcuuccuucaa

SEQ ID NO: 488879 - RNA, 19 nt, Homo sapiens
  misc_RNA (1)...(19): siRNA sense strand
caagagcuuccuucaaacu

SEQ ID NO: 488880 - RNA, 19 nt, Homo sapiens
  misc_RNA (1)...(19): siRNA sense strand
guggaggauucauuuguac

SEQ ID NO: 488881 - RNA, 19 nt, Homo sapiens
  misc_RNA (1)...(19): siRNA sense strand
aaacugcucccuuccuuac

SEQ ID NO: 488882 - RNA, 19 nt, Homo sapiens
  misc_RNA (1)...(19): siRNA sense strand
ccacaccaagccuucagaa

SEQ ID NO: 488883 - RNA, 19 nt, Homo sapiens
  misc_RNA (1)...(19): siRNA sense strand
caccagggccagcucauca

SEQ ID NO: 488884 - RNA, 19 nt, Homo sapiens
  misc_RNA (1)...(19): siRNA sense strand
cucaacggcugaagacaca

SEQ ID NO: 488885 - RNA, 19 nt, Homo sapiens
  misc_RNA (1)...(19): siRNA sense strand
gcaggcuccucaccacacu

SEQ ID NO: 488886 - RNA, 19 nt, Homo sapiens
  misc_RNA (1)...(19): siRNA sense strand
aagacacacuuguuaacag

SEQ ID NO: 488887 - RNA, 19 nt, Homo sapiens
  misc_RNA (1)...(19): siRNA sense strand
acgacacucuuauuucagu

SEQ ID NO: 488888 - RNA, 19 nt, Homo sapiens
  misc_RNA (1)...(19): siRNA sense strand
agggccagcucaucagaga

SEQ ID NO: 488889 - RNA, 19 nt, Homo sapiens
  misc_RNA (1)...(19): siRNA sense strand
ugaagacacacuuguuaac

SEQ ID NO: 488890 - RNA, 19 nt, Homo sapiens
  misc_RNA (1)...(19): siRNA sense strand
acuaugaaagcuguaagua

SEQ ID NO: 488891 - RNA, 19 nt, Homo sapiens
  misc_RNA (1)...(19): siRNA sense strand
accaagcauuucaaggauu

SEQ ID NO: 488892 - RNA, 19 nt, Homo sapiens
  misc_RNA (1)...(19): siRNA sense strand
acaagagcuuccuucaaac

SEQ ID NO: 488893 - RNA, 19 nt, Homo sapiens
  misc_RNA (1)...(19): siRNA sense strand
uaacagaucuugagcagaa

SEQ ID NO: 488894 - RNA, 19 nt, Homo sapiens
  misc_RNA (1)...(19): siRNA sense strand
ugauaggucuuucagauuu

SEQ ID NO: 488895 - RNA, 19 nt, Homo sapiens
  misc_RNA (1)...(19): siRNA sense strand
ggagauccacuuccuguaa

SEQ ID NO: 488896 - RNA, 19 nt, Homo sapiens
  misc_RNA (1)...(19): siRNA sense strand
gagauccacuuccuguaaa

SEQ ID NO: 488897 - RNA, 19 nt, Homo sapiens
  misc_RNA (1)...(19): siRNA sense strand
caagcgguauguggaauua

SEQ ID NO: 488898 - RNA, 19 nt, Homo sapiens
  misc_RNA (1)...(19): siRNA sense strand
ucaaagcgcucuuacaacu

SEQ ID NO: 488899 - RNA, 19 nt, Homo sapiens
  misc_RNA (1)...(19): siRNA sense strand
caugauaggucuuucagau

SEQ ID NO: 488900 - RNA, 19 nt, Homo sapiens
  misc_RNA (1)...(19): siRNA sense strand
gagcagaaguggaagaacu

SEQ ID NO: 488901 - RNA, 19 nt, Homo sapiens
  misc_RNA (1)...(19): siRNA sense strand
guaaaggacagaauggaaa

SEQ ID NO: 488902 - RNA, 19 nt, Homo sapiens
  misc_RNA (1)...(19): siRNA sense strand
ugaaaacucugaagaugua

SEQ ID NO: 488903 - RNA, 19 nt, Homo sapiens
  misc_RNA (1)...(19): siRNA sense strand
ggaauuaacagaucuugag

SEQ ID NO: 488904 - RNA, 19 nt, Homo sapiens
  misc_RNA (1)...(19): siRNA sense strand
ucagauuucuucuuuccaa

SEQ ID NO: 488905 - RNA, 19 nt, Homo sapiens
  misc_RNA (1)...(19): siRNA sense strand
cugaagauguaggccauua

SEQ ID NO: 488906 - RNA, 19 nt, Homo sapiens
  misc_RNA (1)...(19): siRNA sense strand
caacuggauccuugugaaa

SEQ ID NO: 488907 - RNA, 19 nt, Homo sapiens
  misc_RNA (1)...(19): siRNA sense strand
gauaggucuuucagauuuc

SEQ ID NO: 488908 - RNA, 19 nt, Homo sapiens
  misc_RNA (1)...(19): siRNA sense strand
caggaagaacggcaugaua

SEQ ID NO: 488909 - RNA, 19 nt, Homo sapiens
  misc_RNA (1)...(19): siRNA sense strand
cagauuagacucagaugug

SEQ ID NO: 488910 - RNA, 19 nt, Homo sapiens
  misc_RNA (1)...(19): siRNA sense strand
uaaaggacagaauggaaau

SEQ ID NO: 488911 - RNA, 19 nt, Homo sapiens
  misc_RNA (1)...(19): siRNA sense strand
cagauuucuucuuuccaaa

SEQ ID NO: 488912 - RNA, 19 nt, Homo sapiens
  misc_RNA (1)...(19): siRNA sense strand
gaagaacggcaugauaggu

SEQ ID NO: 488913 - RNA, 19 nt, Homo sapiens
  misc_RNA (1)...(19): siRNA sense strand
ggaagaacggcaugauagg

SEQ ID NO: 488914 - RNA, 19 nt, Homo sapiens
  misc_RNA (1)...(19): siRNA sense strand
caagcagugucaccacaag

SEQ ID NO: 488915 - RNA, 19 nt, Homo sapiens
  misc_RNA (1)...(19): siRNA sense strand
cggacauccugaagcaauu

SEQ ID NO: 488916 - RNA, 19 nt, Homo sapiens
  misc_RNA (1)...(19): siRNA sense strand
uauguggaauuaacagauc

SEQ ID NO: 488917 - RNA, 19 nt, Homo sapiens
  misc_RNA (1)...(19): siRNA sense strand
ggagacggaauccuaccuu

SEQ ID NO: 488918 - RNA, 19 nt, Homo sapiens
  misc_RNA (1)...(19): siRNA sense strand
aauccuaccuugccucucu

SEQ ID NO: 488919 - RNA, 19 nt, Homo sapiens
  misc_RNA (1)...(19): siRNA sense strand
auucaaagcgcucuuacaa

SEQ ID NO: 488920 - RNA, 19 nt, Homo sapiens
  misc_RNA (1)...(19): siRNA sense strand
gcucagcagauccacauuc

SEQ ID NO: 488921 - RNA, 19 nt, Homo sapiens
  misc_RNA (1)...(19): siRNA sense strand
ugaagauguaggccauuaa

SEQ ID NO: 488922 - RNA, 19 nt, Homo sapiens
  misc_RNA (1)...(19): siRNA sense strand
gacacaggccugacucaag

SEQ ID NO: 488923 - RNA, 19 nt, Homo sapiens
  misc_RNA (1)...(19): siRNA sense strand
uguaaaggacagaauggaa

SEQ ID NO: 488924 - RNA, 19 nt, Homo sapiens
  misc_RNA (1)...(19): siRNA sense strand
agauuagacucagaugugu

SEQ ID NO: 488925 - RNA, 19 nt, Homo sapiens
  misc_RNA (1)...(19): siRNA sense strand
ggacauccugaagcaauuc

SEQ ID NO: 488926 - RNA, 19 nt, Homo sapiens
  misc_RNA (1)...(19): siRNA sense strand
aggaagaacggcaugauag

SEQ ID NO: 488927 - RNA, 19 nt, Homo sapiens
  misc_RNA (1)...(19): siRNA sense strand
ccgcuacuuggccagauua

SEQ ID NO: 488928 - RNA, 19 nt, Homo sapiens
  misc_RNA (1)...(19): siRNA sense strand
guauguggaauuaacagau

SEQ ID NO: 488929 - RNA, 19 nt, Homo sapiens
  misc_RNA (1)...(19): siRNA sense strand
gcgcucagcagauccacau

SEQ ID NO: 488930 - RNA, 19 nt, Homo sapiens
  misc_RNA (1)...(19): siRNA sense strand
cuacguuuaccgcuacuug

SEQ ID NO: 488931 - RNA, 19 nt, Homo sapiens
  misc_RNA (1)...(19): siRNA sense strand
gcccacggcaacccagaaa

SEQ ID NO: 488932 - RNA, 19 nt, Homo sapiens
  misc_RNA (1)...(19): siRNA sense strand
aauauagacgccaggaaga

SEQ ID NO: 488933 - RNA, 19 nt, Homo sapiens
  misc_RNA (1)...(19): siRNA sense strand
ccuuggagacggaauccua

SEQ ID NO: 488934 - RNA, 19 nt, Homo sapiens
  misc_RNA (1)...(19): siRNA sense strand
cuaccuugccucucuaaag

SEQ ID NO: 488935 - RNA, 19 nt, Homo sapiens
  misc_RNA (1)...(19): siRNA sense strand
gaauugaguucuccgaguu

SEQ ID NO: 488936 - RNA, 19 nt, Homo sapiens
  misc_RNA (1)...(19): siRNA sense strand
ggaaugagaugcuggacau

SEQ ID NO: 488937 - RNA, 19 nt, Homo sapiens
  misc_RNA (1)...(19): siRNA sense strand
gaccggaucuuugccauga

SEQ ID NO: 488938 - RNA, 19 nt, Homo sapiens
  misc_RNA (1)...(19): siRNA sense strand
ccaccaaguuugccacauu

SEQ ID NO: 488939 - RNA, 19 nt, Homo sapiens
  misc_RNA (1)...(19): siRNA sense strand
guacaaaggcuucaucaag

SEQ ID NO: 488940 - RNA, 19 nt, Homo sapiens
  misc_RNA (1)...(19): siRNA sense strand
cagaagaucuacaagcaau

SEQ ID NO: 488941 - RNA, 19 nt, Homo sapiens
  misc_RNA (1)...(19): siRNA sense strand
uggaggagcugaccaggaa

SEQ ID NO: 488942 - RNA, 19 nt, Homo sapiens
  misc_RNA (1)...(19): siRNA sense strand
caccaaguuugccacauuu

SEQ ID NO: 488943 - RNA, 19 nt, Homo sapiens
  misc_RNA (1)...(19): siRNA sense strand
gaagaucuacaagcaauuc

SEQ ID NO: 488944 - RNA, 19 nt, Homo sapiens
  misc_RNA (1)...(19): siRNA sense strand
acaaaggcuucaucaagga

SEQ ID NO: 488945 - RNA, 19 nt, Homo sapiens
  misc_RNA (1)...(19): siRNA sense strand
ggaaauccaacagcaaguu

SEQ ID NO: 488946 - RNA, 19 nt, Homo sapiens
  misc_RNA (1)...(19): siRNA sense strand
aaacaaggacgggcgaauu

SEQ ID NO: 488947 - RNA, 19 nt, Homo sapiens
  misc_RNA (1)...(19): siRNA sense strand
gaucuacaagcaauucuuc

SEQ ID NO: 488948 - RNA, 19 nt, Homo sapiens
  misc_RNA (1)...(19): siRNA sense strand
ggacauuguggaugccauu

SEQ ID NO: 488949 - RNA, 19 nt, Homo sapiens
  misc_RNA (1)...(19): siRNA sense strand
caaguuugccacauuuguu

SEQ ID NO: 488950 - RNA, 19 nt, Homo sapiens
  misc_RNA (1)...(19): siRNA sense strand
ucuacgacuuggacaauga

SEQ ID NO: 488951 - RNA, 19 nt, Homo sapiens
  misc_RNA (1)...(19): siRNA sense strand
agaccuacuuuaccgagaa

SEQ ID NO: 488952 - RNA, 19 nt, Homo sapiens
  misc_RNA (1)...(19): siRNA sense strand
ccaggaagaccuacuuuac

SEQ ID NO: 488953 - RNA, 19 nt, Homo sapiens
  misc_RNA (1)...(19): siRNA sense strand
gaggguggaccggaucuuu

SEQ ID NO: 488954 - RNA, 19 nt, Homo sapiens
  misc_RNA (1)...(19): siRNA sense strand
uccagaagaucuacaagca

SEQ ID NO: 488955 - RNA, 19 nt, Homo sapiens
  misc_RNA (1)...(19): siRNA sense strand
gaccaggaagaccuacuuu

SEQ ID NO: 488956 - RNA, 19 nt, Homo sapiens
  misc_RNA (1)...(19): siRNA sense strand
caaguugaagcccgaaguu

SEQ ID NO: 488957 - RNA, 19 nt, Homo sapiens
  misc_RNA (1)...(19): siRNA sense strand
ggaugccauuuaccagaug

SEQ ID NO: 488958 - RNA, 19 nt, Homo sapiens
  misc_RNA (1)...(19): siRNA sense strand
ccuucaagcucuacgacuu

SEQ ID NO: 488959 - RNA, 19 nt, Homo sapiens
  misc_RNA (1)...(19): siRNA sense strand
ggggaacccuggaugagaa

SEQ ID NO: 488960 - RNA, 19 nt, Homo sapiens
  misc_RNA (1)...(19): siRNA sense strand
ugcaggcgcugucccucua

SEQ ID NO: 488961 - RNA, 19 nt, Homo sapiens
  misc_RNA (1)...(19): siRNA sense strand
cauuguggaugccauuuac

SEQ ID NO: 488962 - RNA, 19 nt, Homo sapiens
  misc_RNA (1)...(19): siRNA sense strand
gaggagcugaccaggaaga

SEQ ID NO: 488963 - RNA, 19 nt, Homo sapiens
  misc_RNA (1)...(19): siRNA sense strand
gagaacacuccugagaaga

SEQ ID NO: 488964 - RNA, 19 nt, Homo sapiens
  misc_RNA (1)...(19): siRNA sense strand
ggacgggcgaauugaguuc

SEQ ID NO: 488965 - RNA, 19 nt, Homo sapiens
  misc_RNA (1)...(19): siRNA sense strand
guccagcagugguacaaag

SEQ ID NO: 488966 - RNA, 19 nt, Homo sapiens
  misc_RNA (1)...(19): siRNA sense strand
gcaaguugaagcccgaagu

SEQ ID NO: 488967 - RNA, 19 nt, Homo sapiens
  misc_RNA (1)...(19): siRNA sense strand
ggugggccuucaagcucua

SEQ ID NO: 488968 - RNA, 19 nt, Homo sapiens
  misc_RNA (1)...(19): siRNA sense strand
ccggaucuuugccaugaug

SEQ ID NO: 488969 - RNA, 19 nt, Homo sapiens
  misc_RNA (1)...(19): siRNA sense strand
caaggcagacccguccauu

SEQ ID NO: 488970 - RNA, 19 nt, Homo sapiens
  misc_RNA (1)...(19): siRNA sense strand
aacaaggacgggcgaauug

SEQ ID NO: 488971 - RNA, 19 nt, Homo sapiens
  misc_RNA (1)...(19): siRNA sense strand
aggcagacccguccauugu

SEQ ID NO: 488972 - RNA, 19 nt, Homo sapiens
  misc_RNA (1)...(19): siRNA sense strand
ccagaagaucuacaagcaa

SEQ ID NO: 488973 - RNA, 19 nt, Homo sapiens
  misc_RNA (1)...(19): siRNA sense strand
gcucuacgacuuggacaau

SEQ ID NO: 488974 - RNA, 19 nt, Homo sapiens
  misc_RNA (1)...(19): siRNA sense strand
guugaagcccgaaguugug

SEQ ID NO: 488975 - RNA, 19 nt, Homo sapiens
  misc_RNA (1)...(19): siRNA sense strand
uggaugccauuuaccagau

SEQ ID NO: 488976 - RNA, 19 nt, Homo sapiens
  misc_RNA (1)...(19): siRNA sense strand
ccaaguuugccacauuugu

SEQ ID NO: 488977 - RNA, 19 nt, Homo sapiens
  misc_RNA (1)...(19): siRNA sense strand
acauuguggaugccauuua

SEQ ID NO: 488978 - RNA, 19 nt, Homo sapiens
  misc_RNA (1)...(19): siRNA sense strand
gaccuacuuuaccgagaag

SEQ ID NO: 488979 - RNA, 19 nt, Homo sapiens
  misc_RNA (1)...(19): siRNA sense strand
gguacaaaggcuucaucaa

SEQ ID NO: 488980 - RNA, 19 nt, Homo sapiens
  misc_RNA (1)...(19): siRNA sense strand
augagaugcuggacauugu

SEQ ID NO: 488981 - RNA, 19 nt, Homo sapiens
  misc_RNA (1)...(19): siRNA sense strand
aaguuugccacauuuguuu

SEQ ID NO: 488982 - RNA, 19 nt, Homo sapiens
  misc_RNA (1)...(19): siRNA sense strand
caacgucuuugaugaaaac

SEQ ID NO: 488983 - RNA, 19 nt, Homo sapiens
  misc_RNA (1)...(19): siRNA sense strand
ggaagaagcugcagaaggu

SEQ ID NO: 488984 - RNA, 19 nt, Homo sapiens
  misc_RNA (1)...(19): siRNA sense strand
ggaauuauccugacagaca

SEQ ID NO: 488985 - RNA, 19 nt, Homo sapiens
  misc_RNA (1)...(19): siRNA sense strand
ggacaaagccagccaagag

SEQ ID NO: 488986 - RNA, 19 nt, Homo sapiens
  misc_RNA (1)...(19): siRNA sense strand
gaauuauccugacagacaa

SEQ ID NO: 488987 - RNA, 19 nt, Homo sapiens
  misc_RNA (1)...(19): siRNA sense strand
ggaaccugcuggacuuaga

SEQ ID NO: 488988 - RNA, 19 nt, Homo sapiens
  misc_RNA (1)...(19): siRNA sense strand
gagaacguguccauauaca

SEQ ID NO: 488989 - RNA, 19 nt, Homo sapiens
  misc_RNA (1)...(19): siRNA sense strand
uugagaacguguccauaua

SEQ ID NO: 488990 - RNA, 19 nt, Homo sapiens
  misc_RNA (1)...(19): siRNA sense strand
gaucguggcuacagcuaag

SEQ ID NO: 488991 - RNA, 19 nt, Homo sapiens
  misc_RNA (1)...(19): siRNA sense strand
cagacaagaugcacgacaa

SEQ ID NO: 488992 - RNA, 19 nt, Homo sapiens
  misc_RNA (1)...(19): siRNA sense strand
ccugagaacuggacagaca

SEQ ID NO: 488993 - RNA, 19 nt, Homo sapiens
  misc_RNA (1)...(19): siRNA sense strand
acgacaagguguuugcaua

SEQ ID NO: 488994 - RNA, 19 nt, Homo sapiens
  misc_RNA (1)...(19): siRNA sense strand
caagguguuugcauacauc

SEQ ID NO: 488995 - RNA, 19 nt, Homo sapiens
  misc_RNA (1)...(19): siRNA sense strand
gaugaccucuucagcuucu

SEQ ID NO: 488996 - RNA, 19 nt, Homo sapiens
  misc_RNA (1)...(19): siRNA sense strand
ccaaggaagagaaagagaa

SEQ ID NO: 488997 - RNA, 19 nt, Homo sapiens
  misc_RNA (1)...(19): siRNA sense strand
cagacaaccucaccaacca

SEQ ID NO: 488998 - RNA, 19 nt, Homo sapiens
  misc_RNA (1)...(19): siRNA sense strand
aggaugaccucuucagcuu

SEQ ID NO: 488999 - RNA, 19 nt, Homo sapiens
  misc_RNA (1)...(19): siRNA sense strand
gacaagguguuugcauaca

SEQ ID NO: 489000 - RNA, 19 nt, Homo sapiens
  misc_RNA (1)...(19): siRNA sense strand
ucaccaaccagcucauuga

SEQ ID NO: 489001 - RNA, 19 nt, Homo sapiens
  misc_RNA (1)...(19): siRNA sense strand
gaaagagaagagggacaaa

SEQ ID NO: 489002 - RNA, 19 nt, Homo sapiens
  misc_RNA (1)...(19): siRNA sense strand
cagcccaggacaugcauua

SEQ ID NO: 489003 - RNA, 19 nt, Homo sapiens
  misc_RNA (1)...(19): siRNA sense strand
gcaagcugccugagaacug

SEQ ID NO: 489004 - RNA, 19 nt, Homo sapiens
  misc_RNA (1)...(19): siRNA sense strand
gaugauggccuggaugaag

SEQ ID NO: 489005 - RNA, 19 nt, Homo sapiens
  misc_RNA (1)...(19): siRNA sense strand
uggccuggaugaagcguuu

SEQ ID NO: 489006 - RNA, 19 nt, Homo sapiens
  misc_RNA (1)...(19): siRNA sense strand
ugacagacaaccucaccaa

SEQ ID NO: 489007 - RNA, 19 nt, Homo sapiens
  misc_RNA (1)...(19): siRNA sense strand
gcacagcagacaagaugca

SEQ ID NO: 489008 - RNA, 19 nt, Homo sapiens
  misc_RNA (1)...(19): siRNA sense strand
caaggaagagaaagagaag

SEQ ID NO: 489009 - RNA, 19 nt, Homo sapiens
  misc_RNA (1)...(19): siRNA sense strand
ucaaguaccugggcaugac

SEQ ID NO: 489010 - RNA, 19 nt, Homo sapiens
  misc_RNA (1)...(19): siRNA sense strand
cgacaagguguuugcauac

SEQ ID NO: 489011 - RNA, 19 nt, Homo sapiens
  misc_RNA (1)...(19): siRNA sense strand
cugggaaccugcuggacuu

SEQ ID NO: 489012 - RNA, 19 nt, Homo sapiens
  misc_RNA (1)...(19): siRNA sense strand
acaagguguuugcauacau

SEQ ID NO: 489013 - RNA, 19 nt, Homo sapiens
  misc_RNA (1)...(19): siRNA sense strand
ggaucguggcuacagcuaa

SEQ ID NO: 489014 - RNA, 19 nt, Homo sapiens
  misc_RNA (1)...(19): siRNA sense strand
gcuggaugauggccuggau

SEQ ID NO: 489015 - RNA, 19 nt, Homo sapiens
  misc_RNA (1)...(19): siRNA sense strand
gcuaaggccagugggaaga

SEQ ID NO: 489016 - RNA, 19 nt, Homo sapiens
  misc_RNA (1)...(19): siRNA sense strand
agaaagagaagagggacaa

SEQ ID NO: 489017 - RNA, 19 nt, Homo sapiens
  misc_RNA (1)...(19): siRNA sense strand
ccuggacacuggccugaca

SEQ ID NO: 489018 - RNA, 19 nt, Homo sapiens
  misc_RNA (1)...(19): siRNA sense strand
gugggaagaagcugcagaa

SEQ ID NO: 489019 - RNA, 19 nt, Homo sapiens
  misc_RNA (1)...(19): siRNA sense strand
gaugcacgacaagguguuu

SEQ ID NO: 489020 - RNA, 19 nt, Homo sapiens
  misc_RNA (1)...(19): siRNA sense strand
accgcaagcugccugagaa

SEQ ID NO: 489021 - RNA, 19 nt, Homo sapiens
  misc_RNA (1)...(19): siRNA sense strand
ugagaacguguccauauac

SEQ ID NO: 489022 - RNA, 19 nt, Homo sapiens
  misc_RNA (1)...(19): siRNA sense strand
uugcacagcagacaagaug

SEQ ID NO: 489023 - RNA, 19 nt, Homo sapiens
  misc_RNA (1)...(19): siRNA sense strand
gaaccugcuggacuuagag

SEQ ID NO: 489024 - RNA, 19 nt, Homo sapiens
  misc_RNA (1)...(19): siRNA sense strand
aagaaugucuccaucaaua

SEQ ID NO: 489025 - RNA, 19 nt, Homo sapiens
  misc_RNA (1)...(19): siRNA sense strand
ucaauacaguuaccuauga

SEQ ID NO: 489026 - RNA, 19 nt, Homo sapiens
  misc_RNA (1)...(19): siRNA sense strand
ggaagaagcagcuggcaaa

SEQ ID NO: 489027 - RNA, 19 nt, Homo sapiens
  misc_RNA (1)...(19): siRNA sense strand
cgaaagggcuggcuaugau

SEQ ID NO: 489028 - RNA, 19 nt, Homo sapiens
  misc_RNA (1)...(19): siRNA sense strand
ggaagaaugagaagcuaua

SEQ ID NO: 489029 - RNA, 19 nt, Homo sapiens
  misc_RNA (1)...(19): siRNA sense strand
ugaaggagauggagcaguu

SEQ ID NO: 489030 - RNA, 19 nt, Homo sapiens
  misc_RNA (1)...(19): siRNA sense strand
ccagagaggugaaggagau

SEQ ID NO: 489031 - RNA, 19 nt, Homo sapiens
  misc_RNA (1)...(19): siRNA sense strand
gccaugaacuccugguuga

SEQ ID NO: 489032 - RNA, 19 nt, Homo sapiens
  misc_RNA (1)...(19): siRNA sense strand
gggcuuaggucacgagcaa

SEQ ID NO: 489033 - RNA, 19 nt, Homo sapiens
  misc_RNA (1)...(19): siRNA sense strand
gaaagggcuggcuaugaua

SEQ ID NO: 489034 - RNA, 19 nt, Homo sapiens
  misc_RNA (1)...(19): siRNA sense strand
gcaaugaagaggaucgaaa

SEQ ID NO: 489035 - RNA, 19 nt, Homo sapiens
  misc_RNA (1)...(19): siRNA sense strand
aaacuaaagucagauggaa

SEQ ID NO: 489036 - RNA, 19 nt, Homo sapiens
  misc_RNA (1)...(19): siRNA sense strand
gauguccucuugagcaaug

SEQ ID NO: 489037 - RNA, 19 nt, Homo sapiens
  misc_RNA (1)...(19): siRNA sense strand
guuaugauauugacgaauc

SEQ ID NO: 489038 - RNA, 19 nt, Homo sapiens
  misc_RNA (1)...(19): siRNA sense strand
agaagaaugucuccaucaa

SEQ ID NO: 489039 - RNA, 19 nt, Homo sapiens
  misc_RNA (1)...(19): siRNA sense strand
gcaaacugaguaugaaaga

SEQ ID NO: 489040 - RNA, 19 nt, Homo sapiens
  misc_RNA (1)...(19): siRNA sense strand
gaacucaauauuccugcua

SEQ ID NO: 489041 - RNA, 19 nt, Homo sapiens
  misc_RNA (1)...(19): siRNA sense strand
agaagcagcuggcaaagca

SEQ ID NO: 489042 - RNA, 19 nt, Homo sapiens
  misc_RNA (1)...(19): siRNA sense strand
gggaguaggagaugucaaa

SEQ ID NO: 489043 - RNA, 19 nt, Homo sapiens
  misc_RNA (1)...(19): siRNA sense strand
gaaucacgcuguggugugu

SEQ ID NO: 489044 - RNA, 19 nt, Homo sapiens
  misc_RNA (1)...(19): siRNA sense strand
aaacacuucugcugcuuug

SEQ ID NO: 489045 - RNA, 19 nt, Homo sapiens
  misc_RNA (1)...(19): siRNA sense strand
gaaacacuucugcugcuuu

SEQ ID NO: 489046 - RNA, 19 nt, Homo sapiens
  misc_RNA (1)...(19): siRNA sense strand
gaagaaugucuccaucaau

SEQ ID NO: 489047 - RNA, 19 nt, Homo sapiens
  misc_RNA (1)...(19): siRNA sense strand
cgggugaccuauaacaauu

SEQ ID NO: 489048 - RNA, 19 nt, Homo sapiens
  misc_RNA (1)...(19): siRNA sense strand
ggaauucccauguauaaac

SEQ ID NO: 489049 - RNA, 19 nt, Homo sapiens
  misc_RNA (1)...(19): siRNA sense strand
aguaggagaugucaaacuu

SEQ ID NO: 489050 - RNA, 19 nt, Homo sapiens
  misc_RNA (1)...(19): siRNA sense strand
ugucaaggaugccacaaug

SEQ ID NO: 489051 - RNA, 19 nt, Homo sapiens
  misc_RNA (1)...(19): siRNA sense strand
ucaguggaauguaagaaga

SEQ ID NO: 489052 - RNA, 19 nt, Homo sapiens
  misc_RNA (1)...(19): siRNA sense strand
caaaagaacucaauauucc

SEQ ID NO: 489053 - RNA, 19 nt, Homo sapiens
  misc_RNA (1)...(19): siRNA sense strand
uauacgugauggucaauga

SEQ ID NO: 489054 - RNA, 19 nt, Homo sapiens
  misc_RNA (1)...(19): siRNA sense strand
caaacugaguaugaaagaa

SEQ ID NO: 489055 - RNA, 19 nt, Homo sapiens
  misc_RNA (1)...(19): siRNA sense strand
gcugcaaacugaguaugaa

SEQ ID NO: 489056 - RNA, 19 nt, Homo sapiens
  misc_RNA (1)...(19): siRNA sense strand
gaaguucaugccaguagaa

SEQ ID NO: 489057 - RNA, 19 nt, Homo sapiens
  misc_RNA (1)...(19): siRNA sense strand
ugcaagcccugcuauguga

SEQ ID NO: 489058 - RNA, 19 nt, Homo sapiens
  misc_RNA (1)...(19): siRNA sense strand
ugacugugauagcauucua

SEQ ID NO: 489059 - RNA, 19 nt, Homo sapiens
  misc_RNA (1)...(19): siRNA sense strand
gaccaggacccuucaaagu

SEQ ID NO: 489060 - RNA, 19 nt, Homo sapiens
  misc_RNA (1)...(19): siRNA sense strand
gauauucagcaaugaguau

SEQ ID NO: 489061 - RNA, 19 nt, Homo sapiens
  misc_RNA (1)...(19): siRNA sense strand
ucuguucaguggaauguaa

SEQ ID NO: 489062 - RNA, 19 nt, Homo sapiens
  misc_RNA (1)...(19): siRNA sense strand
gcaaguguggccaagaaga

SEQ ID NO: 489063 - RNA, 19 nt, Homo sapiens
  misc_RNA (1)...(19): siRNA sense strand
gauauugacgaauccaguu

SEQ ID NO: 489064 - RNA, 19 nt, Homo sapiens
  misc_RNA (1)...(19): siRNA sense strand
uggagcaguuugugaagaa

SEQ ID NO: 489065 - RNA, 19 nt, Homo sapiens
  misc_RNA (1)...(19): siRNA sense strand
gaagacaccaaguauacca

SEQ ID NO: 489066 - RNA, 19 nt, Homo sapiens
  misc_RNA (1)...(19): siRNA sense strand
gauucgaacugcacuucug

SEQ ID NO: 489067 - RNA, 19 nt, Homo sapiens
  misc_RNA (1)...(19): siRNA sense strand
ggagcaguuugugaagaaa

SEQ ID NO: 489068 - RNA, 19 nt, Homo sapiens
  misc_RNA (1)...(19): siRNA sense strand
gagauggagcaguuuguga

SEQ ID NO: 489069 - RNA, 19 nt, Homo sapiens
  misc_RNA (1)...(19): siRNA sense strand
gaaugucuccaucaauaca

SEQ ID NO: 489070 - RNA, 19 nt, Homo sapiens
  misc_RNA (1)...(19): siRNA sense strand
auaccacucugauugcaaa

SEQ ID NO: 489071 - RNA, 19 nt, Homo sapiens
  misc_RNA (1)...(19): siRNA sense strand
gcacaaaagaacucaauau

SEQ ID NO: 489072 - RNA, 19 nt, Homo sapiens
  misc_RNA (1)...(19): siRNA sense strand
cugcaaguguggccaagaa

SEQ ID NO: 489073 - RNA, 19 nt, Homo sapiens
  misc_RNA (1)...(19): siRNA sense strand
caaguauaccacucugauu

SEQ ID NO: 489074 - RNA, 19 nt, Homo sapiens
  misc_RNA (1)...(19): siRNA sense strand
ggugaccuauaacaauuuc

SEQ ID NO: 489075 - RNA, 19 nt, Homo sapiens
  misc_RNA (1)...(19): siRNA sense strand
ccugcuaugugaagaauca

SEQ ID NO: 489076 - RNA, 19 nt, Homo sapiens
  misc_RNA (1)...(19): siRNA sense strand
gaauucccauguauaaacg

SEQ ID NO: 489077 - RNA, 19 nt, Homo sapiens
  misc_RNA (1)...(19): siRNA sense strand
gaaugagaagcuauacugu

SEQ ID NO: 489078 - RNA, 19 nt, Homo sapiens
  misc_RNA (1)...(19): siRNA sense strand
ugcagcgggugaccuauaa

SEQ ID NO: 489079 - RNA, 19 nt, Homo sapiens
  misc_RNA (1)...(19): siRNA sense strand
gaacuccugguugacauga

SEQ ID NO: 489080 - RNA, 19 nt, Homo sapiens
  misc_RNA (1)...(19): siRNA sense strand
gaauguaagaagaggaugu

SEQ ID NO: 489081 - RNA, 19 nt, Homo sapiens
  misc_RNA (1)...(19): siRNA sense strand
gugcagcgggugaccuaua

SEQ ID NO: 489082 - RNA, 19 nt, Homo sapiens
  misc_RNA (1)...(19): siRNA sense strand
agauauacgugauggucaa

SEQ ID NO: 489083 - RNA, 19 nt, Homo sapiens
  misc_RNA (1)...(19): siRNA sense strand
agaauuggcaccugaaaca

SEQ ID NO: 489084 - RNA, 19 nt, Homo sapiens
  misc_RNA (1)...(19): siRNA sense strand
gaguauacccaggcagaaa

SEQ ID NO: 489085 - RNA, 19 nt, Homo sapiens
  misc_RNA (1)...(19): siRNA sense strand
gcuauacuguggcagacau

SEQ ID NO: 489086 - RNA, 19 nt, Homo sapiens
  misc_RNA (1)...(19): siRNA sense strand
agcaguuugugaagaaaua

SEQ ID NO: 489087 - RNA, 19 nt, Homo sapiens
  misc_RNA (1)...(19): siRNA sense strand
gagcaugauguccucuuga

SEQ ID NO: 489088 - RNA, 19 nt, Homo sapiens
  misc_RNA (1)...(19): siRNA sense strand
gcacccagcuuguuuuguc

SEQ ID NO: 489089 - RNA, 19 nt, Homo sapiens
  misc_RNA (1)...(19): siRNA sense strand
caaacuucccugugagaug

SEQ ID NO: 489090 - RNA, 19 nt, Homo sapiens
  misc_RNA (1)...(19): siRNA sense strand
ccaagaagagcaugauguc

SEQ ID NO: 489091 - RNA, 19 nt, Homo sapiens
  misc_RNA (1)...(19): siRNA sense strand
gaaggagauggagcaguuu

SEQ ID NO: 489092 - RNA, 19 nt, Homo sapiens
  misc_RNA (1)...(19): siRNA sense strand
ccaagaagaaugucuccau

SEQ ID NO: 489093 - RNA, 19 nt, Homo sapiens
  misc_RNA (1)...(19): siRNA sense strand
gcgggugaccuauaacaau

SEQ ID NO: 489094 - RNA, 19 nt, Homo sapiens
  misc_RNA (1)...(19): siRNA sense strand
agaaugagaagcuauacug

SEQ ID NO: 489095 - RNA, 19 nt, Homo sapiens
  misc_RNA (1)...(19): siRNA sense strand
aaagggcuggcuaugauaa

SEQ ID NO: 489096 - RNA, 19 nt, Homo sapiens
  misc_RNA (1)...(19): siRNA sense strand
caaagugccaugaguuguc

SEQ ID NO: 489097 - RNA, 19 nt, Homo sapiens
  misc_RNA (1)...(19): siRNA sense strand
ccaaguauaccacucugau

SEQ ID NO: 489098 - RNA, 19 nt, Homo sapiens
  misc_RNA (1)...(19): siRNA sense strand
caauacaguuaccuaugag

SEQ ID NO: 489099 - RNA, 19 nt, Homo sapiens
  misc_RNA (1)...(19): siRNA sense strand
gcagaugcuacccaaggaa

SEQ ID NO: 489100 - RNA, 19 nt, Homo sapiens
  misc_RNA (1)...(19): siRNA sense strand
gcuguggugugucaaggau

SEQ ID NO: 489101 - RNA, 19 nt, Homo sapiens
  misc_RNA (1)...(19): siRNA sense strand
gcugugacgagcugauauu

SEQ ID NO: 489102 - RNA, 19 nt, Homo sapiens
  misc_RNA (1)...(19): siRNA sense strand
aaacugaguaugaaagaag

SEQ ID NO: 489103 - RNA, 19 nt, Homo sapiens
  misc_RNA (1)...(19): siRNA sense strand
acuaaagucagauggaauu

SEQ ID NO: 489104 - RNA, 19 nt, Homo sapiens
  misc_RNA (1)...(19): siRNA sense strand
ugaagaggaucgaaaagug

SEQ ID NO: 489105 - RNA, 19 nt, Homo sapiens
  misc_RNA (1)...(19): siRNA sense strand
gaaggugacccagccaucu

SEQ ID NO: 489106 - RNA, 19 nt, Homo sapiens
  misc_RNA (1)...(19): siRNA sense strand
uguccagaaucaagcauug

SEQ ID NO: 489107 - RNA, 19 nt, Homo sapiens
  misc_RNA (1)...(19): siRNA sense strand
caucaauacaguuaccuau

SEQ ID NO: 489108 - RNA, 19 nt, Homo sapiens
  misc_RNA (1)...(19): siRNA sense strand
gccaagaagagcaugaugu

SEQ ID NO: 489109 - RNA, 19 nt, Homo sapiens
  misc_RNA (1)...(19): siRNA sense strand
gcagaaguucaugccagua

SEQ ID NO: 489110 - RNA, 19 nt, Homo sapiens
  misc_RNA (1)...(19): siRNA sense strand
ugaaacacuucugcugcuu

SEQ ID NO: 489111 - RNA, 19 nt, Homo sapiens
  misc_RNA (1)...(19): siRNA sense strand
ccgaaagggcuggcuauga

SEQ ID NO: 489112 - RNA, 19 nt, Homo sapiens
  misc_RNA (1)...(19): siRNA sense strand
aaguauaccacucugauug

SEQ ID NO: 489113 - RNA, 19 nt, Homo sapiens
  misc_RNA (1)...(19): siRNA sense strand
gugcaagcccugcuaugug

SEQ ID NO: 489114 - RNA, 19 nt, Homo sapiens
  misc_RNA (1)...(19): siRNA sense strand
ggagauggagcaguuugug

SEQ ID NO: 489115 - RNA, 19 nt, Homo sapiens
  misc_RNA (1)...(19): siRNA sense strand
cagaugcuacccaaggaaa

SEQ ID NO: 489116 - RNA, 19 nt, Homo sapiens
  misc_RNA (1)...(19): siRNA sense strand
ccaguagaagggaugguuu

SEQ ID NO: 489117 - RNA, 19 nt, Homo sapiens
  misc_RNA (1)...(19): siRNA sense strand
agaaguucaugccaguaga

SEQ ID NO: 489118 - RNA, 19 nt, Homo sapiens
  misc_RNA (1)...(19): siRNA sense strand
aaauaugucguaacugcaa

SEQ ID NO: 489119 - RNA, 19 nt, Homo sapiens
  misc_RNA (1)...(19): siRNA sense strand
gggcuccuccuguccagaa

SEQ ID NO: 489120 - RNA, 19 nt, Homo sapiens
  misc_RNA (1)...(19): siRNA sense strand
gaagaaugagaagcuauac

SEQ ID NO: 489121 - RNA, 19 nt, Homo sapiens
  misc_RNA (1)...(19): siRNA sense strand
uggcaugcauccacagagu

SEQ ID NO: 489122 - RNA, 19 nt, Homo sapiens
  misc_RNA (1)...(19): siRNA sense strand
gcccugcuaugugaagaau

SEQ ID NO: 489123 - RNA, 19 nt, Homo sapiens
  misc_RNA (1)...(19): siRNA sense strand
guauaccacucugauugca

SEQ ID NO: 489124 - RNA, 19 nt, Homo sapiens
  misc_RNA (1)...(19): siRNA sense strand
aagaaugucuccaucaaua

SEQ ID NO: 489125 - RNA, 19 nt, Homo sapiens
  misc_RNA (1)...(19): siRNA sense strand
ucaauacaguuaccuauga

SEQ ID NO: 489126 - RNA, 19 nt, Homo sapiens
  misc_RNA (1)...(19): siRNA sense strand
ggaagaagcagcuggcaaa

SEQ ID NO: 489127 - RNA, 19 nt, Homo sapiens
  misc_RNA (1)...(19): siRNA sense strand
cgaaagggcuggcuaugau

SEQ ID NO: 489128 - RNA, 19 nt, Homo sapiens
  misc_RNA (1)...(19): siRNA sense strand
ggaagaaugagaagcuaua

SEQ ID NO: 489129 - RNA, 19 nt, Homo sapiens
  misc_RNA (1)...(19): siRNA sense strand
ugaaggagauggagcaguu

SEQ ID NO: 489130 - RNA, 19 nt, Homo sapiens
  misc_RNA (1)...(19): siRNA sense strand
ccagagaggugaaggagau

SEQ ID NO: 489131 - RNA, 19 nt, Homo sapiens
  misc_RNA (1)...(19): siRNA sense strand
gccaugaacuccugguuga

SEQ ID NO: 489132 - RNA, 19 nt, Homo sapiens
  misc_RNA (1)...(19): siRNA sense strand
gggcuuaggucacgagcaa

SEQ ID NO: 489133 - RNA, 19 nt, Homo sapiens
  misc_RNA (1)...(19): siRNA sense strand
gaaagggcuggcuaugaua

SEQ ID NO: 489134 - RNA, 19 nt, Homo sapiens
  misc_RNA (1)...(19): siRNA sense strand
gcaaugaagaggaucgaaa

SEQ ID NO: 489135 - RNA, 19 nt, Homo sapiens
  misc_RNA (1)...(19): siRNA sense strand
aaacuaaagucagauggaa

SEQ ID NO: 489136 - RNA, 19 nt, Homo sapiens
  misc_RNA (1)...(19): siRNA sense strand
gauguccucuugagcaaug

SEQ ID NO: 489137 - RNA, 19 nt, Homo sapiens
  misc_RNA (1)...(19): siRNA sense strand
guuaugauauugacgaauc

SEQ ID NO: 489138 - RNA, 19 nt, Homo sapiens
  misc_RNA (1)...(19): siRNA sense strand
agaagaaugucuccaucaa

SEQ ID NO: 489139 - RNA, 19 nt, Homo sapiens
  misc_RNA (1)...(19): siRNA sense strand
gcaaacugaguaugaaaga

SEQ ID NO: 489140 - RNA, 19 nt, Homo sapiens
  misc_RNA (1)...(19): siRNA sense strand
gaacucaauauuccugcua

SEQ ID NO: 489141 - RNA, 19 nt, Homo sapiens
  misc_RNA (1)...(19): siRNA sense strand
agaagcagcuggcaaagca

SEQ ID NO: 489142 - RNA, 19 nt, Homo sapiens
  misc_RNA (1)...(19): siRNA sense strand
gggaguaggagaugucaaa

SEQ ID NO: 489143 - RNA, 19 nt, Homo sapiens
  misc_RNA (1)...(19): siRNA sense strand
gaaucacgcuguggugugu

SEQ ID NO: 489144 - RNA, 19 nt, Homo sapiens
  misc_RNA (1)...(19): siRNA sense strand
aaacacuucugcugcuuug

SEQ ID NO: 489145 - RNA, 19 nt, Homo sapiens
  misc_RNA (1)...(19): siRNA sense strand
gaaacacuucugcugcuuu

SEQ ID NO: 489146 - RNA, 19 nt, Homo sapiens
  misc_RNA (1)...(19): siRNA sense strand
gaagaaugucuccaucaau

SEQ ID NO: 489147 - RNA, 19 nt, Homo sapiens
  misc_RNA (1)...(19): siRNA sense strand
cgggugaccuauaacaauu

SEQ ID NO: 489148 - RNA, 19 nt, Homo sapiens
  misc_RNA (1)...(19): siRNA sense strand
ggaauucccauguauaaac

SEQ ID NO: 489149 - RNA, 19 nt, Homo sapiens
  misc_RNA (1)...(19): siRNA sense strand
aguaggagaugucaaacuu

SEQ ID NO: 489150 - RNA, 19 nt, Homo sapiens
  misc_RNA (1)...(19): siRNA sense strand
ugucaaggaugccacaaug

SEQ ID NO: 489151 - RNA, 19 nt, Homo sapiens
  misc_RNA (1)...(19): siRNA sense strand
ucaguggaauguaagaaga

SEQ ID NO: 489152 - RNA, 19 nt, Homo sapiens
  misc_RNA (1)...(19): siRNA sense strand
caaaagaacucaauauucc

SEQ ID NO: 489153 - RNA, 19 nt, Homo sapiens
  misc_RNA (1)...(19): siRNA sense strand
uauacgugauggucaauga

SEQ ID NO: 489154 - RNA, 19 nt, Homo sapiens
  misc_RNA (1)...(19): siRNA sense strand
caaacugaguaugaaagaa

SEQ ID NO: 489155 - RNA, 19 nt, Homo sapiens
  misc_RNA (1)...(19): siRNA sense strand
gcugcaaacugaguaugaa

SEQ ID NO: 489156 - RNA, 19 nt, Homo sapiens
  misc_RNA (1)...(19): siRNA sense strand
gaaguucaugccaguagaa

SEQ ID NO: 489157 - RNA, 19 nt, Homo sapiens
  misc_RNA (1)...(19): siRNA sense strand
ugcaagcccugcuauguga

SEQ ID NO: 489158 - RNA, 19 nt, Homo sapiens
  misc_RNA (1)...(19): siRNA sense strand
ugacugugauagcauucua

SEQ ID NO: 489159 - RNA, 19 nt, Homo sapiens
  misc_RNA (1)...(19): siRNA sense strand
gaccaggacccuucaaagu

SEQ ID NO: 489160 - RNA, 19 nt, Homo sapiens
  misc_RNA (1)...(19): siRNA sense strand
gauauucagcaaugaguau

SEQ ID NO: 489161 - RNA, 19 nt, Homo sapiens
  misc_RNA (1)...(19): siRNA sense strand
ucuguucaguggaauguaa

SEQ ID NO: 489162 - RNA, 19 nt, Homo sapiens
  misc_RNA (1)...(19): siRNA sense strand
gcaaguguggccaagaaga

SEQ ID NO: 489163 - RNA, 19 nt, Homo sapiens
  misc_RNA (1)...(19): siRNA sense strand
gauauugacgaauccaguu

SEQ ID NO: 489164 - RNA, 19 nt, Homo sapiens
  misc_RNA (1)...(19): siRNA sense strand
uggagcaguuugugaagaa

SEQ ID NO: 489165 - RNA, 19 nt, Homo sapiens
  misc_RNA (1)...(19): siRNA sense strand
gaagacaccaaguauacca

SEQ ID NO: 489166 - RNA, 19 nt, Homo sapiens
  misc_RNA (1)...(19): siRNA sense strand
gauucgaacugcacuucug

SEQ ID NO: 489167 - RNA, 19 nt, Homo sapiens
  misc_RNA (1)...(19): siRNA sense strand
ggagcaguuugugaagaaa

SEQ ID NO: 489168 - RNA, 19 nt, Homo sapiens
  misc_RNA (1)...(19): siRNA sense strand
gagauggagcaguuuguga

SEQ ID NO: 489169 - RNA, 19 nt, Homo sapiens
  misc_RNA (1)...(19): siRNA sense strand
gaaugucuccaucaauaca

SEQ ID NO: 489170 - RNA, 19 nt, Homo sapiens
  misc_RNA (1)...(19): siRNA sense strand
auaccacucugauugcaaa

SEQ ID NO: 489171 - RNA, 19 nt, Homo sapiens
  misc_RNA (1)...(19): siRNA sense strand
gcacaaaagaacucaauau

SEQ ID NO: 489172 - RNA, 19 nt, Homo sapiens
  misc_RNA (1)...(19): siRNA sense strand
cugcaaguguggccaagaa

SEQ ID NO: 489173 - RNA, 19 nt, Homo sapiens
  misc_RNA (1)...(19): siRNA sense strand
caaguauaccacucugauu

SEQ ID NO: 489174 - RNA, 19 nt, Homo sapiens
  misc_RNA (1)...(19): siRNA sense strand
ggugaccuauaacaauuuc

SEQ ID NO: 489175 - RNA, 19 nt, Homo sapiens
  misc_RNA (1)...(19): siRNA sense strand
ccugcuaugugaagaauca

SEQ ID NO: 489176 - RNA, 19 nt, Homo sapiens
  misc_RNA (1)...(19): siRNA sense strand
gaauucccauguauaaacg

SEQ ID NO: 489177 - RNA, 19 nt, Homo sapiens
  misc_RNA (1)...(19): siRNA sense strand
gaaugagaagcuauacugu

SEQ ID NO: 489178 - RNA, 19 nt, Homo sapiens
  misc_RNA (1)...(19): siRNA sense strand
ugcagcgggugaccuauaa

SEQ ID NO: 489179 - RNA, 19 nt, Homo sapiens
  misc_RNA (1)...(19): siRNA sense strand
gaacuccugguugacauga

SEQ ID NO: 489180 - RNA, 19 nt, Homo sapiens
  misc_RNA (1)...(19): siRNA sense strand
gaauguaagaagaggaugu

SEQ ID NO: 489181 - RNA, 19 nt, Homo sapiens
  misc_RNA (1)...(19): siRNA sense strand
gugcagcgggugaccuaua

SEQ ID NO: 489182 - RNA, 19 nt, Homo sapiens
  misc_RNA (1)...(19): siRNA sense strand
agauauacgugauggucaa

SEQ ID NO: 489183 - RNA, 19 nt, Homo sapiens
  misc_RNA (1)...(19): siRNA sense strand
agaauuggcaccugaaaca

SEQ ID NO: 489184 - RNA, 19 nt, Homo sapiens
  misc_RNA (1)...(19): siRNA sense strand
gaguauacccaggcagaaa

SEQ ID NO: 489185 - RNA, 19 nt, Homo sapiens
  misc_RNA (1)...(19): siRNA sense strand
gcuauacuguggcagacau

SEQ ID NO: 489186 - RNA, 19 nt, Homo sapiens
  misc_RNA (1)...(19): siRNA sense strand
agcaguuugugaagaaaua

SEQ ID NO: 489187 - RNA, 19 nt, Homo sapiens
  misc_RNA (1)...(19): siRNA sense strand
gagcaugauguccucuuga

SEQ ID NO: 489188 - RNA, 19 nt, Homo sapiens
  misc_RNA (1)...(19): siRNA sense strand
gcacccagcuuguuuuguc

SEQ ID NO: 489189 - RNA, 19 nt, Homo sapiens
  misc_RNA (1)...(19): siRNA sense strand
caaacuucccugugagaug

SEQ ID NO: 489190 - RNA, 19 nt, Homo sapiens
  misc_RNA (1)...(19): siRNA sense strand
ccaagaagagcaugauguc

SEQ ID NO: 489191 - RNA, 19 nt, Homo sapiens
  misc_RNA (1)...(19): siRNA sense strand
gaaggagauggagcaguuu

SEQ ID NO: 489192 - RNA, 19 nt, Homo sapiens
  misc_RNA (1)...(19): siRNA sense strand
ccaagaagaaugucuccau

SEQ ID NO: 489193 - RNA, 19 nt, Homo sapiens
  misc_RNA (1)...(19): siRNA sense strand
gcgggugaccuauaacaau

SEQ ID NO: 489194 - RNA, 19 nt, Homo sapiens
  misc_RNA (1)...(19): siRNA sense strand
agaaugagaagcuauacug

SEQ ID NO: 489195 - RNA, 19 nt, Homo sapiens
  misc_RNA (1)...(19): siRNA sense strand
aaagggcuggcuaugauaa

SEQ ID NO: 489196 - RNA, 19 nt, Homo sapiens
  misc_RNA (1)...(19): siRNA sense strand
caaagugccaugaguuguc

SEQ ID NO: 489197 - RNA, 19 nt, Homo sapiens
  misc_RNA (1)...(19): siRNA sense strand
ccaaguauaccacucugau

SEQ ID NO: 489198 - RNA, 19 nt, Homo sapiens
  misc_RNA (1)...(19): siRNA sense strand
caauacaguuaccuaugag

SEQ ID NO: 489199 - RNA, 19 nt, Homo sapiens
  misc_RNA (1)...(19): siRNA sense strand
gcagaugcuacccaaggaa

SEQ ID NO: 489200 - RNA, 19 nt, Homo sapiens
  misc_RNA (1)...(19): siRNA sense strand
gcuguggugugucaaggau

SEQ ID NO: 489201 - RNA, 19 nt, Homo sapiens
  misc_RNA (1)...(19): siRNA sense strand
gcugugacgagcugauauu

SEQ ID NO: 489202 - RNA, 19 nt, Homo sapiens
  misc_RNA (1)...(19): siRNA sense strand
aaacugaguaugaaagaag

SEQ ID NO: 489203 - RNA, 19 nt, Homo sapiens
  misc_RNA (1)...(19): siRNA sense strand
acuaaagucagauggaauu

SEQ ID NO: 489204 - RNA, 19 nt, Homo sapiens
  misc_RNA (1)...(19): siRNA sense strand
ugaagaggaucgaaaagug

SEQ ID NO: 489205 - RNA, 19 nt, Homo sapiens
  misc_RNA (1)...(19): siRNA sense strand
gaaggugacccagccaucu

SEQ ID NO: 489206 - RNA, 19 nt, Homo sapiens
  misc_RNA (1)...(19): siRNA sense strand
uguccagaaucaagcauug

SEQ ID NO: 489207 - RNA, 19 nt, Homo sapiens
  misc_RNA (1)...(19): siRNA sense strand
caucaauacaguuaccuau

SEQ ID NO: 489208 - RNA, 19 nt, Homo sapiens
  misc_RNA (1)...(19): siRNA sense strand
gccaagaagagcaugaugu

SEQ ID NO: 489209 - RNA, 19 nt, Homo sapiens
  misc_RNA (1)...(19): siRNA sense strand
gcagaaguucaugccagua

SEQ ID NO: 489210 - RNA, 19 nt, Homo sapiens
  misc_RNA (1)...(19): siRNA sense strand
ugaaacacuucugcugcuu

SEQ ID NO: 489211 - RNA, 19 nt, Homo sapiens
  misc_RNA (1)...(19): siRNA sense strand
ccgaaagggcuggcuauga

SEQ ID NO: 489212 - RNA, 19 nt, Homo sapiens
  misc_RNA (1)...(19): siRNA sense strand
aaguauaccacucugauug

SEQ ID NO: 489213 - RNA, 19 nt, Homo sapiens
  misc_RNA (1)...(19): siRNA sense strand
gugcaagcccugcuaugug

SEQ ID NO: 489214 - RNA, 19 nt, Homo sapiens
  misc_RNA (1)...(19): siRNA sense strand
ggagauggagcaguuugug

SEQ ID NO: 489215 - RNA, 19 nt, Homo sapiens
  misc_RNA (1)...(19): siRNA sense strand
cagaugcuacccaaggaaa

SEQ ID NO: 489216 - RNA, 19 nt, Homo sapiens
  misc_RNA (1)...(19): siRNA sense strand
ccaguagaagggaugguuu

SEQ ID NO: 489217 - RNA, 19 nt, Homo sapiens
  misc_RNA (1)...(19): siRNA sense strand
agaaguucaugccaguaga

SEQ ID NO: 489218 - RNA, 19 nt, Homo sapiens
  misc_RNA (1)...(19): siRNA sense strand
aaauaugucguaacugcaa

SEQ ID NO: 489219 - RNA, 19 nt, Homo sapiens
  misc_RNA (1)...(19): siRNA sense strand
gggcuccuccuguccagaa

SEQ ID NO: 489220 - RNA, 19 nt, Homo sapiens
  misc_RNA (1)...(19): siRNA sense strand
gaagaaugagaagcuauac

SEQ ID NO: 489221 - RNA, 19 nt, Homo sapiens
  misc_RNA (1)...(19): siRNA sense strand
uggcaugcauccacagagu

SEQ ID NO: 489222 - RNA, 19 nt, Homo sapiens
  misc_RNA (1)...(19): siRNA sense strand
gcccugcuaugugaagaau

SEQ ID NO: 489223 - RNA, 19 nt, Homo sapiens
  misc_RNA (1)...(19): siRNA sense strand
guauaccacucugauugca

SEQ ID NO: 489224 - RNA, 19 nt, Homo sapiens
  misc_RNA (1)...(19): siRNA sense strand
ggacaguguuacagcaauu

SEQ ID NO: 489225 - RNA, 19 nt, Homo sapiens
  misc_RNA (1)...(19): siRNA sense strand
caucaaaguuguccugcaa

SEQ ID NO: 489226 - RNA, 19 nt, Homo sapiens
  misc_RNA (1)...(19): siRNA sense strand
caaaauggcagaauucaua

SEQ ID NO: 489227 - RNA, 19 nt, Homo sapiens
  misc_RNA (1)...(19): siRNA sense strand
ucauauagcaucaaaguug

SEQ ID NO: 489228 - RNA, 19 nt, Homo sapiens
  misc_RNA (1)...(19): siRNA sense strand
aauagaauguggaccuaaa

SEQ ID NO: 489229 - RNA, 19 nt, Homo sapiens
  misc_RNA (1)...(19): siRNA sense strand
ggaccuaaauacccagaag

SEQ ID NO: 489230 - RNA, 19 nt, Homo sapiens
  misc_RNA (1)...(19): siRNA sense strand
ggaguaaauaguucuaaug

SEQ ID NO: 489231 - RNA, 19 nt, Homo sapiens
  misc_RNA (1)...(19): siRNA sense strand
ccauaucagugcuagcaaa

SEQ ID NO: 489232 - RNA, 19 nt, Homo sapiens
  misc_RNA (1)...(19): siRNA sense strand
ucaaaguuguccugcaaga

SEQ ID NO: 489233 - RNA, 19 nt, Homo sapiens
  misc_RNA (1)...(19): siRNA sense strand
ugaauggaguaaauaguuc

SEQ ID NO: 489234 - RNA, 19 nt, Homo sapiens
  misc_RNA (1)...(19): siRNA sense strand
cauauagcaucaaaguugu

SEQ ID NO: 489235 - RNA, 19 nt, Homo sapiens
  misc_RNA (1)...(19): siRNA sense strand
gccuaaugaugucuaaaga

SEQ ID NO: 489236 - RNA, 19 nt, Homo sapiens
  misc_RNA (1)...(19): siRNA sense strand
uagaauguggaccuaaaua

SEQ ID NO: 489237 - RNA, 19 nt, Homo sapiens
  misc_RNA (1)...(19): siRNA sense strand
gaguaaauaguucuaaugg

SEQ ID NO: 489238 - RNA, 19 nt, Homo sapiens
  misc_RNA (1)...(19): siRNA sense strand
cagaauucauauagcauca

SEQ ID NO: 489239 - RNA, 19 nt, Homo sapiens
  misc_RNA (1)...(19): siRNA sense strand
ccgaauauacagccuuaaa

SEQ ID NO: 489240 - RNA, 19 nt, Homo sapiens
  misc_RNA (1)...(19): siRNA sense strand
uggcagaauucauauagca

SEQ ID NO: 489241 - RNA, 19 nt, Homo sapiens
  misc_RNA (1)...(19): siRNA sense strand
gacaguguuacagcaauua

SEQ ID NO: 489242 - RNA, 19 nt, Homo sapiens
  misc_RNA (1)...(19): siRNA sense strand
ggacccaagagccauauca

SEQ ID NO: 489243 - RNA, 19 nt, Homo sapiens
  misc_RNA (1)...(19): siRNA sense strand
uaucagugcuagcaaaaug

SEQ ID NO: 489244 - RNA, 19 nt, Homo sapiens
  misc_RNA (1)...(19): siRNA sense strand
ccuaaugaugucuaaagaa

SEQ ID NO: 489245 - RNA, 19 nt, Homo sapiens
  misc_RNA (1)...(19): siRNA sense strand
gguggacccaagagccaua

SEQ ID NO: 489246 - RNA, 19 nt, Homo sapiens
  misc_RNA (1)...(19): siRNA sense strand
gaauggaguaaauaguucu

SEQ ID NO: 489247 - RNA, 19 nt, Homo sapiens
  misc_RNA (1)...(19): siRNA sense strand
gaauguggaccuaaauacc

SEQ ID NO: 489248 - RNA, 19 nt, Homo sapiens
  misc_RNA (1)...(19): siRNA sense strand
aaaauagaauguggaccua

SEQ ID NO: 489249 - RNA, 19 nt, Homo sapiens
  misc_RNA (1)...(19): siRNA sense strand
ggacaguguuacagcaauu

SEQ ID NO: 489250 - RNA, 19 nt, Homo sapiens
  misc_RNA (1)...(19): siRNA sense strand
caucaaaguuguccugcaa

SEQ ID NO: 489251 - RNA, 19 nt, Homo sapiens
  misc_RNA (1)...(19): siRNA sense strand
caaaauggcagaauucaua

SEQ ID NO: 489252 - RNA, 19 nt, Homo sapiens
  misc_RNA (1)...(19): siRNA sense strand
ucauauagcaucaaaguug

SEQ ID NO: 489253 - RNA, 19 nt, Homo sapiens
  misc_RNA (1)...(19): siRNA sense strand
aauagaauguggaccuaaa

SEQ ID NO: 489254 - RNA, 19 nt, Homo sapiens
  misc_RNA (1)...(19): siRNA sense strand
ggaccuaaauacccagaag

SEQ ID NO: 489255 - RNA, 19 nt, Homo sapiens
  misc_RNA (1)...(19): siRNA sense strand
ggaguaaauaguucuaaug

SEQ ID NO: 489256 - RNA, 19 nt, Homo sapiens
  misc_RNA (1)...(19): siRNA sense strand
ccauaucagugcuagcaaa

SEQ ID NO: 489257 - RNA, 19 nt, Homo sapiens
  misc_RNA (1)...(19): siRNA sense strand
ucaaaguuguccugcaaga

SEQ ID NO: 489258 - RNA, 19 nt, Homo sapiens
  misc_RNA (1)...(19): siRNA sense strand
ugaauggaguaaauaguuc

SEQ ID NO: 489259 - RNA, 19 nt, Homo sapiens
  misc_RNA (1)...(19): siRNA sense strand
cauauagcaucaaaguugu

SEQ ID NO: 489260 - RNA, 19 nt, Homo sapiens
  misc_RNA (1)...(19): siRNA sense strand
gccuaaugaugucuaaaga

SEQ ID NO: 489261 - RNA, 19 nt, Homo sapiens
  misc_RNA (1)...(19): siRNA sense strand
uagaauguggaccuaaaua

SEQ ID NO: 489262 - RNA, 19 nt, Homo sapiens
  misc_RNA (1)...(19): siRNA sense strand
gaguaaauaguucuaaugg

SEQ ID NO: 489263 - RNA, 19 nt, Homo sapiens
  misc_RNA (1)...(19): siRNA sense strand
cagaauucauauagcauca

SEQ ID NO: 489264 - RNA, 19 nt, Homo sapiens
  misc_RNA (1)...(19): siRNA sense strand
ccgaauauacagccuuaaa

SEQ ID NO: 489265 - RNA, 19 nt, Homo sapiens
  misc_RNA (1)...(19): siRNA sense strand
uggcagaauucauauagca

SEQ ID NO: 489266 - RNA, 19 nt, Homo sapiens
  misc_RNA (1)...(19): siRNA sense strand
gacaguguuacagcaauua

SEQ ID NO: 489267 - RNA, 19 nt, Homo sapiens
  misc_RNA (1)...(19): siRNA sense strand
ggacccaagagccauauca

SEQ ID NO: 489268 - RNA, 19 nt, Homo sapiens
  misc_RNA (1)...(19): siRNA sense strand
uaucagugcuagcaaaaug

SEQ ID NO: 489269 - RNA, 19 nt, Homo sapiens
  misc_RNA (1)...(19): siRNA sense strand
ccuaaugaugucuaaagaa

SEQ ID NO: 489270 - RNA, 19 nt, Homo sapiens
  misc_RNA (1)...(19): siRNA sense strand
gguggacccaagagccaua

SEQ ID NO: 489271 - RNA, 19 nt, Homo sapiens
  misc_RNA (1)...(19): siRNA sense strand
gaauggaguaaauaguucu

SEQ ID NO: 489272 - RNA, 19 nt, Homo sapiens
  misc_RNA (1)...(19): siRNA sense strand
gaauguggaccuaaauacc

SEQ ID NO: 489273 - RNA, 19 nt, Homo sapiens
  misc_RNA (1)...(19): siRNA sense strand
aaaauagaauguggaccua

SEQ ID NO: 489274 - RNA, 19 nt, Homo sapiens
  misc_RNA (1)...(19): siRNA sense strand
ggacaguguuacagcaauu

SEQ ID NO: 489275 - RNA, 19 nt, Homo sapiens
  misc_RNA (1)...(19): siRNA sense strand
caucaaaguuguccugcaa

SEQ ID NO: 489276 - RNA, 19 nt, Homo sapiens
  misc_RNA (1)...(19): siRNA sense strand
caaaauggcagaauucaua

SEQ ID NO: 489277 - RNA, 19 nt, Homo sapiens
  misc_RNA (1)...(19): siRNA sense strand
ucauauagcaucaaaguug

SEQ ID NO: 489278 - RNA, 19 nt, Homo sapiens
  misc_RNA (1)...(19): siRNA sense strand
aauagaauguggaccuaaa

SEQ ID NO: 489279 - RNA, 19 nt, Homo sapiens
  misc_RNA (1)...(19): siRNA sense strand
ggaccuaaauacccagaag

SEQ ID NO: 489280 - RNA, 19 nt, Homo sapiens
  misc_RNA (1)...(19): siRNA sense strand
ggaguaaauaguucuaaug

SEQ ID NO: 489281 - RNA, 19 nt, Homo sapiens
  misc_RNA (1)...(19): siRNA sense strand
ccauaucagugcuagcaaa

SEQ ID NO: 489282 - RNA, 19 nt, Homo sapiens
  misc_RNA (1)...(19): siRNA sense strand
ucaaaguuguccugcaaga

SEQ ID NO: 489283 - RNA, 19 nt, Homo sapiens
  misc_RNA (1)...(19): siRNA sense strand
ugaauggaguaaauaguuc

SEQ ID NO: 489284 - RNA, 19 nt, Homo sapiens
  misc_RNA (1)...(19): siRNA sense strand
aaccgaauauacagccuua

SEQ ID NO: 489285 - RNA, 19 nt, Homo sapiens
  misc_RNA (1)...(19): siRNA sense strand
cauauagcaucaaaguugu

SEQ ID NO: 489286 - RNA, 19 nt, Homo sapiens
  misc_RNA (1)...(19): siRNA sense strand
gccuaaugaugucuaaaga

SEQ ID NO: 489287 - RNA, 19 nt, Homo sapiens
  misc_RNA (1)...(19): siRNA sense strand
uagaauguggaccuaaaua

SEQ ID NO: 489288 - RNA, 19 nt, Homo sapiens
  misc_RNA (1)...(19): siRNA sense strand
gaguaaauaguucuaaugg

SEQ ID NO: 489289 - RNA, 19 nt, Homo sapiens
  misc_RNA (1)...(19): siRNA sense strand
cagaauucauauagcauca

SEQ ID NO: 489290 - RNA, 19 nt, Homo sapiens
  misc_RNA (1)...(19): siRNA sense strand
ccgaauauacagccuuaaa

SEQ ID NO: 489291 - RNA, 19 nt, Homo sapiens
  misc_RNA (1)...(19): siRNA sense strand
uggcagaauucauauagca

SEQ ID NO: 489292 - RNA, 19 nt, Homo sapiens
  misc_RNA (1)...(19): siRNA sense strand
gacaguguuacagcaauua

SEQ ID NO: 489293 - RNA, 19 nt, Homo sapiens
  misc_RNA (1)...(19): siRNA sense strand
ggacccaagagccauauca

SEQ ID NO: 489294 - RNA, 19 nt, Homo sapiens
  misc_RNA (1)...(19): siRNA sense strand
uaucagugcuagcaaaaug

SEQ ID NO: 489295 - RNA, 19 nt, Homo sapiens
  misc_RNA (1)...(19): siRNA sense strand
ccuaaugaugucuaaagaa

SEQ ID NO: 489296 - RNA, 19 nt, Homo sapiens
  misc_RNA (1)...(19): siRNA sense strand
gaauggaguaaauaguucu

SEQ ID NO: 489297 - RNA, 19 nt, Homo sapiens
  misc_RNA (1)...(19): siRNA sense strand
gguggacccaagagccaua

SEQ ID NO: 489298 - RNA, 19 nt, Homo sapiens
  misc_RNA (1)...(19): siRNA sense strand
gaauguggaccuaaauacc

SEQ ID NO: 489299 - RNA, 19 nt, Homo sapiens
  misc_RNA (1)...(19): siRNA sense strand
aaaauagaauguggaccua

SEQ ID NO: 489300 - RNA, 19 nt, Homo sapiens
  misc_RNA (1)...(19): siRNA sense strand
gaaaugaccuacggauuga

SEQ ID NO: 489301 - RNA, 19 nt, Homo sapiens
  misc_RNA (1)...(19): siRNA sense strand
ucaaagaccuuaaccaaga

SEQ ID NO: 489302 - RNA, 19 nt, Homo sapiens
  misc_RNA (1)...(19): siRNA sense strand
ggacauagcaucucuuguu

SEQ ID NO: 489303 - RNA, 19 nt, Homo sapiens
  misc_RNA (1)...(19): siRNA sense strand
caucaaaccuguuauuguu

SEQ ID NO: 489304 - RNA, 19 nt, Homo sapiens
  misc_RNA (1)...(19): siRNA sense strand
gacauagcaucucuuguua

SEQ ID NO: 489305 - RNA, 19 nt, Homo sapiens
  misc_RNA (1)...(19): siRNA sense strand
gaacagagacuacguugga

SEQ ID NO: 489306 - RNA, 19 nt, Homo sapiens
  misc_RNA (1)...(19): siRNA sense strand
gcaaagacgaggaaauuaa

SEQ ID NO: 489307 - RNA, 19 nt, Homo sapiens
  misc_RNA (1)...(19): siRNA sense strand
gaaacgaauggcugaauua

SEQ ID NO: 489308 - RNA, 19 nt, Homo sapiens
  misc_RNA (1)...(19): siRNA sense strand
gauaacaguugcccgaauu

SEQ ID NO: 489309 - RNA, 19 nt, Homo sapiens
  misc_RNA (1)...(19): siRNA sense strand
gcagagcucacaucaguua

SEQ ID NO: 489310 - RNA, 19 nt, Homo sapiens
  misc_RNA (1)...(19): siRNA sense strand
agagaaaucugaccaagaa

SEQ ID NO: 489311 - RNA, 19 nt, Homo sapiens
  misc_RNA (1)...(19): siRNA sense strand
ggagaaacuugaagaggaa

SEQ ID NO: 489312 - RNA, 19 nt, Homo sapiens
  misc_RNA (1)...(19): siRNA sense strand
ggaagaagagcuuaagaaa

SEQ ID NO: 489313 - RNA, 19 nt, Homo sapiens
  misc_RNA (1)...(19): siRNA sense strand
uaaagcagguagagaauga

SEQ ID NO: 489314 - RNA, 19 nt, Homo sapiens
  misc_RNA (1)...(19): siRNA sense strand
gaaccucccuauuugagaa

SEQ ID NO: 489315 - RNA, 19 nt, Homo sapiens
  misc_RNA (1)...(19): siRNA sense strand
gaguuuagcgucagaguua

SEQ ID NO: 489316 - RNA, 19 nt, Homo sapiens
  misc_RNA (1)...(19): siRNA sense strand
gaagacaacacgaacguuu

SEQ ID NO: 489317 - RNA, 19 nt, Homo sapiens
  misc_RNA (1)...(19): siRNA sense strand
caaaguagccucacugugu

SEQ ID NO: 489318 - RNA, 19 nt, Homo sapiens
  misc_RNA (1)...(19): siRNA sense strand
gaaugaaucugugaaaucu

SEQ ID NO: 489319 - RNA, 19 nt, Homo sapiens
  misc_RNA (1)...(19): siRNA sense strand
caagaaacagaaagaguua

SEQ ID NO: 489320 - RNA, 19 nt, Homo sapiens
  misc_RNA (1)...(19): siRNA sense strand
ggaguuugcucucaacaau

SEQ ID NO: 489321 - RNA, 19 nt, Homo sapiens
  misc_RNA (1)...(19): siRNA sense strand
cagccuaacucuagagaaa

SEQ ID NO: 489322 - RNA, 19 nt, Homo sapiens
  misc_RNA (1)...(19): siRNA sense strand
caaacaaagugacaaguag

SEQ ID NO: 489323 - RNA, 19 nt, Homo sapiens
  misc_RNA (1)...(19): siRNA sense strand
gaggaucugugucgucuga

SEQ ID NO: 489324 - RNA, 19 nt, Homo sapiens
  misc_RNA (1)...(19): siRNA sense strand
gagauaaagcuacaaauca

SEQ ID NO: 489325 - RNA, 19 nt, Homo sapiens
  misc_RNA (1)...(19): siRNA sense strand
ccuagaaccucccuauuug

SEQ ID NO: 489326 - RNA, 19 nt, Homo sapiens
  misc_RNA (1)...(19): siRNA sense strand
cggaaugccuggaagagua

SEQ ID NO: 489327 - RNA, 19 nt, Homo sapiens
  misc_RNA (1)...(19): siRNA sense strand
caacggaagucaaguaacu

SEQ ID NO: 489328 - RNA, 19 nt, Homo sapiens
  misc_RNA (1)...(19): siRNA sense strand
ugauaaagaugcuggaaug

SEQ ID NO: 489329 - RNA, 19 nt, Homo sapiens
  misc_RNA (1)...(19): siRNA sense strand
auaacgaccuucaggauaa

SEQ ID NO: 489330 - RNA, 19 nt, Homo sapiens
  misc_RNA (1)...(19): siRNA sense strand
agacucagaugaugacuug

SEQ ID NO: 489331 - RNA, 19 nt, Homo sapiens
  misc_RNA (1)...(19): siRNA sense strand
caagagauugagaaacuua

SEQ ID NO: 489332 - RNA, 19 nt, Homo sapiens
  misc_RNA (1)...(19): siRNA sense strand
cagaagggcucucuaaagg

SEQ ID NO: 489333 - RNA, 19 nt, Homo sapiens
  misc_RNA (1)...(19): siRNA sense strand
gguagagaaugaaacaaga

SEQ ID NO: 489334 - RNA, 19 nt, Homo sapiens
  misc_RNA (1)...(19): siRNA sense strand
ggcgagacuugaaaucuuu

SEQ ID NO: 489335 - RNA, 19 nt, Homo sapiens
  misc_RNA (1)...(19): siRNA sense strand
ccaaacaaagugacaagua

SEQ ID NO: 489336 - RNA, 19 nt, Homo sapiens
  misc_RNA (1)...(19): siRNA sense strand
gagaaugaaucugugaaau

SEQ ID NO: 489337 - RNA, 19 nt, Homo sapiens
  misc_RNA (1)...(19): siRNA sense strand
gagagaagccagacucaga

SEQ ID NO: 489338 - RNA, 19 nt, Homo sapiens
  misc_RNA (1)...(19): siRNA sense strand
caugagaggacuaaguuua

SEQ ID NO: 489339 - RNA, 19 nt, Homo sapiens
  misc_RNA (1)...(19): siRNA sense strand
ggagauaaagcuacaaauc

SEQ ID NO: 489340 - RNA, 19 nt, Homo sapiens
  misc_RNA (1)...(19): siRNA sense strand
ucagaugccagacauguua

SEQ ID NO: 489341 - RNA, 19 nt, Homo sapiens
  misc_RNA (1)...(19): siRNA sense strand
ggacucaggagacaaagaa

SEQ ID NO: 489342 - RNA, 19 nt, Homo sapiens
  misc_RNA (1)...(19): siRNA sense strand
gcugagaauugaaggcaaa

SEQ ID NO: 489343 - RNA, 19 nt, Homo sapiens
  misc_RNA (1)...(19): siRNA sense strand
aaagugacaaguagcauua

SEQ ID NO: 489344 - RNA, 19 nt, Homo sapiens
  misc_RNA (1)...(19): siRNA sense strand
gaugaugacuuggacauag

SEQ ID NO: 489345 - RNA, 19 nt, Homo sapiens
  misc_RNA (1)...(19): siRNA sense strand
gguagcaacuccagcaugu

SEQ ID NO: 489346 - RNA, 19 nt, Homo sapiens
  misc_RNA (1)...(19): siRNA sense strand
gucagagccuccaccaaua

SEQ ID NO: 489347 - RNA, 19 nt, Homo sapiens
  misc_RNA (1)...(19): siRNA sense strand
uggcagagcucacaucagu

SEQ ID NO: 489348 - RNA, 19 nt, Homo sapiens
  misc_RNA (1)...(19): siRNA sense strand
ucucggagcagcauuauaa

SEQ ID NO: 489349 - RNA, 19 nt, Homo sapiens
  misc_RNA (1)...(19): siRNA sense strand
ggaagacaacaaagucaaa

SEQ ID NO: 489350 - RNA, 19 nt, Homo sapiens
  misc_RNA (1)...(19): siRNA sense strand
gaauggagaaugaaucugu

SEQ ID NO: 489351 - RNA, 19 nt, Homo sapiens
  misc_RNA (1)...(19): siRNA sense strand
caacacgaacguuuaguga

SEQ ID NO: 489352 - RNA, 19 nt, Homo sapiens
  misc_RNA (1)...(19): siRNA sense strand
agaaacgaauggcugaauu

SEQ ID NO: 489353 - RNA, 19 nt, Homo sapiens
  misc_RNA (1)...(19): siRNA sense strand
ggagaaugaaucugugaaa

SEQ ID NO: 489354 - RNA, 19 nt, Homo sapiens
  misc_RNA (1)...(19): siRNA sense strand
agaaaugaccuacggauug

SEQ ID NO: 489355 - RNA, 19 nt, Homo sapiens
  misc_RNA (1)...(19): siRNA sense strand
cccgggagcugaaaucuga

SEQ ID NO: 489356 - RNA, 19 nt, Homo sapiens
  misc_RNA (1)...(19): siRNA sense strand
ggagcagcauuauaaucaa

SEQ ID NO: 489357 - RNA, 19 nt, Homo sapiens
  misc_RNA (1)...(19): siRNA sense strand
ccauggagcucccagauac

SEQ ID NO: 489358 - RNA, 19 nt, Homo sapiens
  misc_RNA (1)...(19): siRNA sense strand
ggaacugucuccucagcau

SEQ ID NO: 489359 - RNA, 19 nt, Homo sapiens
  misc_RNA (1)...(19): siRNA sense strand
gacaugagaggacuaaguu

SEQ ID NO: 489360 - RNA, 19 nt, Homo sapiens
  misc_RNA (1)...(19): siRNA sense strand
caacaaagucaaagaccuu

SEQ ID NO: 489361 - RNA, 19 nt, Homo sapiens
  misc_RNA (1)...(19): siRNA sense strand
caaagugaaagaacuagaa

SEQ ID NO: 489362 - RNA, 19 nt, Homo sapiens
  misc_RNA (1)...(19): siRNA sense strand
gcucagagucaaagugaaa

SEQ ID NO: 489363 - RNA, 19 nt, Homo sapiens
  misc_RNA (1)...(19): siRNA sense strand
ggaaaugcucagagucaaa

SEQ ID NO: 489364 - RNA, 19 nt, Homo sapiens
  misc_RNA (1)...(19): siRNA sense strand
cagcaagcauggugaguuc

SEQ ID NO: 489365 - RNA, 19 nt, Homo sapiens
  misc_RNA (1)...(19): siRNA sense strand
gcacacauccacuagcaau

SEQ ID NO: 489366 - RNA, 19 nt, Homo sapiens
  misc_RNA (1)...(19): siRNA sense strand
ucaagaaacagaaagaguu

SEQ ID NO: 489367 - RNA, 19 nt, Homo sapiens
  misc_RNA (1)...(19): siRNA sense strand
gaacugucuccucagcaua

SEQ ID NO: 489368 - RNA, 19 nt, Homo sapiens
  misc_RNA (1)...(19): siRNA sense strand
gaagaacaggccagaaaca

SEQ ID NO: 489369 - RNA, 19 nt, Homo sapiens
  misc_RNA (1)...(19): siRNA sense strand
gcaacaggcagguuucuuc

SEQ ID NO: 489370 - RNA, 19 nt, Homo sapiens
  misc_RNA (1)...(19): siRNA sense strand
gagaaugaaacaagaaaca

SEQ ID NO: 489371 - RNA, 19 nt, Homo sapiens
  misc_RNA (1)...(19): siRNA sense strand
gagcugacaaggcuucuga

SEQ ID NO: 489372 - RNA, 19 nt, Homo sapiens
  misc_RNA (1)...(19): siRNA sense strand
acacgaacguuuagugaca

SEQ ID NO: 489373 - RNA, 19 nt, Homo sapiens
  misc_RNA (1)...(19): siRNA sense strand
ggaguaagaaugacuguac

SEQ ID NO: 489374 - RNA, 19 nt, Homo sapiens
  misc_RNA (1)...(19): siRNA sense strand
gaaagcagaggaugaacuc

SEQ ID NO: 489375 - RNA, 19 nt, Homo sapiens
  misc_RNA (1)...(19): siRNA sense strand
gaaugcuucuaaucuggaa

SEQ ID NO: 489376 - RNA, 19 nt, Homo sapiens
  misc_RNA (1)...(19): siRNA sense strand
caaggaaugcuucuaaucu

SEQ ID NO: 489377 - RNA, 19 nt, Homo sapiens
  misc_RNA (1)...(19): siRNA sense strand
ccaagaaaaucuccucuga

SEQ ID NO: 489378 - RNA, 19 nt, Homo sapiens
  misc_RNA (1)...(19): siRNA sense strand
gagagaaaucugaccaaga

SEQ ID NO: 489379 - RNA, 19 nt, Homo sapiens
  misc_RNA (1)...(19): siRNA sense strand
acgaauggcugaauuagag

SEQ ID NO: 489380 - RNA, 19 nt, Homo sapiens
  misc_RNA (1)...(19): siRNA sense strand
gagcagcauuauaaucaag

SEQ ID NO: 489381 - RNA, 19 nt, Homo sapiens
  misc_RNA (1)...(19): siRNA sense strand
acagaaacccgucuccaaa

SEQ ID NO: 489382 - RNA, 19 nt, Homo sapiens
  misc_RNA (1)...(19): siRNA sense strand
gcaccuagaaccucccuau

SEQ ID NO: 489383 - RNA, 19 nt, Homo sapiens
  misc_RNA (1)...(19): siRNA sense strand
gcccuggccucaucucgaa

SEQ ID NO: 489384 - RNA, 19 nt, Homo sapiens
  misc_RNA (1)...(19): siRNA sense strand
cuacaaaucaagaaacaga

SEQ ID NO: 489385 - RNA, 19 nt, Homo sapiens
  misc_RNA (1)...(19): siRNA sense strand
gaggagauaaagcuacaaa

SEQ ID NO: 489386 - RNA, 19 nt, Homo sapiens
  misc_RNA (1)...(19): siRNA sense strand
gaagaagagcuuaagaaaa

SEQ ID NO: 489387 - RNA, 19 nt, Homo sapiens
  misc_RNA (1)...(19): siRNA sense strand
gguuuaagcuacagagucu

SEQ ID NO: 489388 - RNA, 19 nt, Homo sapiens
  misc_RNA (1)...(19): siRNA sense strand
gcagguagagaaugaaaca

SEQ ID NO: 489389 - RNA, 19 nt, Homo sapiens
  misc_RNA (1)...(19): siRNA sense strand
gcaaucaggaagacaacaa

SEQ ID NO: 489390 - RNA, 19 nt, Homo sapiens
  misc_RNA (1)...(19): siRNA sense strand
gagaggcacacauccacua

SEQ ID NO: 489391 - RNA, 19 nt, Homo sapiens
  misc_RNA (1)...(19): siRNA sense strand
uaaccaagagauugagaaa

SEQ ID NO: 489392 - RNA, 19 nt, Homo sapiens
  misc_RNA (1)...(19): siRNA sense strand
ggcaaagacgaggaaauua

SEQ ID NO: 489393 - RNA, 19 nt, Homo sapiens
  misc_RNA (1)...(19): siRNA sense strand
gaagaguaggcgagacuug

SEQ ID NO: 489394 - RNA, 19 nt, Homo sapiens
  misc_RNA (1)...(19): siRNA sense strand
agacuacguuggagaaaca

SEQ ID NO: 489395 - RNA, 19 nt, Homo sapiens
  misc_RNA (1)...(19): siRNA sense strand
ccagaaagcagaggaugaa

SEQ ID NO: 489396 - RNA, 19 nt, Homo sapiens
  misc_RNA (1)...(19): siRNA sense strand
ccacacugccguccaaaga

SEQ ID NO: 489397 - RNA, 19 nt, Homo sapiens
  misc_RNA (1)...(19): siRNA sense strand
auacaaggaaugcuucuaa

SEQ ID NO: 489398 - RNA, 19 nt, Homo sapiens
  misc_RNA (1)...(19): siRNA sense strand
acucugagcuuuguaagug

SEQ ID NO: 489399 - RNA, 19 nt, Homo sapiens
  misc_RNA (1)...(19): siRNA sense strand
ggagaggaauagccaugca

SEQ ID NO: 489400 - RNA, 19 nt, Homo sapiens
  misc_RNA (1)...(19): siRNA sense strand
gcacggaauuugaacagua

SEQ ID NO: 489401 - RNA, 19 nt, Homo sapiens
  misc_RNA (1)...(19): siRNA sense strand
caacuauccugacguguga

SEQ ID NO: 489402 - RNA, 19 nt, Homo sapiens
  misc_RNA (1)...(19): siRNA sense strand
gggcaugacuccgguguga

SEQ ID NO: 489403 - RNA, 19 nt, Homo sapiens
  misc_RNA (1)...(19): siRNA sense strand
gcaagaugcugggcaaguc

SEQ ID NO: 489404 - RNA, 19 nt, Homo sapiens
  misc_RNA (1)...(19): siRNA sense strand
ccagcuccgcgguauauua

SEQ ID NO: 489405 - RNA, 19 nt, Homo sapiens
  misc_RNA (1)...(19): siRNA sense strand
ccagcgcccuucacgugua

SEQ ID NO: 489406 - RNA, 19 nt, Homo sapiens
  misc_RNA (1)...(19): siRNA sense strand
guauauuacugcaacuauc

SEQ ID NO: 489407 - RNA, 19 nt, Homo sapiens
  misc_RNA (1)...(19): siRNA sense strand
ggaccgcacggaauuugaa

SEQ ID NO: 489408 - RNA, 19 nt, Homo sapiens
  misc_RNA (1)...(19): siRNA sense strand
cacggaauuugaacaguau

SEQ ID NO: 489409 - RNA, 19 nt, Homo sapiens
  misc_RNA (1)...(19): siRNA sense strand
gcaugacuccggugugaau

SEQ ID NO: 489410 - RNA, 19 nt, Homo sapiens
  misc_RNA (1)...(19): siRNA sense strand
gguauauuacugcaacuau

SEQ ID NO: 489411 - RNA, 19 nt, Homo sapiens
  misc_RNA (1)...(19): siRNA sense strand
gcuccgcgguauauuacug

SEQ ID NO: 489412 - RNA, 19 nt, Homo sapiens
  misc_RNA (1)...(19): siRNA sense strand
acgcgcaggucucggacua

SEQ ID NO: 489413 - RNA, 19 nt, Homo sapiens
  misc_RNA (1)...(19): siRNA sense strand
ugaacaguaucugcacuuc

SEQ ID NO: 489414 - RNA, 19 nt, Homo sapiens
  misc_RNA (1)...(19): siRNA sense strand
gagguggaccgcacggaau

SEQ ID NO: 489415 - RNA, 19 nt, Homo sapiens
  misc_RNA (1)...(19): siRNA sense strand
aacaguaucugcacuucgu

SEQ ID NO: 489416 - RNA, 19 nt, Homo sapiens
  misc_RNA (1)...(19): siRNA sense strand
ggagagccguguucaauga

SEQ ID NO: 489417 - RNA, 19 nt, Homo sapiens
  misc_RNA (1)...(19): siRNA sense strand
gcccagagcugcuagaguu

SEQ ID NO: 489418 - RNA, 19 nt, Homo sapiens
  misc_RNA (1)...(19): siRNA sense strand
ccaagaagcccaagaaaca

SEQ ID NO: 489419 - RNA, 19 nt, Homo sapiens
  misc_RNA (1)...(19): siRNA sense strand
gggcgaggaugcugaggaa

SEQ ID NO: 489420 - RNA, 19 nt, Homo sapiens
  misc_RNA (1)...(19): siRNA sense strand
ggaaugaugaagaggcuuu

SEQ ID NO: 489421 - RNA, 19 nt, Homo sapiens
  misc_RNA (1)...(19): siRNA sense strand
gaggagagccguguucaau

SEQ ID NO: 489422 - RNA, 19 nt, Homo sapiens
  misc_RNA (1)...(19): siRNA sense strand
acagcgagauugaggaguu

SEQ ID NO: 489423 - RNA, 19 nt, Homo sapiens
  misc_RNA (1)...(19): siRNA sense strand
ccgaggaugucguccaguu

SEQ ID NO: 489424 - RNA, 19 nt, Homo sapiens
  misc_RNA (1)...(19): siRNA sense strand
cugcuagaguucuuaggua

SEQ ID NO: 489425 - RNA, 19 nt, Homo sapiens
  misc_RNA (1)...(19): siRNA sense strand
gacagggaaugaugaagag

SEQ ID NO: 489426 - RNA, 19 nt, Homo sapiens
  misc_RNA (1)...(19): siRNA sense strand
gcuccaagaagcccaagaa

SEQ ID NO: 489427 - RNA, 19 nt, Homo sapiens
  misc_RNA (1)...(19): siRNA sense strand
cagcgagauugaggaguuu

SEQ ID NO: 489428 - RNA, 19 nt, Homo sapiens
  misc_RNA (1)...(19): siRNA sense strand
agacagggaaugaugaaga

SEQ ID NO: 489429 - RNA, 19 nt, Homo sapiens
  misc_RNA (1)...(19): siRNA sense strand
gggcucaccagcagagauu

SEQ ID NO: 489430 - RNA, 19 nt, Homo sapiens
  misc_RNA (1)...(19): siRNA sense strand
cuccaaggaugccgaguug

SEQ ID NO: 489431 - RNA, 19 nt, Homo sapiens
  misc_RNA (1)...(19): siRNA sense strand
ggagaggagagccguguuc

SEQ ID NO: 489432 - RNA, 19 nt, Homo sapiens
  misc_RNA (1)...(19): siRNA sense strand
ccaggcgacuucagaaugc

SEQ ID NO: 489433 - RNA, 19 nt, Homo sapiens
  misc_RNA (1)...(19): siRNA sense strand
gcuggacccucugggcauu

SEQ ID NO: 489434 - RNA, 19 nt, Homo sapiens
  misc_RNA (1)...(19): siRNA sense strand
gcgaggaugcugaggaauc

SEQ ID NO: 489435 - RNA, 19 nt, Homo sapiens
  misc_RNA (1)...(19): siRNA sense strand
gagccguguucaaugagau

SEQ ID NO: 489436 - RNA, 19 nt, Homo sapiens
  misc_RNA (1)...(19): siRNA sense strand
gcaagaccaaguggcagaa

SEQ ID NO: 489437 - RNA, 19 nt, Homo sapiens
  misc_RNA (1)...(19): siRNA sense strand
cagagcugcuagaguucuu

SEQ ID NO: 489438 - RNA, 19 nt, Homo sapiens
  misc_RNA (1)...(19): siRNA sense strand
gagaggagagccguguuca

SEQ ID NO: 489439 - RNA, 19 nt, Homo sapiens
  misc_RNA (1)...(19): siRNA sense strand
ggaugucguccaguucuug

SEQ ID NO: 489440 - RNA, 19 nt, Homo sapiens
  misc_RNA (1)...(19): siRNA sense strand
caagaagcccaagaaacau

SEQ ID NO: 489441 - RNA, 19 nt, Homo sapiens
  misc_RNA (1)...(19): siRNA sense strand
aagaccaaguggcagaaga

SEQ ID NO: 489442 - RNA, 19 nt, Homo sapiens
  misc_RNA (1)...(19): siRNA sense strand
ucagacagggaaugaugaa

SEQ ID NO: 489443 - RNA, 19 nt, Homo sapiens
  misc_RNA (1)...(19): siRNA sense strand
gaggaugucguccaguucu

SEQ ID NO: 489444 - RNA, 19 nt, Homo sapiens
  misc_RNA (1)...(19): siRNA sense strand
ggagagccguguucaauga

SEQ ID NO: 489445 - RNA, 19 nt, Homo sapiens
  misc_RNA (1)...(19): siRNA sense strand
gcccagagcugcuagaguu

SEQ ID NO: 489446 - RNA, 19 nt, Homo sapiens
  misc_RNA (1)...(19): siRNA sense strand
ccaagaagcccaagaaaca

SEQ ID NO: 489447 - RNA, 19 nt, Homo sapiens
  misc_RNA (1)...(19): siRNA sense strand
gggcgaggaugcugaggaa

SEQ ID NO: 489448 - RNA, 19 nt, Homo sapiens
  misc_RNA (1)...(19): siRNA sense strand
ggaaugaugaagaggcuuu

SEQ ID NO: 489449 - RNA, 19 nt, Homo sapiens
  misc_RNA (1)...(19): siRNA sense strand
gaggagagccguguucaau

SEQ ID NO: 489450 - RNA, 19 nt, Homo sapiens
  misc_RNA (1)...(19): siRNA sense strand
acagcgagauugaggaguu

SEQ ID NO: 489451 - RNA, 19 nt, Homo sapiens
  misc_RNA (1)...(19): siRNA sense strand
ccgaggaugucguccaguu

SEQ ID NO: 489452 - RNA, 19 nt, Homo sapiens
  misc_RNA (1)...(19): siRNA sense strand
cugcuagaguucuuaggua

SEQ ID NO: 489453 - RNA, 19 nt, Homo sapiens
  misc_RNA (1)...(19): siRNA sense strand
gacagggaaugaugaagag

SEQ ID NO: 489454 - RNA, 19 nt, Homo sapiens
  misc_RNA (1)...(19): siRNA sense strand
gcuccaagaagcccaagaa

SEQ ID NO: 489455 - RNA, 19 nt, Homo sapiens
  misc_RNA (1)...(19): siRNA sense strand
cagcgagauugaggaguuu

SEQ ID NO: 489456 - RNA, 19 nt, Homo sapiens
  misc_RNA (1)...(19): siRNA sense strand
agacagggaaugaugaaga

SEQ ID NO: 489457 - RNA, 19 nt, Homo sapiens
  misc_RNA (1)...(19): siRNA sense strand
gggcucaccagcagagauu

SEQ ID NO: 489458 - RNA, 19 nt, Homo sapiens
  misc_RNA (1)...(19): siRNA sense strand
cuccaaggaugccgaguug

SEQ ID NO: 489459 - RNA, 19 nt, Homo sapiens
  misc_RNA (1)...(19): siRNA sense strand
ggagaggagagccguguuc

SEQ ID NO: 489460 - RNA, 19 nt, Homo sapiens
  misc_RNA (1)...(19): siRNA sense strand
ccaggcgacuucagaaugc

SEQ ID NO: 489461 - RNA, 19 nt, Homo sapiens
  misc_RNA (1)...(19): siRNA sense strand
gcuggacccucugggcauu

SEQ ID NO: 489462 - RNA, 19 nt, Homo sapiens
  misc_RNA (1)...(19): siRNA sense strand
gcgaggaugcugaggaauc

SEQ ID NO: 489463 - RNA, 19 nt, Homo sapiens
  misc_RNA (1)...(19): siRNA sense strand
gagccguguucaaugagau

SEQ ID NO: 489464 - RNA, 19 nt, Homo sapiens
  misc_RNA (1)...(19): siRNA sense strand
ggucacagcacccagaacu

SEQ ID NO: 489465 - RNA, 19 nt, Homo sapiens
  misc_RNA (1)...(19): siRNA sense strand
gcaagaccaaguggcagaa

SEQ ID NO: 489466 - RNA, 19 nt, Homo sapiens
  misc_RNA (1)...(19): siRNA sense strand
cagagcugcuagaguucuu

SEQ ID NO: 489467 - RNA, 19 nt, Homo sapiens
  misc_RNA (1)...(19): siRNA sense strand
gagaggagagccguguuca

SEQ ID NO: 489468 - RNA, 19 nt, Homo sapiens
  misc_RNA (1)...(19): siRNA sense strand
ggaugucguccaguucuug

SEQ ID NO: 489469 - RNA, 19 nt, Homo sapiens
  misc_RNA (1)...(19): siRNA sense strand
caagaagcccaagaaacau

SEQ ID NO: 489470 - RNA, 19 nt, Homo sapiens
  misc_RNA (1)...(19): siRNA sense strand
aagaccaaguggcagaaga

SEQ ID NO: 489471 - RNA, 19 nt, Homo sapiens
  misc_RNA (1)...(19): siRNA sense strand
ucagacagggaaugaugaa

SEQ ID NO: 489472 - RNA, 19 nt, Homo sapiens
  misc_RNA (1)...(19): siRNA sense strand
gaggaugucguccaguucu

SEQ ID NO: 489473 - RNA, 19 nt, Homo sapiens
  misc_RNA (1)...(19): siRNA sense strand
ggcagaagccugggucaca

SEQ ID NO: 489474 - RNA, 19 nt, Homo sapiens
  misc_RNA (1)...(19): siRNA sense strand
ggagacagauuuagauaua

SEQ ID NO: 489475 - RNA, 19 nt, Homo sapiens
  misc_RNA (1)...(19): siRNA sense strand
gaacugcucuggacauaug

SEQ ID NO: 489476 - RNA, 19 nt, Homo sapiens
  misc_RNA (1)...(19): siRNA sense strand
ggacacagcaucuuugauu

SEQ ID NO: 489477 - RNA, 19 nt, Homo sapiens
  misc_RNA (1)...(19): siRNA sense strand
gcaagagcauccacaccuu

SEQ ID NO: 489478 - RNA, 19 nt, Homo sapiens
  misc_RNA (1)...(19): siRNA sense strand
gacacagcaucuuugauuu

SEQ ID NO: 489479 - RNA, 19 nt, Homo sapiens
  misc_RNA (1)...(19): siRNA sense strand
cgacaggauugcagaagug

SEQ ID NO: 489480 - RNA, 19 nt, Homo sapiens
  misc_RNA (1)...(19): siRNA sense strand
agaaguggcuggcuauagu

SEQ ID NO: 489481 - RNA, 19 nt, Homo sapiens
  misc_RNA (1)...(19): siRNA sense strand
gagcaagggccaggcagua

SEQ ID NO: 489482 - RNA, 19 nt, Homo sapiens
  misc_RNA (1)...(19): siRNA sense strand
cagcaucuuugauuucauc

SEQ ID NO: 489483 - RNA, 19 nt, Homo sapiens
  misc_RNA (1)...(19): siRNA sense strand
gagacagauuuagauauag

SEQ ID NO: 489484 - RNA, 19 nt, Homo sapiens
  misc_RNA (1)...(19): siRNA sense strand
gccacagccuggacaugaa

SEQ ID NO: 489485 - RNA, 19 nt, Homo sapiens
  misc_RNA (1)...(19): siRNA sense strand
guggagacagauuuagaua

SEQ ID NO: 489486 - RNA, 19 nt, Homo sapiens
  misc_RNA (1)...(19): siRNA sense strand
ggcaguggagacagauuua

SEQ ID NO: 489487 - RNA, 19 nt, Homo sapiens
  misc_RNA (1)...(19): siRNA sense strand
cacagcaucuuugauuuca

SEQ ID NO: 489488 - RNA, 19 nt, Homo sapiens
  misc_RNA (1)...(19): siRNA sense strand
gcagaaguggcuggcuaua

SEQ ID NO: 489489 - RNA, 19 nt, Homo sapiens
  misc_RNA (1)...(19): siRNA sense strand
ccuggaaggugcugaacug

SEQ ID NO: 489490 - RNA, 19 nt, Homo sapiens
  misc_RNA (1)...(19): siRNA sense strand
cugaacugcucuggacaua

SEQ ID NO: 489491 - RNA, 19 nt, Homo sapiens
  misc_RNA (1)...(19): siRNA sense strand
cggagaguaucgucugugu

SEQ ID NO: 489492 - RNA, 19 nt, Homo sapiens
  misc_RNA (1)...(19): siRNA sense strand
gaaugugcacagacucuuc

SEQ ID NO: 489493 - RNA, 19 nt, Homo sapiens
  misc_RNA (1)...(19): siRNA sense strand
gcuguuccgccuacgagua

SEQ ID NO: 489494 - RNA, 19 nt, Homo sapiens
  misc_RNA (1)...(19): siRNA sense strand
ggacauaugagggccuaca

SEQ ID NO: 489495 - RNA, 19 nt, Homo sapiens
  misc_RNA (1)...(19): siRNA sense strand
ggauggggcuucaguagca

SEQ ID NO: 489496 - RNA, 19 nt, Homo sapiens
  misc_RNA (1)...(19): siRNA sense strand
gcaguaacagggcaguauc

SEQ ID NO: 489497 - RNA, 19 nt, Homo sapiens
  misc_RNA (1)...(19): siRNA sense strand
acacagcaucuuugauuuc

SEQ ID NO: 489498 - RNA, 19 nt, Homo sapiens
  misc_RNA (1)...(19): siRNA sense strand
gagaaugugcacagacucu

SEQ ID NO: 489499 - RNA, 19 nt, Homo sapiens
  misc_RNA (1)...(19): siRNA sense strand
uaucgucuguguccauuuu

SEQ ID NO: 489500 - RNA, 19 nt, Homo sapiens
  misc_RNA (1)...(19): siRNA sense strand
agacagauuuagauauagc

SEQ ID NO: 489501 - RNA, 19 nt, Homo sapiens
  misc_RNA (1)...(19): siRNA sense strand
ccgagaaugugcacagacu

SEQ ID NO: 489502 - RNA, 19 nt, Homo sapiens
  misc_RNA (1)...(19): siRNA sense strand
cauuggacacagcaucuuu

SEQ ID NO: 489503 - RNA, 19 nt, Homo sapiens
  misc_RNA (1)...(19): siRNA sense strand
gaaguggcuggcuauaguc

SEQ ID NO: 489504 - RNA, 19 nt, Homo sapiens
  misc_RNA (1)...(19): siRNA sense strand
cgccacagccuggacauga

SEQ ID NO: 489505 - RNA, 19 nt, Homo sapiens
  misc_RNA (1)...(19): siRNA sense strand
cugaggcaguggagacaga

SEQ ID NO: 489506 - RNA, 19 nt, Homo sapiens
  misc_RNA (1)...(19): siRNA sense strand
ggcaguaacagggcaguau

SEQ ID NO: 489507 - RNA, 19 nt, Homo sapiens
  misc_RNA (1)...(19): siRNA sense strand
gacauaugagggccuacaa

SEQ ID NO: 489508 - RNA, 19 nt, Homo sapiens
  misc_RNA (1)...(19): siRNA sense strand
caguggagacagauuuaga

SEQ ID NO: 489509 - RNA, 19 nt, Homo sapiens
  misc_RNA (1)...(19): siRNA sense strand
caagggccaggcaguaaca

SEQ ID NO: 489510 - RNA, 19 nt, Homo sapiens
  misc_RNA (1)...(19): siRNA sense strand
gcaagggccaggcaguaac

SEQ ID NO: 489511 - RNA, 19 nt, Homo sapiens
  misc_RNA (1)...(19): siRNA sense strand
caccgagaaugugcacaga

SEQ ID NO: 489512 - RNA, 19 nt, Homo sapiens
  misc_RNA (1)...(19): siRNA sense strand
ggagacagauuuagauaua

SEQ ID NO: 489513 - RNA, 19 nt, Homo sapiens
  misc_RNA (1)...(19): siRNA sense strand
gaacugcucuggacauaug

SEQ ID NO: 489514 - RNA, 19 nt, Homo sapiens
  misc_RNA (1)...(19): siRNA sense strand
ggacacagcaucuuugauu

SEQ ID NO: 489515 - RNA, 19 nt, Homo sapiens
  misc_RNA (1)...(19): siRNA sense strand
ggacaaggccucuaucaug

SEQ ID NO: 489516 - RNA, 19 nt, Homo sapiens
  misc_RNA (1)...(19): siRNA sense strand
gcaagagcauccacaccuu

SEQ ID NO: 489517 - RNA, 19 nt, Homo sapiens
  misc_RNA (1)...(19): siRNA sense strand
gacacagcaucuuugauuu

SEQ ID NO: 489518 - RNA, 19 nt, Homo sapiens
  misc_RNA (1)...(19): siRNA sense strand
cgacaggauugcagaagug

SEQ ID NO: 489519 - RNA, 19 nt, Homo sapiens
  misc_RNA (1)...(19): siRNA sense strand
agaaguggcuggcuauagu

SEQ ID NO: 489520 - RNA, 19 nt, Homo sapiens
  misc_RNA (1)...(19): siRNA sense strand
gagcaagggccaggcagua

SEQ ID NO: 489521 - RNA, 19 nt, Homo sapiens
  misc_RNA (1)...(19): siRNA sense strand
cagcaucuuugauuucauc

SEQ ID NO: 489522 - RNA, 19 nt, Homo sapiens
  misc_RNA (1)...(19): siRNA sense strand
gagacagauuuagauauag

SEQ ID NO: 489523 - RNA, 19 nt, Homo sapiens
  misc_RNA (1)...(19): siRNA sense strand
gccacagccuggacaugaa

SEQ ID NO: 489524 - RNA, 19 nt, Homo sapiens
  misc_RNA (1)...(19): siRNA sense strand
guggagacagauuuagaua

SEQ ID NO: 489525 - RNA, 19 nt, Homo sapiens
  misc_RNA (1)...(19): siRNA sense strand
ggcaguggagacagauuua

SEQ ID NO: 489526 - RNA, 19 nt, Homo sapiens
  misc_RNA (1)...(19): siRNA sense strand
cacagcaucuuugauuuca

SEQ ID NO: 489527 - RNA, 19 nt, Homo sapiens
  misc_RNA (1)...(19): siRNA sense strand
gcagaaguggcuggcuaua

SEQ ID NO: 489528 - RNA, 19 nt, Homo sapiens
  misc_RNA (1)...(19): siRNA sense strand
ccuggaaggugcugaacug

SEQ ID NO: 489529 - RNA, 19 nt, Homo sapiens
  misc_RNA (1)...(19): siRNA sense strand
cugaacugcucuggacaua

SEQ ID NO: 489530 - RNA, 19 nt, Homo sapiens
  misc_RNA (1)...(19): siRNA sense strand
cggagaguaucgucugugu

SEQ ID NO: 489531 - RNA, 19 nt, Homo sapiens
  misc_RNA (1)...(19): siRNA sense strand
gaaugugcacagacucuuc

SEQ ID NO: 489532 - RNA, 19 nt, Homo sapiens
  misc_RNA (1)...(19): siRNA sense strand
gcuguuccgccuacgagua

SEQ ID NO: 489533 - RNA, 19 nt, Homo sapiens
  misc_RNA (1)...(19): siRNA sense strand
agaccgaggugcuguacca

SEQ ID NO: 489534 - RNA, 19 nt, Homo sapiens
  misc_RNA (1)...(19): siRNA sense strand
ggacauaugagggccuaca

SEQ ID NO: 489535 - RNA, 19 nt, Homo sapiens
  misc_RNA (1)...(19): siRNA sense strand
ggauggggcuucaguagca

SEQ ID NO: 489536 - RNA, 19 nt, Homo sapiens
  misc_RNA (1)...(19): siRNA sense strand
gcaguaacagggcaguauc

SEQ ID NO: 489537 - RNA, 19 nt, Homo sapiens
  misc_RNA (1)...(19): siRNA sense strand
acacagcaucuuugauuuc

SEQ ID NO: 489538 - RNA, 19 nt, Homo sapiens
  misc_RNA (1)...(19): siRNA sense strand
gagaaugugcacagacucu

SEQ ID NO: 489539 - RNA, 19 nt, Homo sapiens
  misc_RNA (1)...(19): siRNA sense strand
uaucgucuguguccauuuu

SEQ ID NO: 489540 - RNA, 19 nt, Homo sapiens
  misc_RNA (1)...(19): siRNA sense strand
agacagauuuagauauagc

SEQ ID NO: 489541 - RNA, 19 nt, Homo sapiens
  misc_RNA (1)...(19): siRNA sense strand
ccgagaaugugcacagacu

SEQ ID NO: 489542 - RNA, 19 nt, Homo sapiens
  misc_RNA (1)...(19): siRNA sense strand
gaaguggcuggcuauaguc

SEQ ID NO: 489543 - RNA, 19 nt, Homo sapiens
  misc_RNA (1)...(19): siRNA sense strand
cauuggacacagcaucuuu

SEQ ID NO: 489544 - RNA, 19 nt, Homo sapiens
  misc_RNA (1)...(19): siRNA sense strand
cgccacagccuggacauga

SEQ ID NO: 489545 - RNA, 19 nt, Homo sapiens
  misc_RNA (1)...(19): siRNA sense strand
cugaggcaguggagacaga

SEQ ID NO: 489546 - RNA, 19 nt, Homo sapiens
  misc_RNA (1)...(19): siRNA sense strand
ggcaguaacagggcaguau

SEQ ID NO: 489547 - RNA, 19 nt, Homo sapiens
  misc_RNA (1)...(19): siRNA sense strand
gacauaugagggccuacaa

SEQ ID NO: 489548 - RNA, 19 nt, Homo sapiens
  misc_RNA (1)...(19): siRNA sense strand
caguggagacagauuuaga

SEQ ID NO: 489549 - RNA, 19 nt, Homo sapiens
  misc_RNA (1)...(19): siRNA sense strand
caagggccaggcaguaaca

SEQ ID NO: 489550 - RNA, 19 nt, Homo sapiens
  misc_RNA (1)...(19): siRNA sense strand
gcaagggccaggcaguaac

SEQ ID NO: 489551 - RNA, 19 nt, Homo sapiens
  misc_RNA (1)...(19): siRNA sense strand
caccgagaaugugcacaga

SEQ ID NO: 489552 - RNA, 19 nt, Homo sapiens
  misc_RNA (1)...(19): siRNA sense strand
ggagacagauuuagauaua

SEQ ID NO: 489553 - RNA, 19 nt, Homo sapiens
  misc_RNA (1)...(19): siRNA sense strand
gaacugcucuggacauaug

SEQ ID NO: 489554 - RNA, 19 nt, Homo sapiens
  misc_RNA (1)...(19): siRNA sense strand
ggacacagcaucuuugauu

SEQ ID NO: 489555 - RNA, 19 nt, Homo sapiens
  misc_RNA (1)...(19): siRNA sense strand
ggacaaggccucuaucaug

SEQ ID NO: 489556 - RNA, 19 nt, Homo sapiens
  misc_RNA (1)...(19): siRNA sense strand
gcaagagcauccacaccuu

SEQ ID NO: 489557 - RNA, 19 nt, Homo sapiens
  misc_RNA (1)...(19): siRNA sense strand
gacacagcaucuuugauuu

SEQ ID NO: 489558 - RNA, 19 nt, Homo sapiens
  misc_RNA (1)...(19): siRNA sense strand
cgacaggauugcagaagug

SEQ ID NO: 489559 - RNA, 19 nt, Homo sapiens
  misc_RNA (1)...(19): siRNA sense strand
agaaguggcuggcuauagu

SEQ ID NO: 489560 - RNA, 19 nt, Homo sapiens
  misc_RNA (1)...(19): siRNA sense strand
gagcaagggccaggcagua

SEQ ID NO: 489561 - RNA, 19 nt, Homo sapiens
  misc_RNA (1)...(19): siRNA sense strand
cagcaucuuugauuucauc

SEQ ID NO: 489562 - RNA, 19 nt, Homo sapiens
  misc_RNA (1)...(19): siRNA sense strand
gagacagauuuagauauag

SEQ ID NO: 489563 - RNA, 19 nt, Homo sapiens
  misc_RNA (1)...(19): siRNA sense strand
gccacagccuggacaugaa

SEQ ID NO: 489564 - RNA, 19 nt, Homo sapiens
  misc_RNA (1)...(19): siRNA sense strand
guggagacagauuuagaua

SEQ ID NO: 489565 - RNA, 19 nt, Homo sapiens
  misc_RNA (1)...(19): siRNA sense strand
ggcaguggagacagauuua

SEQ ID NO: 489566 - RNA, 19 nt, Homo sapiens
  misc_RNA (1)...(19): siRNA sense strand
cacagcaucuuugauuuca

SEQ ID NO: 489567 - RNA, 19 nt, Homo sapiens
  misc_RNA (1)...(19): siRNA sense strand
gcagaaguggcuggcuaua

SEQ ID NO: 489568 - RNA, 19 nt, Homo sapiens
  misc_RNA (1)...(19): siRNA sense strand
ccuggaaggugcugaacug

SEQ ID NO: 489569 - RNA, 19 nt, Homo sapiens
  misc_RNA (1)...(19): siRNA sense strand
cugaacugcucuggacaua

SEQ ID NO: 489570 - RNA, 19 nt, Homo sapiens
  misc_RNA (1)...(19): siRNA sense strand
cggagaguaucgucugugu

SEQ ID NO: 489571 - RNA, 19 nt, Homo sapiens
  misc_RNA (1)...(19): siRNA sense strand
gaaugugcacagacucuuc

SEQ ID NO: 489572 - RNA, 19 nt, Homo sapiens
  misc_RNA (1)...(19): siRNA sense strand
gcuguuccgccuacgagua

SEQ ID NO: 489573 - RNA, 19 nt, Homo sapiens
  misc_RNA (1)...(19): siRNA sense strand
agaccgaggugcuguacca

SEQ ID NO: 489574 - RNA, 19 nt, Homo sapiens
  misc_RNA (1)...(19): siRNA sense strand
ggacauaugagggccuaca

SEQ ID NO: 489575 - RNA, 19 nt, Homo sapiens
  misc_RNA (1)...(19): siRNA sense strand
ggauggggcuucaguagca

SEQ ID NO: 489576 - RNA, 19 nt, Homo sapiens
  misc_RNA (1)...(19): siRNA sense strand
gcaguaacagggcaguauc

SEQ ID NO: 489577 - RNA, 19 nt, Homo sapiens
  misc_RNA (1)...(19): siRNA sense strand
acacagcaucuuugauuuc

SEQ ID NO: 489578 - RNA, 19 nt, Homo sapiens
  misc_RNA (1)...(19): siRNA sense strand
gagaaugugcacagacucu

SEQ ID NO: 489579 - RNA, 19 nt, Homo sapiens
  misc_RNA (1)...(19): siRNA sense strand
uaucgucuguguccauuuu

SEQ ID NO: 489580 - RNA, 19 nt, Homo sapiens
  misc_RNA (1)...(19): siRNA sense strand
agacagauuuagauauagc

SEQ ID NO: 489581 - RNA, 19 nt, Homo sapiens
  misc_RNA (1)...(19): siRNA sense strand
ccgagaaugugcacagacu

SEQ ID NO: 489582 - RNA, 19 nt, Homo sapiens
  misc_RNA (1)...(19): siRNA sense strand
gaaguggcuggcuauaguc

SEQ ID NO: 489583 - RNA, 19 nt, Homo sapiens
  misc_RNA (1)...(19): siRNA sense strand
cauuggacacagcaucuuu

SEQ ID NO: 489584 - RNA, 19 nt, Homo sapiens
  misc_RNA (1)...(19): siRNA sense strand
cgccacagccuggacauga

SEQ ID NO: 489585 - RNA, 19 nt, Homo sapiens
  misc_RNA (1)...(19): siRNA sense strand
cugaggcaguggagacaga

SEQ ID NO: 489586 - RNA, 19 nt, Homo sapiens
  misc_RNA (1)...(19): siRNA sense strand
ggcaguaacagggcaguau

SEQ ID NO: 489587 - RNA, 19 nt, Homo sapiens
  misc_RNA (1)...(19): siRNA sense strand
gacauaugagggccuacaa

SEQ ID NO: 489588 - RNA, 19 nt, Homo sapiens
  misc_RNA (1)...(19): siRNA sense strand
caguggagacagauuuaga

SEQ ID NO: 489589 - RNA, 19 nt, Homo sapiens
  misc_RNA (1)...(19): siRNA sense strand
caagggccaggcaguaaca

SEQ ID NO: 489590 - RNA, 19 nt, Homo sapiens
  misc_RNA (1)...(19): siRNA sense strand
gcaagggccaggcaguaac

SEQ ID NO: 489591 - RNA, 19 nt, Homo sapiens
  misc_RNA (1)...(19): siRNA sense strand
caccgagaaugugcacaga

SEQ ID NO: 489592 - RNA, 19 nt, Homo sapiens
  misc_RNA (1)...(19): siRNA sense strand
ggagacagauuuagauaua

SEQ ID NO: 489593 - RNA, 19 nt, Homo sapiens
  misc_RNA (1)...(19): siRNA sense strand
gaacugcucuggacauaug

SEQ ID NO: 489594 - RNA, 19 nt, Homo sapiens
  misc_RNA (1)...(19): siRNA sense strand
ggacacagcaucuuugauu

SEQ ID NO: 489595 - RNA, 19 nt, Homo sapiens
  misc_RNA (1)...(19): siRNA sense strand
ggacaaggccucuaucaug

SEQ ID NO: 489596 - RNA, 19 nt, Homo sapiens
  misc_RNA (1)...(19): siRNA sense strand
gcaagagcauccacaccuu

SEQ ID NO: 489597 - RNA, 19 nt, Homo sapiens
  misc_RNA (1)...(19): siRNA sense strand
gacacagcaucuuugauuu

SEQ ID NO: 489598 - RNA, 19 nt, Homo sapiens
  misc_RNA (1)...(19): siRNA sense strand
cgacaggauugcagaagug

SEQ ID NO: 489599 - RNA, 19 nt, Homo sapiens
  misc_RNA (1)...(19): siRNA sense strand
agaaguggcuggcuauagu

SEQ ID NO: 489600 - RNA, 19 nt, Homo sapiens
  misc_RNA (1)...(19): siRNA sense strand
gagcaagggccaggcagua

SEQ ID NO: 489601 - RNA, 19 nt, Homo sapiens
  misc_RNA (1)...(19): siRNA sense strand
cagcaucuuugauuucauc

SEQ ID NO: 489602 - RNA, 19 nt, Homo sapiens
  misc_RNA (1)...(19): siRNA sense strand
gagacagauuuagauauag

SEQ ID NO: 489603 - RNA, 19 nt, Homo sapiens
  misc_RNA (1)...(19): siRNA sense strand
gccacagccuggacaugaa

SEQ ID NO: 489604 - RNA, 19 nt, Homo sapiens
  misc_RNA (1)...(19): siRNA sense strand
guggagacagauuuagaua

SEQ ID NO: 489605 - RNA, 19 nt, Homo sapiens
  misc_RNA (1)...(19): siRNA sense strand
ggcaguggagacagauuua

SEQ ID NO: 489606 - RNA, 19 nt, Homo sapiens
  misc_RNA (1)...(19): siRNA sense strand
cacagcaucuuugauuuca

SEQ ID NO: 489607 - RNA, 19 nt, Homo sapiens
  misc_RNA (1)...(19): siRNA sense strand
gcagaaguggcuggcuaua

SEQ ID NO: 489608 - RNA, 19 nt, Homo sapiens
  misc_RNA (1)...(19): siRNA sense strand
ccuggaaggugcugaacug

SEQ ID NO: 489609 - RNA, 19 nt, Homo sapiens
  misc_RNA (1)...(19): siRNA sense strand
cugaacugcucuggacaua

SEQ ID NO: 489610 - RNA, 19 nt, Homo sapiens
  misc_RNA (1)...(19): siRNA sense strand
cggagaguaucgucugugu

SEQ ID NO: 489611 - RNA, 19 nt, Homo sapiens
  misc_RNA (1)...(19): siRNA sense strand
gaaugugcacagacucuuc

SEQ ID NO: 489612 - RNA, 19 nt, Homo sapiens
  misc_RNA (1)...(19): siRNA sense strand
agaccgaggugcuguacca

SEQ ID NO: 489613 - RNA, 19 nt, Homo sapiens
  misc_RNA (1)...(19): siRNA sense strand
gcuguuccgccuacgagua

SEQ ID NO: 489614 - RNA, 19 nt, Homo sapiens
  misc_RNA (1)...(19): siRNA sense strand
ggacauaugagggccuaca

SEQ ID NO: 489615 - RNA, 19 nt, Homo sapiens
  misc_RNA (1)...(19): siRNA sense strand
ggauggggcuucaguagca

SEQ ID NO: 489616 - RNA, 19 nt, Homo sapiens
  misc_RNA (1)...(19): siRNA sense strand
gcaguaacagggcaguauc

SEQ ID NO: 489617 - RNA, 19 nt, Homo sapiens
  misc_RNA (1)...(19): siRNA sense strand
acacagcaucuuugauuuc

SEQ ID NO: 489618 - RNA, 19 nt, Homo sapiens
  misc_RNA (1)...(19): siRNA sense strand
gagaaugugcacagacucu

SEQ ID NO: 489619 - RNA, 19 nt, Homo sapiens
  misc_RNA (1)...(19): siRNA sense strand
uaucgucuguguccauuuu

SEQ ID NO: 489620 - RNA, 19 nt, Homo sapiens
  misc_RNA (1)...(19): siRNA sense strand
agacagauuuagauauagc

SEQ ID NO: 489621 - RNA, 19 nt, Homo sapiens
  misc_RNA (1)...(19): siRNA sense strand
ccgagaaugugcacagacu

SEQ ID NO: 489622 - RNA, 19 nt, Homo sapiens
  misc_RNA (1)...(19): siRNA sense strand
gaaguggcuggcuauaguc

SEQ ID NO: 489623 - RNA, 19 nt, Homo sapiens
  misc_RNA (1)...(19): siRNA sense strand
cauuggacacagcaucuuu

SEQ ID NO: 489624 - RNA, 19 nt, Homo sapiens
  misc_RNA (1)...(19): siRNA sense strand
cgccacagccuggacauga

SEQ ID NO: 489625 - RNA, 19 nt, Homo sapiens
  misc_RNA (1)...(19): siRNA sense strand
cugaggcaguggagacaga

SEQ ID NO: 489626 - RNA, 19 nt, Homo sapiens
  misc_RNA (1)...(19): siRNA sense strand
ggcaguaacagggcaguau

SEQ ID NO: 489627 - RNA, 19 nt, Homo sapiens
  misc_RNA (1)...(19): siRNA sense strand
gacauaugagggccuacaa

SEQ ID NO: 489628 - RNA, 19 nt, Homo sapiens
  misc_RNA (1)...(19): siRNA sense strand
caguggagacagauuuaga

SEQ ID NO: 489629 - RNA, 19 nt, Homo sapiens
  misc_RNA (1)...(19): siRNA sense strand
caagggccaggcaguaaca

SEQ ID NO: 489630 - RNA, 19 nt, Homo sapiens
  misc_RNA (1)...(19): siRNA sense strand
gcaagggccaggcaguaac

SEQ ID NO: 489631 - RNA, 19 nt, Homo sapiens
  misc_RNA (1)...(19): siRNA sense strand
caccgagaaugugcacaga

SEQ ID NO: 489632 - RNA, 19 nt, Homo sapiens
  misc_RNA (1)...(19): siRNA sense strand
gcagagcccugagaaguug

SEQ ID NO: 489633 - RNA, 19 nt, Homo sapiens
  misc_RNA (1)...(19): siRNA sense strand
ggagucaggccucacauuu

SEQ ID NO: 489634 - RNA, 19 nt, Homo sapiens
  misc_RNA (1)...(19): siRNA sense strand
ggccgaauccuccucuuua

SEQ ID NO: 489635 - RNA, 19 nt, Homo sapiens
  misc_RNA (1)...(19): siRNA sense strand
gaggagaccuggacuuuug

SEQ ID NO: 489636 - RNA, 19 nt, Homo sapiens
  misc_RNA (1)...(19): siRNA sense strand
ucaaagucaugcagagguu

SEQ ID NO: 489637 - RNA, 19 nt, Homo sapiens
  misc_RNA (1)...(19): siRNA sense strand
acacucacuuugacgauga

SEQ ID NO: 489638 - RNA, 19 nt, Homo sapiens
  misc_RNA (1)...(19): siRNA sense strand
gggcgacccugacaaguac

SEQ ID NO: 489639 - RNA, 19 nt, Homo sapiens
  misc_RNA (1)...(19): siRNA sense strand
caugagcuaugcccugaug

SEQ ID NO: 489640 - RNA, 19 nt, Homo sapiens
  misc_RNA (1)...(19): siRNA sense strand
agucaggccucacauuuca

SEQ ID NO: 489641 - RNA, 19 nt, Homo sapiens
  misc_RNA (1)...(19): siRNA sense strand
ugacaagcccacaaggaaa

SEQ ID NO: 489642 - RNA, 19 nt, Homo sapiens
  misc_RNA (1)...(19): siRNA sense strand
cgacauccucaucgacuuu

SEQ ID NO: 489643 - RNA, 19 nt, Homo sapiens
  misc_RNA (1)...(19): siRNA sense strand
gcgauggccugcagcaacu

SEQ ID NO: 489644 - RNA, 19 nt, Homo sapiens
  misc_RNA (1)...(19): siRNA sense strand
gccgaauccuccucuuuag

SEQ ID NO: 489645 - RNA, 19 nt, Homo sapiens
  misc_RNA (1)...(19): siRNA sense strand
acaaguaccgccugucuca

SEQ ID NO: 489646 - RNA, 19 nt, Homo sapiens
  misc_RNA (1)...(19): siRNA sense strand
gaagaagcgaacccugaca

SEQ ID NO: 489647 - RNA, 19 nt, Homo sapiens
  misc_RNA (1)...(19): siRNA sense strand
cccaagaacagcaucaaga

SEQ ID NO: 489648 - RNA, 19 nt, Homo sapiens
  misc_RNA (1)...(19): siRNA sense strand
gagucaggccucacauuuc

SEQ ID NO: 489649 - RNA, 19 nt, Homo sapiens
  misc_RNA (1)...(19): siRNA sense strand
ggacacucacuuugacgau

SEQ ID NO: 489650 - RNA, 19 nt, Homo sapiens
  misc_RNA (1)...(19): siRNA sense strand
guccgaaaccugcgauugu

SEQ ID NO: 489651 - RNA, 19 nt, Homo sapiens
  misc_RNA (1)...(19): siRNA sense strand
aagcgaacccugacaugga

SEQ ID NO: 489652 - RNA, 19 nt, Homo sapiens
  misc_RNA (1)...(19): siRNA sense strand
ugggcgacccugacaagua

SEQ ID NO: 489653 - RNA, 19 nt, Homo sapiens
  misc_RNA (1)...(19): siRNA sense strand
gaugugagggcaauuuuga

SEQ ID NO: 489654 - RNA, 19 nt, Homo sapiens
  misc_RNA (1)...(19): siRNA sense strand
ggcugacucgcuaugguua

SEQ ID NO: 489655 - RNA, 19 nt, Homo sapiens
  misc_RNA (1)...(19): siRNA sense strand
ccacacacagcccauccuu

SEQ ID NO: 489656 - RNA, 19 nt, Homo sapiens
  misc_RNA (1)...(19): siRNA sense strand
gaugaggagaccuggacuu

SEQ ID NO: 489657 - RNA, 19 nt, Homo sapiens
  misc_RNA (1)...(19): siRNA sense strand
ccuagcccaugccuucuuc

SEQ ID NO: 489658 - RNA, 19 nt, Homo sapiens
  misc_RNA (1)...(19): siRNA sense strand
ccaagaacagcaucaagac

SEQ ID NO: 489659 - RNA, 19 nt, Homo sapiens
  misc_RNA (1)...(19): siRNA sense strand
gacaagcccacaaggaaac

SEQ ID NO: 489660 - RNA, 19 nt, Homo sapiens
  misc_RNA (1)...(19): siRNA sense strand
uaugacaagcccacaagga

SEQ ID NO: 489661 - RNA, 19 nt, Homo sapiens
  misc_RNA (1)...(19): siRNA sense strand
ugacaccuacuucuucaag

SEQ ID NO: 489662 - RNA, 19 nt, Homo sapiens
  misc_RNA (1)...(19): siRNA sense strand
cacagaacgggaagaccua

SEQ ID NO: 489663 - RNA, 19 nt, Homo sapiens
  misc_RNA (1)...(19): siRNA sense strand
gaaaccugcgauugucagu

SEQ ID NO: 489664 - RNA, 19 nt, Homo sapiens
  misc_RNA (1)...(19): siRNA sense strand
gcagagcccugagaaguug

SEQ ID NO: 489665 - RNA, 19 nt, Homo sapiens
  misc_RNA (1)...(19): siRNA sense strand
ggagucaggccucacauuu

SEQ ID NO: 489666 - RNA, 19 nt, Homo sapiens
  misc_RNA (1)...(19): siRNA sense strand
ggccgaauccuccucuuua

SEQ ID NO: 489667 - RNA, 19 nt, Homo sapiens
  misc_RNA (1)...(19): siRNA sense strand
gaggagaccuggacuuuug

SEQ ID NO: 489668 - RNA, 19 nt, Homo sapiens
  misc_RNA (1)...(19): siRNA sense strand
ucaaagucaugcagagguu

SEQ ID NO: 489669 - RNA, 19 nt, Homo sapiens
  misc_RNA (1)...(19): siRNA sense strand
acacucacuuugacgauga

SEQ ID NO: 489670 - RNA, 19 nt, Homo sapiens
  misc_RNA (1)...(19): siRNA sense strand
gggcgacccugacaaguac

SEQ ID NO: 489671 - RNA, 19 nt, Homo sapiens
  misc_RNA (1)...(19): siRNA sense strand
caugagcuaugcccugaug

SEQ ID NO: 489672 - RNA, 19 nt, Homo sapiens
  misc_RNA (1)...(19): siRNA sense strand
agucaggccucacauuuca

SEQ ID NO: 489673 - RNA, 19 nt, Homo sapiens
  misc_RNA (1)...(19): siRNA sense strand
ugacaagcccacaaggaaa

SEQ ID NO: 489674 - RNA, 19 nt, Homo sapiens
  misc_RNA (1)...(19): siRNA sense strand
cgacauccucaucgacuuu

SEQ ID NO: 489675 - RNA, 19 nt, Homo sapiens
  misc_RNA (1)...(19): siRNA sense strand
gcgauggccugcagcaacu

SEQ ID NO: 489676 - RNA, 19 nt, Homo sapiens
  misc_RNA (1)...(19): siRNA sense strand
gccgaauccuccucuuuag

SEQ ID NO: 489677 - RNA, 19 nt, Homo sapiens
  misc_RNA (1)...(19): siRNA sense strand
acaaguaccgccugucuca

SEQ ID NO: 489678 - RNA, 19 nt, Homo sapiens
  misc_RNA (1)...(19): siRNA sense strand
gaagaagcgaacccugaca

SEQ ID NO: 489679 - RNA, 19 nt, Homo sapiens
  misc_RNA (1)...(19): siRNA sense strand
cccaagaacagcaucaaga

SEQ ID NO: 489680 - RNA, 19 nt, Homo sapiens
  misc_RNA (1)...(19): siRNA sense strand
gagucaggccucacauuuc

SEQ ID NO: 489681 - RNA, 19 nt, Homo sapiens
  misc_RNA (1)...(19): siRNA sense strand
ggacacucacuuugacgau

SEQ ID NO: 489682 - RNA, 19 nt, Homo sapiens
  misc_RNA (1)...(19): siRNA sense strand
guccgaaaccugcgauugu

SEQ ID NO: 489683 - RNA, 19 nt, Homo sapiens
  misc_RNA (1)...(19): siRNA sense strand
aagcgaacccugacaugga

SEQ ID NO: 489684 - RNA, 19 nt, Homo sapiens
  misc_RNA (1)...(19): siRNA sense strand
ugggcgacccugacaagua

SEQ ID NO: 489685 - RNA, 19 nt, Homo sapiens
  misc_RNA (1)...(19): siRNA sense strand
gaugugagggcaauuuuga

SEQ ID NO: 489686 - RNA, 19 nt, Homo sapiens
  misc_RNA (1)...(19): siRNA sense strand
ggcugacucgcuaugguua

SEQ ID NO: 489687 - RNA, 19 nt, Homo sapiens
  misc_RNA (1)...(19): siRNA sense strand
ccacacacagcccauccuu

SEQ ID NO: 489688 - RNA, 19 nt, Homo sapiens
  misc_RNA (1)...(19): siRNA sense strand
gaugaggagaccuggacuu

SEQ ID NO: 489689 - RNA, 19 nt, Homo sapiens
  misc_RNA (1)...(19): siRNA sense strand
ccuagcccaugccuucuuc

SEQ ID NO: 489690 - RNA, 19 nt, Homo sapiens
  misc_RNA (1)...(19): siRNA sense strand
ccaagaacagcaucaagac

SEQ ID NO: 489691 - RNA, 19 nt, Homo sapiens
  misc_RNA (1)...(19): siRNA sense strand
gacaagcccacaaggaaac

SEQ ID NO: 489692 - RNA, 19 nt, Homo sapiens
  misc_RNA (1)...(19): siRNA sense strand
uaugacaagcccacaagga

SEQ ID NO: 489693 - RNA, 19 nt, Homo sapiens
  misc_RNA (1)...(19): siRNA sense strand
ugacaccuacuucuucaag

SEQ ID NO: 489694 - RNA, 19 nt, Homo sapiens
  misc_RNA (1)...(19): siRNA sense strand
cacagaacgggaagaccua

SEQ ID NO: 489695 - RNA, 19 nt, Homo sapiens
  misc_RNA (1)...(19): siRNA sense strand
gaaaccugcgauugucagu

SEQ ID NO: 489696 - RNA, 19 nt, Homo sapiens
  misc_RNA (1)...(19): siRNA sense strand
uggagaaccuugaaucuaa

SEQ ID NO: 489697 - RNA, 19 nt, Homo sapiens
  misc_RNA (1)...(19): siRNA sense strand
ggacuggacucgggccaua

SEQ ID NO: 489698 - RNA, 19 nt, Homo sapiens
  misc_RNA (1)...(19): siRNA sense strand
ggagaaccuugaaucuaag

SEQ ID NO: 489699 - RNA, 19 nt, Homo sapiens
  misc_RNA (1)...(19): siRNA sense strand
ggagccggaugcaguagga

SEQ ID NO: 489700 - RNA, 19 nt, Homo sapiens
  misc_RNA (1)...(19): siRNA sense strand
ucauggacuuccugacuga

SEQ ID NO: 489701 - RNA, 19 nt, Homo sapiens
  misc_RNA (1)...(19): siRNA sense strand
ggugguguaugauggugaa

SEQ ID NO: 489702 - RNA, 19 nt, Homo sapiens
  misc_RNA (1)...(19): siRNA sense strand
gcucccugcucaagaccua

SEQ ID NO: 489703 - RNA, 19 nt, Homo sapiens
  misc_RNA (1)...(19): siRNA sense strand
gugaacaccugggcagcuu

SEQ ID NO: 489704 - RNA, 19 nt, Homo sapiens
  misc_RNA (1)...(19): siRNA sense strand
guaccucgagcgccacgua

SEQ ID NO: 489705 - RNA, 19 nt, Homo sapiens
  misc_RNA (1)...(19): siRNA sense strand
guggauguuccguguguuu

SEQ ID NO: 489706 - RNA, 19 nt, Homo sapiens
  misc_RNA (1)...(19): siRNA sense strand
gagaaccuugaaucuaaga

SEQ ID NO: 489707 - RNA, 19 nt, Homo sapiens
  misc_RNA (1)...(19): siRNA sense strand
gaacaccugggcagcuucu

SEQ ID NO: 489708 - RNA, 19 nt, Homo sapiens
  misc_RNA (1)...(19): siRNA sense strand
cgcacguggugguguauga

SEQ ID NO: 489709 - RNA, 19 nt, Homo sapiens
  misc_RNA (1)...(19): siRNA sense strand
agccugauguggccgugua

SEQ ID NO: 489710 - RNA, 19 nt, Homo sapiens
  misc_RNA (1)...(19): siRNA sense strand
aaugguggcuuccggaacu

SEQ ID NO: 489711 - RNA, 19 nt, Homo sapiens
  misc_RNA (1)...(19): siRNA sense strand
ccucuuucuuugacauaga

SEQ ID NO: 489712 - RNA, 19 nt, Homo sapiens
  misc_RNA (1)...(19): siRNA sense strand
ccguaucagugcucaaugg

SEQ ID NO: 489713 - RNA, 19 nt, Homo sapiens
  misc_RNA (1)...(19): siRNA sense strand
cuggagaaccuugaaucua

SEQ ID NO: 489714 - RNA, 19 nt, Homo sapiens
  misc_RNA (1)...(19): siRNA sense strand
gcuggagaaccuugaaucu

SEQ ID NO: 489715 - RNA, 19 nt, Homo sapiens
  misc_RNA (1)...(19): siRNA sense strand
gauggaacuucgacuuugu

SEQ ID NO: 489716 - RNA, 19 nt, Homo sapiens
  misc_RNA (1)...(19): siRNA sense strand
gcgauggaacuucgacuuu

SEQ ID NO: 489717 - RNA, 19 nt, Homo sapiens
  misc_RNA (1)...(19): siRNA sense strand
cgauggaacuucgacuuug

SEQ ID NO: 489718 - RNA, 19 nt, Homo sapiens
  misc_RNA (1)...(19): siRNA sense strand
cgacugugaugcgcuaaug

SEQ ID NO: 489719 - RNA, 19 nt, Homo sapiens
  misc_RNA (1)...(19): siRNA sense strand
gaccugucacugucuugua

SEQ ID NO: 489720 - RNA, 19 nt, Homo sapiens
  misc_RNA (1)...(19): siRNA sense strand
cagcagaggaagaccaugu

SEQ ID NO: 489721 - RNA, 19 nt, Homo sapiens
  misc_RNA (1)...(19): siRNA sense strand
cauguggaccugucacugu

SEQ ID NO: 489722 - RNA, 19 nt, Homo sapiens
  misc_RNA (1)...(19): siRNA sense strand
gauggaacuucgacuuugu

SEQ ID NO: 489723 - RNA, 19 nt, Homo sapiens
  misc_RNA (1)...(19): siRNA sense strand
gcgauggaacuucgacuuu

SEQ ID NO: 489724 - RNA, 19 nt, Homo sapiens
  misc_RNA (1)...(19): siRNA sense strand
cgauggaacuucgacuuug

SEQ ID NO: 489725 - RNA, 19 nt, Homo sapiens
  misc_RNA (1)...(19): siRNA sense strand
cgacugugaugcgcuaaug

SEQ ID NO: 489726 - RNA, 19 nt, Homo sapiens
  misc_RNA (1)...(19): siRNA sense strand
gaccugucacugucuugua

SEQ ID NO: 489727 - RNA, 19 nt, Homo sapiens
  misc_RNA (1)...(19): siRNA sense strand
cagcagaggaagaccaugu

SEQ ID NO: 489728 - RNA, 19 nt, Homo sapiens
  misc_RNA (1)...(19): siRNA sense strand
cauguggaccugucacugu

SEQ ID NO: 489729 - RNA, 19 nt, Homo sapiens
  misc_RNA (1)...(19): siRNA sense strand
aaagaaagcugcguuaaug

SEQ ID NO: 489730 - RNA, 19 nt, Homo sapiens
  misc_RNA (1)...(19): siRNA sense strand
aaagaaaccuagcaacaaa

SEQ ID NO: 489731 - RNA, 19 nt, Homo sapiens
  misc_RNA (1)...(19): siRNA sense strand
gaagacagcaaugaugaua

SEQ ID NO: 489732 - RNA, 19 nt, Homo sapiens
  misc_RNA (1)...(19): siRNA sense strand
gaaagcugcguuaauguuu

SEQ ID NO: 489733 - RNA, 19 nt, Homo sapiens
  misc_RNA (1)...(19): siRNA sense strand
gaacuaacagaucucuuaa

SEQ ID NO: 489734 - RNA, 19 nt, Homo sapiens
  misc_RNA (1)...(19): siRNA sense strand
gcaaugaugauauggauga

SEQ ID NO: 489735 - RNA, 19 nt, Homo sapiens
  misc_RNA (1)...(19): siRNA sense strand
guucuacgcuucugugaga

SEQ ID NO: 489736 - RNA, 19 nt, Homo sapiens
  misc_RNA (1)...(19): siRNA sense strand
agaacuaacagaucucuua

SEQ ID NO: 489737 - RNA, 19 nt, Homo sapiens
  misc_RNA (1)...(19): siRNA sense strand
gagaagaacugugaaaaga

SEQ ID NO: 489738 - RNA, 19 nt, Homo sapiens
  misc_RNA (1)...(19): siRNA sense strand
gaacacugcagaacuaaca

SEQ ID NO: 489739 - RNA, 19 nt, Homo sapiens
  misc_RNA (1)...(19): siRNA sense strand
uugaacagcuggacaaguu

SEQ ID NO: 489740 - RNA, 19 nt, Homo sapiens
  misc_RNA (1)...(19): siRNA sense strand
agacagcaaugaugauaug

SEQ ID NO: 489741 - RNA, 19 nt, Homo sapiens
  misc_RNA (1)...(19): siRNA sense strand
ugugaacacugcagaacua

SEQ ID NO: 489742 - RNA, 19 nt, Homo sapiens
  misc_RNA (1)...(19): siRNA sense strand
gaaaggguacccagugugu

SEQ ID NO: 489743 - RNA, 19 nt, Homo sapiens
  misc_RNA (1)...(19): siRNA sense strand
ugaagacgaugaugacagu

SEQ ID NO: 489744 - RNA, 19 nt, Homo sapiens
  misc_RNA (1)...(19): siRNA sense strand
gauuaugacggaauuaaga

SEQ ID NO: 489745 - RNA, 19 nt, Homo sapiens
  misc_RNA (1)...(19): siRNA sense strand
acgaggaagugaauauuga

SEQ ID NO: 489746 - RNA, 19 nt, Homo sapiens
  misc_RNA (1)...(19): siRNA sense strand
caaaugcagaggaagaauu

SEQ ID NO: 489747 - RNA, 19 nt, Homo sapiens
  misc_RNA (1)...(19): siRNA sense strand
cagaagacagcaaugauga

SEQ ID NO: 489748 - RNA, 19 nt, Homo sapiens
  misc_RNA (1)...(19): siRNA sense strand
cagcaaugaugauauggau

SEQ ID NO: 489749 - RNA, 19 nt, Homo sapiens
  misc_RNA (1)...(19): siRNA sense strand
acagaucucuuaauucaac

SEQ ID NO: 489750 - RNA, 19 nt, Homo sapiens
  misc_RNA (1)...(19): siRNA sense strand
ggagugugauuaagcaaac

SEQ ID NO: 489751 - RNA, 19 nt, Homo sapiens
  misc_RNA (1)...(19): siRNA sense strand
gggcacacagaaccaauaa

SEQ ID NO: 489752 - RNA, 19 nt, Homo sapiens
  misc_RNA (1)...(19): siRNA sense strand
gaagaggacgaggucauug

SEQ ID NO: 489753 - RNA, 19 nt, Homo sapiens
  misc_RNA (1)...(19): siRNA sense strand
gcguuaauguuugcaaaug

SEQ ID NO: 489754 - RNA, 19 nt, Homo sapiens
  misc_RNA (1)...(19): siRNA sense strand
gcacacagaaccaauaagc

SEQ ID NO: 489755 - RNA, 19 nt, Homo sapiens
  misc_RNA (1)...(19): siRNA sense strand
uaaugucccuccacagauc

SEQ ID NO: 489756 - RNA, 19 nt, Homo sapiens
  misc_RNA (1)...(19): siRNA sense strand
cauauugggagugugauua

SEQ ID NO: 489757 - RNA, 19 nt, Homo sapiens
  misc_RNA (1)...(19): siRNA sense strand
ucuaaaggcuccugugaac

SEQ ID NO: 489758 - RNA, 19 nt, Homo sapiens
  misc_RNA (1)...(19): siRNA sense strand
accagcagcuucagaaaga

SEQ ID NO: 489759 - RNA, 19 nt, Homo sapiens
  misc_RNA (1)...(19): siRNA sense strand
ggccuucuccuaagugaaa

SEQ ID NO: 489760 - RNA, 19 nt, Homo sapiens
  misc_RNA (1)...(19): siRNA sense strand
gacgaggaagugaauauug

SEQ ID NO: 489761 - RNA, 19 nt, Homo sapiens
  misc_RNA (1)...(19): siRNA sense strand
aaagcugcguuaauguuug

SEQ ID NO: 489762 - RNA, 19 nt, Homo sapiens
  misc_RNA (1)...(19): siRNA sense strand
ugaagcuuauucccuauca

SEQ ID NO: 489763 - RNA, 19 nt, Homo sapiens
  misc_RNA (1)...(19): siRNA sense strand
aaaugaggaugaagacgau

SEQ ID NO: 489764 - RNA, 19 nt, Homo sapiens
  misc_RNA (1)...(19): siRNA sense strand
cugcagaacuaacagaucu

SEQ ID NO: 489765 - RNA, 19 nt, Homo sapiens
  misc_RNA (1)...(19): siRNA sense strand
agaaagcugcguuaauguu

SEQ ID NO: 489766 - RNA, 19 nt, Homo sapiens
  misc_RNA (1)...(19): siRNA sense strand
ucuccuaagugaaagauuc

SEQ ID NO: 489767 - RNA, 19 nt, Homo sapiens
  misc_RNA (1)...(19): siRNA sense strand
aagaaaggguacccagugu

SEQ ID NO: 489768 - RNA, 19 nt, Homo sapiens
  misc_RNA (1)...(19): siRNA sense strand
ugauauggaugaagaugag

SEQ ID NO: 489769 - RNA, 19 nt, Homo sapiens
  misc_RNA (1)...(19): siRNA sense strand
ucagaagacagcaaugaug

SEQ ID NO: 489770 - RNA, 19 nt, Homo sapiens
  misc_RNA (1)...(19): siRNA sense strand
ugaugacagugacaaggaa

SEQ ID NO: 489771 - RNA, 19 nt, Homo sapiens
  misc_RNA (1)...(19): siRNA sense strand
augaugauauggaugaaga

SEQ ID NO: 489772 - RNA, 19 nt, Homo sapiens
  misc_RNA (1)...(19): siRNA sense strand
ccugugggccuucuccuaa

SEQ ID NO: 489773 - RNA, 19 nt, Homo sapiens
  misc_RNA (1)...(19): siRNA sense strand
agaucgcucugcccaugua

SEQ ID NO: 489774 - RNA, 19 nt, Homo sapiens
  misc_RNA (1)...(19): siRNA sense strand
uaagacauuuguggaagca

SEQ ID NO: 489775 - RNA, 19 nt, Homo sapiens
  misc_RNA (1)...(19): siRNA sense strand
ugaagaggacgaggucauu

SEQ ID NO: 489776 - RNA, 19 nt, Homo sapiens
  misc_RNA (1)...(19): siRNA sense strand
gaaaagagcaugguugaac

SEQ ID NO: 489777 - RNA, 19 nt, Homo sapiens
  misc_RNA (1)...(19): siRNA sense strand
guaccagcagcuucagaaa

SEQ ID NO: 489778 - RNA, 19 nt, Homo sapiens
  misc_RNA (1)...(19): siRNA sense strand
gggagugugauuaagcaaa

SEQ ID NO: 489779 - RNA, 19 nt, Homo sapiens
  misc_RNA (1)...(19): siRNA sense strand
gaacagcuggacaaguuuu

SEQ ID NO: 489780 - RNA, 19 nt, Homo sapiens
  misc_RNA (1)...(19): siRNA sense strand
ggaugaagacgaugaugac

SEQ ID NO: 489781 - RNA, 19 nt, Homo sapiens
  misc_RNA (1)...(19): siRNA sense strand
gaugacagugacaaggaaa

SEQ ID NO: 489782 - RNA, 19 nt, Homo sapiens
  misc_RNA (1)...(19): siRNA sense strand
gaggaagugaauauugaau

SEQ ID NO: 489783 - RNA, 19 nt, Homo sapiens
  misc_RNA (1)...(19): siRNA sense strand
caaugaugauauggaugaa

SEQ ID NO: 489784 - RNA, 19 nt, Homo sapiens
  misc_RNA (1)...(19): siRNA sense strand
gcgcgacgaggaagaggaa

SEQ ID NO: 489785 - RNA, 19 nt, Homo sapiens
  misc_RNA (1)...(19): siRNA sense strand
gcaaaugcagaggaagaau

SEQ ID NO: 489786 - RNA, 19 nt, Homo sapiens
  misc_RNA (1)...(19): siRNA sense strand
ugacgaggaagugaauauu

SEQ ID NO: 489787 - RNA, 19 nt, Homo sapiens
  misc_RNA (1)...(19): siRNA sense strand
cgaggaagugaauauugaa

SEQ ID NO: 489788 - RNA, 19 nt, Homo sapiens
  misc_RNA (1)...(19): siRNA sense strand
ugauuaagcaaacggaugu

SEQ ID NO: 489789 - RNA, 19 nt, Homo sapiens
  misc_RNA (1)...(19): siRNA sense strand
gaugauauggaugaagaug

SEQ ID NO: 489790 - RNA, 19 nt, Homo sapiens
  misc_RNA (1)...(19): siRNA sense strand
uaaaggcuccugugaacac

SEQ ID NO: 489791 - RNA, 19 nt, Homo sapiens
  misc_RNA (1)...(19): siRNA sense strand
ucugugagaagaacuguga

SEQ ID NO: 489792 - RNA, 19 nt, Homo sapiens
  misc_RNA (1)...(19): siRNA sense strand
ucucuuaauucaacagaac

SEQ ID NO: 489793 - RNA, 19 nt, Homo sapiens
  misc_RNA (1)...(19): siRNA sense strand
aagaggacgaggucauuga

SEQ ID NO: 489794 - RNA, 19 nt, Homo sapiens
  misc_RNA (1)...(19): siRNA sense strand
cugcguuaauguuugcaaa

SEQ ID NO: 489795 - RNA, 19 nt, Homo sapiens
  misc_RNA (1)...(19): siRNA sense strand
uaguaagacauuuguggaa

SEQ ID NO: 489796 - RNA, 19 nt, Homo sapiens
  misc_RNA (1)...(19): siRNA sense strand
ccagcagcuucagaaagaa

SEQ ID NO: 489797 - RNA, 19 nt, Homo sapiens
  misc_RNA (1)...(19): siRNA sense strand
aagcuuauucccuaucaga

SEQ ID NO: 489798 - RNA, 19 nt, Homo sapiens
  misc_RNA (1)...(19): siRNA sense strand
cuaacagaucucuuaauuc

SEQ ID NO: 489799 - RNA, 19 nt, Homo sapiens
  misc_RNA (1)...(19): siRNA sense strand
gaucucuuaauucaacaga

SEQ ID NO: 489800 - RNA, 19 nt, Homo sapiens
  misc_RNA (1)...(19): siRNA sense strand
aaggguacccaguguguug

SEQ ID NO: 489801 - RNA, 19 nt, Homo sapiens
  misc_RNA (1)...(19): siRNA sense strand
gcagaacuaacagaucucu

SEQ ID NO: 489802 - RNA, 19 nt, Homo sapiens
  misc_RNA (1)...(19): siRNA sense strand
aauaagccaugugggaagu

SEQ ID NO: 489803 - RNA, 19 nt, Homo sapiens
  misc_RNA (1)...(19): siRNA sense strand
cagaaccaauaagccaugu

SEQ ID NO: 489804 - RNA, 19 nt, Homo sapiens
  misc_RNA (1)...(19): siRNA sense strand
ccauguaccagcagcuuca

SEQ ID NO: 489805 - RNA, 19 nt, Homo sapiens
  misc_RNA (1)...(19): siRNA sense strand
aaagaaagcugcguuaaug

SEQ ID NO: 489806 - RNA, 19 nt, Homo sapiens
  misc_RNA (1)...(19): siRNA sense strand
aaagaaaccuagcaacaaa

SEQ ID NO: 489807 - RNA, 19 nt, Homo sapiens
  misc_RNA (1)...(19): siRNA sense strand
gaagacagcaaugaugaua

SEQ ID NO: 489808 - RNA, 19 nt, Homo sapiens
  misc_RNA (1)...(19): siRNA sense strand
gaaagcugcguuaauguuu

SEQ ID NO: 489809 - RNA, 19 nt, Homo sapiens
  misc_RNA (1)...(19): siRNA sense strand
gaacuaacagaucucuuaa

SEQ ID NO: 489810 - RNA, 19 nt, Homo sapiens
  misc_RNA (1)...(19): siRNA sense strand
gcaaugaugauauggauga

SEQ ID NO: 489811 - RNA, 19 nt, Homo sapiens
  misc_RNA (1)...(19): siRNA sense strand
guucuacgcuucugugaga

SEQ ID NO: 489812 - RNA, 19 nt, Homo sapiens
  misc_RNA (1)...(19): siRNA sense strand
agaacuaacagaucucuua

SEQ ID NO: 489813 - RNA, 19 nt, Homo sapiens
  misc_RNA (1)...(19): siRNA sense strand
gagaagaacugugaaaaga

SEQ ID NO: 489814 - RNA, 19 nt, Homo sapiens
  misc_RNA (1)...(19): siRNA sense strand
gaacacugcagaacuaaca

SEQ ID NO: 489815 - RNA, 19 nt, Homo sapiens
  misc_RNA (1)...(19): siRNA sense strand
uugaacagcuggacaaguu

SEQ ID NO: 489816 - RNA, 19 nt, Homo sapiens
  misc_RNA (1)...(19): siRNA sense strand
agacagcaaugaugauaug

SEQ ID NO: 489817 - RNA, 19 nt, Homo sapiens
  misc_RNA (1)...(19): siRNA sense strand
ugugaacacugcagaacua

SEQ ID NO: 489818 - RNA, 19 nt, Homo sapiens
  misc_RNA (1)...(19): siRNA sense strand
gaaaggguacccagugugu

SEQ ID NO: 489819 - RNA, 19 nt, Homo sapiens
  misc_RNA (1)...(19): siRNA sense strand
ugaagacgaugaugacagu

SEQ ID NO: 489820 - RNA, 19 nt, Homo sapiens
  misc_RNA (1)...(19): siRNA sense strand
gauuaugacggaauuaaga

SEQ ID NO: 489821 - RNA, 19 nt, Homo sapiens
  misc_RNA (1)...(19): siRNA sense strand
acgaggaagugaauauuga

SEQ ID NO: 489822 - RNA, 19 nt, Homo sapiens
  misc_RNA (1)...(19): siRNA sense strand
caaaugcagaggaagaauu

SEQ ID NO: 489823 - RNA, 19 nt, Homo sapiens
  misc_RNA (1)...(19): siRNA sense strand
cagaagacagcaaugauga

SEQ ID NO: 489824 - RNA, 19 nt, Homo sapiens
  misc_RNA (1)...(19): siRNA sense strand
cagcaaugaugauauggau

SEQ ID NO: 489825 - RNA, 19 nt, Homo sapiens
  misc_RNA (1)...(19): siRNA sense strand
acagaucucuuaauucaac

SEQ ID NO: 489826 - RNA, 19 nt, Homo sapiens
  misc_RNA (1)...(19): siRNA sense strand
ggagugugauuaagcaaac

SEQ ID NO: 489827 - RNA, 19 nt, Homo sapiens
  misc_RNA (1)...(19): siRNA sense strand
gggcacacagaaccaauaa

SEQ ID NO: 489828 - RNA, 19 nt, Homo sapiens
  misc_RNA (1)...(19): siRNA sense strand
gaagaggacgaggucauug

SEQ ID NO: 489829 - RNA, 19 nt, Homo sapiens
  misc_RNA (1)...(19): siRNA sense strand
gcguuaauguuugcaaaug

SEQ ID NO: 489830 - RNA, 19 nt, Homo sapiens
  misc_RNA (1)...(19): siRNA sense strand
gcacacagaaccaauaagc

SEQ ID NO: 489831 - RNA, 19 nt, Homo sapiens
  misc_RNA (1)...(19): siRNA sense strand
uaaugucccuccacagauc

SEQ ID NO: 489832 - RNA, 19 nt, Homo sapiens
  misc_RNA (1)...(19): siRNA sense strand
cauauugggagugugauua

SEQ ID NO: 489833 - RNA, 19 nt, Homo sapiens
  misc_RNA (1)...(19): siRNA sense strand
ucuaaaggcuccugugaac

SEQ ID NO: 489834 - RNA, 19 nt, Homo sapiens
  misc_RNA (1)...(19): siRNA sense strand
accagcagcuucagaaaga

SEQ ID NO: 489835 - RNA, 19 nt, Homo sapiens
  misc_RNA (1)...(19): siRNA sense strand
ggccuucuccuaagugaaa

SEQ ID NO: 489836 - RNA, 19 nt, Homo sapiens
  misc_RNA (1)...(19): siRNA sense strand
gacgaggaagugaauauug

SEQ ID NO: 489837 - RNA, 19 nt, Homo sapiens
  misc_RNA (1)...(19): siRNA sense strand
aaagcugcguuaauguuug

SEQ ID NO: 489838 - RNA, 19 nt, Homo sapiens
  misc_RNA (1)...(19): siRNA sense strand
ugaagcuuauucccuauca

SEQ ID NO: 489839 - RNA, 19 nt, Homo sapiens
  misc_RNA (1)...(19): siRNA sense strand
aaaugaggaugaagacgau

SEQ ID NO: 489840 - RNA, 19 nt, Homo sapiens
  misc_RNA (1)...(19): siRNA sense strand
cugcagaacuaacagaucu

SEQ ID NO: 489841 - RNA, 19 nt, Homo sapiens
  misc_RNA (1)...(19): siRNA sense strand
agaaagcugcguuaauguu

SEQ ID NO: 489842 - RNA, 19 nt, Homo sapiens
  misc_RNA (1)...(19): siRNA sense strand
ucuccuaagugaaagauuc

SEQ ID NO: 489843 - RNA, 19 nt, Homo sapiens
  misc_RNA (1)...(19): siRNA sense strand
aagaaaggguacccagugu

SEQ ID NO: 489844 - RNA, 19 nt, Homo sapiens
  misc_RNA (1)...(19): siRNA sense strand
ugauauggaugaagaugag

SEQ ID NO: 489845 - RNA, 19 nt, Homo sapiens
  misc_RNA (1)...(19): siRNA sense strand
ucagaagacagcaaugaug

SEQ ID NO: 489846 - RNA, 19 nt, Homo sapiens
  misc_RNA (1)...(19): siRNA sense strand
ugaugacagugacaaggaa

SEQ ID NO: 489847 - RNA, 19 nt, Homo sapiens
  misc_RNA (1)...(19): siRNA sense strand
augaugauauggaugaaga

SEQ ID NO: 489848 - RNA, 19 nt, Homo sapiens
  misc_RNA (1)...(19): siRNA sense strand
ccugugggccuucuccuaa

SEQ ID NO: 489849 - RNA, 19 nt, Homo sapiens
  misc_RNA (1)...(19): siRNA sense strand
agaucgcucugcccaugua

SEQ ID NO: 489850 - RNA, 19 nt, Homo sapiens
  misc_RNA (1)...(19): siRNA sense strand
uaagacauuuguggaagca

SEQ ID NO: 489851 - RNA, 19 nt, Homo sapiens
  misc_RNA (1)...(19): siRNA sense strand
ugaagaggacgaggucauu

SEQ ID NO: 489852 - RNA, 19 nt, Homo sapiens
  misc_RNA (1)...(19): siRNA sense strand
gaaaagagcaugguugaac

SEQ ID NO: 489853 - RNA, 19 nt, Homo sapiens
  misc_RNA (1)...(19): siRNA sense strand
guaccagcagcuucagaaa

SEQ ID NO: 489854 - RNA, 19 nt, Homo sapiens
  misc_RNA (1)...(19): siRNA sense strand
gggagugugauuaagcaaa

SEQ ID NO: 489855 - RNA, 19 nt, Homo sapiens
  misc_RNA (1)...(19): siRNA sense strand
gaacagcuggacaaguuuu

SEQ ID NO: 489856 - RNA, 19 nt, Homo sapiens
  misc_RNA (1)...(19): siRNA sense strand
ggaugaagacgaugaugac

SEQ ID NO: 489857 - RNA, 19 nt, Homo sapiens
  misc_RNA (1)...(19): siRNA sense strand
gaugacagugacaaggaaa

SEQ ID NO: 489858 - RNA, 19 nt, Homo sapiens
  misc_RNA (1)...(19): siRNA sense strand
gaggaagugaauauugaau

SEQ ID NO: 489859 - RNA, 19 nt, Homo sapiens
  misc_RNA (1)...(19): siRNA sense strand
caaugaugauauggaugaa

SEQ ID NO: 489860 - RNA, 19 nt, Homo sapiens
  misc_RNA (1)...(19): siRNA sense strand
gcgcgacgaggaagaggaa

SEQ ID NO: 489861 - RNA, 19 nt, Homo sapiens
  misc_RNA (1)...(19): siRNA sense strand
gcaaaugcagaggaagaau

SEQ ID NO: 489862 - RNA, 19 nt, Homo sapiens
  misc_RNA (1)...(19): siRNA sense strand
ugacgaggaagugaauauu

SEQ ID NO: 489863 - RNA, 19 nt, Homo sapiens
  misc_RNA (1)...(19): siRNA sense strand
cgaggaagugaauauugaa

SEQ ID NO: 489864 - RNA, 19 nt, Homo sapiens
  misc_RNA (1)...(19): siRNA sense strand
ugauuaagcaaacggaugu

SEQ ID NO: 489865 - RNA, 19 nt, Homo sapiens
  misc_RNA (1)...(19): siRNA sense strand
gaugauauggaugaagaug

SEQ ID NO: 489866 - RNA, 19 nt, Homo sapiens
  misc_RNA (1)...(19): siRNA sense strand
uaaaggcuccugugaacac

SEQ ID NO: 489867 - RNA, 19 nt, Homo sapiens
  misc_RNA (1)...(19): siRNA sense strand
ucugugagaagaacuguga

SEQ ID NO: 489868 - RNA, 19 nt, Homo sapiens
  misc_RNA (1)...(19): siRNA sense strand
ucucuuaauucaacagaac

SEQ ID NO: 489869 - RNA, 19 nt, Homo sapiens
  misc_RNA (1)...(19): siRNA sense strand
aagaggacgaggucauuga

SEQ ID NO: 489870 - RNA, 19 nt, Homo sapiens
  misc_RNA (1)...(19): siRNA sense strand
cugcguuaauguuugcaaa

SEQ ID NO: 489871 - RNA, 19 nt, Homo sapiens
  misc_RNA (1)...(19): siRNA sense strand
uaguaagacauuuguggaa

SEQ ID NO: 489872 - RNA, 19 nt, Homo sapiens
  misc_RNA (1)...(19): siRNA sense strand
ccagcagcuucagaaagaa

SEQ ID NO: 489873 - RNA, 19 nt, Homo sapiens
  misc_RNA (1)...(19): siRNA sense strand
aagcuuauucccuaucaga

SEQ ID NO: 489874 - RNA, 19 nt, Homo sapiens
  misc_RNA (1)...(19): siRNA sense strand
cuaacagaucucuuaauuc

SEQ ID NO: 489875 - RNA, 19 nt, Homo sapiens
  misc_RNA (1)...(19): siRNA sense strand
gaucucuuaauucaacaga

SEQ ID NO: 489876 - RNA, 19 nt, Homo sapiens
  misc_RNA (1)...(19): siRNA sense strand
aaggguacccaguguguug

SEQ ID NO: 489877 - RNA, 19 nt, Homo sapiens
  misc_RNA (1)...(19): siRNA sense strand
gcagaacuaacagaucucu

SEQ ID NO: 489878 - RNA, 19 nt, Homo sapiens
  misc_RNA (1)...(19): siRNA sense strand
aauaagccaugugggaagu

SEQ ID NO: 489879 - RNA, 19 nt, Homo sapiens
  misc_RNA (1)...(19): siRNA sense strand
cagaaccaauaagccaugu

SEQ ID NO: 489880 - RNA, 19 nt, Homo sapiens
  misc_RNA (1)...(19): siRNA sense strand
ccauguaccagcagcuuca

SEQ ID NO: 489881 - RNA, 19 nt, Homo sapiens
  misc_RNA (1)...(19): siRNA sense strand
aaagaaagcugcguuaaug

SEQ ID NO: 489882 - RNA, 19 nt, Homo sapiens
  misc_RNA (1)...(19): siRNA sense strand
aaagaaaccuagcaacaaa

SEQ ID NO: 489883 - RNA, 19 nt, Homo sapiens
  misc_RNA (1)...(19): siRNA sense strand
gaagacagcaaugaugaua

SEQ ID NO: 489884 - RNA, 19 nt, Homo sapiens
  misc_RNA (1)...(19): siRNA sense strand
gaaagcugcguuaauguuu

SEQ ID NO: 489885 - RNA, 19 nt, Homo sapiens
  misc_RNA (1)...(19): siRNA sense strand
gaacuaacagaucucuuaa

SEQ ID NO: 489886 - RNA, 19 nt, Homo sapiens
  misc_RNA (1)...(19): siRNA sense strand
gcaaugaugauauggauga

SEQ ID NO: 489887 - RNA, 19 nt, Homo sapiens
  misc_RNA (1)...(19): siRNA sense strand
guucuacgcuucugugaga

SEQ ID NO: 489888 - RNA, 19 nt, Homo sapiens
  misc_RNA (1)...(19): siRNA sense strand
agaacuaacagaucucuua

SEQ ID NO: 489889 - RNA, 19 nt, Homo sapiens
  misc_RNA (1)...(19): siRNA sense strand
gagaagaacugugaaaaga

SEQ ID NO: 489890 - RNA, 19 nt, Homo sapiens
  misc_RNA (1)...(19): siRNA sense strand
gaacacugcagaacuaaca

SEQ ID NO: 489891 - RNA, 19 nt, Homo sapiens
  misc_RNA (1)...(19): siRNA sense strand
uugaacagcuggacaaguu

SEQ ID NO: 489892 - RNA, 19 nt, Homo sapiens
  misc_RNA (1)...(19): siRNA sense strand
agacagcaaugaugauaug

SEQ ID NO: 489893 - RNA, 19 nt, Homo sapiens
  misc_RNA (1)...(19): siRNA sense strand
ugugaacacugcagaacua

SEQ ID NO: 489894 - RNA, 19 nt, Homo sapiens
  misc_RNA (1)...(19): siRNA sense strand
gaaaggguacccagugugu

SEQ ID NO: 489895 - RNA, 19 nt, Homo sapiens
  misc_RNA (1)...(19): siRNA sense strand
ugaagacgaugaugacagu

SEQ ID NO: 489896 - RNA, 19 nt, Homo sapiens
  misc_RNA (1)...(19): siRNA sense strand
gauuaugacggaauuaaga

SEQ ID NO: 489897 - RNA, 19 nt, Homo sapiens
  misc_RNA (1)...(19): siRNA sense strand
acgaggaagugaauauuga

SEQ ID NO: 489898 - RNA, 19 nt, Homo sapiens
  misc_RNA (1)...(19): siRNA sense strand
caaaugcagaggaagaauu

SEQ ID NO: 489899 - RNA, 19 nt, Homo sapiens
  misc_RNA (1)...(19): siRNA sense strand
cagaagacagcaaugauga

SEQ ID NO: 489900 - RNA, 19 nt, Homo sapiens
  misc_RNA (1)...(19): siRNA sense strand
cagcaaugaugauauggau

SEQ ID NO: 489901 - RNA, 19 nt, Homo sapiens
  misc_RNA (1)...(19): siRNA sense strand
acagaucucuuaauucaac

SEQ ID NO: 489902 - RNA, 19 nt, Homo sapiens
  misc_RNA (1)...(19): siRNA sense strand
ggagugugauuaagcaaac

SEQ ID NO: 489903 - RNA, 19 nt, Homo sapiens
  misc_RNA (1)...(19): siRNA sense strand
gggcacacagaaccaauaa

SEQ ID NO: 489904 - RNA, 19 nt, Homo sapiens
  misc_RNA (1)...(19): siRNA sense strand
gaagaggacgaggucauug

SEQ ID NO: 489905 - RNA, 19 nt, Homo sapiens
  misc_RNA (1)...(19): siRNA sense strand
gcguuaauguuugcaaaug

SEQ ID NO: 489906 - RNA, 19 nt, Homo sapiens
  misc_RNA (1)...(19): siRNA sense strand
gcacacagaaccaauaagc

SEQ ID NO: 489907 - RNA, 19 nt, Homo sapiens
  misc_RNA (1)...(19): siRNA sense strand
uaaugucccuccacagauc

SEQ ID NO: 489908 - RNA, 19 nt, Homo sapiens
  misc_RNA (1)...(19): siRNA sense strand
cauauugggagugugauua

SEQ ID NO: 489909 - RNA, 19 nt, Homo sapiens
  misc_RNA (1)...(19): siRNA sense strand
ucuaaaggcuccugugaac

SEQ ID NO: 489910 - RNA, 19 nt, Homo sapiens
  misc_RNA (1)...(19): siRNA sense strand
accagcagcuucagaaaga

SEQ ID NO: 489911 - RNA, 19 nt, Homo sapiens
  misc_RNA (1)...(19): siRNA sense strand
ggccuucuccuaagugaaa

SEQ ID NO: 489912 - RNA, 19 nt, Homo sapiens
  misc_RNA (1)...(19): siRNA sense strand
gacgaggaagugaauauug

SEQ ID NO: 489913 - RNA, 19 nt, Homo sapiens
  misc_RNA (1)...(19): siRNA sense strand
aaagcugcguuaauguuug

SEQ ID NO: 489914 - RNA, 19 nt, Homo sapiens
  misc_RNA (1)...(19): siRNA sense strand
ugaagcuuauucccuauca

SEQ ID NO: 489915 - RNA, 19 nt, Homo sapiens
  misc_RNA (1)...(19): siRNA sense strand
aaaugaggaugaagacgau

SEQ ID NO: 489916 - RNA, 19 nt, Homo sapiens
  misc_RNA (1)...(19): siRNA sense strand
cugcagaacuaacagaucu

SEQ ID NO: 489917 - RNA, 19 nt, Homo sapiens
  misc_RNA (1)...(19): siRNA sense strand
agaaagcugcguuaauguu

SEQ ID NO: 489918 - RNA, 19 nt, Homo sapiens
  misc_RNA (1)...(19): siRNA sense strand
ucuccuaagugaaagauuc

SEQ ID NO: 489919 - RNA, 19 nt, Homo sapiens
  misc_RNA (1)...(19): siRNA sense strand
aagaaaggguacccagugu

SEQ ID NO: 489920 - RNA, 19 nt, Homo sapiens
  misc_RNA (1)...(19): siRNA sense strand
ugauauggaugaagaugag

SEQ ID NO: 489921 - RNA, 19 nt, Homo sapiens
  misc_RNA (1)...(19): siRNA sense strand
ucagaagacagcaaugaug

SEQ ID NO: 489922 - RNA, 19 nt, Homo sapiens
  misc_RNA (1)...(19): siRNA sense strand
ugaugacagugacaaggaa

SEQ ID NO: 489923 - RNA, 19 nt, Homo sapiens
  misc_RNA (1)...(19): siRNA sense strand
augaugauauggaugaaga

SEQ ID NO: 489924 - RNA, 19 nt, Homo sapiens
  misc_RNA (1)...(19): siRNA sense strand
ccugugggccuucuccuaa

SEQ ID NO: 489925 - RNA, 19 nt, Homo sapiens
  misc_RNA (1)...(19): siRNA sense strand
agaucgcucugcccaugua

SEQ ID NO: 489926 - RNA, 19 nt, Homo sapiens
  misc_RNA (1)...(19): siRNA sense strand
uaagacauuuguggaagca

SEQ ID NO: 489927 - RNA, 19 nt, Homo sapiens
  misc_RNA (1)...(19): siRNA sense strand
ugaagaggacgaggucauu

SEQ ID NO: 489928 - RNA, 19 nt, Homo sapiens
  misc_RNA (1)...(19): siRNA sense strand
gaaaagagcaugguugaac

SEQ ID NO: 489929 - RNA, 19 nt, Homo sapiens
  misc_RNA (1)...(19): siRNA sense strand
guaccagcagcuucagaaa

SEQ ID NO: 489930 - RNA, 19 nt, Homo sapiens
  misc_RNA (1)...(19): siRNA sense strand
gggagugugauuaagcaaa

SEQ ID NO: 489931 - RNA, 19 nt, Homo sapiens
  misc_RNA (1)...(19): siRNA sense strand
gaacagcuggacaaguuuu

SEQ ID NO: 489932 - RNA, 19 nt, Homo sapiens
  misc_RNA (1)...(19): siRNA sense strand
ggaugaagacgaugaugac

SEQ ID NO: 489933 - RNA, 19 nt, Homo sapiens
  misc_RNA (1)...(19): siRNA sense strand
gaugacagugacaaggaaa

SEQ ID NO: 489934 - RNA, 19 nt, Homo sapiens
  misc_RNA (1)...(19): siRNA sense strand
gaggaagugaauauugaau

SEQ ID NO: 489935 - RNA, 19 nt, Homo sapiens
  misc_RNA (1)...(19): siRNA sense strand
caaugaugauauggaugaa

SEQ ID NO: 489936 - RNA, 19 nt, Homo sapiens
  misc_RNA (1)...(19): siRNA sense strand
gcgcgacgaggaagaggaa

SEQ ID NO: 489937 - RNA, 19 nt, Homo sapiens
  misc_RNA (1)...(19): siRNA sense strand
gcaaaugcagaggaagaau

SEQ ID NO: 489938 - RNA, 19 nt, Homo sapiens
  misc_RNA (1)...(19): siRNA sense strand
ugacgaggaagugaauauu

SEQ ID NO: 489939 - RNA, 19 nt, Homo sapiens
  misc_RNA (1)...(19): siRNA sense strand
cgaggaagugaauauugaa

SEQ ID NO: 489940 - RNA, 19 nt, Homo sapiens
  misc_RNA (1)...(19): siRNA sense strand
ugauuaagcaaacggaugu

SEQ ID NO: 489941 - RNA, 19 nt, Homo sapiens
  misc_RNA (1)...(19): siRNA sense strand
gaugauauggaugaagaug

SEQ ID NO: 489942 - RNA, 19 nt, Homo sapiens
  misc_RNA (1)...(19): siRNA sense strand
uaaaggcuccugugaacac

SEQ ID NO: 489943 - RNA, 19 nt, Homo sapiens
  misc_RNA (1)...(19): siRNA sense strand
ucugugagaagaacuguga

SEQ ID NO: 489944 - RNA, 19 nt, Homo sapiens
  misc_RNA (1)...(19): siRNA sense strand
ucucuuaauucaacagaac

SEQ ID NO: 489945 - RNA, 19 nt, Homo sapiens
  misc_RNA (1)...(19): siRNA sense strand
aagaggacgaggucauuga

SEQ ID NO: 489946 - RNA, 19 nt, Homo sapiens
  misc_RNA (1)...(19): siRNA sense strand
cugcguuaauguuugcaaa

SEQ ID NO: 489947 - RNA, 19 nt, Homo sapiens
  misc_RNA (1)...(19): siRNA sense strand
uaguaagacauuuguggaa

SEQ ID NO: 489948 - RNA, 19 nt, Homo sapiens
  misc_RNA (1)...(19): siRNA sense strand
ccagcagcuucagaaagaa

SEQ ID NO: 489949 - RNA, 19 nt, Homo sapiens
  misc_RNA (1)...(19): siRNA sense strand
aagcuuauucccuaucaga

SEQ ID NO: 489950 - RNA, 19 nt, Homo sapiens
  misc_RNA (1)...(19): siRNA sense strand
cuaacagaucucuuaauuc

SEQ ID NO: 489951 - RNA, 19 nt, Homo sapiens
  misc_RNA (1)...(19): siRNA sense strand
gaucucuuaauucaacaga

SEQ ID NO: 489952 - RNA, 19 nt, Homo sapiens
  misc_RNA (1)...(19): siRNA sense strand
aaggguacccaguguguug

SEQ ID NO: 489953 - RNA, 19 nt, Homo sapiens
  misc_RNA (1)...(19): siRNA sense strand
gcagaacuaacagaucucu

SEQ ID NO: 489954 - RNA, 19 nt, Homo sapiens
  misc_RNA (1)...(19): siRNA sense strand
aauaagccaugugggaagu

SEQ ID NO: 489955 - RNA, 19 nt, Homo sapiens
  misc_RNA (1)...(19): siRNA sense strand
cagaaccaauaagccaugu

SEQ ID NO: 489956 - RNA, 19 nt, Homo sapiens
  misc_RNA (1)...(19): siRNA sense strand
ccauguaccagcagcuuca

SEQ ID NO: 489957 - RNA, 19 nt, Homo sapiens
  misc_RNA (1)...(19): siRNA sense strand
aaagaaagcugcguuaaug

SEQ ID NO: 489958 - RNA, 19 nt, Homo sapiens
  misc_RNA (1)...(19): siRNA sense strand
aaagaaaccuagcaacaaa

SEQ ID NO: 489959 - RNA, 19 nt, Homo sapiens
  misc_RNA (1)...(19): siRNA sense strand
gaagacagcaaugaugaua

SEQ ID NO: 489960 - RNA, 19 nt, Homo sapiens
  misc_RNA (1)...(19): siRNA sense strand
gaaagcugcguuaauguuu

SEQ ID NO: 489961 - RNA, 19 nt, Homo sapiens
  misc_RNA (1)...(19): siRNA sense strand
gaacuaacagaucucuuaa

SEQ ID NO: 489962 - RNA, 19 nt, Homo sapiens
  misc_RNA (1)...(19): siRNA sense strand
gcaaugaugauauggauga

SEQ ID NO: 489963 - RNA, 19 nt, Homo sapiens
  misc_RNA (1)...(19): siRNA sense strand
guucuacgcuucugugaga

SEQ ID NO: 489964 - RNA, 19 nt, Homo sapiens
  misc_RNA (1)...(19): siRNA sense strand
agaacuaacagaucucuua

SEQ ID NO: 489965 - RNA, 19 nt, Homo sapiens
  misc_RNA (1)...(19): siRNA sense strand
gagaagaacugugaaaaga

SEQ ID NO: 489966 - RNA, 19 nt, Homo sapiens
  misc_RNA (1)...(19): siRNA sense strand
gaacacugcagaacuaaca

SEQ ID NO: 489967 - RNA, 19 nt, Homo sapiens
  misc_RNA (1)...(19): siRNA sense strand
uugaacagcuggacaaguu

SEQ ID NO: 489968 - RNA, 19 nt, Homo sapiens
  misc_RNA (1)...(19): siRNA sense strand
agacagcaaugaugauaug

SEQ ID NO: 489969 - RNA, 19 nt, Homo sapiens
  misc_RNA (1)...(19): siRNA sense strand
ugugaacacugcagaacua

SEQ ID NO: 489970 - RNA, 19 nt, Homo sapiens
  misc_RNA (1)...(19): siRNA sense strand
gaaaggguacccagugugu

SEQ ID NO: 489971 - RNA, 19 nt, Homo sapiens
  misc_RNA (1)...(19): siRNA sense strand
ugaagacgaugaugacagu

SEQ ID NO: 489972 - RNA, 19 nt, Homo sapiens
  misc_RNA (1)...(19): siRNA sense strand
gauuaugacggaauuaaga

SEQ ID NO: 489973 - RNA, 19 nt, Homo sapiens
  misc_RNA (1)...(19): siRNA sense strand
acgaggaagugaauauuga

SEQ ID NO: 489974 - RNA, 19 nt, Homo sapiens
  misc_RNA (1)...(19): siRNA sense strand
caaaugcagaggaagaauu

SEQ ID NO: 489975 - RNA, 19 nt, Homo sapiens
  misc_RNA (1)...(19): siRNA sense strand
cagaagacagcaaugauga

SEQ ID NO: 489976 - RNA, 19 nt, Homo sapiens
  misc_RNA (1)...(19): siRNA sense strand
cagcaaugaugauauggau

SEQ ID NO: 489977 - RNA, 19 nt, Homo sapiens
  misc_RNA (1)...(19): siRNA sense strand
acagaucucuuaauucaac

SEQ ID NO: 489978 - RNA, 19 nt, Homo sapiens
  misc_RNA (1)...(19): siRNA sense strand
ggagugugauuaagcaaac

SEQ ID NO: 489979 - RNA, 19 nt, Homo sapiens
  misc_RNA (1)...(19): siRNA sense strand
gggcacacagaaccaauaa

SEQ ID NO: 489980 - RNA, 19 nt, Homo sapiens
  misc_RNA (1)...(19): siRNA sense strand
gaagaggacgaggucauug

SEQ ID NO: 489981 - RNA, 19 nt, Homo sapiens
  misc_RNA (1)...(19): siRNA sense strand
gcguuaauguuugcaaaug

SEQ ID NO: 489982 - RNA, 19 nt, Homo sapiens
  misc_RNA (1)...(19): siRNA sense strand
gcacacagaaccaauaagc

SEQ ID NO: 489983 - RNA, 19 nt, Homo sapiens
  misc_RNA (1)...(19): siRNA sense strand
uaaugucccuccacagauc

SEQ ID NO: 489984 - RNA, 19 nt, Homo sapiens
  misc_RNA (1)...(19): siRNA sense strand
cauauugggagugugauua

SEQ ID NO: 489985 - RNA, 19 nt, Homo sapiens
  misc_RNA (1)...(19): siRNA sense strand
ucuaaaggcuccugugaac

SEQ ID NO: 489986 - RNA, 19 nt, Homo sapiens
  misc_RNA (1)...(19): siRNA sense strand
accagcagcuucagaaaga

SEQ ID NO: 489987 - RNA, 19 nt, Homo sapiens
  misc_RNA (1)...(19): siRNA sense strand
ggccuucuccuaagugaaa

SEQ ID NO: 489988 - RNA, 19 nt, Homo sapiens
  misc_RNA (1)...(19): siRNA sense strand
gacgaggaagugaauauug

SEQ ID NO: 489989 - RNA, 19 nt, Homo sapiens
  misc_RNA (1)...(19): siRNA sense strand
aaagcugcguuaauguuug

SEQ ID NO: 489990 - RNA, 19 nt, Homo sapiens
  misc_RNA (1)...(19): siRNA sense strand
ugaagcuuauucccuauca

SEQ ID NO: 489991 - RNA, 19 nt, Homo sapiens
  misc_RNA (1)...(19): siRNA sense strand
aaaugaggaugaagacgau

SEQ ID NO: 489992 - RNA, 19 nt, Homo sapiens
  misc_RNA (1)...(19): siRNA sense strand
cugcagaacuaacagaucu

SEQ ID NO: 489993 - RNA, 19 nt, Homo sapiens
  misc_RNA (1)...(19): siRNA sense strand
agaaagcugcguuaauguu

SEQ ID NO: 489994 - RNA, 19 nt, Homo sapiens
  misc_RNA (1)...(19): siRNA sense strand
ucuccuaagugaaagauuc

SEQ ID NO: 489995 - RNA, 19 nt, Homo sapiens
  misc_RNA (1)...(19): siRNA sense strand
aagaaaggguacccagugu

SEQ ID NO: 489996 - RNA, 19 nt, Homo sapiens
  misc_RNA (1)...(19): siRNA sense strand
ugauauggaugaagaugag

SEQ ID NO: 489997 - RNA, 19 nt, Homo sapiens
  misc_RNA (1)...(19): siRNA sense strand
ucagaagacagcaaugaug

SEQ ID NO: 489998 - RNA, 19 nt, Homo sapiens
  misc_RNA (1)...(19): siRNA sense strand
ugaugacagugacaaggaa

SEQ ID NO: 489999 - RNA, 19 nt, Homo sapiens
  misc_RNA (1)...(19): siRNA sense strand
augaugauauggaugaaga

SEQ ID NO: 490000 - RNA, 19 nt, Homo sapiens
  misc_RNA (1)...(19): siRNA sense strand
ccugugggccuucuccuaa

SEQ ID NO: 490001 - RNA, 19 nt, Homo sapiens
  misc_RNA (1)...(19): siRNA sense strand
agaucgcucugcccaugua

SEQ ID NO: 490002 - RNA, 19 nt, Homo sapiens
  misc_RNA (1)...(19): siRNA sense strand
uaagacauuuguggaagca

SEQ ID NO: 490003 - RNA, 19 nt, Homo sapiens
  misc_RNA (1)...(19): siRNA sense strand
ugaagaggacgaggucauu

SEQ ID NO: 490004 - RNA, 19 nt, Homo sapiens
  misc_RNA (1)...(19): siRNA sense strand
gaaaagagcaugguugaac

SEQ ID NO: 490005 - RNA, 19 nt, Homo sapiens
  misc_RNA (1)...(19): siRNA sense strand
guaccagcagcuucagaaa

SEQ ID NO: 490006 - RNA, 19 nt, Homo sapiens
  misc_RNA (1)...(19): siRNA sense strand
gggagugugauuaagcaaa

SEQ ID NO: 490007 - RNA, 19 nt, Homo sapiens
  misc_RNA (1)...(19): siRNA sense strand
gaacagcuggacaaguuuu

SEQ ID NO: 490008 - RNA, 19 nt, Homo sapiens
  misc_RNA (1)...(19): siRNA sense strand
ggaugaagacgaugaugac

SEQ ID NO: 490009 - RNA, 19 nt, Homo sapiens
  misc_RNA (1)...(19): siRNA sense strand
gaugacagugacaaggaaa

SEQ ID NO: 490010 - RNA, 19 nt, Homo sapiens
  misc_RNA (1)...(19): siRNA sense strand
gaggaagugaauauugaau

SEQ ID NO: 490011 - RNA, 19 nt, Homo sapiens
  misc_RNA (1)...(19): siRNA sense strand
caaugaugauauggaugaa

SEQ ID NO: 490012 - RNA, 19 nt, Homo sapiens
  misc_RNA (1)...(19): siRNA sense strand
gcgcgacgaggaagaggaa

SEQ ID NO: 490013 - RNA, 19 nt, Homo sapiens
  misc_RNA (1)...(19): siRNA sense strand
gcaaaugcagaggaagaau

SEQ ID NO: 490014 - RNA, 19 nt, Homo sapiens
  misc_RNA (1)...(19): siRNA sense strand
ugacgaggaagugaauauu

SEQ ID NO: 490015 - RNA, 19 nt, Homo sapiens
  misc_RNA (1)...(19): siRNA sense strand
cgaggaagugaauauugaa

SEQ ID NO: 490016 - RNA, 19 nt, Homo sapiens
  misc_RNA (1)...(19): siRNA sense strand
ugauuaagcaaacggaugu

SEQ ID NO: 490017 - RNA, 19 nt, Homo sapiens
  misc_RNA (1)...(19): siRNA sense strand
gaugauauggaugaagaug

SEQ ID NO: 490018 - RNA, 19 nt, Homo sapiens
  misc_RNA (1)...(19): siRNA sense strand
uaaaggcuccugugaacac

SEQ ID NO: 490019 - RNA, 19 nt, Homo sapiens
  misc_RNA (1)...(19): siRNA sense strand
ucugugagaagaacuguga

SEQ ID NO: 490020 - RNA, 19 nt, Homo sapiens
  misc_RNA (1)...(19): siRNA sense strand
ucucuuaauucaacagaac

SEQ ID NO: 490021 - RNA, 19 nt, Homo sapiens
  misc_RNA (1)...(19): siRNA sense strand
aagaggacgaggucauuga

SEQ ID NO: 490022 - RNA, 19 nt, Homo sapiens
  misc_RNA (1)...(19): siRNA sense strand
cugcguuaauguuugcaaa

SEQ ID NO: 490023 - RNA, 19 nt, Homo sapiens
  misc_RNA (1)...(19): siRNA sense strand
uaguaagacauuuguggaa

SEQ ID NO: 490024 - RNA, 19 nt, Homo sapiens
  misc_RNA (1)...(19): siRNA sense strand
ccagcagcuucagaaagaa

SEQ ID NO: 490025 - RNA, 19 nt, Homo sapiens
  misc_RNA (1)...(19): siRNA sense strand
aagcuuauucccuaucaga

SEQ ID NO: 490026 - RNA, 19 nt, Homo sapiens
  misc_RNA (1)...(19): siRNA sense strand
cuaacagaucucuuaauuc

SEQ ID NO: 490027 - RNA, 19 nt, Homo sapiens
  misc_RNA (1)...(19): siRNA sense strand
gaucucuuaauucaacaga

SEQ ID NO: 490028 - RNA, 19 nt, Homo sapiens
  misc_RNA (1)...(19): siRNA sense strand
aaggguacccaguguguug

SEQ ID NO: 490029 - RNA, 19 nt, Homo sapiens
  misc_RNA (1)...(19): siRNA sense strand
gcagaacuaacagaucucu

SEQ ID NO: 490030 - RNA, 19 nt, Homo sapiens
  misc_RNA (1)...(19): siRNA sense strand
aauaagccaugugggaagu

SEQ ID NO: 490031 - RNA, 19 nt, Homo sapiens
  misc_RNA (1)...(19): siRNA sense strand
cagaaccaauaagccaugu

SEQ ID NO: 490032 - RNA, 19 nt, Homo sapiens
  misc_RNA (1)...(19): siRNA sense strand
ccauguaccagcagcuuca

SEQ ID NO: 490033 - RNA, 19 nt, Homo sapiens
  misc_RNA (1)...(19): siRNA sense strand
aaagaaagcugcguuaaug

SEQ ID NO: 490034 - RNA, 19 nt, Homo sapiens
  misc_RNA (1)...(19): siRNA sense strand
aaagaaaccuagcaacaaa

SEQ ID NO: 490035 - RNA, 19 nt, Homo sapiens
  misc_RNA (1)...(19): siRNA sense strand
gaagacagcaaugaugaua

SEQ ID NO: 490036 - RNA, 19 nt, Homo sapiens
  misc_RNA (1)...(19): siRNA sense strand
gaaagcugcguuaauguuu

SEQ ID NO: 490037 - RNA, 19 nt, Homo sapiens
  misc_RNA (1)...(19): siRNA sense strand
gaacuaacagaucucuuaa

SEQ ID NO: 490038 - RNA, 19 nt, Homo sapiens
  misc_RNA (1)...(19): siRNA sense strand
gcaaugaugauauggauga

SEQ ID NO: 490039 - RNA, 19 nt, Homo sapiens
  misc_RNA (1)...(19): siRNA sense strand
guucuacgcuucugugaga

SEQ ID NO: 490040 - RNA, 19 nt, Homo sapiens
  misc_RNA (1)...(19): siRNA sense strand
agaacuaacagaucucuua

SEQ ID NO: 490041 - RNA, 19 nt, Homo sapiens
  misc_RNA (1)...(19): siRNA sense strand
gagaagaacugugaaaaga

SEQ ID NO: 490042 - RNA, 19 nt, Homo sapiens
  misc_RNA (1)...(19): siRNA sense strand
gaacacugcagaacuaaca

SEQ ID NO: 490043 - RNA, 19 nt, Homo sapiens
  misc_RNA (1)...(19): siRNA sense strand
uugaacagcuggacaaguu

SEQ ID NO: 490044 - RNA, 19 nt, Homo sapiens
  misc_RNA (1)...(19): siRNA sense strand
agacagcaaugaugauaug

SEQ ID NO: 490045 - RNA, 19 nt, Homo sapiens
  misc_RNA (1)...(19): siRNA sense strand
ugugaacacugcagaacua

SEQ ID NO: 490046 - RNA, 19 nt, Homo sapiens
  misc_RNA (1)...(19): siRNA sense strand
gaaaggguacccagugugu

SEQ ID NO: 490047 - RNA, 19 nt, Homo sapiens
  misc_RNA (1)...(19): siRNA sense strand
ugaagacgaugaugacagu

SEQ ID NO: 490048 - RNA, 19 nt, Homo sapiens
  misc_RNA (1)...(19): siRNA sense strand
gauuaugacggaauuaaga

SEQ ID NO: 490049 - RNA, 19 nt, Homo sapiens
  misc_RNA (1)...(19): siRNA sense strand
acgaggaagugaauauuga

SEQ ID NO: 490050 - RNA, 19 nt, Homo sapiens
  misc_RNA (1)...(19): siRNA sense strand
caaaugcagaggaagaauu

SEQ ID NO: 490051 - RNA, 19 nt, Homo sapiens
  misc_RNA (1)...(19): siRNA sense strand
cagaagacagcaaugauga

SEQ ID NO: 490052 - RNA, 19 nt, Homo sapiens
  misc_RNA (1)...(19): siRNA sense strand
cagcaaugaugauauggau

SEQ ID NO: 490053 - RNA, 19 nt, Homo sapiens
  misc_RNA (1)...(19): siRNA sense strand
acagaucucuuaauucaac

SEQ ID NO: 490054 - RNA, 19 nt, Homo sapiens
  misc_RNA (1)...(19): siRNA sense strand
ggagugugauuaagcaaac

SEQ ID NO: 490055 - RNA, 19 nt, Homo sapiens
  misc_RNA (1)...(19): siRNA sense strand
gggcacacagaaccaauaa

SEQ ID NO: 490056 - RNA, 19 nt, Homo sapiens
  misc_RNA (1)...(19): siRNA sense strand
gaagaggacgaggucauug

SEQ ID NO: 490057 - RNA, 19 nt, Homo sapiens
  misc_RNA (1)...(19): siRNA sense strand
gcguuaauguuugcaaaug

SEQ ID NO: 490058 - RNA, 19 nt, Homo sapiens
  misc_RNA (1)...(19): siRNA sense strand
gcacacagaaccaauaagc

SEQ ID NO: 490059 - RNA, 19 nt, Homo sapiens
  misc_RNA (1)...(19): siRNA sense strand
uaaugucccuccacagauc

SEQ ID NO: 490060 - RNA, 19 nt, Homo sapiens
  misc_RNA (1)...(19): siRNA sense strand
cauauugggagugugauua

SEQ ID NO: 490061 - RNA, 19 nt, Homo sapiens
  misc_RNA (1)...(19): siRNA sense strand
ucuaaaggcuccugugaac

SEQ ID NO: 490062 - RNA, 19 nt, Homo sapiens
  misc_RNA (1)...(19): siRNA sense strand
accagcagcuucagaaaga

SEQ ID NO: 490063 - RNA, 19 nt, Homo sapiens
  misc_RNA (1)...(19): siRNA sense strand
ggccuucuccuaagugaaa

SEQ ID NO: 490064 - RNA, 19 nt, Homo sapiens
  misc_RNA (1)...(19): siRNA sense strand
gacgaggaagugaauauug

SEQ ID NO: 490065 - RNA, 19 nt, Homo sapiens
  misc_RNA (1)...(19): siRNA sense strand
aaagcugcguuaauguuug

SEQ ID NO: 490066 - RNA, 19 nt, Homo sapiens
  misc_RNA (1)...(19): siRNA sense strand
ugaagcuuauucccuauca

SEQ ID NO: 490067 - RNA, 19 nt, Homo sapiens
  misc_RNA (1)...(19): siRNA sense strand
aaaugaggaugaagacgau

SEQ ID NO: 490068 - RNA, 19 nt, Homo sapiens
  misc_RNA (1)...(19): siRNA sense strand
cugcagaacuaacagaucu

SEQ ID NO: 490069 - RNA, 19 nt, Homo sapiens
  misc_RNA (1)...(19): siRNA sense strand
agaaagcugcguuaauguu

SEQ ID NO: 490070 - RNA, 19 nt, Homo sapiens
  misc_RNA (1)...(19): siRNA sense strand
ucuccuaagugaaagauuc

SEQ ID NO: 490071 - RNA, 19 nt, Homo sapiens
  misc_RNA (1)...(19): siRNA sense strand
aagaaaggguacccagugu

SEQ ID NO: 490072 - RNA, 19 nt, Homo sapiens
  misc_RNA (1)...(19): siRNA sense strand
ugauauggaugaagaugag

SEQ ID NO: 490073 - RNA, 19 nt, Homo sapiens
  misc_RNA (1)...(19): siRNA sense strand
ucagaagacagcaaugaug

SEQ ID NO: 490074 - RNA, 19 nt, Homo sapiens
  misc_RNA (1)...(19): siRNA sense strand
ugaugacagugacaaggaa

SEQ ID NO: 490075 - RNA, 19 nt, Homo sapiens
  misc_RNA (1)...(19): siRNA sense strand
augaugauauggaugaaga

SEQ ID NO: 490076 - RNA, 19 nt, Homo sapiens
  misc_RNA (1)...(19): siRNA sense strand
ccugugggccuucuccuaa

SEQ ID NO: 490077 - RNA, 19 nt, Homo sapiens
  misc_RNA (1)...(19): siRNA sense strand
agaucgcucugcccaugua

SEQ ID NO: 490078 - RNA, 19 nt, Homo sapiens
  misc_RNA (1)...(19): siRNA sense strand
uaagacauuuguggaagca

SEQ ID NO: 490079 - RNA, 19 nt, Homo sapiens
  misc_RNA (1)...(19): siRNA sense strand
ugaagaggacgaggucauu

SEQ ID NO: 490080 - RNA, 19 nt, Homo sapiens
  misc_RNA (1)...(19): siRNA sense strand
gaaaagagcaugguugaac

SEQ ID NO: 490081 - RNA, 19 nt, Homo sapiens
  misc_RNA (1)...(19): siRNA sense strand
guaccagcagcuucagaaa

SEQ ID NO: 490082 - RNA, 19 nt, Homo sapiens
  misc_RNA (1)...(19): siRNA sense strand
gggagugugauuaagcaaa

SEQ ID NO: 490083 - RNA, 19 nt, Homo sapiens
  misc_RNA (1)...(19): siRNA sense strand
gaacagcuggacaaguuuu

SEQ ID NO: 490084 - RNA, 19 nt, Homo sapiens
  misc_RNA (1)...(19): siRNA sense strand
ggaugaagacgaugaugac

SEQ ID NO: 490085 - RNA, 19 nt, Homo sapiens
  misc_RNA (1)...(19): siRNA sense strand
gaugacagugacaaggaaa

SEQ ID NO: 490086 - RNA, 19 nt, Homo sapiens
  misc_RNA (1)...(19): siRNA sense strand
gaggaagugaauauugaau

SEQ ID NO: 490087 - RNA, 19 nt, Homo sapiens
  misc_RNA (1)...(19): siRNA sense strand
caaugaugauauggaugaa

SEQ ID NO: 490088 - RNA, 19 nt, Homo sapiens
  misc_RNA (1)...(19): siRNA sense strand
gcgcgacgaggaagaggaa

SEQ ID NO: 490089 - RNA, 19 nt, Homo sapiens
  misc_RNA (1)...(19): siRNA sense strand
gcaaaugcagaggaagaau

SEQ ID NO: 490090 - RNA, 19 nt, Homo sapiens
  misc_RNA (1)...(19): siRNA sense strand
ugacgaggaagugaauauu

SEQ ID NO: 490091 - RNA, 19 nt, Homo sapiens
  misc_RNA (1)...(19): siRNA sense strand
cgaggaagugaauauugaa

SEQ ID NO: 490092 - RNA, 19 nt, Homo sapiens
  misc_RNA (1)...(19): siRNA sense strand
ugauuaagcaaacggaugu

SEQ ID NO: 490093 - RNA, 19 nt, Homo sapiens
  misc_RNA (1)...(19): siRNA sense strand
gaugauauggaugaagaug

SEQ ID NO: 490094 - RNA, 19 nt, Homo sapiens
  misc_RNA (1)...(19): siRNA sense strand
uaaaggcuccugugaacac

SEQ ID NO: 490095 - RNA, 19 nt, Homo sapiens
  misc_RNA (1)...(19): siRNA sense strand
ucugugagaagaacuguga

SEQ ID NO: 490096 - RNA, 19 nt, Homo sapiens
  misc_RNA (1)...(19): siRNA sense strand
ucucuuaauucaacagaac

SEQ ID NO: 490097 - RNA, 19 nt, Homo sapiens
  misc_RNA (1)...(19): siRNA sense strand
aagaggacgaggucauuga

SEQ ID NO: 490098 - RNA, 19 nt, Homo sapiens
  misc_RNA (1)...(19): siRNA sense strand
cugcguuaauguuugcaaa

SEQ ID NO: 490099 - RNA, 19 nt, Homo sapiens
  misc_RNA (1)...(19): siRNA sense strand
uaguaagacauuuguggaa

SEQ ID NO: 490100 - RNA, 19 nt, Homo sapiens
  misc_RNA (1)...(19): siRNA sense strand
ccagcagcuucagaaagaa

SEQ ID NO: 490101 - RNA, 19 nt, Homo sapiens
  misc_RNA (1)...(19): siRNA sense strand
aagcuuauucccuaucaga

SEQ ID NO: 490102 - RNA, 19 nt, Homo sapiens
  misc_RNA (1)...(19): siRNA sense strand
cuaacagaucucuuaauuc

SEQ ID NO: 490103 - RNA, 19 nt, Homo sapiens
  misc_RNA (1)...(19): siRNA sense strand
gaucucuuaauucaacaga

SEQ ID NO: 490104 - RNA, 19 nt, Homo sapiens
  misc_RNA (1)...(19): siRNA sense strand
aaggguacccaguguguug

SEQ ID NO: 490105 - RNA, 19 nt, Homo sapiens
  misc_RNA (1)...(19): siRNA sense strand
gcagaacuaacagaucucu

SEQ ID NO: 490106 - RNA, 19 nt, Homo sapiens
  misc_RNA (1)...(19): siRNA sense strand
aauaagccaugugggaagu

SEQ ID NO: 490107 - RNA, 19 nt, Homo sapiens
  misc_RNA (1)...(19): siRNA sense strand
cagaaccaauaagccaugu

SEQ ID NO: 490108 - RNA, 19 nt, Homo sapiens
  misc_RNA (1)...(19): siRNA sense strand
ccauguaccagcagcuuca

SEQ ID NO: 490109 - RNA, 19 nt, Homo sapiens
  misc_RNA (1)...(19): siRNA sense strand
aaagaaagcugcguuaaug

SEQ ID NO: 490110 - RNA, 19 nt, Homo sapiens
  misc_RNA (1)...(19): siRNA sense strand
aaagaaaccuagcaacaaa

SEQ ID NO: 490111 - RNA, 19 nt, Homo sapiens
  misc_RNA (1)...(19): siRNA sense strand
gaagacagcaaugaugaua

SEQ ID NO: 490112 - RNA, 19 nt, Homo sapiens
  misc_RNA (1)...(19): siRNA sense strand
gaaagcugcguuaauguuu

SEQ ID NO: 490113 - RNA, 19 nt, Homo sapiens
  misc_RNA (1)...(19): siRNA sense strand
gaacuaacagaucucuuaa

SEQ ID NO: 490114 - RNA, 19 nt, Homo sapiens
  misc_RNA (1)...(19): siRNA sense strand
gcaaugaugauauggauga

SEQ ID NO: 490115 - RNA, 19 nt, Homo sapiens
  misc_RNA (1)...(19): siRNA sense strand
guucuacgcuucugugaga

SEQ ID NO: 490116 - RNA, 19 nt, Homo sapiens
  misc_RNA (1)...(19): siRNA sense strand
agaacuaacagaucucuua

SEQ ID NO: 490117 - RNA, 19 nt, Homo sapiens
  misc_RNA (1)...(19): siRNA sense strand
gagaagaacugugaaaaga

SEQ ID NO: 490118 - RNA, 19 nt, Homo sapiens
  misc_RNA (1)...(19): siRNA sense strand
gaacacugcagaacuaaca

SEQ ID NO: 490119 - RNA, 19 nt, Homo sapiens
  misc_RNA (1)...(19): siRNA sense strand
uugaacagcuggacaaguu

SEQ ID NO: 490120 - RNA, 19 nt, Homo sapiens
  misc_RNA (1)...(19): siRNA sense strand
agacagcaaugaugauaug

SEQ ID NO: 490121 - RNA, 19 nt, Homo sapiens
  misc_RNA (1)...(19): siRNA sense strand
ugugaacacugcagaacua

SEQ ID NO: 490122 - RNA, 19 nt, Homo sapiens
  misc_RNA (1)...(19): siRNA sense strand
gaaaggguacccagugugu

SEQ ID NO: 490123 - RNA, 19 nt, Homo sapiens
  misc_RNA (1)...(19): siRNA sense strand
ugaagacgaugaugacagu

SEQ ID NO: 490124 - RNA, 19 nt, Homo sapiens
  misc_RNA (1)...(19): siRNA sense strand
gauuaugacggaauuaaga

SEQ ID NO: 490125 - RNA, 19 nt, Homo sapiens
  misc_RNA (1)...(19): siRNA sense strand
acgaggaagugaauauuga

SEQ ID NO: 490126 - RNA, 19 nt, Homo sapiens
  misc_RNA (1)...(19): siRNA sense strand
caaaugcagaggaagaauu

SEQ ID NO: 490127 - RNA, 19 nt, Homo sapiens
  misc_RNA (1)...(19): siRNA sense strand
cagaagacagcaaugauga

SEQ ID NO: 490128 - RNA, 19 nt, Homo sapiens
  misc_RNA (1)...(19): siRNA sense strand
cagcaaugaugauauggau

SEQ ID NO: 490129 - RNA, 19 nt, Homo sapiens
  misc_RNA (1)...(19): siRNA sense strand
acagaucucuuaauucaac

SEQ ID NO: 490130 - RNA, 19 nt, Homo sapiens
  misc_RNA (1)...(19): siRNA sense strand
ggagugugauuaagcaaac

SEQ ID NO: 490131 - RNA, 19 nt, Homo sapiens
  misc_RNA (1)...(19): siRNA sense strand
gggcacacagaaccaauaa

SEQ ID NO: 490132 - RNA, 19 nt, Homo sapiens
  misc_RNA (1)...(19): siRNA sense strand
gaagaggacgaggucauug

SEQ ID NO: 490133 - RNA, 19 nt, Homo sapiens
  misc_RNA (1)...(19): siRNA sense strand
gcguuaauguuugcaaaug

SEQ ID NO: 490134 - RNA, 19 nt, Homo sapiens
  misc_RNA (1)...(19): siRNA sense strand
gcacacagaaccaauaagc

SEQ ID NO: 490135 - RNA, 19 nt, Homo sapiens
  misc_RNA (1)...(19): siRNA sense strand
uaaugucccuccacagauc

SEQ ID NO: 490136 - RNA, 19 nt, Homo sapiens
  misc_RNA (1)...(19): siRNA sense strand
cauauugggagugugauua

SEQ ID NO: 490137 - RNA, 19 nt, Homo sapiens
  misc_RNA (1)...(19): siRNA sense strand
ucuaaaggcuccugugaac

SEQ ID NO: 490138 - RNA, 19 nt, Homo sapiens
  misc_RNA (1)...(19): siRNA sense strand
accagcagcuucagaaaga

SEQ ID NO: 490139 - RNA, 19 nt, Homo sapiens
  misc_RNA (1)...(19): siRNA sense strand
ggccuucuccuaagugaaa

SEQ ID NO: 490140 - RNA, 19 nt, Homo sapiens
  misc_RNA (1)...(19): siRNA sense strand
gacgaggaagugaauauug

SEQ ID NO: 490141 - RNA, 19 nt, Homo sapiens
  misc_RNA (1)...(19): siRNA sense strand
aaagcugcguuaauguuug

SEQ ID NO: 490142 - RNA, 19 nt, Homo sapiens
  misc_RNA (1)...(19): siRNA sense strand
ugaagcuuauucccuauca

SEQ ID NO: 490143 - RNA, 19 nt, Homo sapiens
  misc_RNA (1)...(19): siRNA sense strand
aaaugaggaugaagacgau

SEQ ID NO: 490144 - RNA, 19 nt, Homo sapiens
  misc_RNA (1)...(19): siRNA sense strand
cugcagaacuaacagaucu

SEQ ID NO: 490145 - RNA, 19 nt, Homo sapiens
  misc_RNA (1)...(19): siRNA sense strand
agaaagcugcguuaauguu

SEQ ID NO: 490146 - RNA, 19 nt, Homo sapiens
  misc_RNA (1)...(19): siRNA sense strand
ucuccuaagugaaagauuc

SEQ ID NO: 490147 - RNA, 19 nt, Homo sapiens
  misc_RNA (1)...(19): siRNA sense strand
aagaaaggguacccagugu

SEQ ID NO: 490148 - RNA, 19 nt, Homo sapiens
  misc_RNA (1)...(19): siRNA sense strand
ugauauggaugaagaugag

SEQ ID NO: 490149 - RNA, 19 nt, Homo sapiens
  misc_RNA (1)...(19): siRNA sense strand
ucagaagacagcaaugaug

SEQ ID NO: 490150 - RNA, 19 nt, Homo sapiens
  misc_RNA (1)...(19): siRNA sense strand
ugaugacagugacaaggaa

SEQ ID NO: 490151 - RNA, 19 nt, Homo sapiens
  misc_RNA (1)...(19): siRNA sense strand
augaugauauggaugaaga

SEQ ID NO: 490152 - RNA, 19 nt, Homo sapiens
  misc_RNA (1)...(19): siRNA sense strand
ccugugggccuucuccuaa

SEQ ID NO: 490153 - RNA, 19 nt, Homo sapiens
  misc_RNA (1)...(19): siRNA sense strand
agaucgcucugcccaugua

SEQ ID NO: 490154 - RNA, 19 nt, Homo sapiens
  misc_RNA (1)...(19): siRNA sense strand
uaagacauuuguggaagca

SEQ ID NO: 490155 - RNA, 19 nt, Homo sapiens
  misc_RNA (1)...(19): siRNA sense strand
ugaagaggacgaggucauu

SEQ ID NO: 490156 - RNA, 19 nt, Homo sapiens
  misc_RNA (1)...(19): siRNA sense strand
gaaaagagcaugguugaac

SEQ ID NO: 490157 - RNA, 19 nt, Homo sapiens
  misc_RNA (1)...(19): siRNA sense strand
guaccagcagcuucagaaa

SEQ ID NO: 490158 - RNA, 19 nt, Homo sapiens
  misc_RNA (1)...(19): siRNA sense strand
gggagugugauuaagcaaa

SEQ ID NO: 490159 - RNA, 19 nt, Homo sapiens
  misc_RNA (1)...(19): siRNA sense strand
gaacagcuggacaaguuuu

SEQ ID NO: 490160 - RNA, 19 nt, Homo sapiens
  misc_RNA (1)...(19): siRNA sense strand
ggaugaagacgaugaugac

SEQ ID NO: 490161 - RNA, 19 nt, Homo sapiens
  misc_RNA (1)...(19): siRNA sense strand
gaugacagugacaaggaaa

SEQ ID NO: 490162 - RNA, 19 nt, Homo sapiens
  misc_RNA (1)...(19): siRNA sense strand
gaggaagugaauauugaau

SEQ ID NO: 490163 - RNA, 19 nt, Homo sapiens
  misc_RNA (1)...(19): siRNA sense strand
caaugaugauauggaugaa

SEQ ID NO: 490164 - RNA, 19 nt, Homo sapiens
  misc_RNA (1)...(19): siRNA sense strand
gcgcgacgaggaagaggaa

SEQ ID NO: 490165 - RNA, 19 nt, Homo sapiens
  misc_RNA (1)...(19): siRNA sense strand
gcaaaugcagaggaagaau

SEQ ID NO: 490166 - RNA, 19 nt, Homo sapiens
  misc_RNA (1)...(19): siRNA sense strand
ugacgaggaagugaauauu

SEQ ID NO: 490167 - RNA, 19 nt, Homo sapiens
  misc_RNA (1)...(19): siRNA sense strand
cgaggaagugaauauugaa

SEQ ID NO: 490168 - RNA, 19 nt, Homo sapiens
  misc_RNA (1)...(19): siRNA sense strand
ugauuaagcaaacggaugu

SEQ ID NO: 490169 - RNA, 19 nt, Homo sapiens
  misc_RNA (1)...(19): siRNA sense strand
gaugauauggaugaagaug

SEQ ID NO: 490170 - RNA, 19 nt, Homo sapiens
  misc_RNA (1)...(19): siRNA sense strand
uaaaggcuccugugaacac

SEQ ID NO: 490171 - RNA, 19 nt, Homo sapiens
  misc_RNA (1)...(19): siRNA sense strand
ucugugagaagaacuguga

SEQ ID NO: 490172 - RNA, 19 nt, Homo sapiens
  misc_RNA (1)...(19): siRNA sense strand
ucucuuaauucaacagaac

SEQ ID NO: 490173 - RNA, 19 nt, Homo sapiens
  misc_RNA (1)...(19): siRNA sense strand
aagaggacgaggucauuga

SEQ ID NO: 490174 - RNA, 19 nt, Homo sapiens
  misc_RNA (1)...(19): siRNA sense strand
cugcguuaauguuugcaaa

SEQ ID NO: 490175 - RNA, 19 nt, Homo sapiens
  misc_RNA (1)...(19): siRNA sense strand
uaguaagacauuuguggaa

SEQ ID NO: 490176 - RNA, 19 nt, Homo sapiens
  misc_RNA (1)...(19): siRNA sense strand
ccagcagcuucagaaagaa

SEQ ID NO: 490177 - RNA, 19 nt, Homo sapiens
  misc_RNA (1)...(19): siRNA sense strand
aagcuuauucccuaucaga

SEQ ID NO: 490178 - RNA, 19 nt, Homo sapiens
  misc_RNA (1)...(19): siRNA sense strand
cuaacagaucucuuaauuc

SEQ ID NO: 490179 - RNA, 19 nt, Homo sapiens
  misc_RNA (1)...(19): siRNA sense strand
gaucucuuaauucaacaga

SEQ ID NO: 490180 - RNA, 19 nt, Homo sapiens
  misc_RNA (1)...(19): siRNA sense strand
aaggguacccaguguguug

SEQ ID NO: 490181 - RNA, 19 nt, Homo sapiens
  misc_RNA (1)...(19): siRNA sense strand
gcagaacuaacagaucucu

SEQ ID NO: 490182 - RNA, 19 nt, Homo sapiens
  misc_RNA (1)...(19): siRNA sense strand
aauaagccaugugggaagu

SEQ ID NO: 490183 - RNA, 19 nt, Homo sapiens
  misc_RNA (1)...(19): siRNA sense strand
cagaaccaauaagccaugu

SEQ ID NO: 490184 - RNA, 19 nt, Homo sapiens
  misc_RNA (1)...(19): siRNA sense strand
ccauguaccagcagcuuca

SEQ ID NO: 490185 - RNA, 19 nt, Homo sapiens
  misc_RNA (1)...(19): siRNA sense strand
aggacaugcucaagaagua

SEQ ID NO: 490186 - RNA, 19 nt, Homo sapiens
  misc_RNA (1)...(19): siRNA sense strand
ccaaguacgccaagaugga

SEQ ID NO: 490187 - RNA, 19 nt, Homo sapiens
  misc_RNA (1)...(19): siRNA sense strand
ugcaggacaugcucaagaa

SEQ ID NO: 490188 - RNA, 19 nt, Homo sapiens
  misc_RNA (1)...(19): siRNA sense strand
uggacaccgucaucaagua

SEQ ID NO: 490189 - RNA, 19 nt, Homo sapiens
  misc_RNA (1)...(19): siRNA sense strand
acaaguacggcaucaagaa

SEQ ID NO: 490190 - RNA, 19 nt, Homo sapiens
  misc_RNA (1)...(19): siRNA sense strand
gacaaguacggcaucaaga

SEQ ID NO: 490191 - RNA, 19 nt, Homo sapiens
  misc_RNA (1)...(19): siRNA sense strand
gaugaagcaggcucuagga

SEQ ID NO: 490192 - RNA, 19 nt, Homo sapiens
  misc_RNA (1)...(19): siRNA sense strand
cgagacaaguacggcauca

SEQ ID NO: 490193 - RNA, 19 nt, Homo sapiens
  misc_RNA (1)...(19): siRNA sense strand
ggacaccgucaucaaguac

SEQ ID NO: 490194 - RNA, 19 nt, Homo sapiens
  misc_RNA (1)...(19): siRNA sense strand
ggccaaguacgccaagaug

SEQ ID NO: 490195 - RNA, 19 nt, Homo sapiens
  misc_RNA (1)...(19): siRNA sense strand
caaguacggcaucaagaag

SEQ ID NO: 490196 - RNA, 19 nt, Homo sapiens
  misc_RNA (1)...(19): siRNA sense strand
aguacggcaucaagaagaa

SEQ ID NO: 490197 - RNA, 19 nt, Homo sapiens
  misc_RNA (1)...(19): siRNA sense strand
ggacaugcucaagaaguag

SEQ ID NO: 490198 - RNA, 19 nt, Homo sapiens
  misc_RNA (1)...(19): siRNA sense strand
agacaaguacggcaucaag

SEQ ID NO: 490199 - RNA, 19 nt, Homo sapiens
  misc_RNA (1)...(19): siRNA sense strand
gcaaguggaauuucgauuu

SEQ ID NO: 490200 - RNA, 19 nt, Homo sapiens
  misc_RNA (1)...(19): siRNA sense strand
caagaagccuggccucaga

SEQ ID NO: 490201 - RNA, 19 nt, Homo sapiens
  misc_RNA (1)...(19): siRNA sense strand
gagaagcacugcagagaca

SEQ ID NO: 490202 - RNA, 19 nt, Homo sapiens
  misc_RNA (1)...(19): siRNA sense strand
ggagcaaugcgcaggaaua

SEQ ID NO: 490203 - RNA, 19 nt, Homo sapiens
  misc_RNA (1)...(19): siRNA sense strand
gagcaaugcgcaggaauaa

SEQ ID NO: 490204 - RNA, 19 nt, Homo sapiens
  misc_RNA (1)...(19): siRNA sense strand
gcaaugcgcaggaauaagg

SEQ ID NO: 490205 - RNA, 19 nt, Homo sapiens
  misc_RNA (1)...(19): siRNA sense strand
caaguggaauuucgauuuu

SEQ ID NO: 490206 - RNA, 19 nt, Homo sapiens
  misc_RNA (1)...(19): siRNA sense strand
caacagaacagaagaaaau

SEQ ID NO: 490207 - RNA, 19 nt, Homo sapiens
  misc_RNA (1)...(19): siRNA sense strand
cgacgauucuucuacucaa

SEQ ID NO: 490208 - RNA, 19 nt, Homo sapiens
  misc_RNA (1)...(19): siRNA sense strand
gacgauucuucuacucaaa

SEQ ID NO: 490209 - RNA, 19 nt, Homo sapiens
  misc_RNA (1)...(19): siRNA sense strand
gcacugcagagacauggaa

SEQ ID NO: 490210 - RNA, 19 nt, Homo sapiens
  misc_RNA (1)...(19): siRNA sense strand
caaacgugcgagugucuaa

SEQ ID NO: 490211 - RNA, 19 nt, Homo sapiens
  misc_RNA (1)...(19): siRNA sense strand
gcagcuugcccgaguucua

SEQ ID NO: 490212 - RNA, 19 nt, Homo sapiens
  misc_RNA (1)...(19): siRNA sense strand
caaaagagccaacagaaca

SEQ ID NO: 490213 - RNA, 19 nt, Homo sapiens
  misc_RNA (1)...(19): siRNA sense strand
gcaaguacgaguggcaaga

SEQ ID NO: 490214 - RNA, 19 nt, Homo sapiens
  misc_RNA (1)...(19): siRNA sense strand
gggcuccggcuaacucuga

SEQ ID NO: 490215 - RNA, 19 nt, Homo sapiens
  misc_RNA (1)...(19): siRNA sense strand
gcggagcaaugcgcaggaa

SEQ ID NO: 490216 - RNA, 19 nt, Homo sapiens
  misc_RNA (1)...(19): siRNA sense strand
gaagcacugcagagacaug

SEQ ID NO: 490217 - RNA, 19 nt, Homo sapiens
  misc_RNA (1)...(19): siRNA sense strand
acucugaggacacgcauuu

SEQ ID NO: 490218 - RNA, 19 nt, Homo sapiens
  misc_RNA (1)...(19): siRNA sense strand
gcaaccgacgauucuucua

SEQ ID NO: 490219 - RNA, 19 nt, Homo sapiens
  misc_RNA (1)...(19): siRNA sense strand
ggccucagaagacgucaaa

SEQ ID NO: 490220 - RNA, 19 nt, Homo sapiens
  misc_RNA (1)...(19): siRNA sense strand
gccaacagaacagaagaaa

SEQ ID NO: 490221 - RNA, 19 nt, Homo sapiens
  misc_RNA (1)...(19): siRNA sense strand
agaguuaacccgggacuug

SEQ ID NO: 490222 - RNA, 19 nt, Homo sapiens
  misc_RNA (1)...(19): siRNA sense strand
gaccugcaaccgacgauuc

SEQ ID NO: 490223 - RNA, 19 nt, Homo sapiens
  misc_RNA (1)...(19): siRNA sense strand
caaccgacgauucuucuac

SEQ ID NO: 490224 - RNA, 19 nt, Homo sapiens
  misc_RNA (1)...(19): siRNA sense strand
gagccaacagaacagaaga

SEQ ID NO: 490225 - RNA, 19 nt, Homo sapiens
  misc_RNA (1)...(19): siRNA sense strand
cagcgcaaguggaauuucg

SEQ ID NO: 490226 - RNA, 19 nt, Homo sapiens
  misc_RNA (1)...(19): siRNA sense strand
gaagccuggccucagaaga

SEQ ID NO: 490227 - RNA, 19 nt, Homo sapiens
  misc_RNA (1)...(19): siRNA sense strand
cgagccagcgcaaguggaa

SEQ ID NO: 490228 - RNA, 19 nt, Homo sapiens
  misc_RNA (1)...(19): siRNA sense strand
uggagcagacgcccaagaa

SEQ ID NO: 490229 - RNA, 19 nt, Homo sapiens
  misc_RNA (1)...(19): siRNA sense strand
gaagaagaguccaaauuua

SEQ ID NO: 490230 - RNA, 19 nt, Homo sapiens
  misc_RNA (1)...(19): siRNA sense strand
ggacagaccuuaucuccaa

SEQ ID NO: 490231 - RNA, 19 nt, Homo sapiens
  misc_RNA (1)...(19): siRNA sense strand
caacaagacugcuuuaaau

SEQ ID NO: 490232 - RNA, 19 nt, Homo sapiens
  misc_RNA (1)...(19): siRNA sense strand
acaaagaccuaccaacuua

SEQ ID NO: 490233 - RNA, 19 nt, Homo sapiens
  misc_RNA (1)...(19): siRNA sense strand
ggaaggaacucccaggaaa

SEQ ID NO: 490234 - RNA, 19 nt, Homo sapiens
  misc_RNA (1)...(19): siRNA sense strand
gcaaaugaauuacuuggaa

SEQ ID NO: 490235 - RNA, 19 nt, Homo sapiens
  misc_RNA (1)...(19): siRNA sense strand
gaagaucauuucagaagaa

SEQ ID NO: 490236 - RNA, 19 nt, Homo sapiens
  misc_RNA (1)...(19): siRNA sense strand
gcccagaaguguuccauua

SEQ ID NO: 490237 - RNA, 19 nt, Homo sapiens
  misc_RNA (1)...(19): siRNA sense strand
cgaaauagcagccagcuua

SEQ ID NO: 490238 - RNA, 19 nt, Homo sapiens
  misc_RNA (1)...(19): siRNA sense strand
gagaacccaucacuaauuu

SEQ ID NO: 490239 - RNA, 19 nt, Homo sapiens
  misc_RNA (1)...(19): siRNA sense strand
gaacaggcacugcaaauga

SEQ ID NO: 490240 - RNA, 19 nt, Homo sapiens
  misc_RNA (1)...(19): siRNA sense strand
gcugagagauuaagaguug

SEQ ID NO: 490241 - RNA, 19 nt, Homo sapiens
  misc_RNA (1)...(19): siRNA sense strand
gaaauuccagcaacaguua

SEQ ID NO: 490242 - RNA, 19 nt, Homo sapiens
  misc_RNA (1)...(19): siRNA sense strand
cgaaguauaugggauguua

SEQ ID NO: 490243 - RNA, 19 nt, Homo sapiens
  misc_RNA (1)...(19): siRNA sense strand
ucaguuaccucacuacuaa

SEQ ID NO: 490244 - RNA, 19 nt, Homo sapiens
  misc_RNA (1)...(19): siRNA sense strand
ggaaauagcaguccagguu

SEQ ID NO: 490245 - RNA, 19 nt, Homo sapiens
  misc_RNA (1)...(19): siRNA sense strand
caaauuaccugcauucuac

SEQ ID NO: 490246 - RNA, 19 nt, Homo sapiens
  misc_RNA (1)...(19): siRNA sense strand
gacuacagcuucucgguua

SEQ ID NO: 490247 - RNA, 19 nt, Homo sapiens
  misc_RNA (1)...(19): siRNA sense strand
gaccagaaguccuaugaaa

SEQ ID NO: 490248 - RNA, 19 nt, Homo sapiens
  misc_RNA (1)...(19): siRNA sense strand
ggacgaggauuuacuguca

SEQ ID NO: 490249 - RNA, 19 nt, Homo sapiens
  misc_RNA (1)...(19): siRNA sense strand
gaauggccuucaucacuua

SEQ ID NO: 490250 - RNA, 19 nt, Homo sapiens
  misc_RNA (1)...(19): siRNA sense strand
ucaacagccugaauaauuu

SEQ ID NO: 490251 - RNA, 19 nt, Homo sapiens
  misc_RNA (1)...(19): siRNA sense strand
gaacaacauugacaucauc

SEQ ID NO: 490252 - RNA, 19 nt, Homo sapiens
  misc_RNA (1)...(19): siRNA sense strand
gaagagcaauggccucaug

SEQ ID NO: 490253 - RNA, 19 nt, Homo sapiens
  misc_RNA (1)...(19): siRNA sense strand
ggaaagaccacuauauuca

SEQ ID NO: 490254 - RNA, 19 nt, Homo sapiens
  misc_RNA (1)...(19): siRNA sense strand
gaucauggcuauacucauc

SEQ ID NO: 490255 - RNA, 19 nt, Homo sapiens
  misc_RNA (1)...(19): siRNA sense strand
ggaagaacauuuguauuuc

SEQ ID NO: 490256 - RNA, 19 nt, Homo sapiens
  misc_RNA (1)...(19): siRNA sense strand
ggaauggccuucaucacuu

SEQ ID NO: 490257 - RNA, 19 nt, Homo sapiens
  misc_RNA (1)...(19): siRNA sense strand
ccagugaucuacaguguuu

SEQ ID NO: 490258 - RNA, 19 nt, Homo sapiens
  misc_RNA (1)...(19): siRNA sense strand
gaacaaaacugccagaaca

SEQ ID NO: 490259 - RNA, 19 nt, Homo sapiens
  misc_RNA (1)...(19): siRNA sense strand
gauuauagcuguaaacaac

SEQ ID NO: 490260 - RNA, 19 nt, Homo sapiens
  misc_RNA (1)...(19): siRNA sense strand
ugagacagcuggcggaauu

SEQ ID NO: 490261 - RNA, 19 nt, Homo sapiens
  misc_RNA (1)...(19): siRNA sense strand
caacaguuauccagagauu

SEQ ID NO: 490262 - RNA, 19 nt, Homo sapiens
  misc_RNA (1)...(19): siRNA sense strand
ugaccgaacuucuuuguga

SEQ ID NO: 490263 - RNA, 19 nt, Homo sapiens
  misc_RNA (1)...(19): siRNA sense strand
gcacuugucucagcaaugu

SEQ ID NO: 490264 - RNA, 19 nt, Homo sapiens
  misc_RNA (1)...(19): siRNA sense strand
ugaagaagaucauggcuau

SEQ ID NO: 490265 - RNA, 19 nt, Homo sapiens
  misc_RNA (1)...(19): siRNA sense strand
gaagaggaaguuaucuaua

SEQ ID NO: 490266 - RNA, 19 nt, Homo sapiens
  misc_RNA (1)...(19): siRNA sense strand
gcaauggccucauguuuac

SEQ ID NO: 490267 - RNA, 19 nt, Homo sapiens
  misc_RNA (1)...(19): siRNA sense strand
gccaugagcuaucuuauca

SEQ ID NO: 490268 - RNA, 19 nt, Homo sapiens
  misc_RNA (1)...(19): siRNA sense strand
guaaauauuuccucuugug

SEQ ID NO: 490269 - RNA, 19 nt, Homo sapiens
  misc_RNA (1)...(19): siRNA sense strand
gacaauagaugaggaugaa

SEQ ID NO: 490270 - RNA, 19 nt, Homo sapiens
  misc_RNA (1)...(19): siRNA sense strand
gaacacaccacaaggauca

SEQ ID NO: 490271 - RNA, 19 nt, Homo sapiens
  misc_RNA (1)...(19): siRNA sense strand
ucucacagcucauuaguug

SEQ ID NO: 490272 - RNA, 19 nt, Homo sapiens
  misc_RNA (1)...(19): siRNA sense strand
ggagaacccaucacuaauu

SEQ ID NO: 490273 - RNA, 19 nt, Homo sapiens
  misc_RNA (1)...(19): siRNA sense strand
ccacaaggaucauuuagca

SEQ ID NO: 490274 - RNA, 19 nt, Homo sapiens
  misc_RNA (1)...(19): siRNA sense strand
gauccgacuuuagaacuua

SEQ ID NO: 490275 - RNA, 19 nt, Homo sapiens
  misc_RNA (1)...(19): siRNA sense strand
caacaggacuauugacaag

SEQ ID NO: 490276 - RNA, 19 nt, Homo sapiens
  misc_RNA (1)...(19): siRNA sense strand
gaucauuucagaagaagua

SEQ ID NO: 490277 - RNA, 19 nt, Homo sapiens
  misc_RNA (1)...(19): siRNA sense strand
ggaagaucauuucagaaga

SEQ ID NO: 490278 - RNA, 19 nt, Homo sapiens
  misc_RNA (1)...(19): siRNA sense strand
ggcauuaauuccauuguuu

SEQ ID NO: 490279 - RNA, 19 nt, Homo sapiens
  misc_RNA (1)...(19): siRNA sense strand
ggccagagguucaccagaa

SEQ ID NO: 490280 - RNA, 19 nt, Homo sapiens
  misc_RNA (1)...(19): siRNA sense strand
cagccaagguuccacuaua

SEQ ID NO: 490281 - RNA, 19 nt, Homo sapiens
  misc_RNA (1)...(19): siRNA sense strand
gagaaugaguugagcuaug

SEQ ID NO: 490282 - RNA, 19 nt, Homo sapiens
  misc_RNA (1)...(19): siRNA sense strand
uugaagagcugaaagaaga

SEQ ID NO: 490283 - RNA, 19 nt, Homo sapiens
  misc_RNA (1)...(19): siRNA sense strand
ggaauuaccacugaauauu

SEQ ID NO: 490284 - RNA, 19 nt, Homo sapiens
  misc_RNA (1)...(19): siRNA sense strand
guaaacaacaucagcauug

SEQ ID NO: 490285 - RNA, 19 nt, Homo sapiens
  misc_RNA (1)...(19): siRNA sense strand
caucccagguaauuuauaa

SEQ ID NO: 490286 - RNA, 19 nt, Homo sapiens
  misc_RNA (1)...(19): siRNA sense strand
gaacaaucauucugucaac

SEQ ID NO: 490287 - RNA, 19 nt, Homo sapiens
  misc_RNA (1)...(19): siRNA sense strand
cuacaucauugccuucuuu

SEQ ID NO: 490288 - RNA, 19 nt, Homo sapiens
  misc_RNA (1)...(19): siRNA sense strand
gaacagacagccuucuaug

SEQ ID NO: 490289 - RNA, 19 nt, Homo sapiens
  misc_RNA (1)...(19): siRNA sense strand
agaagaagaguccaaauuu

SEQ ID NO: 490290 - RNA, 19 nt, Homo sapiens
  misc_RNA (1)...(19): siRNA sense strand
caguaaauauuuccucuug

SEQ ID NO: 490291 - RNA, 19 nt, Homo sapiens
  misc_RNA (1)...(19): siRNA sense strand
gcacauaaagagcagguuu

SEQ ID NO: 490292 - RNA, 19 nt, Homo sapiens
  misc_RNA (1)...(19): siRNA sense strand
gaaagaccacuauauucaa

SEQ ID NO: 490293 - RNA, 19 nt, Homo sapiens
  misc_RNA (1)...(19): siRNA sense strand
gaugcccucuuaaauauau

SEQ ID NO: 490294 - RNA, 19 nt, Homo sapiens
  misc_RNA (1)...(19): siRNA sense strand
gaacagggcauuggucuuc

SEQ ID NO: 490295 - RNA, 19 nt, Homo sapiens
  misc_RNA (1)...(19): siRNA sense strand
gaguugagcuauguauuga

SEQ ID NO: 490296 - RNA, 19 nt, Homo sapiens
  misc_RNA (1)...(19): siRNA sense strand
uaucaccacucccaaacua

SEQ ID NO: 490297 - RNA, 19 nt, Homo sapiens
  misc_RNA (1)...(19): siRNA sense strand
ccaaagaccagaaguccua

SEQ ID NO: 490298 - RNA, 19 nt, Homo sapiens
  misc_RNA (1)...(19): siRNA sense strand
gaacaugggagucuguaug

SEQ ID NO: 490299 - RNA, 19 nt, Homo sapiens
  misc_RNA (1)...(19): siRNA sense strand
cauguuaacugggcuguuu

SEQ ID NO: 490300 - RNA, 19 nt, Homo sapiens
  misc_RNA (1)...(19): siRNA sense strand
uauagagaguguuggauuu

SEQ ID NO: 490301 - RNA, 19 nt, Homo sapiens
  misc_RNA (1)...(19): siRNA sense strand
acuagaagaugcaaugaaa

SEQ ID NO: 490302 - RNA, 19 nt, Homo sapiens
  misc_RNA (1)...(19): siRNA sense strand
ggaggagucgcaaacauuu

SEQ ID NO: 490303 - RNA, 19 nt, Homo sapiens
  misc_RNA (1)...(19): siRNA sense strand
cagaagaaguacagaacaa

SEQ ID NO: 490304 - RNA, 19 nt, Homo sapiens
  misc_RNA (1)...(19): siRNA sense strand
uagaugaccugguaacugu

SEQ ID NO: 490305 - RNA, 19 nt, Homo sapiens
  misc_RNA (1)...(19): siRNA sense strand
uaacgcauguguggaauga

SEQ ID NO: 490306 - RNA, 19 nt, Homo sapiens
  misc_RNA (1)...(19): siRNA sense strand
gcugggcucuuccaugaaa

SEQ ID NO: 490307 - RNA, 19 nt, Homo sapiens
  misc_RNA (1)...(19): siRNA sense strand
gaacaccagugaucuacag

SEQ ID NO: 490308 - RNA, 19 nt, Homo sapiens
  misc_RNA (1)...(19): siRNA sense strand
gaacuggaaaggucucauu

SEQ ID NO: 490309 - RNA, 19 nt, Homo sapiens
  misc_RNA (1)...(19): siRNA sense strand
gagcaauggccucauguuu

SEQ ID NO: 490310 - RNA, 19 nt, Homo sapiens
  misc_RNA (1)...(19): siRNA sense strand
caccaucucccaagcauua

SEQ ID NO: 490311 - RNA, 19 nt, Homo sapiens
  misc_RNA (1)...(19): siRNA sense strand
gcacacauccgcugcuaga

SEQ ID NO: 490312 - RNA, 19 nt, Homo sapiens
  misc_RNA (1)...(19): siRNA sense strand
ucaggaagaugccuuagau

SEQ ID NO: 490313 - RNA, 19 nt, Homo sapiens
  misc_RNA (1)...(19): siRNA sense strand
ggaguggaauacccaaaug

SEQ ID NO: 490314 - RNA, 19 nt, Homo sapiens
  misc_RNA (1)...(19): siRNA sense strand
gaucaaggguaguaauuuu

SEQ ID NO: 490315 - RNA, 19 nt, Homo sapiens
  misc_RNA (1)...(19): siRNA sense strand
cuauauagccaucgucaua

SEQ ID NO: 490316 - RNA, 19 nt, Homo sapiens
  misc_RNA (1)...(19): siRNA sense strand
uaaccagugucucuuauuc

SEQ ID NO: 490317 - RNA, 19 nt, Homo sapiens
  misc_RNA (1)...(19): siRNA sense strand
ugagaucccugaagcaaau

SEQ ID NO: 490318 - RNA, 19 nt, Homo sapiens
  misc_RNA (1)...(19): siRNA sense strand
ccaggucaguuacuagaaa

SEQ ID NO: 490319 - RNA, 19 nt, Homo sapiens
  misc_RNA (1)...(19): siRNA sense strand
ccaacaagacugcuuuaaa

SEQ ID NO: 490320 - RNA, 19 nt, Homo sapiens
  misc_RNA (1)...(19): siRNA sense strand
guggagaacccaucacuaa

SEQ ID NO: 490321 - RNA, 19 nt, Homo sapiens
  misc_RNA (1)...(19): siRNA sense strand
guugagcuauguauugaaa

SEQ ID NO: 490322 - RNA, 19 nt, Homo sapiens
  misc_RNA (1)...(19): siRNA sense strand
gaugaacucgauauucuaa

SEQ ID NO: 490323 - RNA, 19 nt, Homo sapiens
  misc_RNA (1)...(19): siRNA sense strand
acagauagaugaacucgau

SEQ ID NO: 490324 - RNA, 19 nt, Homo sapiens
  misc_RNA (1)...(19): siRNA sense strand
acgaaucccugauaaagaa

SEQ ID NO: 490325 - RNA, 19 nt, Homo sapiens
  misc_RNA (1)...(19): siRNA sense strand
gauaauauaacgcaugugu

SEQ ID NO: 490326 - RNA, 19 nt, Homo sapiens
  misc_RNA (1)...(19): siRNA sense strand
caggaaagaccacuauauu

SEQ ID NO: 490327 - RNA, 19 nt, Homo sapiens
  misc_RNA (1)...(19): siRNA sense strand
gcaggaaagaccacuauau

SEQ ID NO: 490328 - RNA, 19 nt, Homo sapiens
  misc_RNA (1)...(19): siRNA sense strand
caacaucagcauugggaua

SEQ ID NO: 490329 - RNA, 19 nt, Homo sapiens
  misc_RNA (1)...(19): siRNA sense strand
gaagaagaguccaaauuua

SEQ ID NO: 490330 - RNA, 19 nt, Homo sapiens
  misc_RNA (1)...(19): siRNA sense strand
ggacagaccuuaucuccaa

SEQ ID NO: 490331 - RNA, 19 nt, Homo sapiens
  misc_RNA (1)...(19): siRNA sense strand
caacaagacugcuuuaaau

SEQ ID NO: 490332 - RNA, 19 nt, Homo sapiens
  misc_RNA (1)...(19): siRNA sense strand
acaaagaccuaccaacuua

SEQ ID NO: 490333 - RNA, 19 nt, Homo sapiens
  misc_RNA (1)...(19): siRNA sense strand
ggaaggaacucccaggaaa

SEQ ID NO: 490334 - RNA, 19 nt, Homo sapiens
  misc_RNA (1)...(19): siRNA sense strand
gcaaaugaauuacuuggaa

SEQ ID NO: 490335 - RNA, 19 nt, Homo sapiens
  misc_RNA (1)...(19): siRNA sense strand
gaagaucauuucagaagaa

SEQ ID NO: 490336 - RNA, 19 nt, Homo sapiens
  misc_RNA (1)...(19): siRNA sense strand
gcccagaaguguuccauua

SEQ ID NO: 490337 - RNA, 19 nt, Homo sapiens
  misc_RNA (1)...(19): siRNA sense strand
cgaaauagcagccagcuua

SEQ ID NO: 490338 - RNA, 19 nt, Homo sapiens
  misc_RNA (1)...(19): siRNA sense strand
gagaacccaucacuaauuu

SEQ ID NO: 490339 - RNA, 19 nt, Homo sapiens
  misc_RNA (1)...(19): siRNA sense strand
gaacaggcacugcaaauga

SEQ ID NO: 490340 - RNA, 19 nt, Homo sapiens
  misc_RNA (1)...(19): siRNA sense strand
gcugagagauuaagaguug

SEQ ID NO: 490341 - RNA, 19 nt, Homo sapiens
  misc_RNA (1)...(19): siRNA sense strand
gaaauuccagcaacaguua

SEQ ID NO: 490342 - RNA, 19 nt, Homo sapiens
  misc_RNA (1)...(19): siRNA sense strand
cgaaguauaugggauguua

SEQ ID NO: 490343 - RNA, 19 nt, Homo sapiens
  misc_RNA (1)...(19): siRNA sense strand
ucaguuaccucacuacuaa

SEQ ID NO: 490344 - RNA, 19 nt, Homo sapiens
  misc_RNA (1)...(19): siRNA sense strand
ggaaauagcaguccagguu

SEQ ID NO: 490345 - RNA, 19 nt, Homo sapiens
  misc_RNA (1)...(19): siRNA sense strand
caaauuaccugcauucuac

SEQ ID NO: 490346 - RNA, 19 nt, Homo sapiens
  misc_RNA (1)...(19): siRNA sense strand
gacuacagcuucucgguua

SEQ ID NO: 490347 - RNA, 19 nt, Homo sapiens
  misc_RNA (1)...(19): siRNA sense strand
gaccagaaguccuaugaaa

SEQ ID NO: 490348 - RNA, 19 nt, Homo sapiens
  misc_RNA (1)...(19): siRNA sense strand
ggacgaggauuuacuguca

SEQ ID NO: 490349 - RNA, 19 nt, Homo sapiens
  misc_RNA (1)...(19): siRNA sense strand
gaauggccuucaucacuua

SEQ ID NO: 490350 - RNA, 19 nt, Homo sapiens
  misc_RNA (1)...(19): siRNA sense strand
ucaacagccugaauaauuu

SEQ ID NO: 490351 - RNA, 19 nt, Homo sapiens
  misc_RNA (1)...(19): siRNA sense strand
gaacaacauugacaucauc

SEQ ID NO: 490352 - RNA, 19 nt, Homo sapiens
  misc_RNA (1)...(19): siRNA sense strand
gaagagcaauggccucaug

SEQ ID NO: 490353 - RNA, 19 nt, Homo sapiens
  misc_RNA (1)...(19): siRNA sense strand
ggaaagaccacuauauuca

SEQ ID NO: 490354 - RNA, 19 nt, Homo sapiens
  misc_RNA (1)...(19): siRNA sense strand
gaucauggcuauacucauc

SEQ ID NO: 490355 - RNA, 19 nt, Homo sapiens
  misc_RNA (1)...(19): siRNA sense strand
ggaagaacauuuguauuuc

SEQ ID NO: 490356 - RNA, 19 nt, Homo sapiens
  misc_RNA (1)...(19): siRNA sense strand
ggaauggccuucaucacuu

SEQ ID NO: 490357 - RNA, 19 nt, Homo sapiens
  misc_RNA (1)...(19): siRNA sense strand
ccagugaucuacaguguuu

SEQ ID NO: 490358 - RNA, 19 nt, Homo sapiens
  misc_RNA (1)...(19): siRNA sense strand
gaacaaaacugccagaaca

SEQ ID NO: 490359 - RNA, 19 nt, Homo sapiens
  misc_RNA (1)...(19): siRNA sense strand
gauuauagcuguaaacaac

SEQ ID NO: 490360 - RNA, 19 nt, Homo sapiens
  misc_RNA (1)...(19): siRNA sense strand
ugagacagcuggcggaauu

SEQ ID NO: 490361 - RNA, 19 nt, Homo sapiens
  misc_RNA (1)...(19): siRNA sense strand
caacaguuauccagagauu

SEQ ID NO: 490362 - RNA, 19 nt, Homo sapiens
  misc_RNA (1)...(19): siRNA sense strand
ugaccgaacuucuuuguga

SEQ ID NO: 490363 - RNA, 19 nt, Homo sapiens
  misc_RNA (1)...(19): siRNA sense strand
gcacuugucucagcaaugu

SEQ ID NO: 490364 - RNA, 19 nt, Homo sapiens
  misc_RNA (1)...(19): siRNA sense strand
ugaagaagaucauggcuau

SEQ ID NO: 490365 - RNA, 19 nt, Homo sapiens
  misc_RNA (1)...(19): siRNA sense strand
gaagaggaaguuaucuaua

SEQ ID NO: 490366 - RNA, 19 nt, Homo sapiens
  misc_RNA (1)...(19): siRNA sense strand
gcaauggccucauguuuac

SEQ ID NO: 490367 - RNA, 19 nt, Homo sapiens
  misc_RNA (1)...(19): siRNA sense strand
gccaugagcuaucuuauca

SEQ ID NO: 490368 - RNA, 19 nt, Homo sapiens
  misc_RNA (1)...(19): siRNA sense strand
guaaauauuuccucuugug

SEQ ID NO: 490369 - RNA, 19 nt, Homo sapiens
  misc_RNA (1)...(19): siRNA sense strand
gacaauagaugaggaugaa

SEQ ID NO: 490370 - RNA, 19 nt, Homo sapiens
  misc_RNA (1)...(19): siRNA sense strand
gaacacaccacaaggauca

SEQ ID NO: 490371 - RNA, 19 nt, Homo sapiens
  misc_RNA (1)...(19): siRNA sense strand
ucucacagcucauuaguug

SEQ ID NO: 490372 - RNA, 19 nt, Homo sapiens
  misc_RNA (1)...(19): siRNA sense strand
ggagaacccaucacuaauu

SEQ ID NO: 490373 - RNA, 19 nt, Homo sapiens
  misc_RNA (1)...(19): siRNA sense strand
ccacaaggaucauuuagca

SEQ ID NO: 490374 - RNA, 19 nt, Homo sapiens
  misc_RNA (1)...(19): siRNA sense strand
gauccgacuuuagaacuua

SEQ ID NO: 490375 - RNA, 19 nt, Homo sapiens
  misc_RNA (1)...(19): siRNA sense strand
caacaggacuauugacaag

SEQ ID NO: 490376 - RNA, 19 nt, Homo sapiens
  misc_RNA (1)...(19): siRNA sense strand
gaucauuucagaagaagua

SEQ ID NO: 490377 - RNA, 19 nt, Homo sapiens
  misc_RNA (1)...(19): siRNA sense strand
ggaagaucauuucagaaga

SEQ ID NO: 490378 - RNA, 19 nt, Homo sapiens
  misc_RNA (1)...(19): siRNA sense strand
ggcauuaauuccauuguuu

SEQ ID NO: 490379 - RNA, 19 nt, Homo sapiens
  misc_RNA (1)...(19): siRNA sense strand
ggccagagguucaccagaa

SEQ ID NO: 490380 - RNA, 19 nt, Homo sapiens
  misc_RNA (1)...(19): siRNA sense strand
cagccaagguuccacuaua

SEQ ID NO: 490381 - RNA, 19 nt, Homo sapiens
  misc_RNA (1)...(19): siRNA sense strand
gagaaugaguugagcuaug

SEQ ID NO: 490382 - RNA, 19 nt, Homo sapiens
  misc_RNA (1)...(19): siRNA sense strand
uugaagagcugaaagaaga

SEQ ID NO: 490383 - RNA, 19 nt, Homo sapiens
  misc_RNA (1)...(19): siRNA sense strand
ggaauuaccacugaauauu

SEQ ID NO: 490384 - RNA, 19 nt, Homo sapiens
  misc_RNA (1)...(19): siRNA sense strand
guaaacaacaucagcauug

SEQ ID NO: 490385 - RNA, 19 nt, Homo sapiens
  misc_RNA (1)...(19): siRNA sense strand
caucccagguaauuuauaa

SEQ ID NO: 490386 - RNA, 19 nt, Homo sapiens
  misc_RNA (1)...(19): siRNA sense strand
gaacaaucauucugucaac

SEQ ID NO: 490387 - RNA, 19 nt, Homo sapiens
  misc_RNA (1)...(19): siRNA sense strand
cuacaucauugccuucuuu

SEQ ID NO: 490388 - RNA, 19 nt, Homo sapiens
  misc_RNA (1)...(19): siRNA sense strand
gaacagacagccuucuaug

SEQ ID NO: 490389 - RNA, 19 nt, Homo sapiens
  misc_RNA (1)...(19): siRNA sense strand
agaagaagaguccaaauuu

SEQ ID NO: 490390 - RNA, 19 nt, Homo sapiens
  misc_RNA (1)...(19): siRNA sense strand
caguaaauauuuccucuug

SEQ ID NO: 490391 - RNA, 19 nt, Homo sapiens
  misc_RNA (1)...(19): siRNA sense strand
gcacauaaagagcagguuu

SEQ ID NO: 490392 - RNA, 19 nt, Homo sapiens
  misc_RNA (1)...(19): siRNA sense strand
gaaagaccacuauauucaa

SEQ ID NO: 490393 - RNA, 19 nt, Homo sapiens
  misc_RNA (1)...(19): siRNA sense strand
gaugcccucuuaaauauau

SEQ ID NO: 490394 - RNA, 19 nt, Homo sapiens
  misc_RNA (1)...(19): siRNA sense strand
gaacagggcauuggucuuc

SEQ ID NO: 490395 - RNA, 19 nt, Homo sapiens
  misc_RNA (1)...(19): siRNA sense strand
gaguugagcuauguauuga

SEQ ID NO: 490396 - RNA, 19 nt, Homo sapiens
  misc_RNA (1)...(19): siRNA sense strand
uaucaccacucccaaacua

SEQ ID NO: 490397 - RNA, 19 nt, Homo sapiens
  misc_RNA (1)...(19): siRNA sense strand
ccaaagaccagaaguccua

SEQ ID NO: 490398 - RNA, 19 nt, Homo sapiens
  misc_RNA (1)...(19): siRNA sense strand
gaacaugggagucuguaug

SEQ ID NO: 490399 - RNA, 19 nt, Homo sapiens
  misc_RNA (1)...(19): siRNA sense strand
cauguuaacugggcuguuu

SEQ ID NO: 490400 - RNA, 19 nt, Homo sapiens
  misc_RNA (1)...(19): siRNA sense strand
uauagagaguguuggauuu

SEQ ID NO: 490401 - RNA, 19 nt, Homo sapiens
  misc_RNA (1)...(19): siRNA sense strand
acuagaagaugcaaugaaa

SEQ ID NO: 490402 - RNA, 19 nt, Homo sapiens
  misc_RNA (1)...(19): siRNA sense strand
ggaggagucgcaaacauuu

SEQ ID NO: 490403 - RNA, 19 nt, Homo sapiens
  misc_RNA (1)...(19): siRNA sense strand
cagaagaaguacagaacaa

SEQ ID NO: 490404 - RNA, 19 nt, Homo sapiens
  misc_RNA (1)...(19): siRNA sense strand
uagaugaccugguaacugu

SEQ ID NO: 490405 - RNA, 19 nt, Homo sapiens
  misc_RNA (1)...(19): siRNA sense strand
uaacgcauguguggaauga

SEQ ID NO: 490406 - RNA, 19 nt, Homo sapiens
  misc_RNA (1)...(19): siRNA sense strand
gcugggcucuuccaugaaa

SEQ ID NO: 490407 - RNA, 19 nt, Homo sapiens
  misc_RNA (1)...(19): siRNA sense strand
gaacaccagugaucuacag

SEQ ID NO: 490408 - RNA, 19 nt, Homo sapiens
  misc_RNA (1)...(19): siRNA sense strand
gaacuggaaaggucucauu

SEQ ID NO: 490409 - RNA, 19 nt, Homo sapiens
  misc_RNA (1)...(19): siRNA sense strand
gagcaauggccucauguuu

SEQ ID NO: 490410 - RNA, 19 nt, Homo sapiens
  misc_RNA (1)...(19): siRNA sense strand
caccaucucccaagcauua

SEQ ID NO: 490411 - RNA, 19 nt, Homo sapiens
  misc_RNA (1)...(19): siRNA sense strand
gcacacauccgcugcuaga

SEQ ID NO: 490412 - RNA, 19 nt, Homo sapiens
  misc_RNA (1)...(19): siRNA sense strand
ucaggaagaugccuuagau

SEQ ID NO: 490413 - RNA, 19 nt, Homo sapiens
  misc_RNA (1)...(19): siRNA sense strand
ggaguggaauacccaaaug

SEQ ID NO: 490414 - RNA, 19 nt, Homo sapiens
  misc_RNA (1)...(19): siRNA sense strand
gaucaaggguaguaauuuu

SEQ ID NO: 490415 - RNA, 19 nt, Homo sapiens
  misc_RNA (1)...(19): siRNA sense strand
cuauauagccaucgucaua

SEQ ID NO: 490416 - RNA, 19 nt, Homo sapiens
  misc_RNA (1)...(19): siRNA sense strand
uaaccagugucucuuauuc

SEQ ID NO: 490417 - RNA, 19 nt, Homo sapiens
  misc_RNA (1)...(19): siRNA sense strand
ugagaucccugaagcaaau

SEQ ID NO: 490418 - RNA, 19 nt, Homo sapiens
  misc_RNA (1)...(19): siRNA sense strand
ccaggucaguuacuagaaa

SEQ ID NO: 490419 - RNA, 19 nt, Homo sapiens
  misc_RNA (1)...(19): siRNA sense strand
ccaacaagacugcuuuaaa

SEQ ID NO: 490420 - RNA, 19 nt, Homo sapiens
  misc_RNA (1)...(19): siRNA sense strand
guggagaacccaucacuaa

SEQ ID NO: 490421 - RNA, 19 nt, Homo sapiens
  misc_RNA (1)...(19): siRNA sense strand
guugagcuauguauugaaa

SEQ ID NO: 490422 - RNA, 19 nt, Homo sapiens
  misc_RNA (1)...(19): siRNA sense strand
gaugaacucgauauucuaa

SEQ ID NO: 490423 - RNA, 19 nt, Homo sapiens
  misc_RNA (1)...(19): siRNA sense strand
acagauagaugaacucgau

SEQ ID NO: 490424 - RNA, 19 nt, Homo sapiens
  misc_RNA (1)...(19): siRNA sense strand
acgaaucccugauaaagaa

SEQ ID NO: 490425 - RNA, 19 nt, Homo sapiens
  misc_RNA (1)...(19): siRNA sense strand
gauaauauaacgcaugugu

SEQ ID NO: 490426 - RNA, 19 nt, Homo sapiens
  misc_RNA (1)...(19): siRNA sense strand
caggaaagaccacuauauu

SEQ ID NO: 490427 - RNA, 19 nt, Homo sapiens
  misc_RNA (1)...(19): siRNA sense strand
gcaggaaagaccacuauau

SEQ ID NO: 490428 - RNA, 19 nt, Homo sapiens
  misc_RNA (1)...(19): siRNA sense strand
caacaucagcauugggaua

SEQ ID NO: 490429 - RNA, 19 nt, Homo sapiens
  misc_RNA (1)...(19): siRNA sense strand
gcaguuugcuguuuauuau

SEQ ID NO: 490430 - RNA, 19 nt, Homo sapiens
  misc_RNA (1)...(19): siRNA sense strand
guaaaggaauucaaacaga

SEQ ID NO: 490431 - RNA, 19 nt, Homo sapiens
  misc_RNA (1)...(19): siRNA sense strand
gggaucagaugaaagagua

SEQ ID NO: 490432 - RNA, 19 nt, Homo sapiens
  misc_RNA (1)...(19): siRNA sense strand
aaacagagccuuauaaagu

SEQ ID NO: 490433 - RNA, 19 nt, Homo sapiens
  misc_RNA (1)...(19): siRNA sense strand
uaaaguacauggaaacuca

SEQ ID NO: 490434 - RNA, 19 nt, Homo sapiens
  misc_RNA (1)...(19): siRNA sense strand
gggcgaaucugugccuuua

SEQ ID NO: 490435 - RNA, 19 nt, Homo sapiens
  misc_RNA (1)...(19): siRNA sense strand
gagaacaguuauuagacua

SEQ ID NO: 490436 - RNA, 19 nt, Homo sapiens
  misc_RNA (1)...(19): siRNA sense strand
gugaagcucuguacaaaga

SEQ ID NO: 490437 - RNA, 19 nt, Homo sapiens
  misc_RNA (1)...(19): siRNA sense strand
gaacuaauggacuguauug

SEQ ID NO: 490438 - RNA, 19 nt, Homo sapiens
  misc_RNA (1)...(19): siRNA sense strand
gcaagacuccuagguuaua

SEQ ID NO: 490439 - RNA, 19 nt, Homo sapiens
  misc_RNA (1)...(19): siRNA sense strand
ggaaauagagagauuguca

SEQ ID NO: 490440 - RNA, 19 nt, Homo sapiens
  misc_RNA (1)...(19): siRNA sense strand
gagagauugucauuauuga

SEQ ID NO: 490441 - RNA, 19 nt, Homo sapiens
  misc_RNA (1)...(19): siRNA sense strand
gcacgacucagauaacaaa

SEQ ID NO: 490442 - RNA, 19 nt, Homo sapiens
  misc_RNA (1)...(19): siRNA sense strand
gaacaguuauuagacuaga

SEQ ID NO: 490443 - RNA, 19 nt, Homo sapiens
  misc_RNA (1)...(19): siRNA sense strand
gaucugagcugagaaucau

SEQ ID NO: 490444 - RNA, 19 nt, Homo sapiens
  misc_RNA (1)...(19): siRNA sense strand
acgcaagacuccuagguua

SEQ ID NO: 490445 - RNA, 19 nt, Homo sapiens
  misc_RNA (1)...(19): siRNA sense strand
acacacaauuguccucuuu

SEQ ID NO: 490446 - RNA, 19 nt, Homo sapiens
  misc_RNA (1)...(19): siRNA sense strand
gaaucugugccuuuaauaa

SEQ ID NO: 490447 - RNA, 19 nt, Homo sapiens
  misc_RNA (1)...(19): siRNA sense strand
aacagagccuuauaaagua

SEQ ID NO: 490448 - RNA, 19 nt, Homo sapiens
  misc_RNA (1)...(19): siRNA sense strand
ugacacaccagauauguuu

SEQ ID NO: 490449 - RNA, 19 nt, Homo sapiens
  misc_RNA (1)...(19): siRNA sense strand
gcgaaucugugccuuuaau

SEQ ID NO: 490450 - RNA, 19 nt, Homo sapiens
  misc_RNA (1)...(19): siRNA sense strand
auacagaggucuaaaugug

SEQ ID NO: 490451 - RNA, 19 nt, Homo sapiens
  misc_RNA (1)...(19): siRNA sense strand
gcaauuuauucugcaguuu

SEQ ID NO: 490452 - RNA, 19 nt, Homo sapiens
  misc_RNA (1)...(19): siRNA sense strand
ucccagaccuugacuaaga

SEQ ID NO: 490453 - RNA, 19 nt, Homo sapiens
  misc_RNA (1)...(19): siRNA sense strand
ggugaucacuauaccaaug

SEQ ID NO: 490454 - RNA, 19 nt, Homo sapiens
  misc_RNA (1)...(19): siRNA sense strand
guggcucccugauggauua

SEQ ID NO: 490455 - RNA, 19 nt, Homo sapiens
  misc_RNA (1)...(19): siRNA sense strand
gaauucaaacagagccuua

SEQ ID NO: 490456 - RNA, 19 nt, Homo sapiens
  misc_RNA (1)...(19): siRNA sense strand
cauggaaacucaaagaagu

SEQ ID NO: 490457 - RNA, 19 nt, Homo sapiens
  misc_RNA (1)...(19): siRNA sense strand
gaagcaagcauuugaaucg

SEQ ID NO: 490458 - RNA, 19 nt, Homo sapiens
  misc_RNA (1)...(19): siRNA sense strand
ucaaacagagccuuauaaa

SEQ ID NO: 490459 - RNA, 19 nt, Homo sapiens
  misc_RNA (1)...(19): siRNA sense strand
ggagaucuuuggagaggau

SEQ ID NO: 490460 - RNA, 19 nt, Homo sapiens
  misc_RNA (1)...(19): siRNA sense strand
guacauggaaacucaaaga

SEQ ID NO: 490461 - RNA, 19 nt, Homo sapiens
  misc_RNA (1)...(19): siRNA sense strand
gaugaaagaguaaaggaau

SEQ ID NO: 490462 - RNA, 19 nt, Homo sapiens
  misc_RNA (1)...(19): siRNA sense strand
gaagcaaacugccuaaaag

SEQ ID NO: 490463 - RNA, 19 nt, Homo sapiens
  misc_RNA (1)...(19): siRNA sense strand
caaucaggaugaccaagug

SEQ ID NO: 490464 - RNA, 19 nt, Homo sapiens
  misc_RNA (1)...(19): siRNA sense strand
ucaguuguuucucagauug

SEQ ID NO: 490465 - RNA, 19 nt, Homo sapiens
  misc_RNA (1)...(19): siRNA sense strand
cagggaagcuggggaaaua

SEQ ID NO: 490466 - RNA, 19 nt, Homo sapiens
  misc_RNA (1)...(19): siRNA sense strand
cagcaugugcaauuuguuu

SEQ ID NO: 490467 - RNA, 19 nt, Homo sapiens
  misc_RNA (1)...(19): siRNA sense strand
uaauacagaggucuaaaug

SEQ ID NO: 490468 - RNA, 19 nt, Homo sapiens
  misc_RNA (1)...(19): siRNA sense strand
ucaggaagcaagcauuuga

SEQ ID NO: 490469 - RNA, 19 nt, Homo sapiens
  misc_RNA (1)...(19): siRNA sense strand
gcaaucaggaugaccaagu

SEQ ID NO: 490470 - RNA, 19 nt, Homo sapiens
  misc_RNA (1)...(19): siRNA sense strand
ccacaaggaagaccucaau

SEQ ID NO: 490471 - RNA, 19 nt, Homo sapiens
  misc_RNA (1)...(19): siRNA sense strand
ggaacuaauggacuguauu

SEQ ID NO: 490472 - RNA, 19 nt, Homo sapiens
  misc_RNA (1)...(19): siRNA sense strand
agagagauugucauuauug

SEQ ID NO: 490473 - RNA, 19 nt, Homo sapiens
  misc_RNA (1)...(19): siRNA sense strand
ugagaacaguuauuagacu

SEQ ID NO: 490474 - RNA, 19 nt, Homo sapiens
  misc_RNA (1)...(19): siRNA sense strand
uguauucaguuguuucuca

SEQ ID NO: 490475 - RNA, 19 nt, Homo sapiens
  misc_RNA (1)...(19): siRNA sense strand
gcagaucugagcugagaau

SEQ ID NO: 490476 - RNA, 19 nt, Homo sapiens
  misc_RNA (1)...(19): siRNA sense strand
gaguaaaggaauucaaaca

SEQ ID NO: 490477 - RNA, 19 nt, Homo sapiens
  misc_RNA (1)...(19): siRNA sense strand
caaggaagaccucaauggu

SEQ ID NO: 490478 - RNA, 19 nt, Homo sapiens
  misc_RNA (1)...(19): siRNA sense strand
ccaagugaaggaacuaaug

SEQ ID NO: 490479 - RNA, 19 nt, Homo sapiens
  misc_RNA (1)...(19): siRNA sense strand
gaacgcaagacuccuaggu

SEQ ID NO: 490480 - RNA, 19 nt, Homo sapiens
  misc_RNA (1)...(19): siRNA sense strand
ggaagcaagcauuugaauc

SEQ ID NO: 490481 - RNA, 19 nt, Homo sapiens
  misc_RNA (1)...(19): siRNA sense strand
uugaggaucuguugaugga

SEQ ID NO: 490482 - RNA, 19 nt, Homo sapiens
  misc_RNA (1)...(19): siRNA sense strand
caccagauauguuuucuug

SEQ ID NO: 490483 - RNA, 19 nt, Homo sapiens
  misc_RNA (1)...(19): siRNA sense strand
caauuuauucugcaguuug

SEQ ID NO: 490484 - RNA, 19 nt, Homo sapiens
  misc_RNA (1)...(19): siRNA sense strand
caaacagagccuuauaaag

SEQ ID NO: 490485 - RNA, 19 nt, Homo sapiens
  misc_RNA (1)...(19): siRNA sense strand
gauaacaaagcccuaagca

SEQ ID NO: 490486 - RNA, 19 nt, Homo sapiens
  misc_RNA (1)...(19): siRNA sense strand
gaaauagagagauugucau

SEQ ID NO: 490487 - RNA, 19 nt, Homo sapiens
  misc_RNA (1)...(19): siRNA sense strand
gaucagaugaaagaguaaa

SEQ ID NO: 490488 - RNA, 19 nt, Homo sapiens
  misc_RNA (1)...(19): siRNA sense strand
guucccagaccuugacuaa

SEQ ID NO: 490489 - RNA, 19 nt, Homo sapiens
  misc_RNA (1)...(19): siRNA sense strand
cgaaucugugccuuuaaua

SEQ ID NO: 490490 - RNA, 19 nt, Homo sapiens
  misc_RNA (1)...(19): siRNA sense strand
ccagauauguuuucuugga

SEQ ID NO: 490491 - RNA, 19 nt, Homo sapiens
  misc_RNA (1)...(19): siRNA sense strand
cugugaagcucuguacaaa

SEQ ID NO: 490492 - RNA, 19 nt, Homo sapiens
  misc_RNA (1)...(19): siRNA sense strand
caagacuccuagguuauag

SEQ ID NO: 490493 - RNA, 19 nt, Homo sapiens
  misc_RNA (1)...(19): siRNA sense strand
acacaauuguccucuuuac

SEQ ID NO: 490494 - RNA, 19 nt, Homo sapiens
  misc_RNA (1)...(19): siRNA sense strand
ggaccaaaaugaacacagu

SEQ ID NO: 490495 - RNA, 19 nt, Homo sapiens
  misc_RNA (1)...(19): siRNA sense strand
gaaagaguaaaggaauuca

SEQ ID NO: 490496 - RNA, 19 nt, Homo sapiens
  misc_RNA (1)...(19): siRNA sense strand
gccaugggacacacaauug

SEQ ID NO: 490497 - RNA, 19 nt, Homo sapiens
  misc_RNA (1)...(19): siRNA sense strand
cacagagggugaaggagau

SEQ ID NO: 490498 - RNA, 19 nt, Homo sapiens
  misc_RNA (1)...(19): siRNA sense strand
ccugugggaucagaugaaa

SEQ ID NO: 490499 - RNA, 19 nt, Homo sapiens
  misc_RNA (1)...(19): siRNA sense strand
ccucaggaagcaagcauuu

SEQ ID NO: 490500 - RNA, 19 nt, Homo sapiens
  misc_RNA (1)...(19): siRNA sense strand
ucagauaacaaagcccuaa

SEQ ID NO: 490501 - RNA, 19 nt, Homo sapiens
  misc_RNA (1)...(19): siRNA sense strand
cuagaacgcaagacuccua

SEQ ID NO: 490502 - RNA, 19 nt, Homo sapiens
  misc_RNA (1)...(19): siRNA sense strand
gaaggaccacugugaagcu

SEQ ID NO: 490503 - RNA, 19 nt, Homo sapiens
  misc_RNA (1)...(19): siRNA sense strand
ugauaauucuguggcuuug

SEQ ID NO: 490504 - RNA, 19 nt, Homo sapiens
  misc_RNA (1)...(19): siRNA sense strand
ugaaagaguaaaggaauuc

SEQ ID NO: 490505 - RNA, 19 nt, Homo sapiens
  misc_RNA (1)...(19): siRNA sense strand
caagugaaggaacuaaugg

SEQ ID NO: 490506 - RNA, 19 nt, Homo sapiens
  misc_RNA (1)...(19): siRNA sense strand
ugcaguuugcuguuuauua

SEQ ID NO: 490507 - RNA, 19 nt, Homo sapiens
  misc_RNA (1)...(19): siRNA sense strand
guauugaggaucuguugau

SEQ ID NO: 490508 - RNA, 19 nt, Homo sapiens
  misc_RNA (1)...(19): siRNA sense strand
ggaccugugggaucagaug

SEQ ID NO: 490509 - RNA, 19 nt, Homo sapiens
  misc_RNA (1)...(19): siRNA sense strand
cuaauacagaggucuaaau

SEQ ID NO: 490510 - RNA, 19 nt, Homo sapiens
  misc_RNA (1)...(19): siRNA sense strand
ugugggaucagaugaaaga

SEQ ID NO: 490511 - RNA, 19 nt, Homo sapiens
  misc_RNA (1)...(19): siRNA sense strand
cagaugaaagaguaaagga

SEQ ID NO: 490512 - RNA, 19 nt, Homo sapiens
  misc_RNA (1)...(19): siRNA sense strand
gagggugaaggagaucuuu

SEQ ID NO: 490513 - RNA, 19 nt, Homo sapiens
  misc_RNA (1)...(19): siRNA sense strand
gagcaaucaggaugaccaa

SEQ ID NO: 490514 - RNA, 19 nt, Homo sapiens
  misc_RNA (1)...(19): siRNA sense strand
gcuguuuauuauacccaaa

SEQ ID NO: 490515 - RNA, 19 nt, Homo sapiens
  misc_RNA (1)...(19): siRNA sense strand
gaccaagugaaggaacuaa

SEQ ID NO: 490516 - RNA, 19 nt, Homo sapiens
  misc_RNA (1)...(19): siRNA sense strand
cacacaauuguccucuuua

SEQ ID NO: 490517 - RNA, 19 nt, Homo sapiens
  misc_RNA (1)...(19): siRNA sense strand
auaauucuguggcuuugca

SEQ ID NO: 490518 - RNA, 19 nt, Homo sapiens
  misc_RNA (1)...(19): siRNA sense strand
gcugaagcaaacugccuaa

SEQ ID NO: 490519 - RNA, 19 nt, Homo sapiens
  misc_RNA (1)...(19): siRNA sense strand
auuauugacacaccagaua

SEQ ID NO: 490520 - RNA, 19 nt, Homo sapiens
  misc_RNA (1)...(19): siRNA sense strand
uacaugcacgacucagaua

SEQ ID NO: 490521 - RNA, 19 nt, Homo sapiens
  misc_RNA (1)...(19): siRNA sense strand
acaaggaagaccucaaugg

SEQ ID NO: 490522 - RNA, 19 nt, Homo sapiens
  misc_RNA (1)...(19): siRNA sense strand
uauugaggaucuguugaug

SEQ ID NO: 490523 - RNA, 19 nt, Homo sapiens
  misc_RNA (1)...(19): siRNA sense strand
ggacuguauugaggaucug

SEQ ID NO: 490524 - RNA, 19 nt, Homo sapiens
  misc_RNA (1)...(19): siRNA sense strand
agaccuugacuaagacuug

SEQ ID NO: 490525 - RNA, 19 nt, Homo sapiens
  misc_RNA (1)...(19): siRNA sense strand
caggaagcaagcauuugaa

SEQ ID NO: 490526 - RNA, 19 nt, Homo sapiens
  misc_RNA (1)...(19): siRNA sense strand
agcaagcauuugaaucgaa

SEQ ID NO: 490527 - RNA, 19 nt, Homo sapiens
  misc_RNA (1)...(19): siRNA sense strand
ccuuauaaaguacauggaa

SEQ ID NO: 490528 - RNA, 19 nt, Homo sapiens
  misc_RNA (1)...(19): siRNA sense strand
ccaaugugccagcagaucu

SEQ ID NO: 490529 - RNA, 19 nt, Homo sapiens
  misc_RNA (1)...(19): siRNA sense strand
ggcaaggucuucugcaugu

SEQ ID NO: 490530 - RNA, 19 nt, Homo sapiens
  misc_RNA (1)...(19): siRNA sense strand
gcaaggucuucugcauguu

SEQ ID NO: 490531 - RNA, 19 nt, Homo sapiens
  misc_RNA (1)...(19): siRNA sense strand
gccaucaccgucaucacua

SEQ ID NO: 490532 - RNA, 19 nt, Homo sapiens
  misc_RNA (1)...(19): siRNA sense strand
caaggucuucugcauguuc

SEQ ID NO: 490533 - RNA, 19 nt, Homo sapiens
  misc_RNA (1)...(19): siRNA sense strand
gccuucagcuuccucuaca

SEQ ID NO: 490534 - RNA, 19 nt, Homo sapiens
  misc_RNA (1)...(19): siRNA sense strand
cuacuacuacugcuucauc

SEQ ID NO: 490535 - RNA, 19 nt, Homo sapiens
  misc_RNA (1)...(19): siRNA sense strand
caagagcucucacauguuu

SEQ ID NO: 490536 - RNA, 19 nt, Homo sapiens
  misc_RNA (1)...(19): siRNA sense strand
gacaagagcucucacaugu

SEQ ID NO: 490537 - RNA, 19 nt, Homo sapiens
  misc_RNA (1)...(19): siRNA sense strand
ggagagaauucaugaaaca

SEQ ID NO: 490538 - RNA, 19 nt, Homo sapiens
  misc_RNA (1)...(19): siRNA sense strand
ccagaauccucucaaagua

SEQ ID NO: 490539 - RNA, 19 nt, Homo sapiens
  misc_RNA (1)...(19): siRNA sense strand
guacagagcaaagaaguuu

SEQ ID NO: 490540 - RNA, 19 nt, Homo sapiens
  misc_RNA (1)...(19): siRNA sense strand
caaaugugauguccucaug

SEQ ID NO: 490541 - RNA, 19 nt, Homo sapiens
  misc_RNA (1)...(19): siRNA sense strand
gcucucacauguuuaucua

SEQ ID NO: 490542 - RNA, 19 nt, Homo sapiens
  misc_RNA (1)...(19): siRNA sense strand
ucaaaguacucaaguguca

SEQ ID NO: 490543 - RNA, 19 nt, Homo sapiens
  misc_RNA (1)...(19): siRNA sense strand
caugaaacagcacuacuua

SEQ ID NO: 490544 - RNA, 19 nt, Homo sapiens
  misc_RNA (1)...(19): siRNA sense strand
aaacagcacuacuuaaguc

SEQ ID NO: 490545 - RNA, 19 nt, Homo sapiens
  misc_RNA (1)...(19): siRNA sense strand
gaaacagcacuacuuaagu

SEQ ID NO: 490546 - RNA, 19 nt, Homo sapiens
  misc_RNA (1)...(19): siRNA sense strand
cauagaagaccuaaagaug

SEQ ID NO: 490547 - RNA, 19 nt, Homo sapiens
  misc_RNA (1)...(19): siRNA sense strand
gguccagaauccucucaaa

SEQ ID NO: 490548 - RNA, 19 nt, Homo sapiens
  misc_RNA (1)...(19): siRNA sense strand
uaaagaugguagaaccuau

SEQ ID NO: 490549 - RNA, 19 nt, Homo sapiens
  misc_RNA (1)...(19): siRNA sense strand
caacuacauugaauuccau

SEQ ID NO: 490550 - RNA, 19 nt, Homo sapiens
  misc_RNA (1)...(19): siRNA sense strand
uagaagaccuaaagauggu

SEQ ID NO: 490551 - RNA, 19 nt, Homo sapiens
  misc_RNA (1)...(19): siRNA sense strand
ucagagaguacaaauguga

SEQ ID NO: 490552 - RNA, 19 nt, Homo sapiens
  misc_RNA (1)...(19): siRNA sense strand
gcauagaagaccuaaagau

SEQ ID NO: 490553 - RNA, 19 nt, Homo sapiens
  misc_RNA (1)...(19): siRNA sense strand
ggauggaucgcuuccgaaa

SEQ ID NO: 490554 - RNA, 19 nt, Homo sapiens
  misc_RNA (1)...(19): siRNA sense strand
ugaaacagcacuacuuaag

SEQ ID NO: 490555 - RNA, 19 nt, Homo sapiens
  misc_RNA (1)...(19): siRNA sense strand
ggacggguauguugauagc

SEQ ID NO: 490556 - RNA, 19 nt, Homo sapiens
  misc_RNA (1)...(19): siRNA sense strand
cuuccgaaaugcauaugua

SEQ ID NO: 490557 - RNA, 19 nt, Homo sapiens
  misc_RNA (1)...(19): siRNA sense strand
gcaggagcuucaacuacau

SEQ ID NO: 490558 - RNA, 19 nt, Homo sapiens
  misc_RNA (1)...(19): siRNA sense strand
gugauguccucaugagaga

SEQ ID NO: 490559 - RNA, 19 nt, Homo sapiens
  misc_RNA (1)...(19): siRNA sense strand
cagcacuacuuaaguccaa

SEQ ID NO: 490560 - RNA, 19 nt, Homo sapiens
  misc_RNA (1)...(19): siRNA sense strand
uagcauagaagaccuaaag

SEQ ID NO: 490561 - RNA, 19 nt, Homo sapiens
  misc_RNA (1)...(19): siRNA sense strand
auggaucgcuuccgaaaug

SEQ ID NO: 490562 - RNA, 19 nt, Homo sapiens
  misc_RNA (1)...(19): siRNA sense strand
gaauucagagaguacaaau

SEQ ID NO: 490563 - RNA, 19 nt, Homo sapiens
  misc_RNA (1)...(19): siRNA sense strand
aaaugaagcucugaaagac

SEQ ID NO: 490564 - RNA, 19 nt, Homo sapiens
  misc_RNA (1)...(19): siRNA sense strand
gagcaggagcuucaacuac

SEQ ID NO: 490565 - RNA, 19 nt, Homo sapiens
  misc_RNA (1)...(19): siRNA sense strand
gauguccucaugagagaaa

SEQ ID NO: 490566 - RNA, 19 nt, Homo sapiens
  misc_RNA (1)...(19): siRNA sense strand
uagaaccuaucggcaacua

SEQ ID NO: 490567 - RNA, 19 nt, Homo sapiens
  misc_RNA (1)...(19): siRNA sense strand
ggcccuacuuugcauccua

SEQ ID NO: 490568 - RNA, 19 nt, Homo sapiens
  misc_RNA (1)...(19): siRNA sense strand
acagagagcaggagcuuca

SEQ ID NO: 490569 - RNA, 19 nt, Homo sapiens
  misc_RNA (1)...(19): siRNA sense strand
gcauggacggguauguuga

SEQ ID NO: 490570 - RNA, 19 nt, Homo sapiens
  misc_RNA (1)...(19): siRNA sense strand
gucgagaauucagagagua

SEQ ID NO: 490571 - RNA, 19 nt, Homo sapiens
  misc_RNA (1)...(19): siRNA sense strand
ucaagugucaccaggagaa

SEQ ID NO: 490572 - RNA, 19 nt, Homo sapiens
  misc_RNA (1)...(19): siRNA sense strand
gcacuagugacaacuggau

SEQ ID NO: 490573 - RNA, 19 nt, Homo sapiens
  misc_RNA (1)...(19): siRNA sense strand
augaagcucugaaagacaa

SEQ ID NO: 490574 - RNA, 19 nt, Homo sapiens
  misc_RNA (1)...(19): siRNA sense strand
agacaagagcucucacaug

SEQ ID NO: 490575 - RNA, 19 nt, Homo sapiens
  misc_RNA (1)...(19): siRNA sense strand
cuaaagaugguagaaccua

SEQ ID NO: 490576 - RNA, 19 nt, Homo sapiens
  misc_RNA (1)...(19): siRNA sense strand
acauugaauuccauuguag

SEQ ID NO: 490577 - RNA, 19 nt, Homo sapiens
  misc_RNA (1)...(19): siRNA sense strand
gguacaaaaucgagcauau

SEQ ID NO: 490578 - RNA, 19 nt, Homo sapiens
  misc_RNA (1)...(19): siRNA sense strand
guacaaaaucgagcauaua

SEQ ID NO: 490579 - RNA, 19 nt, Homo sapiens
  misc_RNA (1)...(19): siRNA sense strand
gcccuacuuugcauccuau

SEQ ID NO: 490580 - RNA, 19 nt, Homo sapiens
  misc_RNA (1)...(19): siRNA sense strand
agcaggagcuucaacuaca

SEQ ID NO: 490581 - RNA, 19 nt, Homo sapiens
  misc_RNA (1)...(19): siRNA sense strand
ucaugaaacagcacuacuu

SEQ ID NO: 490582 - RNA, 19 nt, Homo sapiens
  misc_RNA (1)...(19): siRNA sense strand
uauaugcacuagugacaac

SEQ ID NO: 490583 - RNA, 19 nt, Homo sapiens
  misc_RNA (1)...(19): siRNA sense strand
aaaaugaagcucugaaaga

SEQ ID NO: 490584 - RNA, 19 nt, Homo sapiens
  misc_RNA (1)...(19): siRNA sense strand
ugaaagacaagagcucuca

SEQ ID NO: 490585 - RNA, 19 nt, Homo sapiens
  misc_RNA (1)...(19): siRNA sense strand
uuggagagaauucaugaaa

SEQ ID NO: 490586 - RNA, 19 nt, Homo sapiens
  misc_RNA (1)...(19): siRNA sense strand
cuacauugaauuccauugu

SEQ ID NO: 490587 - RNA, 19 nt, Homo sapiens
  misc_RNA (1)...(19): siRNA sense strand
gagaauucagagaguacaa

SEQ ID NO: 490588 - RNA, 19 nt, Homo sapiens
  misc_RNA (1)...(19): siRNA sense strand
gaaaaugaagcucugaaag

SEQ ID NO: 490589 - RNA, 19 nt, Homo sapiens
  misc_RNA (1)...(19): siRNA sense strand
auucagagaguacaaaugu

SEQ ID NO: 490590 - RNA, 19 nt, Homo sapiens
  misc_RNA (1)...(19): siRNA sense strand
cauauaugcacuagugaca

SEQ ID NO: 490591 - RNA, 19 nt, Homo sapiens
  misc_RNA (1)...(19): siRNA sense strand
gauagcauagaagaccuaa

SEQ ID NO: 490592 - RNA, 19 nt, Homo sapiens
  misc_RNA (1)...(19): siRNA sense strand
ucucaaaguacucaagugu

SEQ ID NO: 490593 - RNA, 19 nt, Homo sapiens
  misc_RNA (1)...(19): siRNA sense strand
agaauccucucaaaguacu

SEQ ID NO: 490594 - RNA, 19 nt, Homo sapiens
  misc_RNA (1)...(19): siRNA sense strand
gagaguacaaaugugaugu

SEQ ID NO: 490595 - RNA, 19 nt, Homo sapiens
  misc_RNA (1)...(19): siRNA sense strand
uagcauggacggguauguu

SEQ ID NO: 490596 - RNA, 19 nt, Homo sapiens
  misc_RNA (1)...(19): siRNA sense strand
uccagaauccucucaaagu

SEQ ID NO: 490597 - RNA, 19 nt, Homo sapiens
  misc_RNA (1)...(19): siRNA sense strand
aaugugauguccucaugag

SEQ ID NO: 490598 - RNA, 19 nt, Homo sapiens
  misc_RNA (1)...(19): siRNA sense strand
uggagagaauucaugaaac

SEQ ID NO: 490599 - RNA, 19 nt, Homo sapiens
  misc_RNA (1)...(19): siRNA sense strand
uaugcacacugcuuguaca

SEQ ID NO: 490600 - RNA, 19 nt, Homo sapiens
  misc_RNA (1)...(19): siRNA sense strand
gagagcaggagcuucaacu

SEQ ID NO: 490601 - RNA, 19 nt, Homo sapiens
  misc_RNA (1)...(19): siRNA sense strand
cuauaucucaugguacaaa

SEQ ID NO: 490602 - RNA, 19 nt, Homo sapiens
  misc_RNA (1)...(19): siRNA sense strand
ggacgagucugagauguug

SEQ ID NO: 490603 - RNA, 19 nt, Homo sapiens
  misc_RNA (1)...(19): siRNA sense strand
gcgaggagcucuacgucau

SEQ ID NO: 490604 - RNA, 19 nt, Homo sapiens
  misc_RNA (1)...(19): siRNA sense strand
caaagaacgccggaugaaa

SEQ ID NO: 490605 - RNA, 19 nt, Homo sapiens
  misc_RNA (1)...(19): siRNA sense strand
ccaaagagacggacaacuc

SEQ ID NO: 490606 - RNA, 19 nt, Homo sapiens
  misc_RNA (1)...(19): siRNA sense strand
gcgcguggcacaucaaaug

SEQ ID NO: 490607 - RNA, 19 nt, Homo sapiens
  misc_RNA (1)...(19): siRNA sense strand
ucuuucaccucaacuguuu

SEQ ID NO: 490608 - RNA, 19 nt, Homo sapiens
  misc_RNA (1)...(19): siRNA sense strand
ggagaccggccucaacaug

SEQ ID NO: 490609 - RNA, 19 nt, Homo sapiens
  misc_RNA (1)...(19): siRNA sense strand
ccaaagaacgccggaugaa

SEQ ID NO: 490610 - RNA, 19 nt, Homo sapiens
  misc_RNA (1)...(19): siRNA sense strand
acaaggagacggccaacaa

SEQ ID NO: 490611 - RNA, 19 nt, Homo sapiens
  misc_RNA (1)...(19): siRNA sense strand
aaagaacgccggaugaaac

SEQ ID NO: 490612 - RNA, 19 nt, Homo sapiens
  misc_RNA (1)...(19): siRNA sense strand
gggcaagcucuacugcaaa

SEQ ID NO: 490613 - RNA, 19 nt, Homo sapiens
  misc_RNA (1)...(19): siRNA sense strand
ggcaagcucuacugcaaaa

SEQ ID NO: 490614 - RNA, 19 nt, Homo sapiens
  misc_RNA (1)...(19): siRNA sense strand
gcucauccagccucaagga

SEQ ID NO: 490615 - RNA, 19 nt, Homo sapiens
  misc_RNA (1)...(19): siRNA sense strand
agggcaagcucuacugcaa

SEQ ID NO: 490616 - RNA, 19 nt, Homo sapiens
  misc_RNA (1)...(19): siRNA sense strand
acaaguucgugugcaaaga

SEQ ID NO: 490617 - RNA, 19 nt, Homo sapiens
  misc_RNA (1)...(19): siRNA sense strand
gagcucauccagccucaag

SEQ ID NO: 490618 - RNA, 19 nt, Homo sapiens
  misc_RNA (1)...(19): siRNA sense strand
aagcaacuacgacuucuuc

SEQ ID NO: 490619 - RNA, 19 nt, Homo sapiens
  misc_RNA (1)...(19): siRNA sense strand
caggagaccggccucaaca

SEQ ID NO: 490620 - RNA, 19 nt, Homo sapiens
  misc_RNA (1)...(19): siRNA sense strand
cuaccaaggcgacuacuac

SEQ ID NO: 490621 - RNA, 19 nt, Homo sapiens
  misc_RNA (1)...(19): siRNA sense strand
gcccauccucgaccgcuuu

SEQ ID NO: 490622 - RNA, 19 nt, Homo sapiens
  misc_RNA (1)...(19): siRNA sense strand
gagacuaccaaggcgacua

SEQ ID NO: 490623 - RNA, 19 nt, Homo sapiens
  misc_RNA (1)...(19): siRNA sense strand
guacggaccgcaguuuguc

SEQ ID NO: 490624 - RNA, 19 nt, Homo sapiens
  misc_RNA (1)...(19): siRNA sense strand
cagguucaccgacaugauc

SEQ ID NO: 490625 - RNA, 19 nt, Homo sapiens
  misc_RNA (1)...(19): siRNA sense strand
cuacuacggagacuaccaa

SEQ ID NO: 490626 - RNA, 19 nt, Homo sapiens
  misc_RNA (1)...(19): siRNA sense strand
gcaagugccuagcuaugaa

SEQ ID NO: 490627 - RNA, 19 nt, Homo sapiens
  misc_RNA (1)...(19): siRNA sense strand
gaagccgggucaucuauuc

SEQ ID NO: 490628 - RNA, 19 nt, Homo sapiens
  misc_RNA (1)...(19): siRNA sense strand
gaccuugaccuacgaguuu

SEQ ID NO: 490629 - RNA, 19 nt, Homo sapiens
  misc_RNA (1)...(19): siRNA sense strand
ggaagucagugcagcucaa

SEQ ID NO: 490630 - RNA, 19 nt, Homo sapiens
  misc_RNA (1)...(19): siRNA sense strand
caacagcucggcacccauu

SEQ ID NO: 490631 - RNA, 19 nt, Homo sapiens
  misc_RNA (1)...(19): siRNA sense strand
uuccaucgcugcccuugua

SEQ ID NO: 490632 - RNA, 19 nt, Homo sapiens
  misc_RNA (1)...(19): siRNA sense strand
ggucaucuauuccgaaagc

SEQ ID NO: 490633 - RNA, 19 nt, Homo sapiens
  misc_RNA (1)...(19): siRNA sense strand
caggaucaccgccuacaaa

SEQ ID NO: 490634 - RNA, 19 nt, Homo sapiens
  misc_RNA (1)...(19): siRNA sense strand
ggaagccgggucaucuauu

SEQ ID NO: 490635 - RNA, 19 nt, Homo sapiens
  misc_RNA (1)...(19): siRNA sense strand
ggaccucagugcccuucug

SEQ ID NO: 490636 - RNA, 19 nt, Homo sapiens
  misc_RNA (1)...(19): siRNA sense strand
ggucuuaaagggcaggaaa

SEQ ID NO: 490637 - RNA, 19 nt, Homo sapiens
  misc_RNA (1)...(19): siRNA sense strand
uuaaagggcaggaaauaca

SEQ ID NO: 490638 - RNA, 19 nt, Homo sapiens
  misc_RNA (1)...(19): siRNA sense strand
gggcaggaaauacacuuug

SEQ ID NO: 490639 - RNA, 19 nt, Homo sapiens
  misc_RNA (1)...(19): siRNA sense strand
cgggucaucuauuccgaaa

SEQ ID NO: 490640 - RNA, 19 nt, Homo sapiens
  misc_RNA (1)...(19): siRNA sense strand
cuaugcaagugccuagcua

SEQ ID NO: 490641 - RNA, 19 nt, Homo sapiens
  misc_RNA (1)...(19): siRNA sense strand
ucuuaaagggcaggaaaua

SEQ ID NO: 490642 - RNA, 19 nt, Homo sapiens
  misc_RNA (1)...(19): siRNA sense strand
gaagucagugcagcucaau

SEQ ID NO: 490643 - RNA, 19 nt, Homo sapiens
  misc_RNA (1)...(19): siRNA sense strand
agucagugcagcucaauug

SEQ ID NO: 490644 - RNA, 19 nt, Homo sapiens
  misc_RNA (1)...(19): siRNA sense strand
ggcaggaaauacacuuugc

SEQ ID NO: 490645 - RNA, 19 nt, Homo sapiens
  misc_RNA (1)...(19): siRNA sense strand
ccaacgugaccuugaccua

SEQ ID NO: 490646 - RNA, 19 nt, Homo sapiens
  misc_RNA (1)...(19): siRNA sense strand
uaugaagucccaggcguaa

SEQ ID NO: 490647 - RNA, 19 nt, Homo sapiens
  misc_RNA (1)...(19): siRNA sense strand
uagggauccuccucacugu

SEQ ID NO: 490648 - RNA, 19 nt, Homo sapiens
  misc_RNA (1)...(19): siRNA sense strand
ugugggcgcugcguaccua

SEQ ID NO: 490649 - RNA, 19 nt, Homo sapiens
  misc_RNA (1)...(19): siRNA sense strand
cugcguaccuaugcaagug

SEQ ID NO: 490650 - RNA, 19 nt, Homo sapiens
  misc_RNA (1)...(19): siRNA sense strand
gccuggaucuggccaacgu

SEQ ID NO: 490651 - RNA, 19 nt, Homo sapiens
  misc_RNA (1)...(19): siRNA sense strand
gcucggcacccauuacacu

SEQ ID NO: 490652 - RNA, 19 nt, Homo sapiens
  misc_RNA (1)...(19): siRNA sense strand
gaagccgggucaucuauuc

SEQ ID NO: 490653 - RNA, 19 nt, Homo sapiens
  misc_RNA (1)...(19): siRNA sense strand
gaccuugaccuacgaguuu

SEQ ID NO: 490654 - RNA, 19 nt, Homo sapiens
  misc_RNA (1)...(19): siRNA sense strand
ggaagucagugcagcucaa

SEQ ID NO: 490655 - RNA, 19 nt, Homo sapiens
  misc_RNA (1)...(19): siRNA sense strand
caacagcucggcacccauu

SEQ ID NO: 490656 - RNA, 19 nt, Homo sapiens
  misc_RNA (1)...(19): siRNA sense strand
ggucaucuauuccgaaagc

SEQ ID NO: 490657 - RNA, 19 nt, Homo sapiens
  misc_RNA (1)...(19): siRNA sense strand
caggaucaccgccuacaaa

SEQ ID NO: 490658 - RNA, 19 nt, Homo sapiens
  misc_RNA (1)...(19): siRNA sense strand
ggaagccgggucaucuauu

SEQ ID NO: 490659 - RNA, 19 nt, Homo sapiens
  misc_RNA (1)...(19): siRNA sense strand
ggaccucagugcccuucug

SEQ ID NO: 490660 - RNA, 19 nt, Homo sapiens
  misc_RNA (1)...(19): siRNA sense strand
ggucuuaaagggcaggaaa

SEQ ID NO: 490661 - RNA, 19 nt, Homo sapiens
  misc_RNA (1)...(19): siRNA sense strand
uuaaagggcaggaaauaca

SEQ ID NO: 490662 - RNA, 19 nt, Homo sapiens
  misc_RNA (1)...(19): siRNA sense strand
gggcaggaaauacacuuug

SEQ ID NO: 490663 - RNA, 19 nt, Homo sapiens
  misc_RNA (1)...(19): siRNA sense strand
cgggucaucuauuccgaaa

SEQ ID NO: 490664 - RNA, 19 nt, Homo sapiens
  misc_RNA (1)...(19): siRNA sense strand
ucuuaaagggcaggaaaua

SEQ ID NO: 490665 - RNA, 19 nt, Homo sapiens
  misc_RNA (1)...(19): siRNA sense strand
ggcaggaaauacacuuugc

SEQ ID NO: 490666 - RNA, 19 nt, Homo sapiens
  misc_RNA (1)...(19): siRNA sense strand
gaagucagugcagcucaau

SEQ ID NO: 490667 - RNA, 19 nt, Homo sapiens
  misc_RNA (1)...(19): siRNA sense strand
agucagugcagcucaauug

SEQ ID NO: 490668 - RNA, 19 nt, Homo sapiens
  misc_RNA (1)...(19): siRNA sense strand
ccaacgugaccuugaccua

SEQ ID NO: 490669 - RNA, 19 nt, Homo sapiens
  misc_RNA (1)...(19): siRNA sense strand
gccuggaucuggccaacgu

SEQ ID NO: 490670 - RNA, 19 nt, Homo sapiens
  misc_RNA (1)...(19): siRNA sense strand
gcucggcacccauuacacu

SEQ ID NO: 490671 - RNA, 19 nt, Homo sapiens
  misc_RNA (1)...(19): siRNA sense strand
ggaggaaacuucacguuga

SEQ ID NO: 490672 - RNA, 19 nt, Homo sapiens
  misc_RNA (1)...(19): siRNA sense strand
ggacugggacuguuugaaa

SEQ ID NO: 490673 - RNA, 19 nt, Homo sapiens
  misc_RNA (1)...(19): siRNA sense strand
gggagacccugaucaagaa

SEQ ID NO: 490674 - RNA, 19 nt, Homo sapiens
  misc_RNA (1)...(19): siRNA sense strand
gggagaacgugaccaucua

SEQ ID NO: 490675 - RNA, 19 nt, Homo sapiens
  misc_RNA (1)...(19): siRNA sense strand
gaaucuaccugcccaaguc

SEQ ID NO: 490676 - RNA, 19 nt, Homo sapiens
  misc_RNA (1)...(19): siRNA sense strand
gcaagaagggcgaguacaa

SEQ ID NO: 490677 - RNA, 19 nt, Homo sapiens
  misc_RNA (1)...(19): siRNA sense strand
ccagagagcuccgaaccuu

SEQ ID NO: 490678 - RNA, 19 nt, Homo sapiens
  misc_RNA (1)...(19): siRNA sense strand
gggcagauggugacaguaa

SEQ ID NO: 490679 - RNA, 19 nt, Homo sapiens
  misc_RNA (1)...(19): siRNA sense strand
gaacaggagcgcagagcuu

SEQ ID NO: 490680 - RNA, 19 nt, Homo sapiens
  misc_RNA (1)...(19): siRNA sense strand
gcacggacugggacuguuu

SEQ ID NO: 490681 - RNA, 19 nt, Homo sapiens
  misc_RNA (1)...(19): siRNA sense strand
gcccagaacgcauuacuug

SEQ ID NO: 490682 - RNA, 19 nt, Homo sapiens
  misc_RNA (1)...(19): siRNA sense strand
ggaggaccauggagccaau

SEQ ID NO: 490683 - RNA, 19 nt, Homo sapiens
  misc_RNA (1)...(19): siRNA sense strand
ucccagagcucccagaauc

SEQ ID NO: 490684 - RNA, 19 nt, Homo sapiens
  misc_RNA (1)...(19): siRNA sense strand
caccggagauggaugaauc

SEQ ID NO: 490685 - RNA, 19 nt, Homo sapiens
  misc_RNA (1)...(19): siRNA sense strand
cgacagacgcagcuucuuc

SEQ ID NO: 490686 - RNA, 19 nt, Homo sapiens
  misc_RNA (1)...(19): siRNA sense strand
gaggaaacuucacguugac

SEQ ID NO: 490687 - RNA, 19 nt, Homo sapiens
  misc_RNA (1)...(19): siRNA sense strand
gaaucugaguccugauguc

SEQ ID NO: 490688 - RNA, 19 nt, Homo sapiens
  misc_RNA (1)...(19): siRNA sense strand
gaauauggccccagguuug

SEQ ID NO: 490689 - RNA, 19 nt, Homo sapiens
  misc_RNA (1)...(19): siRNA sense strand
gggagcaugcgggcacuua

SEQ ID NO: 490690 - RNA, 19 nt, Homo sapiens
  misc_RNA (1)...(19): siRNA sense strand
ucacugugggcguggaaua

SEQ ID NO: 490691 - RNA, 19 nt, Homo sapiens
  misc_RNA (1)...(19): siRNA sense strand
uaaaugccaccgagaacga

SEQ ID NO: 490692 - RNA, 19 nt, Homo sapiens
  misc_RNA (1)...(19): siRNA sense strand
gucaaggacguaacgcuaa

SEQ ID NO: 490693 - RNA, 19 nt, Homo sapiens
  misc_RNA (1)...(19): siRNA sense strand
agaccucgcugcgccgaaa

SEQ ID NO: 490694 - RNA, 19 nt, Homo sapiens
  misc_RNA (1)...(19): siRNA sense strand
gaccauggagccaauuucu

SEQ ID NO: 490695 - RNA, 19 nt, Homo sapiens
  misc_RNA (1)...(19): siRNA sense strand
uaacgcuaacgguggagua

SEQ ID NO: 490696 - RNA, 19 nt, Homo sapiens
  misc_RNA (1)...(19): siRNA sense strand
ggaccauggagccaauuuc

SEQ ID NO: 490697 - RNA, 19 nt, Homo sapiens
  misc_RNA (1)...(19): siRNA sense strand
ucaaggacguaacgcuaac

SEQ ID NO: 490698 - RNA, 19 nt, Homo sapiens
  misc_RNA (1)...(19): siRNA sense strand
gacugggacuguuugaaaa

SEQ ID NO: 490699 - RNA, 19 nt, Homo sapiens
  misc_RNA (1)...(19): siRNA sense strand
cagcuucgccggugaacca

SEQ ID NO: 490700 - RNA, 19 nt, Homo sapiens
  misc_RNA (1)...(19): siRNA sense strand
ggaauauggccccagguuu

SEQ ID NO: 490701 - RNA, 19 nt, Homo sapiens
  misc_RNA (1)...(19): siRNA sense strand
gcagagcuucguguccuau

SEQ ID NO: 490702 - RNA, 19 nt, Homo sapiens
  misc_RNA (1)...(19): siRNA sense strand
gcucacagccacgguacug

SEQ ID NO: 490703 - RNA, 19 nt, Homo sapiens
  misc_RNA (1)...(19): siRNA sense strand
cccaagcucuggucacacu

SEQ ID NO: 490704 - RNA, 19 nt, Homo sapiens
  misc_RNA (1)...(19): siRNA sense strand
ggagaacgugaccaucuac

SEQ ID NO: 490705 - RNA, 19 nt, Homo sapiens
  misc_RNA (1)...(19): siRNA sense strand
gacagacgcagcuucuucu

SEQ ID NO: 490706 - RNA, 19 nt, Homo sapiens
  misc_RNA (1)...(19): siRNA sense strand
gcuaaaugccaccgagaac

SEQ ID NO: 490707 - RNA, 19 nt, Homo sapiens
  misc_RNA (1)...(19): siRNA sense strand
caagaagggcgaguacaac

SEQ ID NO: 490708 - RNA, 19 nt, Homo sapiens
  misc_RNA (1)...(19): siRNA sense strand
aagccucgcugagcugugu

SEQ ID NO: 490709 - RNA, 19 nt, Homo sapiens
  misc_RNA (1)...(19): siRNA sense strand
ggggagacccugaucaaga

SEQ ID NO: 490710 - RNA, 19 nt, Homo sapiens
  misc_RNA (1)...(19): siRNA sense strand
ccaagaagcugaugacaug

SEQ ID NO: 490711 - RNA, 19 nt, Homo sapiens
  misc_RNA (1)...(19): siRNA sense strand
gaauccaccuuguuucuga

SEQ ID NO: 490712 - RNA, 19 nt, Homo sapiens
  misc_RNA (1)...(19): siRNA sense strand
gagcacaucucagcugaaa

SEQ ID NO: 490713 - RNA, 19 nt, Homo sapiens
  misc_RNA (1)...(19): siRNA sense strand
aaacccagcugaagucauu

SEQ ID NO: 490714 - RNA, 19 nt, Homo sapiens
  misc_RNA (1)...(19): siRNA sense strand
gaaauauguuggugaacug

SEQ ID NO: 490715 - RNA, 19 nt, Homo sapiens
  misc_RNA (1)...(19): siRNA sense strand
gcugauguauacacguuua

SEQ ID NO: 490716 - RNA, 19 nt, Homo sapiens
  misc_RNA (1)...(19): siRNA sense strand
gagaaucagcuucaagaaa

SEQ ID NO: 490717 - RNA, 19 nt, Homo sapiens
  misc_RNA (1)...(19): siRNA sense strand
ggaaauauguuggugaacu

SEQ ID NO: 490718 - RNA, 19 nt, Homo sapiens
  misc_RNA (1)...(19): siRNA sense strand
gagauccagucuaugauga

SEQ ID NO: 490719 - RNA, 19 nt, Homo sapiens
  misc_RNA (1)...(19): siRNA sense strand
ugaccgagauccagucuau

SEQ ID NO: 490720 - RNA, 19 nt, Homo sapiens
  misc_RNA (1)...(19): siRNA sense strand
ccugaaagaugucucauuc

SEQ ID NO: 490721 - RNA, 19 nt, Homo sapiens
  misc_RNA (1)...(19): siRNA sense strand
gaaaggcuucugagagauu

SEQ ID NO: 490722 - RNA, 19 nt, Homo sapiens
  misc_RNA (1)...(19): siRNA sense strand
cagcugaagucauuagaga

SEQ ID NO: 490723 - RNA, 19 nt, Homo sapiens
  misc_RNA (1)...(19): siRNA sense strand
aaaccaaacugaucucucu

SEQ ID NO: 490724 - RNA, 19 nt, Homo sapiens
  misc_RNA (1)...(19): siRNA sense strand
gaaagaugucucauucaga

SEQ ID NO: 490725 - RNA, 19 nt, Homo sapiens
  misc_RNA (1)...(19): siRNA sense strand
gauauugcaccaaguagaa

SEQ ID NO: 490726 - RNA, 19 nt, Homo sapiens
  misc_RNA (1)...(19): siRNA sense strand
gcaaucuguucugaaauga

SEQ ID NO: 490727 - RNA, 19 nt, Homo sapiens
  misc_RNA (1)...(19): siRNA sense strand
ggagacugaucuuuauaag

SEQ ID NO: 490728 - RNA, 19 nt, Homo sapiens
  misc_RNA (1)...(19): siRNA sense strand
guacugaugaggaaaguga

SEQ ID NO: 490729 - RNA, 19 nt, Homo sapiens
  misc_RNA (1)...(19): siRNA sense strand
gaacccaguauaacucauu

SEQ ID NO: 490730 - RNA, 19 nt, Homo sapiens
  misc_RNA (1)...(19): siRNA sense strand
ugagaguacugaugaggaa

SEQ ID NO: 490731 - RNA, 19 nt, Homo sapiens
  misc_RNA (1)...(19): siRNA sense strand
aaacugcaaucuguucuga

SEQ ID NO: 490732 - RNA, 19 nt, Homo sapiens
  misc_RNA (1)...(19): siRNA sense strand
gacagcgaaugcaaagaaa

SEQ ID NO: 490733 - RNA, 19 nt, Homo sapiens
  misc_RNA (1)...(19): siRNA sense strand
aaaugcagcucaagaacga

SEQ ID NO: 490734 - RNA, 19 nt, Homo sapiens
  misc_RNA (1)...(19): siRNA sense strand
cagcugauguauacacguu

SEQ ID NO: 490735 - RNA, 19 nt, Homo sapiens
  misc_RNA (1)...(19): siRNA sense strand
agaaucagcuucaagaaaa

SEQ ID NO: 490736 - RNA, 19 nt, Homo sapiens
  misc_RNA (1)...(19): siRNA sense strand
uaaggaagcuuuggagacu

SEQ ID NO: 490737 - RNA, 19 nt, Homo sapiens
  misc_RNA (1)...(19): siRNA sense strand
augaaaggcuucugagaga

SEQ ID NO: 490738 - RNA, 19 nt, Homo sapiens
  misc_RNA (1)...(19): siRNA sense strand
gguguugaaugagaagaaa

SEQ ID NO: 490739 - RNA, 19 nt, Homo sapiens
  misc_RNA (1)...(19): siRNA sense strand
ucagagauuucccaagaag

SEQ ID NO: 490740 - RNA, 19 nt, Homo sapiens
  misc_RNA (1)...(19): siRNA sense strand
ccucuuugaugagauuuaa

SEQ ID NO: 490741 - RNA, 19 nt, Homo sapiens
  misc_RNA (1)...(19): siRNA sense strand
gaaaaugaaaggcuucuga

SEQ ID NO: 490742 - RNA, 19 nt, Homo sapiens
  misc_RNA (1)...(19): siRNA sense strand
ggaaucugguuuuguuauu

SEQ ID NO: 490743 - RNA, 19 nt, Homo sapiens
  misc_RNA (1)...(19): siRNA sense strand
ggagaaucagcuucaagaa

SEQ ID NO: 490744 - RNA, 19 nt, Homo sapiens
  misc_RNA (1)...(19): siRNA sense strand
agacagcgaaugcaaagaa

SEQ ID NO: 490745 - RNA, 19 nt, Homo sapiens
  misc_RNA (1)...(19): siRNA sense strand
gauccagucuaugaugaga

SEQ ID NO: 490746 - RNA, 19 nt, Homo sapiens
  misc_RNA (1)...(19): siRNA sense strand
gagcaggaccagcugaugu

SEQ ID NO: 490747 - RNA, 19 nt, Homo sapiens
  misc_RNA (1)...(19): siRNA sense strand
guuauuacacuuacugaug

SEQ ID NO: 490748 - RNA, 19 nt, Homo sapiens
  misc_RNA (1)...(19): siRNA sense strand
aaaaggacaucaaacaaga

SEQ ID NO: 490749 - RNA, 19 nt, Homo sapiens
  misc_RNA (1)...(19): siRNA sense strand
ggagacagcgaaugcaaag

SEQ ID NO: 490750 - RNA, 19 nt, Homo sapiens
  misc_RNA (1)...(19): siRNA sense strand
ugcaaucuguucugaaaug

SEQ ID NO: 490751 - RNA, 19 nt, Homo sapiens
  misc_RNA (1)...(19): siRNA sense strand
acugcaaucuguucugaaa

SEQ ID NO: 490752 - RNA, 19 nt, Homo sapiens
  misc_RNA (1)...(19): siRNA sense strand
gagauuggaaugauguuca

SEQ ID NO: 490753 - RNA, 19 nt, Homo sapiens
  misc_RNA (1)...(19): siRNA sense strand
gaaacagcagcccagaaga

SEQ ID NO: 490754 - RNA, 19 nt, Homo sapiens
  misc_RNA (1)...(19): siRNA sense strand
gguuuauucugguguugaa

SEQ ID NO: 490755 - RNA, 19 nt, Homo sapiens
  misc_RNA (1)...(19): siRNA sense strand
ugggacaguuucugaauca

SEQ ID NO: 490756 - RNA, 19 nt, Homo sapiens
  misc_RNA (1)...(19): siRNA sense strand
caucucagcugaaaacaug

SEQ ID NO: 490757 - RNA, 19 nt, Homo sapiens
  misc_RNA (1)...(19): siRNA sense strand
gaugacauggcaauggaaa

SEQ ID NO: 490758 - RNA, 19 nt, Homo sapiens
  misc_RNA (1)...(19): siRNA sense strand
gagaaacagcagcccagaa

SEQ ID NO: 490759 - RNA, 19 nt, Homo sapiens
  misc_RNA (1)...(19): siRNA sense strand
gagcaccugcagaaagaaa

SEQ ID NO: 490760 - RNA, 19 nt, Homo sapiens
  misc_RNA (1)...(19): siRNA sense strand
gaaaaggacaucaaacaag

SEQ ID NO: 490761 - RNA, 19 nt, Homo sapiens
  misc_RNA (1)...(19): siRNA sense strand
agaccucuuugaugagauu

SEQ ID NO: 490762 - RNA, 19 nt, Homo sapiens
  misc_RNA (1)...(19): siRNA sense strand
agggaaauauguuggugaa

SEQ ID NO: 490763 - RNA, 19 nt, Homo sapiens
  misc_RNA (1)...(19): siRNA sense strand
gauguucaaggacgauuug

SEQ ID NO: 490764 - RNA, 19 nt, Homo sapiens
  misc_RNA (1)...(19): siRNA sense strand
ggacaccauugcagaaaau

SEQ ID NO: 490765 - RNA, 19 nt, Homo sapiens
  misc_RNA (1)...(19): siRNA sense strand
gcagaauccaccuuguuuc

SEQ ID NO: 490766 - RNA, 19 nt, Homo sapiens
  misc_RNA (1)...(19): siRNA sense strand
uuuggagacugaucuuuau

SEQ ID NO: 490767 - RNA, 19 nt, Homo sapiens
  misc_RNA (1)...(19): siRNA sense strand
gagaaaaggacaucaaaca

SEQ ID NO: 490768 - RNA, 19 nt, Homo sapiens
  misc_RNA (1)...(19): siRNA sense strand
gucuugaugucacugauau

SEQ ID NO: 490769 - RNA, 19 nt, Homo sapiens
  misc_RNA (1)...(19): siRNA sense strand
uagaaacucugagaaacag

SEQ ID NO: 490770 - RNA, 19 nt, Homo sapiens
  misc_RNA (1)...(19): siRNA sense strand
ugaugucacugauauugca

SEQ ID NO: 490771 - RNA, 19 nt, Homo sapiens
  misc_RNA (1)...(19): siRNA sense strand
gagaaaagcauuguuguca

SEQ ID NO: 490772 - RNA, 19 nt, Homo sapiens
  misc_RNA (1)...(19): siRNA sense strand
uaagcagaauccaccuugu

SEQ ID NO: 490773 - RNA, 19 nt, Homo sapiens
  misc_RNA (1)...(19): siRNA sense strand
gggaaacugcaaucuguuc

SEQ ID NO: 490774 - RNA, 19 nt, Homo sapiens
  misc_RNA (1)...(19): siRNA sense strand
uggagacugaucuuuauaa

SEQ ID NO: 490775 - RNA, 19 nt, Homo sapiens
  misc_RNA (1)...(19): siRNA sense strand
cuuuggagacugaucuuua

SEQ ID NO: 490776 - RNA, 19 nt, Homo sapiens
  misc_RNA (1)...(19): siRNA sense strand
aggaagcuuuggagacuga

SEQ ID NO: 490777 - RNA, 19 nt, Homo sapiens
  misc_RNA (1)...(19): siRNA sense strand
augagcaccugcagaaaga

SEQ ID NO: 490778 - RNA, 19 nt, Homo sapiens
  misc_RNA (1)...(19): siRNA sense strand
aggaccagcugauguauac

SEQ ID NO: 490779 - RNA, 19 nt, Homo sapiens
  misc_RNA (1)...(19): siRNA sense strand
cugaugacauggcaaugga

SEQ ID NO: 490780 - RNA, 19 nt, Homo sapiens
  misc_RNA (1)...(19): siRNA sense strand
ucugagagauuggaaugau

SEQ ID NO: 490781 - RNA, 19 nt, Homo sapiens
  misc_RNA (1)...(19): siRNA sense strand
gaaacugcaaucuguucug

SEQ ID NO: 490782 - RNA, 19 nt, Homo sapiens
  misc_RNA (1)...(19): siRNA sense strand
agaaacagcagcccagaag

SEQ ID NO: 490783 - RNA, 19 nt, Homo sapiens
  misc_RNA (1)...(19): siRNA sense strand
cgagauccagucuaugaug

SEQ ID NO: 490784 - RNA, 19 nt, Homo sapiens
  misc_RNA (1)...(19): siRNA sense strand
cagcgaaugcaaagaaauc

SEQ ID NO: 490785 - RNA, 19 nt, Homo sapiens
  misc_RNA (1)...(19): siRNA sense strand
aaaggcuucugagagauug

SEQ ID NO: 490786 - RNA, 19 nt, Homo sapiens
  misc_RNA (1)...(19): siRNA sense strand
gaucuuuauaagcgguuua

SEQ ID NO: 490787 - RNA, 19 nt, Homo sapiens
  misc_RNA (1)...(19): siRNA sense strand
caggaccagcugauguaua

SEQ ID NO: 490788 - RNA, 19 nt, Homo sapiens
  misc_RNA (1)...(19): siRNA sense strand
uuagaaacucugagaaaca

SEQ ID NO: 490789 - RNA, 19 nt, Homo sapiens
  misc_RNA (1)...(19): siRNA sense strand
agauuggaaugauguucaa

SEQ ID NO: 490790 - RNA, 19 nt, Homo sapiens
  misc_RNA (1)...(19): siRNA sense strand
ugaaaggcuucugagagau

SEQ ID NO: 490791 - RNA, 19 nt, Homo sapiens
  misc_RNA (1)...(19): siRNA sense strand
aaaaugagcaccugcagaa

SEQ ID NO: 490792 - RNA, 19 nt, Homo sapiens
  misc_RNA (1)...(19): siRNA sense strand
ugagagauuggaaugaugu

SEQ ID NO: 490793 - RNA, 19 nt, Homo sapiens
  misc_RNA (1)...(19): siRNA sense strand
aagcagaauccaccuuguu

SEQ ID NO: 490794 - RNA, 19 nt, Homo sapiens
  misc_RNA (1)...(19): siRNA sense strand
aacccaguauaacucauuu

SEQ ID NO: 490795 - RNA, 19 nt, Homo sapiens
  misc_RNA (1)...(19): siRNA sense strand
gauggucauucagcaugga

SEQ ID NO: 490796 - RNA, 19 nt, Homo sapiens
  misc_RNA (1)...(19): siRNA sense strand
cuuuagaaacucugagaaa

SEQ ID NO: 490797 - RNA, 19 nt, Homo sapiens
  misc_RNA (1)...(19): siRNA sense strand
cugaaaacaugucuuuaga

SEQ ID NO: 490798 - RNA, 19 nt, Homo sapiens
  misc_RNA (1)...(19): siRNA sense strand
uuggaaugauguucaagga

SEQ ID NO: 490799 - RNA, 19 nt, Homo sapiens
  misc_RNA (1)...(19): siRNA sense strand
agcagaauccaccuuguuu

SEQ ID NO: 490800 - RNA, 19 nt, Homo sapiens
  misc_RNA (1)...(19): siRNA sense strand
ucaggagaaucagcuucaa

SEQ ID NO: 490801 - RNA, 19 nt, Homo sapiens
  misc_RNA (1)...(19): siRNA sense strand
gaguacugaugaggaaagu

SEQ ID NO: 490802 - RNA, 19 nt, Homo sapiens
  misc_RNA (1)...(19): siRNA sense strand
ggaaacugcaaucuguucu

SEQ ID NO: 490803 - RNA, 19 nt, Homo sapiens
  misc_RNA (1)...(19): siRNA sense strand
gcagcucaagaacgagaaa

SEQ ID NO: 490804 - RNA, 19 nt, Homo sapiens
  misc_RNA (1)...(19): siRNA sense strand
ugagugcuaaggaagcuuu

SEQ ID NO: 490805 - RNA, 19 nt, Homo sapiens
  misc_RNA (1)...(19): siRNA sense strand
aaaugaaaggcuucugaga

SEQ ID NO: 490806 - RNA, 19 nt, Homo sapiens
  misc_RNA (1)...(19): siRNA sense strand
gcaggaccagcugauguau

SEQ ID NO: 490807 - RNA, 19 nt, Homo sapiens
  misc_RNA (1)...(19): siRNA sense strand
aggagaaucagcuucaaga

SEQ ID NO: 490808 - RNA, 19 nt, Homo sapiens
  misc_RNA (1)...(19): siRNA sense strand
acugauauugcaccaagua

SEQ ID NO: 490809 - RNA, 19 nt, Homo sapiens
  misc_RNA (1)...(19): siRNA sense strand
aaucuguucugaaaugacu

SEQ ID NO: 490810 - RNA, 19 nt, Homo sapiens
  misc_RNA (1)...(19): siRNA sense strand
ccaagaagcugaugacaug

SEQ ID NO: 490811 - RNA, 19 nt, Homo sapiens
  misc_RNA (1)...(19): siRNA sense strand
gaauccaccuuguuucuga

SEQ ID NO: 490812 - RNA, 19 nt, Homo sapiens
  misc_RNA (1)...(19): siRNA sense strand
gagcacaucucagcugaaa

SEQ ID NO: 490813 - RNA, 19 nt, Homo sapiens
  misc_RNA (1)...(19): siRNA sense strand
aaacccagcugaagucauu

SEQ ID NO: 490814 - RNA, 19 nt, Homo sapiens
  misc_RNA (1)...(19): siRNA sense strand
gaaauauguuggugaacug

SEQ ID NO: 490815 - RNA, 19 nt, Homo sapiens
  misc_RNA (1)...(19): siRNA sense strand
gcugauguauacacguuua

SEQ ID NO: 490816 - RNA, 19 nt, Homo sapiens
  misc_RNA (1)...(19): siRNA sense strand
gagaaucagcuucaagaaa

SEQ ID NO: 490817 - RNA, 19 nt, Homo sapiens
  misc_RNA (1)...(19): siRNA sense strand
ggaaauauguuggugaacu

SEQ ID NO: 490818 - RNA, 19 nt, Homo sapiens
  misc_RNA (1)...(19): siRNA sense strand
gagauccagucuaugauga

SEQ ID NO: 490819 - RNA, 19 nt, Homo sapiens
  misc_RNA (1)...(19): siRNA sense strand
ugaccgagauccagucuau

SEQ ID NO: 490820 - RNA, 19 nt, Homo sapiens
  misc_RNA (1)...(19): siRNA sense strand
ccugaaagaugucucauuc

SEQ ID NO: 490821 - RNA, 19 nt, Homo sapiens
  misc_RNA (1)...(19): siRNA sense strand
gaaaggcuucugagagauu

SEQ ID NO: 490822 - RNA, 19 nt, Homo sapiens
  misc_RNA (1)...(19): siRNA sense strand
cagcugaagucauuagaga

SEQ ID NO: 490823 - RNA, 19 nt, Homo sapiens
  misc_RNA (1)...(19): siRNA sense strand
aaaccaaacugaucucucu

SEQ ID NO: 490824 - RNA, 19 nt, Homo sapiens
  misc_RNA (1)...(19): siRNA sense strand
gaaagaugucucauucaga

SEQ ID NO: 490825 - RNA, 19 nt, Homo sapiens
  misc_RNA (1)...(19): siRNA sense strand
gauauugcaccaaguagaa

SEQ ID NO: 490826 - RNA, 19 nt, Homo sapiens
  misc_RNA (1)...(19): siRNA sense strand
gcaaucuguucugaaauga

SEQ ID NO: 490827 - RNA, 19 nt, Homo sapiens
  misc_RNA (1)...(19): siRNA sense strand
ggagacugaucuuuauaag

SEQ ID NO: 490828 - RNA, 19 nt, Homo sapiens
  misc_RNA (1)...(19): siRNA sense strand
guacugaugaggaaaguga

SEQ ID NO: 490829 - RNA, 19 nt, Homo sapiens
  misc_RNA (1)...(19): siRNA sense strand
gaacccaguauaacucauu

SEQ ID NO: 490830 - RNA, 19 nt, Homo sapiens
  misc_RNA (1)...(19): siRNA sense strand
ugagaguacugaugaggaa

SEQ ID NO: 490831 - RNA, 19 nt, Homo sapiens
  misc_RNA (1)...(19): siRNA sense strand
aaacugcaaucuguucuga

SEQ ID NO: 490832 - RNA, 19 nt, Homo sapiens
  misc_RNA (1)...(19): siRNA sense strand
gacagcgaaugcaaagaaa

SEQ ID NO: 490833 - RNA, 19 nt, Homo sapiens
  misc_RNA (1)...(19): siRNA sense strand
aaaugcagcucaagaacga

SEQ ID NO: 490834 - RNA, 19 nt, Homo sapiens
  misc_RNA (1)...(19): siRNA sense strand
cagcugauguauacacguu

SEQ ID NO: 490835 - RNA, 19 nt, Homo sapiens
  misc_RNA (1)...(19): siRNA sense strand
agaaucagcuucaagaaaa

SEQ ID NO: 490836 - RNA, 19 nt, Homo sapiens
  misc_RNA (1)...(19): siRNA sense strand
uaaggaagcuuuggagacu

SEQ ID NO: 490837 - RNA, 19 nt, Homo sapiens
  misc_RNA (1)...(19): siRNA sense strand
augaaaggcuucugagaga

SEQ ID NO: 490838 - RNA, 19 nt, Homo sapiens
  misc_RNA (1)...(19): siRNA sense strand
gguguugaaugagaagaaa

SEQ ID NO: 490839 - RNA, 19 nt, Homo sapiens
  misc_RNA (1)...(19): siRNA sense strand
ucagagauuucccaagaag

SEQ ID NO: 490840 - RNA, 19 nt, Homo sapiens
  misc_RNA (1)...(19): siRNA sense strand
ccucuuugaugagauuuaa

SEQ ID NO: 490841 - RNA, 19 nt, Homo sapiens
  misc_RNA (1)...(19): siRNA sense strand
gaaaaugaaaggcuucuga

SEQ ID NO: 490842 - RNA, 19 nt, Homo sapiens
  misc_RNA (1)...(19): siRNA sense strand
ggaaucugguuuuguuauu

SEQ ID NO: 490843 - RNA, 19 nt, Homo sapiens
  misc_RNA (1)...(19): siRNA sense strand
ggagaaucagcuucaagaa

SEQ ID NO: 490844 - RNA, 19 nt, Homo sapiens
  misc_RNA (1)...(19): siRNA sense strand
agacagcgaaugcaaagaa

SEQ ID NO: 490845 - RNA, 19 nt, Homo sapiens
  misc_RNA (1)...(19): siRNA sense strand
gauccagucuaugaugaga

SEQ ID NO: 490846 - RNA, 19 nt, Homo sapiens
  misc_RNA (1)...(19): siRNA sense strand
gagcaggaccagcugaugu

SEQ ID NO: 490847 - RNA, 19 nt, Homo sapiens
  misc_RNA (1)...(19): siRNA sense strand
guuauuacacuuacugaug

SEQ ID NO: 490848 - RNA, 19 nt, Homo sapiens
  misc_RNA (1)...(19): siRNA sense strand
aaaaggacaucaaacaaga

SEQ ID NO: 490849 - RNA, 19 nt, Homo sapiens
  misc_RNA (1)...(19): siRNA sense strand
ggagacagcgaaugcaaag

SEQ ID NO: 490850 - RNA, 19 nt, Homo sapiens
  misc_RNA (1)...(19): siRNA sense strand
ugcaaucuguucugaaaug

SEQ ID NO: 490851 - RNA, 19 nt, Homo sapiens
  misc_RNA (1)...(19): siRNA sense strand
acugcaaucuguucugaaa

SEQ ID NO: 490852 - RNA, 19 nt, Homo sapiens
  misc_RNA (1)...(19): siRNA sense strand
gagauuggaaugauguuca

SEQ ID NO: 490853 - RNA, 19 nt, Homo sapiens
  misc_RNA (1)...(19): siRNA sense strand
gaaacagcagcccagaaga

SEQ ID NO: 490854 - RNA, 19 nt, Homo sapiens
  misc_RNA (1)...(19): siRNA sense strand
gguuuauucugguguugaa

SEQ ID NO: 490855 - RNA, 19 nt, Homo sapiens
  misc_RNA (1)...(19): siRNA sense strand
ugggacaguuucugaauca

SEQ ID NO: 490856 - RNA, 19 nt, Homo sapiens
  misc_RNA (1)...(19): siRNA sense strand
caucucagcugaaaacaug

SEQ ID NO: 490857 - RNA, 19 nt, Homo sapiens
  misc_RNA (1)...(19): siRNA sense strand
gaugacauggcaauggaaa

SEQ ID NO: 490858 - RNA, 19 nt, Homo sapiens
  misc_RNA (1)...(19): siRNA sense strand
gagaaacagcagcccagaa

SEQ ID NO: 490859 - RNA, 19 nt, Homo sapiens
  misc_RNA (1)...(19): siRNA sense strand
gagcaccugcagaaagaaa

SEQ ID NO: 490860 - RNA, 19 nt, Homo sapiens
  misc_RNA (1)...(19): siRNA sense strand
gaaaaggacaucaaacaag

SEQ ID NO: 490861 - RNA, 19 nt, Homo sapiens
  misc_RNA (1)...(19): siRNA sense strand
agaccucuuugaugagauu

SEQ ID NO: 490862 - RNA, 19 nt, Homo sapiens
  misc_RNA (1)...(19): siRNA sense strand
agggaaauauguuggugaa

SEQ ID NO: 490863 - RNA, 19 nt, Homo sapiens
  misc_RNA (1)...(19): siRNA sense strand
gauguucaaggacgauuug

SEQ ID NO: 490864 - RNA, 19 nt, Homo sapiens
  misc_RNA (1)...(19): siRNA sense strand
ggacaccauugcagaaaau

SEQ ID NO: 490865 - RNA, 19 nt, Homo sapiens
  misc_RNA (1)...(19): siRNA sense strand
gcagaauccaccuuguuuc

SEQ ID NO: 490866 - RNA, 19 nt, Homo sapiens
  misc_RNA (1)...(19): siRNA sense strand
uuuggagacugaucuuuau

SEQ ID NO: 490867 - RNA, 19 nt, Homo sapiens
  misc_RNA (1)...(19): siRNA sense strand
gagaaaaggacaucaaaca

SEQ ID NO: 490868 - RNA, 19 nt, Homo sapiens
  misc_RNA (1)...(19): siRNA sense strand
gucuugaugucacugauau

SEQ ID NO: 490869 - RNA, 19 nt, Homo sapiens
  misc_RNA (1)...(19): siRNA sense strand
uagaaacucugagaaacag

SEQ ID NO: 490870 - RNA, 19 nt, Homo sapiens
  misc_RNA (1)...(19): siRNA sense strand
ugaugucacugauauugca

SEQ ID NO: 490871 - RNA, 19 nt, Homo sapiens
  misc_RNA (1)...(19): siRNA sense strand
gagaaaagcauuguuguca

SEQ ID NO: 490872 - RNA, 19 nt, Homo sapiens
  misc_RNA (1)...(19): siRNA sense strand
uaagcagaauccaccuugu

SEQ ID NO: 490873 - RNA, 19 nt, Homo sapiens
  misc_RNA (1)...(19): siRNA sense strand
gggaaacugcaaucuguuc

SEQ ID NO: 490874 - RNA, 19 nt, Homo sapiens
  misc_RNA (1)...(19): siRNA sense strand
uggagacugaucuuuauaa

SEQ ID NO: 490875 - RNA, 19 nt, Homo sapiens
  misc_RNA (1)...(19): siRNA sense strand
cuuuggagacugaucuuua

SEQ ID NO: 490876 - RNA, 19 nt, Homo sapiens
  misc_RNA (1)...(19): siRNA sense strand
aggaagcuuuggagacuga

SEQ ID NO: 490877 - RNA, 19 nt, Homo sapiens
  misc_RNA (1)...(19): siRNA sense strand
augagcaccugcagaaaga

SEQ ID NO: 490878 - RNA, 19 nt, Homo sapiens
  misc_RNA (1)...(19): siRNA sense strand
aggaccagcugauguauac

SEQ ID NO: 490879 - RNA, 19 nt, Homo sapiens
  misc_RNA (1)...(19): siRNA sense strand
cugaugacauggcaaugga

SEQ ID NO: 490880 - RNA, 19 nt, Homo sapiens
  misc_RNA (1)...(19): siRNA sense strand
ucugagagauuggaaugau

SEQ ID NO: 490881 - RNA, 19 nt, Homo sapiens
  misc_RNA (1)...(19): siRNA sense strand
gaaacugcaaucuguucug

SEQ ID NO: 490882 - RNA, 19 nt, Homo sapiens
  misc_RNA (1)...(19): siRNA sense strand
agaaacagcagcccagaag

SEQ ID NO: 490883 - RNA, 19 nt, Homo sapiens
  misc_RNA (1)...(19): siRNA sense strand
cgagauccagucuaugaug

SEQ ID NO: 490884 - RNA, 19 nt, Homo sapiens
  misc_RNA (1)...(19): siRNA sense strand
cagcgaaugcaaagaaauc

SEQ ID NO: 490885 - RNA, 19 nt, Homo sapiens
  misc_RNA (1)...(19): siRNA sense strand
aaaggcuucugagagauug

SEQ ID NO: 490886 - RNA, 19 nt, Homo sapiens
  misc_RNA (1)...(19): siRNA sense strand
gaucuuuauaagcgguuua

SEQ ID NO: 490887 - RNA, 19 nt, Homo sapiens
  misc_RNA (1)...(19): siRNA sense strand
caggaccagcugauguaua

SEQ ID NO: 490888 - RNA, 19 nt, Homo sapiens
  misc_RNA (1)...(19): siRNA sense strand
uuagaaacucugagaaaca

SEQ ID NO: 490889 - RNA, 19 nt, Homo sapiens
  misc_RNA (1)...(19): siRNA sense strand
agauuggaaugauguucaa

SEQ ID NO: 490890 - RNA, 19 nt, Homo sapiens
  misc_RNA (1)...(19): siRNA sense strand
ugaaaggcuucugagagau

SEQ ID NO: 490891 - RNA, 19 nt, Homo sapiens
  misc_RNA (1)...(19): siRNA sense strand
aaaaugagcaccugcagaa

SEQ ID NO: 490892 - RNA, 19 nt, Homo sapiens
  misc_RNA (1)...(19): siRNA sense strand
ugagagauuggaaugaugu

SEQ ID NO: 490893 - RNA, 19 nt, Homo sapiens
  misc_RNA (1)...(19): siRNA sense strand
aagcagaauccaccuuguu

SEQ ID NO: 490894 - RNA, 19 nt, Homo sapiens
  misc_RNA (1)...(19): siRNA sense strand
aacccaguauaacucauuu

SEQ ID NO: 490895 - RNA, 19 nt, Homo sapiens
  misc_RNA (1)...(19): siRNA sense strand
gauggucauucagcaugga

SEQ ID NO: 490896 - RNA, 19 nt, Homo sapiens
  misc_RNA (1)...(19): siRNA sense strand
cuuuagaaacucugagaaa

SEQ ID NO: 490897 - RNA, 19 nt, Homo sapiens
  misc_RNA (1)...(19): siRNA sense strand
cugaaaacaugucuuuaga

SEQ ID NO: 490898 - RNA, 19 nt, Homo sapiens
  misc_RNA (1)...(19): siRNA sense strand
uuggaaugauguucaagga

SEQ ID NO: 490899 - RNA, 19 nt, Homo sapiens
  misc_RNA (1)...(19): siRNA sense strand
agcagaauccaccuuguuu

SEQ ID NO: 490900 - RNA, 19 nt, Homo sapiens
  misc_RNA (1)...(19): siRNA sense strand
ucaggagaaucagcuucaa

SEQ ID NO: 490901 - RNA, 19 nt, Homo sapiens
  misc_RNA (1)...(19): siRNA sense strand
gaguacugaugaggaaagu

SEQ ID NO: 490902 - RNA, 19 nt, Homo sapiens
  misc_RNA (1)...(19): siRNA sense strand
ggaaacugcaaucuguucu

SEQ ID NO: 490903 - RNA, 19 nt, Homo sapiens
  misc_RNA (1)...(19): siRNA sense strand
gcagcucaagaacgagaaa

SEQ ID NO: 490904 - RNA, 19 nt, Homo sapiens
  misc_RNA (1)...(19): siRNA sense strand
ugagugcuaaggaagcuuu

SEQ ID NO: 490905 - RNA, 19 nt, Homo sapiens
  misc_RNA (1)...(19): siRNA sense strand
aaaugaaaggcuucugaga

SEQ ID NO: 490906 - RNA, 19 nt, Homo sapiens
  misc_RNA (1)...(19): siRNA sense strand
gcaggaccagcugauguau

SEQ ID NO: 490907 - RNA, 19 nt, Homo sapiens
  misc_RNA (1)...(19): siRNA sense strand
aggagaaucagcuucaaga

SEQ ID NO: 490908 - RNA, 19 nt, Homo sapiens
  misc_RNA (1)...(19): siRNA sense strand
acugauauugcaccaagua

SEQ ID NO: 490909 - RNA, 19 nt, Homo sapiens
  misc_RNA (1)...(19): siRNA sense strand
aaucuguucugaaaugacu

SEQ ID NO: 490910 - RNA, 19 nt, Homo sapiens
  misc_RNA (1)...(19): siRNA sense strand
ccaagaagcugaugacaug

SEQ ID NO: 490911 - RNA, 19 nt, Homo sapiens
  misc_RNA (1)...(19): siRNA sense strand
gaauccaccuuguuucuga

SEQ ID NO: 490912 - RNA, 19 nt, Homo sapiens
  misc_RNA (1)...(19): siRNA sense strand
gagcacaucucagcugaaa

SEQ ID NO: 490913 - RNA, 19 nt, Homo sapiens
  misc_RNA (1)...(19): siRNA sense strand
aaacccagcugaagucauu

SEQ ID NO: 490914 - RNA, 19 nt, Homo sapiens
  misc_RNA (1)...(19): siRNA sense strand
gaaauauguuggugaacug

SEQ ID NO: 490915 - RNA, 19 nt, Homo sapiens
  misc_RNA (1)...(19): siRNA sense strand
gcugauguauacacguuua

SEQ ID NO: 490916 - RNA, 19 nt, Homo sapiens
  misc_RNA (1)...(19): siRNA sense strand
gagaaucagcuucaagaaa

SEQ ID NO: 490917 - RNA, 19 nt, Homo sapiens
  misc_RNA (1)...(19): siRNA sense strand
ggaaauauguuggugaacu

SEQ ID NO: 490918 - RNA, 19 nt, Homo sapiens
  misc_RNA (1)...(19): siRNA sense strand
gagauccagucuaugauga

SEQ ID NO: 490919 - RNA, 19 nt, Homo sapiens
  misc_RNA (1)...(19): siRNA sense strand
ugaccgagauccagucuau

SEQ ID NO: 490920 - RNA, 19 nt, Homo sapiens
  misc_RNA (1)...(19): siRNA sense strand
ccugaaagaugucucauuc

SEQ ID NO: 490921 - RNA, 19 nt, Homo sapiens
  misc_RNA (1)...(19): siRNA sense strand
gaaaggcuucugagagauu

SEQ ID NO: 490922 - RNA, 19 nt, Homo sapiens
  misc_RNA (1)...(19): siRNA sense strand
cagcugaagucauuagaga

SEQ ID NO: 490923 - RNA, 19 nt, Homo sapiens
  misc_RNA (1)...(19): siRNA sense strand
aaaccaaacugaucucucu

SEQ ID NO: 490924 - RNA, 19 nt, Homo sapiens
  misc_RNA (1)...(19): siRNA sense strand
gaaagaugucucauucaga

SEQ ID NO: 490925 - RNA, 19 nt, Homo sapiens
  misc_RNA (1)...(19): siRNA sense strand
gauauugcaccaaguagaa

SEQ ID NO: 490926 - RNA, 19 nt, Homo sapiens
  misc_RNA (1)...(19): siRNA sense strand
gcaaucuguucugaaauga

SEQ ID NO: 490927 - RNA, 19 nt, Homo sapiens
  misc_RNA (1)...(19): siRNA sense strand
ggagacugaucuuuauaag

SEQ ID NO: 490928 - RNA, 19 nt, Homo sapiens
  misc_RNA (1)...(19): siRNA sense strand
guacugaugaggaaaguga

SEQ ID NO: 490929 - RNA, 19 nt, Homo sapiens
  misc_RNA (1)...(19): siRNA sense strand
gaacccaguauaacucauu

SEQ ID NO: 490930 - RNA, 19 nt, Homo sapiens
  misc_RNA (1)...(19): siRNA sense strand
ugagaguacugaugaggaa

SEQ ID NO: 490931 - RNA, 19 nt, Homo sapiens
  misc_RNA (1)...(19): siRNA sense strand
aaacugcaaucuguucuga

SEQ ID NO: 490932 - RNA, 19 nt, Homo sapiens
  misc_RNA (1)...(19): siRNA sense strand
gacagcgaaugcaaagaaa

SEQ ID NO: 490933 - RNA, 19 nt, Homo sapiens
  misc_RNA (1)...(19): siRNA sense strand
aaaugcagcucaagaacga

SEQ ID NO: 490934 - RNA, 19 nt, Homo sapiens
  misc_RNA (1)...(19): siRNA sense strand
cagcugauguauacacguu

SEQ ID NO: 490935 - RNA, 19 nt, Homo sapiens
  misc_RNA (1)...(19): siRNA sense strand
agaaucagcuucaagaaaa

SEQ ID NO: 490936 - RNA, 19 nt, Homo sapiens
  misc_RNA (1)...(19): siRNA sense strand
uaaggaagcuuuggagacu

SEQ ID NO: 490937 - RNA, 19 nt, Homo sapiens
  misc_RNA (1)...(19): siRNA sense strand
augaaaggcuucugagaga

SEQ ID NO: 490938 - RNA, 19 nt, Homo sapiens
  misc_RNA (1)...(19): siRNA sense strand
gguguugaaugagaagaaa

SEQ ID NO: 490939 - RNA, 19 nt, Homo sapiens
  misc_RNA (1)...(19): siRNA sense strand
ucagagauuucccaagaag

SEQ ID NO: 490940 - RNA, 19 nt, Homo sapiens
  misc_RNA (1)...(19): siRNA sense strand
ccucuuugaugagauuuaa

SEQ ID NO: 490941 - RNA, 19 nt, Homo sapiens
  misc_RNA (1)...(19): siRNA sense strand
gaaaaugaaaggcuucuga

SEQ ID NO: 490942 - RNA, 19 nt, Homo sapiens
  misc_RNA (1)...(19): siRNA sense strand
ggaaucugguuuuguuauu

SEQ ID NO: 490943 - RNA, 19 nt, Homo sapiens
  misc_RNA (1)...(19): siRNA sense strand
ggagaaucagcuucaagaa

SEQ ID NO: 490944 - RNA, 19 nt, Homo sapiens
  misc_RNA (1)...(19): siRNA sense strand
agacagcgaaugcaaagaa

SEQ ID NO: 490945 - RNA, 19 nt, Homo sapiens
  misc_RNA (1)...(19): siRNA sense strand
gauccagucuaugaugaga

SEQ ID NO: 490946 - RNA, 19 nt, Homo sapiens
  misc_RNA (1)...(19): siRNA sense strand
gagcaggaccagcugaugu

SEQ ID NO: 490947 - RNA, 19 nt, Homo sapiens
  misc_RNA (1)...(19): siRNA sense strand
guuauuacacuuacugaug

SEQ ID NO: 490948 - RNA, 19 nt, Homo sapiens
  misc_RNA (1)...(19): siRNA sense strand
aaaaggacaucaaacaaga

SEQ ID NO: 490949 - RNA, 19 nt, Homo sapiens
  misc_RNA (1)...(19): siRNA sense strand
ggagacagcgaaugcaaag

SEQ ID NO: 490950 - RNA, 19 nt, Homo sapiens
  misc_RNA (1)...(19): siRNA sense strand
ugcaaucuguucugaaaug

SEQ ID NO: 490951 - RNA, 19 nt, Homo sapiens
  misc_RNA (1)...(19): siRNA sense strand
acugcaaucuguucugaaa

SEQ ID NO: 490952 - RNA, 19 nt, Homo sapiens
  misc_RNA (1)...(19): siRNA sense strand
gagauuggaaugauguuca

SEQ ID NO: 490953 - RNA, 19 nt, Homo sapiens
  misc_RNA (1)...(19): siRNA sense strand
gaaacagcagcccagaaga

SEQ ID NO: 490954 - RNA, 19 nt, Homo sapiens
  misc_RNA (1)...(19): siRNA sense strand
gguuuauucugguguugaa

SEQ ID NO: 490955 - RNA, 19 nt, Homo sapiens
  misc_RNA (1)...(19): siRNA sense strand
ugggacaguuucugaauca

SEQ ID NO: 490956 - RNA, 19 nt, Homo sapiens
  misc_RNA (1)...(19): siRNA sense strand
caucucagcugaaaacaug

SEQ ID NO: 490957 - RNA, 19 nt, Homo sapiens
  misc_RNA (1)...(19): siRNA sense strand
gaugacauggcaauggaaa

SEQ ID NO: 490958 - RNA, 19 nt, Homo sapiens
  misc_RNA (1)...(19): siRNA sense strand
gagaaacagcagcccagaa

SEQ ID NO: 490959 - RNA, 19 nt, Homo sapiens
  misc_RNA (1)...(19): siRNA sense strand
gagcaccugcagaaagaaa

SEQ ID NO: 490960 - RNA, 19 nt, Homo sapiens
  misc_RNA (1)...(19): siRNA sense strand
gaaaaggacaucaaacaag

SEQ ID NO: 490961 - RNA, 19 nt, Homo sapiens
  misc_RNA (1)...(19): siRNA sense strand
agaccucuuugaugagauu

SEQ ID NO: 490962 - RNA, 19 nt, Homo sapiens
  misc_RNA (1)...(19): siRNA sense strand
agggaaauauguuggugaa

SEQ ID NO: 490963 - RNA, 19 nt, Homo sapiens
  misc_RNA (1)...(19): siRNA sense strand
gauguucaaggacgauuug

SEQ ID NO: 490964 - RNA, 19 nt, Homo sapiens
  misc_RNA (1)...(19): siRNA sense strand
ggacaccauugcagaaaau

SEQ ID NO: 490965 - RNA, 19 nt, Homo sapiens
  misc_RNA (1)...(19): siRNA sense strand
gcagaauccaccuuguuuc

SEQ ID NO: 490966 - RNA, 19 nt, Homo sapiens
  misc_RNA (1)...(19): siRNA sense strand
uuuggagacugaucuuuau

SEQ ID NO: 490967 - RNA, 19 nt, Homo sapiens
  misc_RNA (1)...(19): siRNA sense strand
gagaaaaggacaucaaaca

SEQ ID NO: 490968 - RNA, 19 nt, Homo sapiens
  misc_RNA (1)...(19): siRNA sense strand
gucuugaugucacugauau

SEQ ID NO: 490969 - RNA, 19 nt, Homo sapiens
  misc_RNA (1)...(19): siRNA sense strand
uagaaacucugagaaacag

SEQ ID NO: 490970 - RNA, 19 nt, Homo sapiens
  misc_RNA (1)...(19): siRNA sense strand
ugaugucacugauauugca

SEQ ID NO: 490971 - RNA, 19 nt, Homo sapiens
  misc_RNA (1)...(19): siRNA sense strand
gagaaaagcauuguuguca

SEQ ID NO: 490972 - RNA, 19 nt, Homo sapiens
  misc_RNA (1)...(19): siRNA sense strand
uaagcagaauccaccuugu

SEQ ID NO: 490973 - RNA, 19 nt, Homo sapiens
  misc_RNA (1)...(19): siRNA sense strand
gggaaacugcaaucuguuc

SEQ ID NO: 490974 - RNA, 19 nt, Homo sapiens
  misc_RNA (1)...(19): siRNA sense strand
uggagacugaucuuuauaa

SEQ ID NO: 490975 - RNA, 19 nt, Homo sapiens
  misc_RNA (1)...(19): siRNA sense strand
cuuuggagacugaucuuua

SEQ ID NO: 490976 - RNA, 19 nt, Homo sapiens
  misc_RNA (1)...(19): siRNA sense strand
aggaagcuuuggagacuga

SEQ ID NO: 490977 - RNA, 19 nt, Homo sapiens
  misc_RNA (1)...(19): siRNA sense strand
augagcaccugcagaaaga

SEQ ID NO: 490978 - RNA, 19 nt, Homo sapiens
  misc_RNA (1)...(19): siRNA sense strand
aggaccagcugauguauac

SEQ ID NO: 490979 - RNA, 19 nt, Homo sapiens
  misc_RNA (1)...(19): siRNA sense strand
cugaugacauggcaaugga

SEQ ID NO: 490980 - RNA, 19 nt, Homo sapiens
  misc_RNA (1)...(19): siRNA sense strand
ucugagagauuggaaugau

SEQ ID NO: 490981 - RNA, 19 nt, Homo sapiens
  misc_RNA (1)...(19): siRNA sense strand
gaaacugcaaucuguucug

SEQ ID NO: 490982 - RNA, 19 nt, Homo sapiens
  misc_RNA (1)...(19): siRNA sense strand
agaaacagcagcccagaag

SEQ ID NO: 490983 - RNA, 19 nt, Homo sapiens
  misc_RNA (1)...(19): siRNA sense strand
cgagauccagucuaugaug

SEQ ID NO: 490984 - RNA, 19 nt, Homo sapiens
  misc_RNA (1)...(19): siRNA sense strand
cagcgaaugcaaagaaauc

SEQ ID NO: 490985 - RNA, 19 nt, Homo sapiens
  misc_RNA (1)...(19): siRNA sense strand
aaaggcuucugagagauug

SEQ ID NO: 490986 - RNA, 19 nt, Homo sapiens
  misc_RNA (1)...(19): siRNA sense strand
gaucuuuauaagcgguuua

SEQ ID NO: 490987 - RNA, 19 nt, Homo sapiens
  misc_RNA (1)...(19): siRNA sense strand
caggaccagcugauguaua

SEQ ID NO: 490988 - RNA, 19 nt, Homo sapiens
  misc_RNA (1)...(19): siRNA sense strand
uuagaaacucugagaaaca

SEQ ID NO: 490989 - RNA, 19 nt, Homo sapiens
  misc_RNA (1)...(19): siRNA sense strand
agauuggaaugauguucaa

SEQ ID NO: 490990 - RNA, 19 nt, Homo sapiens
  misc_RNA (1)...(19): siRNA sense strand
ugaaaggcuucugagagau

SEQ ID NO: 490991 - RNA, 19 nt, Homo sapiens
  misc_RNA (1)...(19): siRNA sense strand
aaaaugagcaccugcagaa

SEQ ID NO: 490992 - RNA, 19 nt, Homo sapiens
  misc_RNA (1)...(19): siRNA sense strand
ugagagauuggaaugaugu

SEQ ID NO: 490993 - RNA, 19 nt, Homo sapiens
  misc_RNA (1)...(19): siRNA sense strand
aagcagaauccaccuuguu

SEQ ID NO: 490994 - RNA, 19 nt, Homo sapiens
  misc_RNA (1)...(19): siRNA sense strand
aacccaguauaacucauuu

SEQ ID NO: 490995 - RNA, 19 nt, Homo sapiens
  misc_RNA (1)...(19): siRNA sense strand
gauggucauucagcaugga

SEQ ID NO: 490996 - RNA, 19 nt, Homo sapiens
  misc_RNA (1)...(19): siRNA sense strand
cuuuagaaacucugagaaa

SEQ ID NO: 490997 - RNA, 19 nt, Homo sapiens
  misc_RNA (1)...(19): siRNA sense strand
cugaaaacaugucuuuaga

SEQ ID NO: 490998 - RNA, 19 nt, Homo sapiens
  misc_RNA (1)...(19): siRNA sense strand
uuggaaugauguucaagga

SEQ ID NO: 490999 - RNA, 19 nt, Homo sapiens
  misc_RNA (1)...(19): siRNA sense strand
agcagaauccaccuuguuu

SEQ ID NO: 491000 - RNA, 19 nt, Homo sapiens
  misc_RNA (1)...(19): siRNA sense strand
ucaggagaaucagcuucaa

SEQ ID NO: 491001 - RNA, 19 nt, Homo sapiens
  misc_RNA (1)...(19): siRNA sense strand
gaguacugaugaggaaagu

SEQ ID NO: 491002 - RNA, 19 nt, Homo sapiens
  misc_RNA (1)...(19): siRNA sense strand
ggaaacugcaaucuguucu

SEQ ID NO: 491003 - RNA, 19 nt, Homo sapiens
  misc_RNA (1)...(19): siRNA sense strand
gcagcucaagaacgagaaa

SEQ ID NO: 491004 - RNA, 19 nt, Homo sapiens
  misc_RNA (1)...(19): siRNA sense strand
ugagugcuaaggaagcuuu

SEQ ID NO: 491005 - RNA, 19 nt, Homo sapiens
  misc_RNA (1)...(19): siRNA sense strand
aaaugaaaggcuucugaga

SEQ ID NO: 491006 - RNA, 19 nt, Homo sapiens
  misc_RNA (1)...(19): siRNA sense strand
gcaggaccagcugauguau

SEQ ID NO: 491007 - RNA, 19 nt, Homo sapiens
  misc_RNA (1)...(19): siRNA sense strand
aggagaaucagcuucaaga

SEQ ID NO: 491008 - RNA, 19 nt, Homo sapiens
  misc_RNA (1)...(19): siRNA sense strand
acugauauugcaccaagua

SEQ ID NO: 491009 - RNA, 19 nt, Homo sapiens
  misc_RNA (1)...(19): siRNA sense strand
aaucuguucugaaaugacu

SEQ ID NO: 491010 - RNA, 19 nt, Homo sapiens
  misc_RNA (1)...(19): siRNA sense strand
gggcaaugcuuuacuauga

SEQ ID NO: 491011 - RNA, 19 nt, Homo sapiens
  misc_RNA (1)...(19): siRNA sense strand
ucauggagcuggacucgua

SEQ ID NO: 491012 - RNA, 19 nt, Homo sapiens
  misc_RNA (1)...(19): siRNA sense strand
aaccuaagcuucaaaguga

SEQ ID NO: 491013 - RNA, 19 nt, Homo sapiens
  misc_RNA (1)...(19): siRNA sense strand
gaaccuaagcuucaaagug

SEQ ID NO: 491014 - RNA, 19 nt, Homo sapiens
  misc_RNA (1)...(19): siRNA sense strand
ccacauggccuccuucuuc

SEQ ID NO: 491015 - RNA, 19 nt, Homo sapiens
  misc_RNA (1)...(19): siRNA sense strand
gaucugguccuccugauga

SEQ ID NO: 491016 - RNA, 19 nt, Homo sapiens
  misc_RNA (1)...(19): siRNA sense strand
ucagagaccucaacuacca

SEQ ID NO: 491017 - RNA, 19 nt, Homo sapiens
  misc_RNA (1)...(19): siRNA sense strand
ggucuucuguugcaggauu

SEQ ID NO: 491018 - RNA, 19 nt, Homo sapiens
  misc_RNA (1)...(19): siRNA sense strand
gcggaggccugucugaugu

SEQ ID NO: 491019 - RNA, 19 nt, Homo sapiens
  misc_RNA (1)...(19): siRNA sense strand
cgagagaccuuggccuuca

SEQ ID NO: 491020 - RNA, 19 nt, Homo sapiens
  misc_RNA (1)...(19): siRNA sense strand
gaccaucggcuuccucuau

SEQ ID NO: 491021 - RNA, 19 nt, Homo sapiens
  misc_RNA (1)...(19): siRNA sense strand
ggaaagcagagacgaagga

SEQ ID NO: 491022 - RNA, 19 nt, Homo sapiens
  misc_RNA (1)...(19): siRNA sense strand
ucagagagggcaaugcuuu

SEQ ID NO: 491023 - RNA, 19 nt, Homo sapiens
  misc_RNA (1)...(19): siRNA sense strand
gugccuacaucaucaucua

SEQ ID NO: 491024 - RNA, 19 nt, Homo sapiens
  misc_RNA (1)...(19): siRNA sense strand
ggcaaugcuuuacuaugaa

SEQ ID NO: 491025 - RNA, 19 nt, Homo sapiens
  misc_RNA (1)...(19): siRNA sense strand
agagggcaaugcuuuacua

SEQ ID NO: 491026 - RNA, 19 nt, Homo sapiens
  misc_RNA (1)...(19): siRNA sense strand
gggugcagcuccuguggaa

SEQ ID NO: 491027 - RNA, 19 nt, Homo sapiens
  misc_RNA (1)...(19): siRNA sense strand
uaagguucaucaaacagaa

SEQ ID NO: 491028 - RNA, 19 nt, Homo sapiens
  misc_RNA (1)...(19): siRNA sense strand
uugaagggcugaugaagau

SEQ ID NO: 491029 - RNA, 19 nt, Homo sapiens
  misc_RNA (1)...(19): siRNA sense strand
cagcucuccuucauggaua

SEQ ID NO: 491030 - RNA, 19 nt, Homo sapiens
  misc_RNA (1)...(19): siRNA sense strand
aaacagaaaccaagucaag

SEQ ID NO: 491031 - RNA, 19 nt, Homo sapiens
  misc_RNA (1)...(19): siRNA sense strand
ccucagcgguggcuucaug

SEQ ID NO: 491032 - RNA, 19 nt, Homo sapiens
  misc_RNA (1)...(19): siRNA sense strand
gauaaaauccucaguguca

SEQ ID NO: 491033 - RNA, 19 nt, Homo sapiens
  misc_RNA (1)...(19): siRNA sense strand
gcacaugguccaguauuuc

SEQ ID NO: 491034 - RNA, 19 nt, Homo sapiens
  misc_RNA (1)...(19): siRNA sense strand
gcaauccugcugacuucua

SEQ ID NO: 491035 - RNA, 19 nt, Homo sapiens
  misc_RNA (1)...(19): siRNA sense strand
ucucccagcugccagaauu

SEQ ID NO: 491036 - RNA, 19 nt, Homo sapiens
  misc_RNA (1)...(19): siRNA sense strand
gagauaaaauccucagugu

SEQ ID NO: 491037 - RNA, 19 nt, Homo sapiens
  misc_RNA (1)...(19): siRNA sense strand
agagagggcugccgaaagg

SEQ ID NO: 491038 - RNA, 19 nt, Homo sapiens
  misc_RNA (1)...(19): siRNA sense strand
gcagcuggcucaguucaag

SEQ ID NO: 491039 - RNA, 19 nt, Homo sapiens
  misc_RNA (1)...(19): siRNA sense strand
gaagggcugaugaagauuc

SEQ ID NO: 491040 - RNA, 19 nt, Homo sapiens
  misc_RNA (1)...(19): siRNA sense strand
cagagagggcaaugcuuua

SEQ ID NO: 491041 - RNA, 19 nt, Homo sapiens
  misc_RNA (1)...(19): siRNA sense strand
ccucugggcucgacagcuu

SEQ ID NO: 491042 - RNA, 19 nt, Homo sapiens
  misc_RNA (1)...(19): siRNA sense strand
gcuuuacuaugaacuggaa

SEQ ID NO: 491043 - RNA, 19 nt, Homo sapiens
  misc_RNA (1)...(19): siRNA sense strand
gcauccagcucuccuucau

SEQ ID NO: 491044 - RNA, 19 nt, Homo sapiens
  misc_RNA (1)...(19): siRNA sense strand
cagcagagagcaggaauug

SEQ ID NO: 491045 - RNA, 19 nt, Homo sapiens
  misc_RNA (1)...(19): siRNA sense strand
ccucucaggucccuugguu

SEQ ID NO: 491046 - RNA, 19 nt, Homo sapiens
  misc_RNA (1)...(19): siRNA sense strand
ggagagagggcugccgaaa

SEQ ID NO: 491047 - RNA, 19 nt, Homo sapiens
  misc_RNA (1)...(19): siRNA sense strand
cagcagaagaacuuauaaa

SEQ ID NO: 491048 - RNA, 19 nt, Homo sapiens
  misc_RNA (1)...(19): siRNA sense strand
gcaaugcuuuacuaugaac

SEQ ID NO: 491049 - RNA, 19 nt, Homo sapiens
  misc_RNA (1)...(19): siRNA sense strand
ucgcagcccuguuucuaga

SEQ ID NO: 491050 - RNA, 19 nt, Homo sapiens
  misc_RNA (1)...(19): siRNA sense strand
caauccugcugacuucuau

SEQ ID NO: 491051 - RNA, 19 nt, Homo sapiens
  misc_RNA (1)...(19): siRNA sense strand
aagauucaguucagcagaa

SEQ ID NO: 491052 - RNA, 19 nt, Homo sapiens
  misc_RNA (1)...(19): siRNA sense strand
gcaaccggcuggugcucau

SEQ ID NO: 491053 - RNA, 19 nt, Homo sapiens
  misc_RNA (1)...(19): siRNA sense strand
ucggugcucucaucccuuu

SEQ ID NO: 491054 - RNA, 19 nt, Homo sapiens
  misc_RNA (1)...(19): siRNA sense strand
ccaucggcuuccucuauuu

SEQ ID NO: 491055 - RNA, 19 nt, Homo sapiens
  misc_RNA (1)...(19): siRNA sense strand
agauuguucuccucugaaa

SEQ ID NO: 491056 - RNA, 19 nt, Homo sapiens
  misc_RNA (1)...(19): siRNA sense strand
gagccuccuugcuagaugu

SEQ ID NO: 491057 - RNA, 19 nt, Homo sapiens
  misc_RNA (1)...(19): siRNA sense strand
cacauggccuccuucuuca

SEQ ID NO: 491058 - RNA, 19 nt, Homo sapiens
  misc_RNA (1)...(19): siRNA sense strand
ggugagcgcaggagaguca

SEQ ID NO: 491059 - RNA, 19 nt, Homo sapiens
  misc_RNA (1)...(19): siRNA sense strand
auagauuguucuccucuga

SEQ ID NO: 491060 - RNA, 19 nt, Homo sapiens
  misc_RNA (1)...(19): siRNA sense strand
gcaggagagucagcauugg

SEQ ID NO: 491061 - RNA, 19 nt, Homo sapiens
  misc_RNA (1)...(19): siRNA sense strand
ucaaacagaaaccaaguca

SEQ ID NO: 491062 - RNA, 19 nt, Homo sapiens
  misc_RNA (1)...(19): siRNA sense strand
ccacugguccauauuucuu

SEQ ID NO: 491063 - RNA, 19 nt, Homo sapiens
  misc_RNA (1)...(19): siRNA sense strand
gcagagacgaaggaucuug

SEQ ID NO: 491064 - RNA, 19 nt, Homo sapiens
  misc_RNA (1)...(19): siRNA sense strand
gaccugaccagcauugaca

SEQ ID NO: 491065 - RNA, 19 nt, Homo sapiens
  misc_RNA (1)...(19): siRNA sense strand
cccagcacaugguccagua

SEQ ID NO: 491066 - RNA, 19 nt, Homo sapiens
  misc_RNA (1)...(19): siRNA sense strand
gagagagggcugccgaaag

SEQ ID NO: 491067 - RNA, 19 nt, Homo sapiens
  misc_RNA (1)...(19): siRNA sense strand
ccuuaagguucaucaaaca

SEQ ID NO: 491068 - RNA, 19 nt, Homo sapiens
  misc_RNA (1)...(19): siRNA sense strand
gcuucaugguccuguacua

SEQ ID NO: 491069 - RNA, 19 nt, Homo sapiens
  misc_RNA (1)...(19): siRNA sense strand
ggaggccugucugauguca

SEQ ID NO: 491070 - RNA, 19 nt, Homo sapiens
  misc_RNA (1)...(19): siRNA sense strand
gagagaccuuggccuucau

SEQ ID NO: 491071 - RNA, 19 nt, Homo sapiens
  misc_RNA (1)...(19): siRNA sense strand
gaaggcggcagaggagaga

SEQ ID NO: 491072 - RNA, 19 nt, Homo sapiens
  misc_RNA (1)...(19): siRNA sense strand
auagggagcucagguugug

SEQ ID NO: 491073 - RNA, 19 nt, Homo sapiens
  misc_RNA (1)...(19): siRNA sense strand
aagcagagacgaaggaucu

SEQ ID NO: 491074 - RNA, 19 nt, Homo sapiens
  misc_RNA (1)...(19): siRNA sense strand
ggccuucauugcccagaug

SEQ ID NO: 491075 - RNA, 19 nt, Homo sapiens
  misc_RNA (1)...(19): siRNA sense strand
guccuuaagguucaucaaa

SEQ ID NO: 491076 - RNA, 19 nt, Homo sapiens
  misc_RNA (1)...(19): siRNA sense strand
ucucaggucccuugguuug

SEQ ID NO: 491077 - RNA, 19 nt, Homo sapiens
  misc_RNA (1)...(19): siRNA sense strand
ucuacgggaugcccaccua

SEQ ID NO: 491078 - RNA, 19 nt, Homo sapiens
  misc_RNA (1)...(19): siRNA sense strand
cagagacgaaggaucuuga

SEQ ID NO: 491079 - RNA, 19 nt, Homo sapiens
  misc_RNA (1)...(19): siRNA sense strand
gggagaaggcucagucacu

SEQ ID NO: 491080 - RNA, 19 nt, Homo sapiens
  misc_RNA (1)...(19): siRNA sense strand
gcagcagagagcaggaauu

SEQ ID NO: 491081 - RNA, 19 nt, Homo sapiens
  misc_RNA (1)...(19): siRNA sense strand
cagaugcggcugcccagaa

SEQ ID NO: 491082 - RNA, 19 nt, Homo sapiens
  misc_RNA (1)...(19): siRNA sense strand
gcgcaggagagucagcauu

SEQ ID NO: 491083 - RNA, 19 nt, Homo sapiens
  misc_RNA (1)...(19): siRNA sense strand
ccuccaggauagauuguuc

SEQ ID NO: 491084 - RNA, 19 nt, Homo sapiens
  misc_RNA (1)...(19): siRNA sense strand
caacgucauucuggauguc

SEQ ID NO: 491085 - RNA, 19 nt, Homo sapiens
  misc_RNA (1)...(19): siRNA sense strand
ucaacgucauucuggaugu

SEQ ID NO: 491086 - RNA, 19 nt, Homo sapiens
  misc_RNA (1)...(19): siRNA sense strand
gaaagcagagacgaaggau

SEQ ID NO: 491087 - RNA, 19 nt, Homo sapiens
  misc_RNA (1)...(19): siRNA sense strand
cagcacaugguccaguauu

SEQ ID NO: 491088 - RNA, 19 nt, Homo sapiens
  misc_RNA (1)...(19): siRNA sense strand
ggacucguacccucucuac

SEQ ID NO: 491089 - RNA, 19 nt, Homo sapiens
  misc_RNA (1)...(19): siRNA sense strand
ccagcugccagaauucuug

SEQ ID NO: 491090 - RNA, 19 nt, Homo sapiens
  misc_RNA (1)...(19): siRNA sense strand
ccaucuaccucaucgucau

SEQ ID NO: 491091 - RNA, 19 nt, Homo sapiens
  misc_RNA (1)...(19): siRNA sense strand
gcccacaaccuggugaaga

SEQ ID NO: 491092 - RNA, 19 nt, Homo sapiens
  misc_RNA (1)...(19): siRNA sense strand
accaucggcuuccucuauu

SEQ ID NO: 491093 - RNA, 19 nt, Homo sapiens
  misc_RNA (1)...(19): siRNA sense strand
agcacaugguccaguauuu

SEQ ID NO: 491094 - RNA, 19 nt, Homo sapiens
  misc_RNA (1)...(19): siRNA sense strand
gcugccagaauucuuguga

SEQ ID NO: 491095 - RNA, 19 nt, Homo sapiens
  misc_RNA (1)...(19): siRNA sense strand
cagccucgcucugacaucu

SEQ ID NO: 491096 - RNA, 19 nt, Homo sapiens
  misc_RNA (1)...(19): siRNA sense strand
gagggcaaugcuuuacuau

SEQ ID NO: 491097 - RNA, 19 nt, Homo sapiens
  misc_RNA (1)...(19): siRNA sense strand
caucaaacagaaaccaagu

SEQ ID NO: 491098 - RNA, 19 nt, Homo sapiens
  misc_RNA (1)...(19): siRNA sense strand
guacuacguguccuuaagg

SEQ ID NO: 491099 - RNA, 19 nt, Homo sapiens
  misc_RNA (1)...(19): siRNA sense strand
uguacuacguguccuuaag

SEQ ID NO: 491100 - RNA, 19 nt, Homo sapiens
  misc_RNA (1)...(19): siRNA sense strand
ucagcagaagaacuuauaa

SEQ ID NO: 491101 - RNA, 19 nt, Homo sapiens
  misc_RNA (1)...(19): siRNA sense strand
ggcugguggucuucuguug

SEQ ID NO: 491102 - RNA, 19 nt, Homo sapiens
  misc_RNA (1)...(19): siRNA sense strand
gagagccuccuugcuagau

SEQ ID NO: 491103 - RNA, 19 nt, Homo sapiens
  misc_RNA (1)...(19): siRNA sense strand
aggccugucugaugucaau

SEQ ID NO: 491104 - RNA, 19 nt, Homo sapiens
  misc_RNA (1)...(19): siRNA sense strand
ucagauuuccaacgacuuc

SEQ ID NO: 491105 - RNA, 19 nt, Homo sapiens
  misc_RNA (1)...(19): siRNA sense strand
cgcaggagagucagcauug

SEQ ID NO: 491106 - RNA, 19 nt, Homo sapiens
  misc_RNA (1)...(19): siRNA sense strand
gucacucgcagcccuguuu

SEQ ID NO: 491107 - RNA, 19 nt, Homo sapiens
  misc_RNA (1)...(19): siRNA sense strand
uguccucgcuacagcaauc

SEQ ID NO: 491108 - RNA, 19 nt, Homo sapiens
  misc_RNA (1)...(19): siRNA sense strand
ugacaucuucaggcuguuu

SEQ ID NO: 491109 - RNA, 19 nt, Homo sapiens
  misc_RNA (1)...(19): siRNA sense strand
gugcgugacuuagaugacu

SEQ ID NO: 491110 - RNA, 19 nt, Homo sapiens
  misc_RNA (1)...(19): siRNA sense strand
gguguucucuuuaaucaga

SEQ ID NO: 491111 - RNA, 19 nt, Homo sapiens
  misc_RNA (1)...(19): siRNA sense strand
gcgguguucucuuuaauca

SEQ ID NO: 491112 - RNA, 19 nt, Homo sapiens
  misc_RNA (1)...(19): siRNA sense strand
gacuugcucuucaucuuug

SEQ ID NO: 491113 - RNA, 19 nt, Homo sapiens
  misc_RNA (1)...(19): siRNA sense strand
cgacuugcucuucaucuuu

SEQ ID NO: 491114 - RNA, 19 nt, Homo sapiens
  misc_RNA (1)...(19): siRNA sense strand
caugcgguguucucuuuaa

SEQ ID NO: 491115 - RNA, 19 nt, Homo sapiens
  misc_RNA (1)...(19): siRNA sense strand
gcucuucaucuuugaguuu

SEQ ID NO: 491116 - RNA, 19 nt, Homo sapiens
  misc_RNA (1)...(19): siRNA sense strand
uccaugcgguguucucuuu

SEQ ID NO: 491117 - RNA, 19 nt, Homo sapiens
  misc_RNA (1)...(19): siRNA sense strand
uuaaucagauggaagucuu

SEQ ID NO: 491118 - RNA, 19 nt, Homo sapiens
  misc_RNA (1)...(19): siRNA sense strand
ccgacuugcucuucaucuu

SEQ ID NO: 491119 - RNA, 19 nt, Homo sapiens
  misc_RNA (1)...(19): siRNA sense strand
cauagccacucugcucuac

SEQ ID NO: 491120 - RNA, 19 nt, Homo sapiens
  misc_RNA (1)...(19): siRNA sense strand
uagccacucugcucuacgu

SEQ ID NO: 491121 - RNA, 19 nt, Homo sapiens
  misc_RNA (1)...(19): siRNA sense strand
gguguucucuuuaaucaga

SEQ ID NO: 491122 - RNA, 19 nt, Homo sapiens
  misc_RNA (1)...(19): siRNA sense strand
gcgguguucucuuuaauca

SEQ ID NO: 491123 - RNA, 19 nt, Homo sapiens
  misc_RNA (1)...(19): siRNA sense strand
gacuugcucuucaucuuug

SEQ ID NO: 491124 - RNA, 19 nt, Homo sapiens
  misc_RNA (1)...(19): siRNA sense strand
cgacuugcucuucaucuuu

SEQ ID NO: 491125 - RNA, 19 nt, Homo sapiens
  misc_RNA (1)...(19): siRNA sense strand
caugcgguguucucuuuaa

SEQ ID NO: 491126 - RNA, 19 nt, Homo sapiens
  misc_RNA (1)...(19): siRNA sense strand
gcucuucaucuuugaguuu

SEQ ID NO: 491127 - RNA, 19 nt, Homo sapiens
  misc_RNA (1)...(19): siRNA sense strand
uccaugcgguguucucuuu

SEQ ID NO: 491128 - RNA, 19 nt, Homo sapiens
  misc_RNA (1)...(19): siRNA sense strand
uuaaucagauggaagucuu

SEQ ID NO: 491129 - RNA, 19 nt, Homo sapiens
  misc_RNA (1)...(19): siRNA sense strand
ccgacuugcucuucaucuu

SEQ ID NO: 491130 - RNA, 19 nt, Homo sapiens
  misc_RNA (1)...(19): siRNA sense strand
cauagccacucugcucuac

SEQ ID NO: 491131 - RNA, 19 nt, Homo sapiens
  misc_RNA (1)...(19): siRNA sense strand
uagccacucugcucuacgu

SEQ ID NO: 491132 - RNA, 19 nt, Homo sapiens
  misc_RNA (1)...(19): siRNA sense strand
gguguucucuuuaaucaga

SEQ ID NO: 491133 - RNA, 19 nt, Homo sapiens
  misc_RNA (1)...(19): siRNA sense strand
gcgguguucucuuuaauca

SEQ ID NO: 491134 - RNA, 19 nt, Homo sapiens
  misc_RNA (1)...(19): siRNA sense strand
gacuugcucuucaucuuug

SEQ ID NO: 491135 - RNA, 19 nt, Homo sapiens
  misc_RNA (1)...(19): siRNA sense strand
cgacuugcucuucaucuuu

SEQ ID NO: 491136 - RNA, 19 nt, Homo sapiens
  misc_RNA (1)...(19): siRNA sense strand
caugcgguguucucuuuaa

SEQ ID NO: 491137 - RNA, 19 nt, Homo sapiens
  misc_RNA (1)...(19): siRNA sense strand
gcucuucaucuuugaguuu

SEQ ID NO: 491138 - RNA, 19 nt, Homo sapiens
  misc_RNA (1)...(19): siRNA sense strand
uccaugcgguguucucuuu

SEQ ID NO: 491139 - RNA, 19 nt, Homo sapiens
  misc_RNA (1)...(19): siRNA sense strand
uuaaucagauggaagucuu

SEQ ID NO: 491140 - RNA, 19 nt, Homo sapiens
  misc_RNA (1)...(19): siRNA sense strand
ccgacuugcucuucaucuu

SEQ ID NO: 491141 - RNA, 19 nt, Homo sapiens
  misc_RNA (1)...(19): siRNA sense strand
cauagccacucugcucuac

SEQ ID NO: 491142 - RNA, 19 nt, Homo sapiens
  misc_RNA (1)...(19): siRNA sense strand
uagccacucugcucuacgu

SEQ ID NO: 491143 - RNA, 19 nt, Homo sapiens
  misc_RNA (1)...(19): siRNA sense strand
gguguucucuuuaaucaga

SEQ ID NO: 491144 - RNA, 19 nt, Homo sapiens
  misc_RNA (1)...(19): siRNA sense strand
gcgguguucucuuuaauca

SEQ ID NO: 491145 - RNA, 19 nt, Homo sapiens
  misc_RNA (1)...(19): siRNA sense strand
gacuugcucuucaucuuug

SEQ ID NO: 491146 - RNA, 19 nt, Homo sapiens
  misc_RNA (1)...(19): siRNA sense strand
cgacuugcucuucaucuuu

SEQ ID NO: 491147 - RNA, 19 nt, Homo sapiens
  misc_RNA (1)...(19): siRNA sense strand
caugcgguguucucuuuaa

SEQ ID NO: 491148 - RNA, 19 nt, Homo sapiens
  misc_RNA (1)...(19): siRNA sense strand
gcucuucaucuuugaguuu

SEQ ID NO: 491149 - RNA, 19 nt, Homo sapiens
  misc_RNA (1)...(19): siRNA sense strand
uccaugcgguguucucuuu

SEQ ID NO: 491150 - RNA, 19 nt, Homo sapiens
  misc_RNA (1)...(19): siRNA sense strand
uuaaucagauggaagucuu

SEQ ID NO: 491151 - RNA, 19 nt, Homo sapiens
  misc_RNA (1)...(19): siRNA sense strand
ccgacuugcucuucaucuu

SEQ ID NO: 491152 - RNA, 19 nt, Homo sapiens
  misc_RNA (1)...(19): siRNA sense strand
cauagccacucugcucuac

SEQ ID NO: 491153 - RNA, 19 nt, Homo sapiens
  misc_RNA (1)...(19): siRNA sense strand
uagccacucugcucuacgu

SEQ ID NO: 491154 - RNA, 19 nt, Homo sapiens
  misc_RNA (1)...(19): siRNA sense strand
gguguucucuuuaaucaga

SEQ ID NO: 491155 - RNA, 19 nt, Homo sapiens
  misc_RNA (1)...(19): siRNA sense strand
gcgguguucucuuuaauca

SEQ ID NO: 491156 - RNA, 19 nt, Homo sapiens
  misc_RNA (1)...(19): siRNA sense strand
gacuugcucuucaucuuug

SEQ ID NO: 491157 - RNA, 19 nt, Homo sapiens
  misc_RNA (1)...(19): siRNA sense strand
cgacuugcucuucaucuuu

SEQ ID NO: 491158 - RNA, 19 nt, Homo sapiens
  misc_RNA (1)...(19): siRNA sense strand
caugcgguguucucuuuaa

SEQ ID NO: 491159 - RNA, 19 nt, Homo sapiens
  misc_RNA (1)...(19): siRNA sense strand
gcucuucaucuuugaguuu

SEQ ID NO: 491160 - RNA, 19 nt, Homo sapiens
  misc_RNA (1)...(19): siRNA sense strand
uccaugcgguguucucuuu

SEQ ID NO: 491161 - RNA, 19 nt, Homo sapiens
  misc_RNA (1)...(19): siRNA sense strand
uuaaucagauggaagucuu

SEQ ID NO: 491162 - RNA, 19 nt, Homo sapiens
  misc_RNA (1)...(19): siRNA sense strand
ccgacuugcucuucaucuu

SEQ ID NO: 491163 - RNA, 19 nt, Homo sapiens
  misc_RNA (1)...(19): siRNA sense strand
cauagccacucugcucuac

SEQ ID NO: 491164 - RNA, 19 nt, Homo sapiens
  misc_RNA (1)...(19): siRNA sense strand
uagccacucugcucuacgu

SEQ ID NO: 491165 - RNA, 19 nt, Homo sapiens
  misc_RNA (1)...(19): siRNA sense strand
gguguucucuuuaaucaga

SEQ ID NO: 491166 - RNA, 19 nt, Homo sapiens
  misc_RNA (1)...(19): siRNA sense strand
gcgguguucucuuuaauca

SEQ ID NO: 491167 - RNA, 19 nt, Homo sapiens
  misc_RNA (1)...(19): siRNA sense strand
gacuugcucuucaucuuug

SEQ ID NO: 491168 - RNA, 19 nt, Homo sapiens
  misc_RNA (1)...(19): siRNA sense strand
cgacuugcucuucaucuuu

SEQ ID NO: 491169 - RNA, 19 nt, Homo sapiens
  misc_RNA (1)...(19): siRNA sense strand
caugcgguguucucuuuaa

SEQ ID NO: 491170 - RNA, 19 nt, Homo sapiens
  misc_RNA (1)...(19): siRNA sense strand
gcucuucaucuuugaguuu

SEQ ID NO: 491171 - RNA, 19 nt, Homo sapiens
  misc_RNA (1)...(19): siRNA sense strand
uccaugcgguguucucuuu

SEQ ID NO: 491172 - RNA, 19 nt, Homo sapiens
  misc_RNA (1)...(19): siRNA sense strand
uuaaucagauggaagucuu

SEQ ID NO: 491173 - RNA, 19 nt, Homo sapiens
  misc_RNA (1)...(19): siRNA sense strand
ccgacuugcucuucaucuu

SEQ ID NO: 491174 - RNA, 19 nt, Homo sapiens
  misc_RNA (1)...(19): siRNA sense strand
cauagccacucugcucuac

SEQ ID NO: 491175 - RNA, 19 nt, Homo sapiens
  misc_RNA (1)...(19): siRNA sense strand
uagccacucugcucuacgu

SEQ ID NO: 491176 - RNA, 19 nt, Homo sapiens
  misc_RNA (1)...(19): siRNA sense strand
gguguucucuuuaaucaga

SEQ ID NO: 491177 - RNA, 19 nt, Homo sapiens
  misc_RNA (1)...(19): siRNA sense strand
gcgguguucucuuuaauca

SEQ ID NO: 491178 - RNA, 19 nt, Homo sapiens
  misc_RNA (1)...(19): siRNA sense strand
gacuugcucuucaucuuug

SEQ ID NO: 491179 - RNA, 19 nt, Homo sapiens
  misc_RNA (1)...(19): siRNA sense strand
cgacuugcucuucaucuuu

SEQ ID NO: 491180 - RNA, 19 nt, Homo sapiens
  misc_RNA (1)...(19): siRNA sense strand
caugcgguguucucuuuaa

SEQ ID NO: 491181 - RNA, 19 nt, Homo sapiens
  misc_RNA (1)...(19): siRNA sense strand
gcucuucaucuuugaguuu

SEQ ID NO: 491182 - RNA, 19 nt, Homo sapiens
  misc_RNA (1)...(19): siRNA sense strand
uccaugcgguguucucuuu

SEQ ID NO: 491183 - RNA, 19 nt, Homo sapiens
  misc_RNA (1)...(19): siRNA sense strand
uuaaucagauggaagucuu

SEQ ID NO: 491184 - RNA, 19 nt, Homo sapiens
  misc_RNA (1)...(19): siRNA sense strand
ccgacuugcucuucaucuu

SEQ ID NO: 491185 - RNA, 19 nt, Homo sapiens
  misc_RNA (1)...(19): siRNA sense strand
cauagccacucugcucuac

SEQ ID NO: 491186 - RNA, 19 nt, Homo sapiens
  misc_RNA (1)...(19): siRNA sense strand
uagccacucugcucuacgu

SEQ ID NO: 491187 - RNA, 19 nt, Homo sapiens
  misc_RNA (1)...(19): siRNA sense strand
gguguucucuuuaaucaga

SEQ ID NO: 491188 - RNA, 19 nt, Homo sapiens
  misc_RNA (1)...(19): siRNA sense strand
gcgguguucucuuuaauca

SEQ ID NO: 491189 - RNA, 19 nt, Homo sapiens
  misc_RNA (1)...(19): siRNA sense strand
gacuugcucuucaucuuug

SEQ ID NO: 491190 - RNA, 19 nt, Homo sapiens
  misc_RNA (1)...(19): siRNA sense strand
cgacuugcucuucaucuuu

SEQ ID NO: 491191 - RNA, 19 nt, Homo sapiens
  misc_RNA (1)...(19): siRNA sense strand
caugcgguguucucuuuaa

SEQ ID NO: 491192 - RNA, 19 nt, Homo sapiens
  misc_RNA (1)...(19): siRNA sense strand
gcucuucaucuuugaguuu

SEQ ID NO: 491193 - RNA, 19 nt, Homo sapiens
  misc_RNA (1)...(19): siRNA sense strand
uccaugcgguguucucuuu

SEQ ID NO: 491194 - RNA, 19 nt, Homo sapiens
  misc_RNA (1)...(19): siRNA sense strand
uuaaucagauggaagucuu

SEQ ID NO: 491195 - RNA, 19 nt, Homo sapiens
  misc_RNA (1)...(19): siRNA sense strand
ccgacuugcucuucaucuu

SEQ ID NO: 491196 - RNA, 19 nt, Homo sapiens
  misc_RNA (1)...(19): siRNA sense strand
cauagccacucugcucuac

SEQ ID NO: 491197 - RNA, 19 nt, Homo sapiens
  misc_RNA (1)...(19): siRNA sense strand
uagccacucugcucuacgu

SEQ ID NO: 491198 - RNA, 19 nt, Homo sapiens
  misc_RNA (1)...(19): siRNA sense strand
gguguucucuuuaaucaga

SEQ ID NO: 491199 - RNA, 19 nt, Homo sapiens
  misc_RNA (1)...(19): siRNA sense strand
gcgguguucucuuuaauca

SEQ ID NO: 491200 - RNA, 19 nt, Homo sapiens
  misc_RNA (1)...(19): siRNA sense strand
gacuugcucuucaucuuug

SEQ ID NO: 491201 - RNA, 19 nt, Homo sapiens
  misc_RNA (1)...(19): siRNA sense strand
cgacuugcucuucaucuuu

SEQ ID NO: 491202 - RNA, 19 nt, Homo sapiens
  misc_RNA (1)...(19): siRNA sense strand
caugcgguguucucuuuaa

SEQ ID NO: 491203 - RNA, 19 nt, Homo sapiens
  misc_RNA (1)...(19): siRNA sense strand
gcucuucaucuuugaguuu

SEQ ID NO: 491204 - RNA, 19 nt, Homo sapiens
  misc_RNA (1)...(19): siRNA sense strand
uccaugcgguguucucuuu

SEQ ID NO: 491205 - RNA, 19 nt, Homo sapiens
  misc_RNA (1)...(19): siRNA sense strand
uuaaucagauggaagucuu

SEQ ID NO: 491206 - RNA, 19 nt, Homo sapiens
  misc_RNA (1)...(19): siRNA sense strand
ccgacuugcucuucaucuu

SEQ ID NO: 491207 - RNA, 19 nt, Homo sapiens
  misc_RNA (1)...(19): siRNA sense strand
cauagccacucugcucuac

SEQ ID NO: 491208 - RNA, 19 nt, Homo sapiens
  misc_RNA (1)...(19): siRNA sense strand
uagccacucugcucuacgu

SEQ ID NO: 491209 - RNA, 19 nt, Homo sapiens
  misc_RNA (1)...(19): siRNA sense strand
gguguucucuuuaaucaga

SEQ ID NO: 491210 - RNA, 19 nt, Homo sapiens
  misc_RNA (1)...(19): siRNA sense strand
gcgguguucucuuuaauca

SEQ ID NO: 491211 - RNA, 19 nt, Homo sapiens
  misc_RNA (1)...(19): siRNA sense strand
gacuugcucuucaucuuug

SEQ ID NO: 491212 - RNA, 19 nt, Homo sapiens
  misc_RNA (1)...(19): siRNA sense strand
cgacuugcucuucaucuuu

SEQ ID NO: 491213 - RNA, 19 nt, Homo sapiens
  misc_RNA (1)...(19): siRNA sense strand
caugcgguguucucuuuaa

SEQ ID NO: 491214 - RNA, 19 nt, Homo sapiens
  misc_RNA (1)...(19): siRNA sense strand
gcucuucaucuuugaguuu

SEQ ID NO: 491215 - RNA, 19 nt, Homo sapiens
  misc_RNA (1)...(19): siRNA sense strand
uccaugcgguguucucuuu

SEQ ID NO: 491216 - RNA, 19 nt, Homo sapiens
  misc_RNA (1)...(19): siRNA sense strand
uuaaucagauggaagucuu

SEQ ID NO: 491217 - RNA, 19 nt, Homo sapiens
  misc_RNA (1)...(19): siRNA sense strand
ccgacuugcucuucaucuu

SEQ ID NO: 491218 - RNA, 19 nt, Homo sapiens
  misc_RNA (1)...(19): siRNA sense strand
cauagccacucugcucuac

SEQ ID NO: 491219 - RNA, 19 nt, Homo sapiens
  misc_RNA (1)...(19): siRNA sense strand
uagccacucugcucuacgu

SEQ ID NO: 491220 - RNA, 19 nt, Homo sapiens
  misc_RNA (1)...(19): siRNA sense strand
gguguucucuuuaaucaga

SEQ ID NO: 491221 - RNA, 19 nt, Homo sapiens
  misc_RNA (1)...(19): siRNA sense strand
gcgguguucucuuuaauca

SEQ ID NO: 491222 - RNA, 19 nt, Homo sapiens
  misc_RNA (1)...(19): siRNA sense strand
gacuugcucuucaucuuug

SEQ ID NO: 491223 - RNA, 19 nt, Homo sapiens
  misc_RNA (1)...(19): siRNA sense strand
cgacuugcucuucaucuuu

SEQ ID NO: 491224 - RNA, 19 nt, Homo sapiens
  misc_RNA (1)...(19): siRNA sense strand
caugcgguguucucuuuaa

SEQ ID NO: 491225 - RNA, 19 nt, Homo sapiens
  misc_RNA (1)...(19): siRNA sense strand
gcucuucaucuuugaguuu

SEQ ID NO: 491226 - RNA, 19 nt, Homo sapiens
  misc_RNA (1)...(19): siRNA sense strand
uccaugcgguguucucuuu

SEQ ID NO: 491227 - RNA, 19 nt, Homo sapiens
  misc_RNA (1)...(19): siRNA sense strand
uuaaucagauggaagucuu

SEQ ID NO: 491228 - RNA, 19 nt, Homo sapiens
  misc_RNA (1)...(19): siRNA sense strand
ccgacuugcucuucaucuu

SEQ ID NO: 491229 - RNA, 19 nt, Homo sapiens
  misc_RNA (1)...(19): siRNA sense strand
cauagccacucugcucuac

SEQ ID NO: 491230 - RNA, 19 nt, Homo sapiens
  misc_RNA (1)...(19): siRNA sense strand
uagccacucugcucuacgu

SEQ ID NO: 491231 - RNA, 19 nt, Homo sapiens
  misc_RNA (1)...(19): siRNA sense strand
gguguucucuuuaaucaga

SEQ ID NO: 491232 - RNA, 19 nt, Homo sapiens
  misc_RNA (1)...(19): siRNA sense strand
gcgguguucucuuuaauca

SEQ ID NO: 491233 - RNA, 19 nt, Homo sapiens
  misc_RNA (1)...(19): siRNA sense strand
gacuugcucuucaucuuug

SEQ ID NO: 491234 - RNA, 19 nt, Homo sapiens
  misc_RNA (1)...(19): siRNA sense strand
cgacuugcucuucaucuuu

SEQ ID NO: 491235 - RNA, 19 nt, Homo sapiens
  misc_RNA (1)...(19): siRNA sense strand
caugcgguguucucuuuaa

SEQ ID NO: 491236 - RNA, 19 nt, Homo sapiens
  misc_RNA (1)...(19): siRNA sense strand
gcucuucaucuuugaguuu

SEQ ID NO: 491237 - RNA, 19 nt, Homo sapiens
  misc_RNA (1)...(19): siRNA sense strand
uccaugcgguguucucuuu

SEQ ID NO: 491238 - RNA, 19 nt, Homo sapiens
  misc_RNA (1)...(19): siRNA sense strand
uuaaucagauggaagucuu

SEQ ID NO: 491239 - RNA, 19 nt, Homo sapiens
  misc_RNA (1)...(19): siRNA sense strand
ccgacuugcucuucaucuu

SEQ ID NO: 491240 - RNA, 19 nt, Homo sapiens
  misc_RNA (1)...(19): siRNA sense strand
cauagccacucugcucuac

SEQ ID NO: 491241 - RNA, 19 nt, Homo sapiens
  misc_RNA (1)...(19): siRNA sense strand
uagccacucugcucuacgu

SEQ ID NO: 491242 - RNA, 19 nt, Homo sapiens
  misc_RNA (1)...(19): siRNA sense strand
ggaagaagcugcucucuga

SEQ ID NO: 491243 - RNA, 19 nt, Homo sapiens
  misc_RNA (1)...(19): siRNA sense strand
aauaugaacuggagaugua

SEQ ID NO: 491244 - RNA, 19 nt, Homo sapiens
  misc_RNA (1)...(19): siRNA sense strand
gaacuggagauguaugaaa

SEQ ID NO: 491245 - RNA, 19 nt, Homo sapiens
  misc_RNA (1)...(19): siRNA sense strand
cgaaggccaccuacaaaua

SEQ ID NO: 491246 - RNA, 19 nt, Homo sapiens
  misc_RNA (1)...(19): siRNA sense strand
gaaaggcaaccgcuucuuc

SEQ ID NO: 491247 - RNA, 19 nt, Homo sapiens
  misc_RNA (1)...(19): siRNA sense strand
gaaggccaccuacaaauag

SEQ ID NO: 491248 - RNA, 19 nt, Homo sapiens
  misc_RNA (1)...(19): siRNA sense strand
gcaagguguuucucagcaa

SEQ ID NO: 491249 - RNA, 19 nt, Homo sapiens
  misc_RNA (1)...(19): siRNA sense strand
gaagauggagggaguaaaa

SEQ ID NO: 491250 - RNA, 19 nt, Homo sapiens
  misc_RNA (1)...(19): siRNA sense strand
gaaggagggaggcagaguu

SEQ ID NO: 491251 - RNA, 19 nt, Homo sapiens
  misc_RNA (1)...(19): siRNA sense strand
gcaaucgucgcaaacaaga

SEQ ID NO: 491252 - RNA, 19 nt, Homo sapiens
  misc_RNA (1)...(19): siRNA sense strand
gagaagauggagggaguaa

SEQ ID NO: 491253 - RNA, 19 nt, Homo sapiens
  misc_RNA (1)...(19): siRNA sense strand
cuacgaaggccaccuacaa

SEQ ID NO: 491254 - RNA, 19 nt, Homo sapiens
  misc_RNA (1)...(19): siRNA sense strand
cgugggagaugaguacauu

SEQ ID NO: 491255 - RNA, 19 nt, Homo sapiens
  misc_RNA (1)...(19): siRNA sense strand
cacaugggcuggccugaag

SEQ ID NO: 491256 - RNA, 19 nt, Homo sapiens
  misc_RNA (1)...(19): siRNA sense strand
ggagggaggcagaguugug

SEQ ID NO: 491257 - RNA, 19 nt, Homo sapiens
  misc_RNA (1)...(19): siRNA sense strand
gugcuugucuguggaggaa

SEQ ID NO: 491258 - RNA, 19 nt, Homo sapiens
  misc_RNA (1)...(19): siRNA sense strand
caacgguggacacgucauu

SEQ ID NO: 491259 - RNA, 19 nt, Homo sapiens
  misc_RNA (1)...(19): siRNA sense strand
caagauugaccucccugaa

SEQ ID NO: 491260 - RNA, 19 nt, Homo sapiens
  misc_RNA (1)...(19): siRNA sense strand
ucugagaguugaccagcaa

SEQ ID NO: 491261 - RNA, 19 nt, Homo sapiens
  misc_RNA (1)...(19): siRNA sense strand
ccacuacgaaggccaccua

SEQ ID NO: 491262 - RNA, 19 nt, Homo sapiens
  misc_RNA (1)...(19): siRNA sense strand
gguggacacgucauucuga

SEQ ID NO: 491263 - RNA, 19 nt, Homo sapiens
  misc_RNA (1)...(19): siRNA sense strand
gcgcugccgcuuucucuug

SEQ ID NO: 491264 - RNA, 19 nt, Homo sapiens
  misc_RNA (1)...(19): siRNA sense strand
ggguuucaguggagaagau

SEQ ID NO: 491265 - RNA, 19 nt, Homo sapiens
  misc_RNA (1)...(19): siRNA sense strand
gauugaggaccguguuuca

SEQ ID NO: 491266 - RNA, 19 nt, Homo sapiens
  misc_RNA (1)...(19): siRNA sense strand
ggagaagauggagggagua

SEQ ID NO: 491267 - RNA, 19 nt, Homo sapiens
  misc_RNA (1)...(19): siRNA sense strand
caagauugaggaccguguu

SEQ ID NO: 491268 - RNA, 19 nt, Homo sapiens
  misc_RNA (1)...(19): siRNA sense strand
uacgaaggccaccuacaaa

SEQ ID NO: 491269 - RNA, 19 nt, Homo sapiens
  misc_RNA (1)...(19): siRNA sense strand
ggaaaggcaaccgcuucuu

SEQ ID NO: 491270 - RNA, 19 nt, Homo sapiens
  misc_RNA (1)...(19): siRNA sense strand
ccacaugggcuggccugaa

SEQ ID NO: 491271 - RNA, 19 nt, Homo sapiens
  misc_RNA (1)...(19): siRNA sense strand
ugggcacgcuggugaagga

SEQ ID NO: 491272 - RNA, 19 nt, Homo sapiens
  misc_RNA (1)...(19): siRNA sense strand
aaauagcaguggccgacau

SEQ ID NO: 491273 - RNA, 19 nt, Homo sapiens
  misc_RNA (1)...(19): siRNA sense strand
acacgucauucugagaguu

SEQ ID NO: 491274 - RNA, 19 nt, Homo sapiens
  misc_RNA (1)...(19): siRNA sense strand
ugucuugcgugggagauga

SEQ ID NO: 491275 - RNA, 19 nt, Homo sapiens
  misc_RNA (1)...(19): siRNA sense strand
gcuucuuccuggccaacaa

SEQ ID NO: 491276 - RNA, 19 nt, Homo sapiens
  misc_RNA (1)...(19): siRNA sense strand
gagccguggacucaaguug

SEQ ID NO: 491277 - RNA, 19 nt, Homo sapiens
  misc_RNA (1)...(19): siRNA sense strand
cuacaucucucuucaggaa

SEQ ID NO: 491278 - RNA, 19 nt, Homo sapiens
  misc_RNA (1)...(19): siRNA sense strand
guacgagucggccaaguug

SEQ ID NO: 491279 - RNA, 19 nt, Homo sapiens
  misc_RNA (1)...(19): siRNA sense strand
ugucuucccuuccuacaga

SEQ ID NO: 491280 - RNA, 19 nt, Homo sapiens
  misc_RNA (1)...(19): siRNA sense strand
cggccaaguugaugaaugu

SEQ ID NO: 491281 - RNA, 19 nt, Homo sapiens
  misc_RNA (1)...(19): siRNA sense strand
ugacaucgcccugcaaauc

SEQ ID NO: 491282 - RNA, 19 nt, Homo sapiens
  misc_RNA (1)...(19): siRNA sense strand
ccacugucuucccuuccua

SEQ ID NO: 491283 - RNA, 19 nt, Homo sapiens
  misc_RNA (1)...(19): siRNA sense strand
ugacaacgacaucaacauc

SEQ ID NO: 491284 - RNA, 19 nt, Homo sapiens
  misc_RNA (1)...(19): siRNA sense strand
ggccagcuacugcgaagaa

SEQ ID NO: 491285 - RNA, 19 nt, Homo sapiens
  misc_RNA (1)...(19): siRNA sense strand
ugguggagguggccagcua

SEQ ID NO: 491286 - RNA, 19 nt, Homo sapiens
  misc_RNA (1)...(19): siRNA sense strand
gccagcuacugcgaagaaa

SEQ ID NO: 491287 - RNA, 19 nt, Homo sapiens
  misc_RNA (1)...(19): siRNA sense strand
gcugugacaacgacaucaa

SEQ ID NO: 491288 - RNA, 19 nt, Homo sapiens
  misc_RNA (1)...(19): siRNA sense strand
gaaggaagaugaacauguu

SEQ ID NO: 491289 - RNA, 19 nt, Homo sapiens
  misc_RNA (1)...(19): siRNA sense strand
caagauaagucaguuguaa

SEQ ID NO: 491290 - RNA, 19 nt, Homo sapiens
  misc_RNA (1)...(19): siRNA sense strand
gaaagcaauuguacucuau

SEQ ID NO: 491291 - RNA, 19 nt, Homo sapiens
  misc_RNA (1)...(19): siRNA sense strand
gaagauggauguuugucaa

SEQ ID NO: 491292 - RNA, 19 nt, Homo sapiens
  misc_RNA (1)...(19): siRNA sense strand
ggacacaaaugcaguuauc

SEQ ID NO: 491293 - RNA, 19 nt, Homo sapiens
  misc_RNA (1)...(19): siRNA sense strand
gaaccugucuggacuuauc

SEQ ID NO: 491294 - RNA, 19 nt, Homo sapiens
  misc_RNA (1)...(19): siRNA sense strand
gagaaccugucuggacuua

SEQ ID NO: 491295 - RNA, 19 nt, Homo sapiens
  misc_RNA (1)...(19): siRNA sense strand
ggaccuggaugccaagcua

SEQ ID NO: 491296 - RNA, 19 nt, Homo sapiens
  misc_RNA (1)...(19): siRNA sense strand
gcaauuguacucuaucaaa

SEQ ID NO: 491297 - RNA, 19 nt, Homo sapiens
  misc_RNA (1)...(19): siRNA sense strand
ggacuuaucgaaagcaauu

SEQ ID NO: 491298 - RNA, 19 nt, Homo sapiens
  misc_RNA (1)...(19): siRNA sense strand
cgaaagcaauuguacucua

SEQ ID NO: 491299 - RNA, 19 nt, Homo sapiens
  misc_RNA (1)...(19): siRNA sense strand
gaugcaaucucuugucuca

SEQ ID NO: 491300 - RNA, 19 nt, Homo sapiens
  misc_RNA (1)...(19): siRNA sense strand
ggagcacuauuauggauga

SEQ ID NO: 491301 - RNA, 19 nt, Homo sapiens
  misc_RNA (1)...(19): siRNA sense strand
cgaagcaggccuuuauuaa

SEQ ID NO: 491302 - RNA, 19 nt, Homo sapiens
  misc_RNA (1)...(19): siRNA sense strand
guaaauaagaugcaacaga

SEQ ID NO: 491303 - RNA, 19 nt, Homo sapiens
  misc_RNA (1)...(19): siRNA sense strand
ggacuuacaggaucgauau

SEQ ID NO: 491304 - RNA, 19 nt, Homo sapiens
  misc_RNA (1)...(19): siRNA sense strand
ugaaggugcugacaaagau

SEQ ID NO: 491305 - RNA, 19 nt, Homo sapiens
  misc_RNA (1)...(19): siRNA sense strand
gaagaaggaagaugaacau

SEQ ID NO: 491306 - RNA, 19 nt, Homo sapiens
  misc_RNA (1)...(19): siRNA sense strand
acaagcaaauggagaaguu

SEQ ID NO: 491307 - RNA, 19 nt, Homo sapiens
  misc_RNA (1)...(19): siRNA sense strand
ggacgugucucaggagcuu

SEQ ID NO: 491308 - RNA, 19 nt, Homo sapiens
  misc_RNA (1)...(19): siRNA sense strand
gaggagcacuauuauggau

SEQ ID NO: 491309 - RNA, 19 nt, Homo sapiens
  misc_RNA (1)...(19): siRNA sense strand
gaacagugcaggacggaau

SEQ ID NO: 491310 - RNA, 19 nt, Homo sapiens
  misc_RNA (1)...(19): siRNA sense strand
ggaucgauaugcucaagau

SEQ ID NO: 491311 - RNA, 19 nt, Homo sapiens
  misc_RNA (1)...(19): siRNA sense strand
ucccaagguuuccaagaua

SEQ ID NO: 491312 - RNA, 19 nt, Homo sapiens
  misc_RNA (1)...(19): siRNA sense strand
ucucuugucucacaugcua

SEQ ID NO: 491313 - RNA, 19 nt, Homo sapiens
  misc_RNA (1)...(19): siRNA sense strand
cgaaauccuuugugucgau

SEQ ID NO: 491314 - RNA, 19 nt, Homo sapiens
  misc_RNA (1)...(19): siRNA sense strand
ccagaccucuacaagcaaa

SEQ ID NO: 491315 - RNA, 19 nt, Homo sapiens
  misc_RNA (1)...(19): siRNA sense strand
agacgaagcaggccuuuau

SEQ ID NO: 491316 - RNA, 19 nt, Homo sapiens
  misc_RNA (1)...(19): siRNA sense strand
aagaugaccugcugcuguu

SEQ ID NO: 491317 - RNA, 19 nt, Homo sapiens
  misc_RNA (1)...(19): siRNA sense strand
ggaagaaggaagaugaaca

SEQ ID NO: 491318 - RNA, 19 nt, Homo sapiens
  misc_RNA (1)...(19): siRNA sense strand
auacuuggcugacggugaa

SEQ ID NO: 491319 - RNA, 19 nt, Homo sapiens
  misc_RNA (1)...(19): siRNA sense strand
gaagguacaaacacaagug

SEQ ID NO: 491320 - RNA, 19 nt, Homo sapiens
  misc_RNA (1)...(19): siRNA sense strand
ucaggaagguacaaacaca

SEQ ID NO: 491321 - RNA, 19 nt, Homo sapiens
  misc_RNA (1)...(19): siRNA sense strand
cuagagcuguuucauucaa

SEQ ID NO: 491322 - RNA, 19 nt, Homo sapiens
  misc_RNA (1)...(19): siRNA sense strand
cccaagguuuccaagauaa

SEQ ID NO: 491323 - RNA, 19 nt, Homo sapiens
  misc_RNA (1)...(19): siRNA sense strand
ccacagggaagaaggaaga

SEQ ID NO: 491324 - RNA, 19 nt, Homo sapiens
  misc_RNA (1)...(19): siRNA sense strand
aauugaagauggauguuug

SEQ ID NO: 491325 - RNA, 19 nt, Homo sapiens
  misc_RNA (1)...(19): siRNA sense strand
ggagcgagcagaugcaauc

SEQ ID NO: 491326 - RNA, 19 nt, Homo sapiens
  misc_RNA (1)...(19): siRNA sense strand
uagaggagcacuauuaugg

SEQ ID NO: 491327 - RNA, 19 nt, Homo sapiens
  misc_RNA (1)...(19): siRNA sense strand
ggaugaaggacgugucuca

SEQ ID NO: 491328 - RNA, 19 nt, Homo sapiens
  misc_RNA (1)...(19): siRNA sense strand
acgaagcaggccuuuauua

SEQ ID NO: 491329 - RNA, 19 nt, Homo sapiens
  misc_RNA (1)...(19): siRNA sense strand
aaaacgaacugggaaaauu

SEQ ID NO: 491330 - RNA, 19 nt, Homo sapiens
  misc_RNA (1)...(19): siRNA sense strand
ggaauauagaggagcacua

SEQ ID NO: 491331 - RNA, 19 nt, Homo sapiens
  misc_RNA (1)...(19): siRNA sense strand
cagggaagaaggaagauga

SEQ ID NO: 491332 - RNA, 19 nt, Homo sapiens
  misc_RNA (1)...(19): siRNA sense strand
gaucgauaugcucaagaua

SEQ ID NO: 491333 - RNA, 19 nt, Homo sapiens
  misc_RNA (1)...(19): siRNA sense strand
ugucuggacuuaucgaaag

SEQ ID NO: 491334 - RNA, 19 nt, Homo sapiens
  misc_RNA (1)...(19): siRNA sense strand
ugcaaucucuugucucaca

SEQ ID NO: 491335 - RNA, 19 nt, Homo sapiens
  misc_RNA (1)...(19): siRNA sense strand
gugcaggacggaauauaga

SEQ ID NO: 491336 - RNA, 19 nt, Homo sapiens
  misc_RNA (1)...(19): siRNA sense strand
ucgauaugcucaagauaag

SEQ ID NO: 491337 - RNA, 19 nt, Homo sapiens
  misc_RNA (1)...(19): siRNA sense strand
gauaugcucaagauaaguc

SEQ ID NO: 491338 - RNA, 19 nt, Homo sapiens
  misc_RNA (1)...(19): siRNA sense strand
caggaaaggcccucugcuu

SEQ ID NO: 491339 - RNA, 19 nt, Homo sapiens
  misc_RNA (1)...(19): siRNA sense strand
aaccagagcaggaaagaug

SEQ ID NO: 491340 - RNA, 19 nt, Homo sapiens
  misc_RNA (1)...(19): siRNA sense strand
aagcaauuguacucuauca

SEQ ID NO: 491341 - RNA, 19 nt, Homo sapiens
  misc_RNA (1)...(19): siRNA sense strand
agaaauauugggagacgaa

SEQ ID NO: 491342 - RNA, 19 nt, Homo sapiens
  misc_RNA (1)...(19): siRNA sense strand
gagacgaagcaggccuuua

SEQ ID NO: 491343 - RNA, 19 nt, Homo sapiens
  misc_RNA (1)...(19): siRNA sense strand
uuucuucgaucccaagguu

SEQ ID NO: 491344 - RNA, 19 nt, Homo sapiens
  misc_RNA (1)...(19): siRNA sense strand
agagcuguuucauucaauu

SEQ ID NO: 491345 - RNA, 19 nt, Homo sapiens
  misc_RNA (1)...(19): siRNA sense strand
aaauggagaaguucaggaa

SEQ ID NO: 491346 - RNA, 19 nt, Homo sapiens
  misc_RNA (1)...(19): siRNA sense strand
cuuacgaaauccuuugugu

SEQ ID NO: 491347 - RNA, 19 nt, Homo sapiens
  misc_RNA (1)...(19): siRNA sense strand
gaugaccugcugcuguuga

SEQ ID NO: 491348 - RNA, 19 nt, Homo sapiens
  misc_RNA (1)...(19): siRNA sense strand
aaaaguggaucuucuugga

SEQ ID NO: 491349 - RNA, 19 nt, Homo sapiens
  misc_RNA (1)...(19): siRNA sense strand
agaugcaacagaaauauug

SEQ ID NO: 491350 - RNA, 19 nt, Homo sapiens
  misc_RNA (1)...(19): siRNA sense strand
ggagaaguucaggaaggua

SEQ ID NO: 491351 - RNA, 19 nt, Homo sapiens
  misc_RNA (1)...(19): siRNA sense strand
ucaagauaagucaguugua

SEQ ID NO: 491352 - RNA, 19 nt, Homo sapiens
  misc_RNA (1)...(19): siRNA sense strand
gacgaagcaggccuuuauu

SEQ ID NO: 491353 - RNA, 19 nt, Homo sapiens
  misc_RNA (1)...(19): siRNA sense strand
ccaagguuuccaagauaaa

SEQ ID NO: 491354 - RNA, 19 nt, Homo sapiens
  misc_RNA (1)...(19): siRNA sense strand
agaaggaagaugaacaugu

SEQ ID NO: 491355 - RNA, 19 nt, Homo sapiens
  misc_RNA (1)...(19): siRNA sense strand
gagcaggaaagaugaugca

SEQ ID NO: 491356 - RNA, 19 nt, Homo sapiens
  misc_RNA (1)...(19): siRNA sense strand
gcaaucucuugucucacau

SEQ ID NO: 491357 - RNA, 19 nt, Homo sapiens
  misc_RNA (1)...(19): siRNA sense strand
acaaauugaagauggaugu

SEQ ID NO: 491358 - RNA, 19 nt, Homo sapiens
  misc_RNA (1)...(19): siRNA sense strand
gggacuuacaggaucgaua

SEQ ID NO: 491359 - RNA, 19 nt, Homo sapiens
  misc_RNA (1)...(19): siRNA sense strand
gaaggugcugacaaagaug

SEQ ID NO: 491360 - RNA, 19 nt, Homo sapiens
  misc_RNA (1)...(19): siRNA sense strand
cucacaugcuagcaacaua

SEQ ID NO: 491361 - RNA, 19 nt, Homo sapiens
  misc_RNA (1)...(19): siRNA sense strand
ggaagguacaaacacaagu

SEQ ID NO: 491362 - RNA, 19 nt, Homo sapiens
  misc_RNA (1)...(19): siRNA sense strand
auccagaccucuacaagca

SEQ ID NO: 491363 - RNA, 19 nt, Homo sapiens
  misc_RNA (1)...(19): siRNA sense strand
gugucgauuucaccaagaa

SEQ ID NO: 491364 - RNA, 19 nt, Homo sapiens
  misc_RNA (1)...(19): siRNA sense strand
gaucccaagguuuccaaga

SEQ ID NO: 491365 - RNA, 19 nt, Homo sapiens
  misc_RNA (1)...(19): siRNA sense strand
gcucaagauaagucaguug

SEQ ID NO: 491366 - RNA, 19 nt, Homo sapiens
  misc_RNA (1)...(19): siRNA sense strand
guucaggaagguacaaaca

SEQ ID NO: 491367 - RNA, 19 nt, Homo sapiens
  misc_RNA (1)...(19): siRNA sense strand
aaacgaacugggaaaauuu

SEQ ID NO: 491368 - RNA, 19 nt, Homo sapiens
  misc_RNA (1)...(19): siRNA sense strand
cugaaggugcugacaaaga

SEQ ID NO: 491369 - RNA, 19 nt, Homo sapiens
  misc_RNA (1)...(19): siRNA sense strand
ugaagauggauguuuguca

SEQ ID NO: 491370 - RNA, 19 nt, Homo sapiens
  misc_RNA (1)...(19): siRNA sense strand
gaaguucaggaagguacaa

SEQ ID NO: 491371 - RNA, 19 nt, Homo sapiens
  misc_RNA (1)...(19): siRNA sense strand
gaugcaagcgacaggaaag

SEQ ID NO: 491372 - RNA, 19 nt, Homo sapiens
  misc_RNA (1)...(19): siRNA sense strand
gagcuguuucauucaauuc

SEQ ID NO: 491373 - RNA, 19 nt, Homo sapiens
  misc_RNA (1)...(19): siRNA sense strand
gaaaacgaacugggaaaau

SEQ ID NO: 491374 - RNA, 19 nt, Homo sapiens
  misc_RNA (1)...(19): siRNA sense strand
uagagcuguuucauucaau

SEQ ID NO: 491375 - RNA, 19 nt, Homo sapiens
  misc_RNA (1)...(19): siRNA sense strand
gauaaaaccagagcaggaa

SEQ ID NO: 491376 - RNA, 19 nt, Homo sapiens
  misc_RNA (1)...(19): siRNA sense strand
caggaucgauaugcucaag

SEQ ID NO: 491377 - RNA, 19 nt, Homo sapiens
  misc_RNA (1)...(19): siRNA sense strand
caggacacaaaugcaguua

SEQ ID NO: 491378 - RNA, 19 nt, Homo sapiens
  misc_RNA (1)...(19): siRNA sense strand
caaauugaagauggauguu

SEQ ID NO: 491379 - RNA, 19 nt, Homo sapiens
  misc_RNA (1)...(19): siRNA sense strand
ggagacgaagcaggccuuu

SEQ ID NO: 491380 - RNA, 19 nt, Homo sapiens
  misc_RNA (1)...(19): siRNA sense strand
gagcacuauuauggaugaa

SEQ ID NO: 491381 - RNA, 19 nt, Homo sapiens
  misc_RNA (1)...(19): siRNA sense strand
ucuacaagcaaauggagaa

SEQ ID NO: 491382 - RNA, 19 nt, Homo sapiens
  misc_RNA (1)...(19): siRNA sense strand
gaaggaagaugaacauguu

SEQ ID NO: 491383 - RNA, 19 nt, Homo sapiens
  misc_RNA (1)...(19): siRNA sense strand
caagauaagucaguuguaa

SEQ ID NO: 491384 - RNA, 19 nt, Homo sapiens
  misc_RNA (1)...(19): siRNA sense strand
gaaagcaauuguacucuau

SEQ ID NO: 491385 - RNA, 19 nt, Homo sapiens
  misc_RNA (1)...(19): siRNA sense strand
gaagauggauguuugucaa

SEQ ID NO: 491386 - RNA, 19 nt, Homo sapiens
  misc_RNA (1)...(19): siRNA sense strand
ggacacaaaugcaguuauc

SEQ ID NO: 491387 - RNA, 19 nt, Homo sapiens
  misc_RNA (1)...(19): siRNA sense strand
gaaccugucuggacuuauc

SEQ ID NO: 491388 - RNA, 19 nt, Homo sapiens
  misc_RNA (1)...(19): siRNA sense strand
gagaaccugucuggacuua

SEQ ID NO: 491389 - RNA, 19 nt, Homo sapiens
  misc_RNA (1)...(19): siRNA sense strand
ggaccuggaugccaagcua

SEQ ID NO: 491390 - RNA, 19 nt, Homo sapiens
  misc_RNA (1)...(19): siRNA sense strand
gcaauuguacucuaucaaa

SEQ ID NO: 491391 - RNA, 19 nt, Homo sapiens
  misc_RNA (1)...(19): siRNA sense strand
ggacuuaucgaaagcaauu

SEQ ID NO: 491392 - RNA, 19 nt, Homo sapiens
  misc_RNA (1)...(19): siRNA sense strand
cgaaagcaauuguacucua

SEQ ID NO: 491393 - RNA, 19 nt, Homo sapiens
  misc_RNA (1)...(19): siRNA sense strand
gaugcaaucucuugucuca

SEQ ID NO: 491394 - RNA, 19 nt, Homo sapiens
  misc_RNA (1)...(19): siRNA sense strand
ggagcacuauuauggauga

SEQ ID NO: 491395 - RNA, 19 nt, Homo sapiens
  misc_RNA (1)...(19): siRNA sense strand
cgaagcaggccuuuauuaa

SEQ ID NO: 491396 - RNA, 19 nt, Homo sapiens
  misc_RNA (1)...(19): siRNA sense strand
guaaauaagaugcaacaga

SEQ ID NO: 491397 - RNA, 19 nt, Homo sapiens
  misc_RNA (1)...(19): siRNA sense strand
ggacuuacaggaucgauau

SEQ ID NO: 491398 - RNA, 19 nt, Homo sapiens
  misc_RNA (1)...(19): siRNA sense strand
ugaaggugcugacaaagau

SEQ ID NO: 491399 - RNA, 19 nt, Homo sapiens
  misc_RNA (1)...(19): siRNA sense strand
cgauaaagaacacgaauug

SEQ ID NO: 491400 - RNA, 19 nt, Homo sapiens
  misc_RNA (1)...(19): siRNA sense strand
gaagaaggaagaugaacau

SEQ ID NO: 491401 - RNA, 19 nt, Homo sapiens
  misc_RNA (1)...(19): siRNA sense strand
acaagcaaauggagaaguu

SEQ ID NO: 491402 - RNA, 19 nt, Homo sapiens
  misc_RNA (1)...(19): siRNA sense strand
ggacgugucucaggagcuu

SEQ ID NO: 491403 - RNA, 19 nt, Homo sapiens
  misc_RNA (1)...(19): siRNA sense strand
gaggagcacuauuauggau

SEQ ID NO: 491404 - RNA, 19 nt, Homo sapiens
  misc_RNA (1)...(19): siRNA sense strand
gaacagugcaggacggaau

SEQ ID NO: 491405 - RNA, 19 nt, Homo sapiens
  misc_RNA (1)...(19): siRNA sense strand
ugagugagaucuucaaugc

SEQ ID NO: 491406 - RNA, 19 nt, Homo sapiens
  misc_RNA (1)...(19): siRNA sense strand
ggaucgauaugcucaagau

SEQ ID NO: 491407 - RNA, 19 nt, Homo sapiens
  misc_RNA (1)...(19): siRNA sense strand
ucccaagguuuccaagaua

SEQ ID NO: 491408 - RNA, 19 nt, Homo sapiens
  misc_RNA (1)...(19): siRNA sense strand
ucucuugucucacaugcua

SEQ ID NO: 491409 - RNA, 19 nt, Homo sapiens
  misc_RNA (1)...(19): siRNA sense strand
cgaaauccuuugugucgau

SEQ ID NO: 491410 - RNA, 19 nt, Homo sapiens
  misc_RNA (1)...(19): siRNA sense strand
ccagaccucuacaagcaaa

SEQ ID NO: 491411 - RNA, 19 nt, Homo sapiens
  misc_RNA (1)...(19): siRNA sense strand
agacgaagcaggccuuuau

SEQ ID NO: 491412 - RNA, 19 nt, Homo sapiens
  misc_RNA (1)...(19): siRNA sense strand
aagaugaccugcugcuguu

SEQ ID NO: 491413 - RNA, 19 nt, Homo sapiens
  misc_RNA (1)...(19): siRNA sense strand
ggaagaaggaagaugaaca

SEQ ID NO: 491414 - RNA, 19 nt, Homo sapiens
  misc_RNA (1)...(19): siRNA sense strand
auacuuggcugacggugaa

SEQ ID NO: 491415 - RNA, 19 nt, Homo sapiens
  misc_RNA (1)...(19): siRNA sense strand
gaagguacaaacacaagug

SEQ ID NO: 491416 - RNA, 19 nt, Homo sapiens
  misc_RNA (1)...(19): siRNA sense strand
ucaggaagguacaaacaca

SEQ ID NO: 491417 - RNA, 19 nt, Homo sapiens
  misc_RNA (1)...(19): siRNA sense strand
agugagaucuucaaugcuu

SEQ ID NO: 491418 - RNA, 19 nt, Homo sapiens
  misc_RNA (1)...(19): siRNA sense strand
cuagagcuguuucauucaa

SEQ ID NO: 491419 - RNA, 19 nt, Homo sapiens
  misc_RNA (1)...(19): siRNA sense strand
uuacaggccucgcuacaag

SEQ ID NO: 491420 - RNA, 19 nt, Homo sapiens
  misc_RNA (1)...(19): siRNA sense strand
cccaagguuuccaagauaa

SEQ ID NO: 491421 - RNA, 19 nt, Homo sapiens
  misc_RNA (1)...(19): siRNA sense strand
ccacagggaagaaggaaga

SEQ ID NO: 491422 - RNA, 19 nt, Homo sapiens
  misc_RNA (1)...(19): siRNA sense strand
aauugaagauggauguuug

SEQ ID NO: 491423 - RNA, 19 nt, Homo sapiens
  misc_RNA (1)...(19): siRNA sense strand
ggagcgagcagaugcaauc

SEQ ID NO: 491424 - RNA, 19 nt, Homo sapiens
  misc_RNA (1)...(19): siRNA sense strand
uagaggagcacuauuaugg

SEQ ID NO: 491425 - RNA, 19 nt, Homo sapiens
  misc_RNA (1)...(19): siRNA sense strand
ggaugaaggacgugucuca

SEQ ID NO: 491426 - RNA, 19 nt, Homo sapiens
  misc_RNA (1)...(19): siRNA sense strand
acgaagcaggccuuuauua

SEQ ID NO: 491427 - RNA, 19 nt, Homo sapiens
  misc_RNA (1)...(19): siRNA sense strand
aaaacgaacugggaaaauu

SEQ ID NO: 491428 - RNA, 19 nt, Homo sapiens
  misc_RNA (1)...(19): siRNA sense strand
ggaauauagaggagcacua

SEQ ID NO: 491429 - RNA, 19 nt, Homo sapiens
  misc_RNA (1)...(19): siRNA sense strand
cagggaagaaggaagauga

SEQ ID NO: 491430 - RNA, 19 nt, Homo sapiens
  misc_RNA (1)...(19): siRNA sense strand
gaucgauaugcucaagaua

SEQ ID NO: 491431 - RNA, 19 nt, Homo sapiens
  misc_RNA (1)...(19): siRNA sense strand
ugucuggacuuaucgaaag

SEQ ID NO: 491432 - RNA, 19 nt, Homo sapiens
  misc_RNA (1)...(19): siRNA sense strand
ugcaaucucuugucucaca

SEQ ID NO: 491433 - RNA, 19 nt, Homo sapiens
  misc_RNA (1)...(19): siRNA sense strand
gugcaggacggaauauaga

SEQ ID NO: 491434 - RNA, 19 nt, Homo sapiens
  misc_RNA (1)...(19): siRNA sense strand
ucgauaugcucaagauaag

SEQ ID NO: 491435 - RNA, 19 nt, Homo sapiens
  misc_RNA (1)...(19): siRNA sense strand
aagcaauuguacucuauca

SEQ ID NO: 491436 - RNA, 19 nt, Homo sapiens
  misc_RNA (1)...(19): siRNA sense strand
ccagacaggcucagguuuc

SEQ ID NO: 491437 - RNA, 19 nt, Homo sapiens
  misc_RNA (1)...(19): siRNA sense strand
gauaugcucaagauaaguc

SEQ ID NO: 491438 - RNA, 19 nt, Homo sapiens
  misc_RNA (1)...(19): siRNA sense strand
caggaaaggcccucugcuu

SEQ ID NO: 491439 - RNA, 19 nt, Homo sapiens
  misc_RNA (1)...(19): siRNA sense strand
aaccagagcaggaaagaug

SEQ ID NO: 491440 - RNA, 19 nt, Homo sapiens
  misc_RNA (1)...(19): siRNA sense strand
uuucuucgaucccaagguu

SEQ ID NO: 491441 - RNA, 19 nt, Homo sapiens
  misc_RNA (1)...(19): siRNA sense strand
agaaauauugggagacgaa

SEQ ID NO: 491442 - RNA, 19 nt, Homo sapiens
  misc_RNA (1)...(19): siRNA sense strand
gagacgaagcaggccuuua

SEQ ID NO: 491443 - RNA, 19 nt, Homo sapiens
  misc_RNA (1)...(19): siRNA sense strand
agagcuguuucauucaauu

SEQ ID NO: 491444 - RNA, 19 nt, Homo sapiens
  misc_RNA (1)...(19): siRNA sense strand
gcuguugagugagaucuuc

SEQ ID NO: 491445 - RNA, 19 nt, Homo sapiens
  misc_RNA (1)...(19): siRNA sense strand
aaauggagaaguucaggaa

SEQ ID NO: 491446 - RNA, 19 nt, Homo sapiens
  misc_RNA (1)...(19): siRNA sense strand
cuuacgaaauccuuugugu

SEQ ID NO: 491447 - RNA, 19 nt, Homo sapiens
  misc_RNA (1)...(19): siRNA sense strand
gaugaccugcugcuguuga

SEQ ID NO: 491448 - RNA, 19 nt, Homo sapiens
  misc_RNA (1)...(19): siRNA sense strand
aaaaguggaucuucuugga

SEQ ID NO: 491449 - RNA, 19 nt, Homo sapiens
  misc_RNA (1)...(19): siRNA sense strand
agaugcaacagaaauauug

SEQ ID NO: 491450 - RNA, 19 nt, Homo sapiens
  misc_RNA (1)...(19): siRNA sense strand
ggagaaguucaggaaggua

SEQ ID NO: 491451 - RNA, 19 nt, Homo sapiens
  misc_RNA (1)...(19): siRNA sense strand
ucaagauaagucaguugua

SEQ ID NO: 491452 - RNA, 19 nt, Homo sapiens
  misc_RNA (1)...(19): siRNA sense strand
gacgaagcaggccuuuauu

SEQ ID NO: 491453 - RNA, 19 nt, Homo sapiens
  misc_RNA (1)...(19): siRNA sense strand
ccaagguuuccaagauaaa

SEQ ID NO: 491454 - RNA, 19 nt, Homo sapiens
  misc_RNA (1)...(19): siRNA sense strand
gaaaaccgauaaagaacac

SEQ ID NO: 491455 - RNA, 19 nt, Homo sapiens
  misc_RNA (1)...(19): siRNA sense strand
agaaggaagaugaacaugu

SEQ ID NO: 491456 - RNA, 19 nt, Homo sapiens
  misc_RNA (1)...(19): siRNA sense strand
gagggcgaguucagcaaag

SEQ ID NO: 491457 - RNA, 19 nt, Homo sapiens
  misc_RNA (1)...(19): siRNA sense strand
gagcaggaaagaugaugca

SEQ ID NO: 491458 - RNA, 19 nt, Homo sapiens
  misc_RNA (1)...(19): siRNA sense strand
gcaaucucuugucucacau

SEQ ID NO: 491459 - RNA, 19 nt, Homo sapiens
  misc_RNA (1)...(19): siRNA sense strand
acaaauugaagauggaugu

SEQ ID NO: 491460 - RNA, 19 nt, Homo sapiens
  misc_RNA (1)...(19): siRNA sense strand
gggacuuacaggaucgaua

SEQ ID NO: 491461 - RNA, 19 nt, Homo sapiens
  misc_RNA (1)...(19): siRNA sense strand
gcccagacaggcucagguu

SEQ ID NO: 491462 - RNA, 19 nt, Homo sapiens
  misc_RNA (1)...(19): siRNA sense strand
cugcugcuguugagugaga

SEQ ID NO: 491463 - RNA, 19 nt, Homo sapiens
  misc_RNA (1)...(19): siRNA sense strand
gaaggugcugacaaagaug

SEQ ID NO: 491464 - RNA, 19 nt, Homo sapiens
  misc_RNA (1)...(19): siRNA sense strand
cucacaugcuagcaacaua

SEQ ID NO: 491465 - RNA, 19 nt, Homo sapiens
  misc_RNA (1)...(19): siRNA sense strand
ggaagguacaaacacaagu

SEQ ID NO: 491466 - RNA, 19 nt, Homo sapiens
  misc_RNA (1)...(19): siRNA sense strand
auccagaccucuacaagca

SEQ ID NO: 491467 - RNA, 19 nt, Homo sapiens
  misc_RNA (1)...(19): siRNA sense strand
gugucgauuucaccaagaa

SEQ ID NO: 491468 - RNA, 19 nt, Homo sapiens
  misc_RNA (1)...(19): siRNA sense strand
gaucccaagguuuccaaga

SEQ ID NO: 491469 - RNA, 19 nt, Homo sapiens
  misc_RNA (1)...(19): siRNA sense strand
guucaggaagguacaaaca

SEQ ID NO: 491470 - RNA, 19 nt, Homo sapiens
  misc_RNA (1)...(19): siRNA sense strand
gacaggcucagguuuccuu

SEQ ID NO: 491471 - RNA, 19 nt, Homo sapiens
  misc_RNA (1)...(19): siRNA sense strand
gcucaagauaagucaguug

SEQ ID NO: 491472 - RNA, 19 nt, Homo sapiens
  misc_RNA (1)...(19): siRNA sense strand
aaacgaacugggaaaauuu

SEQ ID NO: 491473 - RNA, 19 nt, Homo sapiens
  misc_RNA (1)...(19): siRNA sense strand
cugaaggugcugacaaaga

SEQ ID NO: 491474 - RNA, 19 nt, Homo sapiens
  misc_RNA (1)...(19): siRNA sense strand
ugaagauggauguuuguca

SEQ ID NO: 491475 - RNA, 19 nt, Homo sapiens
  misc_RNA (1)...(19): siRNA sense strand
gagcuguuucauucaauuc

SEQ ID NO: 491476 - RNA, 19 nt, Homo sapiens
  misc_RNA (1)...(19): siRNA sense strand
gaaguucaggaagguacaa

SEQ ID NO: 491477 - RNA, 19 nt, Homo sapiens
  misc_RNA (1)...(19): siRNA sense strand
gaugcaagcgacaggaaag

SEQ ID NO: 491478 - RNA, 19 nt, Homo sapiens
  misc_RNA (1)...(19): siRNA sense strand
gauaaaaccagagcaggaa

SEQ ID NO: 491479 - RNA, 19 nt, Homo sapiens
  misc_RNA (1)...(19): siRNA sense strand
ccgauaaagaacacgaauu

SEQ ID NO: 491480 - RNA, 19 nt, Homo sapiens
  misc_RNA (1)...(19): siRNA sense strand
ugaccucgacccacucuca

SEQ ID NO: 491481 - RNA, 19 nt, Homo sapiens
  misc_RNA (1)...(19): siRNA sense strand
uagagcuguuucauucaau

SEQ ID NO: 491482 - RNA, 19 nt, Homo sapiens
  misc_RNA (1)...(19): siRNA sense strand
gaaggaagaugaacauguu

SEQ ID NO: 491483 - RNA, 19 nt, Homo sapiens
  misc_RNA (1)...(19): siRNA sense strand
caagauaagucaguuguaa

SEQ ID NO: 491484 - RNA, 19 nt, Homo sapiens
  misc_RNA (1)...(19): siRNA sense strand
gaaagcaauuguacucuau

SEQ ID NO: 491485 - RNA, 19 nt, Homo sapiens
  misc_RNA (1)...(19): siRNA sense strand
ggacacaaaugcaguuauc

SEQ ID NO: 491486 - RNA, 19 nt, Homo sapiens
  misc_RNA (1)...(19): siRNA sense strand
gaaccugucuggacuuauc

SEQ ID NO: 491487 - RNA, 19 nt, Homo sapiens
  misc_RNA (1)...(19): siRNA sense strand
gagaaccugucuggacuua

SEQ ID NO: 491488 - RNA, 19 nt, Homo sapiens
  misc_RNA (1)...(19): siRNA sense strand
ggaccuggaugccaagcua

SEQ ID NO: 491489 - RNA, 19 nt, Homo sapiens
  misc_RNA (1)...(19): siRNA sense strand
gcaauuguacucuaucaaa

SEQ ID NO: 491490 - RNA, 19 nt, Homo sapiens
  misc_RNA (1)...(19): siRNA sense strand
ggacuuaucgaaagcaauu

SEQ ID NO: 491491 - RNA, 19 nt, Homo sapiens
  misc_RNA (1)...(19): siRNA sense strand
cgaaagcaauuguacucua

SEQ ID NO: 491492 - RNA, 19 nt, Homo sapiens
  misc_RNA (1)...(19): siRNA sense strand
cgaagcaggccuuuauuaa

SEQ ID NO: 491493 - RNA, 19 nt, Homo sapiens
  misc_RNA (1)...(19): siRNA sense strand
guaaauaagaugcaacaga

SEQ ID NO: 491494 - RNA, 19 nt, Homo sapiens
  misc_RNA (1)...(19): siRNA sense strand
ggacuuacaggaucgauau

SEQ ID NO: 491495 - RNA, 19 nt, Homo sapiens
  misc_RNA (1)...(19): siRNA sense strand
gaagaaggaagaugaacau

SEQ ID NO: 491496 - RNA, 19 nt, Homo sapiens
  misc_RNA (1)...(19): siRNA sense strand
ggaucgauaugcucaagau

SEQ ID NO: 491497 - RNA, 19 nt, Homo sapiens
  misc_RNA (1)...(19): siRNA sense strand
agacgaagcaggccuuuau

SEQ ID NO: 491498 - RNA, 19 nt, Homo sapiens
  misc_RNA (1)...(19): siRNA sense strand
ggaagaaggaagaugaaca

SEQ ID NO: 491499 - RNA, 19 nt, Homo sapiens
  misc_RNA (1)...(19): siRNA sense strand
cuagagcuguuucauucaa

SEQ ID NO: 491500 - RNA, 19 nt, Homo sapiens
  misc_RNA (1)...(19): siRNA sense strand
ccacagggaagaaggaaga

SEQ ID NO: 491501 - RNA, 19 nt, Homo sapiens
  misc_RNA (1)...(19): siRNA sense strand
acgaagcaggccuuuauua

SEQ ID NO: 491502 - RNA, 19 nt, Homo sapiens
  misc_RNA (1)...(19): siRNA sense strand
cagggaagaaggaagauga

SEQ ID NO: 491503 - RNA, 19 nt, Homo sapiens
  misc_RNA (1)...(19): siRNA sense strand
gaucgauaugcucaagaua

SEQ ID NO: 491504 - RNA, 19 nt, Homo sapiens
  misc_RNA (1)...(19): siRNA sense strand
ugucuggacuuaucgaaag

SEQ ID NO: 491505 - RNA, 19 nt, Homo sapiens
  misc_RNA (1)...(19): siRNA sense strand
ucgauaugcucaagauaag

SEQ ID NO: 491506 - RNA, 19 nt, Homo sapiens
  misc_RNA (1)...(19): siRNA sense strand
gauaugcucaagauaaguc

SEQ ID NO: 491507 - RNA, 19 nt, Homo sapiens
  misc_RNA (1)...(19): siRNA sense strand
aagcaauuguacucuauca

SEQ ID NO: 491508 - RNA, 19 nt, Homo sapiens
  misc_RNA (1)...(19): siRNA sense strand
agaaauauugggagacgaa

SEQ ID NO: 491509 - RNA, 19 nt, Homo sapiens
  misc_RNA (1)...(19): siRNA sense strand
gagacgaagcaggccuuua

SEQ ID NO: 491510 - RNA, 19 nt, Homo sapiens
  misc_RNA (1)...(19): siRNA sense strand
agagcuguuucauucaauu

SEQ ID NO: 491511 - RNA, 19 nt, Homo sapiens
  misc_RNA (1)...(19): siRNA sense strand
agaugcaacagaaauauug

SEQ ID NO: 491512 - RNA, 19 nt, Homo sapiens
  misc_RNA (1)...(19): siRNA sense strand
ucaagauaagucaguugua

SEQ ID NO: 491513 - RNA, 19 nt, Homo sapiens
  misc_RNA (1)...(19): siRNA sense strand
gacgaagcaggccuuuauu

SEQ ID NO: 491514 - RNA, 19 nt, Homo sapiens
  misc_RNA (1)...(19): siRNA sense strand
agaaggaagaugaacaugu

SEQ ID NO: 491515 - RNA, 19 nt, Homo sapiens
  misc_RNA (1)...(19): siRNA sense strand
gggacuuacaggaucgaua

SEQ ID NO: 491516 - RNA, 19 nt, Homo sapiens
  misc_RNA (1)...(19): siRNA sense strand
gcucaagauaagucaguug

SEQ ID NO: 491517 - RNA, 19 nt, Homo sapiens
  misc_RNA (1)...(19): siRNA sense strand
gagcuguuucauucaauuc

SEQ ID NO: 491518 - RNA, 19 nt, Homo sapiens
  misc_RNA (1)...(19): siRNA sense strand
uagagcuguuucauucaau

SEQ ID NO: 491519 - RNA, 19 nt, Homo sapiens
  misc_RNA (1)...(19): siRNA sense strand
caggaucgauaugcucaag

SEQ ID NO: 491520 - RNA, 19 nt, Homo sapiens
  misc_RNA (1)...(19): siRNA sense strand
caggacacaaaugcaguua

SEQ ID NO: 491521 - RNA, 19 nt, Homo sapiens
  misc_RNA (1)...(19): siRNA sense strand
ggagacgaagcaggccuuu

SEQ ID NO: 491522 - RNA, 19 nt, Homo sapiens
  misc_RNA (1)...(19): siRNA sense strand
gaaggaagaugaacauguu

SEQ ID NO: 491523 - RNA, 19 nt, Homo sapiens
  misc_RNA (1)...(19): siRNA sense strand
caagauaagucaguuguaa

SEQ ID NO: 491524 - RNA, 19 nt, Homo sapiens
  misc_RNA (1)...(19): siRNA sense strand
gaaagcaauuguacucuau

SEQ ID NO: 491525 - RNA, 19 nt, Homo sapiens
  misc_RNA (1)...(19): siRNA sense strand
gaagauggauguuugucaa

SEQ ID NO: 491526 - RNA, 19 nt, Homo sapiens
  misc_RNA (1)...(19): siRNA sense strand
ggacacaaaugcaguuauc

SEQ ID NO: 491527 - RNA, 19 nt, Homo sapiens
  misc_RNA (1)...(19): siRNA sense strand
gaaccugucuggacuuauc

SEQ ID NO: 491528 - RNA, 19 nt, Homo sapiens
  misc_RNA (1)...(19): siRNA sense strand
gagaaccugucuggacuua

SEQ ID NO: 491529 - RNA, 19 nt, Homo sapiens
  misc_RNA (1)...(19): siRNA sense strand
ggaccuggaugccaagcua

SEQ ID NO: 491530 - RNA, 19 nt, Homo sapiens
  misc_RNA (1)...(19): siRNA sense strand
gcaauuguacucuaucaaa

SEQ ID NO: 491531 - RNA, 19 nt, Homo sapiens
  misc_RNA (1)...(19): siRNA sense strand
ggacuuaucgaaagcaauu

SEQ ID NO: 491532 - RNA, 19 nt, Homo sapiens
  misc_RNA (1)...(19): siRNA sense strand
cgaaagcaauuguacucua

SEQ ID NO: 491533 - RNA, 19 nt, Homo sapiens
  misc_RNA (1)...(19): siRNA sense strand
gaugcaaucucuugucuca

SEQ ID NO: 491534 - RNA, 19 nt, Homo sapiens
  misc_RNA (1)...(19): siRNA sense strand
ggagcacuauuauggauga

SEQ ID NO: 491535 - RNA, 19 nt, Homo sapiens
  misc_RNA (1)...(19): siRNA sense strand
cgaagcaggccuuuauuaa

SEQ ID NO: 491536 - RNA, 19 nt, Homo sapiens
  misc_RNA (1)...(19): siRNA sense strand
guaaauaagaugcaacaga

SEQ ID NO: 491537 - RNA, 19 nt, Homo sapiens
  misc_RNA (1)...(19): siRNA sense strand
ggacuuacaggaucgauau

SEQ ID NO: 491538 - RNA, 19 nt, Homo sapiens
  misc_RNA (1)...(19): siRNA sense strand
ugaaggugcugacaaagau

SEQ ID NO: 491539 - RNA, 19 nt, Homo sapiens
  misc_RNA (1)...(19): siRNA sense strand
gaagaaggaagaugaacau

SEQ ID NO: 491540 - RNA, 19 nt, Homo sapiens
  misc_RNA (1)...(19): siRNA sense strand
acaagcaaauggagaaguu

SEQ ID NO: 491541 - RNA, 19 nt, Homo sapiens
  misc_RNA (1)...(19): siRNA sense strand
ggacgugucucaggagcuu

SEQ ID NO: 491542 - RNA, 19 nt, Homo sapiens
  misc_RNA (1)...(19): siRNA sense strand
gaggagcacuauuauggau

SEQ ID NO: 491543 - RNA, 19 nt, Homo sapiens
  misc_RNA (1)...(19): siRNA sense strand
gaacagugcaggacggaau

SEQ ID NO: 491544 - RNA, 19 nt, Homo sapiens
  misc_RNA (1)...(19): siRNA sense strand
ggaucgauaugcucaagau

SEQ ID NO: 491545 - RNA, 19 nt, Homo sapiens
  misc_RNA (1)...(19): siRNA sense strand
ucccaagguuuccaagaua

SEQ ID NO: 491546 - RNA, 19 nt, Homo sapiens
  misc_RNA (1)...(19): siRNA sense strand
ucucuugucucacaugcua

SEQ ID NO: 491547 - RNA, 19 nt, Homo sapiens
  misc_RNA (1)...(19): siRNA sense strand
cgaaauccuuugugucgau

SEQ ID NO: 491548 - RNA, 19 nt, Homo sapiens
  misc_RNA (1)...(19): siRNA sense strand
ccagaccucuacaagcaaa

SEQ ID NO: 491549 - RNA, 19 nt, Homo sapiens
  misc_RNA (1)...(19): siRNA sense strand
agacgaagcaggccuuuau

SEQ ID NO: 491550 - RNA, 19 nt, Homo sapiens
  misc_RNA (1)...(19): siRNA sense strand
aagaugaccugcugcuguu

SEQ ID NO: 491551 - RNA, 19 nt, Homo sapiens
  misc_RNA (1)...(19): siRNA sense strand
ggaagaaggaagaugaaca

SEQ ID NO: 491552 - RNA, 19 nt, Homo sapiens
  misc_RNA (1)...(19): siRNA sense strand
auacuuggcugacggugaa

SEQ ID NO: 491553 - RNA, 19 nt, Homo sapiens
  misc_RNA (1)...(19): siRNA sense strand
gaagguacaaacacaagug

SEQ ID NO: 491554 - RNA, 19 nt, Homo sapiens
  misc_RNA (1)...(19): siRNA sense strand
ucaggaagguacaaacaca

SEQ ID NO: 491555 - RNA, 19 nt, Homo sapiens
  misc_RNA (1)...(19): siRNA sense strand
cuagagcuguuucauucaa

SEQ ID NO: 491556 - RNA, 19 nt, Homo sapiens
  misc_RNA (1)...(19): siRNA sense strand
cccaagguuuccaagauaa

SEQ ID NO: 491557 - RNA, 19 nt, Homo sapiens
  misc_RNA (1)...(19): siRNA sense strand
ccacagggaagaaggaaga

SEQ ID NO: 491558 - RNA, 19 nt, Homo sapiens
  misc_RNA (1)...(19): siRNA sense strand
aauugaagauggauguuug

SEQ ID NO: 491559 - RNA, 19 nt, Homo sapiens
  misc_RNA (1)...(19): siRNA sense strand
ggagcgagcagaugcaauc

SEQ ID NO: 491560 - RNA, 19 nt, Homo sapiens
  misc_RNA (1)...(19): siRNA sense strand
uagaggagcacuauuaugg

SEQ ID NO: 491561 - RNA, 19 nt, Homo sapiens
  misc_RNA (1)...(19): siRNA sense strand
ggaugaaggacgugucuca

SEQ ID NO: 491562 - RNA, 19 nt, Homo sapiens
  misc_RNA (1)...(19): siRNA sense strand
acgaagcaggccuuuauua

SEQ ID NO: 491563 - RNA, 19 nt, Homo sapiens
  misc_RNA (1)...(19): siRNA sense strand
aaaacgaacugggaaaauu

SEQ ID NO: 491564 - RNA, 19 nt, Homo sapiens
  misc_RNA (1)...(19): siRNA sense strand
ggaauauagaggagcacua

SEQ ID NO: 491565 - RNA, 19 nt, Homo sapiens
  misc_RNA (1)...(19): siRNA sense strand
cagggaagaaggaagauga

SEQ ID NO: 491566 - RNA, 19 nt, Homo sapiens
  misc_RNA (1)...(19): siRNA sense strand
gaucgauaugcucaagaua

SEQ ID NO: 491567 - RNA, 19 nt, Homo sapiens
  misc_RNA (1)...(19): siRNA sense strand
ugucuggacuuaucgaaag

SEQ ID NO: 491568 - RNA, 19 nt, Homo sapiens
  misc_RNA (1)...(19): siRNA sense strand
ugcaaucucuugucucaca

SEQ ID NO: 491569 - RNA, 19 nt, Homo sapiens
  misc_RNA (1)...(19): siRNA sense strand
gugcaggacggaauauaga

SEQ ID NO: 491570 - RNA, 19 nt, Homo sapiens
  misc_RNA (1)...(19): siRNA sense strand
ucgauaugcucaagauaag

SEQ ID NO: 491571 - RNA, 19 nt, Homo sapiens
  misc_RNA (1)...(19): siRNA sense strand
gauaugcucaagauaaguc

SEQ ID NO: 491572 - RNA, 19 nt, Homo sapiens
  misc_RNA (1)...(19): siRNA sense strand
caggaaaggcccucugcuu

SEQ ID NO: 491573 - RNA, 19 nt, Homo sapiens
  misc_RNA (1)...(19): siRNA sense strand
aaccagagcaggaaagaug

SEQ ID NO: 491574 - RNA, 19 nt, Homo sapiens
  misc_RNA (1)...(19): siRNA sense strand
aagcaauuguacucuauca

SEQ ID NO: 491575 - RNA, 19 nt, Homo sapiens
  misc_RNA (1)...(19): siRNA sense strand
agaaauauugggagacgaa

SEQ ID NO: 491576 - RNA, 19 nt, Homo sapiens
  misc_RNA (1)...(19): siRNA sense strand
gagacgaagcaggccuuua

SEQ ID NO: 491577 - RNA, 19 nt, Homo sapiens
  misc_RNA (1)...(19): siRNA sense strand
uuucuucgaucccaagguu

SEQ ID NO: 491578 - RNA, 19 nt, Homo sapiens
  misc_RNA (1)...(19): siRNA sense strand
agagcuguuucauucaauu

SEQ ID NO: 491579 - RNA, 19 nt, Homo sapiens
  misc_RNA (1)...(19): siRNA sense strand
aaauggagaaguucaggaa

SEQ ID NO: 491580 - RNA, 19 nt, Homo sapiens
  misc_RNA (1)...(19): siRNA sense strand
cuuacgaaauccuuugugu

SEQ ID NO: 491581 - RNA, 19 nt, Homo sapiens
  misc_RNA (1)...(19): siRNA sense strand
gaugaccugcugcuguuga

SEQ ID NO: 491582 - RNA, 19 nt, Homo sapiens
  misc_RNA (1)...(19): siRNA sense strand
aaaaguggaucuucuugga

SEQ ID NO: 491583 - RNA, 19 nt, Homo sapiens
  misc_RNA (1)...(19): siRNA sense strand
agaugcaacagaaauauug

SEQ ID NO: 491584 - RNA, 19 nt, Homo sapiens
  misc_RNA (1)...(19): siRNA sense strand
ggagaaguucaggaaggua

SEQ ID NO: 491585 - RNA, 19 nt, Homo sapiens
  misc_RNA (1)...(19): siRNA sense strand
ucaagauaagucaguugua

SEQ ID NO: 491586 - RNA, 19 nt, Homo sapiens
  misc_RNA (1)...(19): siRNA sense strand
gacgaagcaggccuuuauu

SEQ ID NO: 491587 - RNA, 19 nt, Homo sapiens
  misc_RNA (1)...(19): siRNA sense strand
ccaagguuuccaagauaaa

SEQ ID NO: 491588 - RNA, 19 nt, Homo sapiens
  misc_RNA (1)...(19): siRNA sense strand
agaaggaagaugaacaugu

SEQ ID NO: 491589 - RNA, 19 nt, Homo sapiens
  misc_RNA (1)...(19): siRNA sense strand
gagcaggaaagaugaugca

SEQ ID NO: 491590 - RNA, 19 nt, Homo sapiens
  misc_RNA (1)...(19): siRNA sense strand
gcaaucucuugucucacau

SEQ ID NO: 491591 - RNA, 19 nt, Homo sapiens
  misc_RNA (1)...(19): siRNA sense strand
acaaauugaagauggaugu

SEQ ID NO: 491592 - RNA, 19 nt, Homo sapiens
  misc_RNA (1)...(19): siRNA sense strand
gggacuuacaggaucgaua

SEQ ID NO: 491593 - RNA, 19 nt, Homo sapiens
  misc_RNA (1)...(19): siRNA sense strand
gaaggugcugacaaagaug

SEQ ID NO: 491594 - RNA, 19 nt, Homo sapiens
  misc_RNA (1)...(19): siRNA sense strand
cucacaugcuagcaacaua

SEQ ID NO: 491595 - RNA, 19 nt, Homo sapiens
  misc_RNA (1)...(19): siRNA sense strand
ggaagguacaaacacaagu

SEQ ID NO: 491596 - RNA, 19 nt, Homo sapiens
  misc_RNA (1)...(19): siRNA sense strand
auccagaccucuacaagca

SEQ ID NO: 491597 - RNA, 19 nt, Homo sapiens
  misc_RNA (1)...(19): siRNA sense strand
gugucgauuucaccaagaa

SEQ ID NO: 491598 - RNA, 19 nt, Homo sapiens
  misc_RNA (1)...(19): siRNA sense strand
gaucccaagguuuccaaga

SEQ ID NO: 491599 - RNA, 19 nt, Homo sapiens
  misc_RNA (1)...(19): siRNA sense strand
gcucaagauaagucaguug

SEQ ID NO: 491600 - RNA, 19 nt, Homo sapiens
  misc_RNA (1)...(19): siRNA sense strand
guucaggaagguacaaaca

SEQ ID NO: 491601 - RNA, 19 nt, Homo sapiens
  misc_RNA (1)...(19): siRNA sense strand
aaacgaacugggaaaauuu

SEQ ID NO: 491602 - RNA, 19 nt, Homo sapiens
  misc_RNA (1)...(19): siRNA sense strand
cugaaggugcugacaaaga

SEQ ID NO: 491603 - RNA, 19 nt, Homo sapiens
  misc_RNA (1)...(19): siRNA sense strand
ugaagauggauguuuguca

SEQ ID NO: 491604 - RNA, 19 nt, Homo sapiens
  misc_RNA (1)...(19): siRNA sense strand
gaaguucaggaagguacaa

SEQ ID NO: 491605 - RNA, 19 nt, Homo sapiens
  misc_RNA (1)...(19): siRNA sense strand
gaugcaagcgacaggaaag

SEQ ID NO: 491606 - RNA, 19 nt, Homo sapiens
  misc_RNA (1)...(19): siRNA sense strand
gagcuguuucauucaauuc

SEQ ID NO: 491607 - RNA, 19 nt, Homo sapiens
  misc_RNA (1)...(19): siRNA sense strand
gaaaacgaacugggaaaau

SEQ ID NO: 491608 - RNA, 19 nt, Homo sapiens
  misc_RNA (1)...(19): siRNA sense strand
uagagcuguuucauucaau

SEQ ID NO: 491609 - RNA, 19 nt, Homo sapiens
  misc_RNA (1)...(19): siRNA sense strand
gauaaaaccagagcaggaa

SEQ ID NO: 491610 - RNA, 19 nt, Homo sapiens
  misc_RNA (1)...(19): siRNA sense strand
caggaucgauaugcucaag

SEQ ID NO: 491611 - RNA, 19 nt, Homo sapiens
  misc_RNA (1)...(19): siRNA sense strand
caggacacaaaugcaguua

SEQ ID NO: 491612 - RNA, 19 nt, Homo sapiens
  misc_RNA (1)...(19): siRNA sense strand
caaauugaagauggauguu

SEQ ID NO: 491613 - RNA, 19 nt, Homo sapiens
  misc_RNA (1)...(19): siRNA sense strand
ggagacgaagcaggccuuu

SEQ ID NO: 491614 - RNA, 19 nt, Homo sapiens
  misc_RNA (1)...(19): siRNA sense strand
gagcacuauuauggaugaa

SEQ ID NO: 491615 - RNA, 19 nt, Homo sapiens
  misc_RNA (1)...(19): siRNA sense strand
ucuacaagcaaauggagaa

SEQ ID NO: 491616 - RNA, 19 nt, Homo sapiens
  misc_RNA (1)...(19): siRNA sense strand
gaaggaagaugaacauguu

SEQ ID NO: 491617 - RNA, 19 nt, Homo sapiens
  misc_RNA (1)...(19): siRNA sense strand
caagauaagucaguuguaa

SEQ ID NO: 491618 - RNA, 19 nt, Homo sapiens
  misc_RNA (1)...(19): siRNA sense strand
gaaagcaauuguacucuau

SEQ ID NO: 491619 - RNA, 19 nt, Homo sapiens
  misc_RNA (1)...(19): siRNA sense strand
gaagauggauguuugucaa

SEQ ID NO: 491620 - RNA, 19 nt, Homo sapiens
  misc_RNA (1)...(19): siRNA sense strand
ggacacaaaugcaguuauc

SEQ ID NO: 491621 - RNA, 19 nt, Homo sapiens
  misc_RNA (1)...(19): siRNA sense strand
gaaccugucuggacuuauc

SEQ ID NO: 491622 - RNA, 19 nt, Homo sapiens
  misc_RNA (1)...(19): siRNA sense strand
gagaaccugucuggacuua

SEQ ID NO: 491623 - RNA, 19 nt, Homo sapiens
  misc_RNA (1)...(19): siRNA sense strand
ggaccuggaugccaagcua

SEQ ID NO: 491624 - RNA, 19 nt, Homo sapiens
  misc_RNA (1)...(19): siRNA sense strand
gcaauuguacucuaucaaa

SEQ ID NO: 491625 - RNA, 19 nt, Homo sapiens
  misc_RNA (1)...(19): siRNA sense strand
ggacuuaucgaaagcaauu

SEQ ID NO: 491626 - RNA, 19 nt, Homo sapiens
  misc_RNA (1)...(19): siRNA sense strand
cgaaagcaauuguacucua

SEQ ID NO: 491627 - RNA, 19 nt, Homo sapiens
  misc_RNA (1)...(19): siRNA sense strand
gaugcaaucucuugucuca

SEQ ID NO: 491628 - RNA, 19 nt, Homo sapiens
  misc_RNA (1)...(19): siRNA sense strand
ggagcacuauuauggauga

SEQ ID NO: 491629 - RNA, 19 nt, Homo sapiens
  misc_RNA (1)...(19): siRNA sense strand
cgaagcaggccuuuauuaa

SEQ ID NO: 491630 - RNA, 19 nt, Homo sapiens
  misc_RNA (1)...(19): siRNA sense strand
guaaauaagaugcaacaga

SEQ ID NO: 491631 - RNA, 19 nt, Homo sapiens
  misc_RNA (1)...(19): siRNA sense strand
ggacuuacaggaucgauau

SEQ ID NO: 491632 - RNA, 19 nt, Homo sapiens
  misc_RNA (1)...(19): siRNA sense strand
ugaaggugcugacaaagau

SEQ ID NO: 491633 - RNA, 19 nt, Homo sapiens
  misc_RNA (1)...(19): siRNA sense strand
cgauaaagaacacgaauug

SEQ ID NO: 491634 - RNA, 19 nt, Homo sapiens
  misc_RNA (1)...(19): siRNA sense strand
gaagaaggaagaugaacau

SEQ ID NO: 491635 - RNA, 19 nt, Homo sapiens
  misc_RNA (1)...(19): siRNA sense strand
acaagcaaauggagaaguu

SEQ ID NO: 491636 - RNA, 19 nt, Homo sapiens
  misc_RNA (1)...(19): siRNA sense strand
ggacgugucucaggagcuu

SEQ ID NO: 491637 - RNA, 19 nt, Homo sapiens
  misc_RNA (1)...(19): siRNA sense strand
gaggagcacuauuauggau

SEQ ID NO: 491638 - RNA, 19 nt, Homo sapiens
  misc_RNA (1)...(19): siRNA sense strand
gaacagugcaggacggaau

SEQ ID NO: 491639 - RNA, 19 nt, Homo sapiens
  misc_RNA (1)...(19): siRNA sense strand
ugagugagaucuucaaugc

SEQ ID NO: 491640 - RNA, 19 nt, Homo sapiens
  misc_RNA (1)...(19): siRNA sense strand
ggaucgauaugcucaagau

SEQ ID NO: 491641 - RNA, 19 nt, Homo sapiens
  misc_RNA (1)...(19): siRNA sense strand
ucccaagguuuccaagaua

SEQ ID NO: 491642 - RNA, 19 nt, Homo sapiens
  misc_RNA (1)...(19): siRNA sense strand
ucucuugucucacaugcua

SEQ ID NO: 491643 - RNA, 19 nt, Homo sapiens
  misc_RNA (1)...(19): siRNA sense strand
cgaaauccuuugugucgau

SEQ ID NO: 491644 - RNA, 19 nt, Homo sapiens
  misc_RNA (1)...(19): siRNA sense strand
ccagaccucuacaagcaaa

SEQ ID NO: 491645 - RNA, 19 nt, Homo sapiens
  misc_RNA (1)...(19): siRNA sense strand
agacgaagcaggccuuuau

SEQ ID NO: 491646 - RNA, 19 nt, Homo sapiens
  misc_RNA (1)...(19): siRNA sense strand
aagaugaccugcugcuguu

SEQ ID NO: 491647 - RNA, 19 nt, Homo sapiens
  misc_RNA (1)...(19): siRNA sense strand
ggaagaaggaagaugaaca

SEQ ID NO: 491648 - RNA, 19 nt, Homo sapiens
  misc_RNA (1)...(19): siRNA sense strand
auacuuggcugacggugaa

SEQ ID NO: 491649 - RNA, 19 nt, Homo sapiens
  misc_RNA (1)...(19): siRNA sense strand
gaagguacaaacacaagug

SEQ ID NO: 491650 - RNA, 19 nt, Homo sapiens
  misc_RNA (1)...(19): siRNA sense strand
ucaggaagguacaaacaca

SEQ ID NO: 491651 - RNA, 19 nt, Homo sapiens
  misc_RNA (1)...(19): siRNA sense strand
agugagaucuucaaugcuu

SEQ ID NO: 491652 - RNA, 19 nt, Homo sapiens
  misc_RNA (1)...(19): siRNA sense strand
cuagagcuguuucauucaa

SEQ ID NO: 491653 - RNA, 19 nt, Homo sapiens
  misc_RNA (1)...(19): siRNA sense strand
uuacaggccucgcuacaag

SEQ ID NO: 491654 - RNA, 19 nt, Homo sapiens
  misc_RNA (1)...(19): siRNA sense strand
cccaagguuuccaagauaa

SEQ ID NO: 491655 - RNA, 19 nt, Homo sapiens
  misc_RNA (1)...(19): siRNA sense strand
ccacagggaagaaggaaga

SEQ ID NO: 491656 - RNA, 19 nt, Homo sapiens
  misc_RNA (1)...(19): siRNA sense strand
aauugaagauggauguuug

SEQ ID NO: 491657 - RNA, 19 nt, Homo sapiens
  misc_RNA (1)...(19): siRNA sense strand
ggagcgagcagaugcaauc

SEQ ID NO: 491658 - RNA, 19 nt, Homo sapiens
  misc_RNA (1)...(19): siRNA sense strand
uagaggagcacuauuaugg

SEQ ID NO: 491659 - RNA, 19 nt, Homo sapiens
  misc_RNA (1)...(19): siRNA sense strand
ggaugaaggacgugucuca

SEQ ID NO: 491660 - RNA, 19 nt, Homo sapiens
  misc_RNA (1)...(19): siRNA sense strand
acgaagcaggccuuuauua

SEQ ID NO: 491661 - RNA, 19 nt, Homo sapiens
  misc_RNA (1)...(19): siRNA sense strand
aaaacgaacugggaaaauu

SEQ ID NO: 491662 - RNA, 19 nt, Homo sapiens
  misc_RNA (1)...(19): siRNA sense strand
ggaauauagaggagcacua

SEQ ID NO: 491663 - RNA, 19 nt, Homo sapiens
  misc_RNA (1)...(19): siRNA sense strand
cagggaagaaggaagauga

SEQ ID NO: 491664 - RNA, 19 nt, Homo sapiens
  misc_RNA (1)...(19): siRNA sense strand
gaucgauaugcucaagaua

SEQ ID NO: 491665 - RNA, 19 nt, Homo sapiens
  misc_RNA (1)...(19): siRNA sense strand
ugucuggacuuaucgaaag

SEQ ID NO: 491666 - RNA, 19 nt, Homo sapiens
  misc_RNA (1)...(19): siRNA sense strand
ugcaaucucuugucucaca

SEQ ID NO: 491667 - RNA, 19 nt, Homo sapiens
  misc_RNA (1)...(19): siRNA sense strand
gugcaggacggaauauaga

SEQ ID NO: 491668 - RNA, 19 nt, Homo sapiens
  misc_RNA (1)...(19): siRNA sense strand
ucgauaugcucaagauaag

SEQ ID NO: 491669 - RNA, 19 nt, Homo sapiens
  misc_RNA (1)...(19): siRNA sense strand
aagcaauuguacucuauca

SEQ ID NO: 491670 - RNA, 19 nt, Homo sapiens
  misc_RNA (1)...(19): siRNA sense strand
ccagacaggcucagguuuc

SEQ ID NO: 491671 - RNA, 19 nt, Homo sapiens
  misc_RNA (1)...(19): siRNA sense strand
gauaugcucaagauaaguc

SEQ ID NO: 491672 - RNA, 19 nt, Homo sapiens
  misc_RNA (1)...(19): siRNA sense strand
caggaaaggcccucugcuu

SEQ ID NO: 491673 - RNA, 19 nt, Homo sapiens
  misc_RNA (1)...(19): siRNA sense strand
aaccagagcaggaaagaug

SEQ ID NO: 491674 - RNA, 19 nt, Homo sapiens
  misc_RNA (1)...(19): siRNA sense strand
uuucuucgaucccaagguu

SEQ ID NO: 491675 - RNA, 19 nt, Homo sapiens
  misc_RNA (1)...(19): siRNA sense strand
agaaauauugggagacgaa

SEQ ID NO: 491676 - RNA, 19 nt, Homo sapiens
  misc_RNA (1)...(19): siRNA sense strand
gagacgaagcaggccuuua

SEQ ID NO: 491677 - RNA, 19 nt, Homo sapiens
  misc_RNA (1)...(19): siRNA sense strand
agagcuguuucauucaauu

SEQ ID NO: 491678 - RNA, 19 nt, Homo sapiens
  misc_RNA (1)...(19): siRNA sense strand
gcuguugagugagaucuuc

SEQ ID NO: 491679 - RNA, 19 nt, Homo sapiens
  misc_RNA (1)...(19): siRNA sense strand
aaauggagaaguucaggaa

SEQ ID NO: 491680 - RNA, 19 nt, Homo sapiens
  misc_RNA (1)...(19): siRNA sense strand
cuuacgaaauccuuugugu

SEQ ID NO: 491681 - RNA, 19 nt, Homo sapiens
  misc_RNA (1)...(19): siRNA sense strand
gaugaccugcugcuguuga

SEQ ID NO: 491682 - RNA, 19 nt, Homo sapiens
  misc_RNA (1)...(19): siRNA sense strand
aaaaguggaucuucuugga

SEQ ID NO: 491683 - RNA, 19 nt, Homo sapiens
  misc_RNA (1)...(19): siRNA sense strand
agaugcaacagaaauauug

SEQ ID NO: 491684 - RNA, 19 nt, Homo sapiens
  misc_RNA (1)...(19): siRNA sense strand
ggagaaguucaggaaggua

SEQ ID NO: 491685 - RNA, 19 nt, Homo sapiens
  misc_RNA (1)...(19): siRNA sense strand
ucaagauaagucaguugua

SEQ ID NO: 491686 - RNA, 19 nt, Homo sapiens
  misc_RNA (1)...(19): siRNA sense strand
gacgaagcaggccuuuauu

SEQ ID NO: 491687 - RNA, 19 nt, Homo sapiens
  misc_RNA (1)...(19): siRNA sense strand
ccaagguuuccaagauaaa

SEQ ID NO: 491688 - RNA, 19 nt, Homo sapiens
  misc_RNA (1)...(19): siRNA sense strand
gaaaaccgauaaagaacac

SEQ ID NO: 491689 - RNA, 19 nt, Homo sapiens
  misc_RNA (1)...(19): siRNA sense strand
agaaggaagaugaacaugu

SEQ ID NO: 491690 - RNA, 19 nt, Homo sapiens
  misc_RNA (1)...(19): siRNA sense strand
gagggcgaguucagcaaag

SEQ ID NO: 491691 - RNA, 19 nt, Homo sapiens
  misc_RNA (1)...(19): siRNA sense strand
gagcaggaaagaugaugca

SEQ ID NO: 491692 - RNA, 19 nt, Homo sapiens
  misc_RNA (1)...(19): siRNA sense strand
gcaaucucuugucucacau

SEQ ID NO: 491693 - RNA, 19 nt, Homo sapiens
  misc_RNA (1)...(19): siRNA sense strand
acaaauugaagauggaugu

SEQ ID NO: 491694 - RNA, 19 nt, Homo sapiens
  misc_RNA (1)...(19): siRNA sense strand
gggacuuacaggaucgaua

SEQ ID NO: 491695 - RNA, 19 nt, Homo sapiens
  misc_RNA (1)...(19): siRNA sense strand
gcccagacaggcucagguu

SEQ ID NO: 491696 - RNA, 19 nt, Homo sapiens
  misc_RNA (1)...(19): siRNA sense strand
cugcugcuguugagugaga

SEQ ID NO: 491697 - RNA, 19 nt, Homo sapiens
  misc_RNA (1)...(19): siRNA sense strand
gaaggugcugacaaagaug

SEQ ID NO: 491698 - RNA, 19 nt, Homo sapiens
  misc_RNA (1)...(19): siRNA sense strand
cucacaugcuagcaacaua

SEQ ID NO: 491699 - RNA, 19 nt, Homo sapiens
  misc_RNA (1)...(19): siRNA sense strand
ggaagguacaaacacaagu

SEQ ID NO: 491700 - RNA, 19 nt, Homo sapiens
  misc_RNA (1)...(19): siRNA sense strand
auccagaccucuacaagca

SEQ ID NO: 491701 - RNA, 19 nt, Homo sapiens
  misc_RNA (1)...(19): siRNA sense strand
gugucgauuucaccaagaa

SEQ ID NO: 491702 - RNA, 19 nt, Homo sapiens
  misc_RNA (1)...(19): siRNA sense strand
gaucccaagguuuccaaga

SEQ ID NO: 491703 - RNA, 19 nt, Homo sapiens
  misc_RNA (1)...(19): siRNA sense strand
guucaggaagguacaaaca

SEQ ID NO: 491704 - RNA, 19 nt, Homo sapiens
  misc_RNA (1)...(19): siRNA sense strand
gacaggcucagguuuccuu

SEQ ID NO: 491705 - RNA, 19 nt, Homo sapiens
  misc_RNA (1)...(19): siRNA sense strand
gcucaagauaagucaguug

SEQ ID NO: 491706 - RNA, 19 nt, Homo sapiens
  misc_RNA (1)...(19): siRNA sense strand
aaacgaacugggaaaauuu

SEQ ID NO: 491707 - RNA, 19 nt, Homo sapiens
  misc_RNA (1)...(19): siRNA sense strand
cugaaggugcugacaaaga

SEQ ID NO: 491708 - RNA, 19 nt, Homo sapiens
  misc_RNA (1)...(19): siRNA sense strand
ugaagauggauguuuguca

SEQ ID NO: 491709 - RNA, 19 nt, Homo sapiens
  misc_RNA (1)...(19): siRNA sense strand
gagcuguuucauucaauuc

SEQ ID NO: 491710 - RNA, 19 nt, Homo sapiens
  misc_RNA (1)...(19): siRNA sense strand
gaaguucaggaagguacaa

SEQ ID NO: 491711 - RNA, 19 nt, Homo sapiens
  misc_RNA (1)...(19): siRNA sense strand
gaugcaagcgacaggaaag

SEQ ID NO: 491712 - RNA, 19 nt, Homo sapiens
  misc_RNA (1)...(19): siRNA sense strand
gauaaaaccagagcaggaa

SEQ ID NO: 491713 - RNA, 19 nt, Homo sapiens
  misc_RNA (1)...(19): siRNA sense strand
ccgauaaagaacacgaauu

SEQ ID NO: 491714 - RNA, 19 nt, Homo sapiens
  misc_RNA (1)...(19): siRNA sense strand
ugaccucgacccacucuca

SEQ ID NO: 491715 - RNA, 19 nt, Homo sapiens
  misc_RNA (1)...(19): siRNA sense strand
uagagcuguuucauucaau

SEQ ID NO: 491716 - RNA, 19 nt, Homo sapiens
  misc_RNA (1)...(19): siRNA sense strand
gaaggaagaugaacauguu

SEQ ID NO: 491717 - RNA, 19 nt, Homo sapiens
  misc_RNA (1)...(19): siRNA sense strand
caagauaagucaguuguaa

SEQ ID NO: 491718 - RNA, 19 nt, Homo sapiens
  misc_RNA (1)...(19): siRNA sense strand
gaaagcaauuguacucuau

SEQ ID NO: 491719 - RNA, 19 nt, Homo sapiens
  misc_RNA (1)...(19): siRNA sense strand
ggacacaaaugcaguuauc

SEQ ID NO: 491720 - RNA, 19 nt, Homo sapiens
  misc_RNA (1)...(19): siRNA sense strand
gaaccugucuggacuuauc

SEQ ID NO: 491721 - RNA, 19 nt, Homo sapiens
  misc_RNA (1)...(19): siRNA sense strand
gagaaccugucuggacuua

SEQ ID NO: 491722 - RNA, 19 nt, Homo sapiens
  misc_RNA (1)...(19): siRNA sense strand
ggaccuggaugccaagcua

SEQ ID NO: 491723 - RNA, 19 nt, Homo sapiens
  misc_RNA (1)...(19): siRNA sense strand
gcaauuguacucuaucaaa

SEQ ID NO: 491724 - RNA, 19 nt, Homo sapiens
  misc_RNA (1)...(19): siRNA sense strand
ggacuuaucgaaagcaauu

SEQ ID NO: 491725 - RNA, 19 nt, Homo sapiens
  misc_RNA (1)...(19): siRNA sense strand
cgaaagcaauuguacucua

SEQ ID NO: 491726 - RNA, 19 nt, Homo sapiens
  misc_RNA (1)...(19): siRNA sense strand
cgaagcaggccuuuauuaa

SEQ ID NO: 491727 - RNA, 19 nt, Homo sapiens
  misc_RNA (1)...(19): siRNA sense strand
guaaauaagaugcaacaga

SEQ ID NO: 491728 - RNA, 19 nt, Homo sapiens
  misc_RNA (1)...(19): siRNA sense strand
ggacuuacaggaucgauau

SEQ ID NO: 491729 - RNA, 19 nt, Homo sapiens
  misc_RNA (1)...(19): siRNA sense strand
gaagaaggaagaugaacau

SEQ ID NO: 491730 - RNA, 19 nt, Homo sapiens
  misc_RNA (1)...(19): siRNA sense strand
ggaucgauaugcucaagau

SEQ ID NO: 491731 - RNA, 19 nt, Homo sapiens
  misc_RNA (1)...(19): siRNA sense strand
agacgaagcaggccuuuau

SEQ ID NO: 491732 - RNA, 19 nt, Homo sapiens
  misc_RNA (1)...(19): siRNA sense strand
ggaagaaggaagaugaaca

SEQ ID NO: 491733 - RNA, 19 nt, Homo sapiens
  misc_RNA (1)...(19): siRNA sense strand
cuagagcuguuucauucaa

SEQ ID NO: 491734 - RNA, 19 nt, Homo sapiens
  misc_RNA (1)...(19): siRNA sense strand
ccacagggaagaaggaaga

SEQ ID NO: 491735 - RNA, 19 nt, Homo sapiens
  misc_RNA (1)...(19): siRNA sense strand
acgaagcaggccuuuauua

SEQ ID NO: 491736 - RNA, 19 nt, Homo sapiens
  misc_RNA (1)...(19): siRNA sense strand
cagggaagaaggaagauga

SEQ ID NO: 491737 - RNA, 19 nt, Homo sapiens
  misc_RNA (1)...(19): siRNA sense strand
gaucgauaugcucaagaua

SEQ ID NO: 491738 - RNA, 19 nt, Homo sapiens
  misc_RNA (1)...(19): siRNA sense strand
ugucuggacuuaucgaaag

SEQ ID NO: 491739 - RNA, 19 nt, Homo sapiens
  misc_RNA (1)...(19): siRNA sense strand
ucgauaugcucaagauaag

SEQ ID NO: 491740 - RNA, 19 nt, Homo sapiens
  misc_RNA (1)...(19): siRNA sense strand
gauaugcucaagauaaguc

SEQ ID NO: 491741 - RNA, 19 nt, Homo sapiens
  misc_RNA (1)...(19): siRNA sense strand
aagcaauuguacucuauca

SEQ ID NO: 491742 - RNA, 19 nt, Homo sapiens
  misc_RNA (1)...(19): siRNA sense strand
agaaauauugggagacgaa

SEQ ID NO: 491743 - RNA, 19 nt, Homo sapiens
  misc_RNA (1)...(19): siRNA sense strand
gagacgaagcaggccuuua

SEQ ID NO: 491744 - RNA, 19 nt, Homo sapiens
  misc_RNA (1)...(19): siRNA sense strand
agagcuguuucauucaauu

SEQ ID NO: 491745 - RNA, 19 nt, Homo sapiens
  misc_RNA (1)...(19): siRNA sense strand
agaugcaacagaaauauug

SEQ ID NO: 491746 - RNA, 19 nt, Homo sapiens
  misc_RNA (1)...(19): siRNA sense strand
ucaagauaagucaguugua

SEQ ID NO: 491747 - RNA, 19 nt, Homo sapiens
  misc_RNA (1)...(19): siRNA sense strand
gacgaagcaggccuuuauu

SEQ ID NO: 491748 - RNA, 19 nt, Homo sapiens
  misc_RNA (1)...(19): siRNA sense strand
agaaggaagaugaacaugu

SEQ ID NO: 491749 - RNA, 19 nt, Homo sapiens
  misc_RNA (1)...(19): siRNA sense strand
gggacuuacaggaucgaua

SEQ ID NO: 491750 - RNA, 19 nt, Homo sapiens
  misc_RNA (1)...(19): siRNA sense strand
gcucaagauaagucaguug

SEQ ID NO: 491751 - RNA, 19 nt, Homo sapiens
  misc_RNA (1)...(19): siRNA sense strand
gagcuguuucauucaauuc

SEQ ID NO: 491752 - RNA, 19 nt, Homo sapiens
  misc_RNA (1)...(19): siRNA sense strand
uagagcuguuucauucaau

SEQ ID NO: 491753 - RNA, 19 nt, Homo sapiens
  misc_RNA (1)...(19): siRNA sense strand
caggaucgauaugcucaag

SEQ ID NO: 491754 - RNA, 19 nt, Homo sapiens
  misc_RNA (1)...(19): siRNA sense strand
caggacacaaaugcaguua

SEQ ID NO: 491755 - RNA, 19 nt, Homo sapiens
  misc_RNA (1)...(19): siRNA sense strand
ggagacgaagcaggccuuu

SEQ ID NO: 491756 - RNA, 19 nt, Homo sapiens
  misc_RNA (1)...(19): siRNA sense strand
gaaaggaggucaaaguaaa

SEQ ID NO: 491757 - RNA, 19 nt, Homo sapiens
  misc_RNA (1)...(19): siRNA sense strand
gauaugguauggcaaguua

SEQ ID NO: 491758 - RNA, 19 nt, Homo sapiens
  misc_RNA (1)...(19): siRNA sense strand
uaaagaaucuccugauaug

SEQ ID NO: 491759 - RNA, 19 nt, Homo sapiens
  misc_RNA (1)...(19): siRNA sense strand
gguaaagaaucuccugaua

SEQ ID NO: 491760 - RNA, 19 nt, Homo sapiens
  misc_RNA (1)...(19): siRNA sense strand
gaaaagggcuauucauuug

SEQ ID NO: 491761 - RNA, 19 nt, Homo sapiens
  misc_RNA (1)...(19): siRNA sense strand
gcaaauggguggcaaguac

SEQ ID NO: 491762 - RNA, 19 nt, Homo sapiens
  misc_RNA (1)...(19): siRNA sense strand
ggaaaggaggucaaaguaa

SEQ ID NO: 491763 - RNA, 19 nt, Homo sapiens
  misc_RNA (1)...(19): siRNA sense strand
uaacagagcauacaagcaa

SEQ ID NO: 491764 - RNA, 19 nt, Homo sapiens
  misc_RNA (1)...(19): siRNA sense strand
caacaaggauuuggaguag

SEQ ID NO: 491765 - RNA, 19 nt, Homo sapiens
  misc_RNA (1)...(19): siRNA sense strand
ggaauugcgucuggguuaa

SEQ ID NO: 491766 - RNA, 19 nt, Homo sapiens
  misc_RNA (1)...(19): siRNA sense strand
caacagaagauaucaaauc

SEQ ID NO: 491767 - RNA, 19 nt, Homo sapiens
  misc_RNA (1)...(19): siRNA sense strand
guaaagaaucuccugauau

SEQ ID NO: 491768 - RNA, 19 nt, Homo sapiens
  misc_RNA (1)...(19): siRNA sense strand
guugagauuugaagaugua

SEQ ID NO: 491769 - RNA, 19 nt, Homo sapiens
  misc_RNA (1)...(19): siRNA sense strand
uaaaccaccugcaccuaaa

SEQ ID NO: 491770 - RNA, 19 nt, Homo sapiens
  misc_RNA (1)...(19): siRNA sense strand
gacaguauauggcaaaugg

SEQ ID NO: 491771 - RNA, 19 nt, Homo sapiens
  misc_RNA (1)...(19): siRNA sense strand
cagaucagcuuaugagaca

SEQ ID NO: 491772 - RNA, 19 nt, Homo sapiens
  misc_RNA (1)...(19): siRNA sense strand
gggaaaggaggucaaagua

SEQ ID NO: 491773 - RNA, 19 nt, Homo sapiens
  misc_RNA (1)...(19): siRNA sense strand
gcuauucauuugucagauu

SEQ ID NO: 491774 - RNA, 19 nt, Homo sapiens
  misc_RNA (1)...(19): siRNA sense strand
guaaaccaccugcaccuaa

SEQ ID NO: 491775 - RNA, 19 nt, Homo sapiens
  misc_RNA (1)...(19): siRNA sense strand
gacaugugguuaaaugcua

SEQ ID NO: 491776 - RNA, 19 nt, Homo sapiens
  misc_RNA (1)...(19): siRNA sense strand
guccagaaauuacaacaga

SEQ ID NO: 491777 - RNA, 19 nt, Homo sapiens
  misc_RNA (1)...(19): siRNA sense strand
ugaaggacaugugguuaaa

SEQ ID NO: 491778 - RNA, 19 nt, Homo sapiens
  misc_RNA (1)...(19): siRNA sense strand
gaacgguacuacgauugaa

SEQ ID NO: 491779 - RNA, 19 nt, Homo sapiens
  misc_RNA (1)...(19): siRNA sense strand
acacuaagcaguugagauu

SEQ ID NO: 491780 - RNA, 19 nt, Homo sapiens
  misc_RNA (1)...(19): siRNA sense strand
cgucaaauccgaaccaauu

SEQ ID NO: 491781 - RNA, 19 nt, Homo sapiens
  misc_RNA (1)...(19): siRNA sense strand
ccagagaugugacagaagu

SEQ ID NO: 491782 - RNA, 19 nt, Homo sapiens
  misc_RNA (1)...(19): siRNA sense strand
gcaaguaccgccuuaugga

SEQ ID NO: 491783 - RNA, 19 nt, Homo sapiens
  misc_RNA (1)...(19): siRNA sense strand
gagauuugaagauguagua

SEQ ID NO: 491784 - RNA, 19 nt, Homo sapiens
  misc_RNA (1)...(19): siRNA sense strand
guaaaccagucaaguccaa

SEQ ID NO: 491785 - RNA, 19 nt, Homo sapiens
  misc_RNA (1)...(19): siRNA sense strand
gaagauaucaaaucagcau

SEQ ID NO: 491786 - RNA, 19 nt, Homo sapiens
  misc_RNA (1)...(19): siRNA sense strand
ggagccaaguguauggaaa

SEQ ID NO: 491787 - RNA, 19 nt, Homo sapiens
  misc_RNA (1)...(19): siRNA sense strand
ugacagaaguccuuauacu

SEQ ID NO: 491788 - RNA, 19 nt, Homo sapiens
  misc_RNA (1)...(19): siRNA sense strand
cauauugcuuuguggaauu

SEQ ID NO: 491789 - RNA, 19 nt, Homo sapiens
  misc_RNA (1)...(19): siRNA sense strand
ggugaacgguacuacgauu

SEQ ID NO: 491790 - RNA, 19 nt, Homo sapiens
  misc_RNA (1)...(19): siRNA sense strand
ccaauugggccacucguaa

SEQ ID NO: 491791 - RNA, 19 nt, Homo sapiens
  misc_RNA (1)...(19): siRNA sense strand
guuaacagaucagcuuaug

SEQ ID NO: 491792 - RNA, 19 nt, Homo sapiens
  misc_RNA (1)...(19): siRNA sense strand
guagaucaaucaccuucug

SEQ ID NO: 491793 - RNA, 19 nt, Homo sapiens
  misc_RNA (1)...(19): siRNA sense strand
uaacagaucagcuuaugag

SEQ ID NO: 491794 - RNA, 19 nt, Homo sapiens
  misc_RNA (1)...(19): siRNA sense strand
ucaacaaggauuuggagua

SEQ ID NO: 491795 - RNA, 19 nt, Homo sapiens
  misc_RNA (1)...(19): siRNA sense strand
gguggcaaguaccgccuua

SEQ ID NO: 491796 - RNA, 19 nt, Homo sapiens
  misc_RNA (1)...(19): siRNA sense strand
agacagacauucucaccau

SEQ ID NO: 491797 - RNA, 19 nt, Homo sapiens
  misc_RNA (1)...(19): siRNA sense strand
uacaagcaaugacccauau

SEQ ID NO: 491798 - RNA, 19 nt, Homo sapiens
  misc_RNA (1)...(19): siRNA sense strand
acaaggauuuggaguagau

SEQ ID NO: 491799 - RNA, 19 nt, Homo sapiens
  misc_RNA (1)...(19): siRNA sense strand
uaacaaacuggaugcagaa

SEQ ID NO: 491800 - RNA, 19 nt, Homo sapiens
  misc_RNA (1)...(19): siRNA sense strand
acuaagcaguugagauuug

SEQ ID NO: 491801 - RNA, 19 nt, Homo sapiens
  misc_RNA (1)...(19): siRNA sense strand
aaggacaugugguuaaaug

SEQ ID NO: 491802 - RNA, 19 nt, Homo sapiens
  misc_RNA (1)...(19): siRNA sense strand
gacagacauucucaccauu

SEQ ID NO: 491803 - RNA, 19 nt, Homo sapiens
  misc_RNA (1)...(19): siRNA sense strand
cuaagcaguugagauuuga

SEQ ID NO: 491804 - RNA, 19 nt, Homo sapiens
  misc_RNA (1)...(19): siRNA sense strand
cagacauucucaccauuug

SEQ ID NO: 491805 - RNA, 19 nt, Homo sapiens
  misc_RNA (1)...(19): siRNA sense strand
ccaaucacuuccauguguu

SEQ ID NO: 491806 - RNA, 19 nt, Homo sapiens
  misc_RNA (1)...(19): siRNA sense strand
gguaaccuuuccagagaug

SEQ ID NO: 491807 - RNA, 19 nt, Homo sapiens
  misc_RNA (1)...(19): siRNA sense strand
acaacaguauggacaguau

SEQ ID NO: 491808 - RNA, 19 nt, Homo sapiens
  misc_RNA (1)...(19): siRNA sense strand
aaagauacuuccaaucacu

SEQ ID NO: 491809 - RNA, 19 nt, Homo sapiens
  misc_RNA (1)...(19): siRNA sense strand
caaacuggaugcagaaaau

SEQ ID NO: 491810 - RNA, 19 nt, Homo sapiens
  misc_RNA (1)...(19): siRNA sense strand
gggcaaccauggaaucaac

SEQ ID NO: 491811 - RNA, 19 nt, Homo sapiens
  misc_RNA (1)...(19): siRNA sense strand
uccaaucacuuccaugugu

SEQ ID NO: 491812 - RNA, 19 nt, Homo sapiens
  misc_RNA (1)...(19): siRNA sense strand
caacaguauggacaguaua

SEQ ID NO: 491813 - RNA, 19 nt, Homo sapiens
  misc_RNA (1)...(19): siRNA sense strand
ccaauggagccaaguguau

SEQ ID NO: 491814 - RNA, 19 nt, Homo sapiens
  misc_RNA (1)...(19): siRNA sense strand
guaguaaaccagucaaguc

SEQ ID NO: 491815 - RNA, 19 nt, Homo sapiens
  misc_RNA (1)...(19): siRNA sense strand
ucacuuccauguguuuguu

SEQ ID NO: 491816 - RNA, 19 nt, Homo sapiens
  misc_RNA (1)...(19): siRNA sense strand
ggaauuuuaugaacacaga

SEQ ID NO: 491817 - RNA, 19 nt, Homo sapiens
  misc_RNA (1)...(19): siRNA sense strand
uguaauaccuccuccuaac

SEQ ID NO: 491818 - RNA, 19 nt, Homo sapiens
  misc_RNA (1)...(19): siRNA sense strand
caguugagauuugaagaug

SEQ ID NO: 491819 - RNA, 19 nt, Homo sapiens
  misc_RNA (1)...(19): siRNA sense strand
aaaguaaacugggcaacca

SEQ ID NO: 491820 - RNA, 19 nt, Homo sapiens
  misc_RNA (1)...(19): siRNA sense strand
caauugggccacucguaaa

SEQ ID NO: 491821 - RNA, 19 nt, Homo sapiens
  misc_RNA (1)...(19): siRNA sense strand
gauugaaggacaugugguu

SEQ ID NO: 491822 - RNA, 19 nt, Homo sapiens
  misc_RNA (1)...(19): siRNA sense strand
gcaguugagauuugaagau

SEQ ID NO: 491823 - RNA, 19 nt, Homo sapiens
  misc_RNA (1)...(19): siRNA sense strand
gcuaugguuuuguaucuuu

SEQ ID NO: 491824 - RNA, 19 nt, Homo sapiens
  misc_RNA (1)...(19): siRNA sense strand
ccauauugcuuuguggaau

SEQ ID NO: 491825 - RNA, 19 nt, Homo sapiens
  misc_RNA (1)...(19): siRNA sense strand
gaucagcuuaugagacaga

SEQ ID NO: 491826 - RNA, 19 nt, Homo sapiens
  misc_RNA (1)...(19): siRNA sense strand
ugacccauauugcuuugug

SEQ ID NO: 491827 - RNA, 19 nt, Homo sapiens
  misc_RNA (1)...(19): siRNA sense strand
uauggcaaguuaccaaaca

SEQ ID NO: 491828 - RNA, 19 nt, Homo sapiens
  misc_RNA (1)...(19): siRNA sense strand
aaagggcuauucauuuguc

SEQ ID NO: 491829 - RNA, 19 nt, Homo sapiens
  misc_RNA (1)...(19): siRNA sense strand
acagacauucucaccauuu

SEQ ID NO: 491830 - RNA, 19 nt, Homo sapiens
  misc_RNA (1)...(19): siRNA sense strand
gcaaguuaccaaacacagu

SEQ ID NO: 491831 - RNA, 19 nt, Homo sapiens
  misc_RNA (1)...(19): siRNA sense strand
ugugacagaaguccuuaua

SEQ ID NO: 491832 - RNA, 19 nt, Homo sapiens
  misc_RNA (1)...(19): siRNA sense strand
gccaauggagccaagugua

SEQ ID NO: 491833 - RNA, 19 nt, Homo sapiens
  misc_RNA (1)...(19): siRNA sense strand
gaugugacagaaguccuua

SEQ ID NO: 491834 - RNA, 19 nt, Homo sapiens
  misc_RNA (1)...(19): siRNA sense strand
ggaaacccacaacaguaug

SEQ ID NO: 491835 - RNA, 19 nt, Homo sapiens
  misc_RNA (1)...(19): siRNA sense strand
agaaaagggcuauucauuu

SEQ ID NO: 491836 - RNA, 19 nt, Homo sapiens
  misc_RNA (1)...(19): siRNA sense strand
uguguacuguggaggaauu

SEQ ID NO: 491837 - RNA, 19 nt, Homo sapiens
  misc_RNA (1)...(19): siRNA sense strand
aggaauugcgucuggguua

SEQ ID NO: 491838 - RNA, 19 nt, Homo sapiens
  misc_RNA (1)...(19): siRNA sense strand
gacauucucaccauuugga

SEQ ID NO: 491839 - RNA, 19 nt, Homo sapiens
  misc_RNA (1)...(19): siRNA sense strand
aauaagaguuuucccagaa

SEQ ID NO: 491840 - RNA, 19 nt, Homo sapiens
  misc_RNA (1)...(19): siRNA sense strand
ccggguaguuaaagacaug

SEQ ID NO: 491841 - RNA, 19 nt, Homo sapiens
  misc_RNA (1)...(19): siRNA sense strand
ccacaacaguauggacagu

SEQ ID NO: 491842 - RNA, 19 nt, Homo sapiens
  misc_RNA (1)...(19): siRNA sense strand
ugaacgguacuacgauuga

SEQ ID NO: 491843 - RNA, 19 nt, Homo sapiens
  misc_RNA (1)...(19): siRNA sense strand
ggguuaacagaucagcuua

SEQ ID NO: 491844 - RNA, 19 nt, Homo sapiens
  misc_RNA (1)...(19): siRNA sense strand
auacaagcaaugacccaua

SEQ ID NO: 491845 - RNA, 19 nt, Homo sapiens
  misc_RNA (1)...(19): siRNA sense strand
gaaacccacaacaguaugg

SEQ ID NO: 491846 - RNA, 19 nt, Homo sapiens
  misc_RNA (1)...(19): siRNA sense strand
ggacaugugguuaaaugcu

SEQ ID NO: 491847 - RNA, 19 nt, Homo sapiens
  misc_RNA (1)...(19): siRNA sense strand
gaaggacaugugguuaaau

SEQ ID NO: 491848 - RNA, 19 nt, Homo sapiens
  misc_RNA (1)...(19): siRNA sense strand
aaagacauggcaacuggaa

SEQ ID NO: 491849 - RNA, 19 nt, Homo sapiens
  misc_RNA (1)...(19): siRNA sense strand
ggauaugguauggcaaguu

SEQ ID NO: 491850 - RNA, 19 nt, Homo sapiens
  misc_RNA (1)...(19): siRNA sense strand
uggaaacccacaacaguau

SEQ ID NO: 491851 - RNA, 19 nt, Homo sapiens
  misc_RNA (1)...(19): siRNA sense strand
gggcuauucauuugucaga

SEQ ID NO: 491852 - RNA, 19 nt, Homo sapiens
  misc_RNA (1)...(19): siRNA sense strand
cagaaaagggcuauucauu

SEQ ID NO: 491853 - RNA, 19 nt, Homo sapiens
  misc_RNA (1)...(19): siRNA sense strand
uuccagagaugugacagaa

SEQ ID NO: 491854 - RNA, 19 nt, Homo sapiens
  misc_RNA (1)...(19): siRNA sense strand
gcaaccauggaaucaacaa

SEQ ID NO: 491855 - RNA, 19 nt, Homo sapiens
  misc_RNA (1)...(19): siRNA sense strand
aguaccgccuuauggagua

SEQ ID NO: 491856 - RNA, 19 nt, Homo sapiens
  misc_RNA (1)...(19): siRNA sense strand
gaaaggaggucaaaguaaa

SEQ ID NO: 491857 - RNA, 19 nt, Homo sapiens
  misc_RNA (1)...(19): siRNA sense strand
uaaagaaucuccugauaug

SEQ ID NO: 491858 - RNA, 19 nt, Homo sapiens
  misc_RNA (1)...(19): siRNA sense strand
gguaaagaaucuccugaua

SEQ ID NO: 491859 - RNA, 19 nt, Homo sapiens
  misc_RNA (1)...(19): siRNA sense strand
gaaaagggcuauucauuug

SEQ ID NO: 491860 - RNA, 19 nt, Homo sapiens
  misc_RNA (1)...(19): siRNA sense strand
ggaaaggaggucaaaguaa

SEQ ID NO: 491861 - RNA, 19 nt, Homo sapiens
  misc_RNA (1)...(19): siRNA sense strand
uaacagagcauacaagcaa

SEQ ID NO: 491862 - RNA, 19 nt, Homo sapiens
  misc_RNA (1)...(19): siRNA sense strand
ggaauugcgucuggguuaa

SEQ ID NO: 491863 - RNA, 19 nt, Homo sapiens
  misc_RNA (1)...(19): siRNA sense strand
caacagaagauaucaaauc

SEQ ID NO: 491864 - RNA, 19 nt, Homo sapiens
  misc_RNA (1)...(19): siRNA sense strand
guaaagaaucuccugauau

SEQ ID NO: 491865 - RNA, 19 nt, Homo sapiens
  misc_RNA (1)...(19): siRNA sense strand
guugagauuugaagaugua

SEQ ID NO: 491866 - RNA, 19 nt, Homo sapiens
  misc_RNA (1)...(19): siRNA sense strand
uaaaccaccugcaccuaaa

SEQ ID NO: 491867 - RNA, 19 nt, Homo sapiens
  misc_RNA (1)...(19): siRNA sense strand
cagaucagcuuaugagaca

SEQ ID NO: 491868 - RNA, 19 nt, Homo sapiens
  misc_RNA (1)...(19): siRNA sense strand
gggaaaggaggucaaagua

SEQ ID NO: 491869 - RNA, 19 nt, Homo sapiens
  misc_RNA (1)...(19): siRNA sense strand
gcuauucauuugucagauu

SEQ ID NO: 491870 - RNA, 19 nt, Homo sapiens
  misc_RNA (1)...(19): siRNA sense strand
guaaaccaccugcaccuaa

SEQ ID NO: 491871 - RNA, 19 nt, Homo sapiens
  misc_RNA (1)...(19): siRNA sense strand
gacaugugguuaaaugcua

SEQ ID NO: 491872 - RNA, 19 nt, Homo sapiens
  misc_RNA (1)...(19): siRNA sense strand
guccagaaauuacaacaga

SEQ ID NO: 491873 - RNA, 19 nt, Homo sapiens
  misc_RNA (1)...(19): siRNA sense strand
ugaaggacaugugguuaaa

SEQ ID NO: 491874 - RNA, 19 nt, Homo sapiens
  misc_RNA (1)...(19): siRNA sense strand
gaacgguacuacgauugaa

SEQ ID NO: 491875 - RNA, 19 nt, Homo sapiens
  misc_RNA (1)...(19): siRNA sense strand
acacuaagcaguugagauu

SEQ ID NO: 491876 - RNA, 19 nt, Homo sapiens
  misc_RNA (1)...(19): siRNA sense strand
cgucaaauccgaaccaauu

SEQ ID NO: 491877 - RNA, 19 nt, Homo sapiens
  misc_RNA (1)...(19): siRNA sense strand
gagauuugaagauguagua

SEQ ID NO: 491878 - RNA, 19 nt, Homo sapiens
  misc_RNA (1)...(19): siRNA sense strand
guaaaccagucaaguccaa

SEQ ID NO: 491879 - RNA, 19 nt, Homo sapiens
  misc_RNA (1)...(19): siRNA sense strand
gaagauaucaaaucagcau

SEQ ID NO: 491880 - RNA, 19 nt, Homo sapiens
  misc_RNA (1)...(19): siRNA sense strand
ggugaacgguacuacgauu

SEQ ID NO: 491881 - RNA, 19 nt, Homo sapiens
  misc_RNA (1)...(19): siRNA sense strand
cauauugcuuuguggaauu

SEQ ID NO: 491882 - RNA, 19 nt, Homo sapiens
  misc_RNA (1)...(19): siRNA sense strand
ccaauugggccacucguaa

SEQ ID NO: 491883 - RNA, 19 nt, Homo sapiens
  misc_RNA (1)...(19): siRNA sense strand
guuaacagaucagcuuaug

SEQ ID NO: 491884 - RNA, 19 nt, Homo sapiens
  misc_RNA (1)...(19): siRNA sense strand
uaacagaucagcuuaugag

SEQ ID NO: 491885 - RNA, 19 nt, Homo sapiens
  misc_RNA (1)...(19): siRNA sense strand
agacagacauucucaccau

SEQ ID NO: 491886 - RNA, 19 nt, Homo sapiens
  misc_RNA (1)...(19): siRNA sense strand
uaacaaacuggaugcagaa

SEQ ID NO: 491887 - RNA, 19 nt, Homo sapiens
  misc_RNA (1)...(19): siRNA sense strand
uacaagcaaugacccauau

SEQ ID NO: 491888 - RNA, 19 nt, Homo sapiens
  misc_RNA (1)...(19): siRNA sense strand
acuaagcaguugagauuug

SEQ ID NO: 491889 - RNA, 19 nt, Homo sapiens
  misc_RNA (1)...(19): siRNA sense strand
aaggacaugugguuaaaug

SEQ ID NO: 491890 - RNA, 19 nt, Homo sapiens
  misc_RNA (1)...(19): siRNA sense strand
gacagacauucucaccauu

SEQ ID NO: 491891 - RNA, 19 nt, Homo sapiens
  misc_RNA (1)...(19): siRNA sense strand
cuaagcaguugagauuuga

SEQ ID NO: 491892 - RNA, 19 nt, Homo sapiens
  misc_RNA (1)...(19): siRNA sense strand
cagacauucucaccauuug

SEQ ID NO: 491893 - RNA, 19 nt, Homo sapiens
  misc_RNA (1)...(19): siRNA sense strand
ccaaucacuuccauguguu

SEQ ID NO: 491894 - RNA, 19 nt, Homo sapiens
  misc_RNA (1)...(19): siRNA sense strand
aaagauacuuccaaucacu

SEQ ID NO: 491895 - RNA, 19 nt, Homo sapiens
  misc_RNA (1)...(19): siRNA sense strand
caaacuggaugcagaaaau

SEQ ID NO: 491896 - RNA, 19 nt, Homo sapiens
  misc_RNA (1)...(19): siRNA sense strand
uccaaucacuuccaugugu

SEQ ID NO: 491897 - RNA, 19 nt, Homo sapiens
  misc_RNA (1)...(19): siRNA sense strand
guaguaaaccagucaaguc

SEQ ID NO: 491898 - RNA, 19 nt, Homo sapiens
  misc_RNA (1)...(19): siRNA sense strand
ucacuuccauguguuuguu

SEQ ID NO: 491899 - RNA, 19 nt, Homo sapiens
  misc_RNA (1)...(19): siRNA sense strand
ggaauuuuaugaacacaga

SEQ ID NO: 491900 - RNA, 19 nt, Homo sapiens
  misc_RNA (1)...(19): siRNA sense strand
caguugagauuugaagaug

SEQ ID NO: 491901 - RNA, 19 nt, Homo sapiens
  misc_RNA (1)...(19): siRNA sense strand
aaaguaaacugggcaacca

SEQ ID NO: 491902 - RNA, 19 nt, Homo sapiens
  misc_RNA (1)...(19): siRNA sense strand
caauugggccacucguaaa

SEQ ID NO: 491903 - RNA, 19 nt, Homo sapiens
  misc_RNA (1)...(19): siRNA sense strand
gauugaaggacaugugguu

SEQ ID NO: 491904 - RNA, 19 nt, Homo sapiens
  misc_RNA (1)...(19): siRNA sense strand
gcaguugagauuugaagau

SEQ ID NO: 491905 - RNA, 19 nt, Homo sapiens
  misc_RNA (1)...(19): siRNA sense strand
gcuaugguuuuguaucuuu

SEQ ID NO: 491906 - RNA, 19 nt, Homo sapiens
  misc_RNA (1)...(19): siRNA sense strand
ccauauugcuuuguggaau

SEQ ID NO: 491907 - RNA, 19 nt, Homo sapiens
  misc_RNA (1)...(19): siRNA sense strand
gaucagcuuaugagacaga

SEQ ID NO: 491908 - RNA, 19 nt, Homo sapiens
  misc_RNA (1)...(19): siRNA sense strand
ugacccauauugcuuugug

SEQ ID NO: 491909 - RNA, 19 nt, Homo sapiens
  misc_RNA (1)...(19): siRNA sense strand
aaagggcuauucauuuguc

SEQ ID NO: 491910 - RNA, 19 nt, Homo sapiens
  misc_RNA (1)...(19): siRNA sense strand
acagacauucucaccauuu

SEQ ID NO: 491911 - RNA, 19 nt, Homo sapiens
  misc_RNA (1)...(19): siRNA sense strand
agaaaagggcuauucauuu

SEQ ID NO: 491912 - RNA, 19 nt, Homo sapiens
  misc_RNA (1)...(19): siRNA sense strand
uguguacuguggaggaauu

SEQ ID NO: 491913 - RNA, 19 nt, Homo sapiens
  misc_RNA (1)...(19): siRNA sense strand
aggaauugcgucuggguua

SEQ ID NO: 491914 - RNA, 19 nt, Homo sapiens
  misc_RNA (1)...(19): siRNA sense strand
gacauucucaccauuugga

SEQ ID NO: 491915 - RNA, 19 nt, Homo sapiens
  misc_RNA (1)...(19): siRNA sense strand
aauaagaguuuucccagaa

SEQ ID NO: 491916 - RNA, 19 nt, Homo sapiens
  misc_RNA (1)...(19): siRNA sense strand
ccggguaguuaaagacaug

SEQ ID NO: 491917 - RNA, 19 nt, Homo sapiens
  misc_RNA (1)...(19): siRNA sense strand
ugaacgguacuacgauuga

SEQ ID NO: 491918 - RNA, 19 nt, Homo sapiens
  misc_RNA (1)...(19): siRNA sense strand
auacaagcaaugacccaua

SEQ ID NO: 491919 - RNA, 19 nt, Homo sapiens
  misc_RNA (1)...(19): siRNA sense strand
ggacaugugguuaaaugcu

SEQ ID NO: 491920 - RNA, 19 nt, Homo sapiens
  misc_RNA (1)...(19): siRNA sense strand
gaaggacaugugguuaaau

SEQ ID NO: 491921 - RNA, 19 nt, Homo sapiens
  misc_RNA (1)...(19): siRNA sense strand
ggguuaacagaucagcuua

SEQ ID NO: 491922 - RNA, 19 nt, Homo sapiens
  misc_RNA (1)...(19): siRNA sense strand
aaagacauggcaacuggaa

SEQ ID NO: 491923 - RNA, 19 nt, Homo sapiens
  misc_RNA (1)...(19): siRNA sense strand
gggcuauucauuugucaga

SEQ ID NO: 491924 - RNA, 19 nt, Homo sapiens
  misc_RNA (1)...(19): siRNA sense strand
cagaaaagggcuauucauu

SEQ ID NO: 491925 - RNA, 19 nt, Homo sapiens
  misc_RNA (1)...(19): siRNA sense strand
guuggguggucgucaaauc

SEQ ID NO: 491926 - RNA, 19 nt, Homo sapiens
  misc_RNA (1)...(19): siRNA sense strand
caaucacuuccauguguuu

SEQ ID NO: 491927 - RNA, 19 nt, Homo sapiens
  misc_RNA (1)...(19): siRNA sense strand
ccagaaauuacaacagaag

SEQ ID NO: 491928 - RNA, 19 nt, Homo sapiens
  misc_RNA (1)...(19): siRNA sense strand
gugguuggguggucgucaa

SEQ ID NO: 491929 - RNA, 19 nt, Homo sapiens
  misc_RNA (1)...(19): siRNA sense strand
uugaaggacaugugguuaa

SEQ ID NO: 491930 - RNA, 19 nt, Homo sapiens
  misc_RNA (1)...(19): siRNA sense strand
cagaaauuacaacagaaga

SEQ ID NO: 491931 - RNA, 19 nt, Homo sapiens
  misc_RNA (1)...(19): siRNA sense strand
gugcagcccaugccauugu

SEQ ID NO: 491932 - RNA, 19 nt, Homo sapiens
  misc_RNA (1)...(19): siRNA sense strand
cacaccaaguagccagaaa

SEQ ID NO: 491933 - RNA, 19 nt, Homo sapiens
  misc_RNA (1)...(19): siRNA sense strand
gggcaaccacaccaaguag

SEQ ID NO: 491934 - RNA, 19 nt, Homo sapiens
  misc_RNA (1)...(19): siRNA sense strand
uugaagauguaguaaacca

SEQ ID NO: 491935 - RNA, 19 nt, Homo sapiens
  misc_RNA (1)...(19): siRNA sense strand
uaaaugcuauugggguaaa

SEQ ID NO: 491936 - RNA, 19 nt, Homo sapiens
  misc_RNA (1)...(19): siRNA sense strand
uccagaaauuacaacagaa

SEQ ID NO: 491937 - RNA, 19 nt, Homo sapiens
  misc_RNA (1)...(19): siRNA sense strand
acaugugguuaaaugcuau

SEQ ID NO: 491938 - RNA, 19 nt, Homo sapiens
  misc_RNA (1)...(19): siRNA sense strand
ugggcaaccacaccaagua

SEQ ID NO: 491939 - RNA, 19 nt, Homo sapiens
  misc_RNA (1)...(19): siRNA sense strand
aaagaaucuccugauauga

SEQ ID NO: 491940 - RNA, 19 nt, Homo sapiens
  misc_RNA (1)...(19): siRNA sense strand
ggguaaagaaucuccugau

SEQ ID NO: 491941 - RNA, 19 nt, Homo sapiens
  misc_RNA (1)...(19): siRNA sense strand
cagagcauacaagcaauga

SEQ ID NO: 491942 - RNA, 19 nt, Homo sapiens
  misc_RNA (1)...(19): siRNA sense strand
ggacaaagcaacaauaauu

SEQ ID NO: 491943 - RNA, 19 nt, Homo sapiens
  misc_RNA (1)...(19): siRNA sense strand
caaaguagcgaaaucagua

SEQ ID NO: 491944 - RNA, 19 nt, Homo sapiens
  misc_RNA (1)...(19): siRNA sense strand
cgacacagauuccaccaaa

SEQ ID NO: 491945 - RNA, 19 nt, Homo sapiens
  misc_RNA (1)...(19): siRNA sense strand
gcaagucuguggauucuag

SEQ ID NO: 491946 - RNA, 19 nt, Homo sapiens
  misc_RNA (1)...(19): siRNA sense strand
gaggaagaauuuauuaugg

SEQ ID NO: 491947 - RNA, 19 nt, Homo sapiens
  misc_RNA (1)...(19): siRNA sense strand
caacaucagaucaauauga

SEQ ID NO: 491948 - RNA, 19 nt, Homo sapiens
  misc_RNA (1)...(19): siRNA sense strand
ccagcaagauggaaaguug

SEQ ID NO: 491949 - RNA, 19 nt, Homo sapiens
  misc_RNA (1)...(19): siRNA sense strand
ggaggaagaauuuauuaug

SEQ ID NO: 491950 - RNA, 19 nt, Homo sapiens
  misc_RNA (1)...(19): siRNA sense strand
gaacaagcacaagccauuu

SEQ ID NO: 491951 - RNA, 19 nt, Homo sapiens
  misc_RNA (1)...(19): siRNA sense strand
guagcgaaaucaguacuaa

SEQ ID NO: 491952 - RNA, 19 nt, Homo sapiens
  misc_RNA (1)...(19): siRNA sense strand
ucagauaccugugcagaau

SEQ ID NO: 491953 - RNA, 19 nt, Homo sapiens
  misc_RNA (1)...(19): siRNA sense strand
gagcaagucuguggauucu

SEQ ID NO: 491954 - RNA, 19 nt, Homo sapiens
  misc_RNA (1)...(19): siRNA sense strand
guacuaagagcaagucugu

SEQ ID NO: 491955 - RNA, 19 nt, Homo sapiens
  misc_RNA (1)...(19): siRNA sense strand
gugcagaauuucgaauaaa

SEQ ID NO: 491956 - RNA, 19 nt, Homo sapiens
  misc_RNA (1)...(19): siRNA sense strand
ccauuagaccugauaaauu

SEQ ID NO: 491957 - RNA, 19 nt, Homo sapiens
  misc_RNA (1)...(19): siRNA sense strand
uaugggaguuuccaaguau

SEQ ID NO: 491958 - RNA, 19 nt, Homo sapiens
  misc_RNA (1)...(19): siRNA sense strand
agauaccugugcagaauuu

SEQ ID NO: 491959 - RNA, 19 nt, Homo sapiens
  misc_RNA (1)...(19): siRNA sense strand
caagccauuugcaagguuu

SEQ ID NO: 491960 - RNA, 19 nt, Homo sapiens
  misc_RNA (1)...(19): siRNA sense strand
gacaaagcaacaauaauuc

SEQ ID NO: 491961 - RNA, 19 nt, Homo sapiens
  misc_RNA (1)...(19): siRNA sense strand
caggacaaagcaacaauaa

SEQ ID NO: 491962 - RNA, 19 nt, Homo sapiens
  misc_RNA (1)...(19): siRNA sense strand
aguagcaguucccaaagua

SEQ ID NO: 491963 - RNA, 19 nt, Homo sapiens
  misc_RNA (1)...(19): siRNA sense strand
uuaugggaguuuccaagua

SEQ ID NO: 491964 - RNA, 19 nt, Homo sapiens
  misc_RNA (1)...(19): siRNA sense strand
gcaacaauaauucagauac

SEQ ID NO: 491965 - RNA, 19 nt, Homo sapiens
  misc_RNA (1)...(19): siRNA sense strand
ugugcagaauuucgaauaa

SEQ ID NO: 491966 - RNA, 19 nt, Homo sapiens
  misc_RNA (1)...(19): siRNA sense strand
gccauuagaccugauaaau

SEQ ID NO: 491967 - RNA, 19 nt, Homo sapiens
  misc_RNA (1)...(19): siRNA sense strand
ccggaggaagaauuuauua

SEQ ID NO: 491968 - RNA, 19 nt, Homo sapiens
  misc_RNA (1)...(19): siRNA sense strand
cgacacaguaguagcaguu

SEQ ID NO: 491969 - RNA, 19 nt, Homo sapiens
  misc_RNA (1)...(19): siRNA sense strand
caacaauaauucagauacc

SEQ ID NO: 491970 - RNA, 19 nt, Homo sapiens
  misc_RNA (1)...(19): siRNA sense strand
ucaggacaaagcaacaaua

SEQ ID NO: 491971 - RNA, 19 nt, Homo sapiens
  misc_RNA (1)...(19): siRNA sense strand
gcauaaaaguaucaacauc

SEQ ID NO: 491972 - RNA, 19 nt, Homo sapiens
  misc_RNA (1)...(19): siRNA sense strand
guaucaacaucagaucaau

SEQ ID NO: 491973 - RNA, 19 nt, Homo sapiens
  misc_RNA (1)...(19): siRNA sense strand
aguaguagcaguucccaaa

SEQ ID NO: 491974 - RNA, 19 nt, Homo sapiens
  misc_RNA (1)...(19): siRNA sense strand
guauuaacaucugagaaac

SEQ ID NO: 491975 - RNA, 19 nt, Homo sapiens
  misc_RNA (1)...(19): siRNA sense strand
aaacgacacaguaguagca

SEQ ID NO: 491976 - RNA, 19 nt, Homo sapiens
  misc_RNA (1)...(19): siRNA sense strand
uaguagcaguucccaaagu

SEQ ID NO: 491977 - RNA, 19 nt, Homo sapiens
  misc_RNA (1)...(19): siRNA sense strand
acaagccauuugcaagguu

SEQ ID NO: 491978 - RNA, 19 nt, Homo sapiens
  misc_RNA (1)...(19): siRNA sense strand
ccaaaguagcgaaaucagu

SEQ ID NO: 491979 - RNA, 19 nt, Homo sapiens
  misc_RNA (1)...(19): siRNA sense strand
gaaacucuccgagggaaaa

SEQ ID NO: 491980 - RNA, 19 nt, Homo sapiens
  misc_RNA (1)...(19): siRNA sense strand
uggccagccucgacacaga

SEQ ID NO: 491981 - RNA, 19 nt, Homo sapiens
  misc_RNA (1)...(19): siRNA sense strand
gcuuuugacucuguauuaa

SEQ ID NO: 491982 - RNA, 19 nt, Homo sapiens
  misc_RNA (1)...(19): siRNA sense strand
uaagagcaagucuguggau

SEQ ID NO: 491983 - RNA, 19 nt, Homo sapiens
  misc_RNA (1)...(19): siRNA sense strand
caaagcaacaauaauucag

SEQ ID NO: 491984 - RNA, 19 nt, Homo sapiens
  misc_RNA (1)...(19): siRNA sense strand
aagagcaagucuguggauu

SEQ ID NO: 491985 - RNA, 19 nt, Homo sapiens
  misc_RNA (1)...(19): siRNA sense strand
agcgaaaucaguacuaaga

SEQ ID NO: 491986 - RNA, 19 nt, Homo sapiens
  misc_RNA (1)...(19): siRNA sense strand
cggaggaagaauuuauuau

SEQ ID NO: 491987 - RNA, 19 nt, Homo sapiens
  misc_RNA (1)...(19): siRNA sense strand
gcucaggacaaagcaacaa

SEQ ID NO: 491988 - RNA, 19 nt, Homo sapiens
  misc_RNA (1)...(19): siRNA sense strand
cacaagccauuugcaaggu

SEQ ID NO: 491989 - RNA, 19 nt, Homo sapiens
  misc_RNA (1)...(19): siRNA sense strand
ggccauuagaccugauaaa

SEQ ID NO: 491990 - RNA, 19 nt, Homo sapiens
  misc_RNA (1)...(19): siRNA sense strand
ggacaaagcaacaauaauu

SEQ ID NO: 491991 - RNA, 19 nt, Homo sapiens
  misc_RNA (1)...(19): siRNA sense strand
caaaguagcgaaaucagua

SEQ ID NO: 491992 - RNA, 19 nt, Homo sapiens
  misc_RNA (1)...(19): siRNA sense strand
cgacacagauuccaccaaa

SEQ ID NO: 491993 - RNA, 19 nt, Homo sapiens
  misc_RNA (1)...(19): siRNA sense strand
gcaagucuguggauucuag

SEQ ID NO: 491994 - RNA, 19 nt, Homo sapiens
  misc_RNA (1)...(19): siRNA sense strand
gaggaagaauuuauuaugg

SEQ ID NO: 491995 - RNA, 19 nt, Homo sapiens
  misc_RNA (1)...(19): siRNA sense strand
caacaucagaucaauauga

SEQ ID NO: 491996 - RNA, 19 nt, Homo sapiens
  misc_RNA (1)...(19): siRNA sense strand
ccagcaagauggaaaguug

SEQ ID NO: 491997 - RNA, 19 nt, Homo sapiens
  misc_RNA (1)...(19): siRNA sense strand
ggaggaagaauuuauuaug

SEQ ID NO: 491998 - RNA, 19 nt, Homo sapiens
  misc_RNA (1)...(19): siRNA sense strand
gaacaagcacaagccauuu

SEQ ID NO: 491999 - RNA, 19 nt, Homo sapiens
  misc_RNA (1)...(19): siRNA sense strand
guagcgaaaucaguacuaa

SEQ ID NO: 492000 - RNA, 19 nt, Homo sapiens
  misc_RNA (1)...(19): siRNA sense strand
ucagauaccugugcagaau

SEQ ID NO: 492001 - RNA, 19 nt, Homo sapiens
  misc_RNA (1)...(19): siRNA sense strand
gagcaagucuguggauucu

SEQ ID NO: 492002 - RNA, 19 nt, Homo sapiens
  misc_RNA (1)...(19): siRNA sense strand
guacuaagagcaagucugu

SEQ ID NO: 492003 - RNA, 19 nt, Homo sapiens
  misc_RNA (1)...(19): siRNA sense strand
gugcagaauuucgaauaaa

SEQ ID NO: 492004 - RNA, 19 nt, Homo sapiens
  misc_RNA (1)...(19): siRNA sense strand
ccauuagaccugauaaauu

SEQ ID NO: 492005 - RNA, 19 nt, Homo sapiens
  misc_RNA (1)...(19): siRNA sense strand
uaugggaguuuccaaguau

SEQ ID NO: 492006 - RNA, 19 nt, Homo sapiens
  misc_RNA (1)...(19): siRNA sense strand
agauaccugugcagaauuu

SEQ ID NO: 492007 - RNA, 19 nt, Homo sapiens
  misc_RNA (1)...(19): siRNA sense strand
caagccauuugcaagguuu

SEQ ID NO: 492008 - RNA, 19 nt, Homo sapiens
  misc_RNA (1)...(19): siRNA sense strand
gacaaagcaacaauaauuc

SEQ ID NO: 492009 - RNA, 19 nt, Homo sapiens
  misc_RNA (1)...(19): siRNA sense strand
caggacaaagcaacaauaa

SEQ ID NO: 492010 - RNA, 19 nt, Homo sapiens
  misc_RNA (1)...(19): siRNA sense strand
aguagcaguucccaaagua

SEQ ID NO: 492011 - RNA, 19 nt, Homo sapiens
  misc_RNA (1)...(19): siRNA sense strand
uuaugggaguuuccaagua

SEQ ID NO: 492012 - RNA, 19 nt, Homo sapiens
  misc_RNA (1)...(19): siRNA sense strand
gcaacaauaauucagauac

SEQ ID NO: 492013 - RNA, 19 nt, Homo sapiens
  misc_RNA (1)...(19): siRNA sense strand
ugugcagaauuucgaauaa

SEQ ID NO: 492014 - RNA, 19 nt, Homo sapiens
  misc_RNA (1)...(19): siRNA sense strand
gccauuagaccugauaaau

SEQ ID NO: 492015 - RNA, 19 nt, Homo sapiens
  misc_RNA (1)...(19): siRNA sense strand
ccggaggaagaauuuauua

SEQ ID NO: 492016 - RNA, 19 nt, Homo sapiens
  misc_RNA (1)...(19): siRNA sense strand
cgacacaguaguagcaguu

SEQ ID NO: 492017 - RNA, 19 nt, Homo sapiens
  misc_RNA (1)...(19): siRNA sense strand
caacaauaauucagauacc

SEQ ID NO: 492018 - RNA, 19 nt, Homo sapiens
  misc_RNA (1)...(19): siRNA sense strand
ucaggacaaagcaacaaua

SEQ ID NO: 492019 - RNA, 19 nt, Homo sapiens
  misc_RNA (1)...(19): siRNA sense strand
gcauaaaaguaucaacauc

SEQ ID NO: 492020 - RNA, 19 nt, Homo sapiens
  misc_RNA (1)...(19): siRNA sense strand
guaucaacaucagaucaau

SEQ ID NO: 492021 - RNA, 19 nt, Homo sapiens
  misc_RNA (1)...(19): siRNA sense strand
aguaguagcaguucccaaa

SEQ ID NO: 492022 - RNA, 19 nt, Homo sapiens
  misc_RNA (1)...(19): siRNA sense strand
guauuaacaucugagaaac

SEQ ID NO: 492023 - RNA, 19 nt, Homo sapiens
  misc_RNA (1)...(19): siRNA sense strand
aaacgacacaguaguagca

SEQ ID NO: 492024 - RNA, 19 nt, Homo sapiens
  misc_RNA (1)...(19): siRNA sense strand
uaguagcaguucccaaagu

SEQ ID NO: 492025 - RNA, 19 nt, Homo sapiens
  misc_RNA (1)...(19): siRNA sense strand
acaagccauuugcaagguu

SEQ ID NO: 492026 - RNA, 19 nt, Homo sapiens
  misc_RNA (1)...(19): siRNA sense strand
ccaaaguagcgaaaucagu

SEQ ID NO: 492027 - RNA, 19 nt, Homo sapiens
  misc_RNA (1)...(19): siRNA sense strand
gaaacucuccgagggaaaa

SEQ ID NO: 492028 - RNA, 19 nt, Homo sapiens
  misc_RNA (1)...(19): siRNA sense strand
uggccagccucgacacaga

SEQ ID NO: 492029 - RNA, 19 nt, Homo sapiens
  misc_RNA (1)...(19): siRNA sense strand
gcuuuugacucuguauuaa

SEQ ID NO: 492030 - RNA, 19 nt, Homo sapiens
  misc_RNA (1)...(19): siRNA sense strand
uaagagcaagucuguggau

SEQ ID NO: 492031 - RNA, 19 nt, Homo sapiens
  misc_RNA (1)...(19): siRNA sense strand
caaagcaacaauaauucag

SEQ ID NO: 492032 - RNA, 19 nt, Homo sapiens
  misc_RNA (1)...(19): siRNA sense strand
aagagcaagucuguggauu

SEQ ID NO: 492033 - RNA, 19 nt, Homo sapiens
  misc_RNA (1)...(19): siRNA sense strand
agcgaaaucaguacuaaga

SEQ ID NO: 492034 - RNA, 19 nt, Homo sapiens
  misc_RNA (1)...(19): siRNA sense strand
cggaggaagaauuuauuau

SEQ ID NO: 492035 - RNA, 19 nt, Homo sapiens
  misc_RNA (1)...(19): siRNA sense strand
gcucaggacaaagcaacaa

SEQ ID NO: 492036 - RNA, 19 nt, Homo sapiens
  misc_RNA (1)...(19): siRNA sense strand
cacaagccauuugcaaggu

SEQ ID NO: 492037 - RNA, 19 nt, Homo sapiens
  misc_RNA (1)...(19): siRNA sense strand
ggccauuagaccugauaaa

SEQ ID NO: 492038 - RNA, 19 nt, Homo sapiens
  misc_RNA (1)...(19): siRNA sense strand
gaacucugcuuacccauuc

SEQ ID NO: 492039 - RNA, 19 nt, Homo sapiens
  misc_RNA (1)...(19): siRNA sense strand
ggaaacaggcuuacucuga

SEQ ID NO: 492040 - RNA, 19 nt, Homo sapiens
  misc_RNA (1)...(19): siRNA sense strand
caucaaaugucaucaacuu

SEQ ID NO: 492041 - RNA, 19 nt, Homo sapiens
  misc_RNA (1)...(19): siRNA sense strand
gcagaaaucaaaguuauug

SEQ ID NO: 492042 - RNA, 19 nt, Homo sapiens
  misc_RNA (1)...(19): siRNA sense strand
gaucuuguguggcaugaug

SEQ ID NO: 492043 - RNA, 19 nt, Homo sapiens
  misc_RNA (1)...(19): siRNA sense strand
ucauagugcucccaucaaa

SEQ ID NO: 492044 - RNA, 19 nt, Homo sapiens
  misc_RNA (1)...(19): siRNA sense strand
ucaaacaggccaccuuaaa

SEQ ID NO: 492045 - RNA, 19 nt, Homo sapiens
  misc_RNA (1)...(19): siRNA sense strand
gcacucugcuggaauucug

SEQ ID NO: 492046 - RNA, 19 nt, Homo sapiens
  misc_RNA (1)...(19): siRNA sense strand
caaacaggccaccuuaaau

SEQ ID NO: 492047 - RNA, 19 nt, Homo sapiens
  misc_RNA (1)...(19): siRNA sense strand
cacaaccuguucccaauga

SEQ ID NO: 492048 - RNA, 19 nt, Homo sapiens
  misc_RNA (1)...(19): siRNA sense strand
acgcagaaaucaaaguuau

SEQ ID NO: 492049 - RNA, 19 nt, Homo sapiens
  misc_RNA (1)...(19): siRNA sense strand
aaacaggccaccuuaaauc

SEQ ID NO: 492050 - RNA, 19 nt, Homo sapiens
  misc_RNA (1)...(19): siRNA sense strand
ucaaaguuauugggacuau

SEQ ID NO: 492051 - RNA, 19 nt, Homo sapiens
  misc_RNA (1)...(19): siRNA sense strand
ugucugcccugguggguuu

SEQ ID NO: 492052 - RNA, 19 nt, Homo sapiens
  misc_RNA (1)...(19): siRNA sense strand
gauuugcacucugcuggaa

SEQ ID NO: 492053 - RNA, 19 nt, Homo sapiens
  misc_RNA (1)...(19): siRNA sense strand
ugucaaacaggccaccuua

SEQ ID NO: 492054 - RNA, 19 nt, Homo sapiens
  misc_RNA (1)...(19): siRNA sense strand
caaaugucaucaacuucuc

SEQ ID NO: 492055 - RNA, 19 nt, Homo sapiens
  misc_RNA (1)...(19): siRNA sense strand
gcccugguggguuucauua

SEQ ID NO: 492056 - RNA, 19 nt, Homo sapiens
  misc_RNA (1)...(19): siRNA sense strand
aggauagccugaagaaaca

SEQ ID NO: 492057 - RNA, 19 nt, Homo sapiens
  misc_RNA (1)...(19): siRNA sense strand
gcaugaugguauugagcuu

SEQ ID NO: 492058 - RNA, 19 nt, Homo sapiens
  misc_RNA (1)...(19): siRNA sense strand
caucauagugcucccauca

SEQ ID NO: 492059 - RNA, 19 nt, Homo sapiens
  misc_RNA (1)...(19): siRNA sense strand
ggacuauccagaucuugug

SEQ ID NO: 492060 - RNA, 19 nt, Homo sapiens
  misc_RNA (1)...(19): siRNA sense strand
cagccugguuggaagcauu

SEQ ID NO: 492061 - RNA, 19 nt, Homo sapiens
  misc_RNA (1)...(19): siRNA sense strand
cauagcagccugguuggaa

SEQ ID NO: 492062 - RNA, 19 nt, Homo sapiens
  misc_RNA (1)...(19): siRNA sense strand
gugcucccaucaaauguca

SEQ ID NO: 492063 - RNA, 19 nt, Homo sapiens
  misc_RNA (1)...(19): siRNA sense strand
ccugguggguuucauuauc

SEQ ID NO: 492064 - RNA, 19 nt, Homo sapiens
  misc_RNA (1)...(19): siRNA sense strand
ucaaaugucaucaacuucu

SEQ ID NO: 492065 - RNA, 19 nt, Homo sapiens
  misc_RNA (1)...(19): siRNA sense strand
aaacaucuacacgcagaaa

SEQ ID NO: 492066 - RNA, 19 nt, Homo sapiens
  misc_RNA (1)...(19): siRNA sense strand
caaccuguucccaaugaga

SEQ ID NO: 492067 - RNA, 19 nt, Homo sapiens
  misc_RNA (1)...(19): siRNA sense strand
ucucucugaugcugauuug

SEQ ID NO: 492068 - RNA, 19 nt, Homo sapiens
  misc_RNA (1)...(19): siRNA sense strand
cuucuacacuguugaacuc

SEQ ID NO: 492069 - RNA, 19 nt, Homo sapiens
  misc_RNA (1)...(19): siRNA sense strand
guauugagcuuggggauca

SEQ ID NO: 492070 - RNA, 19 nt, Homo sapiens
  misc_RNA (1)...(19): siRNA sense strand
ucuacacgcagaaaucaaa

SEQ ID NO: 492071 - RNA, 19 nt, Homo sapiens
  misc_RNA (1)...(19): siRNA sense strand
ugacuucuacacuguugaa

SEQ ID NO: 492072 - RNA, 19 nt, Homo sapiens
  misc_RNA (1)...(19): siRNA sense strand
acacgcagaaaucaaaguu

SEQ ID NO: 492073 - RNA, 19 nt, Homo sapiens
  misc_RNA (1)...(19): siRNA sense strand
gggacuauccagaucuugu

SEQ ID NO: 492074 - RNA, 19 nt, Homo sapiens
  misc_RNA (1)...(19): siRNA sense strand
auagugcucccaucaaaug

SEQ ID NO: 492075 - RNA, 19 nt, Homo sapiens
  misc_RNA (1)...(19): siRNA sense strand
uguguggcaugaugguauu

SEQ ID NO: 492076 - RNA, 19 nt, Homo sapiens
  misc_RNA (1)...(19): siRNA sense strand
gaaacaucuacacgcagaa

SEQ ID NO: 492077 - RNA, 19 nt, Homo sapiens
  misc_RNA (1)...(19): siRNA sense strand
aaacaggcuuacucugacu

SEQ ID NO: 492078 - RNA, 19 nt, Homo sapiens
  misc_RNA (1)...(19): siRNA sense strand
caucuacacgcagaaauca

SEQ ID NO: 492079 - RNA, 19 nt, Homo sapiens
  misc_RNA (1)...(19): siRNA sense strand
ugaacucugcuuacccauu

SEQ ID NO: 492080 - RNA, 19 nt, Homo sapiens
  misc_RNA (1)...(19): siRNA sense strand
ucauuauccugucugucaa

SEQ ID NO: 492081 - RNA, 19 nt, Homo sapiens
  misc_RNA (1)...(19): siRNA sense strand
uuugcacucugcuggaauu

SEQ ID NO: 492082 - RNA, 19 nt, Homo sapiens
  misc_RNA (1)...(19): siRNA sense strand
caaaguuauugggacuauc

SEQ ID NO: 492083 - RNA, 19 nt, Homo sapiens
  misc_RNA (1)...(19): siRNA sense strand
gguggaaacaggcuuacuc

SEQ ID NO: 492084 - RNA, 19 nt, Homo sapiens
  misc_RNA (1)...(19): siRNA sense strand
ucacaaccuguucccaaug

SEQ ID NO: 492085 - RNA, 19 nt, Homo sapiens
  misc_RNA (1)...(19): siRNA sense strand
cacgcagaaaucaaaguua

SEQ ID NO: 492086 - RNA, 19 nt, Homo sapiens
  misc_RNA (1)...(19): siRNA sense strand
gucaaacaggccaccuuaa

SEQ ID NO: 492087 - RNA, 19 nt, Homo sapiens
  misc_RNA (1)...(19): siRNA sense strand
uaucaaucgccacagagaa

SEQ ID NO: 492088 - RNA, 19 nt, Homo sapiens
  misc_RNA (1)...(19): siRNA sense strand
gaacucugcuuacccauuc

SEQ ID NO: 492089 - RNA, 19 nt, Homo sapiens
  misc_RNA (1)...(19): siRNA sense strand
ggaaacaggcuuacucuga

SEQ ID NO: 492090 - RNA, 19 nt, Homo sapiens
  misc_RNA (1)...(19): siRNA sense strand
caucaaaugucaucaacuu

SEQ ID NO: 492091 - RNA, 19 nt, Homo sapiens
  misc_RNA (1)...(19): siRNA sense strand
gcagaaaucaaaguuauug

SEQ ID NO: 492092 - RNA, 19 nt, Homo sapiens
  misc_RNA (1)...(19): siRNA sense strand
gaucuuguguggcaugaug

SEQ ID NO: 492093 - RNA, 19 nt, Homo sapiens
  misc_RNA (1)...(19): siRNA sense strand
ucauagugcucccaucaaa

SEQ ID NO: 492094 - RNA, 19 nt, Homo sapiens
  misc_RNA (1)...(19): siRNA sense strand
ucaaacaggccaccuuaaa

SEQ ID NO: 492095 - RNA, 19 nt, Homo sapiens
  misc_RNA (1)...(19): siRNA sense strand
gcacucugcuggaauucug

SEQ ID NO: 492096 - RNA, 19 nt, Homo sapiens
  misc_RNA (1)...(19): siRNA sense strand
caaacaggccaccuuaaau

SEQ ID NO: 492097 - RNA, 19 nt, Homo sapiens
  misc_RNA (1)...(19): siRNA sense strand
cacaaccuguucccaauga

SEQ ID NO: 492098 - RNA, 19 nt, Homo sapiens
  misc_RNA (1)...(19): siRNA sense strand
acgcagaaaucaaaguuau

SEQ ID NO: 492099 - RNA, 19 nt, Homo sapiens
  misc_RNA (1)...(19): siRNA sense strand
aaacaggccaccuuaaauc

SEQ ID NO: 492100 - RNA, 19 nt, Homo sapiens
  misc_RNA (1)...(19): siRNA sense strand
ucaaaguuauugggacuau

SEQ ID NO: 492101 - RNA, 19 nt, Homo sapiens
  misc_RNA (1)...(19): siRNA sense strand
ugucugcccugguggguuu

SEQ ID NO: 492102 - RNA, 19 nt, Homo sapiens
  misc_RNA (1)...(19): siRNA sense strand
gauuugcacucugcuggaa

SEQ ID NO: 492103 - RNA, 19 nt, Homo sapiens
  misc_RNA (1)...(19): siRNA sense strand
ugucaaacaggccaccuua

SEQ ID NO: 492104 - RNA, 19 nt, Homo sapiens
  misc_RNA (1)...(19): siRNA sense strand
caaaugucaucaacuucuc

SEQ ID NO: 492105 - RNA, 19 nt, Homo sapiens
  misc_RNA (1)...(19): siRNA sense strand
gcccugguggguuucauua

SEQ ID NO: 492106 - RNA, 19 nt, Homo sapiens
  misc_RNA (1)...(19): siRNA sense strand
aggauagccugaagaaaca

SEQ ID NO: 492107 - RNA, 19 nt, Homo sapiens
  misc_RNA (1)...(19): siRNA sense strand
gcaugaugguauugagcuu

SEQ ID NO: 492108 - RNA, 19 nt, Homo sapiens
  misc_RNA (1)...(19): siRNA sense strand
caucauagugcucccauca

SEQ ID NO: 492109 - RNA, 19 nt, Homo sapiens
  misc_RNA (1)...(19): siRNA sense strand
ggacuauccagaucuugug

SEQ ID NO: 492110 - RNA, 19 nt, Homo sapiens
  misc_RNA (1)...(19): siRNA sense strand
cagccugguuggaagcauu

SEQ ID NO: 492111 - RNA, 19 nt, Homo sapiens
  misc_RNA (1)...(19): siRNA sense strand
cauagcagccugguuggaa

SEQ ID NO: 492112 - RNA, 19 nt, Homo sapiens
  misc_RNA (1)...(19): siRNA sense strand
gugcucccaucaaauguca

SEQ ID NO: 492113 - RNA, 19 nt, Homo sapiens
  misc_RNA (1)...(19): siRNA sense strand
ccugguggguuucauuauc

SEQ ID NO: 492114 - RNA, 19 nt, Homo sapiens
  misc_RNA (1)...(19): siRNA sense strand
ucaaaugucaucaacuucu

SEQ ID NO: 492115 - RNA, 19 nt, Homo sapiens
  misc_RNA (1)...(19): siRNA sense strand
aaacaucuacacgcagaaa

SEQ ID NO: 492116 - RNA, 19 nt, Homo sapiens
  misc_RNA (1)...(19): siRNA sense strand
caaccuguucccaaugaga

SEQ ID NO: 492117 - RNA, 19 nt, Homo sapiens
  misc_RNA (1)...(19): siRNA sense strand
ucucucugaugcugauuug

SEQ ID NO: 492118 - RNA, 19 nt, Homo sapiens
  misc_RNA (1)...(19): siRNA sense strand
cuucuacacuguugaacuc

SEQ ID NO: 492119 - RNA, 19 nt, Homo sapiens
  misc_RNA (1)...(19): siRNA sense strand
guauugagcuuggggauca

SEQ ID NO: 492120 - RNA, 19 nt, Homo sapiens
  misc_RNA (1)...(19): siRNA sense strand
ucuacacgcagaaaucaaa

SEQ ID NO: 492121 - RNA, 19 nt, Homo sapiens
  misc_RNA (1)...(19): siRNA sense strand
ugacuucuacacuguugaa

SEQ ID NO: 492122 - RNA, 19 nt, Homo sapiens
  misc_RNA (1)...(19): siRNA sense strand
acacgcagaaaucaaaguu

SEQ ID NO: 492123 - RNA, 19 nt, Homo sapiens
  misc_RNA (1)...(19): siRNA sense strand
gggacuauccagaucuugu

SEQ ID NO: 492124 - RNA, 19 nt, Homo sapiens
  misc_RNA (1)...(19): siRNA sense strand
auagugcucccaucaaaug

SEQ ID NO: 492125 - RNA, 19 nt, Homo sapiens
  misc_RNA (1)...(19): siRNA sense strand
uguguggcaugaugguauu

SEQ ID NO: 492126 - RNA, 19 nt, Homo sapiens
  misc_RNA (1)...(19): siRNA sense strand
gaaacaucuacacgcagaa

SEQ ID NO: 492127 - RNA, 19 nt, Homo sapiens
  misc_RNA (1)...(19): siRNA sense strand
caucuacacgcagaaauca

SEQ ID NO: 492128 - RNA, 19 nt, Homo sapiens
  misc_RNA (1)...(19): siRNA sense strand
ugaacucugcuuacccauu

SEQ ID NO: 492129 - RNA, 19 nt, Homo sapiens
  misc_RNA (1)...(19): siRNA sense strand
ucauuauccugucugucaa

SEQ ID NO: 492130 - RNA, 19 nt, Homo sapiens
  misc_RNA (1)...(19): siRNA sense strand
uuugcacucugcuggaauu

SEQ ID NO: 492131 - RNA, 19 nt, Homo sapiens
  misc_RNA (1)...(19): siRNA sense strand
caaaguuauugggacuauc

SEQ ID NO: 492132 - RNA, 19 nt, Homo sapiens
  misc_RNA (1)...(19): siRNA sense strand
gguggaaacaggcuuacuc

SEQ ID NO: 492133 - RNA, 19 nt, Homo sapiens
  misc_RNA (1)...(19): siRNA sense strand
ucacaaccuguucccaaug

SEQ ID NO: 492134 - RNA, 19 nt, Homo sapiens
  misc_RNA (1)...(19): siRNA sense strand
cacgcagaaaucaaaguua

SEQ ID NO: 492135 - RNA, 19 nt, Homo sapiens
  misc_RNA (1)...(19): siRNA sense strand
gucaaacaggccaccuuaa

SEQ ID NO: 492136 - RNA, 19 nt, Homo sapiens
  misc_RNA (1)...(19): siRNA sense strand
uaucaaucgccacagagaa

SEQ ID NO: 492137 - RNA, 19 nt, Homo sapiens
  misc_RNA (1)...(19): siRNA sense strand
gaacucugcuuacccauuc

SEQ ID NO: 492138 - RNA, 19 nt, Homo sapiens
  misc_RNA (1)...(19): siRNA sense strand
ggaaacaggcuuacucuga

SEQ ID NO: 492139 - RNA, 19 nt, Homo sapiens
  misc_RNA (1)...(19): siRNA sense strand
caucaaaugucaucaacuu

SEQ ID NO: 492140 - RNA, 19 nt, Homo sapiens
  misc_RNA (1)...(19): siRNA sense strand
gcagaaaucaaaguuauug

SEQ ID NO: 492141 - RNA, 19 nt, Homo sapiens
  misc_RNA (1)...(19): siRNA sense strand
gaucuuguguggcaugaug

SEQ ID NO: 492142 - RNA, 19 nt, Homo sapiens
  misc_RNA (1)...(19): siRNA sense strand
ucauagugcucccaucaaa

SEQ ID NO: 492143 - RNA, 19 nt, Homo sapiens
  misc_RNA (1)...(19): siRNA sense strand
ucaaacaggccaccuuaaa

SEQ ID NO: 492144 - RNA, 19 nt, Homo sapiens
  misc_RNA (1)...(19): siRNA sense strand
gcacucugcuggaauucug

SEQ ID NO: 492145 - RNA, 19 nt, Homo sapiens
  misc_RNA (1)...(19): siRNA sense strand
caaacaggccaccuuaaau

SEQ ID NO: 492146 - RNA, 19 nt, Homo sapiens
  misc_RNA (1)...(19): siRNA sense strand
cacaaccuguucccaauga

SEQ ID NO: 492147 - RNA, 19 nt, Homo sapiens
  misc_RNA (1)...(19): siRNA sense strand
acgcagaaaucaaaguuau

SEQ ID NO: 492148 - RNA, 19 nt, Homo sapiens
  misc_RNA (1)...(19): siRNA sense strand
aaacaggccaccuuaaauc

SEQ ID NO: 492149 - RNA, 19 nt, Homo sapiens
  misc_RNA (1)...(19): siRNA sense strand
ucaaaguuauugggacuau

SEQ ID NO: 492150 - RNA, 19 nt, Homo sapiens
  misc_RNA (1)...(19): siRNA sense strand
ugucugcccugguggguuu

SEQ ID NO: 492151 - RNA, 19 nt, Homo sapiens
  misc_RNA (1)...(19): siRNA sense strand
gauuugcacucugcuggaa

SEQ ID NO: 492152 - RNA, 19 nt, Homo sapiens
  misc_RNA (1)...(19): siRNA sense strand
ugucaaacaggccaccuua

SEQ ID NO: 492153 - RNA, 19 nt, Homo sapiens
  misc_RNA (1)...(19): siRNA sense strand
caaaugucaucaacuucuc

SEQ ID NO: 492154 - RNA, 19 nt, Homo sapiens
  misc_RNA (1)...(19): siRNA sense strand
gcccugguggguuucauua

SEQ ID NO: 492155 - RNA, 19 nt, Homo sapiens
  misc_RNA (1)...(19): siRNA sense strand
aggauagccugaagaaaca

SEQ ID NO: 492156 - RNA, 19 nt, Homo sapiens
  misc_RNA (1)...(19): siRNA sense strand
gcaugaugguauugagcuu

SEQ ID NO: 492157 - RNA, 19 nt, Homo sapiens
  misc_RNA (1)...(19): siRNA sense strand
caucauagugcucccauca

SEQ ID NO: 492158 - RNA, 19 nt, Homo sapiens
  misc_RNA (1)...(19): siRNA sense strand
ggacuauccagaucuugug

SEQ ID NO: 492159 - RNA, 19 nt, Homo sapiens
  misc_RNA (1)...(19): siRNA sense strand
cagccugguuggaagcauu

SEQ ID NO: 492160 - RNA, 19 nt, Homo sapiens
  misc_RNA (1)...(19): siRNA sense strand
cauagcagccugguuggaa

SEQ ID NO: 492161 - RNA, 19 nt, Homo sapiens
  misc_RNA (1)...(19): siRNA sense strand
gugcucccaucaaauguca

SEQ ID NO: 492162 - RNA, 19 nt, Homo sapiens
  misc_RNA (1)...(19): siRNA sense strand
ccugguggguuucauuauc

SEQ ID NO: 492163 - RNA, 19 nt, Homo sapiens
  misc_RNA (1)...(19): siRNA sense strand
ucaaaugucaucaacuucu

SEQ ID NO: 492164 - RNA, 19 nt, Homo sapiens
  misc_RNA (1)...(19): siRNA sense strand
aaacaucuacacgcagaaa

SEQ ID NO: 492165 - RNA, 19 nt, Homo sapiens
  misc_RNA (1)...(19): siRNA sense strand
caaccuguucccaaugaga

SEQ ID NO: 492166 - RNA, 19 nt, Homo sapiens
  misc_RNA (1)...(19): siRNA sense strand
ucucucugaugcugauuug

SEQ ID NO: 492167 - RNA, 19 nt, Homo sapiens
  misc_RNA (1)...(19): siRNA sense strand
cuucuacacuguugaacuc

SEQ ID NO: 492168 - RNA, 19 nt, Homo sapiens
  misc_RNA (1)...(19): siRNA sense strand
guauugagcuuggggauca

SEQ ID NO: 492169 - RNA, 19 nt, Homo sapiens
  misc_RNA (1)...(19): siRNA sense strand
ucuacacgcagaaaucaaa

SEQ ID NO: 492170 - RNA, 19 nt, Homo sapiens
  misc_RNA (1)...(19): siRNA sense strand
ugacuucuacacuguugaa

SEQ ID NO: 492171 - RNA, 19 nt, Homo sapiens
  misc_RNA (1)...(19): siRNA sense strand
acacgcagaaaucaaaguu

SEQ ID NO: 492172 - RNA, 19 nt, Homo sapiens
  misc_RNA (1)...(19): siRNA sense strand
gggacuauccagaucuugu

SEQ ID NO: 492173 - RNA, 19 nt, Homo sapiens
  misc_RNA (1)...(19): siRNA sense strand
auagugcucccaucaaaug

SEQ ID NO: 492174 - RNA, 19 nt, Homo sapiens
  misc_RNA (1)...(19): siRNA sense strand
uguguggcaugaugguauu

SEQ ID NO: 492175 - RNA, 19 nt, Homo sapiens
  misc_RNA (1)...(19): siRNA sense strand
gaaacaucuacacgcagaa

SEQ ID NO: 492176 - RNA, 19 nt, Homo sapiens
  misc_RNA (1)...(19): siRNA sense strand
aaacaggcuuacucugacu

SEQ ID NO: 492177 - RNA, 19 nt, Homo sapiens
  misc_RNA (1)...(19): siRNA sense strand
caucuacacgcagaaauca

SEQ ID NO: 492178 - RNA, 19 nt, Homo sapiens
  misc_RNA (1)...(19): siRNA sense strand
ugaacucugcuuacccauu

SEQ ID NO: 492179 - RNA, 19 nt, Homo sapiens
  misc_RNA (1)...(19): siRNA sense strand
ucauuauccugucugucaa

SEQ ID NO: 492180 - RNA, 19 nt, Homo sapiens
  misc_RNA (1)...(19): siRNA sense strand
uuugcacucugcuggaauu

SEQ ID NO: 492181 - RNA, 19 nt, Homo sapiens
  misc_RNA (1)...(19): siRNA sense strand
caaaguuauugggacuauc

SEQ ID NO: 492182 - RNA, 19 nt, Homo sapiens
  misc_RNA (1)...(19): siRNA sense strand
gguggaaacaggcuuacuc

SEQ ID NO: 492183 - RNA, 19 nt, Homo sapiens
  misc_RNA (1)...(19): siRNA sense strand
ucacaaccuguucccaaug

SEQ ID NO: 492184 - RNA, 19 nt, Homo sapiens
  misc_RNA (1)...(19): siRNA sense strand
cacgcagaaaucaaaguua

SEQ ID NO: 492185 - RNA, 19 nt, Homo sapiens
  misc_RNA (1)...(19): siRNA sense strand
gucaaacaggccaccuuaa

SEQ ID NO: 492186 - RNA, 19 nt, Homo sapiens
  misc_RNA (1)...(19): siRNA sense strand
uaucaaucgccacagagaa

SEQ ID NO: 492187 - RNA, 19 nt, Homo sapiens
  misc_RNA (1)...(19): siRNA sense strand
ucaugaagcugcagaagaa

SEQ ID NO: 492188 - RNA, 19 nt, Homo sapiens
  misc_RNA (1)...(19): siRNA sense strand
guaaggacuccaagaugua

SEQ ID NO: 492189 - RNA, 19 nt, Homo sapiens
  misc_RNA (1)...(19): siRNA sense strand
cugcugagcuccaaagaug

SEQ ID NO: 492190 - RNA, 19 nt, Homo sapiens
  misc_RNA (1)...(19): siRNA sense strand
cguaaggacuccaagaugu

SEQ ID NO: 492191 - RNA, 19 nt, Homo sapiens
  misc_RNA (1)...(19): siRNA sense strand
ucaaggagcugcgggugaa

SEQ ID NO: 492192 - RNA, 19 nt, Homo sapiens
  misc_RNA (1)...(19): siRNA sense strand
gcaaggaggagaacuacga

SEQ ID NO: 492193 - RNA, 19 nt, Homo sapiens
  misc_RNA (1)...(19): siRNA sense strand
ccucacgcaucacaccuua

SEQ ID NO: 492194 - RNA, 19 nt, Homo sapiens
  misc_RNA (1)...(19): siRNA sense strand
uggaggaggucgccauuga

SEQ ID NO: 492195 - RNA, 19 nt, Homo sapiens
  misc_RNA (1)...(19): siRNA sense strand
acccgcagcuguacaagaa

SEQ ID NO: 492196 - RNA, 19 nt, Homo sapiens
  misc_RNA (1)...(19): siRNA sense strand
acuccaagauguacaagga

SEQ ID NO: 492197 - RNA, 19 nt, Homo sapiens
  misc_RNA (1)...(19): siRNA sense strand
gcugcaaggaggagaacua

SEQ ID NO: 492198 - RNA, 19 nt, Homo sapiens
  misc_RNA (1)...(19): siRNA sense strand
gcaccagagugaggagaag

SEQ ID NO: 492199 - RNA, 19 nt, Homo sapiens
  misc_RNA (1)...(19): siRNA sense strand
gcauggaggagaaggagau

SEQ ID NO: 492200 - RNA, 19 nt, Homo sapiens
  misc_RNA (1)...(19): siRNA sense strand
gcaagcacacgcugaagcu

SEQ ID NO: 492201 - RNA, 19 nt, Homo sapiens
  misc_RNA (1)...(19): siRNA sense strand
gcucaagcacagccucaug

SEQ ID NO: 492202 - RNA, 19 nt, Homo sapiens
  misc_RNA (1)...(19): siRNA sense strand
ucuacuacccgcagcugua

SEQ ID NO: 492203 - RNA, 19 nt, Homo sapiens
  misc_RNA (1)...(19): siRNA sense strand
gagcaggccaacaccaucu

SEQ ID NO: 492204 - RNA, 19 nt, Homo sapiens
  misc_RNA (1)...(19): siRNA sense strand
gucaugaagcugcagaaga

SEQ ID NO: 492205 - RNA, 19 nt, Homo sapiens
  misc_RNA (1)...(19): siRNA sense strand
caaccuggucauccgcaaa

SEQ ID NO: 492206 - RNA, 19 nt, Homo sapiens
  misc_RNA (1)...(19): siRNA sense strand
gagcuccaaagaugacuuc

SEQ ID NO: 492207 - RNA, 19 nt, Homo sapiens
  misc_RNA (1)...(19): siRNA sense strand
ucaagcacagccucaugaa

SEQ ID NO: 492208 - RNA, 19 nt, Homo sapiens
  misc_RNA (1)...(19): siRNA sense strand
accugcagcuggagauuga

SEQ ID NO: 492209 - RNA, 19 nt, Homo sapiens
  misc_RNA (1)...(19): siRNA sense strand
uggaggagaaggagauguu

SEQ ID NO: 492210 - RNA, 19 nt, Homo sapiens
  misc_RNA (1)...(19): siRNA sense strand
ucaugaagcugcagaagaa

SEQ ID NO: 492211 - RNA, 19 nt, Homo sapiens
  misc_RNA (1)...(19): siRNA sense strand
guaaggacuccaagaugua

SEQ ID NO: 492212 - RNA, 19 nt, Homo sapiens
  misc_RNA (1)...(19): siRNA sense strand
cugcugagcuccaaagaug

SEQ ID NO: 492213 - RNA, 19 nt, Homo sapiens
  misc_RNA (1)...(19): siRNA sense strand
cguaaggacuccaagaugu

SEQ ID NO: 492214 - RNA, 19 nt, Homo sapiens
  misc_RNA (1)...(19): siRNA sense strand
ucaaggagcugcgggugaa

SEQ ID NO: 492215 - RNA, 19 nt, Homo sapiens
  misc_RNA (1)...(19): siRNA sense strand
gcaaggaggagaacuacga

SEQ ID NO: 492216 - RNA, 19 nt, Homo sapiens
  misc_RNA (1)...(19): siRNA sense strand
ccucacgcaucacaccuua

SEQ ID NO: 492217 - RNA, 19 nt, Homo sapiens
  misc_RNA (1)...(19): siRNA sense strand
uggaggaggucgccauuga

SEQ ID NO: 492218 - RNA, 19 nt, Homo sapiens
  misc_RNA (1)...(19): siRNA sense strand
acacccagcucucagacaa

SEQ ID NO: 492219 - RNA, 19 nt, Homo sapiens
  misc_RNA (1)...(19): siRNA sense strand
acccgcagcuguacaagaa

SEQ ID NO: 492220 - RNA, 19 nt, Homo sapiens
  misc_RNA (1)...(19): siRNA sense strand
acuccaagauguacaagga

SEQ ID NO: 492221 - RNA, 19 nt, Homo sapiens
  misc_RNA (1)...(19): siRNA sense strand
gcugcaaggaggagaacua

SEQ ID NO: 492222 - RNA, 19 nt, Homo sapiens
  misc_RNA (1)...(19): siRNA sense strand
gcaccagagugaggagaag

SEQ ID NO: 492223 - RNA, 19 nt, Homo sapiens
  misc_RNA (1)...(19): siRNA sense strand
ggaggacacccagcucuca

SEQ ID NO: 492224 - RNA, 19 nt, Homo sapiens
  misc_RNA (1)...(19): siRNA sense strand
gcauggaggagaaggagau

SEQ ID NO: 492225 - RNA, 19 nt, Homo sapiens
  misc_RNA (1)...(19): siRNA sense strand
gcaagcacacgcugaagcu

SEQ ID NO: 492226 - RNA, 19 nt, Homo sapiens
  misc_RNA (1)...(19): siRNA sense strand
gcucaagcacagccucaug

SEQ ID NO: 492227 - RNA, 19 nt, Homo sapiens
  misc_RNA (1)...(19): siRNA sense strand
ucuacuacccgcagcugua

SEQ ID NO: 492228 - RNA, 19 nt, Homo sapiens
  misc_RNA (1)...(19): siRNA sense strand
gagcaggccaacaccaucu

SEQ ID NO: 492229 - RNA, 19 nt, Homo sapiens
  misc_RNA (1)...(19): siRNA sense strand
gucaugaagcugcagaaga

SEQ ID NO: 492230 - RNA, 19 nt, Homo sapiens
  misc_RNA (1)...(19): siRNA sense strand
gagcuccaaagaugacuuc

SEQ ID NO: 492231 - RNA, 19 nt, Homo sapiens
  misc_RNA (1)...(19): siRNA sense strand
caaccuggucauccgcaaa

SEQ ID NO: 492232 - RNA, 19 nt, Homo sapiens
  misc_RNA (1)...(19): siRNA sense strand
ucaagcacagccucaugaa

SEQ ID NO: 492233 - RNA, 19 nt, Homo sapiens
  misc_RNA (1)...(19): siRNA sense strand
ccugagcuccgaccuggaa

SEQ ID NO: 492234 - RNA, 19 nt, Homo sapiens
  misc_RNA (1)...(19): siRNA sense strand
accugcagcuggagauuga

SEQ ID NO: 492235 - RNA, 19 nt, Homo sapiens
  misc_RNA (1)...(19): siRNA sense strand
uggaggagaaggagauguu

SEQ ID NO: 492236 - RNA, 19 nt, Homo sapiens
  misc_RNA (1)...(19): siRNA sense strand
ucaugaagcugcagaagaa

SEQ ID NO: 492237 - RNA, 19 nt, Homo sapiens
  misc_RNA (1)...(19): siRNA sense strand
guaaggacuccaagaugua

SEQ ID NO: 492238 - RNA, 19 nt, Homo sapiens
  misc_RNA (1)...(19): siRNA sense strand
cugcugagcuccaaagaug

SEQ ID NO: 492239 - RNA, 19 nt, Homo sapiens
  misc_RNA (1)...(19): siRNA sense strand
cguaaggacuccaagaugu

SEQ ID NO: 492240 - RNA, 19 nt, Homo sapiens
  misc_RNA (1)...(19): siRNA sense strand
ucaaggagcugcgggugaa

SEQ ID NO: 492241 - RNA, 19 nt, Homo sapiens
  misc_RNA (1)...(19): siRNA sense strand
gcaaggaggagaacuacga

SEQ ID NO: 492242 - RNA, 19 nt, Homo sapiens
  misc_RNA (1)...(19): siRNA sense strand
ccucacgcaucacaccuua

SEQ ID NO: 492243 - RNA, 19 nt, Homo sapiens
  misc_RNA (1)...(19): siRNA sense strand
uggaggaggucgccauuga

SEQ ID NO: 492244 - RNA, 19 nt, Homo sapiens
  misc_RNA (1)...(19): siRNA sense strand
acacccagcucucagacaa

SEQ ID NO: 492245 - RNA, 19 nt, Homo sapiens
  misc_RNA (1)...(19): siRNA sense strand
acccgcagcuguacaagaa

SEQ ID NO: 492246 - RNA, 19 nt, Homo sapiens
  misc_RNA (1)...(19): siRNA sense strand
acuccaagauguacaagga

SEQ ID NO: 492247 - RNA, 19 nt, Homo sapiens
  misc_RNA (1)...(19): siRNA sense strand
gcugcaaggaggagaacua

SEQ ID NO: 492248 - RNA, 19 nt, Homo sapiens
  misc_RNA (1)...(19): siRNA sense strand
gcaccagagugaggagaag

SEQ ID NO: 492249 - RNA, 19 nt, Homo sapiens
  misc_RNA (1)...(19): siRNA sense strand
ggaggacacccagcucuca

SEQ ID NO: 492250 - RNA, 19 nt, Homo sapiens
  misc_RNA (1)...(19): siRNA sense strand
gcauggaggagaaggagau

SEQ ID NO: 492251 - RNA, 19 nt, Homo sapiens
  misc_RNA (1)...(19): siRNA sense strand
gcaagcacacgcugaagcu

SEQ ID NO: 492252 - RNA, 19 nt, Homo sapiens
  misc_RNA (1)...(19): siRNA sense strand
gcucaagcacagccucaug

SEQ ID NO: 492253 - RNA, 19 nt, Homo sapiens
  misc_RNA (1)...(19): siRNA sense strand
ucuacuacccgcagcugua

SEQ ID NO: 492254 - RNA, 19 nt, Homo sapiens
  misc_RNA (1)...(19): siRNA sense strand
gagcaggccaacaccaucu

SEQ ID NO: 492255 - RNA, 19 nt, Homo sapiens
  misc_RNA (1)...(19): siRNA sense strand
gucaugaagcugcagaaga

SEQ ID NO: 492256 - RNA, 19 nt, Homo sapiens
  misc_RNA (1)...(19): siRNA sense strand
gagcuccaaagaugacuuc

SEQ ID NO: 492257 - RNA, 19 nt, Homo sapiens
  misc_RNA (1)...(19): siRNA sense strand
caaccuggucauccgcaaa

SEQ ID NO: 492258 - RNA, 19 nt, Homo sapiens
  misc_RNA (1)...(19): siRNA sense strand
ucaagcacagccucaugaa

SEQ ID NO: 492259 - RNA, 19 nt, Homo sapiens
  misc_RNA (1)...(19): siRNA sense strand
ccugagcuccgaccuggaa

SEQ ID NO: 492260 - RNA, 19 nt, Homo sapiens
  misc_RNA (1)...(19): siRNA sense strand
accugcagcuggagauuga

SEQ ID NO: 492261 - RNA, 19 nt, Homo sapiens
  misc_RNA (1)...(19): siRNA sense strand
uggaggagaaggagauguu

SEQ ID NO: 492262 - RNA, 19 nt, Homo sapiens
  misc_RNA (1)...(19): siRNA sense strand
cuaggugguugcccgguua

SEQ ID NO: 492263 - RNA, 19 nt, Homo sapiens
  misc_RNA (1)...(19): siRNA sense strand
gugguugcccgguuaguua

SEQ ID NO: 492264 - RNA, 19 nt, Homo sapiens
  misc_RNA (1)...(19): siRNA sense strand
guuaguuacuuacuucugu

SEQ ID NO: 492265 - RNA, 19 nt, Homo sapiens
  misc_RNA (1)...(19): siRNA sense strand
gcugcgagcugggaauaug

SEQ ID NO: 492266 - RNA, 19 nt, Homo sapiens
  misc_RNA (1)...(19): siRNA sense strand
gaauuuacuucugcugcau

SEQ ID NO: 492267 - RNA, 19 nt, Homo sapiens
  misc_RNA (1)...(19): siRNA sense strand
ccgguuaguuacuuacuuc

SEQ ID NO: 492268 - RNA, 19 nt, Homo sapiens
  misc_RNA (1)...(19): siRNA sense strand
ucucggagccacucgcaaa

SEQ ID NO: 492269 - RNA, 19 nt, Homo sapiens
  misc_RNA (1)...(19): siRNA sense strand
gugcugcgagcugggaaua

SEQ ID NO: 492270 - RNA, 19 nt, Homo sapiens
  misc_RNA (1)...(19): siRNA sense strand
cauccucugcucuuaccua

SEQ ID NO: 492271 - RNA, 19 nt, Homo sapiens
  misc_RNA (1)...(19): siRNA sense strand
ggugguugcccgguuaguu

SEQ ID NO: 492272 - RNA, 19 nt, Homo sapiens
  misc_RNA (1)...(19): siRNA sense strand
gggauuuggugguuuguug

SEQ ID NO: 492273 - RNA, 19 nt, Homo sapiens
  misc_RNA (1)...(19): siRNA sense strand
ggacacuacuucauaacca

SEQ ID NO: 492274 - RNA, 19 nt, Homo sapiens
  misc_RNA (1)...(19): siRNA sense strand
ggaacuugguuaugguugu

SEQ ID NO: 492275 - RNA, 19 nt, Homo sapiens
  misc_RNA (1)...(19): siRNA sense strand
gcaacuggugcacuguuua

SEQ ID NO: 492276 - RNA, 19 nt, Homo sapiens
  misc_RNA (1)...(19): siRNA sense strand
ccacuuuacucuacuccuu

SEQ ID NO: 492277 - RNA, 19 nt, Homo sapiens
  misc_RNA (1)...(19): siRNA sense strand
cauaaccacuuuacucuac

SEQ ID NO: 492278 - RNA, 19 nt, Homo sapiens
  misc_RNA (1)...(19): siRNA sense strand
cuaggugguugcccgguua

SEQ ID NO: 492279 - RNA, 19 nt, Homo sapiens
  misc_RNA (1)...(19): siRNA sense strand
guuaguuacuuacuucugu

SEQ ID NO: 492280 - RNA, 19 nt, Homo sapiens
  misc_RNA (1)...(19): siRNA sense strand
cuggugcacuguuuacuaa

SEQ ID NO: 492281 - RNA, 19 nt, Homo sapiens
  misc_RNA (1)...(19): siRNA sense strand
gugguugcccgguuaguua

SEQ ID NO: 492282 - RNA, 19 nt, Homo sapiens
  misc_RNA (1)...(19): siRNA sense strand
gcugcgagcugggaauaug

SEQ ID NO: 492283 - RNA, 19 nt, Homo sapiens
  misc_RNA (1)...(19): siRNA sense strand
uaaaguauaccggacacua

SEQ ID NO: 492284 - RNA, 19 nt, Homo sapiens
  misc_RNA (1)...(19): siRNA sense strand
gaacuugguuaugguuguc

SEQ ID NO: 492285 - RNA, 19 nt, Homo sapiens
  misc_RNA (1)...(19): siRNA sense strand
gagggcugaugccaaguga

SEQ ID NO: 492286 - RNA, 19 nt, Homo sapiens
  misc_RNA (1)...(19): siRNA sense strand
ccagugccaugccuuagau

SEQ ID NO: 492287 - RNA, 19 nt, Homo sapiens
  misc_RNA (1)...(19): siRNA sense strand
guggaucgauucuguuugg

SEQ ID NO: 492288 - RNA, 19 nt, Homo sapiens
  misc_RNA (1)...(19): siRNA sense strand
uaccggacacuacuucaua

SEQ ID NO: 492289 - RNA, 19 nt, Homo sapiens
  misc_RNA (1)...(19): siRNA sense strand
gugaagacccaguggauca

SEQ ID NO: 492290 - RNA, 19 nt, Homo sapiens
  misc_RNA (1)...(19): siRNA sense strand
gggcugaugccaagugaug

SEQ ID NO: 492291 - RNA, 19 nt, Homo sapiens
  misc_RNA (1)...(19): siRNA sense strand
gaauuuacuucugcugcau

SEQ ID NO: 492292 - RNA, 19 nt, Homo sapiens
  misc_RNA (1)...(19): siRNA sense strand
gguuaugguugucucaagu

SEQ ID NO: 492293 - RNA, 19 nt, Homo sapiens
  misc_RNA (1)...(19): siRNA sense strand
ccgguuaguuacuuacuuc

SEQ ID NO: 492294 - RNA, 19 nt, Homo sapiens
  misc_RNA (1)...(19): siRNA sense strand
gugguuuguugaccuuauu

SEQ ID NO: 492295 - RNA, 19 nt, Homo sapiens
  misc_RNA (1)...(19): siRNA sense strand
gaucauguuggaaaugcaa

SEQ ID NO: 492296 - RNA, 19 nt, Homo sapiens
  misc_RNA (1)...(19): siRNA sense strand
ccaggaacuugguuauggu

SEQ ID NO: 492297 - RNA, 19 nt, Homo sapiens
  misc_RNA (1)...(19): siRNA sense strand
ggugguuuguugaccuuau

SEQ ID NO: 492298 - RNA, 19 nt, Homo sapiens
  misc_RNA (1)...(19): siRNA sense strand
gcaguagggaagcuguuga

SEQ ID NO: 492299 - RNA, 19 nt, Homo sapiens
  misc_RNA (1)...(19): siRNA sense strand
ggauuuggugguuuguuga

SEQ ID NO: 492300 - RNA, 19 nt, Homo sapiens
  misc_RNA (1)...(19): siRNA sense strand
cccaggaacuugguuaugg

SEQ ID NO: 492301 - RNA, 19 nt, Homo sapiens
  misc_RNA (1)...(19): siRNA sense strand
cccaguggaucauguugga

SEQ ID NO: 492302 - RNA, 19 nt, Homo sapiens
  misc_RNA (1)...(19): siRNA sense strand
gacuugggauuuggugguu

SEQ ID NO: 492303 - RNA, 19 nt, Homo sapiens
  misc_RNA (1)...(19): siRNA sense strand
ucucggagccacucgcaaa

SEQ ID NO: 492304 - RNA, 19 nt, Homo sapiens
  misc_RNA (1)...(19): siRNA sense strand
cgacguggaacacacuuca

SEQ ID NO: 492305 - RNA, 19 nt, Homo sapiens
  misc_RNA (1)...(19): siRNA sense strand
ggagggcugaugccaagug

SEQ ID NO: 492306 - RNA, 19 nt, Homo sapiens
  misc_RNA (1)...(19): siRNA sense strand
ucauaaccacuuuacucua

SEQ ID NO: 492307 - RNA, 19 nt, Homo sapiens
  misc_RNA (1)...(19): siRNA sense strand
ugccuuagauggaauugag

SEQ ID NO: 492308 - RNA, 19 nt, Homo sapiens
  misc_RNA (1)...(19): siRNA sense strand
gaagacccaguggaucaug

SEQ ID NO: 492309 - RNA, 19 nt, Homo sapiens
  misc_RNA (1)...(19): siRNA sense strand
accggacacuacuucauaa

SEQ ID NO: 492310 - RNA, 19 nt, Homo sapiens
  misc_RNA (1)...(19): siRNA sense strand
caucccaggaacuugguua

SEQ ID NO: 492311 - RNA, 19 nt, Homo sapiens
  misc_RNA (1)...(19): siRNA sense strand
caguggaucauguuggaaa

SEQ ID NO: 492312 - RNA, 19 nt, Homo sapiens
  misc_RNA (1)...(19): siRNA sense strand
cuacuucauaaccacuuua

SEQ ID NO: 492313 - RNA, 19 nt, Homo sapiens
  misc_RNA (1)...(19): siRNA sense strand
caacuggugcacuguuuac

SEQ ID NO: 492314 - RNA, 19 nt, Homo sapiens
  misc_RNA (1)...(19): siRNA sense strand
guguggaucgauucuguuu

SEQ ID NO: 492315 - RNA, 19 nt, Homo sapiens
  misc_RNA (1)...(19): siRNA sense strand
gcuuggaggacuugggauu

SEQ ID NO: 492316 - RNA, 19 nt, Homo sapiens
  misc_RNA (1)...(19): siRNA sense strand
agcaacuggugcacuguuu

SEQ ID NO: 492317 - RNA, 19 nt, Homo sapiens
  misc_RNA (1)...(19): siRNA sense strand
uuggaggacuugggauuug

SEQ ID NO: 492318 - RNA, 19 nt, Homo sapiens
  misc_RNA (1)...(19): siRNA sense strand
gcacugcaguagggaagcu

SEQ ID NO: 492319 - RNA, 19 nt, Homo sapiens
  misc_RNA (1)...(19): siRNA sense strand
cauccucugcucuuaccua

SEQ ID NO: 492320 - RNA, 19 nt, Homo sapiens
  misc_RNA (1)...(19): siRNA sense strand
gugcugcgagcugggaaua

SEQ ID NO: 492321 - RNA, 19 nt, Homo sapiens
  misc_RNA (1)...(19): siRNA sense strand
guauaccggacacuacuuc

SEQ ID NO: 492322 - RNA, 19 nt, Homo sapiens
  misc_RNA (1)...(19): siRNA sense strand
gagugugccaguccuagga

SEQ ID NO: 492323 - RNA, 19 nt, Homo sapiens
  misc_RNA (1)...(19): siRNA sense strand
uaaccacuuuacucuacuc

SEQ ID NO: 492324 - RNA, 19 nt, Homo sapiens
  misc_RNA (1)...(19): siRNA sense strand
cuugggauuuggugguuug

SEQ ID NO: 492325 - RNA, 19 nt, Homo sapiens
  misc_RNA (1)...(19): siRNA sense strand
ggugguugcccgguuaguu

SEQ ID NO: 492326 - RNA, 19 nt, Homo sapiens
  misc_RNA (1)...(19): siRNA sense strand
uaacaugacuugcagauuu

SEQ ID NO: 492327 - RNA, 19 nt, Homo sapiens
  misc_RNA (1)...(19): siRNA sense strand
guacugaaaucccaccuua

SEQ ID NO: 492328 - RNA, 19 nt, Homo sapiens
  misc_RNA (1)...(19): siRNA sense strand
gcagugaaaccaucuguua

SEQ ID NO: 492329 - RNA, 19 nt, Homo sapiens
  misc_RNA (1)...(19): siRNA sense strand
gcagauggcucuuuguaca

SEQ ID NO: 492330 - RNA, 19 nt, Homo sapiens
  misc_RNA (1)...(19): siRNA sense strand
caacaaauuucuccuguac

SEQ ID NO: 492331 - RNA, 19 nt, Homo sapiens
  misc_RNA (1)...(19): siRNA sense strand
ugaaacagauuacgagugu

SEQ ID NO: 492332 - RNA, 19 nt, Homo sapiens
  misc_RNA (1)...(19): siRNA sense strand
gaauauggacgcugauaga

SEQ ID NO: 492333 - RNA, 19 nt, Homo sapiens
  misc_RNA (1)...(19): siRNA sense strand
gaaaucccaccuuauguga

SEQ ID NO: 492334 - RNA, 19 nt, Homo sapiens
  misc_RNA (1)...(19): siRNA sense strand
caauuggacuggaggcuau

SEQ ID NO: 492335 - RNA, 19 nt, Homo sapiens
  misc_RNA (1)...(19): siRNA sense strand
gaacuucaucauuaacaug

SEQ ID NO: 492336 - RNA, 19 nt, Homo sapiens
  misc_RNA (1)...(19): siRNA sense strand
caccuuaugugaugaagug

SEQ ID NO: 492337 - RNA, 19 nt, Homo sapiens
  misc_RNA (1)...(19): siRNA sense strand
uguauagacugcacaacaa

SEQ ID NO: 492338 - RNA, 19 nt, Homo sapiens
  misc_RNA (1)...(19): siRNA sense strand
acaacaaauuucuccugua

SEQ ID NO: 492339 - RNA, 19 nt, Homo sapiens
  misc_RNA (1)...(19): siRNA sense strand
cagcagauggcucuuugua

SEQ ID NO: 492340 - RNA, 19 nt, Homo sapiens
  misc_RNA (1)...(19): siRNA sense strand
gaaacagauuacgagugua

SEQ ID NO: 492341 - RNA, 19 nt, Homo sapiens
  misc_RNA (1)...(19): siRNA sense strand
gcagcuuccugaaacagau

SEQ ID NO: 492342 - RNA, 19 nt, Homo sapiens
  misc_RNA (1)...(19): siRNA sense strand
ggacuggaggcuauaagug

SEQ ID NO: 492343 - RNA, 19 nt, Homo sapiens
  misc_RNA (1)...(19): siRNA sense strand
gauggcucuuuguacauuu

SEQ ID NO: 492344 - RNA, 19 nt, Homo sapiens
  misc_RNA (1)...(19): siRNA sense strand
cauuggaguuggcuauguu

SEQ ID NO: 492345 - RNA, 19 nt, Homo sapiens
  misc_RNA (1)...(19): siRNA sense strand
ggaagccugucacuuuuga

SEQ ID NO: 492346 - RNA, 19 nt, Homo sapiens
  misc_RNA (1)...(19): siRNA sense strand
aaucccaccuuaugugaug

SEQ ID NO: 492347 - RNA, 19 nt, Homo sapiens
  misc_RNA (1)...(19): siRNA sense strand
ggaauauggacgcugauag

SEQ ID NO: 492348 - RNA, 19 nt, Homo sapiens
  misc_RNA (1)...(19): siRNA sense strand
gggaauauggacgcugaua

SEQ ID NO: 492349 - RNA, 19 nt, Homo sapiens
  misc_RNA (1)...(19): siRNA sense strand
gaugaaguguccgagcaau

SEQ ID NO: 492350 - RNA, 19 nt, Homo sapiens
  misc_RNA (1)...(19): siRNA sense strand
guauagacugcacaacaaa

SEQ ID NO: 492351 - RNA, 19 nt, Homo sapiens
  misc_RNA (1)...(19): siRNA sense strand
ugaaaucccaccuuaugug

SEQ ID NO: 492352 - RNA, 19 nt, Homo sapiens
  misc_RNA (1)...(19): siRNA sense strand
uuaccuguguugaucaaga

SEQ ID NO: 492353 - RNA, 19 nt, Homo sapiens
  misc_RNA (1)...(19): siRNA sense strand
ccaaaaugcuauauugcaa

SEQ ID NO: 492354 - RNA, 19 nt, Homo sapiens
  misc_RNA (1)...(19): siRNA sense strand
gagcagaccguuucuaccu

SEQ ID NO: 492355 - RNA, 19 nt, Homo sapiens
  misc_RNA (1)...(19): siRNA sense strand
agauggcucuuuguacauu

SEQ ID NO: 492356 - RNA, 19 nt, Homo sapiens
  misc_RNA (1)...(19): siRNA sense strand
gauagacguccugcucauu

SEQ ID NO: 492357 - RNA, 19 nt, Homo sapiens
  misc_RNA (1)...(19): siRNA sense strand
cuacggcucuggcucuaag

SEQ ID NO: 492358 - RNA, 19 nt, Homo sapiens
  misc_RNA (1)...(19): siRNA sense strand
aaauuucuccuguaccuau

SEQ ID NO: 492359 - RNA, 19 nt, Homo sapiens
  misc_RNA (1)...(19): siRNA sense strand
aaccaucuguuaccugugu

SEQ ID NO: 492360 - RNA, 19 nt, Homo sapiens
  misc_RNA (1)...(19): siRNA sense strand
acaaauuucuccuguaccu

SEQ ID NO: 492361 - RNA, 19 nt, Homo sapiens
  misc_RNA (1)...(19): siRNA sense strand
ccaaaagaacuucaucauu

SEQ ID NO: 492362 - RNA, 19 nt, Homo sapiens
  misc_RNA (1)...(19): siRNA sense strand
augggaagccugucacuuu

SEQ ID NO: 492363 - RNA, 19 nt, Homo sapiens
  misc_RNA (1)...(19): siRNA sense strand
acugaaaucccaccuuaug

SEQ ID NO: 492364 - RNA, 19 nt, Homo sapiens
  misc_RNA (1)...(19): siRNA sense strand
uagacugcacaacaaauuu

SEQ ID NO: 492365 - RNA, 19 nt, Homo sapiens
  misc_RNA (1)...(19): siRNA sense strand
aaacagauuacgaguguac

SEQ ID NO: 492366 - RNA, 19 nt, Homo sapiens
  misc_RNA (1)...(19): siRNA sense strand
gcucauuggaguuggcuau

SEQ ID NO: 492367 - RNA, 19 nt, Homo sapiens
  misc_RNA (1)...(19): siRNA sense strand
gaccagcagauggcucuuu

SEQ ID NO: 492368 - RNA, 19 nt, Homo sapiens
  misc_RNA (1)...(19): siRNA sense strand
ucuguuaccuguguugauc

SEQ ID NO: 492369 - RNA, 19 nt, Homo sapiens
  misc_RNA (1)...(19): siRNA sense strand
gauuacgaguguaccaacu

SEQ ID NO: 492370 - RNA, 19 nt, Homo sapiens
  misc_RNA (1)...(19): siRNA sense strand
ugauagacguccugcucau

SEQ ID NO: 492371 - RNA, 19 nt, Homo sapiens
  misc_RNA (1)...(19): siRNA sense strand
aaugcuauauugcaauugg

SEQ ID NO: 492372 - RNA, 19 nt, Homo sapiens
  misc_RNA (1)...(19): siRNA sense strand
uaaccguacuuuucccaaa

SEQ ID NO: 492373 - RNA, 19 nt, Homo sapiens
  misc_RNA (1)...(19): siRNA sense strand
ucauuggaguuggcuaugu

SEQ ID NO: 492374 - RNA, 19 nt, Homo sapiens
  misc_RNA (1)...(19): siRNA sense strand
auagacugcacaacaaauu

SEQ ID NO: 492375 - RNA, 19 nt, Homo sapiens
  misc_RNA (1)...(19): siRNA sense strand
caagacuucaaaucccaaa

SEQ ID NO: 492376 - RNA, 19 nt, Homo sapiens
  misc_RNA (1)...(19): siRNA sense strand
agacugcacaacaaauuuc

SEQ ID NO: 492377 - RNA, 19 nt, Homo sapiens
  misc_RNA (1)...(19): siRNA sense strand
accagcagauggcucuuug

SEQ ID NO: 492378 - RNA, 19 nt, Homo sapiens
  misc_RNA (1)...(19): siRNA sense strand
auagacguccugcucauug

SEQ ID NO: 492379 - RNA, 19 nt, Homo sapiens
  misc_RNA (1)...(19): siRNA sense strand
ugaaguguccgagcaaugg

SEQ ID NO: 492380 - RNA, 19 nt, Homo sapiens
  misc_RNA (1)...(19): siRNA sense strand
gcucuggcucuaagcauca

SEQ ID NO: 492381 - RNA, 19 nt, Homo sapiens
  misc_RNA (1)...(19): siRNA sense strand
caaauuucuccuguaccua

SEQ ID NO: 492382 - RNA, 19 nt, Homo sapiens
  misc_RNA (1)...(19): siRNA sense strand
uaacaugacuugcagauuu

SEQ ID NO: 492383 - RNA, 19 nt, Homo sapiens
  misc_RNA (1)...(19): siRNA sense strand
guacugaaaucccaccuua

SEQ ID NO: 492384 - RNA, 19 nt, Homo sapiens
  misc_RNA (1)...(19): siRNA sense strand
gcagugaaaccaucuguua

SEQ ID NO: 492385 - RNA, 19 nt, Homo sapiens
  misc_RNA (1)...(19): siRNA sense strand
gcagauggcucuuuguaca

SEQ ID NO: 492386 - RNA, 19 nt, Homo sapiens
  misc_RNA (1)...(19): siRNA sense strand
caacaaauuucuccuguac

SEQ ID NO: 492387 - RNA, 19 nt, Homo sapiens
  misc_RNA (1)...(19): siRNA sense strand
ugaaacagauuacgagugu

SEQ ID NO: 492388 - RNA, 19 nt, Homo sapiens
  misc_RNA (1)...(19): siRNA sense strand
gaauauggacgcugauaga

SEQ ID NO: 492389 - RNA, 19 nt, Homo sapiens
  misc_RNA (1)...(19): siRNA sense strand
gaaaucccaccuuauguga

SEQ ID NO: 492390 - RNA, 19 nt, Homo sapiens
  misc_RNA (1)...(19): siRNA sense strand
caauuggacuggaggcuau

SEQ ID NO: 492391 - RNA, 19 nt, Homo sapiens
  misc_RNA (1)...(19): siRNA sense strand
gaacuucaucauuaacaug

SEQ ID NO: 492392 - RNA, 19 nt, Homo sapiens
  misc_RNA (1)...(19): siRNA sense strand
caccuuaugugaugaagug

SEQ ID NO: 492393 - RNA, 19 nt, Homo sapiens
  misc_RNA (1)...(19): siRNA sense strand
uguauagacugcacaacaa

SEQ ID NO: 492394 - RNA, 19 nt, Homo sapiens
  misc_RNA (1)...(19): siRNA sense strand
acaacaaauuucuccugua

SEQ ID NO: 492395 - RNA, 19 nt, Homo sapiens
  misc_RNA (1)...(19): siRNA sense strand
cagcagauggcucuuugua

SEQ ID NO: 492396 - RNA, 19 nt, Homo sapiens
  misc_RNA (1)...(19): siRNA sense strand
gaaacagauuacgagugua

SEQ ID NO: 492397 - RNA, 19 nt, Homo sapiens
  misc_RNA (1)...(19): siRNA sense strand
gcagcuuccugaaacagau

SEQ ID NO: 492398 - RNA, 19 nt, Homo sapiens
  misc_RNA (1)...(19): siRNA sense strand
ggacuggaggcuauaagug

SEQ ID NO: 492399 - RNA, 19 nt, Homo sapiens
  misc_RNA (1)...(19): siRNA sense strand
gauggcucuuuguacauuu

SEQ ID NO: 492400 - RNA, 19 nt, Homo sapiens
  misc_RNA (1)...(19): siRNA sense strand
cauuggaguuggcuauguu

SEQ ID NO: 492401 - RNA, 19 nt, Homo sapiens
  misc_RNA (1)...(19): siRNA sense strand
ggaagccugucacuuuuga

SEQ ID NO: 492402 - RNA, 19 nt, Homo sapiens
  misc_RNA (1)...(19): siRNA sense strand
aaucccaccuuaugugaug

SEQ ID NO: 492403 - RNA, 19 nt, Homo sapiens
  misc_RNA (1)...(19): siRNA sense strand
ggaauauggacgcugauag

SEQ ID NO: 492404 - RNA, 19 nt, Homo sapiens
  misc_RNA (1)...(19): siRNA sense strand
gggaauauggacgcugaua

SEQ ID NO: 492405 - RNA, 19 nt, Homo sapiens
  misc_RNA (1)...(19): siRNA sense strand
gaugaaguguccgagcaau

SEQ ID NO: 492406 - RNA, 19 nt, Homo sapiens
  misc_RNA (1)...(19): siRNA sense strand
guauagacugcacaacaaa

SEQ ID NO: 492407 - RNA, 19 nt, Homo sapiens
  misc_RNA (1)...(19): siRNA sense strand
ugaaaucccaccuuaugug

SEQ ID NO: 492408 - RNA, 19 nt, Homo sapiens
  misc_RNA (1)...(19): siRNA sense strand
uuaccuguguugaucaaga

SEQ ID NO: 492409 - RNA, 19 nt, Homo sapiens
  misc_RNA (1)...(19): siRNA sense strand
ccaaaaugcuauauugcaa

SEQ ID NO: 492410 - RNA, 19 nt, Homo sapiens
  misc_RNA (1)...(19): siRNA sense strand
gagcagaccguuucuaccu

SEQ ID NO: 492411 - RNA, 19 nt, Homo sapiens
  misc_RNA (1)...(19): siRNA sense strand
agauggcucuuuguacauu

SEQ ID NO: 492412 - RNA, 19 nt, Homo sapiens
  misc_RNA (1)...(19): siRNA sense strand
gauagacguccugcucauu

SEQ ID NO: 492413 - RNA, 19 nt, Homo sapiens
  misc_RNA (1)...(19): siRNA sense strand
cuacggcucuggcucuaag

SEQ ID NO: 492414 - RNA, 19 nt, Homo sapiens
  misc_RNA (1)...(19): siRNA sense strand
aaauuucuccuguaccuau

SEQ ID NO: 492415 - RNA, 19 nt, Homo sapiens
  misc_RNA (1)...(19): siRNA sense strand
aaccaucuguuaccugugu

SEQ ID NO: 492416 - RNA, 19 nt, Homo sapiens
  misc_RNA (1)...(19): siRNA sense strand
acaaauuucuccuguaccu

SEQ ID NO: 492417 - RNA, 19 nt, Homo sapiens
  misc_RNA (1)...(19): siRNA sense strand
ccaaaagaacuucaucauu

SEQ ID NO: 492418 - RNA, 19 nt, Homo sapiens
  misc_RNA (1)...(19): siRNA sense strand
augggaagccugucacuuu

SEQ ID NO: 492419 - RNA, 19 nt, Homo sapiens
  misc_RNA (1)...(19): siRNA sense strand
acugaaaucccaccuuaug

SEQ ID NO: 492420 - RNA, 19 nt, Homo sapiens
  misc_RNA (1)...(19): siRNA sense strand
uagacugcacaacaaauuu

SEQ ID NO: 492421 - RNA, 19 nt, Homo sapiens
  misc_RNA (1)...(19): siRNA sense strand
aaacagauuacgaguguac

SEQ ID NO: 492422 - RNA, 19 nt, Homo sapiens
  misc_RNA (1)...(19): siRNA sense strand
gcucauuggaguuggcuau

SEQ ID NO: 492423 - RNA, 19 nt, Homo sapiens
  misc_RNA (1)...(19): siRNA sense strand
gaccagcagauggcucuuu

SEQ ID NO: 492424 - RNA, 19 nt, Homo sapiens
  misc_RNA (1)...(19): siRNA sense strand
ucuguuaccuguguugauc

SEQ ID NO: 492425 - RNA, 19 nt, Homo sapiens
  misc_RNA (1)...(19): siRNA sense strand
gauuacgaguguaccaacu

SEQ ID NO: 492426 - RNA, 19 nt, Homo sapiens
  misc_RNA (1)...(19): siRNA sense strand
ugauagacguccugcucau

SEQ ID NO: 492427 - RNA, 19 nt, Homo sapiens
  misc_RNA (1)...(19): siRNA sense strand
aaugcuauauugcaauugg

SEQ ID NO: 492428 - RNA, 19 nt, Homo sapiens
  misc_RNA (1)...(19): siRNA sense strand
uaaccguacuuuucccaaa

SEQ ID NO: 492429 - RNA, 19 nt, Homo sapiens
  misc_RNA (1)...(19): siRNA sense strand
ucauuggaguuggcuaugu

SEQ ID NO: 492430 - RNA, 19 nt, Homo sapiens
  misc_RNA (1)...(19): siRNA sense strand
auagacugcacaacaaauu

SEQ ID NO: 492431 - RNA, 19 nt, Homo sapiens
  misc_RNA (1)...(19): siRNA sense strand
caagacuucaaaucccaaa

SEQ ID NO: 492432 - RNA, 19 nt, Homo sapiens
  misc_RNA (1)...(19): siRNA sense strand
agacugcacaacaaauuuc

SEQ ID NO: 492433 - RNA, 19 nt, Homo sapiens
  misc_RNA (1)...(19): siRNA sense strand
accagcagauggcucuuug

SEQ ID NO: 492434 - RNA, 19 nt, Homo sapiens
  misc_RNA (1)...(19): siRNA sense strand
auagacguccugcucauug

SEQ ID NO: 492435 - RNA, 19 nt, Homo sapiens
  misc_RNA (1)...(19): siRNA sense strand
ugaaguguccgagcaaugg

SEQ ID NO: 492436 - RNA, 19 nt, Homo sapiens
  misc_RNA (1)...(19): siRNA sense strand
gcucuggcucuaagcauca

SEQ ID NO: 492437 - RNA, 19 nt, Homo sapiens
  misc_RNA (1)...(19): siRNA sense strand
caaauuucuccuguaccua

SEQ ID NO: 492438 - RNA, 19 nt, Homo sapiens
  misc_RNA (1)...(19): siRNA sense strand
gagcuuugcugucauuuaa

SEQ ID NO: 492439 - RNA, 19 nt, Homo sapiens
  misc_RNA (1)...(19): siRNA sense strand
gaacgagaauauagacauu

SEQ ID NO: 492440 - RNA, 19 nt, Homo sapiens
  misc_RNA (1)...(19): siRNA sense strand
gaccagcaauucagcaaua

SEQ ID NO: 492441 - RNA, 19 nt, Homo sapiens
  misc_RNA (1)...(19): siRNA sense strand
gcaauaacuuaccugcuaa

SEQ ID NO: 492442 - RNA, 19 nt, Homo sapiens
  misc_RNA (1)...(19): siRNA sense strand
gcaauucagcaauaacuua

SEQ ID NO: 492443 - RNA, 19 nt, Homo sapiens
  misc_RNA (1)...(19): siRNA sense strand
gcagggugcucgaaucauu

SEQ ID NO: 492444 - RNA, 19 nt, Homo sapiens
  misc_RNA (1)...(19): siRNA sense strand
gaggaugccuugaaucuca

SEQ ID NO: 492445 - RNA, 19 nt, Homo sapiens
  misc_RNA (1)...(19): siRNA sense strand
gacaggaagugguauuuau

SEQ ID NO: 492446 - RNA, 19 nt, Homo sapiens
  misc_RNA (1)...(19): siRNA sense strand
caucaugucagccuaaaua

SEQ ID NO: 492447 - RNA, 19 nt, Homo sapiens
  misc_RNA (1)...(19): siRNA sense strand
gaucauagcuuugcaaaau

SEQ ID NO: 492448 - RNA, 19 nt, Homo sapiens
  misc_RNA (1)...(19): siRNA sense strand
caucaaaccauuuccagua

SEQ ID NO: 492449 - RNA, 19 nt, Homo sapiens
  misc_RNA (1)...(19): siRNA sense strand
caaauggucccaaagugua

SEQ ID NO: 492450 - RNA, 19 nt, Homo sapiens
  misc_RNA (1)...(19): siRNA sense strand
gcaaugggaaugggaguua

SEQ ID NO: 492451 - RNA, 19 nt, Homo sapiens
  misc_RNA (1)...(19): siRNA sense strand
gaaacugcuucuacaagau

SEQ ID NO: 492452 - RNA, 19 nt, Homo sapiens
  misc_RNA (1)...(19): siRNA sense strand
cuacuaauuugacaacuug

SEQ ID NO: 492453 - RNA, 19 nt, Homo sapiens
  misc_RNA (1)...(19): siRNA sense strand
gucccaaaguguaucauua

SEQ ID NO: 492454 - RNA, 19 nt, Homo sapiens
  misc_RNA (1)...(19): siRNA sense strand
gaaagaugggcguuuggua

SEQ ID NO: 492455 - RNA, 19 nt, Homo sapiens
  misc_RNA (1)...(19): siRNA sense strand
caugucagccuaaauauga

SEQ ID NO: 492456 - RNA, 19 nt, Homo sapiens
  misc_RNA (1)...(19): siRNA sense strand
ccuaauggcuacuuucaau

SEQ ID NO: 492457 - RNA, 19 nt, Homo sapiens
  misc_RNA (1)...(19): siRNA sense strand
ccacagauuuggucacaca

SEQ ID NO: 492458 - RNA, 19 nt, Homo sapiens
  misc_RNA (1)...(19): siRNA sense strand
gaagaugcacuuuauggau

SEQ ID NO: 492459 - RNA, 19 nt, Homo sapiens
  misc_RNA (1)...(19): siRNA sense strand
aaacaagaauggaucaucu

SEQ ID NO: 492460 - RNA, 19 nt, Homo sapiens
  misc_RNA (1)...(19): siRNA sense strand
ggaaugggaguuaaucuuc

SEQ ID NO: 492461 - RNA, 19 nt, Homo sapiens
  misc_RNA (1)...(19): siRNA sense strand
gaaugaaguauacguucua

SEQ ID NO: 492462 - RNA, 19 nt, Homo sapiens
  misc_RNA (1)...(19): siRNA sense strand
gcugaaagaugggcguuug

SEQ ID NO: 492463 - RNA, 19 nt, Homo sapiens
  misc_RNA (1)...(19): siRNA sense strand
ucacgugcuuugauauauu

SEQ ID NO: 492464 - RNA, 19 nt, Homo sapiens
  misc_RNA (1)...(19): siRNA sense strand
gaaaaugcaggaaaccuua

SEQ ID NO: 492465 - RNA, 19 nt, Homo sapiens
  misc_RNA (1)...(19): siRNA sense strand
gcaggaaaccuuacagucu

SEQ ID NO: 492466 - RNA, 19 nt, Homo sapiens
  misc_RNA (1)...(19): siRNA sense strand
aaagaugggcguuugguaa

SEQ ID NO: 492467 - RNA, 19 nt, Homo sapiens
  misc_RNA (1)...(19): siRNA sense strand
ccacauguccuccuaaugg

SEQ ID NO: 492468 - RNA, 19 nt, Homo sapiens
  misc_RNA (1)...(19): siRNA sense strand
uccagaagaugcacuuuau

SEQ ID NO: 492469 - RNA, 19 nt, Homo sapiens
  misc_RNA (1)...(19): siRNA sense strand
uuacauggccgaaggagaa

SEQ ID NO: 492470 - RNA, 19 nt, Homo sapiens
  misc_RNA (1)...(19): siRNA sense strand
agaagagaaugaaguauac

SEQ ID NO: 492471 - RNA, 19 nt, Homo sapiens
  misc_RNA (1)...(19): siRNA sense strand
ggagcuuugcugucauuua

SEQ ID NO: 492472 - RNA, 19 nt, Homo sapiens
  misc_RNA (1)...(19): siRNA sense strand
gaaugggaguuaaucuucu

SEQ ID NO: 492473 - RNA, 19 nt, Homo sapiens
  misc_RNA (1)...(19): siRNA sense strand
ugaacuggauuccguguca

SEQ ID NO: 492474 - RNA, 19 nt, Homo sapiens
  misc_RNA (1)...(19): siRNA sense strand
aauuugaggugcugaaaga

SEQ ID NO: 492475 - RNA, 19 nt, Homo sapiens
  misc_RNA (1)...(19): siRNA sense strand
ugaaguauacguucuagga

SEQ ID NO: 492476 - RNA, 19 nt, Homo sapiens
  misc_RNA (1)...(19): siRNA sense strand
caaggacaacucuaucuau

SEQ ID NO: 492477 - RNA, 19 nt, Homo sapiens
  misc_RNA (1)...(19): siRNA sense strand
ucaggaggaugccuugaau

SEQ ID NO: 492478 - RNA, 19 nt, Homo sapiens
  misc_RNA (1)...(19): siRNA sense strand
ccaccaccaucaaaccauu

SEQ ID NO: 492479 - RNA, 19 nt, Homo sapiens
  misc_RNA (1)...(19): siRNA sense strand
uuugacagcuauugaauuc

SEQ ID NO: 492480 - RNA, 19 nt, Homo sapiens
  misc_RNA (1)...(19): siRNA sense strand
ugacaggaagugguauuua

SEQ ID NO: 492481 - RNA, 19 nt, Homo sapiens
  misc_RNA (1)...(19): siRNA sense strand
ccaaggacaacucuaucua

SEQ ID NO: 492482 - RNA, 19 nt, Homo sapiens
  misc_RNA (1)...(19): siRNA sense strand
gcacauuuggaacagagua

SEQ ID NO: 492483 - RNA, 19 nt, Homo sapiens
  misc_RNA (1)...(19): siRNA sense strand
gaacuggauuccgugucaa

SEQ ID NO: 492484 - RNA, 19 nt, Homo sapiens
  misc_RNA (1)...(19): siRNA sense strand
aaggacaacucuaucuaug

SEQ ID NO: 492485 - RNA, 19 nt, Homo sapiens
  misc_RNA (1)...(19): siRNA sense strand
guguuacccuggugaaaga

SEQ ID NO: 492486 - RNA, 19 nt, Homo sapiens
  misc_RNA (1)...(19): siRNA sense strand
uuucagagguggauucaca

SEQ ID NO: 492487 - RNA, 19 nt, Homo sapiens
  misc_RNA (1)...(19): siRNA sense strand
ccaaauggucccaaagugu

SEQ ID NO: 492488 - RNA, 19 nt, Homo sapiens
  misc_RNA (1)...(19): siRNA sense strand
caaugggaaugggaguuaa

SEQ ID NO: 492489 - RNA, 19 nt, Homo sapiens
  misc_RNA (1)...(19): siRNA sense strand
ucaauacaauaccaaugug

SEQ ID NO: 492490 - RNA, 19 nt, Homo sapiens
  misc_RNA (1)...(19): siRNA sense strand
ugacagcuauugaauucca

SEQ ID NO: 492491 - RNA, 19 nt, Homo sapiens
  misc_RNA (1)...(19): siRNA sense strand
cauugugacuccagaagau

SEQ ID NO: 492492 - RNA, 19 nt, Homo sapiens
  misc_RNA (1)...(19): siRNA sense strand
uggaucaucugggccuaua

SEQ ID NO: 492493 - RNA, 19 nt, Homo sapiens
  misc_RNA (1)...(19): siRNA sense strand
aaacugcuucuacaagauu

SEQ ID NO: 492494 - RNA, 19 nt, Homo sapiens
  misc_RNA (1)...(19): siRNA sense strand
ccuugaaucucaugaacga

SEQ ID NO: 492495 - RNA, 19 nt, Homo sapiens
  misc_RNA (1)...(19): siRNA sense strand
gugcuuugauauauucuuc

SEQ ID NO: 492496 - RNA, 19 nt, Homo sapiens
  misc_RNA (1)...(19): siRNA sense strand
ucuaugucuuggcaaauuu

SEQ ID NO: 492497 - RNA, 19 nt, Homo sapiens
  misc_RNA (1)...(19): siRNA sense strand
gggaaugggaguuaaucuu

SEQ ID NO: 492498 - RNA, 19 nt, Homo sapiens
  misc_RNA (1)...(19): siRNA sense strand
guacacaaaggacucacuu

SEQ ID NO: 492499 - RNA, 19 nt, Homo sapiens
  misc_RNA (1)...(19): siRNA sense strand
gggaguuaaucuucuugug

SEQ ID NO: 492500 - RNA, 19 nt, Homo sapiens
  misc_RNA (1)...(19): siRNA sense strand
uuuggaagguuuggcauuu

SEQ ID NO: 492501 - RNA, 19 nt, Homo sapiens
  misc_RNA (1)...(19): siRNA sense strand
agccggaguuggugacuuu

SEQ ID NO: 492502 - RNA, 19 nt, Homo sapiens
  misc_RNA (1)...(19): siRNA sense strand
uaccgaaauucaucuguca

SEQ ID NO: 492503 - RNA, 19 nt, Homo sapiens
  misc_RNA (1)...(19): siRNA sense strand
cagaagaugcacuuuaugg

SEQ ID NO: 492504 - RNA, 19 nt, Homo sapiens
  misc_RNA (1)...(19): siRNA sense strand
ucagcugccuggccaagga

SEQ ID NO: 492505 - RNA, 19 nt, Homo sapiens
  misc_RNA (1)...(19): siRNA sense strand
auuaugacaugaagacaga

SEQ ID NO: 492506 - RNA, 19 nt, Homo sapiens
  misc_RNA (1)...(19): siRNA sense strand
cagcuuggaugaacguuuu

SEQ ID NO: 492507 - RNA, 19 nt, Homo sapiens
  misc_RNA (1)...(19): siRNA sense strand
uuacccuggugaaagauuu

SEQ ID NO: 492508 - RNA, 19 nt, Homo sapiens
  misc_RNA (1)...(19): siRNA sense strand
caccgcauuuggaagguuu

SEQ ID NO: 492509 - RNA, 19 nt, Homo sapiens
  misc_RNA (1)...(19): siRNA sense strand
cuaauggcuacuuucaaua

SEQ ID NO: 492510 - RNA, 19 nt, Homo sapiens
  misc_RNA (1)...(19): siRNA sense strand
cuaucuaugucuuggcaaa

SEQ ID NO: 492511 - RNA, 19 nt, Homo sapiens
  misc_RNA (1)...(19): siRNA sense strand
aauaugacaggaaguggua

SEQ ID NO: 492512 - RNA, 19 nt, Homo sapiens
  misc_RNA (1)...(19): siRNA sense strand
ggaggugguacacaaagga

SEQ ID NO: 492513 - RNA, 19 nt, Homo sapiens
  misc_RNA (1)...(19): siRNA sense strand
aaggagcuuugcugucauu

SEQ ID NO: 492514 - RNA, 19 nt, Homo sapiens
  misc_RNA (1)...(19): siRNA sense strand
ucacacaccaguacaagca

SEQ ID NO: 492515 - RNA, 19 nt, Homo sapiens
  misc_RNA (1)...(19): siRNA sense strand
cacgugcuuugauauauuc

SEQ ID NO: 492516 - RNA, 19 nt, Homo sapiens
  misc_RNA (1)...(19): siRNA sense strand
gggccuauacuaacagugu

SEQ ID NO: 492517 - RNA, 19 nt, Homo sapiens
  misc_RNA (1)...(19): siRNA sense strand
caaaccauuuccaguacag

SEQ ID NO: 492518 - RNA, 19 nt, Homo sapiens
  misc_RNA (1)...(19): siRNA sense strand
cccaaaguguaucauuaug

SEQ ID NO: 492519 - RNA, 19 nt, Homo sapiens
  misc_RNA (1)...(19): siRNA sense strand
ugacaugaagacagaguug

SEQ ID NO: 492520 - RNA, 19 nt, Homo sapiens
  misc_RNA (1)...(19): siRNA sense strand
ucaaaccauuuccaguaca

SEQ ID NO: 492521 - RNA, 19 nt, Homo sapiens
  misc_RNA (1)...(19): siRNA sense strand
gguaaacaagaauggauca

SEQ ID NO: 492522 - RNA, 19 nt, Homo sapiens
  misc_RNA (1)...(19): siRNA sense strand
aagaugggcguuugguaaa

SEQ ID NO: 492523 - RNA, 19 nt, Homo sapiens
  misc_RNA (1)...(19): siRNA sense strand
ucugucaccuggaaaauuu

SEQ ID NO: 492524 - RNA, 19 nt, Homo sapiens
  misc_RNA (1)...(19): siRNA sense strand
gcuacagaauguuacaaaa

SEQ ID NO: 492525 - RNA, 19 nt, Homo sapiens
  misc_RNA (1)...(19): siRNA sense strand
acaacucuaucuaugucuu

SEQ ID NO: 492526 - RNA, 19 nt, Homo sapiens
  misc_RNA (1)...(19): siRNA sense strand
ucaucugggccuauacuaa

SEQ ID NO: 492527 - RNA, 19 nt, Homo sapiens
  misc_RNA (1)...(19): siRNA sense strand
cuacuuaccgaaauucauc

SEQ ID NO: 492528 - RNA, 19 nt, Homo sapiens
  misc_RNA (1)...(19): siRNA sense strand
gaaauuuaccagggaaacu

SEQ ID NO: 492529 - RNA, 19 nt, Homo sapiens
  misc_RNA (1)...(19): siRNA sense strand
cggaguuggugacuuucaa

SEQ ID NO: 492530 - RNA, 19 nt, Homo sapiens
  misc_RNA (1)...(19): siRNA sense strand
caacucuaucuaugucuug

SEQ ID NO: 492531 - RNA, 19 nt, Homo sapiens
  misc_RNA (1)...(19): siRNA sense strand
gaaggagaagagaguacug

SEQ ID NO: 492532 - RNA, 19 nt, Homo sapiens
  misc_RNA (1)...(19): siRNA sense strand
ccagggauggguucaacuu

SEQ ID NO: 492533 - RNA, 19 nt, Homo sapiens
  misc_RNA (1)...(19): siRNA sense strand
cuccagaagaugcacuuua

SEQ ID NO: 492534 - RNA, 19 nt, Homo sapiens
  misc_RNA (1)...(19): siRNA sense strand
gaagacagaguugggaaaa

SEQ ID NO: 492535 - RNA, 19 nt, Homo sapiens
  misc_RNA (1)...(19): siRNA sense strand
cuaaauaugacaggaagug

SEQ ID NO: 492536 - RNA, 19 nt, Homo sapiens
  misc_RNA (1)...(19): siRNA sense strand
uggcuacuuucaauacaau

SEQ ID NO: 492537 - RNA, 19 nt, Homo sapiens
  misc_RNA (1)...(19): siRNA sense strand
uaaacaagaauggaucauc

SEQ ID NO: 492538 - RNA, 19 nt, Homo sapiens
  misc_RNA (1)...(19): siRNA sense strand
gagcuuugcugucauuuaa

SEQ ID NO: 492539 - RNA, 19 nt, Homo sapiens
  misc_RNA (1)...(19): siRNA sense strand
gaacgagaauauagacauu

SEQ ID NO: 492540 - RNA, 19 nt, Homo sapiens
  misc_RNA (1)...(19): siRNA sense strand
gaccagcaauucagcaaua

SEQ ID NO: 492541 - RNA, 19 nt, Homo sapiens
  misc_RNA (1)...(19): siRNA sense strand
gcaauaacuuaccugcuaa

SEQ ID NO: 492542 - RNA, 19 nt, Homo sapiens
  misc_RNA (1)...(19): siRNA sense strand
gcaauucagcaauaacuua

SEQ ID NO: 492543 - RNA, 19 nt, Homo sapiens
  misc_RNA (1)...(19): siRNA sense strand
gcagggugcucgaaucauu

SEQ ID NO: 492544 - RNA, 19 nt, Homo sapiens
  misc_RNA (1)...(19): siRNA sense strand
gacaggaagugguauuuau

SEQ ID NO: 492545 - RNA, 19 nt, Homo sapiens
  misc_RNA (1)...(19): siRNA sense strand
caucaugucagccuaaaua

SEQ ID NO: 492546 - RNA, 19 nt, Homo sapiens
  misc_RNA (1)...(19): siRNA sense strand
gaucauagcuuugcaaaau

SEQ ID NO: 492547 - RNA, 19 nt, Homo sapiens
  misc_RNA (1)...(19): siRNA sense strand
caucaaaccauuuccagua

SEQ ID NO: 492548 - RNA, 19 nt, Homo sapiens
  misc_RNA (1)...(19): siRNA sense strand
caaauggucccaaagugua

SEQ ID NO: 492549 - RNA, 19 nt, Homo sapiens
  misc_RNA (1)...(19): siRNA sense strand
gcaaugggaaugggaguua

SEQ ID NO: 492550 - RNA, 19 nt, Homo sapiens
  misc_RNA (1)...(19): siRNA sense strand
gaaacugcuucuacaagau

SEQ ID NO: 492551 - RNA, 19 nt, Homo sapiens
  misc_RNA (1)...(19): siRNA sense strand
cuacuaauuugacaacuug

SEQ ID NO: 492552 - RNA, 19 nt, Homo sapiens
  misc_RNA (1)...(19): siRNA sense strand
gucccaaaguguaucauua

SEQ ID NO: 492553 - RNA, 19 nt, Homo sapiens
  misc_RNA (1)...(19): siRNA sense strand
gaaagaugggcguuuggua

SEQ ID NO: 492554 - RNA, 19 nt, Homo sapiens
  misc_RNA (1)...(19): siRNA sense strand
caugucagccuaaauauga

SEQ ID NO: 492555 - RNA, 19 nt, Homo sapiens
  misc_RNA (1)...(19): siRNA sense strand
ccuaauggcuacuuucaau

SEQ ID NO: 492556 - RNA, 19 nt, Homo sapiens
  misc_RNA (1)...(19): siRNA sense strand
ccacagauuuggucacaca

SEQ ID NO: 492557 - RNA, 19 nt, Homo sapiens
  misc_RNA (1)...(19): siRNA sense strand
gaagaugcacuuuauggau

SEQ ID NO: 492558 - RNA, 19 nt, Homo sapiens
  misc_RNA (1)...(19): siRNA sense strand
aaacaagaauggaucaucu

SEQ ID NO: 492559 - RNA, 19 nt, Homo sapiens
  misc_RNA (1)...(19): siRNA sense strand
ggaaugggaguuaaucuuc

SEQ ID NO: 492560 - RNA, 19 nt, Homo sapiens
  misc_RNA (1)...(19): siRNA sense strand
gaaugaaguauacguucua

SEQ ID NO: 492561 - RNA, 19 nt, Homo sapiens
  misc_RNA (1)...(19): siRNA sense strand
gcugaaagaugggcguuug

SEQ ID NO: 492562 - RNA, 19 nt, Homo sapiens
  misc_RNA (1)...(19): siRNA sense strand
ucacgugcuuugauauauu

SEQ ID NO: 492563 - RNA, 19 nt, Homo sapiens
  misc_RNA (1)...(19): siRNA sense strand
gaaaaugcaggaaaccuua

SEQ ID NO: 492564 - RNA, 19 nt, Homo sapiens
  misc_RNA (1)...(19): siRNA sense strand
gcaggaaaccuuacagucu

SEQ ID NO: 492565 - RNA, 19 nt, Homo sapiens
  misc_RNA (1)...(19): siRNA sense strand
aaagaugggcguuugguaa

SEQ ID NO: 492566 - RNA, 19 nt, Homo sapiens
  misc_RNA (1)...(19): siRNA sense strand
ccacauguccuccuaaugg

SEQ ID NO: 492567 - RNA, 19 nt, Homo sapiens
  misc_RNA (1)...(19): siRNA sense strand
uccagaagaugcacuuuau

SEQ ID NO: 492568 - RNA, 19 nt, Homo sapiens
  misc_RNA (1)...(19): siRNA sense strand
uuacauggccgaaggagaa

SEQ ID NO: 492569 - RNA, 19 nt, Homo sapiens
  misc_RNA (1)...(19): siRNA sense strand
agaagagaaugaaguauac

SEQ ID NO: 492570 - RNA, 19 nt, Homo sapiens
  misc_RNA (1)...(19): siRNA sense strand
ggagcuuugcugucauuua

SEQ ID NO: 492571 - RNA, 19 nt, Homo sapiens
  misc_RNA (1)...(19): siRNA sense strand
gaaugggaguuaaucuucu

SEQ ID NO: 492572 - RNA, 19 nt, Homo sapiens
  misc_RNA (1)...(19): siRNA sense strand
ugaacuggauuccguguca

SEQ ID NO: 492573 - RNA, 19 nt, Homo sapiens
  misc_RNA (1)...(19): siRNA sense strand
aauuugaggugcugaaaga

SEQ ID NO: 492574 - RNA, 19 nt, Homo sapiens
  misc_RNA (1)...(19): siRNA sense strand
ugaaguauacguucuagga

SEQ ID NO: 492575 - RNA, 19 nt, Homo sapiens
  misc_RNA (1)...(19): siRNA sense strand
caaggacaacucuaucuau

SEQ ID NO: 492576 - RNA, 19 nt, Homo sapiens
  misc_RNA (1)...(19): siRNA sense strand
ccaccaccaucaaaccauu

SEQ ID NO: 492577 - RNA, 19 nt, Homo sapiens
  misc_RNA (1)...(19): siRNA sense strand
uuugacagcuauugaauuc

SEQ ID NO: 492578 - RNA, 19 nt, Homo sapiens
  misc_RNA (1)...(19): siRNA sense strand
ugacaggaagugguauuua

SEQ ID NO: 492579 - RNA, 19 nt, Homo sapiens
  misc_RNA (1)...(19): siRNA sense strand
ccaaggacaacucuaucua

SEQ ID NO: 492580 - RNA, 19 nt, Homo sapiens
  misc_RNA (1)...(19): siRNA sense strand
gcacauuuggaacagagua

SEQ ID NO: 492581 - RNA, 19 nt, Homo sapiens
  misc_RNA (1)...(19): siRNA sense strand
gaacuggauuccgugucaa

SEQ ID NO: 492582 - RNA, 19 nt, Homo sapiens
  misc_RNA (1)...(19): siRNA sense strand
aaggacaacucuaucuaug

SEQ ID NO: 492583 - RNA, 19 nt, Homo sapiens
  misc_RNA (1)...(19): siRNA sense strand
guguuacccuggugaaaga

SEQ ID NO: 492584 - RNA, 19 nt, Homo sapiens
  misc_RNA (1)...(19): siRNA sense strand
uuucagagguggauucaca

SEQ ID NO: 492585 - RNA, 19 nt, Homo sapiens
  misc_RNA (1)...(19): siRNA sense strand
ccaaauggucccaaagugu

SEQ ID NO: 492586 - RNA, 19 nt, Homo sapiens
  misc_RNA (1)...(19): siRNA sense strand
caaugggaaugggaguuaa

SEQ ID NO: 492587 - RNA, 19 nt, Homo sapiens
  misc_RNA (1)...(19): siRNA sense strand
ucaauacaauaccaaugug

SEQ ID NO: 492588 - RNA, 19 nt, Homo sapiens
  misc_RNA (1)...(19): siRNA sense strand
ugacagcuauugaauucca

SEQ ID NO: 492589 - RNA, 19 nt, Homo sapiens
  misc_RNA (1)...(19): siRNA sense strand
ucuaugucuuggcaaauuu

SEQ ID NO: 492590 - RNA, 19 nt, Homo sapiens
  misc_RNA (1)...(19): siRNA sense strand
uggaucaucugggccuaua

SEQ ID NO: 492591 - RNA, 19 nt, Homo sapiens
  misc_RNA (1)...(19): siRNA sense strand
cauugugacuccagaagau

SEQ ID NO: 492592 - RNA, 19 nt, Homo sapiens
  misc_RNA (1)...(19): siRNA sense strand
aaacugcuucuacaagauu

SEQ ID NO: 492593 - RNA, 19 nt, Homo sapiens
  misc_RNA (1)...(19): siRNA sense strand
gugcuuugauauauucuuc

SEQ ID NO: 492594 - RNA, 19 nt, Homo sapiens
  misc_RNA (1)...(19): siRNA sense strand
gggaaugggaguuaaucuu

SEQ ID NO: 492595 - RNA, 19 nt, Homo sapiens
  misc_RNA (1)...(19): siRNA sense strand
guacacaaaggacucacuu

SEQ ID NO: 492596 - RNA, 19 nt, Homo sapiens
  misc_RNA (1)...(19): siRNA sense strand
gggaguuaaucuucuugug

SEQ ID NO: 492597 - RNA, 19 nt, Homo sapiens
  misc_RNA (1)...(19): siRNA sense strand
uuuggaagguuuggcauuu

SEQ ID NO: 492598 - RNA, 19 nt, Homo sapiens
  misc_RNA (1)...(19): siRNA sense strand
agccggaguuggugacuuu

SEQ ID NO: 492599 - RNA, 19 nt, Homo sapiens
  misc_RNA (1)...(19): siRNA sense strand
uaccgaaauucaucuguca

SEQ ID NO: 492600 - RNA, 19 nt, Homo sapiens
  misc_RNA (1)...(19): siRNA sense strand
cagaagaugcacuuuaugg

SEQ ID NO: 492601 - RNA, 19 nt, Homo sapiens
  misc_RNA (1)...(19): siRNA sense strand
cuaucuaugucuuggcaaa

SEQ ID NO: 492602 - RNA, 19 nt, Homo sapiens
  misc_RNA (1)...(19): siRNA sense strand
auuaugacaugaagacaga

SEQ ID NO: 492603 - RNA, 19 nt, Homo sapiens
  misc_RNA (1)...(19): siRNA sense strand
ucagcugccuggccaagga

SEQ ID NO: 492604 - RNA, 19 nt, Homo sapiens
  misc_RNA (1)...(19): siRNA sense strand
cagcuuggaugaacguuuu

SEQ ID NO: 492605 - RNA, 19 nt, Homo sapiens
  misc_RNA (1)...(19): siRNA sense strand
uuacccuggugaaagauuu

SEQ ID NO: 492606 - RNA, 19 nt, Homo sapiens
  misc_RNA (1)...(19): siRNA sense strand
caccgcauuuggaagguuu

SEQ ID NO: 492607 - RNA, 19 nt, Homo sapiens
  misc_RNA (1)...(19): siRNA sense strand
cuaauggcuacuuucaaua

SEQ ID NO: 492608 - RNA, 19 nt, Homo sapiens
  misc_RNA (1)...(19): siRNA sense strand
aauaugacaggaaguggua

SEQ ID NO: 492609 - RNA, 19 nt, Homo sapiens
  misc_RNA (1)...(19): siRNA sense strand
ggaggugguacacaaagga

SEQ ID NO: 492610 - RNA, 19 nt, Homo sapiens
  misc_RNA (1)...(19): siRNA sense strand
aaggagcuuugcugucauu

SEQ ID NO: 492611 - RNA, 19 nt, Homo sapiens
  misc_RNA (1)...(19): siRNA sense strand
ucacacaccaguacaagca

SEQ ID NO: 492612 - RNA, 19 nt, Homo sapiens
  misc_RNA (1)...(19): siRNA sense strand
cacgugcuuugauauauuc

SEQ ID NO: 492613 - RNA, 19 nt, Homo sapiens
  misc_RNA (1)...(19): siRNA sense strand
gggccuauacuaacagugu

SEQ ID NO: 492614 - RNA, 19 nt, Homo sapiens
  misc_RNA (1)...(19): siRNA sense strand
caaaccauuuccaguacag

SEQ ID NO: 492615 - RNA, 19 nt, Homo sapiens
  misc_RNA (1)...(19): siRNA sense strand
cccaaaguguaucauuaug

SEQ ID NO: 492616 - RNA, 19 nt, Homo sapiens
  misc_RNA (1)...(19): siRNA sense strand
ugacaugaagacagaguug

SEQ ID NO: 492617 - RNA, 19 nt, Homo sapiens
  misc_RNA (1)...(19): siRNA sense strand
ucaaaccauuuccaguaca

SEQ ID NO: 492618 - RNA, 19 nt, Homo sapiens
  misc_RNA (1)...(19): siRNA sense strand
gguaaacaagaauggauca

SEQ ID NO: 492619 - RNA, 19 nt, Homo sapiens
  misc_RNA (1)...(19): siRNA sense strand
aagaugggcguuugguaaa

SEQ ID NO: 492620 - RNA, 19 nt, Homo sapiens
  misc_RNA (1)...(19): siRNA sense strand
ucugucaccuggaaaauuu

SEQ ID NO: 492621 - RNA, 19 nt, Homo sapiens
  misc_RNA (1)...(19): siRNA sense strand
gcuacagaauguuacaaaa

SEQ ID NO: 492622 - RNA, 19 nt, Homo sapiens
  misc_RNA (1)...(19): siRNA sense strand
cggaguuggugacuuucaa

SEQ ID NO: 492623 - RNA, 19 nt, Homo sapiens
  misc_RNA (1)...(19): siRNA sense strand
ucaucugggccuauacuaa

SEQ ID NO: 492624 - RNA, 19 nt, Homo sapiens
  misc_RNA (1)...(19): siRNA sense strand
cuacuuaccgaaauucauc

SEQ ID NO: 492625 - RNA, 19 nt, Homo sapiens
  misc_RNA (1)...(19): siRNA sense strand
gaaauuuaccagggaaacu

SEQ ID NO: 492626 - RNA, 19 nt, Homo sapiens
  misc_RNA (1)...(19): siRNA sense strand
acaacucuaucuaugucuu

SEQ ID NO: 492627 - RNA, 19 nt, Homo sapiens
  misc_RNA (1)...(19): siRNA sense strand
uggcuacuuucaauacaau

SEQ ID NO: 492628 - RNA, 19 nt, Homo sapiens
  misc_RNA (1)...(19): siRNA sense strand
gaaggagaagagaguacug

SEQ ID NO: 492629 - RNA, 19 nt, Homo sapiens
  misc_RNA (1)...(19): siRNA sense strand
ccagggauggguucaacuu

SEQ ID NO: 492630 - RNA, 19 nt, Homo sapiens
  misc_RNA (1)...(19): siRNA sense strand
gaagacagaguugggaaaa

SEQ ID NO: 492631 - RNA, 19 nt, Homo sapiens
  misc_RNA (1)...(19): siRNA sense strand
caacucuaucuaugucuug

SEQ ID NO: 492632 - RNA, 19 nt, Homo sapiens
  misc_RNA (1)...(19): siRNA sense strand
cuaaauaugacaggaagug

SEQ ID NO: 492633 - RNA, 19 nt, Homo sapiens
  misc_RNA (1)...(19): siRNA sense strand
cuccagaagaugcacuuua

SEQ ID NO: 492634 - RNA, 19 nt, Homo sapiens
  misc_RNA (1)...(19): siRNA sense strand
aaugggaguuaaucuucuu

SEQ ID NO: 492635 - RNA, 19 nt, Homo sapiens
  misc_RNA (1)...(19): siRNA sense strand
uaaacaagaauggaucauc

SEQ ID NO: 492636 - RNA, 19 nt, Homo sapiens
  misc_RNA (1)...(19): siRNA sense strand
auucaucugucaccuggaa

SEQ ID NO: 492637 - RNA, 19 nt, Homo sapiens
  misc_RNA (1)...(19): siRNA sense strand
agggauggguucaacuuca

SEQ ID NO: 492638 - RNA, 19 nt, Homo sapiens
  misc_RNA (1)...(19): siRNA sense strand
uaaaggaacuggagaaaga

SEQ ID NO: 492639 - RNA, 19 nt, Homo sapiens
  misc_RNA (1)...(19): siRNA sense strand
gaauugcgauggagaagaa

SEQ ID NO: 492640 - RNA, 19 nt, Homo sapiens
  misc_RNA (1)...(19): siRNA sense strand
gagcuucgcuucagggaaa

SEQ ID NO: 492641 - RNA, 19 nt, Homo sapiens
  misc_RNA (1)...(19): siRNA sense strand
gaagaaagaaagugucauu

SEQ ID NO: 492642 - RNA, 19 nt, Homo sapiens
  misc_RNA (1)...(19): siRNA sense strand
ggaagaaccaccuuuguga

SEQ ID NO: 492643 - RNA, 19 nt, Homo sapiens
  misc_RNA (1)...(19): siRNA sense strand
gaacagaggagcagaugga

SEQ ID NO: 492644 - RNA, 19 nt, Homo sapiens
  misc_RNA (1)...(19): siRNA sense strand
agaaauugcucuaaaggaa

SEQ ID NO: 492645 - RNA, 19 nt, Homo sapiens
  misc_RNA (1)...(19): siRNA sense strand
gaacauguccugcucuauc

SEQ ID NO: 492646 - RNA, 19 nt, Homo sapiens
  misc_RNA (1)...(19): siRNA sense strand
gaacgggaaacaagagaaa

SEQ ID NO: 492647 - RNA, 19 nt, Homo sapiens
  misc_RNA (1)...(19): siRNA sense strand
gaucgcacaucuacacaug

SEQ ID NO: 492648 - RNA, 19 nt, Homo sapiens
  misc_RNA (1)...(19): siRNA sense strand
caagaagaauugcgaugga

SEQ ID NO: 492649 - RNA, 19 nt, Homo sapiens
  misc_RNA (1)...(19): siRNA sense strand
ccgcaguguuuguguauaa

SEQ ID NO: 492650 - RNA, 19 nt, Homo sapiens
  misc_RNA (1)...(19): siRNA sense strand
ggagaaagaacgugugcaa

SEQ ID NO: 492651 - RNA, 19 nt, Homo sapiens
  misc_RNA (1)...(19): siRNA sense strand
gaaccaccuuugugagcaa

SEQ ID NO: 492652 - RNA, 19 nt, Homo sapiens
  misc_RNA (1)...(19): siRNA sense strand
caacaucacagcccaggaa

SEQ ID NO: 492653 - RNA, 19 nt, Homo sapiens
  misc_RNA (1)...(19): siRNA sense strand
gauaggauucucccuuuga

SEQ ID NO: 492654 - RNA, 19 nt, Homo sapiens
  misc_RNA (1)...(19): siRNA sense strand
gaagaauugcgauggagaa

SEQ ID NO: 492655 - RNA, 19 nt, Homo sapiens
  misc_RNA (1)...(19): siRNA sense strand
gagacaguguugagaggaa

SEQ ID NO: 492656 - RNA, 19 nt, Homo sapiens
  misc_RNA (1)...(19): siRNA sense strand
guaugcaucuauuggauca

SEQ ID NO: 492657 - RNA, 19 nt, Homo sapiens
  misc_RNA (1)...(19): siRNA sense strand
cugauaggauucucccuuu

SEQ ID NO: 492658 - RNA, 19 nt, Homo sapiens
  misc_RNA (1)...(19): siRNA sense strand
ggucucagcccaguuuauu

SEQ ID NO: 492659 - RNA, 19 nt, Homo sapiens
  misc_RNA (1)...(19): siRNA sense strand
gagaaauugcucuaaagga

SEQ ID NO: 492660 - RNA, 19 nt, Homo sapiens
  misc_RNA (1)...(19): siRNA sense strand
ggaccuuggagaugcauaa

SEQ ID NO: 492661 - RNA, 19 nt, Homo sapiens
  misc_RNA (1)...(19): siRNA sense strand
cuaugaagcuggagauguc

SEQ ID NO: 492662 - RNA, 19 nt, Homo sapiens
  misc_RNA (1)...(19): siRNA sense strand
caucugcccugcacucaca

SEQ ID NO: 492663 - RNA, 19 nt, Homo sapiens
  misc_RNA (1)...(19): siRNA sense strand
aggagcagauggaggagua

SEQ ID NO: 492664 - RNA, 19 nt, Homo sapiens
  misc_RNA (1)...(19): siRNA sense strand
cagcguggcccuggucaua

SEQ ID NO: 492665 - RNA, 19 nt, Homo sapiens
  misc_RNA (1)...(19): siRNA sense strand
gagaaagaacgugugcaaa

SEQ ID NO: 492666 - RNA, 19 nt, Homo sapiens
  misc_RNA (1)...(19): siRNA sense strand
ggaggaguaccgaggaaga

SEQ ID NO: 492667 - RNA, 19 nt, Homo sapiens
  misc_RNA (1)...(19): siRNA sense strand
gcccacugaucccaucuug

SEQ ID NO: 492668 - RNA, 19 nt, Homo sapiens
  misc_RNA (1)...(19): siRNA sense strand
gaggaagaaccaccuuugu

SEQ ID NO: 492669 - RNA, 19 nt, Homo sapiens
  misc_RNA (1)...(19): siRNA sense strand
gggagagcgugccugacaa

SEQ ID NO: 492670 - RNA, 19 nt, Homo sapiens
  misc_RNA (1)...(19): siRNA sense strand
cggcuggagugcauaucua

SEQ ID NO: 492671 - RNA, 19 nt, Homo sapiens
  misc_RNA (1)...(19): siRNA sense strand
ggucauacacaacaucaca

SEQ ID NO: 492672 - RNA, 19 nt, Homo sapiens
  misc_RNA (1)...(19): siRNA sense strand
gaugucuccuucuacaaca

SEQ ID NO: 492673 - RNA, 19 nt, Homo sapiens
  misc_RNA (1)...(19): siRNA sense strand
ucaacaaacuccaaaagga

SEQ ID NO: 492674 - RNA, 19 nt, Homo sapiens
  misc_RNA (1)...(19): siRNA sense strand
uggcaggacuaggcucuaa

SEQ ID NO: 492675 - RNA, 19 nt, Homo sapiens
  misc_RNA (1)...(19): siRNA sense strand
cgaggaagaaccaccuuug

SEQ ID NO: 492676 - RNA, 19 nt, Homo sapiens
  misc_RNA (1)...(19): siRNA sense strand
cagagagauucgacaguca

SEQ ID NO: 492677 - RNA, 19 nt, Homo sapiens
  misc_RNA (1)...(19): siRNA sense strand
ucuauuggaucaacaaacu

SEQ ID NO: 492678 - RNA, 19 nt, Homo sapiens
  misc_RNA (1)...(19): siRNA sense strand
ucagaggaccggagaagug

SEQ ID NO: 492679 - RNA, 19 nt, Homo sapiens
  misc_RNA (1)...(19): siRNA sense strand
gagaacagaggagcagaug

SEQ ID NO: 492680 - RNA, 19 nt, Homo sapiens
  misc_RNA (1)...(19): siRNA sense strand
ggacccaccagagccuaua

SEQ ID NO: 492681 - RNA, 19 nt, Homo sapiens
  misc_RNA (1)...(19): siRNA sense strand
gaggaccggagaaguguga

SEQ ID NO: 492682 - RNA, 19 nt, Homo sapiens
  misc_RNA (1)...(19): siRNA sense strand
gguugcgccugcccugaaa

SEQ ID NO: 492683 - RNA, 19 nt, Homo sapiens
  misc_RNA (1)...(19): siRNA sense strand
ugauaggauucucccuuug

SEQ ID NO: 492684 - RNA, 19 nt, Homo sapiens
  misc_RNA (1)...(19): siRNA sense strand
aagagggccugacacuuca

SEQ ID NO: 492685 - RNA, 19 nt, Homo sapiens
  misc_RNA (1)...(19): siRNA sense strand
cagaagaaagaaaguguca

SEQ ID NO: 492686 - RNA, 19 nt, Homo sapiens
  misc_RNA (1)...(19): siRNA sense strand
gaggaguaccgaggaagaa

SEQ ID NO: 492687 - RNA, 19 nt, Homo sapiens
  misc_RNA (1)...(19): siRNA sense strand
ucgcuucagggaaacauua

SEQ ID NO: 492688 - RNA, 19 nt, Homo sapiens
  misc_RNA (1)...(19): siRNA sense strand
ggaaacaagagaaauugcu

SEQ ID NO: 492689 - RNA, 19 nt, Homo sapiens
  misc_RNA (1)...(19): siRNA sense strand
caacaaacuccaaaaggaa

SEQ ID NO: 492690 - RNA, 19 nt, Homo sapiens
  misc_RNA (1)...(19): siRNA sense strand
gcucuaagccccucauuuc

SEQ ID NO: 492691 - RNA, 19 nt, Homo sapiens
  misc_RNA (1)...(19): siRNA sense strand
ggacuaugaagcuggagau

SEQ ID NO: 492692 - RNA, 19 nt, Homo sapiens
  misc_RNA (1)...(19): siRNA sense strand
aacauguccugcucuauca

SEQ ID NO: 492693 - RNA, 19 nt, Homo sapiens
  misc_RNA (1)...(19): siRNA sense strand
agacaguguugagaggaaa

SEQ ID NO: 492694 - RNA, 19 nt, Homo sapiens
  misc_RNA (1)...(19): siRNA sense strand
auaggauucucccuuugaa

SEQ ID NO: 492695 - RNA, 19 nt, Homo sapiens
  misc_RNA (1)...(19): siRNA sense strand
gcguggcccuggucauaca

SEQ ID NO: 492696 - RNA, 19 nt, Homo sapiens
  misc_RNA (1)...(19): siRNA sense strand
agaaagaacgugugcaaaa

SEQ ID NO: 492697 - RNA, 19 nt, Homo sapiens
  misc_RNA (1)...(19): siRNA sense strand
gcauccggcuggagugcau

SEQ ID NO: 492698 - RNA, 19 nt, Homo sapiens
  misc_RNA (1)...(19): siRNA sense strand
caccacggcugugaucauc

SEQ ID NO: 492699 - RNA, 19 nt, Homo sapiens
  misc_RNA (1)...(19): siRNA sense strand
gaccggagaagugugagaa

SEQ ID NO: 492700 - RNA, 19 nt, Homo sapiens
  misc_RNA (1)...(19): siRNA sense strand
gggucacggugccugaaga

SEQ ID NO: 492701 - RNA, 19 nt, Homo sapiens
  misc_RNA (1)...(19): siRNA sense strand
uaaagguggcagagagaga

SEQ ID NO: 492702 - RNA, 19 nt, Homo sapiens
  misc_RNA (1)...(19): siRNA sense strand
ugacaacccagagagauuc

SEQ ID NO: 492703 - RNA, 19 nt, Homo sapiens
  misc_RNA (1)...(19): siRNA sense strand
acauggaggugcggugguu

SEQ ID NO: 492704 - RNA, 19 nt, Homo sapiens
  misc_RNA (1)...(19): siRNA sense strand
gcacucacaggagccaaug

SEQ ID NO: 492705 - RNA, 19 nt, Homo sapiens
  misc_RNA (1)...(19): siRNA sense strand
uauaaagguggcagagaga

SEQ ID NO: 492706 - RNA, 19 nt, Homo sapiens
  misc_RNA (1)...(19): siRNA sense strand
aaauugcucuaaaggaacu

SEQ ID NO: 492707 - RNA, 19 nt, Homo sapiens
  misc_RNA (1)...(19): siRNA sense strand
cauugugguuauucugaug

SEQ ID NO: 492708 - RNA, 19 nt, Homo sapiens
  misc_RNA (1)...(19): siRNA sense strand
gccagaagaaagaaagugu

SEQ ID NO: 492709 - RNA, 19 nt, Homo sapiens
  misc_RNA (1)...(19): siRNA sense strand
cagacggccucuucauggu

SEQ ID NO: 492710 - RNA, 19 nt, Homo sapiens
  misc_RNA (1)...(19): siRNA sense strand
gcaucuauuggaucaacaa

SEQ ID NO: 492711 - RNA, 19 nt, Homo sapiens
  misc_RNA (1)...(19): siRNA sense strand
gccugacacuucacagagu

SEQ ID NO: 492712 - RNA, 19 nt, Homo sapiens
  misc_RNA (1)...(19): siRNA sense strand
aaagguggcagagagagaa

SEQ ID NO: 492713 - RNA, 19 nt, Homo sapiens
  misc_RNA (1)...(19): siRNA sense strand
cgggaaacaagagaaauug

SEQ ID NO: 492714 - RNA, 19 nt, Homo sapiens
  misc_RNA (1)...(19): siRNA sense strand
gcauaucuagaggguggua

SEQ ID NO: 492715 - RNA, 19 nt, Homo sapiens
  misc_RNA (1)...(19): siRNA sense strand
gggccugacacuucacaga

SEQ ID NO: 492716 - RNA, 19 nt, Homo sapiens
  misc_RNA (1)...(19): siRNA sense strand
ucucagcccaguuuauugu

SEQ ID NO: 492717 - RNA, 19 nt, Homo sapiens
  misc_RNA (1)...(19): siRNA sense strand
acguuacgcugccaucugu

SEQ ID NO: 492718 - RNA, 19 nt, Homo sapiens
  misc_RNA (1)...(19): siRNA sense strand
ccguaugcaucuauuggau

SEQ ID NO: 492719 - RNA, 19 nt, Homo sapiens
  misc_RNA (1)...(19): siRNA sense strand
gccuaucauugugguuauu

SEQ ID NO: 492720 - RNA, 19 nt, Homo sapiens
  misc_RNA (1)...(19): siRNA sense strand
ggcccugccuaucauugug

SEQ ID NO: 492721 - RNA, 19 nt, Homo sapiens
  misc_RNA (1)...(19): siRNA sense strand
acaagucugugaggaacau

SEQ ID NO: 492722 - RNA, 19 nt, Homo sapiens
  misc_RNA (1)...(19): siRNA sense strand
ucauugugguuauucugau

SEQ ID NO: 492723 - RNA, 19 nt, Homo sapiens
  misc_RNA (1)...(19): siRNA sense strand
ggagaaaacacuacguuac

SEQ ID NO: 492724 - RNA, 19 nt, Homo sapiens
  misc_RNA (1)...(19): siRNA sense strand
uaaaggaacuggagaaaga

SEQ ID NO: 492725 - RNA, 19 nt, Homo sapiens
  misc_RNA (1)...(19): siRNA sense strand
gaauugcgauggagaagaa

SEQ ID NO: 492726 - RNA, 19 nt, Homo sapiens
  misc_RNA (1)...(19): siRNA sense strand
gaagaaagaaagugucauu

SEQ ID NO: 492727 - RNA, 19 nt, Homo sapiens
  misc_RNA (1)...(19): siRNA sense strand
ggaagaaccaccuuuguga

SEQ ID NO: 492728 - RNA, 19 nt, Homo sapiens
  misc_RNA (1)...(19): siRNA sense strand
gaacagaggagcagaugga

SEQ ID NO: 492729 - RNA, 19 nt, Homo sapiens
  misc_RNA (1)...(19): siRNA sense strand
agaaauugcucuaaaggaa

SEQ ID NO: 492730 - RNA, 19 nt, Homo sapiens
  misc_RNA (1)...(19): siRNA sense strand
gaacauguccugcucuauc

SEQ ID NO: 492731 - RNA, 19 nt, Homo sapiens
  misc_RNA (1)...(19): siRNA sense strand
gaacgggaaacaagagaaa

SEQ ID NO: 492732 - RNA, 19 nt, Homo sapiens
  misc_RNA (1)...(19): siRNA sense strand
caagaagaauugcgaugga

SEQ ID NO: 492733 - RNA, 19 nt, Homo sapiens
  misc_RNA (1)...(19): siRNA sense strand
ccgcaguguuuguguauaa

SEQ ID NO: 492734 - RNA, 19 nt, Homo sapiens
  misc_RNA (1)...(19): siRNA sense strand
ggagaaagaacgugugcaa

SEQ ID NO: 492735 - RNA, 19 nt, Homo sapiens
  misc_RNA (1)...(19): siRNA sense strand
gaaccaccuuugugagcaa

SEQ ID NO: 492736 - RNA, 19 nt, Homo sapiens
  misc_RNA (1)...(19): siRNA sense strand
caacaucacagcccaggaa

SEQ ID NO: 492737 - RNA, 19 nt, Homo sapiens
  misc_RNA (1)...(19): siRNA sense strand
gaagaauugcgauggagaa

SEQ ID NO: 492738 - RNA, 19 nt, Homo sapiens
  misc_RNA (1)...(19): siRNA sense strand
guaugcaucuauuggauca

SEQ ID NO: 492739 - RNA, 19 nt, Homo sapiens
  misc_RNA (1)...(19): siRNA sense strand
ggucucagcccaguuuauu

SEQ ID NO: 492740 - RNA, 19 nt, Homo sapiens
  misc_RNA (1)...(19): siRNA sense strand
gagaaauugcucuaaagga

SEQ ID NO: 492741 - RNA, 19 nt, Homo sapiens
  misc_RNA (1)...(19): siRNA sense strand
aggagcagauggaggagua

SEQ ID NO: 492742 - RNA, 19 nt, Homo sapiens
  misc_RNA (1)...(19): siRNA sense strand
cagcguggcccuggucaua

SEQ ID NO: 492743 - RNA, 19 nt, Homo sapiens
  misc_RNA (1)...(19): siRNA sense strand
gagaaagaacgugugcaaa

SEQ ID NO: 492744 - RNA, 19 nt, Homo sapiens
  misc_RNA (1)...(19): siRNA sense strand
ggaggaguaccgaggaaga

SEQ ID NO: 492745 - RNA, 19 nt, Homo sapiens
  misc_RNA (1)...(19): siRNA sense strand
gcccacugaucccaucuug

SEQ ID NO: 492746 - RNA, 19 nt, Homo sapiens
  misc_RNA (1)...(19): siRNA sense strand
gaggaagaaccaccuuugu

SEQ ID NO: 492747 - RNA, 19 nt, Homo sapiens
  misc_RNA (1)...(19): siRNA sense strand
cggcuggagugcauaucua

SEQ ID NO: 492748 - RNA, 19 nt, Homo sapiens
  misc_RNA (1)...(19): siRNA sense strand
ggucauacacaacaucaca

SEQ ID NO: 492749 - RNA, 19 nt, Homo sapiens
  misc_RNA (1)...(19): siRNA sense strand
ucaacaaacuccaaaagga

SEQ ID NO: 492750 - RNA, 19 nt, Homo sapiens
  misc_RNA (1)...(19): siRNA sense strand
uggcaggacuaggcucuaa

SEQ ID NO: 492751 - RNA, 19 nt, Homo sapiens
  misc_RNA (1)...(19): siRNA sense strand
cgaggaagaaccaccuuug

SEQ ID NO: 492752 - RNA, 19 nt, Homo sapiens
  misc_RNA (1)...(19): siRNA sense strand
ucuauuggaucaacaaacu

SEQ ID NO: 492753 - RNA, 19 nt, Homo sapiens
  misc_RNA (1)...(19): siRNA sense strand
gagaacagaggagcagaug

SEQ ID NO: 492754 - RNA, 19 nt, Homo sapiens
  misc_RNA (1)...(19): siRNA sense strand
gguugcgccugcccugaaa

SEQ ID NO: 492755 - RNA, 19 nt, Homo sapiens
  misc_RNA (1)...(19): siRNA sense strand
cagaagaaagaaaguguca

SEQ ID NO: 492756 - RNA, 19 nt, Homo sapiens
  misc_RNA (1)...(19): siRNA sense strand
gaggaguaccgaggaagaa

SEQ ID NO: 492757 - RNA, 19 nt, Homo sapiens
  misc_RNA (1)...(19): siRNA sense strand
ggaaacaagagaaauugcu

SEQ ID NO: 492758 - RNA, 19 nt, Homo sapiens
  misc_RNA (1)...(19): siRNA sense strand
caacaaacuccaaaaggaa

SEQ ID NO: 492759 - RNA, 19 nt, Homo sapiens
  misc_RNA (1)...(19): siRNA sense strand
gcucuaagccccucauuuc

SEQ ID NO: 492760 - RNA, 19 nt, Homo sapiens
  misc_RNA (1)...(19): siRNA sense strand
aacauguccugcucuauca

SEQ ID NO: 492761 - RNA, 19 nt, Homo sapiens
  misc_RNA (1)...(19): siRNA sense strand
gcguggcccuggucauaca

SEQ ID NO: 492762 - RNA, 19 nt, Homo sapiens
  misc_RNA (1)...(19): siRNA sense strand
agaaagaacgugugcaaaa

SEQ ID NO: 492763 - RNA, 19 nt, Homo sapiens
  misc_RNA (1)...(19): siRNA sense strand
gcauccggcuggagugcau

SEQ ID NO: 492764 - RNA, 19 nt, Homo sapiens
  misc_RNA (1)...(19): siRNA sense strand
caccacggcugugaucauc

SEQ ID NO: 492765 - RNA, 19 nt, Homo sapiens
  misc_RNA (1)...(19): siRNA sense strand
uaaagguggcagagagaga

SEQ ID NO: 492766 - RNA, 19 nt, Homo sapiens
  misc_RNA (1)...(19): siRNA sense strand
uauaaagguggcagagaga

SEQ ID NO: 492767 - RNA, 19 nt, Homo sapiens
  misc_RNA (1)...(19): siRNA sense strand
aaauugcucuaaaggaacu

SEQ ID NO: 492768 - RNA, 19 nt, Homo sapiens
  misc_RNA (1)...(19): siRNA sense strand
cauugugguuauucugaug

SEQ ID NO: 492769 - RNA, 19 nt, Homo sapiens
  misc_RNA (1)...(19): siRNA sense strand
gccagaagaaagaaagugu

SEQ ID NO: 492770 - RNA, 19 nt, Homo sapiens
  misc_RNA (1)...(19): siRNA sense strand
cagacggccucuucauggu

SEQ ID NO: 492771 - RNA, 19 nt, Homo sapiens
  misc_RNA (1)...(19): siRNA sense strand
acauggaggugcggugguu

SEQ ID NO: 492772 - RNA, 19 nt, Homo sapiens
  misc_RNA (1)...(19): siRNA sense strand
gcaucuauuggaucaacaa

SEQ ID NO: 492773 - RNA, 19 nt, Homo sapiens
  misc_RNA (1)...(19): siRNA sense strand
aaagguggcagagagagaa

SEQ ID NO: 492774 - RNA, 19 nt, Homo sapiens
  misc_RNA (1)...(19): siRNA sense strand
cgggaaacaagagaaauug

SEQ ID NO: 492775 - RNA, 19 nt, Homo sapiens
  misc_RNA (1)...(19): siRNA sense strand
acguuacgcugccaucugu

SEQ ID NO: 492776 - RNA, 19 nt, Homo sapiens
  misc_RNA (1)...(19): siRNA sense strand
ucucagcccaguuuauugu

SEQ ID NO: 492777 - RNA, 19 nt, Homo sapiens
  misc_RNA (1)...(19): siRNA sense strand
ccguaugcaucuauuggau

SEQ ID NO: 492778 - RNA, 19 nt, Homo sapiens
  misc_RNA (1)...(19): siRNA sense strand
gccuaucauugugguuauu

SEQ ID NO: 492779 - RNA, 19 nt, Homo sapiens
  misc_RNA (1)...(19): siRNA sense strand
ggcccugccuaucauugug

SEQ ID NO: 492780 - RNA, 19 nt, Homo sapiens
  misc_RNA (1)...(19): siRNA sense strand
acaagucugugaggaacau

SEQ ID NO: 492781 - RNA, 19 nt, Homo sapiens
  misc_RNA (1)...(19): siRNA sense strand
gcauaucuagaggguggua

SEQ ID NO: 492782 - RNA, 19 nt, Homo sapiens
  misc_RNA (1)...(19): siRNA sense strand
ggagaaaacacuacguuac

SEQ ID NO: 492783 - RNA, 19 nt, Homo sapiens
  misc_RNA (1)...(19): siRNA sense strand
ucauugugguuauucugau

SEQ ID NO: 492784 - RNA, 19 nt, Homo sapiens
  misc_RNA (1)...(19): siRNA sense strand
ggaggaggaugcagaaauc

SEQ ID NO: 492785 - RNA, 19 nt, Homo sapiens
  misc_RNA (1)...(19): siRNA sense strand
gggcagacccagcaacaua

SEQ ID NO: 492786 - RNA, 19 nt, Homo sapiens
  misc_RNA (1)...(19): siRNA sense strand
gaucacagcucaggaagca

SEQ ID NO: 492787 - RNA, 19 nt, Homo sapiens
  misc_RNA (1)...(19): siRNA sense strand
ggaagaagaggagcuguuu

SEQ ID NO: 492788 - RNA, 19 nt, Homo sapiens
  misc_RNA (1)...(19): siRNA sense strand
gcaggagucuacagugaug

SEQ ID NO: 492789 - RNA, 19 nt, Homo sapiens
  misc_RNA (1)...(19): siRNA sense strand
caagaucuuuguggaguuu

SEQ ID NO: 492790 - RNA, 19 nt, Homo sapiens
  misc_RNA (1)...(19): siRNA sense strand
gcacagacuccaucaagau

SEQ ID NO: 492791 - RNA, 19 nt, Homo sapiens
  misc_RNA (1)...(19): siRNA sense strand
gcagaaaucauugucaaga

SEQ ID NO: 492792 - RNA, 19 nt, Homo sapiens
  misc_RNA (1)...(19): siRNA sense strand
ggaggaugcagaaaucauu

SEQ ID NO: 492793 - RNA, 19 nt, Homo sapiens
  misc_RNA (1)...(19): siRNA sense strand
gcaaggugguggcugaagu

SEQ ID NO: 492794 - RNA, 19 nt, Homo sapiens
  misc_RNA (1)...(19): siRNA sense strand
gaugcugugucuuccauga

SEQ ID NO: 492795 - RNA, 19 nt, Homo sapiens
  misc_RNA (1)...(19): siRNA sense strand
aagcaggagucuacaguga

SEQ ID NO: 492796 - RNA, 19 nt, Homo sapiens
  misc_RNA (1)...(19): siRNA sense strand
ggugguggcugaaguguac

SEQ ID NO: 492797 - RNA, 19 nt, Homo sapiens
  misc_RNA (1)...(19): siRNA sense strand
caagaucacagcucaggaa

SEQ ID NO: 492798 - RNA, 19 nt, Homo sapiens
  misc_RNA (1)...(19): siRNA sense strand
caucaucuaccaagagaaa

SEQ ID NO: 492799 - RNA, 19 nt, Homo sapiens
  misc_RNA (1)...(19): siRNA sense strand
ccaagaaggagaaggaaga

SEQ ID NO: 492800 - RNA, 19 nt, Homo sapiens
  misc_RNA (1)...(19): siRNA sense strand
cagaaaucauugucaagau

SEQ ID NO: 492801 - RNA, 19 nt, Homo sapiens
  misc_RNA (1)...(19): siRNA sense strand
gcuacggcuucauugagua

SEQ ID NO: 492802 - RNA, 19 nt, Homo sapiens
  misc_RNA (1)...(19): siRNA sense strand
gcaucuacguggccucugu

SEQ ID NO: 492803 - RNA, 19 nt, Homo sapiens
  misc_RNA (1)...(19): siRNA sense strand
agaaaucauugucaagauc

SEQ ID NO: 492804 - RNA, 19 nt, Homo sapiens
  misc_RNA (1)...(19): siRNA sense strand
ucaagagugugcuggugaa

SEQ ID NO: 492805 - RNA, 19 nt, Homo sapiens
  misc_RNA (1)...(19): siRNA sense strand
ggcacagacuccaucaaga

SEQ ID NO: 492806 - RNA, 19 nt, Homo sapiens
  misc_RNA (1)...(19): siRNA sense strand
gagcguguuugaggccuuu

SEQ ID NO: 492807 - RNA, 19 nt, Homo sapiens
  misc_RNA (1)...(19): siRNA sense strand
ccauagcucuccaggucaa

SEQ ID NO: 492808 - RNA, 19 nt, Homo sapiens
  misc_RNA (1)...(19): siRNA sense strand
cugcacagcuggccuugga

SEQ ID NO: 492809 - RNA, 19 nt, Homo sapiens
  misc_RNA (1)...(19): siRNA sense strand
gaaaucauugucaagaucu

SEQ ID NO: 492810 - RNA, 19 nt, Homo sapiens
  misc_RNA (1)...(19): siRNA sense strand
caagggcuacggcuucauu

SEQ ID NO: 492811 - RNA, 19 nt, Homo sapiens
  misc_RNA (1)...(19): siRNA sense strand
gacacauggugaugcagaa

SEQ ID NO: 492812 - RNA, 19 nt, Homo sapiens
  misc_RNA (1)...(19): siRNA sense strand
gcaagcaggagucuacagu

SEQ ID NO: 492813 - RNA, 19 nt, Homo sapiens
  misc_RNA (1)...(19): siRNA sense strand
agaaggagaaggaagaaga

SEQ ID NO: 492814 - RNA, 19 nt, Homo sapiens
  misc_RNA (1)...(19): siRNA sense strand
gggacuccgucaccaugaa

SEQ ID NO: 492815 - RNA, 19 nt, Homo sapiens
  misc_RNA (1)...(19): siRNA sense strand
gucaucaucuaccaagaga

SEQ ID NO: 492816 - RNA, 19 nt, Homo sapiens
  misc_RNA (1)...(19): siRNA sense strand
ggagcuguuucccgaguca

SEQ ID NO: 492817 - RNA, 19 nt, Homo sapiens
  misc_RNA (1)...(19): siRNA sense strand
ugacaucaagagcguguuu

SEQ ID NO: 492818 - RNA, 19 nt, Homo sapiens
  misc_RNA (1)...(19): siRNA sense strand
gguggcagcgggagacaaa

SEQ ID NO: 492819 - RNA, 19 nt, Homo sapiens
  misc_RNA (1)...(19): siRNA sense strand
ccaggucaauggccagcaa

SEQ ID NO: 492820 - RNA, 19 nt, Homo sapiens
  misc_RNA (1)...(19): siRNA sense strand
ucaagagcaucgacauguc

SEQ ID NO: 492821 - RNA, 19 nt, Homo sapiens
  misc_RNA (1)...(19): siRNA sense strand
gggcacagacuccaucaag

SEQ ID NO: 492822 - RNA, 19 nt, Homo sapiens
  misc_RNA (1)...(19): siRNA sense strand
gaagaagaggagcuguuuc

SEQ ID NO: 492823 - RNA, 19 nt, Homo sapiens
  misc_RNA (1)...(19): siRNA sense strand
gcagaugaacucggugaug

SEQ ID NO: 492824 - RNA, 19 nt, Homo sapiens
  misc_RNA (1)...(19): siRNA sense strand
cgugggcucuaucuacuau

SEQ ID NO: 492825 - RNA, 19 nt, Homo sapiens
  misc_RNA (1)...(19): siRNA sense strand
ucaagaucuuuguggaguu

SEQ ID NO: 492826 - RNA, 19 nt, Homo sapiens
  misc_RNA (1)...(19): siRNA sense strand
gaggaugcagaaaucauug

SEQ ID NO: 492827 - RNA, 19 nt, Homo sapiens
  misc_RNA (1)...(19): siRNA sense strand
gaaggagaaggaagaagag

SEQ ID NO: 492828 - RNA, 19 nt, Homo sapiens
  misc_RNA (1)...(19): siRNA sense strand
gcaggcccagcccaucaua

SEQ ID NO: 492829 - RNA, 19 nt, Homo sapiens
  misc_RNA (1)...(19): siRNA sense strand
gcuuugccuucguggagua

SEQ ID NO: 492830 - RNA, 19 nt, Homo sapiens
  misc_RNA (1)...(19): siRNA sense strand
caagaaggagaaggaagaa

SEQ ID NO: 492831 - RNA, 19 nt, Homo sapiens
  misc_RNA (1)...(19): siRNA sense strand
ugaaccgcgucaucaucua

SEQ ID NO: 492832 - RNA, 19 nt, Homo sapiens
  misc_RNA (1)...(19): siRNA sense strand
agaggaguguggcaaguuc

SEQ ID NO: 492833 - RNA, 19 nt, Homo sapiens
  misc_RNA (1)...(19): siRNA sense strand
ugggcucuaucuacuauga

SEQ ID NO: 492834 - RNA, 19 nt, Homo sapiens
  misc_RNA (1)...(19): siRNA sense strand
ugauaacagugaccucucu

SEQ ID NO: 492835 - RNA, 19 nt, Homo sapiens
  misc_RNA (1)...(19): siRNA sense strand
uucagaaggccaagaagua

SEQ ID NO: 492836 - RNA, 19 nt, Homo sapiens
  misc_RNA (1)...(19): siRNA sense strand
gcccagucgucccaagaug

SEQ ID NO: 492837 - RNA, 19 nt, Homo sapiens
  misc_RNA (1)...(19): siRNA sense strand
ggcuacggcuucauugagu

SEQ ID NO: 492838 - RNA, 19 nt, Homo sapiens
  misc_RNA (1)...(19): siRNA sense strand
ccaagaaguacgccaugga

SEQ ID NO: 492839 - RNA, 19 nt, Homo sapiens
  misc_RNA (1)...(19): siRNA sense strand
ccacaacuggcaagcacaa

SEQ ID NO: 492840 - RNA, 19 nt, Homo sapiens
  misc_RNA (1)...(19): siRNA sense strand
augcagaaaucauugucaa

SEQ ID NO: 492841 - RNA, 19 nt, Homo sapiens
  misc_RNA (1)...(19): siRNA sense strand
gaaccgcgucaucaucuac

SEQ ID NO: 492842 - RNA, 19 nt, Homo sapiens
  misc_RNA (1)...(19): siRNA sense strand
gaccaggagcguuuugaua

SEQ ID NO: 492843 - RNA, 19 nt, Homo sapiens
  misc_RNA (1)...(19): siRNA sense strand
cacaagggcuacggcuuca

SEQ ID NO: 492844 - RNA, 19 nt, Homo sapiens
  misc_RNA (1)...(19): siRNA sense strand
gucccaagaugcugugucu

SEQ ID NO: 492845 - RNA, 19 nt, Homo sapiens
  misc_RNA (1)...(19): siRNA sense strand
caucaagagcaucgacaug

SEQ ID NO: 492846 - RNA, 19 nt, Homo sapiens
  misc_RNA (1)...(19): siRNA sense strand
ccucaauggccgcugguuu

SEQ ID NO: 492847 - RNA, 19 nt, Homo sapiens
  misc_RNA (1)...(19): siRNA sense strand
cgaggaggaggaugcagaa

SEQ ID NO: 492848 - RNA, 19 nt, Homo sapiens
  misc_RNA (1)...(19): siRNA sense strand
ggaggugacagaggagugu

SEQ ID NO: 492849 - RNA, 19 nt, Homo sapiens
  misc_RNA (1)...(19): siRNA sense strand
caaggugguggcugaagug

SEQ ID NO: 492850 - RNA, 19 nt, Homo sapiens
  misc_RNA (1)...(19): siRNA sense strand
cuacgugggcucuaucuac

SEQ ID NO: 492851 - RNA, 19 nt, Homo sapiens
  misc_RNA (1)...(19): siRNA sense strand
gggcuacggcuucauugag

SEQ ID NO: 492852 - RNA, 19 nt, Homo sapiens
  misc_RNA (1)...(19): siRNA sense strand
cucaauggccgcugguuug

SEQ ID NO: 492853 - RNA, 19 nt, Homo sapiens
  misc_RNA (1)...(19): siRNA sense strand
ggucaauggccagcaagga

SEQ ID NO: 492854 - RNA, 19 nt, Homo sapiens
  misc_RNA (1)...(19): siRNA sense strand
gaugcagaaaucauuguca

SEQ ID NO: 492855 - RNA, 19 nt, Homo sapiens
  misc_RNA (1)...(19): siRNA sense strand
agucagagcggccagagau

SEQ ID NO: 492856 - RNA, 19 nt, Homo sapiens
  misc_RNA (1)...(19): siRNA sense strand
ugucuuccaugaaccucuu

SEQ ID NO: 492857 - RNA, 19 nt, Homo sapiens
  misc_RNA (1)...(19): siRNA sense strand
ggaggaggaugcagaaauc

SEQ ID NO: 492858 - RNA, 19 nt, Homo sapiens
  misc_RNA (1)...(19): siRNA sense strand
gggcagacccagcaacaua

SEQ ID NO: 492859 - RNA, 19 nt, Homo sapiens
  misc_RNA (1)...(19): siRNA sense strand
gaucacagcucaggaagca

SEQ ID NO: 492860 - RNA, 19 nt, Homo sapiens
  misc_RNA (1)...(19): siRNA sense strand
ggaagaagaggagcuguuu

SEQ ID NO: 492861 - RNA, 19 nt, Homo sapiens
  misc_RNA (1)...(19): siRNA sense strand
gcaggagucuacagugaug

SEQ ID NO: 492862 - RNA, 19 nt, Homo sapiens
  misc_RNA (1)...(19): siRNA sense strand
caagaucuuuguggaguuu

SEQ ID NO: 492863 - RNA, 19 nt, Homo sapiens
  misc_RNA (1)...(19): siRNA sense strand
gcacagacuccaucaagau

SEQ ID NO: 492864 - RNA, 19 nt, Homo sapiens
  misc_RNA (1)...(19): siRNA sense strand
gcagaaaucauugucaaga

SEQ ID NO: 492865 - RNA, 19 nt, Homo sapiens
  misc_RNA (1)...(19): siRNA sense strand
ggaggaugcagaaaucauu

SEQ ID NO: 492866 - RNA, 19 nt, Homo sapiens
  misc_RNA (1)...(19): siRNA sense strand
gcaaggugguggcugaagu

SEQ ID NO: 492867 - RNA, 19 nt, Homo sapiens
  misc_RNA (1)...(19): siRNA sense strand
gaugcugugucuuccauga

SEQ ID NO: 492868 - RNA, 19 nt, Homo sapiens
  misc_RNA (1)...(19): siRNA sense strand
aagcaggagucuacaguga

SEQ ID NO: 492869 - RNA, 19 nt, Homo sapiens
  misc_RNA (1)...(19): siRNA sense strand
ggugguggcugaaguguac

SEQ ID NO: 492870 - RNA, 19 nt, Homo sapiens
  misc_RNA (1)...(19): siRNA sense strand
caagaucacagcucaggaa

SEQ ID NO: 492871 - RNA, 19 nt, Homo sapiens
  misc_RNA (1)...(19): siRNA sense strand
caucaucuaccaagagaaa

SEQ ID NO: 492872 - RNA, 19 nt, Homo sapiens
  misc_RNA (1)...(19): siRNA sense strand
ccaagaaggagaaggaaga

SEQ ID NO: 492873 - RNA, 19 nt, Homo sapiens
  misc_RNA (1)...(19): siRNA sense strand
cagaaaucauugucaagau

SEQ ID NO: 492874 - RNA, 19 nt, Homo sapiens
  misc_RNA (1)...(19): siRNA sense strand
gcuacggcuucauugagua

SEQ ID NO: 492875 - RNA, 19 nt, Homo sapiens
  misc_RNA (1)...(19): siRNA sense strand
gcaucuacguggccucugu

SEQ ID NO: 492876 - RNA, 19 nt, Homo sapiens
  misc_RNA (1)...(19): siRNA sense strand
agaaaucauugucaagauc

SEQ ID NO: 492877 - RNA, 19 nt, Homo sapiens
  misc_RNA (1)...(19): siRNA sense strand
ucaagagugugcuggugaa

SEQ ID NO: 492878 - RNA, 19 nt, Homo sapiens
  misc_RNA (1)...(19): siRNA sense strand
ggcacagacuccaucaaga

SEQ ID NO: 492879 - RNA, 19 nt, Homo sapiens
  misc_RNA (1)...(19): siRNA sense strand
gagcguguuugaggccuuu

SEQ ID NO: 492880 - RNA, 19 nt, Homo sapiens
  misc_RNA (1)...(19): siRNA sense strand
ccauagcucuccaggucaa

SEQ ID NO: 492881 - RNA, 19 nt, Homo sapiens
  misc_RNA (1)...(19): siRNA sense strand
cugcacagcuggccuugga

SEQ ID NO: 492882 - RNA, 19 nt, Homo sapiens
  misc_RNA (1)...(19): siRNA sense strand
gaaaucauugucaagaucu

SEQ ID NO: 492883 - RNA, 19 nt, Homo sapiens
  misc_RNA (1)...(19): siRNA sense strand
caagggcuacggcuucauu

SEQ ID NO: 492884 - RNA, 19 nt, Homo sapiens
  misc_RNA (1)...(19): siRNA sense strand
gacacauggugaugcagaa

SEQ ID NO: 492885 - RNA, 19 nt, Homo sapiens
  misc_RNA (1)...(19): siRNA sense strand
gcaagcaggagucuacagu

SEQ ID NO: 492886 - RNA, 19 nt, Homo sapiens
  misc_RNA (1)...(19): siRNA sense strand
agaaggagaaggaagaaga

SEQ ID NO: 492887 - RNA, 19 nt, Homo sapiens
  misc_RNA (1)...(19): siRNA sense strand
gggacuccgucaccaugaa

SEQ ID NO: 492888 - RNA, 19 nt, Homo sapiens
  misc_RNA (1)...(19): siRNA sense strand
gucaucaucuaccaagaga

SEQ ID NO: 492889 - RNA, 19 nt, Homo sapiens
  misc_RNA (1)...(19): siRNA sense strand
ggagcuguuucccgaguca

SEQ ID NO: 492890 - RNA, 19 nt, Homo sapiens
  misc_RNA (1)...(19): siRNA sense strand
ugacaucaagagcguguuu

SEQ ID NO: 492891 - RNA, 19 nt, Homo sapiens
  misc_RNA (1)...(19): siRNA sense strand
gguggcagcgggagacaaa

SEQ ID NO: 492892 - RNA, 19 nt, Homo sapiens
  misc_RNA (1)...(19): siRNA sense strand
ccaggucaauggccagcaa

SEQ ID NO: 492893 - RNA, 19 nt, Homo sapiens
  misc_RNA (1)...(19): siRNA sense strand
ucaagagcaucgacauguc

SEQ ID NO: 492894 - RNA, 19 nt, Homo sapiens
  misc_RNA (1)...(19): siRNA sense strand
gggcacagacuccaucaag

SEQ ID NO: 492895 - RNA, 19 nt, Homo sapiens
  misc_RNA (1)...(19): siRNA sense strand
gaagaagaggagcuguuuc

SEQ ID NO: 492896 - RNA, 19 nt, Homo sapiens
  misc_RNA (1)...(19): siRNA sense strand
gcagaugaacucggugaug

SEQ ID NO: 492897 - RNA, 19 nt, Homo sapiens
  misc_RNA (1)...(19): siRNA sense strand
cgugggcucuaucuacuau

SEQ ID NO: 492898 - RNA, 19 nt, Homo sapiens
  misc_RNA (1)...(19): siRNA sense strand
ucaagaucuuuguggaguu

SEQ ID NO: 492899 - RNA, 19 nt, Homo sapiens
  misc_RNA (1)...(19): siRNA sense strand
gaggaugcagaaaucauug

SEQ ID NO: 492900 - RNA, 19 nt, Homo sapiens
  misc_RNA (1)...(19): siRNA sense strand
gaaggagaaggaagaagag

SEQ ID NO: 492901 - RNA, 19 nt, Homo sapiens
  misc_RNA (1)...(19): siRNA sense strand
gcaggcccagcccaucaua

SEQ ID NO: 492902 - RNA, 19 nt, Homo sapiens
  misc_RNA (1)...(19): siRNA sense strand
gcuuugccuucguggagua

SEQ ID NO: 492903 - RNA, 19 nt, Homo sapiens
  misc_RNA (1)...(19): siRNA sense strand
caagaaggagaaggaagaa

SEQ ID NO: 492904 - RNA, 19 nt, Homo sapiens
  misc_RNA (1)...(19): siRNA sense strand
ugaaccgcgucaucaucua

SEQ ID NO: 492905 - RNA, 19 nt, Homo sapiens
  misc_RNA (1)...(19): siRNA sense strand
agaggaguguggcaaguuc

SEQ ID NO: 492906 - RNA, 19 nt, Homo sapiens
  misc_RNA (1)...(19): siRNA sense strand
ugggcucuaucuacuauga

SEQ ID NO: 492907 - RNA, 19 nt, Homo sapiens
  misc_RNA (1)...(19): siRNA sense strand
ugauaacagugaccucucu

SEQ ID NO: 492908 - RNA, 19 nt, Homo sapiens
  misc_RNA (1)...(19): siRNA sense strand
uucagaaggccaagaagua

SEQ ID NO: 492909 - RNA, 19 nt, Homo sapiens
  misc_RNA (1)...(19): siRNA sense strand
gcccagucgucccaagaug

SEQ ID NO: 492910 - RNA, 19 nt, Homo sapiens
  misc_RNA (1)...(19): siRNA sense strand
ggcuacggcuucauugagu

SEQ ID NO: 492911 - RNA, 19 nt, Homo sapiens
  misc_RNA (1)...(19): siRNA sense strand
ccaagaaguacgccaugga

SEQ ID NO: 492912 - RNA, 19 nt, Homo sapiens
  misc_RNA (1)...(19): siRNA sense strand
ccacaacuggcaagcacaa

SEQ ID NO: 492913 - RNA, 19 nt, Homo sapiens
  misc_RNA (1)...(19): siRNA sense strand
augcagaaaucauugucaa

SEQ ID NO: 492914 - RNA, 19 nt, Homo sapiens
  misc_RNA (1)...(19): siRNA sense strand
gaaccgcgucaucaucuac

SEQ ID NO: 492915 - RNA, 19 nt, Homo sapiens
  misc_RNA (1)...(19): siRNA sense strand
gaccaggagcguuuugaua

SEQ ID NO: 492916 - RNA, 19 nt, Homo sapiens
  misc_RNA (1)...(19): siRNA sense strand
cacaagggcuacggcuuca

SEQ ID NO: 492917 - RNA, 19 nt, Homo sapiens
  misc_RNA (1)...(19): siRNA sense strand
gucccaagaugcugugucu

SEQ ID NO: 492918 - RNA, 19 nt, Homo sapiens
  misc_RNA (1)...(19): siRNA sense strand
caucaagagcaucgacaug

SEQ ID NO: 492919 - RNA, 19 nt, Homo sapiens
  misc_RNA (1)...(19): siRNA sense strand
ccucaauggccgcugguuu

SEQ ID NO: 492920 - RNA, 19 nt, Homo sapiens
  misc_RNA (1)...(19): siRNA sense strand
cgaggaggaggaugcagaa

SEQ ID NO: 492921 - RNA, 19 nt, Homo sapiens
  misc_RNA (1)...(19): siRNA sense strand
ggaggugacagaggagugu

SEQ ID NO: 492922 - RNA, 19 nt, Homo sapiens
  misc_RNA (1)...(19): siRNA sense strand
caaggugguggcugaagug

SEQ ID NO: 492923 - RNA, 19 nt, Homo sapiens
  misc_RNA (1)...(19): siRNA sense strand
cuacgugggcucuaucuac

SEQ ID NO: 492924 - RNA, 19 nt, Homo sapiens
  misc_RNA (1)...(19): siRNA sense strand
gggcuacggcuucauugag

SEQ ID NO: 492925 - RNA, 19 nt, Homo sapiens
  misc_RNA (1)...(19): siRNA sense strand
cucaauggccgcugguuug

SEQ ID NO: 492926 - RNA, 19 nt, Homo sapiens
  misc_RNA (1)...(19): siRNA sense strand
ggucaauggccagcaagga

SEQ ID NO: 492927 - RNA, 19 nt, Homo sapiens
  misc_RNA (1)...(19): siRNA sense strand
gaugcagaaaucauuguca

SEQ ID NO: 492928 - RNA, 19 nt, Homo sapiens
  misc_RNA (1)...(19): siRNA sense strand
agucagagcggccagagau

SEQ ID NO: 492929 - RNA, 19 nt, Homo sapiens
  misc_RNA (1)...(19): siRNA sense strand
ugucuuccaugaaccucuu

SEQ ID NO: 492930 - RNA, 19 nt, Homo sapiens
  misc_RNA (1)...(19): siRNA sense strand
gaacagcuuugacaacauc

SEQ ID NO: 492931 - RNA, 19 nt, Homo sapiens
  misc_RNA (1)...(19): siRNA sense strand
ugaacaagcuccgaagaaa

SEQ ID NO: 492932 - RNA, 19 nt, Homo sapiens
  misc_RNA (1)...(19): siRNA sense strand
gcaagaagguacccaucau

SEQ ID NO: 492933 - RNA, 19 nt, Homo sapiens
  misc_RNA (1)...(19): siRNA sense strand
gauuggagccugugaccua

SEQ ID NO: 492934 - RNA, 19 nt, Homo sapiens
  misc_RNA (1)...(19): siRNA sense strand
acccagaagugaaucauuu

SEQ ID NO: 492935 - RNA, 19 nt, Homo sapiens
  misc_RNA (1)...(19): siRNA sense strand
gugaaucauuucugcaaga

SEQ ID NO: 492936 - RNA, 19 nt, Homo sapiens
  misc_RNA (1)...(19): siRNA sense strand
ggacacagcagggcaagau

SEQ ID NO: 492937 - RNA, 19 nt, Homo sapiens
  misc_RNA (1)...(19): siRNA sense strand
agacugaccugcgcaagga

SEQ ID NO: 492938 - RNA, 19 nt, Homo sapiens
  misc_RNA (1)...(19): siRNA sense strand
ccgaacagcuuugacaaca

SEQ ID NO: 492939 - RNA, 19 nt, Homo sapiens
  misc_RNA (1)...(19): siRNA sense strand
gaacaagcuccgaagaaac

SEQ ID NO: 492940 - RNA, 19 nt, Homo sapiens
  misc_RNA (1)...(19): siRNA sense strand
agacgucgcugcugauggu

SEQ ID NO: 492941 - RNA, 19 nt, Homo sapiens
  misc_RNA (1)...(19): siRNA sense strand
gcuuugacaacaucuuuaa

SEQ ID NO: 492942 - RNA, 19 nt, Homo sapiens
  misc_RNA (1)...(19): siRNA sense strand
gugaacaagcuccgaagaa

SEQ ID NO: 492943 - RNA, 19 nt, Homo sapiens
  misc_RNA (1)...(19): siRNA sense strand
cagcagggcaagaugacua

SEQ ID NO: 492944 - RNA, 19 nt, Homo sapiens
  misc_RNA (1)...(19): siRNA sense strand
caacguccacgccgucuuc

SEQ ID NO: 492945 - RNA, 19 nt, Homo sapiens
  misc_RNA (1)...(19): siRNA sense strand
guacauggucaaccugcaa

SEQ ID NO: 492946 - RNA, 19 nt, Homo sapiens
  misc_RNA (1)...(19): siRNA sense strand
cggcucggcuccaugacaa

SEQ ID NO: 492947 - RNA, 19 nt, Homo sapiens
  misc_RNA (1)...(19): siRNA sense strand
gaagacgucgcugcugaug

SEQ ID NO: 492948 - RNA, 19 nt, Homo sapiens
  misc_RNA (1)...(19): siRNA sense strand
cagcuuugacaacaucuuu

SEQ ID NO: 492949 - RNA, 19 nt, Homo sapiens
  misc_RNA (1)...(19): siRNA sense strand
ggucaaccugcaagugaaa

SEQ ID NO: 492950 - RNA, 19 nt, Homo sapiens
  misc_RNA (1)...(19): siRNA sense strand
acacagcagggcaagauga

SEQ ID NO: 492951 - RNA, 19 nt, Homo sapiens
  misc_RNA (1)...(19): siRNA sense strand
caagaagguacccaucauc

SEQ ID NO: 492952 - RNA, 19 nt, Homo sapiens
  misc_RNA (1)...(19): siRNA sense strand
ggaagacgucgcugcugau

SEQ ID NO: 492953 - RNA, 19 nt, Homo sapiens
  misc_RNA (1)...(19): siRNA sense strand
cgaacagcuuugacaacau

SEQ ID NO: 492954 - RNA, 19 nt, Homo sapiens
  misc_RNA (1)...(19): siRNA sense strand
ggugguacccagaagugaa

SEQ ID NO: 492955 - RNA, 19 nt, Homo sapiens
  misc_RNA (1)...(19): siRNA sense strand
cagggcaagaugacuauga

SEQ ID NO: 492956 - RNA, 19 nt, Homo sapiens
  misc_RNA (1)...(19): siRNA sense strand
ggugaacaagcuccgaaga

SEQ ID NO: 492957 - RNA, 19 nt, Homo sapiens
  misc_RNA (1)...(19): siRNA sense strand
gaugucaccagcccgaaca

SEQ ID NO: 492958 - RNA, 19 nt, Homo sapiens
  misc_RNA (1)...(19): siRNA sense strand
cugcuuugcuucgauguca

SEQ ID NO: 492959 - RNA, 19 nt, Homo sapiens
  misc_RNA (1)...(19): siRNA sense strand
gcggauuacccagggcuuu

SEQ ID NO: 492960 - RNA, 19 nt, Homo sapiens
  misc_RNA (1)...(19): siRNA sense strand
ccauugaugucaccuuuaa

SEQ ID NO: 492961 - RNA, 19 nt, Homo sapiens
  misc_RNA (1)...(19): siRNA sense strand
ugaggaaacugggcuauga

SEQ ID NO: 492962 - RNA, 19 nt, Homo sapiens
  misc_RNA (1)...(19): siRNA sense strand
ggcaagcacugguguggaa

SEQ ID NO: 492963 - RNA, 19 nt, Homo sapiens
  misc_RNA (1)...(19): siRNA sense strand
ucacagaucacauccaaga

SEQ ID NO: 492964 - RNA, 19 nt, Homo sapiens
  misc_RNA (1)...(19): siRNA sense strand
gcaaguacugcuuugugua

SEQ ID NO: 492965 - RNA, 19 nt, Homo sapiens
  misc_RNA (1)...(19): siRNA sense strand
gcgcccaguuuccagagua

SEQ ID NO: 492966 - RNA, 19 nt, Homo sapiens
  misc_RNA (1)...(19): siRNA sense strand
ucucacagaucacauccaa

SEQ ID NO: 492967 - RNA, 19 nt, Homo sapiens
  misc_RNA (1)...(19): siRNA sense strand
gacacugggccuucugaua

SEQ ID NO: 492968 - RNA, 19 nt, Homo sapiens
  misc_RNA (1)...(19): siRNA sense strand
gaugaccucuacugcaagu

SEQ ID NO: 492969 - RNA, 19 nt, Homo sapiens
  misc_RNA (1)...(19): siRNA sense strand
gaaacugggcuaugacacu

SEQ ID NO: 492970 - RNA, 19 nt, Homo sapiens
  misc_RNA (1)...(19): siRNA sense strand
ccaaggacaugaggaaacu

SEQ ID NO: 492971 - RNA, 19 nt, Homo sapiens
  misc_RNA (1)...(19): siRNA sense strand
ccuagcgucuuucuacuca

SEQ ID NO: 492972 - RNA, 19 nt, Homo sapiens
  misc_RNA (1)...(19): siRNA sense strand
ggugguggcucagggugaa

SEQ ID NO: 492973 - RNA, 19 nt, Homo sapiens
  misc_RNA (1)...(19): siRNA sense strand
guauggaccagauguguuc

SEQ ID NO: 492974 - RNA, 19 nt, Homo sapiens
  misc_RNA (1)...(19): siRNA sense strand
cagcguguauggaccagau

SEQ ID NO: 492975 - RNA, 19 nt, Homo sapiens
  misc_RNA (1)...(19): siRNA sense strand
uagcgucuuucuacucaug

SEQ ID NO: 492976 - RNA, 19 nt, Homo sapiens
  misc_RNA (1)...(19): siRNA sense strand
augaugaccucuacugcaa

SEQ ID NO: 492977 - RNA, 19 nt, Homo sapiens
  misc_RNA (1)...(19): siRNA sense strand
cgaugugguucgaggcuau

SEQ ID NO: 492978 - RNA, 19 nt, Homo sapiens
  misc_RNA (1)...(19): siRNA sense strand
ugaccaaggacaugaggaa

SEQ ID NO: 492979 - RNA, 19 nt, Homo sapiens
  misc_RNA (1)...(19): siRNA sense strand
acacugggccuucugauac

SEQ ID NO: 492980 - RNA, 19 nt, Homo sapiens
  misc_RNA (1)...(19): siRNA sense strand
gguggagagcgcccaguuu

SEQ ID NO: 492981 - RNA, 19 nt, Homo sapiens
  misc_RNA (1)...(19): siRNA sense strand
guggagagcgcccaguuuc

SEQ ID NO: 492982 - RNA, 19 nt, Homo sapiens
  misc_RNA (1)...(19): siRNA sense strand
cugcagaaguuuacaagcu

SEQ ID NO: 492983 - RNA, 19 nt, Homo sapiens
  misc_RNA (1)...(19): siRNA sense strand
ugcaaguacugcuuugugu

SEQ ID NO: 492984 - RNA, 19 nt, Homo sapiens
  misc_RNA (1)...(19): siRNA sense strand
cagaaucuacgucuaaacu

SEQ ID NO: 492985 - RNA, 19 nt, Homo sapiens
  misc_RNA (1)...(19): siRNA sense strand
cccagaaucuacgucuaaa

SEQ ID NO: 492986 - RNA, 19 nt, Homo sapiens
  misc_RNA (1)...(19): siRNA sense strand
ucccagaaucuacgucuaa

SEQ ID NO: 492987 - RNA, 19 nt, Homo sapiens
  misc_RNA (1)...(19): siRNA sense strand
ggagagcgcccaguuucca

SEQ ID NO: 492988 - RNA, 19 nt, Homo sapiens
  misc_RNA (1)...(19): siRNA sense strand
gaccaaggacaugaggaaa

SEQ ID NO: 492989 - RNA, 19 nt, Homo sapiens
  misc_RNA (1)...(19): siRNA sense strand
cgcgaguccuagcgucuuu

SEQ ID NO: 492990 - RNA, 19 nt, Homo sapiens
  misc_RNA (1)...(19): siRNA sense strand
gaucgugcucagcguguau

SEQ ID NO: 492991 - RNA, 19 nt, Homo sapiens
  misc_RNA (1)...(19): siRNA sense strand
ggaauggcuucuauuauuu

SEQ ID NO: 492992 - RNA, 19 nt, Homo sapiens
  misc_RNA (1)...(19): siRNA sense strand
gaacuacacugggagaauu

SEQ ID NO: 492993 - RNA, 19 nt, Homo sapiens
  misc_RNA (1)...(19): siRNA sense strand
ggagauguuuaccuuaaua

SEQ ID NO: 492994 - RNA, 19 nt, Homo sapiens
  misc_RNA (1)...(19): siRNA sense strand
uaacauuucuaccagcuua

SEQ ID NO: 492995 - RNA, 19 nt, Homo sapiens
  misc_RNA (1)...(19): siRNA sense strand
gcaggaauggcuucuauua

SEQ ID NO: 492996 - RNA, 19 nt, Homo sapiens
  misc_RNA (1)...(19): siRNA sense strand
gaaagauucuguuccacaa

SEQ ID NO: 492997 - RNA, 19 nt, Homo sapiens
  misc_RNA (1)...(19): siRNA sense strand
gauaaauucuugagucaug

SEQ ID NO: 492998 - RNA, 19 nt, Homo sapiens
  misc_RNA (1)...(19): siRNA sense strand
ugacugugcuggauaaauu

SEQ ID NO: 492999 - RNA, 19 nt, Homo sapiens
  misc_RNA (1)...(19): siRNA sense strand
gaaccuggacuucucauuu

SEQ ID NO: 493000 - RNA, 19 nt, Homo sapiens
  misc_RNA (1)...(19): siRNA sense strand
uaauucggcugaagaagua

SEQ ID NO: 493001 - RNA, 19 nt, Homo sapiens
  misc_RNA (1)...(19): siRNA sense strand
ccacuuuacuucauggaua

SEQ ID NO: 493002 - RNA, 19 nt, Homo sapiens
  misc_RNA (1)...(19): siRNA sense strand
gagcaggaauggcuucuau

SEQ ID NO: 493003 - RNA, 19 nt, Homo sapiens
  misc_RNA (1)...(19): siRNA sense strand
gagcaggguugguguauuc

SEQ ID NO: 493004 - RNA, 19 nt, Homo sapiens
  misc_RNA (1)...(19): siRNA sense strand
gcauaucuuucaugaacua

SEQ ID NO: 493005 - RNA, 19 nt, Homo sapiens
  misc_RNA (1)...(19): siRNA sense strand
ccagggaacuuuaugauca

SEQ ID NO: 493006 - RNA, 19 nt, Homo sapiens
  misc_RNA (1)...(19): siRNA sense strand
ccacuuguguguuaaagaa

SEQ ID NO: 493007 - RNA, 19 nt, Homo sapiens
  misc_RNA (1)...(19): siRNA sense strand
ccacugagguugcugaugu

SEQ ID NO: 493008 - RNA, 19 nt, Homo sapiens
  misc_RNA (1)...(19): siRNA sense strand
ccaacucccuccugaauug

SEQ ID NO: 493009 - RNA, 19 nt, Homo sapiens
  misc_RNA (1)...(19): siRNA sense strand
aggaauggcuucuauuauu

SEQ ID NO: 493010 - RNA, 19 nt, Homo sapiens
  misc_RNA (1)...(19): siRNA sense strand
ucaagcauaucuuucauga

SEQ ID NO: 493011 - RNA, 19 nt, Homo sapiens
  misc_RNA (1)...(19): siRNA sense strand
gguggaagauggauuuaau

SEQ ID NO: 493012 - RNA, 19 nt, Homo sapiens
  misc_RNA (1)...(19): siRNA sense strand
gaugaaagauucuguucca

SEQ ID NO: 493013 - RNA, 19 nt, Homo sapiens
  misc_RNA (1)...(19): siRNA sense strand
gaacaacaggucuaccaaa

SEQ ID NO: 493014 - RNA, 19 nt, Homo sapiens
  misc_RNA (1)...(19): siRNA sense strand
gaagguggugcucauuaua

SEQ ID NO: 493015 - RNA, 19 nt, Homo sapiens
  misc_RNA (1)...(19): siRNA sense strand
gaaauggcauacggaguga

SEQ ID NO: 493016 - RNA, 19 nt, Homo sapiens
  misc_RNA (1)...(19): siRNA sense strand
acaaacuucuuuccacuuu

SEQ ID NO: 493017 - RNA, 19 nt, Homo sapiens
  misc_RNA (1)...(19): siRNA sense strand
caaacaaucuaagagagaa

SEQ ID NO: 493018 - RNA, 19 nt, Homo sapiens
  misc_RNA (1)...(19): siRNA sense strand
agaaacuccuguucccuua

SEQ ID NO: 493019 - RNA, 19 nt, Homo sapiens
  misc_RNA (1)...(19): siRNA sense strand
gcagcuauccugggaauuu

SEQ ID NO: 493020 - RNA, 19 nt, Homo sapiens
  misc_RNA (1)...(19): siRNA sense strand
ugagguugcugauguuauu

SEQ ID NO: 493021 - RNA, 19 nt, Homo sapiens
  misc_RNA (1)...(19): siRNA sense strand
gaaucaagcauaucuuuca

SEQ ID NO: 493022 - RNA, 19 nt, Homo sapiens
  misc_RNA (1)...(19): siRNA sense strand
gaaccauuccucucugaaa

SEQ ID NO: 493023 - RNA, 19 nt, Homo sapiens
  misc_RNA (1)...(19): siRNA sense strand
ggagacaucuacaccuauc

SEQ ID NO: 493024 - RNA, 19 nt, Homo sapiens
  misc_RNA (1)...(19): siRNA sense strand
uauaucagguuaugaagga

SEQ ID NO: 493025 - RNA, 19 nt, Homo sapiens
  misc_RNA (1)...(19): siRNA sense strand
gcaaacaaucuaagagaga

SEQ ID NO: 493026 - RNA, 19 nt, Homo sapiens
  misc_RNA (1)...(19): siRNA sense strand
gaacuuugucgcuaccuuu

SEQ ID NO: 493027 - RNA, 19 nt, Homo sapiens
  misc_RNA (1)...(19): siRNA sense strand
gggugccacuuguguguua

SEQ ID NO: 493028 - RNA, 19 nt, Homo sapiens
  misc_RNA (1)...(19): siRNA sense strand
acaggaacauucaaacuau

SEQ ID NO: 493029 - RNA, 19 nt, Homo sapiens
  misc_RNA (1)...(19): siRNA sense strand
ccuuaauacuggagacuua

SEQ ID NO: 493030 - RNA, 19 nt, Homo sapiens
  misc_RNA (1)...(19): siRNA sense strand
gggaauuucuggauguguu

SEQ ID NO: 493031 - RNA, 19 nt, Homo sapiens
  misc_RNA (1)...(19): siRNA sense strand
ggagacacuuucagaugga

SEQ ID NO: 493032 - RNA, 19 nt, Homo sapiens
  misc_RNA (1)...(19): siRNA sense strand
gaaauauaaagguguguga

SEQ ID NO: 493033 - RNA, 19 nt, Homo sapiens
  misc_RNA (1)...(19): siRNA sense strand
gcucaugacauuguuuaua

SEQ ID NO: 493034 - RNA, 19 nt, Homo sapiens
  misc_RNA (1)...(19): siRNA sense strand
ggagugacugcaagaagua

SEQ ID NO: 493035 - RNA, 19 nt, Homo sapiens
  misc_RNA (1)...(19): siRNA sense strand
ggaagcaacaggaacauuc

SEQ ID NO: 493036 - RNA, 19 nt, Homo sapiens
  misc_RNA (1)...(19): siRNA sense strand
aagcauaucuuucaugaac

SEQ ID NO: 493037 - RNA, 19 nt, Homo sapiens
  misc_RNA (1)...(19): siRNA sense strand
uaucauaguucagcagcua

SEQ ID NO: 493038 - RNA, 19 nt, Homo sapiens
  misc_RNA (1)...(19): siRNA sense strand
gaugaacccaugagaaaug

SEQ ID NO: 493039 - RNA, 19 nt, Homo sapiens
  misc_RNA (1)...(19): siRNA sense strand
gcaaugagccggacuucgu

SEQ ID NO: 493040 - RNA, 19 nt, Homo sapiens
  misc_RNA (1)...(19): siRNA sense strand
gaaagaugaacccaugaga

SEQ ID NO: 493041 - RNA, 19 nt, Homo sapiens
  misc_RNA (1)...(19): siRNA sense strand
ugaagguggugcucauuau

SEQ ID NO: 493042 - RNA, 19 nt, Homo sapiens
  misc_RNA (1)...(19): siRNA sense strand
caagaaguaugaugugacu

SEQ ID NO: 493043 - RNA, 19 nt, Homo sapiens
  misc_RNA (1)...(19): siRNA sense strand
ggagugauguauggagaga

SEQ ID NO: 493044 - RNA, 19 nt, Homo sapiens
  misc_RNA (1)...(19): siRNA sense strand
aagaugaacccaugagaaa

SEQ ID NO: 493045 - RNA, 19 nt, Homo sapiens
  misc_RNA (1)...(19): siRNA sense strand
agggagauguuuaccuuaa

SEQ ID NO: 493046 - RNA, 19 nt, Homo sapiens
  misc_RNA (1)...(19): siRNA sense strand
gcuaugcugggccuuauaa

SEQ ID NO: 493047 - RNA, 19 nt, Homo sapiens
  misc_RNA (1)...(19): siRNA sense strand
uuaagaagggagauguuua

SEQ ID NO: 493048 - RNA, 19 nt, Homo sapiens
  misc_RNA (1)...(19): siRNA sense strand
ccacgcagccaccauguug

SEQ ID NO: 493049 - RNA, 19 nt, Homo sapiens
  misc_RNA (1)...(19): siRNA sense strand
caggaacauucaaacuauu

SEQ ID NO: 493050 - RNA, 19 nt, Homo sapiens
  misc_RNA (1)...(19): siRNA sense strand
gaagcaacaggaacauuca

SEQ ID NO: 493051 - RNA, 19 nt, Homo sapiens
  misc_RNA (1)...(19): siRNA sense strand
uauauaacccuuccucugu

SEQ ID NO: 493052 - RNA, 19 nt, Homo sapiens
  misc_RNA (1)...(19): siRNA sense strand
uaaggugcguuuggcaauu

SEQ ID NO: 493053 - RNA, 19 nt, Homo sapiens
  misc_RNA (1)...(19): siRNA sense strand
aagcagcugugauuaguca

SEQ ID NO: 493054 - RNA, 19 nt, Homo sapiens
  misc_RNA (1)...(19): siRNA sense strand
gaaggaagagcaggaaugg

SEQ ID NO: 493055 - RNA, 19 nt, Homo sapiens
  misc_RNA (1)...(19): siRNA sense strand
auauaacccuuccucugua

SEQ ID NO: 493056 - RNA, 19 nt, Homo sapiens
  misc_RNA (1)...(19): siRNA sense strand
gguguaauuucacucaaag

SEQ ID NO: 493057 - RNA, 19 nt, Homo sapiens
  misc_RNA (1)...(19): siRNA sense strand
cacuuuacuucauggauaa

SEQ ID NO: 493058 - RNA, 19 nt, Homo sapiens
  misc_RNA (1)...(19): siRNA sense strand
gggagauguuuaccuuaau

SEQ ID NO: 493059 - RNA, 19 nt, Homo sapiens
  misc_RNA (1)...(19): siRNA sense strand
gaucauaaggugcguuugg

SEQ ID NO: 493060 - RNA, 19 nt, Homo sapiens
  misc_RNA (1)...(19): siRNA sense strand
guacugcucaugacauugu

SEQ ID NO: 493061 - RNA, 19 nt, Homo sapiens
  misc_RNA (1)...(19): siRNA sense strand
gcagcagaguggcccaugu

SEQ ID NO: 493062 - RNA, 19 nt, Homo sapiens
  misc_RNA (1)...(19): siRNA sense strand
gaggggagcuggugacugu

SEQ ID NO: 493063 - RNA, 19 nt, Homo sapiens
  misc_RNA (1)...(19): siRNA sense strand
cagcagcuauccugggaau

SEQ ID NO: 493064 - RNA, 19 nt, Homo sapiens
  misc_RNA (1)...(19): siRNA sense strand
cagaguggcccaugucuuc

SEQ ID NO: 493065 - RNA, 19 nt, Homo sapiens
  misc_RNA (1)...(19): siRNA sense strand
gacaaccucggaaaccuuu

SEQ ID NO: 493066 - RNA, 19 nt, Homo sapiens
  misc_RNA (1)...(19): siRNA sense strand
caaauaauguuaggggaaa

SEQ ID NO: 493067 - RNA, 19 nt, Homo sapiens
  misc_RNA (1)...(19): siRNA sense strand
gcacacaaaagacaaauug

SEQ ID NO: 493068 - RNA, 19 nt, Homo sapiens
  misc_RNA (1)...(19): siRNA sense strand
ucucauuucucgagugaau

SEQ ID NO: 493069 - RNA, 19 nt, Homo sapiens
  misc_RNA (1)...(19): siRNA sense strand
uggauaaauucuugaguca

SEQ ID NO: 493070 - RNA, 19 nt, Homo sapiens
  misc_RNA (1)...(19): siRNA sense strand
agggagacaucuacaccua

SEQ ID NO: 493071 - RNA, 19 nt, Homo sapiens
  misc_RNA (1)...(19): siRNA sense strand
gaauggucguccugcacuu

SEQ ID NO: 493072 - RNA, 19 nt, Homo sapiens
  misc_RNA (1)...(19): siRNA sense strand
aaagaugaacccaugagaa

SEQ ID NO: 493073 - RNA, 19 nt, Homo sapiens
  misc_RNA (1)...(19): siRNA sense strand
gcuaccgaaucaagcauau

SEQ ID NO: 493074 - RNA, 19 nt, Homo sapiens
  misc_RNA (1)...(19): siRNA sense strand
ccaagccucucagaaaaua

SEQ ID NO: 493075 - RNA, 19 nt, Homo sapiens
  misc_RNA (1)...(19): siRNA sense strand
cuaucaggauguagacaaa

SEQ ID NO: 493076 - RNA, 19 nt, Homo sapiens
  misc_RNA (1)...(19): siRNA sense strand
ggaacaacaggucuaccaa

SEQ ID NO: 493077 - RNA, 19 nt, Homo sapiens
  misc_RNA (1)...(19): siRNA sense strand
cagggaacuuuaugaucaa

SEQ ID NO: 493078 - RNA, 19 nt, Homo sapiens
  misc_RNA (1)...(19): siRNA sense strand
ccgaaucaagcauaucuuu

SEQ ID NO: 493079 - RNA, 19 nt, Homo sapiens
  misc_RNA (1)...(19): siRNA sense strand
uuaugcagcuaccgaauca

SEQ ID NO: 493080 - RNA, 19 nt, Homo sapiens
  misc_RNA (1)...(19): siRNA sense strand
uauaacccuuccucuguau

SEQ ID NO: 493081 - RNA, 19 nt, Homo sapiens
  misc_RNA (1)...(19): siRNA sense strand
cuacugaccagggaacuuu

SEQ ID NO: 493082 - RNA, 19 nt, Homo sapiens
  misc_RNA (1)...(19): siRNA sense strand
ugaguugggugccacuugu

SEQ ID NO: 493083 - RNA, 19 nt, Homo sapiens
  misc_RNA (1)...(19): siRNA sense strand
gggcgcagauuugcuugga

SEQ ID NO: 493084 - RNA, 19 nt, Homo sapiens
  misc_RNA (1)...(19): siRNA sense strand
caacaggaacauucaaacu

SEQ ID NO: 493085 - RNA, 19 nt, Homo sapiens
  misc_RNA (1)...(19): siRNA sense strand
uccaggaucaggacaauuu

SEQ ID NO: 493086 - RNA, 19 nt, Homo sapiens
  misc_RNA (1)...(19): siRNA sense strand
aaccuggacuucucauuuc

SEQ ID NO: 493087 - RNA, 19 nt, Homo sapiens
  misc_RNA (1)...(19): siRNA sense strand
gcuuggaacgguagaagaa

SEQ ID NO: 493088 - RNA, 19 nt, Homo sapiens
  misc_RNA (1)...(19): siRNA sense strand
ggaagcaaacgucuauggu

SEQ ID NO: 493089 - RNA, 19 nt, Homo sapiens
  misc_RNA (1)...(19): siRNA sense strand
aacaggaacauucaaacua

SEQ ID NO: 493090 - RNA, 19 nt, Homo sapiens
  misc_RNA (1)...(19): siRNA sense strand
guguggcuauaucagguua

SEQ ID NO: 493091 - RNA, 19 nt, Homo sapiens
  misc_RNA (1)...(19): siRNA sense strand
agacugaggucacgcaaua

SEQ ID NO: 493092 - RNA, 19 nt, Homo sapiens
  misc_RNA (1)...(19): siRNA sense strand
caaacuaccucucaggaaa

SEQ ID NO: 493093 - RNA, 19 nt, Homo sapiens
  misc_RNA (1)...(19): siRNA sense strand
ggacaagaauuuccucaag

SEQ ID NO: 493094 - RNA, 19 nt, Homo sapiens
  misc_RNA (1)...(19): siRNA sense strand
ggacaagcguuccgacuac

SEQ ID NO: 493095 - RNA, 19 nt, Homo sapiens
  misc_RNA (1)...(19): siRNA sense strand
gacaagaauuuccucaagu

SEQ ID NO: 493096 - RNA, 19 nt, Homo sapiens
  misc_RNA (1)...(19): siRNA sense strand
cagagacgcuugagaugug

SEQ ID NO: 493097 - RNA, 19 nt, Homo sapiens
  misc_RNA (1)...(19): siRNA sense strand
ggccacaucuuaugacauc

SEQ ID NO: 493098 - RNA, 19 nt, Homo sapiens
  misc_RNA (1)...(19): siRNA sense strand
ccaagaaccgggacaagaa

SEQ ID NO: 493099 - RNA, 19 nt, Homo sapiens
  misc_RNA (1)...(19): siRNA sense strand
gcuacaagcuggcgauugc

SEQ ID NO: 493100 - RNA, 19 nt, Homo sapiens
  misc_RNA (1)...(19): siRNA sense strand
gcaaacuaccucucaggaa

SEQ ID NO: 493101 - RNA, 19 nt, Homo sapiens
  misc_RNA (1)...(19): siRNA sense strand
gcgugcaccuguauuucua

SEQ ID NO: 493102 - RNA, 19 nt, Homo sapiens
  misc_RNA (1)...(19): siRNA sense strand
gcagaucccagcaggcauu

SEQ ID NO: 493103 - RNA, 19 nt, Homo sapiens
  misc_RNA (1)...(19): siRNA sense strand
gaccggcucuuccaugagu

SEQ ID NO: 493104 - RNA, 19 nt, Homo sapiens
  misc_RNA (1)...(19): siRNA sense strand
ccagugggcucagugaugu

SEQ ID NO: 493105 - RNA, 19 nt, Homo sapiens
  misc_RNA (1)...(19): siRNA sense strand
gagcagcacuucuuuuaca

SEQ ID NO: 493106 - RNA, 19 nt, Homo sapiens
  misc_RNA (1)...(19): siRNA sense strand
gcagcuuuguggaguaugu

SEQ ID NO: 493107 - RNA, 19 nt, Homo sapiens
  misc_RNA (1)...(19): siRNA sense strand
acaagaauuuccucaaguc

SEQ ID NO: 493108 - RNA, 19 nt, Homo sapiens
  misc_RNA (1)...(19): siRNA sense strand
gcaagugccaguacaagca

SEQ ID NO: 493109 - RNA, 19 nt, Homo sapiens
  misc_RNA (1)...(19): siRNA sense strand
gcagagacgcuugagaugu

SEQ ID NO: 493110 - RNA, 19 nt, Homo sapiens
  misc_RNA (1)...(19): siRNA sense strand
gaccuucaaccgcaaacua

SEQ ID NO: 493111 - RNA, 19 nt, Homo sapiens
  misc_RNA (1)...(19): siRNA sense strand
augaggagcugguggcauu

SEQ ID NO: 493112 - RNA, 19 nt, Homo sapiens
  misc_RNA (1)...(19): siRNA sense strand
gugagacccucguggacaa

SEQ ID NO: 493113 - RNA, 19 nt, Homo sapiens
  misc_RNA (1)...(19): siRNA sense strand
agaauuuccucaagucaca

SEQ ID NO: 493114 - RNA, 19 nt, Homo sapiens
  misc_RNA (1)...(19): siRNA sense strand
gcaccuguauuucuaugac

SEQ ID NO: 493115 - RNA, 19 nt, Homo sapiens
  misc_RNA (1)...(19): siRNA sense strand
gugcugcccuugaccuuca

SEQ ID NO: 493116 - RNA, 19 nt, Homo sapiens
  misc_RNA (1)...(19): siRNA sense strand
uggcauuccuauccaagaa

SEQ ID NO: 493117 - RNA, 19 nt, Homo sapiens
  misc_RNA (1)...(19): siRNA sense strand
gcugaagcgucuccucaag

SEQ ID NO: 493118 - RNA, 19 nt, Homo sapiens
  misc_RNA (1)...(19): siRNA sense strand
cuggagcccugcagacuga

SEQ ID NO: 493119 - RNA, 19 nt, Homo sapiens
  misc_RNA (1)...(19): siRNA sense strand
cuuaugacaucacaguaga

SEQ ID NO: 493120 - RNA, 19 nt, Homo sapiens
  misc_RNA (1)...(19): siRNA sense strand
ccagguucaucaagaaaca

SEQ ID NO: 493121 - RNA, 19 nt, Homo sapiens
  misc_RNA (1)...(19): siRNA sense strand
ggacaacuccagguucauc

SEQ ID NO: 493122 - RNA, 19 nt, Homo sapiens
  misc_RNA (1)...(19): siRNA sense strand
ucacgagcagcacuucuuu

SEQ ID NO: 493123 - RNA, 19 nt, Homo sapiens
  misc_RNA (1)...(19): siRNA sense strand
ggaucgacccaaccuaugu

SEQ ID NO: 493124 - RNA, 19 nt, Homo sapiens
  misc_RNA (1)...(19): siRNA sense strand
aagggucgcugaagcuguu

SEQ ID NO: 493125 - RNA, 19 nt, Homo sapiens
  misc_RNA (1)...(19): siRNA sense strand
cgggacaacuccagguuca

SEQ ID NO: 493126 - RNA, 19 nt, Homo sapiens
  misc_RNA (1)...(19): siRNA sense strand
agcaggagaucgccaaugu

SEQ ID NO: 493127 - RNA, 19 nt, Homo sapiens
  misc_RNA (1)...(19): siRNA sense strand
uaugacaucacaguagaua

SEQ ID NO: 493128 - RNA, 19 nt, Homo sapiens
  misc_RNA (1)...(19): siRNA sense strand
ccagcgugcaccuguauuu

SEQ ID NO: 493129 - RNA, 19 nt, Homo sapiens
  misc_RNA (1)...(19): siRNA sense strand
ccaaggacacagacaguuc

SEQ ID NO: 493130 - RNA, 19 nt, Homo sapiens
  misc_RNA (1)...(19): siRNA sense strand
gaaccgggacaagaauuuc

SEQ ID NO: 493131 - RNA, 19 nt, Homo sapiens
  misc_RNA (1)...(19): siRNA sense strand
caagaaccgggacaagaau

SEQ ID NO: 493132 - RNA, 19 nt, Homo sapiens
  misc_RNA (1)...(19): siRNA sense strand
gccugggacuucuucauca

SEQ ID NO: 493133 - RNA, 19 nt, Homo sapiens
  misc_RNA (1)...(19): siRNA sense strand
acagggaacugagcagcuu

SEQ ID NO: 493134 - RNA, 19 nt, Homo sapiens
  misc_RNA (1)...(19): siRNA sense strand
ccagccuccugacgaugua

SEQ ID NO: 493135 - RNA, 19 nt, Homo sapiens
  misc_RNA (1)...(19): siRNA sense strand
caaggacacagacaguuca

SEQ ID NO: 493136 - RNA, 19 nt, Homo sapiens
  misc_RNA (1)...(19): siRNA sense strand
guauuucuaugacgaccau

SEQ ID NO: 493137 - RNA, 19 nt, Homo sapiens
  misc_RNA (1)...(19): siRNA sense strand
caugcucacugcuuacaca

SEQ ID NO: 493138 - RNA, 19 nt, Homo sapiens
  misc_RNA (1)...(19): siRNA sense strand
gggcaaggacgcacugucu

SEQ ID NO: 493139 - RNA, 19 nt, Homo sapiens
  misc_RNA (1)...(19): siRNA sense strand
cggcagagacgcuugagau

SEQ ID NO: 493140 - RNA, 19 nt, Homo sapiens
  misc_RNA (1)...(19): siRNA sense strand
gaucccagcaggcauugug

SEQ ID NO: 493141 - RNA, 19 nt, Homo sapiens
  misc_RNA (1)...(19): siRNA sense strand
caagaauuuccucaaguca

SEQ ID NO: 493142 - RNA, 19 nt, Homo sapiens
  misc_RNA (1)...(19): siRNA sense strand
guacauggagcagaguuuc

SEQ ID NO: 493143 - RNA, 19 nt, Homo sapiens
  misc_RNA (1)...(19): siRNA sense strand
gagcugguggcauuccuau

SEQ ID NO: 493144 - RNA, 19 nt, Homo sapiens
  misc_RNA (1)...(19): siRNA sense strand
acacggugcuggagaacag

SEQ ID NO: 493145 - RNA, 19 nt, Homo sapiens
  misc_RNA (1)...(19): siRNA sense strand
gaugucaugcucacugcuu

SEQ ID NO: 493146 - RNA, 19 nt, Homo sapiens
  misc_RNA (1)...(19): siRNA sense strand
agaaccgggacaagaauuu

SEQ ID NO: 493147 - RNA, 19 nt, Homo sapiens
  misc_RNA (1)...(19): siRNA sense strand
gugcaccuguauuucuaug

SEQ ID NO: 493148 - RNA, 19 nt, Homo sapiens
  misc_RNA (1)...(19): siRNA sense strand
uggacaagcguuccgacua

SEQ ID NO: 493149 - RNA, 19 nt, Homo sapiens
  misc_RNA (1)...(19): siRNA sense strand
ucagcugacugggaagaug

SEQ ID NO: 493150 - RNA, 19 nt, Homo sapiens
  misc_RNA (1)...(19): siRNA sense strand
agaaaggaaggcagaggaa

SEQ ID NO: 493151 - RNA, 19 nt, Homo sapiens
  misc_RNA (1)...(19): siRNA sense strand
ccuacaugcuggugguuca

SEQ ID NO: 493152 - RNA, 19 nt, Homo sapiens
  misc_RNA (1)...(19): siRNA sense strand
acuccagguucaucaagaa

SEQ ID NO: 493153 - RNA, 19 nt, Homo sapiens
  misc_RNA (1)...(19): siRNA sense strand
cagcugacugggaagauga

SEQ ID NO: 493154 - RNA, 19 nt, Homo sapiens
  misc_RNA (1)...(19): siRNA sense strand
ccugggacuucuucaucaa

SEQ ID NO: 493155 - RNA, 19 nt, Homo sapiens
  misc_RNA (1)...(19): siRNA sense strand
caucuuaugacaucacagu

SEQ ID NO: 493156 - RNA, 19 nt, Homo sapiens
  misc_RNA (1)...(19): siRNA sense strand
gaucgacccaaccuaugug

SEQ ID NO: 493157 - RNA, 19 nt, Homo sapiens
  misc_RNA (1)...(19): siRNA sense strand
gggacaagaauuuccucaa

SEQ ID NO: 493158 - RNA, 19 nt, Homo sapiens
  misc_RNA (1)...(19): siRNA sense strand
ggagcugguggcauuccua

SEQ ID NO: 493159 - RNA, 19 nt, Homo sapiens
  misc_RNA (1)...(19): siRNA sense strand
cguccagcgugcaccugua

SEQ ID NO: 493160 - RNA, 19 nt, Homo sapiens
  misc_RNA (1)...(19): siRNA sense strand
cgauguaccugcggagcau

SEQ ID NO: 493161 - RNA, 19 nt, Homo sapiens
  misc_RNA (1)...(19): siRNA sense strand
gcuggacugugugccauag

SEQ ID NO: 493162 - RNA, 19 nt, Homo sapiens
  misc_RNA (1)...(19): siRNA sense strand
ggacuguucgacuccuuca

SEQ ID NO: 493163 - RNA, 19 nt, Homo sapiens
  misc_RNA (1)...(19): siRNA sense strand
gcaggagaucgccaaugug

SEQ ID NO: 493164 - RNA, 19 nt, Homo sapiens
  misc_RNA (1)...(19): siRNA sense strand
uauccaaccaggaccaaug

SEQ ID NO: 493165 - RNA, 19 nt, Homo sapiens
  misc_RNA (1)...(19): siRNA sense strand
ggcagagacgcuugagaug

SEQ ID NO: 493166 - RNA, 19 nt, Homo sapiens
  misc_RNA (1)...(19): siRNA sense strand
cagacgggcgacucaggua

SEQ ID NO: 493167 - RNA, 19 nt, Homo sapiens
  misc_RNA (1)...(19): siRNA sense strand
gcacuucuuuuacauccau

SEQ ID NO: 493168 - RNA, 19 nt, Homo sapiens
  misc_RNA (1)...(19): siRNA sense strand
gucuggagguuggcacuga

SEQ ID NO: 493169 - RNA, 19 nt, Homo sapiens
  misc_RNA (1)...(19): siRNA sense strand
ggccugggacuucuucauc

SEQ ID NO: 493170 - RNA, 19 nt, Homo sapiens
  misc_RNA (1)...(19): siRNA sense strand
ugcgccaguucuacacaua

SEQ ID NO: 493171 - RNA, 19 nt, Homo sapiens
  misc_RNA (1)...(19): siRNA sense strand
acacagaugacccgcuugu

SEQ ID NO: 493172 - RNA, 19 nt, Homo sapiens
  misc_RNA (1)...(19): siRNA sense strand
gagagaagaugauguauaa

SEQ ID NO: 493173 - RNA, 19 nt, Homo sapiens
  misc_RNA (1)...(19): siRNA sense strand
ugacaaggauucaaacuua

SEQ ID NO: 493174 - RNA, 19 nt, Homo sapiens
  misc_RNA (1)...(19): siRNA sense strand
gagaauaacucaucagaau

SEQ ID NO: 493175 - RNA, 19 nt, Homo sapiens
  misc_RNA (1)...(19): siRNA sense strand
gaaaugguaucguguuauu

SEQ ID NO: 493176 - RNA, 19 nt, Homo sapiens
  misc_RNA (1)...(19): siRNA sense strand
gaagauccauuuaaagaga

SEQ ID NO: 493177 - RNA, 19 nt, Homo sapiens
  misc_RNA (1)...(19): siRNA sense strand
gaaaucaucugcaaaugug

SEQ ID NO: 493178 - RNA, 19 nt, Homo sapiens
  misc_RNA (1)...(19): siRNA sense strand
ggaaaugaaucagguguaa

SEQ ID NO: 493179 - RNA, 19 nt, Homo sapiens
  misc_RNA (1)...(19): siRNA sense strand
gaauaacccaucacuaaua

SEQ ID NO: 493180 - RNA, 19 nt, Homo sapiens
  misc_RNA (1)...(19): siRNA sense strand
gaagaaggucuggauauua

SEQ ID NO: 493181 - RNA, 19 nt, Homo sapiens
  misc_RNA (1)...(19): siRNA sense strand
gcaaggaguuccaaccauu

SEQ ID NO: 493182 - RNA, 19 nt, Homo sapiens
  misc_RNA (1)...(19): siRNA sense strand
gaacaaugauggugcacaa

SEQ ID NO: 493183 - RNA, 19 nt, Homo sapiens
  misc_RNA (1)...(19): siRNA sense strand
gaaauauugccaagcauua

SEQ ID NO: 493184 - RNA, 19 nt, Homo sapiens
  misc_RNA (1)...(19): siRNA sense strand
cagagaagauccauuuaaa

SEQ ID NO: 493185 - RNA, 19 nt, Homo sapiens
  misc_RNA (1)...(19): siRNA sense strand
ggaaucagcacgaggaaua

SEQ ID NO: 493186 - RNA, 19 nt, Homo sapiens
  misc_RNA (1)...(19): siRNA sense strand
acagauagauuucucauga

SEQ ID NO: 493187 - RNA, 19 nt, Homo sapiens
  misc_RNA (1)...(19): siRNA sense strand
gaagauauccauguaauug

SEQ ID NO: 493188 - RNA, 19 nt, Homo sapiens
  misc_RNA (1)...(19): siRNA sense strand
gaggaacuguugacaauug

SEQ ID NO: 493189 - RNA, 19 nt, Homo sapiens
  misc_RNA (1)...(19): siRNA sense strand
gagaagauccauuuaaaga

SEQ ID NO: 493190 - RNA, 19 nt, Homo sapiens
  misc_RNA (1)...(19): siRNA sense strand
gcucaggccuuaccaaaug

SEQ ID NO: 493191 - RNA, 19 nt, Homo sapiens
  misc_RNA (1)...(19): siRNA sense strand
ucaaggaacuuuacauugu

SEQ ID NO: 493192 - RNA, 19 nt, Homo sapiens
  misc_RNA (1)...(19): siRNA sense strand
gcacgaggaauaaucuuua

SEQ ID NO: 493193 - RNA, 19 nt, Homo sapiens
  misc_RNA (1)...(19): siRNA sense strand
cagaguggcuguuuacauu

SEQ ID NO: 493194 - RNA, 19 nt, Homo sapiens
  misc_RNA (1)...(19): siRNA sense strand
ugacacaauucgaaugaua

SEQ ID NO: 493195 - RNA, 19 nt, Homo sapiens
  misc_RNA (1)...(19): siRNA sense strand
aagaaggucuggauauuaa

SEQ ID NO: 493196 - RNA, 19 nt, Homo sapiens
  misc_RNA (1)...(19): siRNA sense strand
gaaacuggaugaaacagau

SEQ ID NO: 493197 - RNA, 19 nt, Homo sapiens
  misc_RNA (1)...(19): siRNA sense strand
uaagaaguuugcagucaua

SEQ ID NO: 493198 - RNA, 19 nt, Homo sapiens
  misc_RNA (1)...(19): siRNA sense strand
gagaauuuaucacaaguug

SEQ ID NO: 493199 - RNA, 19 nt, Homo sapiens
  misc_RNA (1)...(19): siRNA sense strand
ggaagaauaucaucaucug

SEQ ID NO: 493200 - RNA, 19 nt, Homo sapiens
  misc_RNA (1)...(19): siRNA sense strand
caacaaagaagcaguguau

SEQ ID NO: 493201 - RNA, 19 nt, Homo sapiens
  misc_RNA (1)...(19): siRNA sense strand
acaauagacucaagaaaga

SEQ ID NO: 493202 - RNA, 19 nt, Homo sapiens
  misc_RNA (1)...(19): siRNA sense strand
gauaagaaguuugcaguca

SEQ ID NO: 493203 - RNA, 19 nt, Homo sapiens
  misc_RNA (1)...(19): siRNA sense strand
gaaauaaugacaaggauuc

SEQ ID NO: 493204 - RNA, 19 nt, Homo sapiens
  misc_RNA (1)...(19): siRNA sense strand
augcagagauugagaauuu

SEQ ID NO: 493205 - RNA, 19 nt, Homo sapiens
  misc_RNA (1)...(19): siRNA sense strand
uuagagacgucuuggauaa

SEQ ID NO: 493206 - RNA, 19 nt, Homo sapiens
  misc_RNA (1)...(19): siRNA sense strand
ggaugaaacagauagauuu

SEQ ID NO: 493207 - RNA, 19 nt, Homo sapiens
  misc_RNA (1)...(19): siRNA sense strand
gaauaacucaucagaauca

SEQ ID NO: 493208 - RNA, 19 nt, Homo sapiens
  misc_RNA (1)...(19): siRNA sense strand
gggaagauauccauguaau

SEQ ID NO: 493209 - RNA, 19 nt, Homo sapiens
  misc_RNA (1)...(19): siRNA sense strand
aagaauaacccaucacuaa

SEQ ID NO: 493210 - RNA, 19 nt, Homo sapiens
  misc_RNA (1)...(19): siRNA sense strand
agaaggaaaucgcaaagaa

SEQ ID NO: 493211 - RNA, 19 nt, Homo sapiens
  misc_RNA (1)...(19): siRNA sense strand
gaacucaacccuaugaaca

SEQ ID NO: 493212 - RNA, 19 nt, Homo sapiens
  misc_RNA (1)...(19): siRNA sense strand
gaaguuugcagucauagaa

SEQ ID NO: 493213 - RNA, 19 nt, Homo sapiens
  misc_RNA (1)...(19): siRNA sense strand
agaaagcaaugcagagauu

SEQ ID NO: 493214 - RNA, 19 nt, Homo sapiens
  misc_RNA (1)...(19): siRNA sense strand
ucaaaugaguccaauguca

SEQ ID NO: 493215 - RNA, 19 nt, Homo sapiens
  misc_RNA (1)...(19): siRNA sense strand
caaugaggcccuacaaauu

SEQ ID NO: 493216 - RNA, 19 nt, Homo sapiens
  misc_RNA (1)...(19): siRNA sense strand
gaugaaagucuuggacaua

SEQ ID NO: 493217 - RNA, 19 nt, Homo sapiens
  misc_RNA (1)...(19): siRNA sense strand
aaugaggcccuacaaauua

SEQ ID NO: 493218 - RNA, 19 nt, Homo sapiens
  misc_RNA (1)...(19): siRNA sense strand
acaaagaagcaguguauaa

SEQ ID NO: 493219 - RNA, 19 nt, Homo sapiens
  misc_RNA (1)...(19): siRNA sense strand
gucaaguccugugauauua

SEQ ID NO: 493220 - RNA, 19 nt, Homo sapiens
  misc_RNA (1)...(19): siRNA sense strand
aagaaaugguaucguguua

SEQ ID NO: 493221 - RNA, 19 nt, Homo sapiens
  misc_RNA (1)...(19): siRNA sense strand
gaagaaaugguaucguguu

SEQ ID NO: 493222 - RNA, 19 nt, Homo sapiens
  misc_RNA (1)...(19): siRNA sense strand
caaguccugugauauuauu

SEQ ID NO: 493223 - RNA, 19 nt, Homo sapiens
  misc_RNA (1)...(19): siRNA sense strand
gaacaugcaggcaguugaa

SEQ ID NO: 493224 - RNA, 19 nt, Homo sapiens
  misc_RNA (1)...(19): siRNA sense strand
agaagaaggucuggauauu

SEQ ID NO: 493225 - RNA, 19 nt, Homo sapiens
  misc_RNA (1)...(19): siRNA sense strand
gaaaaugcaucacgucaau

SEQ ID NO: 493226 - RNA, 19 nt, Homo sapiens
  misc_RNA (1)...(19): siRNA sense strand
gaauuacagaugcaaagua

SEQ ID NO: 493227 - RNA, 19 nt, Homo sapiens
  misc_RNA (1)...(19): siRNA sense strand
gaagcaguguauaauaaca

SEQ ID NO: 493228 - RNA, 19 nt, Homo sapiens
  misc_RNA (1)...(19): siRNA sense strand
gaagacagaaaccggauug

SEQ ID NO: 493229 - RNA, 19 nt, Homo sapiens
  misc_RNA (1)...(19): siRNA sense strand
aaagaagugugccgacuau

SEQ ID NO: 493230 - RNA, 19 nt, Homo sapiens
  misc_RNA (1)...(19): siRNA sense strand
gaacaugagacaguuaaug

SEQ ID NO: 493231 - RNA, 19 nt, Homo sapiens
  misc_RNA (1)...(19): siRNA sense strand
ugaaaaggcuggcugaaaa

SEQ ID NO: 493232 - RNA, 19 nt, Homo sapiens
  misc_RNA (1)...(19): siRNA sense strand
gaugaugaguauugugaug

SEQ ID NO: 493233 - RNA, 19 nt, Homo sapiens
  misc_RNA (1)...(19): siRNA sense strand
cauagaagaugauagugau

SEQ ID NO: 493234 - RNA, 19 nt, Homo sapiens
  misc_RNA (1)...(19): siRNA sense strand
ccagagaagauccauuuaa

SEQ ID NO: 493235 - RNA, 19 nt, Homo sapiens
  misc_RNA (1)...(19): siRNA sense strand
caaagaagcaguguauaau

SEQ ID NO: 493236 - RNA, 19 nt, Homo sapiens
  misc_RNA (1)...(19): siRNA sense strand
gagaagaugauguauaaag

SEQ ID NO: 493237 - RNA, 19 nt, Homo sapiens
  misc_RNA (1)...(19): siRNA sense strand
gugccaaucuugaugcauu

SEQ ID NO: 493238 - RNA, 19 nt, Homo sapiens
  misc_RNA (1)...(19): siRNA sense strand
gaagcaagccaaagcugaa

SEQ ID NO: 493239 - RNA, 19 nt, Homo sapiens
  misc_RNA (1)...(19): siRNA sense strand
caaccacaguucagccaaa

SEQ ID NO: 493240 - RNA, 19 nt, Homo sapiens
  misc_RNA (1)...(19): siRNA sense strand
gcagugugcuagccuguuc

SEQ ID NO: 493241 - RNA, 19 nt, Homo sapiens
  misc_RNA (1)...(19): siRNA sense strand
gccaagcauuacaagaaua

SEQ ID NO: 493242 - RNA, 19 nt, Homo sapiens
  misc_RNA (1)...(19): siRNA sense strand
gcagaacauuugaggaagu

SEQ ID NO: 493243 - RNA, 19 nt, Homo sapiens
  misc_RNA (1)...(19): siRNA sense strand
gacaaggauucaaacuuau

SEQ ID NO: 493244 - RNA, 19 nt, Homo sapiens
  misc_RNA (1)...(19): siRNA sense strand
guugucaaguccugugaua

SEQ ID NO: 493245 - RNA, 19 nt, Homo sapiens
  misc_RNA (1)...(19): siRNA sense strand
cgagagaagaugauguaua

SEQ ID NO: 493246 - RNA, 19 nt, Homo sapiens
  misc_RNA (1)...(19): siRNA sense strand
ucacagugguucaggaguu

SEQ ID NO: 493247 - RNA, 19 nt, Homo sapiens
  misc_RNA (1)...(19): siRNA sense strand
cagaacauuugaggaagua

SEQ ID NO: 493248 - RNA, 19 nt, Homo sapiens
  misc_RNA (1)...(19): siRNA sense strand
aaaccuugaucaacugaaa

SEQ ID NO: 493249 - RNA, 19 nt, Homo sapiens
  misc_RNA (1)...(19): siRNA sense strand
gaugcaaaguauaauggaa

SEQ ID NO: 493250 - RNA, 19 nt, Homo sapiens
  misc_RNA (1)...(19): siRNA sense strand
gaagugugccgacuaucaa

SEQ ID NO: 493251 - RNA, 19 nt, Homo sapiens
  misc_RNA (1)...(19): siRNA sense strand
caguacagcucaaauccuu

SEQ ID NO: 493252 - RNA, 19 nt, Homo sapiens
  misc_RNA (1)...(19): siRNA sense strand
ggaagauauccauguaauu

SEQ ID NO: 493253 - RNA, 19 nt, Homo sapiens
  misc_RNA (1)...(19): siRNA sense strand
caugaggcauuauuugaug

SEQ ID NO: 493254 - RNA, 19 nt, Homo sapiens
  misc_RNA (1)...(19): siRNA sense strand
gaagagaaagauaagaagu

SEQ ID NO: 493255 - RNA, 19 nt, Homo sapiens
  misc_RNA (1)...(19): siRNA sense strand
agagaaauauugccaagca

SEQ ID NO: 493256 - RNA, 19 nt, Homo sapiens
  misc_RNA (1)...(19): siRNA sense strand
ggaguuaucgaacaugaga

SEQ ID NO: 493257 - RNA, 19 nt, Homo sapiens
  misc_RNA (1)...(19): siRNA sense strand
ucaaacccaugacacagaa

SEQ ID NO: 493258 - RNA, 19 nt, Homo sapiens
  misc_RNA (1)...(19): siRNA sense strand
gaaaagcugaccaaauuaa

SEQ ID NO: 493259 - RNA, 19 nt, Homo sapiens
  misc_RNA (1)...(19): siRNA sense strand
ugaagaugaggaugauuua

SEQ ID NO: 493260 - RNA, 19 nt, Homo sapiens
  misc_RNA (1)...(19): siRNA sense strand
caacaugggcagugauuca

SEQ ID NO: 493261 - RNA, 19 nt, Homo sapiens
  misc_RNA (1)...(19): siRNA sense strand
guggacaagcuucuaguua

SEQ ID NO: 493262 - RNA, 19 nt, Homo sapiens
  misc_RNA (1)...(19): siRNA sense strand
gaagaugaggaugauuuaa

SEQ ID NO: 493263 - RNA, 19 nt, Homo sapiens
  misc_RNA (1)...(19): siRNA sense strand
ugaguccaaugucagauuu

SEQ ID NO: 493264 - RNA, 19 nt, Homo sapiens
  misc_RNA (1)...(19): siRNA sense strand
gguaucguguuauuggauu

SEQ ID NO: 493265 - RNA, 19 nt, Homo sapiens
  misc_RNA (1)...(19): siRNA sense strand
gaagggaagaauaucauca

SEQ ID NO: 493266 - RNA, 19 nt, Homo sapiens
  misc_RNA (1)...(19): siRNA sense strand
gaaugcuguuuauuuagug

SEQ ID NO: 493267 - RNA, 19 nt, Homo sapiens
  misc_RNA (1)...(19): siRNA sense strand
ggugaaaucaucugcaaau

SEQ ID NO: 493268 - RNA, 19 nt, Homo sapiens
  misc_RNA (1)...(19): siRNA sense strand
ccaagcauuacaagaauaa

SEQ ID NO: 493269 - RNA, 19 nt, Homo sapiens
  misc_RNA (1)...(19): siRNA sense strand
guuaaugauuuccgagaga

SEQ ID NO: 493270 - RNA, 19 nt, Homo sapiens
  misc_RNA (1)...(19): siRNA sense strand
acacagcagugaguucaaa

SEQ ID NO: 493271 - RNA, 19 nt, Homo sapiens
  misc_RNA (1)...(19): siRNA sense strand
ugagacaguuaaugauuuc

SEQ ID NO: 493272 - RNA, 19 nt, Homo sapiens
  misc_RNA (1)...(19): siRNA sense strand
gaggagaccugacauguuu

SEQ ID NO: 493273 - RNA, 19 nt, Homo sapiens
  misc_RNA (1)...(19): siRNA sense strand
ggaaguggaucccauugaa

SEQ ID NO: 493274 - RNA, 19 nt, Homo sapiens
  misc_RNA (1)...(19): siRNA sense strand
agaaggagcuggugacaga

SEQ ID NO: 493275 - RNA, 19 nt, Homo sapiens
  misc_RNA (1)...(19): siRNA sense strand
ucaagugccucucagguaa

SEQ ID NO: 493276 - RNA, 19 nt, Homo sapiens
  misc_RNA (1)...(19): siRNA sense strand
gcuccuaucucuccuaugu

SEQ ID NO: 493277 - RNA, 19 nt, Homo sapiens
  misc_RNA (1)...(19): siRNA sense strand
caauggagcuccuaucucu

SEQ ID NO: 493278 - RNA, 19 nt, Homo sapiens
  misc_RNA (1)...(19): siRNA sense strand
caaguggugucccucauga

SEQ ID NO: 493279 - RNA, 19 nt, Homo sapiens
  misc_RNA (1)...(19): siRNA sense strand
ccagcaaggucuucaacaa

SEQ ID NO: 493280 - RNA, 19 nt, Homo sapiens
  misc_RNA (1)...(19): siRNA sense strand
ugaagaagguggagaacca

SEQ ID NO: 493281 - RNA, 19 nt, Homo sapiens
  misc_RNA (1)...(19): siRNA sense strand
gaaguggaucccauugaaa

SEQ ID NO: 493282 - RNA, 19 nt, Homo sapiens
  misc_RNA (1)...(19): siRNA sense strand
gggcagauccugguuaaug

SEQ ID NO: 493283 - RNA, 19 nt, Homo sapiens
  misc_RNA (1)...(19): siRNA sense strand
gugccaagcucuuugagau

SEQ ID NO: 493284 - RNA, 19 nt, Homo sapiens
  misc_RNA (1)...(19): siRNA sense strand
ggauagcgccucuuguuuc

SEQ ID NO: 493285 - RNA, 19 nt, Homo sapiens
  misc_RNA (1)...(19): siRNA sense strand
caacccggcugacuucauc

SEQ ID NO: 493286 - RNA, 19 nt, Homo sapiens
  misc_RNA (1)...(19): siRNA sense strand
gggagcaccucaacuacug

SEQ ID NO: 493287 - RNA, 19 nt, Homo sapiens
  misc_RNA (1)...(19): siRNA sense strand
caacaacccgccugucaug

SEQ ID NO: 493288 - RNA, 19 nt, Homo sapiens
  misc_RNA (1)...(19): siRNA sense strand
caacccgccugucauguuc

SEQ ID NO: 493289 - RNA, 19 nt, Homo sapiens
  misc_RNA (1)...(19): siRNA sense strand
guucagggcugugcagaau

SEQ ID NO: 493290 - RNA, 19 nt, Homo sapiens
  misc_RNA (1)...(19): siRNA sense strand
gcaagucuacauucaugaa

SEQ ID NO: 493291 - RNA, 19 nt, Homo sapiens
  misc_RNA (1)...(19): siRNA sense strand
gagcuccuaucucuccuau

SEQ ID NO: 493292 - RNA, 19 nt, Homo sapiens
  misc_RNA (1)...(19): siRNA sense strand
auaagacccuucucaagug

SEQ ID NO: 493293 - RNA, 19 nt, Homo sapiens
  misc_RNA (1)...(19): siRNA sense strand
ucguggagcuguccuauuc

SEQ ID NO: 493294 - RNA, 19 nt, Homo sapiens
  misc_RNA (1)...(19): siRNA sense strand
uauaagacccuucucaagu

SEQ ID NO: 493295 - RNA, 19 nt, Homo sapiens
  misc_RNA (1)...(19): siRNA sense strand
cgccaucccuguccucuug

SEQ ID NO: 493296 - RNA, 19 nt, Homo sapiens
  misc_RNA (1)...(19): siRNA sense strand
gccaagcucuuugagaugu

SEQ ID NO: 493297 - RNA, 19 nt, Homo sapiens
  misc_RNA (1)...(19): siRNA sense strand
gaagagcagcccugagaag

SEQ ID NO: 493298 - RNA, 19 nt, Homo sapiens
  misc_RNA (1)...(19): siRNA sense strand
gcuggcaagucuacauuca

SEQ ID NO: 493299 - RNA, 19 nt, Homo sapiens
  misc_RNA (1)...(19): siRNA sense strand
ucaagaccauccccacuua

SEQ ID NO: 493300 - RNA, 19 nt, Homo sapiens
  misc_RNA (1)...(19): siRNA sense strand
caacaccggcugccucuuc

SEQ ID NO: 493301 - RNA, 19 nt, Homo sapiens
  misc_RNA (1)...(19): siRNA sense strand
ccagcacccucacacaguu

SEQ ID NO: 493302 - RNA, 19 nt, Homo sapiens
  misc_RNA (1)...(19): siRNA sense strand
gagcagcccugagaagaac

SEQ ID NO: 493303 - RNA, 19 nt, Homo sapiens
  misc_RNA (1)...(19): siRNA sense strand
agaaugggcugugcgcuau

SEQ ID NO: 493304 - RNA, 19 nt, Homo sapiens
  misc_RNA (1)...(19): siRNA sense strand
cugaggaccuuccgcaaga

SEQ ID NO: 493305 - RNA, 19 nt, Homo sapiens
  misc_RNA (1)...(19): siRNA sense strand
uggcaagucuacauucaug

SEQ ID NO: 493306 - RNA, 19 nt, Homo sapiens
  misc_RNA (1)...(19): siRNA sense strand
cuacauucaugaacaucuu

SEQ ID NO: 493307 - RNA, 19 nt, Homo sapiens
  misc_RNA (1)...(19): siRNA sense strand
ccugacauguuuagaggaa

SEQ ID NO: 493308 - RNA, 19 nt, Homo sapiens
  misc_RNA (1)...(19): siRNA sense strand
caagcucuuugagauguuu

SEQ ID NO: 493309 - RNA, 19 nt, Homo sapiens
  misc_RNA (1)...(19): siRNA sense strand
gaacaucuuggcaggauac

SEQ ID NO: 493310 - RNA, 19 nt, Homo sapiens
  misc_RNA (1)...(19): siRNA sense strand
aagaagagcagcccugaga

SEQ ID NO: 493311 - RNA, 19 nt, Homo sapiens
  misc_RNA (1)...(19): siRNA sense strand
gguggccucuggcgaguau

SEQ ID NO: 493312 - RNA, 19 nt, Homo sapiens
  misc_RNA (1)...(19): siRNA sense strand
gcucagccguggacaucga

SEQ ID NO: 493313 - RNA, 19 nt, Homo sapiens
  misc_RNA (1)...(19): siRNA sense strand
cguauuaccuggccaagac

SEQ ID NO: 493314 - RNA, 19 nt, Homo sapiens
  misc_RNA (1)...(19): siRNA sense strand
gagauggcggucuucauga

SEQ ID NO: 493315 - RNA, 19 nt, Homo sapiens
  misc_RNA (1)...(19): siRNA sense strand
ggccuccucuaccugcaua

SEQ ID NO: 493316 - RNA, 19 nt, Homo sapiens
  misc_RNA (1)...(19): siRNA sense strand
guucaugucccacgugguu

SEQ ID NO: 493317 - RNA, 19 nt, Homo sapiens
  misc_RNA (1)...(19): siRNA sense strand
ccacaacccggcugacuuc

SEQ ID NO: 493318 - RNA, 19 nt, Homo sapiens
  misc_RNA (1)...(19): siRNA sense strand
cagggagucuggaaugaag

SEQ ID NO: 493319 - RNA, 19 nt, Homo sapiens
  misc_RNA (1)...(19): siRNA sense strand
cgaggagaccugacauguu

SEQ ID NO: 493320 - RNA, 19 nt, Homo sapiens
  misc_RNA (1)...(19): siRNA sense strand
ggagaaccacaucacugaa

SEQ ID NO: 493321 - RNA, 19 nt, Homo sapiens
  misc_RNA (1)...(19): siRNA sense strand
uaaagggacucggcuugca

SEQ ID NO: 493322 - RNA, 19 nt, Homo sapiens
  misc_RNA (1)...(19): siRNA sense strand
gaagaaggagcuggugaca

SEQ ID NO: 493323 - RNA, 19 nt, Homo sapiens
  misc_RNA (1)...(19): siRNA sense strand
ggcagauccugguuaaugg

SEQ ID NO: 493324 - RNA, 19 nt, Homo sapiens
  misc_RNA (1)...(19): siRNA sense strand
gugagaagcaggaggugaa

SEQ ID NO: 493325 - RNA, 19 nt, Homo sapiens
  misc_RNA (1)...(19): siRNA sense strand
guuauaagacccuucucaa

SEQ ID NO: 493326 - RNA, 19 nt, Homo sapiens
  misc_RNA (1)...(19): siRNA sense strand
gcgcuauggcugagaagaa

SEQ ID NO: 493327 - RNA, 19 nt, Homo sapiens
  misc_RNA (1)...(19): siRNA sense strand
ucuuugagauguuugacaa

SEQ ID NO: 493328 - RNA, 19 nt, Homo sapiens
  misc_RNA (1)...(19): siRNA sense strand
ugaccacgcaccugaagaa

SEQ ID NO: 493329 - RNA, 19 nt, Homo sapiens
  misc_RNA (1)...(19): siRNA sense strand
cccuggagcuggucaacaa

SEQ ID NO: 493330 - RNA, 19 nt, Homo sapiens
  misc_RNA (1)...(19): siRNA sense strand
cccuacagguggccacuuu

SEQ ID NO: 493331 - RNA, 19 nt, Homo sapiens
  misc_RNA (1)...(19): siRNA sense strand
uagcgccucuuguuuccaa

SEQ ID NO: 493332 - RNA, 19 nt, Homo sapiens
  misc_RNA (1)...(19): siRNA sense strand
ccugucauguucuuugaug

SEQ ID NO: 493333 - RNA, 19 nt, Homo sapiens
  misc_RNA (1)...(19): siRNA sense strand
uggcugacgugcccuuuca

SEQ ID NO: 493334 - RNA, 19 nt, Homo sapiens
  misc_RNA (1)...(19): siRNA sense strand
agagauggcggucuucaug

SEQ ID NO: 493335 - RNA, 19 nt, Homo sapiens
  misc_RNA (1)...(19): siRNA sense strand
gauagcgccucuuguuucc

SEQ ID NO: 493336 - RNA, 19 nt, Homo sapiens
  misc_RNA (1)...(19): siRNA sense strand
agcaggaggugaagaagga

SEQ ID NO: 493337 - RNA, 19 nt, Homo sapiens
  misc_RNA (1)...(19): siRNA sense strand
uggagaaccacaucacuga

SEQ ID NO: 493338 - RNA, 19 nt, Homo sapiens
  misc_RNA (1)...(19): siRNA sense strand
gcucaucggccuccucuac

SEQ ID NO: 493339 - RNA, 19 nt, Homo sapiens
  misc_RNA (1)...(19): siRNA sense strand
ucagggcugugcagaaugg

SEQ ID NO: 493340 - RNA, 19 nt, Homo sapiens
  misc_RNA (1)...(19): siRNA sense strand
gagaaccacaucacugaag

SEQ ID NO: 493341 - RNA, 19 nt, Homo sapiens
  misc_RNA (1)...(19): siRNA sense strand
ugaacaucuuggcaggaua

SEQ ID NO: 493342 - RNA, 19 nt, Homo sapiens
  misc_RNA (1)...(19): siRNA sense strand
ccugcuacaucaugcaaga

SEQ ID NO: 493343 - RNA, 19 nt, Homo sapiens
  misc_RNA (1)...(19): siRNA sense strand
gcagcauuguguacuggau

SEQ ID NO: 493344 - RNA, 19 nt, Homo sapiens
  misc_RNA (1)...(19): siRNA sense strand
ggucagugcaucuucaaag

SEQ ID NO: 493345 - RNA, 19 nt, Homo sapiens
  misc_RNA (1)...(19): siRNA sense strand
ggauacagggagucuggaa

SEQ ID NO: 493346 - RNA, 19 nt, Homo sapiens
  misc_RNA (1)...(19): siRNA sense strand
agaagcaggaggugaagaa

SEQ ID NO: 493347 - RNA, 19 nt, Homo sapiens
  misc_RNA (1)...(19): siRNA sense strand
ccuuagagauggcggucuu

SEQ ID NO: 493348 - RNA, 19 nt, Homo sapiens
  misc_RNA (1)...(19): siRNA sense strand
ggucuugggcaucuucuuc

SEQ ID NO: 493349 - RNA, 19 nt, Homo sapiens
  misc_RNA (1)...(19): siRNA sense strand
gcgaggagaccugacaugu

SEQ ID NO: 493350 - RNA, 19 nt, Homo sapiens
  misc_RNA (1)...(19): siRNA sense strand
gcagauccugguuaaugga

SEQ ID NO: 493351 - RNA, 19 nt, Homo sapiens
  misc_RNA (1)...(19): siRNA sense strand
guuaccgggucaagucaga

SEQ ID NO: 493352 - RNA, 19 nt, Homo sapiens
  misc_RNA (1)...(19): siRNA sense strand
ggagaccugacauguuuag

SEQ ID NO: 493353 - RNA, 19 nt, Homo sapiens
  misc_RNA (1)...(19): siRNA sense strand
uacagggagucuggaauga

SEQ ID NO: 493354 - RNA, 19 nt, Homo sapiens
  misc_RNA (1)...(19): siRNA sense strand
agcaaggucuucaacaaca

SEQ ID NO: 493355 - RNA, 19 nt, Homo sapiens
  misc_RNA (1)...(19): siRNA sense strand
cgcaagauguccugcuaca

SEQ ID NO: 493356 - RNA, 19 nt, Homo sapiens
  misc_RNA (1)...(19): siRNA sense strand
augccaagcucuacaugga

SEQ ID NO: 493357 - RNA, 19 nt, Homo sapiens
  misc_RNA (1)...(19): siRNA sense strand
gcaauggagcuccuaucuc

SEQ ID NO: 493358 - RNA, 19 nt, Homo sapiens
  misc_RNA (1)...(19): siRNA sense strand
cacgggagcugaggaccuu

SEQ ID NO: 493359 - RNA, 19 nt, Homo sapiens
  misc_RNA (1)...(19): siRNA sense strand
gggcuggcaagucuacauu

SEQ ID NO: 493360 - RNA, 19 nt, Homo sapiens
  misc_RNA (1)...(19): siRNA sense strand
caagugccucucagguaaa

SEQ ID NO: 493361 - RNA, 19 nt, Homo sapiens
  misc_RNA (1)...(19): siRNA sense strand
ggucucugcuaaccugaag

SEQ ID NO: 493362 - RNA, 19 nt, Homo sapiens
  misc_RNA (1)...(19): siRNA sense strand
gaggacagcccugcucucu

SEQ ID NO: 493363 - RNA, 19 nt, Homo sapiens
  misc_RNA (1)...(19): siRNA sense strand
ggucaagucagagagauag

SEQ ID NO: 493364 - RNA, 19 nt, Homo sapiens
  misc_RNA (1)...(19): siRNA sense strand
ggagcgaggagaccugaca

SEQ ID NO: 493365 - RNA, 19 nt, Homo sapiens
  misc_RNA (1)...(19): siRNA sense strand
guggucuacugcagcauug

SEQ ID NO: 493366 - RNA, 19 nt, Homo sapiens
  misc_RNA (1)...(19): siRNA sense strand
guacagccucaaagcguau

SEQ ID NO: 493367 - RNA, 19 nt, Homo sapiens
  misc_RNA (1)...(19): siRNA sense strand
gguuauaagacccuucuca

SEQ ID NO: 493368 - RNA, 19 nt, Homo sapiens
  misc_RNA (1)...(19): siRNA sense strand
cagggucagugcaucuuca

SEQ ID NO: 493369 - RNA, 19 nt, Homo sapiens
  misc_RNA (1)...(19): siRNA sense strand
ccaagcucuuugagauguu

SEQ ID NO: 493370 - RNA, 19 nt, Homo sapiens
  misc_RNA (1)...(19): siRNA sense strand
cuggauagcgccucuuguu

SEQ ID NO: 493371 - RNA, 19 nt, Homo sapiens
  misc_RNA (1)...(19): siRNA sense strand
gcaaggucuucaacaacac

SEQ ID NO: 493372 - RNA, 19 nt, Homo sapiens
  misc_RNA (1)...(19): siRNA sense strand
gaaagcagaugaagccuau

SEQ ID NO: 493373 - RNA, 19 nt, Homo sapiens
  misc_RNA (1)...(19): siRNA sense strand
ggacuucacugccaccuuu

SEQ ID NO: 493374 - RNA, 19 nt, Homo sapiens
  misc_RNA (1)...(19): siRNA sense strand
gcaagacgcugcacaucaa

SEQ ID NO: 493375 - RNA, 19 nt, Homo sapiens
  misc_RNA (1)...(19): siRNA sense strand
gagcugaugugguggaugu

SEQ ID NO: 493376 - RNA, 19 nt, Homo sapiens
  misc_RNA (1)...(19): siRNA sense strand
gcucuaagguacugaagga

SEQ ID NO: 493377 - RNA, 19 nt, Homo sapiens
  misc_RNA (1)...(19): siRNA sense strand
ggaacauccugcaccugua

SEQ ID NO: 493378 - RNA, 19 nt, Homo sapiens
  misc_RNA (1)...(19): siRNA sense strand
acacagaggugcccaugga

SEQ ID NO: 493379 - RNA, 19 nt, Homo sapiens
  misc_RNA (1)...(19): siRNA sense strand
caaagagaauggcauggau

SEQ ID NO: 493380 - RNA, 19 nt, Homo sapiens
  misc_RNA (1)...(19): siRNA sense strand
gguggaggcugccaucuca

SEQ ID NO: 493381 - RNA, 19 nt, Homo sapiens
  misc_RNA (1)...(19): siRNA sense strand
caagaucgcagaggaguuu

SEQ ID NO: 493382 - RNA, 19 nt, Homo sapiens
  misc_RNA (1)...(19): siRNA sense strand
gcaacucggacguguauga

SEQ ID NO: 493383 - RNA, 19 nt, Homo sapiens
  misc_RNA (1)...(19): siRNA sense strand
gcacaucccagacaucauc

SEQ ID NO: 493384 - RNA, 19 nt, Homo sapiens
  misc_RNA (1)...(19): siRNA sense strand
agaggcaggucuucuuuga

SEQ ID NO: 493385 - RNA, 19 nt, Homo sapiens
  misc_RNA (1)...(19): siRNA sense strand
acgaggagcuggaggagaa

SEQ ID NO: 493386 - RNA, 19 nt, Homo sapiens
  misc_RNA (1)...(19): siRNA sense strand
gccaugcgcuuccuguaug

SEQ ID NO: 493387 - RNA, 19 nt, Homo sapiens
  misc_RNA (1)...(19): siRNA sense strand
aguauaagcccaucaagaa

SEQ ID NO: 493388 - RNA, 19 nt, Homo sapiens
  misc_RNA (1)...(19): siRNA sense strand
gaguauaagcccaucaaga

SEQ ID NO: 493389 - RNA, 19 nt, Homo sapiens
  misc_RNA (1)...(19): siRNA sense strand
gcuacggguuccucucuga

SEQ ID NO: 493390 - RNA, 19 nt, Homo sapiens
  misc_RNA (1)...(19): siRNA sense strand
guauaagcccaucaagaaa

SEQ ID NO: 493391 - RNA, 19 nt, Homo sapiens
  misc_RNA (1)...(19): siRNA sense strand
caacguggucuucaaguuc

SEQ ID NO: 493392 - RNA, 19 nt, Homo sapiens
  misc_RNA (1)...(19): siRNA sense strand
uggagaaguucaucgagaa

SEQ ID NO: 493393 - RNA, 19 nt, Homo sapiens
  misc_RNA (1)...(19): siRNA sense strand
gcaugaggcccacgaguuc

SEQ ID NO: 493394 - RNA, 19 nt, Homo sapiens
  misc_RNA (1)...(19): siRNA sense strand
ucagcaagcucuucagcau

SEQ ID NO: 493395 - RNA, 19 nt, Homo sapiens
  misc_RNA (1)...(19): siRNA sense strand
ccauggagcgcguguuuga

SEQ ID NO: 493396 - RNA, 19 nt, Homo sapiens
  misc_RNA (1)...(19): siRNA sense strand
ccaaggagaacaacguaga

SEQ ID NO: 493397 - RNA, 19 nt, Homo sapiens
  misc_RNA (1)...(19): siRNA sense strand
ggagaucaccgacguagac

SEQ ID NO: 493398 - RNA, 19 nt, Homo sapiens
  misc_RNA (1)...(19): siRNA sense strand
ucugugaaguggccaaaga

SEQ ID NO: 493399 - RNA, 19 nt, Homo sapiens
  misc_RNA (1)...(19): siRNA sense strand
cccaaaagcuguugcacua

SEQ ID NO: 493400 - RNA, 19 nt, Homo sapiens
  misc_RNA (1)...(19): siRNA sense strand
cuaaacaggugggcuacga

SEQ ID NO: 493401 - RNA, 19 nt, Homo sapiens
  misc_RNA (1)...(19): siRNA sense strand
ccagaggcaggucuucuuu

SEQ ID NO: 493402 - RNA, 19 nt, Homo sapiens
  misc_RNA (1)...(19): siRNA sense strand
ugaaguggccaaagagaau

SEQ ID NO: 493403 - RNA, 19 nt, Homo sapiens
  misc_RNA (1)...(19): siRNA sense strand
acaacguggucuucaaguu

SEQ ID NO: 493404 - RNA, 19 nt, Homo sapiens
  misc_RNA (1)...(19): siRNA sense strand
agaaugugcucaacaacca

SEQ ID NO: 493405 - RNA, 19 nt, Homo sapiens
  misc_RNA (1)...(19): siRNA sense strand
ucaucaagguggccaagga

SEQ ID NO: 493406 - RNA, 19 nt, Homo sapiens
  misc_RNA (1)...(19): siRNA sense strand
gcugggcgaucucaucaag

SEQ ID NO: 493407 - RNA, 19 nt, Homo sapiens
  misc_RNA (1)...(19): siRNA sense strand
ggaugucuuccguguguuu

SEQ ID NO: 493408 - RNA, 19 nt, Homo sapiens
  misc_RNA (1)...(19): siRNA sense strand
gagauugccauccgugugu

SEQ ID NO: 493409 - RNA, 19 nt, Homo sapiens
  misc_RNA (1)...(19): siRNA sense strand
gcacggcaagcacuacuuc

SEQ ID NO: 493410 - RNA, 19 nt, Homo sapiens
  misc_RNA (1)...(19): siRNA sense strand
caccagcgacucugugaaa

SEQ ID NO: 493411 - RNA, 19 nt, Homo sapiens
  misc_RNA (1)...(19): siRNA sense strand
gaacauccugcaccuguac

SEQ ID NO: 493412 - RNA, 19 nt, Homo sapiens
  misc_RNA (1)...(19): siRNA sense strand
ggagaacaacguagaugca

SEQ ID NO: 493413 - RNA, 19 nt, Homo sapiens
  misc_RNA (1)...(19): siRNA sense strand
gcccauggagcgcguguuu

SEQ ID NO: 493414 - RNA, 19 nt, Homo sapiens
  misc_RNA (1)...(19): siRNA sense strand
ggaccaguaugggaacauc

SEQ ID NO: 493415 - RNA, 19 nt, Homo sapiens
  misc_RNA (1)...(19): siRNA sense strand
ugaggguggugcacagcua

SEQ ID NO: 493416 - RNA, 19 nt, Homo sapiens
  misc_RNA (1)...(19): siRNA sense strand
gcaagguucaugugaccaa

SEQ ID NO: 493417 - RNA, 19 nt, Homo sapiens
  misc_RNA (1)...(19): siRNA sense strand
gcacggccaccaugaaguc

SEQ ID NO: 493418 - RNA, 19 nt, Homo sapiens
  misc_RNA (1)...(19): siRNA sense strand
caggagaacauccgcauca

SEQ ID NO: 493419 - RNA, 19 nt, Homo sapiens
  misc_RNA (1)...(19): siRNA sense strand
ggacaugacacuggaaggu

SEQ ID NO: 493420 - RNA, 19 nt, Homo sapiens
  misc_RNA (1)...(19): siRNA sense strand
ggcaagacgcugcacauca

SEQ ID NO: 493421 - RNA, 19 nt, Homo sapiens
  misc_RNA (1)...(19): siRNA sense strand
gugacgcccuccuccaaga

SEQ ID NO: 493422 - RNA, 19 nt, Homo sapiens
  misc_RNA (1)...(19): siRNA sense strand
gagaauggcauggaugucu

SEQ ID NO: 493423 - RNA, 19 nt, Homo sapiens
  misc_RNA (1)...(19): siRNA sense strand
ccaaagagaauggcaugga

SEQ ID NO: 493424 - RNA, 19 nt, Homo sapiens
  misc_RNA (1)...(19): siRNA sense strand
ugcagaaugugcucaacaa

SEQ ID NO: 493425 - RNA, 19 nt, Homo sapiens
  misc_RNA (1)...(19): siRNA sense strand
ccugaauacucgccucuuc

SEQ ID NO: 493426 - RNA, 19 nt, Homo sapiens
  misc_RNA (1)...(19): siRNA sense strand
ggacuccccuggacacaga

SEQ ID NO: 493427 - RNA, 19 nt, Homo sapiens
  misc_RNA (1)...(19): siRNA sense strand
gcgcacccacgaucucaaa

SEQ ID NO: 493428 - RNA, 19 nt, Homo sapiens
  misc_RNA (1)...(19): siRNA sense strand
gccggaagaugugcucuca

SEQ ID NO: 493429 - RNA, 19 nt, Homo sapiens
  misc_RNA (1)...(19): siRNA sense strand
gcagggguccgguuuauug

SEQ ID NO: 493430 - RNA, 19 nt, Homo sapiens
  misc_RNA (1)...(19): siRNA sense strand
gcucucagcagcuauguac

SEQ ID NO: 493431 - RNA, 19 nt, Homo sapiens
  misc_RNA (1)...(19): siRNA sense strand
ugucugggaugacuucaca

SEQ ID NO: 493432 - RNA, 19 nt, Homo sapiens
  misc_RNA (1)...(19): siRNA sense strand
ucaacuacuugcccaacau

SEQ ID NO: 493433 - RNA, 19 nt, Homo sapiens
  misc_RNA (1)...(19): siRNA sense strand
agaauggcauggaugucuu

SEQ ID NO: 493434 - RNA, 19 nt, Homo sapiens
  misc_RNA (1)...(19): siRNA sense strand
ccagaagguggucgagauu

SEQ ID NO: 493435 - RNA, 19 nt, Homo sapiens
  misc_RNA (1)...(19): siRNA sense strand
ggccaaggagaacaacgua

SEQ ID NO: 493436 - RNA, 19 nt, Homo sapiens
  misc_RNA (1)...(19): siRNA sense strand
gcgcguguuugacuacagu

SEQ ID NO: 493437 - RNA, 19 nt, Homo sapiens
  misc_RNA (1)...(19): siRNA sense strand
cugugaaacucgcuaaaca

SEQ ID NO: 493438 - RNA, 19 nt, Homo sapiens
  misc_RNA (1)...(19): siRNA sense strand
cagaagugguccgcaagau

SEQ ID NO: 493439 - RNA, 19 nt, Homo sapiens
  misc_RNA (1)...(19): siRNA sense strand
caacucggacguguaugaa

SEQ ID NO: 493440 - RNA, 19 nt, Homo sapiens
  misc_RNA (1)...(19): siRNA sense strand
gaaguggccaaagagaaug

SEQ ID NO: 493441 - RNA, 19 nt, Homo sapiens
  misc_RNA (1)...(19): siRNA sense strand
gcugugggcuacaccaacu

SEQ ID NO: 493442 - RNA, 19 nt, Homo sapiens
  misc_RNA (1)...(19): siRNA sense strand
ccaugcgcuuccuguauga

SEQ ID NO: 493443 - RNA, 19 nt, Homo sapiens
  misc_RNA (1)...(19): siRNA sense strand
gugaaguggccaaagagaa

SEQ ID NO: 493444 - RNA, 19 nt, Homo sapiens
  misc_RNA (1)...(19): siRNA sense strand
ucccagacaucaucaaggu

SEQ ID NO: 493445 - RNA, 19 nt, Homo sapiens
  misc_RNA (1)...(19): siRNA sense strand
caacuacuugcccaacaug

SEQ ID NO: 493446 - RNA, 19 nt, Homo sapiens
  misc_RNA (1)...(19): siRNA sense strand
ggacgugaagggccagauc

SEQ ID NO: 493447 - RNA, 19 nt, Homo sapiens
  misc_RNA (1)...(19): siRNA sense strand
gcccacgaguucuccaaca

SEQ ID NO: 493448 - RNA, 19 nt, Homo sapiens
  misc_RNA (1)...(19): siRNA sense strand
ugcaggcacuggagaagga

SEQ ID NO: 493449 - RNA, 19 nt, Homo sapiens
  misc_RNA (1)...(19): siRNA sense strand
ggacguguaugaaaaugag

SEQ ID NO: 493450 - RNA, 19 nt, Homo sapiens
  misc_RNA (1)...(19): siRNA sense strand
gauuccaugucugggauga

SEQ ID NO: 493451 - RNA, 19 nt, Homo sapiens
  misc_RNA (1)...(19): siRNA sense strand
gggcgcuguuuguggagaa

SEQ ID NO: 493452 - RNA, 19 nt, Homo sapiens
  misc_RNA (1)...(19): siRNA sense strand
cgauguguuugcccacuuc

SEQ ID NO: 493453 - RNA, 19 nt, Homo sapiens
  misc_RNA (1)...(19): siRNA sense strand
caaggagaacaacguagau

SEQ ID NO: 493454 - RNA, 19 nt, Homo sapiens
  misc_RNA (1)...(19): siRNA sense strand
uggaggcugccaucucaua

SEQ ID NO: 493455 - RNA, 19 nt, Homo sapiens
  misc_RNA (1)...(19): siRNA sense strand
uauaagcccaucaagaaag

SEQ ID NO: 493456 - RNA, 19 nt, Homo sapiens
  misc_RNA (1)...(19): siRNA sense strand
ggccaacagaggugagauu

SEQ ID NO: 493457 - RNA, 19 nt, Homo sapiens
  misc_RNA (1)...(19): siRNA sense strand
cagcgacucugugaaacuc

SEQ ID NO: 493458 - RNA, 19 nt, Homo sapiens
  misc_RNA (1)...(19): siRNA sense strand
acaucgaggugcagaucuu

SEQ ID NO: 493459 - RNA, 19 nt, Homo sapiens
  misc_RNA (1)...(19): siRNA sense strand
gcucaacaaccagcaguuc

SEQ ID NO: 493460 - RNA, 19 nt, Homo sapiens
  misc_RNA (1)...(19): siRNA sense strand
caagacgcugcacaucaaa

SEQ ID NO: 493461 - RNA, 19 nt, Homo sapiens
  misc_RNA (1)...(19): siRNA sense strand
ucaagguggccaaggagaa

SEQ ID NO: 493462 - RNA, 19 nt, Homo sapiens
  misc_RNA (1)...(19): siRNA sense strand
gaauggcauggaugucuuc

SEQ ID NO: 493463 - RNA, 19 nt, Homo sapiens
  misc_RNA (1)...(19): siRNA sense strand
ccagaagugguccgcaaga

SEQ ID NO: 493464 - RNA, 19 nt, Homo sapiens
  misc_RNA (1)...(19): siRNA sense strand
gcagcugcgguccaucuug

SEQ ID NO: 493465 - RNA, 19 nt, Homo sapiens
  misc_RNA (1)...(19): siRNA sense strand
auaagcccaucaagaaagu

SEQ ID NO: 493466 - RNA, 19 nt, Homo sapiens
  misc_RNA (1)...(19): siRNA sense strand
cuggauagccugaauacuc

SEQ ID NO: 493467 - RNA, 19 nt, Homo sapiens
  misc_RNA (1)...(19): siRNA sense strand
ccagaugcaccggcagaaa

SEQ ID NO: 493468 - RNA, 19 nt, Homo sapiens
  misc_RNA (1)...(19): siRNA sense strand
ggucaagaaggccuaugug

SEQ ID NO: 493469 - RNA, 19 nt, Homo sapiens
  misc_RNA (1)...(19): siRNA sense strand
uggcaacucggacguguau

SEQ ID NO: 493470 - RNA, 19 nt, Homo sapiens
  misc_RNA (1)...(19): siRNA sense strand
gcucagugccaugaagaug

SEQ ID NO: 493471 - RNA, 19 nt, Homo sapiens
  misc_RNA (1)...(19): siRNA sense strand
ggacacccaggccaugaag

SEQ ID NO: 493472 - RNA, 19 nt, Homo sapiens
  misc_RNA (1)...(19): siRNA sense strand
gaaagcagaugaagccuau

SEQ ID NO: 493473 - RNA, 19 nt, Homo sapiens
  misc_RNA (1)...(19): siRNA sense strand
ggacuucacugccaccuuu

SEQ ID NO: 493474 - RNA, 19 nt, Homo sapiens
  misc_RNA (1)...(19): siRNA sense strand
gcaagacgcugcacaucaa

SEQ ID NO: 493475 - RNA, 19 nt, Homo sapiens
  misc_RNA (1)...(19): siRNA sense strand
gagcugaugugguggaugu

SEQ ID NO: 493476 - RNA, 19 nt, Homo sapiens
  misc_RNA (1)...(19): siRNA sense strand
gcucuaagguacugaagga

SEQ ID NO: 493477 - RNA, 19 nt, Homo sapiens
  misc_RNA (1)...(19): siRNA sense strand
ggaacauccugcaccugua

SEQ ID NO: 493478 - RNA, 19 nt, Homo sapiens
  misc_RNA (1)...(19): siRNA sense strand
acacagaggugcccaugga

SEQ ID NO: 493479 - RNA, 19 nt, Homo sapiens
  misc_RNA (1)...(19): siRNA sense strand
caaagagaauggcauggau

SEQ ID NO: 493480 - RNA, 19 nt, Homo sapiens
  misc_RNA (1)...(19): siRNA sense strand
gguggaggcugccaucuca

SEQ ID NO: 493481 - RNA, 19 nt, Homo sapiens
  misc_RNA (1)...(19): siRNA sense strand
caagaucgcagaggaguuu

SEQ ID NO: 493482 - RNA, 19 nt, Homo sapiens
  misc_RNA (1)...(19): siRNA sense strand
gcaacucggacguguauga

SEQ ID NO: 493483 - RNA, 19 nt, Homo sapiens
  misc_RNA (1)...(19): siRNA sense strand
gcacaucccagacaucauc

SEQ ID NO: 493484 - RNA, 19 nt, Homo sapiens
  misc_RNA (1)...(19): siRNA sense strand
agaggcaggucuucuuuga

SEQ ID NO: 493485 - RNA, 19 nt, Homo sapiens
  misc_RNA (1)...(19): siRNA sense strand
acgaggagcuggaggagaa

SEQ ID NO: 493486 - RNA, 19 nt, Homo sapiens
  misc_RNA (1)...(19): siRNA sense strand
gccaugcgcuuccuguaug

SEQ ID NO: 493487 - RNA, 19 nt, Homo sapiens
  misc_RNA (1)...(19): siRNA sense strand
aguauaagcccaucaagaa

SEQ ID NO: 493488 - RNA, 19 nt, Homo sapiens
  misc_RNA (1)...(19): siRNA sense strand
gaguauaagcccaucaaga

SEQ ID NO: 493489 - RNA, 19 nt, Homo sapiens
  misc_RNA (1)...(19): siRNA sense strand
gcuacggguuccucucuga

SEQ ID NO: 493490 - RNA, 19 nt, Homo sapiens
  misc_RNA (1)...(19): siRNA sense strand
guauaagcccaucaagaaa

SEQ ID NO: 493491 - RNA, 19 nt, Homo sapiens
  misc_RNA (1)...(19): siRNA sense strand
caacguggucuucaaguuc

SEQ ID NO: 493492 - RNA, 19 nt, Homo sapiens
  misc_RNA (1)...(19): siRNA sense strand
uggagaaguucaucgagaa

SEQ ID NO: 493493 - RNA, 19 nt, Homo sapiens
  misc_RNA (1)...(19): siRNA sense strand
gcaugaggcccacgaguuc

SEQ ID NO: 493494 - RNA, 19 nt, Homo sapiens
  misc_RNA (1)...(19): siRNA sense strand
ucagcaagcucuucagcau

SEQ ID NO: 493495 - RNA, 19 nt, Homo sapiens
  misc_RNA (1)...(19): siRNA sense strand
ccauggagcgcguguuuga

SEQ ID NO: 493496 - RNA, 19 nt, Homo sapiens
  misc_RNA (1)...(19): siRNA sense strand
ccaaggagaacaacguaga

SEQ ID NO: 493497 - RNA, 19 nt, Homo sapiens
  misc_RNA (1)...(19): siRNA sense strand
ggagaucaccgacguagac

SEQ ID NO: 493498 - RNA, 19 nt, Homo sapiens
  misc_RNA (1)...(19): siRNA sense strand
ucugugaaguggccaaaga

SEQ ID NO: 493499 - RNA, 19 nt, Homo sapiens
  misc_RNA (1)...(19): siRNA sense strand
cccaaaagcuguugcacua

SEQ ID NO: 493500 - RNA, 19 nt, Homo sapiens
  misc_RNA (1)...(19): siRNA sense strand
cuaaacaggugggcuacga

SEQ ID NO: 493501 - RNA, 19 nt, Homo sapiens
  misc_RNA (1)...(19): siRNA sense strand
ccagaggcaggucuucuuu

SEQ ID NO: 493502 - RNA, 19 nt, Homo sapiens
  misc_RNA (1)...(19): siRNA sense strand
ugaaguggccaaagagaau

SEQ ID NO: 493503 - RNA, 19 nt, Homo sapiens
  misc_RNA (1)...(19): siRNA sense strand
acaacguggucuucaaguu

SEQ ID NO: 493504 - RNA, 19 nt, Homo sapiens
  misc_RNA (1)...(19): siRNA sense strand
agaaugugcucaacaacca

SEQ ID NO: 493505 - RNA, 19 nt, Homo sapiens
  misc_RNA (1)...(19): siRNA sense strand
ucaucaagguggccaagga

SEQ ID NO: 493506 - RNA, 19 nt, Homo sapiens
  misc_RNA (1)...(19): siRNA sense strand
gcugggcgaucucaucaag

SEQ ID NO: 493507 - RNA, 19 nt, Homo sapiens
  misc_RNA (1)...(19): siRNA sense strand
ggaugucuuccguguguuu

SEQ ID NO: 493508 - RNA, 19 nt, Homo sapiens
  misc_RNA (1)...(19): siRNA sense strand
gagauugccauccgugugu

SEQ ID NO: 493509 - RNA, 19 nt, Homo sapiens
  misc_RNA (1)...(19): siRNA sense strand
gcacggcaagcacuacuuc

SEQ ID NO: 493510 - RNA, 19 nt, Homo sapiens
  misc_RNA (1)...(19): siRNA sense strand
caccagcgacucugugaaa

SEQ ID NO: 493511 - RNA, 19 nt, Homo sapiens
  misc_RNA (1)...(19): siRNA sense strand
gaacauccugcaccuguac

SEQ ID NO: 493512 - RNA, 19 nt, Homo sapiens
  misc_RNA (1)...(19): siRNA sense strand
ggagaacaacguagaugca

SEQ ID NO: 493513 - RNA, 19 nt, Homo sapiens
  misc_RNA (1)...(19): siRNA sense strand
gcccauggagcgcguguuu

SEQ ID NO: 493514 - RNA, 19 nt, Homo sapiens
  misc_RNA (1)...(19): siRNA sense strand
ggaccaguaugggaacauc

SEQ ID NO: 493515 - RNA, 19 nt, Homo sapiens
  misc_RNA (1)...(19): siRNA sense strand
ugaggguggugcacagcua

SEQ ID NO: 493516 - RNA, 19 nt, Homo sapiens
  misc_RNA (1)...(19): siRNA sense strand
gcaagguucaugugaccaa

SEQ ID NO: 493517 - RNA, 19 nt, Homo sapiens
  misc_RNA (1)...(19): siRNA sense strand
gcacggccaccaugaaguc

SEQ ID NO: 493518 - RNA, 19 nt, Homo sapiens
  misc_RNA (1)...(19): siRNA sense strand
caggagaacauccgcauca

SEQ ID NO: 493519 - RNA, 19 nt, Homo sapiens
  misc_RNA (1)...(19): siRNA sense strand
ggacaugacacuggaaggu

SEQ ID NO: 493520 - RNA, 19 nt, Homo sapiens
  misc_RNA (1)...(19): siRNA sense strand
ggcaagacgcugcacauca

SEQ ID NO: 493521 - RNA, 19 nt, Homo sapiens
  misc_RNA (1)...(19): siRNA sense strand
gugacgcccuccuccaaga

SEQ ID NO: 493522 - RNA, 19 nt, Homo sapiens
  misc_RNA (1)...(19): siRNA sense strand
gagaauggcauggaugucu

SEQ ID NO: 493523 - RNA, 19 nt, Homo sapiens
  misc_RNA (1)...(19): siRNA sense strand
ccaaagagaauggcaugga

SEQ ID NO: 493524 - RNA, 19 nt, Homo sapiens
  misc_RNA (1)...(19): siRNA sense strand
ugcagaaugugcucaacaa

SEQ ID NO: 493525 - RNA, 19 nt, Homo sapiens
  misc_RNA (1)...(19): siRNA sense strand
ccugaauacucgccucuuc

SEQ ID NO: 493526 - RNA, 19 nt, Homo sapiens
  misc_RNA (1)...(19): siRNA sense strand
ggacuccccuggacacaga

SEQ ID NO: 493527 - RNA, 19 nt, Homo sapiens
  misc_RNA (1)...(19): siRNA sense strand
gcgcacccacgaucucaaa

SEQ ID NO: 493528 - RNA, 19 nt, Homo sapiens
  misc_RNA (1)...(19): siRNA sense strand
gccggaagaugugcucuca

SEQ ID NO: 493529 - RNA, 19 nt, Homo sapiens
  misc_RNA (1)...(19): siRNA sense strand
gcagggguccgguuuauug

SEQ ID NO: 493530 - RNA, 19 nt, Homo sapiens
  misc_RNA (1)...(19): siRNA sense strand
gcucucagcagcuauguac

SEQ ID NO: 493531 - RNA, 19 nt, Homo sapiens
  misc_RNA (1)...(19): siRNA sense strand
ugucugggaugacuucaca

SEQ ID NO: 493532 - RNA, 19 nt, Homo sapiens
  misc_RNA (1)...(19): siRNA sense strand
ucaacuacuugcccaacau

SEQ ID NO: 493533 - RNA, 19 nt, Homo sapiens
  misc_RNA (1)...(19): siRNA sense strand
agaauggcauggaugucuu

SEQ ID NO: 493534 - RNA, 19 nt, Homo sapiens
  misc_RNA (1)...(19): siRNA sense strand
ccagaagguggucgagauu

SEQ ID NO: 493535 - RNA, 19 nt, Homo sapiens
  misc_RNA (1)...(19): siRNA sense strand
ggccaaggagaacaacgua

SEQ ID NO: 493536 - RNA, 19 nt, Homo sapiens
  misc_RNA (1)...(19): siRNA sense strand
gcgcguguuugacuacagu

SEQ ID NO: 493537 - RNA, 19 nt, Homo sapiens
  misc_RNA (1)...(19): siRNA sense strand
cugugaaacucgcuaaaca

SEQ ID NO: 493538 - RNA, 19 nt, Homo sapiens
  misc_RNA (1)...(19): siRNA sense strand
cagaagugguccgcaagau

SEQ ID NO: 493539 - RNA, 19 nt, Homo sapiens
  misc_RNA (1)...(19): siRNA sense strand
caacucggacguguaugaa

SEQ ID NO: 493540 - RNA, 19 nt, Homo sapiens
  misc_RNA (1)...(19): siRNA sense strand
gaaguggccaaagagaaug

SEQ ID NO: 493541 - RNA, 19 nt, Homo sapiens
  misc_RNA (1)...(19): siRNA sense strand
gcugugggcuacaccaacu

SEQ ID NO: 493542 - RNA, 19 nt, Homo sapiens
  misc_RNA (1)...(19): siRNA sense strand
ccaugcgcuuccuguauga

SEQ ID NO: 493543 - RNA, 19 nt, Homo sapiens
  misc_RNA (1)...(19): siRNA sense strand
gugaaguggccaaagagaa

SEQ ID NO: 493544 - RNA, 19 nt, Homo sapiens
  misc_RNA (1)...(19): siRNA sense strand
ucccagacaucaucaaggu

SEQ ID NO: 493545 - RNA, 19 nt, Homo sapiens
  misc_RNA (1)...(19): siRNA sense strand
caacuacuugcccaacaug

SEQ ID NO: 493546 - RNA, 19 nt, Homo sapiens
  misc_RNA (1)...(19): siRNA sense strand
ggacgugaagggccagauc

SEQ ID NO: 493547 - RNA, 19 nt, Homo sapiens
  misc_RNA (1)...(19): siRNA sense strand
gcccacgaguucuccaaca

SEQ ID NO: 493548 - RNA, 19 nt, Homo sapiens
  misc_RNA (1)...(19): siRNA sense strand
ugcaggcacuggagaagga

SEQ ID NO: 493549 - RNA, 19 nt, Homo sapiens
  misc_RNA (1)...(19): siRNA sense strand
ggacguguaugaaaaugag

SEQ ID NO: 493550 - RNA, 19 nt, Homo sapiens
  misc_RNA (1)...(19): siRNA sense strand
gauuccaugucugggauga

SEQ ID NO: 493551 - RNA, 19 nt, Homo sapiens
  misc_RNA (1)...(19): siRNA sense strand
gggcgcuguuuguggagaa

SEQ ID NO: 493552 - RNA, 19 nt, Homo sapiens
  misc_RNA (1)...(19): siRNA sense strand
cgauguguuugcccacuuc

SEQ ID NO: 493553 - RNA, 19 nt, Homo sapiens
  misc_RNA (1)...(19): siRNA sense strand
caaggagaacaacguagau

SEQ ID NO: 493554 - RNA, 19 nt, Homo sapiens
  misc_RNA (1)...(19): siRNA sense strand
uggaggcugccaucucaua

SEQ ID NO: 493555 - RNA, 19 nt, Homo sapiens
  misc_RNA (1)...(19): siRNA sense strand
uauaagcccaucaagaaag

SEQ ID NO: 493556 - RNA, 19 nt, Homo sapiens
  misc_RNA (1)...(19): siRNA sense strand
ggccaacagaggugagauu

SEQ ID NO: 493557 - RNA, 19 nt, Homo sapiens
  misc_RNA (1)...(19): siRNA sense strand
cagcgacucugugaaacuc

SEQ ID NO: 493558 - RNA, 19 nt, Homo sapiens
  misc_RNA (1)...(19): siRNA sense strand
acaucgaggugcagaucuu

SEQ ID NO: 493559 - RNA, 19 nt, Homo sapiens
  misc_RNA (1)...(19): siRNA sense strand
gcucaacaaccagcaguuc

SEQ ID NO: 493560 - RNA, 19 nt, Homo sapiens
  misc_RNA (1)...(19): siRNA sense strand
caagacgcugcacaucaaa

SEQ ID NO: 493561 - RNA, 19 nt, Homo sapiens
  misc_RNA (1)...(19): siRNA sense strand
ucaagguggccaaggagaa

SEQ ID NO: 493562 - RNA, 19 nt, Homo sapiens
  misc_RNA (1)...(19): siRNA sense strand
gaauggcauggaugucuuc

SEQ ID NO: 493563 - RNA, 19 nt, Homo sapiens
  misc_RNA (1)...(19): siRNA sense strand
ccagaagugguccgcaaga

SEQ ID NO: 493564 - RNA, 19 nt, Homo sapiens
  misc_RNA (1)...(19): siRNA sense strand
gcagcugcgguccaucuug

SEQ ID NO: 493565 - RNA, 19 nt, Homo sapiens
  misc_RNA (1)...(19): siRNA sense strand
auaagcccaucaagaaagu

SEQ ID NO: 493566 - RNA, 19 nt, Homo sapiens
  misc_RNA (1)...(19): siRNA sense strand
cuggauagccugaauacuc

SEQ ID NO: 493567 - RNA, 19 nt, Homo sapiens
  misc_RNA (1)...(19): siRNA sense strand
ccagaugcaccggcagaaa

SEQ ID NO: 493568 - RNA, 19 nt, Homo sapiens
  misc_RNA (1)...(19): siRNA sense strand
ggucaagaaggccuaugug

SEQ ID NO: 493569 - RNA, 19 nt, Homo sapiens
  misc_RNA (1)...(19): siRNA sense strand
uggcaacucggacguguau

SEQ ID NO: 493570 - RNA, 19 nt, Homo sapiens
  misc_RNA (1)...(19): siRNA sense strand
gcucagugccaugaagaug

SEQ ID NO: 493571 - RNA, 19 nt, Homo sapiens
  misc_RNA (1)...(19): siRNA sense strand
ggacacccaggccaugaag

SEQ ID NO: 493572 - RNA, 19 nt, Homo sapiens
  misc_RNA (1)...(19): siRNA sense strand
gaaaugaucccuauuguuu

SEQ ID NO: 493573 - RNA, 19 nt, Homo sapiens
  misc_RNA (1)...(19): siRNA sense strand
gaucucagcccacaaauua

SEQ ID NO: 493574 - RNA, 19 nt, Homo sapiens
  misc_RNA (1)...(19): siRNA sense strand
ccaaacagcuaucauauga

SEQ ID NO: 493575 - RNA, 19 nt, Homo sapiens
  misc_RNA (1)...(19): siRNA sense strand
gaagacaaaucagaacuaa

SEQ ID NO: 493576 - RNA, 19 nt, Homo sapiens
  misc_RNA (1)...(19): siRNA sense strand
ggauacagcuggaaaugau

SEQ ID NO: 493577 - RNA, 19 nt, Homo sapiens
  misc_RNA (1)...(19): siRNA sense strand
ccaagcaacuguacuguau

SEQ ID NO: 493578 - RNA, 19 nt, Homo sapiens
  misc_RNA (1)...(19): siRNA sense strand
guaaggaagucaaagugaa

SEQ ID NO: 493579 - RNA, 19 nt, Homo sapiens
  misc_RNA (1)...(19): siRNA sense strand
ggaaaugcacaacaaauug

SEQ ID NO: 493580 - RNA, 19 nt, Homo sapiens
  misc_RNA (1)...(19): siRNA sense strand
guaaaucagucuaguccaa

SEQ ID NO: 493581 - RNA, 19 nt, Homo sapiens
  misc_RNA (1)...(19): siRNA sense strand
caacuguacuguauacugu

SEQ ID NO: 493582 - RNA, 19 nt, Homo sapiens
  misc_RNA (1)...(19): siRNA sense strand
gcaaguuccugcauaugga

SEQ ID NO: 493583 - RNA, 19 nt, Homo sapiens
  misc_RNA (1)...(19): siRNA sense strand
gacggaagauaauggguaa

SEQ ID NO: 493584 - RNA, 19 nt, Homo sapiens
  misc_RNA (1)...(19): siRNA sense strand
gcaauuguuucuguuaaug

SEQ ID NO: 493585 - RNA, 19 nt, Homo sapiens
  misc_RNA (1)...(19): siRNA sense strand
gaacaacuaaugcgucaga

SEQ ID NO: 493586 - RNA, 19 nt, Homo sapiens
  misc_RNA (1)...(19): siRNA sense strand
gcccacaaauuacaacuga

SEQ ID NO: 493587 - RNA, 19 nt, Homo sapiens
  misc_RNA (1)...(19): siRNA sense strand
caacaaauuggccaguaua

SEQ ID NO: 493588 - RNA, 19 nt, Homo sapiens
  misc_RNA (1)...(19): siRNA sense strand
ggacaaauaauggaaauuc

SEQ ID NO: 493589 - RNA, 19 nt, Homo sapiens
  misc_RNA (1)...(19): siRNA sense strand
gaagauaauggguaaggaa

SEQ ID NO: 493590 - RNA, 19 nt, Homo sapiens
  misc_RNA (1)...(19): siRNA sense strand
ggaagacaaaucagaacua

SEQ ID NO: 493591 - RNA, 19 nt, Homo sapiens
  misc_RNA (1)...(19): siRNA sense strand
guauggaaaugcacaacaa

SEQ ID NO: 493592 - RNA, 19 nt, Homo sapiens
  misc_RNA (1)...(19): siRNA sense strand
ggaaaugaucccuauuguu

SEQ ID NO: 493593 - RNA, 19 nt, Homo sapiens
  misc_RNA (1)...(19): siRNA sense strand
gaaagccucccgcuccaaa

SEQ ID NO: 493594 - RNA, 19 nt, Homo sapiens
  misc_RNA (1)...(19): siRNA sense strand
guacauaugagucaaauac

SEQ ID NO: 493595 - RNA, 19 nt, Homo sapiens
  misc_RNA (1)...(19): siRNA sense strand
gcuaacagaacaacuaaug

SEQ ID NO: 493596 - RNA, 19 nt, Homo sapiens
  misc_RNA (1)...(19): siRNA sense strand
caacagcagaaucaaauug

SEQ ID NO: 493597 - RNA, 19 nt, Homo sapiens
  misc_RNA (1)...(19): siRNA sense strand
caacaaaugggaugcugaa

SEQ ID NO: 493598 - RNA, 19 nt, Homo sapiens
  misc_RNA (1)...(19): siRNA sense strand
gcaacucuuuagccagauu

SEQ ID NO: 493599 - RNA, 19 nt, Homo sapiens
  misc_RNA (1)...(19): siRNA sense strand
caacuaaugcgucagacuu

SEQ ID NO: 493600 - RNA, 19 nt, Homo sapiens
  misc_RNA (1)...(19): siRNA sense strand
caggaaagucuaagggaua

SEQ ID NO: 493601 - RNA, 19 nt, Homo sapiens
  misc_RNA (1)...(19): siRNA sense strand
gauaauggguaaggaaguc

SEQ ID NO: 493602 - RNA, 19 nt, Homo sapiens
  misc_RNA (1)...(19): siRNA sense strand
gccaguauaugccuaaugg

SEQ ID NO: 493603 - RNA, 19 nt, Homo sapiens
  misc_RNA (1)...(19): siRNA sense strand
ugaaggucauguugugaaa

SEQ ID NO: 493604 - RNA, 19 nt, Homo sapiens
  misc_RNA (1)...(19): siRNA sense strand
ggaagauaauggguaagga

SEQ ID NO: 493605 - RNA, 19 nt, Homo sapiens
  misc_RNA (1)...(19): siRNA sense strand
uaugauaaaucccgugcaa

SEQ ID NO: 493606 - RNA, 19 nt, Homo sapiens
  misc_RNA (1)...(19): siRNA sense strand
uaagggauauggcuuuguc

SEQ ID NO: 493607 - RNA, 19 nt, Homo sapiens
  misc_RNA (1)...(19): siRNA sense strand
caaauuggccaguauaugc

SEQ ID NO: 493608 - RNA, 19 nt, Homo sapiens
  misc_RNA (1)...(19): siRNA sense strand
gaaaugcacaacaaauugg

SEQ ID NO: 493609 - RNA, 19 nt, Homo sapiens
  misc_RNA (1)...(19): siRNA sense strand
auucgagucuuuccagaua

SEQ ID NO: 493610 - RNA, 19 nt, Homo sapiens
  misc_RNA (1)...(19): siRNA sense strand
aauggaaauucgagucuuu

SEQ ID NO: 493611 - RNA, 19 nt, Homo sapiens
  misc_RNA (1)...(19): siRNA sense strand
gauauggcuuugucuccuu

SEQ ID NO: 493612 - RNA, 19 nt, Homo sapiens
  misc_RNA (1)...(19): siRNA sense strand
ucaaauaccaaacagcuau

SEQ ID NO: 493613 - RNA, 19 nt, Homo sapiens
  misc_RNA (1)...(19): siRNA sense strand
ccuaaugguuggcaaguuc

SEQ ID NO: 493614 - RNA, 19 nt, Homo sapiens
  misc_RNA (1)...(19): siRNA sense strand
gcaaaaugauuauggauac

SEQ ID NO: 493615 - RNA, 19 nt, Homo sapiens
  misc_RNA (1)...(19): siRNA sense strand
guuggcaaguuccugcaua

SEQ ID NO: 493616 - RNA, 19 nt, Homo sapiens
  misc_RNA (1)...(19): siRNA sense strand
ucgguaaccuuuccagaga

SEQ ID NO: 493617 - RNA, 19 nt, Homo sapiens
  misc_RNA (1)...(19): siRNA sense strand
caaagugaauugggcaaca

SEQ ID NO: 493618 - RNA, 19 nt, Homo sapiens
  misc_RNA (1)...(19): siRNA sense strand
gguaaggaagucaaaguga

SEQ ID NO: 493619 - RNA, 19 nt, Homo sapiens
  misc_RNA (1)...(19): siRNA sense strand
cacaacaaauuggccagua

SEQ ID NO: 493620 - RNA, 19 nt, Homo sapiens
  misc_RNA (1)...(19): siRNA sense strand
caaucagccuucuggguau

SEQ ID NO: 493621 - RNA, 19 nt, Homo sapiens
  misc_RNA (1)...(19): siRNA sense strand
gggcuaacagaacaacuaa

SEQ ID NO: 493622 - RNA, 19 nt, Homo sapiens
  misc_RNA (1)...(19): siRNA sense strand
gcagcauguugcccaauca

SEQ ID NO: 493623 - RNA, 19 nt, Homo sapiens
  misc_RNA (1)...(19): siRNA sense strand
acaacaaauuggccaguau

SEQ ID NO: 493624 - RNA, 19 nt, Homo sapiens
  misc_RNA (1)...(19): siRNA sense strand
cauugaaggucauguugug

SEQ ID NO: 493625 - RNA, 19 nt, Homo sapiens
  misc_RNA (1)...(19): siRNA sense strand
gguaaccuuuccagagaug

SEQ ID NO: 493626 - RNA, 19 nt, Homo sapiens
  misc_RNA (1)...(19): siRNA sense strand
cuaauucugcaacucuuua

SEQ ID NO: 493627 - RNA, 19 nt, Homo sapiens
  misc_RNA (1)...(19): siRNA sense strand
gcaacagcagaaucaaauu

SEQ ID NO: 493628 - RNA, 19 nt, Homo sapiens
  misc_RNA (1)...(19): siRNA sense strand
gaguacauaugagucaaau

SEQ ID NO: 493629 - RNA, 19 nt, Homo sapiens
  misc_RNA (1)...(19): siRNA sense strand
ccaaagaguacauaugagu

SEQ ID NO: 493630 - RNA, 19 nt, Homo sapiens
  misc_RNA (1)...(19): siRNA sense strand
auaccaaacagcuaucaua

SEQ ID NO: 493631 - RNA, 19 nt, Homo sapiens
  misc_RNA (1)...(19): siRNA sense strand
ggugaucucagcccacaaa

SEQ ID NO: 493632 - RNA, 19 nt, Homo sapiens
  misc_RNA (1)...(19): siRNA sense strand
uggaaaugcacaacaaauu

SEQ ID NO: 493633 - RNA, 19 nt, Homo sapiens
  misc_RNA (1)...(19): siRNA sense strand
gguguuacuucugggcuaa

SEQ ID NO: 493634 - RNA, 19 nt, Homo sapiens
  misc_RNA (1)...(19): siRNA sense strand
agacaaaucagaacuaacu

SEQ ID NO: 493635 - RNA, 19 nt, Homo sapiens
  misc_RNA (1)...(19): siRNA sense strand
ucauuuccaugucuuuguu

SEQ ID NO: 493636 - RNA, 19 nt, Homo sapiens
  misc_RNA (1)...(19): siRNA sense strand
gaaaugcuauuggggcaaa

SEQ ID NO: 493637 - RNA, 19 nt, Homo sapiens
  misc_RNA (1)...(19): siRNA sense strand
cacaugcaauuguuucugu

SEQ ID NO: 493638 - RNA, 19 nt, Homo sapiens
  misc_RNA (1)...(19): siRNA sense strand
gguggaagacaaaucagaa

SEQ ID NO: 493639 - RNA, 19 nt, Homo sapiens
  misc_RNA (1)...(19): siRNA sense strand
uggaaaugaucccuauugu

SEQ ID NO: 493640 - RNA, 19 nt, Homo sapiens
  misc_RNA (1)...(19): siRNA sense strand
gcaacuguacuguauacug

SEQ ID NO: 493641 - RNA, 19 nt, Homo sapiens
  misc_RNA (1)...(19): siRNA sense strand
gaaagucuaagggauaugg

SEQ ID NO: 493642 - RNA, 19 nt, Homo sapiens
  misc_RNA (1)...(19): siRNA sense strand
gagaugcccaagacucuau

SEQ ID NO: 493643 - RNA, 19 nt, Homo sapiens
  misc_RNA (1)...(19): siRNA sense strand
aaggucauguugugaaaug

SEQ ID NO: 493644 - RNA, 19 nt, Homo sapiens
  misc_RNA (1)...(19): siRNA sense strand
gacaaauaauggaaauucg

SEQ ID NO: 493645 - RNA, 19 nt, Homo sapiens
  misc_RNA (1)...(19): siRNA sense strand
cauaugaugagguuguaaa

SEQ ID NO: 493646 - RNA, 19 nt, Homo sapiens
  misc_RNA (1)...(19): siRNA sense strand
cuccaaagaguacauauga

SEQ ID NO: 493647 - RNA, 19 nt, Homo sapiens
  misc_RNA (1)...(19): siRNA sense strand
aaagugaauugggcaacaa

SEQ ID NO: 493648 - RNA, 19 nt, Homo sapiens
  misc_RNA (1)...(19): siRNA sense strand
ugauaaaucccgugcaaca

SEQ ID NO: 493649 - RNA, 19 nt, Homo sapiens
  misc_RNA (1)...(19): siRNA sense strand
caagcaacuguacuguaua

SEQ ID NO: 493650 - RNA, 19 nt, Homo sapiens
  misc_RNA (1)...(19): siRNA sense strand
uaaggaagucaaagugaau

SEQ ID NO: 493651 - RNA, 19 nt, Homo sapiens
  misc_RNA (1)...(19): siRNA sense strand
caugcaauuguuucuguua

SEQ ID NO: 493652 - RNA, 19 nt, Homo sapiens
  misc_RNA (1)...(19): siRNA sense strand
aaacgccauucaacagaug

SEQ ID NO: 493653 - RNA, 19 nt, Homo sapiens
  misc_RNA (1)...(19): siRNA sense strand
caaaugggaugcugaaaac

SEQ ID NO: 493654 - RNA, 19 nt, Homo sapiens
  misc_RNA (1)...(19): siRNA sense strand
ugaauggacggaagauaau

SEQ ID NO: 493655 - RNA, 19 nt, Homo sapiens
  misc_RNA (1)...(19): siRNA sense strand
ucgagucuuuccagauaaa

SEQ ID NO: 493656 - RNA, 19 nt, Homo sapiens
  misc_RNA (1)...(19): siRNA sense strand
ccaguggcuugguggaaga

SEQ ID NO: 493657 - RNA, 19 nt, Homo sapiens
  misc_RNA (1)...(19): siRNA sense strand
gaaaacgccauucaacaga

SEQ ID NO: 493658 - RNA, 19 nt, Homo sapiens
  misc_RNA (1)...(19): siRNA sense strand
ccacaaauuacaacugaag

SEQ ID NO: 493659 - RNA, 19 nt, Homo sapiens
  misc_RNA (1)...(19): siRNA sense strand
gaugggaccaaauuaugga

SEQ ID NO: 493660 - RNA, 19 nt, Homo sapiens
  misc_RNA (1)...(19): siRNA sense strand
caguauaugccuaaugguu

SEQ ID NO: 493661 - RNA, 19 nt, Homo sapiens
  misc_RNA (1)...(19): siRNA sense strand
ccagugguauggaaaugca

SEQ ID NO: 493662 - RNA, 19 nt, Homo sapiens
  misc_RNA (1)...(19): siRNA sense strand
gcagaaucaaauuggauau

SEQ ID NO: 493663 - RNA, 19 nt, Homo sapiens
  misc_RNA (1)...(19): siRNA sense strand
gcagcacaugcaauuguuu

SEQ ID NO: 493664 - RNA, 19 nt, Homo sapiens
  misc_RNA (1)...(19): siRNA sense strand
aagcaacuguacuguauac

SEQ ID NO: 493665 - RNA, 19 nt, Homo sapiens
  misc_RNA (1)...(19): siRNA sense strand
ucagaugcccgagugguaa

SEQ ID NO: 493666 - RNA, 19 nt, Homo sapiens
  misc_RNA (1)...(19): siRNA sense strand
ggaugggaccaaauuaugg

SEQ ID NO: 493667 - RNA, 19 nt, Homo sapiens
  misc_RNA (1)...(19): siRNA sense strand
augaauggacggaagauaa

SEQ ID NO: 493668 - RNA, 19 nt, Homo sapiens
  misc_RNA (1)...(19): siRNA sense strand
uaccaaacagcuaucauau

SEQ ID NO: 493669 - RNA, 19 nt, Homo sapiens
  misc_RNA (1)...(19): siRNA sense strand
gugcaacagcagaaucaaa

SEQ ID NO: 493670 - RNA, 19 nt, Homo sapiens
  misc_RNA (1)...(19): siRNA sense strand
cauggaugggaccaaauua

SEQ ID NO: 493671 - RNA, 19 nt, Homo sapiens
  misc_RNA (1)...(19): siRNA sense strand
ugugacagaagcucuaauu

SEQ ID NO: 493672 - RNA, 19 nt, Homo sapiens
  misc_RNA (1)...(19): siRNA sense strand
gaaaugaucccuauuguuu

SEQ ID NO: 493673 - RNA, 19 nt, Homo sapiens
  misc_RNA (1)...(19): siRNA sense strand
gaucucagcccacaaauua

SEQ ID NO: 493674 - RNA, 19 nt, Homo sapiens
  misc_RNA (1)...(19): siRNA sense strand
ccaaacagcuaucauauga

SEQ ID NO: 493675 - RNA, 19 nt, Homo sapiens
  misc_RNA (1)...(19): siRNA sense strand
gaagacaaaucagaacuaa

SEQ ID NO: 493676 - RNA, 19 nt, Homo sapiens
  misc_RNA (1)...(19): siRNA sense strand
ggauacagcuggaaaugau

SEQ ID NO: 493677 - RNA, 19 nt, Homo sapiens
  misc_RNA (1)...(19): siRNA sense strand
ccaagcaacuguacuguau

SEQ ID NO: 493678 - RNA, 19 nt, Homo sapiens
  misc_RNA (1)...(19): siRNA sense strand
guaaggaagucaaagugaa

SEQ ID NO: 493679 - RNA, 19 nt, Homo sapiens
  misc_RNA (1)...(19): siRNA sense strand
ggaaaugcacaacaaauug

SEQ ID NO: 493680 - RNA, 19 nt, Homo sapiens
  misc_RNA (1)...(19): siRNA sense strand
guaaaucagucuaguccaa

SEQ ID NO: 493681 - RNA, 19 nt, Homo sapiens
  misc_RNA (1)...(19): siRNA sense strand
caacuguacuguauacugu

SEQ ID NO: 493682 - RNA, 19 nt, Homo sapiens
  misc_RNA (1)...(19): siRNA sense strand
gcaaguuccugcauaugga

SEQ ID NO: 493683 - RNA, 19 nt, Homo sapiens
  misc_RNA (1)...(19): siRNA sense strand
gacggaagauaauggguaa

SEQ ID NO: 493684 - RNA, 19 nt, Homo sapiens
  misc_RNA (1)...(19): siRNA sense strand
gcaauuguuucuguuaaug

SEQ ID NO: 493685 - RNA, 19 nt, Homo sapiens
  misc_RNA (1)...(19): siRNA sense strand
gaacaacuaaugcgucaga

SEQ ID NO: 493686 - RNA, 19 nt, Homo sapiens
  misc_RNA (1)...(19): siRNA sense strand
gcccacaaauuacaacuga

SEQ ID NO: 493687 - RNA, 19 nt, Homo sapiens
  misc_RNA (1)...(19): siRNA sense strand
caacaaauuggccaguaua

SEQ ID NO: 493688 - RNA, 19 nt, Homo sapiens
  misc_RNA (1)...(19): siRNA sense strand
ggacaaauaauggaaauuc

SEQ ID NO: 493689 - RNA, 19 nt, Homo sapiens
  misc_RNA (1)...(19): siRNA sense strand
gaagauaauggguaaggaa

SEQ ID NO: 493690 - RNA, 19 nt, Homo sapiens
  misc_RNA (1)...(19): siRNA sense strand
ggaagacaaaucagaacua

SEQ ID NO: 493691 - RNA, 19 nt, Homo sapiens
  misc_RNA (1)...(19): siRNA sense strand
guauggaaaugcacaacaa

SEQ ID NO: 493692 - RNA, 19 nt, Homo sapiens
  misc_RNA (1)...(19): siRNA sense strand
ggaaaugaucccuauuguu

SEQ ID NO: 493693 - RNA, 19 nt, Homo sapiens
  misc_RNA (1)...(19): siRNA sense strand
gaaagccucccgcuccaaa

SEQ ID NO: 493694 - RNA, 19 nt, Homo sapiens
  misc_RNA (1)...(19): siRNA sense strand
guacauaugagucaaauac

SEQ ID NO: 493695 - RNA, 19 nt, Homo sapiens
  misc_RNA (1)...(19): siRNA sense strand
gcuaacagaacaacuaaug

SEQ ID NO: 493696 - RNA, 19 nt, Homo sapiens
  misc_RNA (1)...(19): siRNA sense strand
caacagcagaaucaaauug

SEQ ID NO: 493697 - RNA, 19 nt, Homo sapiens
  misc_RNA (1)...(19): siRNA sense strand
caacaaaugggaugcugaa

SEQ ID NO: 493698 - RNA, 19 nt, Homo sapiens
  misc_RNA (1)...(19): siRNA sense strand
gcaacucuuuagccagauu

SEQ ID NO: 493699 - RNA, 19 nt, Homo sapiens
  misc_RNA (1)...(19): siRNA sense strand
caacuaaugcgucagacuu

SEQ ID NO: 493700 - RNA, 19 nt, Homo sapiens
  misc_RNA (1)...(19): siRNA sense strand
caggaaagucuaagggaua

SEQ ID NO: 493701 - RNA, 19 nt, Homo sapiens
  misc_RNA (1)...(19): siRNA sense strand
gauaauggguaaggaaguc

SEQ ID NO: 493702 - RNA, 19 nt, Homo sapiens
  misc_RNA (1)...(19): siRNA sense strand
gccaguauaugccuaaugg

SEQ ID NO: 493703 - RNA, 19 nt, Homo sapiens
  misc_RNA (1)...(19): siRNA sense strand
ugaaggucauguugugaaa

SEQ ID NO: 493704 - RNA, 19 nt, Homo sapiens
  misc_RNA (1)...(19): siRNA sense strand
ggaagauaauggguaagga

SEQ ID NO: 493705 - RNA, 19 nt, Homo sapiens
  misc_RNA (1)...(19): siRNA sense strand
uaugauaaaucccgugcaa

SEQ ID NO: 493706 - RNA, 19 nt, Homo sapiens
  misc_RNA (1)...(19): siRNA sense strand
uaagggauauggcuuuguc

SEQ ID NO: 493707 - RNA, 19 nt, Homo sapiens
  misc_RNA (1)...(19): siRNA sense strand
caaauuggccaguauaugc

SEQ ID NO: 493708 - RNA, 19 nt, Homo sapiens
  misc_RNA (1)...(19): siRNA sense strand
gaaaugcacaacaaauugg

SEQ ID NO: 493709 - RNA, 19 nt, Homo sapiens
  misc_RNA (1)...(19): siRNA sense strand
auucgagucuuuccagaua

SEQ ID NO: 493710 - RNA, 19 nt, Homo sapiens
  misc_RNA (1)...(19): siRNA sense strand
aauggaaauucgagucuuu

SEQ ID NO: 493711 - RNA, 19 nt, Homo sapiens
  misc_RNA (1)...(19): siRNA sense strand
gauauggcuuugucuccuu

SEQ ID NO: 493712 - RNA, 19 nt, Homo sapiens
  misc_RNA (1)...(19): siRNA sense strand
ucaaauaccaaacagcuau

SEQ ID NO: 493713 - RNA, 19 nt, Homo sapiens
  misc_RNA (1)...(19): siRNA sense strand
ccuaaugguuggcaaguuc

SEQ ID NO: 493714 - RNA, 19 nt, Homo sapiens
  misc_RNA (1)...(19): siRNA sense strand
gcaaaaugauuauggauac

SEQ ID NO: 493715 - RNA, 19 nt, Homo sapiens
  misc_RNA (1)...(19): siRNA sense strand
guuggcaaguuccugcaua

SEQ ID NO: 493716 - RNA, 19 nt, Homo sapiens
  misc_RNA (1)...(19): siRNA sense strand
ucgguaaccuuuccagaga

SEQ ID NO: 493717 - RNA, 19 nt, Homo sapiens
  misc_RNA (1)...(19): siRNA sense strand
caaagugaauugggcaaca

SEQ ID NO: 493718 - RNA, 19 nt, Homo sapiens
  misc_RNA (1)...(19): siRNA sense strand
gguaaggaagucaaaguga

SEQ ID NO: 493719 - RNA, 19 nt, Homo sapiens
  misc_RNA (1)...(19): siRNA sense strand
cacaacaaauuggccagua

SEQ ID NO: 493720 - RNA, 19 nt, Homo sapiens
  misc_RNA (1)...(19): siRNA sense strand
caaucagccuucuggguau

SEQ ID NO: 493721 - RNA, 19 nt, Homo sapiens
  misc_RNA (1)...(19): siRNA sense strand
gggcuaacagaacaacuaa

SEQ ID NO: 493722 - RNA, 19 nt, Homo sapiens
  misc_RNA (1)...(19): siRNA sense strand
gcagcauguugcccaauca

SEQ ID NO: 493723 - RNA, 19 nt, Homo sapiens
  misc_RNA (1)...(19): siRNA sense strand
acaacaaauuggccaguau

SEQ ID NO: 493724 - RNA, 19 nt, Homo sapiens
  misc_RNA (1)...(19): siRNA sense strand
cauugaaggucauguugug

SEQ ID NO: 493725 - RNA, 19 nt, Homo sapiens
  misc_RNA (1)...(19): siRNA sense strand
gguaaccuuuccagagaug

SEQ ID NO: 493726 - RNA, 19 nt, Homo sapiens
  misc_RNA (1)...(19): siRNA sense strand
cuaauucugcaacucuuua

SEQ ID NO: 493727 - RNA, 19 nt, Homo sapiens
  misc_RNA (1)...(19): siRNA sense strand
gcaacagcagaaucaaauu

SEQ ID NO: 493728 - RNA, 19 nt, Homo sapiens
  misc_RNA (1)...(19): siRNA sense strand
gaguacauaugagucaaau

SEQ ID NO: 493729 - RNA, 19 nt, Homo sapiens
  misc_RNA (1)...(19): siRNA sense strand
ccaaagaguacauaugagu

SEQ ID NO: 493730 - RNA, 19 nt, Homo sapiens
  misc_RNA (1)...(19): siRNA sense strand
auaccaaacagcuaucaua

SEQ ID NO: 493731 - RNA, 19 nt, Homo sapiens
  misc_RNA (1)...(19): siRNA sense strand
ggugaucucagcccacaaa

SEQ ID NO: 493732 - RNA, 19 nt, Homo sapiens
  misc_RNA (1)...(19): siRNA sense strand
uggaaaugcacaacaaauu

SEQ ID NO: 493733 - RNA, 19 nt, Homo sapiens
  misc_RNA (1)...(19): siRNA sense strand
gguguuacuucugggcuaa

SEQ ID NO: 493734 - RNA, 19 nt, Homo sapiens
  misc_RNA (1)...(19): siRNA sense strand
agacaaaucagaacuaacu

SEQ ID NO: 493735 - RNA, 19 nt, Homo sapiens
  misc_RNA (1)...(19): siRNA sense strand
ucauuuccaugucuuuguu

SEQ ID NO: 493736 - RNA, 19 nt, Homo sapiens
  misc_RNA (1)...(19): siRNA sense strand
gaaaugcuauuggggcaaa

SEQ ID NO: 493737 - RNA, 19 nt, Homo sapiens
  misc_RNA (1)...(19): siRNA sense strand
cacaugcaauuguuucugu

SEQ ID NO: 493738 - RNA, 19 nt, Homo sapiens
  misc_RNA (1)...(19): siRNA sense strand
gguggaagacaaaucagaa

SEQ ID NO: 493739 - RNA, 19 nt, Homo sapiens
  misc_RNA (1)...(19): siRNA sense strand
uggaaaugaucccuauugu

SEQ ID NO: 493740 - RNA, 19 nt, Homo sapiens
  misc_RNA (1)...(19): siRNA sense strand
gcaacuguacuguauacug

SEQ ID NO: 493741 - RNA, 19 nt, Homo sapiens
  misc_RNA (1)...(19): siRNA sense strand
gaaagucuaagggauaugg

SEQ ID NO: 493742 - RNA, 19 nt, Homo sapiens
  misc_RNA (1)...(19): siRNA sense strand
gagaugcccaagacucuau

SEQ ID NO: 493743 - RNA, 19 nt, Homo sapiens
  misc_RNA (1)...(19): siRNA sense strand
aaggucauguugugaaaug

SEQ ID NO: 493744 - RNA, 19 nt, Homo sapiens
  misc_RNA (1)...(19): siRNA sense strand
gacaaauaauggaaauucg

SEQ ID NO: 493745 - RNA, 19 nt, Homo sapiens
  misc_RNA (1)...(19): siRNA sense strand
cauaugaugagguuguaaa

SEQ ID NO: 493746 - RNA, 19 nt, Homo sapiens
  misc_RNA (1)...(19): siRNA sense strand
cuccaaagaguacauauga

SEQ ID NO: 493747 - RNA, 19 nt, Homo sapiens
  misc_RNA (1)...(19): siRNA sense strand
aaagugaauugggcaacaa

SEQ ID NO: 493748 - RNA, 19 nt, Homo sapiens
  misc_RNA (1)...(19): siRNA sense strand
ugauaaaucccgugcaaca

SEQ ID NO: 493749 - RNA, 19 nt, Homo sapiens
  misc_RNA (1)...(19): siRNA sense strand
caagcaacuguacuguaua

SEQ ID NO: 493750 - RNA, 19 nt, Homo sapiens
  misc_RNA (1)...(19): siRNA sense strand
uaaggaagucaaagugaau

SEQ ID NO: 493751 - RNA, 19 nt, Homo sapiens
  misc_RNA (1)...(19): siRNA sense strand
caugcaauuguuucuguua

SEQ ID NO: 493752 - RNA, 19 nt, Homo sapiens
  misc_RNA (1)...(19): siRNA sense strand
aaacgccauucaacagaug

SEQ ID NO: 493753 - RNA, 19 nt, Homo sapiens
  misc_RNA (1)...(19): siRNA sense strand
caaaugggaugcugaaaac

SEQ ID NO: 493754 - RNA, 19 nt, Homo sapiens
  misc_RNA (1)...(19): siRNA sense strand
ugaauggacggaagauaau

SEQ ID NO: 493755 - RNA, 19 nt, Homo sapiens
  misc_RNA (1)...(19): siRNA sense strand
ucgagucuuuccagauaaa

SEQ ID NO: 493756 - RNA, 19 nt, Homo sapiens
  misc_RNA (1)...(19): siRNA sense strand
ccaguggcuugguggaaga

SEQ ID NO: 493757 - RNA, 19 nt, Homo sapiens
  misc_RNA (1)...(19): siRNA sense strand
gaaaacgccauucaacaga

SEQ ID NO: 493758 - RNA, 19 nt, Homo sapiens
  misc_RNA (1)...(19): siRNA sense strand
ccacaaauuacaacugaag

SEQ ID NO: 493759 - RNA, 19 nt, Homo sapiens
  misc_RNA (1)...(19): siRNA sense strand
gaugggaccaaauuaugga

SEQ ID NO: 493760 - RNA, 19 nt, Homo sapiens
  misc_RNA (1)...(19): siRNA sense strand
caguauaugccuaaugguu

SEQ ID NO: 493761 - RNA, 19 nt, Homo sapiens
  misc_RNA (1)...(19): siRNA sense strand
ccagugguauggaaaugca

SEQ ID NO: 493762 - RNA, 19 nt, Homo sapiens
  misc_RNA (1)...(19): siRNA sense strand
gcagaaucaaauuggauau

SEQ ID NO: 493763 - RNA, 19 nt, Homo sapiens
  misc_RNA (1)...(19): siRNA sense strand
gcagcacaugcaauuguuu

SEQ ID NO: 493764 - RNA, 19 nt, Homo sapiens
  misc_RNA (1)...(19): siRNA sense strand
aagcaacuguacuguauac

SEQ ID NO: 493765 - RNA, 19 nt, Homo sapiens
  misc_RNA (1)...(19): siRNA sense strand
ucagaugcccgagugguaa

SEQ ID NO: 493766 - RNA, 19 nt, Homo sapiens
  misc_RNA (1)...(19): siRNA sense strand
ggaugggaccaaauuaugg

SEQ ID NO: 493767 - RNA, 19 nt, Homo sapiens
  misc_RNA (1)...(19): siRNA sense strand
augaauggacggaagauaa

SEQ ID NO: 493768 - RNA, 19 nt, Homo sapiens
  misc_RNA (1)...(19): siRNA sense strand
uaccaaacagcuaucauau

SEQ ID NO: 493769 - RNA, 19 nt, Homo sapiens
  misc_RNA (1)...(19): siRNA sense strand
gugcaacagcagaaucaaa

SEQ ID NO: 493770 - RNA, 19 nt, Homo sapiens
  misc_RNA (1)...(19): siRNA sense strand
cauggaugggaccaaauua

SEQ ID NO: 493771 - RNA, 19 nt, Homo sapiens
  misc_RNA (1)...(19): siRNA sense strand
ugugacagaagcucuaauu

SEQ ID NO: 493772 - RNA, 19 nt, Homo sapiens
  misc_RNA (1)...(19): siRNA sense strand
gaucacaaguugcauguug

SEQ ID NO: 493773 - RNA, 19 nt, Homo sapiens
  misc_RNA (1)...(19): siRNA sense strand
gaauaaaguuguugggaau

SEQ ID NO: 493774 - RNA, 19 nt, Homo sapiens
  misc_RNA (1)...(19): siRNA sense strand
gaucauggucuccucauuu

SEQ ID NO: 493775 - RNA, 19 nt, Homo sapiens
  misc_RNA (1)...(19): siRNA sense strand
gaugagcccuggaaauauc

SEQ ID NO: 493776 - RNA, 19 nt, Homo sapiens
  misc_RNA (1)...(19): siRNA sense strand
gcaccaaagcucccucuga

SEQ ID NO: 493777 - RNA, 19 nt, Homo sapiens
  misc_RNA (1)...(19): siRNA sense strand
ccacacggguaucaucuuc

SEQ ID NO: 493778 - RNA, 19 nt, Homo sapiens
  misc_RNA (1)...(19): siRNA sense strand
acacggguaucaucuucua

SEQ ID NO: 493779 - RNA, 19 nt, Homo sapiens
  misc_RNA (1)...(19): siRNA sense strand
aagaauaccaggagcgaua

SEQ ID NO: 493780 - RNA, 19 nt, Homo sapiens
  misc_RNA (1)...(19): siRNA sense strand
ggaucauggucuccucauu

SEQ ID NO: 493781 - RNA, 19 nt, Homo sapiens
  misc_RNA (1)...(19): siRNA sense strand
guucccauuucuccuuaua

SEQ ID NO: 493782 - RNA, 19 nt, Homo sapiens
  misc_RNA (1)...(19): siRNA sense strand
ggacucggaagacauguau

SEQ ID NO: 493783 - RNA, 19 nt, Homo sapiens
  misc_RNA (1)...(19): siRNA sense strand
aggaugagcccuggaaaua

SEQ ID NO: 493784 - RNA, 19 nt, Homo sapiens
  misc_RNA (1)...(19): siRNA sense strand
aucauggucuccucauuua

SEQ ID NO: 493785 - RNA, 19 nt, Homo sapiens
  misc_RNA (1)...(19): siRNA sense strand
gcagacaggcccucagagu

SEQ ID NO: 493786 - RNA, 19 nt, Homo sapiens
  misc_RNA (1)...(19): siRNA sense strand
ggaugagcccuggaaauau

SEQ ID NO: 493787 - RNA, 19 nt, Homo sapiens
  misc_RNA (1)...(19): siRNA sense strand
ccagggucaucuccaagaa

SEQ ID NO: 493788 - RNA, 19 nt, Homo sapiens
  misc_RNA (1)...(19): siRNA sense strand
caguucccauuucuccuua

SEQ ID NO: 493789 - RNA, 19 nt, Homo sapiens
  misc_RNA (1)...(19): siRNA sense strand
ccacagcggacucggaaga

SEQ ID NO: 493790 - RNA, 19 nt, Homo sapiens
  misc_RNA (1)...(19): siRNA sense strand
gugcugaggcggcuuccua

SEQ ID NO: 493791 - RNA, 19 nt, Homo sapiens
  misc_RNA (1)...(19): siRNA sense strand
gaccuugacuucaguaccu

SEQ ID NO: 493792 - RNA, 19 nt, Homo sapiens
  misc_RNA (1)...(19): siRNA sense strand
cuuccgagguucucacaga

SEQ ID NO: 493793 - RNA, 19 nt, Homo sapiens
  misc_RNA (1)...(19): siRNA sense strand
cuggaaauaucuggaauca

SEQ ID NO: 493794 - RNA, 19 nt, Homo sapiens
  misc_RNA (1)...(19): siRNA sense strand
ccgagguucucacagaguu

SEQ ID NO: 493795 - RNA, 19 nt, Homo sapiens
  misc_RNA (1)...(19): siRNA sense strand
gagaucacaaguugcaugu

SEQ ID NO: 493796 - RNA, 19 nt, Homo sapiens
  misc_RNA (1)...(19): siRNA sense strand
gaaacagccaccggagaga

SEQ ID NO: 493797 - RNA, 19 nt, Homo sapiens
  misc_RNA (1)...(19): siRNA sense strand
gacccaggccauccagaaa

SEQ ID NO: 493798 - RNA, 19 nt, Homo sapiens
  misc_RNA (1)...(19): siRNA sense strand
gaggcggcuuccuaugcua

SEQ ID NO: 493799 - RNA, 19 nt, Homo sapiens
  misc_RNA (1)...(19): siRNA sense strand
uuaccagggucaucuccaa

SEQ ID NO: 493800 - RNA, 19 nt, Homo sapiens
  misc_RNA (1)...(19): siRNA sense strand
uuaggaacgugaagcucuu

SEQ ID NO: 493801 - RNA, 19 nt, Homo sapiens
  misc_RNA (1)...(19): siRNA sense strand
agggucaucuccaagaaga

SEQ ID NO: 493802 - RNA, 19 nt, Homo sapiens
  misc_RNA (1)...(19): siRNA sense strand
cuaucucucuuccgagguu

SEQ ID NO: 493803 - RNA, 19 nt, Homo sapiens
  misc_RNA (1)...(19): siRNA sense strand
cugucgagaucacaaguug

SEQ ID NO: 493804 - RNA, 19 nt, Homo sapiens
  misc_RNA (1)...(19): siRNA sense strand
gauucuuuguccucaguuc

SEQ ID NO: 493805 - RNA, 19 nt, Homo sapiens
  misc_RNA (1)...(19): siRNA sense strand
ugacccaggccauccagaa

SEQ ID NO: 493806 - RNA, 19 nt, Homo sapiens
  misc_RNA (1)...(19): siRNA sense strand
ucccauuucuccuuauaag

SEQ ID NO: 493807 - RNA, 19 nt, Homo sapiens
  misc_RNA (1)...(19): siRNA sense strand
cugagucaaugcccaagau

SEQ ID NO: 493808 - RNA, 19 nt, Homo sapiens
  misc_RNA (1)...(19): siRNA sense strand
ccagaaagccagggaucau

SEQ ID NO: 493809 - RNA, 19 nt, Homo sapiens
  misc_RNA (1)...(19): siRNA sense strand
gaaagccagggaucauggu

SEQ ID NO: 493810 - RNA, 19 nt, Homo sapiens
  misc_RNA (1)...(19): siRNA sense strand
gaauaccaggagcgauaug

SEQ ID NO: 493811 - RNA, 19 nt, Homo sapiens
  misc_RNA (1)...(19): siRNA sense strand
ggaacgugaagcucuugga

SEQ ID NO: 493812 - RNA, 19 nt, Homo sapiens
  misc_RNA (1)...(19): siRNA sense strand
ucaguucccauuucuccuu

SEQ ID NO: 493813 - RNA, 19 nt, Homo sapiens
  misc_RNA (1)...(19): siRNA sense strand
ccacgggaccuugacuuca

SEQ ID NO: 493814 - RNA, 19 nt, Homo sapiens
  misc_RNA (1)...(19): siRNA sense strand
cagaaagccagggaucaug

SEQ ID NO: 493815 - RNA, 19 nt, Homo sapiens
  misc_RNA (1)...(19): siRNA sense strand
uguccucaguucccauuuc

SEQ ID NO: 493816 - RNA, 19 nt, Homo sapiens
  misc_RNA (1)...(19): siRNA sense strand
uaaggaugagcccuggaaa

SEQ ID NO: 493817 - RNA, 19 nt, Homo sapiens
  misc_RNA (1)...(19): siRNA sense strand
gaggguaccugauuuauaa

SEQ ID NO: 493818 - RNA, 19 nt, Homo sapiens
  misc_RNA (1)...(19): siRNA sense strand
cgaagaagaucgucacaga

SEQ ID NO: 493819 - RNA, 19 nt, Homo sapiens
  misc_RNA (1)...(19): siRNA sense strand
gaagagaaccgcaacaauc

SEQ ID NO: 493820 - RNA, 19 nt, Homo sapiens
  misc_RNA (1)...(19): siRNA sense strand
gcaguccgguggaguauga

SEQ ID NO: 493821 - RNA, 19 nt, Homo sapiens
  misc_RNA (1)...(19): siRNA sense strand
gcagaggguaccugauuua

SEQ ID NO: 493822 - RNA, 19 nt, Homo sapiens
  misc_RNA (1)...(19): siRNA sense strand
ggacgaugaugcagagguu

SEQ ID NO: 493823 - RNA, 19 nt, Homo sapiens
  misc_RNA (1)...(19): siRNA sense strand
ucuaaagacuggccuugua

SEQ ID NO: 493824 - RNA, 19 nt, Homo sapiens
  misc_RNA (1)...(19): siRNA sense strand
agacuggccuuguaauuau

SEQ ID NO: 493825 - RNA, 19 nt, Homo sapiens
  misc_RNA (1)...(19): siRNA sense strand
gaucgucacagaagaguuu

SEQ ID NO: 493826 - RNA, 19 nt, Homo sapiens
  misc_RNA (1)...(19): siRNA sense strand
gaagaagaucgucacagaa

SEQ ID NO: 493827 - RNA, 19 nt, Homo sapiens
  misc_RNA (1)...(19): siRNA sense strand
gcgcagaggguaccugauu

SEQ ID NO: 493828 - RNA, 19 nt, Homo sapiens
  misc_RNA (1)...(19): siRNA sense strand
uauauuagcgcucaucuuc

SEQ ID NO: 493829 - RNA, 19 nt, Homo sapiens
  misc_RNA (1)...(19): siRNA sense strand
caagaaaagucuccugaug

SEQ ID NO: 493830 - RNA, 19 nt, Homo sapiens
  misc_RNA (1)...(19): siRNA sense strand
ggaaagugcuggggaaguu

SEQ ID NO: 493831 - RNA, 19 nt, Homo sapiens
  misc_RNA (1)...(19): siRNA sense strand
aagacuggccuuguaauua

SEQ ID NO: 493832 - RNA, 19 nt, Homo sapiens
  misc_RNA (1)...(19): siRNA sense strand
cuaaagacuggccuuguaa

SEQ ID NO: 493833 - RNA, 19 nt, Homo sapiens
  misc_RNA (1)...(19): siRNA sense strand
aaacugaaagucaugcauu

SEQ ID NO: 493834 - RNA, 19 nt, Homo sapiens
  misc_RNA (1)...(19): siRNA sense strand
aggaagcucuggucuggaa

SEQ ID NO: 493835 - RNA, 19 nt, Homo sapiens
  misc_RNA (1)...(19): siRNA sense strand
ggaaucgagcaaacugaaa

SEQ ID NO: 493836 - RNA, 19 nt, Homo sapiens
  misc_RNA (1)...(19): siRNA sense strand
aaagucuccugaugucuau

SEQ ID NO: 493837 - RNA, 19 nt, Homo sapiens
  misc_RNA (1)...(19): siRNA sense strand
cguaaccgaugcucuaaag

SEQ ID NO: 493838 - RNA, 19 nt, Homo sapiens
  misc_RNA (1)...(19): siRNA sense strand
guucguaaccgaugcucua

SEQ ID NO: 493839 - RNA, 19 nt, Homo sapiens
  misc_RNA (1)...(19): siRNA sense strand
gaaccgcaacaaucgcaaa

SEQ ID NO: 493840 - RNA, 19 nt, Homo sapiens
  misc_RNA (1)...(19): siRNA sense strand
gaagaucgucacagaagag

SEQ ID NO: 493841 - RNA, 19 nt, Homo sapiens
  misc_RNA (1)...(19): siRNA sense strand
guagcaguccgguggagua

SEQ ID NO: 493842 - RNA, 19 nt, Homo sapiens
  misc_RNA (1)...(19): siRNA sense strand
cgagcaaacugaaagucau

SEQ ID NO: 493843 - RNA, 19 nt, Homo sapiens
  misc_RNA (1)...(19): siRNA sense strand
augcagagguugaggcuau

SEQ ID NO: 493844 - RNA, 19 nt, Homo sapiens
  misc_RNA (1)...(19): siRNA sense strand
uauuagcgcucaucuucau

SEQ ID NO: 493845 - RNA, 19 nt, Homo sapiens
  misc_RNA (1)...(19): siRNA sense strand
aaagacuggccuuguaauu

SEQ ID NO: 493846 - RNA, 19 nt, Homo sapiens
  misc_RNA (1)...(19): siRNA sense strand
aacugaaagucaugcauuu

SEQ ID NO: 493847 - RNA, 19 nt, Homo sapiens
  misc_RNA (1)...(19): siRNA sense strand
agaggguaccugauuuaua

SEQ ID NO: 493848 - RNA, 19 nt, Homo sapiens
  misc_RNA (1)...(19): siRNA sense strand
cgcagaggguaccugauuu

SEQ ID NO: 493849 - RNA, 19 nt, Homo sapiens
  misc_RNA (1)...(19): siRNA sense strand
gagcacugcccaagcacaa

SEQ ID NO: 493850 - RNA, 19 nt, Homo sapiens
  misc_RNA (1)...(19): siRNA sense strand
gagcaaacugaaagucaug

SEQ ID NO: 493851 - RNA, 19 nt, Homo sapiens
  misc_RNA (1)...(19): siRNA sense strand
gaaucgagcaaacugaaag

SEQ ID NO: 493852 - RNA, 19 nt, Homo sapiens
  misc_RNA (1)...(19): siRNA sense strand
agaagaucgucacagaaga

SEQ ID NO: 493853 - RNA, 19 nt, Homo sapiens
  misc_RNA (1)...(19): siRNA sense strand
gggcaacagcgccaaggaa

SEQ ID NO: 493854 - RNA, 19 nt, Homo sapiens
  misc_RNA (1)...(19): siRNA sense strand
guaauuaugacugggauuc

SEQ ID NO: 493855 - RNA, 19 nt, Homo sapiens
  misc_RNA (1)...(19): siRNA sense strand
gguggaguaugaguucuuc

SEQ ID NO: 493856 - RNA, 19 nt, Homo sapiens
  misc_RNA (1)...(19): siRNA sense strand
cagaagagaaccgcaacaa

SEQ ID NO: 493857 - RNA, 19 nt, Homo sapiens
  misc_RNA (1)...(19): siRNA sense strand
ugacugggauucggacgau

SEQ ID NO: 493858 - RNA, 19 nt, Homo sapiens
  misc_RNA (1)...(19): siRNA sense strand
cuccugaugucuauauuag

SEQ ID NO: 493859 - RNA, 19 nt, Homo sapiens
  misc_RNA (1)...(19): siRNA sense strand
aagaagaucgucacagaag

SEQ ID NO: 493860 - RNA, 19 nt, Homo sapiens
  misc_RNA (1)...(19): siRNA sense strand
cgucagcacagcaucuuug

SEQ ID NO: 493861 - RNA, 19 nt, Homo sapiens
  misc_RNA (1)...(19): siRNA sense strand
gacuggccuuguaauuaug

SEQ ID NO: 493862 - RNA, 19 nt, Homo sapiens
  misc_RNA (1)...(19): siRNA sense strand
uaaagacuggccuuguaau

SEQ ID NO: 493863 - RNA, 19 nt, Homo sapiens
  misc_RNA (1)...(19): siRNA sense strand
ucuccugaugucuauauua

SEQ ID NO: 493864 - RNA, 19 nt, Homo sapiens
  misc_RNA (1)...(19): siRNA sense strand
uaaccgaugcucuaaagac

SEQ ID NO: 493865 - RNA, 19 nt, Homo sapiens
  misc_RNA (1)...(19): siRNA sense strand
ggacgucagcacagcaucu

SEQ ID NO: 493866 - RNA, 19 nt, Homo sapiens
  misc_RNA (1)...(19): siRNA sense strand
caacagcgccaaggaagcu

SEQ ID NO: 493867 - RNA, 19 nt, Homo sapiens
  misc_RNA (1)...(19): siRNA sense strand
gaaagugcuggggaaguua

SEQ ID NO: 493868 - RNA, 19 nt, Homo sapiens
  misc_RNA (1)...(19): siRNA sense strand
agaagagaaccgcaacaau

SEQ ID NO: 493869 - RNA, 19 nt, Homo sapiens
  misc_RNA (1)...(19): siRNA sense strand
gcagaagagaaccgcaaca

SEQ ID NO: 493870 - RNA, 19 nt, Homo sapiens
  misc_RNA (1)...(19): siRNA sense strand
cgagagccgcagaagagaa

SEQ ID NO: 493871 - RNA, 19 nt, Homo sapiens
  misc_RNA (1)...(19): siRNA sense strand
agaaaagucuccugauguc

SEQ ID NO: 493872 - RNA, 19 nt, Homo sapiens
  misc_RNA (1)...(19): siRNA sense strand
uuggagauccgaagaagau

SEQ ID NO: 493873 - RNA, 19 nt, Homo sapiens
  misc_RNA (1)...(19): siRNA sense strand
gaagcucuggucuggaaag

SEQ ID NO: 493874 - RNA, 19 nt, Homo sapiens
  misc_RNA (1)...(19): siRNA sense strand
gagagccgcagaagagaac

SEQ ID NO: 493875 - RNA, 19 nt, Homo sapiens
  misc_RNA (1)...(19): siRNA sense strand
ugaaagucaugcauuuugu

SEQ ID NO: 493876 - RNA, 19 nt, Homo sapiens
  misc_RNA (1)...(19): siRNA sense strand
gaaauuggaugucaccauu

SEQ ID NO: 493877 - RNA, 19 nt, Homo sapiens
  misc_RNA (1)...(19): siRNA sense strand
ggaguagaaugcaugauua

SEQ ID NO: 493878 - RNA, 19 nt, Homo sapiens
  misc_RNA (1)...(19): siRNA sense strand
guaugaagcugaaggaauu

SEQ ID NO: 493879 - RNA, 19 nt, Homo sapiens
  misc_RNA (1)...(19): siRNA sense strand
caagauuucucuacauuug

SEQ ID NO: 493880 - RNA, 19 nt, Homo sapiens
  misc_RNA (1)...(19): siRNA sense strand
gaugaaagcacuaguaaau

SEQ ID NO: 493881 - RNA, 19 nt, Homo sapiens
  misc_RNA (1)...(19): siRNA sense strand
uaagauaacccucaucauu

SEQ ID NO: 493882 - RNA, 19 nt, Homo sapiens
  misc_RNA (1)...(19): siRNA sense strand
ugaaagcacuaguaaauca

SEQ ID NO: 493883 - RNA, 19 nt, Homo sapiens
  misc_RNA (1)...(19): siRNA sense strand
caaaggaggugccuacuac

SEQ ID NO: 493884 - RNA, 19 nt, Homo sapiens
  misc_RNA (1)...(19): siRNA sense strand
ggaagcagauucacugagu

SEQ ID NO: 493885 - RNA, 19 nt, Homo sapiens
  misc_RNA (1)...(19): siRNA sense strand
uaaaagagcccaucauuaa

SEQ ID NO: 493886 - RNA, 19 nt, Homo sapiens
  misc_RNA (1)...(19): siRNA sense strand
gaacgaguggagcauauaa

SEQ ID NO: 493887 - RNA, 19 nt, Homo sapiens
  misc_RNA (1)...(19): siRNA sense strand
gcagauguguuuccagauc

SEQ ID NO: 493888 - RNA, 19 nt, Homo sapiens
  misc_RNA (1)...(19): siRNA sense strand
gcagaugaaagcacuagua

SEQ ID NO: 493889 - RNA, 19 nt, Homo sapiens
  misc_RNA (1)...(19): siRNA sense strand
guagaaugcaugauuauug

SEQ ID NO: 493890 - RNA, 19 nt, Homo sapiens
  misc_RNA (1)...(19): siRNA sense strand
aggauuugcucgaauauuu

SEQ ID NO: 493891 - RNA, 19 nt, Homo sapiens
  misc_RNA (1)...(19): siRNA sense strand
guuugcagguuaccaguua

SEQ ID NO: 493892 - RNA, 19 nt, Homo sapiens
  misc_RNA (1)...(19): siRNA sense strand
gcugaugaauuguauggaa

SEQ ID NO: 493893 - RNA, 19 nt, Homo sapiens
  misc_RNA (1)...(19): siRNA sense strand
aaacaacggaguucucuuu

SEQ ID NO: 493894 - RNA, 19 nt, Homo sapiens
  misc_RNA (1)...(19): siRNA sense strand
cacauuaguuacaggauuu

SEQ ID NO: 493895 - RNA, 19 nt, Homo sapiens
  misc_RNA (1)...(19): siRNA sense strand
uaagaaguuugaagaggaa

SEQ ID NO: 493896 - RNA, 19 nt, Homo sapiens
  misc_RNA (1)...(19): siRNA sense strand
gccaaaugcucguaucuca

SEQ ID NO: 493897 - RNA, 19 nt, Homo sapiens
  misc_RNA (1)...(19): siRNA sense strand
gaaauauuccucugcuguu

SEQ ID NO: 493898 - RNA, 19 nt, Homo sapiens
  misc_RNA (1)...(19): siRNA sense strand
agaaguaucugcugaggau

SEQ ID NO: 493899 - RNA, 19 nt, Homo sapiens
  misc_RNA (1)...(19): siRNA sense strand
cuaggaagguugugaggaa

SEQ ID NO: 493900 - RNA, 19 nt, Homo sapiens
  misc_RNA (1)...(19): siRNA sense strand
caucaugcccuucacuuaa

SEQ ID NO: 493901 - RNA, 19 nt, Homo sapiens
  misc_RNA (1)...(19): siRNA sense strand
cagauucacugaguucaaa

SEQ ID NO: 493902 - RNA, 19 nt, Homo sapiens
  misc_RNA (1)...(19): siRNA sense strand
ggccguacauucuauaauc

SEQ ID NO: 493903 - RNA, 19 nt, Homo sapiens
  misc_RNA (1)...(19): siRNA sense strand
gauaacaaaggaccaaaga

SEQ ID NO: 493904 - RNA, 19 nt, Homo sapiens
  misc_RNA (1)...(19): siRNA sense strand
gcaggcagccaauguguug

SEQ ID NO: 493905 - RNA, 19 nt, Homo sapiens
  misc_RNA (1)...(19): siRNA sense strand
gaagcagauucacugaguu

SEQ ID NO: 493906 - RNA, 19 nt, Homo sapiens
  misc_RNA (1)...(19): siRNA sense strand
cagaagaaauuggauguca

SEQ ID NO: 493907 - RNA, 19 nt, Homo sapiens
  misc_RNA (1)...(19): siRNA sense strand
gcccuucacuuaacuagga

SEQ ID NO: 493908 - RNA, 19 nt, Homo sapiens
  misc_RNA (1)...(19): siRNA sense strand
ggaagaguaucaggaguag

SEQ ID NO: 493909 - RNA, 19 nt, Homo sapiens
  misc_RNA (1)...(19): siRNA sense strand
gcaaggguaugggaugaug

SEQ ID NO: 493910 - RNA, 19 nt, Homo sapiens
  misc_RNA (1)...(19): siRNA sense strand
guacucacuuuguccaguu

SEQ ID NO: 493911 - RNA, 19 nt, Homo sapiens
  misc_RNA (1)...(19): siRNA sense strand
gaucuucauugcagaaagu

SEQ ID NO: 493912 - RNA, 19 nt, Homo sapiens
  misc_RNA (1)...(19): siRNA sense strand
gaaagucuggaguaaguga

SEQ ID NO: 493913 - RNA, 19 nt, Homo sapiens
  misc_RNA (1)...(19): siRNA sense strand
gcguauagcccaagauuuc

SEQ ID NO: 493914 - RNA, 19 nt, Homo sapiens
  misc_RNA (1)...(19): siRNA sense strand
uacaggauuugcucgaaua

SEQ ID NO: 493915 - RNA, 19 nt, Homo sapiens
  misc_RNA (1)...(19): siRNA sense strand
ucacuuaacuaggaagguu

SEQ ID NO: 493916 - RNA, 19 nt, Homo sapiens
  misc_RNA (1)...(19): siRNA sense strand
acuaggagguggugagaaa

SEQ ID NO: 493917 - RNA, 19 nt, Homo sapiens
  misc_RNA (1)...(19): siRNA sense strand
gaacuacaagcagaugaaa

SEQ ID NO: 493918 - RNA, 19 nt, Homo sapiens
  misc_RNA (1)...(19): siRNA sense strand
ccaggagguggcauuauua

SEQ ID NO: 493919 - RNA, 19 nt, Homo sapiens
  misc_RNA (1)...(19): siRNA sense strand
cagguuaccaguuauauga

SEQ ID NO: 493920 - RNA, 19 nt, Homo sapiens
  misc_RNA (1)...(19): siRNA sense strand
ugagaaagcccgagcacuu

SEQ ID NO: 493921 - RNA, 19 nt, Homo sapiens
  misc_RNA (1)...(19): siRNA sense strand
gagcguauagcccaagauu

SEQ ID NO: 493922 - RNA, 19 nt, Homo sapiens
  misc_RNA (1)...(19): siRNA sense strand
caaggauggugccaagaug

SEQ ID NO: 493923 - RNA, 19 nt, Homo sapiens
  misc_RNA (1)...(19): siRNA sense strand
uaucccaguuugcagguua

SEQ ID NO: 493924 - RNA, 19 nt, Homo sapiens
  misc_RNA (1)...(19): siRNA sense strand
cagaugaaagcacuaguaa

SEQ ID NO: 493925 - RNA, 19 nt, Homo sapiens
  misc_RNA (1)...(19): siRNA sense strand
cccaagauuucucuacauu

SEQ ID NO: 493926 - RNA, 19 nt, Homo sapiens
  misc_RNA (1)...(19): siRNA sense strand
auacuuaccucgacaagca

SEQ ID NO: 493927 - RNA, 19 nt, Homo sapiens
  misc_RNA (1)...(19): siRNA sense strand
gcgcaaggguaugggauga

SEQ ID NO: 493928 - RNA, 19 nt, Homo sapiens
  misc_RNA (1)...(19): siRNA sense strand
aagauaacccucaucauug

SEQ ID NO: 493929 - RNA, 19 nt, Homo sapiens
  misc_RNA (1)...(19): siRNA sense strand
acacauuaguuacaggauu

SEQ ID NO: 493930 - RNA, 19 nt, Homo sapiens
  misc_RNA (1)...(19): siRNA sense strand
gagaggucauugcuagaau

SEQ ID NO: 493931 - RNA, 19 nt, Homo sapiens
  misc_RNA (1)...(19): siRNA sense strand
ccacugggcuuuggaugau

SEQ ID NO: 493932 - RNA, 19 nt, Homo sapiens
  misc_RNA (1)...(19): siRNA sense strand
gcacuucacauaucaagag

SEQ ID NO: 493933 - RNA, 19 nt, Homo sapiens
  misc_RNA (1)...(19): siRNA sense strand
aaagagcccaucauuaaga

SEQ ID NO: 493934 - RNA, 19 nt, Homo sapiens
  misc_RNA (1)...(19): siRNA sense strand
uauggagacacauuaguua

SEQ ID NO: 493935 - RNA, 19 nt, Homo sapiens
  misc_RNA (1)...(19): siRNA sense strand
ccaguuauaugacaaugag

SEQ ID NO: 493936 - RNA, 19 nt, Homo sapiens
  misc_RNA (1)...(19): siRNA sense strand
ggaauuaucccaguuugca

SEQ ID NO: 493937 - RNA, 19 nt, Homo sapiens
  misc_RNA (1)...(19): siRNA sense strand
ggaguucucuuuucugaau

SEQ ID NO: 493938 - RNA, 19 nt, Homo sapiens
  misc_RNA (1)...(19): siRNA sense strand
gcccaagugccuaagauaa

SEQ ID NO: 493939 - RNA, 19 nt, Homo sapiens
  misc_RNA (1)...(19): siRNA sense strand
caguuaugcugccaaagaa

SEQ ID NO: 493940 - RNA, 19 nt, Homo sapiens
  misc_RNA (1)...(19): siRNA sense strand
ccaguuaugcugccaaaga

SEQ ID NO: 493941 - RNA, 19 nt, Homo sapiens
  misc_RNA (1)...(19): siRNA sense strand
ccucugcuguuccuucaaa

SEQ ID NO: 493942 - RNA, 19 nt, Homo sapiens
  misc_RNA (1)...(19): siRNA sense strand
aggcaauuaugucuucuaa

SEQ ID NO: 493943 - RNA, 19 nt, Homo sapiens
  misc_RNA (1)...(19): siRNA sense strand
caauagagaagacugacuu

SEQ ID NO: 493944 - RNA, 19 nt, Homo sapiens
  misc_RNA (1)...(19): siRNA sense strand
ggagacacauuaguuacag

SEQ ID NO: 493945 - RNA, 19 nt, Homo sapiens
  misc_RNA (1)...(19): siRNA sense strand
ugaaggaauugccaaggau

SEQ ID NO: 493946 - RNA, 19 nt, Homo sapiens
  misc_RNA (1)...(19): siRNA sense strand
cuucacauaucaagaggaa

SEQ ID NO: 493947 - RNA, 19 nt, Homo sapiens
  misc_RNA (1)...(19): siRNA sense strand
gagaaagcccgagcacuuc

SEQ ID NO: 493948 - RNA, 19 nt, Homo sapiens
  misc_RNA (1)...(19): siRNA sense strand
caaaugcucguaucucagu

SEQ ID NO: 493949 - RNA, 19 nt, Homo sapiens
  misc_RNA (1)...(19): siRNA sense strand
cuauggagccggaaacuau

SEQ ID NO: 493950 - RNA, 19 nt, Homo sapiens
  misc_RNA (1)...(19): siRNA sense strand
ucaaaggaggugccuacua

SEQ ID NO: 493951 - RNA, 19 nt, Homo sapiens
  misc_RNA (1)...(19): siRNA sense strand
caguagguaucguuggaaa

SEQ ID NO: 493952 - RNA, 19 nt, Homo sapiens
  misc_RNA (1)...(19): siRNA sense strand
gcaucuacuuaguugauuc

SEQ ID NO: 493953 - RNA, 19 nt, Homo sapiens
  misc_RNA (1)...(19): siRNA sense strand
aagaguaucaggaguagaa

SEQ ID NO: 493954 - RNA, 19 nt, Homo sapiens
  misc_RNA (1)...(19): siRNA sense strand
uagagaguaugaagcugaa

SEQ ID NO: 493955 - RNA, 19 nt, Homo sapiens
  misc_RNA (1)...(19): siRNA sense strand
ggaagguugugaggaaucu

SEQ ID NO: 493956 - RNA, 19 nt, Homo sapiens
  misc_RNA (1)...(19): siRNA sense strand
ucgacaagcagauguguuu

SEQ ID NO: 493957 - RNA, 19 nt, Homo sapiens
  misc_RNA (1)...(19): siRNA sense strand
uagaaugcaugauuauugc

SEQ ID NO: 493958 - RNA, 19 nt, Homo sapiens
  misc_RNA (1)...(19): siRNA sense strand
ggagguggcauuauuacag

SEQ ID NO: 493959 - RNA, 19 nt, Homo sapiens
  misc_RNA (1)...(19): siRNA sense strand
ggucuugggucucaguuuu

SEQ ID NO: 493960 - RNA, 19 nt, Homo sapiens
  misc_RNA (1)...(19): siRNA sense strand
gagagcaggcagccaaugu

SEQ ID NO: 493961 - RNA, 19 nt, Homo sapiens
  misc_RNA (1)...(19): siRNA sense strand
ccaagauuucucuacauuu

SEQ ID NO: 493962 - RNA, 19 nt, Homo sapiens
  misc_RNA (1)...(19): siRNA sense strand
aauuggaugucaccauuga

SEQ ID NO: 493963 - RNA, 19 nt, Homo sapiens
  misc_RNA (1)...(19): siRNA sense strand
gccguacauucuauaauca

SEQ ID NO: 493964 - RNA, 19 nt, Homo sapiens
  misc_RNA (1)...(19): siRNA sense strand
gcccaucauuaagaaguuu

SEQ ID NO: 493965 - RNA, 19 nt, Homo sapiens
  misc_RNA (1)...(19): siRNA sense strand
agauaacccucaucauugg

SEQ ID NO: 493966 - RNA, 19 nt, Homo sapiens
  misc_RNA (1)...(19): siRNA sense strand
ggaaacaacggaguucucu

SEQ ID NO: 493967 - RNA, 19 nt, Homo sapiens
  misc_RNA (1)...(19): siRNA sense strand
ggauuugcucgaauauuug

SEQ ID NO: 493968 - RNA, 19 nt, Homo sapiens
  misc_RNA (1)...(19): siRNA sense strand
gaugaauuguauggaauag

SEQ ID NO: 493969 - RNA, 19 nt, Homo sapiens
  misc_RNA (1)...(19): siRNA sense strand
ucaucaugcccuucacuua

SEQ ID NO: 493970 - RNA, 19 nt, Homo sapiens
  misc_RNA (1)...(19): siRNA sense strand
gaguagaaugcaugauuau

SEQ ID NO: 493971 - RNA, 19 nt, Homo sapiens
  misc_RNA (1)...(19): siRNA sense strand
aagagcccaucauuaagaa

SEQ ID NO: 493972 - RNA, 19 nt, Homo sapiens
  misc_RNA (1)...(19): siRNA sense strand
cugaaggaauugccaagga

SEQ ID NO: 493973 - RNA, 19 nt, Homo sapiens
  misc_RNA (1)...(19): siRNA sense strand
gcagauucacugaguucaa

SEQ ID NO: 493974 - RNA, 19 nt, Homo sapiens
  misc_RNA (1)...(19): siRNA sense strand
guugugaggaaucuaaauu

SEQ ID NO: 493975 - RNA, 19 nt, Homo sapiens
  misc_RNA (1)...(19): siRNA sense strand
uaguaaaucagcuccauga

SEQ ID NO: 493976 - RNA, 19 nt, Homo sapiens
  misc_RNA (1)...(19): siRNA sense strand
ggaagaaagagcuaaauuu

SEQ ID NO: 493977 - RNA, 19 nt, Homo sapiens
  misc_RNA (1)...(19): siRNA sense strand
gagauggaaucacuaaaga

SEQ ID NO: 493978 - RNA, 19 nt, Homo sapiens
  misc_RNA (1)...(19): siRNA sense strand
uagcagaaguggcauauga

SEQ ID NO: 493979 - RNA, 19 nt, Homo sapiens
  misc_RNA (1)...(19): siRNA sense strand
gaacagaaucagaacauug

SEQ ID NO: 493980 - RNA, 19 nt, Homo sapiens
  misc_RNA (1)...(19): siRNA sense strand
ucaacaagcucaaauucuu

SEQ ID NO: 493981 - RNA, 19 nt, Homo sapiens
  misc_RNA (1)...(19): siRNA sense strand
gauaauacuucaucugucu

SEQ ID NO: 493982 - RNA, 19 nt, Homo sapiens
  misc_RNA (1)...(19): siRNA sense strand
aaagagauguuuccagguu

SEQ ID NO: 493983 - RNA, 19 nt, Homo sapiens
  misc_RNA (1)...(19): siRNA sense strand
agacagacaauuaggauua

SEQ ID NO: 493984 - RNA, 19 nt, Homo sapiens
  misc_RNA (1)...(19): siRNA sense strand
ggcauucugugaaacuuua

SEQ ID NO: 493985 - RNA, 19 nt, Homo sapiens
  misc_RNA (1)...(19): siRNA sense strand
uuacaagcguuucuucaaa

SEQ ID NO: 493986 - RNA, 19 nt, Homo sapiens
  misc_RNA (1)...(19): siRNA sense strand
gauggaaucacuaaagaaa

SEQ ID NO: 493987 - RNA, 19 nt, Homo sapiens
  misc_RNA (1)...(19): siRNA sense strand
gaaucuagagcugauaaua

SEQ ID NO: 493988 - RNA, 19 nt, Homo sapiens
  misc_RNA (1)...(19): siRNA sense strand
guuaugaagugauggaaga

SEQ ID NO: 493989 - RNA, 19 nt, Homo sapiens
  misc_RNA (1)...(19): siRNA sense strand
uuagaagacucaaauaugg

SEQ ID NO: 493990 - RNA, 19 nt, Homo sapiens
  misc_RNA (1)...(19): siRNA sense strand
uuuagaaccugaagaauca

SEQ ID NO: 493991 - RNA, 19 nt, Homo sapiens
  misc_RNA (1)...(19): siRNA sense strand
gaagacagacaauuaggau

SEQ ID NO: 493992 - RNA, 19 nt, Homo sapiens
  misc_RNA (1)...(19): siRNA sense strand
agacaaguguuccugauca

SEQ ID NO: 493993 - RNA, 19 nt, Homo sapiens
  misc_RNA (1)...(19): siRNA sense strand
gaaggugaacagauccuaa

SEQ ID NO: 493994 - RNA, 19 nt, Homo sapiens
  misc_RNA (1)...(19): siRNA sense strand
gacuagcacuuccuccaaa

SEQ ID NO: 493995 - RNA, 19 nt, Homo sapiens
  misc_RNA (1)...(19): siRNA sense strand
caaacuaccgcuuacagaa

SEQ ID NO: 493996 - RNA, 19 nt, Homo sapiens
  misc_RNA (1)...(19): siRNA sense strand
gugaacagauccuaaaggu

SEQ ID NO: 493997 - RNA, 19 nt, Homo sapiens
  misc_RNA (1)...(19): siRNA sense strand
cagaaagaacuacuugaaa

SEQ ID NO: 493998 - RNA, 19 nt, Homo sapiens
  misc_RNA (1)...(19): siRNA sense strand
ggagauggaaucacuaaag

SEQ ID NO: 493999 - RNA, 19 nt, Homo sapiens
  misc_RNA (1)...(19): siRNA sense strand
guuagaagacucaaauaug

SEQ ID NO: 494000 - RNA, 19 nt, Homo sapiens
  misc_RNA (1)...(19): siRNA sense strand
cuacuauacuggguuauga

SEQ ID NO: 494001 - RNA, 19 nt, Homo sapiens
  misc_RNA (1)...(19): siRNA sense strand
aagagacacugaagaacaa

SEQ ID NO: 494002 - RNA, 19 nt, Homo sapiens
  misc_RNA (1)...(19): siRNA sense strand
caagagacacugaagaaca

SEQ ID NO: 494003 - RNA, 19 nt, Homo sapiens
  misc_RNA (1)...(19): siRNA sense strand
guacagcuucuuccauuga

SEQ ID NO: 494004 - RNA, 19 nt, Homo sapiens
  misc_RNA (1)...(19): siRNA sense strand
acaaggacauugcuaacug

SEQ ID NO: 494005 - RNA, 19 nt, Homo sapiens
  misc_RNA (1)...(19): siRNA sense strand
ugaagaaucuagagcugau

SEQ ID NO: 494006 - RNA, 19 nt, Homo sapiens
  misc_RNA (1)...(19): siRNA sense strand
ucagaacauugucuuuaga

SEQ ID NO: 494007 - RNA, 19 nt, Homo sapiens
  misc_RNA (1)...(19): siRNA sense strand
caccuacuauacuggguua

SEQ ID NO: 494008 - RNA, 19 nt, Homo sapiens
  misc_RNA (1)...(19): siRNA sense strand
ggaaagcagggcauucugu

SEQ ID NO: 494009 - RNA, 19 nt, Homo sapiens
  misc_RNA (1)...(19): siRNA sense strand
gauagaaguagcagaagug

SEQ ID NO: 494010 - RNA, 19 nt, Homo sapiens
  misc_RNA (1)...(19): siRNA sense strand
aggacuaaauuuacaggua

SEQ ID NO: 494011 - RNA, 19 nt, Homo sapiens
  misc_RNA (1)...(19): siRNA sense strand
gagaacagaaucagaacau

SEQ ID NO: 494012 - RNA, 19 nt, Homo sapiens
  misc_RNA (1)...(19): siRNA sense strand
aaacuaccgcuuacagaaa

SEQ ID NO: 494013 - RNA, 19 nt, Homo sapiens
  misc_RNA (1)...(19): siRNA sense strand
gagacaaacuaccgcuuac

SEQ ID NO: 494014 - RNA, 19 nt, Homo sapiens
  misc_RNA (1)...(19): siRNA sense strand
agagacaaacuaccgcuua

SEQ ID NO: 494015 - RNA, 19 nt, Homo sapiens
  misc_RNA (1)...(19): siRNA sense strand
acagugaauugggaagaua

SEQ ID NO: 494016 - RNA, 19 nt, Homo sapiens
  misc_RNA (1)...(19): siRNA sense strand
uauacuggguuaugaagug

SEQ ID NO: 494017 - RNA, 19 nt, Homo sapiens
  misc_RNA (1)...(19): siRNA sense strand
cauaugaugcugaagaaga

SEQ ID NO: 494018 - RNA, 19 nt, Homo sapiens
  misc_RNA (1)...(19): siRNA sense strand
gcagaaguggcauaugaug

SEQ ID NO: 494019 - RNA, 19 nt, Homo sapiens
  misc_RNA (1)...(19): siRNA sense strand
gaaucagaacauugucuuu

SEQ ID NO: 494020 - RNA, 19 nt, Homo sapiens
  misc_RNA (1)...(19): siRNA sense strand
caacaaacagaaaucaaag

SEQ ID NO: 494021 - RNA, 19 nt, Homo sapiens
  misc_RNA (1)...(19): siRNA sense strand
gacaaguguuccugaucaa

SEQ ID NO: 494022 - RNA, 19 nt, Homo sapiens
  misc_RNA (1)...(19): siRNA sense strand
acagaaagaacuacuugaa

SEQ ID NO: 494023 - RNA, 19 nt, Homo sapiens
  misc_RNA (1)...(19): siRNA sense strand
uauagacacuuuagagaac

SEQ ID NO: 494024 - RNA, 19 nt, Homo sapiens
  misc_RNA (1)...(19): siRNA sense strand
ccaguuagaagacucaaau

SEQ ID NO: 494025 - RNA, 19 nt, Homo sapiens
  misc_RNA (1)...(19): siRNA sense strand
agagauagaaguagcagaa

SEQ ID NO: 494026 - RNA, 19 nt, Homo sapiens
  misc_RNA (1)...(19): siRNA sense strand
ggaguccucugcacuugag

SEQ ID NO: 494027 - RNA, 19 nt, Homo sapiens
  misc_RNA (1)...(19): siRNA sense strand
uuagagaacagaaucagaa

SEQ ID NO: 494028 - RNA, 19 nt, Homo sapiens
  misc_RNA (1)...(19): siRNA sense strand
caagcucaaauucuucuaa

SEQ ID NO: 494029 - RNA, 19 nt, Homo sapiens
  misc_RNA (1)...(19): siRNA sense strand
ccaccggguccauuugaua

SEQ ID NO: 494030 - RNA, 19 nt, Homo sapiens
  misc_RNA (1)...(19): siRNA sense strand
gguacagcuucuuccauug

SEQ ID NO: 494031 - RNA, 19 nt, Homo sapiens
  misc_RNA (1)...(19): siRNA sense strand
gauggaagaaagagcuaaa

SEQ ID NO: 494032 - RNA, 19 nt, Homo sapiens
  misc_RNA (1)...(19): siRNA sense strand
ggaugugucagaaacagaa

SEQ ID NO: 494033 - RNA, 19 nt, Homo sapiens
  misc_RNA (1)...(19): siRNA sense strand
caacaagcucaaauucuuc

SEQ ID NO: 494034 - RNA, 19 nt, Homo sapiens
  misc_RNA (1)...(19): siRNA sense strand
cuucuuccauugaguauuc

SEQ ID NO: 494035 - RNA, 19 nt, Homo sapiens
  misc_RNA (1)...(19): siRNA sense strand
gaagaaucuagagcugaua

SEQ ID NO: 494036 - RNA, 19 nt, Homo sapiens
  misc_RNA (1)...(19): siRNA sense strand
cauauagacacuuuagaga

SEQ ID NO: 494037 - RNA, 19 nt, Homo sapiens
  misc_RNA (1)...(19): siRNA sense strand
agguacagcuucuuccauu

SEQ ID NO: 494038 - RNA, 19 nt, Homo sapiens
  misc_RNA (1)...(19): siRNA sense strand
aacagaaggugaacagauc

SEQ ID NO: 494039 - RNA, 19 nt, Homo sapiens
  misc_RNA (1)...(19): siRNA sense strand
aaacagaaggugaacagau

SEQ ID NO: 494040 - RNA, 19 nt, Homo sapiens
  misc_RNA (1)...(19): siRNA sense strand
caaguguuccugaucaaau

SEQ ID NO: 494041 - RNA, 19 nt, Homo sapiens
  misc_RNA (1)...(19): siRNA sense strand
gaccaucuacaccuacuau

SEQ ID NO: 494042 - RNA, 19 nt, Homo sapiens
  misc_RNA (1)...(19): siRNA sense strand
aagauguccuggaugaaga

SEQ ID NO: 494043 - RNA, 19 nt, Homo sapiens
  misc_RNA (1)...(19): siRNA sense strand
uggaaucacuaaagaaacu

SEQ ID NO: 494044 - RNA, 19 nt, Homo sapiens
  misc_RNA (1)...(19): siRNA sense strand
uuacagaaagaacuacuug

SEQ ID NO: 494045 - RNA, 19 nt, Homo sapiens
  misc_RNA (1)...(19): siRNA sense strand
aagagauguuuccagguuu

SEQ ID NO: 494046 - RNA, 19 nt, Homo sapiens
  misc_RNA (1)...(19): siRNA sense strand
gaagaaucacuggaugugu

SEQ ID NO: 494047 - RNA, 19 nt, Homo sapiens
  misc_RNA (1)...(19): siRNA sense strand
cagaacauugucuuuagaa

SEQ ID NO: 494048 - RNA, 19 nt, Homo sapiens
  misc_RNA (1)...(19): siRNA sense strand
agaacagaaucagaacauu

SEQ ID NO: 494049 - RNA, 19 nt, Homo sapiens
  misc_RNA (1)...(19): siRNA sense strand
uggaagaaagagcuaaauu

SEQ ID NO: 494050 - RNA, 19 nt, Homo sapiens
  misc_RNA (1)...(19): siRNA sense strand
aucaagauguccuggauga

SEQ ID NO: 494051 - RNA, 19 nt, Homo sapiens
  misc_RNA (1)...(19): siRNA sense strand
ugaucaagauguccuggau

SEQ ID NO: 494052 - RNA, 19 nt, Homo sapiens
  misc_RNA (1)...(19): siRNA sense strand
gaggaaagcagggcauucu

SEQ ID NO: 494053 - RNA, 19 nt, Homo sapiens
  misc_RNA (1)...(19): siRNA sense strand
cagcuucuuccauugagua

SEQ ID NO: 494054 - RNA, 19 nt, Homo sapiens
  misc_RNA (1)...(19): siRNA sense strand
caagauguccuggaugaag

SEQ ID NO: 494055 - RNA, 19 nt, Homo sapiens
  misc_RNA (1)...(19): siRNA sense strand
gaaacagaaggugaacaga

SEQ ID NO: 494056 - RNA, 19 nt, Homo sapiens
  misc_RNA (1)...(19): siRNA sense strand
cugaucaaauggauaauac

SEQ ID NO: 494057 - RNA, 19 nt, Homo sapiens
  misc_RNA (1)...(19): siRNA sense strand
gacagacaauuaggauuac

SEQ ID NO: 494058 - RNA, 19 nt, Homo sapiens
  misc_RNA (1)...(19): siRNA sense strand
ggcagugucucaacaagcu

SEQ ID NO: 494059 - RNA, 19 nt, Homo sapiens
  misc_RNA (1)...(19): siRNA sense strand
gaccaagagacacugaaga

SEQ ID NO: 494060 - RNA, 19 nt, Homo sapiens
  misc_RNA (1)...(19): siRNA sense strand
gauuacaagcguuucuuca

SEQ ID NO: 494061 - RNA, 19 nt, Homo sapiens
  misc_RNA (1)...(19): siRNA sense strand
acagacaaguguuccugau

SEQ ID NO: 494062 - RNA, 19 nt, Homo sapiens
  misc_RNA (1)...(19): siRNA sense strand
agauagaaguagcagaagu

SEQ ID NO: 494063 - RNA, 19 nt, Homo sapiens
  misc_RNA (1)...(19): siRNA sense strand
gggcauucugugaaacuuu

SEQ ID NO: 494064 - RNA, 19 nt, Homo sapiens
  misc_RNA (1)...(19): siRNA sense strand
ggauuacaagcguuucuuc

SEQ ID NO: 494065 - RNA, 19 nt, Homo sapiens
  misc_RNA (1)...(19): siRNA sense strand
ccugaucaaauggauaaua

SEQ ID NO: 494066 - RNA, 19 nt, Homo sapiens
  misc_RNA (1)...(19): siRNA sense strand
gaaaaugcuguaucagaga

SEQ ID NO: 494067 - RNA, 19 nt, Homo sapiens
  misc_RNA (1)...(19): siRNA sense strand
guggaguccucugcacuug

SEQ ID NO: 494068 - RNA, 19 nt, Homo sapiens
  misc_RNA (1)...(19): siRNA sense strand
uggauaauacuucaucugu

SEQ ID NO: 494069 - RNA, 19 nt, Homo sapiens
  misc_RNA (1)...(19): siRNA sense strand
ucauauagacacuuuagag

SEQ ID NO: 494070 - RNA, 19 nt, Homo sapiens
  misc_RNA (1)...(19): siRNA sense strand
ugugaaacuuuagaagaga

SEQ ID NO: 494071 - RNA, 19 nt, Homo sapiens
  misc_RNA (1)...(19): siRNA sense strand
gcucacaaggacauugcua

SEQ ID NO: 494072 - RNA, 19 nt, Homo sapiens
  misc_RNA (1)...(19): siRNA sense strand
aacgcugguuuaaagauaa

SEQ ID NO: 494073 - RNA, 19 nt, Homo sapiens
  misc_RNA (1)...(19): siRNA sense strand
cgacuagcacuuccuccaa

SEQ ID NO: 494074 - RNA, 19 nt, Homo sapiens
  misc_RNA (1)...(19): siRNA sense strand
uguccuggaugaagaaucu

SEQ ID NO: 494075 - RNA, 19 nt, Homo sapiens
  misc_RNA (1)...(19): siRNA sense strand
aagaaucuagagcugauaa

SEQ ID NO: 494076 - RNA, 19 nt, Homo sapiens
  misc_RNA (1)...(19): siRNA sense strand
ggaagaaagagcuaaauuu

SEQ ID NO: 494077 - RNA, 19 nt, Homo sapiens
  misc_RNA (1)...(19): siRNA sense strand
gagauggaaucacuaaaga

SEQ ID NO: 494078 - RNA, 19 nt, Homo sapiens
  misc_RNA (1)...(19): siRNA sense strand
uagcagaaguggcauauga

SEQ ID NO: 494079 - RNA, 19 nt, Homo sapiens
  misc_RNA (1)...(19): siRNA sense strand
gaacagaaucagaacauug

SEQ ID NO: 494080 - RNA, 19 nt, Homo sapiens
  misc_RNA (1)...(19): siRNA sense strand
ucaacaagcucaaauucuu

SEQ ID NO: 494081 - RNA, 19 nt, Homo sapiens
  misc_RNA (1)...(19): siRNA sense strand
gauaauacuucaucugucu

SEQ ID NO: 494082 - RNA, 19 nt, Homo sapiens
  misc_RNA (1)...(19): siRNA sense strand
aaagagauguuuccagguu

SEQ ID NO: 494083 - RNA, 19 nt, Homo sapiens
  misc_RNA (1)...(19): siRNA sense strand
agacagacaauuaggauua

SEQ ID NO: 494084 - RNA, 19 nt, Homo sapiens
  misc_RNA (1)...(19): siRNA sense strand
ggcauucugugaaacuuua

SEQ ID NO: 494085 - RNA, 19 nt, Homo sapiens
  misc_RNA (1)...(19): siRNA sense strand
uuacaagcguuucuucaaa

SEQ ID NO: 494086 - RNA, 19 nt, Homo sapiens
  misc_RNA (1)...(19): siRNA sense strand
gauggaaucacuaaagaaa

SEQ ID NO: 494087 - RNA, 19 nt, Homo sapiens
  misc_RNA (1)...(19): siRNA sense strand
gaaucuagagcugauaaua

SEQ ID NO: 494088 - RNA, 19 nt, Homo sapiens
  misc_RNA (1)...(19): siRNA sense strand
guuaugaagugauggaaga

SEQ ID NO: 494089 - RNA, 19 nt, Homo sapiens
  misc_RNA (1)...(19): siRNA sense strand
uuagaagacucaaauaugg

SEQ ID NO: 494090 - RNA, 19 nt, Homo sapiens
  misc_RNA (1)...(19): siRNA sense strand
uuuagaaccugaagaauca

SEQ ID NO: 494091 - RNA, 19 nt, Homo sapiens
  misc_RNA (1)...(19): siRNA sense strand
gaagacagacaauuaggau

SEQ ID NO: 494092 - RNA, 19 nt, Homo sapiens
  misc_RNA (1)...(19): siRNA sense strand
agacaaguguuccugauca

SEQ ID NO: 494093 - RNA, 19 nt, Homo sapiens
  misc_RNA (1)...(19): siRNA sense strand
gaaggugaacagauccuaa

SEQ ID NO: 494094 - RNA, 19 nt, Homo sapiens
  misc_RNA (1)...(19): siRNA sense strand
gacuagcacuuccuccaaa

SEQ ID NO: 494095 - RNA, 19 nt, Homo sapiens
  misc_RNA (1)...(19): siRNA sense strand
caaacuaccgcuuacagaa

SEQ ID NO: 494096 - RNA, 19 nt, Homo sapiens
  misc_RNA (1)...(19): siRNA sense strand
gugaacagauccuaaaggu

SEQ ID NO: 494097 - RNA, 19 nt, Homo sapiens
  misc_RNA (1)...(19): siRNA sense strand
cagaaagaacuacuugaaa

SEQ ID NO: 494098 - RNA, 19 nt, Homo sapiens
  misc_RNA (1)...(19): siRNA sense strand
ggagauggaaucacuaaag

SEQ ID NO: 494099 - RNA, 19 nt, Homo sapiens
  misc_RNA (1)...(19): siRNA sense strand
guuagaagacucaaauaug

SEQ ID NO: 494100 - RNA, 19 nt, Homo sapiens
  misc_RNA (1)...(19): siRNA sense strand
cuacuauacuggguuauga

SEQ ID NO: 494101 - RNA, 19 nt, Homo sapiens
  misc_RNA (1)...(19): siRNA sense strand
aagagacacugaagaacaa

SEQ ID NO: 494102 - RNA, 19 nt, Homo sapiens
  misc_RNA (1)...(19): siRNA sense strand
caagagacacugaagaaca

SEQ ID NO: 494103 - RNA, 19 nt, Homo sapiens
  misc_RNA (1)...(19): siRNA sense strand
guacagcuucuuccauuga

SEQ ID NO: 494104 - RNA, 19 nt, Homo sapiens
  misc_RNA (1)...(19): siRNA sense strand
acaaggacauugcuaacug

SEQ ID NO: 494105 - RNA, 19 nt, Homo sapiens
  misc_RNA (1)...(19): siRNA sense strand
ugaagaaucuagagcugau

SEQ ID NO: 494106 - RNA, 19 nt, Homo sapiens
  misc_RNA (1)...(19): siRNA sense strand
ucagaacauugucuuuaga

SEQ ID NO: 494107 - RNA, 19 nt, Homo sapiens
  misc_RNA (1)...(19): siRNA sense strand
caccuacuauacuggguua

SEQ ID NO: 494108 - RNA, 19 nt, Homo sapiens
  misc_RNA (1)...(19): siRNA sense strand
ggaaagcagggcauucugu

SEQ ID NO: 494109 - RNA, 19 nt, Homo sapiens
  misc_RNA (1)...(19): siRNA sense strand
gauagaaguagcagaagug

SEQ ID NO: 494110 - RNA, 19 nt, Homo sapiens
  misc_RNA (1)...(19): siRNA sense strand
aggacuaaauuuacaggua

SEQ ID NO: 494111 - RNA, 19 nt, Homo sapiens
  misc_RNA (1)...(19): siRNA sense strand
gagaacagaaucagaacau

SEQ ID NO: 494112 - RNA, 19 nt, Homo sapiens
  misc_RNA (1)...(19): siRNA sense strand
aaacuaccgcuuacagaaa

SEQ ID NO: 494113 - RNA, 19 nt, Homo sapiens
  misc_RNA (1)...(19): siRNA sense strand
gagacaaacuaccgcuuac

SEQ ID NO: 494114 - RNA, 19 nt, Homo sapiens
  misc_RNA (1)...(19): siRNA sense strand
agagacaaacuaccgcuua

SEQ ID NO: 494115 - RNA, 19 nt, Homo sapiens
  misc_RNA (1)...(19): siRNA sense strand
acagugaauugggaagaua

SEQ ID NO: 494116 - RNA, 19 nt, Homo sapiens
  misc_RNA (1)...(19): siRNA sense strand
uauacuggguuaugaagug

SEQ ID NO: 494117 - RNA, 19 nt, Homo sapiens
  misc_RNA (1)...(19): siRNA sense strand
cauaugaugcugaagaaga

SEQ ID NO: 494118 - RNA, 19 nt, Homo sapiens
  misc_RNA (1)...(19): siRNA sense strand
gcagaaguggcauaugaug

SEQ ID NO: 494119 - RNA, 19 nt, Homo sapiens
  misc_RNA (1)...(19): siRNA sense strand
gaaucagaacauugucuuu

SEQ ID NO: 494120 - RNA, 19 nt, Homo sapiens
  misc_RNA (1)...(19): siRNA sense strand
caacaaacagaaaucaaag

SEQ ID NO: 494121 - RNA, 19 nt, Homo sapiens
  misc_RNA (1)...(19): siRNA sense strand
gacaaguguuccugaucaa

SEQ ID NO: 494122 - RNA, 19 nt, Homo sapiens
  misc_RNA (1)...(19): siRNA sense strand
acagaaagaacuacuugaa

SEQ ID NO: 494123 - RNA, 19 nt, Homo sapiens
  misc_RNA (1)...(19): siRNA sense strand
uauagacacuuuagagaac

SEQ ID NO: 494124 - RNA, 19 nt, Homo sapiens
  misc_RNA (1)...(19): siRNA sense strand
ccaguuagaagacucaaau

SEQ ID NO: 494125 - RNA, 19 nt, Homo sapiens
  misc_RNA (1)...(19): siRNA sense strand
agagauagaaguagcagaa

SEQ ID NO: 494126 - RNA, 19 nt, Homo sapiens
  misc_RNA (1)...(19): siRNA sense strand
ggaguccucugcacuugag

SEQ ID NO: 494127 - RNA, 19 nt, Homo sapiens
  misc_RNA (1)...(19): siRNA sense strand
uuagagaacagaaucagaa

SEQ ID NO: 494128 - RNA, 19 nt, Homo sapiens
  misc_RNA (1)...(19): siRNA sense strand
caagcucaaauucuucuaa

SEQ ID NO: 494129 - RNA, 19 nt, Homo sapiens
  misc_RNA (1)...(19): siRNA sense strand
ccaccggguccauuugaua

SEQ ID NO: 494130 - RNA, 19 nt, Homo sapiens
  misc_RNA (1)...(19): siRNA sense strand
gguacagcuucuuccauug

SEQ ID NO: 494131 - RNA, 19 nt, Homo sapiens
  misc_RNA (1)...(19): siRNA sense strand
gauggaagaaagagcuaaa

SEQ ID NO: 494132 - RNA, 19 nt, Homo sapiens
  misc_RNA (1)...(19): siRNA sense strand
ggaugugucagaaacagaa

SEQ ID NO: 494133 - RNA, 19 nt, Homo sapiens
  misc_RNA (1)...(19): siRNA sense strand
caacaagcucaaauucuuc

SEQ ID NO: 494134 - RNA, 19 nt, Homo sapiens
  misc_RNA (1)...(19): siRNA sense strand
cuucuuccauugaguauuc

SEQ ID NO: 494135 - RNA, 19 nt, Homo sapiens
  misc_RNA (1)...(19): siRNA sense strand
gaagaaucuagagcugaua

SEQ ID NO: 494136 - RNA, 19 nt, Homo sapiens
  misc_RNA (1)...(19): siRNA sense strand
cauauagacacuuuagaga

SEQ ID NO: 494137 - RNA, 19 nt, Homo sapiens
  misc_RNA (1)...(19): siRNA sense strand
agguacagcuucuuccauu

SEQ ID NO: 494138 - RNA, 19 nt, Homo sapiens
  misc_RNA (1)...(19): siRNA sense strand
aacagaaggugaacagauc

SEQ ID NO: 494139 - RNA, 19 nt, Homo sapiens
  misc_RNA (1)...(19): siRNA sense strand
aaacagaaggugaacagau

SEQ ID NO: 494140 - RNA, 19 nt, Homo sapiens
  misc_RNA (1)...(19): siRNA sense strand
caaguguuccugaucaaau

SEQ ID NO: 494141 - RNA, 19 nt, Homo sapiens
  misc_RNA (1)...(19): siRNA sense strand
gaccaucuacaccuacuau

SEQ ID NO: 494142 - RNA, 19 nt, Homo sapiens
  misc_RNA (1)...(19): siRNA sense strand
aagauguccuggaugaaga

SEQ ID NO: 494143 - RNA, 19 nt, Homo sapiens
  misc_RNA (1)...(19): siRNA sense strand
uggaaucacuaaagaaacu

SEQ ID NO: 494144 - RNA, 19 nt, Homo sapiens
  misc_RNA (1)...(19): siRNA sense strand
uuacagaaagaacuacuug

SEQ ID NO: 494145 - RNA, 19 nt, Homo sapiens
  misc_RNA (1)...(19): siRNA sense strand
aagagauguuuccagguuu

SEQ ID NO: 494146 - RNA, 19 nt, Homo sapiens
  misc_RNA (1)...(19): siRNA sense strand
gaagaaucacuggaugugu

SEQ ID NO: 494147 - RNA, 19 nt, Homo sapiens
  misc_RNA (1)...(19): siRNA sense strand
cagaacauugucuuuagaa

SEQ ID NO: 494148 - RNA, 19 nt, Homo sapiens
  misc_RNA (1)...(19): siRNA sense strand
agaacagaaucagaacauu

SEQ ID NO: 494149 - RNA, 19 nt, Homo sapiens
  misc_RNA (1)...(19): siRNA sense strand
uggaagaaagagcuaaauu

SEQ ID NO: 494150 - RNA, 19 nt, Homo sapiens
  misc_RNA (1)...(19): siRNA sense strand
aucaagauguccuggauga

SEQ ID NO: 494151 - RNA, 19 nt, Homo sapiens
  misc_RNA (1)...(19): siRNA sense strand
ugaucaagauguccuggau

SEQ ID NO: 494152 - RNA, 19 nt, Homo sapiens
  misc_RNA (1)...(19): siRNA sense strand
gaggaaagcagggcauucu

SEQ ID NO: 494153 - RNA, 19 nt, Homo sapiens
  misc_RNA (1)...(19): siRNA sense strand
cagcuucuuccauugagua

SEQ ID NO: 494154 - RNA, 19 nt, Homo sapiens
  misc_RNA (1)...(19): siRNA sense strand
caagauguccuggaugaag

SEQ ID NO: 494155 - RNA, 19 nt, Homo sapiens
  misc_RNA (1)...(19): siRNA sense strand
gaaacagaaggugaacaga

SEQ ID NO: 494156 - RNA, 19 nt, Homo sapiens
  misc_RNA (1)...(19): siRNA sense strand
cugaucaaauggauaauac

SEQ ID NO: 494157 - RNA, 19 nt, Homo sapiens
  misc_RNA (1)...(19): siRNA sense strand
gacagacaauuaggauuac

SEQ ID NO: 494158 - RNA, 19 nt, Homo sapiens
  misc_RNA (1)...(19): siRNA sense strand
ggcagugucucaacaagcu

SEQ ID NO: 494159 - RNA, 19 nt, Homo sapiens
  misc_RNA (1)...(19): siRNA sense strand
gaccaagagacacugaaga

SEQ ID NO: 494160 - RNA, 19 nt, Homo sapiens
  misc_RNA (1)...(19): siRNA sense strand
gauuacaagcguuucuuca

SEQ ID NO: 494161 - RNA, 19 nt, Homo sapiens
  misc_RNA (1)...(19): siRNA sense strand
acagacaaguguuccugau

SEQ ID NO: 494162 - RNA, 19 nt, Homo sapiens
  misc_RNA (1)...(19): siRNA sense strand
agauagaaguagcagaagu

SEQ ID NO: 494163 - RNA, 19 nt, Homo sapiens
  misc_RNA (1)...(19): siRNA sense strand
gggcauucugugaaacuuu

SEQ ID NO: 494164 - RNA, 19 nt, Homo sapiens
  misc_RNA (1)...(19): siRNA sense strand
ggauuacaagcguuucuuc

SEQ ID NO: 494165 - RNA, 19 nt, Homo sapiens
  misc_RNA (1)...(19): siRNA sense strand
ccugaucaaauggauaaua

SEQ ID NO: 494166 - RNA, 19 nt, Homo sapiens
  misc_RNA (1)...(19): siRNA sense strand
gaaaaugcuguaucagaga

SEQ ID NO: 494167 - RNA, 19 nt, Homo sapiens
  misc_RNA (1)...(19): siRNA sense strand
guggaguccucugcacuug

SEQ ID NO: 494168 - RNA, 19 nt, Homo sapiens
  misc_RNA (1)...(19): siRNA sense strand
uggauaauacuucaucugu

SEQ ID NO: 494169 - RNA, 19 nt, Homo sapiens
  misc_RNA (1)...(19): siRNA sense strand
ucauauagacacuuuagag

SEQ ID NO: 494170 - RNA, 19 nt, Homo sapiens
  misc_RNA (1)...(19): siRNA sense strand
ugugaaacuuuagaagaga

SEQ ID NO: 494171 - RNA, 19 nt, Homo sapiens
  misc_RNA (1)...(19): siRNA sense strand
gcucacaaggacauugcua

SEQ ID NO: 494172 - RNA, 19 nt, Homo sapiens
  misc_RNA (1)...(19): siRNA sense strand
aacgcugguuuaaagauaa

SEQ ID NO: 494173 - RNA, 19 nt, Homo sapiens
  misc_RNA (1)...(19): siRNA sense strand
cgacuagcacuuccuccaa

SEQ ID NO: 494174 - RNA, 19 nt, Homo sapiens
  misc_RNA (1)...(19): siRNA sense strand
uguccuggaugaagaaucu

SEQ ID NO: 494175 - RNA, 19 nt, Homo sapiens
  misc_RNA (1)...(19): siRNA sense strand
aagaaucuagagcugauaa

SEQ ID NO: 494176 - RNA, 19 nt, Homo sapiens
  misc_RNA (1)...(19): siRNA sense strand
ggaagaaagagcuaaauuu

SEQ ID NO: 494177 - RNA, 19 nt, Homo sapiens
  misc_RNA (1)...(19): siRNA sense strand
gagauggaaucacuaaaga

SEQ ID NO: 494178 - RNA, 19 nt, Homo sapiens
  misc_RNA (1)...(19): siRNA sense strand
uagcagaaguggcauauga

SEQ ID NO: 494179 - RNA, 19 nt, Homo sapiens
  misc_RNA (1)...(19): siRNA sense strand
gaacagaaucagaacauug

SEQ ID NO: 494180 - RNA, 19 nt, Homo sapiens
  misc_RNA (1)...(19): siRNA sense strand
ucaacaagcucaaauucuu

SEQ ID NO: 494181 - RNA, 19 nt, Homo sapiens
  misc_RNA (1)...(19): siRNA sense strand
gauaauacuucaucugucu

SEQ ID NO: 494182 - RNA, 19 nt, Homo sapiens
  misc_RNA (1)...(19): siRNA sense strand
aaagagauguuuccagguu

SEQ ID NO: 494183 - RNA, 19 nt, Homo sapiens
  misc_RNA (1)...(19): siRNA sense strand
agacagacaauuaggauua

SEQ ID NO: 494184 - RNA, 19 nt, Homo sapiens
  misc_RNA (1)...(19): siRNA sense strand
ggcauucugugaaacuuua

SEQ ID NO: 494185 - RNA, 19 nt, Homo sapiens
  misc_RNA (1)...(19): siRNA sense strand
uuacaagcguuucuucaaa

SEQ ID NO: 494186 - RNA, 19 nt, Homo sapiens
  misc_RNA (1)...(19): siRNA sense strand
gauggaaucacuaaagaaa

SEQ ID NO: 494187 - RNA, 19 nt, Homo sapiens
  misc_RNA (1)...(19): siRNA sense strand
gaaucuagagcugauaaua

SEQ ID NO: 494188 - RNA, 19 nt, Homo sapiens
  misc_RNA (1)...(19): siRNA sense strand
guuaugaagugauggaaga

SEQ ID NO: 494189 - RNA, 19 nt, Homo sapiens
  misc_RNA (1)...(19): siRNA sense strand
uuagaagacucaaauaugg

SEQ ID NO: 494190 - RNA, 19 nt, Homo sapiens
  misc_RNA (1)...(19): siRNA sense strand
uuuagaaccugaagaauca

SEQ ID NO: 494191 - RNA, 19 nt, Homo sapiens
  misc_RNA (1)...(19): siRNA sense strand
gaagacagacaauuaggau

SEQ ID NO: 494192 - RNA, 19 nt, Homo sapiens
  misc_RNA (1)...(19): siRNA sense strand
agacaaguguuccugauca

SEQ ID NO: 494193 - RNA, 19 nt, Homo sapiens
  misc_RNA (1)...(19): siRNA sense strand
gaaggugaacagauccuaa

SEQ ID NO: 494194 - RNA, 19 nt, Homo sapiens
  misc_RNA (1)...(19): siRNA sense strand
gacuagcacuuccuccaaa

SEQ ID NO: 494195 - RNA, 19 nt, Homo sapiens
  misc_RNA (1)...(19): siRNA sense strand
caaacuaccgcuuacagaa

SEQ ID NO: 494196 - RNA, 19 nt, Homo sapiens
  misc_RNA (1)...(19): siRNA sense strand
gugaacagauccuaaaggu

SEQ ID NO: 494197 - RNA, 19 nt, Homo sapiens
  misc_RNA (1)...(19): siRNA sense strand
cagaaagaacuacuugaaa

SEQ ID NO: 494198 - RNA, 19 nt, Homo sapiens
  misc_RNA (1)...(19): siRNA sense strand
ggagauggaaucacuaaag

SEQ ID NO: 494199 - RNA, 19 nt, Homo sapiens
  misc_RNA (1)...(19): siRNA sense strand
guuagaagacucaaauaug

SEQ ID NO: 494200 - RNA, 19 nt, Homo sapiens
  misc_RNA (1)...(19): siRNA sense strand
cuacuauacuggguuauga

SEQ ID NO: 494201 - RNA, 19 nt, Homo sapiens
  misc_RNA (1)...(19): siRNA sense strand
aagagacacugaagaacaa

SEQ ID NO: 494202 - RNA, 19 nt, Homo sapiens
  misc_RNA (1)...(19): siRNA sense strand
caagagacacugaagaaca

SEQ ID NO: 494203 - RNA, 19 nt, Homo sapiens
  misc_RNA (1)...(19): siRNA sense strand
guacagcuucuuccauuga

SEQ ID NO: 494204 - RNA, 19 nt, Homo sapiens
  misc_RNA (1)...(19): siRNA sense strand
acaaggacauugcuaacug

SEQ ID NO: 494205 - RNA, 19 nt, Homo sapiens
  misc_RNA (1)...(19): siRNA sense strand
ugaagaaucuagagcugau

SEQ ID NO: 494206 - RNA, 19 nt, Homo sapiens
  misc_RNA (1)...(19): siRNA sense strand
ucagaacauugucuuuaga

SEQ ID NO: 494207 - RNA, 19 nt, Homo sapiens
  misc_RNA (1)...(19): siRNA sense strand
caccuacuauacuggguua

SEQ ID NO: 494208 - RNA, 19 nt, Homo sapiens
  misc_RNA (1)...(19): siRNA sense strand
ggaaagcagggcauucugu

SEQ ID NO: 494209 - RNA, 19 nt, Homo sapiens
  misc_RNA (1)...(19): siRNA sense strand
gauagaaguagcagaagug

SEQ ID NO: 494210 - RNA, 19 nt, Homo sapiens
  misc_RNA (1)...(19): siRNA sense strand
aggacuaaauuuacaggua

SEQ ID NO: 494211 - RNA, 19 nt, Homo sapiens
  misc_RNA (1)...(19): siRNA sense strand
gagaacagaaucagaacau

SEQ ID NO: 494212 - RNA, 19 nt, Homo sapiens
  misc_RNA (1)...(19): siRNA sense strand
aaacuaccgcuuacagaaa

SEQ ID NO: 494213 - RNA, 19 nt, Homo sapiens
  misc_RNA (1)...(19): siRNA sense strand
gagacaaacuaccgcuuac

SEQ ID NO: 494214 - RNA, 19 nt, Homo sapiens
  misc_RNA (1)...(19): siRNA sense strand
agagacaaacuaccgcuua

SEQ ID NO: 494215 - RNA, 19 nt, Homo sapiens
  misc_RNA (1)...(19): siRNA sense strand
acagugaauugggaagaua

SEQ ID NO: 494216 - RNA, 19 nt, Homo sapiens
  misc_RNA (1)...(19): siRNA sense strand
uauacuggguuaugaagug

SEQ ID NO: 494217 - RNA, 19 nt, Homo sapiens
  misc_RNA (1)...(19): siRNA sense strand
cauaugaugcugaagaaga

SEQ ID NO: 494218 - RNA, 19 nt, Homo sapiens
  misc_RNA (1)...(19): siRNA sense strand
gcagaaguggcauaugaug

SEQ ID NO: 494219 - RNA, 19 nt, Homo sapiens
  misc_RNA (1)...(19): siRNA sense strand
gaaucagaacauugucuuu

SEQ ID NO: 494220 - RNA, 19 nt, Homo sapiens
  misc_RNA (1)...(19): siRNA sense strand
caacaaacagaaaucaaag

SEQ ID NO: 494221 - RNA, 19 nt, Homo sapiens
  misc_RNA (1)...(19): siRNA sense strand
gacaaguguuccugaucaa

SEQ ID NO: 494222 - RNA, 19 nt, Homo sapiens
  misc_RNA (1)...(19): siRNA sense strand
acagaaagaacuacuugaa

SEQ ID NO: 494223 - RNA, 19 nt, Homo sapiens
  misc_RNA (1)...(19): siRNA sense strand
uauagacacuuuagagaac

SEQ ID NO: 494224 - RNA, 19 nt, Homo sapiens
  misc_RNA (1)...(19): siRNA sense strand
ccaguuagaagacucaaau

SEQ ID NO: 494225 - RNA, 19 nt, Homo sapiens
  misc_RNA (1)...(19): siRNA sense strand
agagauagaaguagcagaa

SEQ ID NO: 494226 - RNA, 19 nt, Homo sapiens
  misc_RNA (1)...(19): siRNA sense strand
ggaguccucugcacuugag

SEQ ID NO: 494227 - RNA, 19 nt, Homo sapiens
  misc_RNA (1)...(19): siRNA sense strand
uuagagaacagaaucagaa

SEQ ID NO: 494228 - RNA, 19 nt, Homo sapiens
  misc_RNA (1)...(19): siRNA sense strand
caagcucaaauucuucuaa

SEQ ID NO: 494229 - RNA, 19 nt, Homo sapiens
  misc_RNA (1)...(19): siRNA sense strand
ccaccggguccauuugaua

SEQ ID NO: 494230 - RNA, 19 nt, Homo sapiens
  misc_RNA (1)...(19): siRNA sense strand
gguacagcuucuuccauug

SEQ ID NO: 494231 - RNA, 19 nt, Homo sapiens
  misc_RNA (1)...(19): siRNA sense strand
gauggaagaaagagcuaaa

SEQ ID NO: 494232 - RNA, 19 nt, Homo sapiens
  misc_RNA (1)...(19): siRNA sense strand
ggaugugucagaaacagaa

SEQ ID NO: 494233 - RNA, 19 nt, Homo sapiens
  misc_RNA (1)...(19): siRNA sense strand
caacaagcucaaauucuuc

SEQ ID NO: 494234 - RNA, 19 nt, Homo sapiens
  misc_RNA (1)...(19): siRNA sense strand
cuucuuccauugaguauuc

SEQ ID NO: 494235 - RNA, 19 nt, Homo sapiens
  misc_RNA (1)...(19): siRNA sense strand
gaagaaucuagagcugaua

SEQ ID NO: 494236 - RNA, 19 nt, Homo sapiens
  misc_RNA (1)...(19): siRNA sense strand
cauauagacacuuuagaga

SEQ ID NO: 494237 - RNA, 19 nt, Homo sapiens
  misc_RNA (1)...(19): siRNA sense strand
agguacagcuucuuccauu

SEQ ID NO: 494238 - RNA, 19 nt, Homo sapiens
  misc_RNA (1)...(19): siRNA sense strand
aacagaaggugaacagauc

SEQ ID NO: 494239 - RNA, 19 nt, Homo sapiens
  misc_RNA (1)...(19): siRNA sense strand
aaacagaaggugaacagau

SEQ ID NO: 494240 - RNA, 19 nt, Homo sapiens
  misc_RNA (1)...(19): siRNA sense strand
caaguguuccugaucaaau

SEQ ID NO: 494241 - RNA, 19 nt, Homo sapiens
  misc_RNA (1)...(19): siRNA sense strand
gaccaucuacaccuacuau

SEQ ID NO: 494242 - RNA, 19 nt, Homo sapiens
  misc_RNA (1)...(19): siRNA sense strand
aagauguccuggaugaaga

SEQ ID NO: 494243 - RNA, 19 nt, Homo sapiens
  misc_RNA (1)...(19): siRNA sense strand
uggaaucacuaaagaaacu

SEQ ID NO: 494244 - RNA, 19 nt, Homo sapiens
  misc_RNA (1)...(19): siRNA sense strand
uuacagaaagaacuacuug

SEQ ID NO: 494245 - RNA, 19 nt, Homo sapiens
  misc_RNA (1)...(19): siRNA sense strand
aagagauguuuccagguuu

SEQ ID NO: 494246 - RNA, 19 nt, Homo sapiens
  misc_RNA (1)...(19): siRNA sense strand
gaagaaucacuggaugugu

SEQ ID NO: 494247 - RNA, 19 nt, Homo sapiens
  misc_RNA (1)...(19): siRNA sense strand
cagaacauugucuuuagaa

SEQ ID NO: 494248 - RNA, 19 nt, Homo sapiens
  misc_RNA (1)...(19): siRNA sense strand
agaacagaaucagaacauu

SEQ ID NO: 494249 - RNA, 19 nt, Homo sapiens
  misc_RNA (1)...(19): siRNA sense strand
uggaagaaagagcuaaauu

SEQ ID NO: 494250 - RNA, 19 nt, Homo sapiens
  misc_RNA (1)...(19): siRNA sense strand
aucaagauguccuggauga

SEQ ID NO: 494251 - RNA, 19 nt, Homo sapiens
  misc_RNA (1)...(19): siRNA sense strand
ugaucaagauguccuggau

SEQ ID NO: 494252 - RNA, 19 nt, Homo sapiens
  misc_RNA (1)...(19): siRNA sense strand
gaggaaagcagggcauucu

SEQ ID NO: 494253 - RNA, 19 nt, Homo sapiens
  misc_RNA (1)...(19): siRNA sense strand
cagcuucuuccauugagua

SEQ ID NO: 494254 - RNA, 19 nt, Homo sapiens
  misc_RNA (1)...(19): siRNA sense strand
caagauguccuggaugaag

SEQ ID NO: 494255 - RNA, 19 nt, Homo sapiens
  misc_RNA (1)...(19): siRNA sense strand
gaaacagaaggugaacaga

SEQ ID NO: 494256 - RNA, 19 nt, Homo sapiens
  misc_RNA (1)...(19): siRNA sense strand
cugaucaaauggauaauac

SEQ ID NO: 494257 - RNA, 19 nt, Homo sapiens
  misc_RNA (1)...(19): siRNA sense strand
gacagacaauuaggauuac

SEQ ID NO: 494258 - RNA, 19 nt, Homo sapiens
  misc_RNA (1)...(19): siRNA sense strand
ggcagugucucaacaagcu

SEQ ID NO: 494259 - RNA, 19 nt, Homo sapiens
  misc_RNA (1)...(19): siRNA sense strand
gaccaagagacacugaaga

SEQ ID NO: 494260 - RNA, 19 nt, Homo sapiens
  misc_RNA (1)...(19): siRNA sense strand
gauuacaagcguuucuuca

SEQ ID NO: 494261 - RNA, 19 nt, Homo sapiens
  misc_RNA (1)...(19): siRNA sense strand
acagacaaguguuccugau

SEQ ID NO: 494262 - RNA, 19 nt, Homo sapiens
  misc_RNA (1)...(19): siRNA sense strand
agauagaaguagcagaagu

SEQ ID NO: 494263 - RNA, 19 nt, Homo sapiens
  misc_RNA (1)...(19): siRNA sense strand
gggcauucugugaaacuuu

SEQ ID NO: 494264 - RNA, 19 nt, Homo sapiens
  misc_RNA (1)...(19): siRNA sense strand
ggauuacaagcguuucuuc

SEQ ID NO: 494265 - RNA, 19 nt, Homo sapiens
  misc_RNA (1)...(19): siRNA sense strand
ccugaucaaauggauaaua

SEQ ID NO: 494266 - RNA, 19 nt, Homo sapiens
  misc_RNA (1)...(19): siRNA sense strand
gaaaaugcuguaucagaga

SEQ ID NO: 494267 - RNA, 19 nt, Homo sapiens
  misc_RNA (1)...(19): siRNA sense strand
guggaguccucugcacuug

SEQ ID NO: 494268 - RNA, 19 nt, Homo sapiens
  misc_RNA (1)...(19): siRNA sense strand
uggauaauacuucaucugu

SEQ ID NO: 494269 - RNA, 19 nt, Homo sapiens
  misc_RNA (1)...(19): siRNA sense strand
ucauauagacacuuuagag

SEQ ID NO: 494270 - RNA, 19 nt, Homo sapiens
  misc_RNA (1)...(19): siRNA sense strand
ugugaaacuuuagaagaga

SEQ ID NO: 494271 - RNA, 19 nt, Homo sapiens
  misc_RNA (1)...(19): siRNA sense strand
gcucacaaggacauugcua

SEQ ID NO: 494272 - RNA, 19 nt, Homo sapiens
  misc_RNA (1)...(19): siRNA sense strand
aacgcugguuuaaagauaa

SEQ ID NO: 494273 - RNA, 19 nt, Homo sapiens
  misc_RNA (1)...(19): siRNA sense strand
cgacuagcacuuccuccaa

SEQ ID NO: 494274 - RNA, 19 nt, Homo sapiens
  misc_RNA (1)...(19): siRNA sense strand
uguccuggaugaagaaucu

SEQ ID NO: 494275 - RNA, 19 nt, Homo sapiens
  misc_RNA (1)...(19): siRNA sense strand
aagaaucuagagcugauaa

SEQ ID NO: 494276 - RNA, 19 nt, Homo sapiens
  misc_RNA (1)...(19): siRNA sense strand
gagcuacucucaaguuaua

SEQ ID NO: 494277 - RNA, 19 nt, Homo sapiens
  misc_RNA (1)...(19): siRNA sense strand
ccacacgccugaacuuuaa

SEQ ID NO: 494278 - RNA, 19 nt, Homo sapiens
  misc_RNA (1)...(19): siRNA sense strand
cauacuggcuucuagaauu

SEQ ID NO: 494279 - RNA, 19 nt, Homo sapiens
  misc_RNA (1)...(19): siRNA sense strand
cgagaagggugaugaggaa

SEQ ID NO: 494280 - RNA, 19 nt, Homo sapiens
  misc_RNA (1)...(19): siRNA sense strand
uauggaugcuucuaucuuu

SEQ ID NO: 494281 - RNA, 19 nt, Homo sapiens
  misc_RNA (1)...(19): siRNA sense strand
caagcucuuugcuaaguuu

SEQ ID NO: 494282 - RNA, 19 nt, Homo sapiens
  misc_RNA (1)...(19): siRNA sense strand
gacaagcucuuugcuaagu

SEQ ID NO: 494283 - RNA, 19 nt, Homo sapiens
  misc_RNA (1)...(19): siRNA sense strand
gcugggauaugacaucuca

SEQ ID NO: 494284 - RNA, 19 nt, Homo sapiens
  misc_RNA (1)...(19): siRNA sense strand
gagccaggaugggcaguuu

SEQ ID NO: 494285 - RNA, 19 nt, Homo sapiens
  misc_RNA (1)...(19): siRNA sense strand
augacaagcucuuugcuaa

SEQ ID NO: 494286 - RNA, 19 nt, Homo sapiens
  misc_RNA (1)...(19): siRNA sense strand
ucucggcucugcugggaua

SEQ ID NO: 494287 - RNA, 19 nt, Homo sapiens
  misc_RNA (1)...(19): siRNA sense strand
ggaaaagucuccaucuucu

SEQ ID NO: 494288 - RNA, 19 nt, Homo sapiens
  misc_RNA (1)...(19): siRNA sense strand
gaagggugaugaggaaguc

SEQ ID NO: 494289 - RNA, 19 nt, Homo sapiens
  misc_RNA (1)...(19): siRNA sense strand
gaccaaagagcgauacauc

SEQ ID NO: 494290 - RNA, 19 nt, Homo sapiens
  misc_RNA (1)...(19): siRNA sense strand
ucuuaacucuggccacuga

SEQ ID NO: 494291 - RNA, 19 nt, Homo sapiens
  misc_RNA (1)...(19): siRNA sense strand
gcucuacacucucaaugac

SEQ ID NO: 494292 - RNA, 19 nt, Homo sapiens
  misc_RNA (1)...(19): siRNA sense strand
ugcacuacaucuuuccaua

SEQ ID NO: 494293 - RNA, 19 nt, Homo sapiens
  misc_RNA (1)...(19): siRNA sense strand
ccacugaacagaccuaugc

SEQ ID NO: 494294 - RNA, 19 nt, Homo sapiens
  misc_RNA (1)...(19): siRNA sense strand
ccaaagagcgauacaucuc

SEQ ID NO: 494295 - RNA, 19 nt, Homo sapiens
  misc_RNA (1)...(19): siRNA sense strand
gcacuacaucuuuccauac

SEQ ID NO: 494296 - RNA, 19 nt, Homo sapiens
  misc_RNA (1)...(19): siRNA sense strand
gccuggacauuguucuuug

SEQ ID NO: 494297 - RNA, 19 nt, Homo sapiens
  misc_RNA (1)...(19): siRNA sense strand
auacuggcuucuagaauuc

SEQ ID NO: 494298 - RNA, 19 nt, Homo sapiens
  misc_RNA (1)...(19): siRNA sense strand
ccaccucucuccagcaaac

SEQ ID NO: 494299 - RNA, 19 nt, Homo sapiens
  misc_RNA (1)...(19): siRNA sense strand
cccacacgccugaacuuua

SEQ ID NO: 494300 - RNA, 19 nt, Homo sapiens
  misc_RNA (1)...(19): siRNA sense strand
auacaucuccugccucuuc

SEQ ID NO: 494301 - RNA, 19 nt, Homo sapiens
  misc_RNA (1)...(19): siRNA sense strand
ucuacacucucaaugacaa

SEQ ID NO: 494302 - RNA, 19 nt, Homo sapiens
  misc_RNA (1)...(19): siRNA sense strand
guauggaugcuucuaucuu

SEQ ID NO: 494303 - RNA, 19 nt, Homo sapiens
  misc_RNA (1)...(19): siRNA sense strand
gugaugaggaagucuguga

SEQ ID NO: 494304 - RNA, 19 nt, Homo sapiens
  misc_RNA (1)...(19): siRNA sense strand
gaagcucuacacucucaau

SEQ ID NO: 494305 - RNA, 19 nt, Homo sapiens
  misc_RNA (1)...(19): siRNA sense strand
gcgaggagcaggucuuaac

SEQ ID NO: 494306 - RNA, 19 nt, Homo sapiens
  misc_RNA (1)...(19): siRNA sense strand
aguuugaccuccucuacaa

SEQ ID NO: 494307 - RNA, 19 nt, Homo sapiens
  misc_RNA (1)...(19): siRNA sense strand
ccuguggccuggacauugu

SEQ ID NO: 494308 - RNA, 19 nt, Homo sapiens
  misc_RNA (1)...(19): siRNA sense strand
guguauggaugcuucuauc

SEQ ID NO: 494309 - RNA, 19 nt, Homo sapiens
  misc_RNA (1)...(19): siRNA sense strand
cagcgugcauuagguggaa

SEQ ID NO: 494310 - RNA, 19 nt, Homo sapiens
  misc_RNA (1)...(19): siRNA sense strand
cggcucugcugggauauga

SEQ ID NO: 494311 - RNA, 19 nt, Homo sapiens
  misc_RNA (1)...(19): siRNA sense strand
ccuagccaacugccucuua

SEQ ID NO: 494312 - RNA, 19 nt, Homo sapiens
  misc_RNA (1)...(19): siRNA sense strand
gcauacuggcuucuagaau

SEQ ID NO: 494313 - RNA, 19 nt, Homo sapiens
  misc_RNA (1)...(19): siRNA sense strand
ggccuggacauuguucuuu

SEQ ID NO: 494314 - RNA, 19 nt, Homo sapiens
  misc_RNA (1)...(19): siRNA sense strand
aaugacaagcucuuugcua

SEQ ID NO: 494315 - RNA, 19 nt, Homo sapiens
  misc_RNA (1)...(19): siRNA sense strand
acaagcucuuugcuaaguu

SEQ ID NO: 494316 - RNA, 19 nt, Homo sapiens
  misc_RNA (1)...(19): siRNA sense strand
ggcauacuggcuucuagaa

SEQ ID NO: 494317 - RNA, 19 nt, Homo sapiens
  misc_RNA (1)...(19): siRNA sense strand
aggagcaggucuuaacucu

SEQ ID NO: 494318 - RNA, 19 nt, Homo sapiens
  misc_RNA (1)...(19): siRNA sense strand
ccagcuaccaccaacuuuc

SEQ ID NO: 494319 - RNA, 19 nt, Homo sapiens
  misc_RNA (1)...(19): siRNA sense strand
cagcagagugggccagcuu

SEQ ID NO: 494320 - RNA, 19 nt, Homo sapiens
  misc_RNA (1)...(19): siRNA sense strand
gaguuugaccuccucuaca

SEQ ID NO: 494321 - RNA, 19 nt, Homo sapiens
  misc_RNA (1)...(19): siRNA sense strand
caggguucagcgugcauua

SEQ ID NO: 494322 - RNA, 19 nt, Homo sapiens
  misc_RNA (1)...(19): siRNA sense strand
caucuuuccauaccaguuc

SEQ ID NO: 494323 - RNA, 19 nt, Homo sapiens
  misc_RNA (1)...(19): siRNA sense strand
uuucugcacuacaucuuuc

SEQ ID NO: 494324 - RNA, 19 nt, Homo sapiens
  misc_RNA (1)...(19): siRNA sense strand
gguguauggaugcuucuau

SEQ ID NO: 494325 - RNA, 19 nt, Homo sapiens
  misc_RNA (1)...(19): siRNA sense strand
gccuugagcccuuaaacuu

SEQ ID NO: 494326 - RNA, 19 nt, Homo sapiens
  misc_RNA (1)...(19): siRNA sense strand
ucccugcucuccauacuuc

SEQ ID NO: 494327 - RNA, 19 nt, Homo sapiens
  misc_RNA (1)...(19): siRNA sense strand
cuugagcccuuaaacuucu

SEQ ID NO: 494328 - RNA, 19 nt, Homo sapiens
  misc_RNA (1)...(19): siRNA sense strand
gccuugagcccuuaaacuu

SEQ ID NO: 494329 - RNA, 19 nt, Homo sapiens
  misc_RNA (1)...(19): siRNA sense strand
ucccugcucuccauacuuc

SEQ ID NO: 494330 - RNA, 19 nt, Homo sapiens
  misc_RNA (1)...(19): siRNA sense strand
cuugagcccuuaaacuucu

SEQ ID NO: 494331 - RNA, 19 nt, Homo sapiens
  misc_RNA (1)...(19): siRNA sense strand
gccuugagcccuuaaacuu

SEQ ID NO: 494332 - RNA, 19 nt, Homo sapiens
  misc_RNA (1)...(19): siRNA sense strand
cuugagcccuuaaacuucu

SEQ ID NO: 494333 - RNA, 19 nt, Homo sapiens
  misc_RNA (1)...(19): siRNA sense strand
gaaauaauguggucucuga

SEQ ID NO: 494334 - RNA, 19 nt, Homo sapiens
  misc_RNA (1)...(19): siRNA sense strand
caagggaucuguuuacuuc

SEQ ID NO: 494335 - RNA, 19 nt, Homo sapiens
  misc_RNA (1)...(19): siRNA sense strand
gaaugugucuuuccuuuca

SEQ ID NO: 494336 - RNA, 19 nt, Homo sapiens
  misc_RNA (1)...(19): siRNA sense strand
ccacagagaacauggauaa

SEQ ID NO: 494337 - RNA, 19 nt, Homo sapiens
  misc_RNA (1)...(19): siRNA sense strand
gaacauggauaaggaugga

SEQ ID NO: 494338 - RNA, 19 nt, Homo sapiens
  misc_RNA (1)...(19): siRNA sense strand
ggacaaccuuccuucucua

SEQ ID NO: 494339 - RNA, 19 nt, Homo sapiens
  misc_RNA (1)...(19): siRNA sense strand
uaacugcacuaacaaagga

SEQ ID NO: 494340 - RNA, 19 nt, Homo sapiens
  misc_RNA (1)...(19): siRNA sense strand
gaagauuacccacgcugua

SEQ ID NO: 494341 - RNA, 19 nt, Homo sapiens
  misc_RNA (1)...(19): siRNA sense strand
caaccuuccuucucuauuc

SEQ ID NO: 494342 - RNA, 19 nt, Homo sapiens
  misc_RNA (1)...(19): siRNA sense strand
uaucuucccuuucaucuau

SEQ ID NO: 494343 - RNA, 19 nt, Homo sapiens
  misc_RNA (1)...(19): siRNA sense strand
cagagaacauggauaagga

SEQ ID NO: 494344 - RNA, 19 nt, Homo sapiens
  misc_RNA (1)...(19): siRNA sense strand
gcacccauauucauagcuu

SEQ ID NO: 494345 - RNA, 19 nt, Homo sapiens
  misc_RNA (1)...(19): siRNA sense strand
aaacagcaguggaaauucu

SEQ ID NO: 494346 - RNA, 19 nt, Homo sapiens
  misc_RNA (1)...(19): siRNA sense strand
caguggaaauucugugaaa

SEQ ID NO: 494347 - RNA, 19 nt, Homo sapiens
  misc_RNA (1)...(19): siRNA sense strand
gcaugaggaaugugucuuu

SEQ ID NO: 494348 - RNA, 19 nt, Homo sapiens
  misc_RNA (1)...(19): siRNA sense strand
ggaaguacugccagaguga

SEQ ID NO: 494349 - RNA, 19 nt, Homo sapiens
  misc_RNA (1)...(19): siRNA sense strand
gaggaaaggcuuauaacag

SEQ ID NO: 494350 - RNA, 19 nt, Homo sapiens
  misc_RNA (1)...(19): siRNA sense strand
agaaacagcaguggaaauu

SEQ ID NO: 494351 - RNA, 19 nt, Homo sapiens
  misc_RNA (1)...(19): siRNA sense strand
ucaccucugucuucgauga

SEQ ID NO: 494352 - RNA, 19 nt, Homo sapiens
  misc_RNA (1)...(19): siRNA sense strand
uggcuuuccuugucacuuu

SEQ ID NO: 494353 - RNA, 19 nt, Homo sapiens
  misc_RNA (1)...(19): siRNA sense strand
auaauguggucucugauug

SEQ ID NO: 494354 - RNA, 19 nt, Homo sapiens
  misc_RNA (1)...(19): siRNA sense strand
gcacuaacaaaggaucaaa

SEQ ID NO: 494355 - RNA, 19 nt, Homo sapiens
  misc_RNA (1)...(19): siRNA sense strand
gagaaacagcaguggaaau

SEQ ID NO: 494356 - RNA, 19 nt, Homo sapiens
  misc_RNA (1)...(19): siRNA sense strand
ggaaauucugugaaacgaa

SEQ ID NO: 494357 - RNA, 19 nt, Homo sapiens
  misc_RNA (1)...(19): siRNA sense strand
gugcaacuucuuacaacua

SEQ ID NO: 494358 - RNA, 19 nt, Homo sapiens
  misc_RNA (1)...(19): siRNA sense strand
gcauggaggaugaaagcaa

SEQ ID NO: 494359 - RNA, 19 nt, Homo sapiens
  misc_RNA (1)...(19): siRNA sense strand
gaaacagcaguggaaauuc

SEQ ID NO: 494360 - RNA, 19 nt, Homo sapiens
  misc_RNA (1)...(19): siRNA sense strand
cugauugcauggaggauga

SEQ ID NO: 494361 - RNA, 19 nt, Homo sapiens
  misc_RNA (1)...(19): siRNA sense strand
caaguggagggaugcauga

SEQ ID NO: 494362 - RNA, 19 nt, Homo sapiens
  misc_RNA (1)...(19): siRNA sense strand
cacuuuccguucaacuaua

SEQ ID NO: 494363 - RNA, 19 nt, Homo sapiens
  misc_RNA (1)...(19): siRNA sense strand
gaaguacugccagagugaa

SEQ ID NO: 494364 - RNA, 19 nt, Homo sapiens
  misc_RNA (1)...(19): siRNA sense strand
gcaguggaaauucugugaa

SEQ ID NO: 494365 - RNA, 19 nt, Homo sapiens
  misc_RNA (1)...(19): siRNA sense strand
cgaggaaaggcuuauaaca

SEQ ID NO: 494366 - RNA, 19 nt, Homo sapiens
  misc_RNA (1)...(19): siRNA sense strand
ucacuugcacccauauuca

SEQ ID NO: 494367 - RNA, 19 nt, Homo sapiens
  misc_RNA (1)...(19): siRNA sense strand
gugaaacgaaugaguaugg

SEQ ID NO: 494368 - RNA, 19 nt, Homo sapiens
  misc_RNA (1)...(19): siRNA sense strand
ucugugaaacgaaugagua

SEQ ID NO: 494369 - RNA, 19 nt, Homo sapiens
  misc_RNA (1)...(19): siRNA sense strand
ccuacaagggaucuguuua

SEQ ID NO: 494370 - RNA, 19 nt, Homo sapiens
  misc_RNA (1)...(19): siRNA sense strand
ucacuuuccguucaacuau

SEQ ID NO: 494371 - RNA, 19 nt, Homo sapiens
  misc_RNA (1)...(19): siRNA sense strand
uggacaaccuuccuucucu

SEQ ID NO: 494372 - RNA, 19 nt, Homo sapiens
  misc_RNA (1)...(19): siRNA sense strand
gagggaugcaugaggaaug

SEQ ID NO: 494373 - RNA, 19 nt, Homo sapiens
  misc_RNA (1)...(19): siRNA sense strand
cacccauauucauagcuua

SEQ ID NO: 494374 - RNA, 19 nt, Homo sapiens
  misc_RNA (1)...(19): siRNA sense strand
ggugugcaacuucuuacaa

SEQ ID NO: 494375 - RNA, 19 nt, Homo sapiens
  misc_RNA (1)...(19): siRNA sense strand
aauaauguggucucugauu

SEQ ID NO: 494376 - RNA, 19 nt, Homo sapiens
  misc_RNA (1)...(19): siRNA sense strand
cgcuguaucuucccuuuca

SEQ ID NO: 494377 - RNA, 19 nt, Homo sapiens
  misc_RNA (1)...(19): siRNA sense strand
caugaggaaugugucuuuc

SEQ ID NO: 494378 - RNA, 19 nt, Homo sapiens
  misc_RNA (1)...(19): siRNA sense strand
gcuuauaacagcugcaucu

SEQ ID NO: 494379 - RNA, 19 nt, Homo sapiens
  misc_RNA (1)...(19): siRNA sense strand
caacuucuuacaacuacga

SEQ ID NO: 494380 - RNA, 19 nt, Homo sapiens
  misc_RNA (1)...(19): siRNA sense strand
cccuccaucuacagaaaua

SEQ ID NO: 494381 - RNA, 19 nt, Homo sapiens
  misc_RNA (1)...(19): siRNA sense strand
gacaaccuuccuucucuau

SEQ ID NO: 494382 - RNA, 19 nt, Homo sapiens
  misc_RNA (1)...(19): siRNA sense strand
cuacaagggaucuguuuac

SEQ ID NO: 494383 - RNA, 19 nt, Homo sapiens
  misc_RNA (1)...(19): siRNA sense strand
acuuuccguucaacuauaa

SEQ ID NO: 494384 - RNA, 19 nt, Homo sapiens
  misc_RNA (1)...(19): siRNA sense strand
gaucuguuuacuucacuug

SEQ ID NO: 494385 - RNA, 19 nt, Homo sapiens
  misc_RNA (1)...(19): siRNA sense strand
ccuuucaucuaucgaggaa

SEQ ID NO: 494386 - RNA, 19 nt, Homo sapiens
  misc_RNA (1)...(19): siRNA sense strand
cacgcuguaucuucccuuu

SEQ ID NO: 494387 - RNA, 19 nt, Homo sapiens
  misc_RNA (1)...(19): siRNA sense strand
agucaccucugucuucgau

SEQ ID NO: 494388 - RNA, 19 nt, Homo sapiens
  misc_RNA (1)...(19): siRNA sense strand
uggaaauucugugaaacga

SEQ ID NO: 494389 - RNA, 19 nt, Homo sapiens
  misc_RNA (1)...(19): siRNA sense strand
ggaucuguuuacuucacuu

SEQ ID NO: 494390 - RNA, 19 nt, Homo sapiens
  misc_RNA (1)...(19): siRNA sense strand
ccuugucacuuuccguuca

SEQ ID NO: 494391 - RNA, 19 nt, Homo sapiens
  misc_RNA (1)...(19): siRNA sense strand
ugagaaacagcaguggaaa

SEQ ID NO: 494392 - RNA, 19 nt, Homo sapiens
  misc_RNA (1)...(19): siRNA sense strand
gucccuggcuuuccuuguc

SEQ ID NO: 494393 - RNA, 19 nt, Homo sapiens
  misc_RNA (1)...(19): siRNA sense strand
ggaugcaugaggaaugugu

SEQ ID NO: 494394 - RNA, 19 nt, Homo sapiens
  misc_RNA (1)...(19): siRNA sense strand
cagaaauaauguggucucu

SEQ ID NO: 494395 - RNA, 19 nt, Homo sapiens
  misc_RNA (1)...(19): siRNA sense strand
ccaccagagccguguacaa

SEQ ID NO: 494396 - RNA, 19 nt, Homo sapiens
  misc_RNA (1)...(19): siRNA sense strand
gugugcaacuucuuacaac

SEQ ID NO: 494397 - RNA, 19 nt, Homo sapiens
  misc_RNA (1)...(19): siRNA sense strand
uguggugugcaacuucuua

SEQ ID NO: 494398 - RNA, 19 nt, Homo sapiens
  misc_RNA (1)...(19): siRNA sense strand
guaucuucccuuucaucua

SEQ ID NO: 494399 - RNA, 19 nt, Homo sapiens
  misc_RNA (1)...(19): siRNA sense strand
caaccacagagaacaugga

SEQ ID NO: 494400 - RNA, 19 nt, Homo sapiens
  misc_RNA (1)...(19): siRNA sense strand
acaaaggaucaaaggagaa

SEQ ID NO: 494401 - RNA, 19 nt, Homo sapiens
  misc_RNA (1)...(19): siRNA sense strand
acaagggaucuguuuacuu

SEQ ID NO: 494402 - RNA, 19 nt, Homo sapiens
  misc_RNA (1)...(19): siRNA sense strand
ggagagagguccagucuga

SEQ ID NO: 494403 - RNA, 19 nt, Homo sapiens
  misc_RNA (1)...(19): siRNA sense strand
ggacggagcaugccaagug

SEQ ID NO: 494404 - RNA, 19 nt, Homo sapiens
  misc_RNA (1)...(19): siRNA sense strand
caugggcucugaggaguug

SEQ ID NO: 494405 - RNA, 19 nt, Homo sapiens
  misc_RNA (1)...(19): siRNA sense strand
gagacuuuguccacagugu

SEQ ID NO: 494406 - RNA, 19 nt, Homo sapiens
  misc_RNA (1)...(19): siRNA sense strand
cuaaagacagugccaagug

SEQ ID NO: 494407 - RNA, 19 nt, Homo sapiens
  misc_RNA (1)...(19): siRNA sense strand
ugaggugcuucuucugcua

SEQ ID NO: 494408 - RNA, 19 nt, Homo sapiens
  misc_RNA (1)...(19): siRNA sense strand
cgucuggccuccuucuaug

SEQ ID NO: 494409 - RNA, 19 nt, Homo sapiens
  misc_RNA (1)...(19): siRNA sense strand
ccacguggaugggcagauc

SEQ ID NO: 494410 - RNA, 19 nt, Homo sapiens
  misc_RNA (1)...(19): siRNA sense strand
agagagguccagucugaaa

SEQ ID NO: 494411 - RNA, 19 nt, Homo sapiens
  misc_RNA (1)...(19): siRNA sense strand
caaggugaggugcuucuuc

SEQ ID NO: 494412 - RNA, 19 nt, Homo sapiens
  misc_RNA (1)...(19): siRNA sense strand
gagguccagucugaaagug

SEQ ID NO: 494413 - RNA, 19 nt, Homo sapiens
  misc_RNA (1)...(19): siRNA sense strand
acacaggccaucaggacaa

SEQ ID NO: 494414 - RNA, 19 nt, Homo sapiens
  misc_RNA (1)...(19): siRNA sense strand
aaggugaggugcuucuucu

SEQ ID NO: 494415 - RNA, 19 nt, Homo sapiens
  misc_RNA (1)...(19): siRNA sense strand
gcgucuggccuccuucuau

SEQ ID NO: 494416 - RNA, 19 nt, Homo sapiens
  misc_RNA (1)...(19): siRNA sense strand
gaggugcuucuucugcuau

SEQ ID NO: 494417 - RNA, 19 nt, Homo sapiens
  misc_RNA (1)...(19): siRNA sense strand
ccuggucugugcugagugu

SEQ ID NO: 494418 - RNA, 19 nt, Homo sapiens
  misc_RNA (1)...(19): siRNA sense strand
caggagagagguccagucu

SEQ ID NO: 494419 - RNA, 19 nt, Homo sapiens
  misc_RNA (1)...(19): siRNA sense strand
ggagagagguccagucuga

SEQ ID NO: 494420 - RNA, 19 nt, Homo sapiens
  misc_RNA (1)...(19): siRNA sense strand
ggacggagcaugccaagug

SEQ ID NO: 494421 - RNA, 19 nt, Homo sapiens
  misc_RNA (1)...(19): siRNA sense strand
caugggcucugaggaguug

SEQ ID NO: 494422 - RNA, 19 nt, Homo sapiens
  misc_RNA (1)...(19): siRNA sense strand
gagacuuuguccacagugu

SEQ ID NO: 494423 - RNA, 19 nt, Homo sapiens
  misc_RNA (1)...(19): siRNA sense strand
cuaaagacagugccaagug

SEQ ID NO: 494424 - RNA, 19 nt, Homo sapiens
  misc_RNA (1)...(19): siRNA sense strand
ugaggugcuucuucugcua

SEQ ID NO: 494425 - RNA, 19 nt, Homo sapiens
  misc_RNA (1)...(19): siRNA sense strand
cgucuggccuccuucuaug

SEQ ID NO: 494426 - RNA, 19 nt, Homo sapiens
  misc_RNA (1)...(19): siRNA sense strand
ccacguggaugggcagauc

SEQ ID NO: 494427 - RNA, 19 nt, Homo sapiens
  misc_RNA (1)...(19): siRNA sense strand
agagagguccagucugaaa

SEQ ID NO: 494428 - RNA, 19 nt, Homo sapiens
  misc_RNA (1)...(19): siRNA sense strand
caaggugaggugcuucuuc

SEQ ID NO: 494429 - RNA, 19 nt, Homo sapiens
  misc_RNA (1)...(19): siRNA sense strand
gagguccagucugaaagug

SEQ ID NO: 494430 - RNA, 19 nt, Homo sapiens
  misc_RNA (1)...(19): siRNA sense strand
acacaggccaucaggacaa

SEQ ID NO: 494431 - RNA, 19 nt, Homo sapiens
  misc_RNA (1)...(19): siRNA sense strand
aaggugaggugcuucuucu

SEQ ID NO: 494432 - RNA, 19 nt, Homo sapiens
  misc_RNA (1)...(19): siRNA sense strand
gcgucuggccuccuucuau

SEQ ID NO: 494433 - RNA, 19 nt, Homo sapiens
  misc_RNA (1)...(19): siRNA sense strand
gaggugcuucuucugcuau

SEQ ID NO: 494434 - RNA, 19 nt, Homo sapiens
  misc_RNA (1)...(19): siRNA sense strand
ccuggucugugcugagugu

SEQ ID NO: 494435 - RNA, 19 nt, Homo sapiens
  misc_RNA (1)...(19): siRNA sense strand
caggagagagguccagucu

SEQ ID NO: 494436 - RNA, 19 nt, Homo sapiens
  misc_RNA (1)...(19): siRNA sense strand
gagaacaccugucaagaug

SEQ ID NO: 494437 - RNA, 19 nt, Homo sapiens
  misc_RNA (1)...(19): siRNA sense strand
gaagcucacucagaaguuu

SEQ ID NO: 494438 - RNA, 19 nt, Homo sapiens
  misc_RNA (1)...(19): siRNA sense strand
gaagugggccugccuaguu

SEQ ID NO: 494439 - RNA, 19 nt, Homo sapiens
  misc_RNA (1)...(19): siRNA sense strand
gaacaccugucaagaugug

SEQ ID NO: 494440 - RNA, 19 nt, Homo sapiens
  misc_RNA (1)...(19): siRNA sense strand
ccacccagcugcucucaaa

SEQ ID NO: 494441 - RNA, 19 nt, Homo sapiens
  misc_RNA (1)...(19): siRNA sense strand
ccugugaccuucaucauuu

SEQ ID NO: 494442 - RNA, 19 nt, Homo sapiens
  misc_RNA (1)...(19): siRNA sense strand
ugaaaucaauccagacaug

SEQ ID NO: 494443 - RNA, 19 nt, Homo sapiens
  misc_RNA (1)...(19): siRNA sense strand
gacacggaaucccgaauaa

SEQ ID NO: 494444 - RNA, 19 nt, Homo sapiens
  misc_RNA (1)...(19): siRNA sense strand
acacagagcugacccugau

SEQ ID NO: 494445 - RNA, 19 nt, Homo sapiens
  misc_RNA (1)...(19): siRNA sense strand
gaaccugcauuccaagaag

SEQ ID NO: 494446 - RNA, 19 nt, Homo sapiens
  misc_RNA (1)...(19): siRNA sense strand
gagcaaguacucagaauuc

SEQ ID NO: 494447 - RNA, 19 nt, Homo sapiens
  misc_RNA (1)...(19): siRNA sense strand
gugcugaccuauguguuua

SEQ ID NO: 494448 - RNA, 19 nt, Homo sapiens
  misc_RNA (1)...(19): siRNA sense strand
gccagacgcuuucccgauu

SEQ ID NO: 494449 - RNA, 19 nt, Homo sapiens
  misc_RNA (1)...(19): siRNA sense strand
caagaagguucgggaagaa

SEQ ID NO: 494450 - RNA, 19 nt, Homo sapiens
  misc_RNA (1)...(19): siRNA sense strand
ggacaagaacgucacuaug

SEQ ID NO: 494451 - RNA, 19 nt, Homo sapiens
  misc_RNA (1)...(19): siRNA sense strand
uccagaaugucaucaaauu

SEQ ID NO: 494452 - RNA, 19 nt, Homo sapiens
  misc_RNA (1)...(19): siRNA sense strand
gccaagagccugccuaaag

SEQ ID NO: 494453 - RNA, 19 nt, Homo sapiens
  misc_RNA (1)...(19): siRNA sense strand
ccaagagccugccuaaagg

SEQ ID NO: 494454 - RNA, 19 nt, Homo sapiens
  misc_RNA (1)...(19): siRNA sense strand
gaaaucaauccagacauga

SEQ ID NO: 494455 - RNA, 19 nt, Homo sapiens
  misc_RNA (1)...(19): siRNA sense strand
gacaagaacgucacuaugg

SEQ ID NO: 494456 - RNA, 19 nt, Homo sapiens
  misc_RNA (1)...(19): siRNA sense strand
cauccagaaugucaucaaa

SEQ ID NO: 494457 - RNA, 19 nt, Homo sapiens
  misc_RNA (1)...(19): siRNA sense strand
acaagaagguucgggaaga

SEQ ID NO: 494458 - RNA, 19 nt, Homo sapiens
  misc_RNA (1)...(19): siRNA sense strand
gaacuccucgugugucaau

SEQ ID NO: 494459 - RNA, 19 nt, Homo sapiens
  misc_RNA (1)...(19): siRNA sense strand
ggagcuuggugcugaccua

SEQ ID NO: 494460 - RNA, 19 nt, Homo sapiens
  misc_RNA (1)...(19): siRNA sense strand
gggcagagacuccaagaca

SEQ ID NO: 494461 - RNA, 19 nt, Homo sapiens
  misc_RNA (1)...(19): siRNA sense strand
gugaagauaugacuuucuc

SEQ ID NO: 494462 - RNA, 19 nt, Homo sapiens
  misc_RNA (1)...(19): siRNA sense strand
gaggagauauaugaaagca

SEQ ID NO: 494463 - RNA, 19 nt, Homo sapiens
  misc_RNA (1)...(19): siRNA sense strand
ggcagagacuccaagacaa

SEQ ID NO: 494464 - RNA, 19 nt, Homo sapiens
  misc_RNA (1)...(19): siRNA sense strand
cgagaacaccugucaagau

SEQ ID NO: 494465 - RNA, 19 nt, Homo sapiens
  misc_RNA (1)...(19): siRNA sense strand
ggagcaaguacucagaauu

SEQ ID NO: 494466 - RNA, 19 nt, Homo sapiens
  misc_RNA (1)...(19): siRNA sense strand
gaacuggaggagauauaug

SEQ ID NO: 494467 - RNA, 19 nt, Homo sapiens
  misc_RNA (1)...(19): siRNA sense strand
auccagacaugaagaaauu

SEQ ID NO: 494468 - RNA, 19 nt, Homo sapiens
  misc_RNA (1)...(19): siRNA sense strand
gcuuggugcugaccuaugu

SEQ ID NO: 494469 - RNA, 19 nt, Homo sapiens
  misc_RNA (1)...(19): siRNA sense strand
gaaagugucaugcggaaaa

SEQ ID NO: 494470 - RNA, 19 nt, Homo sapiens
  misc_RNA (1)...(19): siRNA sense strand
cagcauccgugguguccaa

SEQ ID NO: 494471 - RNA, 19 nt, Homo sapiens
  misc_RNA (1)...(19): siRNA sense strand
gagcagcgcacgcaugaag

SEQ ID NO: 494472 - RNA, 19 nt, Homo sapiens
  misc_RNA (1)...(19): siRNA sense strand
ucaacaccguggguucaua

SEQ ID NO: 494473 - RNA, 19 nt, Homo sapiens
  misc_RNA (1)...(19): siRNA sense strand
ucaaauugguggaugaacu

SEQ ID NO: 494474 - RNA, 19 nt, Homo sapiens
  misc_RNA (1)...(19): siRNA sense strand
ucgaaggccuggagcucua

SEQ ID NO: 494475 - RNA, 19 nt, Homo sapiens
  misc_RNA (1)...(19): siRNA sense strand
gcagagacuccaagacaag

SEQ ID NO: 494476 - RNA, 19 nt, Homo sapiens
  misc_RNA (1)...(19): siRNA sense strand
ggugcugaccuauguguuu

SEQ ID NO: 494477 - RNA, 19 nt, Homo sapiens
  misc_RNA (1)...(19): siRNA sense strand
ccagacaugaagaaauuaa

SEQ ID NO: 494478 - RNA, 19 nt, Homo sapiens
  misc_RNA (1)...(19): siRNA sense strand
uccagaacaugacgacauu

SEQ ID NO: 494479 - RNA, 19 nt, Homo sapiens
  misc_RNA (1)...(19): siRNA sense strand
agacacggaaucccgaaua

SEQ ID NO: 494480 - RNA, 19 nt, Homo sapiens
  misc_RNA (1)...(19): siRNA sense strand
gggagcaaguacucagaau

SEQ ID NO: 494481 - RNA, 19 nt, Homo sapiens
  misc_RNA (1)...(19): siRNA sense strand
gccuggagcucuacuuucu

SEQ ID NO: 494482 - RNA, 19 nt, Homo sapiens
  misc_RNA (1)...(19): siRNA sense strand
gcacgcaugaagcugaauu

SEQ ID NO: 494483 - RNA, 19 nt, Homo sapiens
  misc_RNA (1)...(19): siRNA sense strand
gcgcacgcaugaagcugaa

SEQ ID NO: 494484 - RNA, 19 nt, Homo sapiens
  misc_RNA (1)...(19): siRNA sense strand
ggagacuugugacgacauc

SEQ ID NO: 494485 - RNA, 19 nt, Homo sapiens
  misc_RNA (1)...(19): siRNA sense strand
cagaacuccucguguguca

SEQ ID NO: 494486 - RNA, 19 nt, Homo sapiens
  misc_RNA (1)...(19): siRNA sense strand
cagagcagcgcacgcauga

SEQ ID NO: 494487 - RNA, 19 nt, Homo sapiens
  misc_RNA (1)...(19): siRNA sense strand
ugaccuauguguuuaccau

SEQ ID NO: 494488 - RNA, 19 nt, Homo sapiens
  misc_RNA (1)...(19): siRNA sense strand
ucgcgcagcucuuccuguu

SEQ ID NO: 494489 - RNA, 19 nt, Homo sapiens
  misc_RNA (1)...(19): siRNA sense strand
uugaagauaucaugaggau

SEQ ID NO: 494490 - RNA, 19 nt, Homo sapiens
  misc_RNA (1)...(19): siRNA sense strand
gggacaagaacgucacuau

SEQ ID NO: 494491 - RNA, 19 nt, Homo sapiens
  misc_RNA (1)...(19): siRNA sense strand
uggaggagauauaugaaag

SEQ ID NO: 494492 - RNA, 19 nt, Homo sapiens
  misc_RNA (1)...(19): siRNA sense strand
ggaagcucacucagaaguu

SEQ ID NO: 494493 - RNA, 19 nt, Homo sapiens
  misc_RNA (1)...(19): siRNA sense strand
gagcagcuuugcgauccuu

SEQ ID NO: 494494 - RNA, 19 nt, Homo sapiens
  misc_RNA (1)...(19): siRNA sense strand
ccacaacaacaccaaggaa

SEQ ID NO: 494495 - RNA, 19 nt, Homo sapiens
  misc_RNA (1)...(19): siRNA sense strand
ccuugaaccugcauuccaa

SEQ ID NO: 494496 - RNA, 19 nt, Homo sapiens
  misc_RNA (1)...(19): siRNA sense strand
gugcaacaccgucgaaagu

SEQ ID NO: 494497 - RNA, 19 nt, Homo sapiens
  misc_RNA (1)...(19): siRNA sense strand
agaagguucgggaagaaua

SEQ ID NO: 494498 - RNA, 19 nt, Homo sapiens
  misc_RNA (1)...(19): siRNA sense strand
gggcugcaccugggucuuu

SEQ ID NO: 494499 - RNA, 19 nt, Homo sapiens
  misc_RNA (1)...(19): siRNA sense strand
cuggagcucuacuuucuug

SEQ ID NO: 494500 - RNA, 19 nt, Homo sapiens
  misc_RNA (1)...(19): siRNA sense strand
ccagaaugucaucaaauug

SEQ ID NO: 494501 - RNA, 19 nt, Homo sapiens
  misc_RNA (1)...(19): siRNA sense strand
gcagccaccugagcagcuu

SEQ ID NO: 494502 - RNA, 19 nt, Homo sapiens
  misc_RNA (1)...(19): siRNA sense strand
gaggucaccauccagaaug

SEQ ID NO: 494503 - RNA, 19 nt, Homo sapiens
  misc_RNA (1)...(19): siRNA sense strand
gacuggcgcugucacucuu

SEQ ID NO: 494504 - RNA, 19 nt, Homo sapiens
  misc_RNA (1)...(19): siRNA sense strand
cgauccuuauggcucauua

SEQ ID NO: 494505 - RNA, 19 nt, Homo sapiens
  misc_RNA (1)...(19): siRNA sense strand
caaauugguggaugaacug

SEQ ID NO: 494506 - RNA, 19 nt, Homo sapiens
  misc_RNA (1)...(19): siRNA sense strand
cagaaugucaucaaauugg

SEQ ID NO: 494507 - RNA, 19 nt, Homo sapiens
  misc_RNA (1)...(19): siRNA sense strand
guccacagccagacgcuuu

SEQ ID NO: 494508 - RNA, 19 nt, Homo sapiens
  misc_RNA (1)...(19): siRNA sense strand
ccagacgcuuucccgauuc

SEQ ID NO: 494509 - RNA, 19 nt, Homo sapiens
  misc_RNA (1)...(19): siRNA sense strand
ggacuggcgcugucacucu

SEQ ID NO: 494510 - RNA, 19 nt, Homo sapiens
  misc_RNA (1)...(19): siRNA sense strand
aagccgaacuggaggagau

SEQ ID NO: 494511 - RNA, 19 nt, Homo sapiens
  misc_RNA (1)...(19): siRNA sense strand
ggcaucagaguccggcaua

SEQ ID NO: 494512 - RNA, 19 nt, Homo sapiens
  misc_RNA (1)...(19): siRNA sense strand
cgucucggcugccaucuac

SEQ ID NO: 494513 - RNA, 19 nt, Homo sapiens
  misc_RNA (1)...(19): siRNA sense strand
gcaucagaguccggcauau

SEQ ID NO: 494514 - RNA, 19 nt, Homo sapiens
  misc_RNA (1)...(19): siRNA sense strand
ggaccugugaccuucauca

SEQ ID NO: 494515 - RNA, 19 nt, Homo sapiens
  misc_RNA (1)...(19): siRNA sense strand
gcgagaacaccugucaaga

SEQ ID NO: 494516 - RNA, 19 nt, Homo sapiens
  misc_RNA (1)...(19): siRNA sense strand
gaagguucgggaagaauac

SEQ ID NO: 494517 - RNA, 19 nt, Homo sapiens
  misc_RNA (1)...(19): siRNA sense strand
caucaacgagugugcaaca

SEQ ID NO: 494518 - RNA, 19 nt, Homo sapiens
  misc_RNA (1)...(19): siRNA sense strand
ggaaucccgaauaaccaaa

SEQ ID NO: 494519 - RNA, 19 nt, Homo sapiens
  misc_RNA (1)...(19): siRNA sense strand
caucagaguccggcauaug

SEQ ID NO: 494520 - RNA, 19 nt, Homo sapiens
  misc_RNA (1)...(19): siRNA sense strand
aagugggccugccuaguug

SEQ ID NO: 494521 - RNA, 19 nt, Homo sapiens
  misc_RNA (1)...(19): siRNA sense strand
ggagcucuacuuucuugug

SEQ ID NO: 494522 - RNA, 19 nt, Homo sapiens
  misc_RNA (1)...(19): siRNA sense strand
acuggaagcugacccugau

SEQ ID NO: 494523 - RNA, 19 nt, Homo sapiens
  misc_RNA (1)...(19): siRNA sense strand
ucugugaagauaugacuuu

SEQ ID NO: 494524 - RNA, 19 nt, Homo sapiens
  misc_RNA (1)...(19): siRNA sense strand
ccaagaagcaagccgaacu

SEQ ID NO: 494525 - RNA, 19 nt, Homo sapiens
  misc_RNA (1)...(19): siRNA sense strand
caacaacaccaaggaacuc

SEQ ID NO: 494526 - RNA, 19 nt, Homo sapiens
  misc_RNA (1)...(19): siRNA sense strand
cgaacuggaggagauauau

SEQ ID NO: 494527 - RNA, 19 nt, Homo sapiens
  misc_RNA (1)...(19): siRNA sense strand
caagaagcaagccgaacug

SEQ ID NO: 494528 - RNA, 19 nt, Homo sapiens
  misc_RNA (1)...(19): siRNA sense strand
cagccgaggucaccaucca

SEQ ID NO: 494529 - RNA, 19 nt, Homo sapiens
  misc_RNA (1)...(19): siRNA sense strand
ucaauccagacaugaagaa

SEQ ID NO: 494530 - RNA, 19 nt, Homo sapiens
  misc_RNA (1)...(19): siRNA sense strand
aaaucaauccagacaugaa

SEQ ID NO: 494531 - RNA, 19 nt, Homo sapiens
  misc_RNA (1)...(19): siRNA sense strand
ugaggauccuggccaagag

SEQ ID NO: 494532 - RNA, 19 nt, Homo sapiens
  misc_RNA (1)...(19): siRNA sense strand
cgaggucaccauccagaau

SEQ ID NO: 494533 - RNA, 19 nt, Homo sapiens
  misc_RNA (1)...(19): siRNA sense strand
ccgcgucuuucucgcauuc

SEQ ID NO: 494534 - RNA, 19 nt, Homo sapiens
  misc_RNA (1)...(19): siRNA sense strand
agaaugucaucaaauuggu

SEQ ID NO: 494535 - RNA, 19 nt, Homo sapiens
  misc_RNA (1)...(19): siRNA sense strand
caacaccguggguucauac

SEQ ID NO: 494536 - RNA, 19 nt, Homo sapiens
  misc_RNA (1)...(19): siRNA sense strand
gagaacaccugucaagaug

SEQ ID NO: 494537 - RNA, 19 nt, Homo sapiens
  misc_RNA (1)...(19): siRNA sense strand
gaagcucacucagaaguuu

SEQ ID NO: 494538 - RNA, 19 nt, Homo sapiens
  misc_RNA (1)...(19): siRNA sense strand
gaagugggccugccuaguu

SEQ ID NO: 494539 - RNA, 19 nt, Homo sapiens
  misc_RNA (1)...(19): siRNA sense strand
gaacaccugucaagaugug

SEQ ID NO: 494540 - RNA, 19 nt, Homo sapiens
  misc_RNA (1)...(19): siRNA sense strand
ccacccagcugcucucaaa

SEQ ID NO: 494541 - RNA, 19 nt, Homo sapiens
  misc_RNA (1)...(19): siRNA sense strand
ccugugaccuucaucauuu

SEQ ID NO: 494542 - RNA, 19 nt, Homo sapiens
  misc_RNA (1)...(19): siRNA sense strand
ugaaaucaauccagacaug

SEQ ID NO: 494543 - RNA, 19 nt, Homo sapiens
  misc_RNA (1)...(19): siRNA sense strand
gacacggaaucccgaauaa

SEQ ID NO: 494544 - RNA, 19 nt, Homo sapiens
  misc_RNA (1)...(19): siRNA sense strand
acacagagcugacccugau

SEQ ID NO: 494545 - RNA, 19 nt, Homo sapiens
  misc_RNA (1)...(19): siRNA sense strand
gaaccugcauuccaagaag

SEQ ID NO: 494546 - RNA, 19 nt, Homo sapiens
  misc_RNA (1)...(19): siRNA sense strand
gagcaaguacucagaauuc

SEQ ID NO: 494547 - RNA, 19 nt, Homo sapiens
  misc_RNA (1)...(19): siRNA sense strand
gugcugaccuauguguuua

SEQ ID NO: 494548 - RNA, 19 nt, Homo sapiens
  misc_RNA (1)...(19): siRNA sense strand
gccagacgcuuucccgauu

SEQ ID NO: 494549 - RNA, 19 nt, Homo sapiens
  misc_RNA (1)...(19): siRNA sense strand
caagaagguucgggaagaa

SEQ ID NO: 494550 - RNA, 19 nt, Homo sapiens
  misc_RNA (1)...(19): siRNA sense strand
ggacaagaacgucacuaug

SEQ ID NO: 494551 - RNA, 19 nt, Homo sapiens
  misc_RNA (1)...(19): siRNA sense strand
uccagaaugucaucaaauu

SEQ ID NO: 494552 - RNA, 19 nt, Homo sapiens
  misc_RNA (1)...(19): siRNA sense strand
gccaagagccugccuaaag

SEQ ID NO: 494553 - RNA, 19 nt, Homo sapiens
  misc_RNA (1)...(19): siRNA sense strand
ccaagagccugccuaaagg

SEQ ID NO: 494554 - RNA, 19 nt, Homo sapiens
  misc_RNA (1)...(19): siRNA sense strand
gaaaucaauccagacauga

SEQ ID NO: 494555 - RNA, 19 nt, Homo sapiens
  misc_RNA (1)...(19): siRNA sense strand
gacaagaacgucacuaugg

SEQ ID NO: 494556 - RNA, 19 nt, Homo sapiens
  misc_RNA (1)...(19): siRNA sense strand
cauccagaaugucaucaaa

SEQ ID NO: 494557 - RNA, 19 nt, Homo sapiens
  misc_RNA (1)...(19): siRNA sense strand
acaagaagguucgggaaga

SEQ ID NO: 494558 - RNA, 19 nt, Homo sapiens
  misc_RNA (1)...(19): siRNA sense strand
gaacuccucgugugucaau

SEQ ID NO: 494559 - RNA, 19 nt, Homo sapiens
  misc_RNA (1)...(19): siRNA sense strand
ggagcuuggugcugaccua

SEQ ID NO: 494560 - RNA, 19 nt, Homo sapiens
  misc_RNA (1)...(19): siRNA sense strand
gggcagagacuccaagaca

SEQ ID NO: 494561 - RNA, 19 nt, Homo sapiens
  misc_RNA (1)...(19): siRNA sense strand
gugaagauaugacuuucuc

SEQ ID NO: 494562 - RNA, 19 nt, Homo sapiens
  misc_RNA (1)...(19): siRNA sense strand
gaggagauauaugaaagca

SEQ ID NO: 494563 - RNA, 19 nt, Homo sapiens
  misc_RNA (1)...(19): siRNA sense strand
ggcagagacuccaagacaa

SEQ ID NO: 494564 - RNA, 19 nt, Homo sapiens
  misc_RNA (1)...(19): siRNA sense strand
cgagaacaccugucaagau

SEQ ID NO: 494565 - RNA, 19 nt, Homo sapiens
  misc_RNA (1)...(19): siRNA sense strand
ggagcaaguacucagaauu

SEQ ID NO: 494566 - RNA, 19 nt, Homo sapiens
  misc_RNA (1)...(19): siRNA sense strand
gaacuggaggagauauaug

SEQ ID NO: 494567 - RNA, 19 nt, Homo sapiens
  misc_RNA (1)...(19): siRNA sense strand
auccagacaugaagaaauu

SEQ ID NO: 494568 - RNA, 19 nt, Homo sapiens
  misc_RNA (1)...(19): siRNA sense strand
gcuuggugcugaccuaugu

SEQ ID NO: 494569 - RNA, 19 nt, Homo sapiens
  misc_RNA (1)...(19): siRNA sense strand
gaaagugucaugcggaaaa

SEQ ID NO: 494570 - RNA, 19 nt, Homo sapiens
  misc_RNA (1)...(19): siRNA sense strand
cagcauccgugguguccaa

SEQ ID NO: 494571 - RNA, 19 nt, Homo sapiens
  misc_RNA (1)...(19): siRNA sense strand
gagcagcgcacgcaugaag

SEQ ID NO: 494572 - RNA, 19 nt, Homo sapiens
  misc_RNA (1)...(19): siRNA sense strand
ucaacaccguggguucaua

SEQ ID NO: 494573 - RNA, 19 nt, Homo sapiens
  misc_RNA (1)...(19): siRNA sense strand
ucaaauugguggaugaacu

SEQ ID NO: 494574 - RNA, 19 nt, Homo sapiens
  misc_RNA (1)...(19): siRNA sense strand
ucgaaggccuggagcucua

SEQ ID NO: 494575 - RNA, 19 nt, Homo sapiens
  misc_RNA (1)...(19): siRNA sense strand
gcagagacuccaagacaag

SEQ ID NO: 494576 - RNA, 19 nt, Homo sapiens
  misc_RNA (1)...(19): siRNA sense strand
ggugcugaccuauguguuu

SEQ ID NO: 494577 - RNA, 19 nt, Homo sapiens
  misc_RNA (1)...(19): siRNA sense strand
ccagacaugaagaaauuaa

SEQ ID NO: 494578 - RNA, 19 nt, Homo sapiens
  misc_RNA (1)...(19): siRNA sense strand
uccagaacaugacgacauu

SEQ ID NO: 494579 - RNA, 19 nt, Homo sapiens
  misc_RNA (1)...(19): siRNA sense strand
agacacggaaucccgaaua

SEQ ID NO: 494580 - RNA, 19 nt, Homo sapiens
  misc_RNA (1)...(19): siRNA sense strand
gggagcaaguacucagaau

SEQ ID NO: 494581 - RNA, 19 nt, Homo sapiens
  misc_RNA (1)...(19): siRNA sense strand
gccuggagcucuacuuucu

SEQ ID NO: 494582 - RNA, 19 nt, Homo sapiens
  misc_RNA (1)...(19): siRNA sense strand
gcacgcaugaagcugaauu

SEQ ID NO: 494583 - RNA, 19 nt, Homo sapiens
  misc_RNA (1)...(19): siRNA sense strand
gcgcacgcaugaagcugaa

SEQ ID NO: 494584 - RNA, 19 nt, Homo sapiens
  misc_RNA (1)...(19): siRNA sense strand
ggagacuugugacgacauc

SEQ ID NO: 494585 - RNA, 19 nt, Homo sapiens
  misc_RNA (1)...(19): siRNA sense strand
cagaacuccucguguguca

SEQ ID NO: 494586 - RNA, 19 nt, Homo sapiens
  misc_RNA (1)...(19): siRNA sense strand
cagagcagcgcacgcauga

SEQ ID NO: 494587 - RNA, 19 nt, Homo sapiens
  misc_RNA (1)...(19): siRNA sense strand
ugaccuauguguuuaccau

SEQ ID NO: 494588 - RNA, 19 nt, Homo sapiens
  misc_RNA (1)...(19): siRNA sense strand
ucgcgcagcucuuccuguu

SEQ ID NO: 494589 - RNA, 19 nt, Homo sapiens
  misc_RNA (1)...(19): siRNA sense strand
uugaagauaucaugaggau

SEQ ID NO: 494590 - RNA, 19 nt, Homo sapiens
  misc_RNA (1)...(19): siRNA sense strand
gggacaagaacgucacuau

SEQ ID NO: 494591 - RNA, 19 nt, Homo sapiens
  misc_RNA (1)...(19): siRNA sense strand
uggaggagauauaugaaag

SEQ ID NO: 494592 - RNA, 19 nt, Homo sapiens
  misc_RNA (1)...(19): siRNA sense strand
ggaagcucacucagaaguu

SEQ ID NO: 494593 - RNA, 19 nt, Homo sapiens
  misc_RNA (1)...(19): siRNA sense strand
gagcagcuuugcgauccuu

SEQ ID NO: 494594 - RNA, 19 nt, Homo sapiens
  misc_RNA (1)...(19): siRNA sense strand
ccacaacaacaccaaggaa

SEQ ID NO: 494595 - RNA, 19 nt, Homo sapiens
  misc_RNA (1)...(19): siRNA sense strand
ccuugaaccugcauuccaa

SEQ ID NO: 494596 - RNA, 19 nt, Homo sapiens
  misc_RNA (1)...(19): siRNA sense strand
gugcaacaccgucgaaagu

SEQ ID NO: 494597 - RNA, 19 nt, Homo sapiens
  misc_RNA (1)...(19): siRNA sense strand
agaagguucgggaagaaua

SEQ ID NO: 494598 - RNA, 19 nt, Homo sapiens
  misc_RNA (1)...(19): siRNA sense strand
gggcugcaccugggucuuu

SEQ ID NO: 494599 - RNA, 19 nt, Homo sapiens
  misc_RNA (1)...(19): siRNA sense strand
cuggagcucuacuuucuug

SEQ ID NO: 494600 - RNA, 19 nt, Homo sapiens
  misc_RNA (1)...(19): siRNA sense strand
ccagaaugucaucaaauug

SEQ ID NO: 494601 - RNA, 19 nt, Homo sapiens
  misc_RNA (1)...(19): siRNA sense strand
gcagccaccugagcagcuu

SEQ ID NO: 494602 - RNA, 19 nt, Homo sapiens
  misc_RNA (1)...(19): siRNA sense strand
gaggucaccauccagaaug

SEQ ID NO: 494603 - RNA, 19 nt, Homo sapiens
  misc_RNA (1)...(19): siRNA sense strand
gacuggcgcugucacucuu

SEQ ID NO: 494604 - RNA, 19 nt, Homo sapiens
  misc_RNA (1)...(19): siRNA sense strand
cgauccuuauggcucauua

SEQ ID NO: 494605 - RNA, 19 nt, Homo sapiens
  misc_RNA (1)...(19): siRNA sense strand
caaauugguggaugaacug

SEQ ID NO: 494606 - RNA, 19 nt, Homo sapiens
  misc_RNA (1)...(19): siRNA sense strand
cagaaugucaucaaauugg

SEQ ID NO: 494607 - RNA, 19 nt, Homo sapiens
  misc_RNA (1)...(19): siRNA sense strand
guccacagccagacgcuuu

SEQ ID NO: 494608 - RNA, 19 nt, Homo sapiens
  misc_RNA (1)...(19): siRNA sense strand
ccagacgcuuucccgauuc

SEQ ID NO: 494609 - RNA, 19 nt, Homo sapiens
  misc_RNA (1)...(19): siRNA sense strand
ggacuggcgcugucacucu

SEQ ID NO: 494610 - RNA, 19 nt, Homo sapiens
  misc_RNA (1)...(19): siRNA sense strand
aagccgaacuggaggagau

SEQ ID NO: 494611 - RNA, 19 nt, Homo sapiens
  misc_RNA (1)...(19): siRNA sense strand
ggcaucagaguccggcaua

SEQ ID NO: 494612 - RNA, 19 nt, Homo sapiens
  misc_RNA (1)...(19): siRNA sense strand
cgucucggcugccaucuac

SEQ ID NO: 494613 - RNA, 19 nt, Homo sapiens
  misc_RNA (1)...(19): siRNA sense strand
gcaucagaguccggcauau

SEQ ID NO: 494614 - RNA, 19 nt, Homo sapiens
  misc_RNA (1)...(19): siRNA sense strand
ggaccugugaccuucauca

SEQ ID NO: 494615 - RNA, 19 nt, Homo sapiens
  misc_RNA (1)...(19): siRNA sense strand
gcgagaacaccugucaaga

SEQ ID NO: 494616 - RNA, 19 nt, Homo sapiens
  misc_RNA (1)...(19): siRNA sense strand
gaagguucgggaagaauac

SEQ ID NO: 494617 - RNA, 19 nt, Homo sapiens
  misc_RNA (1)...(19): siRNA sense strand
caucaacgagugugcaaca

SEQ ID NO: 494618 - RNA, 19 nt, Homo sapiens
  misc_RNA (1)...(19): siRNA sense strand
ggaaucccgaauaaccaaa

SEQ ID NO: 494619 - RNA, 19 nt, Homo sapiens
  misc_RNA (1)...(19): siRNA sense strand
caucagaguccggcauaug

SEQ ID NO: 494620 - RNA, 19 nt, Homo sapiens
  misc_RNA (1)...(19): siRNA sense strand
aagugggccugccuaguug

SEQ ID NO: 494621 - RNA, 19 nt, Homo sapiens
  misc_RNA (1)...(19): siRNA sense strand
ggagcucuacuuucuugug

SEQ ID NO: 494622 - RNA, 19 nt, Homo sapiens
  misc_RNA (1)...(19): siRNA sense strand
acuggaagcugacccugau

SEQ ID NO: 494623 - RNA, 19 nt, Homo sapiens
  misc_RNA (1)...(19): siRNA sense strand
ucugugaagauaugacuuu

SEQ ID NO: 494624 - RNA, 19 nt, Homo sapiens
  misc_RNA (1)...(19): siRNA sense strand
ccaagaagcaagccgaacu

SEQ ID NO: 494625 - RNA, 19 nt, Homo sapiens
  misc_RNA (1)...(19): siRNA sense strand
caacaacaccaaggaacuc

SEQ ID NO: 494626 - RNA, 19 nt, Homo sapiens
  misc_RNA (1)...(19): siRNA sense strand
cgaacuggaggagauauau

SEQ ID NO: 494627 - RNA, 19 nt, Homo sapiens
  misc_RNA (1)...(19): siRNA sense strand
caagaagcaagccgaacug

SEQ ID NO: 494628 - RNA, 19 nt, Homo sapiens
  misc_RNA (1)...(19): siRNA sense strand
cagccgaggucaccaucca

SEQ ID NO: 494629 - RNA, 19 nt, Homo sapiens
  misc_RNA (1)...(19): siRNA sense strand
ucaauccagacaugaagaa

SEQ ID NO: 494630 - RNA, 19 nt, Homo sapiens
  misc_RNA (1)...(19): siRNA sense strand
aaaucaauccagacaugaa

SEQ ID NO: 494631 - RNA, 19 nt, Homo sapiens
  misc_RNA (1)...(19): siRNA sense strand
ugaggauccuggccaagag

SEQ ID NO: 494632 - RNA, 19 nt, Homo sapiens
  misc_RNA (1)...(19): siRNA sense strand
cgaggucaccauccagaau

SEQ ID NO: 494633 - RNA, 19 nt, Homo sapiens
  misc_RNA (1)...(19): siRNA sense strand
ccgcgucuuucucgcauuc

SEQ ID NO: 494634 - RNA, 19 nt, Homo sapiens
  misc_RNA (1)...(19): siRNA sense strand
agaaugucaucaaauuggu

SEQ ID NO: 494635 - RNA, 19 nt, Homo sapiens
  misc_RNA (1)...(19): siRNA sense strand
caacaccguggguucauac

SEQ ID NO: 494636 - RNA, 19 nt, Homo sapiens
  misc_RNA (1)...(19): siRNA sense strand
gaagaggucccaacgguuu

SEQ ID NO: 494637 - RNA, 19 nt, Homo sapiens
  misc_RNA (1)...(19): siRNA sense strand
cgacagaucagcacauuaa

SEQ ID NO: 494638 - RNA, 19 nt, Homo sapiens
  misc_RNA (1)...(19): siRNA sense strand
acaauuggcuuucaugaug

SEQ ID NO: 494639 - RNA, 19 nt, Homo sapiens
  misc_RNA (1)...(19): siRNA sense strand
gaugggaaauucaggcaaa

SEQ ID NO: 494640 - RNA, 19 nt, Homo sapiens
  misc_RNA (1)...(19): siRNA sense strand
ccaaagggaucugcaggua

SEQ ID NO: 494641 - RNA, 19 nt, Homo sapiens
  misc_RNA (1)...(19): siRNA sense strand
gaacaauuggcuuucauga

SEQ ID NO: 494642 - RNA, 19 nt, Homo sapiens
  misc_RNA (1)...(19): siRNA sense strand
ugaaggugcuagaggaauu

SEQ ID NO: 494643 - RNA, 19 nt, Homo sapiens
  misc_RNA (1)...(19): siRNA sense strand
aaagggaucugcagguaau

SEQ ID NO: 494644 - RNA, 19 nt, Homo sapiens
  misc_RNA (1)...(19): siRNA sense strand
ggacccagaggaacaauug

SEQ ID NO: 494645 - RNA, 19 nt, Homo sapiens
  misc_RNA (1)...(19): siRNA sense strand
acacaagggugaagaaggu

SEQ ID NO: 494646 - RNA, 19 nt, Homo sapiens
  misc_RNA (1)...(19): siRNA sense strand
aaaggugacuugggagaaa

SEQ ID NO: 494647 - RNA, 19 nt, Homo sapiens
  misc_RNA (1)...(19): siRNA sense strand
agaagcaggucccaaagga

SEQ ID NO: 494648 - RNA, 19 nt, Homo sapiens
  misc_RNA (1)...(19): siRNA sense strand
acuuggagauauaggauua

SEQ ID NO: 494649 - RNA, 19 nt, Homo sapiens
  misc_RNA (1)...(19): siRNA sense strand
gaggaacaauuggcuuuca

SEQ ID NO: 494650 - RNA, 19 nt, Homo sapiens
  misc_RNA (1)...(19): siRNA sense strand
guagagcaccgacagauca

SEQ ID NO: 494651 - RNA, 19 nt, Homo sapiens
  misc_RNA (1)...(19): siRNA sense strand
gaacuuggagauauaggau

SEQ ID NO: 494652 - RNA, 19 nt, Homo sapiens
  misc_RNA (1)...(19): siRNA sense strand
ucagcgagcauuuaacaaa

SEQ ID NO: 494653 - RNA, 19 nt, Homo sapiens
  misc_RNA (1)...(19): siRNA sense strand
caaagggaucugcagguaa

SEQ ID NO: 494654 - RNA, 19 nt, Homo sapiens
  misc_RNA (1)...(19): siRNA sense strand
gggcuuagauggugaaccu

SEQ ID NO: 494655 - RNA, 19 nt, Homo sapiens
  misc_RNA (1)...(19): siRNA sense strand
uaagcagguuugcaugaga

SEQ ID NO: 494656 - RNA, 19 nt, Homo sapiens
  misc_RNA (1)...(19): siRNA sense strand
uaaaggggcuaaaggagaa

SEQ ID NO: 494657 - RNA, 19 nt, Homo sapiens
  misc_RNA (1)...(19): siRNA sense strand
ggucagcgagcauuuaaca

SEQ ID NO: 494658 - RNA, 19 nt, Homo sapiens
  misc_RNA (1)...(19): siRNA sense strand
uaaaggagaaauuggugaa

SEQ ID NO: 494659 - RNA, 19 nt, Homo sapiens
  misc_RNA (1)...(19): siRNA sense strand
ccaggucgcucaggauauc

SEQ ID NO: 494660 - RNA, 19 nt, Homo sapiens
  misc_RNA (1)...(19): siRNA sense strand
uggaaugccuggaacaaag

SEQ ID NO: 494661 - RNA, 19 nt, Homo sapiens
  misc_RNA (1)...(19): siRNA sense strand
ccaaaggagacacggguuu

SEQ ID NO: 494662 - RNA, 19 nt, Homo sapiens
  misc_RNA (1)...(19): siRNA sense strand
cagaggaacaauuggcuuu

SEQ ID NO: 494663 - RNA, 19 nt, Homo sapiens
  misc_RNA (1)...(19): siRNA sense strand
cagcgagcauuuaacaaag

SEQ ID NO: 494664 - RNA, 19 nt, Homo sapiens
  misc_RNA (1)...(19): siRNA sense strand
gagagggccugagggaagu

SEQ ID NO: 494665 - RNA, 19 nt, Homo sapiens
  misc_RNA (1)...(19): siRNA sense strand
ggaacaauuggcuuucaug

SEQ ID NO: 494666 - RNA, 19 nt, Homo sapiens
  misc_RNA (1)...(19): siRNA sense strand
gugaugggaucccuggaau

SEQ ID NO: 494667 - RNA, 19 nt, Homo sapiens
  misc_RNA (1)...(19): siRNA sense strand
accuggcgcugauggauua

SEQ ID NO: 494668 - RNA, 19 nt, Homo sapiens
  misc_RNA (1)...(19): siRNA sense strand
gggugccucuggugaagaa

SEQ ID NO: 494669 - RNA, 19 nt, Homo sapiens
  misc_RNA (1)...(19): siRNA sense strand
gaaggugaagcaggagaaa

SEQ ID NO: 494670 - RNA, 19 nt, Homo sapiens
  misc_RNA (1)...(19): siRNA sense strand
gcaggucccaaaggagaua

SEQ ID NO: 494671 - RNA, 19 nt, Homo sapiens
  misc_RNA (1)...(19): siRNA sense strand
cuccugggcuucccgguuu

SEQ ID NO: 494672 - RNA, 19 nt, Homo sapiens
  misc_RNA (1)...(19): siRNA sense strand
ccagggagaacucggagaa

SEQ ID NO: 494673 - RNA, 19 nt, Homo sapiens
  misc_RNA (1)...(19): siRNA sense strand
ggaacuuggagauauagga

SEQ ID NO: 494674 - RNA, 19 nt, Homo sapiens
  misc_RNA (1)...(19): siRNA sense strand
caccaggucgcucaggaua

SEQ ID NO: 494675 - RNA, 19 nt, Homo sapiens
  misc_RNA (1)...(19): siRNA sense strand
cagaucagcacauuaagca

SEQ ID NO: 494676 - RNA, 19 nt, Homo sapiens
  misc_RNA (1)...(19): siRNA sense strand
aggauuaccuggcccaaag

SEQ ID NO: 494677 - RNA, 19 nt, Homo sapiens
  misc_RNA (1)...(19): siRNA sense strand
cagguaaacuggguucucu

SEQ ID NO: 494678 - RNA, 19 nt, Homo sapiens
  misc_RNA (1)...(19): siRNA sense strand
cggagaaguuggagcucaa

SEQ ID NO: 494679 - RNA, 19 nt, Homo sapiens
  misc_RNA (1)...(19): siRNA sense strand
uggcaguagaggagaauua

SEQ ID NO: 494680 - RNA, 19 nt, Homo sapiens
  misc_RNA (1)...(19): siRNA sense strand
caguagaggagaauuagga

SEQ ID NO: 494681 - RNA, 19 nt, Homo sapiens
  misc_RNA (1)...(19): siRNA sense strand
ggauuuccaggccguggua

SEQ ID NO: 494682 - RNA, 19 nt, Homo sapiens
  misc_RNA (1)...(19): siRNA sense strand
aaaaggugcucggggcuua

SEQ ID NO: 494683 - RNA, 19 nt, Homo sapiens
  misc_RNA (1)...(19): siRNA sense strand
agggaagccuggucagaug

SEQ ID NO: 494684 - RNA, 19 nt, Homo sapiens
  misc_RNA (1)...(19): siRNA sense strand
ggagaagcaggucccaaag

SEQ ID NO: 494685 - RNA, 19 nt, Homo sapiens
  misc_RNA (1)...(19): siRNA sense strand
uggaauuccuggugcaaag

SEQ ID NO: 494686 - RNA, 19 nt, Homo sapiens
  misc_RNA (1)...(19): siRNA sense strand
caaagggugaaccaggaaa

SEQ ID NO: 494687 - RNA, 19 nt, Homo sapiens
  misc_RNA (1)...(19): siRNA sense strand
gaaccuggugugccuggau

SEQ ID NO: 494688 - RNA, 19 nt, Homo sapiens
  misc_RNA (1)...(19): siRNA sense strand
gccuggaucgcguggauuu

SEQ ID NO: 494689 - RNA, 19 nt, Homo sapiens
  misc_RNA (1)...(19): siRNA sense strand
gaaggugcuagaggaauuc

SEQ ID NO: 494690 - RNA, 19 nt, Homo sapiens
  misc_RNA (1)...(19): siRNA sense strand
gagaagcaggucccaaagg

SEQ ID NO: 494691 - RNA, 19 nt, Homo sapiens
  misc_RNA (1)...(19): siRNA sense strand
ggacacaagggugaagaag

SEQ ID NO: 494692 - RNA, 19 nt, Homo sapiens
  misc_RNA (1)...(19): siRNA sense strand
uaaaggugacuugggagaa

SEQ ID NO: 494693 - RNA, 19 nt, Homo sapiens
  misc_RNA (1)...(19): siRNA sense strand
ugagagucauacaagaaca

SEQ ID NO: 494694 - RNA, 19 nt, Homo sapiens
  misc_RNA (1)...(19): siRNA sense strand
aaaggguguugcuggugaa

SEQ ID NO: 494695 - RNA, 19 nt, Homo sapiens
  misc_RNA (1)...(19): siRNA sense strand
gaugggaucccuggaaugc

SEQ ID NO: 494696 - RNA, 19 nt, Homo sapiens
  misc_RNA (1)...(19): siRNA sense strand
aggagaagcaggucccaaa

SEQ ID NO: 494697 - RNA, 19 nt, Homo sapiens
  misc_RNA (1)...(19): siRNA sense strand
gcugaaggugcuagaggaa

SEQ ID NO: 494698 - RNA, 19 nt, Homo sapiens
  misc_RNA (1)...(19): siRNA sense strand
uggcacaccuggcgcugau

SEQ ID NO: 494699 - RNA, 19 nt, Homo sapiens
  misc_RNA (1)...(19): siRNA sense strand
ggagagcuuggccguguag

SEQ ID NO: 494700 - RNA, 19 nt, Homo sapiens
  misc_RNA (1)...(19): siRNA sense strand
gugccuggaucgcguggau

SEQ ID NO: 494701 - RNA, 19 nt, Homo sapiens
  misc_RNA (1)...(19): siRNA sense strand
ggaaugccuggaacaaagg

SEQ ID NO: 494702 - RNA, 19 nt, Homo sapiens
  misc_RNA (1)...(19): siRNA sense strand
gguagagcaccgacagauc

SEQ ID NO: 494703 - RNA, 19 nt, Homo sapiens
  misc_RNA (1)...(19): siRNA sense strand
cuggucagaugggaaauuc

SEQ ID NO: 494704 - RNA, 19 nt, Homo sapiens
  misc_RNA (1)...(19): siRNA sense strand
ucuuaagcguccagacuca

SEQ ID NO: 494705 - RNA, 19 nt, Homo sapiens
  misc_RNA (1)...(19): siRNA sense strand
ggaguggaaggaccaagag

SEQ ID NO: 494706 - RNA, 19 nt, Homo sapiens
  misc_RNA (1)...(19): siRNA sense strand
uggagagcuuggccgugua

SEQ ID NO: 494707 - RNA, 19 nt, Homo sapiens
  misc_RNA (1)...(19): siRNA sense strand
ggucagaugggaaauucag

SEQ ID NO: 494708 - RNA, 19 nt, Homo sapiens
  misc_RNA (1)...(19): siRNA sense strand
gaagaggucccaacgguuu

SEQ ID NO: 494709 - RNA, 19 nt, Homo sapiens
  misc_RNA (1)...(19): siRNA sense strand
cgacagaucagcacauuaa

SEQ ID NO: 494710 - RNA, 19 nt, Homo sapiens
  misc_RNA (1)...(19): siRNA sense strand
acaauuggcuuucaugaug

SEQ ID NO: 494711 - RNA, 19 nt, Homo sapiens
  misc_RNA (1)...(19): siRNA sense strand
gaugggaaauucaggcaaa

SEQ ID NO: 494712 - RNA, 19 nt, Homo sapiens
  misc_RNA (1)...(19): siRNA sense strand
ccaaagggaucugcaggua

SEQ ID NO: 494713 - RNA, 19 nt, Homo sapiens
  misc_RNA (1)...(19): siRNA sense strand
gaacaauuggcuuucauga

SEQ ID NO: 494714 - RNA, 19 nt, Homo sapiens
  misc_RNA (1)...(19): siRNA sense strand
ugaaggugcuagaggaauu

SEQ ID NO: 494715 - RNA, 19 nt, Homo sapiens
  misc_RNA (1)...(19): siRNA sense strand
aaagggaucugcagguaau

SEQ ID NO: 494716 - RNA, 19 nt, Homo sapiens
  misc_RNA (1)...(19): siRNA sense strand
ggacccagaggaacaauug

SEQ ID NO: 494717 - RNA, 19 nt, Homo sapiens
  misc_RNA (1)...(19): siRNA sense strand
acacaagggugaagaaggu

SEQ ID NO: 494718 - RNA, 19 nt, Homo sapiens
  misc_RNA (1)...(19): siRNA sense strand
aaaggugacuugggagaaa

SEQ ID NO: 494719 - RNA, 19 nt, Homo sapiens
  misc_RNA (1)...(19): siRNA sense strand
agaagcaggucccaaagga

SEQ ID NO: 494720 - RNA, 19 nt, Homo sapiens
  misc_RNA (1)...(19): siRNA sense strand
acuuggagauauaggauua

SEQ ID NO: 494721 - RNA, 19 nt, Homo sapiens
  misc_RNA (1)...(19): siRNA sense strand
gaggaacaauuggcuuuca

SEQ ID NO: 494722 - RNA, 19 nt, Homo sapiens
  misc_RNA (1)...(19): siRNA sense strand
guagagcaccgacagauca

SEQ ID NO: 494723 - RNA, 19 nt, Homo sapiens
  misc_RNA (1)...(19): siRNA sense strand
gaacuuggagauauaggau

SEQ ID NO: 494724 - RNA, 19 nt, Homo sapiens
  misc_RNA (1)...(19): siRNA sense strand
ucagcgagcauuuaacaaa

SEQ ID NO: 494725 - RNA, 19 nt, Homo sapiens
  misc_RNA (1)...(19): siRNA sense strand
caaagggaucugcagguaa

SEQ ID NO: 494726 - RNA, 19 nt, Homo sapiens
  misc_RNA (1)...(19): siRNA sense strand
gggcuuagauggugaaccu

SEQ ID NO: 494727 - RNA, 19 nt, Homo sapiens
  misc_RNA (1)...(19): siRNA sense strand
uaagcagguuugcaugaga

SEQ ID NO: 494728 - RNA, 19 nt, Homo sapiens
  misc_RNA (1)...(19): siRNA sense strand
uaaaggggcuaaaggagaa

SEQ ID NO: 494729 - RNA, 19 nt, Homo sapiens
  misc_RNA (1)...(19): siRNA sense strand
ggucagcgagcauuuaaca

SEQ ID NO: 494730 - RNA, 19 nt, Homo sapiens
  misc_RNA (1)...(19): siRNA sense strand
uaaaggagaaauuggugaa

SEQ ID NO: 494731 - RNA, 19 nt, Homo sapiens
  misc_RNA (1)...(19): siRNA sense strand
ccaggucgcucaggauauc

SEQ ID NO: 494732 - RNA, 19 nt, Homo sapiens
  misc_RNA (1)...(19): siRNA sense strand
uggaaugccuggaacaaag

SEQ ID NO: 494733 - RNA, 19 nt, Homo sapiens
  misc_RNA (1)...(19): siRNA sense strand
ccaaaggagacacggguuu

SEQ ID NO: 494734 - RNA, 19 nt, Homo sapiens
  misc_RNA (1)...(19): siRNA sense strand
cagaggaacaauuggcuuu

SEQ ID NO: 494735 - RNA, 19 nt, Homo sapiens
  misc_RNA (1)...(19): siRNA sense strand
cagcgagcauuuaacaaag

SEQ ID NO: 494736 - RNA, 19 nt, Homo sapiens
  misc_RNA (1)...(19): siRNA sense strand
gagagggccugagggaagu

SEQ ID NO: 494737 - RNA, 19 nt, Homo sapiens
  misc_RNA (1)...(19): siRNA sense strand
ggaacaauuggcuuucaug

SEQ ID NO: 494738 - RNA, 19 nt, Homo sapiens
  misc_RNA (1)...(19): siRNA sense strand
gugaugggaucccuggaau

SEQ ID NO: 494739 - RNA, 19 nt, Homo sapiens
  misc_RNA (1)...(19): siRNA sense strand
accuggcgcugauggauua

SEQ ID NO: 494740 - RNA, 19 nt, Homo sapiens
  misc_RNA (1)...(19): siRNA sense strand
gggugccucuggugaagaa

SEQ ID NO: 494741 - RNA, 19 nt, Homo sapiens
  misc_RNA (1)...(19): siRNA sense strand
gaaggugaagcaggagaaa

SEQ ID NO: 494742 - RNA, 19 nt, Homo sapiens
  misc_RNA (1)...(19): siRNA sense strand
gcaggucccaaaggagaua

SEQ ID NO: 494743 - RNA, 19 nt, Homo sapiens
  misc_RNA (1)...(19): siRNA sense strand
cuccugggcuucccgguuu

SEQ ID NO: 494744 - RNA, 19 nt, Homo sapiens
  misc_RNA (1)...(19): siRNA sense strand
ccagggagaacucggagaa

SEQ ID NO: 494745 - RNA, 19 nt, Homo sapiens
  misc_RNA (1)...(19): siRNA sense strand
ggaacuuggagauauagga

SEQ ID NO: 494746 - RNA, 19 nt, Homo sapiens
  misc_RNA (1)...(19): siRNA sense strand
caccaggucgcucaggaua

SEQ ID NO: 494747 - RNA, 19 nt, Homo sapiens
  misc_RNA (1)...(19): siRNA sense strand
cagaucagcacauuaagca

SEQ ID NO: 494748 - RNA, 19 nt, Homo sapiens
  misc_RNA (1)...(19): siRNA sense strand
aggauuaccuggcccaaag

SEQ ID NO: 494749 - RNA, 19 nt, Homo sapiens
  misc_RNA (1)...(19): siRNA sense strand
cagguaaacuggguucucu

SEQ ID NO: 494750 - RNA, 19 nt, Homo sapiens
  misc_RNA (1)...(19): siRNA sense strand
cggagaaguuggagcucaa

SEQ ID NO: 494751 - RNA, 19 nt, Homo sapiens
  misc_RNA (1)...(19): siRNA sense strand
uggcaguagaggagaauua

SEQ ID NO: 494752 - RNA, 19 nt, Homo sapiens
  misc_RNA (1)...(19): siRNA sense strand
caguagaggagaauuagga

SEQ ID NO: 494753 - RNA, 19 nt, Homo sapiens
  misc_RNA (1)...(19): siRNA sense strand
ggauuuccaggccguggua

SEQ ID NO: 494754 - RNA, 19 nt, Homo sapiens
  misc_RNA (1)...(19): siRNA sense strand
aaaaggugcucggggcuua

SEQ ID NO: 494755 - RNA, 19 nt, Homo sapiens
  misc_RNA (1)...(19): siRNA sense strand
agggaagccuggucagaug

SEQ ID NO: 494756 - RNA, 19 nt, Homo sapiens
  misc_RNA (1)...(19): siRNA sense strand
ggagaagcaggucccaaag

SEQ ID NO: 494757 - RNA, 19 nt, Homo sapiens
  misc_RNA (1)...(19): siRNA sense strand
uggaauuccuggugcaaag

SEQ ID NO: 494758 - RNA, 19 nt, Homo sapiens
  misc_RNA (1)...(19): siRNA sense strand
caaagggugaaccaggaaa

SEQ ID NO: 494759 - RNA, 19 nt, Homo sapiens
  misc_RNA (1)...(19): siRNA sense strand
gaaccuggugugccuggau

SEQ ID NO: 494760 - RNA, 19 nt, Homo sapiens
  misc_RNA (1)...(19): siRNA sense strand
gccuggaucgcguggauuu

SEQ ID NO: 494761 - RNA, 19 nt, Homo sapiens
  misc_RNA (1)...(19): siRNA sense strand
gaaggugcuagaggaauuc

SEQ ID NO: 494762 - RNA, 19 nt, Homo sapiens
  misc_RNA (1)...(19): siRNA sense strand
gagaagcaggucccaaagg

SEQ ID NO: 494763 - RNA, 19 nt, Homo sapiens
  misc_RNA (1)...(19): siRNA sense strand
ggacacaagggugaagaag

SEQ ID NO: 494764 - RNA, 19 nt, Homo sapiens
  misc_RNA (1)...(19): siRNA sense strand
uaaaggugacuugggagaa

SEQ ID NO: 494765 - RNA, 19 nt, Homo sapiens
  misc_RNA (1)...(19): siRNA sense strand
ugagagucauacaagaaca

SEQ ID NO: 494766 - RNA, 19 nt, Homo sapiens
  misc_RNA (1)...(19): siRNA sense strand
aaaggguguugcuggugaa

SEQ ID NO: 494767 - RNA, 19 nt, Homo sapiens
  misc_RNA (1)...(19): siRNA sense strand
gaugggaucccuggaaugc

SEQ ID NO: 494768 - RNA, 19 nt, Homo sapiens
  misc_RNA (1)...(19): siRNA sense strand
aggagaagcaggucccaaa

SEQ ID NO: 494769 - RNA, 19 nt, Homo sapiens
  misc_RNA (1)...(19): siRNA sense strand
gcugaaggugcuagaggaa

SEQ ID NO: 494770 - RNA, 19 nt, Homo sapiens
  misc_RNA (1)...(19): siRNA sense strand
uggcacaccuggcgcugau

SEQ ID NO: 494771 - RNA, 19 nt, Homo sapiens
  misc_RNA (1)...(19): siRNA sense strand
ggagagcuuggccguguag

SEQ ID NO: 494772 - RNA, 19 nt, Homo sapiens
  misc_RNA (1)...(19): siRNA sense strand
gugccuggaucgcguggau

SEQ ID NO: 494773 - RNA, 19 nt, Homo sapiens
  misc_RNA (1)...(19): siRNA sense strand
ggaaugccuggaacaaagg

SEQ ID NO: 494774 - RNA, 19 nt, Homo sapiens
  misc_RNA (1)...(19): siRNA sense strand
gguagagcaccgacagauc

SEQ ID NO: 494775 - RNA, 19 nt, Homo sapiens
  misc_RNA (1)...(19): siRNA sense strand
cuggucagaugggaaauuc

SEQ ID NO: 494776 - RNA, 19 nt, Homo sapiens
  misc_RNA (1)...(19): siRNA sense strand
ucuuaagcguccagacuca

SEQ ID NO: 494777 - RNA, 19 nt, Homo sapiens
  misc_RNA (1)...(19): siRNA sense strand
ggaguggaaggaccaagag

SEQ ID NO: 494778 - RNA, 19 nt, Homo sapiens
  misc_RNA (1)...(19): siRNA sense strand
uggagagcuuggccgugua

SEQ ID NO: 494779 - RNA, 19 nt, Homo sapiens
  misc_RNA (1)...(19): siRNA sense strand
ggucagaugggaaauucag

SEQ ID NO: 494780 - RNA, 19 nt, Homo sapiens
  misc_RNA (1)...(19): siRNA sense strand
gagcuuugcugucauuuaa

SEQ ID NO: 494781 - RNA, 19 nt, Homo sapiens
  misc_RNA (1)...(19): siRNA sense strand
gaacgagaauauagacauu

SEQ ID NO: 494782 - RNA, 19 nt, Homo sapiens
  misc_RNA (1)...(19): siRNA sense strand
gaccagcaauucagcaaua

SEQ ID NO: 494783 - RNA, 19 nt, Homo sapiens
  misc_RNA (1)...(19): siRNA sense strand
gcaauaacuuaccugcuaa

SEQ ID NO: 494784 - RNA, 19 nt, Homo sapiens
  misc_RNA (1)...(19): siRNA sense strand
gcaauucagcaauaacuua

SEQ ID NO: 494785 - RNA, 19 nt, Homo sapiens
  misc_RNA (1)...(19): siRNA sense strand
gcagggugcucgaaucauu

SEQ ID NO: 494786 - RNA, 19 nt, Homo sapiens
  misc_RNA (1)...(19): siRNA sense strand
gaggaugccuugaaucuca

SEQ ID NO: 494787 - RNA, 19 nt, Homo sapiens
  misc_RNA (1)...(19): siRNA sense strand
gacaggaagugguauuuau

SEQ ID NO: 494788 - RNA, 19 nt, Homo sapiens
  misc_RNA (1)...(19): siRNA sense strand
caucaugucagccuaaaua

SEQ ID NO: 494789 - RNA, 19 nt, Homo sapiens
  misc_RNA (1)...(19): siRNA sense strand
gaucauagcuuugcaaaau

SEQ ID NO: 494790 - RNA, 19 nt, Homo sapiens
  misc_RNA (1)...(19): siRNA sense strand
caucaaaccauuuccagua

SEQ ID NO: 494791 - RNA, 19 nt, Homo sapiens
  misc_RNA (1)...(19): siRNA sense strand
caaauggucccaaagugua

SEQ ID NO: 494792 - RNA, 19 nt, Homo sapiens
  misc_RNA (1)...(19): siRNA sense strand
gcaaugggaaugggaguua

SEQ ID NO: 494793 - RNA, 19 nt, Homo sapiens
  misc_RNA (1)...(19): siRNA sense strand
gaaacugcuucuacaagau

SEQ ID NO: 494794 - RNA, 19 nt, Homo sapiens
  misc_RNA (1)...(19): siRNA sense strand
cuacuaauuugacaacuug

SEQ ID NO: 494795 - RNA, 19 nt, Homo sapiens
  misc_RNA (1)...(19): siRNA sense strand
gucccaaaguguaucauua

SEQ ID NO: 494796 - RNA, 19 nt, Homo sapiens
  misc_RNA (1)...(19): siRNA sense strand
gaaagaugggcguuuggua

SEQ ID NO: 494797 - RNA, 19 nt, Homo sapiens
  misc_RNA (1)...(19): siRNA sense strand
caugucagccuaaauauga

SEQ ID NO: 494798 - RNA, 19 nt, Homo sapiens
  misc_RNA (1)...(19): siRNA sense strand
ccuaauggcuacuuucaau

SEQ ID NO: 494799 - RNA, 19 nt, Homo sapiens
  misc_RNA (1)...(19): siRNA sense strand
ccacagauuuggucacaca

SEQ ID NO: 494800 - RNA, 19 nt, Homo sapiens
  misc_RNA (1)...(19): siRNA sense strand
gaagaugcacuuuauggau

SEQ ID NO: 494801 - RNA, 19 nt, Homo sapiens
  misc_RNA (1)...(19): siRNA sense strand
aaacaagaauggaucaucu

SEQ ID NO: 494802 - RNA, 19 nt, Homo sapiens
  misc_RNA (1)...(19): siRNA sense strand
ggaaugggaguuaaucuuc

SEQ ID NO: 494803 - RNA, 19 nt, Homo sapiens
  misc_RNA (1)...(19): siRNA sense strand
gaaugaaguauacguucua

SEQ ID NO: 494804 - RNA, 19 nt, Homo sapiens
  misc_RNA (1)...(19): siRNA sense strand
gcugaaagaugggcguuug

SEQ ID NO: 494805 - RNA, 19 nt, Homo sapiens
  misc_RNA (1)...(19): siRNA sense strand
ucacgugcuuugauauauu

SEQ ID NO: 494806 - RNA, 19 nt, Homo sapiens
  misc_RNA (1)...(19): siRNA sense strand
gaaaaugcaggaaaccuua

SEQ ID NO: 494807 - RNA, 19 nt, Homo sapiens
  misc_RNA (1)...(19): siRNA sense strand
gcaggaaaccuuacagucu

SEQ ID NO: 494808 - RNA, 19 nt, Homo sapiens
  misc_RNA (1)...(19): siRNA sense strand
aaagaugggcguuugguaa

SEQ ID NO: 494809 - RNA, 19 nt, Homo sapiens
  misc_RNA (1)...(19): siRNA sense strand
ccacauguccuccuaaugg

SEQ ID NO: 494810 - RNA, 19 nt, Homo sapiens
  misc_RNA (1)...(19): siRNA sense strand
uccagaagaugcacuuuau

SEQ ID NO: 494811 - RNA, 19 nt, Homo sapiens
  misc_RNA (1)...(19): siRNA sense strand
uuacauggccgaaggagaa

SEQ ID NO: 494812 - RNA, 19 nt, Homo sapiens
  misc_RNA (1)...(19): siRNA sense strand
agaagagaaugaaguauac

SEQ ID NO: 494813 - RNA, 19 nt, Homo sapiens
  misc_RNA (1)...(19): siRNA sense strand
ggagcuuugcugucauuua

SEQ ID NO: 494814 - RNA, 19 nt, Homo sapiens
  misc_RNA (1)...(19): siRNA sense strand
gaaugggaguuaaucuucu

SEQ ID NO: 494815 - RNA, 19 nt, Homo sapiens
  misc_RNA (1)...(19): siRNA sense strand
ugaacuggauuccguguca

SEQ ID NO: 494816 - RNA, 19 nt, Homo sapiens
  misc_RNA (1)...(19): siRNA sense strand
aauuugaggugcugaaaga

SEQ ID NO: 494817 - RNA, 19 nt, Homo sapiens
  misc_RNA (1)...(19): siRNA sense strand
ugaaguauacguucuagga

SEQ ID NO: 494818 - RNA, 19 nt, Homo sapiens
  misc_RNA (1)...(19): siRNA sense strand
caaggacaacucuaucuau

SEQ ID NO: 494819 - RNA, 19 nt, Homo sapiens
  misc_RNA (1)...(19): siRNA sense strand
ucaggaggaugccuugaau

SEQ ID NO: 494820 - RNA, 19 nt, Homo sapiens
  misc_RNA (1)...(19): siRNA sense strand
ccaccaccaucaaaccauu

SEQ ID NO: 494821 - RNA, 19 nt, Homo sapiens
  misc_RNA (1)...(19): siRNA sense strand
uuugacagcuauugaauuc

SEQ ID NO: 494822 - RNA, 19 nt, Homo sapiens
  misc_RNA (1)...(19): siRNA sense strand
ugacaggaagugguauuua

SEQ ID NO: 494823 - RNA, 19 nt, Homo sapiens
  misc_RNA (1)...(19): siRNA sense strand
ccaaggacaacucuaucua

SEQ ID NO: 494824 - RNA, 19 nt, Homo sapiens
  misc_RNA (1)...(19): siRNA sense strand
gcacauuuggaacagagua

SEQ ID NO: 494825 - RNA, 19 nt, Homo sapiens
  misc_RNA (1)...(19): siRNA sense strand
gaacuggauuccgugucaa

SEQ ID NO: 494826 - RNA, 19 nt, Homo sapiens
  misc_RNA (1)...(19): siRNA sense strand
aaggacaacucuaucuaug

SEQ ID NO: 494827 - RNA, 19 nt, Homo sapiens
  misc_RNA (1)...(19): siRNA sense strand
guguuacccuggugaaaga

SEQ ID NO: 494828 - RNA, 19 nt, Homo sapiens
  misc_RNA (1)...(19): siRNA sense strand
uuucagagguggauucaca

SEQ ID NO: 494829 - RNA, 19 nt, Homo sapiens
  misc_RNA (1)...(19): siRNA sense strand
ccaaauggucccaaagugu

SEQ ID NO: 494830 - RNA, 19 nt, Homo sapiens
  misc_RNA (1)...(19): siRNA sense strand
caaugggaaugggaguuaa

SEQ ID NO: 494831 - RNA, 19 nt, Homo sapiens
  misc_RNA (1)...(19): siRNA sense strand
ucaauacaauaccaaugug

SEQ ID NO: 494832 - RNA, 19 nt, Homo sapiens
  misc_RNA (1)...(19): siRNA sense strand
ugacagcuauugaauucca

SEQ ID NO: 494833 - RNA, 19 nt, Homo sapiens
  misc_RNA (1)...(19): siRNA sense strand
cauugugacuccagaagau

SEQ ID NO: 494834 - RNA, 19 nt, Homo sapiens
  misc_RNA (1)...(19): siRNA sense strand
uggaucaucugggccuaua

SEQ ID NO: 494835 - RNA, 19 nt, Homo sapiens
  misc_RNA (1)...(19): siRNA sense strand
aaacugcuucuacaagauu

SEQ ID NO: 494836 - RNA, 19 nt, Homo sapiens
  misc_RNA (1)...(19): siRNA sense strand
ccuugaaucucaugaacga

SEQ ID NO: 494837 - RNA, 19 nt, Homo sapiens
  misc_RNA (1)...(19): siRNA sense strand
gugcuuugauauauucuuc

SEQ ID NO: 494838 - RNA, 19 nt, Homo sapiens
  misc_RNA (1)...(19): siRNA sense strand
ucuaugucuuggcaaauuu

SEQ ID NO: 494839 - RNA, 19 nt, Homo sapiens
  misc_RNA (1)...(19): siRNA sense strand
gggaaugggaguuaaucuu

SEQ ID NO: 494840 - RNA, 19 nt, Homo sapiens
  misc_RNA (1)...(19): siRNA sense strand
guacacaaaggacucacuu

SEQ ID NO: 494841 - RNA, 19 nt, Homo sapiens
  misc_RNA (1)...(19): siRNA sense strand
gggaguuaaucuucuugug

SEQ ID NO: 494842 - RNA, 19 nt, Homo sapiens
  misc_RNA (1)...(19): siRNA sense strand
uuuggaagguuuggcauuu

SEQ ID NO: 494843 - RNA, 19 nt, Homo sapiens
  misc_RNA (1)...(19): siRNA sense strand
agccggaguuggugacuuu

SEQ ID NO: 494844 - RNA, 19 nt, Homo sapiens
  misc_RNA (1)...(19): siRNA sense strand
uaccgaaauucaucuguca

SEQ ID NO: 494845 - RNA, 19 nt, Homo sapiens
  misc_RNA (1)...(19): siRNA sense strand
cagaagaugcacuuuaugg

SEQ ID NO: 494846 - RNA, 19 nt, Homo sapiens
  misc_RNA (1)...(19): siRNA sense strand
ucagcugccuggccaagga

SEQ ID NO: 494847 - RNA, 19 nt, Homo sapiens
  misc_RNA (1)...(19): siRNA sense strand
auuaugacaugaagacaga

SEQ ID NO: 494848 - RNA, 19 nt, Homo sapiens
  misc_RNA (1)...(19): siRNA sense strand
cagcuuggaugaacguuuu

SEQ ID NO: 494849 - RNA, 19 nt, Homo sapiens
  misc_RNA (1)...(19): siRNA sense strand
uuacccuggugaaagauuu

SEQ ID NO: 494850 - RNA, 19 nt, Homo sapiens
  misc_RNA (1)...(19): siRNA sense strand
caccgcauuuggaagguuu

SEQ ID NO: 494851 - RNA, 19 nt, Homo sapiens
  misc_RNA (1)...(19): siRNA sense strand
cuaauggcuacuuucaaua

SEQ ID NO: 494852 - RNA, 19 nt, Homo sapiens
  misc_RNA (1)...(19): siRNA sense strand
cuaucuaugucuuggcaaa

SEQ ID NO: 494853 - RNA, 19 nt, Homo sapiens
  misc_RNA (1)...(19): siRNA sense strand
aauaugacaggaaguggua

SEQ ID NO: 494854 - RNA, 19 nt, Homo sapiens
  misc_RNA (1)...(19): siRNA sense strand
ggaggugguacacaaagga

SEQ ID NO: 494855 - RNA, 19 nt, Homo sapiens
  misc_RNA (1)...(19): siRNA sense strand
aaggagcuuugcugucauu

SEQ ID NO: 494856 - RNA, 19 nt, Homo sapiens
  misc_RNA (1)...(19): siRNA sense strand
ucacacaccaguacaagca

SEQ ID NO: 494857 - RNA, 19 nt, Homo sapiens
  misc_RNA (1)...(19): siRNA sense strand
cacgugcuuugauauauuc

SEQ ID NO: 494858 - RNA, 19 nt, Homo sapiens
  misc_RNA (1)...(19): siRNA sense strand
gggccuauacuaacagugu

SEQ ID NO: 494859 - RNA, 19 nt, Homo sapiens
  misc_RNA (1)...(19): siRNA sense strand
caaaccauuuccaguacag

SEQ ID NO: 494860 - RNA, 19 nt, Homo sapiens
  misc_RNA (1)...(19): siRNA sense strand
cccaaaguguaucauuaug

SEQ ID NO: 494861 - RNA, 19 nt, Homo sapiens
  misc_RNA (1)...(19): siRNA sense strand
ugacaugaagacagaguug

SEQ ID NO: 494862 - RNA, 19 nt, Homo sapiens
  misc_RNA (1)...(19): siRNA sense strand
ucaaaccauuuccaguaca

SEQ ID NO: 494863 - RNA, 19 nt, Homo sapiens
  misc_RNA (1)...(19): siRNA sense strand
gguaaacaagaauggauca

SEQ ID NO: 494864 - RNA, 19 nt, Homo sapiens
  misc_RNA (1)...(19): siRNA sense strand
aagaugggcguuugguaaa

SEQ ID NO: 494865 - RNA, 19 nt, Homo sapiens
  misc_RNA (1)...(19): siRNA sense strand
ucugucaccuggaaaauuu

SEQ ID NO: 494866 - RNA, 19 nt, Homo sapiens
  misc_RNA (1)...(19): siRNA sense strand
gcuacagaauguuacaaaa

SEQ ID NO: 494867 - RNA, 19 nt, Homo sapiens
  misc_RNA (1)...(19): siRNA sense strand
acaacucuaucuaugucuu

SEQ ID NO: 494868 - RNA, 19 nt, Homo sapiens
  misc_RNA (1)...(19): siRNA sense strand
ucaucugggccuauacuaa

SEQ ID NO: 494869 - RNA, 19 nt, Homo sapiens
  misc_RNA (1)...(19): siRNA sense strand
cuacuuaccgaaauucauc

SEQ ID NO: 494870 - RNA, 19 nt, Homo sapiens
  misc_RNA (1)...(19): siRNA sense strand
gaaauuuaccagggaaacu

SEQ ID NO: 494871 - RNA, 19 nt, Homo sapiens
  misc_RNA (1)...(19): siRNA sense strand
cggaguuggugacuuucaa

SEQ ID NO: 494872 - RNA, 19 nt, Homo sapiens
  misc_RNA (1)...(19): siRNA sense strand
caacucuaucuaugucuug

SEQ ID NO: 494873 - RNA, 19 nt, Homo sapiens
  misc_RNA (1)...(19): siRNA sense strand
gaaggagaagagaguacug

SEQ ID NO: 494874 - RNA, 19 nt, Homo sapiens
  misc_RNA (1)...(19): siRNA sense strand
ccagggauggguucaacuu

SEQ ID NO: 494875 - RNA, 19 nt, Homo sapiens
  misc_RNA (1)...(19): siRNA sense strand
cuccagaagaugcacuuua

SEQ ID NO: 494876 - RNA, 19 nt, Homo sapiens
  misc_RNA (1)...(19): siRNA sense strand
gaagacagaguugggaaaa

SEQ ID NO: 494877 - RNA, 19 nt, Homo sapiens
  misc_RNA (1)...(19): siRNA sense strand
cuaaauaugacaggaagug

SEQ ID NO: 494878 - RNA, 19 nt, Homo sapiens
  misc_RNA (1)...(19): siRNA sense strand
uggcuacuuucaauacaau

SEQ ID NO: 494879 - RNA, 19 nt, Homo sapiens
  misc_RNA (1)...(19): siRNA sense strand
uaaacaagaauggaucauc

SEQ ID NO: 494880 - RNA, 19 nt, Homo sapiens
  misc_RNA (1)...(19): siRNA sense strand
gagcuuugcugucauuuaa

SEQ ID NO: 494881 - RNA, 19 nt, Homo sapiens
  misc_RNA (1)...(19): siRNA sense strand
gaacgagaauauagacauu

SEQ ID NO: 494882 - RNA, 19 nt, Homo sapiens
  misc_RNA (1)...(19): siRNA sense strand
gaccagcaauucagcaaua

SEQ ID NO: 494883 - RNA, 19 nt, Homo sapiens
  misc_RNA (1)...(19): siRNA sense strand
gcaauaacuuaccugcuaa

SEQ ID NO: 494884 - RNA, 19 nt, Homo sapiens
  misc_RNA (1)...(19): siRNA sense strand
gcaauucagcaauaacuua

SEQ ID NO: 494885 - RNA, 19 nt, Homo sapiens
  misc_RNA (1)...(19): siRNA sense strand
gcagggugcucgaaucauu

SEQ ID NO: 494886 - RNA, 19 nt, Homo sapiens
  misc_RNA (1)...(19): siRNA sense strand
gacaggaagugguauuuau

SEQ ID NO: 494887 - RNA, 19 nt, Homo sapiens
  misc_RNA (1)...(19): siRNA sense strand
caucaugucagccuaaaua

SEQ ID NO: 494888 - RNA, 19 nt, Homo sapiens
  misc_RNA (1)...(19): siRNA sense strand
gaucauagcuuugcaaaau

SEQ ID NO: 494889 - RNA, 19 nt, Homo sapiens
  misc_RNA (1)...(19): siRNA sense strand
caucaaaccauuuccagua

SEQ ID NO: 494890 - RNA, 19 nt, Homo sapiens
  misc_RNA (1)...(19): siRNA sense strand
caaauggucccaaagugua

SEQ ID NO: 494891 - RNA, 19 nt, Homo sapiens
  misc_RNA (1)...(19): siRNA sense strand
gcaaugggaaugggaguua

SEQ ID NO: 494892 - RNA, 19 nt, Homo sapiens
  misc_RNA (1)...(19): siRNA sense strand
gaaacugcuucuacaagau

SEQ ID NO: 494893 - RNA, 19 nt, Homo sapiens
  misc_RNA (1)...(19): siRNA sense strand
cuacuaauuugacaacuug

SEQ ID NO: 494894 - RNA, 19 nt, Homo sapiens
  misc_RNA (1)...(19): siRNA sense strand
gucccaaaguguaucauua

SEQ ID NO: 494895 - RNA, 19 nt, Homo sapiens
  misc_RNA (1)...(19): siRNA sense strand
gaaagaugggcguuuggua

SEQ ID NO: 494896 - RNA, 19 nt, Homo sapiens
  misc_RNA (1)...(19): siRNA sense strand
caugucagccuaaauauga

SEQ ID NO: 494897 - RNA, 19 nt, Homo sapiens
  misc_RNA (1)...(19): siRNA sense strand
ccuaauggcuacuuucaau

SEQ ID NO: 494898 - RNA, 19 nt, Homo sapiens
  misc_RNA (1)...(19): siRNA sense strand
ccacagauuuggucacaca

SEQ ID NO: 494899 - RNA, 19 nt, Homo sapiens
  misc_RNA (1)...(19): siRNA sense strand
gaagaugcacuuuauggau

SEQ ID NO: 494900 - RNA, 19 nt, Homo sapiens
  misc_RNA (1)...(19): siRNA sense strand
aaacaagaauggaucaucu

SEQ ID NO: 494901 - RNA, 19 nt, Homo sapiens
  misc_RNA (1)...(19): siRNA sense strand
ggaaugggaguuaaucuuc

SEQ ID NO: 494902 - RNA, 19 nt, Homo sapiens
  misc_RNA (1)...(19): siRNA sense strand
gaaugaaguauacguucua

SEQ ID NO: 494903 - RNA, 19 nt, Homo sapiens
  misc_RNA (1)...(19): siRNA sense strand
gcugaaagaugggcguuug

SEQ ID NO: 494904 - RNA, 19 nt, Homo sapiens
  misc_RNA (1)...(19): siRNA sense strand
ucacgugcuuugauauauu

SEQ ID NO: 494905 - RNA, 19 nt, Homo sapiens
  misc_RNA (1)...(19): siRNA sense strand
gaaaaugcaggaaaccuua

SEQ ID NO: 494906 - RNA, 19 nt, Homo sapiens
  misc_RNA (1)...(19): siRNA sense strand
gcaggaaaccuuacagucu

SEQ ID NO: 494907 - RNA, 19 nt, Homo sapiens
  misc_RNA (1)...(19): siRNA sense strand
aaagaugggcguuugguaa

SEQ ID NO: 494908 - RNA, 19 nt, Homo sapiens
  misc_RNA (1)...(19): siRNA sense strand
ccacauguccuccuaaugg

SEQ ID NO: 494909 - RNA, 19 nt, Homo sapiens
  misc_RNA (1)...(19): siRNA sense strand
uccagaagaugcacuuuau

SEQ ID NO: 494910 - RNA, 19 nt, Homo sapiens
  misc_RNA (1)...(19): siRNA sense strand
uuacauggccgaaggagaa

SEQ ID NO: 494911 - RNA, 19 nt, Homo sapiens
  misc_RNA (1)...(19): siRNA sense strand
agaagagaaugaaguauac

SEQ ID NO: 494912 - RNA, 19 nt, Homo sapiens
  misc_RNA (1)...(19): siRNA sense strand
ggagcuuugcugucauuua

SEQ ID NO: 494913 - RNA, 19 nt, Homo sapiens
  misc_RNA (1)...(19): siRNA sense strand
gaaugggaguuaaucuucu

SEQ ID NO: 494914 - RNA, 19 nt, Homo sapiens
  misc_RNA (1)...(19): siRNA sense strand
ugaacuggauuccguguca

SEQ ID NO: 494915 - RNA, 19 nt, Homo sapiens
  misc_RNA (1)...(19): siRNA sense strand
aauuugaggugcugaaaga

SEQ ID NO: 494916 - RNA, 19 nt, Homo sapiens
  misc_RNA (1)...(19): siRNA sense strand
ugaaguauacguucuagga

SEQ ID NO: 494917 - RNA, 19 nt, Homo sapiens
  misc_RNA (1)...(19): siRNA sense strand
caaggacaacucuaucuau

SEQ ID NO: 494918 - RNA, 19 nt, Homo sapiens
  misc_RNA (1)...(19): siRNA sense strand
ccaccaccaucaaaccauu

SEQ ID NO: 494919 - RNA, 19 nt, Homo sapiens
  misc_RNA (1)...(19): siRNA sense strand
uuugacagcuauugaauuc

SEQ ID NO: 494920 - RNA, 19 nt, Homo sapiens
  misc_RNA (1)...(19): siRNA sense strand
ugacaggaagugguauuua

SEQ ID NO: 494921 - RNA, 19 nt, Homo sapiens
  misc_RNA (1)...(19): siRNA sense strand
ccaaggacaacucuaucua

SEQ ID NO: 494922 - RNA, 19 nt, Homo sapiens
  misc_RNA (1)...(19): siRNA sense strand
gcacauuuggaacagagua

SEQ ID NO: 494923 - RNA, 19 nt, Homo sapiens
  misc_RNA (1)...(19): siRNA sense strand
gaacuggauuccgugucaa

SEQ ID NO: 494924 - RNA, 19 nt, Homo sapiens
  misc_RNA (1)...(19): siRNA sense strand
aaggacaacucuaucuaug

SEQ ID NO: 494925 - RNA, 19 nt, Homo sapiens
  misc_RNA (1)...(19): siRNA sense strand
guguuacccuggugaaaga

SEQ ID NO: 494926 - RNA, 19 nt, Homo sapiens
  misc_RNA (1)...(19): siRNA sense strand
uuucagagguggauucaca

SEQ ID NO: 494927 - RNA, 19 nt, Homo sapiens
  misc_RNA (1)...(19): siRNA sense strand
ccaaauggucccaaagugu

SEQ ID NO: 494928 - RNA, 19 nt, Homo sapiens
  misc_RNA (1)...(19): siRNA sense strand
caaugggaaugggaguuaa

SEQ ID NO: 494929 - RNA, 19 nt, Homo sapiens
  misc_RNA (1)...(19): siRNA sense strand
ucaauacaauaccaaugug

SEQ ID NO: 494930 - RNA, 19 nt, Homo sapiens
  misc_RNA (1)...(19): siRNA sense strand
ugacagcuauugaauucca

SEQ ID NO: 494931 - RNA, 19 nt, Homo sapiens
  misc_RNA (1)...(19): siRNA sense strand
ucuaugucuuggcaaauuu

SEQ ID NO: 494932 - RNA, 19 nt, Homo sapiens
  misc_RNA (1)...(19): siRNA sense strand
uggaucaucugggccuaua

SEQ ID NO: 494933 - RNA, 19 nt, Homo sapiens
  misc_RNA (1)...(19): siRNA sense strand
cauugugacuccagaagau

SEQ ID NO: 494934 - RNA, 19 nt, Homo sapiens
  misc_RNA (1)...(19): siRNA sense strand
aaacugcuucuacaagauu

SEQ ID NO: 494935 - RNA, 19 nt, Homo sapiens
  misc_RNA (1)...(19): siRNA sense strand
gugcuuugauauauucuuc

SEQ ID NO: 494936 - RNA, 19 nt, Homo sapiens
  misc_RNA (1)...(19): siRNA sense strand
gggaaugggaguuaaucuu

SEQ ID NO: 494937 - RNA, 19 nt, Homo sapiens
  misc_RNA (1)...(19): siRNA sense strand
guacacaaaggacucacuu

SEQ ID NO: 494938 - RNA, 19 nt, Homo sapiens
  misc_RNA (1)...(19): siRNA sense strand
gggaguuaaucuucuugug

SEQ ID NO: 494939 - RNA, 19 nt, Homo sapiens
  misc_RNA (1)...(19): siRNA sense strand
uuuggaagguuuggcauuu

SEQ ID NO: 494940 - RNA, 19 nt, Homo sapiens
  misc_RNA (1)...(19): siRNA sense strand
agccggaguuggugacuuu

SEQ ID NO: 494941 - RNA, 19 nt, Homo sapiens
  misc_RNA (1)...(19): siRNA sense strand
uaccgaaauucaucuguca

SEQ ID NO: 494942 - RNA, 19 nt, Homo sapiens
  misc_RNA (1)...(19): siRNA sense strand
cagaagaugcacuuuaugg

SEQ ID NO: 494943 - RNA, 19 nt, Homo sapiens
  misc_RNA (1)...(19): siRNA sense strand
cuaucuaugucuuggcaaa

SEQ ID NO: 494944 - RNA, 19 nt, Homo sapiens
  misc_RNA (1)...(19): siRNA sense strand
auuaugacaugaagacaga

SEQ ID NO: 494945 - RNA, 19 nt, Homo sapiens
  misc_RNA (1)...(19): siRNA sense strand
ucagcugccuggccaagga

SEQ ID NO: 494946 - RNA, 19 nt, Homo sapiens
  misc_RNA (1)...(19): siRNA sense strand
cagcuuggaugaacguuuu

SEQ ID NO: 494947 - RNA, 19 nt, Homo sapiens
  misc_RNA (1)...(19): siRNA sense strand
uuacccuggugaaagauuu

SEQ ID NO: 494948 - RNA, 19 nt, Homo sapiens
  misc_RNA (1)...(19): siRNA sense strand
caccgcauuuggaagguuu

SEQ ID NO: 494949 - RNA, 19 nt, Homo sapiens
  misc_RNA (1)...(19): siRNA sense strand
cuaauggcuacuuucaaua

SEQ ID NO: 494950 - RNA, 19 nt, Homo sapiens
  misc_RNA (1)...(19): siRNA sense strand
aauaugacaggaaguggua

SEQ ID NO: 494951 - RNA, 19 nt, Homo sapiens
  misc_RNA (1)...(19): siRNA sense strand
ggaggugguacacaaagga

SEQ ID NO: 494952 - RNA, 19 nt, Homo sapiens
  misc_RNA (1)...(19): siRNA sense strand
aaggagcuuugcugucauu

SEQ ID NO: 494953 - RNA, 19 nt, Homo sapiens
  misc_RNA (1)...(19): siRNA sense strand
ucacacaccaguacaagca

SEQ ID NO: 494954 - RNA, 19 nt, Homo sapiens
  misc_RNA (1)...(19): siRNA sense strand
cacgugcuuugauauauuc

SEQ ID NO: 494955 - RNA, 19 nt, Homo sapiens
  misc_RNA (1)...(19): siRNA sense strand
gggccuauacuaacagugu

SEQ ID NO: 494956 - RNA, 19 nt, Homo sapiens
  misc_RNA (1)...(19): siRNA sense strand
caaaccauuuccaguacag

SEQ ID NO: 494957 - RNA, 19 nt, Homo sapiens
  misc_RNA (1)...(19): siRNA sense strand
cccaaaguguaucauuaug

SEQ ID NO: 494958 - RNA, 19 nt, Homo sapiens
  misc_RNA (1)...(19): siRNA sense strand
ugacaugaagacagaguug

SEQ ID NO: 494959 - RNA, 19 nt, Homo sapiens
  misc_RNA (1)...(19): siRNA sense strand
ucaaaccauuuccaguaca

SEQ ID NO: 494960 - RNA, 19 nt, Homo sapiens
  misc_RNA (1)...(19): siRNA sense strand
gguaaacaagaauggauca

SEQ ID NO: 494961 - RNA, 19 nt, Homo sapiens
  misc_RNA (1)...(19): siRNA sense strand
aagaugggcguuugguaaa

SEQ ID NO: 494962 - RNA, 19 nt, Homo sapiens
  misc_RNA (1)...(19): siRNA sense strand
ucugucaccuggaaaauuu

SEQ ID NO: 494963 - RNA, 19 nt, Homo sapiens
  misc_RNA (1)...(19): siRNA sense strand
gcuacagaauguuacaaaa

SEQ ID NO: 494964 - RNA, 19 nt, Homo sapiens
  misc_RNA (1)...(19): siRNA sense strand
cggaguuggugacuuucaa

SEQ ID NO: 494965 - RNA, 19 nt, Homo sapiens
  misc_RNA (1)...(19): siRNA sense strand
ucaucugggccuauacuaa

SEQ ID NO: 494966 - RNA, 19 nt, Homo sapiens
  misc_RNA (1)...(19): siRNA sense strand
cuacuuaccgaaauucauc

SEQ ID NO: 494967 - RNA, 19 nt, Homo sapiens
  misc_RNA (1)...(19): siRNA sense strand
gaaauuuaccagggaaacu

SEQ ID NO: 494968 - RNA, 19 nt, Homo sapiens
  misc_RNA (1)...(19): siRNA sense strand
acaacucuaucuaugucuu

SEQ ID NO: 494969 - RNA, 19 nt, Homo sapiens
  misc_RNA (1)...(19): siRNA sense strand
uggcuacuuucaauacaau

SEQ ID NO: 494970 - RNA, 19 nt, Homo sapiens
  misc_RNA (1)...(19): siRNA sense strand
gaaggagaagagaguacug

SEQ ID NO: 494971 - RNA, 19 nt, Homo sapiens
  misc_RNA (1)...(19): siRNA sense strand
ccagggauggguucaacuu

SEQ ID NO: 494972 - RNA, 19 nt, Homo sapiens
  misc_RNA (1)...(19): siRNA sense strand
gaagacagaguugggaaaa

SEQ ID NO: 494973 - RNA, 19 nt, Homo sapiens
  misc_RNA (1)...(19): siRNA sense strand
caacucuaucuaugucuug

SEQ ID NO: 494974 - RNA, 19 nt, Homo sapiens
  misc_RNA (1)...(19): siRNA sense strand
cuaaauaugacaggaagug

SEQ ID NO: 494975 - RNA, 19 nt, Homo sapiens
  misc_RNA (1)...(19): siRNA sense strand
cuccagaagaugcacuuua

SEQ ID NO: 494976 - RNA, 19 nt, Homo sapiens
  misc_RNA (1)...(19): siRNA sense strand
aaugggaguuaaucuucuu

SEQ ID NO: 494977 - RNA, 19 nt, Homo sapiens
  misc_RNA (1)...(19): siRNA sense strand
uaaacaagaauggaucauc

SEQ ID NO: 494978 - RNA, 19 nt, Homo sapiens
  misc_RNA (1)...(19): siRNA sense strand
auucaucugucaccuggaa

SEQ ID NO: 494979 - RNA, 19 nt, Homo sapiens
  misc_RNA (1)...(19): siRNA sense strand
agggauggguucaacuuca

SEQ ID NO: 494980 - RNA, 19 nt, Homo sapiens
  misc_RNA (1)...(19): siRNA sense strand
gaagcagggugcacauauc

SEQ ID NO: 494981 - RNA, 19 nt, Homo sapiens
  misc_RNA (1)...(19): siRNA sense strand
gcggugauauuaccaaaca

SEQ ID NO: 494982 - RNA, 19 nt, Homo sapiens
  misc_RNA (1)...(19): siRNA sense strand
gacaagaagccaugcaaug

SEQ ID NO: 494983 - RNA, 19 nt, Homo sapiens
  misc_RNA (1)...(19): siRNA sense strand
gcagggugcacauaucauu

SEQ ID NO: 494984 - RNA, 19 nt, Homo sapiens
  misc_RNA (1)...(19): siRNA sense strand
gauggaaucuaugguugga

SEQ ID NO: 494985 - RNA, 19 nt, Homo sapiens
  misc_RNA (1)...(19): siRNA sense strand
caaggacaacucuaucuau

SEQ ID NO: 494986 - RNA, 19 nt, Homo sapiens
  misc_RNA (1)...(19): siRNA sense strand
gauauuaccaaacagaaca

SEQ ID NO: 494987 - RNA, 19 nt, Homo sapiens
  misc_RNA (1)...(19): siRNA sense strand
aagcuuugcuccugaugaa

SEQ ID NO: 494988 - RNA, 19 nt, Homo sapiens
  misc_RNA (1)...(19): siRNA sense strand
ccaaggacaacucuaucua

SEQ ID NO: 494989 - RNA, 19 nt, Homo sapiens
  misc_RNA (1)...(19): siRNA sense strand
aaggacaacucuaucuaug

SEQ ID NO: 494990 - RNA, 19 nt, Homo sapiens
  misc_RNA (1)...(19): siRNA sense strand
ggacaagaagccaugcaau

SEQ ID NO: 494991 - RNA, 19 nt, Homo sapiens
  misc_RNA (1)...(19): siRNA sense strand
caacacaccagugcaacaa

SEQ ID NO: 494992 - RNA, 19 nt, Homo sapiens
  misc_RNA (1)...(19): siRNA sense strand
gcacuggacacuuuuauug

SEQ ID NO: 494993 - RNA, 19 nt, Homo sapiens
  misc_RNA (1)...(19): siRNA sense strand
gaagcuuugcuccugauga

SEQ ID NO: 494994 - RNA, 19 nt, Homo sapiens
  misc_RNA (1)...(19): siRNA sense strand
cuaucuaugucguggcuaa

SEQ ID NO: 494995 - RNA, 19 nt, Homo sapiens
  misc_RNA (1)...(19): siRNA sense strand
cgaagcagggugcacauau

SEQ ID NO: 494996 - RNA, 19 nt, Homo sapiens
  misc_RNA (1)...(19): siRNA sense strand
uuaccaaacagaacagaaa

SEQ ID NO: 494997 - RNA, 19 nt, Homo sapiens
  misc_RNA (1)...(19): siRNA sense strand
uuggugcacuggacacuuu

SEQ ID NO: 494998 - RNA, 19 nt, Homo sapiens
  misc_RNA (1)...(19): siRNA sense strand
ucagcugccuggccaagga

SEQ ID NO: 494999 - RNA, 19 nt, Homo sapiens
  misc_RNA (1)...(19): siRNA sense strand
ucuaugucguggcuaauau

SEQ ID NO: 495000 - RNA, 19 nt, Homo sapiens
  misc_RNA (1)...(19): siRNA sense strand
ggugauauuaccaaacaga

SEQ ID NO: 495001 - RNA, 19 nt, Homo sapiens
  misc_RNA (1)...(19): siRNA sense strand
gcaacacaccagugcaaca

SEQ ID NO: 495002 - RNA, 19 nt, Homo sapiens
  misc_RNA (1)...(19): siRNA sense strand
ugagcaugcggugauauua

SEQ ID NO: 495003 - RNA, 19 nt, Homo sapiens
  misc_RNA (1)...(19): siRNA sense strand
acacaccagugcaacaaag

SEQ ID NO: 495004 - RNA, 19 nt, Homo sapiens
  misc_RNA (1)...(19): siRNA sense strand
gcgaagcagggugcacaua

SEQ ID NO: 495005 - RNA, 19 nt, Homo sapiens
  misc_RNA (1)...(19): siRNA sense strand
gagcaugcggugauauuac

SEQ ID NO: 495006 - RNA, 19 nt, Homo sapiens
  misc_RNA (1)...(19): siRNA sense strand
gaugaacaagaacauagau

SEQ ID NO: 495007 - RNA, 19 nt, Homo sapiens
  misc_RNA (1)...(19): siRNA sense strand
ggagagcauuuaccccuau

SEQ ID NO: 495008 - RNA, 19 nt, Homo sapiens
  misc_RNA (1)...(19): siRNA sense strand
ucaccagggagagcauuua

SEQ ID NO: 495009 - RNA, 19 nt, Homo sapiens
  misc_RNA (1)...(19): siRNA sense strand
cugauggccguuaccaaua

SEQ ID NO: 495010 - RNA, 19 nt, Homo sapiens
  misc_RNA (1)...(19): siRNA sense strand
uauaugagcaugcggugau

SEQ ID NO: 495011 - RNA, 19 nt, Homo sapiens
  misc_RNA (1)...(19): siRNA sense strand
cugaugugguguuugauuc

SEQ ID NO: 495012 - RNA, 19 nt, Homo sapiens
  misc_RNA (1)...(19): siRNA sense strand
ugauggccguuaccaauac

SEQ ID NO: 495013 - RNA, 19 nt, Homo sapiens
  misc_RNA (1)...(19): siRNA sense strand
ccugauggccguuaccaau

SEQ ID NO: 495014 - RNA, 19 nt, Homo sapiens
  misc_RNA (1)...(19): siRNA sense strand
gggacaagaagccaugcaa

SEQ ID NO: 495015 - RNA, 19 nt, Homo sapiens
  misc_RNA (1)...(19): siRNA sense strand
gauggccguuaccaauaca

SEQ ID NO: 495016 - RNA, 19 nt, Homo sapiens
  misc_RNA (1)...(19): siRNA sense strand
ccaauacaacacugaugug

SEQ ID NO: 495017 - RNA, 19 nt, Homo sapiens
  misc_RNA (1)...(19): siRNA sense strand
ugaugaacaagaacauaga

SEQ ID NO: 495018 - RNA, 19 nt, Homo sapiens
  misc_RNA (1)...(19): siRNA sense strand
gcauuuaccccuaucuaga

SEQ ID NO: 495019 - RNA, 19 nt, Homo sapiens
  misc_RNA (1)...(19): siRNA sense strand
aaucuaugguuggaucuuc

SEQ ID NO: 495020 - RNA, 19 nt, Homo sapiens
  misc_RNA (1)...(19): siRNA sense strand
gugauauuaccaaacagaa

SEQ ID NO: 495021 - RNA, 19 nt, Homo sapiens
  misc_RNA (1)...(19): siRNA sense strand
gaugugguguuugauucuc

SEQ ID NO: 495022 - RNA, 19 nt, Homo sapiens
  misc_RNA (1)...(19): siRNA sense strand
auaugagcaugcggugaua

SEQ ID NO: 495023 - RNA, 19 nt, Homo sapiens
  misc_RNA (1)...(19): siRNA sense strand
acaagaagccaugcaaugc

SEQ ID NO: 495024 - RNA, 19 nt, Homo sapiens
  misc_RNA (1)...(19): siRNA sense strand
gaagcagggugcacauauc

SEQ ID NO: 495025 - RNA, 19 nt, Homo sapiens
  misc_RNA (1)...(19): siRNA sense strand
gcggugauauuaccaaaca

SEQ ID NO: 495026 - RNA, 19 nt, Homo sapiens
  misc_RNA (1)...(19): siRNA sense strand
gcagggugcacauaucauu

SEQ ID NO: 495027 - RNA, 19 nt, Homo sapiens
  misc_RNA (1)...(19): siRNA sense strand
gauggaaucuaugguugga

SEQ ID NO: 495028 - RNA, 19 nt, Homo sapiens
  misc_RNA (1)...(19): siRNA sense strand
gauauuaccaaacagaaca

SEQ ID NO: 495029 - RNA, 19 nt, Homo sapiens
  misc_RNA (1)...(19): siRNA sense strand
aagcuuugcuccugaugaa

SEQ ID NO: 495030 - RNA, 19 nt, Homo sapiens
  misc_RNA (1)...(19): siRNA sense strand
gcacuggacacuuuuauug

SEQ ID NO: 495031 - RNA, 19 nt, Homo sapiens
  misc_RNA (1)...(19): siRNA sense strand
gaagcuuugcuccugauga

SEQ ID NO: 495032 - RNA, 19 nt, Homo sapiens
  misc_RNA (1)...(19): siRNA sense strand
cgaagcagggugcacauau

SEQ ID NO: 495033 - RNA, 19 nt, Homo sapiens
  misc_RNA (1)...(19): siRNA sense strand
uuaccaaacagaacagaaa

SEQ ID NO: 495034 - RNA, 19 nt, Homo sapiens
  misc_RNA (1)...(19): siRNA sense strand
uuggugcacuggacacuuu

SEQ ID NO: 495035 - RNA, 19 nt, Homo sapiens
  misc_RNA (1)...(19): siRNA sense strand
ggugauauuaccaaacaga

SEQ ID NO: 495036 - RNA, 19 nt, Homo sapiens
  misc_RNA (1)...(19): siRNA sense strand
ugagcaugcggugauauua

SEQ ID NO: 495037 - RNA, 19 nt, Homo sapiens
  misc_RNA (1)...(19): siRNA sense strand
gcgaagcagggugcacaua

SEQ ID NO: 495038 - RNA, 19 nt, Homo sapiens
  misc_RNA (1)...(19): siRNA sense strand
gagcaugcggugauauuac

SEQ ID NO: 495039 - RNA, 19 nt, Homo sapiens
  misc_RNA (1)...(19): siRNA sense strand
gaugaacaagaacauagau

SEQ ID NO: 495040 - RNA, 19 nt, Homo sapiens
  misc_RNA (1)...(19): siRNA sense strand
ggagagcauuuaccccuau

SEQ ID NO: 495041 - RNA, 19 nt, Homo sapiens
  misc_RNA (1)...(19): siRNA sense strand
ucaccagggagagcauuua

SEQ ID NO: 495042 - RNA, 19 nt, Homo sapiens
  misc_RNA (1)...(19): siRNA sense strand
uauaugagcaugcggugau

SEQ ID NO: 495043 - RNA, 19 nt, Homo sapiens
  misc_RNA (1)...(19): siRNA sense strand
ugaugaacaagaacauaga

SEQ ID NO: 495044 - RNA, 19 nt, Homo sapiens
  misc_RNA (1)...(19): siRNA sense strand
gcauuuaccccuaucuaga

SEQ ID NO: 495045 - RNA, 19 nt, Homo sapiens
  misc_RNA (1)...(19): siRNA sense strand
aaucuaugguuggaucuuc

SEQ ID NO: 495046 - RNA, 19 nt, Homo sapiens
  misc_RNA (1)...(19): siRNA sense strand
gugauauuaccaaacagaa

SEQ ID NO: 495047 - RNA, 19 nt, Homo sapiens
  misc_RNA (1)...(19): siRNA sense strand
auaugagcaugcggugaua

SEQ ID NO: 495048 - RNA, 19 nt, Homo sapiens
  misc_RNA (1)...(19): siRNA sense strand
ggacaccgccugugauuug

SEQ ID NO: 495049 - RNA, 19 nt, Homo sapiens
  misc_RNA (1)...(19): siRNA sense strand
gccaggagacugcuacuua

SEQ ID NO: 495050 - RNA, 19 nt, Homo sapiens
  misc_RNA (1)...(19): siRNA sense strand
uaacaucgaggauaaugaa

SEQ ID NO: 495051 - RNA, 19 nt, Homo sapiens
  misc_RNA (1)...(19): siRNA sense strand
agacuuugcuggaguuuca

SEQ ID NO: 495052 - RNA, 19 nt, Homo sapiens
  misc_RNA (1)...(19): siRNA sense strand
agccacaaaucuucaauaa

SEQ ID NO: 495053 - RNA, 19 nt, Homo sapiens
  misc_RNA (1)...(19): siRNA sense strand
ugaaagaccgaacugguuu

SEQ ID NO: 495054 - RNA, 19 nt, Homo sapiens
  misc_RNA (1)...(19): siRNA sense strand
gaaccugcccuugcacuug

SEQ ID NO: 495055 - RNA, 19 nt, Homo sapiens
  misc_RNA (1)...(19): siRNA sense strand
ccaggagacugcuacuuag

SEQ ID NO: 495056 - RNA, 19 nt, Homo sapiens
  misc_RNA (1)...(19): siRNA sense strand
gagccacaaaucuucaaua

SEQ ID NO: 495057 - RNA, 19 nt, Homo sapiens
  misc_RNA (1)...(19): siRNA sense strand
gaacugguuucgcugucau

SEQ ID NO: 495058 - RNA, 19 nt, Homo sapiens
  misc_RNA (1)...(19): siRNA sense strand
ggaggaaugagguuguuag

SEQ ID NO: 495059 - RNA, 19 nt, Homo sapiens
  misc_RNA (1)...(19): siRNA sense strand
gaccuagagcaacuuacua

SEQ ID NO: 495060 - RNA, 19 nt, Homo sapiens
  misc_RNA (1)...(19): siRNA sense strand
ggaccuagagcaacuuacu

SEQ ID NO: 495061 - RNA, 19 nt, Homo sapiens
  misc_RNA (1)...(19): siRNA sense strand
gaguuucaagcugauguua

SEQ ID NO: 495062 - RNA, 19 nt, Homo sapiens
  misc_RNA (1)...(19): siRNA sense strand
aaacgucaaugcacaaaau

SEQ ID NO: 495063 - RNA, 19 nt, Homo sapiens
  misc_RNA (1)...(19): siRNA sense strand
guuucaagcugauguuaac

SEQ ID NO: 495064 - RNA, 19 nt, Homo sapiens
  misc_RNA (1)...(19): siRNA sense strand
guaaacgucaaugcacaaa

SEQ ID NO: 495065 - RNA, 19 nt, Homo sapiens
  misc_RNA (1)...(19): siRNA sense strand
gaagcacacggccagcaau

SEQ ID NO: 495066 - RNA, 19 nt, Homo sapiens
  misc_RNA (1)...(19): siRNA sense strand
guuaugaaacuuggaaauc

SEQ ID NO: 495067 - RNA, 19 nt, Homo sapiens
  misc_RNA (1)...(19): siRNA sense strand
gggaggaaugagguuguua

SEQ ID NO: 495068 - RNA, 19 nt, Homo sapiens
  misc_RNA (1)...(19): siRNA sense strand
ggaaccugcccuugcacuu

SEQ ID NO: 495069 - RNA, 19 nt, Homo sapiens
  misc_RNA (1)...(19): siRNA sense strand
ggaguuucaagcugauguu

SEQ ID NO: 495070 - RNA, 19 nt, Homo sapiens
  misc_RNA (1)...(19): siRNA sense strand
uaauguaaacgucaaugca

SEQ ID NO: 495071 - RNA, 19 nt, Homo sapiens
  misc_RNA (1)...(19): siRNA sense strand
uugaaagaccgaacugguu

SEQ ID NO: 495072 - RNA, 19 nt, Homo sapiens
  misc_RNA (1)...(19): siRNA sense strand
uacagacuuugcuggaguu

SEQ ID NO: 495073 - RNA, 19 nt, Homo sapiens
  misc_RNA (1)...(19): siRNA sense strand
ccuggacacuuuacagacu

SEQ ID NO: 495074 - RNA, 19 nt, Homo sapiens
  misc_RNA (1)...(19): siRNA sense strand
guuaacaucgaggauaaug

SEQ ID NO: 495075 - RNA, 19 nt, Homo sapiens
  misc_RNA (1)...(19): siRNA sense strand
uggacacuuuacagacuuu

SEQ ID NO: 495076 - RNA, 19 nt, Homo sapiens
  misc_RNA (1)...(19): siRNA sense strand
caggagacugcuacuuaga

SEQ ID NO: 495077 - RNA, 19 nt, Homo sapiens
  misc_RNA (1)...(19): siRNA sense strand
gguuaugaaacuuggaaau

SEQ ID NO: 495078 - RNA, 19 nt, Homo sapiens
  misc_RNA (1)...(19): siRNA sense strand
ggacaccgccugugauuug

SEQ ID NO: 495079 - RNA, 19 nt, Homo sapiens
  misc_RNA (1)...(19): siRNA sense strand
gccaggagacugcuacuua

SEQ ID NO: 495080 - RNA, 19 nt, Homo sapiens
  misc_RNA (1)...(19): siRNA sense strand
uaacaucgaggauaaugaa

SEQ ID NO: 495081 - RNA, 19 nt, Homo sapiens
  misc_RNA (1)...(19): siRNA sense strand
agacuuugcuggaguuuca

SEQ ID NO: 495082 - RNA, 19 nt, Homo sapiens
  misc_RNA (1)...(19): siRNA sense strand
agccacaaaucuucaauaa

SEQ ID NO: 495083 - RNA, 19 nt, Homo sapiens
  misc_RNA (1)...(19): siRNA sense strand
ugaaagaccgaacugguuu

SEQ ID NO: 495084 - RNA, 19 nt, Homo sapiens
  misc_RNA (1)...(19): siRNA sense strand
gaaccugcccuugcacuug

SEQ ID NO: 495085 - RNA, 19 nt, Homo sapiens
  misc_RNA (1)...(19): siRNA sense strand
ccaggagacugcuacuuag

SEQ ID NO: 495086 - RNA, 19 nt, Homo sapiens
  misc_RNA (1)...(19): siRNA sense strand
gagccacaaaucuucaaua

SEQ ID NO: 495087 - RNA, 19 nt, Homo sapiens
  misc_RNA (1)...(19): siRNA sense strand
gaacugguuucgcugucau

SEQ ID NO: 495088 - RNA, 19 nt, Homo sapiens
  misc_RNA (1)...(19): siRNA sense strand
ggaggaaugagguuguuag

SEQ ID NO: 495089 - RNA, 19 nt, Homo sapiens
  misc_RNA (1)...(19): siRNA sense strand
gaccuagagcaacuuacua

SEQ ID NO: 495090 - RNA, 19 nt, Homo sapiens
  misc_RNA (1)...(19): siRNA sense strand
ggaccuagagcaacuuacu

SEQ ID NO: 495091 - RNA, 19 nt, Homo sapiens
  misc_RNA (1)...(19): siRNA sense strand
gaguuucaagcugauguua

SEQ ID NO: 495092 - RNA, 19 nt, Homo sapiens
  misc_RNA (1)...(19): siRNA sense strand
aaacgucaaugcacaaaau

SEQ ID NO: 495093 - RNA, 19 nt, Homo sapiens
  misc_RNA (1)...(19): siRNA sense strand
guuucaagcugauguuaac

SEQ ID NO: 495094 - RNA, 19 nt, Homo sapiens
  misc_RNA (1)...(19): siRNA sense strand
guaaacgucaaugcacaaa

SEQ ID NO: 495095 - RNA, 19 nt, Homo sapiens
  misc_RNA (1)...(19): siRNA sense strand
gaagcacacggccagcaau

SEQ ID NO: 495096 - RNA, 19 nt, Homo sapiens
  misc_RNA (1)...(19): siRNA sense strand
guuaugaaacuuggaaauc

SEQ ID NO: 495097 - RNA, 19 nt, Homo sapiens
  misc_RNA (1)...(19): siRNA sense strand
gggaggaaugagguuguua

SEQ ID NO: 495098 - RNA, 19 nt, Homo sapiens
  misc_RNA (1)...(19): siRNA sense strand
ggaaccugcccuugcacuu

SEQ ID NO: 495099 - RNA, 19 nt, Homo sapiens
  misc_RNA (1)...(19): siRNA sense strand
ggaguuucaagcugauguu

SEQ ID NO: 495100 - RNA, 19 nt, Homo sapiens
  misc_RNA (1)...(19): siRNA sense strand
uaauguaaacgucaaugca

SEQ ID NO: 495101 - RNA, 19 nt, Homo sapiens
  misc_RNA (1)...(19): siRNA sense strand
uugaaagaccgaacugguu

SEQ ID NO: 495102 - RNA, 19 nt, Homo sapiens
  misc_RNA (1)...(19): siRNA sense strand
uacagacuuugcuggaguu

SEQ ID NO: 495103 - RNA, 19 nt, Homo sapiens
  misc_RNA (1)...(19): siRNA sense strand
ccuggacacuuuacagacu

SEQ ID NO: 495104 - RNA, 19 nt, Homo sapiens
  misc_RNA (1)...(19): siRNA sense strand
guuaacaucgaggauaaug

SEQ ID NO: 495105 - RNA, 19 nt, Homo sapiens
  misc_RNA (1)...(19): siRNA sense strand
uggacacuuuacagacuuu

SEQ ID NO: 495106 - RNA, 19 nt, Homo sapiens
  misc_RNA (1)...(19): siRNA sense strand
caggagacugcuacuuaga

SEQ ID NO: 495107 - RNA, 19 nt, Homo sapiens
  misc_RNA (1)...(19): siRNA sense strand
gguuaugaaacuuggaaau

SEQ ID NO: 495108 - RNA, 19 nt, Homo sapiens
  misc_RNA (1)...(19): siRNA sense strand
ugacaaagcuaacgaauuu

SEQ ID NO: 495109 - RNA, 19 nt, Homo sapiens
  misc_RNA (1)...(19): siRNA sense strand
gaacgagcuugacaaauuu

SEQ ID NO: 495110 - RNA, 19 nt, Homo sapiens
  misc_RNA (1)...(19): siRNA sense strand
caucuugccuggauaaaua

SEQ ID NO: 495111 - RNA, 19 nt, Homo sapiens
  misc_RNA (1)...(19): siRNA sense strand
agaacgagcuugacaaauu

SEQ ID NO: 495112 - RNA, 19 nt, Homo sapiens
  misc_RNA (1)...(19): siRNA sense strand
cuacagaaauuguugcuuu

SEQ ID NO: 495113 - RNA, 19 nt, Homo sapiens
  misc_RNA (1)...(19): siRNA sense strand
gaacaucgcacucuuguca

SEQ ID NO: 495114 - RNA, 19 nt, Homo sapiens
  misc_RNA (1)...(19): siRNA sense strand
gaagaacgagcuugacaaa

SEQ ID NO: 495115 - RNA, 19 nt, Homo sapiens
  misc_RNA (1)...(19): siRNA sense strand
ggaaauauuuggugcuuuu

SEQ ID NO: 495116 - RNA, 19 nt, Homo sapiens
  misc_RNA (1)...(19): siRNA sense strand
guacagccguugucaaugg

SEQ ID NO: 495117 - RNA, 19 nt, Homo sapiens
  misc_RNA (1)...(19): siRNA sense strand
agacuacggugugcuguua

SEQ ID NO: 495118 - RNA, 19 nt, Homo sapiens
  misc_RNA (1)...(19): siRNA sense strand
gagcuugacaaauuuauug

SEQ ID NO: 495119 - RNA, 19 nt, Homo sapiens
  misc_RNA (1)...(19): siRNA sense strand
ccuaagccuugaugacuuu

SEQ ID NO: 495120 - RNA, 19 nt, Homo sapiens
  misc_RNA (1)...(19): siRNA sense strand
ugaaggcguuccaguaugu

SEQ ID NO: 495121 - RNA, 19 nt, Homo sapiens
  misc_RNA (1)...(19): siRNA sense strand
ggauaaauacaccaaggaa

SEQ ID NO: 495122 - RNA, 19 nt, Homo sapiens
  misc_RNA (1)...(19): siRNA sense strand
ccaauggagucaucaagca

SEQ ID NO: 495123 - RNA, 19 nt, Homo sapiens
  misc_RNA (1)...(19): siRNA sense strand
ggaagaacgagcuugacaa

SEQ ID NO: 495124 - RNA, 19 nt, Homo sapiens
  misc_RNA (1)...(19): siRNA sense strand
agaaacacauggagaaguc

SEQ ID NO: 495125 - RNA, 19 nt, Homo sapiens
  misc_RNA (1)...(19): siRNA sense strand
ggugaaggcguuccaguau

SEQ ID NO: 495126 - RNA, 19 nt, Homo sapiens
  misc_RNA (1)...(19): siRNA sense strand
ccucaggccugcugcaugu

SEQ ID NO: 495127 - RNA, 19 nt, Homo sapiens
  misc_RNA (1)...(19): siRNA sense strand
gcacucuugucagacuuaa

SEQ ID NO: 495128 - RNA, 19 nt, Homo sapiens
  misc_RNA (1)...(19): siRNA sense strand
ggauuucaccuuugugugu

SEQ ID NO: 495129 - RNA, 19 nt, Homo sapiens
  misc_RNA (1)...(19): siRNA sense strand
caaggaagaauggugguuu

SEQ ID NO: 495130 - RNA, 19 nt, Homo sapiens
  misc_RNA (1)...(19): siRNA sense strand
auaaauacaccaaggaaga

SEQ ID NO: 495131 - RNA, 19 nt, Homo sapiens
  misc_RNA (1)...(19): siRNA sense strand
uaaauacaccaaggaagaa

SEQ ID NO: 495132 - RNA, 19 nt, Homo sapiens
  misc_RNA (1)...(19): siRNA sense strand
gugaaggcguuccaguaug

SEQ ID NO: 495133 - RNA, 19 nt, Homo sapiens
  misc_RNA (1)...(19): siRNA sense strand
gggaaauauuuggugcuuu

SEQ ID NO: 495134 - RNA, 19 nt, Homo sapiens
  misc_RNA (1)...(19): siRNA sense strand
uucagaagguaaaucagua

SEQ ID NO: 495135 - RNA, 19 nt, Homo sapiens
  misc_RNA (1)...(19): siRNA sense strand
gcagauuucccgagacuac

SEQ ID NO: 495136 - RNA, 19 nt, Homo sapiens
  misc_RNA (1)...(19): siRNA sense strand
ggguacagccguugucaau

SEQ ID NO: 495137 - RNA, 19 nt, Homo sapiens
  misc_RNA (1)...(19): siRNA sense strand
aaggaagaauggugguuug

SEQ ID NO: 495138 - RNA, 19 nt, Homo sapiens
  misc_RNA (1)...(19): siRNA sense strand
guuccaguauguagaaaca

SEQ ID NO: 495139 - RNA, 19 nt, Homo sapiens
  misc_RNA (1)...(19): siRNA sense strand
guucuggucuugcacuaag

SEQ ID NO: 495140 - RNA, 19 nt, Homo sapiens
  misc_RNA (1)...(19): siRNA sense strand
gugacaaagcuaacgaauu

SEQ ID NO: 495141 - RNA, 19 nt, Homo sapiens
  misc_RNA (1)...(19): siRNA sense strand
gaggucucuucauaauuga

SEQ ID NO: 495142 - RNA, 19 nt, Homo sapiens
  misc_RNA (1)...(19): siRNA sense strand
ucaauggagaguucaaaga

SEQ ID NO: 495143 - RNA, 19 nt, Homo sapiens
  misc_RNA (1)...(19): siRNA sense strand
ggccgaagcguggaagaaa

SEQ ID NO: 495144 - RNA, 19 nt, Homo sapiens
  misc_RNA (1)...(19): siRNA sense strand
gaacuggacaccggauucu

SEQ ID NO: 495145 - RNA, 19 nt, Homo sapiens
  misc_RNA (1)...(19): siRNA sense strand
ggugugcuguuagaagguu

SEQ ID NO: 495146 - RNA, 19 nt, Homo sapiens
  misc_RNA (1)...(19): siRNA sense strand
uguagaaacacauggagaa

SEQ ID NO: 495147 - RNA, 19 nt, Homo sapiens
  misc_RNA (1)...(19): siRNA sense strand
uguguguccuacagaaauu

SEQ ID NO: 495148 - RNA, 19 nt, Homo sapiens
  misc_RNA (1)...(19): siRNA sense strand
aagaguacuuucagaaggu

SEQ ID NO: 495149 - RNA, 19 nt, Homo sapiens
  misc_RNA (1)...(19): siRNA sense strand
acaaagcuaacgaauuuca

SEQ ID NO: 495150 - RNA, 19 nt, Homo sapiens
  misc_RNA (1)...(19): siRNA sense strand
ggagaguucaaagaccuaa

SEQ ID NO: 495151 - RNA, 19 nt, Homo sapiens
  misc_RNA (1)...(19): siRNA sense strand
agaguacuuucagaaggua

SEQ ID NO: 495152 - RNA, 19 nt, Homo sapiens
  misc_RNA (1)...(19): siRNA sense strand
cagcugcuuccaaagagua

SEQ ID NO: 495153 - RNA, 19 nt, Homo sapiens
  misc_RNA (1)...(19): siRNA sense strand
gaaggcguuccaguaugua

SEQ ID NO: 495154 - RNA, 19 nt, Homo sapiens
  misc_RNA (1)...(19): siRNA sense strand
gaccuaagccuugaugacu

SEQ ID NO: 495155 - RNA, 19 nt, Homo sapiens
  misc_RNA (1)...(19): siRNA sense strand
acaucgcacucuugucaga

SEQ ID NO: 495156 - RNA, 19 nt, Homo sapiens
  misc_RNA (1)...(19): siRNA sense strand
aaguccagcugcuuccaaa

SEQ ID NO: 495157 - RNA, 19 nt, Homo sapiens
  misc_RNA (1)...(19): siRNA sense strand
uccuuuggauuucaccuuu

SEQ ID NO: 495158 - RNA, 19 nt, Homo sapiens
  misc_RNA (1)...(19): siRNA sense strand
guccagcugcuuccaaaga

SEQ ID NO: 495159 - RNA, 19 nt, Homo sapiens
  misc_RNA (1)...(19): siRNA sense strand
caugaacaucgcacucuug

SEQ ID NO: 495160 - RNA, 19 nt, Homo sapiens
  misc_RNA (1)...(19): siRNA sense strand
acaugaacaucgcacucuu

SEQ ID NO: 495161 - RNA, 19 nt, Homo sapiens
  misc_RNA (1)...(19): siRNA sense strand
caauggagaguucaaagac

SEQ ID NO: 495162 - RNA, 19 nt, Homo sapiens
  misc_RNA (1)...(19): siRNA sense strand
gagacuacggugugcuguu

SEQ ID NO: 495163 - RNA, 19 nt, Homo sapiens
  misc_RNA (1)...(19): siRNA sense strand
aagcagauuucccgagacu

SEQ ID NO: 495164 - RNA, 19 nt, Homo sapiens
  misc_RNA (1)...(19): siRNA sense strand
cggauucuccuacgaucaa

SEQ ID NO: 495165 - RNA, 19 nt, Homo sapiens
  misc_RNA (1)...(19): siRNA sense strand
gaaauuguugcuuuuagug

SEQ ID NO: 495166 - RNA, 19 nt, Homo sapiens
  misc_RNA (1)...(19): siRNA sense strand
uuagccaucuugccuggau

SEQ ID NO: 495167 - RNA, 19 nt, Homo sapiens
  misc_RNA (1)...(19): siRNA sense strand
uggugaaggcguuccagua

SEQ ID NO: 495168 - RNA, 19 nt, Homo sapiens
  misc_RNA (1)...(19): siRNA sense strand
auggagucaucaagcauuu

SEQ ID NO: 495169 - RNA, 19 nt, Homo sapiens
  misc_RNA (1)...(19): siRNA sense strand
gccgaagcguggaagaaac

SEQ ID NO: 495170 - RNA, 19 nt, Homo sapiens
  misc_RNA (1)...(19): siRNA sense strand
cguugucaauggagaguuc

SEQ ID NO: 495171 - RNA, 19 nt, Homo sapiens
  misc_RNA (1)...(19): siRNA sense strand
cgaacuggacaccggauuc

SEQ ID NO: 495172 - RNA, 19 nt, Homo sapiens
  misc_RNA (1)...(19): siRNA sense strand
guagaaacacauggagaag

SEQ ID NO: 495173 - RNA, 19 nt, Homo sapiens
  misc_RNA (1)...(19): siRNA sense strand
cgagcuugacaaauuuauu

SEQ ID NO: 495174 - RNA, 19 nt, Homo sapiens
  misc_RNA (1)...(19): siRNA sense strand
ugacaaagcuaacgaauuu

SEQ ID NO: 495175 - RNA, 19 nt, Homo sapiens
  misc_RNA (1)...(19): siRNA sense strand
gaacgagcuugacaaauuu

SEQ ID NO: 495176 - RNA, 19 nt, Homo sapiens
  misc_RNA (1)...(19): siRNA sense strand
caucuugccuggauaaaua

SEQ ID NO: 495177 - RNA, 19 nt, Homo sapiens
  misc_RNA (1)...(19): siRNA sense strand
agaacgagcuugacaaauu

SEQ ID NO: 495178 - RNA, 19 nt, Homo sapiens
  misc_RNA (1)...(19): siRNA sense strand
cuacagaaauuguugcuuu

SEQ ID NO: 495179 - RNA, 19 nt, Homo sapiens
  misc_RNA (1)...(19): siRNA sense strand
gaacaucgcacucuuguca

SEQ ID NO: 495180 - RNA, 19 nt, Homo sapiens
  misc_RNA (1)...(19): siRNA sense strand
gaagaacgagcuugacaaa

SEQ ID NO: 495181 - RNA, 19 nt, Homo sapiens
  misc_RNA (1)...(19): siRNA sense strand
ggaaauauuuggugcuuuu

SEQ ID NO: 495182 - RNA, 19 nt, Homo sapiens
  misc_RNA (1)...(19): siRNA sense strand
guacagccguugucaaugg

SEQ ID NO: 495183 - RNA, 19 nt, Homo sapiens
  misc_RNA (1)...(19): siRNA sense strand
agacuacggugugcuguua

SEQ ID NO: 495184 - RNA, 19 nt, Homo sapiens
  misc_RNA (1)...(19): siRNA sense strand
gagcuugacaaauuuauug

SEQ ID NO: 495185 - RNA, 19 nt, Homo sapiens
  misc_RNA (1)...(19): siRNA sense strand
ccuaagccuugaugacuuu

SEQ ID NO: 495186 - RNA, 19 nt, Homo sapiens
  misc_RNA (1)...(19): siRNA sense strand
ugaaggcguuccaguaugu

SEQ ID NO: 495187 - RNA, 19 nt, Homo sapiens
  misc_RNA (1)...(19): siRNA sense strand
ggauaaauacaccaaggaa

SEQ ID NO: 495188 - RNA, 19 nt, Homo sapiens
  misc_RNA (1)...(19): siRNA sense strand
ccaauggagucaucaagca

SEQ ID NO: 495189 - RNA, 19 nt, Homo sapiens
  misc_RNA (1)...(19): siRNA sense strand
ggaagaacgagcuugacaa

SEQ ID NO: 495190 - RNA, 19 nt, Homo sapiens
  misc_RNA (1)...(19): siRNA sense strand
agaaacacauggagaaguc

SEQ ID NO: 495191 - RNA, 19 nt, Homo sapiens
  misc_RNA (1)...(19): siRNA sense strand
ggugaaggcguuccaguau

SEQ ID NO: 495192 - RNA, 19 nt, Homo sapiens
  misc_RNA (1)...(19): siRNA sense strand
ccucaggccugcugcaugu

SEQ ID NO: 495193 - RNA, 19 nt, Homo sapiens
  misc_RNA (1)...(19): siRNA sense strand
gcacucuugucagacuuaa

SEQ ID NO: 495194 - RNA, 19 nt, Homo sapiens
  misc_RNA (1)...(19): siRNA sense strand
ggauuucaccuuugugugu

SEQ ID NO: 495195 - RNA, 19 nt, Homo sapiens
  misc_RNA (1)...(19): siRNA sense strand
caaggaagaauggugguuu

SEQ ID NO: 495196 - RNA, 19 nt, Homo sapiens
  misc_RNA (1)...(19): siRNA sense strand
auaaauacaccaaggaaga

SEQ ID NO: 495197 - RNA, 19 nt, Homo sapiens
  misc_RNA (1)...(19): siRNA sense strand
uaaauacaccaaggaagaa

SEQ ID NO: 495198 - RNA, 19 nt, Homo sapiens
  misc_RNA (1)...(19): siRNA sense strand
gugaaggcguuccaguaug

SEQ ID NO: 495199 - RNA, 19 nt, Homo sapiens
  misc_RNA (1)...(19): siRNA sense strand
gggaaauauuuggugcuuu

SEQ ID NO: 495200 - RNA, 19 nt, Homo sapiens
  misc_RNA (1)...(19): siRNA sense strand
uucagaagguaaaucagua

SEQ ID NO: 495201 - RNA, 19 nt, Homo sapiens
  misc_RNA (1)...(19): siRNA sense strand
gcagauuucccgagacuac

SEQ ID NO: 495202 - RNA, 19 nt, Homo sapiens
  misc_RNA (1)...(19): siRNA sense strand
ggguacagccguugucaau

SEQ ID NO: 495203 - RNA, 19 nt, Homo sapiens
  misc_RNA (1)...(19): siRNA sense strand
aaggaagaauggugguuug

SEQ ID NO: 495204 - RNA, 19 nt, Homo sapiens
  misc_RNA (1)...(19): siRNA sense strand
guuccaguauguagaaaca

SEQ ID NO: 495205 - RNA, 19 nt, Homo sapiens
  misc_RNA (1)...(19): siRNA sense strand
guucuggucuugcacuaag

SEQ ID NO: 495206 - RNA, 19 nt, Homo sapiens
  misc_RNA (1)...(19): siRNA sense strand
gugacaaagcuaacgaauu

SEQ ID NO: 495207 - RNA, 19 nt, Homo sapiens
  misc_RNA (1)...(19): siRNA sense strand
gaggucucuucauaauuga

SEQ ID NO: 495208 - RNA, 19 nt, Homo sapiens
  misc_RNA (1)...(19): siRNA sense strand
ucaauggagaguucaaaga

SEQ ID NO: 495209 - RNA, 19 nt, Homo sapiens
  misc_RNA (1)...(19): siRNA sense strand
ggccgaagcguggaagaaa

SEQ ID NO: 495210 - RNA, 19 nt, Homo sapiens
  misc_RNA (1)...(19): siRNA sense strand
gaacuggacaccggauucu

SEQ ID NO: 495211 - RNA, 19 nt, Homo sapiens
  misc_RNA (1)...(19): siRNA sense strand
ggugugcuguuagaagguu

SEQ ID NO: 495212 - RNA, 19 nt, Homo sapiens
  misc_RNA (1)...(19): siRNA sense strand
uguagaaacacauggagaa

SEQ ID NO: 495213 - RNA, 19 nt, Homo sapiens
  misc_RNA (1)...(19): siRNA sense strand
uguguguccuacagaaauu

SEQ ID NO: 495214 - RNA, 19 nt, Homo sapiens
  misc_RNA (1)...(19): siRNA sense strand
aagaguacuuucagaaggu

SEQ ID NO: 495215 - RNA, 19 nt, Homo sapiens
  misc_RNA (1)...(19): siRNA sense strand
acaaagcuaacgaauuuca

SEQ ID NO: 495216 - RNA, 19 nt, Homo sapiens
  misc_RNA (1)...(19): siRNA sense strand
ggagaguucaaagaccuaa

SEQ ID NO: 495217 - RNA, 19 nt, Homo sapiens
  misc_RNA (1)...(19): siRNA sense strand
agaguacuuucagaaggua

SEQ ID NO: 495218 - RNA, 19 nt, Homo sapiens
  misc_RNA (1)...(19): siRNA sense strand
cagcugcuuccaaagagua

SEQ ID NO: 495219 - RNA, 19 nt, Homo sapiens
  misc_RNA (1)...(19): siRNA sense strand
gaaggcguuccaguaugua

SEQ ID NO: 495220 - RNA, 19 nt, Homo sapiens
  misc_RNA (1)...(19): siRNA sense strand
gaccuaagccuugaugacu

SEQ ID NO: 495221 - RNA, 19 nt, Homo sapiens
  misc_RNA (1)...(19): siRNA sense strand
acaucgcacucuugucaga

SEQ ID NO: 495222 - RNA, 19 nt, Homo sapiens
  misc_RNA (1)...(19): siRNA sense strand
aaguccagcugcuuccaaa

SEQ ID NO: 495223 - RNA, 19 nt, Homo sapiens
  misc_RNA (1)...(19): siRNA sense strand
uccuuuggauuucaccuuu

SEQ ID NO: 495224 - RNA, 19 nt, Homo sapiens
  misc_RNA (1)...(19): siRNA sense strand
guccagcugcuuccaaaga

SEQ ID NO: 495225 - RNA, 19 nt, Homo sapiens
  misc_RNA (1)...(19): siRNA sense strand
caugaacaucgcacucuug

SEQ ID NO: 495226 - RNA, 19 nt, Homo sapiens
  misc_RNA (1)...(19): siRNA sense strand
acaugaacaucgcacucuu

SEQ ID NO: 495227 - RNA, 19 nt, Homo sapiens
  misc_RNA (1)...(19): siRNA sense strand
caauggagaguucaaagac

SEQ ID NO: 495228 - RNA, 19 nt, Homo sapiens
  misc_RNA (1)...(19): siRNA sense strand
gagacuacggugugcuguu

SEQ ID NO: 495229 - RNA, 19 nt, Homo sapiens
  misc_RNA (1)...(19): siRNA sense strand
aagcagauuucccgagacu

SEQ ID NO: 495230 - RNA, 19 nt, Homo sapiens
  misc_RNA (1)...(19): siRNA sense strand
cggauucuccuacgaucaa

SEQ ID NO: 495231 - RNA, 19 nt, Homo sapiens
  misc_RNA (1)...(19): siRNA sense strand
gaaauuguugcuuuuagug

SEQ ID NO: 495232 - RNA, 19 nt, Homo sapiens
  misc_RNA (1)...(19): siRNA sense strand
uuagccaucuugccuggau

SEQ ID NO: 495233 - RNA, 19 nt, Homo sapiens
  misc_RNA (1)...(19): siRNA sense strand
uggugaaggcguuccagua

SEQ ID NO: 495234 - RNA, 19 nt, Homo sapiens
  misc_RNA (1)...(19): siRNA sense strand
auggagucaucaagcauuu

SEQ ID NO: 495235 - RNA, 19 nt, Homo sapiens
  misc_RNA (1)...(19): siRNA sense strand
gccgaagcguggaagaaac

SEQ ID NO: 495236 - RNA, 19 nt, Homo sapiens
  misc_RNA (1)...(19): siRNA sense strand
cguugucaauggagaguuc

SEQ ID NO: 495237 - RNA, 19 nt, Homo sapiens
  misc_RNA (1)...(19): siRNA sense strand
cgaacuggacaccggauuc

SEQ ID NO: 495238 - RNA, 19 nt, Homo sapiens
  misc_RNA (1)...(19): siRNA sense strand
guagaaacacauggagaag

SEQ ID NO: 495239 - RNA, 19 nt, Homo sapiens
  misc_RNA (1)...(19): siRNA sense strand
cgagcuugacaaauuuauu

SEQ ID NO: 495240 - RNA, 19 nt, Homo sapiens
  misc_RNA (1)...(19): siRNA sense strand
ggacagacguugaaagaua

SEQ ID NO: 495241 - RNA, 19 nt, Homo sapiens
  misc_RNA (1)...(19): siRNA sense strand
gcacagacguccagacaga

SEQ ID NO: 495242 - RNA, 19 nt, Homo sapiens
  misc_RNA (1)...(19): siRNA sense strand
gaggacagacguugaaaga

SEQ ID NO: 495243 - RNA, 19 nt, Homo sapiens
  misc_RNA (1)...(19): siRNA sense strand
caaccuggccugcugauga

SEQ ID NO: 495244 - RNA, 19 nt, Homo sapiens
  misc_RNA (1)...(19): siRNA sense strand
caacuaucauggacauuca

SEQ ID NO: 495245 - RNA, 19 nt, Homo sapiens
  misc_RNA (1)...(19): siRNA sense strand
gaacacacccuccggaaac

SEQ ID NO: 495246 - RNA, 19 nt, Homo sapiens
  misc_RNA (1)...(19): siRNA sense strand
ucagcagacucaacuauca

SEQ ID NO: 495247 - RNA, 19 nt, Homo sapiens
  misc_RNA (1)...(19): siRNA sense strand
ggaugggccucuagugaca

SEQ ID NO: 495248 - RNA, 19 nt, Homo sapiens
  misc_RNA (1)...(19): siRNA sense strand
caccaucguuggccugauu

SEQ ID NO: 495249 - RNA, 19 nt, Homo sapiens
  misc_RNA (1)...(19): siRNA sense strand
cagaugcagucuacacaga

SEQ ID NO: 495250 - RNA, 19 nt, Homo sapiens
  misc_RNA (1)...(19): siRNA sense strand
aaagauaccacguccaguu

SEQ ID NO: 495251 - RNA, 19 nt, Homo sapiens
  misc_RNA (1)...(19): siRNA sense strand
gacagacguugaaagauac

SEQ ID NO: 495252 - RNA, 19 nt, Homo sapiens
  misc_RNA (1)...(19): siRNA sense strand
gauaccacguccaguucuu

SEQ ID NO: 495253 - RNA, 19 nt, Homo sapiens
  misc_RNA (1)...(19): siRNA sense strand
ugacagauccagagacaca

SEQ ID NO: 495254 - RNA, 19 nt, Homo sapiens
  misc_RNA (1)...(19): siRNA sense strand
gaacggaugggccucuagu

SEQ ID NO: 495255 - RNA, 19 nt, Homo sapiens
  misc_RNA (1)...(19): siRNA sense strand
ccagaggacagacguugaa

SEQ ID NO: 495256 - RNA, 19 nt, Homo sapiens
  misc_RNA (1)...(19): siRNA sense strand
ggucgccugugucuucuca

SEQ ID NO: 495257 - RNA, 19 nt, Homo sapiens
  misc_RNA (1)...(19): siRNA sense strand
aaccuggccugcugaugaa

SEQ ID NO: 495258 - RNA, 19 nt, Homo sapiens
  misc_RNA (1)...(19): siRNA sense strand
aagcagcucaucccacuga

SEQ ID NO: 495259 - RNA, 19 nt, Homo sapiens
  misc_RNA (1)...(19): siRNA sense strand
ugaacacacccuccggaaa

SEQ ID NO: 495260 - RNA, 19 nt, Homo sapiens
  misc_RNA (1)...(19): siRNA sense strand
gaugcagucuacacagaac

SEQ ID NO: 495261 - RNA, 19 nt, Homo sapiens
  misc_RNA (1)...(19): siRNA sense strand
caucacaggcaucaucauc

SEQ ID NO: 495262 - RNA, 19 nt, Homo sapiens
  misc_RNA (1)...(19): siRNA sense strand
agugacagauccagagaca

SEQ ID NO: 495263 - RNA, 19 nt, Homo sapiens
  misc_RNA (1)...(19): siRNA sense strand
guucaucacaggcaucauc

SEQ ID NO: 495264 - RNA, 19 nt, Homo sapiens
  misc_RNA (1)...(19): siRNA sense strand
acaccacgacgcucucuga

SEQ ID NO: 495265 - RNA, 19 nt, Homo sapiens
  misc_RNA (1)...(19): siRNA sense strand
gaugaccccuucuucuaug

SEQ ID NO: 495266 - RNA, 19 nt, Homo sapiens
  misc_RNA (1)...(19): siRNA sense strand
ucaacuaucauggacauuc

SEQ ID NO: 495267 - RNA, 19 nt, Homo sapiens
  misc_RNA (1)...(19): siRNA sense strand
ucacaggcaucaucauccu

SEQ ID NO: 495268 - RNA, 19 nt, Homo sapiens
  misc_RNA (1)...(19): siRNA sense strand
gauccagagacacacaaga

SEQ ID NO: 495269 - RNA, 19 nt, Homo sapiens
  misc_RNA (1)...(19): siRNA sense strand
aggcagcugucccgguuau

SEQ ID NO: 495270 - RNA, 19 nt, Homo sapiens
  misc_RNA (1)...(19): siRNA sense strand
acucaacuaucauggacau

SEQ ID NO: 495271 - RNA, 19 nt, Homo sapiens
  misc_RNA (1)...(19): siRNA sense strand
aagcacagacguccagaca

SEQ ID NO: 495272 - RNA, 19 nt, Homo sapiens
  misc_RNA (1)...(19): siRNA sense strand
caagaucuccaaauaguua

SEQ ID NO: 495273 - RNA, 19 nt, Homo sapiens
  misc_RNA (1)...(19): siRNA sense strand
aguacaagaucuccaaaua

SEQ ID NO: 495274 - RNA, 19 nt, Homo sapiens
  misc_RNA (1)...(19): siRNA sense strand
gcauuuccguuaccaagaa

SEQ ID NO: 495275 - RNA, 19 nt, Homo sapiens
  misc_RNA (1)...(19): siRNA sense strand
gcagaaagaaccuggaaga

SEQ ID NO: 495276 - RNA, 19 nt, Homo sapiens
  misc_RNA (1)...(19): siRNA sense strand
caacaaauccagacuccuu

SEQ ID NO: 495277 - RNA, 19 nt, Homo sapiens
  misc_RNA (1)...(19): siRNA sense strand
uacaagaucuccaaauagu

SEQ ID NO: 495278 - RNA, 19 nt, Homo sapiens
  misc_RNA (1)...(19): siRNA sense strand
uggaagacuugcagaaaga

SEQ ID NO: 495279 - RNA, 19 nt, Homo sapiens
  misc_RNA (1)...(19): siRNA sense strand
guacaagaucuccaaauag

SEQ ID NO: 495280 - RNA, 19 nt, Homo sapiens
  misc_RNA (1)...(19): siRNA sense strand
aauccagacuccuucagua

SEQ ID NO: 495281 - RNA, 19 nt, Homo sapiens
  misc_RNA (1)...(19): siRNA sense strand
ccagacuccuucaguacaa

SEQ ID NO: 495282 - RNA, 19 nt, Homo sapiens
  misc_RNA (1)...(19): siRNA sense strand
guggaagacuugcagaaag

SEQ ID NO: 495283 - RNA, 19 nt, Homo sapiens
  misc_RNA (1)...(19): siRNA sense strand
aagagcagauccuggaguu

SEQ ID NO: 495284 - RNA, 19 nt, Homo sapiens
  misc_RNA (1)...(19): siRNA sense strand
gguggaagacuugcagaaa

SEQ ID NO: 495285 - RNA, 19 nt, Homo sapiens
  misc_RNA (1)...(19): siRNA sense strand
ggccagagaaguguacaaa

SEQ ID NO: 495286 - RNA, 19 nt, Homo sapiens
  misc_RNA (1)...(19): siRNA sense strand
ccagagaaguguacaaaag

SEQ ID NO: 495287 - RNA, 19 nt, Homo sapiens
  misc_RNA (1)...(19): siRNA sense strand
agaaagaaccuggaagaca

SEQ ID NO: 495288 - RNA, 19 nt, Homo sapiens
  misc_RNA (1)...(19): siRNA sense strand
ccacugggagcaggaaauu

SEQ ID NO: 495289 - RNA, 19 nt, Homo sapiens
  misc_RNA (1)...(19): siRNA sense strand
ggaguugcugguccuagaa

SEQ ID NO: 495290 - RNA, 19 nt, Homo sapiens
  misc_RNA (1)...(19): siRNA sense strand
ggaagacuugcagaaagaa

SEQ ID NO: 495291 - RNA, 19 nt, Homo sapiens
  misc_RNA (1)...(19): siRNA sense strand
caguggcccugguggaaga

SEQ ID NO: 495292 - RNA, 19 nt, Homo sapiens
  misc_RNA (1)...(19): siRNA sense strand
uggaguugcugguccuaga

SEQ ID NO: 495293 - RNA, 19 nt, Homo sapiens
  misc_RNA (1)...(19): siRNA sense strand
ggcuguagcuguggaccaa

SEQ ID NO: 495294 - RNA, 19 nt, Homo sapiens
  misc_RNA (1)...(19): siRNA sense strand
gcuaaggccagagaagugu

SEQ ID NO: 495295 - RNA, 19 nt, Homo sapiens
  misc_RNA (1)...(19): siRNA sense strand
caagaucuccaaauaguua

SEQ ID NO: 495296 - RNA, 19 nt, Homo sapiens
  misc_RNA (1)...(19): siRNA sense strand
aguacaagaucuccaaaua

SEQ ID NO: 495297 - RNA, 19 nt, Homo sapiens
  misc_RNA (1)...(19): siRNA sense strand
gcauuuccguuaccaagaa

SEQ ID NO: 495298 - RNA, 19 nt, Homo sapiens
  misc_RNA (1)...(19): siRNA sense strand
gcagaaagaaccuggaaga

SEQ ID NO: 495299 - RNA, 19 nt, Homo sapiens
  misc_RNA (1)...(19): siRNA sense strand
caacaaauccagacuccuu

SEQ ID NO: 495300 - RNA, 19 nt, Homo sapiens
  misc_RNA (1)...(19): siRNA sense strand
uacaagaucuccaaauagu

SEQ ID NO: 495301 - RNA, 19 nt, Homo sapiens
  misc_RNA (1)...(19): siRNA sense strand
uggaagacuugcagaaaga

SEQ ID NO: 495302 - RNA, 19 nt, Homo sapiens
  misc_RNA (1)...(19): siRNA sense strand
guacaagaucuccaaauag

SEQ ID NO: 495303 - RNA, 19 nt, Homo sapiens
  misc_RNA (1)...(19): siRNA sense strand
aauccagacuccuucagua

SEQ ID NO: 495304 - RNA, 19 nt, Homo sapiens
  misc_RNA (1)...(19): siRNA sense strand
ccagacuccuucaguacaa

SEQ ID NO: 495305 - RNA, 19 nt, Homo sapiens
  misc_RNA (1)...(19): siRNA sense strand
guggaagacuugcagaaag

SEQ ID NO: 495306 - RNA, 19 nt, Homo sapiens
  misc_RNA (1)...(19): siRNA sense strand
aagagcagauccuggaguu

SEQ ID NO: 495307 - RNA, 19 nt, Homo sapiens
  misc_RNA (1)...(19): siRNA sense strand
gguggaagacuugcagaaa

SEQ ID NO: 495308 - RNA, 19 nt, Homo sapiens
  misc_RNA (1)...(19): siRNA sense strand
ggccagagaaguguacaaa

SEQ ID NO: 495309 - RNA, 19 nt, Homo sapiens
  misc_RNA (1)...(19): siRNA sense strand
ccagagaaguguacaaaag

SEQ ID NO: 495310 - RNA, 19 nt, Homo sapiens
  misc_RNA (1)...(19): siRNA sense strand
agaaagaaccuggaagaca

SEQ ID NO: 495311 - RNA, 19 nt, Homo sapiens
  misc_RNA (1)...(19): siRNA sense strand
ccacugggagcaggaaauu

SEQ ID NO: 495312 - RNA, 19 nt, Homo sapiens
  misc_RNA (1)...(19): siRNA sense strand
ggaguugcugguccuagaa

SEQ ID NO: 495313 - RNA, 19 nt, Homo sapiens
  misc_RNA (1)...(19): siRNA sense strand
ggaagacuugcagaaagaa

SEQ ID NO: 495314 - RNA, 19 nt, Homo sapiens
  misc_RNA (1)...(19): siRNA sense strand
caguggcccugguggaaga

SEQ ID NO: 495315 - RNA, 19 nt, Homo sapiens
  misc_RNA (1)...(19): siRNA sense strand
uggaguugcugguccuaga

SEQ ID NO: 495316 - RNA, 19 nt, Homo sapiens
  misc_RNA (1)...(19): siRNA sense strand
ggcuguagcuguggaccaa

SEQ ID NO: 495317 - RNA, 19 nt, Homo sapiens
  misc_RNA (1)...(19): siRNA sense strand
gcuaaggccagagaagugu

SEQ ID NO: 495318 - RNA, 19 nt, Homo sapiens
  misc_RNA (1)...(19): siRNA sense strand
caagaucuccaaauaguua

SEQ ID NO: 495319 - RNA, 19 nt, Homo sapiens
  misc_RNA (1)...(19): siRNA sense strand
aguacaagaucuccaaaua

SEQ ID NO: 495320 - RNA, 19 nt, Homo sapiens
  misc_RNA (1)...(19): siRNA sense strand
gcauuuccguuaccaagaa

SEQ ID NO: 495321 - RNA, 19 nt, Homo sapiens
  misc_RNA (1)...(19): siRNA sense strand
gcagaaagaaccuggaaga

SEQ ID NO: 495322 - RNA, 19 nt, Homo sapiens
  misc_RNA (1)...(19): siRNA sense strand
caacaaauccagacuccuu

SEQ ID NO: 495323 - RNA, 19 nt, Homo sapiens
  misc_RNA (1)...(19): siRNA sense strand
uacaagaucuccaaauagu

SEQ ID NO: 495324 - RNA, 19 nt, Homo sapiens
  misc_RNA (1)...(19): siRNA sense strand
uggaagacuugcagaaaga

SEQ ID NO: 495325 - RNA, 19 nt, Homo sapiens
  misc_RNA (1)...(19): siRNA sense strand
guacaagaucuccaaauag

SEQ ID NO: 495326 - RNA, 19 nt, Homo sapiens
  misc_RNA (1)...(19): siRNA sense strand
aauccagacuccuucagua

SEQ ID NO: 495327 - RNA, 19 nt, Homo sapiens
  misc_RNA (1)...(19): siRNA sense strand
ccagacuccuucaguacaa

SEQ ID NO: 495328 - RNA, 19 nt, Homo sapiens
  misc_RNA (1)...(19): siRNA sense strand
guggaagacuugcagaaag

SEQ ID NO: 495329 - RNA, 19 nt, Homo sapiens
  misc_RNA (1)...(19): siRNA sense strand
aagagcagauccuggaguu

SEQ ID NO: 495330 - RNA, 19 nt, Homo sapiens
  misc_RNA (1)...(19): siRNA sense strand
gguggaagacuugcagaaa

SEQ ID NO: 495331 - RNA, 19 nt, Homo sapiens
  misc_RNA (1)...(19): siRNA sense strand
ggccagagaaguguacaaa

SEQ ID NO: 495332 - RNA, 19 nt, Homo sapiens
  misc_RNA (1)...(19): siRNA sense strand
ccagagaaguguacaaaag

SEQ ID NO: 495333 - RNA, 19 nt, Homo sapiens
  misc_RNA (1)...(19): siRNA sense strand
agaaagaaccuggaagaca

SEQ ID NO: 495334 - RNA, 19 nt, Homo sapiens
  misc_RNA (1)...(19): siRNA sense strand
ccacugggagcaggaaauu

SEQ ID NO: 495335 - RNA, 19 nt, Homo sapiens
  misc_RNA (1)...(19): siRNA sense strand
ggaguugcugguccuagaa

SEQ ID NO: 495336 - RNA, 19 nt, Homo sapiens
  misc_RNA (1)...(19): siRNA sense strand
ggaagacuugcagaaagaa

SEQ ID NO: 495337 - RNA, 19 nt, Homo sapiens
  misc_RNA (1)...(19): siRNA sense strand
caguggcccugguggaaga

SEQ ID NO: 495338 - RNA, 19 nt, Homo sapiens
  misc_RNA (1)...(19): siRNA sense strand
uggaguugcugguccuaga

SEQ ID NO: 495339 - RNA, 19 nt, Homo sapiens
  misc_RNA (1)...(19): siRNA sense strand
ggcuguagcuguggaccaa

SEQ ID NO: 495340 - RNA, 19 nt, Homo sapiens
  misc_RNA (1)...(19): siRNA sense strand
gcuaaggccagagaagugu

SEQ ID NO: 495341 - RNA, 19 nt, Homo sapiens
  misc_RNA (1)...(19): siRNA sense strand
caagaucuccaaauaguua

SEQ ID NO: 495342 - RNA, 19 nt, Homo sapiens
  misc_RNA (1)...(19): siRNA sense strand
aguacaagaucuccaaaua

SEQ ID NO: 495343 - RNA, 19 nt, Homo sapiens
  misc_RNA (1)...(19): siRNA sense strand
gcauuuccguuaccaagaa

SEQ ID NO: 495344 - RNA, 19 nt, Homo sapiens
  misc_RNA (1)...(19): siRNA sense strand
gcagaaagaaccuggaaga

SEQ ID NO: 495345 - RNA, 19 nt, Homo sapiens
  misc_RNA (1)...(19): siRNA sense strand
caacaaauccagacuccuu

SEQ ID NO: 495346 - RNA, 19 nt, Homo sapiens
  misc_RNA (1)...(19): siRNA sense strand
uacaagaucuccaaauagu

SEQ ID NO: 495347 - RNA, 19 nt, Homo sapiens
  misc_RNA (1)...(19): siRNA sense strand
uggaagacuugcagaaaga

SEQ ID NO: 495348 - RNA, 19 nt, Homo sapiens
  misc_RNA (1)...(19): siRNA sense strand
guacaagaucuccaaauag

SEQ ID NO: 495349 - RNA, 19 nt, Homo sapiens
  misc_RNA (1)...(19): siRNA sense strand
aauccagacuccuucagua

SEQ ID NO: 495350 - RNA, 19 nt, Homo sapiens
  misc_RNA (1)...(19): siRNA sense strand
ccagacuccuucaguacaa

SEQ ID NO: 495351 - RNA, 19 nt, Homo sapiens
  misc_RNA (1)...(19): siRNA sense strand
guggaagacuugcagaaag

SEQ ID NO: 495352 - RNA, 19 nt, Homo sapiens
  misc_RNA (1)...(19): siRNA sense strand
aagagcagauccuggaguu

SEQ ID NO: 495353 - RNA, 19 nt, Homo sapiens
  misc_RNA (1)...(19): siRNA sense strand
gguggaagacuugcagaaa

SEQ ID NO: 495354 - RNA, 19 nt, Homo sapiens
  misc_RNA (1)...(19): siRNA sense strand
ggccagagaaguguacaaa

SEQ ID NO: 495355 - RNA, 19 nt, Homo sapiens
  misc_RNA (1)...(19): siRNA sense strand
ccagagaaguguacaaaag

SEQ ID NO: 495356 - RNA, 19 nt, Homo sapiens
  misc_RNA (1)...(19): siRNA sense strand
agaaagaaccuggaagaca

SEQ ID NO: 495357 - RNA, 19 nt, Homo sapiens
  misc_RNA (1)...(19): siRNA sense strand
ccacugggagcaggaaauu

SEQ ID NO: 495358 - RNA, 19 nt, Homo sapiens
  misc_RNA (1)...(19): siRNA sense strand
ggaguugcugguccuagaa

SEQ ID NO: 495359 - RNA, 19 nt, Homo sapiens
  misc_RNA (1)...(19): siRNA sense strand
ggaagacuugcagaaagaa

SEQ ID NO: 495360 - RNA, 19 nt, Homo sapiens
  misc_RNA (1)...(19): siRNA sense strand
caguggcccugguggaaga

SEQ ID NO: 495361 - RNA, 19 nt, Homo sapiens
  misc_RNA (1)...(19): siRNA sense strand
uggaguugcugguccuaga

SEQ ID NO: 495362 - RNA, 19 nt, Homo sapiens
  misc_RNA (1)...(19): siRNA sense strand
ggcuguagcuguggaccaa

SEQ ID NO: 495363 - RNA, 19 nt, Homo sapiens
  misc_RNA (1)...(19): siRNA sense strand
gcuaaggccagagaagugu

SEQ ID NO: 495364 - RNA, 19 nt, Homo sapiens
  misc_RNA (1)...(19): siRNA sense strand
caagaucuccaaauaguua

SEQ ID NO: 495365 - RNA, 19 nt, Homo sapiens
  misc_RNA (1)...(19): siRNA sense strand
aguacaagaucuccaaaua

SEQ ID NO: 495366 - RNA, 19 nt, Homo sapiens
  misc_RNA (1)...(19): siRNA sense strand
gcauuuccguuaccaagaa

SEQ ID NO: 495367 - RNA, 19 nt, Homo sapiens
  misc_RNA (1)...(19): siRNA sense strand
gcagaaagaaccuggaaga

SEQ ID NO: 495368 - RNA, 19 nt, Homo sapiens
  misc_RNA (1)...(19): siRNA sense strand
caacaaauccagacuccuu

SEQ ID NO: 495369 - RNA, 19 nt, Homo sapiens
  misc_RNA (1)...(19): siRNA sense strand
uacaagaucuccaaauagu

SEQ ID NO: 495370 - RNA, 19 nt, Homo sapiens
  misc_RNA (1)...(19): siRNA sense strand
uggaagacuugcagaaaga

SEQ ID NO: 495371 - RNA, 19 nt, Homo sapiens
  misc_RNA (1)...(19): siRNA sense strand
guacaagaucuccaaauag

SEQ ID NO: 495372 - RNA, 19 nt, Homo sapiens
  misc_RNA (1)...(19): siRNA sense strand
aauccagacuccuucagua

SEQ ID NO: 495373 - RNA, 19 nt, Homo sapiens
  misc_RNA (1)...(19): siRNA sense strand
ccagacuccuucaguacaa

SEQ ID NO: 495374 - RNA, 19 nt, Homo sapiens
  misc_RNA (1)...(19): siRNA sense strand
guggaagacuugcagaaag

SEQ ID NO: 495375 - RNA, 19 nt, Homo sapiens
  misc_RNA (1)...(19): siRNA sense strand
aagagcagauccuggaguu

SEQ ID NO: 495376 - RNA, 19 nt, Homo sapiens
  misc_RNA (1)...(19): siRNA sense strand
gguggaagacuugcagaaa

SEQ ID NO: 495377 - RNA, 19 nt, Homo sapiens
  misc_RNA (1)...(19): siRNA sense strand
ggccagagaaguguacaaa

SEQ ID NO: 495378 - RNA, 19 nt, Homo sapiens
  misc_RNA (1)...(19): siRNA sense strand
ccagagaaguguacaaaag

SEQ ID NO: 495379 - RNA, 19 nt, Homo sapiens
  misc_RNA (1)...(19): siRNA sense strand
agaaagaaccuggaagaca

SEQ ID NO: 495380 - RNA, 19 nt, Homo sapiens
  misc_RNA (1)...(19): siRNA sense strand
ccacugggagcaggaaauu

SEQ ID NO: 495381 - RNA, 19 nt, Homo sapiens
  misc_RNA (1)...(19): siRNA sense strand
ggaguugcugguccuagaa

SEQ ID NO: 495382 - RNA, 19 nt, Homo sapiens
  misc_RNA (1)...(19): siRNA sense strand
ggaagacuugcagaaagaa

SEQ ID NO: 495383 - RNA, 19 nt, Homo sapiens
  misc_RNA (1)...(19): siRNA sense strand
caguggcccugguggaaga

SEQ ID NO: 495384 - RNA, 19 nt, Homo sapiens
  misc_RNA (1)...(19): siRNA sense strand
uggaguugcugguccuaga

SEQ ID NO: 495385 - RNA, 19 nt, Homo sapiens
  misc_RNA (1)...(19): siRNA sense strand
ggcuguagcuguggaccaa

SEQ ID NO: 495386 - RNA, 19 nt, Homo sapiens
  misc_RNA (1)...(19): siRNA sense strand
gcuaaggccagagaagugu

SEQ ID NO: 495387 - RNA, 19 nt, Homo sapiens
  misc_RNA (1)...(19): siRNA sense strand
caagaucuccaaauaguua

SEQ ID NO: 495388 - RNA, 19 nt, Homo sapiens
  misc_RNA (1)...(19): siRNA sense strand
aguacaagaucuccaaaua

SEQ ID NO: 495389 - RNA, 19 nt, Homo sapiens
  misc_RNA (1)...(19): siRNA sense strand
gcauuuccguuaccaagaa

SEQ ID NO: 495390 - RNA, 19 nt, Homo sapiens
  misc_RNA (1)...(19): siRNA sense strand
gcagaaagaaccuggaaga

SEQ ID NO: 495391 - RNA, 19 nt, Homo sapiens
  misc_RNA (1)...(19): siRNA sense strand
caacaaauccagacuccuu

SEQ ID NO: 495392 - RNA, 19 nt, Homo sapiens
  misc_RNA (1)...(19): siRNA sense strand
uacaagaucuccaaauagu

SEQ ID NO: 495393 - RNA, 19 nt, Homo sapiens
  misc_RNA (1)...(19): siRNA sense strand
uggaagacuugcagaaaga

SEQ ID NO: 495394 - RNA, 19 nt, Homo sapiens
  misc_RNA (1)...(19): siRNA sense strand
guacaagaucuccaaauag

SEQ ID NO: 495395 - RNA, 19 nt, Homo sapiens
  misc_RNA (1)...(19): siRNA sense strand
aauccagacuccuucagua

SEQ ID NO: 495396 - RNA, 19 nt, Homo sapiens
  misc_RNA (1)...(19): siRNA sense strand
gggaauuccugcagagaag

SEQ ID NO: 495397 - RNA, 19 nt, Homo sapiens
  misc_RNA (1)...(19): siRNA sense strand
ccagacuccuucaguacaa

SEQ ID NO: 495398 - RNA, 19 nt, Homo sapiens
  misc_RNA (1)...(19): siRNA sense strand
guggaagacuugcagaaag

SEQ ID NO: 495399 - RNA, 19 nt, Homo sapiens
  misc_RNA (1)...(19): siRNA sense strand
ugauguggcucugggaauu

SEQ ID NO: 495400 - RNA, 19 nt, Homo sapiens
  misc_RNA (1)...(19): siRNA sense strand
aagagcagauccuggaguu

SEQ ID NO: 495401 - RNA, 19 nt, Homo sapiens
  misc_RNA (1)...(19): siRNA sense strand
gguggaagacuugcagaaa

SEQ ID NO: 495402 - RNA, 19 nt, Homo sapiens
  misc_RNA (1)...(19): siRNA sense strand
ggccagagaaguguacaaa

SEQ ID NO: 495403 - RNA, 19 nt, Homo sapiens
  misc_RNA (1)...(19): siRNA sense strand
ccagagaaguguacaaaag

SEQ ID NO: 495404 - RNA, 19 nt, Homo sapiens
  misc_RNA (1)...(19): siRNA sense strand
agaaagaaccuggaagaca

SEQ ID NO: 495405 - RNA, 19 nt, Homo sapiens
  misc_RNA (1)...(19): siRNA sense strand
ccacugggagcaggaaauu

SEQ ID NO: 495406 - RNA, 19 nt, Homo sapiens
  misc_RNA (1)...(19): siRNA sense strand
ggaguugcugguccuagaa

SEQ ID NO: 495407 - RNA, 19 nt, Homo sapiens
  misc_RNA (1)...(19): siRNA sense strand
ggaagacuugcagaaagaa

SEQ ID NO: 495408 - RNA, 19 nt, Homo sapiens
  misc_RNA (1)...(19): siRNA sense strand
caguggcccugguggaaga

SEQ ID NO: 495409 - RNA, 19 nt, Homo sapiens
  misc_RNA (1)...(19): siRNA sense strand
uggaguugcugguccuaga

SEQ ID NO: 495410 - RNA, 19 nt, Homo sapiens
  misc_RNA (1)...(19): siRNA sense strand
ggcuguagcuguggaccaa

SEQ ID NO: 495411 - RNA, 19 nt, Homo sapiens
  misc_RNA (1)...(19): siRNA sense strand
gcuaaggccagagaagugu

SEQ ID NO: 495412 - RNA, 19 nt, Homo sapiens
  misc_RNA (1)...(19): siRNA sense strand
ggaauuccugcagagaaga

SEQ ID NO: 495413 - RNA, 19 nt, Homo sapiens
  misc_RNA (1)...(19): siRNA sense strand
gaacauaccuacagugaug

SEQ ID NO: 495414 - RNA, 19 nt, Homo sapiens
  misc_RNA (1)...(19): siRNA sense strand
caaaggagauuuagcagua

SEQ ID NO: 495415 - RNA, 19 nt, Homo sapiens
  misc_RNA (1)...(19): siRNA sense strand
agaaguggcugcugaauuu

SEQ ID NO: 495416 - RNA, 19 nt, Homo sapiens
  misc_RNA (1)...(19): siRNA sense strand
gcaagauguugggauauuu

SEQ ID NO: 495417 - RNA, 19 nt, Homo sapiens
  misc_RNA (1)...(19): siRNA sense strand
ccaggaagcucuugauauc

SEQ ID NO: 495418 - RNA, 19 nt, Homo sapiens
  misc_RNA (1)...(19): siRNA sense strand
gaaugucaguggcaagauu

SEQ ID NO: 495419 - RNA, 19 nt, Homo sapiens
  misc_RNA (1)...(19): siRNA sense strand
agauaaagcuggccaugaa

SEQ ID NO: 495420 - RNA, 19 nt, Homo sapiens
  misc_RNA (1)...(19): siRNA sense strand
aaggauagcaggaauauaa

SEQ ID NO: 495421 - RNA, 19 nt, Homo sapiens
  misc_RNA (1)...(19): siRNA sense strand
caaagaagagcaagauguu

SEQ ID NO: 495422 - RNA, 19 nt, Homo sapiens
  misc_RNA (1)...(19): siRNA sense strand
gagaacauaccuacaguga

SEQ ID NO: 495423 - RNA, 19 nt, Homo sapiens
  misc_RNA (1)...(19): siRNA sense strand
uuagggagcugguucaaga

SEQ ID NO: 495424 - RNA, 19 nt, Homo sapiens
  misc_RNA (1)...(19): siRNA sense strand
caagauguugggauauuua

SEQ ID NO: 495425 - RNA, 19 nt, Homo sapiens
  misc_RNA (1)...(19): siRNA sense strand
gaaccgugauacuaagaug

SEQ ID NO: 495426 - RNA, 19 nt, Homo sapiens
  misc_RNA (1)...(19): siRNA sense strand
agagcaagauguugggaua

SEQ ID NO: 495427 - RNA, 19 nt, Homo sapiens
  misc_RNA (1)...(19): siRNA sense strand
gaagagaacauaccuacag

SEQ ID NO: 495428 - RNA, 19 nt, Homo sapiens
  misc_RNA (1)...(19): siRNA sense strand
ugucaacccugcuggcaua

SEQ ID NO: 495429 - RNA, 19 nt, Homo sapiens
  misc_RNA (1)...(19): siRNA sense strand
caguugaguuucacuauga

SEQ ID NO: 495430 - RNA, 19 nt, Homo sapiens
  misc_RNA (1)...(19): siRNA sense strand
caagaucacaguucccuuu

SEQ ID NO: 495431 - RNA, 19 nt, Homo sapiens
  misc_RNA (1)...(19): siRNA sense strand
ccuaugcacugaagaaugu

SEQ ID NO: 495432 - RNA, 19 nt, Homo sapiens
  misc_RNA (1)...(19): siRNA sense strand
gcagcaagauggagaugca

SEQ ID NO: 495433 - RNA, 19 nt, Homo sapiens
  misc_RNA (1)...(19): siRNA sense strand
gagaaguggcugcugaauu

SEQ ID NO: 495434 - RNA, 19 nt, Homo sapiens
  misc_RNA (1)...(19): siRNA sense strand
ggacaaguggaaagggaua

SEQ ID NO: 495435 - RNA, 19 nt, Homo sapiens
  misc_RNA (1)...(19): siRNA sense strand
gauacacucccuauacuau

SEQ ID NO: 495436 - RNA, 19 nt, Homo sapiens
  misc_RNA (1)...(19): siRNA sense strand
ggacguccaugaagagaac

SEQ ID NO: 495437 - RNA, 19 nt, Homo sapiens
  misc_RNA (1)...(19): siRNA sense strand
uaagauacacucccuauac

SEQ ID NO: 495438 - RNA, 19 nt, Homo sapiens
  misc_RNA (1)...(19): siRNA sense strand
gcaaguucuucaaggauag

SEQ ID NO: 495439 - RNA, 19 nt, Homo sapiens
  misc_RNA (1)...(19): siRNA sense strand
ggauaccuccagcaacaua

SEQ ID NO: 495440 - RNA, 19 nt, Homo sapiens
  misc_RNA (1)...(19): siRNA sense strand
ucacacugaucaaguuguu

SEQ ID NO: 495441 - RNA, 19 nt, Homo sapiens
  misc_RNA (1)...(19): siRNA sense strand
gaucgacagggucuccuua

SEQ ID NO: 495442 - RNA, 19 nt, Homo sapiens
  misc_RNA (1)...(19): siRNA sense strand
gaucaaguuguucaaagaa

SEQ ID NO: 495443 - RNA, 19 nt, Homo sapiens
  misc_RNA (1)...(19): siRNA sense strand
acaguucccuuuggcauaa

SEQ ID NO: 495444 - RNA, 19 nt, Homo sapiens
  misc_RNA (1)...(19): siRNA sense strand
uacacucccuauacuauuu

SEQ ID NO: 495445 - RNA, 19 nt, Homo sapiens
  misc_RNA (1)...(19): siRNA sense strand
aagggaagcuucuuuggau

SEQ ID NO: 495446 - RNA, 19 nt, Homo sapiens
  misc_RNA (1)...(19): siRNA sense strand
guaagauacacucccuaua

SEQ ID NO: 495447 - RNA, 19 nt, Homo sapiens
  misc_RNA (1)...(19): siRNA sense strand
ucaaguuguucaaagaaga

SEQ ID NO: 495448 - RNA, 19 nt, Homo sapiens
  misc_RNA (1)...(19): siRNA sense strand
cagaaugaaugcaguguac

SEQ ID NO: 495449 - RNA, 19 nt, Homo sapiens
  misc_RNA (1)...(19): siRNA sense strand
ugaucaaguuguucaaaga

SEQ ID NO: 495450 - RNA, 19 nt, Homo sapiens
  misc_RNA (1)...(19): siRNA sense strand
ggauagagccaggagagaa

SEQ ID NO: 495451 - RNA, 19 nt, Homo sapiens
  misc_RNA (1)...(19): siRNA sense strand
gcacgaccuucucggauac

SEQ ID NO: 495452 - RNA, 19 nt, Homo sapiens
  misc_RNA (1)...(19): siRNA sense strand
ugcaaguucuucaaggaua

SEQ ID NO: 495453 - RNA, 19 nt, Homo sapiens
  misc_RNA (1)...(19): siRNA sense strand
cggaauggaugcucugcuu

SEQ ID NO: 495454 - RNA, 19 nt, Homo sapiens
  misc_RNA (1)...(19): siRNA sense strand
agauggagaugcagcaaug

SEQ ID NO: 495455 - RNA, 19 nt, Homo sapiens
  misc_RNA (1)...(19): siRNA sense strand
ccaguugaguuucacuaug

SEQ ID NO: 495456 - RNA, 19 nt, Homo sapiens
  misc_RNA (1)...(19): siRNA sense strand
caagaccaaacccacguua

SEQ ID NO: 495457 - RNA, 19 nt, Homo sapiens
  misc_RNA (1)...(19): siRNA sense strand
agagcaacuuuauguggua

SEQ ID NO: 495458 - RNA, 19 nt, Homo sapiens
  misc_RNA (1)...(19): siRNA sense strand
agaaaaugcugccuucgua

SEQ ID NO: 495459 - RNA, 19 nt, Homo sapiens
  misc_RNA (1)...(19): siRNA sense strand
gggucacacugaucaaguu

SEQ ID NO: 495460 - RNA, 19 nt, Homo sapiens
  misc_RNA (1)...(19): siRNA sense strand
ggaauggaugcucugcuuu

SEQ ID NO: 495461 - RNA, 19 nt, Homo sapiens
  misc_RNA (1)...(19): siRNA sense strand
ucaaagaagagcaagaugu

SEQ ID NO: 495462 - RNA, 19 nt, Homo sapiens
  misc_RNA (1)...(19): siRNA sense strand
ucggauaccuccagcaaca

SEQ ID NO: 495463 - RNA, 19 nt, Homo sapiens
  misc_RNA (1)...(19): siRNA sense strand
gcacagggagcugaaguca

SEQ ID NO: 495464 - RNA, 19 nt, Homo sapiens
  misc_RNA (1)...(19): siRNA sense strand
ucugagauguugaagaauc

SEQ ID NO: 495465 - RNA, 19 nt, Homo sapiens
  misc_RNA (1)...(19): siRNA sense strand
ugcacgaccuucucggaua

SEQ ID NO: 495466 - RNA, 19 nt, Homo sapiens
  misc_RNA (1)...(19): siRNA sense strand
gauuugggaugaggauaau

SEQ ID NO: 495467 - RNA, 19 nt, Homo sapiens
  misc_RNA (1)...(19): siRNA sense strand
cgacagggucuccuuagug

SEQ ID NO: 495468 - RNA, 19 nt, Homo sapiens
  misc_RNA (1)...(19): siRNA sense strand
agaaucugguccugcaauu

SEQ ID NO: 495469 - RNA, 19 nt, Homo sapiens
  misc_RNA (1)...(19): siRNA sense strand
aaacccacguuaacaugga

SEQ ID NO: 495470 - RNA, 19 nt, Homo sapiens
  misc_RNA (1)...(19): siRNA sense strand
guacugaagcccacaagag

SEQ ID NO: 495471 - RNA, 19 nt, Homo sapiens
  misc_RNA (1)...(19): siRNA sense strand
ggagauggacaaguggaaa

SEQ ID NO: 495472 - RNA, 19 nt, Homo sapiens
  misc_RNA (1)...(19): siRNA sense strand
gaaccaacagugugauguc

SEQ ID NO: 495473 - RNA, 19 nt, Homo sapiens
  misc_RNA (1)...(19): siRNA sense strand
guggcaagauuugggauga

SEQ ID NO: 495474 - RNA, 19 nt, Homo sapiens
  misc_RNA (1)...(19): siRNA sense strand
acccggaccuucauugcua

SEQ ID NO: 495475 - RNA, 19 nt, Homo sapiens
  misc_RNA (1)...(19): siRNA sense strand
ggaaguggaaggacagucu

SEQ ID NO: 495476 - RNA, 19 nt, Homo sapiens
  misc_RNA (1)...(19): siRNA sense strand
gaagcuucuuuggaucuga

SEQ ID NO: 495477 - RNA, 19 nt, Homo sapiens
  misc_RNA (1)...(19): siRNA sense strand
uaagggaagcuucuuugga

SEQ ID NO: 495478 - RNA, 19 nt, Homo sapiens
  misc_RNA (1)...(19): siRNA sense strand
caucgaauccuagaaagug

SEQ ID NO: 495479 - RNA, 19 nt, Homo sapiens
  misc_RNA (1)...(19): siRNA sense strand
gaaaagguggagcagauaa

SEQ ID NO: 495480 - RNA, 19 nt, Homo sapiens
  misc_RNA (1)...(19): siRNA sense strand
gggagcugguucaagauca

SEQ ID NO: 495481 - RNA, 19 nt, Homo sapiens
  misc_RNA (1)...(19): siRNA sense strand
ggacccagagugccuuguu

SEQ ID NO: 495482 - RNA, 19 nt, Homo sapiens
  misc_RNA (1)...(19): siRNA sense strand
caaauuauuaugccuggau

SEQ ID NO: 495483 - RNA, 19 nt, Homo sapiens
  misc_RNA (1)...(19): siRNA sense strand
ggugaaccgugauacuaag

SEQ ID NO: 495484 - RNA, 19 nt, Homo sapiens
  misc_RNA (1)...(19): siRNA sense strand
gaccaaacccacguuaaca

SEQ ID NO: 495485 - RNA, 19 nt, Homo sapiens
  misc_RNA (1)...(19): siRNA sense strand
gacccagagugccuuguuc

SEQ ID NO: 495486 - RNA, 19 nt, Homo sapiens
  misc_RNA (1)...(19): siRNA sense strand
gcacacaaaacuugauauu

SEQ ID NO: 495487 - RNA, 19 nt, Homo sapiens
  misc_RNA (1)...(19): siRNA sense strand
ccaaacccacguuaacaug

SEQ ID NO: 495488 - RNA, 19 nt, Homo sapiens
  misc_RNA (1)...(19): siRNA sense strand
uaacauggagagagagcaa

SEQ ID NO: 495489 - RNA, 19 nt, Homo sapiens
  misc_RNA (1)...(19): siRNA sense strand
ggcagcaguuccagucugu

SEQ ID NO: 495490 - RNA, 19 nt, Homo sapiens
  misc_RNA (1)...(19): siRNA sense strand
cagaaaagguggagcagau

SEQ ID NO: 495491 - RNA, 19 nt, Homo sapiens
  misc_RNA (1)...(19): siRNA sense strand
ucaaggauagcaggaauau

SEQ ID NO: 495492 - RNA, 19 nt, Homo sapiens
  misc_RNA (1)...(19): siRNA sense strand
ggucugaaccugucaaucc

SEQ ID NO: 495493 - RNA, 19 nt, Homo sapiens
  misc_RNA (1)...(19): siRNA sense strand
ggaagcuucuuuggaucug

SEQ ID NO: 495494 - RNA, 19 nt, Homo sapiens
  misc_RNA (1)...(19): siRNA sense strand
gaaaaugcugccuucguaa

SEQ ID NO: 495495 - RNA, 19 nt, Homo sapiens
  misc_RNA (1)...(19): siRNA sense strand
cagauaaagcuggccauga

SEQ ID NO: 495496 - RNA, 19 nt, Homo sapiens
  misc_RNA (1)...(19): siRNA sense strand
gaauggaugcucugcuuuu

SEQ ID NO: 495497 - RNA, 19 nt, Homo sapiens
  misc_RNA (1)...(19): siRNA sense strand
gcaacuuuaugugguacug

SEQ ID NO: 495498 - RNA, 19 nt, Homo sapiens
  misc_RNA (1)...(19): siRNA sense strand
gauagagccaggagagaag

SEQ ID NO: 495499 - RNA, 19 nt, Homo sapiens
  misc_RNA (1)...(19): siRNA sense strand
acacuacgggucacacuga

SEQ ID NO: 495500 - RNA, 19 nt, Homo sapiens
  misc_RNA (1)...(19): siRNA sense strand
gauauuuaccaaaggagau

SEQ ID NO: 495501 - RNA, 19 nt, Homo sapiens
  misc_RNA (1)...(19): siRNA sense strand
aagauacacucccuauacu

SEQ ID NO: 495502 - RNA, 19 nt, Homo sapiens
  misc_RNA (1)...(19): siRNA sense strand
agcaagauguugggauauu

SEQ ID NO: 495503 - RNA, 19 nt, Homo sapiens
  misc_RNA (1)...(19): siRNA sense strand
uggcaucgaauccuagaaa

SEQ ID NO: 495504 - RNA, 19 nt, Homo sapiens
  misc_RNA (1)...(19): siRNA sense strand
gacauggugaaccgugaua

SEQ ID NO: 495505 - RNA, 19 nt, Homo sapiens
  misc_RNA (1)...(19): siRNA sense strand
ugggauauuuaccaaagga

SEQ ID NO: 495506 - RNA, 19 nt, Homo sapiens
  misc_RNA (1)...(19): siRNA sense strand
gauaccuccagcaacauaa

SEQ ID NO: 495507 - RNA, 19 nt, Homo sapiens
  misc_RNA (1)...(19): siRNA sense strand
aagagaacauaccuacagu

SEQ ID NO: 495508 - RNA, 19 nt, Homo sapiens
  misc_RNA (1)...(19): siRNA sense strand
ccaugaaccaacaguguga

SEQ ID NO: 495509 - RNA, 19 nt, Homo sapiens
  misc_RNA (1)...(19): siRNA sense strand
guucaaagaagagcaagau

SEQ ID NO: 495510 - RNA, 19 nt, Homo sapiens
  misc_RNA (1)...(19): siRNA sense strand
ucagaaugaaugcagugua

SEQ ID NO: 495511 - RNA, 19 nt, Homo sapiens
  misc_RNA (1)...(19): siRNA sense strand
gucugugcaucgugaauga

SEQ ID NO: 495512 - RNA, 19 nt, Homo sapiens
  misc_RNA (1)...(19): siRNA sense strand
uccagagacucccauuuua

SEQ ID NO: 495513 - RNA, 19 nt, Homo sapiens
  misc_RNA (1)...(19): siRNA sense strand
gaggauagcaggaauauga

SEQ ID NO: 495514 - RNA, 19 nt, Homo sapiens
  misc_RNA (1)...(19): siRNA sense strand
gcagaggccuucaagcaaa

SEQ ID NO: 495515 - RNA, 19 nt, Homo sapiens
  misc_RNA (1)...(19): siRNA sense strand
gaagacgaaauccguauua

SEQ ID NO: 495516 - RNA, 19 nt, Homo sapiens
  misc_RNA (1)...(19): siRNA sense strand
ugaaggaugucaguuauaa

SEQ ID NO: 495517 - RNA, 19 nt, Homo sapiens
  misc_RNA (1)...(19): siRNA sense strand
gacaaggcauggcuaauga

SEQ ID NO: 495518 - RNA, 19 nt, Homo sapiens
  misc_RNA (1)...(19): siRNA sense strand
gauauaauccugaaucgaa

SEQ ID NO: 495519 - RNA, 19 nt, Homo sapiens
  misc_RNA (1)...(19): siRNA sense strand
gcaaguacuuugaggauag

SEQ ID NO: 495520 - RNA, 19 nt, Homo sapiens
  misc_RNA (1)...(19): siRNA sense strand
gaagagcuauggcuagaag

SEQ ID NO: 495521 - RNA, 19 nt, Homo sapiens
  misc_RNA (1)...(19): siRNA sense strand
ggaugucaguuauaagauu

SEQ ID NO: 495522 - RNA, 19 nt, Homo sapiens
  misc_RNA (1)...(19): siRNA sense strand
aagaggagcugucauuaug

SEQ ID NO: 495523 - RNA, 19 nt, Homo sapiens
  misc_RNA (1)...(19): siRNA sense strand
ccacaaggaccaacaacua

SEQ ID NO: 495524 - RNA, 19 nt, Homo sapiens
  misc_RNA (1)...(19): siRNA sense strand
ucccugagcuguugucuuu

SEQ ID NO: 495525 - RNA, 19 nt, Homo sapiens
  misc_RNA (1)...(19): siRNA sense strand
agaaugaaauggcauagug

SEQ ID NO: 495526 - RNA, 19 nt, Homo sapiens
  misc_RNA (1)...(19): siRNA sense strand
gaacaaacgguacaauguc

SEQ ID NO: 495527 - RNA, 19 nt, Homo sapiens
  misc_RNA (1)...(19): siRNA sense strand
gaugagggauguccacaag

SEQ ID NO: 495528 - RNA, 19 nt, Homo sapiens
  misc_RNA (1)...(19): siRNA sense strand
cacaauuccuuacgggaua

SEQ ID NO: 495529 - RNA, 19 nt, Homo sapiens
  misc_RNA (1)...(19): siRNA sense strand
acaaggaacugguuuaagg

SEQ ID NO: 495530 - RNA, 19 nt, Homo sapiens
  misc_RNA (1)...(19): siRNA sense strand
gcucuacucuaaagaagug

SEQ ID NO: 495531 - RNA, 19 nt, Homo sapiens
  misc_RNA (1)...(19): siRNA sense strand
gaaauggcauagugaagac

SEQ ID NO: 495532 - RNA, 19 nt, Homo sapiens
  misc_RNA (1)...(19): siRNA sense strand
gaaauuucccugagcuguu

SEQ ID NO: 495533 - RNA, 19 nt, Homo sapiens
  misc_RNA (1)...(19): siRNA sense strand
ggaguucuuuccgggauaa

SEQ ID NO: 495534 - RNA, 19 nt, Homo sapiens
  misc_RNA (1)...(19): siRNA sense strand
ugacagcucugagacaaug

SEQ ID NO: 495535 - RNA, 19 nt, Homo sapiens
  misc_RNA (1)...(19): siRNA sense strand
ccuacucugugaagaauaa

SEQ ID NO: 495536 - RNA, 19 nt, Homo sapiens
  misc_RNA (1)...(19): siRNA sense strand
agagaaggcucccaaaguc

SEQ ID NO: 495537 - RNA, 19 nt, Homo sapiens
  misc_RNA (1)...(19): siRNA sense strand
gaucugagacccuaaagca

SEQ ID NO: 495538 - RNA, 19 nt, Homo sapiens
  misc_RNA (1)...(19): siRNA sense strand
aggcauggcuaaugaauuc

SEQ ID NO: 495539 - RNA, 19 nt, Homo sapiens
  misc_RNA (1)...(19): siRNA sense strand
aaacuggaguggucucaga

SEQ ID NO: 495540 - RNA, 19 nt, Homo sapiens
  misc_RNA (1)...(19): siRNA sense strand
gcuguugucuuugaacuug

SEQ ID NO: 495541 - RNA, 19 nt, Homo sapiens
  misc_RNA (1)...(19): siRNA sense strand
caagaggagcugucauuau

SEQ ID NO: 495542 - RNA, 19 nt, Homo sapiens
  misc_RNA (1)...(19): siRNA sense strand
ggauggccuuucugacauu

SEQ ID NO: 495543 - RNA, 19 nt, Homo sapiens
  misc_RNA (1)...(19): siRNA sense strand
gaacacacaggauggauac

SEQ ID NO: 495544 - RNA, 19 nt, Homo sapiens
  misc_RNA (1)...(19): siRNA sense strand
caacuaagacacacuccuu

SEQ ID NO: 495545 - RNA, 19 nt, Homo sapiens
  misc_RNA (1)...(19): siRNA sense strand
ugagggauguccacaagga

SEQ ID NO: 495546 - RNA, 19 nt, Homo sapiens
  misc_RNA (1)...(19): siRNA sense strand
cauugaaggaugucaguua

SEQ ID NO: 495547 - RNA, 19 nt, Homo sapiens
  misc_RNA (1)...(19): siRNA sense strand
uaaagaagugugggacaua

SEQ ID NO: 495548 - RNA, 19 nt, Homo sapiens
  misc_RNA (1)...(19): siRNA sense strand
gaaugaaauggcauaguga

SEQ ID NO: 495549 - RNA, 19 nt, Homo sapiens
  misc_RNA (1)...(19): siRNA sense strand
gaaagaaaggugggaguuc

SEQ ID NO: 495550 - RNA, 19 nt, Homo sapiens
  misc_RNA (1)...(19): siRNA sense strand
gauggaagcguggagauga

SEQ ID NO: 495551 - RNA, 19 nt, Homo sapiens
  misc_RNA (1)...(19): siRNA sense strand
gacaaugaguggaacuaca

SEQ ID NO: 495552 - RNA, 19 nt, Homo sapiens
  misc_RNA (1)...(19): siRNA sense strand
gauggccuuucugacauua

SEQ ID NO: 495553 - RNA, 19 nt, Homo sapiens
  misc_RNA (1)...(19): siRNA sense strand
gaaaaccuccggagagaaa

SEQ ID NO: 495554 - RNA, 19 nt, Homo sapiens
  misc_RNA (1)...(19): siRNA sense strand
gccgugacauugauauaau

SEQ ID NO: 495555 - RNA, 19 nt, Homo sapiens
  misc_RNA (1)...(19): siRNA sense strand
caggauggauacacaagga

SEQ ID NO: 495556 - RNA, 19 nt, Homo sapiens
  misc_RNA (1)...(19): siRNA sense strand
ggacauacagaacugaagu

SEQ ID NO: 495557 - RNA, 19 nt, Homo sapiens
  misc_RNA (1)...(19): siRNA sense strand
cggaaaggaugcucugcuu

SEQ ID NO: 495558 - RNA, 19 nt, Homo sapiens
  misc_RNA (1)...(19): siRNA sense strand
ccugagcuguugucuuuga

SEQ ID NO: 495559 - RNA, 19 nt, Homo sapiens
  misc_RNA (1)...(19): siRNA sense strand
ugcuaaagcugaccaugaa

SEQ ID NO: 495560 - RNA, 19 nt, Homo sapiens
  misc_RNA (1)...(19): siRNA sense strand
cugagacccuaaagcauuu

SEQ ID NO: 495561 - RNA, 19 nt, Homo sapiens
  misc_RNA (1)...(19): siRNA sense strand
cacaaggaccaacaacuaa

SEQ ID NO: 495562 - RNA, 19 nt, Homo sapiens
  misc_RNA (1)...(19): siRNA sense strand
ugaaauggcauagugaaga

SEQ ID NO: 495563 - RNA, 19 nt, Homo sapiens
  misc_RNA (1)...(19): siRNA sense strand
gaccaguccgccuauguaa

SEQ ID NO: 495564 - RNA, 19 nt, Homo sapiens
  misc_RNA (1)...(19): siRNA sense strand
gacccugaaucucuccaaa

SEQ ID NO: 495565 - RNA, 19 nt, Homo sapiens
  misc_RNA (1)...(19): siRNA sense strand
ugaacaaacgguacaaugu

SEQ ID NO: 495566 - RNA, 19 nt, Homo sapiens
  misc_RNA (1)...(19): siRNA sense strand
gacgaaauccguauuacca

SEQ ID NO: 495567 - RNA, 19 nt, Homo sapiens
  misc_RNA (1)...(19): siRNA sense strand
ugacaaggcauggcuaaug

SEQ ID NO: 495568 - RNA, 19 nt, Homo sapiens
  misc_RNA (1)...(19): siRNA sense strand
gaacugguuuaaggucaca

SEQ ID NO: 495569 - RNA, 19 nt, Homo sapiens
  misc_RNA (1)...(19): siRNA sense strand
gggaguucuuuccgggaua

SEQ ID NO: 495570 - RNA, 19 nt, Homo sapiens
  misc_RNA (1)...(19): siRNA sense strand
aaauuucccugagcuguug

SEQ ID NO: 495571 - RNA, 19 nt, Homo sapiens
  misc_RNA (1)...(19): siRNA sense strand
guucuuuccgggauaauuu

SEQ ID NO: 495572 - RNA, 19 nt, Homo sapiens
  misc_RNA (1)...(19): siRNA sense strand
gaacugcugaggcgcacaa

SEQ ID NO: 495573 - RNA, 19 nt, Homo sapiens
  misc_RNA (1)...(19): siRNA sense strand
gcauuuaguccugcaauuc

SEQ ID NO: 495574 - RNA, 19 nt, Homo sapiens
  misc_RNA (1)...(19): siRNA sense strand
aaugaaacccugcaaggaa

SEQ ID NO: 495575 - RNA, 19 nt, Homo sapiens
  misc_RNA (1)...(19): siRNA sense strand
ucgaagagcuauggcuaga

SEQ ID NO: 495576 - RNA, 19 nt, Homo sapiens
  misc_RNA (1)...(19): siRNA sense strand
cagagaaggcucccaaagu

SEQ ID NO: 495577 - RNA, 19 nt, Homo sapiens
  misc_RNA (1)...(19): siRNA sense strand
gaugggccgugacauugau

SEQ ID NO: 495578 - RNA, 19 nt, Homo sapiens
  misc_RNA (1)...(19): siRNA sense strand
aaauggagaugcuaaagcu

SEQ ID NO: 495579 - RNA, 19 nt, Homo sapiens
  misc_RNA (1)...(19): siRNA sense strand
caaggaccaacaacuaaga

SEQ ID NO: 495580 - RNA, 19 nt, Homo sapiens
  misc_RNA (1)...(19): siRNA sense strand
acaagaggagcugucauua

SEQ ID NO: 495581 - RNA, 19 nt, Homo sapiens
  misc_RNA (1)...(19): siRNA sense strand
ccacguggagaaauagaaa

SEQ ID NO: 495582 - RNA, 19 nt, Homo sapiens
  misc_RNA (1)...(19): siRNA sense strand
acacaaggaacugguuuaa

SEQ ID NO: 495583 - RNA, 19 nt, Homo sapiens
  misc_RNA (1)...(19): siRNA sense strand
aggaaauggugcaggcuuu

SEQ ID NO: 495584 - RNA, 19 nt, Homo sapiens
  misc_RNA (1)...(19): siRNA sense strand
acccggaccuucauugcua

SEQ ID NO: 495585 - RNA, 19 nt, Homo sapiens
  misc_RNA (1)...(19): siRNA sense strand
ggaaguggaaggacagucu

SEQ ID NO: 495586 - RNA, 19 nt, Homo sapiens
  misc_RNA (1)...(19): siRNA sense strand
ggauagcaggaauaugaaa

SEQ ID NO: 495587 - RNA, 19 nt, Homo sapiens
  misc_RNA (1)...(19): siRNA sense strand
augaaacccugcaaggaaa

SEQ ID NO: 495588 - RNA, 19 nt, Homo sapiens
  misc_RNA (1)...(19): siRNA sense strand
gagaaggcucccaaaguca

SEQ ID NO: 495589 - RNA, 19 nt, Homo sapiens
  misc_RNA (1)...(19): siRNA sense strand
cuacugcgcccuacucugu

SEQ ID NO: 495590 - RNA, 19 nt, Homo sapiens
  misc_RNA (1)...(19): siRNA sense strand
gcgaaagaagaaugaaaug

SEQ ID NO: 495591 - RNA, 19 nt, Homo sapiens
  misc_RNA (1)...(19): siRNA sense strand
ucugagacccuaaagcauu

SEQ ID NO: 495592 - RNA, 19 nt, Homo sapiens
  misc_RNA (1)...(19): siRNA sense strand
gcccuacucugugaagaau

SEQ ID NO: 495593 - RNA, 19 nt, Homo sapiens
  misc_RNA (1)...(19): siRNA sense strand
cuuacgggauaaaguauga

SEQ ID NO: 495594 - RNA, 19 nt, Homo sapiens
  misc_RNA (1)...(19): siRNA sense strand
gaccaacaacuaagacaca

SEQ ID NO: 495595 - RNA, 19 nt, Homo sapiens
  misc_RNA (1)...(19): siRNA sense strand
caaugaaacccugcaagga

SEQ ID NO: 495596 - RNA, 19 nt, Homo sapiens
  misc_RNA (1)...(19): siRNA sense strand
gacauugacagcucugaga

SEQ ID NO: 495597 - RNA, 19 nt, Homo sapiens
  misc_RNA (1)...(19): siRNA sense strand
ccuggacggccgagaguua

SEQ ID NO: 495598 - RNA, 19 nt, Homo sapiens
  misc_RNA (1)...(19): siRNA sense strand
cuaaagaagugugggacau

SEQ ID NO: 495599 - RNA, 19 nt, Homo sapiens
  misc_RNA (1)...(19): siRNA sense strand
ggccgugacauugauauaa

SEQ ID NO: 495600 - RNA, 19 nt, Homo sapiens
  misc_RNA (1)...(19): siRNA sense strand
uccagaaucuccgcuuuga

SEQ ID NO: 495601 - RNA, 19 nt, Homo sapiens
  misc_RNA (1)...(19): siRNA sense strand
gaugagaaccaaaagauau

SEQ ID NO: 495602 - RNA, 19 nt, Homo sapiens
  misc_RNA (1)...(19): siRNA sense strand
agaagaaugaaauggcaua

SEQ ID NO: 495603 - RNA, 19 nt, Homo sapiens
  misc_RNA (1)...(19): siRNA sense strand
ccgcaccagugauuguuga

SEQ ID NO: 495604 - RNA, 19 nt, Homo sapiens
  misc_RNA (1)...(19): siRNA sense strand
ggcagcaguuccagucugu

SEQ ID NO: 495605 - RNA, 19 nt, Homo sapiens
  misc_RNA (1)...(19): siRNA sense strand
uuaugaacaugguggguau

SEQ ID NO: 495606 - RNA, 19 nt, Homo sapiens
  misc_RNA (1)...(19): siRNA sense strand
cagaggccuucaagcaaau

SEQ ID NO: 495607 - RNA, 19 nt, Homo sapiens
  misc_RNA (1)...(19): siRNA sense strand
ggaguugggcaaggugaaa

SEQ ID NO: 495608 - RNA, 19 nt, Homo sapiens
  misc_RNA (1)...(19): siRNA sense strand
gagcuguugucuuugaacu

SEQ ID NO: 495609 - RNA, 19 nt, Homo sapiens
  misc_RNA (1)...(19): siRNA sense strand
aaucgggcaugcuucuuug

SEQ ID NO: 495610 - RNA, 19 nt, Homo sapiens
  misc_RNA (1)...(19): siRNA sense strand
auuaccacguggagaaaua

SEQ ID NO: 495611 - RNA, 19 nt, Homo sapiens
  misc_RNA (1)...(19): siRNA sense strand
ccaguccgccuauguaagu

SEQ ID NO: 495612 - RNA, 19 nt, Homo sapiens
  misc_RNA (1)...(19): siRNA sense strand
ucaaugggguuuucaagga

SEQ ID NO: 495613 - RNA, 19 nt, Homo sapiens
  misc_RNA (1)...(19): siRNA sense strand
gaggauagcaggaauauga

SEQ ID NO: 495614 - RNA, 19 nt, Homo sapiens
  misc_RNA (1)...(19): siRNA sense strand
gcagaggccuucaagcaaa

SEQ ID NO: 495615 - RNA, 19 nt, Homo sapiens
  misc_RNA (1)...(19): siRNA sense strand
gaagacgaaauccguauua

SEQ ID NO: 495616 - RNA, 19 nt, Homo sapiens
  misc_RNA (1)...(19): siRNA sense strand
ugaaggaugucaguuauaa

SEQ ID NO: 495617 - RNA, 19 nt, Homo sapiens
  misc_RNA (1)...(19): siRNA sense strand
gacaaggcauggcuaauga

SEQ ID NO: 495618 - RNA, 19 nt, Homo sapiens
  misc_RNA (1)...(19): siRNA sense strand
gauauaauccugaaucgaa

SEQ ID NO: 495619 - RNA, 19 nt, Homo sapiens
  misc_RNA (1)...(19): siRNA sense strand
gcaaguacuuugaggauag

SEQ ID NO: 495620 - RNA, 19 nt, Homo sapiens
  misc_RNA (1)...(19): siRNA sense strand
gaagagcuauggcuagaag

SEQ ID NO: 495621 - RNA, 19 nt, Homo sapiens
  misc_RNA (1)...(19): siRNA sense strand
ggaugucaguuauaagauu

SEQ ID NO: 495622 - RNA, 19 nt, Homo sapiens
  misc_RNA (1)...(19): siRNA sense strand
aagaggagcugucauuaug

SEQ ID NO: 495623 - RNA, 19 nt, Homo sapiens
  misc_RNA (1)...(19): siRNA sense strand
ccacaaggaccaacaacua

SEQ ID NO: 495624 - RNA, 19 nt, Homo sapiens
  misc_RNA (1)...(19): siRNA sense strand
ucccugagcuguugucuuu

SEQ ID NO: 495625 - RNA, 19 nt, Homo sapiens
  misc_RNA (1)...(19): siRNA sense strand
agaaugaaauggcauagug

SEQ ID NO: 495626 - RNA, 19 nt, Homo sapiens
  misc_RNA (1)...(19): siRNA sense strand
gaacaaacgguacaauguc

SEQ ID NO: 495627 - RNA, 19 nt, Homo sapiens
  misc_RNA (1)...(19): siRNA sense strand
gaugagggauguccacaag

SEQ ID NO: 495628 - RNA, 19 nt, Homo sapiens
  misc_RNA (1)...(19): siRNA sense strand
cacaauuccuuacgggaua

SEQ ID NO: 495629 - RNA, 19 nt, Homo sapiens
  misc_RNA (1)...(19): siRNA sense strand
acaaggaacugguuuaagg

SEQ ID NO: 495630 - RNA, 19 nt, Homo sapiens
  misc_RNA (1)...(19): siRNA sense strand
gcucuacucuaaagaagug

SEQ ID NO: 495631 - RNA, 19 nt, Homo sapiens
  misc_RNA (1)...(19): siRNA sense strand
gaaauggcauagugaagac

SEQ ID NO: 495632 - RNA, 19 nt, Homo sapiens
  misc_RNA (1)...(19): siRNA sense strand
gaaauuucccugagcuguu

SEQ ID NO: 495633 - RNA, 19 nt, Homo sapiens
  misc_RNA (1)...(19): siRNA sense strand
ggaguucuuuccgggauaa

SEQ ID NO: 495634 - RNA, 19 nt, Homo sapiens
  misc_RNA (1)...(19): siRNA sense strand
ugacagcucugagacaaug

SEQ ID NO: 495635 - RNA, 19 nt, Homo sapiens
  misc_RNA (1)...(19): siRNA sense strand
ccuacucugugaagaauaa

SEQ ID NO: 495636 - RNA, 19 nt, Homo sapiens
  misc_RNA (1)...(19): siRNA sense strand
agagaaggcucccaaaguc

SEQ ID NO: 495637 - RNA, 19 nt, Homo sapiens
  misc_RNA (1)...(19): siRNA sense strand
gaucugagacccuaaagca

SEQ ID NO: 495638 - RNA, 19 nt, Homo sapiens
  misc_RNA (1)...(19): siRNA sense strand
aggcauggcuaaugaauuc

SEQ ID NO: 495639 - RNA, 19 nt, Homo sapiens
  misc_RNA (1)...(19): siRNA sense strand
aaacuggaguggucucaga

SEQ ID NO: 495640 - RNA, 19 nt, Homo sapiens
  misc_RNA (1)...(19): siRNA sense strand
gcuguugucuuugaacuug

SEQ ID NO: 495641 - RNA, 19 nt, Homo sapiens
  misc_RNA (1)...(19): siRNA sense strand
caagaggagcugucauuau

SEQ ID NO: 495642 - RNA, 19 nt, Homo sapiens
  misc_RNA (1)...(19): siRNA sense strand
ggauggccuuucugacauu

SEQ ID NO: 495643 - RNA, 19 nt, Homo sapiens
  misc_RNA (1)...(19): siRNA sense strand
gaacacacaggauggauac

SEQ ID NO: 495644 - RNA, 19 nt, Homo sapiens
  misc_RNA (1)...(19): siRNA sense strand
caacuaagacacacuccuu

SEQ ID NO: 495645 - RNA, 19 nt, Homo sapiens
  misc_RNA (1)...(19): siRNA sense strand
ugagggauguccacaagga

SEQ ID NO: 495646 - RNA, 19 nt, Homo sapiens
  misc_RNA (1)...(19): siRNA sense strand
cauugaaggaugucaguua

SEQ ID NO: 495647 - RNA, 19 nt, Homo sapiens
  misc_RNA (1)...(19): siRNA sense strand
uaaagaagugugggacaua

SEQ ID NO: 495648 - RNA, 19 nt, Homo sapiens
  misc_RNA (1)...(19): siRNA sense strand
gaaugaaauggcauaguga

SEQ ID NO: 495649 - RNA, 19 nt, Homo sapiens
  misc_RNA (1)...(19): siRNA sense strand
gaaagaaaggugggaguuc

SEQ ID NO: 495650 - RNA, 19 nt, Homo sapiens
  misc_RNA (1)...(19): siRNA sense strand
gauggaagcguggagauga

SEQ ID NO: 495651 - RNA, 19 nt, Homo sapiens
  misc_RNA (1)...(19): siRNA sense strand
gacaaugaguggaacuaca

SEQ ID NO: 495652 - RNA, 19 nt, Homo sapiens
  misc_RNA (1)...(19): siRNA sense strand
gauggccuuucugacauua

SEQ ID NO: 495653 - RNA, 19 nt, Homo sapiens
  misc_RNA (1)...(19): siRNA sense strand
gaaaaccuccggagagaaa

SEQ ID NO: 495654 - RNA, 19 nt, Homo sapiens
  misc_RNA (1)...(19): siRNA sense strand
gccgugacauugauauaau

SEQ ID NO: 495655 - RNA, 19 nt, Homo sapiens
  misc_RNA (1)...(19): siRNA sense strand
caggauggauacacaagga

SEQ ID NO: 495656 - RNA, 19 nt, Homo sapiens
  misc_RNA (1)...(19): siRNA sense strand
ggacauacagaacugaagu

SEQ ID NO: 495657 - RNA, 19 nt, Homo sapiens
  misc_RNA (1)...(19): siRNA sense strand
cggaaaggaugcucugcuu

SEQ ID NO: 495658 - RNA, 19 nt, Homo sapiens
  misc_RNA (1)...(19): siRNA sense strand
ccugagcuguugucuuuga

SEQ ID NO: 495659 - RNA, 19 nt, Homo sapiens
  misc_RNA (1)...(19): siRNA sense strand
ugcuaaagcugaccaugaa

SEQ ID NO: 495660 - RNA, 19 nt, Homo sapiens
  misc_RNA (1)...(19): siRNA sense strand
cugagacccuaaagcauuu

SEQ ID NO: 495661 - RNA, 19 nt, Homo sapiens
  misc_RNA (1)...(19): siRNA sense strand
cacaaggaccaacaacuaa

SEQ ID NO: 495662 - RNA, 19 nt, Homo sapiens
  misc_RNA (1)...(19): siRNA sense strand
ugaaauggcauagugaaga

SEQ ID NO: 495663 - RNA, 19 nt, Homo sapiens
  misc_RNA (1)...(19): siRNA sense strand
gaccaguccgccuauguaa

SEQ ID NO: 495664 - RNA, 19 nt, Homo sapiens
  misc_RNA (1)...(19): siRNA sense strand
gacccugaaucucuccaaa

SEQ ID NO: 495665 - RNA, 19 nt, Homo sapiens
  misc_RNA (1)...(19): siRNA sense strand
ugaacaaacgguacaaugu

SEQ ID NO: 495666 - RNA, 19 nt, Homo sapiens
  misc_RNA (1)...(19): siRNA sense strand
gacgaaauccguauuacca

SEQ ID NO: 495667 - RNA, 19 nt, Homo sapiens
  misc_RNA (1)...(19): siRNA sense strand
ugacaaggcauggcuaaug

SEQ ID NO: 495668 - RNA, 19 nt, Homo sapiens
  misc_RNA (1)...(19): siRNA sense strand
gaacugguuuaaggucaca

SEQ ID NO: 495669 - RNA, 19 nt, Homo sapiens
  misc_RNA (1)...(19): siRNA sense strand
gggaguucuuuccgggaua

SEQ ID NO: 495670 - RNA, 19 nt, Homo sapiens
  misc_RNA (1)...(19): siRNA sense strand
aaauuucccugagcuguug

SEQ ID NO: 495671 - RNA, 19 nt, Homo sapiens
  misc_RNA (1)...(19): siRNA sense strand
guucuuuccgggauaauuu

SEQ ID NO: 495672 - RNA, 19 nt, Homo sapiens
  misc_RNA (1)...(19): siRNA sense strand
gaacugcugaggcgcacaa

SEQ ID NO: 495673 - RNA, 19 nt, Homo sapiens
  misc_RNA (1)...(19): siRNA sense strand
gcauuuaguccugcaauuc

SEQ ID NO: 495674 - RNA, 19 nt, Homo sapiens
  misc_RNA (1)...(19): siRNA sense strand
aaugaaacccugcaaggaa

SEQ ID NO: 495675 - RNA, 19 nt, Homo sapiens
  misc_RNA (1)...(19): siRNA sense strand
ucgaagagcuauggcuaga

SEQ ID NO: 495676 - RNA, 19 nt, Homo sapiens
  misc_RNA (1)...(19): siRNA sense strand
cagagaaggcucccaaagu

SEQ ID NO: 495677 - RNA, 19 nt, Homo sapiens
  misc_RNA (1)...(19): siRNA sense strand
gaugggccgugacauugau

SEQ ID NO: 495678 - RNA, 19 nt, Homo sapiens
  misc_RNA (1)...(19): siRNA sense strand
aaauggagaugcuaaagcu

SEQ ID NO: 495679 - RNA, 19 nt, Homo sapiens
  misc_RNA (1)...(19): siRNA sense strand
caaggaccaacaacuaaga

SEQ ID NO: 495680 - RNA, 19 nt, Homo sapiens
  misc_RNA (1)...(19): siRNA sense strand
acaagaggagcugucauua

SEQ ID NO: 495681 - RNA, 19 nt, Homo sapiens
  misc_RNA (1)...(19): siRNA sense strand
ccacguggagaaauagaaa

SEQ ID NO: 495682 - RNA, 19 nt, Homo sapiens
  misc_RNA (1)...(19): siRNA sense strand
acacaaggaacugguuuaa

SEQ ID NO: 495683 - RNA, 19 nt, Homo sapiens
  misc_RNA (1)...(19): siRNA sense strand
aggaaauggugcaggcuuu

SEQ ID NO: 495684 - RNA, 19 nt, Homo sapiens
  misc_RNA (1)...(19): siRNA sense strand
acccggaccuucauugcua

SEQ ID NO: 495685 - RNA, 19 nt, Homo sapiens
  misc_RNA (1)...(19): siRNA sense strand
ggaaguggaaggacagucu

SEQ ID NO: 495686 - RNA, 19 nt, Homo sapiens
  misc_RNA (1)...(19): siRNA sense strand
ggauagcaggaauaugaaa

SEQ ID NO: 495687 - RNA, 19 nt, Homo sapiens
  misc_RNA (1)...(19): siRNA sense strand
augaaacccugcaaggaaa

SEQ ID NO: 495688 - RNA, 19 nt, Homo sapiens
  misc_RNA (1)...(19): siRNA sense strand
gagaaggcucccaaaguca

SEQ ID NO: 495689 - RNA, 19 nt, Homo sapiens
  misc_RNA (1)...(19): siRNA sense strand
cuacugcgcccuacucugu

SEQ ID NO: 495690 - RNA, 19 nt, Homo sapiens
  misc_RNA (1)...(19): siRNA sense strand
gcgaaagaagaaugaaaug

SEQ ID NO: 495691 - RNA, 19 nt, Homo sapiens
  misc_RNA (1)...(19): siRNA sense strand
ucugagacccuaaagcauu

SEQ ID NO: 495692 - RNA, 19 nt, Homo sapiens
  misc_RNA (1)...(19): siRNA sense strand
gcccuacucugugaagaau

SEQ ID NO: 495693 - RNA, 19 nt, Homo sapiens
  misc_RNA (1)...(19): siRNA sense strand
cuuacgggauaaaguauga

SEQ ID NO: 495694 - RNA, 19 nt, Homo sapiens
  misc_RNA (1)...(19): siRNA sense strand
gaccaacaacuaagacaca

SEQ ID NO: 495695 - RNA, 19 nt, Homo sapiens
  misc_RNA (1)...(19): siRNA sense strand
caaugaaacccugcaagga

SEQ ID NO: 495696 - RNA, 19 nt, Homo sapiens
  misc_RNA (1)...(19): siRNA sense strand
gacauugacagcucugaga

SEQ ID NO: 495697 - RNA, 19 nt, Homo sapiens
  misc_RNA (1)...(19): siRNA sense strand
ccuggacggccgagaguua

SEQ ID NO: 495698 - RNA, 19 nt, Homo sapiens
  misc_RNA (1)...(19): siRNA sense strand
cuaaagaagugugggacau

SEQ ID NO: 495699 - RNA, 19 nt, Homo sapiens
  misc_RNA (1)...(19): siRNA sense strand
ggccgugacauugauauaa

SEQ ID NO: 495700 - RNA, 19 nt, Homo sapiens
  misc_RNA (1)...(19): siRNA sense strand
uccagaaucuccgcuuuga

SEQ ID NO: 495701 - RNA, 19 nt, Homo sapiens
  misc_RNA (1)...(19): siRNA sense strand
gaugagaaccaaaagauau

SEQ ID NO: 495702 - RNA, 19 nt, Homo sapiens
  misc_RNA (1)...(19): siRNA sense strand
agaagaaugaaauggcaua

SEQ ID NO: 495703 - RNA, 19 nt, Homo sapiens
  misc_RNA (1)...(19): siRNA sense strand
ccgcaccagugauuguuga

SEQ ID NO: 495704 - RNA, 19 nt, Homo sapiens
  misc_RNA (1)...(19): siRNA sense strand
ggcagcaguuccagucugu

SEQ ID NO: 495705 - RNA, 19 nt, Homo sapiens
  misc_RNA (1)...(19): siRNA sense strand
uuaugaacaugguggguau

SEQ ID NO: 495706 - RNA, 19 nt, Homo sapiens
  misc_RNA (1)...(19): siRNA sense strand
cagaggccuucaagcaaau

SEQ ID NO: 495707 - RNA, 19 nt, Homo sapiens
  misc_RNA (1)...(19): siRNA sense strand
ggaguugggcaaggugaaa

SEQ ID NO: 495708 - RNA, 19 nt, Homo sapiens
  misc_RNA (1)...(19): siRNA sense strand
gagcuguugucuuugaacu

SEQ ID NO: 495709 - RNA, 19 nt, Homo sapiens
  misc_RNA (1)...(19): siRNA sense strand
aaucgggcaugcuucuuug

SEQ ID NO: 495710 - RNA, 19 nt, Homo sapiens
  misc_RNA (1)...(19): siRNA sense strand
auuaccacguggagaaaua

SEQ ID NO: 495711 - RNA, 19 nt, Homo sapiens
  misc_RNA (1)...(19): siRNA sense strand
ccaguccgccuauguaagu

SEQ ID NO: 495712 - RNA, 19 nt, Homo sapiens
  misc_RNA (1)...(19): siRNA sense strand
ucaaugggguuuucaagga

SEQ ID NO: 495713 - RNA, 19 nt, Homo sapiens
  misc_RNA (1)...(19): siRNA sense strand
caucaucgccuacaucaug

SEQ ID NO: 495714 - RNA, 19 nt, Homo sapiens
  misc_RNA (1)...(19): siRNA sense strand
gcuggaagcccuccgugua

SEQ ID NO: 495715 - RNA, 19 nt, Homo sapiens
  misc_RNA (1)...(19): siRNA sense strand
agaagcaacugucugagau

SEQ ID NO: 495716 - RNA, 19 nt, Homo sapiens
  misc_RNA (1)...(19): siRNA sense strand
gcugcaacaucuccauaga

SEQ ID NO: 495717 - RNA, 19 nt, Homo sapiens
  misc_RNA (1)...(19): siRNA sense strand
caccgucguuuccaccaua

SEQ ID NO: 495718 - RNA, 19 nt, Homo sapiens
  misc_RNA (1)...(19): siRNA sense strand
caaggccucuaucgcuuug

SEQ ID NO: 495719 - RNA, 19 nt, Homo sapiens
  misc_RNA (1)...(19): siRNA sense strand
ggugggagccuuugcaauc

SEQ ID NO: 495720 - RNA, 19 nt, Homo sapiens
  misc_RNA (1)...(19): siRNA sense strand
gccagaacgcccacuauga

SEQ ID NO: 495721 - RNA, 19 nt, Homo sapiens
  misc_RNA (1)...(19): siRNA sense strand
cggaaccgcugcaacaucu

SEQ ID NO: 495722 - RNA, 19 nt, Homo sapiens
  misc_RNA (1)...(19): siRNA sense strand
ggaagcccuccguguacua

SEQ ID NO: 495723 - RNA, 19 nt, Homo sapiens
  misc_RNA (1)...(19): siRNA sense strand
gcaccaucuuguucuucaa

SEQ ID NO: 495724 - RNA, 19 nt, Homo sapiens
  misc_RNA (1)...(19): siRNA sense strand
ugucaucucuauccucauc

SEQ ID NO: 495725 - RNA, 19 nt, Homo sapiens
  misc_RNA (1)...(19): siRNA sense strand
ggagcuacuuugacucacu

SEQ ID NO: 495726 - RNA, 19 nt, Homo sapiens
  misc_RNA (1)...(19): siRNA sense strand
gaagcaacugucugagaug

SEQ ID NO: 495727 - RNA, 19 nt, Homo sapiens
  misc_RNA (1)...(19): siRNA sense strand
ccagaacgcccacuaugag

SEQ ID NO: 495728 - RNA, 19 nt, Homo sapiens
  misc_RNA (1)...(19): siRNA sense strand
ucucuauccucaucaaaca

SEQ ID NO: 495729 - RNA, 19 nt, Homo sapiens
  misc_RNA (1)...(19): siRNA sense strand
ugacaacuccggcgacagu

SEQ ID NO: 495730 - RNA, 19 nt, Homo sapiens
  misc_RNA (1)...(19): siRNA sense strand
gugggagccuuugcaauca

SEQ ID NO: 495731 - RNA, 19 nt, Homo sapiens
  misc_RNA (1)...(19): siRNA sense strand
ccaaggccucuaucgcuuu

SEQ ID NO: 495732 - RNA, 19 nt, Homo sapiens
  misc_RNA (1)...(19): siRNA sense strand
ccuccauccucaucucuug

SEQ ID NO: 495733 - RNA, 19 nt, Homo sapiens
  misc_RNA (1)...(19): siRNA sense strand
gggagccuuugcaaucaug

SEQ ID NO: 495734 - RNA, 19 nt, Homo sapiens
  misc_RNA (1)...(19): siRNA sense strand
ccagcaccaucuuguucuu

SEQ ID NO: 495735 - RNA, 19 nt, Homo sapiens
  misc_RNA (1)...(19): siRNA sense strand
gcagccagaacgcccacua

SEQ ID NO: 495736 - RNA, 19 nt, Homo sapiens
  misc_RNA (1)...(19): siRNA sense strand
ccgggacaaugaauucuca

SEQ ID NO: 495737 - RNA, 19 nt, Homo sapiens
  misc_RNA (1)...(19): siRNA sense strand
gaaggcuggagcuacuuug

SEQ ID NO: 495738 - RNA, 19 nt, Homo sapiens
  misc_RNA (1)...(19): siRNA sense strand
caucuacuccuuguucaau

SEQ ID NO: 495739 - RNA, 19 nt, Homo sapiens
  misc_RNA (1)...(19): siRNA sense strand
ccuuugcaaucaugaacaa

SEQ ID NO: 495740 - RNA, 19 nt, Homo sapiens
  misc_RNA (1)...(19): siRNA sense strand
gcaccgucguuuccaccau

SEQ ID NO: 495741 - RNA, 19 nt, Homo sapiens
  misc_RNA (1)...(19): siRNA sense strand
ugaaggcuggagcuacuuu

SEQ ID NO: 495742 - RNA, 19 nt, Homo sapiens
  misc_RNA (1)...(19): siRNA sense strand
uguucaaugucaucucuau

SEQ ID NO: 495743 - RNA, 19 nt, Homo sapiens
  misc_RNA (1)...(19): siRNA sense strand
ucgccuacaucaugaaguc

SEQ ID NO: 495744 - RNA, 19 nt, Homo sapiens
  misc_RNA (1)...(19): siRNA sense strand
cagaacgcccacuaugaga

SEQ ID NO: 495745 - RNA, 19 nt, Homo sapiens
  misc_RNA (1)...(19): siRNA sense strand
ggcuggagcuacuuugacu

SEQ ID NO: 495746 - RNA, 19 nt, Homo sapiens
  misc_RNA (1)...(19): siRNA sense strand
gcacagccuccauccucau

SEQ ID NO: 495747 - RNA, 19 nt, Homo sapiens
  misc_RNA (1)...(19): siRNA sense strand
ucuacuccuuguucaaugu

SEQ ID NO: 495748 - RNA, 19 nt, Homo sapiens
  misc_RNA (1)...(19): siRNA sense strand
gcaucuacuccuuguucaa

SEQ ID NO: 495749 - RNA, 19 nt, Homo sapiens
  misc_RNA (1)...(19): siRNA sense strand
ugacucacucuacuucugu

SEQ ID NO: 495750 - RNA, 19 nt, Homo sapiens
  misc_RNA (1)...(19): siRNA sense strand
gacucacucuacuucuguu

SEQ ID NO: 495751 - RNA, 19 nt, Homo sapiens
  misc_RNA (1)...(19): siRNA sense strand
ucaucucuauccucaucaa

SEQ ID NO: 495752 - RNA, 19 nt, Homo sapiens
  misc_RNA (1)...(19): siRNA sense strand
uuucagcaccauuggcuuu

SEQ ID NO: 495753 - RNA, 19 nt, Homo sapiens
  misc_RNA (1)...(19): siRNA sense strand
ucacucuacuucuguuuug

SEQ ID NO: 495754 - RNA, 19 nt, Homo sapiens
  misc_RNA (1)...(19): siRNA sense strand
ggaccauccuguucuucaa

SEQ ID NO: 495755 - RNA, 19 nt, Homo sapiens
  misc_RNA (1)...(19): siRNA sense strand
gcuggaagcccucggugua

SEQ ID NO: 495756 - RNA, 19 nt, Homo sapiens
  misc_RNA (1)...(19): siRNA sense strand
gcauuuacucgcucuucaa

SEQ ID NO: 495757 - RNA, 19 nt, Homo sapiens
  misc_RNA (1)...(19): siRNA sense strand
gcgcugggcaucaugaaca

SEQ ID NO: 495758 - RNA, 19 nt, Homo sapiens
  misc_RNA (1)...(19): siRNA sense strand
gcugcuggccuucaucaug

SEQ ID NO: 495759 - RNA, 19 nt, Homo sapiens
  misc_RNA (1)...(19): siRNA sense strand
gcgcugggaccauccuguu

SEQ ID NO: 495760 - RNA, 19 nt, Homo sapiens
  misc_RNA (1)...(19): siRNA sense strand
gcaacuuccucuucauccu

SEQ ID NO: 495761 - RNA, 19 nt, Homo sapiens
  misc_RNA (1)...(19): siRNA sense strand
gggaccauccuguucuuca

SEQ ID NO: 495762 - RNA, 19 nt, Homo sapiens
  misc_RNA (1)...(19): siRNA sense strand
cgggcgagcucaucuccau

SEQ ID NO: 495763 - RNA, 19 nt, Homo sapiens
  misc_RNA (1)...(19): siRNA sense strand
uggacucgcucuacuucug

SEQ ID NO: 495764 - RNA, 19 nt, Homo sapiens
  misc_RNA (1)...(19): siRNA sense strand
gggcaacuuccucuucauc

SEQ ID NO: 495765 - RNA, 19 nt, Homo sapiens
  misc_RNA (1)...(19): siRNA sense strand
ggcgugugcugcauuuacu

SEQ ID NO: 495766 - RNA, 19 nt, Homo sapiens
  misc_RNA (1)...(19): siRNA sense strand
cggagaagcucaucgacua

SEQ ID NO: 495767 - RNA, 19 nt, Homo sapiens
  misc_RNA (1)...(19): siRNA sense strand
uggcagugaucgaguauaa

SEQ ID NO: 495768 - RNA, 19 nt, Homo sapiens
  misc_RNA (1)...(19): siRNA sense strand
ccaaagcuguuucaaguac

SEQ ID NO: 495769 - RNA, 19 nt, Homo sapiens
  misc_RNA (1)...(19): siRNA sense strand
ucccaaagcuguuucaagu

SEQ ID NO: 495770 - RNA, 19 nt, Homo sapiens
  misc_RNA (1)...(19): siRNA sense strand
gcucaaacaccagggauuu

SEQ ID NO: 495771 - RNA, 19 nt, Homo sapiens
  misc_RNA (1)...(19): siRNA sense strand
gaucgaguauaaagggaau

SEQ ID NO: 495772 - RNA, 19 nt, Homo sapiens
  misc_RNA (1)...(19): siRNA sense strand
gcagugaucgaguauaaag

SEQ ID NO: 495773 - RNA, 19 nt, Homo sapiens
  misc_RNA (1)...(19): siRNA sense strand
gggagacacuaacgaacga

SEQ ID NO: 495774 - RNA, 19 nt, Homo sapiens
  misc_RNA (1)...(19): siRNA sense strand
ucaaacaccagggauuuaa

SEQ ID NO: 495775 - RNA, 19 nt, Homo sapiens
  misc_RNA (1)...(19): siRNA sense strand
acacaagaaugcugcagau

SEQ ID NO: 495776 - RNA, 19 nt, Homo sapiens
  misc_RNA (1)...(19): siRNA sense strand
ucacagagaaggauuugau

SEQ ID NO: 495777 - RNA, 19 nt, Homo sapiens
  misc_RNA (1)...(19): siRNA sense strand
ggagaagcucaucgacuau

SEQ ID NO: 495778 - RNA, 19 nt, Homo sapiens
  misc_RNA (1)...(19): siRNA sense strand
agauggcagugaucgagua

SEQ ID NO: 495779 - RNA, 19 nt, Homo sapiens
  misc_RNA (1)...(19): siRNA sense strand
gcugggagacacuaacgaa

SEQ ID NO: 495780 - RNA, 19 nt, Homo sapiens
  misc_RNA (1)...(19): siRNA sense strand
ggaagcugggagacacuaa

SEQ ID NO: 495781 - RNA, 19 nt, Homo sapiens
  misc_RNA (1)...(19): siRNA sense strand
gaaugcugcagaucccaaa

SEQ ID NO: 495782 - RNA, 19 nt, Homo sapiens
  misc_RNA (1)...(19): siRNA sense strand
gagaagcucaucgacuaug

SEQ ID NO: 495783 - RNA, 19 nt, Homo sapiens
  misc_RNA (1)...(19): siRNA sense strand
ggcaggaccucaggcaaag

SEQ ID NO: 495784 - RNA, 19 nt, Homo sapiens
  misc_RNA (1)...(19): siRNA sense strand
gcagagacagccaccuuac

SEQ ID NO: 495785 - RNA, 19 nt, Homo sapiens
  misc_RNA (1)...(19): siRNA sense strand
cggcaggaccucaggcaaa

SEQ ID NO: 495786 - RNA, 19 nt, Homo sapiens
  misc_RNA (1)...(19): siRNA sense strand
ccgcguauuucgccguaug

SEQ ID NO: 495787 - RNA, 19 nt, Homo sapiens
  misc_RNA (1)...(19): siRNA sense strand
gcucacagagaaggauuug

SEQ ID NO: 495788 - RNA, 19 nt, Homo sapiens
  misc_RNA (1)...(19): siRNA sense strand
aaagcuguuucaaguacug

SEQ ID NO: 495789 - RNA, 19 nt, Homo sapiens
  misc_RNA (1)...(19): siRNA sense strand
cgcagagacagccaccuua

SEQ ID NO: 495790 - RNA, 19 nt, Homo sapiens
  misc_RNA (1)...(19): siRNA sense strand
caaagcuguuucaaguacu

SEQ ID NO: 495791 - RNA, 19 nt, Homo sapiens
  misc_RNA (1)...(19): siRNA sense strand
caaccacagcucccacaca

SEQ ID NO: 495792 - RNA, 19 nt, Homo sapiens
  misc_RNA (1)...(19): siRNA sense strand
cccaaagcuguuucaagua

SEQ ID NO: 495793 - RNA, 19 nt, Homo sapiens
  misc_RNA (1)...(19): siRNA sense strand
cagccaagauguuuaacua

SEQ ID NO: 495794 - RNA, 19 nt, Homo sapiens
  misc_RNA (1)...(19): siRNA sense strand
uaacaaccaucguaagaau

SEQ ID NO: 495795 - RNA, 19 nt, Homo sapiens
  misc_RNA (1)...(19): siRNA sense strand
gcuauuacuucuucaauuc

SEQ ID NO: 495796 - RNA, 19 nt, Homo sapiens
  misc_RNA (1)...(19): siRNA sense strand
gaaagcugguagaagauga

SEQ ID NO: 495797 - RNA, 19 nt, Homo sapiens
  misc_RNA (1)...(19): siRNA sense strand
gcucuauccugccuucuuu

SEQ ID NO: 495798 - RNA, 19 nt, Homo sapiens
  misc_RNA (1)...(19): siRNA sense strand
ugauugaacuuuccuucua

SEQ ID NO: 495799 - RNA, 19 nt, Homo sapiens
  misc_RNA (1)...(19): siRNA sense strand
gcacuaucccuucccagua

SEQ ID NO: 495800 - RNA, 19 nt, Homo sapiens
  misc_RNA (1)...(19): siRNA sense strand
cuggaaagcugguagaaga

SEQ ID NO: 495801 - RNA, 19 nt, Homo sapiens
  misc_RNA (1)...(19): siRNA sense strand
gaagaacaccugcaacaac

SEQ ID NO: 495802 - RNA, 19 nt, Homo sapiens
  misc_RNA (1)...(19): siRNA sense strand
gcaugacucuuccgauuac

SEQ ID NO: 495803 - RNA, 19 nt, Homo sapiens
  misc_RNA (1)...(19): siRNA sense strand
gcgcauggcccacaaguuc

SEQ ID NO: 495804 - RNA, 19 nt, Homo sapiens
  misc_RNA (1)...(19): siRNA sense strand
ggagucagccaagauguuu

SEQ ID NO: 495805 - RNA, 19 nt, Homo sapiens
  misc_RNA (1)...(19): siRNA sense strand
gcaacaacaucuucaucgu

SEQ ID NO: 495806 - RNA, 19 nt, Homo sapiens
  misc_RNA (1)...(19): siRNA sense strand
ccucugaugucaagcgaaa

SEQ ID NO: 495807 - RNA, 19 nt, Homo sapiens
  misc_RNA (1)...(19): siRNA sense strand
ggaagaacaccugcaacaa

SEQ ID NO: 495808 - RNA, 19 nt, Homo sapiens
  misc_RNA (1)...(19): siRNA sense strand
ucaauaacaaccaucguaa

SEQ ID NO: 495809 - RNA, 19 nt, Homo sapiens
  misc_RNA (1)...(19): siRNA sense strand
aagaacaccugcaacaaca

SEQ ID NO: 495810 - RNA, 19 nt, Homo sapiens
  misc_RNA (1)...(19): siRNA sense strand
ggcuauuacuucuucaauu

SEQ ID NO: 495811 - RNA, 19 nt, Homo sapiens
  misc_RNA (1)...(19): siRNA sense strand
uuuccugguuugccaauua

SEQ ID NO: 495812 - RNA, 19 nt, Homo sapiens
  misc_RNA (1)...(19): siRNA sense strand
ucuaugacaugaagaaagu

SEQ ID NO: 495813 - RNA, 19 nt, Homo sapiens
  misc_RNA (1)...(19): siRNA sense strand
cugcaugacucuuccgauu

SEQ ID NO: 495814 - RNA, 19 nt, Homo sapiens
  misc_RNA (1)...(19): siRNA sense strand
cauccgagcugggacucua

SEQ ID NO: 495815 - RNA, 19 nt, Homo sapiens
  misc_RNA (1)...(19): siRNA sense strand
gaacaccugcaacaacauc

SEQ ID NO: 495816 - RNA, 19 nt, Homo sapiens
  misc_RNA (1)...(19): siRNA sense strand
gguacuacaugauugaacu

SEQ ID NO: 495817 - RNA, 19 nt, Homo sapiens
  misc_RNA (1)...(19): siRNA sense strand
cacuaucccuucccaguau

SEQ ID NO: 495818 - RNA, 19 nt, Homo sapiens
  misc_RNA (1)...(19): siRNA sense strand
gauugaacuuuccuucuac

SEQ ID NO: 495819 - RNA, 19 nt, Homo sapiens
  misc_RNA (1)...(19): siRNA sense strand
aauaacaaccaucguaaga

SEQ ID NO: 495820 - RNA, 19 nt, Homo sapiens
  misc_RNA (1)...(19): siRNA sense strand
gauggaagaacaccugcaa

SEQ ID NO: 495821 - RNA, 19 nt, Homo sapiens
  misc_RNA (1)...(19): siRNA sense strand
ggaaagcugguagaagaug

SEQ ID NO: 495822 - RNA, 19 nt, Homo sapiens
  misc_RNA (1)...(19): siRNA sense strand
guauugguacuacaugauu

SEQ ID NO: 495823 - RNA, 19 nt, Homo sapiens
  misc_RNA (1)...(19): siRNA sense strand
gaugucaagcgaaaggauu

SEQ ID NO: 495824 - RNA, 19 nt, Homo sapiens
  misc_RNA (1)...(19): siRNA sense strand
acaaccaucguaagaauga

SEQ ID NO: 495825 - RNA, 19 nt, Homo sapiens
  misc_RNA (1)...(19): siRNA sense strand
caacaucuucaucgucuuc

SEQ ID NO: 495826 - RNA, 19 nt, Homo sapiens
  misc_RNA (1)...(19): siRNA sense strand
gcagugaccgggaagaaac

SEQ ID NO: 495827 - RNA, 19 nt, Homo sapiens
  misc_RNA (1)...(19): siRNA sense strand
gagcugggacucuaaucau

SEQ ID NO: 495828 - RNA, 19 nt, Homo sapiens
  misc_RNA (1)...(19): siRNA sense strand
cuucuucaauuccaugaug

SEQ ID NO: 495829 - RNA, 19 nt, Homo sapiens
  misc_RNA (1)...(19): siRNA sense strand
gaaaguuugggagggauau

SEQ ID NO: 495830 - RNA, 19 nt, Homo sapiens
  misc_RNA (1)...(19): siRNA sense strand
ccauguggccaccaucauu

SEQ ID NO: 495831 - RNA, 19 nt, Homo sapiens
  misc_RNA (1)...(19): siRNA sense strand
cuucugggccuaccucauu

SEQ ID NO: 495832 - RNA, 19 nt, Homo sapiens
  misc_RNA (1)...(19): siRNA sense strand
ugcaugacucuuccgauua

SEQ ID NO: 495833 - RNA, 19 nt, Homo sapiens
  misc_RNA (1)...(19): siRNA sense strand
cagcauugccucugauguc

SEQ ID NO: 495834 - RNA, 19 nt, Homo sapiens
  misc_RNA (1)...(19): siRNA sense strand
uauugguacuacaugauug

SEQ ID NO: 495835 - RNA, 19 nt, Homo sapiens
  misc_RNA (1)...(19): siRNA sense strand
uaacuggaaagcugguaga

SEQ ID NO: 495836 - RNA, 19 nt, Homo sapiens
  misc_RNA (1)...(19): siRNA sense strand
ggccgucauuguggauaaa

SEQ ID NO: 495837 - RNA, 19 nt, Homo sapiens
  misc_RNA (1)...(19): siRNA sense strand
gagucagccaagauguuua

SEQ ID NO: 495838 - RNA, 19 nt, Homo sapiens
  misc_RNA (1)...(19): siRNA sense strand
caucagcuuuuccugguuu

SEQ ID NO: 495839 - RNA, 19 nt, Homo sapiens
  misc_RNA (1)...(19): siRNA sense strand
cucaauaacaaccaucgua

SEQ ID NO: 495840 - RNA, 19 nt, Homo sapiens
  misc_RNA (1)...(19): siRNA sense strand
cuacaugauugaacuuucc

SEQ ID NO: 495841 - RNA, 19 nt, Homo sapiens
  misc_RNA (1)...(19): siRNA sense strand
caauaacaaccaucguaag

SEQ ID NO: 495842 - RNA, 19 nt, Homo sapiens
  misc_RNA (1)...(19): siRNA sense strand
uggaagaacaccugcaaca

SEQ ID NO: 495843 - RNA, 19 nt, Homo sapiens
  misc_RNA (1)...(19): siRNA sense strand
agucagccaagauguuuaa

SEQ ID NO: 495844 - RNA, 19 nt, Homo sapiens
  misc_RNA (1)...(19): siRNA sense strand
ucaaggaacagaucaucca

SEQ ID NO: 495845 - RNA, 19 nt, Homo sapiens
  misc_RNA (1)...(19): siRNA sense strand
ccuucuggauccugcauug

SEQ ID NO: 495846 - RNA, 19 nt, Homo sapiens
  misc_RNA (1)...(19): siRNA sense strand
ccaucauucucaucagcuu

SEQ ID NO: 495847 - RNA, 19 nt, Homo sapiens
  misc_RNA (1)...(19): siRNA sense strand
ggauuucaaggaacagauc

SEQ ID NO: 495848 - RNA, 19 nt, Homo sapiens
  misc_RNA (1)...(19): siRNA sense strand
guacuacaugauugaacuu

SEQ ID NO: 495849 - RNA, 19 nt, Homo sapiens
  misc_RNA (1)...(19): siRNA sense strand
cgagcugggacucuaauca

SEQ ID NO: 495850 - RNA, 19 nt, Homo sapiens
  misc_RNA (1)...(19): siRNA sense strand
gaagccagcuggagauuca

SEQ ID NO: 495851 - RNA, 19 nt, Homo sapiens
  misc_RNA (1)...(19): siRNA sense strand
cagccaagauguuuaacua

SEQ ID NO: 495852 - RNA, 19 nt, Homo sapiens
  misc_RNA (1)...(19): siRNA sense strand
uaacaaccaucguaagaau

SEQ ID NO: 495853 - RNA, 19 nt, Homo sapiens
  misc_RNA (1)...(19): siRNA sense strand
gcuauuacuucuucaauuc

SEQ ID NO: 495854 - RNA, 19 nt, Homo sapiens
  misc_RNA (1)...(19): siRNA sense strand
gaaagcugguagaagauga

SEQ ID NO: 495855 - RNA, 19 nt, Homo sapiens
  misc_RNA (1)...(19): siRNA sense strand
gcucuauccugccuucuuu

SEQ ID NO: 495856 - RNA, 19 nt, Homo sapiens
  misc_RNA (1)...(19): siRNA sense strand
ugauugaacuuuccuucua

SEQ ID NO: 495857 - RNA, 19 nt, Homo sapiens
  misc_RNA (1)...(19): siRNA sense strand
gcacuaucccuucccagua

SEQ ID NO: 495858 - RNA, 19 nt, Homo sapiens
  misc_RNA (1)...(19): siRNA sense strand
cuggaaagcugguagaaga

SEQ ID NO: 495859 - RNA, 19 nt, Homo sapiens
  misc_RNA (1)...(19): siRNA sense strand
ccaagcagguggaaguaga

SEQ ID NO: 495860 - RNA, 19 nt, Homo sapiens
  misc_RNA (1)...(19): siRNA sense strand
gaagaacaccugcaacaac

SEQ ID NO: 495861 - RNA, 19 nt, Homo sapiens
  misc_RNA (1)...(19): siRNA sense strand
gcaugacucuuccgauuac

SEQ ID NO: 495862 - RNA, 19 nt, Homo sapiens
  misc_RNA (1)...(19): siRNA sense strand
gcgcauggcccacaaguuc

SEQ ID NO: 495863 - RNA, 19 nt, Homo sapiens
  misc_RNA (1)...(19): siRNA sense strand
ggagucagccaagauguuu

SEQ ID NO: 495864 - RNA, 19 nt, Homo sapiens
  misc_RNA (1)...(19): siRNA sense strand
gcaacaacaucuucaucgu

SEQ ID NO: 495865 - RNA, 19 nt, Homo sapiens
  misc_RNA (1)...(19): siRNA sense strand
gcugcccucuugaacauaa

SEQ ID NO: 495866 - RNA, 19 nt, Homo sapiens
  misc_RNA (1)...(19): siRNA sense strand
ccucugaugucaagcgaaa

SEQ ID NO: 495867 - RNA, 19 nt, Homo sapiens
  misc_RNA (1)...(19): siRNA sense strand
ggaagaacaccugcaacaa

SEQ ID NO: 495868 - RNA, 19 nt, Homo sapiens
  misc_RNA (1)...(19): siRNA sense strand
ucaauaacaaccaucguaa

SEQ ID NO: 495869 - RNA, 19 nt, Homo sapiens
  misc_RNA (1)...(19): siRNA sense strand
aagaacaccugcaacaaca

SEQ ID NO: 495870 - RNA, 19 nt, Homo sapiens
  misc_RNA (1)...(19): siRNA sense strand
ggcuauuacuucuucaauu

SEQ ID NO: 495871 - RNA, 19 nt, Homo sapiens
  misc_RNA (1)...(19): siRNA sense strand
ucuaugacaugaagaaagu

SEQ ID NO: 495872 - RNA, 19 nt, Homo sapiens
  misc_RNA (1)...(19): siRNA sense strand
cugcaugacucuuccgauu

SEQ ID NO: 495873 - RNA, 19 nt, Homo sapiens
  misc_RNA (1)...(19): siRNA sense strand
uuuccugguuugccaauua

SEQ ID NO: 495874 - RNA, 19 nt, Homo sapiens
  misc_RNA (1)...(19): siRNA sense strand
ggcccagucuccucaagaa

SEQ ID NO: 495875 - RNA, 19 nt, Homo sapiens
  misc_RNA (1)...(19): siRNA sense strand
ccagucuccucaagaaguu

SEQ ID NO: 495876 - RNA, 19 nt, Homo sapiens
  misc_RNA (1)...(19): siRNA sense strand
cauccgagcugggacucua

SEQ ID NO: 495877 - RNA, 19 nt, Homo sapiens
  misc_RNA (1)...(19): siRNA sense strand
gaacaccugcaacaacauc

SEQ ID NO: 495878 - RNA, 19 nt, Homo sapiens
  misc_RNA (1)...(19): siRNA sense strand
cacuaucccuucccaguau

SEQ ID NO: 495879 - RNA, 19 nt, Homo sapiens
  misc_RNA (1)...(19): siRNA sense strand
gauugaacuuuccuucuac

SEQ ID NO: 495880 - RNA, 19 nt, Homo sapiens
  misc_RNA (1)...(19): siRNA sense strand
gguacuacaugauugaacu

SEQ ID NO: 495881 - RNA, 19 nt, Homo sapiens
  misc_RNA (1)...(19): siRNA sense strand
aauaacaaccaucguaaga

SEQ ID NO: 495882 - RNA, 19 nt, Homo sapiens
  misc_RNA (1)...(19): siRNA sense strand
guauugguacuacaugauu

SEQ ID NO: 495883 - RNA, 19 nt, Homo sapiens
  misc_RNA (1)...(19): siRNA sense strand
ggaaagcugguagaagaug

SEQ ID NO: 495884 - RNA, 19 nt, Homo sapiens
  misc_RNA (1)...(19): siRNA sense strand
gauggaagaacaccugcaa

SEQ ID NO: 495885 - RNA, 19 nt, Homo sapiens
  misc_RNA (1)...(19): siRNA sense strand
gaugucaagcgaaaggauu

SEQ ID NO: 495886 - RNA, 19 nt, Homo sapiens
  misc_RNA (1)...(19): siRNA sense strand
acaaccaucguaagaauga

SEQ ID NO: 495887 - RNA, 19 nt, Homo sapiens
  misc_RNA (1)...(19): siRNA sense strand
caacaucuucaucgucuuc

SEQ ID NO: 495888 - RNA, 19 nt, Homo sapiens
  misc_RNA (1)...(19): siRNA sense strand
gcuggagauucacauuuua

SEQ ID NO: 495889 - RNA, 19 nt, Homo sapiens
  misc_RNA (1)...(19): siRNA sense strand
cagcuggagauucacauuu

SEQ ID NO: 495890 - RNA, 19 nt, Homo sapiens
  misc_RNA (1)...(19): siRNA sense strand
gcagguggaaguagagcuu

SEQ ID NO: 495891 - RNA, 19 nt, Homo sapiens
  misc_RNA (1)...(19): siRNA sense strand
gcagugaccgggaagaaac

SEQ ID NO: 495892 - RNA, 19 nt, Homo sapiens
  misc_RNA (1)...(19): siRNA sense strand
gagcugggacucuaaucau

SEQ ID NO: 495893 - RNA, 19 nt, Homo sapiens
  misc_RNA (1)...(19): siRNA sense strand
cuucuucaauuccaugaug

SEQ ID NO: 495894 - RNA, 19 nt, Homo sapiens
  misc_RNA (1)...(19): siRNA sense strand
gaaaguuugggagggauau

SEQ ID NO: 495895 - RNA, 19 nt, Homo sapiens
  misc_RNA (1)...(19): siRNA sense strand
ccauguggccaccaucauu

SEQ ID NO: 495896 - RNA, 19 nt, Homo sapiens
  misc_RNA (1)...(19): siRNA sense strand
gagaagccagcuggagauu

SEQ ID NO: 495897 - RNA, 19 nt, Homo sapiens
  misc_RNA (1)...(19): siRNA sense strand
cuucugggccuaccucauu

SEQ ID NO: 495898 - RNA, 19 nt, Homo sapiens
  misc_RNA (1)...(19): siRNA sense strand
uuaccugauugccuucauu

SEQ ID NO: 495899 - RNA, 19 nt, Homo sapiens
  misc_RNA (1)...(19): siRNA sense strand
ugcaugacucuuccgauua

SEQ ID NO: 495900 - RNA, 19 nt, Homo sapiens
  misc_RNA (1)...(19): siRNA sense strand
uggcugcccucuugaacau

SEQ ID NO: 495901 - RNA, 19 nt, Homo sapiens
  misc_RNA (1)...(19): siRNA sense strand
ggccgucauuguggauaaa

SEQ ID NO: 495902 - RNA, 19 nt, Homo sapiens
  misc_RNA (1)...(19): siRNA sense strand
uaacuggaaagcugguaga

SEQ ID NO: 495903 - RNA, 19 nt, Homo sapiens
  misc_RNA (1)...(19): siRNA sense strand
gagucagccaagauguuua

SEQ ID NO: 495904 - RNA, 19 nt, Homo sapiens
  misc_RNA (1)...(19): siRNA sense strand
cagcauugccucugauguc

SEQ ID NO: 495905 - RNA, 19 nt, Homo sapiens
  misc_RNA (1)...(19): siRNA sense strand
uauugguacuacaugauug

SEQ ID NO: 495906 - RNA, 19 nt, Homo sapiens
  misc_RNA (1)...(19): siRNA sense strand
cucaagaaguuccgagaag

SEQ ID NO: 495907 - RNA, 19 nt, Homo sapiens
  misc_RNA (1)...(19): siRNA sense strand
cucaauaacaaccaucgua

SEQ ID NO: 495908 - RNA, 19 nt, Homo sapiens
  misc_RNA (1)...(19): siRNA sense strand
caucagcuuuuccugguuu

SEQ ID NO: 495909 - RNA, 19 nt, Homo sapiens
  misc_RNA (1)...(19): siRNA sense strand
cuacaugauugaacuuucc

SEQ ID NO: 495910 - RNA, 19 nt, Homo sapiens
  misc_RNA (1)...(19): siRNA sense strand
caauaacaaccaucguaag

SEQ ID NO: 495911 - RNA, 19 nt, Homo sapiens
  misc_RNA (1)...(19): siRNA sense strand
uggaagaacaccugcaaca

SEQ ID NO: 495912 - RNA, 19 nt, Homo sapiens
  misc_RNA (1)...(19): siRNA sense strand
agucagccaagauguuuaa

SEQ ID NO: 495913 - RNA, 19 nt, Homo sapiens
  misc_RNA (1)...(19): siRNA sense strand
uggccgucauuguggauaa

SEQ ID NO: 495914 - RNA, 19 nt, Homo sapiens
  misc_RNA (1)...(19): siRNA sense strand
cgagaagccagcuggagau

SEQ ID NO: 495915 - RNA, 19 nt, Homo sapiens
  misc_RNA (1)...(19): siRNA sense strand
ccuucuggauccugcauug

SEQ ID NO: 495916 - RNA, 19 nt, Homo sapiens
  misc_RNA (1)...(19): siRNA sense strand
accacuggcugcccucuug

SEQ ID NO: 495917 - RNA, 19 nt, Homo sapiens
  misc_RNA (1)...(19): siRNA sense strand
ucuugaacauaaaggagaa

SEQ ID NO: 495918 - RNA, 19 nt, Homo sapiens
  misc_RNA (1)...(19): siRNA sense strand
ccaucauucucaucagcuu

SEQ ID NO: 495919 - RNA, 19 nt, Homo sapiens
  misc_RNA (1)...(19): siRNA sense strand
ucaaggaacagaucaucca

SEQ ID NO: 495920 - RNA, 19 nt, Homo sapiens
  misc_RNA (1)...(19): siRNA sense strand
guacuacaugauugaacuu

SEQ ID NO: 495921 - RNA, 19 nt, Homo sapiens
  misc_RNA (1)...(19): siRNA sense strand
ggauuucaaggaacagauc

SEQ ID NO: 495922 - RNA, 19 nt, Homo sapiens
  misc_RNA (1)...(19): siRNA sense strand
gaacauaaaggagaaaacu

SEQ ID NO: 495923 - RNA, 19 nt, Homo sapiens
  misc_RNA (1)...(19): siRNA sense strand
cgagcugggacucuaauca

SEQ ID NO: 495924 - RNA, 19 nt, Homo sapiens
  misc_RNA (1)...(19): siRNA sense strand
gcccaagcagguggaagua

SEQ ID NO: 495925 - RNA, 19 nt, Homo sapiens
  misc_RNA (1)...(19): siRNA sense strand
ccucaagaaguuccgagaa

SEQ ID NO: 495926 - RNA, 19 nt, Homo sapiens
  misc_RNA (1)...(19): siRNA sense strand
gaagccagcuggagauuca

SEQ ID NO: 495927 - RNA, 19 nt, Homo sapiens
  misc_RNA (1)...(19): siRNA sense strand
cagccaagauguuuaacua

SEQ ID NO: 495928 - RNA, 19 nt, Homo sapiens
  misc_RNA (1)...(19): siRNA sense strand
uaacaaccaucguaagaau

SEQ ID NO: 495929 - RNA, 19 nt, Homo sapiens
  misc_RNA (1)...(19): siRNA sense strand
gcuauuacuucuucaauuc

SEQ ID NO: 495930 - RNA, 19 nt, Homo sapiens
  misc_RNA (1)...(19): siRNA sense strand
gaaagcugguagaagauga

SEQ ID NO: 495931 - RNA, 19 nt, Homo sapiens
  misc_RNA (1)...(19): siRNA sense strand
gcucuauccugccuucuuu

SEQ ID NO: 495932 - RNA, 19 nt, Homo sapiens
  misc_RNA (1)...(19): siRNA sense strand
ugauugaacuuuccuucua

SEQ ID NO: 495933 - RNA, 19 nt, Homo sapiens
  misc_RNA (1)...(19): siRNA sense strand
gcacuaucccuucccagua

SEQ ID NO: 495934 - RNA, 19 nt, Homo sapiens
  misc_RNA (1)...(19): siRNA sense strand
cuggaaagcugguagaaga

SEQ ID NO: 495935 - RNA, 19 nt, Homo sapiens
  misc_RNA (1)...(19): siRNA sense strand
ccaagcagguggaaguaga

SEQ ID NO: 495936 - RNA, 19 nt, Homo sapiens
  misc_RNA (1)...(19): siRNA sense strand
gaagaacaccugcaacaac

SEQ ID NO: 495937 - RNA, 19 nt, Homo sapiens
  misc_RNA (1)...(19): siRNA sense strand
gcaugacucuuccgauuac

SEQ ID NO: 495938 - RNA, 19 nt, Homo sapiens
  misc_RNA (1)...(19): siRNA sense strand
gcgcauggcccacaaguuc

SEQ ID NO: 495939 - RNA, 19 nt, Homo sapiens
  misc_RNA (1)...(19): siRNA sense strand
ggagucagccaagauguuu

SEQ ID NO: 495940 - RNA, 19 nt, Homo sapiens
  misc_RNA (1)...(19): siRNA sense strand
gcaacaacaucuucaucgu

SEQ ID NO: 495941 - RNA, 19 nt, Homo sapiens
  misc_RNA (1)...(19): siRNA sense strand
gcugcccucuugaacauaa

SEQ ID NO: 495942 - RNA, 19 nt, Homo sapiens
  misc_RNA (1)...(19): siRNA sense strand
ccucugaugucaagcgaaa

SEQ ID NO: 495943 - RNA, 19 nt, Homo sapiens
  misc_RNA (1)...(19): siRNA sense strand
ggaagaacaccugcaacaa

SEQ ID NO: 495944 - RNA, 19 nt, Homo sapiens
  misc_RNA (1)...(19): siRNA sense strand
ucaauaacaaccaucguaa

SEQ ID NO: 495945 - RNA, 19 nt, Homo sapiens
  misc_RNA (1)...(19): siRNA sense strand
aagaacaccugcaacaaca

SEQ ID NO: 495946 - RNA, 19 nt, Homo sapiens
  misc_RNA (1)...(19): siRNA sense strand
ggcuauuacuucuucaauu

SEQ ID NO: 495947 - RNA, 19 nt, Homo sapiens
  misc_RNA (1)...(19): siRNA sense strand
ucuaugacaugaagaaagu

SEQ ID NO: 495948 - RNA, 19 nt, Homo sapiens
  misc_RNA (1)...(19): siRNA sense strand
cugcaugacucuuccgauu

SEQ ID NO: 495949 - RNA, 19 nt, Homo sapiens
  misc_RNA (1)...(19): siRNA sense strand
uuuccugguuugccaauua

SEQ ID NO: 495950 - RNA, 19 nt, Homo sapiens
  misc_RNA (1)...(19): siRNA sense strand
ggcccagucuccucaagaa

SEQ ID NO: 495951 - RNA, 19 nt, Homo sapiens
  misc_RNA (1)...(19): siRNA sense strand
ccagucuccucaagaaguu

SEQ ID NO: 495952 - RNA, 19 nt, Homo sapiens
  misc_RNA (1)...(19): siRNA sense strand
cauccgagcugggacucua

SEQ ID NO: 495953 - RNA, 19 nt, Homo sapiens
  misc_RNA (1)...(19): siRNA sense strand
gaacaccugcaacaacauc

SEQ ID NO: 495954 - RNA, 19 nt, Homo sapiens
  misc_RNA (1)...(19): siRNA sense strand
cacuaucccuucccaguau

SEQ ID NO: 495955 - RNA, 19 nt, Homo sapiens
  misc_RNA (1)...(19): siRNA sense strand
gauugaacuuuccuucuac

SEQ ID NO: 495956 - RNA, 19 nt, Homo sapiens
  misc_RNA (1)...(19): siRNA sense strand
gguacuacaugauugaacu

SEQ ID NO: 495957 - RNA, 19 nt, Homo sapiens
  misc_RNA (1)...(19): siRNA sense strand
aauaacaaccaucguaaga

SEQ ID NO: 495958 - RNA, 19 nt, Homo sapiens
  misc_RNA (1)...(19): siRNA sense strand
guauugguacuacaugauu

SEQ ID NO: 495959 - RNA, 19 nt, Homo sapiens
  misc_RNA (1)...(19): siRNA sense strand
ggaaagcugguagaagaug

SEQ ID NO: 495960 - RNA, 19 nt, Homo sapiens
  misc_RNA (1)...(19): siRNA sense strand
gauggaagaacaccugcaa

SEQ ID NO: 495961 - RNA, 19 nt, Homo sapiens
  misc_RNA (1)...(19): siRNA sense strand
gaugucaagcgaaaggauu

SEQ ID NO: 495962 - RNA, 19 nt, Homo sapiens
  misc_RNA (1)...(19): siRNA sense strand
acaaccaucguaagaauga

SEQ ID NO: 495963 - RNA, 19 nt, Homo sapiens
  misc_RNA (1)...(19): siRNA sense strand
caacaucuucaucgucuuc

SEQ ID NO: 495964 - RNA, 19 nt, Homo sapiens
  misc_RNA (1)...(19): siRNA sense strand
gcuggagauucacauuuua

SEQ ID NO: 495965 - RNA, 19 nt, Homo sapiens
  misc_RNA (1)...(19): siRNA sense strand
cagcuggagauucacauuu

SEQ ID NO: 495966 - RNA, 19 nt, Homo sapiens
  misc_RNA (1)...(19): siRNA sense strand
gcagguggaaguagagcuu

SEQ ID NO: 495967 - RNA, 19 nt, Homo sapiens
  misc_RNA (1)...(19): siRNA sense strand
gcagugaccgggaagaaac

SEQ ID NO: 495968 - RNA, 19 nt, Homo sapiens
  misc_RNA (1)...(19): siRNA sense strand
gagcugggacucuaaucau

SEQ ID NO: 495969 - RNA, 19 nt, Homo sapiens
  misc_RNA (1)...(19): siRNA sense strand
cuucuucaauuccaugaug

SEQ ID NO: 495970 - RNA, 19 nt, Homo sapiens
  misc_RNA (1)...(19): siRNA sense strand
gaaaguuugggagggauau

SEQ ID NO: 495971 - RNA, 19 nt, Homo sapiens
  misc_RNA (1)...(19): siRNA sense strand
ccauguggccaccaucauu

SEQ ID NO: 495972 - RNA, 19 nt, Homo sapiens
  misc_RNA (1)...(19): siRNA sense strand
gagaagccagcuggagauu

SEQ ID NO: 495973 - RNA, 19 nt, Homo sapiens
  misc_RNA (1)...(19): siRNA sense strand
cuucugggccuaccucauu

SEQ ID NO: 495974 - RNA, 19 nt, Homo sapiens
  misc_RNA (1)...(19): siRNA sense strand
uuaccugauugccuucauu

SEQ ID NO: 495975 - RNA, 19 nt, Homo sapiens
  misc_RNA (1)...(19): siRNA sense strand
ugcaugacucuuccgauua

SEQ ID NO: 495976 - RNA, 19 nt, Homo sapiens
  misc_RNA (1)...(19): siRNA sense strand
uggcugcccucuugaacau

SEQ ID NO: 495977 - RNA, 19 nt, Homo sapiens
  misc_RNA (1)...(19): siRNA sense strand
ggccgucauuguggauaaa

SEQ ID NO: 495978 - RNA, 19 nt, Homo sapiens
  misc_RNA (1)...(19): siRNA sense strand
uaacuggaaagcugguaga

SEQ ID NO: 495979 - RNA, 19 nt, Homo sapiens
  misc_RNA (1)...(19): siRNA sense strand
gagucagccaagauguuua

SEQ ID NO: 495980 - RNA, 19 nt, Homo sapiens
  misc_RNA (1)...(19): siRNA sense strand
cagcauugccucugauguc

SEQ ID NO: 495981 - RNA, 19 nt, Homo sapiens
  misc_RNA (1)...(19): siRNA sense strand
uauugguacuacaugauug

SEQ ID NO: 495982 - RNA, 19 nt, Homo sapiens
  misc_RNA (1)...(19): siRNA sense strand
cucaagaaguuccgagaag

SEQ ID NO: 495983 - RNA, 19 nt, Homo sapiens
  misc_RNA (1)...(19): siRNA sense strand
cucaauaacaaccaucgua

SEQ ID NO: 495984 - RNA, 19 nt, Homo sapiens
  misc_RNA (1)...(19): siRNA sense strand
caucagcuuuuccugguuu

SEQ ID NO: 495985 - RNA, 19 nt, Homo sapiens
  misc_RNA (1)...(19): siRNA sense strand
cuacaugauugaacuuucc

SEQ ID NO: 495986 - RNA, 19 nt, Homo sapiens
  misc_RNA (1)...(19): siRNA sense strand
caauaacaaccaucguaag

SEQ ID NO: 495987 - RNA, 19 nt, Homo sapiens
  misc_RNA (1)...(19): siRNA sense strand
uggaagaacaccugcaaca

SEQ ID NO: 495988 - RNA, 19 nt, Homo sapiens
  misc_RNA (1)...(19): siRNA sense strand
agucagccaagauguuuaa

SEQ ID NO: 495989 - RNA, 19 nt, Homo sapiens
  misc_RNA (1)...(19): siRNA sense strand
uggccgucauuguggauaa

SEQ ID NO: 495990 - RNA, 19 nt, Homo sapiens
  misc_RNA (1)...(19): siRNA sense strand
cgagaagccagcuggagau

SEQ ID NO: 495991 - RNA, 19 nt, Homo sapiens
  misc_RNA (1)...(19): siRNA sense strand
ccuucuggauccugcauug

SEQ ID NO: 495992 - RNA, 19 nt, Homo sapiens
  misc_RNA (1)...(19): siRNA sense strand
accacuggcugcccucuug

SEQ ID NO: 495993 - RNA, 19 nt, Homo sapiens
  misc_RNA (1)...(19): siRNA sense strand
ucuugaacauaaaggagaa

SEQ ID NO: 495994 - RNA, 19 nt, Homo sapiens
  misc_RNA (1)...(19): siRNA sense strand
ccaucauucucaucagcuu

SEQ ID NO: 495995 - RNA, 19 nt, Homo sapiens
  misc_RNA (1)...(19): siRNA sense strand
ucaaggaacagaucaucca

SEQ ID NO: 495996 - RNA, 19 nt, Homo sapiens
  misc_RNA (1)...(19): siRNA sense strand
guacuacaugauugaacuu

SEQ ID NO: 495997 - RNA, 19 nt, Homo sapiens
  misc_RNA (1)...(19): siRNA sense strand
ggauuucaaggaacagauc

SEQ ID NO: 495998 - RNA, 19 nt, Homo sapiens
  misc_RNA (1)...(19): siRNA sense strand
gaacauaaaggagaaaacu

SEQ ID NO: 495999 - RNA, 19 nt, Homo sapiens
  misc_RNA (1)...(19): siRNA sense strand
cgagcugggacucuaauca

SEQ ID NO: 496000 - RNA, 19 nt, Homo sapiens
  misc_RNA (1)...(19): siRNA sense strand
gcccaagcagguggaagua

SEQ ID NO: 496001 - RNA, 19 nt, Homo sapiens
  misc_RNA (1)...(19): siRNA sense strand
ccucaagaaguuccgagaa

SEQ ID NO: 496002 - RNA, 19 nt, Homo sapiens
  misc_RNA (1)...(19): siRNA sense strand
gaugagaggcuacguauua

SEQ ID NO: 496003 - RNA, 19 nt, Homo sapiens
  misc_RNA (1)...(19): siRNA sense strand
cgggauagcuguccuguua

SEQ ID NO: 496004 - RNA, 19 nt, Homo sapiens
  misc_RNA (1)...(19): siRNA sense strand
ggauguggcugaugaagaa

SEQ ID NO: 496005 - RNA, 19 nt, Homo sapiens
  misc_RNA (1)...(19): siRNA sense strand
agaaaucgguguguuauga

SEQ ID NO: 496006 - RNA, 19 nt, Homo sapiens
  misc_RNA (1)...(19): siRNA sense strand
ggauagcuguccuguuaga

SEQ ID NO: 496007 - RNA, 19 nt, Homo sapiens
  misc_RNA (1)...(19): siRNA sense strand
gagaggcuacguauuaauu

SEQ ID NO: 496008 - RNA, 19 nt, Homo sapiens
  misc_RNA (1)...(19): siRNA sense strand
uauguagacuggagaaugu

SEQ ID NO: 496009 - RNA, 19 nt, Homo sapiens
  misc_RNA (1)...(19): siRNA sense strand
uuaauucacucaggaagaa

SEQ ID NO: 496010 - RNA, 19 nt, Homo sapiens
  misc_RNA (1)...(19): siRNA sense strand
gcagaugagaggcuacgua

SEQ ID NO: 496011 - RNA, 19 nt, Homo sapiens
  misc_RNA (1)...(19): siRNA sense strand
gaggcuacguauuaauuca

SEQ ID NO: 496012 - RNA, 19 nt, Homo sapiens
  misc_RNA (1)...(19): siRNA sense strand
gaauguggcgcgaugugaa

SEQ ID NO: 496013 - RNA, 19 nt, Homo sapiens
  misc_RNA (1)...(19): siRNA sense strand
gcuggaggcuuagucguau

SEQ ID NO: 496014 - RNA, 19 nt, Homo sapiens
  misc_RNA (1)...(19): siRNA sense strand
uauagucuuccgucacuua

SEQ ID NO: 496015 - RNA, 19 nt, Homo sapiens
  misc_RNA (1)...(19): siRNA sense strand
aaucagaaaucgguguguu

SEQ ID NO: 496016 - RNA, 19 nt, Homo sapiens
  misc_RNA (1)...(19): siRNA sense strand
cagaugagaggcuacguau

SEQ ID NO: 496017 - RNA, 19 nt, Homo sapiens
  misc_RNA (1)...(19): siRNA sense strand
uagcuguccuguuagaauc

SEQ ID NO: 496018 - RNA, 19 nt, Homo sapiens
  misc_RNA (1)...(19): siRNA sense strand
caaguucgaagucacuaug

SEQ ID NO: 496019 - RNA, 19 nt, Homo sapiens
  misc_RNA (1)...(19): siRNA sense strand
ccagcgagcgacaugguaa

SEQ ID NO: 496020 - RNA, 19 nt, Homo sapiens
  misc_RNA (1)...(19): siRNA sense strand
ucagaaaucgguguguuau

SEQ ID NO: 496021 - RNA, 19 nt, Homo sapiens
  misc_RNA (1)...(19): siRNA sense strand
cguauagucuuccgucacu

SEQ ID NO: 496022 - RNA, 19 nt, Homo sapiens
  misc_RNA (1)...(19): siRNA sense strand
gagaauguggcgcgaugug

SEQ ID NO: 496023 - RNA, 19 nt, Homo sapiens
  misc_RNA (1)...(19): siRNA sense strand
augagaggcuacguauuaa

SEQ ID NO: 496024 - RNA, 19 nt, Homo sapiens
  misc_RNA (1)...(19): siRNA sense strand
uguggcugaugaagaaauu

SEQ ID NO: 496025 - RNA, 19 nt, Homo sapiens
  misc_RNA (1)...(19): siRNA sense strand
ccuguuagaaucagaaauc

SEQ ID NO: 496026 - RNA, 19 nt, Homo sapiens
  misc_RNA (1)...(19): siRNA sense strand
guauuaauucacucaggaa

SEQ ID NO: 496027 - RNA, 19 nt, Homo sapiens
  misc_RNA (1)...(19): siRNA sense strand
gcuuagucguauagucuuc

SEQ ID NO: 496028 - RNA, 19 nt, Homo sapiens
  misc_RNA (1)...(19): siRNA sense strand
gaggcuuagucguauaguc

SEQ ID NO: 496029 - RNA, 19 nt, Homo sapiens
  misc_RNA (1)...(19): siRNA sense strand
guucgaagucacuauguag

SEQ ID NO: 496030 - RNA, 19 nt, Homo sapiens
  misc_RNA (1)...(19): siRNA sense strand
ucaggaagaauaccauuuu

SEQ ID NO: 496031 - RNA, 19 nt, Homo sapiens
  misc_RNA (1)...(19): siRNA sense strand
aguucgaagucacuaugua

SEQ ID NO: 496032 - RNA, 19 nt, Homo sapiens
  misc_RNA (1)...(19): siRNA sense strand
ccuaugaauacgcagauga

SEQ ID NO: 496033 - RNA, 19 nt, Homo sapiens
  misc_RNA (1)...(19): siRNA sense strand
gaccaugggcaacuuucug

SEQ ID NO: 496034 - RNA, 19 nt, Homo sapiens
  misc_RNA (1)...(19): siRNA sense strand
gaaaucgguguguuaugac

SEQ ID NO: 496035 - RNA, 19 nt, Homo sapiens
  misc_RNA (1)...(19): siRNA sense strand
guaaagaacagaagccaaa

SEQ ID NO: 496036 - RNA, 19 nt, Homo sapiens
  misc_RNA (1)...(19): siRNA sense strand
gcaaugaggaggcaccuaa

SEQ ID NO: 496037 - RNA, 19 nt, Homo sapiens
  misc_RNA (1)...(19): siRNA sense strand
gaccgaagccugaauguga

SEQ ID NO: 496038 - RNA, 19 nt, Homo sapiens
  misc_RNA (1)...(19): siRNA sense strand
gaacaggagcccacugaga

SEQ ID NO: 496039 - RNA, 19 nt, Homo sapiens
  misc_RNA (1)...(19): siRNA sense strand
cgaccagccucuucugaaa

SEQ ID NO: 496040 - RNA, 19 nt, Homo sapiens
  misc_RNA (1)...(19): siRNA sense strand
caacaacagguuuaugauu

SEQ ID NO: 496041 - RNA, 19 nt, Homo sapiens
  misc_RNA (1)...(19): siRNA sense strand
ugagaaagcugcaaaucca

SEQ ID NO: 496042 - RNA, 19 nt, Homo sapiens
  misc_RNA (1)...(19): siRNA sense strand
cgccgucacuguuguauaa

SEQ ID NO: 496043 - RNA, 19 nt, Homo sapiens
  misc_RNA (1)...(19): siRNA sense strand
gcgauggccugaccuugaa

SEQ ID NO: 496044 - RNA, 19 nt, Homo sapiens
  misc_RNA (1)...(19): siRNA sense strand
gauaaaggguagaauugag

SEQ ID NO: 496045 - RNA, 19 nt, Homo sapiens
  misc_RNA (1)...(19): siRNA sense strand
gaugacaccuccgauagug

SEQ ID NO: 496046 - RNA, 19 nt, Homo sapiens
  misc_RNA (1)...(19): siRNA sense strand
caagagaccagcuccagaa

SEQ ID NO: 496047 - RNA, 19 nt, Homo sapiens
  misc_RNA (1)...(19): siRNA sense strand
gcaagaagaaacucaagau

SEQ ID NO: 496048 - RNA, 19 nt, Homo sapiens
  misc_RNA (1)...(19): siRNA sense strand
gagcaguuccugaccauug

SEQ ID NO: 496049 - RNA, 19 nt, Homo sapiens
  misc_RNA (1)...(19): siRNA sense strand
ugaggagccuggagacuug

SEQ ID NO: 496050 - RNA, 19 nt, Homo sapiens
  misc_RNA (1)...(19): siRNA sense strand
gacuauaucugcccaaacu

SEQ ID NO: 496051 - RNA, 19 nt, Homo sapiens
  misc_RNA (1)...(19): siRNA sense strand
gggcgagcgaucacaauua

SEQ ID NO: 496052 - RNA, 19 nt, Homo sapiens
  misc_RNA (1)...(19): siRNA sense strand
ggauaaaggguagaauuga

SEQ ID NO: 496053 - RNA, 19 nt, Homo sapiens
  misc_RNA (1)...(19): siRNA sense strand
gggauaaaggguagaauug

SEQ ID NO: 496054 - RNA, 19 nt, Homo sapiens
  misc_RNA (1)...(19): siRNA sense strand
gaucuuccagccugugaua

SEQ ID NO: 496055 - RNA, 19 nt, Homo sapiens
  misc_RNA (1)...(19): siRNA sense strand
cagcaaagaguucaggaaa

SEQ ID NO: 496056 - RNA, 19 nt, Homo sapiens
  misc_RNA (1)...(19): siRNA sense strand
uagcgaagaccaagggaua

SEQ ID NO: 496057 - RNA, 19 nt, Homo sapiens
  misc_RNA (1)...(19): siRNA sense strand
ugacagagagaguaaguug

SEQ ID NO: 496058 - RNA, 19 nt, Homo sapiens
  misc_RNA (1)...(19): siRNA sense strand
gaauugagaaagcugcaaa

SEQ ID NO: 496059 - RNA, 19 nt, Homo sapiens
  misc_RNA (1)...(19): siRNA sense strand
guacaaguauaggaacaau

SEQ ID NO: 496060 - RNA, 19 nt, Homo sapiens
  misc_RNA (1)...(19): siRNA sense strand
agaguaaguuggagggaaa

SEQ ID NO: 496061 - RNA, 19 nt, Homo sapiens
  misc_RNA (1)...(19): siRNA sense strand
acaacagguuuaugauuug

SEQ ID NO: 496062 - RNA, 19 nt, Homo sapiens
  misc_RNA (1)...(19): siRNA sense strand
cacaacaacagguuuauga

SEQ ID NO: 496063 - RNA, 19 nt, Homo sapiens
  misc_RNA (1)...(19): siRNA sense strand
caucaaacccaccagcaaa

SEQ ID NO: 496064 - RNA, 19 nt, Homo sapiens
  misc_RNA (1)...(19): siRNA sense strand
gaaaggcggcucaggacau

SEQ ID NO: 496065 - RNA, 19 nt, Homo sapiens
  misc_RNA (1)...(19): siRNA sense strand
cagaucagcaggaagcuaa

SEQ ID NO: 496066 - RNA, 19 nt, Homo sapiens
  misc_RNA (1)...(19): siRNA sense strand
uaaugacuguauccucaaa

SEQ ID NO: 496067 - RNA, 19 nt, Homo sapiens
  misc_RNA (1)...(19): siRNA sense strand
gaagccaaagccuaaagaa

SEQ ID NO: 496068 - RNA, 19 nt, Homo sapiens
  misc_RNA (1)...(19): siRNA sense strand
guggaaagcgcuucugaga

SEQ ID NO: 496069 - RNA, 19 nt, Homo sapiens
  misc_RNA (1)...(19): siRNA sense strand
acaaugaaguuucuaagcu

SEQ ID NO: 496070 - RNA, 19 nt, Homo sapiens
  misc_RNA (1)...(19): siRNA sense strand
gaacaauagagcagaaguc

SEQ ID NO: 496071 - RNA, 19 nt, Homo sapiens
  misc_RNA (1)...(19): siRNA sense strand
gaagaugaagccagagaag

SEQ ID NO: 496072 - RNA, 19 nt, Homo sapiens
  misc_RNA (1)...(19): siRNA sense strand
gugaagcacucgggaagga

SEQ ID NO: 496073 - RNA, 19 nt, Homo sapiens
  misc_RNA (1)...(19): siRNA sense strand
gggaacaggagcccacuga

SEQ ID NO: 496074 - RNA, 19 nt, Homo sapiens
  misc_RNA (1)...(19): siRNA sense strand
gcaccgauuguacaaguau

SEQ ID NO: 496075 - RNA, 19 nt, Homo sapiens
  misc_RNA (1)...(19): siRNA sense strand
gaaagaugacagagagagu

SEQ ID NO: 496076 - RNA, 19 nt, Homo sapiens
  misc_RNA (1)...(19): siRNA sense strand
cagagucgccugcggaaga

SEQ ID NO: 496077 - RNA, 19 nt, Homo sapiens
  misc_RNA (1)...(19): siRNA sense strand
ccucacaacaacagguuua

SEQ ID NO: 496078 - RNA, 19 nt, Homo sapiens
  misc_RNA (1)...(19): siRNA sense strand
gcugauggcaccgauugua

SEQ ID NO: 496079 - RNA, 19 nt, Homo sapiens
  misc_RNA (1)...(19): siRNA sense strand
ggcgagcgaucacaauuac

SEQ ID NO: 496080 - RNA, 19 nt, Homo sapiens
  misc_RNA (1)...(19): siRNA sense strand
uuucuaagcucagguaaag

SEQ ID NO: 496081 - RNA, 19 nt, Homo sapiens
  misc_RNA (1)...(19): siRNA sense strand
gcaaauccaaguggcaaga

SEQ ID NO: 496082 - RNA, 19 nt, Homo sapiens
  misc_RNA (1)...(19): siRNA sense strand
acaaguauaggaacaauag

SEQ ID NO: 496083 - RNA, 19 nt, Homo sapiens
  misc_RNA (1)...(19): siRNA sense strand
aaagaugacagagagagua

SEQ ID NO: 496084 - RNA, 19 nt, Homo sapiens
  misc_RNA (1)...(19): siRNA sense strand
gcaaagaguucaggaaaac

SEQ ID NO: 496085 - RNA, 19 nt, Homo sapiens
  misc_RNA (1)...(19): siRNA sense strand
ccaacgcccuguauugcau

SEQ ID NO: 496086 - RNA, 19 nt, Homo sapiens
  misc_RNA (1)...(19): siRNA sense strand
guaagcaggagcccgagaa

SEQ ID NO: 496087 - RNA, 19 nt, Homo sapiens
  misc_RNA (1)...(19): siRNA sense strand
cgucacuguuguauaaaug

SEQ ID NO: 496088 - RNA, 19 nt, Homo sapiens
  misc_RNA (1)...(19): siRNA sense strand
ucacaauuacaaugcagua

SEQ ID NO: 496089 - RNA, 19 nt, Homo sapiens
  misc_RNA (1)...(19): siRNA sense strand
cagcgacaaugaaguuucu

SEQ ID NO: 496090 - RNA, 19 nt, Homo sapiens
  misc_RNA (1)...(19): siRNA sense strand
gcgaagaccaagggauaaa

SEQ ID NO: 496091 - RNA, 19 nt, Homo sapiens
  misc_RNA (1)...(19): siRNA sense strand
uaggaacaauagagcagaa

SEQ ID NO: 496092 - RNA, 19 nt, Homo sapiens
  misc_RNA (1)...(19): siRNA sense strand
gcgauugugugggcauuuc

SEQ ID NO: 496093 - RNA, 19 nt, Homo sapiens
  misc_RNA (1)...(19): siRNA sense strand
aacagaagccaaagccuaa

SEQ ID NO: 496094 - RNA, 19 nt, Homo sapiens
  misc_RNA (1)...(19): siRNA sense strand
ucuaagcucagguaaagaa

SEQ ID NO: 496095 - RNA, 19 nt, Homo sapiens
  misc_RNA (1)...(19): siRNA sense strand
gcgacaaugaaguuucuaa

SEQ ID NO: 496096 - RNA, 19 nt, Homo sapiens
  misc_RNA (1)...(19): siRNA sense strand
caagaagaaacucaagauc

SEQ ID NO: 496097 - RNA, 19 nt, Homo sapiens
  misc_RNA (1)...(19): siRNA sense strand
gauuguacaaguauaggaa

SEQ ID NO: 496098 - RNA, 19 nt, Homo sapiens
  misc_RNA (1)...(19): siRNA sense strand
aaagagaccacagugaaga

SEQ ID NO: 496099 - RNA, 19 nt, Homo sapiens
  misc_RNA (1)...(19): siRNA sense strand
cgagcgaucacaauuacaa

SEQ ID NO: 496100 - RNA, 19 nt, Homo sapiens
  misc_RNA (1)...(19): siRNA sense strand
ugaccgcugugaagaaugg

SEQ ID NO: 496101 - RNA, 19 nt, Homo sapiens
  misc_RNA (1)...(19): siRNA sense strand
gaacgaccagccucuucug

SEQ ID NO: 496102 - RNA, 19 nt, Homo sapiens
  misc_RNA (1)...(19): siRNA sense strand
gaaagcugcaaauccaagu

SEQ ID NO: 496103 - RNA, 19 nt, Homo sapiens
  misc_RNA (1)...(19): siRNA sense strand
gaagaccaagggauaaagg

SEQ ID NO: 496104 - RNA, 19 nt, Homo sapiens
  misc_RNA (1)...(19): siRNA sense strand
gguuuaugauuugcuguga

SEQ ID NO: 496105 - RNA, 19 nt, Homo sapiens
  misc_RNA (1)...(19): siRNA sense strand
acagagagaguaaguugga

SEQ ID NO: 496106 - RNA, 19 nt, Homo sapiens
  misc_RNA (1)...(19): siRNA sense strand
gaugacagagagaguaagu

SEQ ID NO: 496107 - RNA, 19 nt, Homo sapiens
  misc_RNA (1)...(19): siRNA sense strand
ggcaccgauuguacaagua

SEQ ID NO: 496108 - RNA, 19 nt, Homo sapiens
  misc_RNA (1)...(19): siRNA sense strand
caccgauuguacaaguaua

SEQ ID NO: 496109 - RNA, 19 nt, Homo sapiens
  misc_RNA (1)...(19): siRNA sense strand
gagaaagcugcaaauccaa

SEQ ID NO: 496110 - RNA, 19 nt, Homo sapiens
  misc_RNA (1)...(19): siRNA sense strand
uaaaggguagaauugagaa

SEQ ID NO: 496111 - RNA, 19 nt, Homo sapiens
  misc_RNA (1)...(19): siRNA sense strand
ggaacgaccagccucuucu

SEQ ID NO: 496112 - RNA, 19 nt, Homo sapiens
  misc_RNA (1)...(19): siRNA sense strand
ccgcagcgacaaugaaguu

SEQ ID NO: 496113 - RNA, 19 nt, Homo sapiens
  misc_RNA (1)...(19): siRNA sense strand
aagaagaaacucaagaucu

SEQ ID NO: 496114 - RNA, 19 nt, Homo sapiens
  misc_RNA (1)...(19): siRNA sense strand
gcagaucagcaggaagcua

SEQ ID NO: 496115 - RNA, 19 nt, Homo sapiens
  misc_RNA (1)...(19): siRNA sense strand
ugcccaaacugcaccauuc

SEQ ID NO: 496116 - RNA, 19 nt, Homo sapiens
  misc_RNA (1)...(19): siRNA sense strand
agaaucgccuucgcaggaa

SEQ ID NO: 496117 - RNA, 19 nt, Homo sapiens
  misc_RNA (1)...(19): siRNA sense strand
gcagcgacaaugaaguuuc

SEQ ID NO: 496118 - RNA, 19 nt, Homo sapiens
  misc_RNA (1)...(19): siRNA sense strand
uggcaccgauuguacaagu

SEQ ID NO: 496119 - RNA, 19 nt, Homo sapiens
  misc_RNA (1)...(19): siRNA sense strand
caacagguuuaugauuugc

SEQ ID NO: 496120 - RNA, 19 nt, Homo sapiens
  misc_RNA (1)...(19): siRNA sense strand
cacgaugacaccuccgaua

SEQ ID NO: 496121 - RNA, 19 nt, Homo sapiens
  misc_RNA (1)...(19): siRNA sense strand
aagccaaagccuaaagaaa

SEQ ID NO: 496122 - RNA, 19 nt, Homo sapiens
  misc_RNA (1)...(19): siRNA sense strand
gcucagguaaagaacagaa

SEQ ID NO: 496123 - RNA, 19 nt, Homo sapiens
  misc_RNA (1)...(19): siRNA sense strand
guaaugacuguauccucaa

SEQ ID NO: 496124 - RNA, 19 nt, Homo sapiens
  misc_RNA (1)...(19): siRNA sense strand
ggcaagaagaaacucaaga

SEQ ID NO: 496125 - RNA, 19 nt, Homo sapiens
  misc_RNA (1)...(19): siRNA sense strand
ggaacaauagagcagaagu

SEQ ID NO: 496126 - RNA, 19 nt, Homo sapiens
  misc_RNA (1)...(19): siRNA sense strand
gauggcaccgauuguacaa

SEQ ID NO: 496127 - RNA, 19 nt, Homo sapiens
  misc_RNA (1)...(19): siRNA sense strand
aagaugacagagagaguaa

SEQ ID NO: 496128 - RNA, 19 nt, Homo sapiens
  misc_RNA (1)...(19): siRNA sense strand
aagacuauaucugcccaaa

SEQ ID NO: 496129 - RNA, 19 nt, Homo sapiens
  misc_RNA (1)...(19): siRNA sense strand
aaaggcggcucaggacauc

SEQ ID NO: 496130 - RNA, 19 nt, Homo sapiens
  misc_RNA (1)...(19): siRNA sense strand
caaaggcgacccgagcaau

SEQ ID NO: 496131 - RNA, 19 nt, Homo sapiens
  misc_RNA (1)...(19): siRNA sense strand
gcaccuaaggccaucaaac

SEQ ID NO: 496132 - RNA, 19 nt, Homo sapiens
  misc_RNA (1)...(19): siRNA sense strand
caagggauaaaggguagaa

SEQ ID NO: 496133 - RNA, 19 nt, Homo sapiens
  misc_RNA (1)...(19): siRNA sense strand
ggaauggggaagacuauau

SEQ ID NO: 496134 - RNA, 19 nt, Homo sapiens
  misc_RNA (1)...(19): siRNA sense strand
caaauccaaguggcaagaa

SEQ ID NO: 496135 - RNA, 19 nt, Homo sapiens
  misc_RNA (1)...(19): siRNA sense strand
guaaagaacagaagccaaa

SEQ ID NO: 496136 - RNA, 19 nt, Homo sapiens
  misc_RNA (1)...(19): siRNA sense strand
gcaaugaggaggcaccuaa

SEQ ID NO: 496137 - RNA, 19 nt, Homo sapiens
  misc_RNA (1)...(19): siRNA sense strand
gaccgaagccugaauguga

SEQ ID NO: 496138 - RNA, 19 nt, Homo sapiens
  misc_RNA (1)...(19): siRNA sense strand
gaacaggagcccacugaga

SEQ ID NO: 496139 - RNA, 19 nt, Homo sapiens
  misc_RNA (1)...(19): siRNA sense strand
cgaccagccucuucugaaa

SEQ ID NO: 496140 - RNA, 19 nt, Homo sapiens
  misc_RNA (1)...(19): siRNA sense strand
caacaacagguuuaugauu

SEQ ID NO: 496141 - RNA, 19 nt, Homo sapiens
  misc_RNA (1)...(19): siRNA sense strand
ugagaaagcugcaaaucca

SEQ ID NO: 496142 - RNA, 19 nt, Homo sapiens
  misc_RNA (1)...(19): siRNA sense strand
cgccgucacuguuguauaa

SEQ ID NO: 496143 - RNA, 19 nt, Homo sapiens
  misc_RNA (1)...(19): siRNA sense strand
gcgauggccugaccuugaa

SEQ ID NO: 496144 - RNA, 19 nt, Homo sapiens
  misc_RNA (1)...(19): siRNA sense strand
gauaaaggguagaauugag

SEQ ID NO: 496145 - RNA, 19 nt, Homo sapiens
  misc_RNA (1)...(19): siRNA sense strand
gaugacaccuccgauagug

SEQ ID NO: 496146 - RNA, 19 nt, Homo sapiens
  misc_RNA (1)...(19): siRNA sense strand
caagagaccagcuccagaa

SEQ ID NO: 496147 - RNA, 19 nt, Homo sapiens
  misc_RNA (1)...(19): siRNA sense strand
gcaagaagaaacucaagau

SEQ ID NO: 496148 - RNA, 19 nt, Homo sapiens
  misc_RNA (1)...(19): siRNA sense strand
gagcaguuccugaccauug

SEQ ID NO: 496149 - RNA, 19 nt, Homo sapiens
  misc_RNA (1)...(19): siRNA sense strand
ugaggagccuggagacuug

SEQ ID NO: 496150 - RNA, 19 nt, Homo sapiens
  misc_RNA (1)...(19): siRNA sense strand
gacuauaucugcccaaacu

SEQ ID NO: 496151 - RNA, 19 nt, Homo sapiens
  misc_RNA (1)...(19): siRNA sense strand
gggcgagcgaucacaauua

SEQ ID NO: 496152 - RNA, 19 nt, Homo sapiens
  misc_RNA (1)...(19): siRNA sense strand
ggauaaaggguagaauuga

SEQ ID NO: 496153 - RNA, 19 nt, Homo sapiens
  misc_RNA (1)...(19): siRNA sense strand
gggauaaaggguagaauug

SEQ ID NO: 496154 - RNA, 19 nt, Homo sapiens
  misc_RNA (1)...(19): siRNA sense strand
gaucuuccagccugugaua

SEQ ID NO: 496155 - RNA, 19 nt, Homo sapiens
  misc_RNA (1)...(19): siRNA sense strand
cagcaaagaguucaggaaa

SEQ ID NO: 496156 - RNA, 19 nt, Homo sapiens
  misc_RNA (1)...(19): siRNA sense strand
uagcgaagaccaagggaua

SEQ ID NO: 496157 - RNA, 19 nt, Homo sapiens
  misc_RNA (1)...(19): siRNA sense strand
ugacagagagaguaaguug

SEQ ID NO: 496158 - RNA, 19 nt, Homo sapiens
  misc_RNA (1)...(19): siRNA sense strand
gaauugagaaagcugcaaa

SEQ ID NO: 496159 - RNA, 19 nt, Homo sapiens
  misc_RNA (1)...(19): siRNA sense strand
guacaaguauaggaacaau

SEQ ID NO: 496160 - RNA, 19 nt, Homo sapiens
  misc_RNA (1)...(19): siRNA sense strand
agaguaaguuggagggaaa

SEQ ID NO: 496161 - RNA, 19 nt, Homo sapiens
  misc_RNA (1)...(19): siRNA sense strand
acaacagguuuaugauuug

SEQ ID NO: 496162 - RNA, 19 nt, Homo sapiens
  misc_RNA (1)...(19): siRNA sense strand
cacaacaacagguuuauga

SEQ ID NO: 496163 - RNA, 19 nt, Homo sapiens
  misc_RNA (1)...(19): siRNA sense strand
caucaaacccaccagcaaa

SEQ ID NO: 496164 - RNA, 19 nt, Homo sapiens
  misc_RNA (1)...(19): siRNA sense strand
gaaaggcggcucaggacau

SEQ ID NO: 496165 - RNA, 19 nt, Homo sapiens
  misc_RNA (1)...(19): siRNA sense strand
cagaucagcaggaagcuaa

SEQ ID NO: 496166 - RNA, 19 nt, Homo sapiens
  misc_RNA (1)...(19): siRNA sense strand
uaaugacuguauccucaaa

SEQ ID NO: 496167 - RNA, 19 nt, Homo sapiens
  misc_RNA (1)...(19): siRNA sense strand
gaagccaaagccuaaagaa

SEQ ID NO: 496168 - RNA, 19 nt, Homo sapiens
  misc_RNA (1)...(19): siRNA sense strand
guggaaagcgcuucugaga

SEQ ID NO: 496169 - RNA, 19 nt, Homo sapiens
  misc_RNA (1)...(19): siRNA sense strand
acaaugaaguuucuaagcu

SEQ ID NO: 496170 - RNA, 19 nt, Homo sapiens
  misc_RNA (1)...(19): siRNA sense strand
gaacaauagagcagaaguc

SEQ ID NO: 496171 - RNA, 19 nt, Homo sapiens
  misc_RNA (1)...(19): siRNA sense strand
gaagaugaagccagagaag

SEQ ID NO: 496172 - RNA, 19 nt, Homo sapiens
  misc_RNA (1)...(19): siRNA sense strand
gugaagcacucgggaagga

SEQ ID NO: 496173 - RNA, 19 nt, Homo sapiens
  misc_RNA (1)...(19): siRNA sense strand
gggaacaggagcccacuga

SEQ ID NO: 496174 - RNA, 19 nt, Homo sapiens
  misc_RNA (1)...(19): siRNA sense strand
gcaccgauuguacaaguau

SEQ ID NO: 496175 - RNA, 19 nt, Homo sapiens
  misc_RNA (1)...(19): siRNA sense strand
gaaagaugacagagagagu

SEQ ID NO: 496176 - RNA, 19 nt, Homo sapiens
  misc_RNA (1)...(19): siRNA sense strand
cagagucgccugcggaaga

SEQ ID NO: 496177 - RNA, 19 nt, Homo sapiens
  misc_RNA (1)...(19): siRNA sense strand
ccucacaacaacagguuua

SEQ ID NO: 496178 - RNA, 19 nt, Homo sapiens
  misc_RNA (1)...(19): siRNA sense strand
gcugauggcaccgauugua

SEQ ID NO: 496179 - RNA, 19 nt, Homo sapiens
  misc_RNA (1)...(19): siRNA sense strand
ggcgagcgaucacaauuac

SEQ ID NO: 496180 - RNA, 19 nt, Homo sapiens
  misc_RNA (1)...(19): siRNA sense strand
uuucuaagcucagguaaag

SEQ ID NO: 496181 - RNA, 19 nt, Homo sapiens
  misc_RNA (1)...(19): siRNA sense strand
gcaaauccaaguggcaaga

SEQ ID NO: 496182 - RNA, 19 nt, Homo sapiens
  misc_RNA (1)...(19): siRNA sense strand
acaaguauaggaacaauag

SEQ ID NO: 496183 - RNA, 19 nt, Homo sapiens
  misc_RNA (1)...(19): siRNA sense strand
aaagaugacagagagagua

SEQ ID NO: 496184 - RNA, 19 nt, Homo sapiens
  misc_RNA (1)...(19): siRNA sense strand
gcaaagaguucaggaaaac

SEQ ID NO: 496185 - RNA, 19 nt, Homo sapiens
  misc_RNA (1)...(19): siRNA sense strand
ccaacgcccuguauugcau

SEQ ID NO: 496186 - RNA, 19 nt, Homo sapiens
  misc_RNA (1)...(19): siRNA sense strand
guaagcaggagcccgagaa

SEQ ID NO: 496187 - RNA, 19 nt, Homo sapiens
  misc_RNA (1)...(19): siRNA sense strand
cgucacuguuguauaaaug

SEQ ID NO: 496188 - RNA, 19 nt, Homo sapiens
  misc_RNA (1)...(19): siRNA sense strand
ucacaauuacaaugcagua

SEQ ID NO: 496189 - RNA, 19 nt, Homo sapiens
  misc_RNA (1)...(19): siRNA sense strand
cagcgacaaugaaguuucu

SEQ ID NO: 496190 - RNA, 19 nt, Homo sapiens
  misc_RNA (1)...(19): siRNA sense strand
gcgaagaccaagggauaaa

SEQ ID NO: 496191 - RNA, 19 nt, Homo sapiens
  misc_RNA (1)...(19): siRNA sense strand
uaggaacaauagagcagaa

SEQ ID NO: 496192 - RNA, 19 nt, Homo sapiens
  misc_RNA (1)...(19): siRNA sense strand
gcgauugugugggcauuuc

SEQ ID NO: 496193 - RNA, 19 nt, Homo sapiens
  misc_RNA (1)...(19): siRNA sense strand
aacagaagccaaagccuaa

SEQ ID NO: 496194 - RNA, 19 nt, Homo sapiens
  misc_RNA (1)...(19): siRNA sense strand
ucuaagcucagguaaagaa

SEQ ID NO: 496195 - RNA, 19 nt, Homo sapiens
  misc_RNA (1)...(19): siRNA sense strand
gcgacaaugaaguuucuaa

SEQ ID NO: 496196 - RNA, 19 nt, Homo sapiens
  misc_RNA (1)...(19): siRNA sense strand
caagaagaaacucaagauc

SEQ ID NO: 496197 - RNA, 19 nt, Homo sapiens
  misc_RNA (1)...(19): siRNA sense strand
gauuguacaaguauaggaa

SEQ ID NO: 496198 - RNA, 19 nt, Homo sapiens
  misc_RNA (1)...(19): siRNA sense strand
aaagagaccacagugaaga

SEQ ID NO: 496199 - RNA, 19 nt, Homo sapiens
  misc_RNA (1)...(19): siRNA sense strand
cgagcgaucacaauuacaa

SEQ ID NO: 496200 - RNA, 19 nt, Homo sapiens
  misc_RNA (1)...(19): siRNA sense strand
ugaccgcugugaagaaugg

SEQ ID NO: 496201 - RNA, 19 nt, Homo sapiens
  misc_RNA (1)...(19): siRNA sense strand
gaacgaccagccucuucug

SEQ ID NO: 496202 - RNA, 19 nt, Homo sapiens
  misc_RNA (1)...(19): siRNA sense strand
gaaagcugcaaauccaagu

SEQ ID NO: 496203 - RNA, 19 nt, Homo sapiens
  misc_RNA (1)...(19): siRNA sense strand
gaagaccaagggauaaagg

SEQ ID NO: 496204 - RNA, 19 nt, Homo sapiens
  misc_RNA (1)...(19): siRNA sense strand
gguuuaugauuugcuguga

SEQ ID NO: 496205 - RNA, 19 nt, Homo sapiens
  misc_RNA (1)...(19): siRNA sense strand
acagagagaguaaguugga

SEQ ID NO: 496206 - RNA, 19 nt, Homo sapiens
  misc_RNA (1)...(19): siRNA sense strand
gaugacagagagaguaagu

SEQ ID NO: 496207 - RNA, 19 nt, Homo sapiens
  misc_RNA (1)...(19): siRNA sense strand
ggcaccgauuguacaagua

SEQ ID NO: 496208 - RNA, 19 nt, Homo sapiens
  misc_RNA (1)...(19): siRNA sense strand
caccgauuguacaaguaua

SEQ ID NO: 496209 - RNA, 19 nt, Homo sapiens
  misc_RNA (1)...(19): siRNA sense strand
gagaaagcugcaaauccaa

SEQ ID NO: 496210 - RNA, 19 nt, Homo sapiens
  misc_RNA (1)...(19): siRNA sense strand
uaaaggguagaauugagaa

SEQ ID NO: 496211 - RNA, 19 nt, Homo sapiens
  misc_RNA (1)...(19): siRNA sense strand
ggaacgaccagccucuucu

SEQ ID NO: 496212 - RNA, 19 nt, Homo sapiens
  misc_RNA (1)...(19): siRNA sense strand
ccgcagcgacaaugaaguu

SEQ ID NO: 496213 - RNA, 19 nt, Homo sapiens
  misc_RNA (1)...(19): siRNA sense strand
aagaagaaacucaagaucu

SEQ ID NO: 496214 - RNA, 19 nt, Homo sapiens
  misc_RNA (1)...(19): siRNA sense strand
gcagaucagcaggaagcua

SEQ ID NO: 496215 - RNA, 19 nt, Homo sapiens
  misc_RNA (1)...(19): siRNA sense strand
ugcccaaacugcaccauuc

SEQ ID NO: 496216 - RNA, 19 nt, Homo sapiens
  misc_RNA (1)...(19): siRNA sense strand
agaaucgccuucgcaggaa

SEQ ID NO: 496217 - RNA, 19 nt, Homo sapiens
  misc_RNA (1)...(19): siRNA sense strand
gcagcgacaaugaaguuuc

SEQ ID NO: 496218 - RNA, 19 nt, Homo sapiens
  misc_RNA (1)...(19): siRNA sense strand
uggcaccgauuguacaagu

SEQ ID NO: 496219 - RNA, 19 nt, Homo sapiens
  misc_RNA (1)...(19): siRNA sense strand
caacagguuuaugauuugc

SEQ ID NO: 496220 - RNA, 19 nt, Homo sapiens
  misc_RNA (1)...(19): siRNA sense strand
cacgaugacaccuccgaua

SEQ ID NO: 496221 - RNA, 19 nt, Homo sapiens
  misc_RNA (1)...(19): siRNA sense strand
aagccaaagccuaaagaaa

SEQ ID NO: 496222 - RNA, 19 nt, Homo sapiens
  misc_RNA (1)...(19): siRNA sense strand
gcucagguaaagaacagaa

SEQ ID NO: 496223 - RNA, 19 nt, Homo sapiens
  misc_RNA (1)...(19): siRNA sense strand
guaaugacuguauccucaa

SEQ ID NO: 496224 - RNA, 19 nt, Homo sapiens
  misc_RNA (1)...(19): siRNA sense strand
ggcaagaagaaacucaaga

SEQ ID NO: 496225 - RNA, 19 nt, Homo sapiens
  misc_RNA (1)...(19): siRNA sense strand
ggaacaauagagcagaagu

SEQ ID NO: 496226 - RNA, 19 nt, Homo sapiens
  misc_RNA (1)...(19): siRNA sense strand
gauggcaccgauuguacaa

SEQ ID NO: 496227 - RNA, 19 nt, Homo sapiens
  misc_RNA (1)...(19): siRNA sense strand
aagaugacagagagaguaa

SEQ ID NO: 496228 - RNA, 19 nt, Homo sapiens
  misc_RNA (1)...(19): siRNA sense strand
aagacuauaucugcccaaa

SEQ ID NO: 496229 - RNA, 19 nt, Homo sapiens
  misc_RNA (1)...(19): siRNA sense strand
aaaggcggcucaggacauc

SEQ ID NO: 496230 - RNA, 19 nt, Homo sapiens
  misc_RNA (1)...(19): siRNA sense strand
caaaggcgacccgagcaau

SEQ ID NO: 496231 - RNA, 19 nt, Homo sapiens
  misc_RNA (1)...(19): siRNA sense strand
gcaccuaaggccaucaaac

SEQ ID NO: 496232 - RNA, 19 nt, Homo sapiens
  misc_RNA (1)...(19): siRNA sense strand
caagggauaaaggguagaa

SEQ ID NO: 496233 - RNA, 19 nt, Homo sapiens
  misc_RNA (1)...(19): siRNA sense strand
ggaauggggaagacuauau

SEQ ID NO: 496234 - RNA, 19 nt, Homo sapiens
  misc_RNA (1)...(19): siRNA sense strand
caaauccaaguggcaagaa

SEQ ID NO: 496235 - RNA, 19 nt, Homo sapiens
  misc_RNA (1)...(19): siRNA sense strand
guaaagaacagaagccaaa

SEQ ID NO: 496236 - RNA, 19 nt, Homo sapiens
  misc_RNA (1)...(19): siRNA sense strand
gcaaugaggaggcaccuaa

SEQ ID NO: 496237 - RNA, 19 nt, Homo sapiens
  misc_RNA (1)...(19): siRNA sense strand
gaccgaagccugaauguga

SEQ ID NO: 496238 - RNA, 19 nt, Homo sapiens
  misc_RNA (1)...(19): siRNA sense strand
gaacaggagcccacugaga

SEQ ID NO: 496239 - RNA, 19 nt, Homo sapiens
  misc_RNA (1)...(19): siRNA sense strand
cgaccagccucuucugaaa

SEQ ID NO: 496240 - RNA, 19 nt, Homo sapiens
  misc_RNA (1)...(19): siRNA sense strand
caacaacagguuuaugauu

SEQ ID NO: 496241 - RNA, 19 nt, Homo sapiens
  misc_RNA (1)...(19): siRNA sense strand
ugagaaagcugcaaaucca

SEQ ID NO: 496242 - RNA, 19 nt, Homo sapiens
  misc_RNA (1)...(19): siRNA sense strand
cgccgucacuguuguauaa

SEQ ID NO: 496243 - RNA, 19 nt, Homo sapiens
  misc_RNA (1)...(19): siRNA sense strand
gcgauggccugaccuugaa

SEQ ID NO: 496244 - RNA, 19 nt, Homo sapiens
  misc_RNA (1)...(19): siRNA sense strand
gauaaaggguagaauugag

SEQ ID NO: 496245 - RNA, 19 nt, Homo sapiens
  misc_RNA (1)...(19): siRNA sense strand
gaugacaccuccgauagug

SEQ ID NO: 496246 - RNA, 19 nt, Homo sapiens
  misc_RNA (1)...(19): siRNA sense strand
caagagaccagcuccagaa

SEQ ID NO: 496247 - RNA, 19 nt, Homo sapiens
  misc_RNA (1)...(19): siRNA sense strand
gcaagaagaaacucaagau

SEQ ID NO: 496248 - RNA, 19 nt, Homo sapiens
  misc_RNA (1)...(19): siRNA sense strand
gagcaguuccugaccauug

SEQ ID NO: 496249 - RNA, 19 nt, Homo sapiens
  misc_RNA (1)...(19): siRNA sense strand
ugaggagccuggagacuug

SEQ ID NO: 496250 - RNA, 19 nt, Homo sapiens
  misc_RNA (1)...(19): siRNA sense strand
gacuauaucugcccaaacu

SEQ ID NO: 496251 - RNA, 19 nt, Homo sapiens
  misc_RNA (1)...(19): siRNA sense strand
gggcgagcgaucacaauua

SEQ ID NO: 496252 - RNA, 19 nt, Homo sapiens
  misc_RNA (1)...(19): siRNA sense strand
ggauaaaggguagaauuga

SEQ ID NO: 496253 - RNA, 19 nt, Homo sapiens
  misc_RNA (1)...(19): siRNA sense strand
gggauaaaggguagaauug

SEQ ID NO: 496254 - RNA, 19 nt, Homo sapiens
  misc_RNA (1)...(19): siRNA sense strand
gaucuuccagccugugaua

SEQ ID NO: 496255 - RNA, 19 nt, Homo sapiens
  misc_RNA (1)...(19): siRNA sense strand
cagcaaagaguucaggaaa

SEQ ID NO: 496256 - RNA, 19 nt, Homo sapiens
  misc_RNA (1)...(19): siRNA sense strand
uagcgaagaccaagggaua

SEQ ID NO: 496257 - RNA, 19 nt, Homo sapiens
  misc_RNA (1)...(19): siRNA sense strand
ugacagagagaguaaguug

SEQ ID NO: 496258 - RNA, 19 nt, Homo sapiens
  misc_RNA (1)...(19): siRNA sense strand
gaauugagaaagcugcaaa

SEQ ID NO: 496259 - RNA, 19 nt, Homo sapiens
  misc_RNA (1)...(19): siRNA sense strand
guacaaguauaggaacaau

SEQ ID NO: 496260 - RNA, 19 nt, Homo sapiens
  misc_RNA (1)...(19): siRNA sense strand
agaguaaguuggagggaaa

SEQ ID NO: 496261 - RNA, 19 nt, Homo sapiens
  misc_RNA (1)...(19): siRNA sense strand
acaacagguuuaugauuug

SEQ ID NO: 496262 - RNA, 19 nt, Homo sapiens
  misc_RNA (1)...(19): siRNA sense strand
cacaacaacagguuuauga

SEQ ID NO: 496263 - RNA, 19 nt, Homo sapiens
  misc_RNA (1)...(19): siRNA sense strand
caucaaacccaccagcaaa

SEQ ID NO: 496264 - RNA, 19 nt, Homo sapiens
  misc_RNA (1)...(19): siRNA sense strand
gaaaggcggcucaggacau

SEQ ID NO: 496265 - RNA, 19 nt, Homo sapiens
  misc_RNA (1)...(19): siRNA sense strand
cagaucagcaggaagcuaa

SEQ ID NO: 496266 - RNA, 19 nt, Homo sapiens
  misc_RNA (1)...(19): siRNA sense strand
uaaugacuguauccucaaa

SEQ ID NO: 496267 - RNA, 19 nt, Homo sapiens
  misc_RNA (1)...(19): siRNA sense strand
gaagccaaagccuaaagaa

SEQ ID NO: 496268 - RNA, 19 nt, Homo sapiens
  misc_RNA (1)...(19): siRNA sense strand
guggaaagcgcuucugaga

SEQ ID NO: 496269 - RNA, 19 nt, Homo sapiens
  misc_RNA (1)...(19): siRNA sense strand
acaaugaaguuucuaagcu

SEQ ID NO: 496270 - RNA, 19 nt, Homo sapiens
  misc_RNA (1)...(19): siRNA sense strand
gaacaauagagcagaaguc

SEQ ID NO: 496271 - RNA, 19 nt, Homo sapiens
  misc_RNA (1)...(19): siRNA sense strand
gaagaugaagccagagaag

SEQ ID NO: 496272 - RNA, 19 nt, Homo sapiens
  misc_RNA (1)...(19): siRNA sense strand
gugaagcacucgggaagga

SEQ ID NO: 496273 - RNA, 19 nt, Homo sapiens
  misc_RNA (1)...(19): siRNA sense strand
gggaacaggagcccacuga

SEQ ID NO: 496274 - RNA, 19 nt, Homo sapiens
  misc_RNA (1)...(19): siRNA sense strand
gcaccgauuguacaaguau

SEQ ID NO: 496275 - RNA, 19 nt, Homo sapiens
  misc_RNA (1)...(19): siRNA sense strand
gaaagaugacagagagagu

SEQ ID NO: 496276 - RNA, 19 nt, Homo sapiens
  misc_RNA (1)...(19): siRNA sense strand
cagagucgccugcggaaga

SEQ ID NO: 496277 - RNA, 19 nt, Homo sapiens
  misc_RNA (1)...(19): siRNA sense strand
guaaguauucguauucucu

SEQ ID NO: 496278 - RNA, 19 nt, Homo sapiens
  misc_RNA (1)...(19): siRNA sense strand
gcucugguaaguauucgua

SEQ ID NO: 496279 - RNA, 19 nt, Homo sapiens
  misc_RNA (1)...(19): siRNA sense strand
ccucacaacaacagguuua

SEQ ID NO: 496280 - RNA, 19 nt, Homo sapiens
  misc_RNA (1)...(19): siRNA sense strand
gcugauggcaccgauugua

SEQ ID NO: 496281 - RNA, 19 nt, Homo sapiens
  misc_RNA (1)...(19): siRNA sense strand
ggcgagcgaucacaauuac

SEQ ID NO: 496282 - RNA, 19 nt, Homo sapiens
  misc_RNA (1)...(19): siRNA sense strand
uuucuaagcucagguaaag

SEQ ID NO: 496283 - RNA, 19 nt, Homo sapiens
  misc_RNA (1)...(19): siRNA sense strand
gcaaauccaaguggcaaga

SEQ ID NO: 496284 - RNA, 19 nt, Homo sapiens
  misc_RNA (1)...(19): siRNA sense strand
acaaguauaggaacaauag

SEQ ID NO: 496285 - RNA, 19 nt, Homo sapiens
  misc_RNA (1)...(19): siRNA sense strand
aaagaugacagagagagua

SEQ ID NO: 496286 - RNA, 19 nt, Homo sapiens
  misc_RNA (1)...(19): siRNA sense strand
gcaaagaguucaggaaaac

SEQ ID NO: 496287 - RNA, 19 nt, Homo sapiens
  misc_RNA (1)...(19): siRNA sense strand
ccaacgcccuguauugcau

SEQ ID NO: 496288 - RNA, 19 nt, Homo sapiens
  misc_RNA (1)...(19): siRNA sense strand
guaagcaggagcccgagaa

SEQ ID NO: 496289 - RNA, 19 nt, Homo sapiens
  misc_RNA (1)...(19): siRNA sense strand
cgucacuguuguauaaaug

SEQ ID NO: 496290 - RNA, 19 nt, Homo sapiens
  misc_RNA (1)...(19): siRNA sense strand
ucacaauuacaaugcagua

SEQ ID NO: 496291 - RNA, 19 nt, Homo sapiens
  misc_RNA (1)...(19): siRNA sense strand
cagcgacaaugaaguuucu

SEQ ID NO: 496292 - RNA, 19 nt, Homo sapiens
  misc_RNA (1)...(19): siRNA sense strand
gcgaagaccaagggauaaa

SEQ ID NO: 496293 - RNA, 19 nt, Homo sapiens
  misc_RNA (1)...(19): siRNA sense strand
uaggaacaauagagcagaa

SEQ ID NO: 496294 - RNA, 19 nt, Homo sapiens
  misc_RNA (1)...(19): siRNA sense strand
gcgauugugugggcauuuc

SEQ ID NO: 496295 - RNA, 19 nt, Homo sapiens
  misc_RNA (1)...(19): siRNA sense strand
aacagaagccaaagccuaa

SEQ ID NO: 496296 - RNA, 19 nt, Homo sapiens
  misc_RNA (1)...(19): siRNA sense strand
ucuaagcucagguaaagaa

SEQ ID NO: 496297 - RNA, 19 nt, Homo sapiens
  misc_RNA (1)...(19): siRNA sense strand
gcgacaaugaaguuucuaa

SEQ ID NO: 496298 - RNA, 19 nt, Homo sapiens
  misc_RNA (1)...(19): siRNA sense strand
caagaagaaacucaagauc

SEQ ID NO: 496299 - RNA, 19 nt, Homo sapiens
  misc_RNA (1)...(19): siRNA sense strand
gauuguacaaguauaggaa

SEQ ID NO: 496300 - RNA, 19 nt, Homo sapiens
  misc_RNA (1)...(19): siRNA sense strand
aaagagaccacagugaaga

SEQ ID NO: 496301 - RNA, 19 nt, Homo sapiens
  misc_RNA (1)...(19): siRNA sense strand
cgagcgaucacaauuacaa

SEQ ID NO: 496302 - RNA, 19 nt, Homo sapiens
  misc_RNA (1)...(19): siRNA sense strand
ugaccgcugugaagaaugg

SEQ ID NO: 496303 - RNA, 19 nt, Homo sapiens
  misc_RNA (1)...(19): siRNA sense strand
gaugacagagagaguaagu

SEQ ID NO: 496304 - RNA, 19 nt, Homo sapiens
  misc_RNA (1)...(19): siRNA sense strand
gaacgaccagccucuucug

SEQ ID NO: 496305 - RNA, 19 nt, Homo sapiens
  misc_RNA (1)...(19): siRNA sense strand
gaaagcugcaaauccaagu

SEQ ID NO: 496306 - RNA, 19 nt, Homo sapiens
  misc_RNA (1)...(19): siRNA sense strand
gaagaccaagggauaaagg

SEQ ID NO: 496307 - RNA, 19 nt, Homo sapiens
  misc_RNA (1)...(19): siRNA sense strand
gguuuaugauuugcuguga

SEQ ID NO: 496308 - RNA, 19 nt, Homo sapiens
  misc_RNA (1)...(19): siRNA sense strand
acagagagaguaaguugga

SEQ ID NO: 496309 - RNA, 19 nt, Homo sapiens
  misc_RNA (1)...(19): siRNA sense strand
ggcaccgauuguacaagua

SEQ ID NO: 496310 - RNA, 19 nt, Homo sapiens
  misc_RNA (1)...(19): siRNA sense strand
ucugguaaguauucguauu

SEQ ID NO: 496311 - RNA, 19 nt, Homo sapiens
  misc_RNA (1)...(19): siRNA sense strand
caccgauuguacaaguaua

SEQ ID NO: 496312 - RNA, 19 nt, Homo sapiens
  misc_RNA (1)...(19): siRNA sense strand
gagaaagcugcaaauccaa

SEQ ID NO: 496313 - RNA, 19 nt, Homo sapiens
  misc_RNA (1)...(19): siRNA sense strand
uaaaggguagaauugagaa

SEQ ID NO: 496314 - RNA, 19 nt, Homo sapiens
  misc_RNA (1)...(19): siRNA sense strand
ugcccaaacugcaccauuc

SEQ ID NO: 496315 - RNA, 19 nt, Homo sapiens
  misc_RNA (1)...(19): siRNA sense strand
ccgcagcgacaaugaaguu

SEQ ID NO: 496316 - RNA, 19 nt, Homo sapiens
  misc_RNA (1)...(19): siRNA sense strand
aagaagaaacucaagaucu

SEQ ID NO: 496317 - RNA, 19 nt, Homo sapiens
  misc_RNA (1)...(19): siRNA sense strand
ggaacgaccagccucuucu

SEQ ID NO: 496318 - RNA, 19 nt, Homo sapiens
  misc_RNA (1)...(19): siRNA sense strand
gcagaucagcaggaagcua

SEQ ID NO: 496319 - RNA, 19 nt, Homo sapiens
  misc_RNA (1)...(19): siRNA sense strand
caacagguuuaugauuugc

SEQ ID NO: 496320 - RNA, 19 nt, Homo sapiens
  misc_RNA (1)...(19): siRNA sense strand
gcagcgacaaugaaguuuc

SEQ ID NO: 496321 - RNA, 19 nt, Homo sapiens
  misc_RNA (1)...(19): siRNA sense strand
uggcaccgauuguacaagu

SEQ ID NO: 496322 - RNA, 19 nt, Homo sapiens
  misc_RNA (1)...(19): siRNA sense strand
agaaucgccuucgcaggaa

SEQ ID NO: 496323 - RNA, 19 nt, Homo sapiens
  misc_RNA (1)...(19): siRNA sense strand
gauggcaccgauuguacaa

SEQ ID NO: 496324 - RNA, 19 nt, Homo sapiens
  misc_RNA (1)...(19): siRNA sense strand
aagccaaagccuaaagaaa

SEQ ID NO: 496325 - RNA, 19 nt, Homo sapiens
  misc_RNA (1)...(19): siRNA sense strand
gcucagguaaagaacagaa

SEQ ID NO: 496326 - RNA, 19 nt, Homo sapiens
  misc_RNA (1)...(19): siRNA sense strand
guaaugacuguauccucaa

SEQ ID NO: 496327 - RNA, 19 nt, Homo sapiens
  misc_RNA (1)...(19): siRNA sense strand
ggcaagaagaaacucaaga

SEQ ID NO: 496328 - RNA, 19 nt, Homo sapiens
  misc_RNA (1)...(19): siRNA sense strand
cacgaugacaccuccgaua

SEQ ID NO: 496329 - RNA, 19 nt, Homo sapiens
  misc_RNA (1)...(19): siRNA sense strand
ggaacaauagagcagaagu

SEQ ID NO: 496330 - RNA, 19 nt, Homo sapiens
  misc_RNA (1)...(19): siRNA sense strand
aagaugacagagagaguaa

SEQ ID NO: 496331 - RNA, 19 nt, Homo sapiens
  misc_RNA (1)...(19): siRNA sense strand
aagacuauaucugcccaaa

SEQ ID NO: 496332 - RNA, 19 nt, Homo sapiens
  misc_RNA (1)...(19): siRNA sense strand
aaaggcggcucaggacauc

SEQ ID NO: 496333 - RNA, 19 nt, Homo sapiens
  misc_RNA (1)...(19): siRNA sense strand
gguaaguauucguauucuc

SEQ ID NO: 496334 - RNA, 19 nt, Homo sapiens
  misc_RNA (1)...(19): siRNA sense strand
cuucaucccagucugauug

SEQ ID NO: 496335 - RNA, 19 nt, Homo sapiens
  misc_RNA (1)...(19): siRNA sense strand
ggaaauaccuggaggauga

SEQ ID NO: 496336 - RNA, 19 nt, Homo sapiens
  misc_RNA (1)...(19): siRNA sense strand
gcacauacaugauaaagaa

SEQ ID NO: 496337 - RNA, 19 nt, Homo sapiens
  misc_RNA (1)...(19): siRNA sense strand
gggaagaaauugaugaaua

SEQ ID NO: 496338 - RNA, 19 nt, Homo sapiens
  misc_RNA (1)...(19): siRNA sense strand
ggacguaauugaugaagua

SEQ ID NO: 496339 - RNA, 19 nt, Homo sapiens
  misc_RNA (1)...(19): siRNA sense strand
gcagauggguucuuaaaug

SEQ ID NO: 496340 - RNA, 19 nt, Homo sapiens
  misc_RNA (1)...(19): siRNA sense strand
gauggguucuuaaauguua

SEQ ID NO: 496341 - RNA, 19 nt, Homo sapiens
  misc_RNA (1)...(19): siRNA sense strand
caaaugagguugaggaaau

SEQ ID NO: 496342 - RNA, 19 nt, Homo sapiens
  misc_RNA (1)...(19): siRNA sense strand
gaguagauguuuccauuaa

SEQ ID NO: 496343 - RNA, 19 nt, Homo sapiens
  misc_RNA (1)...(19): siRNA sense strand
gcagauaguccuucagaua

SEQ ID NO: 496344 - RNA, 19 nt, Homo sapiens
  misc_RNA (1)...(19): siRNA sense strand
ccaaagcacugcagaagaa

SEQ ID NO: 496345 - RNA, 19 nt, Homo sapiens
  misc_RNA (1)...(19): siRNA sense strand
gaauuuauaugcugggaaa

SEQ ID NO: 496346 - RNA, 19 nt, Homo sapiens
  misc_RNA (1)...(19): siRNA sense strand
gccaagcacuguuuaaauu

SEQ ID NO: 496347 - RNA, 19 nt, Homo sapiens
  misc_RNA (1)...(19): siRNA sense strand
ggaggaauuuggagacuuu

SEQ ID NO: 496348 - RNA, 19 nt, Homo sapiens
  misc_RNA (1)...(19): siRNA sense strand
aaagaagacuugagaaaga

SEQ ID NO: 496349 - RNA, 19 nt, Homo sapiens
  misc_RNA (1)...(19): siRNA sense strand
gcaaaggaaucgucuaagu

SEQ ID NO: 496350 - RNA, 19 nt, Homo sapiens
  misc_RNA (1)...(19): siRNA sense strand
ccaggaagaugauguagaa

SEQ ID NO: 496351 - RNA, 19 nt, Homo sapiens
  misc_RNA (1)...(19): siRNA sense strand
uggaugagcuguuggauuu

SEQ ID NO: 496352 - RNA, 19 nt, Homo sapiens
  misc_RNA (1)...(19): siRNA sense strand
gaacagugaucaccauagu

SEQ ID NO: 496353 - RNA, 19 nt, Homo sapiens
  misc_RNA (1)...(19): siRNA sense strand
ggacagggcagcuaugaaa

SEQ ID NO: 496354 - RNA, 19 nt, Homo sapiens
  misc_RNA (1)...(19): siRNA sense strand
gaagcgaucugagaaguug

SEQ ID NO: 496355 - RNA, 19 nt, Homo sapiens
  misc_RNA (1)...(19): siRNA sense strand
gggaguagauguuuccauu

SEQ ID NO: 496356 - RNA, 19 nt, Homo sapiens
  misc_RNA (1)...(19): siRNA sense strand
ggaaggaagugaguuauca

SEQ ID NO: 496357 - RNA, 19 nt, Homo sapiens
  misc_RNA (1)...(19): siRNA sense strand
gaaaauaacucuccauugg

SEQ ID NO: 496358 - RNA, 19 nt, Homo sapiens
  misc_RNA (1)...(19): siRNA sense strand
gaaacuggcugcucucucu

SEQ ID NO: 496359 - RNA, 19 nt, Homo sapiens
  misc_RNA (1)...(19): siRNA sense strand
ggaugcagauggguucuua

SEQ ID NO: 496360 - RNA, 19 nt, Homo sapiens
  misc_RNA (1)...(19): siRNA sense strand
gaugaaaguuacauggaaa

SEQ ID NO: 496361 - RNA, 19 nt, Homo sapiens
  misc_RNA (1)...(19): siRNA sense strand
caagaaaguuacagccaaa

SEQ ID NO: 496362 - RNA, 19 nt, Homo sapiens
  misc_RNA (1)...(19): siRNA sense strand
gggcagcuaugaaacaauu

SEQ ID NO: 496363 - RNA, 19 nt, Homo sapiens
  misc_RNA (1)...(19): siRNA sense strand
gaagacaggcucacugcua

SEQ ID NO: 496364 - RNA, 19 nt, Homo sapiens
  misc_RNA (1)...(19): siRNA sense strand
gaaagaagagaaagaggaa

SEQ ID NO: 496365 - RNA, 19 nt, Homo sapiens
  misc_RNA (1)...(19): siRNA sense strand
ccaagucucucucaucaga

SEQ ID NO: 496366 - RNA, 19 nt, Homo sapiens
  misc_RNA (1)...(19): siRNA sense strand
gaugaagauuccuuuguga

SEQ ID NO: 496367 - RNA, 19 nt, Homo sapiens
  misc_RNA (1)...(19): siRNA sense strand
gaagaggacguaauugaug

SEQ ID NO: 496368 - RNA, 19 nt, Homo sapiens
  misc_RNA (1)...(19): siRNA sense strand
cuacagacuuuaccacuga

SEQ ID NO: 496369 - RNA, 19 nt, Homo sapiens
  misc_RNA (1)...(19): siRNA sense strand
caugauuucuucaaacgua

SEQ ID NO: 496370 - RNA, 19 nt, Homo sapiens
  misc_RNA (1)...(19): siRNA sense strand
gcacugaaccuuccauauc

SEQ ID NO: 496371 - RNA, 19 nt, Homo sapiens
  misc_RNA (1)...(19): siRNA sense strand
gaagcagagugacauuaga

SEQ ID NO: 496372 - RNA, 19 nt, Homo sapiens
  misc_RNA (1)...(19): siRNA sense strand
gauaaugaguuugauagug

SEQ ID NO: 496373 - RNA, 19 nt, Homo sapiens
  misc_RNA (1)...(19): siRNA sense strand
gagaagagaagguagagaa

SEQ ID NO: 496374 - RNA, 19 nt, Homo sapiens
  misc_RNA (1)...(19): siRNA sense strand
uaaaacaacugcauaguga

SEQ ID NO: 496375 - RNA, 19 nt, Homo sapiens
  misc_RNA (1)...(19): siRNA sense strand
ggacagucaguuuaugaua

SEQ ID NO: 496376 - RNA, 19 nt, Homo sapiens
  misc_RNA (1)...(19): siRNA sense strand
ccaugaagaugaugaugaa

SEQ ID NO: 496377 - RNA, 19 nt, Homo sapiens
  misc_RNA (1)...(19): siRNA sense strand
ggaagaccaugaagaugau

SEQ ID NO: 496378 - RNA, 19 nt, Homo sapiens
  misc_RNA (1)...(19): siRNA sense strand
ugaagaugaugaugaagaa

SEQ ID NO: 496379 - RNA, 19 nt, Homo sapiens
  misc_RNA (1)...(19): siRNA sense strand
gcagccagauuaaguaaag

SEQ ID NO: 496380 - RNA, 19 nt, Homo sapiens
  misc_RNA (1)...(19): siRNA sense strand
gaacacagugacucuggua

SEQ ID NO: 496381 - RNA, 19 nt, Homo sapiens
  misc_RNA (1)...(19): siRNA sense strand
ggaggaagaggaagaaaug

SEQ ID NO: 496382 - RNA, 19 nt, Homo sapiens
  misc_RNA (1)...(19): siRNA sense strand
ugaaagacaugggcacuga

SEQ ID NO: 496383 - RNA, 19 nt, Homo sapiens
  misc_RNA (1)...(19): siRNA sense strand
gcaaauacuacugaaauga

SEQ ID NO: 496384 - RNA, 19 nt, Homo sapiens
  misc_RNA (1)...(19): siRNA sense strand
aagaaaggcagccagauua

SEQ ID NO: 496385 - RNA, 19 nt, Homo sapiens
  misc_RNA (1)...(19): siRNA sense strand
ugauagcacuucaggauug

SEQ ID NO: 496386 - RNA, 19 nt, Homo sapiens
  misc_RNA (1)...(19): siRNA sense strand
gaagcgaagaugaguauga

SEQ ID NO: 496387 - RNA, 19 nt, Homo sapiens
  misc_RNA (1)...(19): siRNA sense strand
cagcaugggugauccaaug

SEQ ID NO: 496388 - RNA, 19 nt, Homo sapiens
  misc_RNA (1)...(19): siRNA sense strand
uaaauaaacaggagaagga

SEQ ID NO: 496389 - RNA, 19 nt, Homo sapiens
  misc_RNA (1)...(19): siRNA sense strand
gaagauuccuuugugauac

SEQ ID NO: 496390 - RNA, 19 nt, Homo sapiens
  misc_RNA (1)...(19): siRNA sense strand
uggaaacucuacagacuuu

SEQ ID NO: 496391 - RNA, 19 nt, Homo sapiens
  misc_RNA (1)...(19): siRNA sense strand
aauuacagcugaagaagaa

SEQ ID NO: 496392 - RNA, 19 nt, Homo sapiens
  misc_RNA (1)...(19): siRNA sense strand
gaacugcagagucaaauca

SEQ ID NO: 496393 - RNA, 19 nt, Homo sapiens
  misc_RNA (1)...(19): siRNA sense strand
ccaagcacuguuuaaauua

SEQ ID NO: 496394 - RNA, 19 nt, Homo sapiens
  misc_RNA (1)...(19): siRNA sense strand
aaacuggguuggaggauga

SEQ ID NO: 496395 - RNA, 19 nt, Homo sapiens
  misc_RNA (1)...(19): siRNA sense strand
acaggaagguucuacaaga

SEQ ID NO: 496396 - RNA, 19 nt, Homo sapiens
  misc_RNA (1)...(19): siRNA sense strand
gaaacugucugagccuuca

SEQ ID NO: 496397 - RNA, 19 nt, Homo sapiens
  misc_RNA (1)...(19): siRNA sense strand
ucaggagacugcagaauuc

SEQ ID NO: 496398 - RNA, 19 nt, Homo sapiens
  misc_RNA (1)...(19): siRNA sense strand
gaaagaagaggaggaggaa

SEQ ID NO: 496399 - RNA, 19 nt, Homo sapiens
  misc_RNA (1)...(19): siRNA sense strand
gaagucaucuaaauaucag

SEQ ID NO: 496400 - RNA, 19 nt, Homo sapiens
  misc_RNA (1)...(19): siRNA sense strand
aggaagaaaugacagauga

SEQ ID NO: 496401 - RNA, 19 nt, Homo sapiens
  misc_RNA (1)...(19): siRNA sense strand
gcuaggugcugaugaagau

SEQ ID NO: 496402 - RNA, 19 nt, Homo sapiens
  misc_RNA (1)...(19): siRNA sense strand
ggaguagauguuuccauua

SEQ ID NO: 496403 - RNA, 19 nt, Homo sapiens
  misc_RNA (1)...(19): siRNA sense strand
gcaggaaggauuugguaaa

SEQ ID NO: 496404 - RNA, 19 nt, Homo sapiens
  misc_RNA (1)...(19): siRNA sense strand
ggaagagccugagcagcaa

SEQ ID NO: 496405 - RNA, 19 nt, Homo sapiens
  misc_RNA (1)...(19): siRNA sense strand
gaugauagcacuucaggau

SEQ ID NO: 496406 - RNA, 19 nt, Homo sapiens
  misc_RNA (1)...(19): siRNA sense strand
gccagucgcccuaugguua

SEQ ID NO: 496407 - RNA, 19 nt, Homo sapiens
  misc_RNA (1)...(19): siRNA sense strand
aaacuauguuggaugauga

SEQ ID NO: 496408 - RNA, 19 nt, Homo sapiens
  misc_RNA (1)...(19): siRNA sense strand
caggaagagugacaagaaa

SEQ ID NO: 496409 - RNA, 19 nt, Homo sapiens
  misc_RNA (1)...(19): siRNA sense strand
gaaaccacaggaaucagua

SEQ ID NO: 496410 - RNA, 19 nt, Homo sapiens
  misc_RNA (1)...(19): siRNA sense strand
caaugaaacuccgaagguu

SEQ ID NO: 496411 - RNA, 19 nt, Homo sapiens
  misc_RNA (1)...(19): siRNA sense strand
gaagagucauuagaaucaa

SEQ ID NO: 496412 - RNA, 19 nt, Homo sapiens
  misc_RNA (1)...(19): siRNA sense strand
gaacauggaggaacuucug

SEQ ID NO: 496413 - RNA, 19 nt, Homo sapiens
  misc_RNA (1)...(19): siRNA sense strand
cagauggguucuuaaaugu

SEQ ID NO: 496414 - RNA, 19 nt, Homo sapiens
  misc_RNA (1)...(19): siRNA sense strand
guucauugcuaacaaagga

SEQ ID NO: 496415 - RNA, 19 nt, Homo sapiens
  misc_RNA (1)...(19): siRNA sense strand
aagagaagguagagaaaga

SEQ ID NO: 496416 - RNA, 19 nt, Homo sapiens
  misc_RNA (1)...(19): siRNA sense strand
ugaagauuccuuugugaua

SEQ ID NO: 496417 - RNA, 19 nt, Homo sapiens
  misc_RNA (1)...(19): siRNA sense strand
aaggaaacccagaucauua

SEQ ID NO: 496418 - RNA, 19 nt, Homo sapiens
  misc_RNA (1)...(19): siRNA sense strand
ggaagaugauguagaacag

SEQ ID NO: 496419 - RNA, 19 nt, Homo sapiens
  misc_RNA (1)...(19): siRNA sense strand
gaaauuggcaaggcaguug

SEQ ID NO: 496420 - RNA, 19 nt, Homo sapiens
  misc_RNA (1)...(19): siRNA sense strand
gcaguugggccaccugaaa

SEQ ID NO: 496421 - RNA, 19 nt, Homo sapiens
  misc_RNA (1)...(19): siRNA sense strand
gauguagaacagccauuua

SEQ ID NO: 496422 - RNA, 19 nt, Homo sapiens
  misc_RNA (1)...(19): siRNA sense strand
ggaagagugacaagaaaga

SEQ ID NO: 496423 - RNA, 19 nt, Homo sapiens
  misc_RNA (1)...(19): siRNA sense strand
ggaaucaguaccaagcuuu

SEQ ID NO: 496424 - RNA, 19 nt, Homo sapiens
  misc_RNA (1)...(19): siRNA sense strand
gcuccacgauuccauccua

SEQ ID NO: 496425 - RNA, 19 nt, Homo sapiens
  misc_RNA (1)...(19): siRNA sense strand
ggaggaagaagaaggaaau

SEQ ID NO: 496426 - RNA, 19 nt, Homo sapiens
  misc_RNA (1)...(19): siRNA sense strand
gaaagaggaagaacuagag

SEQ ID NO: 496427 - RNA, 19 nt, Homo sapiens
  misc_RNA (1)...(19): siRNA sense strand
gcuagaaauucaggagaaa

SEQ ID NO: 496428 - RNA, 19 nt, Homo sapiens
  misc_RNA (1)...(19): siRNA sense strand
gcaaugaaacuccgaaggu

SEQ ID NO: 496429 - RNA, 19 nt, Homo sapiens
  misc_RNA (1)...(19): siRNA sense strand
ugacuucuccuucaccuaa

SEQ ID NO: 496430 - RNA, 19 nt, Homo sapiens
  misc_RNA (1)...(19): siRNA sense strand
gcacagcaggggaaaauua

SEQ ID NO: 496431 - RNA, 19 nt, Homo sapiens
  misc_RNA (1)...(19): siRNA sense strand
cggcuuguuucaaaugaua

SEQ ID NO: 496432 - RNA, 19 nt, Homo sapiens
  misc_RNA (1)...(19): siRNA sense strand
gcaggagacuuccaguucu

SEQ ID NO: 496433 - RNA, 19 nt, Homo sapiens
  misc_RNA (1)...(19): siRNA sense strand
aaggagagcagccacaaua

SEQ ID NO: 496434 - RNA, 19 nt, Homo sapiens
  misc_RNA (1)...(19): siRNA sense strand
cucaucagauucuacuuua

SEQ ID NO: 496435 - RNA, 19 nt, Homo sapiens
  misc_RNA (1)...(19): siRNA sense strand
gaucacugcugcccacugu

SEQ ID NO: 496436 - RNA, 19 nt, Homo sapiens
  misc_RNA (1)...(19): siRNA sense strand
gaaggugccugugcagaca

SEQ ID NO: 496437 - RNA, 19 nt, Homo sapiens
  misc_RNA (1)...(19): siRNA sense strand
aaccauaccuguucucugu

SEQ ID NO: 496438 - RNA, 19 nt, Homo sapiens
  misc_RNA (1)...(19): siRNA sense strand
cgacagccauccucaaugc

SEQ ID NO: 496439 - RNA, 19 nt, Homo sapiens
  misc_RNA (1)...(19): siRNA sense strand
gcugaagguuccuaucauc

SEQ ID NO: 496440 - RNA, 19 nt, Homo sapiens
  misc_RNA (1)...(19): siRNA sense strand
gacagggacccaucacuga

SEQ ID NO: 496441 - RNA, 19 nt, Homo sapiens
  misc_RNA (1)...(19): siRNA sense strand
ucacugcugcccacuguuu

SEQ ID NO: 496442 - RNA, 19 nt, Homo sapiens
  misc_RNA (1)...(19): siRNA sense strand
gaagucugcagccaucugu

SEQ ID NO: 496443 - RNA, 19 nt, Homo sapiens
  misc_RNA (1)...(19): siRNA sense strand
ucaaggacaaccugaacaa

SEQ ID NO: 496444 - RNA, 19 nt, Homo sapiens
  misc_RNA (1)...(19): siRNA sense strand
caaggacaaccugaacaaa

SEQ ID NO: 496445 - RNA, 19 nt, Homo sapiens
  misc_RNA (1)...(19): siRNA sense strand
ccucaaugcggccaggaua

SEQ ID NO: 496446 - RNA, 19 nt, Homo sapiens
  misc_RNA (1)...(19): siRNA sense strand
gcugugugccggcuacuug

SEQ ID NO: 496447 - RNA, 19 nt, Homo sapiens
  misc_RNA (1)...(19): siRNA sense strand
cuauccaccucccuccaaa

SEQ ID NO: 496448 - RNA, 19 nt, Homo sapiens
  misc_RNA (1)...(19): siRNA sense strand
gcaggacagggacccauca

SEQ ID NO: 496449 - RNA, 19 nt, Homo sapiens
  misc_RNA (1)...(19): siRNA sense strand
gugagcauccagaagaaug

SEQ ID NO: 496450 - RNA, 19 nt, Homo sapiens
  misc_RNA (1)...(19): siRNA sense strand
aagcugaagguuccuauca

SEQ ID NO: 496451 - RNA, 19 nt, Homo sapiens
  misc_RNA (1)...(19): siRNA sense strand
ggaagucugcagccaucug

SEQ ID NO: 496452 - RNA, 19 nt, Homo sapiens
  misc_RNA (1)...(19): siRNA sense strand
cucgagcgcuccauacagu

SEQ ID NO: 496453 - RNA, 19 nt, Homo sapiens
  misc_RNA (1)...(19): siRNA sense strand
ucgugagcauccagaagaa

SEQ ID NO: 496454 - RNA, 19 nt, Homo sapiens
  misc_RNA (1)...(19): siRNA sense strand
gaagcugaagguuccuauc

SEQ ID NO: 496455 - RNA, 19 nt, Homo sapiens
  misc_RNA (1)...(19): siRNA sense strand
guucuacucucuugaaaua

SEQ ID NO: 496456 - RNA, 19 nt, Homo sapiens
  misc_RNA (1)...(19): siRNA sense strand
ggaaucaucuuguucaaag

SEQ ID NO: 496457 - RNA, 19 nt, Homo sapiens
  misc_RNA (1)...(19): siRNA sense strand
ccaagaagguuuagaagug

SEQ ID NO: 496458 - RNA, 19 nt, Homo sapiens
  misc_RNA (1)...(19): siRNA sense strand
ggauucaacuuguuucuug

SEQ ID NO: 496459 - RNA, 19 nt, Homo sapiens
  misc_RNA (1)...(19): siRNA sense strand
ccaaauccauccauacauu

SEQ ID NO: 496460 - RNA, 19 nt, Homo sapiens
  misc_RNA (1)...(19): siRNA sense strand
caaagaauauuacccgaau

SEQ ID NO: 496461 - RNA, 19 nt, Homo sapiens
  misc_RNA (1)...(19): siRNA sense strand
gaauaggagucucauagau

SEQ ID NO: 496462 - RNA, 19 nt, Homo sapiens
  misc_RNA (1)...(19): siRNA sense strand
ucacggauguugaguuuga

SEQ ID NO: 496463 - RNA, 19 nt, Homo sapiens
  misc_RNA (1)...(19): siRNA sense strand
uggaggaucuauuaugaua

SEQ ID NO: 496464 - RNA, 19 nt, Homo sapiens
  misc_RNA (1)...(19): siRNA sense strand
gcaacuggcucaggcauau

SEQ ID NO: 496465 - RNA, 19 nt, Homo sapiens
  misc_RNA (1)...(19): siRNA sense strand
caaccucaccuacagaaua

SEQ ID NO: 496466 - RNA, 19 nt, Homo sapiens
  misc_RNA (1)...(19): siRNA sense strand
gaugaaaacuucuggauga

SEQ ID NO: 496467 - RNA, 19 nt, Homo sapiens
  misc_RNA (1)...(19): siRNA sense strand
uaucacggauguugaguuu

SEQ ID NO: 496468 - RNA, 19 nt, Homo sapiens
  misc_RNA (1)...(19): siRNA sense strand
gagauaagauucugguuuu

SEQ ID NO: 496469 - RNA, 19 nt, Homo sapiens
  misc_RNA (1)...(19): siRNA sense strand
caaagucacuccacuaaaa

SEQ ID NO: 496470 - RNA, 19 nt, Homo sapiens
  misc_RNA (1)...(19): siRNA sense strand
cagaggauaugcugucuug

SEQ ID NO: 496471 - RNA, 19 nt, Homo sapiens
  misc_RNA (1)...(19): siRNA sense strand
cauaagaguuuaagcuugu

SEQ ID NO: 496472 - RNA, 19 nt, Homo sapiens
  misc_RNA (1)...(19): siRNA sense strand
gaacuaauacuugguuuca

SEQ ID NO: 496473 - RNA, 19 nt, Homo sapiens
  misc_RNA (1)...(19): siRNA sense strand
gagcaggauucaacuuguu

SEQ ID NO: 496474 - RNA, 19 nt, Homo sapiens
  misc_RNA (1)...(19): siRNA sense strand
ggauguugaguuugaauua

SEQ ID NO: 496475 - RNA, 19 nt, Homo sapiens
  misc_RNA (1)...(19): siRNA sense strand
gaggaucuauuaugauauc

SEQ ID NO: 496476 - RNA, 19 nt, Homo sapiens
  misc_RNA (1)...(19): siRNA sense strand
cgaaucaugagaacuaaua

SEQ ID NO: 496477 - RNA, 19 nt, Homo sapiens
  misc_RNA (1)...(19): siRNA sense strand
gcaaagaaccaaagaacuc

SEQ ID NO: 496478 - RNA, 19 nt, Homo sapiens
  misc_RNA (1)...(19): siRNA sense strand
caaauccauccauacauua

SEQ ID NO: 496479 - RNA, 19 nt, Homo sapiens
  misc_RNA (1)...(19): siRNA sense strand
aggcauaucucaaccaguu

SEQ ID NO: 496480 - RNA, 19 nt, Homo sapiens
  misc_RNA (1)...(19): siRNA sense strand
gugauaagaccacaagaaa

SEQ ID NO: 496481 - RNA, 19 nt, Homo sapiens
  misc_RNA (1)...(19): siRNA sense strand
gaauauuacccgaaucaug

SEQ ID NO: 496482 - RNA, 19 nt, Homo sapiens
  misc_RNA (1)...(19): siRNA sense strand
gcaauuugaauacgacauu

SEQ ID NO: 496483 - RNA, 19 nt, Homo sapiens
  misc_RNA (1)...(19): siRNA sense strand
gagcaaagucacuccacua

SEQ ID NO: 496484 - RNA, 19 nt, Homo sapiens
  misc_RNA (1)...(19): siRNA sense strand
ggaauccaguccaucuaug

SEQ ID NO: 496485 - RNA, 19 nt, Homo sapiens
  misc_RNA (1)...(19): siRNA sense strand
caagaagguuuagaagugu

SEQ ID NO: 496486 - RNA, 19 nt, Homo sapiens
  misc_RNA (1)...(19): siRNA sense strand
gagaacuaauacuugguuu

SEQ ID NO: 496487 - RNA, 19 nt, Homo sapiens
  misc_RNA (1)...(19): siRNA sense strand
ggagcaggauucaacuugu

SEQ ID NO: 496488 - RNA, 19 nt, Homo sapiens
  misc_RNA (1)...(19): siRNA sense strand
aauauuacccgaaucauga

SEQ ID NO: 496489 - RNA, 19 nt, Homo sapiens
  misc_RNA (1)...(19): siRNA sense strand
uguggaggaucuauuauga

SEQ ID NO: 496490 - RNA, 19 nt, Homo sapiens
  misc_RNA (1)...(19): siRNA sense strand
gaaauagaagggaaucauc

SEQ ID NO: 496491 - RNA, 19 nt, Homo sapiens
  misc_RNA (1)...(19): siRNA sense strand
gaaaacuucuggaugauca

SEQ ID NO: 496492 - RNA, 19 nt, Homo sapiens
  misc_RNA (1)...(19): siRNA sense strand
gcaaagucacuccacuaaa

SEQ ID NO: 496493 - RNA, 19 nt, Homo sapiens
  misc_RNA (1)...(19): siRNA sense strand
caaacacccuugagaucau

SEQ ID NO: 496494 - RNA, 19 nt, Homo sapiens
  misc_RNA (1)...(19): siRNA sense strand
ggaaucaguauccguguug

SEQ ID NO: 496495 - RNA, 19 nt, Homo sapiens
  misc_RNA (1)...(19): siRNA sense strand
gccuugauguucccaaauu

SEQ ID NO: 496496 - RNA, 19 nt, Homo sapiens
  misc_RNA (1)...(19): siRNA sense strand
uaaacuauacuccggauau

SEQ ID NO: 496497 - RNA, 19 nt, Homo sapiens
  misc_RNA (1)...(19): siRNA sense strand
aaccucaccuacagaauaa

SEQ ID NO: 496498 - RNA, 19 nt, Homo sapiens
  misc_RNA (1)...(19): siRNA sense strand
guucaaagcaagaauagga

SEQ ID NO: 496499 - RNA, 19 nt, Homo sapiens
  misc_RNA (1)...(19): siRNA sense strand
gaaaauacaaccucaccua

SEQ ID NO: 496500 - RNA, 19 nt, Homo sapiens
  misc_RNA (1)...(19): siRNA sense strand
agaagggaaucaucuuguu

SEQ ID NO: 496501 - RNA, 19 nt, Homo sapiens
  misc_RNA (1)...(19): siRNA sense strand
caggaggcauaaagauauu

SEQ ID NO: 496502 - RNA, 19 nt, Homo sapiens
  misc_RNA (1)...(19): siRNA sense strand
gaagggaaucaucuuguuc

SEQ ID NO: 496503 - RNA, 19 nt, Homo sapiens
  misc_RNA (1)...(19): siRNA sense strand
uaucccaaauccauccaua

SEQ ID NO: 496504 - RNA, 19 nt, Homo sapiens
  misc_RNA (1)...(19): siRNA sense strand
gaauacgacauuaagacaa

SEQ ID NO: 496505 - RNA, 19 nt, Homo sapiens
  misc_RNA (1)...(19): siRNA sense strand
ggcacgagcugcuguggau

SEQ ID NO: 496506 - RNA, 19 nt, Homo sapiens
  misc_RNA (1)...(19): siRNA sense strand
gcuggagguuugaugaaau

SEQ ID NO: 496507 - RNA, 19 nt, Homo sapiens
  misc_RNA (1)...(19): siRNA sense strand
gcagccgucugugauaaga

SEQ ID NO: 496508 - RNA, 19 nt, Homo sapiens
  misc_RNA (1)...(19): siRNA sense strand
ccuugauguucccaaauua

SEQ ID NO: 496509 - RNA, 19 nt, Homo sapiens
  misc_RNA (1)...(19): siRNA sense strand
ccacuaaaauucaccaaga

SEQ ID NO: 496510 - RNA, 19 nt, Homo sapiens
  misc_RNA (1)...(19): siRNA sense strand
ucacuccaaugaucaaaca

SEQ ID NO: 496511 - RNA, 19 nt, Homo sapiens
  misc_RNA (1)...(19): siRNA sense strand
uguggcugcucaugaauuu

SEQ ID NO: 496512 - RNA, 19 nt, Homo sapiens
  misc_RNA (1)...(19): siRNA sense strand
gccaaaggaacccacuaua

SEQ ID NO: 496513 - RNA, 19 nt, Homo sapiens
  misc_RNA (1)...(19): siRNA sense strand
ucaggaggcauaaagauau

SEQ ID NO: 496514 - RNA, 19 nt, Homo sapiens
  misc_RNA (1)...(19): siRNA sense strand
aaacuauacuccggauaug

SEQ ID NO: 496515 - RNA, 19 nt, Homo sapiens
  misc_RNA (1)...(19): siRNA sense strand
gaaucaguauccguguuga

SEQ ID NO: 496516 - RNA, 19 nt, Homo sapiens
  misc_RNA (1)...(19): siRNA sense strand
gaugcagccgucugugaua

SEQ ID NO: 496517 - RNA, 19 nt, Homo sapiens
  misc_RNA (1)...(19): siRNA sense strand
uaugcugucuugccagauu

SEQ ID NO: 496518 - RNA, 19 nt, Homo sapiens
  misc_RNA (1)...(19): siRNA sense strand
agagauaagauucugguuu

SEQ ID NO: 496519 - RNA, 19 nt, Homo sapiens
  misc_RNA (1)...(19): siRNA sense strand
ccaaaggaacccacuauac

SEQ ID NO: 496520 - RNA, 19 nt, Homo sapiens
  misc_RNA (1)...(19): siRNA sense strand
gcacauucaggaggcauaa

SEQ ID NO: 496521 - RNA, 19 nt, Homo sapiens
  misc_RNA (1)...(19): siRNA sense strand
gaaguguggagcaaaguca

SEQ ID NO: 496522 - RNA, 19 nt, Homo sapiens
  misc_RNA (1)...(19): siRNA sense strand
caagaauaggagucucaua

SEQ ID NO: 496523 - RNA, 19 nt, Homo sapiens
  misc_RNA (1)...(19): siRNA sense strand
ccgcagagaaguaauguuc

SEQ ID NO: 496524 - RNA, 19 nt, Homo sapiens
  misc_RNA (1)...(19): siRNA sense strand
ccucaccuacagaauaaua

SEQ ID NO: 496525 - RNA, 19 nt, Homo sapiens
  misc_RNA (1)...(19): siRNA sense strand
aagaacuccucauuugguu

SEQ ID NO: 496526 - RNA, 19 nt, Homo sapiens
  misc_RNA (1)...(19): siRNA sense strand
uauccaagaagguuuagaa

SEQ ID NO: 496527 - RNA, 19 nt, Homo sapiens
  misc_RNA (1)...(19): siRNA sense strand
aagaauaggagucucauag

SEQ ID NO: 496528 - RNA, 19 nt, Homo sapiens
  misc_RNA (1)...(19): siRNA sense strand
auacuugguuucaaugcaa

SEQ ID NO: 496529 - RNA, 19 nt, Homo sapiens
  misc_RNA (1)...(19): siRNA sense strand
ucacaacuuuccgcagaga

SEQ ID NO: 496530 - RNA, 19 nt, Homo sapiens
  misc_RNA (1)...(19): siRNA sense strand
ggauggagcaggauucaac

SEQ ID NO: 496531 - RNA, 19 nt, Homo sapiens
  misc_RNA (1)...(19): siRNA sense strand
gauugcagacaucaugauu

SEQ ID NO: 496532 - RNA, 19 nt, Homo sapiens
  misc_RNA (1)...(19): siRNA sense strand
cagccuugauguucccaaa

SEQ ID NO: 496533 - RNA, 19 nt, Homo sapiens
  misc_RNA (1)...(19): siRNA sense strand
gaacuccucauuugguuuu

SEQ ID NO: 496534 - RNA, 19 nt, Homo sapiens
  misc_RNA (1)...(19): siRNA sense strand
aaccaaagaacuccucauu

SEQ ID NO: 496535 - RNA, 19 nt, Homo sapiens
  misc_RNA (1)...(19): siRNA sense strand
aggaugauaucaauggaau

SEQ ID NO: 496536 - RNA, 19 nt, Homo sapiens
  misc_RNA (1)...(19): siRNA sense strand
gauucaacuuguuucuugu

SEQ ID NO: 496537 - RNA, 19 nt, Homo sapiens
  misc_RNA (1)...(19): siRNA sense strand
caaaggaacccacuauacc

SEQ ID NO: 496538 - RNA, 19 nt, Homo sapiens
  misc_RNA (1)...(19): siRNA sense strand
ucuuguggcugcucaugaa

SEQ ID NO: 496539 - RNA, 19 nt, Homo sapiens
  misc_RNA (1)...(19): siRNA sense strand
gacaucaugauugccuuua

SEQ ID NO: 496540 - RNA, 19 nt, Homo sapiens
  misc_RNA (1)...(19): siRNA sense strand
aaagaacuccucauuuggu

SEQ ID NO: 496541 - RNA, 19 nt, Homo sapiens
  misc_RNA (1)...(19): siRNA sense strand
gggaaucaucuuguucaaa

SEQ ID NO: 496542 - RNA, 19 nt, Homo sapiens
  misc_RNA (1)...(19): siRNA sense strand
ccaguucuacucucuugaa

SEQ ID NO: 496543 - RNA, 19 nt, Homo sapiens
  misc_RNA (1)...(19): siRNA sense strand
uuagaaguguggagcaaag

SEQ ID NO: 496544 - RNA, 19 nt, Homo sapiens
  misc_RNA (1)...(19): siRNA sense strand
gaugaaaugacccaaacca

SEQ ID NO: 496545 - RNA, 19 nt, Homo sapiens
  misc_RNA (1)...(19): siRNA sense strand
uaugauaucacggauguug

SEQ ID NO: 496546 - RNA, 19 nt, Homo sapiens
  misc_RNA (1)...(19): siRNA sense strand
agaauaggagucucauaga

SEQ ID NO: 496547 - RNA, 19 nt, Homo sapiens
  misc_RNA (1)...(19): siRNA sense strand
caucaugauugccuuuagg

SEQ ID NO: 496548 - RNA, 19 nt, Homo sapiens
  misc_RNA (1)...(19): siRNA sense strand
caguucuacucucuugaaa

SEQ ID NO: 496549 - RNA, 19 nt, Homo sapiens
  misc_RNA (1)...(19): siRNA sense strand
ugagaacuaauacuugguu

SEQ ID NO: 496550 - RNA, 19 nt, Homo sapiens
  misc_RNA (1)...(19): siRNA sense strand
ugaauacgacauuaagaca

SEQ ID NO: 496551 - RNA, 19 nt, Homo sapiens
  misc_RNA (1)...(19): siRNA sense strand
auuaugauaucacggaugu

SEQ ID NO: 496552 - RNA, 19 nt, Homo sapiens
  misc_RNA (1)...(19): siRNA sense strand
aaccaguucuacucucuug

SEQ ID NO: 496553 - RNA, 19 nt, Homo sapiens
  misc_RNA (1)...(19): siRNA sense strand
cuacucucuugaaauagaa

SEQ ID NO: 496554 - RNA, 19 nt, Homo sapiens
  misc_RNA (1)...(19): siRNA sense strand
aauaggagucucauagaug

SEQ ID NO: 496555 - RNA, 19 nt, Homo sapiens
  misc_RNA (1)...(19): siRNA sense strand
gcacggagcugaacgauga

SEQ ID NO: 496556 - RNA, 19 nt, Homo sapiens
  misc_RNA (1)...(19): siRNA sense strand
gaagaucacucucaucaau

SEQ ID NO: 496557 - RNA, 19 nt, Homo sapiens
  misc_RNA (1)...(19): siRNA sense strand
ggacaaggaugagaauuug

SEQ ID NO: 496558 - RNA, 19 nt, Homo sapiens
  misc_RNA (1)...(19): siRNA sense strand
gaacaacucccaccacuuc

SEQ ID NO: 496559 - RNA, 19 nt, Homo sapiens
  misc_RNA (1)...(19): siRNA sense strand
ggaggccucucgcuucuuu

SEQ ID NO: 496560 - RNA, 19 nt, Homo sapiens
  misc_RNA (1)...(19): siRNA sense strand
cccaagacauggacaauga

SEQ ID NO: 496561 - RNA, 19 nt, Homo sapiens
  misc_RNA (1)...(19): siRNA sense strand
ggacagagagaccaaguca

SEQ ID NO: 496562 - RNA, 19 nt, Homo sapiens
  misc_RNA (1)...(19): siRNA sense strand
gcggagugcugaccuugaa

SEQ ID NO: 496563 - RNA, 19 nt, Homo sapiens
  misc_RNA (1)...(19): siRNA sense strand
cuacgacuuugaucucuuu

SEQ ID NO: 496564 - RNA, 19 nt, Homo sapiens
  misc_RNA (1)...(19): siRNA sense strand
gaauaccaacagcaucuuu

SEQ ID NO: 496565 - RNA, 19 nt, Homo sapiens
  misc_RNA (1)...(19): siRNA sense strand
caacuuggccaucaucauc

SEQ ID NO: 496566 - RNA, 19 nt, Homo sapiens
  misc_RNA (1)...(19): siRNA sense strand
accaaccacuucuuugaua

SEQ ID NO: 496567 - RNA, 19 nt, Homo sapiens
  misc_RNA (1)...(19): siRNA sense strand
ggaaggcggacauucguau

SEQ ID NO: 496568 - RNA, 19 nt, Homo sapiens
  misc_RNA (1)...(19): siRNA sense strand
acagagagaccaagucaga

SEQ ID NO: 496569 - RNA, 19 nt, Homo sapiens
  misc_RNA (1)...(19): siRNA sense strand
gaccuucaauauccugguu

SEQ ID NO: 496570 - RNA, 19 nt, Homo sapiens
  misc_RNA (1)...(19): siRNA sense strand
ccacuucuuugauacauac

SEQ ID NO: 496571 - RNA, 19 nt, Homo sapiens
  misc_RNA (1)...(19): siRNA sense strand
gacaagaccaggccucugu

SEQ ID NO: 496572 - RNA, 19 nt, Homo sapiens
  misc_RNA (1)...(19): siRNA sense strand
ucaccaaccacuucuuuga

SEQ ID NO: 496573 - RNA, 19 nt, Homo sapiens
  misc_RNA (1)...(19): siRNA sense strand
ggucaacgccacagaucaa

SEQ ID NO: 496574 - RNA, 19 nt, Homo sapiens
  misc_RNA (1)...(19): siRNA sense strand
gaaggugaacauccagguu

SEQ ID NO: 496575 - RNA, 19 nt, Homo sapiens
  misc_RNA (1)...(19): siRNA sense strand
guucuucugugacccaguu

SEQ ID NO: 496576 - RNA, 19 nt, Homo sapiens
  misc_RNA (1)...(19): siRNA sense strand
ucaccacgaccuucaauau

SEQ ID NO: 496577 - RNA, 19 nt, Homo sapiens
  misc_RNA (1)...(19): siRNA sense strand
gagugugccugaccaugug

SEQ ID NO: 496578 - RNA, 19 nt, Homo sapiens
  misc_RNA (1)...(19): siRNA sense strand
auacauaccugcugaucag

SEQ ID NO: 496579 - RNA, 19 nt, Homo sapiens
  misc_RNA (1)...(19): siRNA sense strand
gaaggcggacauucguauu

SEQ ID NO: 496580 - RNA, 19 nt, Homo sapiens
  misc_RNA (1)...(19): siRNA sense strand
gcagcguccucuacuccuu

SEQ ID NO: 496581 - RNA, 19 nt, Homo sapiens
  misc_RNA (1)...(19): siRNA sense strand
ggacacgccuguggguucu

SEQ ID NO: 496582 - RNA, 19 nt, Homo sapiens
  misc_RNA (1)...(19): siRNA sense strand
uggacaaggaugagaauuu

SEQ ID NO: 496583 - RNA, 19 nt, Homo sapiens
  misc_RNA (1)...(19): siRNA sense strand
ggcagccacuggacagaga

SEQ ID NO: 496584 - RNA, 19 nt, Homo sapiens
  misc_RNA (1)...(19): siRNA sense strand
ccuguggguucuucuguga

SEQ ID NO: 496585 - RNA, 19 nt, Homo sapiens
  misc_RNA (1)...(19): siRNA sense strand
ugaaccggcugcccuucuu

SEQ ID NO: 496586 - RNA, 19 nt, Homo sapiens
  misc_RNA (1)...(19): siRNA sense strand
caccaucguuucagggaau

SEQ ID NO: 496587 - RNA, 19 nt, Homo sapiens
  misc_RNA (1)...(19): siRNA sense strand
gauacauaccugcugauca

SEQ ID NO: 496588 - RNA, 19 nt, Homo sapiens
  misc_RNA (1)...(19): siRNA sense strand
gcuacgacuuugaucucuu

SEQ ID NO: 496589 - RNA, 19 nt, Homo sapiens
  misc_RNA (1)...(19): siRNA sense strand
ggaacaacucccaccacuu

SEQ ID NO: 496590 - RNA, 19 nt, Homo sapiens
  misc_RNA (1)...(19): siRNA sense strand
gcgcccacauuucacaauc

SEQ ID NO: 496591 - RNA, 19 nt, Homo sapiens
  misc_RNA (1)...(19): siRNA sense strand
gagagaccaagucagaguu

SEQ ID NO: 496592 - RNA, 19 nt, Homo sapiens
  misc_RNA (1)...(19): siRNA sense strand
cgccacagaucaagacaag

SEQ ID NO: 496593 - RNA, 19 nt, Homo sapiens
  misc_RNA (1)...(19): siRNA sense strand
ggagugcugaccuugaaug

SEQ ID NO: 496594 - RNA, 19 nt, Homo sapiens
  misc_RNA (1)...(19): siRNA sense strand
gggaauaccaacagcaucu

SEQ ID NO: 496595 - RNA, 19 nt, Homo sapiens
  misc_RNA (1)...(19): siRNA sense strand
ccgcaucccugagaauaca

SEQ ID NO: 496596 - RNA, 19 nt, Homo sapiens
  misc_RNA (1)...(19): siRNA sense strand
ggacgcccaucuucaucgu

SEQ ID NO: 496597 - RNA, 19 nt, Homo sapiens
  misc_RNA (1)...(19): siRNA sense strand
ccacagaucaagacaagac

SEQ ID NO: 496598 - RNA, 19 nt, Homo sapiens
  misc_RNA (1)...(19): siRNA sense strand
gccagccacuguacaacau

SEQ ID NO: 496599 - RNA, 19 nt, Homo sapiens
  misc_RNA (1)...(19): siRNA sense strand
ccaaccacuucuuugauac

SEQ ID NO: 496600 - RNA, 19 nt, Homo sapiens
  misc_RNA (1)...(19): siRNA sense strand
gagaccaagucagaguuca

SEQ ID NO: 496601 - RNA, 19 nt, Homo sapiens
  misc_RNA (1)...(19): siRNA sense strand
gggaaggcggacauucgua

SEQ ID NO: 496602 - RNA, 19 nt, Homo sapiens
  misc_RNA (1)...(19): siRNA sense strand
gcuuugcccuuccacucuu

SEQ ID NO: 496603 - RNA, 19 nt, Homo sapiens
  misc_RNA (1)...(19): siRNA sense strand
ccauagaccaggauaaagg

SEQ ID NO: 496604 - RNA, 19 nt, Homo sapiens
  misc_RNA (1)...(19): siRNA sense strand
caacaucuacgagcauucu

SEQ ID NO: 496605 - RNA, 19 nt, Homo sapiens
  misc_RNA (1)...(19): siRNA sense strand
ccuaccagcucacggucaa

SEQ ID NO: 496606 - RNA, 19 nt, Homo sapiens
  misc_RNA (1)...(19): siRNA sense strand
uccgggagcuggacuacga

SEQ ID NO: 496607 - RNA, 19 nt, Homo sapiens
  misc_RNA (1)...(19): siRNA sense strand
ggaccgcuacgacuuugau

SEQ ID NO: 496608 - RNA, 19 nt, Homo sapiens
  misc_RNA (1)...(19): siRNA sense strand
cgccauagaccaggauaaa

SEQ ID NO: 496609 - RNA, 19 nt, Homo sapiens
  misc_RNA (1)...(19): siRNA sense strand
gcgcaucaucaccgccaua

SEQ ID NO: 496610 - RNA, 19 nt, Homo sapiens
  misc_RNA (1)...(19): siRNA sense strand
acaucagccuguacgagaa

SEQ ID NO: 496611 - RNA, 19 nt, Homo sapiens
  misc_RNA (1)...(19): siRNA sense strand
caucaucaccgccauagac

SEQ ID NO: 496612 - RNA, 19 nt, Homo sapiens
  misc_RNA (1)...(19): siRNA sense strand
uguccacccuggccaacuu

SEQ ID NO: 496613 - RNA, 19 nt, Homo sapiens
  misc_RNA (1)...(19): siRNA sense strand
cagccacuguacaacauca

SEQ ID NO: 496614 - RNA, 19 nt, Homo sapiens
  misc_RNA (1)...(19): siRNA sense strand
caacucccaccacuucauc

SEQ ID NO: 496615 - RNA, 19 nt, Homo sapiens
  misc_RNA (1)...(19): siRNA sense strand
ucaucaaccugccuuacag

SEQ ID NO: 496616 - RNA, 19 nt, Homo sapiens
  misc_RNA (1)...(19): siRNA sense strand
guccgcaucccugagaaua

SEQ ID NO: 496617 - RNA, 19 nt, Homo sapiens
  misc_RNA (1)...(19): siRNA sense strand
gaaccggcugcccuucuuc

SEQ ID NO: 496618 - RNA, 19 nt, Homo sapiens
  misc_RNA (1)...(19): siRNA sense strand
ggaauaccaacagcaucuu

SEQ ID NO: 496619 - RNA, 19 nt, Homo sapiens
  misc_RNA (1)...(19): siRNA sense strand
cauagaccaggauaaagga

SEQ ID NO: 496620 - RNA, 19 nt, Homo sapiens
  misc_RNA (1)...(19): siRNA sense strand
uuugaucucuuugccaaug

SEQ ID NO: 496621 - RNA, 19 nt, Homo sapiens
  misc_RNA (1)...(19): siRNA sense strand
caaccacuucuuugauaca

SEQ ID NO: 496622 - RNA, 19 nt, Homo sapiens
  misc_RNA (1)...(19): siRNA sense strand
gaguacagcguggccauca

SEQ ID NO: 496623 - RNA, 19 nt, Homo sapiens
  misc_RNA (1)...(19): siRNA sense strand
cacggaaggugaacaucca

SEQ ID NO: 496624 - RNA, 19 nt, Homo sapiens
  misc_RNA (1)...(19): siRNA sense strand
cuucaccaaccacuucuuu

SEQ ID NO: 496625 - RNA, 19 nt, Homo sapiens
  misc_RNA (1)...(19): siRNA sense strand
guggaccgcuacgacuuug

SEQ ID NO: 496626 - RNA, 19 nt, Homo sapiens
  misc_RNA (1)...(19): siRNA sense strand
gagaauuugggccugaaca

SEQ ID NO: 496627 - RNA, 19 nt, Homo sapiens
  misc_RNA (1)...(19): siRNA sense strand
ccuucaauauccugguuau

SEQ ID NO: 496628 - RNA, 19 nt, Homo sapiens
  misc_RNA (1)...(19): siRNA sense strand
ggcuucauccugacuguga

SEQ ID NO: 496629 - RNA, 19 nt, Homo sapiens
  misc_RNA (1)...(19): siRNA sense strand
uuacagcaccaacaucuac

SEQ ID NO: 496630 - RNA, 19 nt, Homo sapiens
  misc_RNA (1)...(19): siRNA sense strand
gcuaugccaaggugaagau

SEQ ID NO: 496631 - RNA, 19 nt, Homo sapiens
  misc_RNA (1)...(19): siRNA sense strand
cagcauguuugagguguac

SEQ ID NO: 496632 - RNA, 19 nt, Homo sapiens
  misc_RNA (1)...(19): siRNA sense strand
gugcugaucucuggaugcu

SEQ ID NO: 496633 - RNA, 19 nt, Homo sapiens
  misc_RNA (1)...(19): siRNA sense strand
acagcauguuugaggugua

SEQ ID NO: 496634 - RNA, 19 nt, Homo sapiens
  misc_RNA (1)...(19): siRNA sense strand
gcacggagcugaacgauga

SEQ ID NO: 496635 - RNA, 19 nt, Homo sapiens
  misc_RNA (1)...(19): siRNA sense strand
gaagaucacucucaucaau

SEQ ID NO: 496636 - RNA, 19 nt, Homo sapiens
  misc_RNA (1)...(19): siRNA sense strand
ggacaaggaugagaauuug

SEQ ID NO: 496637 - RNA, 19 nt, Homo sapiens
  misc_RNA (1)...(19): siRNA sense strand
gaacaacucccaccacuuc

SEQ ID NO: 496638 - RNA, 19 nt, Homo sapiens
  misc_RNA (1)...(19): siRNA sense strand
ggaggccucucgcuucuuu

SEQ ID NO: 496639 - RNA, 19 nt, Homo sapiens
  misc_RNA (1)...(19): siRNA sense strand
cccaagacauggacaauga

SEQ ID NO: 496640 - RNA, 19 nt, Homo sapiens
  misc_RNA (1)...(19): siRNA sense strand
ggacagagagaccaaguca

SEQ ID NO: 496641 - RNA, 19 nt, Homo sapiens
  misc_RNA (1)...(19): siRNA sense strand
gcggagugcugaccuugaa

SEQ ID NO: 496642 - RNA, 19 nt, Homo sapiens
  misc_RNA (1)...(19): siRNA sense strand
cuacgacuuugaucucuuu

SEQ ID NO: 496643 - RNA, 19 nt, Homo sapiens
  misc_RNA (1)...(19): siRNA sense strand
gaauaccaacagcaucuuu

SEQ ID NO: 496644 - RNA, 19 nt, Homo sapiens
  misc_RNA (1)...(19): siRNA sense strand
caacuuggccaucaucauc

SEQ ID NO: 496645 - RNA, 19 nt, Homo sapiens
  misc_RNA (1)...(19): siRNA sense strand
accaaccacuucuuugaua

SEQ ID NO: 496646 - RNA, 19 nt, Homo sapiens
  misc_RNA (1)...(19): siRNA sense strand
ggaaggcggacauucguau

SEQ ID NO: 496647 - RNA, 19 nt, Homo sapiens
  misc_RNA (1)...(19): siRNA sense strand
acagagagaccaagucaga

SEQ ID NO: 496648 - RNA, 19 nt, Homo sapiens
  misc_RNA (1)...(19): siRNA sense strand
gaccuucaauauccugguu

SEQ ID NO: 496649 - RNA, 19 nt, Homo sapiens
  misc_RNA (1)...(19): siRNA sense strand
ccacuucuuugauacauac

SEQ ID NO: 496650 - RNA, 19 nt, Homo sapiens
  misc_RNA (1)...(19): siRNA sense strand
gacaagaccaggccucugu

SEQ ID NO: 496651 - RNA, 19 nt, Homo sapiens
  misc_RNA (1)...(19): siRNA sense strand
ucaccaaccacuucuuuga

SEQ ID NO: 496652 - RNA, 19 nt, Homo sapiens
  misc_RNA (1)...(19): siRNA sense strand
ggucaacgccacagaucaa

SEQ ID NO: 496653 - RNA, 19 nt, Homo sapiens
  misc_RNA (1)...(19): siRNA sense strand
gaaggugaacauccagguu

SEQ ID NO: 496654 - RNA, 19 nt, Homo sapiens
  misc_RNA (1)...(19): siRNA sense strand
guucuucugugacccaguu

SEQ ID NO: 496655 - RNA, 19 nt, Homo sapiens
  misc_RNA (1)...(19): siRNA sense strand
ucaccacgaccuucaauau

SEQ ID NO: 496656 - RNA, 19 nt, Homo sapiens
  misc_RNA (1)...(19): siRNA sense strand
gagugugccugaccaugug

SEQ ID NO: 496657 - RNA, 19 nt, Homo sapiens
  misc_RNA (1)...(19): siRNA sense strand
auacauaccugcugaucag

SEQ ID NO: 496658 - RNA, 19 nt, Homo sapiens
  misc_RNA (1)...(19): siRNA sense strand
gaaggcggacauucguauu

SEQ ID NO: 496659 - RNA, 19 nt, Homo sapiens
  misc_RNA (1)...(19): siRNA sense strand
gcagcguccucuacuccuu

SEQ ID NO: 496660 - RNA, 19 nt, Homo sapiens
  misc_RNA (1)...(19): siRNA sense strand
ggacacgccuguggguucu

SEQ ID NO: 496661 - RNA, 19 nt, Homo sapiens
  misc_RNA (1)...(19): siRNA sense strand
uggacaaggaugagaauuu

SEQ ID NO: 496662 - RNA, 19 nt, Homo sapiens
  misc_RNA (1)...(19): siRNA sense strand
ggcagccacuggacagaga

SEQ ID NO: 496663 - RNA, 19 nt, Homo sapiens
  misc_RNA (1)...(19): siRNA sense strand
ccuguggguucuucuguga

SEQ ID NO: 496664 - RNA, 19 nt, Homo sapiens
  misc_RNA (1)...(19): siRNA sense strand
ugaaccggcugcccuucuu

SEQ ID NO: 496665 - RNA, 19 nt, Homo sapiens
  misc_RNA (1)...(19): siRNA sense strand
caccaucguuucagggaau

SEQ ID NO: 496666 - RNA, 19 nt, Homo sapiens
  misc_RNA (1)...(19): siRNA sense strand
gauacauaccugcugauca

SEQ ID NO: 496667 - RNA, 19 nt, Homo sapiens
  misc_RNA (1)...(19): siRNA sense strand
gcuacgacuuugaucucuu

SEQ ID NO: 496668 - RNA, 19 nt, Homo sapiens
  misc_RNA (1)...(19): siRNA sense strand
ggaacaacucccaccacuu

SEQ ID NO: 496669 - RNA, 19 nt, Homo sapiens
  misc_RNA (1)...(19): siRNA sense strand
gcgcccacauuucacaauc

SEQ ID NO: 496670 - RNA, 19 nt, Homo sapiens
  misc_RNA (1)...(19): siRNA sense strand
gagagaccaagucagaguu

SEQ ID NO: 496671 - RNA, 19 nt, Homo sapiens
  misc_RNA (1)...(19): siRNA sense strand
cgccacagaucaagacaag

SEQ ID NO: 496672 - RNA, 19 nt, Homo sapiens
  misc_RNA (1)...(19): siRNA sense strand
ggagugcugaccuugaaug

SEQ ID NO: 496673 - RNA, 19 nt, Homo sapiens
  misc_RNA (1)...(19): siRNA sense strand
gggaauaccaacagcaucu

SEQ ID NO: 496674 - RNA, 19 nt, Homo sapiens
  misc_RNA (1)...(19): siRNA sense strand
ccgcaucccugagaauaca

SEQ ID NO: 496675 - RNA, 19 nt, Homo sapiens
  misc_RNA (1)...(19): siRNA sense strand
ggacgcccaucuucaucgu

SEQ ID NO: 496676 - RNA, 19 nt, Homo sapiens
  misc_RNA (1)...(19): siRNA sense strand
ccacagaucaagacaagac

SEQ ID NO: 496677 - RNA, 19 nt, Homo sapiens
  misc_RNA (1)...(19): siRNA sense strand
gccagccacuguacaacau

SEQ ID NO: 496678 - RNA, 19 nt, Homo sapiens
  misc_RNA (1)...(19): siRNA sense strand
ccaaccacuucuuugauac

SEQ ID NO: 496679 - RNA, 19 nt, Homo sapiens
  misc_RNA (1)...(19): siRNA sense strand
gagaccaagucagaguuca

SEQ ID NO: 496680 - RNA, 19 nt, Homo sapiens
  misc_RNA (1)...(19): siRNA sense strand
gggaaggcggacauucgua

SEQ ID NO: 496681 - RNA, 19 nt, Homo sapiens
  misc_RNA (1)...(19): siRNA sense strand
gcuuugcccuuccacucuu

SEQ ID NO: 496682 - RNA, 19 nt, Homo sapiens
  misc_RNA (1)...(19): siRNA sense strand
ccauagaccaggauaaagg

SEQ ID NO: 496683 - RNA, 19 nt, Homo sapiens
  misc_RNA (1)...(19): siRNA sense strand
caacaucuacgagcauucu

SEQ ID NO: 496684 - RNA, 19 nt, Homo sapiens
  misc_RNA (1)...(19): siRNA sense strand
ccuaccagcucacggucaa

SEQ ID NO: 496685 - RNA, 19 nt, Homo sapiens
  misc_RNA (1)...(19): siRNA sense strand
uccgggagcuggacuacga

SEQ ID NO: 496686 - RNA, 19 nt, Homo sapiens
  misc_RNA (1)...(19): siRNA sense strand
ggaccgcuacgacuuugau

SEQ ID NO: 496687 - RNA, 19 nt, Homo sapiens
  misc_RNA (1)...(19): siRNA sense strand
cgccauagaccaggauaaa

SEQ ID NO: 496688 - RNA, 19 nt, Homo sapiens
  misc_RNA (1)...(19): siRNA sense strand
gcgcaucaucaccgccaua

SEQ ID NO: 496689 - RNA, 19 nt, Homo sapiens
  misc_RNA (1)...(19): siRNA sense strand
acaucagccuguacgagaa

SEQ ID NO: 496690 - RNA, 19 nt, Homo sapiens
  misc_RNA (1)...(19): siRNA sense strand
caucaucaccgccauagac

SEQ ID NO: 496691 - RNA, 19 nt, Homo sapiens
  misc_RNA (1)...(19): siRNA sense strand
uguccacccuggccaacuu

SEQ ID NO: 496692 - RNA, 19 nt, Homo sapiens
  misc_RNA (1)...(19): siRNA sense strand
cagccacuguacaacauca

SEQ ID NO: 496693 - RNA, 19 nt, Homo sapiens
  misc_RNA (1)...(19): siRNA sense strand
caacucccaccacuucauc

SEQ ID NO: 496694 - RNA, 19 nt, Homo sapiens
  misc_RNA (1)...(19): siRNA sense strand
ucaucaaccugccuuacag

SEQ ID NO: 496695 - RNA, 19 nt, Homo sapiens
  misc_RNA (1)...(19): siRNA sense strand
guccgcaucccugagaaua

SEQ ID NO: 496696 - RNA, 19 nt, Homo sapiens
  misc_RNA (1)...(19): siRNA sense strand
gaaccggcugcccuucuuc

SEQ ID NO: 496697 - RNA, 19 nt, Homo sapiens
  misc_RNA (1)...(19): siRNA sense strand
ggaauaccaacagcaucuu

SEQ ID NO: 496698 - RNA, 19 nt, Homo sapiens
  misc_RNA (1)...(19): siRNA sense strand
cauagaccaggauaaagga

SEQ ID NO: 496699 - RNA, 19 nt, Homo sapiens
  misc_RNA (1)...(19): siRNA sense strand
uuugaucucuuugccaaug

SEQ ID NO: 496700 - RNA, 19 nt, Homo sapiens
  misc_RNA (1)...(19): siRNA sense strand
caaccacuucuuugauaca

SEQ ID NO: 496701 - RNA, 19 nt, Homo sapiens
  misc_RNA (1)...(19): siRNA sense strand
gaguacagcguggccauca

SEQ ID NO: 496702 - RNA, 19 nt, Homo sapiens
  misc_RNA (1)...(19): siRNA sense strand
cacggaaggugaacaucca

SEQ ID NO: 496703 - RNA, 19 nt, Homo sapiens
  misc_RNA (1)...(19): siRNA sense strand
cuucaccaaccacuucuuu

SEQ ID NO: 496704 - RNA, 19 nt, Homo sapiens
  misc_RNA (1)...(19): siRNA sense strand
guggaccgcuacgacuuug

SEQ ID NO: 496705 - RNA, 19 nt, Homo sapiens
  misc_RNA (1)...(19): siRNA sense strand
gagaauuugggccugaaca

SEQ ID NO: 496706 - RNA, 19 nt, Homo sapiens
  misc_RNA (1)...(19): siRNA sense strand
ccuucaauauccugguuau

SEQ ID NO: 496707 - RNA, 19 nt, Homo sapiens
  misc_RNA (1)...(19): siRNA sense strand
ggcuucauccugacuguga

SEQ ID NO: 496708 - RNA, 19 nt, Homo sapiens
  misc_RNA (1)...(19): siRNA sense strand
uuacagcaccaacaucuac

SEQ ID NO: 496709 - RNA, 19 nt, Homo sapiens
  misc_RNA (1)...(19): siRNA sense strand
gcuaugccaaggugaagau

SEQ ID NO: 496710 - RNA, 19 nt, Homo sapiens
  misc_RNA (1)...(19): siRNA sense strand
cagcauguuugagguguac

SEQ ID NO: 496711 - RNA, 19 nt, Homo sapiens
  misc_RNA (1)...(19): siRNA sense strand
gugcugaucucuggaugcu

SEQ ID NO: 496712 - RNA, 19 nt, Homo sapiens
  misc_RNA (1)...(19): siRNA sense strand
acagcauguuugaggugua

SEQ ID NO: 496713 - RNA, 19 nt, Homo sapiens
  misc_RNA (1)...(19): siRNA sense strand
caacagauccaauuucauu

SEQ ID NO: 496714 - RNA, 19 nt, Homo sapiens
  misc_RNA (1)...(19): siRNA sense strand
ggaacugcuucuauaauug

SEQ ID NO: 496715 - RNA, 19 nt, Homo sapiens
  misc_RNA (1)...(19): siRNA sense strand
gaauaucauugucauagug

SEQ ID NO: 496716 - RNA, 19 nt, Homo sapiens
  misc_RNA (1)...(19): siRNA sense strand
cgaaauaacuccagcaacu

SEQ ID NO: 496717 - RNA, 19 nt, Homo sapiens
  misc_RNA (1)...(19): siRNA sense strand
uacaggaacugcuucuaua

SEQ ID NO: 496718 - RNA, 19 nt, Homo sapiens
  misc_RNA (1)...(19): siRNA sense strand
caaagcacauucccacaga

SEQ ID NO: 496719 - RNA, 19 nt, Homo sapiens
  misc_RNA (1)...(19): siRNA sense strand
ugacguccaugguguguaa

SEQ ID NO: 496720 - RNA, 19 nt, Homo sapiens
  misc_RNA (1)...(19): siRNA sense strand
cauaguggcuggagcaaau

SEQ ID NO: 496721 - RNA, 19 nt, Homo sapiens
  misc_RNA (1)...(19): siRNA sense strand
gaacugcuucuauaauugu

SEQ ID NO: 496722 - RNA, 19 nt, Homo sapiens
  misc_RNA (1)...(19): siRNA sense strand
caggaacacagucaucuua

SEQ ID NO: 496723 - RNA, 19 nt, Homo sapiens
  misc_RNA (1)...(19): siRNA sense strand
gcacauucccacagagaaa

SEQ ID NO: 496724 - RNA, 19 nt, Homo sapiens
  misc_RNA (1)...(19): siRNA sense strand
gaaagugaggcugagauuu

SEQ ID NO: 496725 - RNA, 19 nt, Homo sapiens
  misc_RNA (1)...(19): siRNA sense strand
agacagaaccugagccaaa

SEQ ID NO: 496726 - RNA, 19 nt, Homo sapiens
  misc_RNA (1)...(19): siRNA sense strand
guggugggcuccugcauga

SEQ ID NO: 496727 - RNA, 19 nt, Homo sapiens
  misc_RNA (1)...(19): siRNA sense strand
gaagacaugcucaacagau

SEQ ID NO: 496728 - RNA, 19 nt, Homo sapiens
  misc_RNA (1)...(19): siRNA sense strand
aggaacugcuucuauaauu

SEQ ID NO: 496729 - RNA, 19 nt, Homo sapiens
  misc_RNA (1)...(19): siRNA sense strand
gauguguucugcugcaaug

SEQ ID NO: 496730 - RNA, 19 nt, Homo sapiens
  misc_RNA (1)...(19): siRNA sense strand
gaaauaacuccagcaacuu

SEQ ID NO: 496731 - RNA, 19 nt, Homo sapiens
  misc_RNA (1)...(19): siRNA sense strand
gaaaggugccaaccagugu

SEQ ID NO: 496732 - RNA, 19 nt, Homo sapiens
  misc_RNA (1)...(19): siRNA sense strand
gacuaaagaugcugcuaca

SEQ ID NO: 496733 - RNA, 19 nt, Homo sapiens
  misc_RNA (1)...(19): siRNA sense strand
uagcagagccaaagucaug

SEQ ID NO: 496734 - RNA, 19 nt, Homo sapiens
  misc_RNA (1)...(19): siRNA sense strand
ccgcaggaguggagugaaa

SEQ ID NO: 496735 - RNA, 19 nt, Homo sapiens
  misc_RNA (1)...(19): siRNA sense strand
ggucugccagcucgaaaua

SEQ ID NO: 496736 - RNA, 19 nt, Homo sapiens
  misc_RNA (1)...(19): siRNA sense strand
gacagaaccugagccaaag

SEQ ID NO: 496737 - RNA, 19 nt, Homo sapiens
  misc_RNA (1)...(19): siRNA sense strand
gaaagucaaggcuguggau

SEQ ID NO: 496738 - RNA, 19 nt, Homo sapiens
  misc_RNA (1)...(19): siRNA sense strand
ccuucuaccuggcuuacua

SEQ ID NO: 496739 - RNA, 19 nt, Homo sapiens
  misc_RNA (1)...(19): siRNA sense strand
cuacaggaacugcuucuau

SEQ ID NO: 496740 - RNA, 19 nt, Homo sapiens
  misc_RNA (1)...(19): siRNA sense strand
aauaaugaaggccagaaua

SEQ ID NO: 496741 - RNA, 19 nt, Homo sapiens
  misc_RNA (1)...(19): siRNA sense strand
cagaauaucauugucauag

SEQ ID NO: 496742 - RNA, 19 nt, Homo sapiens
  misc_RNA (1)...(19): siRNA sense strand
ugggagcucuggccuucua

SEQ ID NO: 496743 - RNA, 19 nt, Homo sapiens
  misc_RNA (1)...(19): siRNA sense strand
uguguaagguuggcaaaga

SEQ ID NO: 496744 - RNA, 19 nt, Homo sapiens
  misc_RNA (1)...(19): siRNA sense strand
cucaacagauccaauuuca

SEQ ID NO: 496745 - RNA, 19 nt, Homo sapiens
  misc_RNA (1)...(19): siRNA sense strand
uaacuccagcaacuucuuu

SEQ ID NO: 496746 - RNA, 19 nt, Homo sapiens
  misc_RNA (1)...(19): siRNA sense strand
ugaaagugaggcugagauu

SEQ ID NO: 496747 - RNA, 19 nt, Homo sapiens
  misc_RNA (1)...(19): siRNA sense strand
gcaggaacacagucaucuu

SEQ ID NO: 496748 - RNA, 19 nt, Homo sapiens
  misc_RNA (1)...(19): siRNA sense strand
ggaagacaugcucaacaga

SEQ ID NO: 496749 - RNA, 19 nt, Homo sapiens
  misc_RNA (1)...(19): siRNA sense strand
acaggaacugcuucuauaa

SEQ ID NO: 496750 - RNA, 19 nt, Homo sapiens
  misc_RNA (1)...(19): siRNA sense strand
gcucaacagauccaauuuc

SEQ ID NO: 496751 - RNA, 19 nt, Homo sapiens
  misc_RNA (1)...(19): siRNA sense strand
gccagaauaucauugucau

SEQ ID NO: 496752 - RNA, 19 nt, Homo sapiens
  misc_RNA (1)...(19): siRNA sense strand
aaugaaggccagaauauca

SEQ ID NO: 496753 - RNA, 19 nt, Homo sapiens
  misc_RNA (1)...(19): siRNA sense strand
auaaugaaggccagaauau

SEQ ID NO: 496754 - RNA, 19 nt, Homo sapiens
  misc_RNA (1)...(19): siRNA sense strand
cuaccuggcuuacuaucca

SEQ ID NO: 496755 - RNA, 19 nt, Homo sapiens
  misc_RNA (1)...(19): siRNA sense strand
gaaggccagaauaucauug

SEQ ID NO: 496756 - RNA, 19 nt, Homo sapiens
  misc_RNA (1)...(19): siRNA sense strand
ccagaauaucauugucaua

SEQ ID NO: 496757 - RNA, 19 nt, Homo sapiens
  misc_RNA (1)...(19): siRNA sense strand
acagucaucuuacccuuac

SEQ ID NO: 496758 - RNA, 19 nt, Homo sapiens
  misc_RNA (1)...(19): siRNA sense strand
uggaagacaugcucaacag

SEQ ID NO: 496759 - RNA, 19 nt, Homo sapiens
  misc_RNA (1)...(19): siRNA sense strand
guguucugcugcaaugaaa

SEQ ID NO: 496760 - RNA, 19 nt, Homo sapiens
  misc_RNA (1)...(19): siRNA sense strand
caaccaguguguccaagcu

SEQ ID NO: 496761 - RNA, 19 nt, Homo sapiens
  misc_RNA (1)...(19): siRNA sense strand
guguaagguuggcaaagau

SEQ ID NO: 496762 - RNA, 19 nt, Homo sapiens
  misc_RNA (1)...(19): siRNA sense strand
aaagugaggcugagauuuu

SEQ ID NO: 496763 - RNA, 19 nt, Homo sapiens
  misc_RNA (1)...(19): siRNA sense strand
aaauaacuccagcaacuuc

SEQ ID NO: 496764 - RNA, 19 nt, Homo sapiens
  misc_RNA (1)...(19): siRNA sense strand
cacagucaucuuacccuua

SEQ ID NO: 496765 - RNA, 19 nt, Homo sapiens
  misc_RNA (1)...(19): siRNA sense strand
ucuacacccucucagaugu

SEQ ID NO: 496766 - RNA, 19 nt, Homo sapiens
  misc_RNA (1)...(19): siRNA sense strand
caggaacugcuucuauaau

SEQ ID NO: 496767 - RNA, 19 nt, Homo sapiens
  misc_RNA (1)...(19): siRNA sense strand
ggaacacagucaucuuacc

SEQ ID NO: 496768 - RNA, 19 nt, Homo sapiens
  misc_RNA (1)...(19): siRNA sense strand
gagcaaugacguccauggu

SEQ ID NO: 496769 - RNA, 19 nt, Homo sapiens
  misc_RNA (1)...(19): siRNA sense strand
uguccaggcugcaggaaca

SEQ ID NO: 496770 - RNA, 19 nt, Homo sapiens
  misc_RNA (1)...(19): siRNA sense strand
aagacaugcucaacagauc

SEQ ID NO: 496771 - RNA, 19 nt, Homo sapiens
  misc_RNA (1)...(19): siRNA sense strand
caaaucuguccuuggaaga

SEQ ID NO: 496772 - RNA, 19 nt, Homo sapiens
  misc_RNA (1)...(19): siRNA sense strand
ggccagaauaucauuguca

SEQ ID NO: 496773 - RNA, 19 nt, Homo sapiens
  misc_RNA (1)...(19): siRNA sense strand
gaccuuccgcuuacucugu

SEQ ID NO: 496774 - RNA, 19 nt, Homo sapiens
  misc_RNA (1)...(19): siRNA sense strand
cugcauuagugcucuugaa

SEQ ID NO: 496775 - RNA, 19 nt, Homo sapiens
  misc_RNA (1)...(19): siRNA sense strand
ggaguggagugaaaaccuu

SEQ ID NO: 496776 - RNA, 19 nt, Homo sapiens
  misc_RNA (1)...(19): siRNA sense strand
uuuggaagcccuaacaaug

SEQ ID NO: 496777 - RNA, 19 nt, Homo sapiens
  misc_RNA (1)...(19): siRNA sense strand
gcuggagcaaauuuacuuu

SEQ ID NO: 496778 - RNA, 19 nt, Homo sapiens
  misc_RNA (1)...(19): siRNA sense strand
caauaaugaaggccagaau

SEQ ID NO: 496779 - RNA, 19 nt, Homo sapiens
  misc_RNA (1)...(19): siRNA sense strand
ugccauugcugaccuggau

SEQ ID NO: 496780 - RNA, 19 nt, Homo sapiens
  misc_RNA (1)...(19): siRNA sense strand
guaagguuggcaaagauuc

SEQ ID NO: 496781 - RNA, 19 nt, Homo sapiens
  misc_RNA (1)...(19): siRNA sense strand
ugaaggccagaauaucauu

SEQ ID NO: 496782 - RNA, 19 nt, Homo sapiens
  misc_RNA (1)...(19): siRNA sense strand
cauccauggacauaaguuu

SEQ ID NO: 496783 - RNA, 19 nt, Homo sapiens
  misc_RNA (1)...(19): siRNA sense strand
guucuacacccucucagau

SEQ ID NO: 496784 - RNA, 19 nt, Homo sapiens
  misc_RNA (1)...(19): siRNA sense strand
uaaugaaggccagaauauc

SEQ ID NO: 496785 - RNA, 19 nt, Homo sapiens
  misc_RNA (1)...(19): siRNA sense strand
gcugccaggugguaaucau

SEQ ID NO: 496786 - RNA, 19 nt, Homo sapiens
  misc_RNA (1)...(19): siRNA sense strand
gagggcagcagccaauguc

SEQ ID NO: 496787 - RNA, 19 nt, Homo sapiens
  misc_RNA (1)...(19): siRNA sense strand
aagugaggcugagauuuua

SEQ ID NO: 496788 - RNA, 19 nt, Homo sapiens
  misc_RNA (1)...(19): siRNA sense strand
cagucuuacuucucguuug

SEQ ID NO: 496789 - RNA, 19 nt, Homo sapiens
  misc_RNA (1)...(19): siRNA sense strand
cagaagaacugguaccaua

SEQ ID NO: 496790 - RNA, 19 nt, Homo sapiens
  misc_RNA (1)...(19): siRNA sense strand
gaauauggccgauaagaaa

SEQ ID NO: 496791 - RNA, 19 nt, Homo sapiens
  misc_RNA (1)...(19): siRNA sense strand
caagaagucuggacauugu

SEQ ID NO: 496792 - RNA, 19 nt, Homo sapiens
  misc_RNA (1)...(19): siRNA sense strand
uaacccagcuugucaaugg

SEQ ID NO: 496793 - RNA, 19 nt, Homo sapiens
  misc_RNA (1)...(19): siRNA sense strand
caggauggguggugaauau

SEQ ID NO: 496794 - RNA, 19 nt, Homo sapiens
  misc_RNA (1)...(19): siRNA sense strand
gcaaaccuguuccauucuu

SEQ ID NO: 496795 - RNA, 19 nt, Homo sapiens
  misc_RNA (1)...(19): siRNA sense strand
gaagaacugguaccauauu

SEQ ID NO: 496796 - RNA, 19 nt, Homo sapiens
  misc_RNA (1)...(19): siRNA sense strand
ggagaaaggcaaagaggaa

SEQ ID NO: 496797 - RNA, 19 nt, Homo sapiens
  misc_RNA (1)...(19): siRNA sense strand
cgaaggacauaguuucaga

SEQ ID NO: 496798 - RNA, 19 nt, Homo sapiens
  misc_RNA (1)...(19): siRNA sense strand
ucaauagacugcaguaucu

SEQ ID NO: 496799 - RNA, 19 nt, Homo sapiens
  misc_RNA (1)...(19): siRNA sense strand
gagaagagguagaaaaugu

SEQ ID NO: 496800 - RNA, 19 nt, Homo sapiens
  misc_RNA (1)...(19): siRNA sense strand
gaacugguaccauauuaca

SEQ ID NO: 496801 - RNA, 19 nt, Homo sapiens
  misc_RNA (1)...(19): siRNA sense strand
aagaacugguaccauauua

SEQ ID NO: 496802 - RNA, 19 nt, Homo sapiens
  misc_RNA (1)...(19): siRNA sense strand
ggaaguaugguuauaucuu

SEQ ID NO: 496803 - RNA, 19 nt, Homo sapiens
  misc_RNA (1)...(19): siRNA sense strand
uaccugauaucacuaaaga

SEQ ID NO: 496804 - RNA, 19 nt, Homo sapiens
  misc_RNA (1)...(19): siRNA sense strand
agacugcaguaucuuauug

SEQ ID NO: 496805 - RNA, 19 nt, Homo sapiens
  misc_RNA (1)...(19): siRNA sense strand
gacuugaacucgccaggaa

SEQ ID NO: 496806 - RNA, 19 nt, Homo sapiens
  misc_RNA (1)...(19): siRNA sense strand
caaaccuguuccauucuuu

SEQ ID NO: 496807 - RNA, 19 nt, Homo sapiens
  misc_RNA (1)...(19): siRNA sense strand
ggcggauccugccaaauuu

SEQ ID NO: 496808 - RNA, 19 nt, Homo sapiens
  misc_RNA (1)...(19): siRNA sense strand
gauccuagucaaccuauug

SEQ ID NO: 496809 - RNA, 19 nt, Homo sapiens
  misc_RNA (1)...(19): siRNA sense strand
gccaggaaguaugguuaua

SEQ ID NO: 496810 - RNA, 19 nt, Homo sapiens
  misc_RNA (1)...(19): siRNA sense strand
uaacgaaggacauaguuuc

SEQ ID NO: 496811 - RNA, 19 nt, Homo sapiens
  misc_RNA (1)...(19): siRNA sense strand
cauauuacacugaugcaaa

SEQ ID NO: 496812 - RNA, 19 nt, Homo sapiens
  misc_RNA (1)...(19): siRNA sense strand
gcaguaucuuauugauuug

SEQ ID NO: 496813 - RNA, 19 nt, Homo sapiens
  misc_RNA (1)...(19): siRNA sense strand
augcaaaccuguuccauuc

SEQ ID NO: 496814 - RNA, 19 nt, Homo sapiens
  misc_RNA (1)...(19): siRNA sense strand
ccaagaaaccggagagaag

SEQ ID NO: 496815 - RNA, 19 nt, Homo sapiens
  misc_RNA (1)...(19): siRNA sense strand
caagaaaccggagagaaga

SEQ ID NO: 496816 - RNA, 19 nt, Homo sapiens
  misc_RNA (1)...(19): siRNA sense strand
caggaaguaugguuauauc

SEQ ID NO: 496817 - RNA, 19 nt, Homo sapiens
  misc_RNA (1)...(19): siRNA sense strand
ggagaggugugaccaucca

SEQ ID NO: 496818 - RNA, 19 nt, Homo sapiens
  misc_RNA (1)...(19): siRNA sense strand
cggcaaaaguuaauauuga

SEQ ID NO: 496819 - RNA, 19 nt, Homo sapiens
  misc_RNA (1)...(19): siRNA sense strand
gaacucgccaggaaguaug

SEQ ID NO: 496820 - RNA, 19 nt, Homo sapiens
  misc_RNA (1)...(19): siRNA sense strand
ccaagaagucuggacauug

SEQ ID NO: 496821 - RNA, 19 nt, Homo sapiens
  misc_RNA (1)...(19): siRNA sense strand
ugaauauggccgauaagaa

SEQ ID NO: 496822 - RNA, 19 nt, Homo sapiens
  misc_RNA (1)...(19): siRNA sense strand
uggugaauauggccgauaa

SEQ ID NO: 496823 - RNA, 19 nt, Homo sapiens
  misc_RNA (1)...(19): siRNA sense strand
uuacuacagccuucuauga

SEQ ID NO: 496824 - RNA, 19 nt, Homo sapiens
  misc_RNA (1)...(19): siRNA sense strand
aaaaugcucuguacuagga

SEQ ID NO: 496825 - RNA, 19 nt, Homo sapiens
  misc_RNA (1)...(19): siRNA sense strand
uaaaggagaaaggcaaaga

SEQ ID NO: 496826 - RNA, 19 nt, Homo sapiens
  misc_RNA (1)...(19): siRNA sense strand
ccugauaucacuaaagaug

SEQ ID NO: 496827 - RNA, 19 nt, Homo sapiens
  misc_RNA (1)...(19): siRNA sense strand
cagaggccauaaaggagaa

SEQ ID NO: 496828 - RNA, 19 nt, Homo sapiens
  misc_RNA (1)...(19): siRNA sense strand
aauagacugcaguaucuua

SEQ ID NO: 496829 - RNA, 19 nt, Homo sapiens
  misc_RNA (1)...(19): siRNA sense strand
aagaaugcuuccaccagaa

SEQ ID NO: 496830 - RNA, 19 nt, Homo sapiens
  misc_RNA (1)...(19): siRNA sense strand
ggaaggauccaaggcagau

SEQ ID NO: 496831 - RNA, 19 nt, Homo sapiens
  misc_RNA (1)...(19): siRNA sense strand
gagccuggccaacuuaaag

SEQ ID NO: 496832 - RNA, 19 nt, Homo sapiens
  misc_RNA (1)...(19): siRNA sense strand
gaaucccggcuccaagaaa

SEQ ID NO: 496833 - RNA, 19 nt, Homo sapiens
  misc_RNA (1)...(19): siRNA sense strand
ggucggagaagagguagaa

SEQ ID NO: 496834 - RNA, 19 nt, Homo sapiens
  misc_RNA (1)...(19): siRNA sense strand
cauaaaggagaaaggcaaa

SEQ ID NO: 496835 - RNA, 19 nt, Homo sapiens
  misc_RNA (1)...(19): siRNA sense strand
ccuaaaaccuacagaugaa

SEQ ID NO: 496836 - RNA, 19 nt, Homo sapiens
  misc_RNA (1)...(19): siRNA sense strand
ccuguuccauucuuucuuc

SEQ ID NO: 496837 - RNA, 19 nt, Homo sapiens
  misc_RNA (1)...(19): siRNA sense strand
ugauuugggucguguugau

SEQ ID NO: 496838 - RNA, 19 nt, Homo sapiens
  misc_RNA (1)...(19): siRNA sense strand
gguaccauauuacacugau

SEQ ID NO: 496839 - RNA, 19 nt, Homo sapiens
  misc_RNA (1)...(19): siRNA sense strand
cuucagaacuagcuauugc

SEQ ID NO: 496840 - RNA, 19 nt, Homo sapiens
  misc_RNA (1)...(19): siRNA sense strand
ccaggaaguaugguuauau

SEQ ID NO: 496841 - RNA, 19 nt, Homo sapiens
  misc_RNA (1)...(19): siRNA sense strand
aguauaagccuuugagucu

SEQ ID NO: 496842 - RNA, 19 nt, Homo sapiens
  misc_RNA (1)...(19): siRNA sense strand
uaugcaaaccuguuccauu

SEQ ID NO: 496843 - RNA, 19 nt, Homo sapiens
  misc_RNA (1)...(19): siRNA sense strand
gugaauauggccgauaaga

SEQ ID NO: 496844 - RNA, 19 nt, Homo sapiens
  misc_RNA (1)...(19): siRNA sense strand
caaggcagauuuucuuugg

SEQ ID NO: 496845 - RNA, 19 nt, Homo sapiens
  misc_RNA (1)...(19): siRNA sense strand
gugugagccuggccaacuu

SEQ ID NO: 496846 - RNA, 19 nt, Homo sapiens
  misc_RNA (1)...(19): siRNA sense strand
aaguacaguuggcuucaga

SEQ ID NO: 496847 - RNA, 19 nt, Homo sapiens
  misc_RNA (1)...(19): siRNA sense strand
gcuauugcugccauugaaa

SEQ ID NO: 496848 - RNA, 19 nt, Homo sapiens
  misc_RNA (1)...(19): siRNA sense strand
accaagaggucggagaaga

SEQ ID NO: 496849 - RNA, 19 nt, Homo sapiens
  misc_RNA (1)...(19): siRNA sense strand
agaagaacugguaccauau

SEQ ID NO: 496850 - RNA, 19 nt, Homo sapiens
  misc_RNA (1)...(19): siRNA sense strand
gaagucuggacauuguaug

SEQ ID NO: 496851 - RNA, 19 nt, Homo sapiens
  misc_RNA (1)...(19): siRNA sense strand
gaggccagacuccauuuua

SEQ ID NO: 496852 - RNA, 19 nt, Homo sapiens
  misc_RNA (1)...(19): siRNA sense strand
ggguuuaacgaaggacaua

SEQ ID NO: 496853 - RNA, 19 nt, Homo sapiens
  misc_RNA (1)...(19): siRNA sense strand
ugccaaauuuccugaagca

SEQ ID NO: 496854 - RNA, 19 nt, Homo sapiens
  misc_RNA (1)...(19): siRNA sense strand
guaccauauuacacugaug

SEQ ID NO: 496855 - RNA, 19 nt, Homo sapiens
  misc_RNA (1)...(19): siRNA sense strand
caaaauacggguuuaacga

SEQ ID NO: 496856 - RNA, 19 nt, Homo sapiens
  misc_RNA (1)...(19): siRNA sense strand
gacuuaacccagcuuguca

SEQ ID NO: 496857 - RNA, 19 nt, Homo sapiens
  misc_RNA (1)...(19): siRNA sense strand
gaaggauccaaggcagauu

SEQ ID NO: 496858 - RNA, 19 nt, Homo sapiens
  misc_RNA (1)...(19): siRNA sense strand
ucaaaaugcucuguacuag

SEQ ID NO: 496859 - RNA, 19 nt, Homo sapiens
  misc_RNA (1)...(19): siRNA sense strand
auauuacacugaugcaaag

SEQ ID NO: 496860 - RNA, 19 nt, Homo sapiens
  misc_RNA (1)...(19): siRNA sense strand
agaggucggagaagaggua

SEQ ID NO: 496861 - RNA, 19 nt, Homo sapiens
  misc_RNA (1)...(19): siRNA sense strand
ugacuuaacccagcuuguc

SEQ ID NO: 496862 - RNA, 19 nt, Homo sapiens
  misc_RNA (1)...(19): siRNA sense strand
uuaacgaaggacauaguuu

SEQ ID NO: 496863 - RNA, 19 nt, Homo sapiens
  misc_RNA (1)...(19): siRNA sense strand
acuacagccuucuaugauc

SEQ ID NO: 496864 - RNA, 19 nt, Homo sapiens
  misc_RNA (1)...(19): siRNA sense strand
uuacacugaugcaaagaac

SEQ ID NO: 496865 - RNA, 19 nt, Homo sapiens
  misc_RNA (1)...(19): siRNA sense strand
ccgaaucccggcuccaaga

SEQ ID NO: 496866 - RNA, 19 nt, Homo sapiens
  misc_RNA (1)...(19): siRNA sense strand
ccaagaggucggagaagag

SEQ ID NO: 496867 - RNA, 19 nt, Homo sapiens
  misc_RNA (1)...(19): siRNA sense strand
aaggauccaaggcagauuu

SEQ ID NO: 496868 - RNA, 19 nt, Homo sapiens
  misc_RNA (1)...(19): siRNA sense strand
ucuggacauuguaugcaaa

SEQ ID NO: 496869 - RNA, 19 nt, Homo sapiens
  misc_RNA (1)...(19): siRNA sense strand
guuucagacgccaguauaa

SEQ ID NO: 496870 - RNA, 19 nt, Homo sapiens
  misc_RNA (1)...(19): siRNA sense strand
gucuggacauuguaugcaa

SEQ ID NO: 496871 - RNA, 19 nt, Homo sapiens
  misc_RNA (1)...(19): siRNA sense strand
cgaaucccggcuccaagaa

SEQ ID NO: 496872 - RNA, 19 nt, Homo sapiens
  misc_RNA (1)...(19): siRNA sense strand
ggauggguggugaauaugg

SEQ ID NO: 496873 - RNA, 19 nt, Homo sapiens
  misc_RNA (1)...(19): siRNA sense strand
ucgccaggaaguaugguua

SEQ ID NO: 496874 - RNA, 19 nt, Homo sapiens
  misc_RNA (1)...(19): siRNA sense strand
ggaaucaucgucgugaaca

SEQ ID NO: 496875 - RNA, 19 nt, Homo sapiens
  misc_RNA (1)...(19): siRNA sense strand
agaagggagugcagggaau

SEQ ID NO: 496876 - RNA, 19 nt, Homo sapiens
  misc_RNA (1)...(19): siRNA sense strand
gaagggagugcagggaauc

SEQ ID NO: 496877 - RNA, 19 nt, Homo sapiens
  misc_RNA (1)...(19): siRNA sense strand
ggaaucaucgucgugaaca

SEQ ID NO: 496878 - RNA, 19 nt, Homo sapiens
  misc_RNA (1)...(19): siRNA sense strand
agaagggagugcagggaau

SEQ ID NO: 496879 - RNA, 19 nt, Homo sapiens
  misc_RNA (1)...(19): siRNA sense strand
gaagggagugcagggaauc

SEQ ID NO: 496880 - RNA, 19 nt, Homo sapiens
  misc_RNA (1)...(19): siRNA sense strand
ccacuucacuucugccuuu

SEQ ID NO: 496881 - RNA, 19 nt, Homo sapiens
  misc_RNA (1)...(19): siRNA sense strand
gugcugagcuggugaccua

SEQ ID NO: 496882 - RNA, 19 nt, Homo sapiens
  misc_RNA (1)...(19): siRNA sense strand
ucaaacaguucuacaccaa

SEQ ID NO: 496883 - RNA, 19 nt, Homo sapiens
  misc_RNA (1)...(19): siRNA sense strand
ccgagaggcucccuucuga

SEQ ID NO: 496884 - RNA, 19 nt, Homo sapiens
  misc_RNA (1)...(19): siRNA sense strand
gcuaaaguccgguuacaga

SEQ ID NO: 496885 - RNA, 19 nt, Homo sapiens
  misc_RNA (1)...(19): siRNA sense strand
ucgcagaucucaucaccuu

SEQ ID NO: 496886 - RNA, 19 nt, Homo sapiens
  misc_RNA (1)...(19): siRNA sense strand
gcaucggccuguaugauuc

SEQ ID NO: 496887 - RNA, 19 nt, Homo sapiens
  misc_RNA (1)...(19): siRNA sense strand
ggucggagauaccaaagca

SEQ ID NO: 496888 - RNA, 19 nt, Homo sapiens
  misc_RNA (1)...(19): siRNA sense strand
gcagaucucaucaccuuuc

SEQ ID NO: 496889 - RNA, 19 nt, Homo sapiens
  misc_RNA (1)...(19): siRNA sense strand
aagccaaccucaugacaga

SEQ ID NO: 496890 - RNA, 19 nt, Homo sapiens
  misc_RNA (1)...(19): siRNA sense strand
ugaccucccuugccacuuc

SEQ ID NO: 496891 - RNA, 19 nt, Homo sapiens
  misc_RNA (1)...(19): siRNA sense strand
gaccauugcccgagaggaa

SEQ ID NO: 496892 - RNA, 19 nt, Homo sapiens
  misc_RNA (1)...(19): siRNA sense strand
gaaagccaaccucaugaca

SEQ ID NO: 496893 - RNA, 19 nt, Homo sapiens
  misc_RNA (1)...(19): siRNA sense strand
gcuggccacugugcccuua

SEQ ID NO: 496894 - RNA, 19 nt, Homo sapiens
  misc_RNA (1)...(19): siRNA sense strand
ccuguaugauucugucaaa

SEQ ID NO: 496895 - RNA, 19 nt, Homo sapiens
  misc_RNA (1)...(19): siRNA sense strand
uuacagauccaaggagaaa

SEQ ID NO: 496896 - RNA, 19 nt, Homo sapiens
  misc_RNA (1)...(19): siRNA sense strand
uuaccaugcuccagaagga

SEQ ID NO: 496897 - RNA, 19 nt, Homo sapiens
  misc_RNA (1)...(19): siRNA sense strand
gguaaagguccgauuccaa

SEQ ID NO: 496898 - RNA, 19 nt, Homo sapiens
  misc_RNA (1)...(19): siRNA sense strand
ugauguucgucaccuauga

SEQ ID NO: 496899 - RNA, 19 nt, Homo sapiens
  misc_RNA (1)...(19): siRNA sense strand
ccuggaacguggugauguu

SEQ ID NO: 496900 - RNA, 19 nt, Homo sapiens
  misc_RNA (1)...(19): siRNA sense strand
ccugaaagccaaccucaug

SEQ ID NO: 496901 - RNA, 19 nt, Homo sapiens
  misc_RNA (1)...(19): siRNA sense strand
ggucaagacgagauacaug

SEQ ID NO: 496902 - RNA, 19 nt, Homo sapiens
  misc_RNA (1)...(19): siRNA sense strand
gucaagacgagauacauga

SEQ ID NO: 496903 - RNA, 19 nt, Homo sapiens
  misc_RNA (1)...(19): siRNA sense strand
cuacugccacugugaaguu

SEQ ID NO: 496904 - RNA, 19 nt, Homo sapiens
  misc_RNA (1)...(19): siRNA sense strand
cccgaagccucuacaaugg

SEQ ID NO: 496905 - RNA, 19 nt, Homo sapiens
  misc_RNA (1)...(19): siRNA sense strand
ggccugcagcgccaaauga

SEQ ID NO: 496906 - RNA, 19 nt, Homo sapiens
  misc_RNA (1)...(19): siRNA sense strand
gcugaaacgagcccucaug

SEQ ID NO: 496907 - RNA, 19 nt, Homo sapiens
  misc_RNA (1)...(19): siRNA sense strand
ugaccauggugcguacuga

SEQ ID NO: 496908 - RNA, 19 nt, Homo sapiens
  misc_RNA (1)...(19): siRNA sense strand
ucaagacgagauacaugaa

SEQ ID NO: 496909 - RNA, 19 nt, Homo sapiens
  misc_RNA (1)...(19): siRNA sense strand
uaaaguccgguuacagauc

SEQ ID NO: 496910 - RNA, 19 nt, Homo sapiens
  misc_RNA (1)...(19): siRNA sense strand
caucaccuuuccucuggau

SEQ ID NO: 496911 - RNA, 19 nt, Homo sapiens
  misc_RNA (1)...(19): siRNA sense strand
cugagcuggugaccuauga

SEQ ID NO: 496912 - RNA, 19 nt, Homo sapiens
  misc_RNA (1)...(19): siRNA sense strand
cucccaauguugcucguaa

SEQ ID NO: 496913 - RNA, 19 nt, Homo sapiens
  misc_RNA (1)...(19): siRNA sense strand
uaccaaagcaccgucaaug

SEQ ID NO: 496914 - RNA, 19 nt, Homo sapiens
  misc_RNA (1)...(19): siRNA sense strand
aaaugagcuuugccucugu

SEQ ID NO: 496915 - RNA, 19 nt, Homo sapiens
  misc_RNA (1)...(19): siRNA sense strand
caccgucaaugccuacaag

SEQ ID NO: 496916 - RNA, 19 nt, Homo sapiens
  misc_RNA (1)...(19): siRNA sense strand
cgcaucggccuguaugauu

SEQ ID NO: 496917 - RNA, 19 nt, Homo sapiens
  misc_RNA (1)...(19): siRNA sense strand
ccucuacaaugggcugguu

SEQ ID NO: 496918 - RNA, 19 nt, Homo sapiens
  misc_RNA (1)...(19): siRNA sense strand
gccaaccucaugacagaug

SEQ ID NO: 496919 - RNA, 19 nt, Homo sapiens
  misc_RNA (1)...(19): siRNA sense strand
ccaguaccgcggugugaug

SEQ ID NO: 496920 - RNA, 19 nt, Homo sapiens
  misc_RNA (1)...(19): siRNA sense strand
uguaugauucugucaaaca

SEQ ID NO: 496921 - RNA, 19 nt, Homo sapiens
  misc_RNA (1)...(19): siRNA sense strand
gauggacgcucagaugaaa

SEQ ID NO: 496922 - RNA, 19 nt, Homo sapiens
  misc_RNA (1)...(19): siRNA sense strand
gacacuaccuucucccauu

SEQ ID NO: 496923 - RNA, 19 nt, Homo sapiens
  misc_RNA (1)...(19): siRNA sense strand
gaggugagacccaaagaaa

SEQ ID NO: 496924 - RNA, 19 nt, Homo sapiens
  misc_RNA (1)...(19): siRNA sense strand
caaccuacauguucaaagg

SEQ ID NO: 496925 - RNA, 19 nt, Homo sapiens
  misc_RNA (1)...(19): siRNA sense strand
caggagcaauucgccauua

SEQ ID NO: 496926 - RNA, 19 nt, Homo sapiens
  misc_RNA (1)...(19): siRNA sense strand
ccauuacucugaaguccua

SEQ ID NO: 496927 - RNA, 19 nt, Homo sapiens
  misc_RNA (1)...(19): siRNA sense strand
ucaaaggcaucaucagcuu

SEQ ID NO: 496928 - RNA, 19 nt, Homo sapiens
  misc_RNA (1)...(19): siRNA sense strand
acacuaccuucucccauuu

SEQ ID NO: 496929 - RNA, 19 nt, Homo sapiens
  misc_RNA (1)...(19): siRNA sense strand
caacgcagaugaggaaguc

SEQ ID NO: 496930 - RNA, 19 nt, Homo sapiens
  misc_RNA (1)...(19): siRNA sense strand
ccaaaucugccguguaugu

SEQ ID NO: 496931 - RNA, 19 nt, Homo sapiens
  misc_RNA (1)...(19): siRNA sense strand
ggcuaucacuucaauguca

SEQ ID NO: 496932 - RNA, 19 nt, Homo sapiens
  misc_RNA (1)...(19): siRNA sense strand
ggaggaguaugugcugaug

SEQ ID NO: 496933 - RNA, 19 nt, Homo sapiens
  misc_RNA (1)...(19): siRNA sense strand
acucugaaguccuacauug

SEQ ID NO: 496934 - RNA, 19 nt, Homo sapiens
  misc_RNA (1)...(19): siRNA sense strand
gaggagcagcggaugauga

SEQ ID NO: 496935 - RNA, 19 nt, Homo sapiens
  misc_RNA (1)...(19): siRNA sense strand
ucucccauuucaagaauuu

SEQ ID NO: 496936 - RNA, 19 nt, Homo sapiens
  misc_RNA (1)...(19): siRNA sense strand
ggaggugagacccaaagaa

SEQ ID NO: 496937 - RNA, 19 nt, Homo sapiens
  misc_RNA (1)...(19): siRNA sense strand
gacaguggcgggaaagaga

SEQ ID NO: 496938 - RNA, 19 nt, Homo sapiens
  misc_RNA (1)...(19): siRNA sense strand
gagcuccgcagcaucaaug

SEQ ID NO: 496939 - RNA, 19 nt, Homo sapiens
  misc_RNA (1)...(19): siRNA sense strand
ggcagugucuggaacuaca

SEQ ID NO: 496940 - RNA, 19 nt, Homo sapiens
  misc_RNA (1)...(19): siRNA sense strand
cgagcugugucaacugaga

SEQ ID NO: 496941 - RNA, 19 nt, Homo sapiens
  misc_RNA (1)...(19): siRNA sense strand
uggagcccaugcugaaauu

SEQ ID NO: 496942 - RNA, 19 nt, Homo sapiens
  misc_RNA (1)...(19): siRNA sense strand
ugucaacgcagaugaggaa

SEQ ID NO: 496943 - RNA, 19 nt, Homo sapiens
  misc_RNA (1)...(19): siRNA sense strand
gcaggagcaauucgccauu

SEQ ID NO: 496944 - RNA, 19 nt, Homo sapiens
  misc_RNA (1)...(19): siRNA sense strand
caauucgccauuacucuga

SEQ ID NO: 496945 - RNA, 19 nt, Homo sapiens
  misc_RNA (1)...(19): siRNA sense strand
ucugaaguccuacauugaa

SEQ ID NO: 496946 - RNA, 19 nt, Homo sapiens
  misc_RNA (1)...(19): siRNA sense strand
ucaccgagcuccgcagcau

SEQ ID NO: 496947 - RNA, 19 nt, Homo sapiens
  misc_RNA (1)...(19): siRNA sense strand
caaagaaagcuggaaccau

SEQ ID NO: 496948 - RNA, 19 nt, Homo sapiens
  misc_RNA (1)...(19): siRNA sense strand
ccccaaaucugccguguau

SEQ ID NO: 496949 - RNA, 19 nt, Homo sapiens
  misc_RNA (1)...(19): siRNA sense strand
gagcaauucgccauuacuc

SEQ ID NO: 496950 - RNA, 19 nt, Homo sapiens
  misc_RNA (1)...(19): siRNA sense strand
uugccaaagucaucuccua

SEQ ID NO: 496951 - RNA, 19 nt, Homo sapiens
  misc_RNA (1)...(19): siRNA sense strand
gcuaucacuucaaugucau

SEQ ID NO: 496952 - RNA, 19 nt, Homo sapiens
  misc_RNA (1)...(19): siRNA sense strand
cugaaguccuacauugaau

SEQ ID NO: 496953 - RNA, 19 nt, Homo sapiens
  misc_RNA (1)...(19): siRNA sense strand
cuggagagcggcaugaaga

SEQ ID NO: 496954 - RNA, 19 nt, Homo sapiens
  misc_RNA (1)...(19): siRNA sense strand
ggugagacccaaagaaagc

SEQ ID NO: 496955 - RNA, 19 nt, Homo sapiens
  misc_RNA (1)...(19): siRNA sense strand
ggaguuguucggcaucaca

SEQ ID NO: 496956 - RNA, 19 nt, Homo sapiens
  misc_RNA (1)...(19): siRNA sense strand
ugaaggaugcaagggcuuu

SEQ ID NO: 496957 - RNA, 19 nt, Homo sapiens
  misc_RNA (1)...(19): siRNA sense strand
ugauggacgcucagaugaa

SEQ ID NO: 496958 - RNA, 19 nt, Homo sapiens
  misc_RNA (1)...(19): siRNA sense strand
uccugaagaucauggcuau

SEQ ID NO: 496959 - RNA, 19 nt, Homo sapiens
  misc_RNA (1)...(19): siRNA sense strand
caaaucugccguguaugug

SEQ ID NO: 496960 - RNA, 19 nt, Homo sapiens
  misc_RNA (1)...(19): siRNA sense strand
gaugaaaaccuuugacacu

SEQ ID NO: 496961 - RNA, 19 nt, Homo sapiens
  misc_RNA (1)...(19): siRNA sense strand
aggaguaugugcugaugca

SEQ ID NO: 496962 - RNA, 19 nt, Homo sapiens
  misc_RNA (1)...(19): siRNA sense strand
gauggacgcucagaugaaa

SEQ ID NO: 496963 - RNA, 19 nt, Homo sapiens
  misc_RNA (1)...(19): siRNA sense strand
gacacuaccuucucccauu

SEQ ID NO: 496964 - RNA, 19 nt, Homo sapiens
  misc_RNA (1)...(19): siRNA sense strand
gaggugagacccaaagaaa

SEQ ID NO: 496965 - RNA, 19 nt, Homo sapiens
  misc_RNA (1)...(19): siRNA sense strand
caaccuacauguucaaagg

SEQ ID NO: 496966 - RNA, 19 nt, Homo sapiens
  misc_RNA (1)...(19): siRNA sense strand
caggagcaauucgccauua

SEQ ID NO: 496967 - RNA, 19 nt, Homo sapiens
  misc_RNA (1)...(19): siRNA sense strand
ccauuacucugaaguccua

SEQ ID NO: 496968 - RNA, 19 nt, Homo sapiens
  misc_RNA (1)...(19): siRNA sense strand
ucaaaggcaucaucagcuu

SEQ ID NO: 496969 - RNA, 19 nt, Homo sapiens
  misc_RNA (1)...(19): siRNA sense strand
acacuaccuucucccauuu

SEQ ID NO: 496970 - RNA, 19 nt, Homo sapiens
  misc_RNA (1)...(19): siRNA sense strand
caacgcagaugaggaaguc

SEQ ID NO: 496971 - RNA, 19 nt, Homo sapiens
  misc_RNA (1)...(19): siRNA sense strand
ccaaaucugccguguaugu

SEQ ID NO: 496972 - RNA, 19 nt, Homo sapiens
  misc_RNA (1)...(19): siRNA sense strand
ggcuaucacuucaauguca

SEQ ID NO: 496973 - RNA, 19 nt, Homo sapiens
  misc_RNA (1)...(19): siRNA sense strand
ggaggaguaugugcugaug

SEQ ID NO: 496974 - RNA, 19 nt, Homo sapiens
  misc_RNA (1)...(19): siRNA sense strand
acucugaaguccuacauug

SEQ ID NO: 496975 - RNA, 19 nt, Homo sapiens
  misc_RNA (1)...(19): siRNA sense strand
gaggagcagcggaugauga

SEQ ID NO: 496976 - RNA, 19 nt, Homo sapiens
  misc_RNA (1)...(19): siRNA sense strand
caagaggcccagaagcaaa

SEQ ID NO: 496977 - RNA, 19 nt, Homo sapiens
  misc_RNA (1)...(19): siRNA sense strand
ucucccauuucaagaauuu

SEQ ID NO: 496978 - RNA, 19 nt, Homo sapiens
  misc_RNA (1)...(19): siRNA sense strand
ggaggugagacccaaagaa

SEQ ID NO: 496979 - RNA, 19 nt, Homo sapiens
  misc_RNA (1)...(19): siRNA sense strand
gacaguggcgggaaagaga

SEQ ID NO: 496980 - RNA, 19 nt, Homo sapiens
  misc_RNA (1)...(19): siRNA sense strand
gagcuccgcagcaucaaug

SEQ ID NO: 496981 - RNA, 19 nt, Homo sapiens
  misc_RNA (1)...(19): siRNA sense strand
ggcagugucuggaacuaca

SEQ ID NO: 496982 - RNA, 19 nt, Homo sapiens
  misc_RNA (1)...(19): siRNA sense strand
cgagcugugucaacugaga

SEQ ID NO: 496983 - RNA, 19 nt, Homo sapiens
  misc_RNA (1)...(19): siRNA sense strand
uggagcccaugcugaaauu

SEQ ID NO: 496984 - RNA, 19 nt, Homo sapiens
  misc_RNA (1)...(19): siRNA sense strand
ugucaacgcagaugaggaa

SEQ ID NO: 496985 - RNA, 19 nt, Homo sapiens
  misc_RNA (1)...(19): siRNA sense strand
gcaggagcaauucgccauu

SEQ ID NO: 496986 - RNA, 19 nt, Homo sapiens
  misc_RNA (1)...(19): siRNA sense strand
ccaagaggcccagaagcaa

SEQ ID NO: 496987 - RNA, 19 nt, Homo sapiens
  misc_RNA (1)...(19): siRNA sense strand
caauucgccauuacucuga

SEQ ID NO: 496988 - RNA, 19 nt, Homo sapiens
  misc_RNA (1)...(19): siRNA sense strand
ucugaaguccuacauugaa

SEQ ID NO: 496989 - RNA, 19 nt, Homo sapiens
  misc_RNA (1)...(19): siRNA sense strand
ucaccgagcuccgcagcau

SEQ ID NO: 496990 - RNA, 19 nt, Homo sapiens
  misc_RNA (1)...(19): siRNA sense strand
ccccaaaucugccguguau

SEQ ID NO: 496991 - RNA, 19 nt, Homo sapiens
  misc_RNA (1)...(19): siRNA sense strand
gagcaauucgccauuacuc

SEQ ID NO: 496992 - RNA, 19 nt, Homo sapiens
  misc_RNA (1)...(19): siRNA sense strand
uugccaaagucaucuccua

SEQ ID NO: 496993 - RNA, 19 nt, Homo sapiens
  misc_RNA (1)...(19): siRNA sense strand
caaagaaagcuggaaccau

SEQ ID NO: 496994 - RNA, 19 nt, Homo sapiens
  misc_RNA (1)...(19): siRNA sense strand
gcuaucacuucaaugucau

SEQ ID NO: 496995 - RNA, 19 nt, Homo sapiens
  misc_RNA (1)...(19): siRNA sense strand
cugaaguccuacauugaau

SEQ ID NO: 496996 - RNA, 19 nt, Homo sapiens
  misc_RNA (1)...(19): siRNA sense strand
cuggagagcggcaugaaga

SEQ ID NO: 496997 - RNA, 19 nt, Homo sapiens
  misc_RNA (1)...(19): siRNA sense strand
ggugagacccaaagaaagc

SEQ ID NO: 496998 - RNA, 19 nt, Homo sapiens
  misc_RNA (1)...(19): siRNA sense strand
ggaguuguucggcaucaca

SEQ ID NO: 496999 - RNA, 19 nt, Homo sapiens
  misc_RNA (1)...(19): siRNA sense strand
ugaaggaugcaagggcuuu

SEQ ID NO: 497000 - RNA, 19 nt, Homo sapiens
  misc_RNA (1)...(19): siRNA sense strand
caaaucugccguguaugug

SEQ ID NO: 497001 - RNA, 19 nt, Homo sapiens
  misc_RNA (1)...(19): siRNA sense strand
uccugaagaucauggcuau

SEQ ID NO: 497002 - RNA, 19 nt, Homo sapiens
  misc_RNA (1)...(19): siRNA sense strand
ugauggacgcucagaugaa

SEQ ID NO: 497003 - RNA, 19 nt, Homo sapiens
  misc_RNA (1)...(19): siRNA sense strand
gaugaaaaccuuugacacu

SEQ ID NO: 497004 - RNA, 19 nt, Homo sapiens
  misc_RNA (1)...(19): siRNA sense strand
aggaguaugugcugaugca

SEQ ID NO: 497005 - RNA, 19 nt, Homo sapiens
  misc_RNA (1)...(19): siRNA sense strand
gauggacgcucagaugaaa

SEQ ID NO: 497006 - RNA, 19 nt, Homo sapiens
  misc_RNA (1)...(19): siRNA sense strand
gacacuaccuucucccauu

SEQ ID NO: 497007 - RNA, 19 nt, Homo sapiens
  misc_RNA (1)...(19): siRNA sense strand
gaggugagacccaaagaaa

SEQ ID NO: 497008 - RNA, 19 nt, Homo sapiens
  misc_RNA (1)...(19): siRNA sense strand
caaccuacauguucaaagg

SEQ ID NO: 497009 - RNA, 19 nt, Homo sapiens
  misc_RNA (1)...(19): siRNA sense strand
caggagcaauucgccauua

SEQ ID NO: 497010 - RNA, 19 nt, Homo sapiens
  misc_RNA (1)...(19): siRNA sense strand
ccauuacucugaaguccua

SEQ ID NO: 497011 - RNA, 19 nt, Homo sapiens
  misc_RNA (1)...(19): siRNA sense strand
ucaaaggcaucaucagcuu

SEQ ID NO: 497012 - RNA, 19 nt, Homo sapiens
  misc_RNA (1)...(19): siRNA sense strand
acacuaccuucucccauuu

SEQ ID NO: 497013 - RNA, 19 nt, Homo sapiens
  misc_RNA (1)...(19): siRNA sense strand
caacgcagaugaggaaguc

SEQ ID NO: 497014 - RNA, 19 nt, Homo sapiens
  misc_RNA (1)...(19): siRNA sense strand
ccaaaucugccguguaugu

SEQ ID NO: 497015 - RNA, 19 nt, Homo sapiens
  misc_RNA (1)...(19): siRNA sense strand
ggcuaucacuucaauguca

SEQ ID NO: 497016 - RNA, 19 nt, Homo sapiens
  misc_RNA (1)...(19): siRNA sense strand
ggaggaguaugugcugaug

SEQ ID NO: 497017 - RNA, 19 nt, Homo sapiens
  misc_RNA (1)...(19): siRNA sense strand
acucugaaguccuacauug

SEQ ID NO: 497018 - RNA, 19 nt, Homo sapiens
  misc_RNA (1)...(19): siRNA sense strand
gaggagcagcggaugauga

SEQ ID NO: 497019 - RNA, 19 nt, Homo sapiens
  misc_RNA (1)...(19): siRNA sense strand
ucucccauuucaagaauuu

SEQ ID NO: 497020 - RNA, 19 nt, Homo sapiens
  misc_RNA (1)...(19): siRNA sense strand
ggaggugagacccaaagaa

SEQ ID NO: 497021 - RNA, 19 nt, Homo sapiens
  misc_RNA (1)...(19): siRNA sense strand
gacaguggcgggaaagaga

SEQ ID NO: 497022 - RNA, 19 nt, Homo sapiens
  misc_RNA (1)...(19): siRNA sense strand
gagcuccgcagcaucaaug

SEQ ID NO: 497023 - RNA, 19 nt, Homo sapiens
  misc_RNA (1)...(19): siRNA sense strand
ggcagugucuggaacuaca

SEQ ID NO: 497024 - RNA, 19 nt, Homo sapiens
  misc_RNA (1)...(19): siRNA sense strand
cgagcugugucaacugaga

SEQ ID NO: 497025 - RNA, 19 nt, Homo sapiens
  misc_RNA (1)...(19): siRNA sense strand
uggagcccaugcugaaauu

SEQ ID NO: 497026 - RNA, 19 nt, Homo sapiens
  misc_RNA (1)...(19): siRNA sense strand
ugucaacgcagaugaggaa

SEQ ID NO: 497027 - RNA, 19 nt, Homo sapiens
  misc_RNA (1)...(19): siRNA sense strand
gcaggagcaauucgccauu

SEQ ID NO: 497028 - RNA, 19 nt, Homo sapiens
  misc_RNA (1)...(19): siRNA sense strand
caauucgccauuacucuga

SEQ ID NO: 497029 - RNA, 19 nt, Homo sapiens
  misc_RNA (1)...(19): siRNA sense strand
ucugaaguccuacauugaa

SEQ ID NO: 497030 - RNA, 19 nt, Homo sapiens
  misc_RNA (1)...(19): siRNA sense strand
ucaccgagcuccgcagcau

SEQ ID NO: 497031 - RNA, 19 nt, Homo sapiens
  misc_RNA (1)...(19): siRNA sense strand
caaagaaagcuggaaccau

SEQ ID NO: 497032 - RNA, 19 nt, Homo sapiens
  misc_RNA (1)...(19): siRNA sense strand
ccccaaaucugccguguau

SEQ ID NO: 497033 - RNA, 19 nt, Homo sapiens
  misc_RNA (1)...(19): siRNA sense strand
gagcaauucgccauuacuc

SEQ ID NO: 497034 - RNA, 19 nt, Homo sapiens
  misc_RNA (1)...(19): siRNA sense strand
uugccaaagucaucuccua

SEQ ID NO: 497035 - RNA, 19 nt, Homo sapiens
  misc_RNA (1)...(19): siRNA sense strand
gcuaucacuucaaugucau

SEQ ID NO: 497036 - RNA, 19 nt, Homo sapiens
  misc_RNA (1)...(19): siRNA sense strand
cugaaguccuacauugaau

SEQ ID NO: 497037 - RNA, 19 nt, Homo sapiens
  misc_RNA (1)...(19): siRNA sense strand
cuggagagcggcaugaaga

SEQ ID NO: 497038 - RNA, 19 nt, Homo sapiens
  misc_RNA (1)...(19): siRNA sense strand
ggugagacccaaagaaagc

SEQ ID NO: 497039 - RNA, 19 nt, Homo sapiens
  misc_RNA (1)...(19): siRNA sense strand
ggaguuguucggcaucaca

SEQ ID NO: 497040 - RNA, 19 nt, Homo sapiens
  misc_RNA (1)...(19): siRNA sense strand
ugaaggaugcaagggcuuu

SEQ ID NO: 497041 - RNA, 19 nt, Homo sapiens
  misc_RNA (1)...(19): siRNA sense strand
ugauggacgcucagaugaa

SEQ ID NO: 497042 - RNA, 19 nt, Homo sapiens
  misc_RNA (1)...(19): siRNA sense strand
uccugaagaucauggcuau

SEQ ID NO: 497043 - RNA, 19 nt, Homo sapiens
  misc_RNA (1)...(19): siRNA sense strand
caaaucugccguguaugug

SEQ ID NO: 497044 - RNA, 19 nt, Homo sapiens
  misc_RNA (1)...(19): siRNA sense strand
gaugaaaaccuuugacacu

SEQ ID NO: 497045 - RNA, 19 nt, Homo sapiens
  misc_RNA (1)...(19): siRNA sense strand
aggaguaugugcugaugca

SEQ ID NO: 497046 - RNA, 19 nt, Homo sapiens
  misc_RNA (1)...(19): siRNA sense strand
caacauggauuucagagaa

SEQ ID NO: 497047 - RNA, 19 nt, Homo sapiens
  misc_RNA (1)...(19): siRNA sense strand
cuucagggaugacuucuua

SEQ ID NO: 497048 - RNA, 19 nt, Homo sapiens
  misc_RNA (1)...(19): siRNA sense strand
gaccacgacuccagcuuaa

SEQ ID NO: 497049 - RNA, 19 nt, Homo sapiens
  misc_RNA (1)...(19): siRNA sense strand
uaaaggauucugcuaugua

SEQ ID NO: 497050 - RNA, 19 nt, Homo sapiens
  misc_RNA (1)...(19): siRNA sense strand
agacaaagacacagauaaa

SEQ ID NO: 497051 - RNA, 19 nt, Homo sapiens
  misc_RNA (1)...(19): siRNA sense strand
gagacaaagacacagauaa

SEQ ID NO: 497052 - RNA, 19 nt, Homo sapiens
  misc_RNA (1)...(19): siRNA sense strand
gaaguggauucccuuaagg

SEQ ID NO: 497053 - RNA, 19 nt, Homo sapiens
  misc_RNA (1)...(19): siRNA sense strand
ucagagaacccacagaaga

SEQ ID NO: 497054 - RNA, 19 nt, Homo sapiens
  misc_RNA (1)...(19): siRNA sense strand
agaaggaguugcccacaga

SEQ ID NO: 497055 - RNA, 19 nt, Homo sapiens
  misc_RNA (1)...(19): siRNA sense strand
gagaggaagucguucaaaa

SEQ ID NO: 497056 - RNA, 19 nt, Homo sapiens
  misc_RNA (1)...(19): siRNA sense strand
ugaaguggauucccuuaag

SEQ ID NO: 497057 - RNA, 19 nt, Homo sapiens
  misc_RNA (1)...(19): siRNA sense strand
agaauucgaugaaguggau

SEQ ID NO: 497058 - RNA, 19 nt, Homo sapiens
  misc_RNA (1)...(19): siRNA sense strand
aaaggauucugcuauguag

SEQ ID NO: 497059 - RNA, 19 nt, Homo sapiens
  misc_RNA (1)...(19): siRNA sense strand
gaugaaguggauucccuua

SEQ ID NO: 497060 - RNA, 19 nt, Homo sapiens
  misc_RNA (1)...(19): siRNA sense strand
ggcagccgcuucagagaug

SEQ ID NO: 497061 - RNA, 19 nt, Homo sapiens
  misc_RNA (1)...(19): siRNA sense strand
cuuuaaggaucucagcaua

SEQ ID NO: 497062 - RNA, 19 nt, Homo sapiens
  misc_RNA (1)...(19): siRNA sense strand
uuaaggaucucagcauaag

SEQ ID NO: 497063 - RNA, 19 nt, Homo sapiens
  misc_RNA (1)...(19): siRNA sense strand
ucccaacucugcuaucuuc

SEQ ID NO: 497064 - RNA, 19 nt, Homo sapiens
  misc_RNA (1)...(19): siRNA sense strand
gacaaagacacagauaaau

SEQ ID NO: 497065 - RNA, 19 nt, Homo sapiens
  misc_RNA (1)...(19): siRNA sense strand
uuuaaaggauucugcuaug

SEQ ID NO: 497066 - RNA, 19 nt, Homo sapiens
  misc_RNA (1)...(19): siRNA sense strand
gaagaggaaagagcacaga

SEQ ID NO: 497067 - RNA, 19 nt, Homo sapiens
  misc_RNA (1)...(19): siRNA sense strand
agaccacgacuccagcuua

SEQ ID NO: 497068 - RNA, 19 nt, Homo sapiens
  misc_RNA (1)...(19): siRNA sense strand
auacgauggugcacuguug

SEQ ID NO: 497069 - RNA, 19 nt, Homo sapiens
  misc_RNA (1)...(19): siRNA sense strand
uuaaaggauucugcuaugu

SEQ ID NO: 497070 - RNA, 19 nt, Homo sapiens
  misc_RNA (1)...(19): siRNA sense strand
gaaggcagaaaacaagaua

SEQ ID NO: 497071 - RNA, 19 nt, Homo sapiens
  misc_RNA (1)...(19): siRNA sense strand
cagaaaagguggaccagau

SEQ ID NO: 497072 - RNA, 19 nt, Homo sapiens
  misc_RNA (1)...(19): siRNA sense strand
guucagggcgacauagaug

SEQ ID NO: 497073 - RNA, 19 nt, Homo sapiens
  misc_RNA (1)...(19): siRNA sense strand
agagacaaagacacagaua

SEQ ID NO: 497074 - RNA, 19 nt, Homo sapiens
  misc_RNA (1)...(19): siRNA sense strand
ucaaaaggagcaagaauga

SEQ ID NO: 497075 - RNA, 19 nt, Homo sapiens
  misc_RNA (1)...(19): siRNA sense strand
gaaaagguggaccagauga

SEQ ID NO: 497076 - RNA, 19 nt, Homo sapiens
  misc_RNA (1)...(19): siRNA sense strand
aaaucuaccuuucaauacg

SEQ ID NO: 497077 - RNA, 19 nt, Homo sapiens
  misc_RNA (1)...(19): siRNA sense strand
cuauguagaauucgaugaa

SEQ ID NO: 497078 - RNA, 19 nt, Homo sapiens
  misc_RNA (1)...(19): siRNA sense strand
ucagagacaaagacacaga

SEQ ID NO: 497079 - RNA, 19 nt, Homo sapiens
  misc_RNA (1)...(19): siRNA sense strand
ugccaggccuagagaggaa

SEQ ID NO: 497080 - RNA, 19 nt, Homo sapiens
  misc_RNA (1)...(19): siRNA sense strand
gccaaucccaacucugcua

SEQ ID NO: 497081 - RNA, 19 nt, Homo sapiens
  misc_RNA (1)...(19): siRNA sense strand
cagagaacccacagaagag

SEQ ID NO: 497082 - RNA, 19 nt, Homo sapiens
  misc_RNA (1)...(19): siRNA sense strand
ccacgacuccagcuuaaac

SEQ ID NO: 497083 - RNA, 19 nt, Homo sapiens
  misc_RNA (1)...(19): siRNA sense strand
gcagaaggcagaaaacaag

SEQ ID NO: 497084 - RNA, 19 nt, Homo sapiens
  misc_RNA (1)...(19): siRNA sense strand
ucaaucaaguagccaaucc

SEQ ID NO: 497085 - RNA, 19 nt, Homo sapiens
  misc_RNA (1)...(19): siRNA sense strand
uuucagagaacccacagaa

SEQ ID NO: 497086 - RNA, 19 nt, Homo sapiens
  misc_RNA (1)...(19): siRNA sense strand
gggcagccgcuucagagau

SEQ ID NO: 497087 - RNA, 19 nt, Homo sapiens
  misc_RNA (1)...(19): siRNA sense strand
uuuaaggaucucagcauaa

SEQ ID NO: 497088 - RNA, 19 nt, Homo sapiens
  misc_RNA (1)...(19): siRNA sense strand
gccuagagaggaagucguu

SEQ ID NO: 497089 - RNA, 19 nt, Homo sapiens
  misc_RNA (1)...(19): siRNA sense strand
gcagaaaacaagauaaagg

SEQ ID NO: 497090 - RNA, 19 nt, Homo sapiens
  misc_RNA (1)...(19): siRNA sense strand
aaggaucucagcauaagga

SEQ ID NO: 497091 - RNA, 19 nt, Homo sapiens
  misc_RNA (1)...(19): siRNA sense strand
cagcuuaaaccucgaacag

SEQ ID NO: 497092 - RNA, 19 nt, Homo sapiens
  misc_RNA (1)...(19): siRNA sense strand
caacauggauuucagagaa

SEQ ID NO: 497093 - RNA, 19 nt, Homo sapiens
  misc_RNA (1)...(19): siRNA sense strand
cuucagggaugacuucuua

SEQ ID NO: 497094 - RNA, 19 nt, Homo sapiens
  misc_RNA (1)...(19): siRNA sense strand
gaccacgacuccagcuuaa

SEQ ID NO: 497095 - RNA, 19 nt, Homo sapiens
  misc_RNA (1)...(19): siRNA sense strand
uaaaggauucugcuaugua

SEQ ID NO: 497096 - RNA, 19 nt, Homo sapiens
  misc_RNA (1)...(19): siRNA sense strand
agacaaagacacagauaaa

SEQ ID NO: 497097 - RNA, 19 nt, Homo sapiens
  misc_RNA (1)...(19): siRNA sense strand
gagacaaagacacagauaa

SEQ ID NO: 497098 - RNA, 19 nt, Homo sapiens
  misc_RNA (1)...(19): siRNA sense strand
gaaguggauucccuuaagg

SEQ ID NO: 497099 - RNA, 19 nt, Homo sapiens
  misc_RNA (1)...(19): siRNA sense strand
ucagagaacccacagaaga

SEQ ID NO: 497100 - RNA, 19 nt, Homo sapiens
  misc_RNA (1)...(19): siRNA sense strand
agaaggaguugcccacaga

SEQ ID NO: 497101 - RNA, 19 nt, Homo sapiens
  misc_RNA (1)...(19): siRNA sense strand
gagaggaagucguucaaaa

SEQ ID NO: 497102 - RNA, 19 nt, Homo sapiens
  misc_RNA (1)...(19): siRNA sense strand
ugaaguggauucccuuaag

SEQ ID NO: 497103 - RNA, 19 nt, Homo sapiens
  misc_RNA (1)...(19): siRNA sense strand
agaauucgaugaaguggau

SEQ ID NO: 497104 - RNA, 19 nt, Homo sapiens
  misc_RNA (1)...(19): siRNA sense strand
aaaggauucugcuauguag

SEQ ID NO: 497105 - RNA, 19 nt, Homo sapiens
  misc_RNA (1)...(19): siRNA sense strand
gaugaaguggauucccuua

SEQ ID NO: 497106 - RNA, 19 nt, Homo sapiens
  misc_RNA (1)...(19): siRNA sense strand
ggcagccgcuucagagaug

SEQ ID NO: 497107 - RNA, 19 nt, Homo sapiens
  misc_RNA (1)...(19): siRNA sense strand
cuuuaaggaucucagcaua

SEQ ID NO: 497108 - RNA, 19 nt, Homo sapiens
  misc_RNA (1)...(19): siRNA sense strand
uuaaggaucucagcauaag

SEQ ID NO: 497109 - RNA, 19 nt, Homo sapiens
  misc_RNA (1)...(19): siRNA sense strand
ucccaacucugcuaucuuc

SEQ ID NO: 497110 - RNA, 19 nt, Homo sapiens
  misc_RNA (1)...(19): siRNA sense strand
gacaaagacacagauaaau

SEQ ID NO: 497111 - RNA, 19 nt, Homo sapiens
  misc_RNA (1)...(19): siRNA sense strand
uuuaaaggauucugcuaug

SEQ ID NO: 497112 - RNA, 19 nt, Homo sapiens
  misc_RNA (1)...(19): siRNA sense strand
gaagaggaaagagcacaga

SEQ ID NO: 497113 - RNA, 19 nt, Homo sapiens
  misc_RNA (1)...(19): siRNA sense strand
agaccacgacuccagcuua

SEQ ID NO: 497114 - RNA, 19 nt, Homo sapiens
  misc_RNA (1)...(19): siRNA sense strand
auacgauggugcacuguug

SEQ ID NO: 497115 - RNA, 19 nt, Homo sapiens
  misc_RNA (1)...(19): siRNA sense strand
uuaaaggauucugcuaugu

SEQ ID NO: 497116 - RNA, 19 nt, Homo sapiens
  misc_RNA (1)...(19): siRNA sense strand
gaaggcagaaaacaagaua

SEQ ID NO: 497117 - RNA, 19 nt, Homo sapiens
  misc_RNA (1)...(19): siRNA sense strand
cagaaaagguggaccagau

SEQ ID NO: 497118 - RNA, 19 nt, Homo sapiens
  misc_RNA (1)...(19): siRNA sense strand
guucagggcgacauagaug

SEQ ID NO: 497119 - RNA, 19 nt, Homo sapiens
  misc_RNA (1)...(19): siRNA sense strand
agagacaaagacacagaua

SEQ ID NO: 497120 - RNA, 19 nt, Homo sapiens
  misc_RNA (1)...(19): siRNA sense strand
ucaaaaggagcaagaauga

SEQ ID NO: 497121 - RNA, 19 nt, Homo sapiens
  misc_RNA (1)...(19): siRNA sense strand
gaaaagguggaccagauga

SEQ ID NO: 497122 - RNA, 19 nt, Homo sapiens
  misc_RNA (1)...(19): siRNA sense strand
aaaucuaccuuucaauacg

SEQ ID NO: 497123 - RNA, 19 nt, Homo sapiens
  misc_RNA (1)...(19): siRNA sense strand
cuauguagaauucgaugaa

SEQ ID NO: 497124 - RNA, 19 nt, Homo sapiens
  misc_RNA (1)...(19): siRNA sense strand
ucagagacaaagacacaga

SEQ ID NO: 497125 - RNA, 19 nt, Homo sapiens
  misc_RNA (1)...(19): siRNA sense strand
ugccaggccuagagaggaa

SEQ ID NO: 497126 - RNA, 19 nt, Homo sapiens
  misc_RNA (1)...(19): siRNA sense strand
gccaaucccaacucugcua

SEQ ID NO: 497127 - RNA, 19 nt, Homo sapiens
  misc_RNA (1)...(19): siRNA sense strand
cagagaacccacagaagag

SEQ ID NO: 497128 - RNA, 19 nt, Homo sapiens
  misc_RNA (1)...(19): siRNA sense strand
ccacgacuccagcuuaaac

SEQ ID NO: 497129 - RNA, 19 nt, Homo sapiens
  misc_RNA (1)...(19): siRNA sense strand
gcagaaggcagaaaacaag

SEQ ID NO: 497130 - RNA, 19 nt, Homo sapiens
  misc_RNA (1)...(19): siRNA sense strand
ucaaucaaguagccaaucc

SEQ ID NO: 497131 - RNA, 19 nt, Homo sapiens
  misc_RNA (1)...(19): siRNA sense strand
uuucagagaacccacagaa

SEQ ID NO: 497132 - RNA, 19 nt, Homo sapiens
  misc_RNA (1)...(19): siRNA sense strand
gggcagccgcuucagagau

SEQ ID NO: 497133 - RNA, 19 nt, Homo sapiens
  misc_RNA (1)...(19): siRNA sense strand
uuuaaggaucucagcauaa

SEQ ID NO: 497134 - RNA, 19 nt, Homo sapiens
  misc_RNA (1)...(19): siRNA sense strand
gccuagagaggaagucguu

SEQ ID NO: 497135 - RNA, 19 nt, Homo sapiens
  misc_RNA (1)...(19): siRNA sense strand
gcagaaaacaagauaaagg

SEQ ID NO: 497136 - RNA, 19 nt, Homo sapiens
  misc_RNA (1)...(19): siRNA sense strand
aaggaucucagcauaagga

SEQ ID NO: 497137 - RNA, 19 nt, Homo sapiens
  misc_RNA (1)...(19): siRNA sense strand
cagcuuaaaccucgaacag

SEQ ID NO: 497138 - RNA, 19 nt, Homo sapiens
  misc_RNA (1)...(19): siRNA sense strand
gcaagugcaguuucaauca

SEQ ID NO: 497139 - RNA, 19 nt, Homo sapiens
  misc_RNA (1)...(19): siRNA sense strand
ccagaaagcagagaacuga

SEQ ID NO: 497140 - RNA, 19 nt, Homo sapiens
  misc_RNA (1)...(19): siRNA sense strand
uaccagacccugaggauug

SEQ ID NO: 497141 - RNA, 19 nt, Homo sapiens
  misc_RNA (1)...(19): siRNA sense strand
caagugcaguuucaaucag

SEQ ID NO: 497142 - RNA, 19 nt, Homo sapiens
  misc_RNA (1)...(19): siRNA sense strand
caacagagccccagaaagc

SEQ ID NO: 497143 - RNA, 19 nt, Homo sapiens
  misc_RNA (1)...(19): siRNA sense strand
cuaagucgcaggugcaagu

SEQ ID NO: 497144 - RNA, 19 nt, Homo sapiens
  misc_RNA (1)...(19): siRNA sense strand
caucaccgccaaugcaaca

SEQ ID NO: 497145 - RNA, 19 nt, Homo sapiens
  misc_RNA (1)...(19): siRNA sense strand
cgguugggauccuccuuau

SEQ ID NO: 497146 - RNA, 19 nt, Homo sapiens
  misc_RNA (1)...(19): siRNA sense strand
aagugcaguuucaaucaga

SEQ ID NO: 497147 - RNA, 19 nt, Homo sapiens
  misc_RNA (1)...(19): siRNA sense strand
ugaggaaccugacccauuu

SEQ ID NO: 497148 - RNA, 19 nt, Homo sapiens
  misc_RNA (1)...(19): siRNA sense strand
gcaaauccuguaagucuga

SEQ ID NO: 497149 - RNA, 19 nt, Homo sapiens
  misc_RNA (1)...(19): siRNA sense strand
agucugagcuucccucuuc

SEQ ID NO: 497150 - RNA, 19 nt, Homo sapiens
  misc_RNA (1)...(19): siRNA sense strand
gcaugacucuggcaaccau

SEQ ID NO: 497151 - RNA, 19 nt, Homo sapiens
  misc_RNA (1)...(19): siRNA sense strand
acaacacggugcagacugu

SEQ ID NO: 497152 - RNA, 19 nt, Homo sapiens
  misc_RNA (1)...(19): siRNA sense strand
caaccugcaaauccuguaa

SEQ ID NO: 497153 - RNA, 19 nt, Homo sapiens
  misc_RNA (1)...(19): siRNA sense strand
cugcaaauccuguaagucu

SEQ ID NO: 497154 - RNA, 19 nt, Homo sapiens
  misc_RNA (1)...(19): siRNA sense strand
cugaggaaccugacccauu

SEQ ID NO: 497155 - RNA, 19 nt, Homo sapiens
  misc_RNA (1)...(19): siRNA sense strand
ucagcaagaaggugaagug

SEQ ID NO: 497156 - RNA, 19 nt, Homo sapiens
  misc_RNA (1)...(19): siRNA sense strand
ugagagcccaaccugcaaa

SEQ ID NO: 497157 - RNA, 19 nt, Homo sapiens
  misc_RNA (1)...(19): siRNA sense strand
cgaaggagcuuacgacauc

SEQ ID NO: 497158 - RNA, 19 nt, Homo sapiens
  misc_RNA (1)...(19): siRNA sense strand
guagaggucaucaucaaua

SEQ ID NO: 497159 - RNA, 19 nt, Homo sapiens
  misc_RNA (1)...(19): siRNA sense strand
ggaucgucauguauacuua

SEQ ID NO: 497160 - RNA, 19 nt, Homo sapiens
  misc_RNA (1)...(19): siRNA sense strand
ccacaaagccuuggugaug

SEQ ID NO: 497161 - RNA, 19 nt, Homo sapiens
  misc_RNA (1)...(19): siRNA sense strand
ccacugagauggcccugau

SEQ ID NO: 497162 - RNA, 19 nt, Homo sapiens
  misc_RNA (1)...(19): siRNA sense strand
gcuaugagaccauccugaa

SEQ ID NO: 497163 - RNA, 19 nt, Homo sapiens
  misc_RNA (1)...(19): siRNA sense strand
acucucaggucuuuagaaa

SEQ ID NO: 497164 - RNA, 19 nt, Homo sapiens
  misc_RNA (1)...(19): siRNA sense strand
ucucggcgcuuccucuuug

SEQ ID NO: 497165 - RNA, 19 nt, Homo sapiens
  misc_RNA (1)...(19): siRNA sense strand
gcaacaagcagcacaacag

SEQ ID NO: 497166 - RNA, 19 nt, Homo sapiens
  misc_RNA (1)...(19): siRNA sense strand
ccauaugggugguguggau

SEQ ID NO: 497167 - RNA, 19 nt, Homo sapiens
  misc_RNA (1)...(19): siRNA sense strand
ucuggcggcucacgucuuu

SEQ ID NO: 497168 - RNA, 19 nt, Homo sapiens
  misc_RNA (1)...(19): siRNA sense strand
ccaccuccguugccauaug

SEQ ID NO: 497169 - RNA, 19 nt, Homo sapiens
  misc_RNA (1)...(19): siRNA sense strand
cacaaagccuuggugaugu

SEQ ID NO: 497170 - RNA, 19 nt, Homo sapiens
  misc_RNA (1)...(19): siRNA sense strand
gaaggagcuuacgacauca

SEQ ID NO: 497171 - RNA, 19 nt, Homo sapiens
  misc_RNA (1)...(19): siRNA sense strand
ugguagaggucaucaucaa

SEQ ID NO: 497172 - RNA, 19 nt, Homo sapiens
  misc_RNA (1)...(19): siRNA sense strand
ccauacagcggguacaaug

SEQ ID NO: 497173 - RNA, 19 nt, Homo sapiens
  misc_RNA (1)...(19): siRNA sense strand
caacaagcagcacaacagu

SEQ ID NO: 497174 - RNA, 19 nt, Homo sapiens
  misc_RNA (1)...(19): siRNA sense strand
acaaagccuuggugaugug

SEQ ID NO: 497175 - RNA, 19 nt, Homo sapiens
  misc_RNA (1)...(19): siRNA sense strand
gcuacaagcgcuggcguaa

SEQ ID NO: 497176 - RNA, 19 nt, Homo sapiens
  misc_RNA (1)...(19): siRNA sense strand
caaaguuccguccgaagga

SEQ ID NO: 497177 - RNA, 19 nt, Homo sapiens
  misc_RNA (1)...(19): siRNA sense strand
uacaagcgcuggcguaagc

SEQ ID NO: 497178 - RNA, 19 nt, Homo sapiens
  misc_RNA (1)...(19): siRNA sense strand
gaaagacggcaagaacucu

SEQ ID NO: 497179 - RNA, 19 nt, Homo sapiens
  misc_RNA (1)...(19): siRNA sense strand
gaacucucaggucuuuaga

SEQ ID NO: 497180 - RNA, 19 nt, Homo sapiens
  misc_RNA (1)...(19): siRNA sense strand
ugguguggaucgucaugua

SEQ ID NO: 497181 - RNA, 19 nt, Homo sapiens
  misc_RNA (1)...(19): siRNA sense strand
guguggaucgucauguaua

SEQ ID NO: 497182 - RNA, 19 nt, Homo sapiens
  misc_RNA (1)...(19): siRNA sense strand
ccugcgggcugaagacaug

SEQ ID NO: 497183 - RNA, 19 nt, Homo sapiens
  misc_RNA (1)...(19): siRNA sense strand
cgaaagacggcaagaacuc

SEQ ID NO: 497184 - RNA, 19 nt, Homo sapiens
  misc_RNA (1)...(19): siRNA sense strand
ccucuucugccucguguuu

SEQ ID NO: 497185 - RNA, 19 nt, Homo sapiens
  misc_RNA (1)...(19): siRNA sense strand
uagaggucaucaucaauac

SEQ ID NO: 497186 - RNA, 19 nt, Homo sapiens
  misc_RNA (1)...(19): siRNA sense strand
gggccuucguccucuucua

SEQ ID NO: 497187 - RNA, 19 nt, Homo sapiens
  misc_RNA (1)...(19): siRNA sense strand
ucgccaacauggacuuugu

SEQ ID NO: 497188 - RNA, 19 nt, Homo sapiens
  misc_RNA (1)...(19): siRNA sense strand
ucucaggucuuuagaaacc

SEQ ID NO: 497189 - RNA, 19 nt, Homo sapiens
  misc_RNA (1)...(19): siRNA sense strand
agauggcccugaugcacaa

SEQ ID NO: 497190 - RNA, 19 nt, Homo sapiens
  misc_RNA (1)...(19): siRNA sense strand
guaccagcccacugagaug

SEQ ID NO: 497191 - RNA, 19 nt, Homo sapiens
  misc_RNA (1)...(19): siRNA sense strand
aauacagaguggcugauca

SEQ ID NO: 497192 - RNA, 19 nt, Homo sapiens
  misc_RNA (1)...(19): siRNA sense strand
uaugagaccauccugaaag

SEQ ID NO: 497193 - RNA, 19 nt, Homo sapiens
  misc_RNA (1)...(19): siRNA sense strand
ucauggcacucaucuacgu

SEQ ID NO: 497194 - RNA, 19 nt, Homo sapiens
  misc_RNA (1)...(19): siRNA sense strand
gccaucugcuucucuuguc

SEQ ID NO: 497195 - RNA, 19 nt, Homo sapiens
  misc_RNA (1)...(19): siRNA sense strand
ccacguuugugcucaccau

SEQ ID NO: 497196 - RNA, 19 nt, Homo sapiens
  misc_RNA (1)...(19): siRNA sense strand
ggacccagguauucuuccu

SEQ ID NO: 497197 - RNA, 19 nt, Homo sapiens
  misc_RNA (1)...(19): siRNA sense strand
gggcauugucaccacguuu

SEQ ID NO: 497198 - RNA, 19 nt, Homo sapiens
  misc_RNA (1)...(19): siRNA sense strand
augagaccauccugaaaga

SEQ ID NO: 497199 - RNA, 19 nt, Homo sapiens
  misc_RNA (1)...(19): siRNA sense strand
gacugccucucuuccuguu

SEQ ID NO: 497200 - RNA, 19 nt, Homo sapiens
  misc_RNA (1)...(19): siRNA sense strand
cgucuuugcccucaacuuc

SEQ ID NO: 497201 - RNA, 19 nt, Homo sapiens
  misc_RNA (1)...(19): siRNA sense strand
ggcauugucaccacguuug

SEQ ID NO: 497202 - RNA, 19 nt, Homo sapiens
  misc_RNA (1)...(19): siRNA sense strand
gguagaggucaucaucaau

SEQ ID NO: 497203 - RNA, 19 nt, Homo sapiens
  misc_RNA (1)...(19): siRNA sense strand
gaggucaucaucaauacag

SEQ ID NO: 497204 - RNA, 19 nt, Homo sapiens
  misc_RNA (1)...(19): siRNA sense strand
ugucauggcacucaucuac

SEQ ID NO: 497205 - RNA, 19 nt, Homo sapiens
  misc_RNA (1)...(19): siRNA sense strand
gcccugaugcacaaaguuc

SEQ ID NO: 497206 - RNA, 19 nt, Homo sapiens
  misc_RNA (1)...(19): siRNA sense strand
ucacgucuuugcccucaac

SEQ ID NO: 497207 - RNA, 19 nt, Homo sapiens
  misc_RNA (1)...(19): siRNA sense strand
gguguggaucgucauguau

SEQ ID NO: 497208 - RNA, 19 nt, Homo sapiens
  misc_RNA (1)...(19): siRNA sense strand
cgaaggagcuuacgacauc

SEQ ID NO: 497209 - RNA, 19 nt, Homo sapiens
  misc_RNA (1)...(19): siRNA sense strand
guagaggucaucaucaaua

SEQ ID NO: 497210 - RNA, 19 nt, Homo sapiens
  misc_RNA (1)...(19): siRNA sense strand
ggaucgucauguauacuua

SEQ ID NO: 497211 - RNA, 19 nt, Homo sapiens
  misc_RNA (1)...(19): siRNA sense strand
ccacaaagccuuggugaug

SEQ ID NO: 497212 - RNA, 19 nt, Homo sapiens
  misc_RNA (1)...(19): siRNA sense strand
ccacugagauggcccugau

SEQ ID NO: 497213 - RNA, 19 nt, Homo sapiens
  misc_RNA (1)...(19): siRNA sense strand
gcuaugagaccauccugaa

SEQ ID NO: 497214 - RNA, 19 nt, Homo sapiens
  misc_RNA (1)...(19): siRNA sense strand
acucucaggucuuuagaaa

SEQ ID NO: 497215 - RNA, 19 nt, Homo sapiens
  misc_RNA (1)...(19): siRNA sense strand
ucucggcgcuuccucuuug

SEQ ID NO: 497216 - RNA, 19 nt, Homo sapiens
  misc_RNA (1)...(19): siRNA sense strand
gcaacaagcagcacaacag

SEQ ID NO: 497217 - RNA, 19 nt, Homo sapiens
  misc_RNA (1)...(19): siRNA sense strand
ccauaugggugguguggau

SEQ ID NO: 497218 - RNA, 19 nt, Homo sapiens
  misc_RNA (1)...(19): siRNA sense strand
ucuggcggcucacgucuuu

SEQ ID NO: 497219 - RNA, 19 nt, Homo sapiens
  misc_RNA (1)...(19): siRNA sense strand
ccaccuccguugccauaug

SEQ ID NO: 497220 - RNA, 19 nt, Homo sapiens
  misc_RNA (1)...(19): siRNA sense strand
cacaaagccuuggugaugu

SEQ ID NO: 497221 - RNA, 19 nt, Homo sapiens
  misc_RNA (1)...(19): siRNA sense strand
gaaggagcuuacgacauca

SEQ ID NO: 497222 - RNA, 19 nt, Homo sapiens
  misc_RNA (1)...(19): siRNA sense strand
ugguagaggucaucaucaa

SEQ ID NO: 497223 - RNA, 19 nt, Homo sapiens
  misc_RNA (1)...(19): siRNA sense strand
ccauacagcggguacaaug

SEQ ID NO: 497224 - RNA, 19 nt, Homo sapiens
  misc_RNA (1)...(19): siRNA sense strand
caacaagcagcacaacagu

SEQ ID NO: 497225 - RNA, 19 nt, Homo sapiens
  misc_RNA (1)...(19): siRNA sense strand
acaaagccuuggugaugug

SEQ ID NO: 497226 - RNA, 19 nt, Homo sapiens
  misc_RNA (1)...(19): siRNA sense strand
gcuacaagcgcuggcguaa

SEQ ID NO: 497227 - RNA, 19 nt, Homo sapiens
  misc_RNA (1)...(19): siRNA sense strand
caaaguuccguccgaagga

SEQ ID NO: 497228 - RNA, 19 nt, Homo sapiens
  misc_RNA (1)...(19): siRNA sense strand
uacaagcgcuggcguaagc

SEQ ID NO: 497229 - RNA, 19 nt, Homo sapiens
  misc_RNA (1)...(19): siRNA sense strand
gaaagacggcaagaacucu

SEQ ID NO: 497230 - RNA, 19 nt, Homo sapiens
  misc_RNA (1)...(19): siRNA sense strand
gaacucucaggucuuuaga

SEQ ID NO: 497231 - RNA, 19 nt, Homo sapiens
  misc_RNA (1)...(19): siRNA sense strand
ugguguggaucgucaugua

SEQ ID NO: 497232 - RNA, 19 nt, Homo sapiens
  misc_RNA (1)...(19): siRNA sense strand
guguggaucgucauguaua

SEQ ID NO: 497233 - RNA, 19 nt, Homo sapiens
  misc_RNA (1)...(19): siRNA sense strand
ccugcgggcugaagacaug

SEQ ID NO: 497234 - RNA, 19 nt, Homo sapiens
  misc_RNA (1)...(19): siRNA sense strand
cgaaagacggcaagaacuc

SEQ ID NO: 497235 - RNA, 19 nt, Homo sapiens
  misc_RNA (1)...(19): siRNA sense strand
ccucuucugccucguguuu

SEQ ID NO: 497236 - RNA, 19 nt, Homo sapiens
  misc_RNA (1)...(19): siRNA sense strand
uagaggucaucaucaauac

SEQ ID NO: 497237 - RNA, 19 nt, Homo sapiens
  misc_RNA (1)...(19): siRNA sense strand
gggccuucguccucuucua

SEQ ID NO: 497238 - RNA, 19 nt, Homo sapiens
  misc_RNA (1)...(19): siRNA sense strand
ucgccaacauggacuuugu

SEQ ID NO: 497239 - RNA, 19 nt, Homo sapiens
  misc_RNA (1)...(19): siRNA sense strand
ucucaggucuuuagaaacc

SEQ ID NO: 497240 - RNA, 19 nt, Homo sapiens
  misc_RNA (1)...(19): siRNA sense strand
agauggcccugaugcacaa

SEQ ID NO: 497241 - RNA, 19 nt, Homo sapiens
  misc_RNA (1)...(19): siRNA sense strand
guaccagcccacugagaug

SEQ ID NO: 497242 - RNA, 19 nt, Homo sapiens
  misc_RNA (1)...(19): siRNA sense strand
aauacagaguggcugauca

SEQ ID NO: 497243 - RNA, 19 nt, Homo sapiens
  misc_RNA (1)...(19): siRNA sense strand
uaugagaccauccugaaag

SEQ ID NO: 497244 - RNA, 19 nt, Homo sapiens
  misc_RNA (1)...(19): siRNA sense strand
ucauggcacucaucuacgu

SEQ ID NO: 497245 - RNA, 19 nt, Homo sapiens
  misc_RNA (1)...(19): siRNA sense strand
gccaucugcuucucuuguc

SEQ ID NO: 497246 - RNA, 19 nt, Homo sapiens
  misc_RNA (1)...(19): siRNA sense strand
ccacguuugugcucaccau

SEQ ID NO: 497247 - RNA, 19 nt, Homo sapiens
  misc_RNA (1)...(19): siRNA sense strand
ggacccagguauucuuccu

SEQ ID NO: 497248 - RNA, 19 nt, Homo sapiens
  misc_RNA (1)...(19): siRNA sense strand
gggcauugucaccacguuu

SEQ ID NO: 497249 - RNA, 19 nt, Homo sapiens
  misc_RNA (1)...(19): siRNA sense strand
augagaccauccugaaaga

SEQ ID NO: 497250 - RNA, 19 nt, Homo sapiens
  misc_RNA (1)...(19): siRNA sense strand
gacugccucucuuccuguu

SEQ ID NO: 497251 - RNA, 19 nt, Homo sapiens
  misc_RNA (1)...(19): siRNA sense strand
cgucuuugcccucaacuuc

SEQ ID NO: 497252 - RNA, 19 nt, Homo sapiens
  misc_RNA (1)...(19): siRNA sense strand
ggcauugucaccacguuug

SEQ ID NO: 497253 - RNA, 19 nt, Homo sapiens
  misc_RNA (1)...(19): siRNA sense strand
gguagaggucaucaucaau

SEQ ID NO: 497254 - RNA, 19 nt, Homo sapiens
  misc_RNA (1)...(19): siRNA sense strand
gaggucaucaucaauacag

SEQ ID NO: 497255 - RNA, 19 nt, Homo sapiens
  misc_RNA (1)...(19): siRNA sense strand
ugucauggcacucaucuac

SEQ ID NO: 497256 - RNA, 19 nt, Homo sapiens
  misc_RNA (1)...(19): siRNA sense strand
gcccugaugcacaaaguuc

SEQ ID NO: 497257 - RNA, 19 nt, Homo sapiens
  misc_RNA (1)...(19): siRNA sense strand
ucacgucuuugcccucaac

SEQ ID NO: 497258 - RNA, 19 nt, Homo sapiens
  misc_RNA (1)...(19): siRNA sense strand
gguguggaucgucauguau

SEQ ID NO: 497259 - RNA, 19 nt, Homo sapiens
  misc_RNA (1)...(19): siRNA sense strand
cgaaggagcuuacgacauc

SEQ ID NO: 497260 - RNA, 19 nt, Homo sapiens
  misc_RNA (1)...(19): siRNA sense strand
guagaggucaucaucaaua

SEQ ID NO: 497261 - RNA, 19 nt, Homo sapiens
  misc_RNA (1)...(19): siRNA sense strand
ggaucgucauguauacuua

SEQ ID NO: 497262 - RNA, 19 nt, Homo sapiens
  misc_RNA (1)...(19): siRNA sense strand
ccacaaagccuuggugaug

SEQ ID NO: 497263 - RNA, 19 nt, Homo sapiens
  misc_RNA (1)...(19): siRNA sense strand
ccacugagauggcccugau

SEQ ID NO: 497264 - RNA, 19 nt, Homo sapiens
  misc_RNA (1)...(19): siRNA sense strand
gcuaugagaccauccugaa

SEQ ID NO: 497265 - RNA, 19 nt, Homo sapiens
  misc_RNA (1)...(19): siRNA sense strand
acucucaggucuuuagaaa

SEQ ID NO: 497266 - RNA, 19 nt, Homo sapiens
  misc_RNA (1)...(19): siRNA sense strand
ucucggcgcuuccucuuug

SEQ ID NO: 497267 - RNA, 19 nt, Homo sapiens
  misc_RNA (1)...(19): siRNA sense strand
gcaacaagcagcacaacag

SEQ ID NO: 497268 - RNA, 19 nt, Homo sapiens
  misc_RNA (1)...(19): siRNA sense strand
ccauaugggugguguggau

SEQ ID NO: 497269 - RNA, 19 nt, Homo sapiens
  misc_RNA (1)...(19): siRNA sense strand
ucuggcggcucacgucuuu

SEQ ID NO: 497270 - RNA, 19 nt, Homo sapiens
  misc_RNA (1)...(19): siRNA sense strand
ccaccuccguugccauaug

SEQ ID NO: 497271 - RNA, 19 nt, Homo sapiens
  misc_RNA (1)...(19): siRNA sense strand
cacaaagccuuggugaugu

SEQ ID NO: 497272 - RNA, 19 nt, Homo sapiens
  misc_RNA (1)...(19): siRNA sense strand
gaaggagcuuacgacauca

SEQ ID NO: 497273 - RNA, 19 nt, Homo sapiens
  misc_RNA (1)...(19): siRNA sense strand
ugguagaggucaucaucaa

SEQ ID NO: 497274 - RNA, 19 nt, Homo sapiens
  misc_RNA (1)...(19): siRNA sense strand
ccauacagcggguacaaug

SEQ ID NO: 497275 - RNA, 19 nt, Homo sapiens
  misc_RNA (1)...(19): siRNA sense strand
caacaagcagcacaacagu

SEQ ID NO: 497276 - RNA, 19 nt, Homo sapiens
  misc_RNA (1)...(19): siRNA sense strand
acaaagccuuggugaugug

SEQ ID NO: 497277 - RNA, 19 nt, Homo sapiens
  misc_RNA (1)...(19): siRNA sense strand
gcuacaagcgcuggcguaa

SEQ ID NO: 497278 - RNA, 19 nt, Homo sapiens
  misc_RNA (1)...(19): siRNA sense strand
caaaguuccguccgaagga

SEQ ID NO: 497279 - RNA, 19 nt, Homo sapiens
  misc_RNA (1)...(19): siRNA sense strand
uacaagcgcuggcguaagc

SEQ ID NO: 497280 - RNA, 19 nt, Homo sapiens
  misc_RNA (1)...(19): siRNA sense strand
gaaagacggcaagaacucu

SEQ ID NO: 497281 - RNA, 19 nt, Homo sapiens
  misc_RNA (1)...(19): siRNA sense strand
gaacucucaggucuuuaga

SEQ ID NO: 497282 - RNA, 19 nt, Homo sapiens
  misc_RNA (1)...(19): siRNA sense strand
ugguguggaucgucaugua

SEQ ID NO: 497283 - RNA, 19 nt, Homo sapiens
  misc_RNA (1)...(19): siRNA sense strand
guguggaucgucauguaua

SEQ ID NO: 497284 - RNA, 19 nt, Homo sapiens
  misc_RNA (1)...(19): siRNA sense strand
ccugcgggcugaagacaug

SEQ ID NO: 497285 - RNA, 19 nt, Homo sapiens
  misc_RNA (1)...(19): siRNA sense strand
cgaaagacggcaagaacuc

SEQ ID NO: 497286 - RNA, 19 nt, Homo sapiens
  misc_RNA (1)...(19): siRNA sense strand
ccucuucugccucguguuu

SEQ ID NO: 497287 - RNA, 19 nt, Homo sapiens
  misc_RNA (1)...(19): siRNA sense strand
uagaggucaucaucaauac

SEQ ID NO: 497288 - RNA, 19 nt, Homo sapiens
  misc_RNA (1)...(19): siRNA sense strand
gggccuucguccucuucua

SEQ ID NO: 497289 - RNA, 19 nt, Homo sapiens
  misc_RNA (1)...(19): siRNA sense strand
ucgccaacauggacuuugu

SEQ ID NO: 497290 - RNA, 19 nt, Homo sapiens
  misc_RNA (1)...(19): siRNA sense strand
ucucaggucuuuagaaacc

SEQ ID NO: 497291 - RNA, 19 nt, Homo sapiens
  misc_RNA (1)...(19): siRNA sense strand
agauggcccugaugcacaa

SEQ ID NO: 497292 - RNA, 19 nt, Homo sapiens
  misc_RNA (1)...(19): siRNA sense strand
guaccagcccacugagaug

SEQ ID NO: 497293 - RNA, 19 nt, Homo sapiens
  misc_RNA (1)...(19): siRNA sense strand
aauacagaguggcugauca

SEQ ID NO: 497294 - RNA, 19 nt, Homo sapiens
  misc_RNA (1)...(19): siRNA sense strand
uaugagaccauccugaaag

SEQ ID NO: 497295 - RNA, 19 nt, Homo sapiens
  misc_RNA (1)...(19): siRNA sense strand
ucauggcacucaucuacgu

SEQ ID NO: 497296 - RNA, 19 nt, Homo sapiens
  misc_RNA (1)...(19): siRNA sense strand
gccaucugcuucucuuguc

SEQ ID NO: 497297 - RNA, 19 nt, Homo sapiens
  misc_RNA (1)...(19): siRNA sense strand
ccacguuugugcucaccau

SEQ ID NO: 497298 - RNA, 19 nt, Homo sapiens
  misc_RNA (1)...(19): siRNA sense strand
ggacccagguauucuuccu

SEQ ID NO: 497299 - RNA, 19 nt, Homo sapiens
  misc_RNA (1)...(19): siRNA sense strand
gggcauugucaccacguuu

SEQ ID NO: 497300 - RNA, 19 nt, Homo sapiens
  misc_RNA (1)...(19): siRNA sense strand
augagaccauccugaaaga

SEQ ID NO: 497301 - RNA, 19 nt, Homo sapiens
  misc_RNA (1)...(19): siRNA sense strand
gacugccucucuuccuguu

SEQ ID NO: 497302 - RNA, 19 nt, Homo sapiens
  misc_RNA (1)...(19): siRNA sense strand
cgucuuugcccucaacuuc

SEQ ID NO: 497303 - RNA, 19 nt, Homo sapiens
  misc_RNA (1)...(19): siRNA sense strand
ggcauugucaccacguuug

SEQ ID NO: 497304 - RNA, 19 nt, Homo sapiens
  misc_RNA (1)...(19): siRNA sense strand
gguagaggucaucaucaau

SEQ ID NO: 497305 - RNA, 19 nt, Homo sapiens
  misc_RNA (1)...(19): siRNA sense strand
gaggucaucaucaauacag

SEQ ID NO: 497306 - RNA, 19 nt, Homo sapiens
  misc_RNA (1)...(19): siRNA sense strand
ugucauggcacucaucuac

SEQ ID NO: 497307 - RNA, 19 nt, Homo sapiens
  misc_RNA (1)...(19): siRNA sense strand
gcccugaugcacaaaguuc

SEQ ID NO: 497308 - RNA, 19 nt, Homo sapiens
  misc_RNA (1)...(19): siRNA sense strand
ucacgucuuugcccucaac

SEQ ID NO: 497309 - RNA, 19 nt, Homo sapiens
  misc_RNA (1)...(19): siRNA sense strand
gguguggaucgucauguau

SEQ ID NO: 497310 - RNA, 19 nt, Homo sapiens
  misc_RNA (1)...(19): siRNA sense strand
cgaaggagcuuacgacauc

SEQ ID NO: 497311 - RNA, 19 nt, Homo sapiens
  misc_RNA (1)...(19): siRNA sense strand
guagaggucaucaucaaua

SEQ ID NO: 497312 - RNA, 19 nt, Homo sapiens
  misc_RNA (1)...(19): siRNA sense strand
ggaucgucauguauacuua

SEQ ID NO: 497313 - RNA, 19 nt, Homo sapiens
  misc_RNA (1)...(19): siRNA sense strand
ccacaaagccuuggugaug

SEQ ID NO: 497314 - RNA, 19 nt, Homo sapiens
  misc_RNA (1)...(19): siRNA sense strand
ccacugagauggcccugau

SEQ ID NO: 497315 - RNA, 19 nt, Homo sapiens
  misc_RNA (1)...(19): siRNA sense strand
gcuaugagaccauccugaa

SEQ ID NO: 497316 - RNA, 19 nt, Homo sapiens
  misc_RNA (1)...(19): siRNA sense strand
acucucaggucuuuagaaa

SEQ ID NO: 497317 - RNA, 19 nt, Homo sapiens
  misc_RNA (1)...(19): siRNA sense strand
ucucggcgcuuccucuuug

SEQ ID NO: 497318 - RNA, 19 nt, Homo sapiens
  misc_RNA (1)...(19): siRNA sense strand
gcaacaagcagcacaacag

SEQ ID NO: 497319 - RNA, 19 nt, Homo sapiens
  misc_RNA (1)...(19): siRNA sense strand
ccauaugggugguguggau

SEQ ID NO: 497320 - RNA, 19 nt, Homo sapiens
  misc_RNA (1)...(19): siRNA sense strand
ucuggcggcucacgucuuu

SEQ ID NO: 497321 - RNA, 19 nt, Homo sapiens
  misc_RNA (1)...(19): siRNA sense strand
ccaccuccguugccauaug

SEQ ID NO: 497322 - RNA, 19 nt, Homo sapiens
  misc_RNA (1)...(19): siRNA sense strand
cacaaagccuuggugaugu

SEQ ID NO: 497323 - RNA, 19 nt, Homo sapiens
  misc_RNA (1)...(19): siRNA sense strand
gaaggagcuuacgacauca

SEQ ID NO: 497324 - RNA, 19 nt, Homo sapiens
  misc_RNA (1)...(19): siRNA sense strand
ugguagaggucaucaucaa

SEQ ID NO: 497325 - RNA, 19 nt, Homo sapiens
  misc_RNA (1)...(19): siRNA sense strand
ccauacagcggguacaaug

SEQ ID NO: 497326 - RNA, 19 nt, Homo sapiens
  misc_RNA (1)...(19): siRNA sense strand
caacaagcagcacaacagu

SEQ ID NO: 497327 - RNA, 19 nt, Homo sapiens
  misc_RNA (1)...(19): siRNA sense strand
acaaagccuuggugaugug

SEQ ID NO: 497328 - RNA, 19 nt, Homo sapiens
  misc_RNA (1)...(19): siRNA sense strand
gcuacaagcgcuggcguaa

SEQ ID NO: 497329 - RNA, 19 nt, Homo sapiens
  misc_RNA (1)...(19): siRNA sense strand
caaaguuccguccgaagga

SEQ ID NO: 497330 - RNA, 19 nt, Homo sapiens
  misc_RNA (1)...(19): siRNA sense strand
uacaagcgcuggcguaagc

SEQ ID NO: 497331 - RNA, 19 nt, Homo sapiens
  misc_RNA (1)...(19): siRNA sense strand
gaaagacggcaagaacucu

SEQ ID NO: 497332 - RNA, 19 nt, Homo sapiens
  misc_RNA (1)...(19): siRNA sense strand
gaacucucaggucuuuaga

SEQ ID NO: 497333 - RNA, 19 nt, Homo sapiens
  misc_RNA (1)...(19): siRNA sense strand
ugguguggaucgucaugua

SEQ ID NO: 497334 - RNA, 19 nt, Homo sapiens
  misc_RNA (1)...(19): siRNA sense strand
guguggaucgucauguaua

SEQ ID NO: 497335 - RNA, 19 nt, Homo sapiens
  misc_RNA (1)...(19): siRNA sense strand
ccugcgggcugaagacaug

SEQ ID NO: 497336 - RNA, 19 nt, Homo sapiens
  misc_RNA (1)...(19): siRNA sense strand
cgaaagacggcaagaacuc

SEQ ID NO: 497337 - RNA, 19 nt, Homo sapiens
  misc_RNA (1)...(19): siRNA sense strand
ccucuucugccucguguuu

SEQ ID NO: 497338 - RNA, 19 nt, Homo sapiens
  misc_RNA (1)...(19): siRNA sense strand
uagaggucaucaucaauac

SEQ ID NO: 497339 - RNA, 19 nt, Homo sapiens
  misc_RNA (1)...(19): siRNA sense strand
gggccuucguccucuucua

SEQ ID NO: 497340 - RNA, 19 nt, Homo sapiens
  misc_RNA (1)...(19): siRNA sense strand
ucgccaacauggacuuugu

SEQ ID NO: 497341 - RNA, 19 nt, Homo sapiens
  misc_RNA (1)...(19): siRNA sense strand
ucucaggucuuuagaaacc

SEQ ID NO: 497342 - RNA, 19 nt, Homo sapiens
  misc_RNA (1)...(19): siRNA sense strand
agauggcccugaugcacaa

SEQ ID NO: 497343 - RNA, 19 nt, Homo sapiens
  misc_RNA (1)...(19): siRNA sense strand
guaccagcccacugagaug

SEQ ID NO: 497344 - RNA, 19 nt, Homo sapiens
  misc_RNA (1)...(19): siRNA sense strand
aauacagaguggcugauca

SEQ ID NO: 497345 - RNA, 19 nt, Homo sapiens
  misc_RNA (1)...(19): siRNA sense strand
uaugagaccauccugaaag

SEQ ID NO: 497346 - RNA, 19 nt, Homo sapiens
  misc_RNA (1)...(19): siRNA sense strand
ucauggcacucaucuacgu

SEQ ID NO: 497347 - RNA, 19 nt, Homo sapiens
  misc_RNA (1)...(19): siRNA sense strand
gccaucugcuucucuuguc

SEQ ID NO: 497348 - RNA, 19 nt, Homo sapiens
  misc_RNA (1)...(19): siRNA sense strand
ccacguuugugcucaccau

SEQ ID NO: 497349 - RNA, 19 nt, Homo sapiens
  misc_RNA (1)...(19): siRNA sense strand
ggacccagguauucuuccu

SEQ ID NO: 497350 - RNA, 19 nt, Homo sapiens
  misc_RNA (1)...(19): siRNA sense strand
gggcauugucaccacguuu

SEQ ID NO: 497351 - RNA, 19 nt, Homo sapiens
  misc_RNA (1)...(19): siRNA sense strand
augagaccauccugaaaga

SEQ ID NO: 497352 - RNA, 19 nt, Homo sapiens
  misc_RNA (1)...(19): siRNA sense strand
gacugccucucuuccuguu

SEQ ID NO: 497353 - RNA, 19 nt, Homo sapiens
  misc_RNA (1)...(19): siRNA sense strand
cgucuuugcccucaacuuc

SEQ ID NO: 497354 - RNA, 19 nt, Homo sapiens
  misc_RNA (1)...(19): siRNA sense strand
ggcauugucaccacguuug

SEQ ID NO: 497355 - RNA, 19 nt, Homo sapiens
  misc_RNA (1)...(19): siRNA sense strand
gguagaggucaucaucaau

SEQ ID NO: 497356 - RNA, 19 nt, Homo sapiens
  misc_RNA (1)...(19): siRNA sense strand
gaggucaucaucaauacag

SEQ ID NO: 497357 - RNA, 19 nt, Homo sapiens
  misc_RNA (1)...(19): siRNA sense strand
ugucauggcacucaucuac

SEQ ID NO: 497358 - RNA, 19 nt, Homo sapiens
  misc_RNA (1)...(19): siRNA sense strand
gcccugaugcacaaaguuc

SEQ ID NO: 497359 - RNA, 19 nt, Homo sapiens
  misc_RNA (1)...(19): siRNA sense strand
ucacgucuuugcccucaac

SEQ ID NO: 497360 - RNA, 19 nt, Homo sapiens
  misc_RNA (1)...(19): siRNA sense strand
gguguggaucgucauguau

SEQ ID NO: 497361 - RNA, 19 nt, Homo sapiens
  misc_RNA (1)...(19): siRNA sense strand
gaaaugaucccuauuguuu

SEQ ID NO: 497362 - RNA, 19 nt, Homo sapiens
  misc_RNA (1)...(19): siRNA sense strand
gaucucagcccacaaauua

SEQ ID NO: 497363 - RNA, 19 nt, Homo sapiens
  misc_RNA (1)...(19): siRNA sense strand
ccaaacagcuaucauauga

SEQ ID NO: 497364 - RNA, 19 nt, Homo sapiens
  misc_RNA (1)...(19): siRNA sense strand
gaagacaaaucagaacuaa

SEQ ID NO: 497365 - RNA, 19 nt, Homo sapiens
  misc_RNA (1)...(19): siRNA sense strand
ggauacagcuggaaaugau

SEQ ID NO: 497366 - RNA, 19 nt, Homo sapiens
  misc_RNA (1)...(19): siRNA sense strand
ccaagcaacuguacuguau

SEQ ID NO: 497367 - RNA, 19 nt, Homo sapiens
  misc_RNA (1)...(19): siRNA sense strand
guaaggaagucaaagugaa

SEQ ID NO: 497368 - RNA, 19 nt, Homo sapiens
  misc_RNA (1)...(19): siRNA sense strand
ggaaaugcacaacaaauug

SEQ ID NO: 497369 - RNA, 19 nt, Homo sapiens
  misc_RNA (1)...(19): siRNA sense strand
guaaaucagucuaguccaa

SEQ ID NO: 497370 - RNA, 19 nt, Homo sapiens
  misc_RNA (1)...(19): siRNA sense strand
caacuguacuguauacugu

SEQ ID NO: 497371 - RNA, 19 nt, Homo sapiens
  misc_RNA (1)...(19): siRNA sense strand
gcaaguuccugcauaugga

SEQ ID NO: 497372 - RNA, 19 nt, Homo sapiens
  misc_RNA (1)...(19): siRNA sense strand
gacggaagauaauggguaa

SEQ ID NO: 497373 - RNA, 19 nt, Homo sapiens
  misc_RNA (1)...(19): siRNA sense strand
gcaauuguuucuguuaaug

SEQ ID NO: 497374 - RNA, 19 nt, Homo sapiens
  misc_RNA (1)...(19): siRNA sense strand
gaacaacuaaugcgucaga

SEQ ID NO: 497375 - RNA, 19 nt, Homo sapiens
  misc_RNA (1)...(19): siRNA sense strand
gcccacaaauuacaacuga

SEQ ID NO: 497376 - RNA, 19 nt, Homo sapiens
  misc_RNA (1)...(19): siRNA sense strand
caacaaauuggccaguaua

SEQ ID NO: 497377 - RNA, 19 nt, Homo sapiens
  misc_RNA (1)...(19): siRNA sense strand
ggacaaauaauggaaauuc

SEQ ID NO: 497378 - RNA, 19 nt, Homo sapiens
  misc_RNA (1)...(19): siRNA sense strand
gaagauaauggguaaggaa

SEQ ID NO: 497379 - RNA, 19 nt, Homo sapiens
  misc_RNA (1)...(19): siRNA sense strand
ggaagacaaaucagaacua

SEQ ID NO: 497380 - RNA, 19 nt, Homo sapiens
  misc_RNA (1)...(19): siRNA sense strand
guauggaaaugcacaacaa

SEQ ID NO: 497381 - RNA, 19 nt, Homo sapiens
  misc_RNA (1)...(19): siRNA sense strand
ggaaaugaucccuauuguu

SEQ ID NO: 497382 - RNA, 19 nt, Homo sapiens
  misc_RNA (1)...(19): siRNA sense strand
gaaagccucccgcuccaaa

SEQ ID NO: 497383 - RNA, 19 nt, Homo sapiens
  misc_RNA (1)...(19): siRNA sense strand
guacauaugagucaaauac

SEQ ID NO: 497384 - RNA, 19 nt, Homo sapiens
  misc_RNA (1)...(19): siRNA sense strand
gcuaacagaacaacuaaug

SEQ ID NO: 497385 - RNA, 19 nt, Homo sapiens
  misc_RNA (1)...(19): siRNA sense strand
caacagcagaaucaaauug

SEQ ID NO: 497386 - RNA, 19 nt, Homo sapiens
  misc_RNA (1)...(19): siRNA sense strand
caacaaaugggaugcugaa

SEQ ID NO: 497387 - RNA, 19 nt, Homo sapiens
  misc_RNA (1)...(19): siRNA sense strand
gcaacucuuuagccagauu

SEQ ID NO: 497388 - RNA, 19 nt, Homo sapiens
  misc_RNA (1)...(19): siRNA sense strand
caacuaaugcgucagacuu

SEQ ID NO: 497389 - RNA, 19 nt, Homo sapiens
  misc_RNA (1)...(19): siRNA sense strand
caggaaagucuaagggaua

SEQ ID NO: 497390 - RNA, 19 nt, Homo sapiens
  misc_RNA (1)...(19): siRNA sense strand
gauaauggguaaggaaguc

SEQ ID NO: 497391 - RNA, 19 nt, Homo sapiens
  misc_RNA (1)...(19): siRNA sense strand
gccaguauaugccuaaugg

SEQ ID NO: 497392 - RNA, 19 nt, Homo sapiens
  misc_RNA (1)...(19): siRNA sense strand
ugaaggucauguugugaaa

SEQ ID NO: 497393 - RNA, 19 nt, Homo sapiens
  misc_RNA (1)...(19): siRNA sense strand
ggaagauaauggguaagga

SEQ ID NO: 497394 - RNA, 19 nt, Homo sapiens
  misc_RNA (1)...(19): siRNA sense strand
uaugauaaaucccgugcaa

SEQ ID NO: 497395 - RNA, 19 nt, Homo sapiens
  misc_RNA (1)...(19): siRNA sense strand
uaagggauauggcuuuguc

SEQ ID NO: 497396 - RNA, 19 nt, Homo sapiens
  misc_RNA (1)...(19): siRNA sense strand
caaauuggccaguauaugc

SEQ ID NO: 497397 - RNA, 19 nt, Homo sapiens
  misc_RNA (1)...(19): siRNA sense strand
gaaaugcacaacaaauugg

SEQ ID NO: 497398 - RNA, 19 nt, Homo sapiens
  misc_RNA (1)...(19): siRNA sense strand
auucgagucuuuccagaua

SEQ ID NO: 497399 - RNA, 19 nt, Homo sapiens
  misc_RNA (1)...(19): siRNA sense strand
aauggaaauucgagucuuu

SEQ ID NO: 497400 - RNA, 19 nt, Homo sapiens
  misc_RNA (1)...(19): siRNA sense strand
gauauggcuuugucuccuu

SEQ ID NO: 497401 - RNA, 19 nt, Homo sapiens
  misc_RNA (1)...(19): siRNA sense strand
ucaaauaccaaacagcuau

SEQ ID NO: 497402 - RNA, 19 nt, Homo sapiens
  misc_RNA (1)...(19): siRNA sense strand
ccuaaugguuggcaaguuc

SEQ ID NO: 497403 - RNA, 19 nt, Homo sapiens
  misc_RNA (1)...(19): siRNA sense strand
gcaaaaugauuauggauac

SEQ ID NO: 497404 - RNA, 19 nt, Homo sapiens
  misc_RNA (1)...(19): siRNA sense strand
guuggcaaguuccugcaua

SEQ ID NO: 497405 - RNA, 19 nt, Homo sapiens
  misc_RNA (1)...(19): siRNA sense strand
ucgguaaccuuuccagaga

SEQ ID NO: 497406 - RNA, 19 nt, Homo sapiens
  misc_RNA (1)...(19): siRNA sense strand
caaagugaauugggcaaca

SEQ ID NO: 497407 - RNA, 19 nt, Homo sapiens
  misc_RNA (1)...(19): siRNA sense strand
gguaaggaagucaaaguga

SEQ ID NO: 497408 - RNA, 19 nt, Homo sapiens
  misc_RNA (1)...(19): siRNA sense strand
cacaacaaauuggccagua

SEQ ID NO: 497409 - RNA, 19 nt, Homo sapiens
  misc_RNA (1)...(19): siRNA sense strand
caaucagccuucuggguau

SEQ ID NO: 497410 - RNA, 19 nt, Homo sapiens
  misc_RNA (1)...(19): siRNA sense strand
gggcuaacagaacaacuaa

SEQ ID NO: 497411 - RNA, 19 nt, Homo sapiens
  misc_RNA (1)...(19): siRNA sense strand
gcagcauguugcccaauca

SEQ ID NO: 497412 - RNA, 19 nt, Homo sapiens
  misc_RNA (1)...(19): siRNA sense strand
acaacaaauuggccaguau

SEQ ID NO: 497413 - RNA, 19 nt, Homo sapiens
  misc_RNA (1)...(19): siRNA sense strand
cauugaaggucauguugug

SEQ ID NO: 497414 - RNA, 19 nt, Homo sapiens
  misc_RNA (1)...(19): siRNA sense strand
gguaaccuuuccagagaug

SEQ ID NO: 497415 - RNA, 19 nt, Homo sapiens
  misc_RNA (1)...(19): siRNA sense strand
cuaauucugcaacucuuua

SEQ ID NO: 497416 - RNA, 19 nt, Homo sapiens
  misc_RNA (1)...(19): siRNA sense strand
gcaacagcagaaucaaauu

SEQ ID NO: 497417 - RNA, 19 nt, Homo sapiens
  misc_RNA (1)...(19): siRNA sense strand
gaguacauaugagucaaau

SEQ ID NO: 497418 - RNA, 19 nt, Homo sapiens
  misc_RNA (1)...(19): siRNA sense strand
ccaaagaguacauaugagu

SEQ ID NO: 497419 - RNA, 19 nt, Homo sapiens
  misc_RNA (1)...(19): siRNA sense strand
auaccaaacagcuaucaua

SEQ ID NO: 497420 - RNA, 19 nt, Homo sapiens
  misc_RNA (1)...(19): siRNA sense strand
ggugaucucagcccacaaa

SEQ ID NO: 497421 - RNA, 19 nt, Homo sapiens
  misc_RNA (1)...(19): siRNA sense strand
uggaaaugcacaacaaauu

SEQ ID NO: 497422 - RNA, 19 nt, Homo sapiens
  misc_RNA (1)...(19): siRNA sense strand
gguguuacuucugggcuaa

SEQ ID NO: 497423 - RNA, 19 nt, Homo sapiens
  misc_RNA (1)...(19): siRNA sense strand
agacaaaucagaacuaacu

SEQ ID NO: 497424 - RNA, 19 nt, Homo sapiens
  misc_RNA (1)...(19): siRNA sense strand
ucauuuccaugucuuuguu

SEQ ID NO: 497425 - RNA, 19 nt, Homo sapiens
  misc_RNA (1)...(19): siRNA sense strand
gaaaugcuauuggggcaaa

SEQ ID NO: 497426 - RNA, 19 nt, Homo sapiens
  misc_RNA (1)...(19): siRNA sense strand
cacaugcaauuguuucugu

SEQ ID NO: 497427 - RNA, 19 nt, Homo sapiens
  misc_RNA (1)...(19): siRNA sense strand
gguggaagacaaaucagaa

SEQ ID NO: 497428 - RNA, 19 nt, Homo sapiens
  misc_RNA (1)...(19): siRNA sense strand
uggaaaugaucccuauugu

SEQ ID NO: 497429 - RNA, 19 nt, Homo sapiens
  misc_RNA (1)...(19): siRNA sense strand
gcaacuguacuguauacug

SEQ ID NO: 497430 - RNA, 19 nt, Homo sapiens
  misc_RNA (1)...(19): siRNA sense strand
gaaagucuaagggauaugg

SEQ ID NO: 497431 - RNA, 19 nt, Homo sapiens
  misc_RNA (1)...(19): siRNA sense strand
gagaugcccaagacucuau

SEQ ID NO: 497432 - RNA, 19 nt, Homo sapiens
  misc_RNA (1)...(19): siRNA sense strand
aaggucauguugugaaaug

SEQ ID NO: 497433 - RNA, 19 nt, Homo sapiens
  misc_RNA (1)...(19): siRNA sense strand
gacaaauaauggaaauucg

SEQ ID NO: 497434 - RNA, 19 nt, Homo sapiens
  misc_RNA (1)...(19): siRNA sense strand
cauaugaugagguuguaaa

SEQ ID NO: 497435 - RNA, 19 nt, Homo sapiens
  misc_RNA (1)...(19): siRNA sense strand
cuccaaagaguacauauga

SEQ ID NO: 497436 - RNA, 19 nt, Homo sapiens
  misc_RNA (1)...(19): siRNA sense strand
aaagugaauugggcaacaa

SEQ ID NO: 497437 - RNA, 19 nt, Homo sapiens
  misc_RNA (1)...(19): siRNA sense strand
ugauaaaucccgugcaaca

SEQ ID NO: 497438 - RNA, 19 nt, Homo sapiens
  misc_RNA (1)...(19): siRNA sense strand
caagcaacuguacuguaua

SEQ ID NO: 497439 - RNA, 19 nt, Homo sapiens
  misc_RNA (1)...(19): siRNA sense strand
uaaggaagucaaagugaau

SEQ ID NO: 497440 - RNA, 19 nt, Homo sapiens
  misc_RNA (1)...(19): siRNA sense strand
caugcaauuguuucuguua

SEQ ID NO: 497441 - RNA, 19 nt, Homo sapiens
  misc_RNA (1)...(19): siRNA sense strand
aaacgccauucaacagaug

SEQ ID NO: 497442 - RNA, 19 nt, Homo sapiens
  misc_RNA (1)...(19): siRNA sense strand
caaaugggaugcugaaaac

SEQ ID NO: 497443 - RNA, 19 nt, Homo sapiens
  misc_RNA (1)...(19): siRNA sense strand
ugaauggacggaagauaau

SEQ ID NO: 497444 - RNA, 19 nt, Homo sapiens
  misc_RNA (1)...(19): siRNA sense strand
ucgagucuuuccagauaaa

SEQ ID NO: 497445 - RNA, 19 nt, Homo sapiens
  misc_RNA (1)...(19): siRNA sense strand
ccaguggcuugguggaaga

SEQ ID NO: 497446 - RNA, 19 nt, Homo sapiens
  misc_RNA (1)...(19): siRNA sense strand
gaaaacgccauucaacaga

SEQ ID NO: 497447 - RNA, 19 nt, Homo sapiens
  misc_RNA (1)...(19): siRNA sense strand
ccacaaauuacaacugaag

SEQ ID NO: 497448 - RNA, 19 nt, Homo sapiens
  misc_RNA (1)...(19): siRNA sense strand
gaugggaccaaauuaugga

SEQ ID NO: 497449 - RNA, 19 nt, Homo sapiens
  misc_RNA (1)...(19): siRNA sense strand
caguauaugccuaaugguu

SEQ ID NO: 497450 - RNA, 19 nt, Homo sapiens
  misc_RNA (1)...(19): siRNA sense strand
ccagugguauggaaaugca

SEQ ID NO: 497451 - RNA, 19 nt, Homo sapiens
  misc_RNA (1)...(19): siRNA sense strand
gcagaaucaaauuggauau

SEQ ID NO: 497452 - RNA, 19 nt, Homo sapiens
  misc_RNA (1)...(19): siRNA sense strand
gcagcacaugcaauuguuu

SEQ ID NO: 497453 - RNA, 19 nt, Homo sapiens
  misc_RNA (1)...(19): siRNA sense strand
aagcaacuguacuguauac

SEQ ID NO: 497454 - RNA, 19 nt, Homo sapiens
  misc_RNA (1)...(19): siRNA sense strand
ucagaugcccgagugguaa

SEQ ID NO: 497455 - RNA, 19 nt, Homo sapiens
  misc_RNA (1)...(19): siRNA sense strand
ggaugggaccaaauuaugg

SEQ ID NO: 497456 - RNA, 19 nt, Homo sapiens
  misc_RNA (1)...(19): siRNA sense strand
augaauggacggaagauaa

SEQ ID NO: 497457 - RNA, 19 nt, Homo sapiens
  misc_RNA (1)...(19): siRNA sense strand
uaccaaacagcuaucauau

SEQ ID NO: 497458 - RNA, 19 nt, Homo sapiens
  misc_RNA (1)...(19): siRNA sense strand
gugcaacagcagaaucaaa

SEQ ID NO: 497459 - RNA, 19 nt, Homo sapiens
  misc_RNA (1)...(19): siRNA sense strand
cauggaugggaccaaauua

SEQ ID NO: 497460 - RNA, 19 nt, Homo sapiens
  misc_RNA (1)...(19): siRNA sense strand
ugugacagaagcucuaauu

SEQ ID NO: 497461 - RNA, 19 nt, Homo sapiens
  misc_RNA (1)...(19): siRNA sense strand
gaaaugaucccuauuguuu

SEQ ID NO: 497462 - RNA, 19 nt, Homo sapiens
  misc_RNA (1)...(19): siRNA sense strand
gaucucagcccacaaauua

SEQ ID NO: 497463 - RNA, 19 nt, Homo sapiens
  misc_RNA (1)...(19): siRNA sense strand
ccaaacagcuaucauauga

SEQ ID NO: 497464 - RNA, 19 nt, Homo sapiens
  misc_RNA (1)...(19): siRNA sense strand
gaagacaaaucagaacuaa

SEQ ID NO: 497465 - RNA, 19 nt, Homo sapiens
  misc_RNA (1)...(19): siRNA sense strand
ggauacagcuggaaaugau

SEQ ID NO: 497466 - RNA, 19 nt, Homo sapiens
  misc_RNA (1)...(19): siRNA sense strand
ccaagcaacuguacuguau

SEQ ID NO: 497467 - RNA, 19 nt, Homo sapiens
  misc_RNA (1)...(19): siRNA sense strand
guaaggaagucaaagugaa

SEQ ID NO: 497468 - RNA, 19 nt, Homo sapiens
  misc_RNA (1)...(19): siRNA sense strand
ggaaaugcacaacaaauug

SEQ ID NO: 497469 - RNA, 19 nt, Homo sapiens
  misc_RNA (1)...(19): siRNA sense strand
guaaaucagucuaguccaa

SEQ ID NO: 497470 - RNA, 19 nt, Homo sapiens
  misc_RNA (1)...(19): siRNA sense strand
caacuguacuguauacugu

SEQ ID NO: 497471 - RNA, 19 nt, Homo sapiens
  misc_RNA (1)...(19): siRNA sense strand
gcaaguuccugcauaugga

SEQ ID NO: 497472 - RNA, 19 nt, Homo sapiens
  misc_RNA (1)...(19): siRNA sense strand
gacggaagauaauggguaa

SEQ ID NO: 497473 - RNA, 19 nt, Homo sapiens
  misc_RNA (1)...(19): siRNA sense strand
gcaauuguuucuguuaaug

SEQ ID NO: 497474 - RNA, 19 nt, Homo sapiens
  misc_RNA (1)...(19): siRNA sense strand
gaacaacuaaugcgucaga

SEQ ID NO: 497475 - RNA, 19 nt, Homo sapiens
  misc_RNA (1)...(19): siRNA sense strand
gcccacaaauuacaacuga

SEQ ID NO: 497476 - RNA, 19 nt, Homo sapiens
  misc_RNA (1)...(19): siRNA sense strand
caacaaauuggccaguaua

SEQ ID NO: 497477 - RNA, 19 nt, Homo sapiens
  misc_RNA (1)...(19): siRNA sense strand
ggacaaauaauggaaauuc

SEQ ID NO: 497478 - RNA, 19 nt, Homo sapiens
  misc_RNA (1)...(19): siRNA sense strand
gaagauaauggguaaggaa

SEQ ID NO: 497479 - RNA, 19 nt, Homo sapiens
  misc_RNA (1)...(19): siRNA sense strand
ggaagacaaaucagaacua

SEQ ID NO: 497480 - RNA, 19 nt, Homo sapiens
  misc_RNA (1)...(19): siRNA sense strand
guauggaaaugcacaacaa

SEQ ID NO: 497481 - RNA, 19 nt, Homo sapiens
  misc_RNA (1)...(19): siRNA sense strand
ggaaaugaucccuauuguu

SEQ ID NO: 497482 - RNA, 19 nt, Homo sapiens
  misc_RNA (1)...(19): siRNA sense strand
gaaagccucccgcuccaaa

SEQ ID NO: 497483 - RNA, 19 nt, Homo sapiens
  misc_RNA (1)...(19): siRNA sense strand
guacauaugagucaaauac

SEQ ID NO: 497484 - RNA, 19 nt, Homo sapiens
  misc_RNA (1)...(19): siRNA sense strand
gcuaacagaacaacuaaug

SEQ ID NO: 497485 - RNA, 19 nt, Homo sapiens
  misc_RNA (1)...(19): siRNA sense strand
caacagcagaaucaaauug

SEQ ID NO: 497486 - RNA, 19 nt, Homo sapiens
  misc_RNA (1)...(19): siRNA sense strand
caacaaaugggaugcugaa

SEQ ID NO: 497487 - RNA, 19 nt, Homo sapiens
  misc_RNA (1)...(19): siRNA sense strand
gcaacucuuuagccagauu

SEQ ID NO: 497488 - RNA, 19 nt, Homo sapiens
  misc_RNA (1)...(19): siRNA sense strand
caacuaaugcgucagacuu

SEQ ID NO: 497489 - RNA, 19 nt, Homo sapiens
  misc_RNA (1)...(19): siRNA sense strand
caggaaagucuaagggaua

SEQ ID NO: 497490 - RNA, 19 nt, Homo sapiens
  misc_RNA (1)...(19): siRNA sense strand
gauaauggguaaggaaguc

SEQ ID NO: 497491 - RNA, 19 nt, Homo sapiens
  misc_RNA (1)...(19): siRNA sense strand
gccaguauaugccuaaugg

SEQ ID NO: 497492 - RNA, 19 nt, Homo sapiens
  misc_RNA (1)...(19): siRNA sense strand
ugaaggucauguugugaaa

SEQ ID NO: 497493 - RNA, 19 nt, Homo sapiens
  misc_RNA (1)...(19): siRNA sense strand
ggaagauaauggguaagga

SEQ ID NO: 497494 - RNA, 19 nt, Homo sapiens
  misc_RNA (1)...(19): siRNA sense strand
uaugauaaaucccgugcaa

SEQ ID NO: 497495 - RNA, 19 nt, Homo sapiens
  misc_RNA (1)...(19): siRNA sense strand
uaagggauauggcuuuguc

SEQ ID NO: 497496 - RNA, 19 nt, Homo sapiens
  misc_RNA (1)...(19): siRNA sense strand
caaauuggccaguauaugc

SEQ ID NO: 497497 - RNA, 19 nt, Homo sapiens
  misc_RNA (1)...(19): siRNA sense strand
gaaaugcacaacaaauugg

SEQ ID NO: 497498 - RNA, 19 nt, Homo sapiens
  misc_RNA (1)...(19): siRNA sense strand
auucgagucuuuccagaua

SEQ ID NO: 497499 - RNA, 19 nt, Homo sapiens
  misc_RNA (1)...(19): siRNA sense strand
aauggaaauucgagucuuu

SEQ ID NO: 497500 - RNA, 19 nt, Homo sapiens
  misc_RNA (1)...(19): siRNA sense strand
gauauggcuuugucuccuu

SEQ ID NO: 497501 - RNA, 19 nt, Homo sapiens
  misc_RNA (1)...(19): siRNA sense strand
ucaaauaccaaacagcuau

SEQ ID NO: 497502 - RNA, 19 nt, Homo sapiens
  misc_RNA (1)...(19): siRNA sense strand
ccuaaugguuggcaaguuc

SEQ ID NO: 497503 - RNA, 19 nt, Homo sapiens
  misc_RNA (1)...(19): siRNA sense strand
gcaaaaugauuauggauac

SEQ ID NO: 497504 - RNA, 19 nt, Homo sapiens
  misc_RNA (1)...(19): siRNA sense strand
guuggcaaguuccugcaua

SEQ ID NO: 497505 - RNA, 19 nt, Homo sapiens
  misc_RNA (1)...(19): siRNA sense strand
ucgguaaccuuuccagaga

SEQ ID NO: 497506 - RNA, 19 nt, Homo sapiens
  misc_RNA (1)...(19): siRNA sense strand
caaagugaauugggcaaca

SEQ ID NO: 497507 - RNA, 19 nt, Homo sapiens
  misc_RNA (1)...(19): siRNA sense strand
gguaaggaagucaaaguga

SEQ ID NO: 497508 - RNA, 19 nt, Homo sapiens
  misc_RNA (1)...(19): siRNA sense strand
cacaacaaauuggccagua

SEQ ID NO: 497509 - RNA, 19 nt, Homo sapiens
  misc_RNA (1)...(19): siRNA sense strand
caaucagccuucuggguau

SEQ ID NO: 497510 - RNA, 19 nt, Homo sapiens
  misc_RNA (1)...(19): siRNA sense strand
gggcuaacagaacaacuaa

SEQ ID NO: 497511 - RNA, 19 nt, Homo sapiens
  misc_RNA (1)...(19): siRNA sense strand
gcagcauguugcccaauca

SEQ ID NO: 497512 - RNA, 19 nt, Homo sapiens
  misc_RNA (1)...(19): siRNA sense strand
acaacaaauuggccaguau

SEQ ID NO: 497513 - RNA, 19 nt, Homo sapiens
  misc_RNA (1)...(19): siRNA sense strand
cauugaaggucauguugug

SEQ ID NO: 497514 - RNA, 19 nt, Homo sapiens
  misc_RNA (1)...(19): siRNA sense strand
gguaaccuuuccagagaug

SEQ ID NO: 497515 - RNA, 19 nt, Homo sapiens
  misc_RNA (1)...(19): siRNA sense strand
cuaauucugcaacucuuua

SEQ ID NO: 497516 - RNA, 19 nt, Homo sapiens
  misc_RNA (1)...(19): siRNA sense strand
gcaacagcagaaucaaauu

SEQ ID NO: 497517 - RNA, 19 nt, Homo sapiens
  misc_RNA (1)...(19): siRNA sense strand
gaguacauaugagucaaau

SEQ ID NO: 497518 - RNA, 19 nt, Homo sapiens
  misc_RNA (1)...(19): siRNA sense strand
ccaaagaguacauaugagu

SEQ ID NO: 497519 - RNA, 19 nt, Homo sapiens
  misc_RNA (1)...(19): siRNA sense strand
auaccaaacagcuaucaua

SEQ ID NO: 497520 - RNA, 19 nt, Homo sapiens
  misc_RNA (1)...(19): siRNA sense strand
ggugaucucagcccacaaa

SEQ ID NO: 497521 - RNA, 19 nt, Homo sapiens
  misc_RNA (1)...(19): siRNA sense strand
uggaaaugcacaacaaauu

SEQ ID NO: 497522 - RNA, 19 nt, Homo sapiens
  misc_RNA (1)...(19): siRNA sense strand
gguguuacuucugggcuaa

SEQ ID NO: 497523 - RNA, 19 nt, Homo sapiens
  misc_RNA (1)...(19): siRNA sense strand
agacaaaucagaacuaacu

SEQ ID NO: 497524 - RNA, 19 nt, Homo sapiens
  misc_RNA (1)...(19): siRNA sense strand
ucauuuccaugucuuuguu

SEQ ID NO: 497525 - RNA, 19 nt, Homo sapiens
  misc_RNA (1)...(19): siRNA sense strand
gaaaugcuauuggggcaaa

SEQ ID NO: 497526 - RNA, 19 nt, Homo sapiens
  misc_RNA (1)...(19): siRNA sense strand
cacaugcaauuguuucugu

SEQ ID NO: 497527 - RNA, 19 nt, Homo sapiens
  misc_RNA (1)...(19): siRNA sense strand
gguggaagacaaaucagaa

SEQ ID NO: 497528 - RNA, 19 nt, Homo sapiens
  misc_RNA (1)...(19): siRNA sense strand
uggaaaugaucccuauugu

SEQ ID NO: 497529 - RNA, 19 nt, Homo sapiens
  misc_RNA (1)...(19): siRNA sense strand
gcaacuguacuguauacug

SEQ ID NO: 497530 - RNA, 19 nt, Homo sapiens
  misc_RNA (1)...(19): siRNA sense strand
gaaagucuaagggauaugg

SEQ ID NO: 497531 - RNA, 19 nt, Homo sapiens
  misc_RNA (1)...(19): siRNA sense strand
gagaugcccaagacucuau

SEQ ID NO: 497532 - RNA, 19 nt, Homo sapiens
  misc_RNA (1)...(19): siRNA sense strand
aaggucauguugugaaaug

SEQ ID NO: 497533 - RNA, 19 nt, Homo sapiens
  misc_RNA (1)...(19): siRNA sense strand
gacaaauaauggaaauucg

SEQ ID NO: 497534 - RNA, 19 nt, Homo sapiens
  misc_RNA (1)...(19): siRNA sense strand
cauaugaugagguuguaaa

SEQ ID NO: 497535 - RNA, 19 nt, Homo sapiens
  misc_RNA (1)...(19): siRNA sense strand
cuccaaagaguacauauga

SEQ ID NO: 497536 - RNA, 19 nt, Homo sapiens
  misc_RNA (1)...(19): siRNA sense strand
aaagugaauugggcaacaa

SEQ ID NO: 497537 - RNA, 19 nt, Homo sapiens
  misc_RNA (1)...(19): siRNA sense strand
ugauaaaucccgugcaaca

SEQ ID NO: 497538 - RNA, 19 nt, Homo sapiens
  misc_RNA (1)...(19): siRNA sense strand
caagcaacuguacuguaua

SEQ ID NO: 497539 - RNA, 19 nt, Homo sapiens
  misc_RNA (1)...(19): siRNA sense strand
uaaggaagucaaagugaau

SEQ ID NO: 497540 - RNA, 19 nt, Homo sapiens
  misc_RNA (1)...(19): siRNA sense strand
caugcaauuguuucuguua

SEQ ID NO: 497541 - RNA, 19 nt, Homo sapiens
  misc_RNA (1)...(19): siRNA sense strand
aaacgccauucaacagaug

SEQ ID NO: 497542 - RNA, 19 nt, Homo sapiens
  misc_RNA (1)...(19): siRNA sense strand
caaaugggaugcugaaaac

SEQ ID NO: 497543 - RNA, 19 nt, Homo sapiens
  misc_RNA (1)...(19): siRNA sense strand
ugaauggacggaagauaau

SEQ ID NO: 497544 - RNA, 19 nt, Homo sapiens
  misc_RNA (1)...(19): siRNA sense strand
ucgagucuuuccagauaaa

SEQ ID NO: 497545 - RNA, 19 nt, Homo sapiens
  misc_RNA (1)...(19): siRNA sense strand
ccaguggcuugguggaaga

SEQ ID NO: 497546 - RNA, 19 nt, Homo sapiens
  misc_RNA (1)...(19): siRNA sense strand
gaaaacgccauucaacaga

SEQ ID NO: 497547 - RNA, 19 nt, Homo sapiens
  misc_RNA (1)...(19): siRNA sense strand
ccacaaauuacaacugaag

SEQ ID NO: 497548 - RNA, 19 nt, Homo sapiens
  misc_RNA (1)...(19): siRNA sense strand
gaugggaccaaauuaugga

SEQ ID NO: 497549 - RNA, 19 nt, Homo sapiens
  misc_RNA (1)...(19): siRNA sense strand
caguauaugccuaaugguu

SEQ ID NO: 497550 - RNA, 19 nt, Homo sapiens
  misc_RNA (1)...(19): siRNA sense strand
ccagugguauggaaaugca

SEQ ID NO: 497551 - RNA, 19 nt, Homo sapiens
  misc_RNA (1)...(19): siRNA sense strand
gcagaaucaaauuggauau

SEQ ID NO: 497552 - RNA, 19 nt, Homo sapiens
  misc_RNA (1)...(19): siRNA sense strand
gcagcacaugcaauuguuu

SEQ ID NO: 497553 - RNA, 19 nt, Homo sapiens
  misc_RNA (1)...(19): siRNA sense strand
aagcaacuguacuguauac

SEQ ID NO: 497554 - RNA, 19 nt, Homo sapiens
  misc_RNA (1)...(19): siRNA sense strand
ucagaugcccgagugguaa

SEQ ID NO: 497555 - RNA, 19 nt, Homo sapiens
  misc_RNA (1)...(19): siRNA sense strand
ggaugggaccaaauuaugg

SEQ ID NO: 497556 - RNA, 19 nt, Homo sapiens
  misc_RNA (1)...(19): siRNA sense strand
augaauggacggaagauaa

SEQ ID NO: 497557 - RNA, 19 nt, Homo sapiens
  misc_RNA (1)...(19): siRNA sense strand
uaccaaacagcuaucauau

SEQ ID NO: 497558 - RNA, 19 nt, Homo sapiens
  misc_RNA (1)...(19): siRNA sense strand
gugcaacagcagaaucaaa

SEQ ID NO: 497559 - RNA, 19 nt, Homo sapiens
  misc_RNA (1)...(19): siRNA sense strand
cauggaugggaccaaauua

SEQ ID NO: 497560 - RNA, 19 nt, Homo sapiens
  misc_RNA (1)...(19): siRNA sense strand
ugugacagaagcucuaauu

SEQ ID NO: 497561 - RNA, 19 nt, Homo sapiens
  misc_RNA (1)...(19): siRNA sense strand
gcugagaacuguauuggua

SEQ ID NO: 497562 - RNA, 19 nt, Homo sapiens
  misc_RNA (1)...(19): siRNA sense strand
ggacaaagcaaccugauuu

SEQ ID NO: 497563 - RNA, 19 nt, Homo sapiens
  misc_RNA (1)...(19): siRNA sense strand
gggaacagaugcugaauga

SEQ ID NO: 497564 - RNA, 19 nt, Homo sapiens
  misc_RNA (1)...(19): siRNA sense strand
uaagaaagguccacaugaa

SEQ ID NO: 497565 - RNA, 19 nt, Homo sapiens
  misc_RNA (1)...(19): siRNA sense strand
caaagaguguagcaauaua

SEQ ID NO: 497566 - RNA, 19 nt, Homo sapiens
  misc_RNA (1)...(19): siRNA sense strand
agacauaacuucggaauug

SEQ ID NO: 497567 - RNA, 19 nt, Homo sapiens
  misc_RNA (1)...(19): siRNA sense strand
gcaaauacauggacagcau

SEQ ID NO: 497568 - RNA, 19 nt, Homo sapiens
  misc_RNA (1)...(19): siRNA sense strand
cagaauaccuggagacuca

SEQ ID NO: 497569 - RNA, 19 nt, Homo sapiens
  misc_RNA (1)...(19): siRNA sense strand
gaaccuggcaccacacuaa

SEQ ID NO: 497570 - RNA, 19 nt, Homo sapiens
  misc_RNA (1)...(19): siRNA sense strand
gauagcacaugauacagaa

SEQ ID NO: 497571 - RNA, 19 nt, Homo sapiens
  misc_RNA (1)...(19): siRNA sense strand
aaagguggaucuaucuuaa

SEQ ID NO: 497572 - RNA, 19 nt, Homo sapiens
  misc_RNA (1)...(19): siRNA sense strand
guagcgagaugguaacuug

SEQ ID NO: 497573 - RNA, 19 nt, Homo sapiens
  misc_RNA (1)...(19): siRNA sense strand
gaagauacaauccaagaug

SEQ ID NO: 497574 - RNA, 19 nt, Homo sapiens
  misc_RNA (1)...(19): siRNA sense strand
uuauggagcuguaccuaua

SEQ ID NO: 497575 - RNA, 19 nt, Homo sapiens
  misc_RNA (1)...(19): siRNA sense strand
gaagggauaucgguaaugg

SEQ ID NO: 497576 - RNA, 19 nt, Homo sapiens
  misc_RNA (1)...(19): siRNA sense strand
ggacagcauugccaccuau

SEQ ID NO: 497577 - RNA, 19 nt, Homo sapiens
  misc_RNA (1)...(19): siRNA sense strand
gaacagaugcugaaugaac

SEQ ID NO: 497578 - RNA, 19 nt, Homo sapiens
  misc_RNA (1)...(19): siRNA sense strand
gucaaagaguguagcaaua

SEQ ID NO: 497579 - RNA, 19 nt, Homo sapiens
  misc_RNA (1)...(19): siRNA sense strand
ggauaucgguaaugguuau

SEQ ID NO: 497580 - RNA, 19 nt, Homo sapiens
  misc_RNA (1)...(19): siRNA sense strand
gauugaacuugaagggaua

SEQ ID NO: 497581 - RNA, 19 nt, Homo sapiens
  misc_RNA (1)...(19): siRNA sense strand
guucuaccaugaugaguuu

SEQ ID NO: 497582 - RNA, 19 nt, Homo sapiens
  misc_RNA (1)...(19): siRNA sense strand
ugauuuccauggaguguua

SEQ ID NO: 497583 - RNA, 19 nt, Homo sapiens
  misc_RNA (1)...(19): siRNA sense strand
guacaucaggacaaaguua

SEQ ID NO: 497584 - RNA, 19 nt, Homo sapiens
  misc_RNA (1)...(19): siRNA sense strand
caugaaggauguuauguca

SEQ ID NO: 497585 - RNA, 19 nt, Homo sapiens
  misc_RNA (1)...(19): siRNA sense strand
gaugggaugcuguacauuu

SEQ ID NO: 497586 - RNA, 19 nt, Homo sapiens
  misc_RNA (1)...(19): siRNA sense strand
gaaguuaaacguuggcaau

SEQ ID NO: 497587 - RNA, 19 nt, Homo sapiens
  misc_RNA (1)...(19): siRNA sense strand
ucagaaagaucggcugcua

SEQ ID NO: 497588 - RNA, 19 nt, Homo sapiens
  misc_RNA (1)...(19): siRNA sense strand
gggcagaucaggcuaaaug

SEQ ID NO: 497589 - RNA, 19 nt, Homo sapiens
  misc_RNA (1)...(19): siRNA sense strand
uacaggaugugcagccuua

SEQ ID NO: 497590 - RNA, 19 nt, Homo sapiens
  misc_RNA (1)...(19): siRNA sense strand
gcacaugauacagaaauaa

SEQ ID NO: 497591 - RNA, 19 nt, Homo sapiens
  misc_RNA (1)...(19): siRNA sense strand
guuaaacguuggcaaugaa

SEQ ID NO: 497592 - RNA, 19 nt, Homo sapiens
  misc_RNA (1)...(19): siRNA sense strand
gagccaguauuuauguuau

SEQ ID NO: 497593 - RNA, 19 nt, Homo sapiens
  misc_RNA (1)...(19): siRNA sense strand
gcaugugcccucucuauga

SEQ ID NO: 497594 - RNA, 19 nt, Homo sapiens
  misc_RNA (1)...(19): siRNA sense strand
uacgagaaauugucaaaga

SEQ ID NO: 497595 - RNA, 19 nt, Homo sapiens
  misc_RNA (1)...(19): siRNA sense strand
ggagccaguauuuauguua

SEQ ID NO: 497596 - RNA, 19 nt, Homo sapiens
  misc_RNA (1)...(19): siRNA sense strand
uuaagcaugccgagaauua

SEQ ID NO: 497597 - RNA, 19 nt, Homo sapiens
  misc_RNA (1)...(19): siRNA sense strand
cuauggagcuguauguguu

SEQ ID NO: 497598 - RNA, 19 nt, Homo sapiens
  misc_RNA (1)...(19): siRNA sense strand
gaaagguccacaugaagga

SEQ ID NO: 497599 - RNA, 19 nt, Homo sapiens
  misc_RNA (1)...(19): siRNA sense strand
uauaggagccaguauuuau

SEQ ID NO: 497600 - RNA, 19 nt, Homo sapiens
  misc_RNA (1)...(19): siRNA sense strand
acucuuagcucaggagaaa

SEQ ID NO: 497601 - RNA, 19 nt, Homo sapiens
  misc_RNA (1)...(19): siRNA sense strand
gaaauugucaaagagugua

SEQ ID NO: 497602 - RNA, 19 nt, Homo sapiens
  misc_RNA (1)...(19): siRNA sense strand
ggaucaacuuauaagauug

SEQ ID NO: 497603 - RNA, 19 nt, Homo sapiens
  misc_RNA (1)...(19): siRNA sense strand
gauguuaugucagcucugu

SEQ ID NO: 497604 - RNA, 19 nt, Homo sapiens
  misc_RNA (1)...(19): siRNA sense strand
cauggaguguuacgauauu

SEQ ID NO: 497605 - RNA, 19 nt, Homo sapiens
  misc_RNA (1)...(19): siRNA sense strand
ggauagcacaugauacaga

SEQ ID NO: 497606 - RNA, 19 nt, Homo sapiens
  misc_RNA (1)...(19): siRNA sense strand
gcagaucaggcuaaaugaa

SEQ ID NO: 497607 - RNA, 19 nt, Homo sapiens
  misc_RNA (1)...(19): siRNA sense strand
gaguugcuauggagcugua

SEQ ID NO: 497608 - RNA, 19 nt, Homo sapiens
  misc_RNA (1)...(19): siRNA sense strand
gcaguaauucgauggauag

SEQ ID NO: 497609 - RNA, 19 nt, Homo sapiens
  misc_RNA (1)...(19): siRNA sense strand
ucaaagaguguagcaauau

SEQ ID NO: 497610 - RNA, 19 nt, Homo sapiens
  misc_RNA (1)...(19): siRNA sense strand
gagaauuaaccauggaguu

SEQ ID NO: 497611 - RNA, 19 nt, Homo sapiens
  misc_RNA (1)...(19): siRNA sense strand
gcccguacaucaggacaaa

SEQ ID NO: 497612 - RNA, 19 nt, Homo sapiens
  misc_RNA (1)...(19): siRNA sense strand
caaggcuuauuccguauuc

SEQ ID NO: 497613 - RNA, 19 nt, Homo sapiens
  misc_RNA (1)...(19): siRNA sense strand
ggaguguuacgauauuuau

SEQ ID NO: 497614 - RNA, 19 nt, Homo sapiens
  misc_RNA (1)...(19): siRNA sense strand
gaacgaggcaagacauaac

SEQ ID NO: 497615 - RNA, 19 nt, Homo sapiens
  misc_RNA (1)...(19): siRNA sense strand
gaaccauuaguacgagaaa

SEQ ID NO: 497616 - RNA, 19 nt, Homo sapiens
  misc_RNA (1)...(19): siRNA sense strand
gauacaauccaagauguug

SEQ ID NO: 497617 - RNA, 19 nt, Homo sapiens
  misc_RNA (1)...(19): siRNA sense strand
gccaguauuuauguuauug

SEQ ID NO: 497618 - RNA, 19 nt, Homo sapiens
  misc_RNA (1)...(19): siRNA sense strand
ccuauaggagccaguauuu

SEQ ID NO: 497619 - RNA, 19 nt, Homo sapiens
  misc_RNA (1)...(19): siRNA sense strand
cagcagcacggaagaauuc

SEQ ID NO: 497620 - RNA, 19 nt, Homo sapiens
  misc_RNA (1)...(19): siRNA sense strand
gaugcuggccaacuucaaa

SEQ ID NO: 497621 - RNA, 19 nt, Homo sapiens
  misc_RNA (1)...(19): siRNA sense strand
cgauggauagcacaugaua

SEQ ID NO: 497622 - RNA, 19 nt, Homo sapiens
  misc_RNA (1)...(19): siRNA sense strand
gacauaacuucggaauugu

SEQ ID NO: 497623 - RNA, 19 nt, Homo sapiens
  misc_RNA (1)...(19): siRNA sense strand
cuacgugcgugaguuuaaa

SEQ ID NO: 497624 - RNA, 19 nt, Homo sapiens
  misc_RNA (1)...(19): siRNA sense strand
uauuggagaucuugauaca

SEQ ID NO: 497625 - RNA, 19 nt, Homo sapiens
  misc_RNA (1)...(19): siRNA sense strand
guuauuggagaucuugaua

SEQ ID NO: 497626 - RNA, 19 nt, Homo sapiens
  misc_RNA (1)...(19): siRNA sense strand
uugagucuguagaguguua

SEQ ID NO: 497627 - RNA, 19 nt, Homo sapiens
  misc_RNA (1)...(19): siRNA sense strand
aaaaggagcugauuuccau

SEQ ID NO: 497628 - RNA, 19 nt, Homo sapiens
  misc_RNA (1)...(19): siRNA sense strand
uagaugggaugcuguacau

SEQ ID NO: 497629 - RNA, 19 nt, Homo sapiens
  misc_RNA (1)...(19): siRNA sense strand
aagauacaauccaagaugu

SEQ ID NO: 497630 - RNA, 19 nt, Homo sapiens
  misc_RNA (1)...(19): siRNA sense strand
cgacuacgugcgugaguuu

SEQ ID NO: 497631 - RNA, 19 nt, Homo sapiens
  misc_RNA (1)...(19): siRNA sense strand
ggagaucuugauacaggua

SEQ ID NO: 497632 - RNA, 19 nt, Homo sapiens
  misc_RNA (1)...(19): siRNA sense strand
ucucucagcagaaggauuu

SEQ ID NO: 497633 - RNA, 19 nt, Homo sapiens
  misc_RNA (1)...(19): siRNA sense strand
gacccuaacaggcagcuuu

SEQ ID NO: 497634 - RNA, 19 nt, Homo sapiens
  misc_RNA (1)...(19): siRNA sense strand
uaucuuaacgaccagaauu

SEQ ID NO: 497635 - RNA, 19 nt, Homo sapiens
  misc_RNA (1)...(19): siRNA sense strand
agaaagaucggcugcuaug

SEQ ID NO: 497636 - RNA, 19 nt, Homo sapiens
  misc_RNA (1)...(19): siRNA sense strand
ggaauuguggagauagaug

SEQ ID NO: 497637 - RNA, 19 nt, Homo sapiens
  misc_RNA (1)...(19): siRNA sense strand
caggguagcgagaugguaa

SEQ ID NO: 497638 - RNA, 19 nt, Homo sapiens
  misc_RNA (1)...(19): siRNA sense strand
gcaaggcuuauuccguauu

SEQ ID NO: 497639 - RNA, 19 nt, Homo sapiens
  misc_RNA (1)...(19): siRNA sense strand
gaccuucgccguacaggau

SEQ ID NO: 497640 - RNA, 19 nt, Homo sapiens
  misc_RNA (1)...(19): siRNA sense strand
uucauuaccuugccacaga

SEQ ID NO: 497641 - RNA, 19 nt, Homo sapiens
  misc_RNA (1)...(19): siRNA sense strand
caggcuaaaugaagauaca

SEQ ID NO: 497642 - RNA, 19 nt, Homo sapiens
  misc_RNA (1)...(19): siRNA sense strand
uccauggaguguuacgaua

SEQ ID NO: 497643 - RNA, 19 nt, Homo sapiens
  misc_RNA (1)...(19): siRNA sense strand
gggauaucgguaaugguua

SEQ ID NO: 497644 - RNA, 19 nt, Homo sapiens
  misc_RNA (1)...(19): siRNA sense strand
ggaucgaacuggccccuuu

SEQ ID NO: 497645 - RNA, 19 nt, Homo sapiens
  misc_RNA (1)...(19): siRNA sense strand
caaauacauggacagcauu

SEQ ID NO: 497646 - RNA, 19 nt, Homo sapiens
  misc_RNA (1)...(19): siRNA sense strand
gcgagaugguaacuugcaa

SEQ ID NO: 497647 - RNA, 19 nt, Homo sapiens
  misc_RNA (1)...(19): siRNA sense strand
cuucggaauuguggagaua

SEQ ID NO: 497648 - RNA, 19 nt, Homo sapiens
  misc_RNA (1)...(19): siRNA sense strand
agcaguaauucgauggaua

SEQ ID NO: 497649 - RNA, 19 nt, Homo sapiens
  misc_RNA (1)...(19): siRNA sense strand
ugauacagguaccaauuac

SEQ ID NO: 497650 - RNA, 19 nt, Homo sapiens
  misc_RNA (1)...(19): siRNA sense strand
cuaccaugaugaguuuaaa

SEQ ID NO: 497651 - RNA, 19 nt, Homo sapiens
  misc_RNA (1)...(19): siRNA sense strand
aguccgaguucuaccauga

SEQ ID NO: 497652 - RNA, 19 nt, Homo sapiens
  misc_RNA (1)...(19): siRNA sense strand
gggaggagaggauggugaa

SEQ ID NO: 497653 - RNA, 19 nt, Homo sapiens
  misc_RNA (1)...(19): siRNA sense strand
cagcauugccaccuaugaa

SEQ ID NO: 497654 - RNA, 19 nt, Homo sapiens
  misc_RNA (1)...(19): siRNA sense strand
gcuacugacggaccuuaaa

SEQ ID NO: 497655 - RNA, 19 nt, Homo sapiens
  misc_RNA (1)...(19): siRNA sense strand
uaagcaugccgagaauuaa

SEQ ID NO: 497656 - RNA, 19 nt, Homo sapiens
  misc_RNA (1)...(19): siRNA sense strand
agaucaggcuaaaugaaga

SEQ ID NO: 497657 - RNA, 19 nt, Homo sapiens
  misc_RNA (1)...(19): siRNA sense strand
uugauacagguaccaauua

SEQ ID NO: 497658 - RNA, 19 nt, Homo sapiens
  misc_RNA (1)...(19): siRNA sense strand
gcuaaaugaagauacaauc

SEQ ID NO: 497659 - RNA, 19 nt, Homo sapiens
  misc_RNA (1)...(19): siRNA sense strand
caagacauaacuucggaau

SEQ ID NO: 497660 - RNA, 19 nt, Homo sapiens
  misc_RNA (1)...(19): siRNA sense strand
ugaacgaggcaagacauaa

SEQ ID NO: 497661 - RNA, 19 nt, Homo sapiens
  misc_RNA (1)...(19): siRNA sense strand
ggccaucgccuacucauug

SEQ ID NO: 497662 - RNA, 19 nt, Homo sapiens
  misc_RNA (1)...(19): siRNA sense strand
ucgccaaccucaucuacuu

SEQ ID NO: 497663 - RNA, 19 nt, Homo sapiens
  misc_RNA (1)...(19): siRNA sense strand
ccucaucuacuuccucaug

SEQ ID NO: 497664 - RNA, 19 nt, Homo sapiens
  misc_RNA (1)...(19): siRNA sense strand
gcccaucuacagccucuau

SEQ ID NO: 497665 - RNA, 19 nt, Homo sapiens
  misc_RNA (1)...(19): siRNA sense strand
cagccugcuuugccucaug

SEQ ID NO: 497666 - RNA, 19 nt, Homo sapiens
  misc_RNA (1)...(19): siRNA sense strand
caacagcagcacccucaac

SEQ ID NO: 497667 - RNA, 19 nt, Homo sapiens
  misc_RNA (1)...(19): siRNA sense strand
ggccaucgccuacucauug

SEQ ID NO: 497668 - RNA, 19 nt, Homo sapiens
  misc_RNA (1)...(19): siRNA sense strand
ucgccaaccucaucuacuu

SEQ ID NO: 497669 - RNA, 19 nt, Homo sapiens
  misc_RNA (1)...(19): siRNA sense strand
ccucaucuacuuccucaug

SEQ ID NO: 497670 - RNA, 19 nt, Homo sapiens
  misc_RNA (1)...(19): siRNA sense strand
gcccaucuacagccucuau

SEQ ID NO: 497671 - RNA, 19 nt, Homo sapiens
  misc_RNA (1)...(19): siRNA sense strand
cagccugcuuugccucaug

SEQ ID NO: 497672 - RNA, 19 nt, Homo sapiens
  misc_RNA (1)...(19): siRNA sense strand
caacagcagcacccucaac

SEQ ID NO: 497673 - RNA, 19 nt, Homo sapiens
  misc_RNA (1)...(19): siRNA sense strand
gaacuacugguuugacaua

SEQ ID NO: 497674 - RNA, 19 nt, Homo sapiens
  misc_RNA (1)...(19): siRNA sense strand
gcaaauacagcgagauguu

SEQ ID NO: 497675 - RNA, 19 nt, Homo sapiens
  misc_RNA (1)...(19): siRNA sense strand
cagcuucaccuccauauuu

SEQ ID NO: 497676 - RNA, 19 nt, Homo sapiens
  misc_RNA (1)...(19): siRNA sense strand
gcacuggccuggcauucau

SEQ ID NO: 497677 - RNA, 19 nt, Homo sapiens
  misc_RNA (1)...(19): siRNA sense strand
gcugggaacuacugguuug

SEQ ID NO: 497678 - RNA, 19 nt, Homo sapiens
  misc_RNA (1)...(19): siRNA sense strand
gggcugaggagauuugaaa

SEQ ID NO: 497679 - RNA, 19 nt, Homo sapiens
  misc_RNA (1)...(19): siRNA sense strand
ggucggugcucuacuucuu

SEQ ID NO: 497680 - RNA, 19 nt, Homo sapiens
  misc_RNA (1)...(19): siRNA sense strand
cuacugguuugacauauuc

SEQ ID NO: 497681 - RNA, 19 nt, Homo sapiens
  misc_RNA (1)...(19): siRNA sense strand
ccacacaguacuucuggua

SEQ ID NO: 497682 - RNA, 19 nt, Homo sapiens
  misc_RNA (1)...(19): siRNA sense strand
gaugugggcuggcguaagc

SEQ ID NO: 497683 - RNA, 19 nt, Homo sapiens
  misc_RNA (1)...(19): siRNA sense strand
gauguucccgcaaaucaaa

SEQ ID NO: 497684 - RNA, 19 nt, Homo sapiens
  misc_RNA (1)...(19): siRNA sense strand
acaaugagccauccaacaa

SEQ ID NO: 497685 - RNA, 19 nt, Homo sapiens
  misc_RNA (1)...(19): siRNA sense strand
gagauguucccgcaaauca

SEQ ID NO: 497686 - RNA, 19 nt, Homo sapiens
  misc_RNA (1)...(19): siRNA sense strand
ugaggagauuugaaaguga

SEQ ID NO: 497687 - RNA, 19 nt, Homo sapiens
  misc_RNA (1)...(19): siRNA sense strand
ggucuggugugccuuguca

SEQ ID NO: 497688 - RNA, 19 nt, Homo sapiens
  misc_RNA (1)...(19): siRNA sense strand
cagaucuucuucucacuug

SEQ ID NO: 497689 - RNA, 19 nt, Homo sapiens
  misc_RNA (1)...(19): siRNA sense strand
caacagcuucaccuccaua

SEQ ID NO: 497690 - RNA, 19 nt, Homo sapiens
  misc_RNA (1)...(19): siRNA sense strand
cuacacagaggccauuaaa

SEQ ID NO: 497691 - RNA, 19 nt, Homo sapiens
  misc_RNA (1)...(19): siRNA sense strand
gauggaggcugggaacuac

SEQ ID NO: 497692 - RNA, 19 nt, Homo sapiens
  misc_RNA (1)...(19): siRNA sense strand
gaaugccgcucuuguaccu

SEQ ID NO: 497693 - RNA, 19 nt, Homo sapiens
  misc_RNA (1)...(19): siRNA sense strand
gauuugaaagugaccuuaa

SEQ ID NO: 497694 - RNA, 19 nt, Homo sapiens
  misc_RNA (1)...(19): siRNA sense strand
gggaacuacugguuugaca

SEQ ID NO: 497695 - RNA, 19 nt, Homo sapiens
  misc_RNA (1)...(19): siRNA sense strand
ggaaaacccucaauaucuc

SEQ ID NO: 497696 - RNA, 19 nt, Homo sapiens
  misc_RNA (1)...(19): siRNA sense strand
ccagcgugguggucucuuu

SEQ ID NO: 497697 - RNA, 19 nt, Homo sapiens
  misc_RNA (1)...(19): siRNA sense strand
cccaaggccuggaucaaug

SEQ ID NO: 497698 - RNA, 19 nt, Homo sapiens
  misc_RNA (1)...(19): siRNA sense strand
uaugaaaacugcuugaaga

SEQ ID NO: 497699 - RNA, 19 nt, Homo sapiens
  misc_RNA (1)...(19): siRNA sense strand
uggccuggcugguggugua

SEQ ID NO: 497700 - RNA, 19 nt, Homo sapiens
  misc_RNA (1)...(19): siRNA sense strand
uaagcccacugcugauugu

SEQ ID NO: 497701 - RNA, 19 nt, Homo sapiens
  misc_RNA (1)...(19): siRNA sense strand
gaccaacacuuuugaccuu

SEQ ID NO: 497702 - RNA, 19 nt, Homo sapiens
  misc_RNA (1)...(19): siRNA sense strand
cugaggagauuugaaagug

SEQ ID NO: 497703 - RNA, 19 nt, Homo sapiens
  misc_RNA (1)...(19): siRNA sense strand
guaagcccacugcugauug

SEQ ID NO: 497704 - RNA, 19 nt, Homo sapiens
  misc_RNA (1)...(19): siRNA sense strand
gaagggcuaccucgcaucu

SEQ ID NO: 497705 - RNA, 19 nt, Homo sapiens
  misc_RNA (1)...(19): siRNA sense strand
gcgagauguucccgcaaau

SEQ ID NO: 497706 - RNA, 19 nt, Homo sapiens
  misc_RNA (1)...(19): siRNA sense strand
caaauacagcgagauguuc

SEQ ID NO: 497707 - RNA, 19 nt, Homo sapiens
  misc_RNA (1)...(19): siRNA sense strand
gcaugguguucacgaugga

SEQ ID NO: 497708 - RNA, 19 nt, Homo sapiens
  misc_RNA (1)...(19): siRNA sense strand
ccacccagaucuucuucuc

SEQ ID NO: 497709 - RNA, 19 nt, Homo sapiens
  misc_RNA (1)...(19): siRNA sense strand
ugagucugcugcugaccaa

SEQ ID NO: 497710 - RNA, 19 nt, Homo sapiens
  misc_RNA (1)...(19): siRNA sense strand
uguacgggcugaggagauu

SEQ ID NO: 497711 - RNA, 19 nt, Homo sapiens
  misc_RNA (1)...(19): siRNA sense strand
ggugugccuugucaacugu

SEQ ID NO: 497712 - RNA, 19 nt, Homo sapiens
  misc_RNA (1)...(19): siRNA sense strand
gcaucugccuacccaagca

SEQ ID NO: 497713 - RNA, 19 nt, Homo sapiens
  misc_RNA (1)...(19): siRNA sense strand
gggaaugccgcucuuguac

SEQ ID NO: 497714 - RNA, 19 nt, Homo sapiens
  misc_RNA (1)...(19): siRNA sense strand
acuacugguuugacauauu

SEQ ID NO: 497715 - RNA, 19 nt, Homo sapiens
  misc_RNA (1)...(19): siRNA sense strand
cuccauauuugccagcauu

SEQ ID NO: 497716 - RNA, 19 nt, Homo sapiens
  misc_RNA (1)...(19): siRNA sense strand
gagggaaugccgcucuugu

SEQ ID NO: 497717 - RNA, 19 nt, Homo sapiens
  misc_RNA (1)...(19): siRNA sense strand
cgauggaggcugggaacua

SEQ ID NO: 497718 - RNA, 19 nt, Homo sapiens
  misc_RNA (1)...(19): siRNA sense strand
uguggucggugcucuacuu

SEQ ID NO: 497719 - RNA, 19 nt, Homo sapiens
  misc_RNA (1)...(19): siRNA sense strand
guacggcggagguaguuuc

SEQ ID NO: 497720 - RNA, 19 nt, Homo sapiens
  misc_RNA (1)...(19): siRNA sense strand
guacuacaacgucaucaac

SEQ ID NO: 497721 - RNA, 19 nt, Homo sapiens
  misc_RNA (1)...(19): siRNA sense strand
guucagcgucgccucaaga

SEQ ID NO: 497722 - RNA, 19 nt, Homo sapiens
  misc_RNA (1)...(19): siRNA sense strand
aagcaaauacagcgagaug

SEQ ID NO: 497723 - RNA, 19 nt, Homo sapiens
  misc_RNA (1)...(19): siRNA sense strand
ugacauauucaacgacuac

SEQ ID NO: 497724 - RNA, 19 nt, Homo sapiens
  misc_RNA (1)...(19): siRNA sense strand
ugacagacagcaagaucau

SEQ ID NO: 497725 - RNA, 19 nt, Homo sapiens
  misc_RNA (1)...(19): siRNA sense strand
caaugcagccacccagauc

SEQ ID NO: 497726 - RNA, 19 nt, Homo sapiens
  misc_RNA (1)...(19): siRNA sense strand
gcucgugaccaaagauuac

SEQ ID NO: 497727 - RNA, 19 nt, Homo sapiens
  misc_RNA (1)...(19): siRNA sense strand
gcugaggagauuugaaagu

SEQ ID NO: 497728 - RNA, 19 nt, Homo sapiens
  misc_RNA (1)...(19): siRNA sense strand
ccagaagcacgccaucauc

SEQ ID NO: 497729 - RNA, 19 nt, Homo sapiens
  misc_RNA (1)...(19): siRNA sense strand
ccagaucuucuucucacuu

SEQ ID NO: 497730 - RNA, 19 nt, Homo sapiens
  misc_RNA (1)...(19): siRNA sense strand
aggccaccuucaauuauga

SEQ ID NO: 497731 - RNA, 19 nt, Homo sapiens
  misc_RNA (1)...(19): siRNA sense strand
cuugucaacugugccauug

SEQ ID NO: 497732 - RNA, 19 nt, Homo sapiens
  misc_RNA (1)...(19): siRNA sense strand
gcccaaggaggccaucuca

SEQ ID NO: 497733 - RNA, 19 nt, Homo sapiens
  misc_RNA (1)...(19): siRNA sense strand
agcgagauguucccgcaaa

SEQ ID NO: 497734 - RNA, 19 nt, Homo sapiens
  misc_RNA (1)...(19): siRNA sense strand
ucugcccacugaaugguaa

SEQ ID NO: 497735 - RNA, 19 nt, Homo sapiens
  misc_RNA (1)...(19): siRNA sense strand
ccuaugcacuggcugucau

SEQ ID NO: 497736 - RNA, 19 nt, Homo sapiens
  misc_RNA (1)...(19): siRNA sense strand
gccagcucgugaccaaaga

SEQ ID NO: 497737 - RNA, 19 nt, Homo sapiens
  misc_RNA (1)...(19): siRNA sense strand
caucagcccguaccucagu

SEQ ID NO: 497738 - RNA, 19 nt, Homo sapiens
  misc_RNA (1)...(19): siRNA sense strand
cccuacaucaucaugcuua

SEQ ID NO: 497739 - RNA, 19 nt, Homo sapiens
  misc_RNA (1)...(19): siRNA sense strand
agggaaugccgcucuugua

SEQ ID NO: 497740 - RNA, 19 nt, Homo sapiens
  misc_RNA (1)...(19): siRNA sense strand
ggaacuacugguuugacau

SEQ ID NO: 497741 - RNA, 19 nt, Homo sapiens
  misc_RNA (1)...(19): siRNA sense strand
gcgugguggucucuuucuu

SEQ ID NO: 497742 - RNA, 19 nt, Homo sapiens
  misc_RNA (1)...(19): siRNA sense strand
ggagggaaugccgcucuug

SEQ ID NO: 497743 - RNA, 19 nt, Homo sapiens
  misc_RNA (1)...(19): siRNA sense strand
gccagaagcacgccaucau

SEQ ID NO: 497744 - RNA, 19 nt, Homo sapiens
  misc_RNA (1)...(19): siRNA sense strand
gauguacggcggagguagu

SEQ ID NO: 497745 - RNA, 19 nt, Homo sapiens
  misc_RNA (1)...(19): siRNA sense strand
ucacggggacccugaagua

SEQ ID NO: 497746 - RNA, 19 nt, Homo sapiens
  misc_RNA (1)...(19): siRNA sense strand
gaacuacugguuugacaua

SEQ ID NO: 497747 - RNA, 19 nt, Homo sapiens
  misc_RNA (1)...(19): siRNA sense strand
gcaaauacagcgagauguu

SEQ ID NO: 497748 - RNA, 19 nt, Homo sapiens
  misc_RNA (1)...(19): siRNA sense strand
cagcuucaccuccauauuu

SEQ ID NO: 497749 - RNA, 19 nt, Homo sapiens
  misc_RNA (1)...(19): siRNA sense strand
gcacuggccuggcauucau

SEQ ID NO: 497750 - RNA, 19 nt, Homo sapiens
  misc_RNA (1)...(19): siRNA sense strand
gcugggaacuacugguuug

SEQ ID NO: 497751 - RNA, 19 nt, Homo sapiens
  misc_RNA (1)...(19): siRNA sense strand
gggcugaggagauuugaaa

SEQ ID NO: 497752 - RNA, 19 nt, Homo sapiens
  misc_RNA (1)...(19): siRNA sense strand
ggucggugcucuacuucuu

SEQ ID NO: 497753 - RNA, 19 nt, Homo sapiens
  misc_RNA (1)...(19): siRNA sense strand
cuacugguuugacauauuc

SEQ ID NO: 497754 - RNA, 19 nt, Homo sapiens
  misc_RNA (1)...(19): siRNA sense strand
ccacacaguacuucuggua

SEQ ID NO: 497755 - RNA, 19 nt, Homo sapiens
  misc_RNA (1)...(19): siRNA sense strand
gaugugggcuggcguaagc

SEQ ID NO: 497756 - RNA, 19 nt, Homo sapiens
  misc_RNA (1)...(19): siRNA sense strand
gauguucccgcaaaucaaa

SEQ ID NO: 497757 - RNA, 19 nt, Homo sapiens
  misc_RNA (1)...(19): siRNA sense strand
acaaugagccauccaacaa

SEQ ID NO: 497758 - RNA, 19 nt, Homo sapiens
  misc_RNA (1)...(19): siRNA sense strand
gagauguucccgcaaauca

SEQ ID NO: 497759 - RNA, 19 nt, Homo sapiens
  misc_RNA (1)...(19): siRNA sense strand
ugaggagauuugaaaguga

SEQ ID NO: 497760 - RNA, 19 nt, Homo sapiens
  misc_RNA (1)...(19): siRNA sense strand
ggucuggugugccuuguca

SEQ ID NO: 497761 - RNA, 19 nt, Homo sapiens
  misc_RNA (1)...(19): siRNA sense strand
cagaucuucuucucacuug

SEQ ID NO: 497762 - RNA, 19 nt, Homo sapiens
  misc_RNA (1)...(19): siRNA sense strand
caacagcuucaccuccaua

SEQ ID NO: 497763 - RNA, 19 nt, Homo sapiens
  misc_RNA (1)...(19): siRNA sense strand
cuacacagaggccauuaaa

SEQ ID NO: 497764 - RNA, 19 nt, Homo sapiens
  misc_RNA (1)...(19): siRNA sense strand
gauggaggcugggaacuac

SEQ ID NO: 497765 - RNA, 19 nt, Homo sapiens
  misc_RNA (1)...(19): siRNA sense strand
gaaugccgcucuuguaccu

SEQ ID NO: 497766 - RNA, 19 nt, Homo sapiens
  misc_RNA (1)...(19): siRNA sense strand
gauuugaaagugaccuuaa

SEQ ID NO: 497767 - RNA, 19 nt, Homo sapiens
  misc_RNA (1)...(19): siRNA sense strand
gggaacuacugguuugaca

SEQ ID NO: 497768 - RNA, 19 nt, Homo sapiens
  misc_RNA (1)...(19): siRNA sense strand
ggaaaacccucaauaucuc

SEQ ID NO: 497769 - RNA, 19 nt, Homo sapiens
  misc_RNA (1)...(19): siRNA sense strand
ccagcgugguggucucuuu

SEQ ID NO: 497770 - RNA, 19 nt, Homo sapiens
  misc_RNA (1)...(19): siRNA sense strand
cccaaggccuggaucaaug

SEQ ID NO: 497771 - RNA, 19 nt, Homo sapiens
  misc_RNA (1)...(19): siRNA sense strand
uaugaaaacugcuugaaga

SEQ ID NO: 497772 - RNA, 19 nt, Homo sapiens
  misc_RNA (1)...(19): siRNA sense strand
uggccuggcugguggugua

SEQ ID NO: 497773 - RNA, 19 nt, Homo sapiens
  misc_RNA (1)...(19): siRNA sense strand
uaagcccacugcugauugu

SEQ ID NO: 497774 - RNA, 19 nt, Homo sapiens
  misc_RNA (1)...(19): siRNA sense strand
gaccaacacuuuugaccuu

SEQ ID NO: 497775 - RNA, 19 nt, Homo sapiens
  misc_RNA (1)...(19): siRNA sense strand
cugaggagauuugaaagug

SEQ ID NO: 497776 - RNA, 19 nt, Homo sapiens
  misc_RNA (1)...(19): siRNA sense strand
guaagcccacugcugauug

SEQ ID NO: 497777 - RNA, 19 nt, Homo sapiens
  misc_RNA (1)...(19): siRNA sense strand
gaagggcuaccucgcaucu

SEQ ID NO: 497778 - RNA, 19 nt, Homo sapiens
  misc_RNA (1)...(19): siRNA sense strand
gcgagauguucccgcaaau

SEQ ID NO: 497779 - RNA, 19 nt, Homo sapiens
  misc_RNA (1)...(19): siRNA sense strand
caaauacagcgagauguuc

SEQ ID NO: 497780 - RNA, 19 nt, Homo sapiens
  misc_RNA (1)...(19): siRNA sense strand
gcaugguguucacgaugga

SEQ ID NO: 497781 - RNA, 19 nt, Homo sapiens
  misc_RNA (1)...(19): siRNA sense strand
ccacccagaucuucuucuc

SEQ ID NO: 497782 - RNA, 19 nt, Homo sapiens
  misc_RNA (1)...(19): siRNA sense strand
ugagucugcugcugaccaa

SEQ ID NO: 497783 - RNA, 19 nt, Homo sapiens
  misc_RNA (1)...(19): siRNA sense strand
uguacgggcugaggagauu

SEQ ID NO: 497784 - RNA, 19 nt, Homo sapiens
  misc_RNA (1)...(19): siRNA sense strand
ggugugccuugucaacugu

SEQ ID NO: 497785 - RNA, 19 nt, Homo sapiens
  misc_RNA (1)...(19): siRNA sense strand
gcaucugccuacccaagca

SEQ ID NO: 497786 - RNA, 19 nt, Homo sapiens
  misc_RNA (1)...(19): siRNA sense strand
gggaaugccgcucuuguac

SEQ ID NO: 497787 - RNA, 19 nt, Homo sapiens
  misc_RNA (1)...(19): siRNA sense strand
acuacugguuugacauauu

SEQ ID NO: 497788 - RNA, 19 nt, Homo sapiens
  misc_RNA (1)...(19): siRNA sense strand
cuccauauuugccagcauu

SEQ ID NO: 497789 - RNA, 19 nt, Homo sapiens
  misc_RNA (1)...(19): siRNA sense strand
gagggaaugccgcucuugu

SEQ ID NO: 497790 - RNA, 19 nt, Homo sapiens
  misc_RNA (1)...(19): siRNA sense strand
cgauggaggcugggaacua

SEQ ID NO: 497791 - RNA, 19 nt, Homo sapiens
  misc_RNA (1)...(19): siRNA sense strand
uguggucggugcucuacuu

SEQ ID NO: 497792 - RNA, 19 nt, Homo sapiens
  misc_RNA (1)...(19): siRNA sense strand
guacggcggagguaguuuc

SEQ ID NO: 497793 - RNA, 19 nt, Homo sapiens
  misc_RNA (1)...(19): siRNA sense strand
guacuacaacgucaucaac

SEQ ID NO: 497794 - RNA, 19 nt, Homo sapiens
  misc_RNA (1)...(19): siRNA sense strand
guucagcgucgccucaaga

SEQ ID NO: 497795 - RNA, 19 nt, Homo sapiens
  misc_RNA (1)...(19): siRNA sense strand
aagcaaauacagcgagaug

SEQ ID NO: 497796 - RNA, 19 nt, Homo sapiens
  misc_RNA (1)...(19): siRNA sense strand
ugacauauucaacgacuac

SEQ ID NO: 497797 - RNA, 19 nt, Homo sapiens
  misc_RNA (1)...(19): siRNA sense strand
ugacagacagcaagaucau

SEQ ID NO: 497798 - RNA, 19 nt, Homo sapiens
  misc_RNA (1)...(19): siRNA sense strand
caaugcagccacccagauc

SEQ ID NO: 497799 - RNA, 19 nt, Homo sapiens
  misc_RNA (1)...(19): siRNA sense strand
gcucgugaccaaagauuac

SEQ ID NO: 497800 - RNA, 19 nt, Homo sapiens
  misc_RNA (1)...(19): siRNA sense strand
gcugaggagauuugaaagu

SEQ ID NO: 497801 - RNA, 19 nt, Homo sapiens
  misc_RNA (1)...(19): siRNA sense strand
ccagaagcacgccaucauc

SEQ ID NO: 497802 - RNA, 19 nt, Homo sapiens
  misc_RNA (1)...(19): siRNA sense strand
ccagaucuucuucucacuu

SEQ ID NO: 497803 - RNA, 19 nt, Homo sapiens
  misc_RNA (1)...(19): siRNA sense strand
aggccaccuucaauuauga

SEQ ID NO: 497804 - RNA, 19 nt, Homo sapiens
  misc_RNA (1)...(19): siRNA sense strand
cuugucaacugugccauug

SEQ ID NO: 497805 - RNA, 19 nt, Homo sapiens
  misc_RNA (1)...(19): siRNA sense strand
gcccaaggaggccaucuca

SEQ ID NO: 497806 - RNA, 19 nt, Homo sapiens
  misc_RNA (1)...(19): siRNA sense strand
agcgagauguucccgcaaa

SEQ ID NO: 497807 - RNA, 19 nt, Homo sapiens
  misc_RNA (1)...(19): siRNA sense strand
ucugcccacugaaugguaa

SEQ ID NO: 497808 - RNA, 19 nt, Homo sapiens
  misc_RNA (1)...(19): siRNA sense strand
ccuaugcacuggcugucau

SEQ ID NO: 497809 - RNA, 19 nt, Homo sapiens
  misc_RNA (1)...(19): siRNA sense strand
gccagcucgugaccaaaga

SEQ ID NO: 497810 - RNA, 19 nt, Homo sapiens
  misc_RNA (1)...(19): siRNA sense strand
caucagcccguaccucagu

SEQ ID NO: 497811 - RNA, 19 nt, Homo sapiens
  misc_RNA (1)...(19): siRNA sense strand
cccuacaucaucaugcuua

SEQ ID NO: 497812 - RNA, 19 nt, Homo sapiens
  misc_RNA (1)...(19): siRNA sense strand
agggaaugccgcucuugua

SEQ ID NO: 497813 - RNA, 19 nt, Homo sapiens
  misc_RNA (1)...(19): siRNA sense strand
ggaacuacugguuugacau

SEQ ID NO: 497814 - RNA, 19 nt, Homo sapiens
  misc_RNA (1)...(19): siRNA sense strand
gcgugguggucucuuucuu

SEQ ID NO: 497815 - RNA, 19 nt, Homo sapiens
  misc_RNA (1)...(19): siRNA sense strand
ggagggaaugccgcucuug

SEQ ID NO: 497816 - RNA, 19 nt, Homo sapiens
  misc_RNA (1)...(19): siRNA sense strand
gccagaagcacgccaucau

SEQ ID NO: 497817 - RNA, 19 nt, Homo sapiens
  misc_RNA (1)...(19): siRNA sense strand
gauguacggcggagguagu

SEQ ID NO: 497818 - RNA, 19 nt, Homo sapiens
  misc_RNA (1)...(19): siRNA sense strand
ucacggggacccugaagua

SEQ ID NO: 497819 - RNA, 19 nt, Homo sapiens
  misc_RNA (1)...(19): siRNA sense strand
gcagaaagaugcccucauu

SEQ ID NO: 497820 - RNA, 19 nt, Homo sapiens
  misc_RNA (1)...(19): siRNA sense strand
caacagcucuugaguuaug

SEQ ID NO: 497821 - RNA, 19 nt, Homo sapiens
  misc_RNA (1)...(19): siRNA sense strand
ccgcagagcugagaaguua

SEQ ID NO: 497822 - RNA, 19 nt, Homo sapiens
  misc_RNA (1)...(19): siRNA sense strand
gcucuugaguuaugaguua

SEQ ID NO: 497823 - RNA, 19 nt, Homo sapiens
  misc_RNA (1)...(19): siRNA sense strand
gaagagcacaguaaacuaa

SEQ ID NO: 497824 - RNA, 19 nt, Homo sapiens
  misc_RNA (1)...(19): siRNA sense strand
aacaacagcucuugaguua

SEQ ID NO: 497825 - RNA, 19 nt, Homo sapiens
  misc_RNA (1)...(19): siRNA sense strand
ggacuucgcuacugugaug

SEQ ID NO: 497826 - RNA, 19 nt, Homo sapiens
  misc_RNA (1)...(19): siRNA sense strand
ccaaagaguucccaagaga

SEQ ID NO: 497827 - RNA, 19 nt, Homo sapiens
  misc_RNA (1)...(19): siRNA sense strand
ucagagagcuggagucaau

SEQ ID NO: 497828 - RNA, 19 nt, Homo sapiens
  misc_RNA (1)...(19): siRNA sense strand
gaucaacauugucagcuuu

SEQ ID NO: 497829 - RNA, 19 nt, Homo sapiens
  misc_RNA (1)...(19): siRNA sense strand
gaagaucuacgaccuauuc

SEQ ID NO: 497830 - RNA, 19 nt, Homo sapiens
  misc_RNA (1)...(19): siRNA sense strand
gaccaaagaccucaugauu

SEQ ID NO: 497831 - RNA, 19 nt, Homo sapiens
  misc_RNA (1)...(19): siRNA sense strand
ggaacucauugcaguguuu

SEQ ID NO: 497832 - RNA, 19 nt, Homo sapiens
  misc_RNA (1)...(19): siRNA sense strand
gggcacagcugaugacuac

SEQ ID NO: 497833 - RNA, 19 nt, Homo sapiens
  misc_RNA (1)...(19): siRNA sense strand
gaaagaaggaagugauaug

SEQ ID NO: 497834 - RNA, 19 nt, Homo sapiens
  misc_RNA (1)...(19): siRNA sense strand
gagaaagaaggaagugaua

SEQ ID NO: 497835 - RNA, 19 nt, Homo sapiens
  misc_RNA (1)...(19): siRNA sense strand
caaagcagcagaagaucua

SEQ ID NO: 497836 - RNA, 19 nt, Homo sapiens
  misc_RNA (1)...(19): siRNA sense strand
cagaagauaugaugucaag

SEQ ID NO: 497837 - RNA, 19 nt, Homo sapiens
  misc_RNA (1)...(19): siRNA sense strand
ccaaggaaaugaccaccaa

SEQ ID NO: 497838 - RNA, 19 nt, Homo sapiens
  misc_RNA (1)...(19): siRNA sense strand
ccaaagaccucaugauucc

SEQ ID NO: 497839 - RNA, 19 nt, Homo sapiens
  misc_RNA (1)...(19): siRNA sense strand
gaaguggagcuuucucuug

SEQ ID NO: 497840 - RNA, 19 nt, Homo sapiens
  misc_RNA (1)...(19): siRNA sense strand
ccagaaguccuuugagaaa

SEQ ID NO: 497841 - RNA, 19 nt, Homo sapiens
  misc_RNA (1)...(19): siRNA sense strand
ucaggaacaucuggaagua

SEQ ID NO: 497842 - RNA, 19 nt, Homo sapiens
  misc_RNA (1)...(19): siRNA sense strand
cucaguagcucaucuaaug

SEQ ID NO: 497843 - RNA, 19 nt, Homo sapiens
  misc_RNA (1)...(19): siRNA sense strand
ggaagagcacaguaaacua

SEQ ID NO: 497844 - RNA, 19 nt, Homo sapiens
  misc_RNA (1)...(19): siRNA sense strand
caagagaagauuaaaguuc

SEQ ID NO: 497845 - RNA, 19 nt, Homo sapiens
  misc_RNA (1)...(19): siRNA sense strand
cuaaacagcagcagaaaga

SEQ ID NO: 497846 - RNA, 19 nt, Homo sapiens
  misc_RNA (1)...(19): siRNA sense strand
ccaagagggugauccuguu

SEQ ID NO: 497847 - RNA, 19 nt, Homo sapiens
  misc_RNA (1)...(19): siRNA sense strand
gcucgugucuaaucugaug

SEQ ID NO: 497848 - RNA, 19 nt, Homo sapiens
  misc_RNA (1)...(19): siRNA sense strand
gcuuugaccuucuuagcaa

SEQ ID NO: 497849 - RNA, 19 nt, Homo sapiens
  misc_RNA (1)...(19): siRNA sense strand
ggagacacccuggaugaaa

SEQ ID NO: 497850 - RNA, 19 nt, Homo sapiens
  misc_RNA (1)...(19): siRNA sense strand
gaacagcaucagaggacua

SEQ ID NO: 497851 - RNA, 19 nt, Homo sapiens
  misc_RNA (1)...(19): siRNA sense strand
ggaagcagcagaguccuuu

SEQ ID NO: 497852 - RNA, 19 nt, Homo sapiens
  misc_RNA (1)...(19): siRNA sense strand
gaacucauugcaguguuua

SEQ ID NO: 497853 - RNA, 19 nt, Homo sapiens
  misc_RNA (1)...(19): siRNA sense strand
cugauuaccucuacaagga

SEQ ID NO: 497854 - RNA, 19 nt, Homo sapiens
  misc_RNA (1)...(19): siRNA sense strand
gguguuugcugagcuguuu

SEQ ID NO: 497855 - RNA, 19 nt, Homo sapiens
  misc_RNA (1)...(19): siRNA sense strand
ucccaucugucauugaaua

SEQ ID NO: 497856 - RNA, 19 nt, Homo sapiens
  misc_RNA (1)...(19): siRNA sense strand
gcagagcugagaaguuauu

SEQ ID NO: 497857 - RNA, 19 nt, Homo sapiens
  misc_RNA (1)...(19): siRNA sense strand
cagaagaucuacgaccuau

SEQ ID NO: 497858 - RNA, 19 nt, Homo sapiens
  misc_RNA (1)...(19): siRNA sense strand
gcaaagggcacagcugaug

SEQ ID NO: 497859 - RNA, 19 nt, Homo sapiens
  misc_RNA (1)...(19): siRNA sense strand
aaacuaaacagcagcagaa

SEQ ID NO: 497860 - RNA, 19 nt, Homo sapiens
  misc_RNA (1)...(19): siRNA sense strand
gaagauaugaugucaagac

SEQ ID NO: 497861 - RNA, 19 nt, Homo sapiens
  misc_RNA (1)...(19): siRNA sense strand
gagcacaguaaacuaauug

SEQ ID NO: 497862 - RNA, 19 nt, Homo sapiens
  misc_RNA (1)...(19): siRNA sense strand
cagcaugaaugacuauagu

SEQ ID NO: 497863 - RNA, 19 nt, Homo sapiens
  misc_RNA (1)...(19): siRNA sense strand
gagacacccuggaugaaag

SEQ ID NO: 497864 - RNA, 19 nt, Homo sapiens
  misc_RNA (1)...(19): siRNA sense strand
caagagacaccagcucauu

SEQ ID NO: 497865 - RNA, 19 nt, Homo sapiens
  misc_RNA (1)...(19): siRNA sense strand
gcagaagaucuacgaccua

SEQ ID NO: 497866 - RNA, 19 nt, Homo sapiens
  misc_RNA (1)...(19): siRNA sense strand
gaaagaugcccucauucuc

SEQ ID NO: 497867 - RNA, 19 nt, Homo sapiens
  misc_RNA (1)...(19): siRNA sense strand
aaacaacagcucuugaguu

SEQ ID NO: 497868 - RNA, 19 nt, Homo sapiens
  misc_RNA (1)...(19): siRNA sense strand
gcugcucgcugacgacaug

SEQ ID NO: 497869 - RNA, 19 nt, Homo sapiens
  misc_RNA (1)...(19): siRNA sense strand
aaggaagacuccagcagaa

SEQ ID NO: 497870 - RNA, 19 nt, Homo sapiens
  misc_RNA (1)...(19): siRNA sense strand
gaaucucacuuccucaaaa

SEQ ID NO: 497871 - RNA, 19 nt, Homo sapiens
  misc_RNA (1)...(19): siRNA sense strand
guaaacuaauugcaaaggu

SEQ ID NO: 497872 - RNA, 19 nt, Homo sapiens
  misc_RNA (1)...(19): siRNA sense strand
gcaaagggaauauggaaaa

SEQ ID NO: 497873 - RNA, 19 nt, Homo sapiens
  misc_RNA (1)...(19): siRNA sense strand
cggcugaccuggugguguu

SEQ ID NO: 497874 - RNA, 19 nt, Homo sapiens
  misc_RNA (1)...(19): siRNA sense strand
cagcuggccugaucaacau

SEQ ID NO: 497875 - RNA, 19 nt, Homo sapiens
  misc_RNA (1)...(19): siRNA sense strand
ccugacagcuggccugauc

SEQ ID NO: 497876 - RNA, 19 nt, Homo sapiens
  misc_RNA (1)...(19): siRNA sense strand
gaagggaaagugcguaagg

SEQ ID NO: 497877 - RNA, 19 nt, Homo sapiens
  misc_RNA (1)...(19): siRNA sense strand
ggaagacuccagcagaagu

SEQ ID NO: 497878 - RNA, 19 nt, Homo sapiens
  misc_RNA (1)...(19): siRNA sense strand
aagcaaggcccaucccaaa

SEQ ID NO: 497879 - RNA, 19 nt, Homo sapiens
  misc_RNA (1)...(19): siRNA sense strand
caaagggcacagcugauga

SEQ ID NO: 497880 - RNA, 19 nt, Homo sapiens
  misc_RNA (1)...(19): siRNA sense strand
aaucccaucugucauugaa

SEQ ID NO: 497881 - RNA, 19 nt, Homo sapiens
  misc_RNA (1)...(19): siRNA sense strand
gagcccagauugcaucaac

SEQ ID NO: 497882 - RNA, 19 nt, Homo sapiens
  misc_RNA (1)...(19): siRNA sense strand
caagaagacaucucucagu

SEQ ID NO: 497883 - RNA, 19 nt, Homo sapiens
  misc_RNA (1)...(19): siRNA sense strand
uuaagacccugcccagcaa

SEQ ID NO: 497884 - RNA, 19 nt, Homo sapiens
  misc_RNA (1)...(19): siRNA sense strand
cuccagaggucccuaaaca

SEQ ID NO: 497885 - RNA, 19 nt, Homo sapiens
  misc_RNA (1)...(19): siRNA sense strand
gauaacugggacagcuuua

SEQ ID NO: 497886 - RNA, 19 nt, Homo sapiens
  misc_RNA (1)...(19): siRNA sense strand
gaaaguggaagagagaagu

SEQ ID NO: 497887 - RNA, 19 nt, Homo sapiens
  misc_RNA (1)...(19): siRNA sense strand
ggaaguggagcuuucucuu

SEQ ID NO: 497888 - RNA, 19 nt, Homo sapiens
  misc_RNA (1)...(19): siRNA sense strand
ugaguuaggucaaggucau

SEQ ID NO: 497889 - RNA, 19 nt, Homo sapiens
  misc_RNA (1)...(19): siRNA sense strand
gaucagguucacacccuuu

SEQ ID NO: 497890 - RNA, 19 nt, Homo sapiens
  misc_RNA (1)...(19): siRNA sense strand
uuacagaggagcagaggaa

SEQ ID NO: 497891 - RNA, 19 nt, Homo sapiens
  misc_RNA (1)...(19): siRNA sense strand
caacagaaucucaguagcu

SEQ ID NO: 497892 - RNA, 19 nt, Homo sapiens
  misc_RNA (1)...(19): siRNA sense strand
aggcagacaucaguuauuc

SEQ ID NO: 497893 - RNA, 19 nt, Homo sapiens
  misc_RNA (1)...(19): siRNA sense strand
ccucaugauucccacaguu

SEQ ID NO: 497894 - RNA, 19 nt, Homo sapiens
  misc_RNA (1)...(19): siRNA sense strand
ugacuauagugcccugaug

SEQ ID NO: 497895 - RNA, 19 nt, Homo sapiens
  misc_RNA (1)...(19): siRNA sense strand
ucauaagccucuggccaaa

SEQ ID NO: 497896 - RNA, 19 nt, Homo sapiens
  misc_RNA (1)...(19): siRNA sense strand
aaauggcucucacuggaau

SEQ ID NO: 497897 - RNA, 19 nt, Homo sapiens
  misc_RNA (1)...(19): siRNA sense strand
caaauggcucucacuggaa

SEQ ID NO: 497898 - RNA, 19 nt, Homo sapiens
  misc_RNA (1)...(19): siRNA sense strand
uaaguuagaggccaagaca

SEQ ID NO: 497899 - RNA, 19 nt, Homo sapiens
  misc_RNA (1)...(19): siRNA sense strand
ucuacgaccuauuccagaa

SEQ ID NO: 497900 - RNA, 19 nt, Homo sapiens
  misc_RNA (1)...(19): siRNA sense strand
agagcacaguaaacuaauu

SEQ ID NO: 497901 - RNA, 19 nt, Homo sapiens
  misc_RNA (1)...(19): siRNA sense strand
acguggaacuucagcauga

SEQ ID NO: 497902 - RNA, 19 nt, Homo sapiens
  misc_RNA (1)...(19): siRNA sense strand
cuccaucccuuucauuugu

SEQ ID NO: 497903 - RNA, 19 nt, Homo sapiens
  misc_RNA (1)...(19): siRNA sense strand
gcuaaaaucccaucuguca

SEQ ID NO: 497904 - RNA, 19 nt, Homo sapiens
  misc_RNA (1)...(19): siRNA sense strand
ccaagcagcgcaagauagu

SEQ ID NO: 497905 - RNA, 19 nt, Homo sapiens
  misc_RNA (1)...(19): siRNA sense strand
gaggcagacaucaguuauu

SEQ ID NO: 497906 - RNA, 19 nt, Homo sapiens
  misc_RNA (1)...(19): siRNA sense strand
aaagaugcccucauucucu

SEQ ID NO: 497907 - RNA, 19 nt, Homo sapiens
  misc_RNA (1)...(19): siRNA sense strand
aagcucgugucuaaucuga

SEQ ID NO: 497908 - RNA, 19 nt, Homo sapiens
  misc_RNA (1)...(19): siRNA sense strand
guggagcuuucucuuggaa

SEQ ID NO: 497909 - RNA, 19 nt, Homo sapiens
  misc_RNA (1)...(19): siRNA sense strand
cagaagggaaagugcguaa

SEQ ID NO: 497910 - RNA, 19 nt, Homo sapiens
  misc_RNA (1)...(19): siRNA sense strand
uaucuuggaccuacuggaa

SEQ ID NO: 497911 - RNA, 19 nt, Homo sapiens
  misc_RNA (1)...(19): siRNA sense strand
uaaaaucccaucugucauu

SEQ ID NO: 497912 - RNA, 19 nt, Homo sapiens
  misc_RNA (1)...(19): siRNA sense strand
aaacagcagcagaaagaug

SEQ ID NO: 497913 - RNA, 19 nt, Homo sapiens
  misc_RNA (1)...(19): siRNA sense strand
cuaaucugaugcccuuuca

SEQ ID NO: 497914 - RNA, 19 nt, Homo sapiens
  misc_RNA (1)...(19): siRNA sense strand
gcagcuaugccgguccuaa

SEQ ID NO: 497915 - RNA, 19 nt, Homo sapiens
  misc_RNA (1)...(19): siRNA sense strand
uuccagaaguccuuugaga

SEQ ID NO: 497916 - RNA, 19 nt, Homo sapiens
  misc_RNA (1)...(19): siRNA sense strand
ccacugauuaccucuacaa

SEQ ID NO: 497917 - RNA, 19 nt, Homo sapiens
  misc_RNA (1)...(19): siRNA sense strand
ucgcuacugugaugccaaa

SEQ ID NO: 497918 - RNA, 19 nt, Homo sapiens
  misc_RNA (1)...(19): siRNA sense strand
cagcuaugccgguccuaaa

SEQ ID NO: 497919 - RNA, 19 nt, Homo sapiens
  misc_RNA (1)...(19): siRNA sense strand
gaacaaggaugaacaagca

SEQ ID NO: 497920 - RNA, 19 nt, Homo sapiens
  misc_RNA (1)...(19): siRNA sense strand
gaagagagaacaaggauga

SEQ ID NO: 497921 - RNA, 19 nt, Homo sapiens
  misc_RNA (1)...(19): siRNA sense strand
ugacugaccugguaaagaa

SEQ ID NO: 497922 - RNA, 19 nt, Homo sapiens
  misc_RNA (1)...(19): siRNA sense strand
gaacagcuaugacaucuac

SEQ ID NO: 497923 - RNA, 19 nt, Homo sapiens
  misc_RNA (1)...(19): siRNA sense strand
gcacuaccguguugugaaa

SEQ ID NO: 497924 - RNA, 19 nt, Homo sapiens
  misc_RNA (1)...(19): siRNA sense strand
ggaacaagauucugcacaa

SEQ ID NO: 497925 - RNA, 19 nt, Homo sapiens
  misc_RNA (1)...(19): siRNA sense strand
ggaacaaacugcgggugua

SEQ ID NO: 497926 - RNA, 19 nt, Homo sapiens
  misc_RNA (1)...(19): siRNA sense strand
gaaagaggagacagaauau

SEQ ID NO: 497927 - RNA, 19 nt, Homo sapiens
  misc_RNA (1)...(19): siRNA sense strand
gaacaagauucugcacaau

SEQ ID NO: 497928 - RNA, 19 nt, Homo sapiens
  misc_RNA (1)...(19): siRNA sense strand
gauauuuggucucuaggaa

SEQ ID NO: 497929 - RNA, 19 nt, Homo sapiens
  misc_RNA (1)...(19): siRNA sense strand
caagguguauggacucauu

SEQ ID NO: 497930 - RNA, 19 nt, Homo sapiens
  misc_RNA (1)...(19): siRNA sense strand
agaaagaggagacagaaua

SEQ ID NO: 497931 - RNA, 19 nt, Homo sapiens
  misc_RNA (1)...(19): siRNA sense strand
ggaagccccuguaccauua

SEQ ID NO: 497932 - RNA, 19 nt, Homo sapiens
  misc_RNA (1)...(19): siRNA sense strand
acaagauucugcacaauga

SEQ ID NO: 497933 - RNA, 19 nt, Homo sapiens
  misc_RNA (1)...(19): siRNA sense strand
gaaguggucuaagaaguuc

SEQ ID NO: 497934 - RNA, 19 nt, Homo sapiens
  misc_RNA (1)...(19): siRNA sense strand
ggucuaagaaguucauuga

SEQ ID NO: 497935 - RNA, 19 nt, Homo sapiens
  misc_RNA (1)...(19): siRNA sense strand
ccaagaaggccauggacua

SEQ ID NO: 497936 - RNA, 19 nt, Homo sapiens
  misc_RNA (1)...(19): siRNA sense strand
gagcaugccuaccucaagu

SEQ ID NO: 497937 - RNA, 19 nt, Homo sapiens
  misc_RNA (1)...(19): siRNA sense strand
ggaaguacaagaagcgauu

SEQ ID NO: 497938 - RNA, 19 nt, Homo sapiens
  misc_RNA (1)...(19): siRNA sense strand
ugacagccauggagaggaa

SEQ ID NO: 497939 - RNA, 19 nt, Homo sapiens
  misc_RNA (1)...(19): siRNA sense strand
aaccguaacugcaucauga

SEQ ID NO: 497940 - RNA, 19 nt, Homo sapiens
  misc_RNA (1)...(19): siRNA sense strand
acaaacugcggguguauua

SEQ ID NO: 497941 - RNA, 19 nt, Homo sapiens
  misc_RNA (1)...(19): siRNA sense strand
gagcaacucagaggcuuua

SEQ ID NO: 497942 - RNA, 19 nt, Homo sapiens
  misc_RNA (1)...(19): siRNA sense strand
gcacaaugacccagaagug

SEQ ID NO: 497943 - RNA, 19 nt, Homo sapiens
  misc_RNA (1)...(19): siRNA sense strand
ucaugacucugaaccguaa

SEQ ID NO: 497944 - RNA, 19 nt, Homo sapiens
  misc_RNA (1)...(19): siRNA sense strand
ggacccugcugggaucuuu

SEQ ID NO: 497945 - RNA, 19 nt, Homo sapiens
  misc_RNA (1)...(19): siRNA sense strand
cggagcagcuacugaaguu

SEQ ID NO: 497946 - RNA, 19 nt, Homo sapiens
  misc_RNA (1)...(19): siRNA sense strand
caacaucgccaccuacuac

SEQ ID NO: 497947 - RNA, 19 nt, Homo sapiens
  misc_RNA (1)...(19): siRNA sense strand
gaacaaacugcggguguau

SEQ ID NO: 497948 - RNA, 19 nt, Homo sapiens
  misc_RNA (1)...(19): siRNA sense strand
gcauagaggagcagaagga

SEQ ID NO: 497949 - RNA, 19 nt, Homo sapiens
  misc_RNA (1)...(19): siRNA sense strand
ggagugauauuuggucucu

SEQ ID NO: 497950 - RNA, 19 nt, Homo sapiens
  misc_RNA (1)...(19): siRNA sense strand
gaacccugaugccaccuau

SEQ ID NO: 497951 - RNA, 19 nt, Homo sapiens
  misc_RNA (1)...(19): siRNA sense strand
uccaagaaguggucuaaga

SEQ ID NO: 497952 - RNA, 19 nt, Homo sapiens
  misc_RNA (1)...(19): siRNA sense strand
ccaagaaguggucuaagaa

SEQ ID NO: 497953 - RNA, 19 nt, Homo sapiens
  misc_RNA (1)...(19): siRNA sense strand
ggaggacuguaucgccuau

SEQ ID NO: 497954 - RNA, 19 nt, Homo sapiens
  misc_RNA (1)...(19): siRNA sense strand
agacggaacacuuucauug

SEQ ID NO: 497955 - RNA, 19 nt, Homo sapiens
  misc_RNA (1)...(19): siRNA sense strand
guaacugcaucaugaacug

SEQ ID NO: 497956 - RNA, 19 nt, Homo sapiens
  misc_RNA (1)...(19): siRNA sense strand
ugagaaagccauugagauc

SEQ ID NO: 497957 - RNA, 19 nt, Homo sapiens
  misc_RNA (1)...(19): siRNA sense strand
gcaugaaucccgcugacaa

SEQ ID NO: 497958 - RNA, 19 nt, Homo sapiens
  misc_RNA (1)...(19): siRNA sense strand
gcagcgaggaggaagauga

SEQ ID NO: 497959 - RNA, 19 nt, Homo sapiens
  misc_RNA (1)...(19): siRNA sense strand
ccacggagcagcuacugaa

SEQ ID NO: 497960 - RNA, 19 nt, Homo sapiens
  misc_RNA (1)...(19): siRNA sense strand
gauuacaggagugauauuu

SEQ ID NO: 497961 - RNA, 19 nt, Homo sapiens
  misc_RNA (1)...(19): siRNA sense strand
ggagacagaauaugaguac

SEQ ID NO: 497962 - RNA, 19 nt, Homo sapiens
  misc_RNA (1)...(19): siRNA sense strand
gggaacagcuaugacaucu

SEQ ID NO: 497963 - RNA, 19 nt, Homo sapiens
  misc_RNA (1)...(19): siRNA sense strand
ugaaauacgagcggauuaa

SEQ ID NO: 497964 - RNA, 19 nt, Homo sapiens
  misc_RNA (1)...(19): siRNA sense strand
cuacggagccuucaucaag

SEQ ID NO: 497965 - RNA, 19 nt, Homo sapiens
  misc_RNA (1)...(19): siRNA sense strand
guacaagggucggcauguc

SEQ ID NO: 497966 - RNA, 19 nt, Homo sapiens
  misc_RNA (1)...(19): siRNA sense strand
gaaucccgcugacaaacca

SEQ ID NO: 497967 - RNA, 19 nt, Homo sapiens
  misc_RNA (1)...(19): siRNA sense strand
aagaggagacagaauauga

SEQ ID NO: 497968 - RNA, 19 nt, Homo sapiens
  misc_RNA (1)...(19): siRNA sense strand
gagcagcuacugaaguuuc

SEQ ID NO: 497969 - RNA, 19 nt, Homo sapiens
  misc_RNA (1)...(19): siRNA sense strand
ugacuucauugacacaugu

SEQ ID NO: 497970 - RNA, 19 nt, Homo sapiens
  misc_RNA (1)...(19): siRNA sense strand
ggugauccaucgagacauc

SEQ ID NO: 497971 - RNA, 19 nt, Homo sapiens
  misc_RNA (1)...(19): siRNA sense strand
uuacaggagugauauuugg

SEQ ID NO: 497972 - RNA, 19 nt, Homo sapiens
  misc_RNA (1)...(19): siRNA sense strand
ggauuaaguuccuggucau

SEQ ID NO: 497973 - RNA, 19 nt, Homo sapiens
  misc_RNA (1)...(19): siRNA sense strand
gcaacucagaggcuuuaaa

SEQ ID NO: 497974 - RNA, 19 nt, Homo sapiens
  misc_RNA (1)...(19): siRNA sense strand
ggacgaggaggaagagauc

SEQ ID NO: 497975 - RNA, 19 nt, Homo sapiens
  misc_RNA (1)...(19): siRNA sense strand
uggagaugcugcugugcua

SEQ ID NO: 497976 - RNA, 19 nt, Homo sapiens
  misc_RNA (1)...(19): siRNA sense strand
cuacaucccugugcacauc

SEQ ID NO: 497977 - RNA, 19 nt, Homo sapiens
  misc_RNA (1)...(19): siRNA sense strand
acccagaaguggagaagaa

SEQ ID NO: 497978 - RNA, 19 nt, Homo sapiens
  misc_RNA (1)...(19): siRNA sense strand
ggagaacgggcugauguug

SEQ ID NO: 497979 - RNA, 19 nt, Homo sapiens
  misc_RNA (1)...(19): siRNA sense strand
gcugucauccgccagaauu

SEQ ID NO: 497980 - RNA, 19 nt, Homo sapiens
  misc_RNA (1)...(19): siRNA sense strand
ucuaagaaguucauugacu

SEQ ID NO: 497981 - RNA, 19 nt, Homo sapiens
  misc_RNA (1)...(19): siRNA sense strand
gaaauacgagcggauuaag

SEQ ID NO: 497982 - RNA, 19 nt, Homo sapiens
  misc_RNA (1)...(19): siRNA sense strand
gugaaauacgagcggauua

SEQ ID NO: 497983 - RNA, 19 nt, Homo sapiens
  misc_RNA (1)...(19): siRNA sense strand
gaacagcaaaggccaaagc

SEQ ID NO: 497984 - RNA, 19 nt, Homo sapiens
  misc_RNA (1)...(19): siRNA sense strand
gagagaacaaggaugaaca

SEQ ID NO: 497985 - RNA, 19 nt, Homo sapiens
  misc_RNA (1)...(19): siRNA sense strand
ggagaucaacaugcugaaa

SEQ ID NO: 497986 - RNA, 19 nt, Homo sapiens
  misc_RNA (1)...(19): siRNA sense strand
gaaccguaacugcaucaug

SEQ ID NO: 497987 - RNA, 19 nt, Homo sapiens
  misc_RNA (1)...(19): siRNA sense strand
acaaauucauggccuucaa

SEQ ID NO: 497988 - RNA, 19 nt, Homo sapiens
  misc_RNA (1)...(19): siRNA sense strand
aauacgagcggauuaaguu

SEQ ID NO: 497989 - RNA, 19 nt, Homo sapiens
  misc_RNA (1)...(19): siRNA sense strand
gggcucaaccugcucauca

SEQ ID NO: 497990 - RNA, 19 nt, Homo sapiens
  misc_RNA (1)...(19): siRNA sense strand
gagaacagcaaaggccaaa

SEQ ID NO: 497991 - RNA, 19 nt, Homo sapiens
  misc_RNA (1)...(19): siRNA sense strand
ggaugggaguggugacuac

SEQ ID NO: 497992 - RNA, 19 nt, Homo sapiens
  misc_RNA (1)...(19): siRNA sense strand
ccauugagauccgcucugu

SEQ ID NO: 497993 - RNA, 19 nt, Homo sapiens
  misc_RNA (1)...(19): siRNA sense strand
ggugagaaagccauugaga

SEQ ID NO: 497994 - RNA, 19 nt, Homo sapiens
  misc_RNA (1)...(19): siRNA sense strand
gcaacaucgccaccuacua

SEQ ID NO: 497995 - RNA, 19 nt, Homo sapiens
  misc_RNA (1)...(19): siRNA sense strand
cagaggucaucgccuguga

SEQ ID NO: 497996 - RNA, 19 nt, Homo sapiens
  misc_RNA (1)...(19): siRNA sense strand
gggagaugccuacuucugu

SEQ ID NO: 497997 - RNA, 19 nt, Homo sapiens
  misc_RNA (1)...(19): siRNA sense strand
gaaggguucuguggucaac

SEQ ID NO: 497998 - RNA, 19 nt, Homo sapiens
  misc_RNA (1)...(19): siRNA sense strand
ggaugaacaagcagcagaa

SEQ ID NO: 497999 - RNA, 19 nt, Homo sapiens
  misc_RNA (1)...(19): siRNA sense strand
guagaagagagaacaagga

SEQ ID NO: 498000 - RNA, 19 nt, Homo sapiens
  misc_RNA (1)...(19): siRNA sense strand
ggaagcugcaggagaagga

SEQ ID NO: 498001 - RNA, 19 nt, Homo sapiens
  misc_RNA (1)...(19): siRNA sense strand
agaaguggucuaagaaguu

SEQ ID NO: 498002 - RNA, 19 nt, Homo sapiens
  misc_RNA (1)...(19): siRNA sense strand
uaugauuacaggagugaua

SEQ ID NO: 498003 - RNA, 19 nt, Homo sapiens
  misc_RNA (1)...(19): siRNA sense strand
cugaugccaccuaugauua

SEQ ID NO: 498004 - RNA, 19 nt, Homo sapiens
  misc_RNA (1)...(19): siRNA sense strand
ugacagcaauggguacaca

SEQ ID NO: 498005 - RNA, 19 nt, Homo sapiens
  misc_RNA (1)...(19): siRNA sense strand
caacucagaggcuuuaaaa

SEQ ID NO: 498006 - RNA, 19 nt, Homo sapiens
  misc_RNA (1)...(19): siRNA sense strand
aagaaguggucuaagaagu

SEQ ID NO: 498007 - RNA, 19 nt, Homo sapiens
  misc_RNA (1)...(19): siRNA sense strand
cuacuucuguggccuacau

SEQ ID NO: 498008 - RNA, 19 nt, Homo sapiens
  misc_RNA (1)...(19): siRNA sense strand
caaacccuaccacaaauuc

SEQ ID NO: 498009 - RNA, 19 nt, Homo sapiens
  misc_RNA (1)...(19): siRNA sense strand
acuaccguguugugaaaua

SEQ ID NO: 498010 - RNA, 19 nt, Homo sapiens
  misc_RNA (1)...(19): siRNA sense strand
gaacaagcagcagaacucu

SEQ ID NO: 498011 - RNA, 19 nt, Homo sapiens
  misc_RNA (1)...(19): siRNA sense strand
ucaaacaggagaucaacau

SEQ ID NO: 498012 - RNA, 19 nt, Homo sapiens
  misc_RNA (1)...(19): siRNA sense strand
cccaaacccuaccacaaau

SEQ ID NO: 498013 - RNA, 19 nt, Homo sapiens
  misc_RNA (1)...(19): siRNA sense strand
guucuguggucaacgugaa

SEQ ID NO: 498014 - RNA, 19 nt, Homo sapiens
  misc_RNA (1)...(19): siRNA sense strand
gcagaggggagcagagaua

SEQ ID NO: 498015 - RNA, 19 nt, Homo sapiens
  misc_RNA (1)...(19): siRNA sense strand
caugaaucccgcugacaaa

SEQ ID NO: 498016 - RNA, 19 nt, Homo sapiens
  misc_RNA (1)...(19): siRNA sense strand
agcagcagcuucagaaaca

SEQ ID NO: 498017 - RNA, 19 nt, Homo sapiens
  misc_RNA (1)...(19): siRNA sense strand
uacggagccuucaucaaga

SEQ ID NO: 498018 - RNA, 19 nt, Homo sapiens
  misc_RNA (1)...(19): siRNA sense strand
cgagcccucuuccucauuc

SEQ ID NO: 498019 - RNA, 19 nt, Homo sapiens
  misc_RNA (1)...(19): siRNA sense strand
gaacaaggaugaacaagca

SEQ ID NO: 498020 - RNA, 19 nt, Homo sapiens
  misc_RNA (1)...(19): siRNA sense strand
gaagagagaacaaggauga

SEQ ID NO: 498021 - RNA, 19 nt, Homo sapiens
  misc_RNA (1)...(19): siRNA sense strand
ugacugaccugguaaagaa

SEQ ID NO: 498022 - RNA, 19 nt, Homo sapiens
  misc_RNA (1)...(19): siRNA sense strand
gaacagcuaugacaucuac

SEQ ID NO: 498023 - RNA, 19 nt, Homo sapiens
  misc_RNA (1)...(19): siRNA sense strand
gcacuaccguguugugaaa

SEQ ID NO: 498024 - RNA, 19 nt, Homo sapiens
  misc_RNA (1)...(19): siRNA sense strand
ggaacaagauucugcacaa

SEQ ID NO: 498025 - RNA, 19 nt, Homo sapiens
  misc_RNA (1)...(19): siRNA sense strand
ggaacaaacugcgggugua

SEQ ID NO: 498026 - RNA, 19 nt, Homo sapiens
  misc_RNA (1)...(19): siRNA sense strand
gaaagaggagacagaauau

SEQ ID NO: 498027 - RNA, 19 nt, Homo sapiens
  misc_RNA (1)...(19): siRNA sense strand
gaacaagauucugcacaau

SEQ ID NO: 498028 - RNA, 19 nt, Homo sapiens
  misc_RNA (1)...(19): siRNA sense strand
gauauuuggucucuaggaa

SEQ ID NO: 498029 - RNA, 19 nt, Homo sapiens
  misc_RNA (1)...(19): siRNA sense strand
caagguguauggacucauu

SEQ ID NO: 498030 - RNA, 19 nt, Homo sapiens
  misc_RNA (1)...(19): siRNA sense strand
agaaagaggagacagaaua

SEQ ID NO: 498031 - RNA, 19 nt, Homo sapiens
  misc_RNA (1)...(19): siRNA sense strand
ggaagccccuguaccauua

SEQ ID NO: 498032 - RNA, 19 nt, Homo sapiens
  misc_RNA (1)...(19): siRNA sense strand
acaagauucugcacaauga

SEQ ID NO: 498033 - RNA, 19 nt, Homo sapiens
  misc_RNA (1)...(19): siRNA sense strand
gaaguggucuaagaaguuc

SEQ ID NO: 498034 - RNA, 19 nt, Homo sapiens
  misc_RNA (1)...(19): siRNA sense strand
ggucuaagaaguucauuga

SEQ ID NO: 498035 - RNA, 19 nt, Homo sapiens
  misc_RNA (1)...(19): siRNA sense strand
ccaagaaggccauggacua

SEQ ID NO: 498036 - RNA, 19 nt, Homo sapiens
  misc_RNA (1)...(19): siRNA sense strand
gagcaugccuaccucaagu

SEQ ID NO: 498037 - RNA, 19 nt, Homo sapiens
  misc_RNA (1)...(19): siRNA sense strand
ggaaguacaagaagcgauu

SEQ ID NO: 498038 - RNA, 19 nt, Homo sapiens
  misc_RNA (1)...(19): siRNA sense strand
ugacagccauggagaggaa

SEQ ID NO: 498039 - RNA, 19 nt, Homo sapiens
  misc_RNA (1)...(19): siRNA sense strand
aaccguaacugcaucauga

SEQ ID NO: 498040 - RNA, 19 nt, Homo sapiens
  misc_RNA (1)...(19): siRNA sense strand
acaaacugcggguguauua

SEQ ID NO: 498041 - RNA, 19 nt, Homo sapiens
  misc_RNA (1)...(19): siRNA sense strand
gagcaacucagaggcuuua

SEQ ID NO: 498042 - RNA, 19 nt, Homo sapiens
  misc_RNA (1)...(19): siRNA sense strand
gcacaaugacccagaagug

SEQ ID NO: 498043 - RNA, 19 nt, Homo sapiens
  misc_RNA (1)...(19): siRNA sense strand
ucaugacucugaaccguaa

SEQ ID NO: 498044 - RNA, 19 nt, Homo sapiens
  misc_RNA (1)...(19): siRNA sense strand
ggacccugcugggaucuuu

SEQ ID NO: 498045 - RNA, 19 nt, Homo sapiens
  misc_RNA (1)...(19): siRNA sense strand
cggagcagcuacugaaguu

SEQ ID NO: 498046 - RNA, 19 nt, Homo sapiens
  misc_RNA (1)...(19): siRNA sense strand
caacaucgccaccuacuac

SEQ ID NO: 498047 - RNA, 19 nt, Homo sapiens
  misc_RNA (1)...(19): siRNA sense strand
gaacaaacugcggguguau

SEQ ID NO: 498048 - RNA, 19 nt, Homo sapiens
  misc_RNA (1)...(19): siRNA sense strand
gcauagaggagcagaagga

SEQ ID NO: 498049 - RNA, 19 nt, Homo sapiens
  misc_RNA (1)...(19): siRNA sense strand
ggagugauauuuggucucu

SEQ ID NO: 498050 - RNA, 19 nt, Homo sapiens
  misc_RNA (1)...(19): siRNA sense strand
gaacccugaugccaccuau

SEQ ID NO: 498051 - RNA, 19 nt, Homo sapiens
  misc_RNA (1)...(19): siRNA sense strand
uccaagaaguggucuaaga

SEQ ID NO: 498052 - RNA, 19 nt, Homo sapiens
  misc_RNA (1)...(19): siRNA sense strand
ccaagaaguggucuaagaa

SEQ ID NO: 498053 - RNA, 19 nt, Homo sapiens
  misc_RNA (1)...(19): siRNA sense strand
ggaggacuguaucgccuau

SEQ ID NO: 498054 - RNA, 19 nt, Homo sapiens
  misc_RNA (1)...(19): siRNA sense strand
agacggaacacuuucauug

SEQ ID NO: 498055 - RNA, 19 nt, Homo sapiens
  misc_RNA (1)...(19): siRNA sense strand
guaacugcaucaugaacug

SEQ ID NO: 498056 - RNA, 19 nt, Homo sapiens
  misc_RNA (1)...(19): siRNA sense strand
ugagaaagccauugagauc

SEQ ID NO: 498057 - RNA, 19 nt, Homo sapiens
  misc_RNA (1)...(19): siRNA sense strand
gcaugaaucccgcugacaa

SEQ ID NO: 498058 - RNA, 19 nt, Homo sapiens
  misc_RNA (1)...(19): siRNA sense strand
gcagcgaggaggaagauga

SEQ ID NO: 498059 - RNA, 19 nt, Homo sapiens
  misc_RNA (1)...(19): siRNA sense strand
ccacggagcagcuacugaa

SEQ ID NO: 498060 - RNA, 19 nt, Homo sapiens
  misc_RNA (1)...(19): siRNA sense strand
gauuacaggagugauauuu

SEQ ID NO: 498061 - RNA, 19 nt, Homo sapiens
  misc_RNA (1)...(19): siRNA sense strand
ggagacagaauaugaguac

SEQ ID NO: 498062 - RNA, 19 nt, Homo sapiens
  misc_RNA (1)...(19): siRNA sense strand
gggaacagcuaugacaucu

SEQ ID NO: 498063 - RNA, 19 nt, Homo sapiens
  misc_RNA (1)...(19): siRNA sense strand
ugaaauacgagcggauuaa

SEQ ID NO: 498064 - RNA, 19 nt, Homo sapiens
  misc_RNA (1)...(19): siRNA sense strand
cuacggagccuucaucaag

SEQ ID NO: 498065 - RNA, 19 nt, Homo sapiens
  misc_RNA (1)...(19): siRNA sense strand
guacaagggucggcauguc

SEQ ID NO: 498066 - RNA, 19 nt, Homo sapiens
  misc_RNA (1)...(19): siRNA sense strand
gaaucccgcugacaaacca

SEQ ID NO: 498067 - RNA, 19 nt, Homo sapiens
  misc_RNA (1)...(19): siRNA sense strand
aagaggagacagaauauga

SEQ ID NO: 498068 - RNA, 19 nt, Homo sapiens
  misc_RNA (1)...(19): siRNA sense strand
gagcagcuacugaaguuuc

SEQ ID NO: 498069 - RNA, 19 nt, Homo sapiens
  misc_RNA (1)...(19): siRNA sense strand
ugacuucauugacacaugu

SEQ ID NO: 498070 - RNA, 19 nt, Homo sapiens
  misc_RNA (1)...(19): siRNA sense strand
ggugauccaucgagacauc

SEQ ID NO: 498071 - RNA, 19 nt, Homo sapiens
  misc_RNA (1)...(19): siRNA sense strand
uuacaggagugauauuugg

SEQ ID NO: 498072 - RNA, 19 nt, Homo sapiens
  misc_RNA (1)...(19): siRNA sense strand
ggauuaaguuccuggucau

SEQ ID NO: 498073 - RNA, 19 nt, Homo sapiens
  misc_RNA (1)...(19): siRNA sense strand
gcaacucagaggcuuuaaa

SEQ ID NO: 498074 - RNA, 19 nt, Homo sapiens
  misc_RNA (1)...(19): siRNA sense strand
ggacgaggaggaagagauc

SEQ ID NO: 498075 - RNA, 19 nt, Homo sapiens
  misc_RNA (1)...(19): siRNA sense strand
uggagaugcugcugugcua

SEQ ID NO: 498076 - RNA, 19 nt, Homo sapiens
  misc_RNA (1)...(19): siRNA sense strand
cuacaucccugugcacauc

SEQ ID NO: 498077 - RNA, 19 nt, Homo sapiens
  misc_RNA (1)...(19): siRNA sense strand
acccagaaguggagaagaa

SEQ ID NO: 498078 - RNA, 19 nt, Homo sapiens
  misc_RNA (1)...(19): siRNA sense strand
ggagaacgggcugauguug

SEQ ID NO: 498079 - RNA, 19 nt, Homo sapiens
  misc_RNA (1)...(19): siRNA sense strand
gcugucauccgccagaauu

SEQ ID NO: 498080 - RNA, 19 nt, Homo sapiens
  misc_RNA (1)...(19): siRNA sense strand
ucuaagaaguucauugacu

SEQ ID NO: 498081 - RNA, 19 nt, Homo sapiens
  misc_RNA (1)...(19): siRNA sense strand
gaaauacgagcggauuaag

SEQ ID NO: 498082 - RNA, 19 nt, Homo sapiens
  misc_RNA (1)...(19): siRNA sense strand
gugaaauacgagcggauua

SEQ ID NO: 498083 - RNA, 19 nt, Homo sapiens
  misc_RNA (1)...(19): siRNA sense strand
gaacagcaaaggccaaagc

SEQ ID NO: 498084 - RNA, 19 nt, Homo sapiens
  misc_RNA (1)...(19): siRNA sense strand
gagagaacaaggaugaaca

SEQ ID NO: 498085 - RNA, 19 nt, Homo sapiens
  misc_RNA (1)...(19): siRNA sense strand
ggagaucaacaugcugaaa

SEQ ID NO: 498086 - RNA, 19 nt, Homo sapiens
  misc_RNA (1)...(19): siRNA sense strand
gaaccguaacugcaucaug

SEQ ID NO: 498087 - RNA, 19 nt, Homo sapiens
  misc_RNA (1)...(19): siRNA sense strand
acaaauucauggccuucaa

SEQ ID NO: 498088 - RNA, 19 nt, Homo sapiens
  misc_RNA (1)...(19): siRNA sense strand
aauacgagcggauuaaguu

SEQ ID NO: 498089 - RNA, 19 nt, Homo sapiens
  misc_RNA (1)...(19): siRNA sense strand
gggcucaaccugcucauca

SEQ ID NO: 498090 - RNA, 19 nt, Homo sapiens
  misc_RNA (1)...(19): siRNA sense strand
gagaacagcaaaggccaaa

SEQ ID NO: 498091 - RNA, 19 nt, Homo sapiens
  misc_RNA (1)...(19): siRNA sense strand
ggaugggaguggugacuac

SEQ ID NO: 498092 - RNA, 19 nt, Homo sapiens
  misc_RNA (1)...(19): siRNA sense strand
ccauugagauccgcucugu

SEQ ID NO: 498093 - RNA, 19 nt, Homo sapiens
  misc_RNA (1)...(19): siRNA sense strand
ggugagaaagccauugaga

SEQ ID NO: 498094 - RNA, 19 nt, Homo sapiens
  misc_RNA (1)...(19): siRNA sense strand
gcaacaucgccaccuacua

SEQ ID NO: 498095 - RNA, 19 nt, Homo sapiens
  misc_RNA (1)...(19): siRNA sense strand
cagaggucaucgccuguga

SEQ ID NO: 498096 - RNA, 19 nt, Homo sapiens
  misc_RNA (1)...(19): siRNA sense strand
gggagaugccuacuucugu

SEQ ID NO: 498097 - RNA, 19 nt, Homo sapiens
  misc_RNA (1)...(19): siRNA sense strand
gaaggguucuguggucaac

SEQ ID NO: 498098 - RNA, 19 nt, Homo sapiens
  misc_RNA (1)...(19): siRNA sense strand
ggaugaacaagcagcagaa

SEQ ID NO: 498099 - RNA, 19 nt, Homo sapiens
  misc_RNA (1)...(19): siRNA sense strand
guagaagagagaacaagga

SEQ ID NO: 498100 - RNA, 19 nt, Homo sapiens
  misc_RNA (1)...(19): siRNA sense strand
ggaagcugcaggagaagga

SEQ ID NO: 498101 - RNA, 19 nt, Homo sapiens
  misc_RNA (1)...(19): siRNA sense strand
agaaguggucuaagaaguu

SEQ ID NO: 498102 - RNA, 19 nt, Homo sapiens
  misc_RNA (1)...(19): siRNA sense strand
uaugauuacaggagugaua

SEQ ID NO: 498103 - RNA, 19 nt, Homo sapiens
  misc_RNA (1)...(19): siRNA sense strand
cugaugccaccuaugauua

SEQ ID NO: 498104 - RNA, 19 nt, Homo sapiens
  misc_RNA (1)...(19): siRNA sense strand
ugacagcaauggguacaca

SEQ ID NO: 498105 - RNA, 19 nt, Homo sapiens
  misc_RNA (1)...(19): siRNA sense strand
caacucagaggcuuuaaaa

SEQ ID NO: 498106 - RNA, 19 nt, Homo sapiens
  misc_RNA (1)...(19): siRNA sense strand
aagaaguggucuaagaagu

SEQ ID NO: 498107 - RNA, 19 nt, Homo sapiens
  misc_RNA (1)...(19): siRNA sense strand
cuacuucuguggccuacau

SEQ ID NO: 498108 - RNA, 19 nt, Homo sapiens
  misc_RNA (1)...(19): siRNA sense strand
caaacccuaccacaaauuc

SEQ ID NO: 498109 - RNA, 19 nt, Homo sapiens
  misc_RNA (1)...(19): siRNA sense strand
acuaccguguugugaaaua

SEQ ID NO: 498110 - RNA, 19 nt, Homo sapiens
  misc_RNA (1)...(19): siRNA sense strand
gaacaagcagcagaacucu

SEQ ID NO: 498111 - RNA, 19 nt, Homo sapiens
  misc_RNA (1)...(19): siRNA sense strand
ucaaacaggagaucaacau

SEQ ID NO: 498112 - RNA, 19 nt, Homo sapiens
  misc_RNA (1)...(19): siRNA sense strand
cccaaacccuaccacaaau

SEQ ID NO: 498113 - RNA, 19 nt, Homo sapiens
  misc_RNA (1)...(19): siRNA sense strand
guucuguggucaacgugaa

SEQ ID NO: 498114 - RNA, 19 nt, Homo sapiens
  misc_RNA (1)...(19): siRNA sense strand
gcagaggggagcagagaua

SEQ ID NO: 498115 - RNA, 19 nt, Homo sapiens
  misc_RNA (1)...(19): siRNA sense strand
caugaaucccgcugacaaa

SEQ ID NO: 498116 - RNA, 19 nt, Homo sapiens
  misc_RNA (1)...(19): siRNA sense strand
agcagcagcuucagaaaca

SEQ ID NO: 498117 - RNA, 19 nt, Homo sapiens
  misc_RNA (1)...(19): siRNA sense strand
uacggagccuucaucaaga

SEQ ID NO: 498118 - RNA, 19 nt, Homo sapiens
  misc_RNA (1)...(19): siRNA sense strand
cgagcccucuuccucauuc

SEQ ID NO: 498119 - RNA, 19 nt, Homo sapiens
  misc_RNA (1)...(19): siRNA sense strand
gaacaaggaugaacaagca

SEQ ID NO: 498120 - RNA, 19 nt, Homo sapiens
  misc_RNA (1)...(19): siRNA sense strand
gaagagagaacaaggauga

SEQ ID NO: 498121 - RNA, 19 nt, Homo sapiens
  misc_RNA (1)...(19): siRNA sense strand
ugacugaccugguaaagaa

SEQ ID NO: 498122 - RNA, 19 nt, Homo sapiens
  misc_RNA (1)...(19): siRNA sense strand
gaacagcuaugacaucuac

SEQ ID NO: 498123 - RNA, 19 nt, Homo sapiens
  misc_RNA (1)...(19): siRNA sense strand
gcacuaccguguugugaaa

SEQ ID NO: 498124 - RNA, 19 nt, Homo sapiens
  misc_RNA (1)...(19): siRNA sense strand
ggaacaagauucugcacaa

SEQ ID NO: 498125 - RNA, 19 nt, Homo sapiens
  misc_RNA (1)...(19): siRNA sense strand
ggaacaaacugcgggugua

SEQ ID NO: 498126 - RNA, 19 nt, Homo sapiens
  misc_RNA (1)...(19): siRNA sense strand
gaaagaggagacagaauau

SEQ ID NO: 498127 - RNA, 19 nt, Homo sapiens
  misc_RNA (1)...(19): siRNA sense strand
gaacaagauucugcacaau

SEQ ID NO: 498128 - RNA, 19 nt, Homo sapiens
  misc_RNA (1)...(19): siRNA sense strand
gauauuuggucucuaggaa

SEQ ID NO: 498129 - RNA, 19 nt, Homo sapiens
  misc_RNA (1)...(19): siRNA sense strand
caagguguauggacucauu

SEQ ID NO: 498130 - RNA, 19 nt, Homo sapiens
  misc_RNA (1)...(19): siRNA sense strand
agaaagaggagacagaaua

SEQ ID NO: 498131 - RNA, 19 nt, Homo sapiens
  misc_RNA (1)...(19): siRNA sense strand
ggaagccccuguaccauua

SEQ ID NO: 498132 - RNA, 19 nt, Homo sapiens
  misc_RNA (1)...(19): siRNA sense strand
acaagauucugcacaauga

SEQ ID NO: 498133 - RNA, 19 nt, Homo sapiens
  misc_RNA (1)...(19): siRNA sense strand
gaaguggucuaagaaguuc

SEQ ID NO: 498134 - RNA, 19 nt, Homo sapiens
  misc_RNA (1)...(19): siRNA sense strand
ggucuaagaaguucauuga

SEQ ID NO: 498135 - RNA, 19 nt, Homo sapiens
  misc_RNA (1)...(19): siRNA sense strand
ccaagaaggccauggacua

SEQ ID NO: 498136 - RNA, 19 nt, Homo sapiens
  misc_RNA (1)...(19): siRNA sense strand
gagcaugccuaccucaagu

SEQ ID NO: 498137 - RNA, 19 nt, Homo sapiens
  misc_RNA (1)...(19): siRNA sense strand
ggaaguacaagaagcgauu

SEQ ID NO: 498138 - RNA, 19 nt, Homo sapiens
  misc_RNA (1)...(19): siRNA sense strand
ugacagccauggagaggaa

SEQ ID NO: 498139 - RNA, 19 nt, Homo sapiens
  misc_RNA (1)...(19): siRNA sense strand
aaccguaacugcaucauga

SEQ ID NO: 498140 - RNA, 19 nt, Homo sapiens
  misc_RNA (1)...(19): siRNA sense strand
acaaacugcggguguauua

SEQ ID NO: 498141 - RNA, 19 nt, Homo sapiens
  misc_RNA (1)...(19): siRNA sense strand
gagcaacucagaggcuuua

SEQ ID NO: 498142 - RNA, 19 nt, Homo sapiens
  misc_RNA (1)...(19): siRNA sense strand
gcacaaugacccagaagug

SEQ ID NO: 498143 - RNA, 19 nt, Homo sapiens
  misc_RNA (1)...(19): siRNA sense strand
ucaugacucugaaccguaa

SEQ ID NO: 498144 - RNA, 19 nt, Homo sapiens
  misc_RNA (1)...(19): siRNA sense strand
ggacccugcugggaucuuu

SEQ ID NO: 498145 - RNA, 19 nt, Homo sapiens
  misc_RNA (1)...(19): siRNA sense strand
cggagcagcuacugaaguu

SEQ ID NO: 498146 - RNA, 19 nt, Homo sapiens
  misc_RNA (1)...(19): siRNA sense strand
caacaucgccaccuacuac

SEQ ID NO: 498147 - RNA, 19 nt, Homo sapiens
  misc_RNA (1)...(19): siRNA sense strand
gaacaaacugcggguguau

SEQ ID NO: 498148 - RNA, 19 nt, Homo sapiens
  misc_RNA (1)...(19): siRNA sense strand
gcauagaggagcagaagga

SEQ ID NO: 498149 - RNA, 19 nt, Homo sapiens
  misc_RNA (1)...(19): siRNA sense strand
ggagugauauuuggucucu

SEQ ID NO: 498150 - RNA, 19 nt, Homo sapiens
  misc_RNA (1)...(19): siRNA sense strand
gaacccugaugccaccuau

SEQ ID NO: 498151 - RNA, 19 nt, Homo sapiens
  misc_RNA (1)...(19): siRNA sense strand
uccaagaaguggucuaaga

SEQ ID NO: 498152 - RNA, 19 nt, Homo sapiens
  misc_RNA (1)...(19): siRNA sense strand
ccaagaaguggucuaagaa

SEQ ID NO: 498153 - RNA, 19 nt, Homo sapiens
  misc_RNA (1)...(19): siRNA sense strand
ggaggacuguaucgccuau

SEQ ID NO: 498154 - RNA, 19 nt, Homo sapiens
  misc_RNA (1)...(19): siRNA sense strand
agacggaacacuuucauug

SEQ ID NO: 498155 - RNA, 19 nt, Homo sapiens
  misc_RNA (1)...(19): siRNA sense strand
guaacugcaucaugaacug

SEQ ID NO: 498156 - RNA, 19 nt, Homo sapiens
  misc_RNA (1)...(19): siRNA sense strand
ugagaaagccauugagauc

SEQ ID NO: 498157 - RNA, 19 nt, Homo sapiens
  misc_RNA (1)...(19): siRNA sense strand
gcaugaaucccgcugacaa

SEQ ID NO: 498158 - RNA, 19 nt, Homo sapiens
  misc_RNA (1)...(19): siRNA sense strand
gcagcgaggaggaagauga

SEQ ID NO: 498159 - RNA, 19 nt, Homo sapiens
  misc_RNA (1)...(19): siRNA sense strand
ccacggagcagcuacugaa

SEQ ID NO: 498160 - RNA, 19 nt, Homo sapiens
  misc_RNA (1)...(19): siRNA sense strand
gauuacaggagugauauuu

SEQ ID NO: 498161 - RNA, 19 nt, Homo sapiens
  misc_RNA (1)...(19): siRNA sense strand
ggagacagaauaugaguac

SEQ ID NO: 498162 - RNA, 19 nt, Homo sapiens
  misc_RNA (1)...(19): siRNA sense strand
gggaacagcuaugacaucu

SEQ ID NO: 498163 - RNA, 19 nt, Homo sapiens
  misc_RNA (1)...(19): siRNA sense strand
ugaaauacgagcggauuaa

SEQ ID NO: 498164 - RNA, 19 nt, Homo sapiens
  misc_RNA (1)...(19): siRNA sense strand
cuacggagccuucaucaag

SEQ ID NO: 498165 - RNA, 19 nt, Homo sapiens
  misc_RNA (1)...(19): siRNA sense strand
guacaagggucggcauguc

SEQ ID NO: 498166 - RNA, 19 nt, Homo sapiens
  misc_RNA (1)...(19): siRNA sense strand
gaaucccgcugacaaacca

SEQ ID NO: 498167 - RNA, 19 nt, Homo sapiens
  misc_RNA (1)...(19): siRNA sense strand
aagaggagacagaauauga

SEQ ID NO: 498168 - RNA, 19 nt, Homo sapiens
  misc_RNA (1)...(19): siRNA sense strand
gagcagcuacugaaguuuc

SEQ ID NO: 498169 - RNA, 19 nt, Homo sapiens
  misc_RNA (1)...(19): siRNA sense strand
ugacuucauugacacaugu

SEQ ID NO: 498170 - RNA, 19 nt, Homo sapiens
  misc_RNA (1)...(19): siRNA sense strand
ggugauccaucgagacauc

SEQ ID NO: 498171 - RNA, 19 nt, Homo sapiens
  misc_RNA (1)...(19): siRNA sense strand
uuacaggagugauauuugg

SEQ ID NO: 498172 - RNA, 19 nt, Homo sapiens
  misc_RNA (1)...(19): siRNA sense strand
ggauuaaguuccuggucau

SEQ ID NO: 498173 - RNA, 19 nt, Homo sapiens
  misc_RNA (1)...(19): siRNA sense strand
gcaacucagaggcuuuaaa

SEQ ID NO: 498174 - RNA, 19 nt, Homo sapiens
  misc_RNA (1)...(19): siRNA sense strand
ggacgaggaggaagagauc

SEQ ID NO: 498175 - RNA, 19 nt, Homo sapiens
  misc_RNA (1)...(19): siRNA sense strand
uggagaugcugcugugcua

SEQ ID NO: 498176 - RNA, 19 nt, Homo sapiens
  misc_RNA (1)...(19): siRNA sense strand
cuacaucccugugcacauc

SEQ ID NO: 498177 - RNA, 19 nt, Homo sapiens
  misc_RNA (1)...(19): siRNA sense strand
acccagaaguggagaagaa

SEQ ID NO: 498178 - RNA, 19 nt, Homo sapiens
  misc_RNA (1)...(19): siRNA sense strand
ggagaacgggcugauguug

SEQ ID NO: 498179 - RNA, 19 nt, Homo sapiens
  misc_RNA (1)...(19): siRNA sense strand
gcugucauccgccagaauu

SEQ ID NO: 498180 - RNA, 19 nt, Homo sapiens
  misc_RNA (1)...(19): siRNA sense strand
ucuaagaaguucauugacu

SEQ ID NO: 498181 - RNA, 19 nt, Homo sapiens
  misc_RNA (1)...(19): siRNA sense strand
gaaauacgagcggauuaag

SEQ ID NO: 498182 - RNA, 19 nt, Homo sapiens
  misc_RNA (1)...(19): siRNA sense strand
gugaaauacgagcggauua

SEQ ID NO: 498183 - RNA, 19 nt, Homo sapiens
  misc_RNA (1)...(19): siRNA sense strand
gaacagcaaaggccaaagc

SEQ ID NO: 498184 - RNA, 19 nt, Homo sapiens
  misc_RNA (1)...(19): siRNA sense strand
gagagaacaaggaugaaca

SEQ ID NO: 498185 - RNA, 19 nt, Homo sapiens
  misc_RNA (1)...(19): siRNA sense strand
ggagaucaacaugcugaaa

SEQ ID NO: 498186 - RNA, 19 nt, Homo sapiens
  misc_RNA (1)...(19): siRNA sense strand
gaaccguaacugcaucaug

SEQ ID NO: 498187 - RNA, 19 nt, Homo sapiens
  misc_RNA (1)...(19): siRNA sense strand
acaaauucauggccuucaa

SEQ ID NO: 498188 - RNA, 19 nt, Homo sapiens
  misc_RNA (1)...(19): siRNA sense strand
aauacgagcggauuaaguu

SEQ ID NO: 498189 - RNA, 19 nt, Homo sapiens
  misc_RNA (1)...(19): siRNA sense strand
gggcucaaccugcucauca

SEQ ID NO: 498190 - RNA, 19 nt, Homo sapiens
  misc_RNA (1)...(19): siRNA sense strand
gagaacagcaaaggccaaa

SEQ ID NO: 498191 - RNA, 19 nt, Homo sapiens
  misc_RNA (1)...(19): siRNA sense strand
ggaugggaguggugacuac

SEQ ID NO: 498192 - RNA, 19 nt, Homo sapiens
  misc_RNA (1)...(19): siRNA sense strand
ccauugagauccgcucugu

SEQ ID NO: 498193 - RNA, 19 nt, Homo sapiens
  misc_RNA (1)...(19): siRNA sense strand
ggugagaaagccauugaga

SEQ ID NO: 498194 - RNA, 19 nt, Homo sapiens
  misc_RNA (1)...(19): siRNA sense strand
gcaacaucgccaccuacua

SEQ ID NO: 498195 - RNA, 19 nt, Homo sapiens
  misc_RNA (1)...(19): siRNA sense strand
cagaggucaucgccuguga

SEQ ID NO: 498196 - RNA, 19 nt, Homo sapiens
  misc_RNA (1)...(19): siRNA sense strand
gggagaugccuacuucugu

SEQ ID NO: 498197 - RNA, 19 nt, Homo sapiens
  misc_RNA (1)...(19): siRNA sense strand
gaaggguucuguggucaac

SEQ ID NO: 498198 - RNA, 19 nt, Homo sapiens
  misc_RNA (1)...(19): siRNA sense strand
ggaugaacaagcagcagaa

SEQ ID NO: 498199 - RNA, 19 nt, Homo sapiens
  misc_RNA (1)...(19): siRNA sense strand
guagaagagagaacaagga

SEQ ID NO: 498200 - RNA, 19 nt, Homo sapiens
  misc_RNA (1)...(19): siRNA sense strand
ggaagcugcaggagaagga

SEQ ID NO: 498201 - RNA, 19 nt, Homo sapiens
  misc_RNA (1)...(19): siRNA sense strand
agaaguggucuaagaaguu

SEQ ID NO: 498202 - RNA, 19 nt, Homo sapiens
  misc_RNA (1)...(19): siRNA sense strand
uaugauuacaggagugaua

SEQ ID NO: 498203 - RNA, 19 nt, Homo sapiens
  misc_RNA (1)...(19): siRNA sense strand
cugaugccaccuaugauua

SEQ ID NO: 498204 - RNA, 19 nt, Homo sapiens
  misc_RNA (1)...(19): siRNA sense strand
ugacagcaauggguacaca

SEQ ID NO: 498205 - RNA, 19 nt, Homo sapiens
  misc_RNA (1)...(19): siRNA sense strand
caacucagaggcuuuaaaa

SEQ ID NO: 498206 - RNA, 19 nt, Homo sapiens
  misc_RNA (1)...(19): siRNA sense strand
aagaaguggucuaagaagu

SEQ ID NO: 498207 - RNA, 19 nt, Homo sapiens
  misc_RNA (1)...(19): siRNA sense strand
cuacuucuguggccuacau

SEQ ID NO: 498208 - RNA, 19 nt, Homo sapiens
  misc_RNA (1)...(19): siRNA sense strand
caaacccuaccacaaauuc

SEQ ID NO: 498209 - RNA, 19 nt, Homo sapiens
  misc_RNA (1)...(19): siRNA sense strand
acuaccguguugugaaaua

SEQ ID NO: 498210 - RNA, 19 nt, Homo sapiens
  misc_RNA (1)...(19): siRNA sense strand
gaacaagcagcagaacucu

SEQ ID NO: 498211 - RNA, 19 nt, Homo sapiens
  misc_RNA (1)...(19): siRNA sense strand
ucaaacaggagaucaacau

SEQ ID NO: 498212 - RNA, 19 nt, Homo sapiens
  misc_RNA (1)...(19): siRNA sense strand
cccaaacccuaccacaaau

SEQ ID NO: 498213 - RNA, 19 nt, Homo sapiens
  misc_RNA (1)...(19): siRNA sense strand
guucuguggucaacgugaa

SEQ ID NO: 498214 - RNA, 19 nt, Homo sapiens
  misc_RNA (1)...(19): siRNA sense strand
gcagaggggagcagagaua

SEQ ID NO: 498215 - RNA, 19 nt, Homo sapiens
  misc_RNA (1)...(19): siRNA sense strand
caugaaucccgcugacaaa

SEQ ID NO: 498216 - RNA, 19 nt, Homo sapiens
  misc_RNA (1)...(19): siRNA sense strand
agcagcagcuucagaaaca

SEQ ID NO: 498217 - RNA, 19 nt, Homo sapiens
  misc_RNA (1)...(19): siRNA sense strand
uacggagccuucaucaaga

SEQ ID NO: 498218 - RNA, 19 nt, Homo sapiens
  misc_RNA (1)...(19): siRNA sense strand
cgagcccucuuccucauuc

SEQ ID NO: 498219 - RNA, 19 nt, Homo sapiens
  misc_RNA (1)...(19): siRNA sense strand
aaggagagaugguggauua

SEQ ID NO: 498220 - RNA, 19 nt, Homo sapiens
  misc_RNA (1)...(19): siRNA sense strand
cagcugggcuuccugguuu

SEQ ID NO: 498221 - RNA, 19 nt, Homo sapiens
  misc_RNA (1)...(19): siRNA sense strand
ccaaagacaucuccaggau

SEQ ID NO: 498222 - RNA, 19 nt, Homo sapiens
  misc_RNA (1)...(19): siRNA sense strand
gagagaugguggauuacaa

SEQ ID NO: 498223 - RNA, 19 nt, Homo sapiens
  misc_RNA (1)...(19): siRNA sense strand
aaagggaccucgcgguaaa

SEQ ID NO: 498224 - RNA, 19 nt, Homo sapiens
  misc_RNA (1)...(19): siRNA sense strand
gaugguggauuacaaugga

SEQ ID NO: 498225 - RNA, 19 nt, Homo sapiens
  misc_RNA (1)...(19): siRNA sense strand
ggauuacaauggaaacauc

SEQ ID NO: 498226 - RNA, 19 nt, Homo sapiens
  misc_RNA (1)...(19): siRNA sense strand
caagggagaaccagggaaa

SEQ ID NO: 498227 - RNA, 19 nt, Homo sapiens
  misc_RNA (1)...(19): siRNA sense strand
ggaagcaggacuagaugga

SEQ ID NO: 498228 - RNA, 19 nt, Homo sapiens
  misc_RNA (1)...(19): siRNA sense strand
caaggcugcuggaacaagu

SEQ ID NO: 498229 - RNA, 19 nt, Homo sapiens
  misc_RNA (1)...(19): siRNA sense strand
gggagaagcaggugucgau

SEQ ID NO: 498230 - RNA, 19 nt, Homo sapiens
  misc_RNA (1)...(19): siRNA sense strand
ggagaacagggaccagaug

SEQ ID NO: 498231 - RNA, 19 nt, Homo sapiens
  misc_RNA (1)...(19): siRNA sense strand
acaauggaaacaucaauga

SEQ ID NO: 498232 - RNA, 19 nt, Homo sapiens
  misc_RNA (1)...(19): siRNA sense strand
gaaaggagagaugguggau

SEQ ID NO: 498233 - RNA, 19 nt, Homo sapiens
  misc_RNA (1)...(19): siRNA sense strand
cuagagguuucccuggauu

SEQ ID NO: 498234 - RNA, 19 nt, Homo sapiens
  misc_RNA (1)...(19): siRNA sense strand
gcaaauggagacggcuauu

SEQ ID NO: 498235 - RNA, 19 nt, Homo sapiens
  misc_RNA (1)...(19): siRNA sense strand
gaaaggcuuccagggagaa

SEQ ID NO: 498236 - RNA, 19 nt, Homo sapiens
  misc_RNA (1)...(19): siRNA sense strand
gcagcugggcuuccugguu

SEQ ID NO: 498237 - RNA, 19 nt, Homo sapiens
  misc_RNA (1)...(19): siRNA sense strand
ggagagaugguggauuaca

SEQ ID NO: 498238 - RNA, 19 nt, Homo sapiens
  misc_RNA (1)...(19): siRNA sense strand
gaugcuggcaacuccauug

SEQ ID NO: 498239 - RNA, 19 nt, Homo sapiens
  misc_RNA (1)...(19): siRNA sense strand
gcguggagcagcuggagaa

SEQ ID NO: 498240 - RNA, 19 nt, Homo sapiens
  misc_RNA (1)...(19): siRNA sense strand
uggagcagcuggagaacag

SEQ ID NO: 498241 - RNA, 19 nt, Homo sapiens
  misc_RNA (1)...(19): siRNA sense strand
ggauuuccgggucccauug

SEQ ID NO: 498242 - RNA, 19 nt, Homo sapiens
  misc_RNA (1)...(19): siRNA sense strand
gagaugguggauuacaaug

SEQ ID NO: 498243 - RNA, 19 nt, Homo sapiens
  misc_RNA (1)...(19): siRNA sense strand
uagcggagcgcacccacaa

SEQ ID NO: 498244 - RNA, 19 nt, Homo sapiens
  misc_RNA (1)...(19): siRNA sense strand
gggagaaccagggaaagga

SEQ ID NO: 498245 - RNA, 19 nt, Homo sapiens
  misc_RNA (1)...(19): siRNA sense strand
gagccaggccagcauccaa

SEQ ID NO: 498246 - RNA, 19 nt, Homo sapiens
  misc_RNA (1)...(19): siRNA sense strand
gguacuccaggaccaauug

SEQ ID NO: 498247 - RNA, 19 nt, Homo sapiens
  misc_RNA (1)...(19): siRNA sense strand
aaaggagacccugggauga

SEQ ID NO: 498248 - RNA, 19 nt, Homo sapiens
  misc_RNA (1)...(19): siRNA sense strand
gagccagggaucccaggaa

SEQ ID NO: 498249 - RNA, 19 nt, Homo sapiens
  misc_RNA (1)...(19): siRNA sense strand
gaaccagggaaaggagaga

SEQ ID NO: 498250 - RNA, 19 nt, Homo sapiens
  misc_RNA (1)...(19): siRNA sense strand
gauuacaauggaaacauca

SEQ ID NO: 498251 - RNA, 19 nt, Homo sapiens
  misc_RNA (1)...(19): siRNA sense strand
ggucaaccaggaacuagag

SEQ ID NO: 498252 - RNA, 19 nt, Homo sapiens
  misc_RNA (1)...(19): siRNA sense strand
aaggagagaugguggauua

SEQ ID NO: 498253 - RNA, 19 nt, Homo sapiens
  misc_RNA (1)...(19): siRNA sense strand
cagcugggcuuccugguuu

SEQ ID NO: 498254 - RNA, 19 nt, Homo sapiens
  misc_RNA (1)...(19): siRNA sense strand
ccaaagacaucuccaggau

SEQ ID NO: 498255 - RNA, 19 nt, Homo sapiens
  misc_RNA (1)...(19): siRNA sense strand
gagagaugguggauuacaa

SEQ ID NO: 498256 - RNA, 19 nt, Homo sapiens
  misc_RNA (1)...(19): siRNA sense strand
aaagggaccucgcgguaaa

SEQ ID NO: 498257 - RNA, 19 nt, Homo sapiens
  misc_RNA (1)...(19): siRNA sense strand
gaugguggauuacaaugga

SEQ ID NO: 498258 - RNA, 19 nt, Homo sapiens
  misc_RNA (1)...(19): siRNA sense strand
ggauuacaauggaaacauc

SEQ ID NO: 498259 - RNA, 19 nt, Homo sapiens
  misc_RNA (1)...(19): siRNA sense strand
caagggagaaccagggaaa

SEQ ID NO: 498260 - RNA, 19 nt, Homo sapiens
  misc_RNA (1)...(19): siRNA sense strand
ggaagcaggacuagaugga

SEQ ID NO: 498261 - RNA, 19 nt, Homo sapiens
  misc_RNA (1)...(19): siRNA sense strand
caaggcugcuggaacaagu

SEQ ID NO: 498262 - RNA, 19 nt, Homo sapiens
  misc_RNA (1)...(19): siRNA sense strand
gggagaagcaggugucgau

SEQ ID NO: 498263 - RNA, 19 nt, Homo sapiens
  misc_RNA (1)...(19): siRNA sense strand
ggagaacagggaccagaug

SEQ ID NO: 498264 - RNA, 19 nt, Homo sapiens
  misc_RNA (1)...(19): siRNA sense strand
acaauggaaacaucaauga

SEQ ID NO: 498265 - RNA, 19 nt, Homo sapiens
  misc_RNA (1)...(19): siRNA sense strand
gaaaggagagaugguggau

SEQ ID NO: 498266 - RNA, 19 nt, Homo sapiens
  misc_RNA (1)...(19): siRNA sense strand
cuagagguuucccuggauu

SEQ ID NO: 498267 - RNA, 19 nt, Homo sapiens
  misc_RNA (1)...(19): siRNA sense strand
gcaaauggagacggcuauu

SEQ ID NO: 498268 - RNA, 19 nt, Homo sapiens
  misc_RNA (1)...(19): siRNA sense strand
gaaaggcuuccagggagaa

SEQ ID NO: 498269 - RNA, 19 nt, Homo sapiens
  misc_RNA (1)...(19): siRNA sense strand
gcagcugggcuuccugguu

SEQ ID NO: 498270 - RNA, 19 nt, Homo sapiens
  misc_RNA (1)...(19): siRNA sense strand
ggagagaugguggauuaca

SEQ ID NO: 498271 - RNA, 19 nt, Homo sapiens
  misc_RNA (1)...(19): siRNA sense strand
gaugcuggcaacuccauug

SEQ ID NO: 498272 - RNA, 19 nt, Homo sapiens
  misc_RNA (1)...(19): siRNA sense strand
gcguggagcagcuggagaa

SEQ ID NO: 498273 - RNA, 19 nt, Homo sapiens
  misc_RNA (1)...(19): siRNA sense strand
uggagcagcuggagaacag

SEQ ID NO: 498274 - RNA, 19 nt, Homo sapiens
  misc_RNA (1)...(19): siRNA sense strand
ggauuuccgggucccauug

SEQ ID NO: 498275 - RNA, 19 nt, Homo sapiens
  misc_RNA (1)...(19): siRNA sense strand
gagaugguggauuacaaug

SEQ ID NO: 498276 - RNA, 19 nt, Homo sapiens
  misc_RNA (1)...(19): siRNA sense strand
uagcggagcgcacccacaa

SEQ ID NO: 498277 - RNA, 19 nt, Homo sapiens
  misc_RNA (1)...(19): siRNA sense strand
gggagaaccagggaaagga

SEQ ID NO: 498278 - RNA, 19 nt, Homo sapiens
  misc_RNA (1)...(19): siRNA sense strand
gagccaggccagcauccaa

SEQ ID NO: 498279 - RNA, 19 nt, Homo sapiens
  misc_RNA (1)...(19): siRNA sense strand
gguacuccaggaccaauug

SEQ ID NO: 498280 - RNA, 19 nt, Homo sapiens
  misc_RNA (1)...(19): siRNA sense strand
aaaggagacccugggauga

SEQ ID NO: 498281 - RNA, 19 nt, Homo sapiens
  misc_RNA (1)...(19): siRNA sense strand
gagccagggaucccaggaa

SEQ ID NO: 498282 - RNA, 19 nt, Homo sapiens
  misc_RNA (1)...(19): siRNA sense strand
gaaccagggaaaggagaga

SEQ ID NO: 498283 - RNA, 19 nt, Homo sapiens
  misc_RNA (1)...(19): siRNA sense strand
gauuacaauggaaacauca

SEQ ID NO: 498284 - RNA, 19 nt, Homo sapiens
  misc_RNA (1)...(19): siRNA sense strand
ggucaaccaggaacuagag

SEQ ID NO: 498285 - RNA, 19 nt, Homo sapiens
  misc_RNA (1)...(19): siRNA sense strand
aaggagagaugguggauua

SEQ ID NO: 498286 - RNA, 19 nt, Homo sapiens
  misc_RNA (1)...(19): siRNA sense strand
cagcugggcuuccugguuu

SEQ ID NO: 498287 - RNA, 19 nt, Homo sapiens
  misc_RNA (1)...(19): siRNA sense strand
ccaaagacaucuccaggau

SEQ ID NO: 498288 - RNA, 19 nt, Homo sapiens
  misc_RNA (1)...(19): siRNA sense strand
gagagaugguggauuacaa

SEQ ID NO: 498289 - RNA, 19 nt, Homo sapiens
  misc_RNA (1)...(19): siRNA sense strand
aaagggaccucgcgguaaa

SEQ ID NO: 498290 - RNA, 19 nt, Homo sapiens
  misc_RNA (1)...(19): siRNA sense strand
gaugguggauuacaaugga

SEQ ID NO: 498291 - RNA, 19 nt, Homo sapiens
  misc_RNA (1)...(19): siRNA sense strand
ggauuacaauggaaacauc

SEQ ID NO: 498292 - RNA, 19 nt, Homo sapiens
  misc_RNA (1)...(19): siRNA sense strand
caagggagaaccagggaaa

SEQ ID NO: 498293 - RNA, 19 nt, Homo sapiens
  misc_RNA (1)...(19): siRNA sense strand
ggaagcaggacuagaugga

SEQ ID NO: 498294 - RNA, 19 nt, Homo sapiens
  misc_RNA (1)...(19): siRNA sense strand
caaggcugcuggaacaagu

SEQ ID NO: 498295 - RNA, 19 nt, Homo sapiens
  misc_RNA (1)...(19): siRNA sense strand
gggagaagcaggugucgau

SEQ ID NO: 498296 - RNA, 19 nt, Homo sapiens
  misc_RNA (1)...(19): siRNA sense strand
ggagaacagggaccagaug

SEQ ID NO: 498297 - RNA, 19 nt, Homo sapiens
  misc_RNA (1)...(19): siRNA sense strand
acaauggaaacaucaauga

SEQ ID NO: 498298 - RNA, 19 nt, Homo sapiens
  misc_RNA (1)...(19): siRNA sense strand
gaaaggagagaugguggau

SEQ ID NO: 498299 - RNA, 19 nt, Homo sapiens
  misc_RNA (1)...(19): siRNA sense strand
cuagagguuucccuggauu

SEQ ID NO: 498300 - RNA, 19 nt, Homo sapiens
  misc_RNA (1)...(19): siRNA sense strand
gcaaauggagacggcuauu

SEQ ID NO: 498301 - RNA, 19 nt, Homo sapiens
  misc_RNA (1)...(19): siRNA sense strand
gaaaggcuuccagggagaa

SEQ ID NO: 498302 - RNA, 19 nt, Homo sapiens
  misc_RNA (1)...(19): siRNA sense strand
gcagcugggcuuccugguu

SEQ ID NO: 498303 - RNA, 19 nt, Homo sapiens
  misc_RNA (1)...(19): siRNA sense strand
ggagagaugguggauuaca

SEQ ID NO: 498304 - RNA, 19 nt, Homo sapiens
  misc_RNA (1)...(19): siRNA sense strand
gaugcuggcaacuccauug

SEQ ID NO: 498305 - RNA, 19 nt, Homo sapiens
  misc_RNA (1)...(19): siRNA sense strand
gcguggagcagcuggagaa

SEQ ID NO: 498306 - RNA, 19 nt, Homo sapiens
  misc_RNA (1)...(19): siRNA sense strand
uggagcagcuggagaacag

SEQ ID NO: 498307 - RNA, 19 nt, Homo sapiens
  misc_RNA (1)...(19): siRNA sense strand
ggauuuccgggucccauug

SEQ ID NO: 498308 - RNA, 19 nt, Homo sapiens
  misc_RNA (1)...(19): siRNA sense strand
gagaugguggauuacaaug

SEQ ID NO: 498309 - RNA, 19 nt, Homo sapiens
  misc_RNA (1)...(19): siRNA sense strand
uagcggagcgcacccacaa

SEQ ID NO: 498310 - RNA, 19 nt, Homo sapiens
  misc_RNA (1)...(19): siRNA sense strand
gggagaaccagggaaagga

SEQ ID NO: 498311 - RNA, 19 nt, Homo sapiens
  misc_RNA (1)...(19): siRNA sense strand
gagccaggccagcauccaa

SEQ ID NO: 498312 - RNA, 19 nt, Homo sapiens
  misc_RNA (1)...(19): siRNA sense strand
gguacuccaggaccaauug

SEQ ID NO: 498313 - RNA, 19 nt, Homo sapiens
  misc_RNA (1)...(19): siRNA sense strand
aaaggagacccugggauga

SEQ ID NO: 498314 - RNA, 19 nt, Homo sapiens
  misc_RNA (1)...(19): siRNA sense strand
gagccagggaucccaggaa

SEQ ID NO: 498315 - RNA, 19 nt, Homo sapiens
  misc_RNA (1)...(19): siRNA sense strand
gaaccagggaaaggagaga

SEQ ID NO: 498316 - RNA, 19 nt, Homo sapiens
  misc_RNA (1)...(19): siRNA sense strand
gauuacaauggaaacauca

SEQ ID NO: 498317 - RNA, 19 nt, Homo sapiens
  misc_RNA (1)...(19): siRNA sense strand
ggucaaccaggaacuagag

SEQ ID NO: 498318 - RNA, 19 nt, Homo sapiens
  misc_RNA (1)...(19): siRNA sense strand
aaggagagaugguggauua

SEQ ID NO: 498319 - RNA, 19 nt, Homo sapiens
  misc_RNA (1)...(19): siRNA sense strand
cagcugggcuuccugguuu

SEQ ID NO: 498320 - RNA, 19 nt, Homo sapiens
  misc_RNA (1)...(19): siRNA sense strand
ccaaagacaucuccaggau

SEQ ID NO: 498321 - RNA, 19 nt, Homo sapiens
  misc_RNA (1)...(19): siRNA sense strand
gagagaugguggauuacaa

SEQ ID NO: 498322 - RNA, 19 nt, Homo sapiens
  misc_RNA (1)...(19): siRNA sense strand
aaagggaccucgcgguaaa

SEQ ID NO: 498323 - RNA, 19 nt, Homo sapiens
  misc_RNA (1)...(19): siRNA sense strand
gaugguggauuacaaugga

SEQ ID NO: 498324 - RNA, 19 nt, Homo sapiens
  misc_RNA (1)...(19): siRNA sense strand
ggauuacaauggaaacauc

SEQ ID NO: 498325 - RNA, 19 nt, Homo sapiens
  misc_RNA (1)...(19): siRNA sense strand
caagggagaaccagggaaa

SEQ ID NO: 498326 - RNA, 19 nt, Homo sapiens
  misc_RNA (1)...(19): siRNA sense strand
ggaagcaggacuagaugga

SEQ ID NO: 498327 - RNA, 19 nt, Homo sapiens
  misc_RNA (1)...(19): siRNA sense strand
caaggcugcuggaacaagu

SEQ ID NO: 498328 - RNA, 19 nt, Homo sapiens
  misc_RNA (1)...(19): siRNA sense strand
gggagaagcaggugucgau

SEQ ID NO: 498329 - RNA, 19 nt, Homo sapiens
  misc_RNA (1)...(19): siRNA sense strand
ggagaacagggaccagaug

SEQ ID NO: 498330 - RNA, 19 nt, Homo sapiens
  misc_RNA (1)...(19): siRNA sense strand
acaauggaaacaucaauga

SEQ ID NO: 498331 - RNA, 19 nt, Homo sapiens
  misc_RNA (1)...(19): siRNA sense strand
gaaaggagagaugguggau

SEQ ID NO: 498332 - RNA, 19 nt, Homo sapiens
  misc_RNA (1)...(19): siRNA sense strand
cuagagguuucccuggauu

SEQ ID NO: 498333 - RNA, 19 nt, Homo sapiens
  misc_RNA (1)...(19): siRNA sense strand
gcaaauggagacggcuauu

SEQ ID NO: 498334 - RNA, 19 nt, Homo sapiens
  misc_RNA (1)...(19): siRNA sense strand
gaaaggcuuccagggagaa

SEQ ID NO: 498335 - RNA, 19 nt, Homo sapiens
  misc_RNA (1)...(19): siRNA sense strand
gcagcugggcuuccugguu

SEQ ID NO: 498336 - RNA, 19 nt, Homo sapiens
  misc_RNA (1)...(19): siRNA sense strand
ggagagaugguggauuaca

SEQ ID NO: 498337 - RNA, 19 nt, Homo sapiens
  misc_RNA (1)...(19): siRNA sense strand
gaugcuggcaacuccauug

SEQ ID NO: 498338 - RNA, 19 nt, Homo sapiens
  misc_RNA (1)...(19): siRNA sense strand
gcguggagcagcuggagaa

SEQ ID NO: 498339 - RNA, 19 nt, Homo sapiens
  misc_RNA (1)...(19): siRNA sense strand
uggagcagcuggagaacag

SEQ ID NO: 498340 - RNA, 19 nt, Homo sapiens
  misc_RNA (1)...(19): siRNA sense strand
ggauuuccgggucccauug

SEQ ID NO: 498341 - RNA, 19 nt, Homo sapiens
  misc_RNA (1)...(19): siRNA sense strand
gagaugguggauuacaaug

SEQ ID NO: 498342 - RNA, 19 nt, Homo sapiens
  misc_RNA (1)...(19): siRNA sense strand
uagcggagcgcacccacaa

SEQ ID NO: 498343 - RNA, 19 nt, Homo sapiens
  misc_RNA (1)...(19): siRNA sense strand
gggagaaccagggaaagga

SEQ ID NO: 498344 - RNA, 19 nt, Homo sapiens
  misc_RNA (1)...(19): siRNA sense strand
gagccaggccagcauccaa

SEQ ID NO: 498345 - RNA, 19 nt, Homo sapiens
  misc_RNA (1)...(19): siRNA sense strand
gguacuccaggaccaauug

SEQ ID NO: 498346 - RNA, 19 nt, Homo sapiens
  misc_RNA (1)...(19): siRNA sense strand
aaaggagacccugggauga

SEQ ID NO: 498347 - RNA, 19 nt, Homo sapiens
  misc_RNA (1)...(19): siRNA sense strand
gagccagggaucccaggaa

SEQ ID NO: 498348 - RNA, 19 nt, Homo sapiens
  misc_RNA (1)...(19): siRNA sense strand
gaaccagggaaaggagaga

SEQ ID NO: 498349 - RNA, 19 nt, Homo sapiens
  misc_RNA (1)...(19): siRNA sense strand
gauuacaauggaaacauca

SEQ ID NO: 498350 - RNA, 19 nt, Homo sapiens
  misc_RNA (1)...(19): siRNA sense strand
ggucaaccaggaacuagag

SEQ ID NO: 498351 - RNA, 19 nt, Homo sapiens
  misc_RNA (1)...(19): siRNA sense strand
aaggagagaugguggauua

SEQ ID NO: 498352 - RNA, 19 nt, Homo sapiens
  misc_RNA (1)...(19): siRNA sense strand
cagcugggcuuccugguuu

SEQ ID NO: 498353 - RNA, 19 nt, Homo sapiens
  misc_RNA (1)...(19): siRNA sense strand
ccaaagacaucuccaggau

SEQ ID NO: 498354 - RNA, 19 nt, Homo sapiens
  misc_RNA (1)...(19): siRNA sense strand
gagagaugguggauuacaa

SEQ ID NO: 498355 - RNA, 19 nt, Homo sapiens
  misc_RNA (1)...(19): siRNA sense strand
aaagggaccucgcgguaaa

SEQ ID NO: 498356 - RNA, 19 nt, Homo sapiens
  misc_RNA (1)...(19): siRNA sense strand
gaugguggauuacaaugga

SEQ ID NO: 498357 - RNA, 19 nt, Homo sapiens
  misc_RNA (1)...(19): siRNA sense strand
ggauuacaauggaaacauc

SEQ ID NO: 498358 - RNA, 19 nt, Homo sapiens
  misc_RNA (1)...(19): siRNA sense strand
caagggagaaccagggaaa

SEQ ID NO: 498359 - RNA, 19 nt, Homo sapiens
  misc_RNA (1)...(19): siRNA sense strand
ggaagcaggacuagaugga

SEQ ID NO: 498360 - RNA, 19 nt, Homo sapiens
  misc_RNA (1)...(19): siRNA sense strand
caaggcugcuggaacaagu

SEQ ID NO: 498361 - RNA, 19 nt, Homo sapiens
  misc_RNA (1)...(19): siRNA sense strand
gggagaagcaggugucgau

SEQ ID NO: 498362 - RNA, 19 nt, Homo sapiens
  misc_RNA (1)...(19): siRNA sense strand
ggagaacagggaccagaug

SEQ ID NO: 498363 - RNA, 19 nt, Homo sapiens
  misc_RNA (1)...(19): siRNA sense strand
acaauggaaacaucaauga

SEQ ID NO: 498364 - RNA, 19 nt, Homo sapiens
  misc_RNA (1)...(19): siRNA sense strand
gaaaggagagaugguggau

SEQ ID NO: 498365 - RNA, 19 nt, Homo sapiens
  misc_RNA (1)...(19): siRNA sense strand
cuagagguuucccuggauu

SEQ ID NO: 498366 - RNA, 19 nt, Homo sapiens
  misc_RNA (1)...(19): siRNA sense strand
gcaaauggagacggcuauu

SEQ ID NO: 498367 - RNA, 19 nt, Homo sapiens
  misc_RNA (1)...(19): siRNA sense strand
gaaaggcuuccagggagaa

SEQ ID NO: 498368 - RNA, 19 nt, Homo sapiens
  misc_RNA (1)...(19): siRNA sense strand
gcagcugggcuuccugguu

SEQ ID NO: 498369 - RNA, 19 nt, Homo sapiens
  misc_RNA (1)...(19): siRNA sense strand
ggagagaugguggauuaca

SEQ ID NO: 498370 - RNA, 19 nt, Homo sapiens
  misc_RNA (1)...(19): siRNA sense strand
gaugcuggcaacuccauug

SEQ ID NO: 498371 - RNA, 19 nt, Homo sapiens
  misc_RNA (1)...(19): siRNA sense strand
gcguggagcagcuggagaa

SEQ ID NO: 498372 - RNA, 19 nt, Homo sapiens
  misc_RNA (1)...(19): siRNA sense strand
uggagcagcuggagaacag

SEQ ID NO: 498373 - RNA, 19 nt, Homo sapiens
  misc_RNA (1)...(19): siRNA sense strand
ggauuuccgggucccauug

SEQ ID NO: 498374 - RNA, 19 nt, Homo sapiens
  misc_RNA (1)...(19): siRNA sense strand
gagaugguggauuacaaug

SEQ ID NO: 498375 - RNA, 19 nt, Homo sapiens
  misc_RNA (1)...(19): siRNA sense strand
uagcggagcgcacccacaa

SEQ ID NO: 498376 - RNA, 19 nt, Homo sapiens
  misc_RNA (1)...(19): siRNA sense strand
gggagaaccagggaaagga

SEQ ID NO: 498377 - RNA, 19 nt, Homo sapiens
  misc_RNA (1)...(19): siRNA sense strand
gagccaggccagcauccaa

SEQ ID NO: 498378 - RNA, 19 nt, Homo sapiens
  misc_RNA (1)...(19): siRNA sense strand
gguacuccaggaccaauug

SEQ ID NO: 498379 - RNA, 19 nt, Homo sapiens
  misc_RNA (1)...(19): siRNA sense strand
aaaggagacccugggauga

SEQ ID NO: 498380 - RNA, 19 nt, Homo sapiens
  misc_RNA (1)...(19): siRNA sense strand
gagccagggaucccaggaa

SEQ ID NO: 498381 - RNA, 19 nt, Homo sapiens
  misc_RNA (1)...(19): siRNA sense strand
gaaccagggaaaggagaga

SEQ ID NO: 498382 - RNA, 19 nt, Homo sapiens
  misc_RNA (1)...(19): siRNA sense strand
gauuacaauggaaacauca

SEQ ID NO: 498383 - RNA, 19 nt, Homo sapiens
  misc_RNA (1)...(19): siRNA sense strand
ggucaaccaggaacuagag

SEQ ID NO: 498384 - RNA, 19 nt, Homo sapiens
  misc_RNA (1)...(19): siRNA sense strand
aaggagagaugguggauua

SEQ ID NO: 498385 - RNA, 19 nt, Homo sapiens
  misc_RNA (1)...(19): siRNA sense strand
cagcugggcuuccugguuu

SEQ ID NO: 498386 - RNA, 19 nt, Homo sapiens
  misc_RNA (1)...(19): siRNA sense strand
ccaaagacaucuccaggau

SEQ ID NO: 498387 - RNA, 19 nt, Homo sapiens
  misc_RNA (1)...(19): siRNA sense strand
gagagaugguggauuacaa

SEQ ID NO: 498388 - RNA, 19 nt, Homo sapiens
  misc_RNA (1)...(19): siRNA sense strand
aaagggaccucgcgguaaa

SEQ ID NO: 498389 - RNA, 19 nt, Homo sapiens
  misc_RNA (1)...(19): siRNA sense strand
gaugguggauuacaaugga

SEQ ID NO: 498390 - RNA, 19 nt, Homo sapiens
  misc_RNA (1)...(19): siRNA sense strand
ggauuacaauggaaacauc

SEQ ID NO: 498391 - RNA, 19 nt, Homo sapiens
  misc_RNA (1)...(19): siRNA sense strand
caagggagaaccagggaaa

SEQ ID NO: 498392 - RNA, 19 nt, Homo sapiens
  misc_RNA (1)...(19): siRNA sense strand
ggaagcaggacuagaugga

SEQ ID NO: 498393 - RNA, 19 nt, Homo sapiens
  misc_RNA (1)...(19): siRNA sense strand
caaggcugcuggaacaagu

SEQ ID NO: 498394 - RNA, 19 nt, Homo sapiens
  misc_RNA (1)...(19): siRNA sense strand
gggagaagcaggugucgau

SEQ ID NO: 498395 - RNA, 19 nt, Homo sapiens
  misc_RNA (1)...(19): siRNA sense strand
ggagaacagggaccagaug

SEQ ID NO: 498396 - RNA, 19 nt, Homo sapiens
  misc_RNA (1)...(19): siRNA sense strand
acaauggaaacaucaauga

SEQ ID NO: 498397 - RNA, 19 nt, Homo sapiens
  misc_RNA (1)...(19): siRNA sense strand
gaaaggagagaugguggau

SEQ ID NO: 498398 - RNA, 19 nt, Homo sapiens
  misc_RNA (1)...(19): siRNA sense strand
cuagagguuucccuggauu

SEQ ID NO: 498399 - RNA, 19 nt, Homo sapiens
  misc_RNA (1)...(19): siRNA sense strand
gcaaauggagacggcuauu

SEQ ID NO: 498400 - RNA, 19 nt, Homo sapiens
  misc_RNA (1)...(19): siRNA sense strand
gaaaggcuuccagggagaa

SEQ ID NO: 498401 - RNA, 19 nt, Homo sapiens
  misc_RNA (1)...(19): siRNA sense strand
gcagcugggcuuccugguu

SEQ ID NO: 498402 - RNA, 19 nt, Homo sapiens
  misc_RNA (1)...(19): siRNA sense strand
ggagagaugguggauuaca

SEQ ID NO: 498403 - RNA, 19 nt, Homo sapiens
  misc_RNA (1)...(19): siRNA sense strand
gaugcuggcaacuccauug

SEQ ID NO: 498404 - RNA, 19 nt, Homo sapiens
  misc_RNA (1)...(19): siRNA sense strand
gcguggagcagcuggagaa

SEQ ID NO: 498405 - RNA, 19 nt, Homo sapiens
  misc_RNA (1)...(19): siRNA sense strand
uggagcagcuggagaacag

SEQ ID NO: 498406 - RNA, 19 nt, Homo sapiens
  misc_RNA (1)...(19): siRNA sense strand
ggauuuccgggucccauug

SEQ ID NO: 498407 - RNA, 19 nt, Homo sapiens
  misc_RNA (1)...(19): siRNA sense strand
gagaugguggauuacaaug

SEQ ID NO: 498408 - RNA, 19 nt, Homo sapiens
  misc_RNA (1)...(19): siRNA sense strand
uagcggagcgcacccacaa

SEQ ID NO: 498409 - RNA, 19 nt, Homo sapiens
  misc_RNA (1)...(19): siRNA sense strand
gggagaaccagggaaagga

SEQ ID NO: 498410 - RNA, 19 nt, Homo sapiens
  misc_RNA (1)...(19): siRNA sense strand
gagccaggccagcauccaa

SEQ ID NO: 498411 - RNA, 19 nt, Homo sapiens
  misc_RNA (1)...(19): siRNA sense strand
gguacuccaggaccaauug

SEQ ID NO: 498412 - RNA, 19 nt, Homo sapiens
  misc_RNA (1)...(19): siRNA sense strand
aaaggagacccugggauga

SEQ ID NO: 498413 - RNA, 19 nt, Homo sapiens
  misc_RNA (1)...(19): siRNA sense strand
gagccagggaucccaggaa

SEQ ID NO: 498414 - RNA, 19 nt, Homo sapiens
  misc_RNA (1)...(19): siRNA sense strand
gaaccagggaaaggagaga

SEQ ID NO: 498415 - RNA, 19 nt, Homo sapiens
  misc_RNA (1)...(19): siRNA sense strand
gauuacaauggaaacauca

SEQ ID NO: 498416 - RNA, 19 nt, Homo sapiens
  misc_RNA (1)...(19): siRNA sense strand
ggucaaccaggaacuagag

SEQ ID NO: 498417 - RNA, 19 nt, Homo sapiens
  misc_RNA (1)...(19): siRNA sense strand
aaggagagaugguggauua

SEQ ID NO: 498418 - RNA, 19 nt, Homo sapiens
  misc_RNA (1)...(19): siRNA sense strand
cagcugggcuuccugguuu

SEQ ID NO: 498419 - RNA, 19 nt, Homo sapiens
  misc_RNA (1)...(19): siRNA sense strand
ccaaagacaucuccaggau

SEQ ID NO: 498420 - RNA, 19 nt, Homo sapiens
  misc_RNA (1)...(19): siRNA sense strand
gagagaugguggauuacaa

SEQ ID NO: 498421 - RNA, 19 nt, Homo sapiens
  misc_RNA (1)...(19): siRNA sense strand
aaagggaccucgcgguaaa

SEQ ID NO: 498422 - RNA, 19 nt, Homo sapiens
  misc_RNA (1)...(19): siRNA sense strand
gaugguggauuacaaugga

SEQ ID NO: 498423 - RNA, 19 nt, Homo sapiens
  misc_RNA (1)...(19): siRNA sense strand
ggauuacaauggaaacauc

SEQ ID NO: 498424 - RNA, 19 nt, Homo sapiens
  misc_RNA (1)...(19): siRNA sense strand
caagggagaaccagggaaa

SEQ ID NO: 498425 - RNA, 19 nt, Homo sapiens
  misc_RNA (1)...(19): siRNA sense strand
ggaagcaggacuagaugga

SEQ ID NO: 498426 - RNA, 19 nt, Homo sapiens
  misc_RNA (1)...(19): siRNA sense strand
caaggcugcuggaacaagu

SEQ ID NO: 498427 - RNA, 19 nt, Homo sapiens
  misc_RNA (1)...(19): siRNA sense strand
gggagaagcaggugucgau

SEQ ID NO: 498428 - RNA, 19 nt, Homo sapiens
  misc_RNA (1)...(19): siRNA sense strand
ggagaacagggaccagaug

SEQ ID NO: 498429 - RNA, 19 nt, Homo sapiens
  misc_RNA (1)...(19): siRNA sense strand
acaauggaaacaucaauga

SEQ ID NO: 498430 - RNA, 19 nt, Homo sapiens
  misc_RNA (1)...(19): siRNA sense strand
gaaaggagagaugguggau

SEQ ID NO: 498431 - RNA, 19 nt, Homo sapiens
  misc_RNA (1)...(19): siRNA sense strand
cuagagguuucccuggauu

SEQ ID NO: 498432 - RNA, 19 nt, Homo sapiens
  misc_RNA (1)...(19): siRNA sense strand
gcaaauggagacggcuauu

SEQ ID NO: 498433 - RNA, 19 nt, Homo sapiens
  misc_RNA (1)...(19): siRNA sense strand
gaaaggcuuccagggagaa

SEQ ID NO: 498434 - RNA, 19 nt, Homo sapiens
  misc_RNA (1)...(19): siRNA sense strand
gcagcugggcuuccugguu

SEQ ID NO: 498435 - RNA, 19 nt, Homo sapiens
  misc_RNA (1)...(19): siRNA sense strand
ggagagaugguggauuaca

SEQ ID NO: 498436 - RNA, 19 nt, Homo sapiens
  misc_RNA (1)...(19): siRNA sense strand
gaugcuggcaacuccauug

SEQ ID NO: 498437 - RNA, 19 nt, Homo sapiens
  misc_RNA (1)...(19): siRNA sense strand
gcguggagcagcuggagaa

SEQ ID NO: 498438 - RNA, 19 nt, Homo sapiens
  misc_RNA (1)...(19): siRNA sense strand
uggagcagcuggagaacag

SEQ ID NO: 498439 - RNA, 19 nt, Homo sapiens
  misc_RNA (1)...(19): siRNA sense strand
ggauuuccgggucccauug

SEQ ID NO: 498440 - RNA, 19 nt, Homo sapiens
  misc_RNA (1)...(19): siRNA sense strand
gagaugguggauuacaaug

SEQ ID NO: 498441 - RNA, 19 nt, Homo sapiens
  misc_RNA (1)...(19): siRNA sense strand
uagcggagcgcacccacaa

SEQ ID NO: 498442 - RNA, 19 nt, Homo sapiens
  misc_RNA (1)...(19): siRNA sense strand
gggagaaccagggaaagga

SEQ ID NO: 498443 - RNA, 19 nt, Homo sapiens
  misc_RNA (1)...(19): siRNA sense strand
gagccaggccagcauccaa

SEQ ID NO: 498444 - RNA, 19 nt, Homo sapiens
  misc_RNA (1)...(19): siRNA sense strand
gguacuccaggaccaauug

SEQ ID NO: 498445 - RNA, 19 nt, Homo sapiens
  misc_RNA (1)...(19): siRNA sense strand
aaaggagacccugggauga

SEQ ID NO: 498446 - RNA, 19 nt, Homo sapiens
  misc_RNA (1)...(19): siRNA sense strand
gagccagggaucccaggaa

SEQ ID NO: 498447 - RNA, 19 nt, Homo sapiens
  misc_RNA (1)...(19): siRNA sense strand
gaaccagggaaaggagaga

SEQ ID NO: 498448 - RNA, 19 nt, Homo sapiens
  misc_RNA (1)...(19): siRNA sense strand
gauuacaauggaaacauca

SEQ ID NO: 498449 - RNA, 19 nt, Homo sapiens
  misc_RNA (1)...(19): siRNA sense strand
ggucaaccaggaacuagag

SEQ ID NO: 498450 - RNA, 19 nt, Homo sapiens
  misc_RNA (1)...(19): siRNA sense strand
aaggagagaugguggauua

SEQ ID NO: 498451 - RNA, 19 nt, Homo sapiens
  misc_RNA (1)...(19): siRNA sense strand
cagcugggcuuccugguuu

SEQ ID NO: 498452 - RNA, 19 nt, Homo sapiens
  misc_RNA (1)...(19): siRNA sense strand
ccaaagacaucuccaggau

SEQ ID NO: 498453 - RNA, 19 nt, Homo sapiens
  misc_RNA (1)...(19): siRNA sense strand
gagagaugguggauuacaa

SEQ ID NO: 498454 - RNA, 19 nt, Homo sapiens
  misc_RNA (1)...(19): siRNA sense strand
aaagggaccucgcgguaaa

SEQ ID NO: 498455 - RNA, 19 nt, Homo sapiens
  misc_RNA (1)...(19): siRNA sense strand
gaugguggauuacaaugga

SEQ ID NO: 498456 - RNA, 19 nt, Homo sapiens
  misc_RNA (1)...(19): siRNA sense strand
ggauuacaauggaaacauc

SEQ ID NO: 498457 - RNA, 19 nt, Homo sapiens
  misc_RNA (1)...(19): siRNA sense strand
caagggagaaccagggaaa

SEQ ID NO: 498458 - RNA, 19 nt, Homo sapiens
  misc_RNA (1)...(19): siRNA sense strand
ggaagcaggacuagaugga

SEQ ID NO: 498459 - RNA, 19 nt, Homo sapiens
  misc_RNA (1)...(19): siRNA sense strand
caaggcugcuggaacaagu

SEQ ID NO: 498460 - RNA, 19 nt, Homo sapiens
  misc_RNA (1)...(19): siRNA sense strand
gggagaagcaggugucgau

SEQ ID NO: 498461 - RNA, 19 nt, Homo sapiens
  misc_RNA (1)...(19): siRNA sense strand
ggagaacagggaccagaug

SEQ ID NO: 498462 - RNA, 19 nt, Homo sapiens
  misc_RNA (1)...(19): siRNA sense strand
acaauggaaacaucaauga

SEQ ID NO: 498463 - RNA, 19 nt, Homo sapiens
  misc_RNA (1)...(19): siRNA sense strand
gaaaggagagaugguggau

SEQ ID NO: 498464 - RNA, 19 nt, Homo sapiens
  misc_RNA (1)...(19): siRNA sense strand
cuagagguuucccuggauu

SEQ ID NO: 498465 - RNA, 19 nt, Homo sapiens
  misc_RNA (1)...(19): siRNA sense strand
gcaaauggagacggcuauu

SEQ ID NO: 498466 - RNA, 19 nt, Homo sapiens
  misc_RNA (1)...(19): siRNA sense strand
gaaaggcuuccagggagaa

SEQ ID NO: 498467 - RNA, 19 nt, Homo sapiens
  misc_RNA (1)...(19): siRNA sense strand
gcagcugggcuuccugguu

SEQ ID NO: 498468 - RNA, 19 nt, Homo sapiens
  misc_RNA (1)...(19): siRNA sense strand
ggagagaugguggauuaca

SEQ ID NO: 498469 - RNA, 19 nt, Homo sapiens
  misc_RNA (1)...(19): siRNA sense strand
gaugcuggcaacuccauug

SEQ ID NO: 498470 - RNA, 19 nt, Homo sapiens
  misc_RNA (1)...(19): siRNA sense strand
gcguggagcagcuggagaa

SEQ ID NO: 498471 - RNA, 19 nt, Homo sapiens
  misc_RNA (1)...(19): siRNA sense strand
uggagcagcuggagaacag

SEQ ID NO: 498472 - RNA, 19 nt, Homo sapiens
  misc_RNA (1)...(19): siRNA sense strand
ggauuuccgggucccauug

SEQ ID NO: 498473 - RNA, 19 nt, Homo sapiens
  misc_RNA (1)...(19): siRNA sense strand
gagaugguggauuacaaug

SEQ ID NO: 498474 - RNA, 19 nt, Homo sapiens
  misc_RNA (1)...(19): siRNA sense strand
uagcggagcgcacccacaa

SEQ ID NO: 498475 - RNA, 19 nt, Homo sapiens
  misc_RNA (1)...(19): siRNA sense strand
gggagaaccagggaaagga

SEQ ID NO: 498476 - RNA, 19 nt, Homo sapiens
  misc_RNA (1)...(19): siRNA sense strand
gagccaggccagcauccaa

SEQ ID NO: 498477 - RNA, 19 nt, Homo sapiens
  misc_RNA (1)...(19): siRNA sense strand
gguacuccaggaccaauug

SEQ ID NO: 498478 - RNA, 19 nt, Homo sapiens
  misc_RNA (1)...(19): siRNA sense strand
aaaggagacccugggauga

SEQ ID NO: 498479 - RNA, 19 nt, Homo sapiens
  misc_RNA (1)...(19): siRNA sense strand
gagccagggaucccaggaa

SEQ ID NO: 498480 - RNA, 19 nt, Homo sapiens
  misc_RNA (1)...(19): siRNA sense strand
gaaccagggaaaggagaga

SEQ ID NO: 498481 - RNA, 19 nt, Homo sapiens
  misc_RNA (1)...(19): siRNA sense strand
gauuacaauggaaacauca

SEQ ID NO: 498482 - RNA, 19 nt, Homo sapiens
  misc_RNA (1)...(19): siRNA sense strand
ggucaaccaggaacuagag

SEQ ID NO: 498483 - RNA, 19 nt, Homo sapiens
  misc_RNA (1)...(19): siRNA sense strand
aaggagagaugguggauua

SEQ ID NO: 498484 - RNA, 19 nt, Homo sapiens
  misc_RNA (1)...(19): siRNA sense strand
cagcugggcuuccugguuu

SEQ ID NO: 498485 - RNA, 19 nt, Homo sapiens
  misc_RNA (1)...(19): siRNA sense strand
ccaaagacaucuccaggau

SEQ ID NO: 498486 - RNA, 19 nt, Homo sapiens
  misc_RNA (1)...(19): siRNA sense strand
gagagaugguggauuacaa

SEQ ID NO: 498487 - RNA, 19 nt, Homo sapiens
  misc_RNA (1)...(19): siRNA sense strand
aaagggaccucgcgguaaa

SEQ ID NO: 498488 - RNA, 19 nt, Homo sapiens
  misc_RNA (1)...(19): siRNA sense strand
gaugguggauuacaaugga

SEQ ID NO: 498489 - RNA, 19 nt, Homo sapiens
  misc_RNA (1)...(19): siRNA sense strand
ggauuacaauggaaacauc

SEQ ID NO: 498490 - RNA, 19 nt, Homo sapiens
  misc_RNA (1)...(19): siRNA sense strand
caagggagaaccagggaaa

SEQ ID NO: 498491 - RNA, 19 nt, Homo sapiens
  misc_RNA (1)...(19): siRNA sense strand
ggaagcaggacuagaugga

SEQ ID NO: 498492 - RNA, 19 nt, Homo sapiens
  misc_RNA (1)...(19): siRNA sense strand
caaggcugcuggaacaagu

SEQ ID NO: 498493 - RNA, 19 nt, Homo sapiens
  misc_RNA (1)...(19): siRNA sense strand
gggagaagcaggugucgau

SEQ ID NO: 498494 - RNA, 19 nt, Homo sapiens
  misc_RNA (1)...(19): siRNA sense strand
ggagaacagggaccagaug

SEQ ID NO: 498495 - RNA, 19 nt, Homo sapiens
  misc_RNA (1)...(19): siRNA sense strand
acaauggaaacaucaauga

SEQ ID NO: 498496 - RNA, 19 nt, Homo sapiens
  misc_RNA (1)...(19): siRNA sense strand
gaaaggagagaugguggau

SEQ ID NO: 498497 - RNA, 19 nt, Homo sapiens
  misc_RNA (1)...(19): siRNA sense strand
cuagagguuucccuggauu

SEQ ID NO: 498498 - RNA, 19 nt, Homo sapiens
  misc_RNA (1)...(19): siRNA sense strand
gcaaauggagacggcuauu

SEQ ID NO: 498499 - RNA, 19 nt, Homo sapiens
  misc_RNA (1)...(19): siRNA sense strand
gaaaggcuuccagggagaa

SEQ ID NO: 498500 - RNA, 19 nt, Homo sapiens
  misc_RNA (1)...(19): siRNA sense strand
gcagcugggcuuccugguu

SEQ ID NO: 498501 - RNA, 19 nt, Homo sapiens
  misc_RNA (1)...(19): siRNA sense strand
ggagagaugguggauuaca

SEQ ID NO: 498502 - RNA, 19 nt, Homo sapiens
  misc_RNA (1)...(19): siRNA sense strand
gaugcuggcaacuccauug

SEQ ID NO: 498503 - RNA, 19 nt, Homo sapiens
  misc_RNA (1)...(19): siRNA sense strand
gcguggagcagcuggagaa

SEQ ID NO: 498504 - RNA, 19 nt, Homo sapiens
  misc_RNA (1)...(19): siRNA sense strand
uggagcagcuggagaacag

SEQ ID NO: 498505 - RNA, 19 nt, Homo sapiens
  misc_RNA (1)...(19): siRNA sense strand
ggauuuccgggucccauug

SEQ ID NO: 498506 - RNA, 19 nt, Homo sapiens
  misc_RNA (1)...(19): siRNA sense strand
gagaugguggauuacaaug

SEQ ID NO: 498507 - RNA, 19 nt, Homo sapiens
  misc_RNA (1)...(19): siRNA sense strand
uagcggagcgcacccacaa

SEQ ID NO: 498508 - RNA, 19 nt, Homo sapiens
  misc_RNA (1)...(19): siRNA sense strand
gggagaaccagggaaagga

SEQ ID NO: 498509 - RNA, 19 nt, Homo sapiens
  misc_RNA (1)...(19): siRNA sense strand
gagccaggccagcauccaa

SEQ ID NO: 498510 - RNA, 19 nt, Homo sapiens
  misc_RNA (1)...(19): siRNA sense strand
gguacuccaggaccaauug

SEQ ID NO: 498511 - RNA, 19 nt, Homo sapiens
  misc_RNA (1)...(19): siRNA sense strand
aaaggagacccugggauga

SEQ ID NO: 498512 - RNA, 19 nt, Homo sapiens
  misc_RNA (1)...(19): siRNA sense strand
gagccagggaucccaggaa

SEQ ID NO: 498513 - RNA, 19 nt, Homo sapiens
  misc_RNA (1)...(19): siRNA sense strand
gaaccagggaaaggagaga

SEQ ID NO: 498514 - RNA, 19 nt, Homo sapiens
  misc_RNA (1)...(19): siRNA sense strand
gauuacaauggaaacauca

SEQ ID NO: 498515 - RNA, 19 nt, Homo sapiens
  misc_RNA (1)...(19): siRNA sense strand
ggucaaccaggaacuagag

SEQ ID NO: 498516 - RNA, 19 nt, Homo sapiens
  misc_RNA (1)...(19): siRNA sense strand
aaggagagaugguggauua

SEQ ID NO: 498517 - RNA, 19 nt, Homo sapiens
  misc_RNA (1)...(19): siRNA sense strand
cagcugggcuuccugguuu

SEQ ID NO: 498518 - RNA, 19 nt, Homo sapiens
  misc_RNA (1)...(19): siRNA sense strand
ccaaagacaucuccaggau

SEQ ID NO: 498519 - RNA, 19 nt, Homo sapiens
  misc_RNA (1)...(19): siRNA sense strand
gagagaugguggauuacaa

SEQ ID NO: 498520 - RNA, 19 nt, Homo sapiens
  misc_RNA (1)...(19): siRNA sense strand
aaagggaccucgcgguaaa

SEQ ID NO: 498521 - RNA, 19 nt, Homo sapiens
  misc_RNA (1)...(19): siRNA sense strand
gaugguggauuacaaugga

SEQ ID NO: 498522 - RNA, 19 nt, Homo sapiens
  misc_RNA (1)...(19): siRNA sense strand
ggauuacaauggaaacauc

SEQ ID NO: 498523 - RNA, 19 nt, Homo sapiens
  misc_RNA (1)...(19): siRNA sense strand
caagggagaaccagggaaa

SEQ ID NO: 498524 - RNA, 19 nt, Homo sapiens
  misc_RNA (1)...(19): siRNA sense strand
ggaagcaggacuagaugga

SEQ ID NO: 498525 - RNA, 19 nt, Homo sapiens
  misc_RNA (1)...(19): siRNA sense strand
caaggcugcuggaacaagu

SEQ ID NO: 498526 - RNA, 19 nt, Homo sapiens
  misc_RNA (1)...(19): siRNA sense strand
gggagaagcaggugucgau

SEQ ID NO: 498527 - RNA, 19 nt, Homo sapiens
  misc_RNA (1)...(19): siRNA sense strand
ggagaacagggaccagaug

SEQ ID NO: 498528 - RNA, 19 nt, Homo sapiens
  misc_RNA (1)...(19): siRNA sense strand
acaauggaaacaucaauga

SEQ ID NO: 498529 - RNA, 19 nt, Homo sapiens
  misc_RNA (1)...(19): siRNA sense strand
gaaaggagagaugguggau

SEQ ID NO: 498530 - RNA, 19 nt, Homo sapiens
  misc_RNA (1)...(19): siRNA sense strand
cuagagguuucccuggauu

SEQ ID NO: 498531 - RNA, 19 nt, Homo sapiens
  misc_RNA (1)...(19): siRNA sense strand
gcaaauggagacggcuauu

SEQ ID NO: 498532 - RNA, 19 nt, Homo sapiens
  misc_RNA (1)...(19): siRNA sense strand
gaaaggcuuccagggagaa

SEQ ID NO: 498533 - RNA, 19 nt, Homo sapiens
  misc_RNA (1)...(19): siRNA sense strand
gcagcugggcuuccugguu

SEQ ID NO: 498534 - RNA, 19 nt, Homo sapiens
  misc_RNA (1)...(19): siRNA sense strand
ggagagaugguggauuaca

SEQ ID NO: 498535 - RNA, 19 nt, Homo sapiens
  misc_RNA (1)...(19): siRNA sense strand
gaugcuggcaacuccauug

SEQ ID NO: 498536 - RNA, 19 nt, Homo sapiens
  misc_RNA (1)...(19): siRNA sense strand
gcguggagcagcuggagaa

SEQ ID NO: 498537 - RNA, 19 nt, Homo sapiens
  misc_RNA (1)...(19): siRNA sense strand
uggagcagcuggagaacag

SEQ ID NO: 498538 - RNA, 19 nt, Homo sapiens
  misc_RNA (1)...(19): siRNA sense strand
ggauuuccgggucccauug

SEQ ID NO: 498539 - RNA, 19 nt, Homo sapiens
  misc_RNA (1)...(19): siRNA sense strand
gagaugguggauuacaaug

SEQ ID NO: 498540 - RNA, 19 nt, Homo sapiens
  misc_RNA (1)...(19): siRNA sense strand
uagcggagcgcacccacaa

SEQ ID NO: 498541 - RNA, 19 nt, Homo sapiens
  misc_RNA (1)...(19): siRNA sense strand
gggagaaccagggaaagga

SEQ ID NO: 498542 - RNA, 19 nt, Homo sapiens
  misc_RNA (1)...(19): siRNA sense strand
gagccaggccagcauccaa

SEQ ID NO: 498543 - RNA, 19 nt, Homo sapiens
  misc_RNA (1)...(19): siRNA sense strand
gguacuccaggaccaauug

SEQ ID NO: 498544 - RNA, 19 nt, Homo sapiens
  misc_RNA (1)...(19): siRNA sense strand
aaaggagacccugggauga

SEQ ID NO: 498545 - RNA, 19 nt, Homo sapiens
  misc_RNA (1)...(19): siRNA sense strand
gagccagggaucccaggaa

SEQ ID NO: 498546 - RNA, 19 nt, Homo sapiens
  misc_RNA (1)...(19): siRNA sense strand
gaaccagggaaaggagaga

SEQ ID NO: 498547 - RNA, 19 nt, Homo sapiens
  misc_RNA (1)...(19): siRNA sense strand
gauuacaauggaaacauca

SEQ ID NO: 498548 - RNA, 19 nt, Homo sapiens
  misc_RNA (1)...(19): siRNA sense strand
ggucaaccaggaacuagag

SEQ ID NO: 498549 - RNA, 19 nt, Homo sapiens
  misc_RNA (1)...(19): siRNA sense strand
aaggagagaugguggauua

SEQ ID NO: 498550 - RNA, 19 nt, Homo sapiens
  misc_RNA (1)...(19): siRNA sense strand
cagcugggcuuccugguuu

SEQ ID NO: 498551 - RNA, 19 nt, Homo sapiens
  misc_RNA (1)...(19): siRNA sense strand
ccaaagacaucuccaggau

SEQ ID NO: 498552 - RNA, 19 nt, Homo sapiens
  misc_RNA (1)...(19): siRNA sense strand
gagagaugguggauuacaa

SEQ ID NO: 498553 - RNA, 19 nt, Homo sapiens
  misc_RNA (1)...(19): siRNA sense strand
aaagggaccucgcgguaaa

SEQ ID NO: 498554 - RNA, 19 nt, Homo sapiens
  misc_RNA (1)...(19): siRNA sense strand
gaugguggauuacaaugga

SEQ ID NO: 498555 - RNA, 19 nt, Homo sapiens
  misc_RNA (1)...(19): siRNA sense strand
ggauuacaauggaaacauc

SEQ ID NO: 498556 - RNA, 19 nt, Homo sapiens
  misc_RNA (1)...(19): siRNA sense strand
caagggagaaccagggaaa

SEQ ID NO: 498557 - RNA, 19 nt, Homo sapiens
  misc_RNA (1)...(19): siRNA sense strand
ggaagcaggacuagaugga

SEQ ID NO: 498558 - RNA, 19 nt, Homo sapiens
  misc_RNA (1)...(19): siRNA sense strand
caaggcugcuggaacaagu

SEQ ID NO: 498559 - RNA, 19 nt, Homo sapiens
  misc_RNA (1)...(19): siRNA sense strand
gggagaagcaggugucgau

SEQ ID NO: 498560 - RNA, 19 nt, Homo sapiens
  misc_RNA (1)...(19): siRNA sense strand
ggagaacagggaccagaug

SEQ ID NO: 498561 - RNA, 19 nt, Homo sapiens
  misc_RNA (1)...(19): siRNA sense strand
acaauggaaacaucaauga

SEQ ID NO: 498562 - RNA, 19 nt, Homo sapiens
  misc_RNA (1)...(19): siRNA sense strand
gaaaggagagaugguggau

SEQ ID NO: 498563 - RNA, 19 nt, Homo sapiens
  misc_RNA (1)...(19): siRNA sense strand
cuagagguuucccuggauu

SEQ ID NO: 498564 - RNA, 19 nt, Homo sapiens
  misc_RNA (1)...(19): siRNA sense strand
gcaaauggagacggcuauu

SEQ ID NO: 498565 - RNA, 19 nt, Homo sapiens
  misc_RNA (1)...(19): siRNA sense strand
gaaaggcuuccagggagaa

SEQ ID NO: 498566 - RNA, 19 nt, Homo sapiens
  misc_RNA (1)...(19): siRNA sense strand
gcagcugggcuuccugguu

SEQ ID NO: 498567 - RNA, 19 nt, Homo sapiens
  misc_RNA (1)...(19): siRNA sense strand
ggagagaugguggauuaca

SEQ ID NO: 498568 - RNA, 19 nt, Homo sapiens
  misc_RNA (1)...(19): siRNA sense strand
gaugcuggcaacuccauug

SEQ ID NO: 498569 - RNA, 19 nt, Homo sapiens
  misc_RNA (1)...(19): siRNA sense strand
gcguggagcagcuggagaa

SEQ ID NO: 498570 - RNA, 19 nt, Homo sapiens
  misc_RNA (1)...(19): siRNA sense strand
uggagcagcuggagaacag

SEQ ID NO: 498571 - RNA, 19 nt, Homo sapiens
  misc_RNA (1)...(19): siRNA sense strand
ggauuuccgggucccauug

SEQ ID NO: 498572 - RNA, 19 nt, Homo sapiens
  misc_RNA (1)...(19): siRNA sense strand
gagaugguggauuacaaug

SEQ ID NO: 498573 - RNA, 19 nt, Homo sapiens
  misc_RNA (1)...(19): siRNA sense strand
uagcggagcgcacccacaa

SEQ ID NO: 498574 - RNA, 19 nt, Homo sapiens
  misc_RNA (1)...(19): siRNA sense strand
gggagaaccagggaaagga

SEQ ID NO: 498575 - RNA, 19 nt, Homo sapiens
  misc_RNA (1)...(19): siRNA sense strand
gagccaggccagcauccaa

SEQ ID NO: 498576 - RNA, 19 nt, Homo sapiens
  misc_RNA (1)...(19): siRNA sense strand
gguacuccaggaccaauug

SEQ ID NO: 498577 - RNA, 19 nt, Homo sapiens
  misc_RNA (1)...(19): siRNA sense strand
aaaggagacccugggauga

SEQ ID NO: 498578 - RNA, 19 nt, Homo sapiens
  misc_RNA (1)...(19): siRNA sense strand
gagccagggaucccaggaa

SEQ ID NO: 498579 - RNA, 19 nt, Homo sapiens
  misc_RNA (1)...(19): siRNA sense strand
gaaccagggaaaggagaga

SEQ ID NO: 498580 - RNA, 19 nt, Homo sapiens
  misc_RNA (1)...(19): siRNA sense strand
gauuacaauggaaacauca

SEQ ID NO: 498581 - RNA, 19 nt, Homo sapiens
  misc_RNA (1)...(19): siRNA sense strand
ggucaaccaggaacuagag

SEQ ID NO: 498582 - RNA, 19 nt, Homo sapiens
  misc_RNA (1)...(19): siRNA sense strand
aaggagagaugguggauua

SEQ ID NO: 498583 - RNA, 19 nt, Homo sapiens
  misc_RNA (1)...(19): siRNA sense strand
cagcugggcuuccugguuu

SEQ ID NO: 498584 - RNA, 19 nt, Homo sapiens
  misc_RNA (1)...(19): siRNA sense strand
ccaaagacaucuccaggau

SEQ ID NO: 498585 - RNA, 19 nt, Homo sapiens
  misc_RNA (1)...(19): siRNA sense strand
gagagaugguggauuacaa

SEQ ID NO: 498586 - RNA, 19 nt, Homo sapiens
  misc_RNA (1)...(19): siRNA sense strand
aaagggaccucgcgguaaa

SEQ ID NO: 498587 - RNA, 19 nt, Homo sapiens
  misc_RNA (1)...(19): siRNA sense strand
gaugguggauuacaaugga

SEQ ID NO: 498588 - RNA, 19 nt, Homo sapiens
  misc_RNA (1)...(19): siRNA sense strand
ggauuacaauggaaacauc

SEQ ID NO: 498589 - RNA, 19 nt, Homo sapiens
  misc_RNA (1)...(19): siRNA sense strand
caagggagaaccagggaaa

SEQ ID NO: 498590 - RNA, 19 nt, Homo sapiens
  misc_RNA (1)...(19): siRNA sense strand
ggaagcaggacuagaugga

SEQ ID NO: 498591 - RNA, 19 nt, Homo sapiens
  misc_RNA (1)...(19): siRNA sense strand
caaggcugcuggaacaagu

SEQ ID NO: 498592 - RNA, 19 nt, Homo sapiens
  misc_RNA (1)...(19): siRNA sense strand
gggagaagcaggugucgau

SEQ ID NO: 498593 - RNA, 19 nt, Homo sapiens
  misc_RNA (1)...(19): siRNA sense strand
ggagaacagggaccagaug

SEQ ID NO: 498594 - RNA, 19 nt, Homo sapiens
  misc_RNA (1)...(19): siRNA sense strand
acaauggaaacaucaauga

SEQ ID NO: 498595 - RNA, 19 nt, Homo sapiens
  misc_RNA (1)...(19): siRNA sense strand
gaaaggagagaugguggau

SEQ ID NO: 498596 - RNA, 19 nt, Homo sapiens
  misc_RNA (1)...(19): siRNA sense strand
cuagagguuucccuggauu

SEQ ID NO: 498597 - RNA, 19 nt, Homo sapiens
  misc_RNA (1)...(19): siRNA sense strand
gcaaauggagacggcuauu

SEQ ID NO: 498598 - RNA, 19 nt, Homo sapiens
  misc_RNA (1)...(19): siRNA sense strand
gaaaggcuuccagggagaa

SEQ ID NO: 498599 - RNA, 19 nt, Homo sapiens
  misc_RNA (1)...(19): siRNA sense strand
gcagcugggcuuccugguu

SEQ ID NO: 498600 - RNA, 19 nt, Homo sapiens
  misc_RNA (1)...(19): siRNA sense strand
ggagagaugguggauuaca

SEQ ID NO: 498601 - RNA, 19 nt, Homo sapiens
  misc_RNA (1)...(19): siRNA sense strand
gaugcuggcaacuccauug

SEQ ID NO: 498602 - RNA, 19 nt, Homo sapiens
  misc_RNA (1)...(19): siRNA sense strand
gcguggagcagcuggagaa

SEQ ID NO: 498603 - RNA, 19 nt, Homo sapiens
  misc_RNA (1)...(19): siRNA sense strand
uggagcagcuggagaacag

SEQ ID NO: 498604 - RNA, 19 nt, Homo sapiens
  misc_RNA (1)...(19): siRNA sense strand
ggauuuccgggucccauug

SEQ ID NO: 498605 - RNA, 19 nt, Homo sapiens
  misc_RNA (1)...(19): siRNA sense strand
gagaugguggauuacaaug

SEQ ID NO: 498606 - RNA, 19 nt, Homo sapiens
  misc_RNA (1)...(19): siRNA sense strand
uagcggagcgcacccacaa

SEQ ID NO: 498607 - RNA, 19 nt, Homo sapiens
  misc_RNA (1)...(19): siRNA sense strand
gggagaaccagggaaagga

SEQ ID NO: 498608 - RNA, 19 nt, Homo sapiens
  misc_RNA (1)...(19): siRNA sense strand
gagccaggccagcauccaa

SEQ ID NO: 498609 - RNA, 19 nt, Homo sapiens
  misc_RNA (1)...(19): siRNA sense strand
gguacuccaggaccaauug

SEQ ID NO: 498610 - RNA, 19 nt, Homo sapiens
  misc_RNA (1)...(19): siRNA sense strand
aaaggagacccugggauga

SEQ ID NO: 498611 - RNA, 19 nt, Homo sapiens
  misc_RNA (1)...(19): siRNA sense strand
gagccagggaucccaggaa

SEQ ID NO: 498612 - RNA, 19 nt, Homo sapiens
  misc_RNA (1)...(19): siRNA sense strand
gaaccagggaaaggagaga

SEQ ID NO: 498613 - RNA, 19 nt, Homo sapiens
  misc_RNA (1)...(19): siRNA sense strand
gauuacaauggaaacauca

SEQ ID NO: 498614 - RNA, 19 nt, Homo sapiens
  misc_RNA (1)...(19): siRNA sense strand
ggucaaccaggaacuagag

SEQ ID NO: 498615 - RNA, 19 nt, Homo sapiens
  misc_RNA (1)...(19): siRNA sense strand
aaggagagaugguggauua

SEQ ID NO: 498616 - RNA, 19 nt, Homo sapiens
  misc_RNA (1)...(19): siRNA sense strand
cagcugggcuuccugguuu

SEQ ID NO: 498617 - RNA, 19 nt, Homo sapiens
  misc_RNA (1)...(19): siRNA sense strand
ccaaagacaucuccaggau

SEQ ID NO: 498618 - RNA, 19 nt, Homo sapiens
  misc_RNA (1)...(19): siRNA sense strand
gagagaugguggauuacaa

SEQ ID NO: 498619 - RNA, 19 nt, Homo sapiens
  misc_RNA (1)...(19): siRNA sense strand
aaagggaccucgcgguaaa

SEQ ID NO: 498620 - RNA, 19 nt, Homo sapiens
  misc_RNA (1)...(19): siRNA sense strand
gaugguggauuacaaugga

SEQ ID NO: 498621 - RNA, 19 nt, Homo sapiens
  misc_RNA (1)...(19): siRNA sense strand
ggauuacaauggaaacauc

SEQ ID NO: 498622 - RNA, 19 nt, Homo sapiens
  misc_RNA (1)...(19): siRNA sense strand
caagggagaaccagggaaa

SEQ ID NO: 498623 - RNA, 19 nt, Homo sapiens
  misc_RNA (1)...(19): siRNA sense strand
ggaagcaggacuagaugga

SEQ ID NO: 498624 - RNA, 19 nt, Homo sapiens
  misc_RNA (1)...(19): siRNA sense strand
caaggcugcuggaacaagu

SEQ ID NO: 498625 - RNA, 19 nt, Homo sapiens
  misc_RNA (1)...(19): siRNA sense strand
gggagaagcaggugucgau

SEQ ID NO: 498626 - RNA, 19 nt, Homo sapiens
  misc_RNA (1)...(19): siRNA sense strand
ggagaacagggaccagaug

SEQ ID NO: 498627 - RNA, 19 nt, Homo sapiens
  misc_RNA (1)...(19): siRNA sense strand
acaauggaaacaucaauga

SEQ ID NO: 498628 - RNA, 19 nt, Homo sapiens
  misc_RNA (1)...(19): siRNA sense strand
gaaaggagagaugguggau

SEQ ID NO: 498629 - RNA, 19 nt, Homo sapiens
  misc_RNA (1)...(19): siRNA sense strand
cuagagguuucccuggauu

SEQ ID NO: 498630 - RNA, 19 nt, Homo sapiens
  misc_RNA (1)...(19): siRNA sense strand
gcaaauggagacggcuauu

SEQ ID NO: 498631 - RNA, 19 nt, Homo sapiens
  misc_RNA (1)...(19): siRNA sense strand
gaaaggcuuccagggagaa

SEQ ID NO: 498632 - RNA, 19 nt, Homo sapiens
  misc_RNA (1)...(19): siRNA sense strand
gcagcugggcuuccugguu

SEQ ID NO: 498633 - RNA, 19 nt, Homo sapiens
  misc_RNA (1)...(19): siRNA sense strand
ggagagaugguggauuaca

SEQ ID NO: 498634 - RNA, 19 nt, Homo sapiens
  misc_RNA (1)...(19): siRNA sense strand
gaugcuggcaacuccauug

SEQ ID NO: 498635 - RNA, 19 nt, Homo sapiens
  misc_RNA (1)...(19): siRNA sense strand
gcguggagcagcuggagaa

SEQ ID NO: 498636 - RNA, 19 nt, Homo sapiens
  misc_RNA (1)...(19): siRNA sense strand
uggagcagcuggagaacag

SEQ ID NO: 498637 - RNA, 19 nt, Homo sapiens
  misc_RNA (1)...(19): siRNA sense strand
ggauuuccgggucccauug

SEQ ID NO: 498638 - RNA, 19 nt, Homo sapiens
  misc_RNA (1)...(19): siRNA sense strand
gagaugguggauuacaaug

SEQ ID NO: 498639 - RNA, 19 nt, Homo sapiens
  misc_RNA (1)...(19): siRNA sense strand
uagcggagcgcacccacaa

SEQ ID NO: 498640 - RNA, 19 nt, Homo sapiens
  misc_RNA (1)...(19): siRNA sense strand
gggagaaccagggaaagga

SEQ ID NO: 498641 - RNA, 19 nt, Homo sapiens
  misc_RNA (1)...(19): siRNA sense strand
gagccaggccagcauccaa

SEQ ID NO: 498642 - RNA, 19 nt, Homo sapiens
  misc_RNA (1)...(19): siRNA sense strand
gguacuccaggaccaauug

SEQ ID NO: 498643 - RNA, 19 nt, Homo sapiens
  misc_RNA (1)...(19): siRNA sense strand
aaaggagacccugggauga

SEQ ID NO: 498644 - RNA, 19 nt, Homo sapiens
  misc_RNA (1)...(19): siRNA sense strand
gagccagggaucccaggaa

SEQ ID NO: 498645 - RNA, 19 nt, Homo sapiens
  misc_RNA (1)...(19): siRNA sense strand
gaaccagggaaaggagaga

SEQ ID NO: 498646 - RNA, 19 nt, Homo sapiens
  misc_RNA (1)...(19): siRNA sense strand
gauuacaauggaaacauca

SEQ ID NO: 498647 - RNA, 19 nt, Homo sapiens
  misc_RNA (1)...(19): siRNA sense strand
ggucaaccaggaacuagag

SEQ ID NO: 498648 - RNA, 19 nt, Homo sapiens
  misc_RNA (1)...(19): siRNA sense strand
aaggagagaugguggauua

SEQ ID NO: 498649 - RNA, 19 nt, Homo sapiens
  misc_RNA (1)...(19): siRNA sense strand
cagcugggcuuccugguuu

SEQ ID NO: 498650 - RNA, 19 nt, Homo sapiens
  misc_RNA (1)...(19): siRNA sense strand
ccaaagacaucuccaggau

SEQ ID NO: 498651 - RNA, 19 nt, Homo sapiens
  misc_RNA (1)...(19): siRNA sense strand
gagagaugguggauuacaa

SEQ ID NO: 498652 - RNA, 19 nt, Homo sapiens
  misc_RNA (1)...(19): siRNA sense strand
aaagggaccucgcgguaaa

SEQ ID NO: 498653 - RNA, 19 nt, Homo sapiens
  misc_RNA (1)...(19): siRNA sense strand
gaugguggauuacaaugga

SEQ ID NO: 498654 - RNA, 19 nt, Homo sapiens
  misc_RNA (1)...(19): siRNA sense strand
ggauuacaauggaaacauc

SEQ ID NO: 498655 - RNA, 19 nt, Homo sapiens
  misc_RNA (1)...(19): siRNA sense strand
caagggagaaccagggaaa

SEQ ID NO: 498656 - RNA, 19 nt, Homo sapiens
  misc_RNA (1)...(19): siRNA sense strand
ggaagcaggacuagaugga

SEQ ID NO: 498657 - RNA, 19 nt, Homo sapiens
  misc_RNA (1)...(19): siRNA sense strand
caaggcugcuggaacaagu

SEQ ID NO: 498658 - RNA, 19 nt, Homo sapiens
  misc_RNA (1)...(19): siRNA sense strand
gggagaagcaggugucgau

SEQ ID NO: 498659 - RNA, 19 nt, Homo sapiens
  misc_RNA (1)...(19): siRNA sense strand
ggagaacagggaccagaug

SEQ ID NO: 498660 - RNA, 19 nt, Homo sapiens
  misc_RNA (1)...(19): siRNA sense strand
acaauggaaacaucaauga

SEQ ID NO: 498661 - RNA, 19 nt, Homo sapiens
  misc_RNA (1)...(19): siRNA sense strand
gaaaggagagaugguggau

SEQ ID NO: 498662 - RNA, 19 nt, Homo sapiens
  misc_RNA (1)...(19): siRNA sense strand
cuagagguuucccuggauu

SEQ ID NO: 498663 - RNA, 19 nt, Homo sapiens
  misc_RNA (1)...(19): siRNA sense strand
gcaaauggagacggcuauu

SEQ ID NO: 498664 - RNA, 19 nt, Homo sapiens
  misc_RNA (1)...(19): siRNA sense strand
gaaaggcuuccagggagaa

SEQ ID NO: 498665 - RNA, 19 nt, Homo sapiens
  misc_RNA (1)...(19): siRNA sense strand
gcagcugggcuuccugguu

SEQ ID NO: 498666 - RNA, 19 nt, Homo sapiens
  misc_RNA (1)...(19): siRNA sense strand
ggagagaugguggauuaca

SEQ ID NO: 498667 - RNA, 19 nt, Homo sapiens
  misc_RNA (1)...(19): siRNA sense strand
gaugcuggcaacuccauug

SEQ ID NO: 498668 - RNA, 19 nt, Homo sapiens
  misc_RNA (1)...(19): siRNA sense strand
gcguggagcagcuggagaa

SEQ ID NO: 498669 - RNA, 19 nt, Homo sapiens
  misc_RNA (1)...(19): siRNA sense strand
uggagcagcuggagaacag

SEQ ID NO: 498670 - RNA, 19 nt, Homo sapiens
  misc_RNA (1)...(19): siRNA sense strand
ggauuuccgggucccauug

SEQ ID NO: 498671 - RNA, 19 nt, Homo sapiens
  misc_RNA (1)...(19): siRNA sense strand
gagaugguggauuacaaug

SEQ ID NO: 498672 - RNA, 19 nt, Homo sapiens
  misc_RNA (1)...(19): siRNA sense strand
uagcggagcgcacccacaa

SEQ ID NO: 498673 - RNA, 19 nt, Homo sapiens
  misc_RNA (1)...(19): siRNA sense strand
gggagaaccagggaaagga

SEQ ID NO: 498674 - RNA, 19 nt, Homo sapiens
  misc_RNA (1)...(19): siRNA sense strand
gagccaggccagcauccaa

SEQ ID NO: 498675 - RNA, 19 nt, Homo sapiens
  misc_RNA (1)...(19): siRNA sense strand
gguacuccaggaccaauug

SEQ ID NO: 498676 - RNA, 19 nt, Homo sapiens
  misc_RNA (1)...(19): siRNA sense strand
aaaggagacccugggauga

SEQ ID NO: 498677 - RNA, 19 nt, Homo sapiens
  misc_RNA (1)...(19): siRNA sense strand
gagccagggaucccaggaa

SEQ ID NO: 498678 - RNA, 19 nt, Homo sapiens
  misc_RNA (1)...(19): siRNA sense strand
gaaccagggaaaggagaga

SEQ ID NO: 498679 - RNA, 19 nt, Homo sapiens
  misc_RNA (1)...(19): siRNA sense strand
gauuacaauggaaacauca

SEQ ID NO: 498680 - RNA, 19 nt, Homo sapiens
  misc_RNA (1)...(19): siRNA sense strand
ggucaaccaggaacuagag

SEQ ID NO: 498681 - RNA, 19 nt, Homo sapiens
  misc_RNA (1)...(19): siRNA sense strand
aaggagagaugguggauua

SEQ ID NO: 498682 - RNA, 19 nt, Homo sapiens
  misc_RNA (1)...(19): siRNA sense strand
cagcugggcuuccugguuu

SEQ ID NO: 498683 - RNA, 19 nt, Homo sapiens
  misc_RNA (1)...(19): siRNA sense strand
ccaaagacaucuccaggau

SEQ ID NO: 498684 - RNA, 19 nt, Homo sapiens
  misc_RNA (1)...(19): siRNA sense strand
gagagaugguggauuacaa

SEQ ID NO: 498685 - RNA, 19 nt, Homo sapiens
  misc_RNA (1)...(19): siRNA sense strand
aaagggaccucgcgguaaa

SEQ ID NO: 498686 - RNA, 19 nt, Homo sapiens
  misc_RNA (1)...(19): siRNA sense strand
gaugguggauuacaaugga

SEQ ID NO: 498687 - RNA, 19 nt, Homo sapiens
  misc_RNA (1)...(19): siRNA sense strand
ggauuacaauggaaacauc

SEQ ID NO: 498688 - RNA, 19 nt, Homo sapiens
  misc_RNA (1)...(19): siRNA sense strand
caagggagaaccagggaaa

SEQ ID NO: 498689 - RNA, 19 nt, Homo sapiens
  misc_RNA (1)...(19): siRNA sense strand
ggaagcaggacuagaugga

SEQ ID NO: 498690 - RNA, 19 nt, Homo sapiens
  misc_RNA (1)...(19): siRNA sense strand
caaggcugcuggaacaagu

SEQ ID NO: 498691 - RNA, 19 nt, Homo sapiens
  misc_RNA (1)...(19): siRNA sense strand
gggagaagcaggugucgau

SEQ ID NO: 498692 - RNA, 19 nt, Homo sapiens
  misc_RNA (1)...(19): siRNA sense strand
ggagaacagggaccagaug

SEQ ID NO: 498693 - RNA, 19 nt, Homo sapiens
  misc_RNA (1)...(19): siRNA sense strand
acaauggaaacaucaauga

SEQ ID NO: 498694 - RNA, 19 nt, Homo sapiens
  misc_RNA (1)...(19): siRNA sense strand
gaaaggagagaugguggau

SEQ ID NO: 498695 - RNA, 19 nt, Homo sapiens
  misc_RNA (1)...(19): siRNA sense strand
cuagagguuucccuggauu

SEQ ID NO: 498696 - RNA, 19 nt, Homo sapiens
  misc_RNA (1)...(19): siRNA sense strand
gcaaauggagacggcuauu

SEQ ID NO: 498697 - RNA, 19 nt, Homo sapiens
  misc_RNA (1)...(19): siRNA sense strand
gaaaggcuuccagggagaa

SEQ ID NO: 498698 - RNA, 19 nt, Homo sapiens
  misc_RNA (1)...(19): siRNA sense strand
gcagcugggcuuccugguu

SEQ ID NO: 498699 - RNA, 19 nt, Homo sapiens
  misc_RNA (1)...(19): siRNA sense strand
ggagagaugguggauuaca

SEQ ID NO: 498700 - RNA, 19 nt, Homo sapiens
  misc_RNA (1)...(19): siRNA sense strand
gaugcuggcaacuccauug

SEQ ID NO: 498701 - RNA, 19 nt, Homo sapiens
  misc_RNA (1)...(19): siRNA sense strand
gcguggagcagcuggagaa

SEQ ID NO: 498702 - RNA, 19 nt, Homo sapiens
  misc_RNA (1)...(19): siRNA sense strand
uggagcagcuggagaacag

SEQ ID NO: 498703 - RNA, 19 nt, Homo sapiens
  misc_RNA (1)...(19): siRNA sense strand
ggauuuccgggucccauug

SEQ ID NO: 498704 - RNA, 19 nt, Homo sapiens
  misc_RNA (1)...(19): siRNA sense strand
gagaugguggauuacaaug

SEQ ID NO: 498705 - RNA, 19 nt, Homo sapiens
  misc_RNA (1)...(19): siRNA sense strand
uagcggagcgcacccacaa

SEQ ID NO: 498706 - RNA, 19 nt, Homo sapiens
  misc_RNA (1)...(19): siRNA sense strand
gggagaaccagggaaagga

SEQ ID NO: 498707 - RNA, 19 nt, Homo sapiens
  misc_RNA (1)...(19): siRNA sense strand
gagccaggccagcauccaa

SEQ ID NO: 498708 - RNA, 19 nt, Homo sapiens
  misc_RNA (1)...(19): siRNA sense strand
gguacuccaggaccaauug

SEQ ID NO: 498709 - RNA, 19 nt, Homo sapiens
  misc_RNA (1)...(19): siRNA sense strand
aaaggagacccugggauga

SEQ ID NO: 498710 - RNA, 19 nt, Homo sapiens
  misc_RNA (1)...(19): siRNA sense strand
gagccagggaucccaggaa

SEQ ID NO: 498711 - RNA, 19 nt, Homo sapiens
  misc_RNA (1)...(19): siRNA sense strand
gaaccagggaaaggagaga

SEQ ID NO: 498712 - RNA, 19 nt, Homo sapiens
  misc_RNA (1)...(19): siRNA sense strand
gauuacaauggaaacauca

SEQ ID NO: 498713 - RNA, 19 nt, Homo sapiens
  misc_RNA (1)...(19): siRNA sense strand
ggucaaccaggaacuagag

SEQ ID NO: 498714 - RNA, 19 nt, Homo sapiens
  misc_RNA (1)...(19): siRNA sense strand
aaggagagaugguggauua

SEQ ID NO: 498715 - RNA, 19 nt, Homo sapiens
  misc_RNA (1)...(19): siRNA sense strand
cagcugggcuuccugguuu

SEQ ID NO: 498716 - RNA, 19 nt, Homo sapiens
  misc_RNA (1)...(19): siRNA sense strand
ccaaagacaucuccaggau

SEQ ID NO: 498717 - RNA, 19 nt, Homo sapiens
  misc_RNA (1)...(19): siRNA sense strand
gagagaugguggauuacaa

SEQ ID NO: 498718 - RNA, 19 nt, Homo sapiens
  misc_RNA (1)...(19): siRNA sense strand
aaagggaccucgcgguaaa

SEQ ID NO: 498719 - RNA, 19 nt, Homo sapiens
  misc_RNA (1)...(19): siRNA sense strand
gaugguggauuacaaugga

SEQ ID NO: 498720 - RNA, 19 nt, Homo sapiens
  misc_RNA (1)...(19): siRNA sense strand
ggauuacaauggaaacauc

SEQ ID NO: 498721 - RNA, 19 nt, Homo sapiens
  misc_RNA (1)...(19): siRNA sense strand
caagggagaaccagggaaa

SEQ ID NO: 498722 - RNA, 19 nt, Homo sapiens
  misc_RNA (1)...(19): siRNA sense strand
ggaagcaggacuagaugga

SEQ ID NO: 498723 - RNA, 19 nt, Homo sapiens
  misc_RNA (1)...(19): siRNA sense strand
caaggcugcuggaacaagu

SEQ ID NO: 498724 - RNA, 19 nt, Homo sapiens
  misc_RNA (1)...(19): siRNA sense strand
gggagaagcaggugucgau

SEQ ID NO: 498725 - RNA, 19 nt, Homo sapiens
  misc_RNA (1)...(19): siRNA sense strand
ggagaacagggaccagaug

SEQ ID NO: 498726 - RNA, 19 nt, Homo sapiens
  misc_RNA (1)...(19): siRNA sense strand
acaauggaaacaucaauga

SEQ ID NO: 498727 - RNA, 19 nt, Homo sapiens
  misc_RNA (1)...(19): siRNA sense strand
gaaaggagagaugguggau

SEQ ID NO: 498728 - RNA, 19 nt, Homo sapiens
  misc_RNA (1)...(19): siRNA sense strand
cuagagguuucccuggauu

SEQ ID NO: 498729 - RNA, 19 nt, Homo sapiens
  misc_RNA (1)...(19): siRNA sense strand
gcaaauggagacggcuauu

SEQ ID NO: 498730 - RNA, 19 nt, Homo sapiens
  misc_RNA (1)...(19): siRNA sense strand
gaaaggcuuccagggagaa

SEQ ID NO: 498731 - RNA, 19 nt, Homo sapiens
  misc_RNA (1)...(19): siRNA sense strand
gcagcugggcuuccugguu

SEQ ID NO: 498732 - RNA, 19 nt, Homo sapiens
  misc_RNA (1)...(19): siRNA sense strand
ggagagaugguggauuaca

SEQ ID NO: 498733 - RNA, 19 nt, Homo sapiens
  misc_RNA (1)...(19): siRNA sense strand
gaugcuggcaacuccauug

SEQ ID NO: 498734 - RNA, 19 nt, Homo sapiens
  misc_RNA (1)...(19): siRNA sense strand
gcguggagcagcuggagaa

SEQ ID NO: 498735 - RNA, 19 nt, Homo sapiens
  misc_RNA (1)...(19): siRNA sense strand
uggagcagcuggagaacag

SEQ ID NO: 498736 - RNA, 19 nt, Homo sapiens
  misc_RNA (1)...(19): siRNA sense strand
ggauuuccgggucccauug

SEQ ID NO: 498737 - RNA, 19 nt, Homo sapiens
  misc_RNA (1)...(19): siRNA sense strand
gagaugguggauuacaaug

SEQ ID NO: 498738 - RNA, 19 nt, Homo sapiens
  misc_RNA (1)...(19): siRNA sense strand
uagcggagcgcacccacaa

SEQ ID NO: 498739 - RNA, 19 nt, Homo sapiens
  misc_RNA (1)...(19): siRNA sense strand
gggagaaccagggaaagga

SEQ ID NO: 498740 - RNA, 19 nt, Homo sapiens
  misc_RNA (1)...(19): siRNA sense strand
gagccaggccagcauccaa

SEQ ID NO: 498741 - RNA, 19 nt, Homo sapiens
  misc_RNA (1)...(19): siRNA sense strand
gguacuccaggaccaauug

SEQ ID NO: 498742 - RNA, 19 nt, Homo sapiens
  misc_RNA (1)...(19): siRNA sense strand
aaaggagacccugggauga

SEQ ID NO: 498743 - RNA, 19 nt, Homo sapiens
  misc_RNA (1)...(19): siRNA sense strand
gagccagggaucccaggaa

SEQ ID NO: 498744 - RNA, 19 nt, Homo sapiens
  misc_RNA (1)...(19): siRNA sense strand
gaaccagggaaaggagaga

SEQ ID NO: 498745 - RNA, 19 nt, Homo sapiens
  misc_RNA (1)...(19): siRNA sense strand
gauuacaauggaaacauca

SEQ ID NO: 498746 - RNA, 19 nt, Homo sapiens
  misc_RNA (1)...(19): siRNA sense strand
ggucaaccaggaacuagag

SEQ ID NO: 498747 - RNA, 19 nt, Homo sapiens
  misc_RNA (1)...(19): siRNA sense strand
aaggagagaugguggauua

SEQ ID NO: 498748 - RNA, 19 nt, Homo sapiens
  misc_RNA (1)...(19): siRNA sense strand
cagcugggcuuccugguuu

SEQ ID NO: 498749 - RNA, 19 nt, Homo sapiens
  misc_RNA (1)...(19): siRNA sense strand
ccaaagacaucuccaggau

SEQ ID NO: 498750 - RNA, 19 nt, Homo sapiens
  misc_RNA (1)...(19): siRNA sense strand
gagagaugguggauuacaa

SEQ ID NO: 498751 - RNA, 19 nt, Homo sapiens
  misc_RNA (1)...(19): siRNA sense strand
aaagggaccucgcgguaaa

SEQ ID NO: 498752 - RNA, 19 nt, Homo sapiens
  misc_RNA (1)...(19): siRNA sense strand
gaugguggauuacaaugga

SEQ ID NO: 498753 - RNA, 19 nt, Homo sapiens
  misc_RNA (1)...(19): siRNA sense strand
ggauuacaauggaaacauc

SEQ ID NO: 498754 - RNA, 19 nt, Homo sapiens
  misc_RNA (1)...(19): siRNA sense strand
caagggagaaccagggaaa

SEQ ID NO: 498755 - RNA, 19 nt, Homo sapiens
  misc_RNA (1)...(19): siRNA sense strand
ggaagcaggacuagaugga

SEQ ID NO: 498756 - RNA, 19 nt, Homo sapiens
  misc_RNA (1)...(19): siRNA sense strand
caaggcugcuggaacaagu

SEQ ID NO: 498757 - RNA, 19 nt, Homo sapiens
  misc_RNA (1)...(19): siRNA sense strand
gggagaagcaggugucgau

SEQ ID NO: 498758 - RNA, 19 nt, Homo sapiens
  misc_RNA (1)...(19): siRNA sense strand
ggagaacagggaccagaug

SEQ ID NO: 498759 - RNA, 19 nt, Homo sapiens
  misc_RNA (1)...(19): siRNA sense strand
acaauggaaacaucaauga

SEQ ID NO: 498760 - RNA, 19 nt, Homo sapiens
  misc_RNA (1)...(19): siRNA sense strand
gaaaggagagaugguggau

SEQ ID NO: 498761 - RNA, 19 nt, Homo sapiens
  misc_RNA (1)...(19): siRNA sense strand
cuagagguuucccuggauu

SEQ ID NO: 498762 - RNA, 19 nt, Homo sapiens
  misc_RNA (1)...(19): siRNA sense strand
gcaaauggagacggcuauu

SEQ ID NO: 498763 - RNA, 19 nt, Homo sapiens
  misc_RNA (1)...(19): siRNA sense strand
gaaaggcuuccagggagaa

SEQ ID NO: 498764 - RNA, 19 nt, Homo sapiens
  misc_RNA (1)...(19): siRNA sense strand
gcagcugggcuuccugguu

SEQ ID NO: 498765 - RNA, 19 nt, Homo sapiens
  misc_RNA (1)...(19): siRNA sense strand
ggagagaugguggauuaca

SEQ ID NO: 498766 - RNA, 19 nt, Homo sapiens
  misc_RNA (1)...(19): siRNA sense strand
gaugcuggcaacuccauug

SEQ ID NO: 498767 - RNA, 19 nt, Homo sapiens
  misc_RNA (1)...(19): siRNA sense strand
gcguggagcagcuggagaa

SEQ ID NO: 498768 - RNA, 19 nt, Homo sapiens
  misc_RNA (1)...(19): siRNA sense strand
uggagcagcuggagaacag

SEQ ID NO: 498769 - RNA, 19 nt, Homo sapiens
  misc_RNA (1)...(19): siRNA sense strand
ggauuuccgggucccauug

SEQ ID NO: 498770 - RNA, 19 nt, Homo sapiens
  misc_RNA (1)...(19): siRNA sense strand
gagaugguggauuacaaug

SEQ ID NO: 498771 - RNA, 19 nt, Homo sapiens
  misc_RNA (1)...(19): siRNA sense strand
uagcggagcgcacccacaa

SEQ ID NO: 498772 - RNA, 19 nt, Homo sapiens
  misc_RNA (1)...(19): siRNA sense strand
gggagaaccagggaaagga

SEQ ID NO: 498773 - RNA, 19 nt, Homo sapiens
  misc_RNA (1)...(19): siRNA sense strand
gagccaggccagcauccaa

SEQ ID NO: 498774 - RNA, 19 nt, Homo sapiens
  misc_RNA (1)...(19): siRNA sense strand
gguacuccaggaccaauug

SEQ ID NO: 498775 - RNA, 19 nt, Homo sapiens
  misc_RNA (1)...(19): siRNA sense strand
aaaggagacccugggauga

SEQ ID NO: 498776 - RNA, 19 nt, Homo sapiens
  misc_RNA (1)...(19): siRNA sense strand
gagccagggaucccaggaa

SEQ ID NO: 498777 - RNA, 19 nt, Homo sapiens
  misc_RNA (1)...(19): siRNA sense strand
gaaccagggaaaggagaga

SEQ ID NO: 498778 - RNA, 19 nt, Homo sapiens
  misc_RNA (1)...(19): siRNA sense strand
gauuacaauggaaacauca

SEQ ID NO: 498779 - RNA, 19 nt, Homo sapiens
  misc_RNA (1)...(19): siRNA sense strand
ggucaaccaggaacuagag

SEQ ID NO: 498780 - RNA, 19 nt, Homo sapiens
  misc_RNA (1)...(19): siRNA sense strand
aaggagagaugguggauua

SEQ ID NO: 498781 - RNA, 19 nt, Homo sapiens
  misc_RNA (1)...(19): siRNA sense strand
cagcugggcuuccugguuu

SEQ ID NO: 498782 - RNA, 19 nt, Homo sapiens
  misc_RNA (1)...(19): siRNA sense strand
ccaaagacaucuccaggau

SEQ ID NO: 498783 - RNA, 19 nt, Homo sapiens
  misc_RNA (1)...(19): siRNA sense strand
gagagaugguggauuacaa

SEQ ID NO: 498784 - RNA, 19 nt, Homo sapiens
  misc_RNA (1)...(19): siRNA sense strand
aaagggaccucgcgguaaa

SEQ ID NO: 498785 - RNA, 19 nt, Homo sapiens
  misc_RNA (1)...(19): siRNA sense strand
gaugguggauuacaaugga

SEQ ID NO: 498786 - RNA, 19 nt, Homo sapiens
  misc_RNA (1)...(19): siRNA sense strand
ggauuacaauggaaacauc

SEQ ID NO: 498787 - RNA, 19 nt, Homo sapiens
  misc_RNA (1)...(19): siRNA sense strand
caagggagaaccagggaaa

SEQ ID NO: 498788 - RNA, 19 nt, Homo sapiens
  misc_RNA (1)...(19): siRNA sense strand
ggaagcaggacuagaugga

SEQ ID NO: 498789 - RNA, 19 nt, Homo sapiens
  misc_RNA (1)...(19): siRNA sense strand
caaggcugcuggaacaagu

SEQ ID NO: 498790 - RNA, 19 nt, Homo sapiens
  misc_RNA (1)...(19): siRNA sense strand
gggagaagcaggugucgau

SEQ ID NO: 498791 - RNA, 19 nt, Homo sapiens
  misc_RNA (1)...(19): siRNA sense strand
ggagaacagggaccagaug

SEQ ID NO: 498792 - RNA, 19 nt, Homo sapiens
  misc_RNA (1)...(19): siRNA sense strand
acaauggaaacaucaauga

SEQ ID NO: 498793 - RNA, 19 nt, Homo sapiens
  misc_RNA (1)...(19): siRNA sense strand
gaaaggagagaugguggau

SEQ ID NO: 498794 - RNA, 19 nt, Homo sapiens
  misc_RNA (1)...(19): siRNA sense strand
cuagagguuucccuggauu

SEQ ID NO: 498795 - RNA, 19 nt, Homo sapiens
  misc_RNA (1)...(19): siRNA sense strand
gcaaauggagacggcuauu

SEQ ID NO: 498796 - RNA, 19 nt, Homo sapiens
  misc_RNA (1)...(19): siRNA sense strand
gaaaggcuuccagggagaa

SEQ ID NO: 498797 - RNA, 19 nt, Homo sapiens
  misc_RNA (1)...(19): siRNA sense strand
gcagcugggcuuccugguu

SEQ ID NO: 498798 - RNA, 19 nt, Homo sapiens
  misc_RNA (1)...(19): siRNA sense strand
ggagagaugguggauuaca

SEQ ID NO: 498799 - RNA, 19 nt, Homo sapiens
  misc_RNA (1)...(19): siRNA sense strand
gaugcuggcaacuccauug

SEQ ID NO: 498800 - RNA, 19 nt, Homo sapiens
  misc_RNA (1)...(19): siRNA sense strand
gcguggagcagcuggagaa

SEQ ID NO: 498801 - RNA, 19 nt, Homo sapiens
  misc_RNA (1)...(19): siRNA sense strand
uggagcagcuggagaacag

SEQ ID NO: 498802 - RNA, 19 nt, Homo sapiens
  misc_RNA (1)...(19): siRNA sense strand
ggauuuccgggucccauug

SEQ ID NO: 498803 - RNA, 19 nt, Homo sapiens
  misc_RNA (1)...(19): siRNA sense strand
gagaugguggauuacaaug

SEQ ID NO: 498804 - RNA, 19 nt, Homo sapiens
  misc_RNA (1)...(19): siRNA sense strand
uagcggagcgcacccacaa

SEQ ID NO: 498805 - RNA, 19 nt, Homo sapiens
  misc_RNA (1)...(19): siRNA sense strand
gggagaaccagggaaagga

SEQ ID NO: 498806 - RNA, 19 nt, Homo sapiens
  misc_RNA (1)...(19): siRNA sense strand
gagccaggccagcauccaa

SEQ ID NO: 498807 - RNA, 19 nt, Homo sapiens
  misc_RNA (1)...(19): siRNA sense strand
gguacuccaggaccaauug

SEQ ID NO: 498808 - RNA, 19 nt, Homo sapiens
  misc_RNA (1)...(19): siRNA sense strand
aaaggagacccugggauga

SEQ ID NO: 498809 - RNA, 19 nt, Homo sapiens
  misc_RNA (1)...(19): siRNA sense strand
gagccagggaucccaggaa

SEQ ID NO: 498810 - RNA, 19 nt, Homo sapiens
  misc_RNA (1)...(19): siRNA sense strand
gaaccagggaaaggagaga

SEQ ID NO: 498811 - RNA, 19 nt, Homo sapiens
  misc_RNA (1)...(19): siRNA sense strand
gauuacaauggaaacauca

SEQ ID NO: 498812 - RNA, 19 nt, Homo sapiens
  misc_RNA (1)...(19): siRNA sense strand
ggucaaccaggaacuagag

SEQ ID NO: 498813 - RNA, 19 nt, Homo sapiens
  misc_RNA (1)...(19): siRNA sense strand
aaggagagaugguggauua

SEQ ID NO: 498814 - RNA, 19 nt, Homo sapiens
  misc_RNA (1)...(19): siRNA sense strand
cagcugggcuuccugguuu

SEQ ID NO: 498815 - RNA, 19 nt, Homo sapiens
  misc_RNA (1)...(19): siRNA sense strand
ccaaagacaucuccaggau

SEQ ID NO: 498816 - RNA, 19 nt, Homo sapiens
  misc_RNA (1)...(19): siRNA sense strand
gagagaugguggauuacaa

SEQ ID NO: 498817 - RNA, 19 nt, Homo sapiens
  misc_RNA (1)...(19): siRNA sense strand
aaagggaccucgcgguaaa

SEQ ID NO: 498818 - RNA, 19 nt, Homo sapiens
  misc_RNA (1)...(19): siRNA sense strand
gaugguggauuacaaugga

SEQ ID NO: 498819 - RNA, 19 nt, Homo sapiens
  misc_RNA (1)...(19): siRNA sense strand
ggauuacaauggaaacauc

SEQ ID NO: 498820 - RNA, 19 nt, Homo sapiens
  misc_RNA (1)...(19): siRNA sense strand
gggcgaagauggcuuacca

SEQ ID NO: 498821 - RNA, 19 nt, Homo sapiens
  misc_RNA (1)...(19): siRNA sense strand
caagggagaaccagggaaa

SEQ ID NO: 498822 - RNA, 19 nt, Homo sapiens
  misc_RNA (1)...(19): siRNA sense strand
ggaagcaggacuagaugga

SEQ ID NO: 498823 - RNA, 19 nt, Homo sapiens
  misc_RNA (1)...(19): siRNA sense strand
caaggcugcuggaacaagu

SEQ ID NO: 498824 - RNA, 19 nt, Homo sapiens
  misc_RNA (1)...(19): siRNA sense strand
gggagaagcaggugucgau

SEQ ID NO: 498825 - RNA, 19 nt, Homo sapiens
  misc_RNA (1)...(19): siRNA sense strand
ggagaacagggaccagaug

SEQ ID NO: 498826 - RNA, 19 nt, Homo sapiens
  misc_RNA (1)...(19): siRNA sense strand
acaauggaaacaucaauga

SEQ ID NO: 498827 - RNA, 19 nt, Homo sapiens
  misc_RNA (1)...(19): siRNA sense strand
gaaaggagagaugguggau

SEQ ID NO: 498828 - RNA, 19 nt, Homo sapiens
  misc_RNA (1)...(19): siRNA sense strand
cuagagguuucccuggauu

SEQ ID NO: 498829 - RNA, 19 nt, Homo sapiens
  misc_RNA (1)...(19): siRNA sense strand
gcaaauggagacggcuauu

SEQ ID NO: 498830 - RNA, 19 nt, Homo sapiens
  misc_RNA (1)...(19): siRNA sense strand
gaaaggcuuccagggagaa

SEQ ID NO: 498831 - RNA, 19 nt, Homo sapiens
  misc_RNA (1)...(19): siRNA sense strand
gcagcugggcuuccugguu

SEQ ID NO: 498832 - RNA, 19 nt, Homo sapiens
  misc_RNA (1)...(19): siRNA sense strand
ggagagaugguggauuaca

SEQ ID NO: 498833 - RNA, 19 nt, Homo sapiens
  misc_RNA (1)...(19): siRNA sense strand
gaugcuggcaacuccauug

SEQ ID NO: 498834 - RNA, 19 nt, Homo sapiens
  misc_RNA (1)...(19): siRNA sense strand
gcguggagcagcuggagaa

SEQ ID NO: 498835 - RNA, 19 nt, Homo sapiens
  misc_RNA (1)...(19): siRNA sense strand
uggagcagcuggagaacag

SEQ ID NO: 498836 - RNA, 19 nt, Homo sapiens
  misc_RNA (1)...(19): siRNA sense strand
ggauuuccgggucccauug

SEQ ID NO: 498837 - RNA, 19 nt, Homo sapiens
  misc_RNA (1)...(19): siRNA sense strand
gagaugguggauuacaaug

SEQ ID NO: 498838 - RNA, 19 nt, Homo sapiens
  misc_RNA (1)...(19): siRNA sense strand
uagcggagcgcacccacaa

SEQ ID NO: 498839 - RNA, 19 nt, Homo sapiens
  misc_RNA (1)...(19): siRNA sense strand
gggagaaccagggaaagga

SEQ ID NO: 498840 - RNA, 19 nt, Homo sapiens
  misc_RNA (1)...(19): siRNA sense strand
gagccaggccagcauccaa

SEQ ID NO: 498841 - RNA, 19 nt, Homo sapiens
  misc_RNA (1)...(19): siRNA sense strand
gguacuccaggaccaauug

SEQ ID NO: 498842 - RNA, 19 nt, Homo sapiens
  misc_RNA (1)...(19): siRNA sense strand
aaaggagacccugggauga

SEQ ID NO: 498843 - RNA, 19 nt, Homo sapiens
  misc_RNA (1)...(19): siRNA sense strand
gagccagggaucccaggaa

SEQ ID NO: 498844 - RNA, 19 nt, Homo sapiens
  misc_RNA (1)...(19): siRNA sense strand
gaaccagggaaaggagaga

SEQ ID NO: 498845 - RNA, 19 nt, Homo sapiens
  misc_RNA (1)...(19): siRNA sense strand
gauuacaauggaaacauca

SEQ ID NO: 498846 - RNA, 19 nt, Homo sapiens
  misc_RNA (1)...(19): siRNA sense strand
ggucaaccaggaacuagag

SEQ ID NO: 498847 - RNA, 19 nt, Homo sapiens
  misc_RNA (1)...(19): siRNA sense strand
aaggagagaugguggauua

SEQ ID NO: 498848 - RNA, 19 nt, Homo sapiens
  misc_RNA (1)...(19): siRNA sense strand
cagcugggcuuccugguuu

SEQ ID NO: 498849 - RNA, 19 nt, Homo sapiens
  misc_RNA (1)...(19): siRNA sense strand
ccaaagacaucuccaggau

SEQ ID NO: 498850 - RNA, 19 nt, Homo sapiens
  misc_RNA (1)...(19): siRNA sense strand
gagagaugguggauuacaa

SEQ ID NO: 498851 - RNA, 19 nt, Homo sapiens
  misc_RNA (1)...(19): siRNA sense strand
aaagggaccucgcgguaaa

SEQ ID NO: 498852 - RNA, 19 nt, Homo sapiens
  misc_RNA (1)...(19): siRNA sense strand
gaugguggauuacaaugga

SEQ ID NO: 498853 - RNA, 19 nt, Homo sapiens
  misc_RNA (1)...(19): siRNA sense strand
ggauuacaauggaaacauc

SEQ ID NO: 498854 - RNA, 19 nt, Homo sapiens
  misc_RNA (1)...(19): siRNA sense strand
caagggagaaccagggaaa

SEQ ID NO: 498855 - RNA, 19 nt, Homo sapiens
  misc_RNA (1)...(19): siRNA sense strand
ggaagcaggacuagaugga

SEQ ID NO: 498856 - RNA, 19 nt, Homo sapiens
  misc_RNA (1)...(19): siRNA sense strand
caaggcugcuggaacaagu

SEQ ID NO: 498857 - RNA, 19 nt, Homo sapiens
  misc_RNA (1)...(19): siRNA sense strand
gggagaagcaggugucgau

SEQ ID NO: 498858 - RNA, 19 nt, Homo sapiens
  misc_RNA (1)...(19): siRNA sense strand
ggagaacagggaccagaug

SEQ ID NO: 498859 - RNA, 19 nt, Homo sapiens
  misc_RNA (1)...(19): siRNA sense strand
acaauggaaacaucaauga

SEQ ID NO: 498860 - RNA, 19 nt, Homo sapiens
  misc_RNA (1)...(19): siRNA sense strand
gaaaggagagaugguggau

SEQ ID NO: 498861 - RNA, 19 nt, Homo sapiens
  misc_RNA (1)...(19): siRNA sense strand
cuagagguuucccuggauu

SEQ ID NO: 498862 - RNA, 19 nt, Homo sapiens
  misc_RNA (1)...(19): siRNA sense strand
gcaaauggagacggcuauu

SEQ ID NO: 498863 - RNA, 19 nt, Homo sapiens
  misc_RNA (1)...(19): siRNA sense strand
gaaaggcuuccagggagaa

SEQ ID NO: 498864 - RNA, 19 nt, Homo sapiens
  misc_RNA (1)...(19): siRNA sense strand
gcagcugggcuuccugguu

SEQ ID NO: 498865 - RNA, 19 nt, Homo sapiens
  misc_RNA (1)...(19): siRNA sense strand
ggagagaugguggauuaca

SEQ ID NO: 498866 - RNA, 19 nt, Homo sapiens
  misc_RNA (1)...(19): siRNA sense strand
gaugcuggcaacuccauug

SEQ ID NO: 498867 - RNA, 19 nt, Homo sapiens
  misc_RNA (1)...(19): siRNA sense strand
gcguggagcagcuggagaa

SEQ ID NO: 498868 - RNA, 19 nt, Homo sapiens
  misc_RNA (1)...(19): siRNA sense strand
uggagcagcuggagaacag

SEQ ID NO: 498869 - RNA, 19 nt, Homo sapiens
  misc_RNA (1)...(19): siRNA sense strand
ggauuuccgggucccauug

SEQ ID NO: 498870 - RNA, 19 nt, Homo sapiens
  misc_RNA (1)...(19): siRNA sense strand
gagaugguggauuacaaug

SEQ ID NO: 498871 - RNA, 19 nt, Homo sapiens
  misc_RNA (1)...(19): siRNA sense strand
uagcggagcgcacccacaa

SEQ ID NO: 498872 - RNA, 19 nt, Homo sapiens
  misc_RNA (1)...(19): siRNA sense strand
gggagaaccagggaaagga

SEQ ID NO: 498873 - RNA, 19 nt, Homo sapiens
  misc_RNA (1)...(19): siRNA sense strand
gagccaggccagcauccaa

SEQ ID NO: 498874 - RNA, 19 nt, Homo sapiens
  misc_RNA (1)...(19): siRNA sense strand
gguacuccaggaccaauug

SEQ ID NO: 498875 - RNA, 19 nt, Homo sapiens
  misc_RNA (1)...(19): siRNA sense strand
aaaggagacccugggauga

SEQ ID NO: 498876 - RNA, 19 nt, Homo sapiens
  misc_RNA (1)...(19): siRNA sense strand
gagccagggaucccaggaa

SEQ ID NO: 498877 - RNA, 19 nt, Homo sapiens
  misc_RNA (1)...(19): siRNA sense strand
gaaccagggaaaggagaga

SEQ ID NO: 498878 - RNA, 19 nt, Homo sapiens
  misc_RNA (1)...(19): siRNA sense strand
gauuacaauggaaacauca

SEQ ID NO: 498879 - RNA, 19 nt, Homo sapiens
  misc_RNA (1)...(19): siRNA sense strand
ggucaaccaggaacuagag

SEQ ID NO: 498880 - RNA, 19 nt, Homo sapiens
  misc_RNA (1)...(19): siRNA sense strand
aaggagagaugguggauua

SEQ ID NO: 498881 - RNA, 19 nt, Homo sapiens
  misc_RNA (1)...(19): siRNA sense strand
cagcugggcuuccugguuu

SEQ ID NO: 498882 - RNA, 19 nt, Homo sapiens
  misc_RNA (1)...(19): siRNA sense strand
ccaaagacaucuccaggau

SEQ ID NO: 498883 - RNA, 19 nt, Homo sapiens
  misc_RNA (1)...(19): siRNA sense strand
gagagaugguggauuacaa

SEQ ID NO: 498884 - RNA, 19 nt, Homo sapiens
  misc_RNA (1)...(19): siRNA sense strand
aaagggaccucgcgguaaa

SEQ ID NO: 498885 - RNA, 19 nt, Homo sapiens
  misc_RNA (1)...(19): siRNA sense strand
gaugguggauuacaaugga

SEQ ID NO: 498886 - RNA, 19 nt, Homo sapiens
  misc_RNA (1)...(19): siRNA sense strand
ggauuacaauggaaacauc

SEQ ID NO: 498887 - RNA, 19 nt, Homo sapiens
  misc_RNA (1)...(19): siRNA sense strand
caagggagaaccagggaaa

SEQ ID NO: 498888 - RNA, 19 nt, Homo sapiens
  misc_RNA (1)...(19): siRNA sense strand
ggaagcaggacuagaugga

SEQ ID NO: 498889 - RNA, 19 nt, Homo sapiens
  misc_RNA (1)...(19): siRNA sense strand
caaggcugcuggaacaagu

SEQ ID NO: 498890 - RNA, 19 nt, Homo sapiens
  misc_RNA (1)...(19): siRNA sense strand
gggagaagcaggugucgau

SEQ ID NO: 498891 - RNA, 19 nt, Homo sapiens
  misc_RNA (1)...(19): siRNA sense strand
ggagaacagggaccagaug

SEQ ID NO: 498892 - RNA, 19 nt, Homo sapiens
  misc_RNA (1)...(19): siRNA sense strand
acaauggaaacaucaauga

SEQ ID NO: 498893 - RNA, 19 nt, Homo sapiens
  misc_RNA (1)...(19): siRNA sense strand
gaaaggagagaugguggau

SEQ ID NO: 498894 - RNA, 19 nt, Homo sapiens
  misc_RNA (1)...(19): siRNA sense strand
cuagagguuucccuggauu

SEQ ID NO: 498895 - RNA, 19 nt, Homo sapiens
  misc_RNA (1)...(19): siRNA sense strand
gcaaauggagacggcuauu

SEQ ID NO: 498896 - RNA, 19 nt, Homo sapiens
  misc_RNA (1)...(19): siRNA sense strand
gaaaggcuuccagggagaa

SEQ ID NO: 498897 - RNA, 19 nt, Homo sapiens
  misc_RNA (1)...(19): siRNA sense strand
gcagcugggcuuccugguu

SEQ ID NO: 498898 - RNA, 19 nt, Homo sapiens
  misc_RNA (1)...(19): siRNA sense strand
ggagagaugguggauuaca

SEQ ID NO: 498899 - RNA, 19 nt, Homo sapiens
  misc_RNA (1)...(19): siRNA sense strand
gaugcuggcaacuccauug

SEQ ID NO: 498900 - RNA, 19 nt, Homo sapiens
  misc_RNA (1)...(19): siRNA sense strand
gcguggagcagcuggagaa

SEQ ID NO: 498901 - RNA, 19 nt, Homo sapiens
  misc_RNA (1)...(19): siRNA sense strand
uggagcagcuggagaacag

SEQ ID NO: 498902 - RNA, 19 nt, Homo sapiens
  misc_RNA (1)...(19): siRNA sense strand
ggauuuccgggucccauug

SEQ ID NO: 498903 - RNA, 19 nt, Homo sapiens
  misc_RNA (1)...(19): siRNA sense strand
gagaugguggauuacaaug

SEQ ID NO: 498904 - RNA, 19 nt, Homo sapiens
  misc_RNA (1)...(19): siRNA sense strand
uagcggagcgcacccacaa

SEQ ID NO: 498905 - RNA, 19 nt, Homo sapiens
  misc_RNA (1)...(19): siRNA sense strand
gggagaaccagggaaagga

SEQ ID NO: 498906 - RNA, 19 nt, Homo sapiens
  misc_RNA (1)...(19): siRNA sense strand
gagccaggccagcauccaa

SEQ ID NO: 498907 - RNA, 19 nt, Homo sapiens
  misc_RNA (1)...(19): siRNA sense strand
gguacuccaggaccaauug

SEQ ID NO: 498908 - RNA, 19 nt, Homo sapiens
  misc_RNA (1)...(19): siRNA sense strand
aaaggagacccugggauga

SEQ ID NO: 498909 - RNA, 19 nt, Homo sapiens
  misc_RNA (1)...(19): siRNA sense strand
gagccagggaucccaggaa

SEQ ID NO: 498910 - RNA, 19 nt, Homo sapiens
  misc_RNA (1)...(19): siRNA sense strand
gaaccagggaaaggagaga

SEQ ID NO: 498911 - RNA, 19 nt, Homo sapiens
  misc_RNA (1)...(19): siRNA sense strand
gauuacaauggaaacauca

SEQ ID NO: 498912 - RNA, 19 nt, Homo sapiens
  misc_RNA (1)...(19): siRNA sense strand
ggucaaccaggaacuagag

SEQ ID NO: 498913 - RNA, 19 nt, Homo sapiens
  misc_RNA (1)...(19): siRNA sense strand
aaggagagaugguggauua

SEQ ID NO: 498914 - RNA, 19 nt, Homo sapiens
  misc_RNA (1)...(19): siRNA sense strand
cagcugggcuuccugguuu

SEQ ID NO: 498915 - RNA, 19 nt, Homo sapiens
  misc_RNA (1)...(19): siRNA sense strand
ccaaagacaucuccaggau

SEQ ID NO: 498916 - RNA, 19 nt, Homo sapiens
  misc_RNA (1)...(19): siRNA sense strand
gagagaugguggauuacaa

SEQ ID NO: 498917 - RNA, 19 nt, Homo sapiens
  misc_RNA (1)...(19): siRNA sense strand
aaagggaccucgcgguaaa

SEQ ID NO: 498918 - RNA, 19 nt, Homo sapiens
  misc_RNA (1)...(19): siRNA sense strand
gaugguggauuacaaugga

SEQ ID NO: 498919 - RNA, 19 nt, Homo sapiens
  misc_RNA (1)...(19): siRNA sense strand
ggauuacaauggaaacauc

SEQ ID NO: 498920 - RNA, 19 nt, Homo sapiens
  misc_RNA (1)...(19): siRNA sense strand
caagggagaaccagggaaa

SEQ ID NO: 498921 - RNA, 19 nt, Homo sapiens
  misc_RNA (1)...(19): siRNA sense strand
ggaagcaggacuagaugga

SEQ ID NO: 498922 - RNA, 19 nt, Homo sapiens
  misc_RNA (1)...(19): siRNA sense strand
caaggcugcuggaacaagu

SEQ ID NO: 498923 - RNA, 19 nt, Homo sapiens
  misc_RNA (1)...(19): siRNA sense strand
gggagaagcaggugucgau

SEQ ID NO: 498924 - RNA, 19 nt, Homo sapiens
  misc_RNA (1)...(19): siRNA sense strand
ggagaacagggaccagaug

SEQ ID NO: 498925 - RNA, 19 nt, Homo sapiens
  misc_RNA (1)...(19): siRNA sense strand
acaauggaaacaucaauga

SEQ ID NO: 498926 - RNA, 19 nt, Homo sapiens
  misc_RNA (1)...(19): siRNA sense strand
gaaaggagagaugguggau

SEQ ID NO: 498927 - RNA, 19 nt, Homo sapiens
  misc_RNA (1)...(19): siRNA sense strand
cuagagguuucccuggauu

SEQ ID NO: 498928 - RNA, 19 nt, Homo sapiens
  misc_RNA (1)...(19): siRNA sense strand
gcaaauggagacggcuauu

SEQ ID NO: 498929 - RNA, 19 nt, Homo sapiens
  misc_RNA (1)...(19): siRNA sense strand
gaaaggcuuccagggagaa

SEQ ID NO: 498930 - RNA, 19 nt, Homo sapiens
  misc_RNA (1)...(19): siRNA sense strand
gcagcugggcuuccugguu

SEQ ID NO: 498931 - RNA, 19 nt, Homo sapiens
  misc_RNA (1)...(19): siRNA sense strand
ggagagaugguggauuaca

SEQ ID NO: 498932 - RNA, 19 nt, Homo sapiens
  misc_RNA (1)...(19): siRNA sense strand
gaugcuggcaacuccauug

SEQ ID NO: 498933 - RNA, 19 nt, Homo sapiens
  misc_RNA (1)...(19): siRNA sense strand
gcguggagcagcuggagaa

SEQ ID NO: 498934 - RNA, 19 nt, Homo sapiens
  misc_RNA (1)...(19): siRNA sense strand
uggagcagcuggagaacag

SEQ ID NO: 498935 - RNA, 19 nt, Homo sapiens
  misc_RNA (1)...(19): siRNA sense strand
ggauuuccgggucccauug

SEQ ID NO: 498936 - RNA, 19 nt, Homo sapiens
  misc_RNA (1)...(19): siRNA sense strand
gagaugguggauuacaaug

SEQ ID NO: 498937 - RNA, 19 nt, Homo sapiens
  misc_RNA (1)...(19): siRNA sense strand
uagcggagcgcacccacaa

SEQ ID NO: 498938 - RNA, 19 nt, Homo sapiens
  misc_RNA (1)...(19): siRNA sense strand
gggagaaccagggaaagga

SEQ ID NO: 498939 - RNA, 19 nt, Homo sapiens
  misc_RNA (1)...(19): siRNA sense strand
gagccaggccagcauccaa

SEQ ID NO: 498940 - RNA, 19 nt, Homo sapiens
  misc_RNA (1)...(19): siRNA sense strand
gguacuccaggaccaauug

SEQ ID NO: 498941 - RNA, 19 nt, Homo sapiens
  misc_RNA (1)...(19): siRNA sense strand
aaaggagacccugggauga

SEQ ID NO: 498942 - RNA, 19 nt, Homo sapiens
  misc_RNA (1)...(19): siRNA sense strand
gagccagggaucccaggaa

SEQ ID NO: 498943 - RNA, 19 nt, Homo sapiens
  misc_RNA (1)...(19): siRNA sense strand
gaaccagggaaaggagaga

SEQ ID NO: 498944 - RNA, 19 nt, Homo sapiens
  misc_RNA (1)...(19): siRNA sense strand
gauuacaauggaaacauca

SEQ ID NO: 498945 - RNA, 19 nt, Homo sapiens
  misc_RNA (1)...(19): siRNA sense strand
ggucaaccaggaacuagag

SEQ ID NO: 498946 - RNA, 19 nt, Homo sapiens
  misc_RNA (1)...(19): siRNA sense strand
aaggagagaugguggauua

SEQ ID NO: 498947 - RNA, 19 nt, Homo sapiens
  misc_RNA (1)...(19): siRNA sense strand
cagcugggcuuccugguuu

SEQ ID NO: 498948 - RNA, 19 nt, Homo sapiens
  misc_RNA (1)...(19): siRNA sense strand
ccaaagacaucuccaggau

SEQ ID NO: 498949 - RNA, 19 nt, Homo sapiens
  misc_RNA (1)...(19): siRNA sense strand
gagagaugguggauuacaa

SEQ ID NO: 498950 - RNA, 19 nt, Homo sapiens
  misc_RNA (1)...(19): siRNA sense strand
aaagggaccucgcgguaaa

SEQ ID NO: 498951 - RNA, 19 nt, Homo sapiens
  misc_RNA (1)...(19): siRNA sense strand
gaugguggauuacaaugga

SEQ ID NO: 498952 - RNA, 19 nt, Homo sapiens
  misc_RNA (1)...(19): siRNA sense strand
ggauuacaauggaaacauc

SEQ ID NO: 498953 - RNA, 19 nt, Homo sapiens
  misc_RNA (1)...(19): siRNA sense strand
caagggagaaccagggaaa

SEQ ID NO: 498954 - RNA, 19 nt, Homo sapiens
  misc_RNA (1)...(19): siRNA sense strand
ggaagcaggacuagaugga

SEQ ID NO: 498955 - RNA, 19 nt, Homo sapiens
  misc_RNA (1)...(19): siRNA sense strand
caaggcugcuggaacaagu

SEQ ID NO: 498956 - RNA, 19 nt, Homo sapiens
  misc_RNA (1)...(19): siRNA sense strand
gggagaagcaggugucgau

SEQ ID NO: 498957 - RNA, 19 nt, Homo sapiens
  misc_RNA (1)...(19): siRNA sense strand
ggagaacagggaccagaug

SEQ ID NO: 498958 - RNA, 19 nt, Homo sapiens
  misc_RNA (1)...(19): siRNA sense strand
acaauggaaacaucaauga

SEQ ID NO: 498959 - RNA, 19 nt, Homo sapiens
  misc_RNA (1)...(19): siRNA sense strand
gaaaggagagaugguggau

SEQ ID NO: 498960 - RNA, 19 nt, Homo sapiens
  misc_RNA (1)...(19): siRNA sense strand
cuagagguuucccuggauu

SEQ ID NO: 498961 - RNA, 19 nt, Homo sapiens
  misc_RNA (1)...(19): siRNA sense strand
gcaaauggagacggcuauu

SEQ ID NO: 498962 - RNA, 19 nt, Homo sapiens
  misc_RNA (1)...(19): siRNA sense strand
gaaaggcuuccagggagaa

SEQ ID NO: 498963 - RNA, 19 nt, Homo sapiens
  misc_RNA (1)...(19): siRNA sense strand
gcagcugggcuuccugguu

SEQ ID NO: 498964 - RNA, 19 nt, Homo sapiens
  misc_RNA (1)...(19): siRNA sense strand
ggagagaugguggauuaca

SEQ ID NO: 498965 - RNA, 19 nt, Homo sapiens
  misc_RNA (1)...(19): siRNA sense strand
gaugcuggcaacuccauug

SEQ ID NO: 498966 - RNA, 19 nt, Homo sapiens
  misc_RNA (1)...(19): siRNA sense strand
gcguggagcagcuggagaa

SEQ ID NO: 498967 - RNA, 19 nt, Homo sapiens
  misc_RNA (1)...(19): siRNA sense strand
uggagcagcuggagaacag

SEQ ID NO: 498968 - RNA, 19 nt, Homo sapiens
  misc_RNA (1)...(19): siRNA sense strand
ggauuuccgggucccauug

SEQ ID NO: 498969 - RNA, 19 nt, Homo sapiens
  misc_RNA (1)...(19): siRNA sense strand
gagaugguggauuacaaug

SEQ ID NO: 498970 - RNA, 19 nt, Homo sapiens
  misc_RNA (1)...(19): siRNA sense strand
uagcggagcgcacccacaa

SEQ ID NO: 498971 - RNA, 19 nt, Homo sapiens
  misc_RNA (1)...(19): siRNA sense strand
gggagaaccagggaaagga

SEQ ID NO: 498972 - RNA, 19 nt, Homo sapiens
  misc_RNA (1)...(19): siRNA sense strand
gagccaggccagcauccaa

SEQ ID NO: 498973 - RNA, 19 nt, Homo sapiens
  misc_RNA (1)...(19): siRNA sense strand
gguacuccaggaccaauug

SEQ ID NO: 498974 - RNA, 19 nt, Homo sapiens
  misc_RNA (1)...(19): siRNA sense strand
aaaggagacccugggauga

SEQ ID NO: 498975 - RNA, 19 nt, Homo sapiens
  misc_RNA (1)...(19): siRNA sense strand
gagccagggaucccaggaa

SEQ ID NO: 498976 - RNA, 19 nt, Homo sapiens
  misc_RNA (1)...(19): siRNA sense strand
gaaccagggaaaggagaga

SEQ ID NO: 498977 - RNA, 19 nt, Homo sapiens
  misc_RNA (1)...(19): siRNA sense strand
gauuacaauggaaacauca

SEQ ID NO: 498978 - RNA, 19 nt, Homo sapiens
  misc_RNA (1)...(19): siRNA sense strand
ggucaaccaggaacuagag

SEQ ID NO: 498979 - RNA, 19 nt, Homo sapiens
  misc_RNA (1)...(19): siRNA sense strand
aaggagagaugguggauua

SEQ ID NO: 498980 - RNA, 19 nt, Homo sapiens
  misc_RNA (1)...(19): siRNA sense strand
cagcugggcuuccugguuu

SEQ ID NO: 498981 - RNA, 19 nt, Homo sapiens
  misc_RNA (1)...(19): siRNA sense strand
ccaaagacaucuccaggau

SEQ ID NO: 498982 - RNA, 19 nt, Homo sapiens
  misc_RNA (1)...(19): siRNA sense strand
gagagaugguggauuacaa

SEQ ID NO: 498983 - RNA, 19 nt, Homo sapiens
  misc_RNA (1)...(19): siRNA sense strand
aaagggaccucgcgguaaa

SEQ ID NO: 498984 - RNA, 19 nt, Homo sapiens
  misc_RNA (1)...(19): siRNA sense strand
gaugguggauuacaaugga

SEQ ID NO: 498985 - RNA, 19 nt, Homo sapiens
  misc_RNA (1)...(19): siRNA sense strand
ggauuacaauggaaacauc

SEQ ID NO: 498986 - RNA, 19 nt, Homo sapiens
  misc_RNA (1)...(19): siRNA sense strand
caagggagaaccagggaaa

SEQ ID NO: 498987 - RNA, 19 nt, Homo sapiens
  misc_RNA (1)...(19): siRNA sense strand
ggaagcaggacuagaugga

SEQ ID NO: 498988 - RNA, 19 nt, Homo sapiens
  misc_RNA (1)...(19): siRNA sense strand
caaggcugcuggaacaagu

SEQ ID NO: 498989 - RNA, 19 nt, Homo sapiens
  misc_RNA (1)...(19): siRNA sense strand
gggagaagcaggugucgau

SEQ ID NO: 498990 - RNA, 19 nt, Homo sapiens
  misc_RNA (1)...(19): siRNA sense strand
ggagaacagggaccagaug

SEQ ID NO: 498991 - RNA, 19 nt, Homo sapiens
  misc_RNA (1)...(19): siRNA sense strand
acaauggaaacaucaauga

SEQ ID NO: 498992 - RNA, 19 nt, Homo sapiens
  misc_RNA (1)...(19): siRNA sense strand
gaaaggagagaugguggau

SEQ ID NO: 498993 - RNA, 19 nt, Homo sapiens
  misc_RNA (1)...(19): siRNA sense strand
cuagagguuucccuggauu

SEQ ID NO: 498994 - RNA, 19 nt, Homo sapiens
  misc_RNA (1)...(19): siRNA sense strand
gcaaauggagacggcuauu

SEQ ID NO: 498995 - RNA, 19 nt, Homo sapiens
  misc_RNA (1)...(19): siRNA sense strand
gaaaggcuuccagggagaa

SEQ ID NO: 498996 - RNA, 19 nt, Homo sapiens
  misc_RNA (1)...(19): siRNA sense strand
gcagcugggcuuccugguu

SEQ ID NO: 498997 - RNA, 19 nt, Homo sapiens
  misc_RNA (1)...(19): siRNA sense strand
ggagagaugguggauuaca

SEQ ID NO: 498998 - RNA, 19 nt, Homo sapiens
  misc_RNA (1)...(19): siRNA sense strand
gaugcuggcaacuccauug

SEQ ID NO: 498999 - RNA, 19 nt, Homo sapiens
  misc_RNA (1)...(19): siRNA sense strand
gcguggagcagcuggagaa

SEQ ID NO: 499000 - RNA, 19 nt, Homo sapiens
  misc_RNA (1)...(19): siRNA sense strand
uggagcagcuggagaacag

SEQ ID NO: 499001 - RNA, 19 nt, Homo sapiens
  misc_RNA (1)...(19): siRNA sense strand
ggauuuccgggucccauug

SEQ ID NO: 499002 - RNA, 19 nt, Homo sapiens
  misc_RNA (1)...(19): siRNA sense strand
gagaugguggauuacaaug

SEQ ID NO: 499003 - RNA, 19 nt, Homo sapiens
  misc_RNA (1)...(19): siRNA sense strand
uagcggagcgcacccacaa

SEQ ID NO: 499004 - RNA, 19 nt, Homo sapiens
  misc_RNA (1)...(19): siRNA sense strand
gggagaaccagggaaagga

SEQ ID NO: 499005 - RNA, 19 nt, Homo sapiens
  misc_RNA (1)...(19): siRNA sense strand
gagccaggccagcauccaa

SEQ ID NO: 499006 - RNA, 19 nt, Homo sapiens
  misc_RNA (1)...(19): siRNA sense strand
gguacuccaggaccaauug

SEQ ID NO: 499007 - RNA, 19 nt, Homo sapiens
  misc_RNA (1)...(19): siRNA sense strand
aaaggagacccugggauga

SEQ ID NO: 499008 - RNA, 19 nt, Homo sapiens
  misc_RNA (1)...(19): siRNA sense strand
gagccagggaucccaggaa

SEQ ID NO: 499009 - RNA, 19 nt, Homo sapiens
  misc_RNA (1)...(19): siRNA sense strand
gaaccagggaaaggagaga

SEQ ID NO: 499010 - RNA, 19 nt, Homo sapiens
  misc_RNA (1)...(19): siRNA sense strand
gauuacaauggaaacauca

SEQ ID NO: 499011 - RNA, 19 nt, Homo sapiens
  misc_RNA (1)...(19): siRNA sense strand
ggucaaccaggaacuagag

SEQ ID NO: 499012 - RNA, 19 nt, Homo sapiens
  misc_RNA (1)...(19): siRNA sense strand
aaggagagaugguggauua

SEQ ID NO: 499013 - RNA, 19 nt, Homo sapiens
  misc_RNA (1)...(19): siRNA sense strand
cagcugggcuuccugguuu

SEQ ID NO: 499014 - RNA, 19 nt, Homo sapiens
  misc_RNA (1)...(19): siRNA sense strand
ccaaagacaucuccaggau

SEQ ID NO: 499015 - RNA, 19 nt, Homo sapiens
  misc_RNA (1)...(19): siRNA sense strand
gagagaugguggauuacaa

SEQ ID NO: 499016 - RNA, 19 nt, Homo sapiens
  misc_RNA (1)...(19): siRNA sense strand
aaagggaccucgcgguaaa

SEQ ID NO: 499017 - RNA, 19 nt, Homo sapiens
  misc_RNA (1)...(19): siRNA sense strand
gaugguggauuacaaugga

SEQ ID NO: 499018 - RNA, 19 nt, Homo sapiens
  misc_RNA (1)...(19): siRNA sense strand
ggauuacaauggaaacauc

SEQ ID NO: 499019 - RNA, 19 nt, Homo sapiens
  misc_RNA (1)...(19): siRNA sense strand
caagggagaaccagggaaa

SEQ ID NO: 499020 - RNA, 19 nt, Homo sapiens
  misc_RNA (1)...(19): siRNA sense strand
ggaagcaggacuagaugga

SEQ ID NO: 499021 - RNA, 19 nt, Homo sapiens
  misc_RNA (1)...(19): siRNA sense strand
caaggcugcuggaacaagu

SEQ ID NO: 499022 - RNA, 19 nt, Homo sapiens
  misc_RNA (1)...(19): siRNA sense strand
gggagaagcaggugucgau

SEQ ID NO: 499023 - RNA, 19 nt, Homo sapiens
  misc_RNA (1)...(19): siRNA sense strand
ggagaacagggaccagaug

SEQ ID NO: 499024 - RNA, 19 nt, Homo sapiens
  misc_RNA (1)...(19): siRNA sense strand
acaauggaaacaucaauga

SEQ ID NO: 499025 - RNA, 19 nt, Homo sapiens
  misc_RNA (1)...(19): siRNA sense strand
gaaaggagagaugguggau

SEQ ID NO: 499026 - RNA, 19 nt, Homo sapiens
  misc_RNA (1)...(19): siRNA sense strand
cuagagguuucccuggauu

SEQ ID NO: 499027 - RNA, 19 nt, Homo sapiens
  misc_RNA (1)...(19): siRNA sense strand
gcaaauggagacggcuauu

SEQ ID NO: 499028 - RNA, 19 nt, Homo sapiens
  misc_RNA (1)...(19): siRNA sense strand
gaaaggcuuccagggagaa

SEQ ID NO: 499029 - RNA, 19 nt, Homo sapiens
  misc_RNA (1)...(19): siRNA sense strand
gcagcugggcuuccugguu

SEQ ID NO: 499030 - RNA, 19 nt, Homo sapiens
  misc_RNA (1)...(19): siRNA sense strand
ggagagaugguggauuaca

SEQ ID NO: 499031 - RNA, 19 nt, Homo sapiens
  misc_RNA (1)...(19): siRNA sense strand
gaugcuggcaacuccauug

SEQ ID NO: 499032 - RNA, 19 nt, Homo sapiens
  misc_RNA (1)...(19): siRNA sense strand
gcguggagcagcuggagaa

SEQ ID NO: 499033 - RNA, 19 nt, Homo sapiens
  misc_RNA (1)...(19): siRNA sense strand
uggagcagcuggagaacag

SEQ ID NO: 499034 - RNA, 19 nt, Homo sapiens
  misc_RNA (1)...(19): siRNA sense strand
ggauuuccgggucccauug

SEQ ID NO: 499035 - RNA, 19 nt, Homo sapiens
  misc_RNA (1)...(19): siRNA sense strand
gagaugguggauuacaaug

SEQ ID NO: 499036 - RNA, 19 nt, Homo sapiens
  misc_RNA (1)...(19): siRNA sense strand
uagcggagcgcacccacaa

SEQ ID NO: 499037 - RNA, 19 nt, Homo sapiens
  misc_RNA (1)...(19): siRNA sense strand
gggagaaccagggaaagga

SEQ ID NO: 499038 - RNA, 19 nt, Homo sapiens
  misc_RNA (1)...(19): siRNA sense strand
gagccaggccagcauccaa

SEQ ID NO: 499039 - RNA, 19 nt, Homo sapiens
  misc_RNA (1)...(19): siRNA sense strand
gguacuccaggaccaauug

SEQ ID NO: 499040 - RNA, 19 nt, Homo sapiens
  misc_RNA (1)...(19): siRNA sense strand
aaaggagacccugggauga

SEQ ID NO: 499041 - RNA, 19 nt, Homo sapiens
  misc_RNA (1)...(19): siRNA sense strand
gagccagggaucccaggaa

SEQ ID NO: 499042 - RNA, 19 nt, Homo sapiens
  misc_RNA (1)...(19): siRNA sense strand
gaaccagggaaaggagaga

SEQ ID NO: 499043 - RNA, 19 nt, Homo sapiens
  misc_RNA (1)...(19): siRNA sense strand
gauuacaauggaaacauca

SEQ ID NO: 499044 - RNA, 19 nt, Homo sapiens
  misc_RNA (1)...(19): siRNA sense strand
ggucaaccaggaacuagag

SEQ ID NO: 499045 - RNA, 19 nt, Homo sapiens
  misc_RNA (1)...(19): siRNA sense strand
aaggagagaugguggauua

SEQ ID NO: 499046 - RNA, 19 nt, Homo sapiens
  misc_RNA (1)...(19): siRNA sense strand
cagcugggcuuccugguuu

SEQ ID NO: 499047 - RNA, 19 nt, Homo sapiens
  misc_RNA (1)...(19): siRNA sense strand
ccaaagacaucuccaggau

SEQ ID NO: 499048 - RNA, 19 nt, Homo sapiens
  misc_RNA (1)...(19): siRNA sense strand
gagagaugguggauuacaa

SEQ ID NO: 499049 - RNA, 19 nt, Homo sapiens
  misc_RNA (1)...(19): siRNA sense strand
aaagggaccucgcgguaaa

SEQ ID NO: 499050 - RNA, 19 nt, Homo sapiens
  misc_RNA (1)...(19): siRNA sense strand
gaugguggauuacaaugga

SEQ ID NO: 499051 - RNA, 19 nt, Homo sapiens
  misc_RNA (1)...(19): siRNA sense strand
ggauuacaauggaaacauc

SEQ ID NO: 499052 - RNA, 19 nt, Homo sapiens
  misc_RNA (1)...(19): siRNA sense strand
caagggagaaccagggaaa

SEQ ID NO: 499053 - RNA, 19 nt, Homo sapiens
  misc_RNA (1)...(19): siRNA sense strand
ggaagcaggacuagaugga

SEQ ID NO: 499054 - RNA, 19 nt, Homo sapiens
  misc_RNA (1)...(19): siRNA sense strand
caaggcugcuggaacaagu

SEQ ID NO: 499055 - RNA, 19 nt, Homo sapiens
  misc_RNA (1)...(19): siRNA sense strand
gggagaagcaggugucgau

SEQ ID NO: 499056 - RNA, 19 nt, Homo sapiens
  misc_RNA (1)...(19): siRNA sense strand
ggagaacagggaccagaug

SEQ ID NO: 499057 - RNA, 19 nt, Homo sapiens
  misc_RNA (1)...(19): siRNA sense strand
acaauggaaacaucaauga

SEQ ID NO: 499058 - RNA, 19 nt, Homo sapiens
  misc_RNA (1)...(19): siRNA sense strand
gaaaggagagaugguggau

SEQ ID NO: 499059 - RNA, 19 nt, Homo sapiens
  misc_RNA (1)...(19): siRNA sense strand
cuagagguuucccuggauu

SEQ ID NO: 499060 - RNA, 19 nt, Homo sapiens
  misc_RNA (1)...(19): siRNA sense strand
gcaaauggagacggcuauu

SEQ ID NO: 499061 - RNA, 19 nt, Homo sapiens
  misc_RNA (1)...(19): siRNA sense strand
gaaaggcuuccagggagaa

SEQ ID NO: 499062 - RNA, 19 nt, Homo sapiens
  misc_RNA (1)...(19): siRNA sense strand
gcagcugggcuuccugguu

SEQ ID NO: 499063 - RNA, 19 nt, Homo sapiens
  misc_RNA (1)...(19): siRNA sense strand
ggagagaugguggauuaca

SEQ ID NO: 499064 - RNA, 19 nt, Homo sapiens
  misc_RNA (1)...(19): siRNA sense strand
gaugcuggcaacuccauug

SEQ ID NO: 499065 - RNA, 19 nt, Homo sapiens
  misc_RNA (1)...(19): siRNA sense strand
gcguggagcagcuggagaa

SEQ ID NO: 499066 - RNA, 19 nt, Homo sapiens
  misc_RNA (1)...(19): siRNA sense strand
uggagcagcuggagaacag

SEQ ID NO: 499067 - RNA, 19 nt, Homo sapiens
  misc_RNA (1)...(19): siRNA sense strand
ggauuuccgggucccauug

SEQ ID NO: 499068 - RNA, 19 nt, Homo sapiens
  misc_RNA (1)...(19): siRNA sense strand
gagaugguggauuacaaug

SEQ ID NO: 499069 - RNA, 19 nt, Homo sapiens
  misc_RNA (1)...(19): siRNA sense strand
uagcggagcgcacccacaa

SEQ ID NO: 499070 - RNA, 19 nt, Homo sapiens
  misc_RNA (1)...(19): siRNA sense strand
gggagaaccagggaaagga

SEQ ID NO: 499071 - RNA, 19 nt, Homo sapiens
  misc_RNA (1)...(19): siRNA sense strand
gagccaggccagcauccaa

SEQ ID NO: 499072 - RNA, 19 nt, Homo sapiens
  misc_RNA (1)...(19): siRNA sense strand
gguacuccaggaccaauug

SEQ ID NO: 499073 - RNA, 19 nt, Homo sapiens
  misc_RNA (1)...(19): siRNA sense strand
aaaggagacccugggauga

SEQ ID NO: 499074 - RNA, 19 nt, Homo sapiens
  misc_RNA (1)...(19): siRNA sense strand
gagccagggaucccaggaa

SEQ ID NO: 499075 - RNA, 19 nt, Homo sapiens
  misc_RNA (1)...(19): siRNA sense strand
gaaccagggaaaggagaga

SEQ ID NO: 499076 - RNA, 19 nt, Homo sapiens
  misc_RNA (1)...(19): siRNA sense strand
gauuacaauggaaacauca

SEQ ID NO: 499077 - RNA, 19 nt, Homo sapiens
  misc_RNA (1)...(19): siRNA sense strand
ggucaaccaggaacuagag

SEQ ID NO: 499078 - RNA, 19 nt, Homo sapiens
  misc_RNA (1)...(19): siRNA sense strand
aaggagagaugguggauua

SEQ ID NO: 499079 - RNA, 19 nt, Homo sapiens
  misc_RNA (1)...(19): siRNA sense strand
cagcugggcuuccugguuu

SEQ ID NO: 499080 - RNA, 19 nt, Homo sapiens
  misc_RNA (1)...(19): siRNA sense strand
ccaaagacaucuccaggau

SEQ ID NO: 499081 - RNA, 19 nt, Homo sapiens
  misc_RNA (1)...(19): siRNA sense strand
gagagaugguggauuacaa

SEQ ID NO: 499082 - RNA, 19 nt, Homo sapiens
  misc_RNA (1)...(19): siRNA sense strand
aaagggaccucgcgguaaa

SEQ ID NO: 499083 - RNA, 19 nt, Homo sapiens
  misc_RNA (1)...(19): siRNA sense strand
gaugguggauuacaaugga

SEQ ID NO: 499084 - RNA, 19 nt, Homo sapiens
  misc_RNA (1)...(19): siRNA sense strand
ggauuacaauggaaacauc

SEQ ID NO: 499085 - RNA, 19 nt, Homo sapiens
  misc_RNA (1)...(19): siRNA sense strand
caagggagaaccagggaaa

SEQ ID NO: 499086 - RNA, 19 nt, Homo sapiens
  misc_RNA (1)...(19): siRNA sense strand
ggaagcaggacuagaugga

SEQ ID NO: 499087 - RNA, 19 nt, Homo sapiens
  misc_RNA (1)...(19): siRNA sense strand
caaggcugcuggaacaagu

SEQ ID NO: 499088 - RNA, 19 nt, Homo sapiens
  misc_RNA (1)...(19): siRNA sense strand
gggagaagcaggugucgau

SEQ ID NO: 499089 - RNA, 19 nt, Homo sapiens
  misc_RNA (1)...(19): siRNA sense strand
ggagaacagggaccagaug

SEQ ID NO: 499090 - RNA, 19 nt, Homo sapiens
  misc_RNA (1)...(19): siRNA sense strand
acaauggaaacaucaauga

SEQ ID NO: 499091 - RNA, 19 nt, Homo sapiens
  misc_RNA (1)...(19): siRNA sense strand
gaaaggagagaugguggau

SEQ ID NO: 499092 - RNA, 19 nt, Homo sapiens
  misc_RNA (1)...(19): siRNA sense strand
cuagagguuucccuggauu

SEQ ID NO: 499093 - RNA, 19 nt, Homo sapiens
  misc_RNA (1)...(19): siRNA sense strand
gcaaauggagacggcuauu

SEQ ID NO: 499094 - RNA, 19 nt, Homo sapiens
  misc_RNA (1)...(19): siRNA sense strand
gaaaggcuuccagggagaa

SEQ ID NO: 499095 - RNA, 19 nt, Homo sapiens
  misc_RNA (1)...(19): siRNA sense strand
gcagcugggcuuccugguu

SEQ ID NO: 499096 - RNA, 19 nt, Homo sapiens
  misc_RNA (1)...(19): siRNA sense strand
ggagagaugguggauuaca

SEQ ID NO: 499097 - RNA, 19 nt, Homo sapiens
  misc_RNA (1)...(19): siRNA sense strand
gaugcuggcaacuccauug

SEQ ID NO: 499098 - RNA, 19 nt, Homo sapiens
  misc_RNA (1)...(19): siRNA sense strand
gcguggagcagcuggagaa

SEQ ID NO: 499099 - RNA, 19 nt, Homo sapiens
  misc_RNA (1)...(19): siRNA sense strand
uggagcagcuggagaacag

SEQ ID NO: 499100 - RNA, 19 nt, Homo sapiens
  misc_RNA (1)...(19): siRNA sense strand
ggauuuccgggucccauug

SEQ ID NO: 499101 - RNA, 19 nt, Homo sapiens
  misc_RNA (1)...(19): siRNA sense strand
gagaugguggauuacaaug

SEQ ID NO: 499102 - RNA, 19 nt, Homo sapiens
  misc_RNA (1)...(19): siRNA sense strand
uagcggagcgcacccacaa

SEQ ID NO: 499103 - RNA, 19 nt, Homo sapiens
  misc_RNA (1)...(19): siRNA sense strand
gggagaaccagggaaagga

SEQ ID NO: 499104 - RNA, 19 nt, Homo sapiens
  misc_RNA (1)...(19): siRNA sense strand
gagccaggccagcauccaa

SEQ ID NO: 499105 - RNA, 19 nt, Homo sapiens
  misc_RNA (1)...(19): siRNA sense strand
gguacuccaggaccaauug

SEQ ID NO: 499106 - RNA, 19 nt, Homo sapiens
  misc_RNA (1)...(19): siRNA sense strand
aaaggagacccugggauga

SEQ ID NO: 499107 - RNA, 19 nt, Homo sapiens
  misc_RNA (1)...(19): siRNA sense strand
gagccagggaucccaggaa

SEQ ID NO: 499108 - RNA, 19 nt, Homo sapiens
  misc_RNA (1)...(19): siRNA sense strand
gaaccagggaaaggagaga

SEQ ID NO: 499109 - RNA, 19 nt, Homo sapiens
  misc_RNA (1)...(19): siRNA sense strand
gauuacaauggaaacauca

SEQ ID NO: 499110 - RNA, 19 nt, Homo sapiens
  misc_RNA (1)...(19): siRNA sense strand
ggucaaccaggaacuagag

SEQ ID NO: 499111 - RNA, 19 nt, Homo sapiens
  misc_RNA (1)...(19): siRNA sense strand
aaggagagaugguggauua

SEQ ID NO: 499112 - RNA, 19 nt, Homo sapiens
  misc_RNA (1)...(19): siRNA sense strand
cagcugggcuuccugguuu

SEQ ID NO: 499113 - RNA, 19 nt, Homo sapiens
  misc_RNA (1)...(19): siRNA sense strand
ccaaagacaucuccaggau

SEQ ID NO: 499114 - RNA, 19 nt, Homo sapiens
  misc_RNA (1)...(19): siRNA sense strand
gagagaugguggauuacaa

SEQ ID NO: 499115 - RNA, 19 nt, Homo sapiens
  misc_RNA (1)...(19): siRNA sense strand
aaagggaccucgcgguaaa

SEQ ID NO: 499116 - RNA, 19 nt, Homo sapiens
  misc_RNA (1)...(19): siRNA sense strand
gaugguggauuacaaugga

SEQ ID NO: 499117 - RNA, 19 nt, Homo sapiens
  misc_RNA (1)...(19): siRNA sense strand
ggauuacaauggaaacauc

SEQ ID NO: 499118 - RNA, 19 nt, Homo sapiens
  misc_RNA (1)...(19): siRNA sense strand
caagggagaaccagggaaa

SEQ ID NO: 499119 - RNA, 19 nt, Homo sapiens
  misc_RNA (1)...(19): siRNA sense strand
ggaagcaggacuagaugga

SEQ ID NO: 499120 - RNA, 19 nt, Homo sapiens
  misc_RNA (1)...(19): siRNA sense strand
caaggcugcuggaacaagu

SEQ ID NO: 499121 - RNA, 19 nt, Homo sapiens
  misc_RNA (1)...(19): siRNA sense strand
gggagaagcaggugucgau

SEQ ID NO: 499122 - RNA, 19 nt, Homo sapiens
  misc_RNA (1)...(19): siRNA sense strand
ggagaacagggaccagaug

SEQ ID NO: 499123 - RNA, 19 nt, Homo sapiens
  misc_RNA (1)...(19): siRNA sense strand
acaauggaaacaucaauga

SEQ ID NO: 499124 - RNA, 19 nt, Homo sapiens
  misc_RNA (1)...(19): siRNA sense strand
gaaaggagagaugguggau

SEQ ID NO: 499125 - RNA, 19 nt, Homo sapiens
  misc_RNA (1)...(19): siRNA sense strand
cuagagguuucccuggauu

SEQ ID NO: 499126 - RNA, 19 nt, Homo sapiens
  misc_RNA (1)...(19): siRNA sense strand
gcaaauggagacggcuauu

SEQ ID NO: 499127 - RNA, 19 nt, Homo sapiens
  misc_RNA (1)...(19): siRNA sense strand
gaaaggcuuccagggagaa

SEQ ID NO: 499128 - RNA, 19 nt, Homo sapiens
  misc_RNA (1)...(19): siRNA sense strand
gcagcugggcuuccugguu

SEQ ID NO: 499129 - RNA, 19 nt, Homo sapiens
  misc_RNA (1)...(19): siRNA sense strand
ggagagaugguggauuaca

SEQ ID NO: 499130 - RNA, 19 nt, Homo sapiens
  misc_RNA (1)...(19): siRNA sense strand
gaugcuggcaacuccauug

SEQ ID NO: 499131 - RNA, 19 nt, Homo sapiens
  misc_RNA (1)...(19): siRNA sense strand
gcguggagcagcuggagaa

SEQ ID NO: 499132 - RNA, 19 nt, Homo sapiens
  misc_RNA (1)...(19): siRNA sense strand
uggagcagcuggagaacag

SEQ ID NO: 499133 - RNA, 19 nt, Homo sapiens
  misc_RNA (1)...(19): siRNA sense strand
ggauuuccgggucccauug

SEQ ID NO: 499134 - RNA, 19 nt, Homo sapiens
  misc_RNA (1)...(19): siRNA sense strand
gagaugguggauuacaaug

SEQ ID NO: 499135 - RNA, 19 nt, Homo sapiens
  misc_RNA (1)...(19): siRNA sense strand
uagcggagcgcacccacaa

SEQ ID NO: 499136 - RNA, 19 nt, Homo sapiens
  misc_RNA (1)...(19): siRNA sense strand
gggagaaccagggaaagga

SEQ ID NO: 499137 - RNA, 19 nt, Homo sapiens
  misc_RNA (1)...(19): siRNA sense strand
gagccaggccagcauccaa

SEQ ID NO: 499138 - RNA, 19 nt, Homo sapiens
  misc_RNA (1)...(19): siRNA sense strand
gguacuccaggaccaauug

SEQ ID NO: 499139 - RNA, 19 nt, Homo sapiens
  misc_RNA (1)...(19): siRNA sense strand
aaaggagacccugggauga

SEQ ID NO: 499140 - RNA, 19 nt, Homo sapiens
  misc_RNA (1)...(19): siRNA sense strand
gagccagggaucccaggaa

SEQ ID NO: 499141 - RNA, 19 nt, Homo sapiens
  misc_RNA (1)...(19): siRNA sense strand
gaaccagggaaaggagaga

SEQ ID NO: 499142 - RNA, 19 nt, Homo sapiens
  misc_RNA (1)...(19): siRNA sense strand
gauuacaauggaaacauca

SEQ ID NO: 499143 - RNA, 19 nt, Homo sapiens
  misc_RNA (1)...(19): siRNA sense strand
ggucaaccaggaacuagag

SEQ ID NO: 499144 - RNA, 19 nt, Homo sapiens
  misc_RNA (1)...(19): siRNA sense strand
aaggagagaugguggauua

SEQ ID NO: 499145 - RNA, 19 nt, Homo sapiens
  misc_RNA (1)...(19): siRNA sense strand
cagcugggcuuccugguuu

SEQ ID NO: 499146 - RNA, 19 nt, Homo sapiens
  misc_RNA (1)...(19): siRNA sense strand
ccaaagacaucuccaggau

SEQ ID NO: 499147 - RNA, 19 nt, Homo sapiens
  misc_RNA (1)...(19): siRNA sense strand
gagagaugguggauuacaa

SEQ ID NO: 499148 - RNA, 19 nt, Homo sapiens
  misc_RNA (1)...(19): siRNA sense strand
aaagggaccucgcgguaaa

SEQ ID NO: 499149 - RNA, 19 nt, Homo sapiens
  misc_RNA (1)...(19): siRNA sense strand
gaugguggauuacaaugga

SEQ ID NO: 499150 - RNA, 19 nt, Homo sapiens
  misc_RNA (1)...(19): siRNA sense strand
ggauuacaauggaaacauc

SEQ ID NO: 499151 - RNA, 19 nt, Homo sapiens
  misc_RNA (1)...(19): siRNA sense strand
caagggagaaccagggaaa

SEQ ID NO: 499152 - RNA, 19 nt, Homo sapiens
  misc_RNA (1)...(19): siRNA sense strand
ggaagcaggacuagaugga

SEQ ID NO: 499153 - RNA, 19 nt, Homo sapiens
  misc_RNA (1)...(19): siRNA sense strand
caaggcugcuggaacaagu

SEQ ID NO: 499154 - RNA, 19 nt, Homo sapiens
  misc_RNA (1)...(19): siRNA sense strand
gggagaagcaggugucgau

SEQ ID NO: 499155 - RNA, 19 nt, Homo sapiens
  misc_RNA (1)...(19): siRNA sense strand
ggagaacagggaccagaug

SEQ ID NO: 499156 - RNA, 19 nt, Homo sapiens
  misc_RNA (1)...(19): siRNA sense strand
acaauggaaacaucaauga

SEQ ID NO: 499157 - RNA, 19 nt, Homo sapiens
  misc_RNA (1)...(19): siRNA sense strand
gaaaggagagaugguggau

SEQ ID NO: 499158 - RNA, 19 nt, Homo sapiens
  misc_RNA (1)...(19): siRNA sense strand
cuagagguuucccuggauu

SEQ ID NO: 499159 - RNA, 19 nt, Homo sapiens
  misc_RNA (1)...(19): siRNA sense strand
gcaaauggagacggcuauu

SEQ ID NO: 499160 - RNA, 19 nt, Homo sapiens
  misc_RNA (1)...(19): siRNA sense strand
gaaaggcuuccagggagaa

SEQ ID NO: 499161 - RNA, 19 nt, Homo sapiens
  misc_RNA (1)...(19): siRNA sense strand
gcagcugggcuuccugguu

SEQ ID NO: 499162 - RNA, 19 nt, Homo sapiens
  misc_RNA (1)...(19): siRNA sense strand
ggagagaugguggauuaca

SEQ ID NO: 499163 - RNA, 19 nt, Homo sapiens
  misc_RNA (1)...(19): siRNA sense strand
gaugcuggcaacuccauug

SEQ ID NO: 499164 - RNA, 19 nt, Homo sapiens
  misc_RNA (1)...(19): siRNA sense strand
gcguggagcagcuggagaa

SEQ ID NO: 499165 - RNA, 19 nt, Homo sapiens
  misc_RNA (1)...(19): siRNA sense strand
uggagcagcuggagaacag

SEQ ID NO: 499166 - RNA, 19 nt, Homo sapiens
  misc_RNA (1)...(19): siRNA sense strand
ggauuuccgggucccauug

SEQ ID NO: 499167 - RNA, 19 nt, Homo sapiens
  misc_RNA (1)...(19): siRNA sense strand
gagaugguggauuacaaug

SEQ ID NO: 499168 - RNA, 19 nt, Homo sapiens
  misc_RNA (1)...(19): siRNA sense strand
uagcggagcgcacccacaa

SEQ ID NO: 499169 - RNA, 19 nt, Homo sapiens
  misc_RNA (1)...(19): siRNA sense strand
gggagaaccagggaaagga

SEQ ID NO: 499170 - RNA, 19 nt, Homo sapiens
  misc_RNA (1)...(19): siRNA sense strand
gagccaggccagcauccaa

SEQ ID NO: 499171 - RNA, 19 nt, Homo sapiens
  misc_RNA (1)...(19): siRNA sense strand
gguacuccaggaccaauug

SEQ ID NO: 499172 - RNA, 19 nt, Homo sapiens
  misc_RNA (1)...(19): siRNA sense strand
aaaggagacccugggauga

SEQ ID NO: 499173 - RNA, 19 nt, Homo sapiens
  misc_RNA (1)...(19): siRNA sense strand
gagccagggaucccaggaa

SEQ ID NO: 499174 - RNA, 19 nt, Homo sapiens
  misc_RNA (1)...(19): siRNA sense strand
gaaccagggaaaggagaga

SEQ ID NO: 499175 - RNA, 19 nt, Homo sapiens
  misc_RNA (1)...(19): siRNA sense strand
gauuacaauggaaacauca

SEQ ID NO: 499176 - RNA, 19 nt, Homo sapiens
  misc_RNA (1)...(19): siRNA sense strand
ggucaaccaggaacuagag

SEQ ID NO: 499177 - RNA, 19 nt, Homo sapiens
  misc_RNA (1)...(19): siRNA sense strand
aaggagagaugguggauua

SEQ ID NO: 499178 - RNA, 19 nt, Homo sapiens
  misc_RNA (1)...(19): siRNA sense strand
cagcugggcuuccugguuu

SEQ ID NO: 499179 - RNA, 19 nt, Homo sapiens
  misc_RNA (1)...(19): siRNA sense strand
ccaaagacaucuccaggau

SEQ ID NO: 499180 - RNA, 19 nt, Homo sapiens
  misc_RNA (1)...(19): siRNA sense strand
gagagaugguggauuacaa

SEQ ID NO: 499181 - RNA, 19 nt, Homo sapiens
  misc_RNA (1)...(19): siRNA sense strand
aaagggaccucgcgguaaa

SEQ ID NO: 499182 - RNA, 19 nt, Homo sapiens
  misc_RNA (1)...(19): siRNA sense strand
gaugguggauuacaaugga

SEQ ID NO: 499183 - RNA, 19 nt, Homo sapiens
  misc_RNA (1)...(19): siRNA sense strand
ggauuacaauggaaacauc

SEQ ID NO: 499184 - RNA, 19 nt, Homo sapiens
  misc_RNA (1)...(19): siRNA sense strand
caagggagaaccagggaaa

SEQ ID NO: 499185 - RNA, 19 nt, Homo sapiens
  misc_RNA (1)...(19): siRNA sense strand
ggaagcaggacuagaugga

SEQ ID NO: 499186 - RNA, 19 nt, Homo sapiens
  misc_RNA (1)...(19): siRNA sense strand
caaggcugcuggaacaagu

SEQ ID NO: 499187 - RNA, 19 nt, Homo sapiens
  misc_RNA (1)...(19): siRNA sense strand
gggagaagcaggugucgau

SEQ ID NO: 499188 - RNA, 19 nt, Homo sapiens
  misc_RNA (1)...(19): siRNA sense strand
ggagaacagggaccagaug

SEQ ID NO: 499189 - RNA, 19 nt, Homo sapiens
  misc_RNA (1)...(19): siRNA sense strand
acaauggaaacaucaauga

SEQ ID NO: 499190 - RNA, 19 nt, Homo sapiens
  misc_RNA (1)...(19): siRNA sense strand
gaaaggagagaugguggau

SEQ ID NO: 499191 - RNA, 19 nt, Homo sapiens
  misc_RNA (1)...(19): siRNA sense strand
cuagagguuucccuggauu

SEQ ID NO: 499192 - RNA, 19 nt, Homo sapiens
  misc_RNA (1)...(19): siRNA sense strand
gcaaauggagacggcuauu

SEQ ID NO: 499193 - RNA, 19 nt, Homo sapiens
  misc_RNA (1)...(19): siRNA sense strand
gaaaggcuuccagggagaa

SEQ ID NO: 499194 - RNA, 19 nt, Homo sapiens
  misc_RNA (1)...(19): siRNA sense strand
gcagcugggcuuccugguu

SEQ ID NO: 499195 - RNA, 19 nt, Homo sapiens
  misc_RNA (1)...(19): siRNA sense strand
ggagagaugguggauuaca

SEQ ID NO: 499196 - RNA, 19 nt, Homo sapiens
  misc_RNA (1)...(19): siRNA sense strand
gaugcuggcaacuccauug

SEQ ID NO: 499197 - RNA, 19 nt, Homo sapiens
  misc_RNA (1)...(19): siRNA sense strand
gcguggagcagcuggagaa

SEQ ID NO: 499198 - RNA, 19 nt, Homo sapiens
  misc_RNA (1)...(19): siRNA sense strand
uggagcagcuggagaacag

SEQ ID NO: 499199 - RNA, 19 nt, Homo sapiens
  misc_RNA (1)...(19): siRNA sense strand
ggauuuccgggucccauug

SEQ ID NO: 499200 - RNA, 19 nt, Homo sapiens
  misc_RNA (1)...(19): siRNA sense strand
gagaugguggauuacaaug

SEQ ID NO: 499201 - RNA, 19 nt, Homo sapiens
  misc_RNA (1)...(19): siRNA sense strand
uagcggagcgcacccacaa

SEQ ID NO: 499202 - RNA, 19 nt, Homo sapiens
  misc_RNA (1)...(19): siRNA sense strand
gggagaaccagggaaagga

SEQ ID NO: 499203 - RNA, 19 nt, Homo sapiens
  misc_RNA (1)...(19): siRNA sense strand
gagccaggccagcauccaa

SEQ ID NO: 499204 - RNA, 19 nt, Homo sapiens
  misc_RNA (1)...(19): siRNA sense strand
gguacuccaggaccaauug

SEQ ID NO: 499205 - RNA, 19 nt, Homo sapiens
  misc_RNA (1)...(19): siRNA sense strand
aaaggagacccugggauga

SEQ ID NO: 499206 - RNA, 19 nt, Homo sapiens
  misc_RNA (1)...(19): siRNA sense strand
gagccagggaucccaggaa

SEQ ID NO: 499207 - RNA, 19 nt, Homo sapiens
  misc_RNA (1)...(19): siRNA sense strand
gaaccagggaaaggagaga

SEQ ID NO: 499208 - RNA, 19 nt, Homo sapiens
  misc_RNA (1)...(19): siRNA sense strand
gauuacaauggaaacauca

SEQ ID NO: 499209 - RNA, 19 nt, Homo sapiens
  misc_RNA (1)...(19): siRNA sense strand
ggucaaccaggaacuagag

SEQ ID NO: 499210 - RNA, 19 nt, Homo sapiens
  misc_RNA (1)...(19): siRNA sense strand
aaggagagaugguggauua

SEQ ID NO: 499211 - RNA, 19 nt, Homo sapiens
  misc_RNA (1)...(19): siRNA sense strand
cagcugggcuuccugguuu

SEQ ID NO: 499212 - RNA, 19 nt, Homo sapiens
  misc_RNA (1)...(19): siRNA sense strand
ccaaagacaucuccaggau

SEQ ID NO: 499213 - RNA, 19 nt, Homo sapiens
  misc_RNA (1)...(19): siRNA sense strand
gagagaugguggauuacaa

SEQ ID NO: 499214 - RNA, 19 nt, Homo sapiens
  misc_RNA (1)...(19): siRNA sense strand
aaagggaccucgcgguaaa

SEQ ID NO: 499215 - RNA, 19 nt, Homo sapiens
  misc_RNA (1)...(19): siRNA sense strand
gaugguggauuacaaugga

SEQ ID NO: 499216 - RNA, 19 nt, Homo sapiens
  misc_RNA (1)...(19): siRNA sense strand
ggauuacaauggaaacauc

SEQ ID NO: 499217 - RNA, 19 nt, Homo sapiens
  misc_RNA (1)...(19): siRNA sense strand
caagggagaaccagggaaa

SEQ ID NO: 499218 - RNA, 19 nt, Homo sapiens
  misc_RNA (1)...(19): siRNA sense strand
ggaagcaggacuagaugga

SEQ ID NO: 499219 - RNA, 19 nt, Homo sapiens
  misc_RNA (1)...(19): siRNA sense strand
caaggcugcuggaacaagu

SEQ ID NO: 499220 - RNA, 19 nt, Homo sapiens
  misc_RNA (1)...(19): siRNA sense strand
gggagaagcaggugucgau

SEQ ID NO: 499221 - RNA, 19 nt, Homo sapiens
  misc_RNA (1)...(19): siRNA sense strand
ggagaacagggaccagaug

SEQ ID NO: 499222 - RNA, 19 nt, Homo sapiens
  misc_RNA (1)...(19): siRNA sense strand
acaauggaaacaucaauga

SEQ ID NO: 499223 - RNA, 19 nt, Homo sapiens
  misc_RNA (1)...(19): siRNA sense strand
gaaaggagagaugguggau

SEQ ID NO: 499224 - RNA, 19 nt, Homo sapiens
  misc_RNA (1)...(19): siRNA sense strand
cuagagguuucccuggauu

SEQ ID NO: 499225 - RNA, 19 nt, Homo sapiens
  misc_RNA (1)...(19): siRNA sense strand
gcaaauggagacggcuauu

SEQ ID NO: 499226 - RNA, 19 nt, Homo sapiens
  misc_RNA (1)...(19): siRNA sense strand
gaaaggcuuccagggagaa

SEQ ID NO: 499227 - RNA, 19 nt, Homo sapiens
  misc_RNA (1)...(19): siRNA sense strand
gcagcugggcuuccugguu

SEQ ID NO: 499228 - RNA, 19 nt, Homo sapiens
  misc_RNA (1)...(19): siRNA sense strand
ggagagaugguggauuaca

SEQ ID NO: 499229 - RNA, 19 nt, Homo sapiens
  misc_RNA (1)...(19): siRNA sense strand
gaugcuggcaacuccauug

SEQ ID NO: 499230 - RNA, 19 nt, Homo sapiens
  misc_RNA (1)...(19): siRNA sense strand
gcguggagcagcuggagaa

SEQ ID NO: 499231 - RNA, 19 nt, Homo sapiens
  misc_RNA (1)...(19): siRNA sense strand
uggagcagcuggagaacag

SEQ ID NO: 499232 - RNA, 19 nt, Homo sapiens
  misc_RNA (1)...(19): siRNA sense strand
ggauuuccgggucccauug

SEQ ID NO: 499233 - RNA, 19 nt, Homo sapiens
  misc_RNA (1)...(19): siRNA sense strand
gagaugguggauuacaaug

SEQ ID NO: 499234 - RNA, 19 nt, Homo sapiens
  misc_RNA (1)...(19): siRNA sense strand
uagcggagcgcacccacaa

SEQ ID NO: 499235 - RNA, 19 nt, Homo sapiens
  misc_RNA (1)...(19): siRNA sense strand
gggagaaccagggaaagga

SEQ ID NO: 499236 - RNA, 19 nt, Homo sapiens
  misc_RNA (1)...(19): siRNA sense strand
gagccaggccagcauccaa

SEQ ID NO: 499237 - RNA, 19 nt, Homo sapiens
  misc_RNA (1)...(19): siRNA sense strand
gguacuccaggaccaauug

SEQ ID NO: 499238 - RNA, 19 nt, Homo sapiens
  misc_RNA (1)...(19): siRNA sense strand
aaaggagacccugggauga

SEQ ID NO: 499239 - RNA, 19 nt, Homo sapiens
  misc_RNA (1)...(19): siRNA sense strand
gagccagggaucccaggaa

SEQ ID NO: 499240 - RNA, 19 nt, Homo sapiens
  misc_RNA (1)...(19): siRNA sense strand
gaaccagggaaaggagaga

SEQ ID NO: 499241 - RNA, 19 nt, Homo sapiens
  misc_RNA (1)...(19): siRNA sense strand
gauuacaauggaaacauca

SEQ ID NO: 499242 - RNA, 19 nt, Homo sapiens
  misc_RNA (1)...(19): siRNA sense strand
ggucaaccaggaacuagag

SEQ ID NO: 499243 - RNA, 19 nt, Homo sapiens
  misc_RNA (1)...(19): siRNA sense strand
aaggagagaugguggauua

SEQ ID NO: 499244 - RNA, 19 nt, Homo sapiens
  misc_RNA (1)...(19): siRNA sense strand
cagcugggcuuccugguuu

SEQ ID NO: 499245 - RNA, 19 nt, Homo sapiens
  misc_RNA (1)...(19): siRNA sense strand
ccaaagacaucuccaggau

SEQ ID NO: 499246 - RNA, 19 nt, Homo sapiens
  misc_RNA (1)...(19): siRNA sense strand
gagagaugguggauuacaa

SEQ ID NO: 499247 - RNA, 19 nt, Homo sapiens
  misc_RNA (1)...(19): siRNA sense strand
aaagggaccucgcgguaaa

SEQ ID NO: 499248 - RNA, 19 nt, Homo sapiens
  misc_RNA (1)...(19): siRNA sense strand
gaugguggauuacaaugga

SEQ ID NO: 499249 - RNA, 19 nt, Homo sapiens
  misc_RNA (1)...(19): siRNA sense strand
ggauuacaauggaaacauc

SEQ ID NO: 499250 - RNA, 19 nt, Homo sapiens
  misc_RNA (1)...(19): siRNA sense strand
caagggagaaccagggaaa

SEQ ID NO: 499251 - RNA, 19 nt, Homo sapiens
  misc_RNA (1)...(19): siRNA sense strand
ggaagcaggacuagaugga

SEQ ID NO: 499252 - RNA, 19 nt, Homo sapiens
  misc_RNA (1)...(19): siRNA sense strand
caaggcugcuggaacaagu

SEQ ID NO: 499253 - RNA, 19 nt, Homo sapiens
  misc_RNA (1)...(19): siRNA sense strand
gggagaagcaggugucgau

SEQ ID NO: 499254 - RNA, 19 nt, Homo sapiens
  misc_RNA (1)...(19): siRNA sense strand
ggagaacagggaccagaug

SEQ ID NO: 499255 - RNA, 19 nt, Homo sapiens
  misc_RNA (1)...(19): siRNA sense strand
acaauggaaacaucaauga

SEQ ID NO: 499256 - RNA, 19 nt, Homo sapiens
  misc_RNA (1)...(19): siRNA sense strand
gaaaggagagaugguggau

SEQ ID NO: 499257 - RNA, 19 nt, Homo sapiens
  misc_RNA (1)...(19): siRNA sense strand
cuagagguuucccuggauu

SEQ ID NO: 499258 - RNA, 19 nt, Homo sapiens
  misc_RNA (1)...(19): siRNA sense strand
gcaaauggagacggcuauu

SEQ ID NO: 499259 - RNA, 19 nt, Homo sapiens
  misc_RNA (1)...(19): siRNA sense strand
gaaaggcuuccagggagaa

SEQ ID NO: 499260 - RNA, 19 nt, Homo sapiens
  misc_RNA (1)...(19): siRNA sense strand
gcagcugggcuuccugguu

SEQ ID NO: 499261 - RNA, 19 nt, Homo sapiens
  misc_RNA (1)...(19): siRNA sense strand
ggagagaugguggauuaca

SEQ ID NO: 499262 - RNA, 19 nt, Homo sapiens
  misc_RNA (1)...(19): siRNA sense strand
gaugcuggcaacuccauug

SEQ ID NO: 499263 - RNA, 19 nt, Homo sapiens
  misc_RNA (1)...(19): siRNA sense strand
gcguggagcagcuggagaa

SEQ ID NO: 499264 - RNA, 19 nt, Homo sapiens
  misc_RNA (1)...(19): siRNA sense strand
uggagcagcuggagaacag

SEQ ID NO: 499265 - RNA, 19 nt, Homo sapiens
  misc_RNA (1)...(19): siRNA sense strand
ggauuuccgggucccauug

SEQ ID NO: 499266 - RNA, 19 nt, Homo sapiens
  misc_RNA (1)...(19): siRNA sense strand
gagaugguggauuacaaug

SEQ ID NO: 499267 - RNA, 19 nt, Homo sapiens
  misc_RNA (1)...(19): siRNA sense strand
uagcggagcgcacccacaa

SEQ ID NO: 499268 - RNA, 19 nt, Homo sapiens
  misc_RNA (1)...(19): siRNA sense strand
gggagaaccagggaaagga

SEQ ID NO: 499269 - RNA, 19 nt, Homo sapiens
  misc_RNA (1)...(19): siRNA sense strand
gagccaggccagcauccaa

SEQ ID NO: 499270 - RNA, 19 nt, Homo sapiens
  misc_RNA (1)...(19): siRNA sense strand
gguacuccaggaccaauug

SEQ ID NO: 499271 - RNA, 19 nt, Homo sapiens
  misc_RNA (1)...(19): siRNA sense strand
aaaggagacccugggauga

SEQ ID NO: 499272 - RNA, 19 nt, Homo sapiens
  misc_RNA (1)...(19): siRNA sense strand
gagccagggaucccaggaa

SEQ ID NO: 499273 - RNA, 19 nt, Homo sapiens
  misc_RNA (1)...(19): siRNA sense strand
gaaccagggaaaggagaga

SEQ ID NO: 499274 - RNA, 19 nt, Homo sapiens
  misc_RNA (1)...(19): siRNA sense strand
gauuacaauggaaacauca

SEQ ID NO: 499275 - RNA, 19 nt, Homo sapiens
  misc_RNA (1)...(19): siRNA sense strand
ggucaaccaggaacuagag

SEQ ID NO: 499276 - RNA, 19 nt, Homo sapiens
  misc_RNA (1)...(19): siRNA sense strand
aaggagagaugguggauua

SEQ ID NO: 499277 - RNA, 19 nt, Homo sapiens
  misc_RNA (1)...(19): siRNA sense strand
cagcugggcuuccugguuu

SEQ ID NO: 499278 - RNA, 19 nt, Homo sapiens
  misc_RNA (1)...(19): siRNA sense strand
ccaaagacaucuccaggau

SEQ ID NO: 499279 - RNA, 19 nt, Homo sapiens
  misc_RNA (1)...(19): siRNA sense strand
gagagaugguggauuacaa

SEQ ID NO: 499280 - RNA, 19 nt, Homo sapiens
  misc_RNA (1)...(19): siRNA sense strand
aaagggaccucgcgguaaa

SEQ ID NO: 499281 - RNA, 19 nt, Homo sapiens
  misc_RNA (1)...(19): siRNA sense strand
gaugguggauuacaaugga

SEQ ID NO: 499282 - RNA, 19 nt, Homo sapiens
  misc_RNA (1)...(19): siRNA sense strand
ggauuacaauggaaacauc

SEQ ID NO: 499283 - RNA, 19 nt, Homo sapiens
  misc_RNA (1)...(19): siRNA sense strand
caagggagaaccagggaaa

SEQ ID NO: 499284 - RNA, 19 nt, Homo sapiens
  misc_RNA (1)...(19): siRNA sense strand
ggaagcaggacuagaugga

SEQ ID NO: 499285 - RNA, 19 nt, Homo sapiens
  misc_RNA (1)...(19): siRNA sense strand
caaggcugcuggaacaagu

SEQ ID NO: 499286 - RNA, 19 nt, Homo sapiens
  misc_RNA (1)...(19): siRNA sense strand
gggagaagcaggugucgau

SEQ ID NO: 499287 - RNA, 19 nt, Homo sapiens
  misc_RNA (1)...(19): siRNA sense strand
ggagaacagggaccagaug

SEQ ID NO: 499288 - RNA, 19 nt, Homo sapiens
  misc_RNA (1)...(19): siRNA sense strand
acaauggaaacaucaauga

SEQ ID NO: 499289 - RNA, 19 nt, Homo sapiens
  misc_RNA (1)...(19): siRNA sense strand
gaaaggagagaugguggau

SEQ ID NO: 499290 - RNA, 19 nt, Homo sapiens
  misc_RNA (1)...(19): siRNA sense strand
cuagagguuucccuggauu

SEQ ID NO: 499291 - RNA, 19 nt, Homo sapiens
  misc_RNA (1)...(19): siRNA sense strand
gcaaauggagacggcuauu

SEQ ID NO: 499292 - RNA, 19 nt, Homo sapiens
  misc_RNA (1)...(19): siRNA sense strand
gaaaggcuuccagggagaa

SEQ ID NO: 499293 - RNA, 19 nt, Homo sapiens
  misc_RNA (1)...(19): siRNA sense strand
gcagcugggcuuccugguu

SEQ ID NO: 499294 - RNA, 19 nt, Homo sapiens
  misc_RNA (1)...(19): siRNA sense strand
ggagagaugguggauuaca

SEQ ID NO: 499295 - RNA, 19 nt, Homo sapiens
  misc_RNA (1)...(19): siRNA sense strand
gaugcuggcaacuccauug

SEQ ID NO: 499296 - RNA, 19 nt, Homo sapiens
  misc_RNA (1)...(19): siRNA sense strand
gcguggagcagcuggagaa

SEQ ID NO: 499297 - RNA, 19 nt, Homo sapiens
  misc_RNA (1)...(19): siRNA sense strand
uggagcagcuggagaacag

SEQ ID NO: 499298 - RNA, 19 nt, Homo sapiens
  misc_RNA (1)...(19): siRNA sense strand
ggauuuccgggucccauug

SEQ ID NO: 499299 - RNA, 19 nt, Homo sapiens
  misc_RNA (1)...(19): siRNA sense strand
gagaugguggauuacaaug

SEQ ID NO: 499300 - RNA, 19 nt, Homo sapiens
  misc_RNA (1)...(19): siRNA sense strand
uagcggagcgcacccacaa

SEQ ID NO: 499301 - RNA, 19 nt, Homo sapiens
  misc_RNA (1)...(19): siRNA sense strand
gggagaaccagggaaagga

SEQ ID NO: 499302 - RNA, 19 nt, Homo sapiens
  misc_RNA (1)...(19): siRNA sense strand
gagccaggccagcauccaa

SEQ ID NO: 499303 - RNA, 19 nt, Homo sapiens
  misc_RNA (1)...(19): siRNA sense strand
gguacuccaggaccaauug

SEQ ID NO: 499304 - RNA, 19 nt, Homo sapiens
  misc_RNA (1)...(19): siRNA sense strand
aaaggagacccugggauga

SEQ ID NO: 499305 - RNA, 19 nt, Homo sapiens
  misc_RNA (1)...(19): siRNA sense strand
gagccagggaucccaggaa

SEQ ID NO: 499306 - RNA, 19 nt, Homo sapiens
  misc_RNA (1)...(19): siRNA sense strand
gaaccagggaaaggagaga

SEQ ID NO: 499307 - RNA, 19 nt, Homo sapiens
  misc_RNA (1)...(19): siRNA sense strand
gauuacaauggaaacauca

SEQ ID NO: 499308 - RNA, 19 nt, Homo sapiens
  misc_RNA (1)...(19): siRNA sense strand
ggucaaccaggaacuagag

SEQ ID NO: 499309 - RNA, 19 nt, Homo sapiens
  misc_RNA (1)...(19): siRNA sense strand
aaggagagaugguggauua

SEQ ID NO: 499310 - RNA, 19 nt, Homo sapiens
  misc_RNA (1)...(19): siRNA sense strand
cagcugggcuuccugguuu

SEQ ID NO: 499311 - RNA, 19 nt, Homo sapiens
  misc_RNA (1)...(19): siRNA sense strand
ccaaagacaucuccaggau

SEQ ID NO: 499312 - RNA, 19 nt, Homo sapiens
  misc_RNA (1)...(19): siRNA sense strand
gagagaugguggauuacaa

SEQ ID NO: 499313 - RNA, 19 nt, Homo sapiens
  misc_RNA (1)...(19): siRNA sense strand
aaagggaccucgcgguaaa

SEQ ID NO: 499314 - RNA, 19 nt, Homo sapiens
  misc_RNA (1)...(19): siRNA sense strand
gaugguggauuacaaugga

SEQ ID NO: 499315 - RNA, 19 nt, Homo sapiens
  misc_RNA (1)...(19): siRNA sense strand
ggauuacaauggaaacauc

SEQ ID NO: 499316 - RNA, 19 nt, Homo sapiens
  misc_RNA (1)...(19): siRNA sense strand
caagggagaaccagggaaa

SEQ ID NO: 499317 - RNA, 19 nt, Homo sapiens
  misc_RNA (1)...(19): siRNA sense strand
ggaagcaggacuagaugga

SEQ ID NO: 499318 - RNA, 19 nt, Homo sapiens
  misc_RNA (1)...(19): siRNA sense strand
caaggcugcuggaacaagu

SEQ ID NO: 499319 - RNA, 19 nt, Homo sapiens
  misc_RNA (1)...(19): siRNA sense strand
gggagaagcaggugucgau

SEQ ID NO: 499320 - RNA, 19 nt, Homo sapiens
  misc_RNA (1)...(19): siRNA sense strand
ggagaacagggaccagaug

SEQ ID NO: 499321 - RNA, 19 nt, Homo sapiens
  misc_RNA (1)...(19): siRNA sense strand
acaauggaaacaucaauga

SEQ ID NO: 499322 - RNA, 19 nt, Homo sapiens
  misc_RNA (1)...(19): siRNA sense strand
gaaaggagagaugguggau

SEQ ID NO: 499323 - RNA, 19 nt, Homo sapiens
  misc_RNA (1)...(19): siRNA sense strand
cuagagguuucccuggauu

SEQ ID NO: 499324 - RNA, 19 nt, Homo sapiens
  misc_RNA (1)...(19): siRNA sense strand
gcaaauggagacggcuauu

SEQ ID NO: 499325 - RNA, 19 nt, Homo sapiens
  misc_RNA (1)...(19): siRNA sense strand
gaaaggcuuccagggagaa

SEQ ID NO: 499326 - RNA, 19 nt, Homo sapiens
  misc_RNA (1)...(19): siRNA sense strand
gcagcugggcuuccugguu

SEQ ID NO: 499327 - RNA, 19 nt, Homo sapiens
  misc_RNA (1)...(19): siRNA sense strand
ggagagaugguggauuaca

SEQ ID NO: 499328 - RNA, 19 nt, Homo sapiens
  misc_RNA (1)...(19): siRNA sense strand
gaugcuggcaacuccauug

SEQ ID NO: 499329 - RNA, 19 nt, Homo sapiens
  misc_RNA (1)...(19): siRNA sense strand
gcguggagcagcuggagaa

SEQ ID NO: 499330 - RNA, 19 nt, Homo sapiens
  misc_RNA (1)...(19): siRNA sense strand
uggagcagcuggagaacag

SEQ ID NO: 499331 - RNA, 19 nt, Homo sapiens
  misc_RNA (1)...(19): siRNA sense strand
ggauuuccgggucccauug

SEQ ID NO: 499332 - RNA, 19 nt, Homo sapiens
  misc_RNA (1)...(19): siRNA sense strand
gagaugguggauuacaaug

SEQ ID NO: 499333 - RNA, 19 nt, Homo sapiens
  misc_RNA (1)...(19): siRNA sense strand
uagcggagcgcacccacaa

SEQ ID NO: 499334 - RNA, 19 nt, Homo sapiens
  misc_RNA (1)...(19): siRNA sense strand
gggagaaccagggaaagga

SEQ ID NO: 499335 - RNA, 19 nt, Homo sapiens
  misc_RNA (1)...(19): siRNA sense strand
gagccaggccagcauccaa

SEQ ID NO: 499336 - RNA, 19 nt, Homo sapiens
  misc_RNA (1)...(19): siRNA sense strand
gguacuccaggaccaauug

SEQ ID NO: 499337 - RNA, 19 nt, Homo sapiens
  misc_RNA (1)...(19): siRNA sense strand
aaaggagacccugggauga

SEQ ID NO: 499338 - RNA, 19 nt, Homo sapiens
  misc_RNA (1)...(19): siRNA sense strand
gagccagggaucccaggaa

SEQ ID NO: 499339 - RNA, 19 nt, Homo sapiens
  misc_RNA (1)...(19): siRNA sense strand
gaaccagggaaaggagaga

SEQ ID NO: 499340 - RNA, 19 nt, Homo sapiens
  misc_RNA (1)...(19): siRNA sense strand
gauuacaauggaaacauca

SEQ ID NO: 499341 - RNA, 19 nt, Homo sapiens
  misc_RNA (1)...(19): siRNA sense strand
ggucaaccaggaacuagag

SEQ ID NO: 499342 - RNA, 19 nt, Homo sapiens
  misc_RNA (1)...(19): siRNA sense strand
aaggagagaugguggauua

SEQ ID NO: 499343 - RNA, 19 nt, Homo sapiens
  misc_RNA (1)...(19): siRNA sense strand
cagcugggcuuccugguuu

SEQ ID NO: 499344 - RNA, 19 nt, Homo sapiens
  misc_RNA (1)...(19): siRNA sense strand
ccaaagacaucuccaggau

SEQ ID NO: 499345 - RNA, 19 nt, Homo sapiens
  misc_RNA (1)...(19): siRNA sense strand
gagagaugguggauuacaa

SEQ ID NO: 499346 - RNA, 19 nt, Homo sapiens
  misc_RNA (1)...(19): siRNA sense strand
aaagggaccucgcgguaaa

SEQ ID NO: 499347 - RNA, 19 nt, Homo sapiens
  misc_RNA (1)...(19): siRNA sense strand
gaugguggauuacaaugga

SEQ ID NO: 499348 - RNA, 19 nt, Homo sapiens
  misc_RNA (1)...(19): siRNA sense strand
ggauuacaauggaaacauc

SEQ ID NO: 499349 - RNA, 19 nt, Homo sapiens
  misc_RNA (1)...(19): siRNA sense strand
caagggagaaccagggaaa

SEQ ID NO: 499350 - RNA, 19 nt, Homo sapiens
  misc_RNA (1)...(19): siRNA sense strand
ggaagcaggacuagaugga

SEQ ID NO: 499351 - RNA, 19 nt, Homo sapiens
  misc_RNA (1)...(19): siRNA sense strand
caaggcugcuggaacaagu

SEQ ID NO: 499352 - RNA, 19 nt, Homo sapiens
  misc_RNA (1)...(19): siRNA sense strand
gggagaagcaggugucgau

SEQ ID NO: 499353 - RNA, 19 nt, Homo sapiens
  misc_RNA (1)...(19): siRNA sense strand
ggagaacagggaccagaug

SEQ ID NO: 499354 - RNA, 19 nt, Homo sapiens
  misc_RNA (1)...(19): siRNA sense strand
acaauggaaacaucaauga

SEQ ID NO: 499355 - RNA, 19 nt, Homo sapiens
  misc_RNA (1)...(19): siRNA sense strand
gaaaggagagaugguggau

SEQ ID NO: 499356 - RNA, 19 nt, Homo sapiens
  misc_RNA (1)...(19): siRNA sense strand
cuagagguuucccuggauu

SEQ ID NO: 499357 - RNA, 19 nt, Homo sapiens
  misc_RNA (1)...(19): siRNA sense strand
gcaaauggagacggcuauu

SEQ ID NO: 499358 - RNA, 19 nt, Homo sapiens
  misc_RNA (1)...(19): siRNA sense strand
gaaaggcuuccagggagaa

SEQ ID NO: 499359 - RNA, 19 nt, Homo sapiens
  misc_RNA (1)...(19): siRNA sense strand
gcagcugggcuuccugguu

SEQ ID NO: 499360 - RNA, 19 nt, Homo sapiens
  misc_RNA (1)...(19): siRNA sense strand
ggagagaugguggauuaca

SEQ ID NO: 499361 - RNA, 19 nt, Homo sapiens
  misc_RNA (1)...(19): siRNA sense strand
gaugcuggcaacuccauug

SEQ ID NO: 499362 - RNA, 19 nt, Homo sapiens
  misc_RNA (1)...(19): siRNA sense strand
gcguggagcagcuggagaa

SEQ ID NO: 499363 - RNA, 19 nt, Homo sapiens
  misc_RNA (1)...(19): siRNA sense strand
uggagcagcuggagaacag

SEQ ID NO: 499364 - RNA, 19 nt, Homo sapiens
  misc_RNA (1)...(19): siRNA sense strand
ggauuuccgggucccauug

SEQ ID NO: 499365 - RNA, 19 nt, Homo sapiens
  misc_RNA (1)...(19): siRNA sense strand
gagaugguggauuacaaug

SEQ ID NO: 499366 - RNA, 19 nt, Homo sapiens
  misc_RNA (1)...(19): siRNA sense strand
uagcggagcgcacccacaa

SEQ ID NO: 499367 - RNA, 19 nt, Homo sapiens
  misc_RNA (1)...(19): siRNA sense strand
gggagaaccagggaaagga

SEQ ID NO: 499368 - RNA, 19 nt, Homo sapiens
  misc_RNA (1)...(19): siRNA sense strand
gagccaggccagcauccaa

SEQ ID NO: 499369 - RNA, 19 nt, Homo sapiens
  misc_RNA (1)...(19): siRNA sense strand
gguacuccaggaccaauug

SEQ ID NO: 499370 - RNA, 19 nt, Homo sapiens
  misc_RNA (1)...(19): siRNA sense strand
aaaggagacccugggauga

SEQ ID NO: 499371 - RNA, 19 nt, Homo sapiens
  misc_RNA (1)...(19): siRNA sense strand
gagccagggaucccaggaa

SEQ ID NO: 499372 - RNA, 19 nt, Homo sapiens
  misc_RNA (1)...(19): siRNA sense strand
gaaccagggaaaggagaga

SEQ ID NO: 499373 - RNA, 19 nt, Homo sapiens
  misc_RNA (1)...(19): siRNA sense strand
gauuacaauggaaacauca

SEQ ID NO: 499374 - RNA, 19 nt, Homo sapiens
  misc_RNA (1)...(19): siRNA sense strand
ggucaaccaggaacuagag

SEQ ID NO: 499375 - RNA, 19 nt, Homo sapiens
  misc_RNA (1)...(19): siRNA sense strand
aaggagagaugguggauua

SEQ ID NO: 499376 - RNA, 19 nt, Homo sapiens
  misc_RNA (1)...(19): siRNA sense strand
cagcugggcuuccugguuu

SEQ ID NO: 499377 - RNA, 19 nt, Homo sapiens
  misc_RNA (1)...(19): siRNA sense strand
ccaaagacaucuccaggau

SEQ ID NO: 499378 - RNA, 19 nt, Homo sapiens
  misc_RNA (1)...(19): siRNA sense strand
gagagaugguggauuacaa

SEQ ID NO: 499379 - RNA, 19 nt, Homo sapiens
  misc_RNA (1)...(19): siRNA sense strand
aaagggaccucgcgguaaa

SEQ ID NO: 499380 - RNA, 19 nt, Homo sapiens
  misc_RNA (1)...(19): siRNA sense strand
gaugguggauuacaaugga

SEQ ID NO: 499381 - RNA, 19 nt, Homo sapiens
  misc_RNA (1)...(19): siRNA sense strand
ggauuacaauggaaacauc

SEQ ID NO: 499382 - RNA, 19 nt, Homo sapiens
  misc_RNA (1)...(19): siRNA sense strand
caagggagaaccagggaaa

SEQ ID NO: 499383 - RNA, 19 nt, Homo sapiens
  misc_RNA (1)...(19): siRNA sense strand
ggaagcaggacuagaugga

SEQ ID NO: 499384 - RNA, 19 nt, Homo sapiens
  misc_RNA (1)...(19): siRNA sense strand
caaggcugcuggaacaagu

SEQ ID NO: 499385 - RNA, 19 nt, Homo sapiens
  misc_RNA (1)...(19): siRNA sense strand
gggagaagcaggugucgau

SEQ ID NO: 499386 - RNA, 19 nt, Homo sapiens
  misc_RNA (1)...(19): siRNA sense strand
ggagaacagggaccagaug

SEQ ID NO: 499387 - RNA, 19 nt, Homo sapiens
  misc_RNA (1)...(19): siRNA sense strand
acaauggaaacaucaauga

SEQ ID NO: 499388 - RNA, 19 nt, Homo sapiens
  misc_RNA (1)...(19): siRNA sense strand
gaaaggagagaugguggau

SEQ ID NO: 499389 - RNA, 19 nt, Homo sapiens
  misc_RNA (1)...(19): siRNA sense strand
cuagagguuucccuggauu

SEQ ID NO: 499390 - RNA, 19 nt, Homo sapiens
  misc_RNA (1)...(19): siRNA sense strand
gcaaauggagacggcuauu

SEQ ID NO: 499391 - RNA, 19 nt, Homo sapiens
  misc_RNA (1)...(19): siRNA sense strand
gaaaggcuuccagggagaa

SEQ ID NO: 499392 - RNA, 19 nt, Homo sapiens
  misc_RNA (1)...(19): siRNA sense strand
gcagcugggcuuccugguu

SEQ ID NO: 499393 - RNA, 19 nt, Homo sapiens
  misc_RNA (1)...(19): siRNA sense strand
ggagagaugguggauuaca

SEQ ID NO: 499394 - RNA, 19 nt, Homo sapiens
  misc_RNA (1)...(19): siRNA sense strand
gaugcuggcaacuccauug

SEQ ID NO: 499395 - RNA, 19 nt, Homo sapiens
  misc_RNA (1)...(19): siRNA sense strand
gcguggagcagcuggagaa

SEQ ID NO: 499396 - RNA, 19 nt, Homo sapiens
  misc_RNA (1)...(19): siRNA sense strand
uggagcagcuggagaacag

SEQ ID NO: 499397 - RNA, 19 nt, Homo sapiens
  misc_RNA (1)...(19): siRNA sense strand
ggauuuccgggucccauug

SEQ ID NO: 499398 - RNA, 19 nt, Homo sapiens
  misc_RNA (1)...(19): siRNA sense strand
gagaugguggauuacaaug

SEQ ID NO: 499399 - RNA, 19 nt, Homo sapiens
  misc_RNA (1)...(19): siRNA sense strand
uagcggagcgcacccacaa

SEQ ID NO: 499400 - RNA, 19 nt, Homo sapiens
  misc_RNA (1)...(19): siRNA sense strand
gggagaaccagggaaagga

SEQ ID NO: 499401 - RNA, 19 nt, Homo sapiens
  misc_RNA (1)...(19): siRNA sense strand
gagccaggccagcauccaa

SEQ ID NO: 499402 - RNA, 19 nt, Homo sapiens
  misc_RNA (1)...(19): siRNA sense strand
gguacuccaggaccaauug

SEQ ID NO: 499403 - RNA, 19 nt, Homo sapiens
  misc_RNA (1)...(19): siRNA sense strand
aaaggagacccugggauga

SEQ ID NO: 499404 - RNA, 19 nt, Homo sapiens
  misc_RNA (1)...(19): siRNA sense strand
gagccagggaucccaggaa

SEQ ID NO: 499405 - RNA, 19 nt, Homo sapiens
  misc_RNA (1)...(19): siRNA sense strand
gaaccagggaaaggagaga

SEQ ID NO: 499406 - RNA, 19 nt, Homo sapiens
  misc_RNA (1)...(19): siRNA sense strand
gauuacaauggaaacauca

SEQ ID NO: 499407 - RNA, 19 nt, Homo sapiens
  misc_RNA (1)...(19): siRNA sense strand
ggucaaccaggaacuagag

SEQ ID NO: 499408 - RNA, 19 nt, Homo sapiens
  misc_RNA (1)...(19): siRNA sense strand
aaggagagaugguggauua

SEQ ID NO: 499409 - RNA, 19 nt, Homo sapiens
  misc_RNA (1)...(19): siRNA sense strand
cagcugggcuuccugguuu

SEQ ID NO: 499410 - RNA, 19 nt, Homo sapiens
  misc_RNA (1)...(19): siRNA sense strand
ccaaagacaucuccaggau

SEQ ID NO: 499411 - RNA, 19 nt, Homo sapiens
  misc_RNA (1)...(19): siRNA sense strand
gagagaugguggauuacaa

SEQ ID NO: 499412 - RNA, 19 nt, Homo sapiens
  misc_RNA (1)...(19): siRNA sense strand
aaagggaccucgcgguaaa

SEQ ID NO: 499413 - RNA, 19 nt, Homo sapiens
  misc_RNA (1)...(19): siRNA sense strand
gaugguggauuacaaugga

SEQ ID NO: 499414 - RNA, 19 nt, Homo sapiens
  misc_RNA (1)...(19): siRNA sense strand
ggauuacaauggaaacauc

SEQ ID NO: 499415 - RNA, 19 nt, Homo sapiens
  misc_RNA (1)...(19): siRNA sense strand
caagggagaaccagggaaa

SEQ ID NO: 499416 - RNA, 19 nt, Homo sapiens
  misc_RNA (1)...(19): siRNA sense strand
ggaagcaggacuagaugga

SEQ ID NO: 499417 - RNA, 19 nt, Homo sapiens
  misc_RNA (1)...(19): siRNA sense strand
caaggcugcuggaacaagu

SEQ ID NO: 499418 - RNA, 19 nt, Homo sapiens
  misc_RNA (1)...(19): siRNA sense strand
gggagaagcaggugucgau

SEQ ID NO: 499419 - RNA, 19 nt, Homo sapiens
  misc_RNA (1)...(19): siRNA sense strand
ggagaacagggaccagaug

SEQ ID NO: 499420 - RNA, 19 nt, Homo sapiens
  misc_RNA (1)...(19): siRNA sense strand
acaauggaaacaucaauga

SEQ ID NO: 499421 - RNA, 19 nt, Homo sapiens
  misc_RNA (1)...(19): siRNA sense strand
gaaaggagagaugguggau

SEQ ID NO: 499422 - RNA, 19 nt, Homo sapiens
  misc_RNA (1)...(19): siRNA sense strand
cuagagguuucccuggauu

SEQ ID NO: 499423 - RNA, 19 nt, Homo sapiens
  misc_RNA (1)...(19): siRNA sense strand
gcaaauggagacggcuauu

SEQ ID NO: 499424 - RNA, 19 nt, Homo sapiens
  misc_RNA (1)...(19): siRNA sense strand
gaaaggcuuccagggagaa

SEQ ID NO: 499425 - RNA, 19 nt, Homo sapiens
  misc_RNA (1)...(19): siRNA sense strand
gcagcugggcuuccugguu

SEQ ID NO: 499426 - RNA, 19 nt, Homo sapiens
  misc_RNA (1)...(19): siRNA sense strand
ggagagaugguggauuaca

SEQ ID NO: 499427 - RNA, 19 nt, Homo sapiens
  misc_RNA (1)...(19): siRNA sense strand
gaugcuggcaacuccauug

SEQ ID NO: 499428 - RNA, 19 nt, Homo sapiens
  misc_RNA (1)...(19): siRNA sense strand
gcguggagcagcuggagaa

SEQ ID NO: 499429 - RNA, 19 nt, Homo sapiens
  misc_RNA (1)...(19): siRNA sense strand
uggagcagcuggagaacag

SEQ ID NO: 499430 - RNA, 19 nt, Homo sapiens
  misc_RNA (1)...(19): siRNA sense strand
ggauuuccgggucccauug

SEQ ID NO: 499431 - RNA, 19 nt, Homo sapiens
  misc_RNA (1)...(19): siRNA sense strand
gagaugguggauuacaaug

SEQ ID NO: 499432 - RNA, 19 nt, Homo sapiens
  misc_RNA (1)...(19): siRNA sense strand
uagcggagcgcacccacaa

SEQ ID NO: 499433 - RNA, 19 nt, Homo sapiens
  misc_RNA (1)...(19): siRNA sense strand
gggagaaccagggaaagga

SEQ ID NO: 499434 - RNA, 19 nt, Homo sapiens
  misc_RNA (1)...(19): siRNA sense strand
gagccaggccagcauccaa

SEQ ID NO: 499435 - RNA, 19 nt, Homo sapiens
  misc_RNA (1)...(19): siRNA sense strand
gguacuccaggaccaauug

SEQ ID NO: 499436 - RNA, 19 nt, Homo sapiens
  misc_RNA (1)...(19): siRNA sense strand
aaaggagacccugggauga

SEQ ID NO: 499437 - RNA, 19 nt, Homo sapiens
  misc_RNA (1)...(19): siRNA sense strand
gagccagggaucccaggaa

SEQ ID NO: 499438 - RNA, 19 nt, Homo sapiens
  misc_RNA (1)...(19): siRNA sense strand
gaaccagggaaaggagaga

SEQ ID NO: 499439 - RNA, 19 nt, Homo sapiens
  misc_RNA (1)...(19): siRNA sense strand
gauuacaauggaaacauca

SEQ ID NO: 499440 - RNA, 19 nt, Homo sapiens
  misc_RNA (1)...(19): siRNA sense strand
ggucaaccaggaacuagag

SEQ ID NO: 499441 - RNA, 19 nt, Homo sapiens
  misc_RNA (1)...(19): siRNA sense strand
aaggagagaugguggauua

SEQ ID NO: 499442 - RNA, 19 nt, Homo sapiens
  misc_RNA (1)...(19): siRNA sense strand
cagcugggcuuccugguuu

SEQ ID NO: 499443 - RNA, 19 nt, Homo sapiens
  misc_RNA (1)...(19): siRNA sense strand
ccaaagacaucuccaggau

SEQ ID NO: 499444 - RNA, 19 nt, Homo sapiens
  misc_RNA (1)...(19): siRNA sense strand
gagagaugguggauuacaa

SEQ ID NO: 499445 - RNA, 19 nt, Homo sapiens
  misc_RNA (1)...(19): siRNA sense strand
aaagggaccucgcgguaaa

SEQ ID NO: 499446 - RNA, 19 nt, Homo sapiens
  misc_RNA (1)...(19): siRNA sense strand
gaugguggauuacaaugga

SEQ ID NO: 499447 - RNA, 19 nt, Homo sapiens
  misc_RNA (1)...(19): siRNA sense strand
ggauuacaauggaaacauc

SEQ ID NO: 499448 - RNA, 19 nt, Homo sapiens
  misc_RNA (1)...(19): siRNA sense strand
gggcgaagauggcuuacca

SEQ ID NO: 499449 - RNA, 19 nt, Homo sapiens
  misc_RNA (1)...(19): siRNA sense strand
caagggagaaccagggaaa

SEQ ID NO: 499450 - RNA, 19 nt, Homo sapiens
  misc_RNA (1)...(19): siRNA sense strand
ggaagcaggacuagaugga

SEQ ID NO: 499451 - RNA, 19 nt, Homo sapiens
  misc_RNA (1)...(19): siRNA sense strand
caaggcugcuggaacaagu

SEQ ID NO: 499452 - RNA, 19 nt, Homo sapiens
  misc_RNA (1)...(19): siRNA sense strand
gggagaagcaggugucgau

SEQ ID NO: 499453 - RNA, 19 nt, Homo sapiens
  misc_RNA (1)...(19): siRNA sense strand
ggagaacagggaccagaug

SEQ ID NO: 499454 - RNA, 19 nt, Homo sapiens
  misc_RNA (1)...(19): siRNA sense strand
acaauggaaacaucaauga

SEQ ID NO: 499455 - RNA, 19 nt, Homo sapiens
  misc_RNA (1)...(19): siRNA sense strand
gaaaggagagaugguggau

SEQ ID NO: 499456 - RNA, 19 nt, Homo sapiens
  misc_RNA (1)...(19): siRNA sense strand
cuagagguuucccuggauu

SEQ ID NO: 499457 - RNA, 19 nt, Homo sapiens
  misc_RNA (1)...(19): siRNA sense strand
gcaaauggagacggcuauu

SEQ ID NO: 499458 - RNA, 19 nt, Homo sapiens
  misc_RNA (1)...(19): siRNA sense strand
gaaaggcuuccagggagaa

SEQ ID NO: 499459 - RNA, 19 nt, Homo sapiens
  misc_RNA (1)...(19): siRNA sense strand
gcagcugggcuuccugguu

SEQ ID NO: 499460 - RNA, 19 nt, Homo sapiens
  misc_RNA (1)...(19): siRNA sense strand
ggagagaugguggauuaca

SEQ ID NO: 499461 - RNA, 19 nt, Homo sapiens
  misc_RNA (1)...(19): siRNA sense strand
gaugcuggcaacuccauug

SEQ ID NO: 499462 - RNA, 19 nt, Homo sapiens
  misc_RNA (1)...(19): siRNA sense strand
gcguggagcagcuggagaa

SEQ ID NO: 499463 - RNA, 19 nt, Homo sapiens
  misc_RNA (1)...(19): siRNA sense strand
uggagcagcuggagaacag

SEQ ID NO: 499464 - RNA, 19 nt, Homo sapiens
  misc_RNA (1)...(19): siRNA sense strand
ggauuuccgggucccauug

SEQ ID NO: 499465 - RNA, 19 nt, Homo sapiens
  misc_RNA (1)...(19): siRNA sense strand
gagaugguggauuacaaug

SEQ ID NO: 499466 - RNA, 19 nt, Homo sapiens
  misc_RNA (1)...(19): siRNA sense strand
uagcggagcgcacccacaa

SEQ ID NO: 499467 - RNA, 19 nt, Homo sapiens
  misc_RNA (1)...(19): siRNA sense strand
gggagaaccagggaaagga

SEQ ID NO: 499468 - RNA, 19 nt, Homo sapiens
  misc_RNA (1)...(19): siRNA sense strand
gagccaggccagcauccaa

SEQ ID NO: 499469 - RNA, 19 nt, Homo sapiens
  misc_RNA (1)...(19): siRNA sense strand
gguacuccaggaccaauug

SEQ ID NO: 499470 - RNA, 19 nt, Homo sapiens
  misc_RNA (1)...(19): siRNA sense strand
aaaggagacccugggauga

SEQ ID NO: 499471 - RNA, 19 nt, Homo sapiens
  misc_RNA (1)...(19): siRNA sense strand
gagccagggaucccaggaa

SEQ ID NO: 499472 - RNA, 19 nt, Homo sapiens
  misc_RNA (1)...(19): siRNA sense strand
gaaccagggaaaggagaga

SEQ ID NO: 499473 - RNA, 19 nt, Homo sapiens
  misc_RNA (1)...(19): siRNA sense strand
gauuacaauggaaacauca

SEQ ID NO: 499474 - RNA, 19 nt, Homo sapiens
  misc_RNA (1)...(19): siRNA sense strand
ggucaaccaggaacuagag

SEQ ID NO: 499475 - RNA, 19 nt, Homo sapiens
  misc_RNA (1)...(19): siRNA sense strand
gagaaacauugaccaggaa

SEQ ID NO: 499476 - RNA, 19 nt, Homo sapiens
  misc_RNA (1)...(19): siRNA sense strand
gcgggauccugcucaauaa

SEQ ID NO: 499477 - RNA, 19 nt, Homo sapiens
  misc_RNA (1)...(19): siRNA sense strand
ggaaccugcuggcuacuga

SEQ ID NO: 499478 - RNA, 19 nt, Homo sapiens
  misc_RNA (1)...(19): siRNA sense strand
ggauccugcucaauaauga

SEQ ID NO: 499479 - RNA, 19 nt, Homo sapiens
  misc_RNA (1)...(19): siRNA sense strand
ucacgacaguggagagaaa

SEQ ID NO: 499480 - RNA, 19 nt, Homo sapiens
  misc_RNA (1)...(19): siRNA sense strand
ccacucacccgaucuccua

SEQ ID NO: 499481 - RNA, 19 nt, Homo sapiens
  misc_RNA (1)...(19): siRNA sense strand
gcacugcucaccugucugu

SEQ ID NO: 499482 - RNA, 19 nt, Homo sapiens
  misc_RNA (1)...(19): siRNA sense strand
ccacugcacuggccaucau

SEQ ID NO: 499483 - RNA, 19 nt, Homo sapiens
  misc_RNA (1)...(19): siRNA sense strand
caccaucaaccucuacuuu

SEQ ID NO: 499484 - RNA, 19 nt, Homo sapiens
  misc_RNA (1)...(19): siRNA sense strand
ccaucaaccucuacuuugg

SEQ ID NO: 499485 - RNA, 19 nt, Homo sapiens
  misc_RNA (1)...(19): siRNA sense strand
gggcacugcucaccugucu

SEQ ID NO: 499486 - RNA, 19 nt, Homo sapiens
  misc_RNA (1)...(19): siRNA sense strand
gcacuggccaucaucuaca

SEQ ID NO: 499487 - RNA, 19 nt, Homo sapiens
  misc_RNA (1)...(19): siRNA sense strand
cagccgcucucguccaugu

SEQ ID NO: 499488 - RNA, 19 nt, Homo sapiens
  misc_RNA (1)...(19): siRNA sense strand
ccagcaccaucaaccucua

SEQ ID NO: 499489 - RNA, 19 nt, Homo sapiens
  misc_RNA (1)...(19): siRNA sense strand
gacaguggagagaaacauu

SEQ ID NO: 499490 - RNA, 19 nt, Homo sapiens
  misc_RNA (1)...(19): siRNA sense strand
gggauccugcucaauaaug

SEQ ID NO: 499491 - RNA, 19 nt, Homo sapiens
  misc_RNA (1)...(19): siRNA sense strand
acuacaagcccgaguucua

SEQ ID NO: 499492 - RNA, 19 nt, Homo sapiens
  misc_RNA (1)...(19): siRNA sense strand
guucggcuaugacgugaag

SEQ ID NO: 499493 - RNA, 19 nt, Homo sapiens
  misc_RNA (1)...(19): siRNA sense strand
cacccgaucuccuacuaca

SEQ ID NO: 499494 - RNA, 19 nt, Homo sapiens
  misc_RNA (1)...(19): siRNA sense strand
aaacauugaccaggaagug

SEQ ID NO: 499495 - RNA, 19 nt, Homo sapiens
  misc_RNA (1)...(19): siRNA sense strand
agcgggauccugcucaaua

SEQ ID NO: 499496 - RNA, 19 nt, Homo sapiens
  misc_RNA (1)...(19): siRNA sense strand
caccaucacacccagauca

SEQ ID NO: 499497 - RNA, 19 nt, Homo sapiens
  misc_RNA (1)...(19): siRNA sense strand
ccugcucaauaaugaaaug

SEQ ID NO: 499498 - RNA, 19 nt, Homo sapiens
  misc_RNA (1)...(19): siRNA sense strand
gaaacauugaccaggaagu

SEQ ID NO: 499499 - RNA, 19 nt, Homo sapiens
  misc_RNA (1)...(19): siRNA sense strand
ucagcgggauccugcucaa

SEQ ID NO: 499500 - RNA, 19 nt, Homo sapiens
  misc_RNA (1)...(19): siRNA sense strand
gcaccaucaaccucuacuu

SEQ ID NO: 499501 - RNA, 19 nt, Homo sapiens
  misc_RNA (1)...(19): siRNA sense strand
caguggagagaaacauuga

SEQ ID NO: 499502 - RNA, 19 nt, Homo sapiens
  misc_RNA (1)...(19): siRNA sense strand
gagaaacauugaccaggaa

SEQ ID NO: 499503 - RNA, 19 nt, Homo sapiens
  misc_RNA (1)...(19): siRNA sense strand
gcgggauccugcucaauaa

SEQ ID NO: 499504 - RNA, 19 nt, Homo sapiens
  misc_RNA (1)...(19): siRNA sense strand
ggaaccugcuggcuacuga

SEQ ID NO: 499505 - RNA, 19 nt, Homo sapiens
  misc_RNA (1)...(19): siRNA sense strand
ggauccugcucaauaauga

SEQ ID NO: 499506 - RNA, 19 nt, Homo sapiens
  misc_RNA (1)...(19): siRNA sense strand
ucacgacaguggagagaaa

SEQ ID NO: 499507 - RNA, 19 nt, Homo sapiens
  misc_RNA (1)...(19): siRNA sense strand
ccacucacccgaucuccua

SEQ ID NO: 499508 - RNA, 19 nt, Homo sapiens
  misc_RNA (1)...(19): siRNA sense strand
gcacugcucaccugucugu

SEQ ID NO: 499509 - RNA, 19 nt, Homo sapiens
  misc_RNA (1)...(19): siRNA sense strand
ccacugcacuggccaucau

SEQ ID NO: 499510 - RNA, 19 nt, Homo sapiens
  misc_RNA (1)...(19): siRNA sense strand
caccaucaaccucuacuuu

SEQ ID NO: 499511 - RNA, 19 nt, Homo sapiens
  misc_RNA (1)...(19): siRNA sense strand
ccaucaaccucuacuuugg

SEQ ID NO: 499512 - RNA, 19 nt, Homo sapiens
  misc_RNA (1)...(19): siRNA sense strand
gggcacugcucaccugucu

SEQ ID NO: 499513 - RNA, 19 nt, Homo sapiens
  misc_RNA (1)...(19): siRNA sense strand
gcacuggccaucaucuaca

SEQ ID NO: 499514 - RNA, 19 nt, Homo sapiens
  misc_RNA (1)...(19): siRNA sense strand
cagccgcucucguccaugu

SEQ ID NO: 499515 - RNA, 19 nt, Homo sapiens
  misc_RNA (1)...(19): siRNA sense strand
ccagcaccaucaaccucua

SEQ ID NO: 499516 - RNA, 19 nt, Homo sapiens
  misc_RNA (1)...(19): siRNA sense strand
gacaguggagagaaacauu

SEQ ID NO: 499517 - RNA, 19 nt, Homo sapiens
  misc_RNA (1)...(19): siRNA sense strand
gggauccugcucaauaaug

SEQ ID NO: 499518 - RNA, 19 nt, Homo sapiens
  misc_RNA (1)...(19): siRNA sense strand
acuacaagcccgaguucua

SEQ ID NO: 499519 - RNA, 19 nt, Homo sapiens
  misc_RNA (1)...(19): siRNA sense strand
guucggcuaugacgugaag

SEQ ID NO: 499520 - RNA, 19 nt, Homo sapiens
  misc_RNA (1)...(19): siRNA sense strand
cacccgaucuccuacuaca

SEQ ID NO: 499521 - RNA, 19 nt, Homo sapiens
  misc_RNA (1)...(19): siRNA sense strand
aaacauugaccaggaagug

SEQ ID NO: 499522 - RNA, 19 nt, Homo sapiens
  misc_RNA (1)...(19): siRNA sense strand
agcgggauccugcucaaua

SEQ ID NO: 499523 - RNA, 19 nt, Homo sapiens
  misc_RNA (1)...(19): siRNA sense strand
caccaucacacccagauca

SEQ ID NO: 499524 - RNA, 19 nt, Homo sapiens
  misc_RNA (1)...(19): siRNA sense strand
ccugcucaauaaugaaaug

SEQ ID NO: 499525 - RNA, 19 nt, Homo sapiens
  misc_RNA (1)...(19): siRNA sense strand
gaaacauugaccaggaagu

SEQ ID NO: 499526 - RNA, 19 nt, Homo sapiens
  misc_RNA (1)...(19): siRNA sense strand
ucagcgggauccugcucaa

SEQ ID NO: 499527 - RNA, 19 nt, Homo sapiens
  misc_RNA (1)...(19): siRNA sense strand
gcaccaucaaccucuacuu

SEQ ID NO: 499528 - RNA, 19 nt, Homo sapiens
  misc_RNA (1)...(19): siRNA sense strand
caguggagagaaacauuga

SEQ ID NO: 499529 - RNA, 19 nt, Homo sapiens
  misc_RNA (1)...(19): siRNA sense strand
gagaaacauugaccaggaa

SEQ ID NO: 499530 - RNA, 19 nt, Homo sapiens
  misc_RNA (1)...(19): siRNA sense strand
gcgggauccugcucaauaa

SEQ ID NO: 499531 - RNA, 19 nt, Homo sapiens
  misc_RNA (1)...(19): siRNA sense strand
ggaaccugcuggcuacuga

SEQ ID NO: 499532 - RNA, 19 nt, Homo sapiens
  misc_RNA (1)...(19): siRNA sense strand
ggauccugcucaauaauga

SEQ ID NO: 499533 - RNA, 19 nt, Homo sapiens
  misc_RNA (1)...(19): siRNA sense strand
ucacgacaguggagagaaa

SEQ ID NO: 499534 - RNA, 19 nt, Homo sapiens
  misc_RNA (1)...(19): siRNA sense strand
ccacucacccgaucuccua

SEQ ID NO: 499535 - RNA, 19 nt, Homo sapiens
  misc_RNA (1)...(19): siRNA sense strand
gcacugcucaccugucugu

SEQ ID NO: 499536 - RNA, 19 nt, Homo sapiens
  misc_RNA (1)...(19): siRNA sense strand
ccacugcacuggccaucau

SEQ ID NO: 499537 - RNA, 19 nt, Homo sapiens
  misc_RNA (1)...(19): siRNA sense strand
caccaucaaccucuacuuu

SEQ ID NO: 499538 - RNA, 19 nt, Homo sapiens
  misc_RNA (1)...(19): siRNA sense strand
ccaucaaccucuacuuugg

SEQ ID NO: 499539 - RNA, 19 nt, Homo sapiens
  misc_RNA (1)...(19): siRNA sense strand
gggcacugcucaccugucu

SEQ ID NO: 499540 - RNA, 19 nt, Homo sapiens
  misc_RNA (1)...(19): siRNA sense strand
gcacuggccaucaucuaca

SEQ ID NO: 499541 - RNA, 19 nt, Homo sapiens
  misc_RNA (1)...(19): siRNA sense strand
cagccgcucucguccaugu

SEQ ID NO: 499542 - RNA, 19 nt, Homo sapiens
  misc_RNA (1)...(19): siRNA sense strand
ccagcaccaucaaccucua

SEQ ID NO: 499543 - RNA, 19 nt, Homo sapiens
  misc_RNA (1)...(19): siRNA sense strand
gacaguggagagaaacauu

SEQ ID NO: 499544 - RNA, 19 nt, Homo sapiens
  misc_RNA (1)...(19): siRNA sense strand
gggauccugcucaauaaug

SEQ ID NO: 499545 - RNA, 19 nt, Homo sapiens
  misc_RNA (1)...(19): siRNA sense strand
acuacaagcccgaguucua

SEQ ID NO: 499546 - RNA, 19 nt, Homo sapiens
  misc_RNA (1)...(19): siRNA sense strand
guucggcuaugacgugaag

SEQ ID NO: 499547 - RNA, 19 nt, Homo sapiens
  misc_RNA (1)...(19): siRNA sense strand
cacccgaucuccuacuaca

SEQ ID NO: 499548 - RNA, 19 nt, Homo sapiens
  misc_RNA (1)...(19): siRNA sense strand
aaacauugaccaggaagug

SEQ ID NO: 499549 - RNA, 19 nt, Homo sapiens
  misc_RNA (1)...(19): siRNA sense strand
agcgggauccugcucaaua

SEQ ID NO: 499550 - RNA, 19 nt, Homo sapiens
  misc_RNA (1)...(19): siRNA sense strand
caccaucacacccagauca

SEQ ID NO: 499551 - RNA, 19 nt, Homo sapiens
  misc_RNA (1)...(19): siRNA sense strand
ccugcucaauaaugaaaug

SEQ ID NO: 499552 - RNA, 19 nt, Homo sapiens
  misc_RNA (1)...(19): siRNA sense strand
gaaacauugaccaggaagu

SEQ ID NO: 499553 - RNA, 19 nt, Homo sapiens
  misc_RNA (1)...(19): siRNA sense strand
ucagcgggauccugcucaa

SEQ ID NO: 499554 - RNA, 19 nt, Homo sapiens
  misc_RNA (1)...(19): siRNA sense strand
gcaccaucaaccucuacuu

SEQ ID NO: 499555 - RNA, 19 nt, Homo sapiens
  misc_RNA (1)...(19): siRNA sense strand
caguggagagaaacauuga

SEQ ID NO: 499556 - RNA, 19 nt, Homo sapiens
  misc_RNA (1)...(19): siRNA sense strand
ccaaagaccugguauagug

SEQ ID NO: 499557 - RNA, 19 nt, Homo sapiens
  misc_RNA (1)...(19): siRNA sense strand
gagcaggaguuucuguaua

SEQ ID NO: 499558 - RNA, 19 nt, Homo sapiens
  misc_RNA (1)...(19): siRNA sense strand
ggacucaucuacuggauug

SEQ ID NO: 499559 - RNA, 19 nt, Homo sapiens
  misc_RNA (1)...(19): siRNA sense strand
gcacuucacuguggacaaa

SEQ ID NO: 499560 - RNA, 19 nt, Homo sapiens
  misc_RNA (1)...(19): siRNA sense strand
gaagaagucaguaccuuaa

SEQ ID NO: 499561 - RNA, 19 nt, Homo sapiens
  misc_RNA (1)...(19): siRNA sense strand
ggaagaagucaguaccuua

SEQ ID NO: 499562 - RNA, 19 nt, Homo sapiens
  misc_RNA (1)...(19): siRNA sense strand
caacaaugcugggaacaau

SEQ ID NO: 499563 - RNA, 19 nt, Homo sapiens
  misc_RNA (1)...(19): siRNA sense strand
gaacacuguggcaauauaa

SEQ ID NO: 499564 - RNA, 19 nt, Homo sapiens
  misc_RNA (1)...(19): siRNA sense strand
uauaaaggcucccucacuu

SEQ ID NO: 499565 - RNA, 19 nt, Homo sapiens
  misc_RNA (1)...(19): siRNA sense strand
ugaacacuguggcaauaua

SEQ ID NO: 499566 - RNA, 19 nt, Homo sapiens
  misc_RNA (1)...(19): siRNA sense strand
ugaaugagagccuggguua

SEQ ID NO: 499567 - RNA, 19 nt, Homo sapiens
  misc_RNA (1)...(19): siRNA sense strand
cagggcagcuuggagaaua

SEQ ID NO: 499568 - RNA, 19 nt, Homo sapiens
  misc_RNA (1)...(19): siRNA sense strand
cacaguccgugcugcauua

SEQ ID NO: 499569 - RNA, 19 nt, Homo sapiens
  misc_RNA (1)...(19): siRNA sense strand
gaagucaguaccuuaaaug

SEQ ID NO: 499570 - RNA, 19 nt, Homo sapiens
  misc_RNA (1)...(19): siRNA sense strand
aaugaacacuguggcaaua

SEQ ID NO: 499571 - RNA, 19 nt, Homo sapiens
  misc_RNA (1)...(19): siRNA sense strand
gcaggaguuucuguauaaa

SEQ ID NO: 499572 - RNA, 19 nt, Homo sapiens
  misc_RNA (1)...(19): siRNA sense strand
aaagaccaauguccaguug

SEQ ID NO: 499573 - RNA, 19 nt, Homo sapiens
  misc_RNA (1)...(19): siRNA sense strand
agcaggaguuucuguauaa

SEQ ID NO: 499574 - RNA, 19 nt, Homo sapiens
  misc_RNA (1)...(19): siRNA sense strand
uaucagauguaaagaccaa

SEQ ID NO: 499575 - RNA, 19 nt, Homo sapiens
  misc_RNA (1)...(19): siRNA sense strand
gggaagaagucaguaccuu

SEQ ID NO: 499576 - RNA, 19 nt, Homo sapiens
  misc_RNA (1)...(19): siRNA sense strand
cacccuggauucugaaauu

SEQ ID NO: 499577 - RNA, 19 nt, Homo sapiens
  misc_RNA (1)...(19): siRNA sense strand
gacccuaugucccaucaga

SEQ ID NO: 499578 - RNA, 19 nt, Homo sapiens
  misc_RNA (1)...(19): siRNA sense strand
gcccaaaucccagaguuaa

SEQ ID NO: 499579 - RNA, 19 nt, Homo sapiens
  misc_RNA (1)...(19): siRNA sense strand
ccagugcuuuaaauacaaa

SEQ ID NO: 499580 - RNA, 19 nt, Homo sapiens
  misc_RNA (1)...(19): siRNA sense strand
ccuggauucugaaauuaaa

SEQ ID NO: 499581 - RNA, 19 nt, Homo sapiens
  misc_RNA (1)...(19): siRNA sense strand
ggauuggccugacuaaagc

SEQ ID NO: 499582 - RNA, 19 nt, Homo sapiens
  misc_RNA (1)...(19): siRNA sense strand
uaccuuaaaugcccaaauc

SEQ ID NO: 499583 - RNA, 19 nt, Homo sapiens
  misc_RNA (1)...(19): siRNA sense strand
agaagucaguaccuuaaau

SEQ ID NO: 499584 - RNA, 19 nt, Homo sapiens
  misc_RNA (1)...(19): siRNA sense strand
ugaccucggugaccucaga

SEQ ID NO: 499585 - RNA, 19 nt, Homo sapiens
  misc_RNA (1)...(19): siRNA sense strand
cuucaggccuggaaugaug

SEQ ID NO: 499586 - RNA, 19 nt, Homo sapiens
  misc_RNA (1)...(19): siRNA sense strand
agauccagauggugaauga

SEQ ID NO: 499587 - RNA, 19 nt, Homo sapiens
  misc_RNA (1)...(19): siRNA sense strand
uaaaggcucccucacuuca

SEQ ID NO: 499588 - RNA, 19 nt, Homo sapiens
  misc_RNA (1)...(19): siRNA sense strand
aacaagaaguugggaagaa

SEQ ID NO: 499589 - RNA, 19 nt, Homo sapiens
  misc_RNA (1)...(19): siRNA sense strand
gccagugcuuuaaauacaa

SEQ ID NO: 499590 - RNA, 19 nt, Homo sapiens
  misc_RNA (1)...(19): siRNA sense strand
caccauaucagauguaaag

SEQ ID NO: 499591 - RNA, 19 nt, Homo sapiens
  misc_RNA (1)...(19): siRNA sense strand
uggagaauaugagcaaguu

SEQ ID NO: 499592 - RNA, 19 nt, Homo sapiens
  misc_RNA (1)...(19): siRNA sense strand
ggaaugaugccccauguga

SEQ ID NO: 499593 - RNA, 19 nt, Homo sapiens
  misc_RNA (1)...(19): siRNA sense strand
ggcaccauaucagauguaa

SEQ ID NO: 499594 - RNA, 19 nt, Homo sapiens
  misc_RNA (1)...(19): siRNA sense strand
ucaaggggaacuucuauua

SEQ ID NO: 499595 - RNA, 19 nt, Homo sapiens
  misc_RNA (1)...(19): siRNA sense strand
uaaagaccaauguccaguu

SEQ ID NO: 499596 - RNA, 19 nt, Homo sapiens
  misc_RNA (1)...(19): siRNA sense strand
ugaaaggucguguggacaa

SEQ ID NO: 499597 - RNA, 19 nt, Homo sapiens
  misc_RNA (1)...(19): siRNA sense strand
gccgagcaguucugugugu

SEQ ID NO: 499598 - RNA, 19 nt, Homo sapiens
  misc_RNA (1)...(19): siRNA sense strand
gaugacacgccauucaaca

SEQ ID NO: 499599 - RNA, 19 nt, Homo sapiens
  misc_RNA (1)...(19): siRNA sense strand
gaaaggucguguggacaac

SEQ ID NO: 499600 - RNA, 19 nt, Homo sapiens
  misc_RNA (1)...(19): siRNA sense strand
acaaugcugggaacaauga

SEQ ID NO: 499601 - RNA, 19 nt, Homo sapiens
  misc_RNA (1)...(19): siRNA sense strand
caggugagcccaacaaugc

SEQ ID NO: 499602 - RNA, 19 nt, Homo sapiens
  misc_RNA (1)...(19): siRNA sense strand
ucucaaggcuggaaguacu

SEQ ID NO: 499603 - RNA, 19 nt, Homo sapiens
  misc_RNA (1)...(19): siRNA sense strand
aaagugauuuggagaaagc

SEQ ID NO: 499604 - RNA, 19 nt, Homo sapiens
  misc_RNA (1)...(19): siRNA sense strand
acaagaaguugggaagaag

SEQ ID NO: 499605 - RNA, 19 nt, Homo sapiens
  misc_RNA (1)...(19): siRNA sense strand
gcugcaggccguccuuuau

SEQ ID NO: 499606 - RNA, 19 nt, Homo sapiens
  misc_RNA (1)...(19): siRNA sense strand
uaacaagaaguugggaaga

SEQ ID NO: 499607 - RNA, 19 nt, Homo sapiens
  misc_RNA (1)...(19): siRNA sense strand
ugggaacaaugaacacugu

SEQ ID NO: 499608 - RNA, 19 nt, Homo sapiens
  misc_RNA (1)...(19): siRNA sense strand
gguauagugccgagcaguu

SEQ ID NO: 499609 - RNA, 19 nt, Homo sapiens
  misc_RNA (1)...(19): siRNA sense strand
gauauucuacaggugguuu

SEQ ID NO: 499610 - RNA, 19 nt, Homo sapiens
  misc_RNA (1)...(19): siRNA sense strand
caacaucagcacccuggau

SEQ ID NO: 499611 - RNA, 19 nt, Homo sapiens
  misc_RNA (1)...(19): siRNA sense strand
caaugaacacuguggcaau

SEQ ID NO: 499612 - RNA, 19 nt, Homo sapiens
  misc_RNA (1)...(19): siRNA sense strand
gacuaaagcagggauggaa

SEQ ID NO: 499613 - RNA, 19 nt, Homo sapiens
  misc_RNA (1)...(19): siRNA sense strand
ccacaguccgugcugcauu

SEQ ID NO: 499614 - RNA, 19 nt, Homo sapiens
  misc_RNA (1)...(19): siRNA sense strand
aaugagagccuggguuaug

SEQ ID NO: 499615 - RNA, 19 nt, Homo sapiens
  misc_RNA (1)...(19): siRNA sense strand
gaaggccaacgcacagauc

SEQ ID NO: 499616 - RNA, 19 nt, Homo sapiens
  misc_RNA (1)...(19): siRNA sense strand
acccuggauucugaaauua

SEQ ID NO: 499617 - RNA, 19 nt, Homo sapiens
  misc_RNA (1)...(19): siRNA sense strand
uggauuggccugacuaaag

SEQ ID NO: 499618 - RNA, 19 nt, Homo sapiens
  misc_RNA (1)...(19): siRNA sense strand
agccagugcuuuaaauaca

SEQ ID NO: 499619 - RNA, 19 nt, Homo sapiens
  misc_RNA (1)...(19): siRNA sense strand
gugagcaggaguuucugua

SEQ ID NO: 499620 - RNA, 19 nt, Homo sapiens
  misc_RNA (1)...(19): siRNA sense strand
gagagccuccucccaaguc

SEQ ID NO: 499621 - RNA, 19 nt, Homo sapiens
  misc_RNA (1)...(19): siRNA sense strand
guuaugugcguucucaguu

SEQ ID NO: 499622 - RNA, 19 nt, Homo sapiens
  misc_RNA (1)...(19): siRNA sense strand
gcgacccuaugucccauca

SEQ ID NO: 499623 - RNA, 19 nt, Homo sapiens
  misc_RNA (1)...(19): siRNA sense strand
gggaacuucuauuacuuuu

SEQ ID NO: 499624 - RNA, 19 nt, Homo sapiens
  misc_RNA (1)...(19): siRNA sense strand
gugccgagcaguucugugu

SEQ ID NO: 499625 - RNA, 19 nt, Homo sapiens
  misc_RNA (1)...(19): siRNA sense strand
gcguucagauccagauggu

SEQ ID NO: 499626 - RNA, 19 nt, Homo sapiens
  misc_RNA (1)...(19): siRNA sense strand
agagugagcaggaguuucu

SEQ ID NO: 499627 - RNA, 19 nt, Homo sapiens
  misc_RNA (1)...(19): siRNA sense strand
gggcaccauaucagaugua

SEQ ID NO: 499628 - RNA, 19 nt, Homo sapiens
  misc_RNA (1)...(19): siRNA sense strand
gaaugagagccuggguuau

SEQ ID NO: 499629 - RNA, 19 nt, Homo sapiens
  misc_RNA (1)...(19): siRNA sense strand
uuaugugcguucucaguuc

SEQ ID NO: 499630 - RNA, 19 nt, Homo sapiens
  misc_RNA (1)...(19): siRNA sense strand
ccaacaaugcugggaacaa

SEQ ID NO: 499631 - RNA, 19 nt, Homo sapiens
  misc_RNA (1)...(19): siRNA sense strand
ccaggugagcccaacaaug

SEQ ID NO: 499632 - RNA, 19 nt, Homo sapiens
  misc_RNA (1)...(19): siRNA sense strand
agugcgagguucuggauuc

SEQ ID NO: 499633 - RNA, 19 nt, Homo sapiens
  misc_RNA (1)...(19): siRNA sense strand
ggagaauaugagcaaguug

SEQ ID NO: 499634 - RNA, 19 nt, Homo sapiens
  misc_RNA (1)...(19): siRNA sense strand
gcuuggagaauaugagcaa

SEQ ID NO: 499635 - RNA, 19 nt, Homo sapiens
  misc_RNA (1)...(19): siRNA sense strand
gagaaggccaacgcacaga

SEQ ID NO: 499636 - RNA, 19 nt, Homo sapiens
  misc_RNA (1)...(19): siRNA sense strand
aguccgugcugcauuaauc

SEQ ID NO: 499637 - RNA, 19 nt, Homo sapiens
  misc_RNA (1)...(19): siRNA sense strand
guauagugccgagcaguuc

SEQ ID NO: 499638 - RNA, 19 nt, Homo sapiens
  misc_RNA (1)...(19): siRNA sense strand
ccaaaucccagaguuaaaa

SEQ ID NO: 499639 - RNA, 19 nt, Homo sapiens
  misc_RNA (1)...(19): siRNA sense strand
ccaauguccaguugcugaa

SEQ ID NO: 499640 - RNA, 19 nt, Homo sapiens
  misc_RNA (1)...(19): siRNA sense strand
caagaaguugggaagaagu

SEQ ID NO: 499641 - RNA, 19 nt, Homo sapiens
  misc_RNA (1)...(19): siRNA sense strand
guggaugacacgccauuca

SEQ ID NO: 499642 - RNA, 19 nt, Homo sapiens
  misc_RNA (1)...(19): siRNA sense strand
ugacacgccauucaacaag

SEQ ID NO: 499643 - RNA, 19 nt, Homo sapiens
  misc_RNA (1)...(19): siRNA sense strand
gggagaagcuggugagaaa

SEQ ID NO: 499644 - RNA, 19 nt, Homo sapiens
  misc_RNA (1)...(19): siRNA sense strand
gagaggagcugucuuucaa

SEQ ID NO: 499645 - RNA, 19 nt, Homo sapiens
  misc_RNA (1)...(19): siRNA sense strand
uaagggaucuauuggauuu

SEQ ID NO: 499646 - RNA, 19 nt, Homo sapiens
  misc_RNA (1)...(19): siRNA sense strand
cagcauagauggugagaug

SEQ ID NO: 499647 - RNA, 19 nt, Homo sapiens
  misc_RNA (1)...(19): siRNA sense strand
gcaaggcccuccaggauuc

SEQ ID NO: 499648 - RNA, 19 nt, Homo sapiens
  misc_RNA (1)...(19): siRNA sense strand
gaaggccacuuuccugaga

SEQ ID NO: 499649 - RNA, 19 nt, Homo sapiens
  misc_RNA (1)...(19): siRNA sense strand
agacucagcucucuaugaa

SEQ ID NO: 499650 - RNA, 19 nt, Homo sapiens
  misc_RNA (1)...(19): siRNA sense strand
ggacucaguuccagaucuu

SEQ ID NO: 499651 - RNA, 19 nt, Homo sapiens
  misc_RNA (1)...(19): siRNA sense strand
gcaggcggcuccuuuaaag

SEQ ID NO: 499652 - RNA, 19 nt, Homo sapiens
  misc_RNA (1)...(19): siRNA sense strand
ggaccuaagggaucuauug

SEQ ID NO: 499653 - RNA, 19 nt, Homo sapiens
  misc_RNA (1)...(19): siRNA sense strand
gggagacccuggugauguu

SEQ ID NO: 499654 - RNA, 19 nt, Homo sapiens
  misc_RNA (1)...(19): siRNA sense strand
gaguaaaggcgauaaagga

SEQ ID NO: 499655 - RNA, 19 nt, Homo sapiens
  misc_RNA (1)...(19): siRNA sense strand
ggacagacgaagacccuuu

SEQ ID NO: 499656 - RNA, 19 nt, Homo sapiens
  misc_RNA (1)...(19): siRNA sense strand
ggauugaucggucucauug

SEQ ID NO: 499657 - RNA, 19 nt, Homo sapiens
  misc_RNA (1)...(19): siRNA sense strand
ucacaucgcugagcuugga

SEQ ID NO: 499658 - RNA, 19 nt, Homo sapiens
  misc_RNA (1)...(19): siRNA sense strand
ccugguagcugacugugaa

SEQ ID NO: 499659 - RNA, 19 nt, Homo sapiens
  misc_RNA (1)...(19): siRNA sense strand
gaacuucuccuugcugauc

SEQ ID NO: 499660 - RNA, 19 nt, Homo sapiens
  misc_RNA (1)...(19): siRNA sense strand
cagcugaacuuccugaaac

SEQ ID NO: 499661 - RNA, 19 nt, Homo sapiens
  misc_RNA (1)...(19): siRNA sense strand
ugccaggccucccagguua

SEQ ID NO: 499662 - RNA, 19 nt, Homo sapiens
  misc_RNA (1)...(19): siRNA sense strand
ccuaagggaucuauuggau

SEQ ID NO: 499663 - RNA, 19 nt, Homo sapiens
  misc_RNA (1)...(19): siRNA sense strand
aguuugagaucgugaaauu

SEQ ID NO: 499664 - RNA, 19 nt, Homo sapiens
  misc_RNA (1)...(19): siRNA sense strand
ggagaggagcugucuuuca

SEQ ID NO: 499665 - RNA, 19 nt, Homo sapiens
  misc_RNA (1)...(19): siRNA sense strand
aaagggaagucgggaaaga

SEQ ID NO: 499666 - RNA, 19 nt, Homo sapiens
  misc_RNA (1)...(19): siRNA sense strand
cagggaggaugaagaagga

SEQ ID NO: 499667 - RNA, 19 nt, Homo sapiens
  misc_RNA (1)...(19): siRNA sense strand
gaaauuuggaccucaaguc

SEQ ID NO: 499668 - RNA, 19 nt, Homo sapiens
  misc_RNA (1)...(19): siRNA sense strand
gaaguuugagaucgugaaa

SEQ ID NO: 499669 - RNA, 19 nt, Homo sapiens
  misc_RNA (1)...(19): siRNA sense strand
caugaugccguuccaguuu

SEQ ID NO: 499670 - RNA, 19 nt, Homo sapiens
  misc_RNA (1)...(19): siRNA sense strand
ggaaaggacagacgaagac

SEQ ID NO: 499671 - RNA, 19 nt, Homo sapiens
  misc_RNA (1)...(19): siRNA sense strand
aaccagaccuccacugaca

SEQ ID NO: 499672 - RNA, 19 nt, Homo sapiens
  misc_RNA (1)...(19): siRNA sense strand
ccacagcucgccagaacuu

SEQ ID NO: 499673 - RNA, 19 nt, Homo sapiens
  misc_RNA (1)...(19): siRNA sense strand
gcagcugaacuuccugaaa

SEQ ID NO: 499674 - RNA, 19 nt, Homo sapiens
  misc_RNA (1)...(19): siRNA sense strand
gggaaagacaggagaagug

SEQ ID NO: 499675 - RNA, 19 nt, Homo sapiens
  misc_RNA (1)...(19): siRNA sense strand
ccacuuuccugagaacuuc

SEQ ID NO: 499676 - RNA, 19 nt, Homo sapiens
  misc_RNA (1)...(19): siRNA sense strand
gaggagaacugggcuucca

SEQ ID NO: 499677 - RNA, 19 nt, Homo sapiens
  misc_RNA (1)...(19): siRNA sense strand
caagggagacauuggugaa

SEQ ID NO: 499678 - RNA, 19 nt, Homo sapiens
  misc_RNA (1)...(19): siRNA sense strand
cccgggaccuacuggcuua

SEQ ID NO: 499679 - RNA, 19 nt, Homo sapiens
  misc_RNA (1)...(19): siRNA sense strand
ggagagcccgcagugauug

SEQ ID NO: 499680 - RNA, 19 nt, Homo sapiens
  misc_RNA (1)...(19): siRNA sense strand
gaagacccuuuucgaauuc

SEQ ID NO: 499681 - RNA, 19 nt, Homo sapiens
  misc_RNA (1)...(19): siRNA sense strand
uggagaggauggagccaaa

SEQ ID NO: 499682 - RNA, 19 nt, Homo sapiens
  misc_RNA (1)...(19): siRNA sense strand
gaaaagggccacauuggau

SEQ ID NO: 499683 - RNA, 19 nt, Homo sapiens
  misc_RNA (1)...(19): siRNA sense strand
acucagcucucuaugaaag

SEQ ID NO: 499684 - RNA, 19 nt, Homo sapiens
  misc_RNA (1)...(19): siRNA sense strand
ggaugaagaaggagaugau

SEQ ID NO: 499685 - RNA, 19 nt, Homo sapiens
  misc_RNA (1)...(19): siRNA sense strand
ccuggaggcugguauagca

SEQ ID NO: 499686 - RNA, 19 nt, Homo sapiens
  misc_RNA (1)...(19): siRNA sense strand
ggacagccagccaaucagu

SEQ ID NO: 499687 - RNA, 19 nt, Homo sapiens
  misc_RNA (1)...(19): siRNA sense strand
ggaguaaaggcgauaaagg

SEQ ID NO: 499688 - RNA, 19 nt, Homo sapiens
  misc_RNA (1)...(19): siRNA sense strand
gcauccaggucugaaagga

SEQ ID NO: 499689 - RNA, 19 nt, Homo sapiens
  misc_RNA (1)...(19): siRNA sense strand
gagcuuggacccugacagu

SEQ ID NO: 499690 - RNA, 19 nt, Homo sapiens
  misc_RNA (1)...(19): siRNA sense strand
acaagaaguuugagaucgu

SEQ ID NO: 499691 - RNA, 19 nt, Homo sapiens
  misc_RNA (1)...(19): siRNA sense strand
gcaggaggcauuggacuuc

SEQ ID NO: 499692 - RNA, 19 nt, Homo sapiens
  misc_RNA (1)...(19): siRNA sense strand
ggagaagugggaccucuag

SEQ ID NO: 499693 - RNA, 19 nt, Homo sapiens
  misc_RNA (1)...(19): siRNA sense strand
gggugugacuggaauugau

SEQ ID NO: 499694 - RNA, 19 nt, Homo sapiens
  misc_RNA (1)...(19): siRNA sense strand
gaaaaggggcagcaguuug

SEQ ID NO: 499695 - RNA, 19 nt, Homo sapiens
  misc_RNA (1)...(19): siRNA sense strand
agaaagggaagucgggaaa

SEQ ID NO: 499696 - RNA, 19 nt, Homo sapiens
  misc_RNA (1)...(19): siRNA sense strand
cgacaagaaguuugagauc

SEQ ID NO: 499697 - RNA, 19 nt, Homo sapiens
  misc_RNA (1)...(19): siRNA sense strand
gaugaagaaggagaugauu

SEQ ID NO: 499698 - RNA, 19 nt, Homo sapiens
  misc_RNA (1)...(19): siRNA sense strand
gcagcagacucagcucucu

SEQ ID NO: 499699 - RNA, 19 nt, Homo sapiens
  misc_RNA (1)...(19): siRNA sense strand
gcuguccauuuaugaugaa

SEQ ID NO: 499700 - RNA, 19 nt, Homo sapiens
  misc_RNA (1)...(19): siRNA sense strand
guccugcuguccauuuaug

SEQ ID NO: 499701 - RNA, 19 nt, Homo sapiens
  misc_RNA (1)...(19): siRNA sense strand
ugaaugucgugcagcugaa

SEQ ID NO: 499702 - RNA, 19 nt, Homo sapiens
  misc_RNA (1)...(19): siRNA sense strand
aggagacccuggaguuuca

SEQ ID NO: 499703 - RNA, 19 nt, Homo sapiens
  misc_RNA (1)...(19): siRNA sense strand
cagacucagcucucuauga

SEQ ID NO: 499704 - RNA, 19 nt, Homo sapiens
  misc_RNA (1)...(19): siRNA sense strand
ggaaaagggccacauugga

SEQ ID NO: 499705 - RNA, 19 nt, Homo sapiens
  misc_RNA (1)...(19): siRNA sense strand
gaaaagggaggaagaaagg

SEQ ID NO: 499706 - RNA, 19 nt, Homo sapiens
  misc_RNA (1)...(19): siRNA sense strand
gagaagcuggugagaaagg

SEQ ID NO: 499707 - RNA, 19 nt, Homo sapiens
  misc_RNA (1)...(19): siRNA sense strand
agaaccagaccuccacuga

SEQ ID NO: 499708 - RNA, 19 nt, Homo sapiens
  misc_RNA (1)...(19): siRNA sense strand
cgccagaacuucaccuacu

SEQ ID NO: 499709 - RNA, 19 nt, Homo sapiens
  misc_RNA (1)...(19): siRNA sense strand
ggacagaaaggcucaaaag

SEQ ID NO: 499710 - RNA, 19 nt, Homo sapiens
  misc_RNA (1)...(19): siRNA sense strand
aaggaaauuuggaccucaa

SEQ ID NO: 499711 - RNA, 19 nt, Homo sapiens
  misc_RNA (1)...(19): siRNA sense strand
gccagaacuucaccuacuc

SEQ ID NO: 499712 - RNA, 19 nt, Homo sapiens
  misc_RNA (1)...(19): siRNA sense strand
gcauagauggugagauggu

SEQ ID NO: 499713 - RNA, 19 nt, Homo sapiens
  misc_RNA (1)...(19): siRNA sense strand
gugcuggccucgcucacau

SEQ ID NO: 499714 - RNA, 19 nt, Homo sapiens
  misc_RNA (1)...(19): siRNA sense strand
cagagacuccagcuccaaa

SEQ ID NO: 499715 - RNA, 19 nt, Homo sapiens
  misc_RNA (1)...(19): siRNA sense strand
gacuccagcuccaaaucug

SEQ ID NO: 499716 - RNA, 19 nt, Homo sapiens
  misc_RNA (1)...(19): siRNA sense strand
caccaugggcccugacuuc

SEQ ID NO: 499717 - RNA, 19 nt, Homo sapiens
  misc_RNA (1)...(19): siRNA sense strand
gggaccuacuggcuuaaag

SEQ ID NO: 499718 - RNA, 19 nt, Homo sapiens
  misc_RNA (1)...(19): siRNA sense strand
gaaagggaagucgggaaag

SEQ ID NO: 499719 - RNA, 19 nt, Homo sapiens
  misc_RNA (1)...(19): siRNA sense strand
ucaaugccacgauccuaga

SEQ ID NO: 499720 - RNA, 19 nt, Homo sapiens
  misc_RNA (1)...(19): siRNA sense strand
cggaaaggacagacgaaga

SEQ ID NO: 499721 - RNA, 19 nt, Homo sapiens
  misc_RNA (1)...(19): siRNA sense strand
gggccacauuggauugauc

SEQ ID NO: 499722 - RNA, 19 nt, Homo sapiens
  misc_RNA (1)...(19): siRNA sense strand
ggaguuucaggcauagaug

SEQ ID NO: 499723 - RNA, 19 nt, Homo sapiens
  misc_RNA (1)...(19): siRNA sense strand
ggucaccaagguaaagaug

SEQ ID NO: 499724 - RNA, 19 nt, Homo sapiens
  misc_RNA (1)...(19): siRNA sense strand
guccauuuaugaugaaagg

SEQ ID NO: 499725 - RNA, 19 nt, Homo sapiens
  misc_RNA (1)...(19): siRNA sense strand
aaagaacaaggaaauuugg

SEQ ID NO: 499726 - RNA, 19 nt, Homo sapiens
  misc_RNA (1)...(19): siRNA sense strand
ugccacagcucgccagaac

SEQ ID NO: 499727 - RNA, 19 nt, Homo sapiens
  misc_RNA (1)...(19): siRNA sense strand
ccguguggccgucagcaua

SEQ ID NO: 499728 - RNA, 19 nt, Homo sapiens
  misc_RNA (1)...(19): siRNA sense strand
cuaagggaucuauuggauu

SEQ ID NO: 499729 - RNA, 19 nt, Homo sapiens
  misc_RNA (1)...(19): siRNA sense strand
gaccuaagggaucuauugg

SEQ ID NO: 499730 - RNA, 19 nt, Homo sapiens
  misc_RNA (1)...(19): siRNA sense strand
gagagcccgcagugauuga

SEQ ID NO: 499731 - RNA, 19 nt, Homo sapiens
  misc_RNA (1)...(19): siRNA sense strand
ggaaauuuggaccucaagu

SEQ ID NO: 499732 - RNA, 19 nt, Homo sapiens
  misc_RNA (1)...(19): siRNA sense strand
ggaggaugaagaaggagau

SEQ ID NO: 499733 - RNA, 19 nt, Homo sapiens
  misc_RNA (1)...(19): siRNA sense strand
ucuccuugcugaucaccuu

SEQ ID NO: 499734 - RNA, 19 nt, Homo sapiens
  misc_RNA (1)...(19): siRNA sense strand
ggaccuacuggcuuaaagg

SEQ ID NO: 499735 - RNA, 19 nt, Homo sapiens
  misc_RNA (1)...(19): siRNA sense strand
gcagcagaauauccaucuc

SEQ ID NO: 499736 - RNA, 19 nt, Homo sapiens
  misc_RNA (1)...(19): siRNA sense strand
gacuuucgagggagacauu

SEQ ID NO: 499737 - RNA, 19 nt, Homo sapiens
  misc_RNA (1)...(19): siRNA sense strand
caccuacuccugccagaau

SEQ ID NO: 499738 - RNA, 19 nt, Homo sapiens
  misc_RNA (1)...(19): siRNA sense strand
gccucuaucccgacaagaa

SEQ ID NO: 499739 - RNA, 19 nt, Homo sapiens
  misc_RNA (1)...(19): siRNA sense strand
aaagggccacauuggauug

SEQ ID NO: 499740 - RNA, 19 nt, Homo sapiens
  misc_RNA (1)...(19): siRNA sense strand
aaggagagcccgcagugau

SEQ ID NO: 499741 - RNA, 19 nt, Homo sapiens
  misc_RNA (1)...(19): siRNA sense strand
gauggggaauacuggauug

SEQ ID NO: 499742 - RNA, 19 nt, Homo sapiens
  misc_RNA (1)...(19): siRNA sense strand
ggaggcugguauagcacau

SEQ ID NO: 499743 - RNA, 19 nt, Homo sapiens
  misc_RNA (1)...(19): siRNA sense strand
aaggagagaugguggauua

SEQ ID NO: 499744 - RNA, 19 nt, Homo sapiens
  misc_RNA (1)...(19): siRNA sense strand
cagcugggcuuccugguuu

SEQ ID NO: 499745 - RNA, 19 nt, Homo sapiens
  misc_RNA (1)...(19): siRNA sense strand
ccaaagacaucuccaggau

SEQ ID NO: 499746 - RNA, 19 nt, Homo sapiens
  misc_RNA (1)...(19): siRNA sense strand
gagagaugguggauuacaa

SEQ ID NO: 499747 - RNA, 19 nt, Homo sapiens
  misc_RNA (1)...(19): siRNA sense strand
aaagggaccucgcgguaaa

SEQ ID NO: 499748 - RNA, 19 nt, Homo sapiens
  misc_RNA (1)...(19): siRNA sense strand
gaugguggauuacaaugga

SEQ ID NO: 499749 - RNA, 19 nt, Homo sapiens
  misc_RNA (1)...(19): siRNA sense strand
ggauuacaauggaaacauc

SEQ ID NO: 499750 - RNA, 19 nt, Homo sapiens
  misc_RNA (1)...(19): siRNA sense strand
caagggagaaccagggaaa

SEQ ID NO: 499751 - RNA, 19 nt, Homo sapiens
  misc_RNA (1)...(19): siRNA sense strand
ggaagcaggacuagaugga

SEQ ID NO: 499752 - RNA, 19 nt, Homo sapiens
  misc_RNA (1)...(19): siRNA sense strand
caaggcugcuggaacaagu

SEQ ID NO: 499753 - RNA, 19 nt, Homo sapiens
  misc_RNA (1)...(19): siRNA sense strand
gggagaagcaggugucgau

SEQ ID NO: 499754 - RNA, 19 nt, Homo sapiens
  misc_RNA (1)...(19): siRNA sense strand
ggagaacagggaccagaug

SEQ ID NO: 499755 - RNA, 19 nt, Homo sapiens
  misc_RNA (1)...(19): siRNA sense strand
acaauggaaacaucaauga

SEQ ID NO: 499756 - RNA, 19 nt, Homo sapiens
  misc_RNA (1)...(19): siRNA sense strand
gaaaggagagaugguggau

SEQ ID NO: 499757 - RNA, 19 nt, Homo sapiens
  misc_RNA (1)...(19): siRNA sense strand
cuagagguuucccuggauu

SEQ ID NO: 499758 - RNA, 19 nt, Homo sapiens
  misc_RNA (1)...(19): siRNA sense strand
gcaaauggagacggcuauu

SEQ ID NO: 499759 - RNA, 19 nt, Homo sapiens
  misc_RNA (1)...(19): siRNA sense strand
gaaaggcuuccagggagaa

SEQ ID NO: 499760 - RNA, 19 nt, Homo sapiens
  misc_RNA (1)...(19): siRNA sense strand
gcagcugggcuuccugguu

SEQ ID NO: 499761 - RNA, 19 nt, Homo sapiens
  misc_RNA (1)...(19): siRNA sense strand
ggagagaugguggauuaca

SEQ ID NO: 499762 - RNA, 19 nt, Homo sapiens
  misc_RNA (1)...(19): siRNA sense strand
gaugcuggcaacuccauug

SEQ ID NO: 499763 - RNA, 19 nt, Homo sapiens
  misc_RNA (1)...(19): siRNA sense strand
gcguggagcagcuggagaa

SEQ ID NO: 499764 - RNA, 19 nt, Homo sapiens
  misc_RNA (1)...(19): siRNA sense strand
uggagcagcuggagaacag

SEQ ID NO: 499765 - RNA, 19 nt, Homo sapiens
  misc_RNA (1)...(19): siRNA sense strand
ggauuuccgggucccauug

SEQ ID NO: 499766 - RNA, 19 nt, Homo sapiens
  misc_RNA (1)...(19): siRNA sense strand
gagaugguggauuacaaug

SEQ ID NO: 499767 - RNA, 19 nt, Homo sapiens
  misc_RNA (1)...(19): siRNA sense strand
uagcggagcgcacccacaa

SEQ ID NO: 499768 - RNA, 19 nt, Homo sapiens
  misc_RNA (1)...(19): siRNA sense strand
gggagaaccagggaaagga

SEQ ID NO: 499769 - RNA, 19 nt, Homo sapiens
  misc_RNA (1)...(19): siRNA sense strand
gagccaggccagcauccaa

SEQ ID NO: 499770 - RNA, 19 nt, Homo sapiens
  misc_RNA (1)...(19): siRNA sense strand
gguacuccaggaccaauug

SEQ ID NO: 499771 - RNA, 19 nt, Homo sapiens
  misc_RNA (1)...(19): siRNA sense strand
aaaggagacccugggauga

SEQ ID NO: 499772 - RNA, 19 nt, Homo sapiens
  misc_RNA (1)...(19): siRNA sense strand
gagccagggaucccaggaa

SEQ ID NO: 499773 - RNA, 19 nt, Homo sapiens
  misc_RNA (1)...(19): siRNA sense strand
gaaccagggaaaggagaga

SEQ ID NO: 499774 - RNA, 19 nt, Homo sapiens
  misc_RNA (1)...(19): siRNA sense strand
gauuacaauggaaacauca

SEQ ID NO: 499775 - RNA, 19 nt, Homo sapiens
  misc_RNA (1)...(19): siRNA sense strand
ggucaaccaggaacuagag

SEQ ID NO: 499776 - RNA, 19 nt, Homo sapiens
  misc_RNA (1)...(19): siRNA sense strand
aaggagagaugguggauua

SEQ ID NO: 499777 - RNA, 19 nt, Homo sapiens
  misc_RNA (1)...(19): siRNA sense strand
cagcugggcuuccugguuu

SEQ ID NO: 499778 - RNA, 19 nt, Homo sapiens
  misc_RNA (1)...(19): siRNA sense strand
ccaaagacaucuccaggau

SEQ ID NO: 499779 - RNA, 19 nt, Homo sapiens
  misc_RNA (1)...(19): siRNA sense strand
gagagaugguggauuacaa

SEQ ID NO: 499780 - RNA, 19 nt, Homo sapiens
  misc_RNA (1)...(19): siRNA sense strand
aaagggaccucgcgguaaa

SEQ ID NO: 499781 - RNA, 19 nt, Homo sapiens
  misc_RNA (1)...(19): siRNA sense strand
gaugguggauuacaaugga

SEQ ID NO: 499782 - RNA, 19 nt, Homo sapiens
  misc_RNA (1)...(19): siRNA sense strand
ggauuacaauggaaacauc

SEQ ID NO: 499783 - RNA, 19 nt, Homo sapiens
  misc_RNA (1)...(19): siRNA sense strand
caagggagaaccagggaaa

SEQ ID NO: 499784 - RNA, 19 nt, Homo sapiens
  misc_RNA (1)...(19): siRNA sense strand
ggaagcaggacuagaugga

SEQ ID NO: 499785 - RNA, 19 nt, Homo sapiens
  misc_RNA (1)...(19): siRNA sense strand
caaggcugcuggaacaagu

SEQ ID NO: 499786 - RNA, 19 nt, Homo sapiens
  misc_RNA (1)...(19): siRNA sense strand
gggagaagcaggugucgau

SEQ ID NO: 499787 - RNA, 19 nt, Homo sapiens
  misc_RNA (1)...(19): siRNA sense strand
ggagaacagggaccagaug

SEQ ID NO: 499788 - RNA, 19 nt, Homo sapiens
  misc_RNA (1)...(19): siRNA sense strand
acaauggaaacaucaauga

SEQ ID NO: 499789 - RNA, 19 nt, Homo sapiens
  misc_RNA (1)...(19): siRNA sense strand
gaaaggagagaugguggau

SEQ ID NO: 499790 - RNA, 19 nt, Homo sapiens
  misc_RNA (1)...(19): siRNA sense strand
cuagagguuucccuggauu

SEQ ID NO: 499791 - RNA, 19 nt, Homo sapiens
  misc_RNA (1)...(19): siRNA sense strand
gcaaauggagacggcuauu

SEQ ID NO: 499792 - RNA, 19 nt, Homo sapiens
  misc_RNA (1)...(19): siRNA sense strand
gaaaggcuuccagggagaa

SEQ ID NO: 499793 - RNA, 19 nt, Homo sapiens
  misc_RNA (1)...(19): siRNA sense strand
gcagcugggcuuccugguu

SEQ ID NO: 499794 - RNA, 19 nt, Homo sapiens
  misc_RNA (1)...(19): siRNA sense strand
ggagagaugguggauuaca

SEQ ID NO: 499795 - RNA, 19 nt, Homo sapiens
  misc_RNA (1)...(19): siRNA sense strand
gaugcuggcaacuccauug

SEQ ID NO: 499796 - RNA, 19 nt, Homo sapiens
  misc_RNA (1)...(19): siRNA sense strand
gcguggagcagcuggagaa

SEQ ID NO: 499797 - RNA, 19 nt, Homo sapiens
  misc_RNA (1)...(19): siRNA sense strand
uggagcagcuggagaacag

SEQ ID NO: 499798 - RNA, 19 nt, Homo sapiens
  misc_RNA (1)...(19): siRNA sense strand
ggauuuccgggucccauug

SEQ ID NO: 499799 - RNA, 19 nt, Homo sapiens
  misc_RNA (1)...(19): siRNA sense strand
gagaugguggauuacaaug

SEQ ID NO: 499800 - RNA, 19 nt, Homo sapiens
  misc_RNA (1)...(19): siRNA sense strand
uagcggagcgcacccacaa

SEQ ID NO: 499801 - RNA, 19 nt, Homo sapiens
  misc_RNA (1)...(19): siRNA sense strand
gggagaaccagggaaagga

SEQ ID NO: 499802 - RNA, 19 nt, Homo sapiens
  misc_RNA (1)...(19): siRNA sense strand
gagccaggccagcauccaa

SEQ ID NO: 499803 - RNA, 19 nt, Homo sapiens
  misc_RNA (1)...(19): siRNA sense strand
gguacuccaggaccaauug

SEQ ID NO: 499804 - RNA, 19 nt, Homo sapiens
  misc_RNA (1)...(19): siRNA sense strand
aaaggagacccugggauga

SEQ ID NO: 499805 - RNA, 19 nt, Homo sapiens
  misc_RNA (1)...(19): siRNA sense strand
gagccagggaucccaggaa

SEQ ID NO: 499806 - RNA, 19 nt, Homo sapiens
  misc_RNA (1)...(19): siRNA sense strand
gaaccagggaaaggagaga

SEQ ID NO: 499807 - RNA, 19 nt, Homo sapiens
  misc_RNA (1)...(19): siRNA sense strand
gauuacaauggaaacauca

SEQ ID NO: 499808 - RNA, 19 nt, Homo sapiens
  misc_RNA (1)...(19): siRNA sense strand
ggucaaccaggaacuagag

SEQ ID NO: 499809 - RNA, 19 nt, Homo sapiens
  misc_RNA (1)...(19): siRNA sense strand
aaggagagaugguggauua

SEQ ID NO: 499810 - RNA, 19 nt, Homo sapiens
  misc_RNA (1)...(19): siRNA sense strand
cagcugggcuuccugguuu

SEQ ID NO: 499811 - RNA, 19 nt, Homo sapiens
  misc_RNA (1)...(19): siRNA sense strand
ccaaagacaucuccaggau

SEQ ID NO: 499812 - RNA, 19 nt, Homo sapiens
  misc_RNA (1)...(19): siRNA sense strand
gagagaugguggauuacaa

SEQ ID NO: 499813 - RNA, 19 nt, Homo sapiens
  misc_RNA (1)...(19): siRNA sense strand
aaagggaccucgcgguaaa

SEQ ID NO: 499814 - RNA, 19 nt, Homo sapiens
  misc_RNA (1)...(19): siRNA sense strand
gaugguggauuacaaugga

SEQ ID NO: 499815 - RNA, 19 nt, Homo sapiens
  misc_RNA (1)...(19): siRNA sense strand
ggauuacaauggaaacauc

SEQ ID NO: 499816 - RNA, 19 nt, Homo sapiens
  misc_RNA (1)...(19): siRNA sense strand
caagggagaaccagggaaa

SEQ ID NO: 499817 - RNA, 19 nt, Homo sapiens
  misc_RNA (1)...(19): siRNA sense strand
ggaagcaggacuagaugga

SEQ ID NO: 499818 - RNA, 19 nt, Homo sapiens
  misc_RNA (1)...(19): siRNA sense strand
caaggcugcuggaacaagu

SEQ ID NO: 499819 - RNA, 19 nt, Homo sapiens
  misc_RNA (1)...(19): siRNA sense strand
gggagaagcaggugucgau

SEQ ID NO: 499820 - RNA, 19 nt, Homo sapiens
  misc_RNA (1)...(19): siRNA sense strand
ggagaacagggaccagaug

SEQ ID NO: 499821 - RNA, 19 nt, Homo sapiens
  misc_RNA (1)...(19): siRNA sense strand
acaauggaaacaucaauga

SEQ ID NO: 499822 - RNA, 19 nt, Homo sapiens
  misc_RNA (1)...(19): siRNA sense strand
gaaaggagagaugguggau

SEQ ID NO: 499823 - RNA, 19 nt, Homo sapiens
  misc_RNA (1)...(19): siRNA sense strand
cuagagguuucccuggauu

SEQ ID NO: 499824 - RNA, 19 nt, Homo sapiens
  misc_RNA (1)...(19): siRNA sense strand
gcaaauggagacggcuauu

SEQ ID NO: 499825 - RNA, 19 nt, Homo sapiens
  misc_RNA (1)...(19): siRNA sense strand
gaaaggcuuccagggagaa

SEQ ID NO: 499826 - RNA, 19 nt, Homo sapiens
  misc_RNA (1)...(19): siRNA sense strand
gcagcugggcuuccugguu

SEQ ID NO: 499827 - RNA, 19 nt, Homo sapiens
  misc_RNA (1)...(19): siRNA sense strand
ggagagaugguggauuaca

SEQ ID NO: 499828 - RNA, 19 nt, Homo sapiens
  misc_RNA (1)...(19): siRNA sense strand
gaugcuggcaacuccauug

SEQ ID NO: 499829 - RNA, 19 nt, Homo sapiens
  misc_RNA (1)...(19): siRNA sense strand
gcguggagcagcuggagaa

SEQ ID NO: 499830 - RNA, 19 nt, Homo sapiens
  misc_RNA (1)...(19): siRNA sense strand
uggagcagcuggagaacag

SEQ ID NO: 499831 - RNA, 19 nt, Homo sapiens
  misc_RNA (1)...(19): siRNA sense strand
ggauuuccgggucccauug

SEQ ID NO: 499832 - RNA, 19 nt, Homo sapiens
  misc_RNA (1)...(19): siRNA sense strand
gagaugguggauuacaaug

SEQ ID NO: 499833 - RNA, 19 nt, Homo sapiens
  misc_RNA (1)...(19): siRNA sense strand
uagcggagcgcacccacaa

SEQ ID NO: 499834 - RNA, 19 nt, Homo sapiens
  misc_RNA (1)...(19): siRNA sense strand
gggagaaccagggaaagga

SEQ ID NO: 499835 - RNA, 19 nt, Homo sapiens
  misc_RNA (1)...(19): siRNA sense strand
gagccaggccagcauccaa

SEQ ID NO: 499836 - RNA, 19 nt, Homo sapiens
  misc_RNA (1)...(19): siRNA sense strand
gguacuccaggaccaauug

SEQ ID NO: 499837 - RNA, 19 nt, Homo sapiens
  misc_RNA (1)...(19): siRNA sense strand
aaaggagacccugggauga

SEQ ID NO: 499838 - RNA, 19 nt, Homo sapiens
  misc_RNA (1)...(19): siRNA sense strand
gagccagggaucccaggaa

SEQ ID NO: 499839 - RNA, 19 nt, Homo sapiens
  misc_RNA (1)...(19): siRNA sense strand
gaaccagggaaaggagaga

SEQ ID NO: 499840 - RNA, 19 nt, Homo sapiens
  misc_RNA (1)...(19): siRNA sense strand
gauuacaauggaaacauca

SEQ ID NO: 499841 - RNA, 19 nt, Homo sapiens
  misc_RNA (1)...(19): siRNA sense strand
ggucaaccaggaacuagag

SEQ ID NO: 499842 - RNA, 19 nt, Homo sapiens
  misc_RNA (1)...(19): siRNA sense strand
aaggagagaugguggauua

SEQ ID NO: 499843 - RNA, 19 nt, Homo sapiens
  misc_RNA (1)...(19): siRNA sense strand
cagcugggcuuccugguuu

SEQ ID NO: 499844 - RNA, 19 nt, Homo sapiens
  misc_RNA (1)...(19): siRNA sense strand
ccaaagacaucuccaggau

SEQ ID NO: 499845 - RNA, 19 nt, Homo sapiens
  misc_RNA (1)...(19): siRNA sense strand
gagagaugguggauuacaa

SEQ ID NO: 499846 - RNA, 19 nt, Homo sapiens
  misc_RNA (1)...(19): siRNA sense strand
aaagggaccucgcgguaaa

SEQ ID NO: 499847 - RNA, 19 nt, Homo sapiens
  misc_RNA (1)...(19): siRNA sense strand
gaugguggauuacaaugga

SEQ ID NO: 499848 - RNA, 19 nt, Homo sapiens
  misc_RNA (1)...(19): siRNA sense strand
ggauuacaauggaaacauc

SEQ ID NO: 499849 - RNA, 19 nt, Homo sapiens
  misc_RNA (1)...(19): siRNA sense strand
caagggagaaccagggaaa

SEQ ID NO: 499850 - RNA, 19 nt, Homo sapiens
  misc_RNA (1)...(19): siRNA sense strand
ggaagcaggacuagaugga

SEQ ID NO: 499851 - RNA, 19 nt, Homo sapiens
  misc_RNA (1)...(19): siRNA sense strand
caaggcugcuggaacaagu

SEQ ID NO: 499852 - RNA, 19 nt, Homo sapiens
  misc_RNA (1)...(19): siRNA sense strand
gggagaagcaggugucgau

SEQ ID NO: 499853 - RNA, 19 nt, Homo sapiens
  misc_RNA (1)...(19): siRNA sense strand
ggagaacagggaccagaug

SEQ ID NO: 499854 - RNA, 19 nt, Homo sapiens
  misc_RNA (1)...(19): siRNA sense strand
acaauggaaacaucaauga

SEQ ID NO: 499855 - RNA, 19 nt, Homo sapiens
  misc_RNA (1)...(19): siRNA sense strand
gaaaggagagaugguggau

SEQ ID NO: 499856 - RNA, 19 nt, Homo sapiens
  misc_RNA (1)...(19): siRNA sense strand
cuagagguuucccuggauu

SEQ ID NO: 499857 - RNA, 19 nt, Homo sapiens
  misc_RNA (1)...(19): siRNA sense strand
gcaaauggagacggcuauu

SEQ ID NO: 499858 - RNA, 19 nt, Homo sapiens
  misc_RNA (1)...(19): siRNA sense strand
gaaaggcuuccagggagaa

SEQ ID NO: 499859 - RNA, 19 nt, Homo sapiens
  misc_RNA (1)...(19): siRNA sense strand
gcagcugggcuuccugguu

SEQ ID NO: 499860 - RNA, 19 nt, Homo sapiens
  misc_RNA (1)...(19): siRNA sense strand
ggagagaugguggauuaca

SEQ ID NO: 499861 - RNA, 19 nt, Homo sapiens
  misc_RNA (1)...(19): siRNA sense strand
gaugcuggcaacuccauug

SEQ ID NO: 499862 - RNA, 19 nt, Homo sapiens
  misc_RNA (1)...(19): siRNA sense strand
gcguggagcagcuggagaa

SEQ ID NO: 499863 - RNA, 19 nt, Homo sapiens
  misc_RNA (1)...(19): siRNA sense strand
uggagcagcuggagaacag

SEQ ID NO: 499864 - RNA, 19 nt, Homo sapiens
  misc_RNA (1)...(19): siRNA sense strand
ggauuuccgggucccauug

SEQ ID NO: 499865 - RNA, 19 nt, Homo sapiens
  misc_RNA (1)...(19): siRNA sense strand
gagaugguggauuacaaug

SEQ ID NO: 499866 - RNA, 19 nt, Homo sapiens
  misc_RNA (1)...(19): siRNA sense strand
uagcggagcgcacccacaa

SEQ ID NO: 499867 - RNA, 19 nt, Homo sapiens
  misc_RNA (1)...(19): siRNA sense strand
gggagaaccagggaaagga

SEQ ID NO: 499868 - RNA, 19 nt, Homo sapiens
  misc_RNA (1)...(19): siRNA sense strand
gagccaggccagcauccaa

SEQ ID NO: 499869 - RNA, 19 nt, Homo sapiens
  misc_RNA (1)...(19): siRNA sense strand
gguacuccaggaccaauug

SEQ ID NO: 499870 - RNA, 19 nt, Homo sapiens
  misc_RNA (1)...(19): siRNA sense strand
aaaggagacccugggauga

SEQ ID NO: 499871 - RNA, 19 nt, Homo sapiens
  misc_RNA (1)...(19): siRNA sense strand
gagccagggaucccaggaa

SEQ ID NO: 499872 - RNA, 19 nt, Homo sapiens
  misc_RNA (1)...(19): siRNA sense strand
gaaccagggaaaggagaga

SEQ ID NO: 499873 - RNA, 19 nt, Homo sapiens
  misc_RNA (1)...(19): siRNA sense strand
gauuacaauggaaacauca

SEQ ID NO: 499874 - RNA, 19 nt, Homo sapiens
  misc_RNA (1)...(19): siRNA sense strand
ggucaaccaggaacuagag

SEQ ID NO: 499875 - RNA, 19 nt, Homo sapiens
  misc_RNA (1)...(19): siRNA sense strand
aaggagagaugguggauua

SEQ ID NO: 499876 - RNA, 19 nt, Homo sapiens
  misc_RNA (1)...(19): siRNA sense strand
cagcugggcuuccugguuu

SEQ ID NO: 499877 - RNA, 19 nt, Homo sapiens
  misc_RNA (1)...(19): siRNA sense strand
ccaaagacaucuccaggau

SEQ ID NO: 499878 - RNA, 19 nt, Homo sapiens
  misc_RNA (1)...(19): siRNA sense strand
gagagaugguggauuacaa

SEQ ID NO: 499879 - RNA, 19 nt, Homo sapiens
  misc_RNA (1)...(19): siRNA sense strand
aaagggaccucgcgguaaa

SEQ ID NO: 499880 - RNA, 19 nt, Homo sapiens
  misc_RNA (1)...(19): siRNA sense strand
gaugguggauuacaaugga

SEQ ID NO: 499881 - RNA, 19 nt, Homo sapiens
  misc_RNA (1)...(19): siRNA sense strand
ggauuacaauggaaacauc

SEQ ID NO: 499882 - RNA, 19 nt, Homo sapiens
  misc_RNA (1)...(19): siRNA sense strand
caagggagaaccagggaaa

SEQ ID NO: 499883 - RNA, 19 nt, Homo sapiens
  misc_RNA (1)...(19): siRNA sense strand
ggaagcaggacuagaugga

SEQ ID NO: 499884 - RNA, 19 nt, Homo sapiens
  misc_RNA (1)...(19): siRNA sense strand
caaggcugcuggaacaagu

SEQ ID NO: 499885 - RNA, 19 nt, Homo sapiens
  misc_RNA (1)...(19): siRNA sense strand
gggagaagcaggugucgau

SEQ ID NO: 499886 - RNA, 19 nt, Homo sapiens
  misc_RNA (1)...(19): siRNA sense strand
ggagaacagggaccagaug

SEQ ID NO: 499887 - RNA, 19 nt, Homo sapiens
  misc_RNA (1)...(19): siRNA sense strand
acaauggaaacaucaauga

SEQ ID NO: 499888 - RNA, 19 nt, Homo sapiens
  misc_RNA (1)...(19): siRNA sense strand
gaaaggagagaugguggau

SEQ ID NO: 499889 - RNA, 19 nt, Homo sapiens
  misc_RNA (1)...(19): siRNA sense strand
cuagagguuucccuggauu

SEQ ID NO: 499890 - RNA, 19 nt, Homo sapiens
  misc_RNA (1)...(19): siRNA sense strand
gcaaauggagacggcuauu

SEQ ID NO: 499891 - RNA, 19 nt, Homo sapiens
  misc_RNA (1)...(19): siRNA sense strand
gaaaggcuuccagggagaa

SEQ ID NO: 499892 - RNA, 19 nt, Homo sapiens
  misc_RNA (1)...(19): siRNA sense strand
gcagcugggcuuccugguu

SEQ ID NO: 499893 - RNA, 19 nt, Homo sapiens
  misc_RNA (1)...(19): siRNA sense strand
ggagagaugguggauuaca

SEQ ID NO: 499894 - RNA, 19 nt, Homo sapiens
  misc_RNA (1)...(19): siRNA sense strand
gaugcuggcaacuccauug

SEQ ID NO: 499895 - RNA, 19 nt, Homo sapiens
  misc_RNA (1)...(19): siRNA sense strand
gcguggagcagcuggagaa

SEQ ID NO: 499896 - RNA, 19 nt, Homo sapiens
  misc_RNA (1)...(19): siRNA sense strand
uggagcagcuggagaacag

SEQ ID NO: 499897 - RNA, 19 nt, Homo sapiens
  misc_RNA (1)...(19): siRNA sense strand
ggauuuccgggucccauug

SEQ ID NO: 499898 - RNA, 19 nt, Homo sapiens
  misc_RNA (1)...(19): siRNA sense strand
gagaugguggauuacaaug

SEQ ID NO: 499899 - RNA, 19 nt, Homo sapiens
  misc_RNA (1)...(19): siRNA sense strand
uagcggagcgcacccacaa

SEQ ID NO: 499900 - RNA, 19 nt, Homo sapiens
  misc_RNA (1)...(19): siRNA sense strand
gggagaaccagggaaagga

SEQ ID NO: 499901 - RNA, 19 nt, Homo sapiens
  misc_RNA (1)...(19): siRNA sense strand
gagccaggccagcauccaa

SEQ ID NO: 499902 - RNA, 19 nt, Homo sapiens
  misc_RNA (1)...(19): siRNA sense strand
gguacuccaggaccaauug

SEQ ID NO: 499903 - RNA, 19 nt, Homo sapiens
  misc_RNA (1)...(19): siRNA sense strand
aaaggagacccugggauga

SEQ ID NO: 499904 - RNA, 19 nt, Homo sapiens
  misc_RNA (1)...(19): siRNA sense strand
gagccagggaucccaggaa

SEQ ID NO: 499905 - RNA, 19 nt, Homo sapiens
  misc_RNA (1)...(19): siRNA sense strand
gaaccagggaaaggagaga

SEQ ID NO: 499906 - RNA, 19 nt, Homo sapiens
  misc_RNA (1)...(19): siRNA sense strand
gauuacaauggaaacauca

SEQ ID NO: 499907 - RNA, 19 nt, Homo sapiens
  misc_RNA (1)...(19): siRNA sense strand
ggucaaccaggaacuagag

SEQ ID NO: 499908 - RNA, 19 nt, Homo sapiens
  misc_RNA (1)...(19): siRNA sense strand
aaggagagaugguggauua

SEQ ID NO: 499909 - RNA, 19 nt, Homo sapiens
  misc_RNA (1)...(19): siRNA sense strand
cagcugggcuuccugguuu

SEQ ID NO: 499910 - RNA, 19 nt, Homo sapiens
  misc_RNA (1)...(19): siRNA sense strand
ccaaagacaucuccaggau

SEQ ID NO: 499911 - RNA, 19 nt, Homo sapiens
  misc_RNA (1)...(19): siRNA sense strand
gagagaugguggauuacaa

SEQ ID NO: 499912 - RNA, 19 nt, Homo sapiens
  misc_RNA (1)...(19): siRNA sense strand
aaagggaccucgcgguaaa

SEQ ID NO: 499913 - RNA, 19 nt, Homo sapiens
  misc_RNA (1)...(19): siRNA sense strand
gaugguggauuacaaugga

SEQ ID NO: 499914 - RNA, 19 nt, Homo sapiens
  misc_RNA (1)...(19): siRNA sense strand
ggauuacaauggaaacauc

SEQ ID NO: 499915 - RNA, 19 nt, Homo sapiens
  misc_RNA (1)...(19): siRNA sense strand
caagggagaaccagggaaa

SEQ ID NO: 499916 - RNA, 19 nt, Homo sapiens
  misc_RNA (1)...(19): siRNA sense strand
ggaagcaggacuagaugga

SEQ ID NO: 499917 - RNA, 19 nt, Homo sapiens
  misc_RNA (1)...(19): siRNA sense strand
caaggcugcuggaacaagu

SEQ ID NO: 499918 - RNA, 19 nt, Homo sapiens
  misc_RNA (1)...(19): siRNA sense strand
gggagaagcaggugucgau

SEQ ID NO: 499919 - RNA, 19 nt, Homo sapiens
  misc_RNA (1)...(19): siRNA sense strand
ggagaacagggaccagaug

SEQ ID NO: 499920 - RNA, 19 nt, Homo sapiens
  misc_RNA (1)...(19): siRNA sense strand
acaauggaaacaucaauga

SEQ ID NO: 499921 - RNA, 19 nt, Homo sapiens
  misc_RNA (1)...(19): siRNA sense strand
gaaaggagagaugguggau

SEQ ID NO: 499922 - RNA, 19 nt, Homo sapiens
  misc_RNA (1)...(19): siRNA sense strand
cuagagguuucccuggauu

SEQ ID NO: 499923 - RNA, 19 nt, Homo sapiens
  misc_RNA (1)...(19): siRNA sense strand
gcaaauggagacggcuauu

SEQ ID NO: 499924 - RNA, 19 nt, Homo sapiens
  misc_RNA (1)...(19): siRNA sense strand
gaaaggcuuccagggagaa

SEQ ID NO: 499925 - RNA, 19 nt, Homo sapiens
  misc_RNA (1)...(19): siRNA sense strand
gcagcugggcuuccugguu

SEQ ID NO: 499926 - RNA, 19 nt, Homo sapiens
  misc_RNA (1)...(19): siRNA sense strand
ggagagaugguggauuaca

SEQ ID NO: 499927 - RNA, 19 nt, Homo sapiens
  misc_RNA (1)...(19): siRNA sense strand
gaugcuggcaacuccauug

SEQ ID NO: 499928 - RNA, 19 nt, Homo sapiens
  misc_RNA (1)...(19): siRNA sense strand
gcguggagcagcuggagaa

SEQ ID NO: 499929 - RNA, 19 nt, Homo sapiens
  misc_RNA (1)...(19): siRNA sense strand
uggagcagcuggagaacag

SEQ ID NO: 499930 - RNA, 19 nt, Homo sapiens
  misc_RNA (1)...(19): siRNA sense strand
ggauuuccgggucccauug

SEQ ID NO: 499931 - RNA, 19 nt, Homo sapiens
  misc_RNA (1)...(19): siRNA sense strand
gagaugguggauuacaaug

SEQ ID NO: 499932 - RNA, 19 nt, Homo sapiens
  misc_RNA (1)...(19): siRNA sense strand
uagcggagcgcacccacaa

SEQ ID NO: 499933 - RNA, 19 nt, Homo sapiens
  misc_RNA (1)...(19): siRNA sense strand
gggagaaccagggaaagga

SEQ ID NO: 499934 - RNA, 19 nt, Homo sapiens
  misc_RNA (1)...(19): siRNA sense strand
gagccaggccagcauccaa

SEQ ID NO: 499935 - RNA, 19 nt, Homo sapiens
  misc_RNA (1)...(19): siRNA sense strand
gguacuccaggaccaauug

SEQ ID NO: 499936 - RNA, 19 nt, Homo sapiens
  misc_RNA (1)...(19): siRNA sense strand
aaaggagacccugggauga

SEQ ID NO: 499937 - RNA, 19 nt, Homo sapiens
  misc_RNA (1)...(19): siRNA sense strand
gagccagggaucccaggaa

SEQ ID NO: 499938 - RNA, 19 nt, Homo sapiens
  misc_RNA (1)...(19): siRNA sense strand
gaaccagggaaaggagaga

SEQ ID NO: 499939 - RNA, 19 nt, Homo sapiens
  misc_RNA (1)...(19): siRNA sense strand
gauuacaauggaaacauca

SEQ ID NO: 499940 - RNA, 19 nt, Homo sapiens
  misc_RNA (1)...(19): siRNA sense strand
ggucaaccaggaacuagag

SEQ ID NO: 499941 - RNA, 19 nt, Homo sapiens
  misc_RNA (1)...(19): siRNA sense strand
aaggagagaugguggauua

SEQ ID NO: 499942 - RNA, 19 nt, Homo sapiens
  misc_RNA (1)...(19): siRNA sense strand
cagcugggcuuccugguuu

SEQ ID NO: 499943 - RNA, 19 nt, Homo sapiens
  misc_RNA (1)...(19): siRNA sense strand
ccaaagacaucuccaggau

SEQ ID NO: 499944 - RNA, 19 nt, Homo sapiens
  misc_RNA (1)...(19): siRNA sense strand
gagagaugguggauuacaa

SEQ ID NO: 499945 - RNA, 19 nt, Homo sapiens
  misc_RNA (1)...(19): siRNA sense strand
aaagggaccucgcgguaaa

SEQ ID NO: 499946 - RNA, 19 nt, Homo sapiens
  misc_RNA (1)...(19): siRNA sense strand
gaugguggauuacaaugga

SEQ ID NO: 499947 - RNA, 19 nt, Homo sapiens
  misc_RNA (1)...(19): siRNA sense strand
ggauuacaauggaaacauc

SEQ ID NO: 499948 - RNA, 19 nt, Homo sapiens
  misc_RNA (1)...(19): siRNA sense strand
caagggagaaccagggaaa

SEQ ID NO: 499949 - RNA, 19 nt, Homo sapiens
  misc_RNA (1)...(19): siRNA sense strand
ggaagcaggacuagaugga

SEQ ID NO: 499950 - RNA, 19 nt, Homo sapiens
  misc_RNA (1)...(19): siRNA sense strand
caaggcugcuggaacaagu

SEQ ID NO: 499951 - RNA, 19 nt, Homo sapiens
  misc_RNA (1)...(19): siRNA sense strand
gggagaagcaggugucgau

SEQ ID NO: 499952 - RNA, 19 nt, Homo sapiens
  misc_RNA (1)...(19): siRNA sense strand
ggagaacagggaccagaug

SEQ ID NO: 499953 - RNA, 19 nt, Homo sapiens
  misc_RNA (1)...(19): siRNA sense strand
acaauggaaacaucaauga

SEQ ID NO: 499954 - RNA, 19 nt, Homo sapiens
  misc_RNA (1)...(19): siRNA sense strand
gaaaggagagaugguggau

SEQ ID NO: 499955 - RNA, 19 nt, Homo sapiens
  misc_RNA (1)...(19): siRNA sense strand
cuagagguuucccuggauu

SEQ ID NO: 499956 - RNA, 19 nt, Homo sapiens
  misc_RNA (1)...(19): siRNA sense strand
gcaaauggagacggcuauu

SEQ ID NO: 499957 - RNA, 19 nt, Homo sapiens
  misc_RNA (1)...(19): siRNA sense strand
gaaaggcuuccagggagaa

SEQ ID NO: 499958 - RNA, 19 nt, Homo sapiens
  misc_RNA (1)...(19): siRNA sense strand
gcagcugggcuuccugguu

SEQ ID NO: 499959 - RNA, 19 nt, Homo sapiens
  misc_RNA (1)...(19): siRNA sense strand
ggagagaugguggauuaca

SEQ ID NO: 499960 - RNA, 19 nt, Homo sapiens
  misc_RNA (1)...(19): siRNA sense strand
gaugcuggcaacuccauug

SEQ ID NO: 499961 - RNA, 19 nt, Homo sapiens
  misc_RNA (1)...(19): siRNA sense strand
gcguggagcagcuggagaa

SEQ ID NO: 499962 - RNA, 19 nt, Homo sapiens
  misc_RNA (1)...(19): siRNA sense strand
uggagcagcuggagaacag

SEQ ID NO: 499963 - RNA, 19 nt, Homo sapiens
  misc_RNA (1)...(19): siRNA sense strand
ggauuuccgggucccauug

SEQ ID NO: 499964 - RNA, 19 nt, Homo sapiens
  misc_RNA (1)...(19): siRNA sense strand
gagaugguggauuacaaug

SEQ ID NO: 499965 - RNA, 19 nt, Homo sapiens
  misc_RNA (1)...(19): siRNA sense strand
uagcggagcgcacccacaa

SEQ ID NO: 499966 - RNA, 19 nt, Homo sapiens
  misc_RNA (1)...(19): siRNA sense strand
gggagaaccagggaaagga

SEQ ID NO: 499967 - RNA, 19 nt, Homo sapiens
  misc_RNA (1)...(19): siRNA sense strand
gagccaggccagcauccaa

SEQ ID NO: 499968 - RNA, 19 nt, Homo sapiens
  misc_RNA (1)...(19): siRNA sense strand
gguacuccaggaccaauug

SEQ ID NO: 499969 - RNA, 19 nt, Homo sapiens
  misc_RNA (1)...(19): siRNA sense strand
aaaggagacccugggauga

SEQ ID NO: 499970 - RNA, 19 nt, Homo sapiens
  misc_RNA (1)...(19): siRNA sense strand
gagccagggaucccaggaa

SEQ ID NO: 499971 - RNA, 19 nt, Homo sapiens
  misc_RNA (1)...(19): siRNA sense strand
gaaccagggaaaggagaga

SEQ ID NO: 499972 - RNA, 19 nt, Homo sapiens
  misc_RNA (1)...(19): siRNA sense strand
gauuacaauggaaacauca

SEQ ID NO: 499973 - RNA, 19 nt, Homo sapiens
  misc_RNA (1)...(19): siRNA sense strand
ggucaaccaggaacuagag

SEQ ID NO: 499974 - RNA, 19 nt, Homo sapiens
  misc_RNA (1)...(19): siRNA sense strand
aaggagagaugguggauua

SEQ ID NO: 499975 - RNA, 19 nt, Homo sapiens
  misc_RNA (1)...(19): siRNA sense strand
cagcugggcuuccugguuu

SEQ ID NO: 499976 - RNA, 19 nt, Homo sapiens
  misc_RNA (1)...(19): siRNA sense strand
ccaaagacaucuccaggau

SEQ ID NO: 499977 - RNA, 19 nt, Homo sapiens
  misc_RNA (1)...(19): siRNA sense strand
gagagaugguggauuacaa

SEQ ID NO: 499978 - RNA, 19 nt, Homo sapiens
  misc_RNA (1)...(19): siRNA sense strand
aaagggaccucgcgguaaa

SEQ ID NO: 499979 - RNA, 19 nt, Homo sapiens
  misc_RNA (1)...(19): siRNA sense strand
gaugguggauuacaaugga

SEQ ID NO: 499980 - RNA, 19 nt, Homo sapiens
  misc_RNA (1)...(19): siRNA sense strand
ggauuacaauggaaacauc

SEQ ID NO: 499981 - RNA, 19 nt, Homo sapiens
  misc_RNA (1)...(19): siRNA sense strand
caagggagaaccagggaaa

SEQ ID NO: 499982 - RNA, 19 nt, Homo sapiens
  misc_RNA (1)...(19): siRNA sense strand
ggaagcaggacuagaugga

SEQ ID NO: 499983 - RNA, 19 nt, Homo sapiens
  misc_RNA (1)...(19): siRNA sense strand
caaggcugcuggaacaagu

SEQ ID NO: 499984 - RNA, 19 nt, Homo sapiens
  misc_RNA (1)...(19): siRNA sense strand
gggagaagcaggugucgau

SEQ ID NO: 499985 - RNA, 19 nt, Homo sapiens
  misc_RNA (1)...(19): siRNA sense strand
ggagaacagggaccagaug

SEQ ID NO: 499986 - RNA, 19 nt, Homo sapiens
  misc_RNA (1)...(19): siRNA sense strand
acaauggaaacaucaauga

SEQ ID NO: 499987 - RNA, 19 nt, Homo sapiens
  misc_RNA (1)...(19): siRNA sense strand
gaaaggagagaugguggau

SEQ ID NO: 499988 - RNA, 19 nt, Homo sapiens
  misc_RNA (1)...(19): siRNA sense strand
cuagagguuucccuggauu

SEQ ID NO: 499989 - RNA, 19 nt, Homo sapiens
  misc_RNA (1)...(19): siRNA sense strand
gcaaauggagacggcuauu

SEQ ID NO: 499990 - RNA, 19 nt, Homo sapiens
  misc_RNA (1)...(19): siRNA sense strand
gaaaggcuuccagggagaa

SEQ ID NO: 499991 - RNA, 19 nt, Homo sapiens
  misc_RNA (1)...(19): siRNA sense strand
gcagcugggcuuccugguu

SEQ ID NO: 499992 - RNA, 19 nt, Homo sapiens
  misc_RNA (1)...(19): siRNA sense strand
ggagagaugguggauuaca

SEQ ID NO: 499993 - RNA, 19 nt, Homo sapiens
  misc_RNA (1)...(19): siRNA sense strand
gaugcuggcaacuccauug

SEQ ID NO: 499994 - RNA, 19 nt, Homo sapiens
  misc_RNA (1)...(19): siRNA sense strand
gcguggagcagcuggagaa

SEQ ID NO: 499995 - RNA, 19 nt, Homo sapiens
  misc_RNA (1)...(19): siRNA sense strand
uggagcagcuggagaacag

SEQ ID NO: 499996 - RNA, 19 nt, Homo sapiens
  misc_RNA (1)...(19): siRNA sense strand
ggauuuccgggucccauug

SEQ ID NO: 499997 - RNA, 19 nt, Homo sapiens
  misc_RNA (1)...(19): siRNA sense strand
gagaugguggauuacaaug

SEQ ID NO: 499998 - RNA, 19 nt, Homo sapiens
  misc_RNA (1)...(19): siRNA sense strand
uagcggagcgcacccacaa

SEQ ID NO: 499999 - RNA, 19 nt, Homo sapiens
  misc_RNA (1)...(19): siRNA sense strand
gggagaaccagggaaagga

SEQ ID NO: 500000 - RNA, 19 nt, Homo sapiens
  misc_RNA (1)...(19): siRNA sense strand
gagccaggccagcauccaa

SEQ ID NO: 500001 - RNA, 19 nt, Homo sapiens
  misc_RNA (1)...(19): siRNA sense strand
gguacuccaggaccaauug

SEQ ID NO: 500002 - RNA, 19 nt, Homo sapiens
  misc_RNA (1)...(19): siRNA sense strand
aaaggagacccugggauga

SEQ ID NO: 500003 - RNA, 19 nt, Homo sapiens
  misc_RNA (1)...(19): siRNA sense strand
gagccagggaucccaggaa

SEQ ID NO: 500004 - RNA, 19 nt, Homo sapiens
  misc_RNA (1)...(19): siRNA sense strand
gaaccagggaaaggagaga

SEQ ID NO: 500005 - RNA, 19 nt, Homo sapiens
  misc_RNA (1)...(19): siRNA sense strand
gauuacaauggaaacauca

SEQ ID NO: 500006 - RNA, 19 nt, Homo sapiens
  misc_RNA (1)...(19): siRNA sense strand
ggucaaccaggaacuagag

SEQ ID NO: 500007 - RNA, 19 nt, Homo sapiens
  misc_RNA (1)...(19): siRNA sense strand
aaggagagaugguggauua

SEQ ID NO: 500008 - RNA, 19 nt, Homo sapiens
  misc_RNA (1)...(19): siRNA sense strand
cagcugggcuuccugguuu

SEQ ID NO: 500009 - RNA, 19 nt, Homo sapiens
  misc_RNA (1)...(19): siRNA sense strand
ccaaagacaucuccaggau

SEQ ID NO: 500010 - RNA, 19 nt, Homo sapiens
  misc_RNA (1)...(19): siRNA sense strand
gagagaugguggauuacaa

SEQ ID NO: 500011 - RNA, 19 nt, Homo sapiens
  misc_RNA (1)...(19): siRNA sense strand
aaagggaccucgcgguaaa

SEQ ID NO: 500012 - RNA, 19 nt, Homo sapiens
  misc_RNA (1)...(19): siRNA sense strand
gaugguggauuacaaugga

SEQ ID NO: 500013 - RNA, 19 nt, Homo sapiens
  misc_RNA (1)...(19): siRNA sense strand
ggauuacaauggaaacauc

SEQ ID NO: 500014 - RNA, 19 nt, Homo sapiens
  misc_RNA (1)...(19): siRNA sense strand
caagggagaaccagggaaa

SEQ ID NO: 500015 - RNA, 19 nt, Homo sapiens
  misc_RNA (1)...(19): siRNA sense strand
ggaagcaggacuagaugga

SEQ ID NO: 500016 - RNA, 19 nt, Homo sapiens
  misc_RNA (1)...(19): siRNA sense strand
caaggcugcuggaacaagu

SEQ ID NO: 500017 - RNA, 19 nt, Homo sapiens
  misc_RNA (1)...(19): siRNA sense strand
gggagaagcaggugucgau

SEQ ID NO: 500018 - RNA, 19 nt, Homo sapiens
  misc_RNA (1)...(19): siRNA sense strand
ggagaacagggaccagaug

SEQ ID NO: 500019 - RNA, 19 nt, Homo sapiens
  misc_RNA (1)...(19): siRNA sense strand
acaauggaaacaucaauga

SEQ ID NO: 500020 - RNA, 19 nt, Homo sapiens
  misc_RNA (1)...(19): siRNA sense strand
gaaaggagagaugguggau

SEQ ID NO: 500021 - RNA, 19 nt, Homo sapiens
  misc_RNA (1)...(19): siRNA sense strand
cuagagguuucccuggauu

SEQ ID NO: 500022 - RNA, 19 nt, Homo sapiens
  misc_RNA (1)...(19): siRNA sense strand
gcaaauggagacggcuauu

SEQ ID NO: 500023 - RNA, 19 nt, Homo sapiens
  misc_RNA (1)...(19): siRNA sense strand
gaaaggcuuccagggagaa

SEQ ID NO: 500024 - RNA, 19 nt, Homo sapiens
  misc_RNA (1)...(19): siRNA sense strand
gcagcugggcuuccugguu

SEQ ID NO: 500025 - RNA, 19 nt, Homo sapiens
  misc_RNA (1)...(19): siRNA sense strand
ggagagaugguggauuaca

SEQ ID NO: 500026 - RNA, 19 nt, Homo sapiens
  misc_RNA (1)...(19): siRNA sense strand
gaugcuggcaacuccauug

SEQ ID NO: 500027 - RNA, 19 nt, Homo sapiens
  misc_RNA (1)...(19): siRNA sense strand
gcguggagcagcuggagaa

SEQ ID NO: 500028 - RNA, 19 nt, Homo sapiens
  misc_RNA (1)...(19): siRNA sense strand
uggagcagcuggagaacag

SEQ ID NO: 500029 - RNA, 19 nt, Homo sapiens
  misc_RNA (1)...(19): siRNA sense strand
ggauuuccgggucccauug

SEQ ID NO: 500030 - RNA, 19 nt, Homo sapiens
  misc_RNA (1)...(19): siRNA sense strand
gagaugguggauuacaaug

SEQ ID NO: 500031 - RNA, 19 nt, Homo sapiens
  misc_RNA (1)...(19): siRNA sense strand
uagcggagcgcacccacaa

SEQ ID NO: 500032 - RNA, 19 nt, Homo sapiens
  misc_RNA (1)...(19): siRNA sense strand
gggagaaccagggaaagga

SEQ ID NO: 500033 - RNA, 19 nt, Homo sapiens
  misc_RNA (1)...(19): siRNA sense strand
gagccaggccagcauccaa

SEQ ID NO: 500034 - RNA, 19 nt, Homo sapiens
  misc_RNA (1)...(19): siRNA sense strand
gguacuccaggaccaauug

SEQ ID NO: 500035 - RNA, 19 nt, Homo sapiens
  misc_RNA (1)...(19): siRNA sense strand
aaaggagacccugggauga

SEQ ID NO: 500036 - RNA, 19 nt, Homo sapiens
  misc_RNA (1)...(19): siRNA sense strand
gagccagggaucccaggaa

SEQ ID NO: 500037 - RNA, 19 nt, Homo sapiens
  misc_RNA (1)...(19): siRNA sense strand
gaaccagggaaaggagaga

SEQ ID NO: 500038 - RNA, 19 nt, Homo sapiens
  misc_RNA (1)...(19): siRNA sense strand
gauuacaauggaaacauca

SEQ ID NO: 500039 - RNA, 19 nt, Homo sapiens
  misc_RNA (1)...(19): siRNA sense strand
ggucaaccaggaacuagag

SEQ ID NO: 500040 - RNA, 19 nt, Homo sapiens
  misc_RNA (1)...(19): siRNA sense strand
aaggagagaugguggauua

SEQ ID NO: 500041 - RNA, 19 nt, Homo sapiens
  misc_RNA (1)...(19): siRNA sense strand
cagcugggcuuccugguuu

SEQ ID NO: 500042 - RNA, 19 nt, Homo sapiens
  misc_RNA (1)...(19): siRNA sense strand
ccaaagacaucuccaggau

SEQ ID NO: 500043 - RNA, 19 nt, Homo sapiens
  misc_RNA (1)...(19): siRNA sense strand
gagagaugguggauuacaa

SEQ ID NO: 500044 - RNA, 19 nt, Homo sapiens
  misc_RNA (1)...(19): siRNA sense strand
aaagggaccucgcgguaaa

SEQ ID NO: 500045 - RNA, 19 nt, Homo sapiens
  misc_RNA (1)...(19): siRNA sense strand
gaugguggauuacaaugga

SEQ ID NO: 500046 - RNA, 19 nt, Homo sapiens
  misc_RNA (1)...(19): siRNA sense strand
ggauuacaauggaaacauc

SEQ ID NO: 500047 - RNA, 19 nt, Homo sapiens
  misc_RNA (1)...(19): siRNA sense strand
caagggagaaccagggaaa

SEQ ID NO: 500048 - RNA, 19 nt, Homo sapiens
  misc_RNA (1)...(19): siRNA sense strand
ggaagcaggacuagaugga

SEQ ID NO: 500049 - RNA, 19 nt, Homo sapiens
  misc_RNA (1)...(19): siRNA sense strand
caaggcugcuggaacaagu

SEQ ID NO: 500050 - RNA, 19 nt, Homo sapiens
  misc_RNA (1)...(19): siRNA sense strand
gggagaagcaggugucgau

SEQ ID NO: 500051 - RNA, 19 nt, Homo sapiens
  misc_RNA (1)...(19): siRNA sense strand
ggagaacagggaccagaug

SEQ ID NO: 500052 - RNA, 19 nt, Homo sapiens
  misc_RNA (1)...(19): siRNA sense strand
acaauggaaacaucaauga

SEQ ID NO: 500053 - RNA, 19 nt, Homo sapiens
  misc_RNA (1)...(19): siRNA sense strand
gaaaggagagaugguggau

SEQ ID NO: 500054 - RNA, 19 nt, Homo sapiens
  misc_RNA (1)...(19): siRNA sense strand
cuagagguuucccuggauu

SEQ ID NO: 500055 - RNA, 19 nt, Homo sapiens
  misc_RNA (1)...(19): siRNA sense strand
gcaaauggagacggcuauu

SEQ ID NO: 500056 - RNA, 19 nt, Homo sapiens
  misc_RNA (1)...(19): siRNA sense strand
gaaaggcuuccagggagaa

SEQ ID NO: 500057 - RNA, 19 nt, Homo sapiens
  misc_RNA (1)...(19): siRNA sense strand
gcagcugggcuuccugguu

SEQ ID NO: 500058 - RNA, 19 nt, Homo sapiens
  misc_RNA (1)...(19): siRNA sense strand
ggagagaugguggauuaca

SEQ ID NO: 500059 - RNA, 19 nt, Homo sapiens
  misc_RNA (1)...(19): siRNA sense strand
gaugcuggcaacuccauug

SEQ ID NO: 500060 - RNA, 19 nt, Homo sapiens
  misc_RNA (1)...(19): siRNA sense strand
gcguggagcagcuggagaa

SEQ ID NO: 500061 - RNA, 19 nt, Homo sapiens
  misc_RNA (1)...(19): siRNA sense strand
uggagcagcuggagaacag

SEQ ID NO: 500062 - RNA, 19 nt, Homo sapiens
  misc_RNA (1)...(19): siRNA sense strand
ggauuuccgggucccauug

SEQ ID NO: 500063 - RNA, 19 nt, Homo sapiens
  misc_RNA (1)...(19): siRNA sense strand
gagaugguggauuacaaug

SEQ ID NO: 500064 - RNA, 19 nt, Homo sapiens
  misc_RNA (1)...(19): siRNA sense strand
uagcggagcgcacccacaa

SEQ ID NO: 500065 - RNA, 19 nt, Homo sapiens
  misc_RNA (1)...(19): siRNA sense strand
gggagaaccagggaaagga

SEQ ID NO: 500066 - RNA, 19 nt, Homo sapiens
  misc_RNA (1)...(19): siRNA sense strand
gagccaggccagcauccaa

SEQ ID NO: 500067 - RNA, 19 nt, Homo sapiens
  misc_RNA (1)...(19): siRNA sense strand
gguacuccaggaccaauug

SEQ ID NO: 500068 - RNA, 19 nt, Homo sapiens
  misc_RNA (1)...(19): siRNA sense strand
aaaggagacccugggauga

SEQ ID NO: 500069 - RNA, 19 nt, Homo sapiens
  misc_RNA (1)...(19): siRNA sense strand
gagccagggaucccaggaa

SEQ ID NO: 500070 - RNA, 19 nt, Homo sapiens
  misc_RNA (1)...(19): siRNA sense strand
gaaccagggaaaggagaga

SEQ ID NO: 500071 - RNA, 19 nt, Homo sapiens
  misc_RNA (1)...(19): siRNA sense strand
gauuacaauggaaacauca

SEQ ID NO: 500072 - RNA, 19 nt, Homo sapiens
  misc_RNA (1)...(19): siRNA sense strand
ggucaaccaggaacuagag

SEQ ID NO: 500073 - RNA, 19 nt, Homo sapiens
  misc_RNA (1)...(19): siRNA sense strand
aaggagagaugguggauua

SEQ ID NO: 500074 - RNA, 19 nt, Homo sapiens
  misc_RNA (1)...(19): siRNA sense strand
cagcugggcuuccugguuu

SEQ ID NO: 500075 - RNA, 19 nt, Homo sapiens
  misc_RNA (1)...(19): siRNA sense strand
ccaaagacaucuccaggau

SEQ ID NO: 500076 - RNA, 19 nt, Homo sapiens
  misc_RNA (1)...(19): siRNA sense strand
gagagaugguggauuacaa

SEQ ID NO: 500077 - RNA, 19 nt, Homo sapiens
  misc_RNA (1)...(19): siRNA sense strand
aaagggaccucgcgguaaa

SEQ ID NO: 500078 - RNA, 19 nt, Homo sapiens
  misc_RNA (1)...(19): siRNA sense strand
gaugguggauuacaaugga

SEQ ID NO: 500079 - RNA, 19 nt, Homo sapiens
  misc_RNA (1)...(19): siRNA sense strand
ggauuacaauggaaacauc

SEQ ID NO: 500080 - RNA, 19 nt, Homo sapiens
  misc_RNA (1)...(19): siRNA sense strand
caagggagaaccagggaaa

SEQ ID NO: 500081 - RNA, 19 nt, Homo sapiens
  misc_RNA (1)...(19): siRNA sense strand
ggaagcaggacuagaugga

SEQ ID NO: 500082 - RNA, 19 nt, Homo sapiens
  misc_RNA (1)...(19): siRNA sense strand
caaggcugcuggaacaagu

SEQ ID NO: 500083 - RNA, 19 nt, Homo sapiens
  misc_RNA (1)...(19): siRNA sense strand
gggagaagcaggugucgau

SEQ ID NO: 500084 - RNA, 19 nt, Homo sapiens
  misc_RNA (1)...(19): siRNA sense strand
ggagaacagggaccagaug

SEQ ID NO: 500085 - RNA, 19 nt, Homo sapiens
  misc_RNA (1)...(19): siRNA sense strand
acaauggaaacaucaauga

SEQ ID NO: 500086 - RNA, 19 nt, Homo sapiens
  misc_RNA (1)...(19): siRNA sense strand
gaaaggagagaugguggau

SEQ ID NO: 500087 - RNA, 19 nt, Homo sapiens
  misc_RNA (1)...(19): siRNA sense strand
cuagagguuucccuggauu

SEQ ID NO: 500088 - RNA, 19 nt, Homo sapiens
  misc_RNA (1)...(19): siRNA sense strand
gcaaauggagacggcuauu

SEQ ID NO: 500089 - RNA, 19 nt, Homo sapiens
  misc_RNA (1)...(19): siRNA sense strand
gaaaggcuuccagggagaa

SEQ ID NO: 500090 - RNA, 19 nt, Homo sapiens
  misc_RNA (1)...(19): siRNA sense strand
gcagcugggcuuccugguu

SEQ ID NO: 500091 - RNA, 19 nt, Homo sapiens
  misc_RNA (1)...(19): siRNA sense strand
ggagagaugguggauuaca

SEQ ID NO: 500092 - RNA, 19 nt, Homo sapiens
  misc_RNA (1)...(19): siRNA sense strand
gaugcuggcaacuccauug

SEQ ID NO: 500093 - RNA, 19 nt, Homo sapiens
  misc_RNA (1)...(19): siRNA sense strand
gcguggagcagcuggagaa

SEQ ID NO: 500094 - RNA, 19 nt, Homo sapiens
  misc_RNA (1)...(19): siRNA sense strand
uggagcagcuggagaacag

SEQ ID NO: 500095 - RNA, 19 nt, Homo sapiens
  misc_RNA (1)...(19): siRNA sense strand
ggauuuccgggucccauug

SEQ ID NO: 500096 - RNA, 19 nt, Homo sapiens
  misc_RNA (1)...(19): siRNA sense strand
gagaugguggauuacaaug

SEQ ID NO: 500097 - RNA, 19 nt, Homo sapiens
  misc_RNA (1)...(19): siRNA sense strand
uagcggagcgcacccacaa

SEQ ID NO: 500098 - RNA, 19 nt, Homo sapiens
  misc_RNA (1)...(19): siRNA sense strand
gggagaaccagggaaagga

SEQ ID NO: 500099 - RNA, 19 nt, Homo sapiens
  misc_RNA (1)...(19): siRNA sense strand
gagccaggccagcauccaa

SEQ ID NO: 500100 - RNA, 19 nt, Homo sapiens
  misc_RNA (1)...(19): siRNA sense strand
gguacuccaggaccaauug

SEQ ID NO: 500101 - RNA, 19 nt, Homo sapiens
  misc_RNA (1)...(19): siRNA sense strand
aaaggagacccugggauga

SEQ ID NO: 500102 - RNA, 19 nt, Homo sapiens
  misc_RNA (1)...(19): siRNA sense strand
gagccagggaucccaggaa

SEQ ID NO: 500103 - RNA, 19 nt, Homo sapiens
  misc_RNA (1)...(19): siRNA sense strand
gaaccagggaaaggagaga

SEQ ID NO: 500104 - RNA, 19 nt, Homo sapiens
  misc_RNA (1)...(19): siRNA sense strand
gauuacaauggaaacauca

SEQ ID NO: 500105 - RNA, 19 nt, Homo sapiens
  misc_RNA (1)...(19): siRNA sense strand
ggucaaccaggaacuagag

SEQ ID NO: 500106 - RNA, 19 nt, Homo sapiens
  misc_RNA (1)...(19): siRNA sense strand
aaggagagaugguggauua

SEQ ID NO: 500107 - RNA, 19 nt, Homo sapiens
  misc_RNA (1)...(19): siRNA sense strand
cagcugggcuuccugguuu

SEQ ID NO: 500108 - RNA, 19 nt, Homo sapiens
  misc_RNA (1)...(19): siRNA sense strand
ccaaagacaucuccaggau

SEQ ID NO: 500109 - RNA, 19 nt, Homo sapiens
  misc_RNA (1)...(19): siRNA sense strand
gagagaugguggauuacaa

SEQ ID NO: 500110 - RNA, 19 nt, Homo sapiens
  misc_RNA (1)...(19): siRNA sense strand
aaagggaccucgcgguaaa

SEQ ID NO: 500111 - RNA, 19 nt, Homo sapiens
  misc_RNA (1)...(19): siRNA sense strand
gaugguggauuacaaugga

SEQ ID NO: 500112 - RNA, 19 nt, Homo sapiens
  misc_RNA (1)...(19): siRNA sense strand
ggauuacaauggaaacauc

SEQ ID NO: 500113 - RNA, 19 nt, Homo sapiens
  misc_RNA (1)...(19): siRNA sense strand
caagggagaaccagggaaa

SEQ ID NO: 500114 - RNA, 19 nt, Homo sapiens
  misc_RNA (1)...(19): siRNA sense strand
ggaagcaggacuagaugga

SEQ ID NO: 500115 - RNA, 19 nt, Homo sapiens
  misc_RNA (1)...(19): siRNA sense strand
caaggcugcuggaacaagu

SEQ ID NO: 500116 - RNA, 19 nt, Homo sapiens
  misc_RNA (1)...(19): siRNA sense strand
gggagaagcaggugucgau

SEQ ID NO: 500117 - RNA, 19 nt, Homo sapiens
  misc_RNA (1)...(19): siRNA sense strand
ggagaacagggaccagaug

SEQ ID NO: 500118 - RNA, 19 nt, Homo sapiens
  misc_RNA (1)...(19): siRNA sense strand
acaauggaaacaucaauga

SEQ ID NO: 500119 - RNA, 19 nt, Homo sapiens
  misc_RNA (1)...(19): siRNA sense strand
gaaaggagagaugguggau

SEQ ID NO: 500120 - RNA, 19 nt, Homo sapiens
  misc_RNA (1)...(19): siRNA sense strand
cuagagguuucccuggauu

SEQ ID NO: 500121 - RNA, 19 nt, Homo sapiens
  misc_RNA (1)...(19): siRNA sense strand
gcaaauggagacggcuauu

SEQ ID NO: 500122 - RNA, 19 nt, Homo sapiens
  misc_RNA (1)...(19): siRNA sense strand
gaaaggcuuccagggagaa

SEQ ID NO: 500123 - RNA, 19 nt, Homo sapiens
  misc_RNA (1)...(19): siRNA sense strand
gcagcugggcuuccugguu

SEQ ID NO: 500124 - RNA, 19 nt, Homo sapiens
  misc_RNA (1)...(19): siRNA sense strand
ggagagaugguggauuaca

SEQ ID NO: 500125 - RNA, 19 nt, Homo sapiens
  misc_RNA (1)...(19): siRNA sense strand
gaugcuggcaacuccauug

SEQ ID NO: 500126 - RNA, 19 nt, Homo sapiens
  misc_RNA (1)...(19): siRNA sense strand
gcguggagcagcuggagaa

SEQ ID NO: 500127 - RNA, 19 nt, Homo sapiens
  misc_RNA (1)...(19): siRNA sense strand
uggagcagcuggagaacag

SEQ ID NO: 500128 - RNA, 19 nt, Homo sapiens
  misc_RNA (1)...(19): siRNA sense strand
ggauuuccgggucccauug

SEQ ID NO: 500129 - RNA, 19 nt, Homo sapiens
  misc_RNA (1)...(19): siRNA sense strand
gagaugguggauuacaaug

SEQ ID NO: 500130 - RNA, 19 nt, Homo sapiens
  misc_RNA (1)...(19): siRNA sense strand
uagcggagcgcacccacaa

SEQ ID NO: 500131 - RNA, 19 nt, Homo sapiens
  misc_RNA (1)...(19): siRNA sense strand
gggagaaccagggaaagga

SEQ ID NO: 500132 - RNA, 19 nt, Homo sapiens
  misc_RNA (1)...(19): siRNA sense strand
gagccaggccagcauccaa

SEQ ID NO: 500133 - RNA, 19 nt, Homo sapiens
  misc_RNA (1)...(19): siRNA sense strand
gguacuccaggaccaauug

SEQ ID NO: 500134 - RNA, 19 nt, Homo sapiens
  misc_RNA (1)...(19): siRNA sense strand
aaaggagacccugggauga

SEQ ID NO: 500135 - RNA, 19 nt, Homo sapiens
  misc_RNA (1)...(19): siRNA sense strand
gagccagggaucccaggaa

SEQ ID NO: 500136 - RNA, 19 nt, Homo sapiens
  misc_RNA (1)...(19): siRNA sense strand
gaaccagggaaaggagaga

SEQ ID NO: 500137 - RNA, 19 nt, Homo sapiens
  misc_RNA (1)...(19): siRNA sense strand
gauuacaauggaaacauca

SEQ ID NO: 500138 - RNA, 19 nt, Homo sapiens
  misc_RNA (1)...(19): siRNA sense strand
ggucaaccaggaacuagag

SEQ ID NO: 500139 - RNA, 19 nt, Homo sapiens
  misc_RNA (1)...(19): siRNA sense strand
aaggagagaugguggauua

SEQ ID NO: 500140 - RNA, 19 nt, Homo sapiens
  misc_RNA (1)...(19): siRNA sense strand
cagcugggcuuccugguuu

SEQ ID NO: 500141 - RNA, 19 nt, Homo sapiens
  misc_RNA (1)...(19): siRNA sense strand
ccaaagacaucuccaggau

SEQ ID NO: 500142 - RNA, 19 nt, Homo sapiens
  misc_RNA (1)...(19): siRNA sense strand
gagagaugguggauuacaa

SEQ ID NO: 500143 - RNA, 19 nt, Homo sapiens
  misc_RNA (1)...(19): siRNA sense strand
aaagggaccucgcgguaaa

SEQ ID NO: 500144 - RNA, 19 nt, Homo sapiens
  misc_RNA (1)...(19): siRNA sense strand
gaugguggauuacaaugga

SEQ ID NO: 500145 - RNA, 19 nt, Homo sapiens
  misc_RNA (1)...(19): siRNA sense strand
ggauuacaauggaaacauc

SEQ ID NO: 500146 - RNA, 19 nt, Homo sapiens
  misc_RNA (1)...(19): siRNA sense strand
caagggagaaccagggaaa

SEQ ID NO: 500147 - RNA, 19 nt, Homo sapiens
  misc_RNA (1)...(19): siRNA sense strand
ggaagcaggacuagaugga

SEQ ID NO: 500148 - RNA, 19 nt, Homo sapiens
  misc_RNA (1)...(19): siRNA sense strand
caaggcugcuggaacaagu

SEQ ID NO: 500149 - RNA, 19 nt, Homo sapiens
  misc_RNA (1)...(19): siRNA sense strand
gggagaagcaggugucgau

SEQ ID NO: 500150 - RNA, 19 nt, Homo sapiens
  misc_RNA (1)...(19): siRNA sense strand
ggagaacagggaccagaug

SEQ ID NO: 500151 - RNA, 19 nt, Homo sapiens
  misc_RNA (1)...(19): siRNA sense strand
acaauggaaacaucaauga

SEQ ID NO: 500152 - RNA, 19 nt, Homo sapiens
  misc_RNA (1)...(19): siRNA sense strand
gaaaggagagaugguggau

SEQ ID NO: 500153 - RNA, 19 nt, Homo sapiens
  misc_RNA (1)...(19): siRNA sense strand
cuagagguuucccuggauu

SEQ ID NO: 500154 - RNA, 19 nt, Homo sapiens
  misc_RNA (1)...(19): siRNA sense strand
gcaaauggagacggcuauu

SEQ ID NO: 500155 - RNA, 19 nt, Homo sapiens
  misc_RNA (1)...(19): siRNA sense strand
gaaaggcuuccagggagaa

SEQ ID NO: 500156 - RNA, 19 nt, Homo sapiens
  misc_RNA (1)...(19): siRNA sense strand
gcagcugggcuuccugguu

SEQ ID NO: 500157 - RNA, 19 nt, Homo sapiens
  misc_RNA (1)...(19): siRNA sense strand
ggagagaugguggauuaca

SEQ ID NO: 500158 - RNA, 19 nt, Homo sapiens
  misc_RNA (1)...(19): siRNA sense strand
gaugcuggcaacuccauug

SEQ ID NO: 500159 - RNA, 19 nt, Homo sapiens
  misc_RNA (1)...(19): siRNA sense strand
gcguggagcagcuggagaa

SEQ ID NO: 500160 - RNA, 19 nt, Homo sapiens
  misc_RNA (1)...(19): siRNA sense strand
uggagcagcuggagaacag

SEQ ID NO: 500161 - RNA, 19 nt, Homo sapiens
  misc_RNA (1)...(19): siRNA sense strand
ggauuuccgggucccauug

SEQ ID NO: 500162 - RNA, 19 nt, Homo sapiens
  misc_RNA (1)...(19): siRNA sense strand
gagaugguggauuacaaug

SEQ ID NO: 500163 - RNA, 19 nt, Homo sapiens
  misc_RNA (1)...(19): siRNA sense strand
uagcggagcgcacccacaa

SEQ ID NO: 500164 - RNA, 19 nt, Homo sapiens
  misc_RNA (1)...(19): siRNA sense strand
gggagaaccagggaaagga

SEQ ID NO: 500165 - RNA, 19 nt, Homo sapiens
  misc_RNA (1)...(19): siRNA sense strand
gagccaggccagcauccaa

SEQ ID NO: 500166 - RNA, 19 nt, Homo sapiens
  misc_RNA (1)...(19): siRNA sense strand
gguacuccaggaccaauug

SEQ ID NO: 500167 - RNA, 19 nt, Homo sapiens
  misc_RNA (1)...(19): siRNA sense strand
aaaggagacccugggauga

SEQ ID NO: 500168 - RNA, 19 nt, Homo sapiens
  misc_RNA (1)...(19): siRNA sense strand
gagccagggaucccaggaa

SEQ ID NO: 500169 - RNA, 19 nt, Homo sapiens
  misc_RNA (1)...(19): siRNA sense strand
gaaccagggaaaggagaga

SEQ ID NO: 500170 - RNA, 19 nt, Homo sapiens
  misc_RNA (1)...(19): siRNA sense strand
gauuacaauggaaacauca

SEQ ID NO: 500171 - RNA, 19 nt, Homo sapiens
  misc_RNA (1)...(19): siRNA sense strand
ggucaaccaggaacuagag

SEQ ID NO: 500172 - RNA, 19 nt, Homo sapiens
  misc_RNA (1)...(19): siRNA sense strand
aaggagagaugguggauua

SEQ ID NO: 500173 - RNA, 19 nt, Homo sapiens
  misc_RNA (1)...(19): siRNA sense strand
cagcugggcuuccugguuu

SEQ ID NO: 500174 - RNA, 19 nt, Homo sapiens
  misc_RNA (1)...(19): siRNA sense strand
ccaaagacaucuccaggau

SEQ ID NO: 500175 - RNA, 19 nt, Homo sapiens
  misc_RNA (1)...(19): siRNA sense strand
gagagaugguggauuacaa

SEQ ID NO: 500176 - RNA, 19 nt, Homo sapiens
  misc_RNA (1)...(19): siRNA sense strand
aaagggaccucgcgguaaa

SEQ ID NO: 500177 - RNA, 19 nt, Homo sapiens
  misc_RNA (1)...(19): siRNA sense strand
gaugguggauuacaaugga

SEQ ID NO: 500178 - RNA, 19 nt, Homo sapiens
  misc_RNA (1)...(19): siRNA sense strand
ggauuacaauggaaacauc

SEQ ID NO: 500179 - RNA, 19 nt, Homo sapiens
  misc_RNA (1)...(19): siRNA sense strand
caagggagaaccagggaaa

SEQ ID NO: 500180 - RNA, 19 nt, Homo sapiens
  misc_RNA (1)...(19): siRNA sense strand
ggaagcaggacuagaugga

SEQ ID NO: 500181 - RNA, 19 nt, Homo sapiens
  misc_RNA (1)...(19): siRNA sense strand
caaggcugcuggaacaagu

SEQ ID NO: 500182 - RNA, 19 nt, Homo sapiens
  misc_RNA (1)...(19): siRNA sense strand
gggagaagcaggugucgau

SEQ ID NO: 500183 - RNA, 19 nt, Homo sapiens
  misc_RNA (1)...(19): siRNA sense strand
ggagaacagggaccagaug

SEQ ID NO: 500184 - RNA, 19 nt, Homo sapiens
  misc_RNA (1)...(19): siRNA sense strand
acaauggaaacaucaauga

SEQ ID NO: 500185 - RNA, 19 nt, Homo sapiens
  misc_RNA (1)...(19): siRNA sense strand
gaaaggagagaugguggau

SEQ ID NO: 500186 - RNA, 19 nt, Homo sapiens
  misc_RNA (1)...(19): siRNA sense strand
cuagagguuucccuggauu

SEQ ID NO: 500187 - RNA, 19 nt, Homo sapiens
  misc_RNA (1)...(19): siRNA sense strand
gcaaauggagacggcuauu

SEQ ID NO: 500188 - RNA, 19 nt, Homo sapiens
  misc_RNA (1)...(19): siRNA sense strand
gaaaggcuuccagggagaa

SEQ ID NO: 500189 - RNA, 19 nt, Homo sapiens
  misc_RNA (1)...(19): siRNA sense strand
gcagcugggcuuccugguu

SEQ ID NO: 500190 - RNA, 19 nt, Homo sapiens
  misc_RNA (1)...(19): siRNA sense strand
ggagagaugguggauuaca

SEQ ID NO: 500191 - RNA, 19 nt, Homo sapiens
  misc_RNA (1)...(19): siRNA sense strand
gaugcuggcaacuccauug

SEQ ID NO: 500192 - RNA, 19 nt, Homo sapiens
  misc_RNA (1)...(19): siRNA sense strand
gcguggagcagcuggagaa

SEQ ID NO: 500193 - RNA, 19 nt, Homo sapiens
  misc_RNA (1)...(19): siRNA sense strand
uggagcagcuggagaacag

SEQ ID NO: 500194 - RNA, 19 nt, Homo sapiens
  misc_RNA (1)...(19): siRNA sense strand
ggauuuccgggucccauug

SEQ ID NO: 500195 - RNA, 19 nt, Homo sapiens
  misc_RNA (1)...(19): siRNA sense strand
gagaugguggauuacaaug

SEQ ID NO: 500196 - RNA, 19 nt, Homo sapiens
  misc_RNA (1)...(19): siRNA sense strand
uagcggagcgcacccacaa

SEQ ID NO: 500197 - RNA, 19 nt, Homo sapiens
  misc_RNA (1)...(19): siRNA sense strand
gggagaaccagggaaagga

SEQ ID NO: 500198 - RNA, 19 nt, Homo sapiens
  misc_RNA (1)...(19): siRNA sense strand
gagccaggccagcauccaa

SEQ ID NO: 500199 - RNA, 19 nt, Homo sapiens
  misc_RNA (1)...(19): siRNA sense strand
gguacuccaggaccaauug

SEQ ID NO: 500200 - RNA, 19 nt, Homo sapiens
  misc_RNA (1)...(19): siRNA sense strand
aaaggagacccugggauga

SEQ ID NO: 500201 - RNA, 19 nt, Homo sapiens
  misc_RNA (1)...(19): siRNA sense strand
gagccagggaucccaggaa

SEQ ID NO: 500202 - RNA, 19 nt, Homo sapiens
  misc_RNA (1)...(19): siRNA sense strand
gaaccagggaaaggagaga

SEQ ID NO: 500203 - RNA, 19 nt, Homo sapiens
  misc_RNA (1)...(19): siRNA sense strand
gauuacaauggaaacauca

SEQ ID NO: 500204 - RNA, 19 nt, Homo sapiens
  misc_RNA (1)...(19): siRNA sense strand
ggucaaccaggaacuagag

SEQ ID NO: 500205 - RNA, 19 nt, Homo sapiens
  misc_RNA (1)...(19): siRNA sense strand
aaggagagaugguggauua

SEQ ID NO: 500206 - RNA, 19 nt, Homo sapiens
  misc_RNA (1)...(19): siRNA sense strand
cagcugggcuuccugguuu

SEQ ID NO: 500207 - RNA, 19 nt, Homo sapiens
  misc_RNA (1)...(19): siRNA sense strand
ccaaagacaucuccaggau

SEQ ID NO: 500208 - RNA, 19 nt, Homo sapiens
  misc_RNA (1)...(19): siRNA sense strand
gagagaugguggauuacaa

SEQ ID NO: 500209 - RNA, 19 nt, Homo sapiens
  misc_RNA (1)...(19): siRNA sense strand
aaagggaccucgcgguaaa

SEQ ID NO: 500210 - RNA, 19 nt, Homo sapiens
  misc_RNA (1)...(19): siRNA sense strand
gaugguggauuacaaugga

SEQ ID NO: 500211 - RNA, 19 nt, Homo sapiens
  misc_RNA (1)...(19): siRNA sense strand
ggauuacaauggaaacauc

SEQ ID NO: 500212 - RNA, 19 nt, Homo sapiens
  misc_RNA (1)...(19): siRNA sense strand
caagggagaaccagggaaa

SEQ ID NO: 500213 - RNA, 19 nt, Homo sapiens
  misc_RNA (1)...(19): siRNA sense strand
ggaagcaggacuagaugga

SEQ ID NO: 500214 - RNA, 19 nt, Homo sapiens
  misc_RNA (1)...(19): siRNA sense strand
caaggcugcuggaacaagu

SEQ ID NO: 500215 - RNA, 19 nt, Homo sapiens
  misc_RNA (1)...(19): siRNA sense strand
gggagaagcaggugucgau

SEQ ID NO: 500216 - RNA, 19 nt, Homo sapiens
  misc_RNA (1)...(19): siRNA sense strand
ggagaacagggaccagaug

SEQ ID NO: 500217 - RNA, 19 nt, Homo sapiens
  misc_RNA (1)...(19): siRNA sense strand
acaauggaaacaucaauga

SEQ ID NO: 500218 - RNA, 19 nt, Homo sapiens
  misc_RNA (1)...(19): siRNA sense strand
gaaaggagagaugguggau

SEQ ID NO: 500219 - RNA, 19 nt, Homo sapiens
  misc_RNA (1)...(19): siRNA sense strand
cuagagguuucccuggauu

SEQ ID NO: 500220 - RNA, 19 nt, Homo sapiens
  misc_RNA (1)...(19): siRNA sense strand
gcaaauggagacggcuauu

SEQ ID NO: 500221 - RNA, 19 nt, Homo sapiens
  misc_RNA (1)...(19): siRNA sense strand
gaaaggcuuccagggagaa

SEQ ID NO: 500222 - RNA, 19 nt, Homo sapiens
  misc_RNA (1)...(19): siRNA sense strand
gcagcugggcuuccugguu

SEQ ID NO: 500223 - RNA, 19 nt, Homo sapiens
  misc_RNA (1)...(19): siRNA sense strand
ggagagaugguggauuaca

SEQ ID NO: 500224 - RNA, 19 nt, Homo sapiens
  misc_RNA (1)...(19): siRNA sense strand
gaugcuggcaacuccauug

SEQ ID NO: 500225 - RNA, 19 nt, Homo sapiens
  misc_RNA (1)...(19): siRNA sense strand
gcguggagcagcuggagaa

SEQ ID NO: 500226 - RNA, 19 nt, Homo sapiens
  misc_RNA (1)...(19): siRNA sense strand
uggagcagcuggagaacag

SEQ ID NO: 500227 - RNA, 19 nt, Homo sapiens
  misc_RNA (1)...(19): siRNA sense strand
ggauuuccgggucccauug

SEQ ID NO: 500228 - RNA, 19 nt, Homo sapiens
  misc_RNA (1)...(19): siRNA sense strand
gagaugguggauuacaaug

SEQ ID NO: 500229 - RNA, 19 nt, Homo sapiens
  misc_RNA (1)...(19): siRNA sense strand
uagcggagcgcacccacaa

SEQ ID NO: 500230 - RNA, 19 nt, Homo sapiens
  misc_RNA (1)...(19): siRNA sense strand
gggagaaccagggaaagga

SEQ ID NO: 500231 - RNA, 19 nt, Homo sapiens
  misc_RNA (1)...(19): siRNA sense strand
gagccaggccagcauccaa

SEQ ID NO: 500232 - RNA, 19 nt, Homo sapiens
  misc_RNA (1)...(19): siRNA sense strand
gguacuccaggaccaauug

SEQ ID NO: 500233 - RNA, 19 nt, Homo sapiens
  misc_RNA (1)...(19): siRNA sense strand
aaaggagacccugggauga

SEQ ID NO: 500234 - RNA, 19 nt, Homo sapiens
  misc_RNA (1)...(19): siRNA sense strand
gagccagggaucccaggaa

SEQ ID NO: 500235 - RNA, 19 nt, Homo sapiens
  misc_RNA (1)...(19): siRNA sense strand
gaaccagggaaaggagaga

SEQ ID NO: 500236 - RNA, 19 nt, Homo sapiens
  misc_RNA (1)...(19): siRNA sense strand
gauuacaauggaaacauca

SEQ ID NO: 500237 - RNA, 19 nt, Homo sapiens
  misc_RNA (1)...(19): siRNA sense strand
ggucaaccaggaacuagag

SEQ ID NO: 500238 - RNA, 19 nt, Homo sapiens
  misc_RNA (1)...(19): siRNA sense strand
aaggagagaugguggauua

SEQ ID NO: 500239 - RNA, 19 nt, Homo sapiens
  misc_RNA (1)...(19): siRNA sense strand
cagcugggcuuccugguuu

SEQ ID NO: 500240 - RNA, 19 nt, Homo sapiens
  misc_RNA (1)...(19): siRNA sense strand
ccaaagacaucuccaggau

SEQ ID NO: 500241 - RNA, 19 nt, Homo sapiens
  misc_RNA (1)...(19): siRNA sense strand
gagagaugguggauuacaa

SEQ ID NO: 500242 - RNA, 19 nt, Homo sapiens
  misc_RNA (1)...(19): siRNA sense strand
aaagggaccucgcgguaaa

SEQ ID NO: 500243 - RNA, 19 nt, Homo sapiens
  misc_RNA (1)...(19): siRNA sense strand
gaugguggauuacaaugga

SEQ ID NO: 500244 - RNA, 19 nt, Homo sapiens
  misc_RNA (1)...(19): siRNA sense strand
ggauuacaauggaaacauc

SEQ ID NO: 500245 - RNA, 19 nt, Homo sapiens
  misc_RNA (1)...(19): siRNA sense strand
caagggagaaccagggaaa

SEQ ID NO: 500246 - RNA, 19 nt, Homo sapiens
  misc_RNA (1)...(19): siRNA sense strand
ggaagcaggacuagaugga

SEQ ID NO: 500247 - RNA, 19 nt, Homo sapiens
  misc_RNA (1)...(19): siRNA sense strand
caaggcugcuggaacaagu

SEQ ID NO: 500248 - RNA, 19 nt, Homo sapiens
  misc_RNA (1)...(19): siRNA sense strand
gggagaagcaggugucgau

SEQ ID NO: 500249 - RNA, 19 nt, Homo sapiens
  misc_RNA (1)...(19): siRNA sense strand
ggagaacagggaccagaug

SEQ ID NO: 500250 - RNA, 19 nt, Homo sapiens
  misc_RNA (1)...(19): siRNA sense strand
acaauggaaacaucaauga

SEQ ID NO: 500251 - RNA, 19 nt, Homo sapiens
  misc_RNA (1)...(19): siRNA sense strand
gaaaggagagaugguggau

SEQ ID NO: 500252 - RNA, 19 nt, Homo sapiens
  misc_RNA (1)...(19): siRNA sense strand
cuagagguuucccuggauu

SEQ ID NO: 500253 - RNA, 19 nt, Homo sapiens
  misc_RNA (1)...(19): siRNA sense strand
gcaaauggagacggcuauu

SEQ ID NO: 500254 - RNA, 19 nt, Homo sapiens
  misc_RNA (1)...(19): siRNA sense strand
gaaaggcuuccagggagaa

SEQ ID NO: 500255 - RNA, 19 nt, Homo sapiens
  misc_RNA (1)...(19): siRNA sense strand
gcagcugggcuuccugguu

SEQ ID NO: 500256 - RNA, 19 nt, Homo sapiens
  misc_RNA (1)...(19): siRNA sense strand
ggagagaugguggauuaca

SEQ ID NO: 500257 - RNA, 19 nt, Homo sapiens
  misc_RNA (1)...(19): siRNA sense strand
gaugcuggcaacuccauug

SEQ ID NO: 500258 - RNA, 19 nt, Homo sapiens
  misc_RNA (1)...(19): siRNA sense strand
gcguggagcagcuggagaa

SEQ ID NO: 500259 - RNA, 19 nt, Homo sapiens
  misc_RNA (1)...(19): siRNA sense strand
uggagcagcuggagaacag

SEQ ID NO: 500260 - RNA, 19 nt, Homo sapiens
  misc_RNA (1)...(19): siRNA sense strand
ggauuuccgggucccauug

SEQ ID NO: 500261 - RNA, 19 nt, Homo sapiens
  misc_RNA (1)...(19): siRNA sense strand
gagaugguggauuacaaug

SEQ ID NO: 500262 - RNA, 19 nt, Homo sapiens
  misc_RNA (1)...(19): siRNA sense strand
uagcggagcgcacccacaa

SEQ ID NO: 500263 - RNA, 19 nt, Homo sapiens
  misc_RNA (1)...(19): siRNA sense strand
gggagaaccagggaaagga

SEQ ID NO: 500264 - RNA, 19 nt, Homo sapiens
  misc_RNA (1)...(19): siRNA sense strand
gagccaggccagcauccaa

SEQ ID NO: 500265 - RNA, 19 nt, Homo sapiens
  misc_RNA (1)...(19): siRNA sense strand
gguacuccaggaccaauug

SEQ ID NO: 500266 - RNA, 19 nt, Homo sapiens
  misc_RNA (1)...(19): siRNA sense strand
aaaggagacccugggauga

SEQ ID NO: 500267 - RNA, 19 nt, Homo sapiens
  misc_RNA (1)...(19): siRNA sense strand
gagccagggaucccaggaa

SEQ ID NO: 500268 - RNA, 19 nt, Homo sapiens
  misc_RNA (1)...(19): siRNA sense strand
gaaccagggaaaggagaga

SEQ ID NO: 500269 - RNA, 19 nt, Homo sapiens
  misc_RNA (1)...(19): siRNA sense strand
gauuacaauggaaacauca

SEQ ID NO: 500270 - RNA, 19 nt, Homo sapiens
  misc_RNA (1)...(19): siRNA sense strand
ggucaaccaggaacuagag

SEQ ID NO: 500271 - RNA, 19 nt, Homo sapiens
  misc_RNA (1)...(19): siRNA sense strand
aaggagagaugguggauua

SEQ ID NO: 500272 - RNA, 19 nt, Homo sapiens
  misc_RNA (1)...(19): siRNA sense strand
cagcugggcuuccugguuu

SEQ ID NO: 500273 - RNA, 19 nt, Homo sapiens
  misc_RNA (1)...(19): siRNA sense strand
ccaaagacaucuccaggau

SEQ ID NO: 500274 - RNA, 19 nt, Homo sapiens
  misc_RNA (1)...(19): siRNA sense strand
gagagaugguggauuacaa

SEQ ID NO: 500275 - RNA, 19 nt, Homo sapiens
  misc_RNA (1)...(19): siRNA sense strand
aaagggaccucgcgguaaa

SEQ ID NO: 500276 - RNA, 19 nt, Homo sapiens
  misc_RNA (1)...(19): siRNA sense strand
gaugguggauuacaaugga

SEQ ID NO: 500277 - RNA, 19 nt, Homo sapiens
  misc_RNA (1)...(19): siRNA sense strand
ggauuacaauggaaacauc

SEQ ID NO: 500278 - RNA, 19 nt, Homo sapiens
  misc_RNA (1)...(19): siRNA sense strand
caagggagaaccagggaaa

SEQ ID NO: 500279 - RNA, 19 nt, Homo sapiens
  misc_RNA (1)...(19): siRNA sense strand
ggaagcaggacuagaugga

SEQ ID NO: 500280 - RNA, 19 nt, Homo sapiens
  misc_RNA (1)...(19): siRNA sense strand
caaggcugcuggaacaagu

SEQ ID NO: 500281 - RNA, 19 nt, Homo sapiens
  misc_RNA (1)...(19): siRNA sense strand
gggagaagcaggugucgau

SEQ ID NO: 500282 - RNA, 19 nt, Homo sapiens
  misc_RNA (1)...(19): siRNA sense strand
ggagaacagggaccagaug

SEQ ID NO: 500283 - RNA, 19 nt, Homo sapiens
  misc_RNA (1)...(19): siRNA sense strand
acaauggaaacaucaauga

SEQ ID NO: 500284 - RNA, 19 nt, Homo sapiens
  misc_RNA (1)...(19): siRNA sense strand
gaaaggagagaugguggau

SEQ ID NO: 500285 - RNA, 19 nt, Homo sapiens
  misc_RNA (1)...(19): siRNA sense strand
cuagagguuucccuggauu

SEQ ID NO: 500286 - RNA, 19 nt, Homo sapiens
  misc_RNA (1)...(19): siRNA sense strand
gcaaauggagacggcuauu

SEQ ID NO: 500287 - RNA, 19 nt, Homo sapiens
  misc_RNA (1)...(19): siRNA sense strand
gaaaggcuuccagggagaa

SEQ ID NO: 500288 - RNA, 19 nt, Homo sapiens
  misc_RNA (1)...(19): siRNA sense strand
gcagcugggcuuccugguu

SEQ ID NO: 500289 - RNA, 19 nt, Homo sapiens
  misc_RNA (1)...(19): siRNA sense strand
ggagagaugguggauuaca

SEQ ID NO: 500290 - RNA, 19 nt, Homo sapiens
  misc_RNA (1)...(19): siRNA sense strand
gaugcuggcaacuccauug

SEQ ID NO: 500291 - RNA, 19 nt, Homo sapiens
  misc_RNA (1)...(19): siRNA sense strand
gcguggagcagcuggagaa

SEQ ID NO: 500292 - RNA, 19 nt, Homo sapiens
  misc_RNA (1)...(19): siRNA sense strand
uggagcagcuggagaacag

SEQ ID NO: 500293 - RNA, 19 nt, Homo sapiens
  misc_RNA (1)...(19): siRNA sense strand
ggauuuccgggucccauug

SEQ ID NO: 500294 - RNA, 19 nt, Homo sapiens
  misc_RNA (1)...(19): siRNA sense strand
gagaugguggauuacaaug

SEQ ID NO: 500295 - RNA, 19 nt, Homo sapiens
  misc_RNA (1)...(19): siRNA sense strand
uagcggagcgcacccacaa

SEQ ID NO: 500296 - RNA, 19 nt, Homo sapiens
  misc_RNA (1)...(19): siRNA sense strand
gggagaaccagggaaagga

SEQ ID NO: 500297 - RNA, 19 nt, Homo sapiens
  misc_RNA (1)...(19): siRNA sense strand
gagccaggccagcauccaa

SEQ ID NO: 500298 - RNA, 19 nt, Homo sapiens
  misc_RNA (1)...(19): siRNA sense strand
gguacuccaggaccaauug

SEQ ID NO: 500299 - RNA, 19 nt, Homo sapiens
  misc_RNA (1)...(19): siRNA sense strand
aaaggagacccugggauga

SEQ ID NO: 500300 - RNA, 19 nt, Homo sapiens
  misc_RNA (1)...(19): siRNA sense strand
gagccagggaucccaggaa

SEQ ID NO: 500301 - RNA, 19 nt, Homo sapiens
  misc_RNA (1)...(19): siRNA sense strand
gaaccagggaaaggagaga

SEQ ID NO: 500302 - RNA, 19 nt, Homo sapiens
  misc_RNA (1)...(19): siRNA sense strand
gauuacaauggaaacauca

SEQ ID NO: 500303 - RNA, 19 nt, Homo sapiens
  misc_RNA (1)...(19): siRNA sense strand
ggucaaccaggaacuagag

SEQ ID NO: 500304 - RNA, 19 nt, Homo sapiens
  misc_RNA (1)...(19): siRNA sense strand
aaggagagaugguggauua

SEQ ID NO: 500305 - RNA, 19 nt, Homo sapiens
  misc_RNA (1)...(19): siRNA sense strand
cagcugggcuuccugguuu

SEQ ID NO: 500306 - RNA, 19 nt, Homo sapiens
  misc_RNA (1)...(19): siRNA sense strand
ccaaagacaucuccaggau

SEQ ID NO: 500307 - RNA, 19 nt, Homo sapiens
  misc_RNA (1)...(19): siRNA sense strand
gagagaugguggauuacaa

SEQ ID NO: 500308 - RNA, 19 nt, Homo sapiens
  misc_RNA (1)...(19): siRNA sense strand
aaagggaccucgcgguaaa

SEQ ID NO: 500309 - RNA, 19 nt, Homo sapiens
  misc_RNA (1)...(19): siRNA sense strand
gaugguggauuacaaugga

SEQ ID NO: 500310 - RNA, 19 nt, Homo sapiens
  misc_RNA (1)...(19): siRNA sense strand
ggauuacaauggaaacauc

SEQ ID NO: 500311 - RNA, 19 nt, Homo sapiens
  misc_RNA (1)...(19): siRNA sense strand
caagggagaaccagggaaa

SEQ ID NO: 500312 - RNA, 19 nt, Homo sapiens
  misc_RNA (1)...(19): siRNA sense strand
ggaagcaggacuagaugga

SEQ ID NO: 500313 - RNA, 19 nt, Homo sapiens
  misc_RNA (1)...(19): siRNA sense strand
caaggcugcuggaacaagu

SEQ ID NO: 500314 - RNA, 19 nt, Homo sapiens
  misc_RNA (1)...(19): siRNA sense strand
gggagaagcaggugucgau

SEQ ID NO: 500315 - RNA, 19 nt, Homo sapiens
  misc_RNA (1)...(19): siRNA sense strand
ggagaacagggaccagaug

SEQ ID NO: 500316 - RNA, 19 nt, Homo sapiens
  misc_RNA (1)...(19): siRNA sense strand
acaauggaaacaucaauga

SEQ ID NO: 500317 - RNA, 19 nt, Homo sapiens
  misc_RNA (1)...(19): siRNA sense strand
gaaaggagagaugguggau

SEQ ID NO: 500318 - RNA, 19 nt, Homo sapiens
  misc_RNA (1)...(19): siRNA sense strand
cuagagguuucccuggauu

SEQ ID NO: 500319 - RNA, 19 nt, Homo sapiens
  misc_RNA (1)...(19): siRNA sense strand
gcaaauggagacggcuauu

SEQ ID NO: 500320 - RNA, 19 nt, Homo sapiens
  misc_RNA (1)...(19): siRNA sense strand
gaaaggcuuccagggagaa

SEQ ID NO: 500321 - RNA, 19 nt, Homo sapiens
  misc_RNA (1)...(19): siRNA sense strand
gcagcugggcuuccugguu

SEQ ID NO: 500322 - RNA, 19 nt, Homo sapiens
  misc_RNA (1)...(19): siRNA sense strand
ggagagaugguggauuaca

SEQ ID NO: 500323 - RNA, 19 nt, Homo sapiens
  misc_RNA (1)...(19): siRNA sense strand
gaugcuggcaacuccauug

SEQ ID NO: 500324 - RNA, 19 nt, Homo sapiens
  misc_RNA (1)...(19): siRNA sense strand
gcguggagcagcuggagaa

SEQ ID NO: 500325 - RNA, 19 nt, Homo sapiens
  misc_RNA (1)...(19): siRNA sense strand
uggagcagcuggagaacag

SEQ ID NO: 500326 - RNA, 19 nt, Homo sapiens
  misc_RNA (1)...(19): siRNA sense strand
ggauuuccgggucccauug

SEQ ID NO: 500327 - RNA, 19 nt, Homo sapiens
  misc_RNA (1)...(19): siRNA sense strand
gagaugguggauuacaaug

SEQ ID NO: 500328 - RNA, 19 nt, Homo sapiens
  misc_RNA (1)...(19): siRNA sense strand
uagcggagcgcacccacaa

SEQ ID NO: 500329 - RNA, 19 nt, Homo sapiens
  misc_RNA (1)...(19): siRNA sense strand
gggagaaccagggaaagga

SEQ ID NO: 500330 - RNA, 19 nt, Homo sapiens
  misc_RNA (1)...(19): siRNA sense strand
gagccaggccagcauccaa

SEQ ID NO: 500331 - RNA, 19 nt, Homo sapiens
  misc_RNA (1)...(19): siRNA sense strand
gguacuccaggaccaauug

SEQ ID NO: 500332 - RNA, 19 nt, Homo sapiens
  misc_RNA (1)...(19): siRNA sense strand
aaaggagacccugggauga

SEQ ID NO: 500333 - RNA, 19 nt, Homo sapiens
  misc_RNA (1)...(19): siRNA sense strand
gagccagggaucccaggaa

SEQ ID NO: 500334 - RNA, 19 nt, Homo sapiens
  misc_RNA (1)...(19): siRNA sense strand
gaaccagggaaaggagaga

SEQ ID NO: 500335 - RNA, 19 nt, Homo sapiens
  misc_RNA (1)...(19): siRNA sense strand
gauuacaauggaaacauca

SEQ ID NO: 500336 - RNA, 19 nt, Homo sapiens
  misc_RNA (1)...(19): siRNA sense strand
ggucaaccaggaacuagag

SEQ ID NO: 500337 - RNA, 19 nt, Homo sapiens
  misc_RNA (1)...(19): siRNA sense strand
aaggagagaugguggauua

SEQ ID NO: 500338 - RNA, 19 nt, Homo sapiens
  misc_RNA (1)...(19): siRNA sense strand
cagcugggcuuccugguuu

SEQ ID NO: 500339 - RNA, 19 nt, Homo sapiens
  misc_RNA (1)...(19): siRNA sense strand
ccaaagacaucuccaggau

SEQ ID NO: 500340 - RNA, 19 nt, Homo sapiens
  misc_RNA (1)...(19): siRNA sense strand
gagagaugguggauuacaa

SEQ ID NO: 500341 - RNA, 19 nt, Homo sapiens
  misc_RNA (1)...(19): siRNA sense strand
aaagggaccucgcgguaaa

SEQ ID NO: 500342 - RNA, 19 nt, Homo sapiens
  misc_RNA (1)...(19): siRNA sense strand
gaugguggauuacaaugga

SEQ ID NO: 500343 - RNA, 19 nt, Homo sapiens
  misc_RNA (1)...(19): siRNA sense strand
ggauuacaauggaaacauc

SEQ ID NO: 500344 - RNA, 19 nt, Homo sapiens
  misc_RNA (1)...(19): siRNA sense strand
gggcgaagauggcuuacca

SEQ ID NO: 500345 - RNA, 19 nt, Homo sapiens
  misc_RNA (1)...(19): siRNA sense strand
caagggagaaccagggaaa

SEQ ID NO: 500346 - RNA, 19 nt, Homo sapiens
  misc_RNA (1)...(19): siRNA sense strand
ggaagcaggacuagaugga

SEQ ID NO: 500347 - RNA, 19 nt, Homo sapiens
  misc_RNA (1)...(19): siRNA sense strand
caaggcugcuggaacaagu

SEQ ID NO: 500348 - RNA, 19 nt, Homo sapiens
  misc_RNA (1)...(19): siRNA sense strand
gggagaagcaggugucgau

SEQ ID NO: 500349 - RNA, 19 nt, Homo sapiens
  misc_RNA (1)...(19): siRNA sense strand
ggagaacagggaccagaug

SEQ ID NO: 500350 - RNA, 19 nt, Homo sapiens
  misc_RNA (1)...(19): siRNA sense strand
acaauggaaacaucaauga

SEQ ID NO: 500351 - RNA, 19 nt, Homo sapiens
  misc_RNA (1)...(19): siRNA sense strand
gaaaggagagaugguggau

SEQ ID NO: 500352 - RNA, 19 nt, Homo sapiens
  misc_RNA (1)...(19): siRNA sense strand
cuagagguuucccuggauu

SEQ ID NO: 500353 - RNA, 19 nt, Homo sapiens
  misc_RNA (1)...(19): siRNA sense strand
gcaaauggagacggcuauu

SEQ ID NO: 500354 - RNA, 19 nt, Homo sapiens
  misc_RNA (1)...(19): siRNA sense strand
gaaaggcuuccagggagaa

SEQ ID NO: 500355 - RNA, 19 nt, Homo sapiens
  misc_RNA (1)...(19): siRNA sense strand
gcagcugggcuuccugguu

SEQ ID NO: 500356 - RNA, 19 nt, Homo sapiens
  misc_RNA (1)...(19): siRNA sense strand
ggagagaugguggauuaca

SEQ ID NO: 500357 - RNA, 19 nt, Homo sapiens
  misc_RNA (1)...(19): siRNA sense strand
gaugcuggcaacuccauug

SEQ ID NO: 500358 - RNA, 19 nt, Homo sapiens
  misc_RNA (1)...(19): siRNA sense strand
gcguggagcagcuggagaa

SEQ ID NO: 500359 - RNA, 19 nt, Homo sapiens
  misc_RNA (1)...(19): siRNA sense strand
uggagcagcuggagaacag

SEQ ID NO: 500360 - RNA, 19 nt, Homo sapiens
  misc_RNA (1)...(19): siRNA sense strand
ggauuuccgggucccauug

SEQ ID NO: 500361 - RNA, 19 nt, Homo sapiens
  misc_RNA (1)...(19): siRNA sense strand
gagaugguggauuacaaug

SEQ ID NO: 500362 - RNA, 19 nt, Homo sapiens
  misc_RNA (1)...(19): siRNA sense strand
uagcggagcgcacccacaa

SEQ ID NO: 500363 - RNA, 19 nt, Homo sapiens
  misc_RNA (1)...(19): siRNA sense strand
gggagaaccagggaaagga

SEQ ID NO: 500364 - RNA, 19 nt, Homo sapiens
  misc_RNA (1)...(19): siRNA sense strand
gagccaggccagcauccaa

SEQ ID NO: 500365 - RNA, 19 nt, Homo sapiens
  misc_RNA (1)...(19): siRNA sense strand
gguacuccaggaccaauug

SEQ ID NO: 500366 - RNA, 19 nt, Homo sapiens
  misc_RNA (1)...(19): siRNA sense strand
aaaggagacccugggauga

SEQ ID NO: 500367 - RNA, 19 nt, Homo sapiens
  misc_RNA (1)...(19): siRNA sense strand
gagccagggaucccaggaa

SEQ ID NO: 500368 - RNA, 19 nt, Homo sapiens
  misc_RNA (1)...(19): siRNA sense strand
gaaccagggaaaggagaga

SEQ ID NO: 500369 - RNA, 19 nt, Homo sapiens
  misc_RNA (1)...(19): siRNA sense strand
gauuacaauggaaacauca

SEQ ID NO: 500370 - RNA, 19 nt, Homo sapiens
  misc_RNA (1)...(19): siRNA sense strand
ggucaaccaggaacuagag

SEQ ID NO: 500371 - RNA, 19 nt, Homo sapiens
  misc_RNA (1)...(19): siRNA sense strand
aaggagagaugguggauua

SEQ ID NO: 500372 - RNA, 19 nt, Homo sapiens
  misc_RNA (1)...(19): siRNA sense strand
cagcugggcuuccugguuu

SEQ ID NO: 500373 - RNA, 19 nt, Homo sapiens
  misc_RNA (1)...(19): siRNA sense strand
ccaaagacaucuccaggau

SEQ ID NO: 500374 - RNA, 19 nt, Homo sapiens
  misc_RNA (1)...(19): siRNA sense strand
gagagaugguggauuacaa

SEQ ID NO: 500375 - RNA, 19 nt, Homo sapiens
  misc_RNA (1)...(19): siRNA sense strand
aaagggaccucgcgguaaa

SEQ ID NO: 500376 - RNA, 19 nt, Homo sapiens
  misc_RNA (1)...(19): siRNA sense strand
gaugguggauuacaaugga

SEQ ID NO: 500377 - RNA, 19 nt, Homo sapiens
  misc_RNA (1)...(19): siRNA sense strand
ggauuacaauggaaacauc

SEQ ID NO: 500378 - RNA, 19 nt, Homo sapiens
  misc_RNA (1)...(19): siRNA sense strand
caagggagaaccagggaaa

SEQ ID NO: 500379 - RNA, 19 nt, Homo sapiens
  misc_RNA (1)...(19): siRNA sense strand
ggaagcaggacuagaugga

SEQ ID NO: 500380 - RNA, 19 nt, Homo sapiens
  misc_RNA (1)...(19): siRNA sense strand
caaggcugcuggaacaagu

SEQ ID NO: 500381 - RNA, 19 nt, Homo sapiens
  misc_RNA (1)...(19): siRNA sense strand
gggagaagcaggugucgau

SEQ ID NO: 500382 - RNA, 19 nt, Homo sapiens
  misc_RNA (1)...(19): siRNA sense strand
ggagaacagggaccagaug

SEQ ID NO: 500383 - RNA, 19 nt, Homo sapiens
  misc_RNA (1)...(19): siRNA sense strand
acaauggaaacaucaauga

SEQ ID NO: 500384 - RNA, 19 nt, Homo sapiens
  misc_RNA (1)...(19): siRNA sense strand
gaaaggagagaugguggau

SEQ ID NO: 500385 - RNA, 19 nt, Homo sapiens
  misc_RNA (1)...(19): siRNA sense strand
cuagagguuucccuggauu

SEQ ID NO: 500386 - RNA, 19 nt, Homo sapiens
  misc_RNA (1)...(19): siRNA sense strand
gcaaauggagacggcuauu

SEQ ID NO: 500387 - RNA, 19 nt, Homo sapiens
  misc_RNA (1)...(19): siRNA sense strand
gaaaggcuuccagggagaa

SEQ ID NO: 500388 - RNA, 19 nt, Homo sapiens
  misc_RNA (1)...(19): siRNA sense strand
gcagcugggcuuccugguu

SEQ ID NO: 500389 - RNA, 19 nt, Homo sapiens
  misc_RNA (1)...(19): siRNA sense strand
ggagagaugguggauuaca

SEQ ID NO: 500390 - RNA, 19 nt, Homo sapiens
  misc_RNA (1)...(19): siRNA sense strand
gaugcuggcaacuccauug

SEQ ID NO: 500391 - RNA, 19 nt, Homo sapiens
  misc_RNA (1)...(19): siRNA sense strand
gcguggagcagcuggagaa

SEQ ID NO: 500392 - RNA, 19 nt, Homo sapiens
  misc_RNA (1)...(19): siRNA sense strand
uggagcagcuggagaacag

SEQ ID NO: 500393 - RNA, 19 nt, Homo sapiens
  misc_RNA (1)...(19): siRNA sense strand
ggauuuccgggucccauug

SEQ ID NO: 500394 - RNA, 19 nt, Homo sapiens
  misc_RNA (1)...(19): siRNA sense strand
gagaugguggauuacaaug

SEQ ID NO: 500395 - RNA, 19 nt, Homo sapiens
  misc_RNA (1)...(19): siRNA sense strand
uagcggagcgcacccacaa

SEQ ID NO: 500396 - RNA, 19 nt, Homo sapiens
  misc_RNA (1)...(19): siRNA sense strand
gggagaaccagggaaagga

SEQ ID NO: 500397 - RNA, 19 nt, Homo sapiens
  misc_RNA (1)...(19): siRNA sense strand
gagccaggccagcauccaa

SEQ ID NO: 500398 - RNA, 19 nt, Homo sapiens
  misc_RNA (1)...(19): siRNA sense strand
gguacuccaggaccaauug

SEQ ID NO: 500399 - RNA, 19 nt, Homo sapiens
  misc_RNA (1)...(19): siRNA sense strand
aaaggagacccugggauga

SEQ ID NO: 500400 - RNA, 19 nt, Homo sapiens
  misc_RNA (1)...(19): siRNA sense strand
gagccagggaucccaggaa

SEQ ID NO: 500401 - RNA, 19 nt, Homo sapiens
  misc_RNA (1)...(19): siRNA sense strand
gaaccagggaaaggagaga

SEQ ID NO: 500402 - RNA, 19 nt, Homo sapiens
  misc_RNA (1)...(19): siRNA sense strand
gauuacaauggaaacauca

SEQ ID NO: 500403 - RNA, 19 nt, Homo sapiens
  misc_RNA (1)...(19): siRNA sense strand
ggucaaccaggaacuagag

SEQ ID NO: 500404 - RNA, 19 nt, Homo sapiens
  misc_RNA (1)...(19): siRNA sense strand
aaggagagaugguggauua

SEQ ID NO: 500405 - RNA, 19 nt, Homo sapiens
  misc_RNA (1)...(19): siRNA sense strand
cagcugggcuuccugguuu

SEQ ID NO: 500406 - RNA, 19 nt, Homo sapiens
  misc_RNA (1)...(19): siRNA sense strand
ccaaagacaucuccaggau

SEQ ID NO: 500407 - RNA, 19 nt, Homo sapiens
  misc_RNA (1)...(19): siRNA sense strand
gagagaugguggauuacaa

SEQ ID NO: 500408 - RNA, 19 nt, Homo sapiens
  misc_RNA (1)...(19): siRNA sense strand
aaagggaccucgcgguaaa

SEQ ID NO: 500409 - RNA, 19 nt, Homo sapiens
  misc_RNA (1)...(19): siRNA sense strand
gaugguggauuacaaugga

SEQ ID NO: 500410 - RNA, 19 nt, Homo sapiens
  misc_RNA (1)...(19): siRNA sense strand
ggauuacaauggaaacauc

SEQ ID NO: 500411 - RNA, 19 nt, Homo sapiens
  misc_RNA (1)...(19): siRNA sense strand
caagggagaaccagggaaa

SEQ ID NO: 500412 - RNA, 19 nt, Homo sapiens
  misc_RNA (1)...(19): siRNA sense strand
ggaagcaggacuagaugga

SEQ ID NO: 500413 - RNA, 19 nt, Homo sapiens
  misc_RNA (1)...(19): siRNA sense strand
caaggcugcuggaacaagu

SEQ ID NO: 500414 - RNA, 19 nt, Homo sapiens
  misc_RNA (1)...(19): siRNA sense strand
gggagaagcaggugucgau

SEQ ID NO: 500415 - RNA, 19 nt, Homo sapiens
  misc_RNA (1)...(19): siRNA sense strand
ggagaacagggaccagaug

SEQ ID NO: 500416 - RNA, 19 nt, Homo sapiens
  misc_RNA (1)...(19): siRNA sense strand
acaauggaaacaucaauga

SEQ ID NO: 500417 - RNA, 19 nt, Homo sapiens
  misc_RNA (1)...(19): siRNA sense strand
gaaaggagagaugguggau

SEQ ID NO: 500418 - RNA, 19 nt, Homo sapiens
  misc_RNA (1)...(19): siRNA sense strand
cuagagguuucccuggauu

SEQ ID NO: 500419 - RNA, 19 nt, Homo sapiens
  misc_RNA (1)...(19): siRNA sense strand
gcaaauggagacggcuauu

SEQ ID NO: 500420 - RNA, 19 nt, Homo sapiens
  misc_RNA (1)...(19): siRNA sense strand
gaaaggcuuccagggagaa

SEQ ID NO: 500421 - RNA, 19 nt, Homo sapiens
  misc_RNA (1)...(19): siRNA sense strand
gcagcugggcuuccugguu

SEQ ID NO: 500422 - RNA, 19 nt, Homo sapiens
  misc_RNA (1)...(19): siRNA sense strand
ggagagaugguggauuaca

SEQ ID NO: 500423 - RNA, 19 nt, Homo sapiens
  misc_RNA (1)...(19): siRNA sense strand
gaugcuggcaacuccauug

SEQ ID NO: 500424 - RNA, 19 nt, Homo sapiens
  misc_RNA (1)...(19): siRNA sense strand
gcguggagcagcuggagaa

SEQ ID NO: 500425 - RNA, 19 nt, Homo sapiens
  misc_RNA (1)...(19): siRNA sense strand
uggagcagcuggagaacag

SEQ ID NO: 500426 - RNA, 19 nt, Homo sapiens
  misc_RNA (1)...(19): siRNA sense strand
ggauuuccgggucccauug

SEQ ID NO: 500427 - RNA, 19 nt, Homo sapiens
  misc_RNA (1)...(19): siRNA sense strand
gagaugguggauuacaaug

SEQ ID NO: 500428 - RNA, 19 nt, Homo sapiens
  misc_RNA (1)...(19): siRNA sense strand
uagcggagcgcacccacaa

SEQ ID NO: 500429 - RNA, 19 nt, Homo sapiens
  misc_RNA (1)...(19): siRNA sense strand
gggagaaccagggaaagga

SEQ ID NO: 500430 - RNA, 19 nt, Homo sapiens
  misc_RNA (1)...(19): siRNA sense strand
gagccaggccagcauccaa

SEQ ID NO: 500431 - RNA, 19 nt, Homo sapiens
  misc_RNA (1)...(19): siRNA sense strand
gguacuccaggaccaauug

SEQ ID NO: 500432 - RNA, 19 nt, Homo sapiens
  misc_RNA (1)...(19): siRNA sense strand
aaaggagacccugggauga

SEQ ID NO: 500433 - RNA, 19 nt, Homo sapiens
  misc_RNA (1)...(19): siRNA sense strand
gagccagggaucccaggaa

SEQ ID NO: 500434 - RNA, 19 nt, Homo sapiens
  misc_RNA (1)...(19): siRNA sense strand
gaaccagggaaaggagaga

SEQ ID NO: 500435 - RNA, 19 nt, Homo sapiens
  misc_RNA (1)...(19): siRNA sense strand
gauuacaauggaaacauca

SEQ ID NO: 500436 - RNA, 19 nt, Homo sapiens
  misc_RNA (1)...(19): siRNA sense strand
ggucaaccaggaacuagag

SEQ ID NO: 500437 - RNA, 19 nt, Homo sapiens
  misc_RNA (1)...(19): siRNA sense strand
aaggagagaugguggauua

SEQ ID NO: 500438 - RNA, 19 nt, Homo sapiens
  misc_RNA (1)...(19): siRNA sense strand
cagcugggcuuccugguuu

SEQ ID NO: 500439 - RNA, 19 nt, Homo sapiens
  misc_RNA (1)...(19): siRNA sense strand
ccaaagacaucuccaggau

SEQ ID NO: 500440 - RNA, 19 nt, Homo sapiens
  misc_RNA (1)...(19): siRNA sense strand
gagagaugguggauuacaa

SEQ ID NO: 500441 - RNA, 19 nt, Homo sapiens
  misc_RNA (1)...(19): siRNA sense strand
aaagggaccucgcgguaaa

SEQ ID NO: 500442 - RNA, 19 nt, Homo sapiens
  misc_RNA (1)...(19): siRNA sense strand
gaugguggauuacaaugga

SEQ ID NO: 500443 - RNA, 19 nt, Homo sapiens
  misc_RNA (1)...(19): siRNA sense strand
ggauuacaauggaaacauc

SEQ ID NO: 500444 - RNA, 19 nt, Homo sapiens
  misc_RNA (1)...(19): siRNA sense strand
caagggagaaccagggaaa

SEQ ID NO: 500445 - RNA, 19 nt, Homo sapiens
  misc_RNA (1)...(19): siRNA sense strand
ggaagcaggacuagaugga

SEQ ID NO: 500446 - RNA, 19 nt, Homo sapiens
  misc_RNA (1)...(19): siRNA sense strand
caaggcugcuggaacaagu

SEQ ID NO: 500447 - RNA, 19 nt, Homo sapiens
  misc_RNA (1)...(19): siRNA sense strand
gggagaagcaggugucgau

SEQ ID NO: 500448 - RNA, 19 nt, Homo sapiens
  misc_RNA (1)...(19): siRNA sense strand
ggagaacagggaccagaug

SEQ ID NO: 500449 - RNA, 19 nt, Homo sapiens
  misc_RNA (1)...(19): siRNA sense strand
acaauggaaacaucaauga

SEQ ID NO: 500450 - RNA, 19 nt, Homo sapiens
  misc_RNA (1)...(19): siRNA sense strand
gaaaggagagaugguggau

SEQ ID NO: 500451 - RNA, 19 nt, Homo sapiens
  misc_RNA (1)...(19): siRNA sense strand
cuagagguuucccuggauu

SEQ ID NO: 500452 - RNA, 19 nt, Homo sapiens
  misc_RNA (1)...(19): siRNA sense strand
gcaaauggagacggcuauu

SEQ ID NO: 500453 - RNA, 19 nt, Homo sapiens
  misc_RNA (1)...(19): siRNA sense strand
gaaaggcuuccagggagaa

SEQ ID NO: 500454 - RNA, 19 nt, Homo sapiens
  misc_RNA (1)...(19): siRNA sense strand
gcagcugggcuuccugguu

SEQ ID NO: 500455 - RNA, 19 nt, Homo sapiens
  misc_RNA (1)...(19): siRNA sense strand
ggagagaugguggauuaca

SEQ ID NO: 500456 - RNA, 19 nt, Homo sapiens
  misc_RNA (1)...(19): siRNA sense strand
gaugcuggcaacuccauug

SEQ ID NO: 500457 - RNA, 19 nt, Homo sapiens
  misc_RNA (1)...(19): siRNA sense strand
gcguggagcagcuggagaa

SEQ ID NO: 500458 - RNA, 19 nt, Homo sapiens
  misc_RNA (1)...(19): siRNA sense strand
uggagcagcuggagaacag

SEQ ID NO: 500459 - RNA, 19 nt, Homo sapiens
  misc_RNA (1)...(19): siRNA sense strand
ggauuuccgggucccauug

SEQ ID NO: 500460 - RNA, 19 nt, Homo sapiens
  misc_RNA (1)...(19): siRNA sense strand
gagaugguggauuacaaug

SEQ ID NO: 500461 - RNA, 19 nt, Homo sapiens
  misc_RNA (1)...(19): siRNA sense strand
uagcggagcgcacccacaa

SEQ ID NO: 500462 - RNA, 19 nt, Homo sapiens
  misc_RNA (1)...(19): siRNA sense strand
gggagaaccagggaaagga

SEQ ID NO: 500463 - RNA, 19 nt, Homo sapiens
  misc_RNA (1)...(19): siRNA sense strand
gagccaggccagcauccaa

SEQ ID NO: 500464 - RNA, 19 nt, Homo sapiens
  misc_RNA (1)...(19): siRNA sense strand
gguacuccaggaccaauug

SEQ ID NO: 500465 - RNA, 19 nt, Homo sapiens
  misc_RNA (1)...(19): siRNA sense strand
aaaggagacccugggauga

SEQ ID NO: 500466 - RNA, 19 nt, Homo sapiens
  misc_RNA (1)...(19): siRNA sense strand
gagccagggaucccaggaa

SEQ ID NO: 500467 - RNA, 19 nt, Homo sapiens
  misc_RNA (1)...(19): siRNA sense strand
gaaccagggaaaggagaga

SEQ ID NO: 500468 - RNA, 19 nt, Homo sapiens
  misc_RNA (1)...(19): siRNA sense strand
gauuacaauggaaacauca

SEQ ID NO: 500469 - RNA, 19 nt, Homo sapiens
  misc_RNA (1)...(19): siRNA sense strand
ggucaaccaggaacuagag

SEQ ID NO: 500470 - RNA, 19 nt, Homo sapiens
  misc_RNA (1)...(19): siRNA sense strand
aaggagagaugguggauua

SEQ ID NO: 500471 - RNA, 19 nt, Homo sapiens
  misc_RNA (1)...(19): siRNA sense strand
cagcugggcuuccugguuu

SEQ ID NO: 500472 - RNA, 19 nt, Homo sapiens
  misc_RNA (1)...(19): siRNA sense strand
ccaaagacaucuccaggau

SEQ ID NO: 500473 - RNA, 19 nt, Homo sapiens
  misc_RNA (1)...(19): siRNA sense strand
gagagaugguggauuacaa

SEQ ID NO: 500474 - RNA, 19 nt, Homo sapiens
  misc_RNA (1)...(19): siRNA sense strand
aaagggaccucgcgguaaa

SEQ ID NO: 500475 - RNA, 19 nt, Homo sapiens
  misc_RNA (1)...(19): siRNA sense strand
gaugguggauuacaaugga

SEQ ID NO: 500476 - RNA, 19 nt, Homo sapiens
  misc_RNA (1)...(19): siRNA sense strand
ggauuacaauggaaacauc

SEQ ID NO: 500477 - RNA, 19 nt, Homo sapiens
  misc_RNA (1)...(19): siRNA sense strand
caagggagaaccagggaaa

SEQ ID NO: 500478 - RNA, 19 nt, Homo sapiens
  misc_RNA (1)...(19): siRNA sense strand
ggaagcaggacuagaugga

SEQ ID NO: 500479 - RNA, 19 nt, Homo sapiens
  misc_RNA (1)...(19): siRNA sense strand
caaggcugcuggaacaagu

SEQ ID NO: 500480 - RNA, 19 nt, Homo sapiens
  misc_RNA (1)...(19): siRNA sense strand
gggagaagcaggugucgau

SEQ ID NO: 500481 - RNA, 19 nt, Homo sapiens
  misc_RNA (1)...(19): siRNA sense strand
ggagaacagggaccagaug

SEQ ID NO: 500482 - RNA, 19 nt, Homo sapiens
  misc_RNA (1)...(19): siRNA sense strand
acaauggaaacaucaauga

SEQ ID NO: 500483 - RNA, 19 nt, Homo sapiens
  misc_RNA (1)...(19): siRNA sense strand
gaaaggagagaugguggau

SEQ ID NO: 500484 - RNA, 19 nt, Homo sapiens
  misc_RNA (1)...(19): siRNA sense strand
cuagagguuucccuggauu

SEQ ID NO: 500485 - RNA, 19 nt, Homo sapiens
  misc_RNA (1)...(19): siRNA sense strand
gcaaauggagacggcuauu

SEQ ID NO: 500486 - RNA, 19 nt, Homo sapiens
  misc_RNA (1)...(19): siRNA sense strand
gaaaggcuuccagggagaa

SEQ ID NO: 500487 - RNA, 19 nt, Homo sapiens
  misc_RNA (1)...(19): siRNA sense strand
gcagcugggcuuccugguu

SEQ ID NO: 500488 - RNA, 19 nt, Homo sapiens
  misc_RNA (1)...(19): siRNA sense strand
ggagagaugguggauuaca

SEQ ID NO: 500489 - RNA, 19 nt, Homo sapiens
  misc_RNA (1)...(19): siRNA sense strand
gaugcuggcaacuccauug

SEQ ID NO: 500490 - RNA, 19 nt, Homo sapiens
  misc_RNA (1)...(19): siRNA sense strand
gcguggagcagcuggagaa

SEQ ID NO: 500491 - RNA, 19 nt, Homo sapiens
  misc_RNA (1)...(19): siRNA sense strand
uggagcagcuggagaacag

SEQ ID NO: 500492 - RNA, 19 nt, Homo sapiens
  misc_RNA (1)...(19): siRNA sense strand
ggauuuccgggucccauug

SEQ ID NO: 500493 - RNA, 19 nt, Homo sapiens
  misc_RNA (1)...(19): siRNA sense strand
gagaugguggauuacaaug

SEQ ID NO: 500494 - RNA, 19 nt, Homo sapiens
  misc_RNA (1)...(19): siRNA sense strand
uagcggagcgcacccacaa

SEQ ID NO: 500495 - RNA, 19 nt, Homo sapiens
  misc_RNA (1)...(19): siRNA sense strand
gggagaaccagggaaagga

SEQ ID NO: 500496 - RNA, 19 nt, Homo sapiens
  misc_RNA (1)...(19): siRNA sense strand
gagccaggccagcauccaa

SEQ ID NO: 500497 - RNA, 19 nt, Homo sapiens
  misc_RNA (1)...(19): siRNA sense strand
gguacuccaggaccaauug

SEQ ID NO: 500498 - RNA, 19 nt, Homo sapiens
  misc_RNA (1)...(19): siRNA sense strand
aaaggagacccugggauga

SEQ ID NO: 500499 - RNA, 19 nt, Homo sapiens
  misc_RNA (1)...(19): siRNA sense strand
gagccagggaucccaggaa

SEQ ID NO: 500500 - RNA, 19 nt, Homo sapiens
  misc_RNA (1)...(19): siRNA sense strand
gaaccagggaaaggagaga

SEQ ID NO: 500501 - RNA, 19 nt, Homo sapiens
  misc_RNA (1)...(19): siRNA sense strand
gauuacaauggaaacauca

SEQ ID NO: 500502 - RNA, 19 nt, Homo sapiens
  misc_RNA (1)...(19): siRNA sense strand
ggucaaccaggaacuagag

SEQ ID NO: 500503 - RNA, 19 nt, Homo sapiens
  misc_RNA (1)...(19): siRNA sense strand
aaggagagaugguggauua

SEQ ID NO: 500504 - RNA, 19 nt, Homo sapiens
  misc_RNA (1)...(19): siRNA sense strand
cagcugggcuuccugguuu

SEQ ID NO: 500505 - RNA, 19 nt, Homo sapiens
  misc_RNA (1)...(19): siRNA sense strand
ccaaagacaucuccaggau

SEQ ID NO: 500506 - RNA, 19 nt, Homo sapiens
  misc_RNA (1)...(19): siRNA sense strand
gagagaugguggauuacaa

SEQ ID NO: 500507 - RNA, 19 nt, Homo sapiens
  misc_RNA (1)...(19): siRNA sense strand
aaagggaccucgcgguaaa

SEQ ID NO: 500508 - RNA, 19 nt, Homo sapiens
  misc_RNA (1)...(19): siRNA sense strand
gaugguggauuacaaugga

SEQ ID NO: 500509 - RNA, 19 nt, Homo sapiens
  misc_RNA (1)...(19): siRNA sense strand
ggauuacaauggaaacauc

SEQ ID NO: 500510 - RNA, 19 nt, Homo sapiens
  misc_RNA (1)...(19): siRNA sense strand
caagggagaaccagggaaa

SEQ ID NO: 500511 - RNA, 19 nt, Homo sapiens
  misc_RNA (1)...(19): siRNA sense strand
ggaagcaggacuagaugga

SEQ ID NO: 500512 - RNA, 19 nt, Homo sapiens
  misc_RNA (1)...(19): siRNA sense strand
caaggcugcuggaacaagu

SEQ ID NO: 500513 - RNA, 19 nt, Homo sapiens
  misc_RNA (1)...(19): siRNA sense strand
gggagaagcaggugucgau

SEQ ID NO: 500514 - RNA, 19 nt, Homo sapiens
  misc_RNA (1)...(19): siRNA sense strand
ggagaacagggaccagaug

SEQ ID NO: 500515 - RNA, 19 nt, Homo sapiens
  misc_RNA (1)...(19): siRNA sense strand
acaauggaaacaucaauga

SEQ ID NO: 500516 - RNA, 19 nt, Homo sapiens
  misc_RNA (1)...(19): siRNA sense strand
gaaaggagagaugguggau

SEQ ID NO: 500517 - RNA, 19 nt, Homo sapiens
  misc_RNA (1)...(19): siRNA sense strand
cuagagguuucccuggauu

SEQ ID NO: 500518 - RNA, 19 nt, Homo sapiens
  misc_RNA (1)...(19): siRNA sense strand
gcaaauggagacggcuauu

SEQ ID NO: 500519 - RNA, 19 nt, Homo sapiens
  misc_RNA (1)...(19): siRNA sense strand
gaaaggcuuccagggagaa

SEQ ID NO: 500520 - RNA, 19 nt, Homo sapiens
  misc_RNA (1)...(19): siRNA sense strand
gcagcugggcuuccugguu

SEQ ID NO: 500521 - RNA, 19 nt, Homo sapiens
  misc_RNA (1)...(19): siRNA sense strand
ggagagaugguggauuaca

SEQ ID NO: 500522 - RNA, 19 nt, Homo sapiens
  misc_RNA (1)...(19): siRNA sense strand
gaugcuggcaacuccauug

SEQ ID NO: 500523 - RNA, 19 nt, Homo sapiens
  misc_RNA (1)...(19): siRNA sense strand
gcguggagcagcuggagaa

SEQ ID NO: 500524 - RNA, 19 nt, Homo sapiens
  misc_RNA (1)...(19): siRNA sense strand
uggagcagcuggagaacag

SEQ ID NO: 500525 - RNA, 19 nt, Homo sapiens
  misc_RNA (1)...(19): siRNA sense strand
ggauuuccgggucccauug

SEQ ID NO: 500526 - RNA, 19 nt, Homo sapiens
  misc_RNA (1)...(19): siRNA sense strand
gagaugguggauuacaaug

SEQ ID NO: 500527 - RNA, 19 nt, Homo sapiens
  misc_RNA (1)...(19): siRNA sense strand
uagcggagcgcacccacaa

SEQ ID NO: 500528 - RNA, 19 nt, Homo sapiens
  misc_RNA (1)...(19): siRNA sense strand
gggagaaccagggaaagga

SEQ ID NO: 500529 - RNA, 19 nt, Homo sapiens
  misc_RNA (1)...(19): siRNA sense strand
gagccaggccagcauccaa

SEQ ID NO: 500530 - RNA, 19 nt, Homo sapiens
  misc_RNA (1)...(19): siRNA sense strand
gguacuccaggaccaauug

SEQ ID NO: 500531 - RNA, 19 nt, Homo sapiens
  misc_RNA (1)...(19): siRNA sense strand
aaaggagacccugggauga

SEQ ID NO: 500532 - RNA, 19 nt, Homo sapiens
  misc_RNA (1)...(19): siRNA sense strand
gagccagggaucccaggaa

SEQ ID NO: 500533 - RNA, 19 nt, Homo sapiens
  misc_RNA (1)...(19): siRNA sense strand
gaaccagggaaaggagaga

SEQ ID NO: 500534 - RNA, 19 nt, Homo sapiens
  misc_RNA (1)...(19): siRNA sense strand
gauuacaauggaaacauca

SEQ ID NO: 500535 - RNA, 19 nt, Homo sapiens
  misc_RNA (1)...(19): siRNA sense strand
ggucaaccaggaacuagag

SEQ ID NO: 500536 - RNA, 19 nt, Homo sapiens
  misc_RNA (1)...(19): siRNA sense strand
aaggagagaugguggauua

SEQ ID NO: 500537 - RNA, 19 nt, Homo sapiens
  misc_RNA (1)...(19): siRNA sense strand
cagcugggcuuccugguuu

SEQ ID NO: 500538 - RNA, 19 nt, Homo sapiens
  misc_RNA (1)...(19): siRNA sense strand
ccaaagacaucuccaggau

SEQ ID NO: 500539 - RNA, 19 nt, Homo sapiens
  misc_RNA (1)...(19): siRNA sense strand
gagagaugguggauuacaa

SEQ ID NO: 500540 - RNA, 19 nt, Homo sapiens
  misc_RNA (1)...(19): siRNA sense strand
aaagggaccucgcgguaaa

SEQ ID NO: 500541 - RNA, 19 nt, Homo sapiens
  misc_RNA (1)...(19): siRNA sense strand
gaugguggauuacaaugga

SEQ ID NO: 500542 - RNA, 19 nt, Homo sapiens
  misc_RNA (1)...(19): siRNA sense strand
ggauuacaauggaaacauc

SEQ ID NO: 500543 - RNA, 19 nt, Homo sapiens
  misc_RNA (1)...(19): siRNA sense strand
caagggagaaccagggaaa

SEQ ID NO: 500544 - RNA, 19 nt, Homo sapiens
  misc_RNA (1)...(19): siRNA sense strand
ggaagcaggacuagaugga

SEQ ID NO: 500545 - RNA, 19 nt, Homo sapiens
  misc_RNA (1)...(19): siRNA sense strand
caaggcugcuggaacaagu

SEQ ID NO: 500546 - RNA, 19 nt, Homo sapiens
  misc_RNA (1)...(19): siRNA sense strand
gggagaagcaggugucgau

SEQ ID NO: 500547 - RNA, 19 nt, Homo sapiens
  misc_RNA (1)...(19): siRNA sense strand
ggagaacagggaccagaug

SEQ ID NO: 500548 - RNA, 19 nt, Homo sapiens
  misc_RNA (1)...(19): siRNA sense strand
acaauggaaacaucaauga

SEQ ID NO: 500549 - RNA, 19 nt, Homo sapiens
  misc_RNA (1)...(19): siRNA sense strand
gaaaggagagaugguggau

SEQ ID NO: 500550 - RNA, 19 nt, Homo sapiens
  misc_RNA (1)...(19): siRNA sense strand
cuagagguuucccuggauu

SEQ ID NO: 500551 - RNA, 19 nt, Homo sapiens
  misc_RNA (1)...(19): siRNA sense strand
gcaaauggagacggcuauu

SEQ ID NO: 500552 - RNA, 19 nt, Homo sapiens
  misc_RNA (1)...(19): siRNA sense strand
gaaaggcuuccagggagaa

SEQ ID NO: 500553 - RNA, 19 nt, Homo sapiens
  misc_RNA (1)...(19): siRNA sense strand
gcagcugggcuuccugguu

SEQ ID NO: 500554 - RNA, 19 nt, Homo sapiens
  misc_RNA (1)...(19): siRNA sense strand
ggagagaugguggauuaca

SEQ ID NO: 500555 - RNA, 19 nt, Homo sapiens
  misc_RNA (1)...(19): siRNA sense strand
gaugcuggcaacuccauug

SEQ ID NO: 500556 - RNA, 19 nt, Homo sapiens
  misc_RNA (1)...(19): siRNA sense strand
gcguggagcagcuggagaa

SEQ ID NO: 500557 - RNA, 19 nt, Homo sapiens
  misc_RNA (1)...(19): siRNA sense strand
uggagcagcuggagaacag

SEQ ID NO: 500558 - RNA, 19 nt, Homo sapiens
  misc_RNA (1)...(19): siRNA sense strand
ggauuuccgggucccauug

SEQ ID NO: 500559 - RNA, 19 nt, Homo sapiens
  misc_RNA (1)...(19): siRNA sense strand
gagaugguggauuacaaug

SEQ ID NO: 500560 - RNA, 19 nt, Homo sapiens
  misc_RNA (1)...(19): siRNA sense strand
uagcggagcgcacccacaa

SEQ ID NO: 500561 - RNA, 19 nt, Homo sapiens
  misc_RNA (1)...(19): siRNA sense strand
gggagaaccagggaaagga

SEQ ID NO: 500562 - RNA, 19 nt, Homo sapiens
  misc_RNA (1)...(19): siRNA sense strand
gagccaggccagcauccaa

SEQ ID NO: 500563 - RNA, 19 nt, Homo sapiens
  misc_RNA (1)...(19): siRNA sense strand
gguacuccaggaccaauug

SEQ ID NO: 500564 - RNA, 19 nt, Homo sapiens
  misc_RNA (1)...(19): siRNA sense strand
aaaggagacccugggauga

SEQ ID NO: 500565 - RNA, 19 nt, Homo sapiens
  misc_RNA (1)...(19): siRNA sense strand
gagccagggaucccaggaa

SEQ ID NO: 500566 - RNA, 19 nt, Homo sapiens
  misc_RNA (1)...(19): siRNA sense strand
gaaccagggaaaggagaga

SEQ ID NO: 500567 - RNA, 19 nt, Homo sapiens
  misc_RNA (1)...(19): siRNA sense strand
gauuacaauggaaacauca

SEQ ID NO: 500568 - RNA, 19 nt, Homo sapiens
  misc_RNA (1)...(19): siRNA sense strand
ggucaaccaggaacuagag

SEQ ID NO: 500569 - RNA, 19 nt, Homo sapiens
  misc_RNA (1)...(19): siRNA sense strand
aaggagagaugguggauua

SEQ ID NO: 500570 - RNA, 19 nt, Homo sapiens
  misc_RNA (1)...(19): siRNA sense strand
cagcugggcuuccugguuu

SEQ ID NO: 500571 - RNA, 19 nt, Homo sapiens
  misc_RNA (1)...(19): siRNA sense strand
ccaaagacaucuccaggau

SEQ ID NO: 500572 - RNA, 19 nt, Homo sapiens
  misc_RNA (1)...(19): siRNA sense strand
gagagaugguggauuacaa

SEQ ID NO: 500573 - RNA, 19 nt, Homo sapiens
  misc_RNA (1)...(19): siRNA sense strand
aaagggaccucgcgguaaa

SEQ ID NO: 500574 - RNA, 19 nt, Homo sapiens
  misc_RNA (1)...(19): siRNA sense strand
gaugguggauuacaaugga

SEQ ID NO: 500575 - RNA, 19 nt, Homo sapiens
  misc_RNA (1)...(19): siRNA sense strand
ggauuacaauggaaacauc

SEQ ID NO: 500576 - RNA, 19 nt, Homo sapiens
  misc_RNA (1)...(19): siRNA sense strand
caagggagaaccagggaaa

SEQ ID NO: 500577 - RNA, 19 nt, Homo sapiens
  misc_RNA (1)...(19): siRNA sense strand
ggaagcaggacuagaugga

SEQ ID NO: 500578 - RNA, 19 nt, Homo sapiens
  misc_RNA (1)...(19): siRNA sense strand
caaggcugcuggaacaagu

SEQ ID NO: 500579 - RNA, 19 nt, Homo sapiens
  misc_RNA (1)...(19): siRNA sense strand
gggagaagcaggugucgau

SEQ ID NO: 500580 - RNA, 19 nt, Homo sapiens
  misc_RNA (1)...(19): siRNA sense strand
ggagaacagggaccagaug

SEQ ID NO: 500581 - RNA, 19 nt, Homo sapiens
  misc_RNA (1)...(19): siRNA sense strand
acaauggaaacaucaauga

SEQ ID NO: 500582 - RNA, 19 nt, Homo sapiens
  misc_RNA (1)...(19): siRNA sense strand
gaaaggagagaugguggau

SEQ ID NO: 500583 - RNA, 19 nt, Homo sapiens
  misc_RNA (1)...(19): siRNA sense strand
cuagagguuucccuggauu

SEQ ID NO: 500584 - RNA, 19 nt, Homo sapiens
  misc_RNA (1)...(19): siRNA sense strand
gcaaauggagacggcuauu

SEQ ID NO: 500585 - RNA, 19 nt, Homo sapiens
  misc_RNA (1)...(19): siRNA sense strand
gaaaggcuuccagggagaa

SEQ ID NO: 500586 - RNA, 19 nt, Homo sapiens
  misc_RNA (1)...(19): siRNA sense strand
gcagcugggcuuccugguu

SEQ ID NO: 500587 - RNA, 19 nt, Homo sapiens
  misc_RNA (1)...(19): siRNA sense strand
ggagagaugguggauuaca

SEQ ID NO: 500588 - RNA, 19 nt, Homo sapiens
  misc_RNA (1)...(19): siRNA sense strand
gaugcuggcaacuccauug

SEQ ID NO: 500589 - RNA, 19 nt, Homo sapiens
  misc_RNA (1)...(19): siRNA sense strand
gcguggagcagcuggagaa

SEQ ID NO: 500590 - RNA, 19 nt, Homo sapiens
  misc_RNA (1)...(19): siRNA sense strand
uggagcagcuggagaacag

SEQ ID NO: 500591 - RNA, 19 nt, Homo sapiens
  misc_RNA (1)...(19): siRNA sense strand
ggauuuccgggucccauug

SEQ ID NO: 500592 - RNA, 19 nt, Homo sapiens
  misc_RNA (1)...(19): siRNA sense strand
gagaugguggauuacaaug

SEQ ID NO: 500593 - RNA, 19 nt, Homo sapiens
  misc_RNA (1)...(19): siRNA sense strand
uagcggagcgcacccacaa

SEQ ID NO: 500594 - RNA, 19 nt, Homo sapiens
  misc_RNA (1)...(19): siRNA sense strand
gggagaaccagggaaagga

SEQ ID NO: 500595 - RNA, 19 nt, Homo sapiens
  misc_RNA (1)...(19): siRNA sense strand
gagccaggccagcauccaa

SEQ ID NO: 500596 - RNA, 19 nt, Homo sapiens
  misc_RNA (1)...(19): siRNA sense strand
gguacuccaggaccaauug

SEQ ID NO: 500597 - RNA, 19 nt, Homo sapiens
  misc_RNA (1)...(19): siRNA sense strand
aaaggagacccugggauga

SEQ ID NO: 500598 - RNA, 19 nt, Homo sapiens
  misc_RNA (1)...(19): siRNA sense strand
gagccagggaucccaggaa

SEQ ID NO: 500599 - RNA, 19 nt, Homo sapiens
  misc_RNA (1)...(19): siRNA sense strand
gaaccagggaaaggagaga

SEQ ID NO: 500600 - RNA, 19 nt, Homo sapiens
  misc_RNA (1)...(19): siRNA sense strand
gauuacaauggaaacauca

SEQ ID NO: 500601 - RNA, 19 nt, Homo sapiens
  misc_RNA (1)...(19): siRNA sense strand
ggucaaccaggaacuagag

SEQ ID NO: 500602 - RNA, 19 nt, Homo sapiens
  misc_RNA (1)...(19): siRNA sense strand
aaggagagaugguggauua

SEQ ID NO: 500603 - RNA, 19 nt, Homo sapiens
  misc_RNA (1)...(19): siRNA sense strand
cagcugggcuuccugguuu

SEQ ID NO: 500604 - RNA, 19 nt, Homo sapiens
  misc_RNA (1)...(19): siRNA sense strand
ccaaagacaucuccaggau

SEQ ID NO: 500605 - RNA, 19 nt, Homo sapiens
  misc_RNA (1)...(19): siRNA sense strand
gagagaugguggauuacaa

SEQ ID NO: 500606 - RNA, 19 nt, Homo sapiens
  misc_RNA (1)...(19): siRNA sense strand
aaagggaccucgcgguaaa

SEQ ID NO: 500607 - RNA, 19 nt, Homo sapiens
  misc_RNA (1)...(19): siRNA sense strand
gaugguggauuacaaugga

SEQ ID NO: 500608 - RNA, 19 nt, Homo sapiens
  misc_RNA (1)...(19): siRNA sense strand
ggauuacaauggaaacauc

SEQ ID NO: 500609 - RNA, 19 nt, Homo sapiens
  misc_RNA (1)...(19): siRNA sense strand
caagggagaaccagggaaa

SEQ ID NO: 500610 - RNA, 19 nt, Homo sapiens
  misc_RNA (1)...(19): siRNA sense strand
ggaagcaggacuagaugga

SEQ ID NO: 500611 - RNA, 19 nt, Homo sapiens
  misc_RNA (1)...(19): siRNA sense strand
caaggcugcuggaacaagu

SEQ ID NO: 500612 - RNA, 19 nt, Homo sapiens
  misc_RNA (1)...(19): siRNA sense strand
gggagaagcaggugucgau

SEQ ID NO: 500613 - RNA, 19 nt, Homo sapiens
  misc_RNA (1)...(19): siRNA sense strand
ggagaacagggaccagaug

SEQ ID NO: 500614 - RNA, 19 nt, Homo sapiens
  misc_RNA (1)...(19): siRNA sense strand
acaauggaaacaucaauga

SEQ ID NO: 500615 - RNA, 19 nt, Homo sapiens
  misc_RNA (1)...(19): siRNA sense strand
gaaaggagagaugguggau

SEQ ID NO: 500616 - RNA, 19 nt, Homo sapiens
  misc_RNA (1)...(19): siRNA sense strand
cuagagguuucccuggauu

SEQ ID NO: 500617 - RNA, 19 nt, Homo sapiens
  misc_RNA (1)...(19): siRNA sense strand
gcaaauggagacggcuauu

SEQ ID NO: 500618 - RNA, 19 nt, Homo sapiens
  misc_RNA (1)...(19): siRNA sense strand
gaaaggcuuccagggagaa

SEQ ID NO: 500619 - RNA, 19 nt, Homo sapiens
  misc_RNA (1)...(19): siRNA sense strand
gcagcugggcuuccugguu

SEQ ID NO: 500620 - RNA, 19 nt, Homo sapiens
  misc_RNA (1)...(19): siRNA sense strand
ggagagaugguggauuaca

SEQ ID NO: 500621 - RNA, 19 nt, Homo sapiens
  misc_RNA (1)...(19): siRNA sense strand
gaugcuggcaacuccauug

SEQ ID NO: 500622 - RNA, 19 nt, Homo sapiens
  misc_RNA (1)...(19): siRNA sense strand
gcguggagcagcuggagaa

SEQ ID NO: 500623 - RNA, 19 nt, Homo sapiens
  misc_RNA (1)...(19): siRNA sense strand
uggagcagcuggagaacag

SEQ ID NO: 500624 - RNA, 19 nt, Homo sapiens
  misc_RNA (1)...(19): siRNA sense strand
ggauuuccgggucccauug

SEQ ID NO: 500625 - RNA, 19 nt, Homo sapiens
  misc_RNA (1)...(19): siRNA sense strand
gagaugguggauuacaaug

SEQ ID NO: 500626 - RNA, 19 nt, Homo sapiens
  misc_RNA (1)...(19): siRNA sense strand
uagcggagcgcacccacaa

SEQ ID NO: 500627 - RNA, 19 nt, Homo sapiens
  misc_RNA (1)...(19): siRNA sense strand
gggagaaccagggaaagga

SEQ ID NO: 500628 - RNA, 19 nt, Homo sapiens
  misc_RNA (1)...(19): siRNA sense strand
gagccaggccagcauccaa

SEQ ID NO: 500629 - RNA, 19 nt, Homo sapiens
  misc_RNA (1)...(19): siRNA sense strand
gguacuccaggaccaauug

SEQ ID NO: 500630 - RNA, 19 nt, Homo sapiens
  misc_RNA (1)...(19): siRNA sense strand
aaaggagacccugggauga

SEQ ID NO: 500631 - RNA, 19 nt, Homo sapiens
  misc_RNA (1)...(19): siRNA sense strand
gagccagggaucccaggaa

SEQ ID NO: 500632 - RNA, 19 nt, Homo sapiens
  misc_RNA (1)...(19): siRNA sense strand
gaaccagggaaaggagaga

SEQ ID NO: 500633 - RNA, 19 nt, Homo sapiens
  misc_RNA (1)...(19): siRNA sense strand
gauuacaauggaaacauca

SEQ ID NO: 500634 - RNA, 19 nt, Homo sapiens
  misc_RNA (1)...(19): siRNA sense strand
ggucaaccaggaacuagag

SEQ ID NO: 500635 - RNA, 19 nt, Homo sapiens
  misc_RNA (1)...(19): siRNA sense strand
aaggagagaugguggauua

SEQ ID NO: 500636 - RNA, 19 nt, Homo sapiens
  misc_RNA (1)...(19): siRNA sense strand
cagcugggcuuccugguuu

SEQ ID NO: 500637 - RNA, 19 nt, Homo sapiens
  misc_RNA (1)...(19): siRNA sense strand
ccaaagacaucuccaggau

SEQ ID NO: 500638 - RNA, 19 nt, Homo sapiens
  misc_RNA (1)...(19): siRNA sense strand
gagagaugguggauuacaa

SEQ ID NO: 500639 - RNA, 19 nt, Homo sapiens
  misc_RNA (1)...(19): siRNA sense strand
aaagggaccucgcgguaaa

SEQ ID NO: 500640 - RNA, 19 nt, Homo sapiens
  misc_RNA (1)...(19): siRNA sense strand
gaugguggauuacaaugga

SEQ ID NO: 500641 - RNA, 19 nt, Homo sapiens
  misc_RNA (1)...(19): siRNA sense strand
ggauuacaauggaaacauc

SEQ ID NO: 500642 - RNA, 19 nt, Homo sapiens
  misc_RNA (1)...(19): siRNA sense strand
caagggagaaccagggaaa

SEQ ID NO: 500643 - RNA, 19 nt, Homo sapiens
  misc_RNA (1)...(19): siRNA sense strand
ggaagcaggacuagaugga

SEQ ID NO: 500644 - RNA, 19 nt, Homo sapiens
  misc_RNA (1)...(19): siRNA sense strand
caaggcugcuggaacaagu

SEQ ID NO: 500645 - RNA, 19 nt, Homo sapiens
  misc_RNA (1)...(19): siRNA sense strand
gggagaagcaggugucgau

SEQ ID NO: 500646 - RNA, 19 nt, Homo sapiens
  misc_RNA (1)...(19): siRNA sense strand
ggagaacagggaccagaug

SEQ ID NO: 500647 - RNA, 19 nt, Homo sapiens
  misc_RNA (1)...(19): siRNA sense strand
acaauggaaacaucaauga

SEQ ID NO: 500648 - RNA, 19 nt, Homo sapiens
  misc_RNA (1)...(19): siRNA sense strand
gaaaggagagaugguggau

SEQ ID NO: 500649 - RNA, 19 nt, Homo sapiens
  misc_RNA (1)...(19): siRNA sense strand
cuagagguuucccuggauu

SEQ ID NO: 500650 - RNA, 19 nt, Homo sapiens
  misc_RNA (1)...(19): siRNA sense strand
gcaaauggagacggcuauu

SEQ ID NO: 500651 - RNA, 19 nt, Homo sapiens
  misc_RNA (1)...(19): siRNA sense strand
gaaaggcuuccagggagaa

SEQ ID NO: 500652 - RNA, 19 nt, Homo sapiens
  misc_RNA (1)...(19): siRNA sense strand
gcagcugggcuuccugguu

SEQ ID NO: 500653 - RNA, 19 nt, Homo sapiens
  misc_RNA (1)...(19): siRNA sense strand
ggagagaugguggauuaca

SEQ ID NO: 500654 - RNA, 19 nt, Homo sapiens
  misc_RNA (1)...(19): siRNA sense strand
gaugcuggcaacuccauug

SEQ ID NO: 500655 - RNA, 19 nt, Homo sapiens
  misc_RNA (1)...(19): siRNA sense strand
gcguggagcagcuggagaa

SEQ ID NO: 500656 - RNA, 19 nt, Homo sapiens
  misc_RNA (1)...(19): siRNA sense strand
uggagcagcuggagaacag

SEQ ID NO: 500657 - RNA, 19 nt, Homo sapiens
  misc_RNA (1)...(19): siRNA sense strand
ggauuuccgggucccauug

SEQ ID NO: 500658 - RNA, 19 nt, Homo sapiens
  misc_RNA (1)...(19): siRNA sense strand
gagaugguggauuacaaug

SEQ ID NO: 500659 - RNA, 19 nt, Homo sapiens
  misc_RNA (1)...(19): siRNA sense strand
uagcggagcgcacccacaa

SEQ ID NO: 500660 - RNA, 19 nt, Homo sapiens
  misc_RNA (1)...(19): siRNA sense strand
gggagaaccagggaaagga

SEQ ID NO: 500661 - RNA, 19 nt, Homo sapiens
  misc_RNA (1)...(19): siRNA sense strand
gagccaggccagcauccaa

SEQ ID NO: 500662 - RNA, 19 nt, Homo sapiens
  misc_RNA (1)...(19): siRNA sense strand
gguacuccaggaccaauug

SEQ ID NO: 500663 - RNA, 19 nt, Homo sapiens
  misc_RNA (1)...(19): siRNA sense strand
aaaggagacccugggauga

SEQ ID NO: 500664 - RNA, 19 nt, Homo sapiens
  misc_RNA (1)...(19): siRNA sense strand
gagccagggaucccaggaa

SEQ ID NO: 500665 - RNA, 19 nt, Homo sapiens
  misc_RNA (1)...(19): siRNA sense strand
gaaccagggaaaggagaga

SEQ ID NO: 500666 - RNA, 19 nt, Homo sapiens
  misc_RNA (1)...(19): siRNA sense strand
gauuacaauggaaacauca

SEQ ID NO: 500667 - RNA, 19 nt, Homo sapiens
  misc_RNA (1)...(19): siRNA sense strand
ggucaaccaggaacuagag

SEQ ID NO: 500668 - RNA, 19 nt, Homo sapiens
  misc_RNA (1)...(19): siRNA sense strand
aaggagagaugguggauua

SEQ ID NO: 500669 - RNA, 19 nt, Homo sapiens
  misc_RNA (1)...(19): siRNA sense strand
cagcugggcuuccugguuu

SEQ ID NO: 500670 - RNA, 19 nt, Homo sapiens
  misc_RNA (1)...(19): siRNA sense strand
ccaaagacaucuccaggau

SEQ ID NO: 500671 - RNA, 19 nt, Homo sapiens
  misc_RNA (1)...(19): siRNA sense strand
gagagaugguggauuacaa

SEQ ID NO: 500672 - RNA, 19 nt, Homo sapiens
  misc_RNA (1)...(19): siRNA sense strand
aaagggaccucgcgguaaa

SEQ ID NO: 500673 - RNA, 19 nt, Homo sapiens
  misc_RNA (1)...(19): siRNA sense strand
gaugguggauuacaaugga

SEQ ID NO: 500674 - RNA, 19 nt, Homo sapiens
  misc_RNA (1)...(19): siRNA sense strand
ggauuacaauggaaacauc

SEQ ID NO: 500675 - RNA, 19 nt, Homo sapiens
  misc_RNA (1)...(19): siRNA sense strand
caagggagaaccagggaaa

SEQ ID NO: 500676 - RNA, 19 nt, Homo sapiens
  misc_RNA (1)...(19): siRNA sense strand
ggaagcaggacuagaugga

SEQ ID NO: 500677 - RNA, 19 nt, Homo sapiens
  misc_RNA (1)...(19): siRNA sense strand
caaggcugcuggaacaagu

SEQ ID NO: 500678 - RNA, 19 nt, Homo sapiens
  misc_RNA (1)...(19): siRNA sense strand
gggagaagcaggugucgau

SEQ ID NO: 500679 - RNA, 19 nt, Homo sapiens
  misc_RNA (1)...(19): siRNA sense strand
ggagaacagggaccagaug

SEQ ID NO: 500680 - RNA, 19 nt, Homo sapiens
  misc_RNA (1)...(19): siRNA sense strand
acaauggaaacaucaauga

SEQ ID NO: 500681 - RNA, 19 nt, Homo sapiens
  misc_RNA (1)...(19): siRNA sense strand
gaaaggagagaugguggau

SEQ ID NO: 500682 - RNA, 19 nt, Homo sapiens
  misc_RNA (1)...(19): siRNA sense strand
cuagagguuucccuggauu

SEQ ID NO: 500683 - RNA, 19 nt, Homo sapiens
  misc_RNA (1)...(19): siRNA sense strand
gcaaauggagacggcuauu

SEQ ID NO: 500684 - RNA, 19 nt, Homo sapiens
  misc_RNA (1)...(19): siRNA sense strand
gaaaggcuuccagggagaa

SEQ ID NO: 500685 - RNA, 19 nt, Homo sapiens
  misc_RNA (1)...(19): siRNA sense strand
gcagcugggcuuccugguu

SEQ ID NO: 500686 - RNA, 19 nt, Homo sapiens
  misc_RNA (1)...(19): siRNA sense strand
ggagagaugguggauuaca

SEQ ID NO: 500687 - RNA, 19 nt, Homo sapiens
  misc_RNA (1)...(19): siRNA sense strand
gaugcuggcaacuccauug

SEQ ID NO: 500688 - RNA, 19 nt, Homo sapiens
  misc_RNA (1)...(19): siRNA sense strand
gcguggagcagcuggagaa

SEQ ID NO: 500689 - RNA, 19 nt, Homo sapiens
  misc_RNA (1)...(19): siRNA sense strand
uggagcagcuggagaacag

SEQ ID NO: 500690 - RNA, 19 nt, Homo sapiens
  misc_RNA (1)...(19): siRNA sense strand
ggauuuccgggucccauug

SEQ ID NO: 500691 - RNA, 19 nt, Homo sapiens
  misc_RNA (1)...(19): siRNA sense strand
gagaugguggauuacaaug

SEQ ID NO: 500692 - RNA, 19 nt, Homo sapiens
  misc_RNA (1)...(19): siRNA sense strand
uagcggagcgcacccacaa

SEQ ID NO: 500693 - RNA, 19 nt, Homo sapiens
  misc_RNA (1)...(19): siRNA sense strand
gggagaaccagggaaagga

SEQ ID NO: 500694 - RNA, 19 nt, Homo sapiens
  misc_RNA (1)...(19): siRNA sense strand
gagccaggccagcauccaa

SEQ ID NO: 500695 - RNA, 19 nt, Homo sapiens
  misc_RNA (1)...(19): siRNA sense strand
gguacuccaggaccaauug

SEQ ID NO: 500696 - RNA, 19 nt, Homo sapiens
  misc_RNA (1)...(19): siRNA sense strand
aaaggagacccugggauga

SEQ ID NO: 500697 - RNA, 19 nt, Homo sapiens
  misc_RNA (1)...(19): siRNA sense strand
gagccagggaucccaggaa

SEQ ID NO: 500698 - RNA, 19 nt, Homo sapiens
  misc_RNA (1)...(19): siRNA sense strand
gaaccagggaaaggagaga

SEQ ID NO: 500699 - RNA, 19 nt, Homo sapiens
  misc_RNA (1)...(19): siRNA sense strand
gauuacaauggaaacauca

SEQ ID NO: 500700 - RNA, 19 nt, Homo sapiens
  misc_RNA (1)...(19): siRNA sense strand
ggucaaccaggaacuagag

SEQ ID NO: 500701 - RNA, 19 nt, Homo sapiens
  misc_RNA (1)...(19): siRNA sense strand
aaggagagaugguggauua

SEQ ID NO: 500702 - RNA, 19 nt, Homo sapiens
  misc_RNA (1)...(19): siRNA sense strand
cagcugggcuuccugguuu

SEQ ID NO: 500703 - RNA, 19 nt, Homo sapiens
  misc_RNA (1)...(19): siRNA sense strand
ccaaagacaucuccaggau

SEQ ID NO: 500704 - RNA, 19 nt, Homo sapiens
  misc_RNA (1)...(19): siRNA sense strand
gagagaugguggauuacaa

SEQ ID NO: 500705 - RNA, 19 nt, Homo sapiens
  misc_RNA (1)...(19): siRNA sense strand
aaagggaccucgcgguaaa

SEQ ID NO: 500706 - RNA, 19 nt, Homo sapiens
  misc_RNA (1)...(19): siRNA sense strand
gaugguggauuacaaugga

SEQ ID NO: 500707 - RNA, 19 nt, Homo sapiens
  misc_RNA (1)...(19): siRNA sense strand
ggauuacaauggaaacauc

SEQ ID NO: 500708 - RNA, 19 nt, Homo sapiens
  misc_RNA (1)...(19): siRNA sense strand
caagggagaaccagggaaa

SEQ ID NO: 500709 - RNA, 19 nt, Homo sapiens
  misc_RNA (1)...(19): siRNA sense strand
ggaagcaggacuagaugga

SEQ ID NO: 500710 - RNA, 19 nt, Homo sapiens
  misc_RNA (1)...(19): siRNA sense strand
caaggcugcuggaacaagu

SEQ ID NO: 500711 - RNA, 19 nt, Homo sapiens
  misc_RNA (1)...(19): siRNA sense strand
gggagaagcaggugucgau

SEQ ID NO: 500712 - RNA, 19 nt, Homo sapiens
  misc_RNA (1)...(19): siRNA sense strand
ggagaacagggaccagaug

SEQ ID NO: 500713 - RNA, 19 nt, Homo sapiens
  misc_RNA (1)...(19): siRNA sense strand
acaauggaaacaucaauga

SEQ ID NO: 500714 - RNA, 19 nt, Homo sapiens
  misc_RNA (1)...(19): siRNA sense strand
gaaaggagagaugguggau

SEQ ID NO: 500715 - RNA, 19 nt, Homo sapiens
  misc_RNA (1)...(19): siRNA sense strand
cuagagguuucccuggauu

SEQ ID NO: 500716 - RNA, 19 nt, Homo sapiens
  misc_RNA (1)...(19): siRNA sense strand
gcaaauggagacggcuauu

SEQ ID NO: 500717 - RNA, 19 nt, Homo sapiens
  misc_RNA (1)...(19): siRNA sense strand
gaaaggcuuccagggagaa

SEQ ID NO: 500718 - RNA, 19 nt, Homo sapiens
  misc_RNA (1)...(19): siRNA sense strand
gcagcugggcuuccugguu

SEQ ID NO: 500719 - RNA, 19 nt, Homo sapiens
  misc_RNA (1)...(19): siRNA sense strand
ggagagaugguggauuaca

SEQ ID NO: 500720 - RNA, 19 nt, Homo sapiens
  misc_RNA (1)...(19): siRNA sense strand
gaugcuggcaacuccauug

SEQ ID NO: 500721 - RNA, 19 nt, Homo sapiens
  misc_RNA (1)...(19): siRNA sense strand
gcguggagcagcuggagaa

SEQ ID NO: 500722 - RNA, 19 nt, Homo sapiens
  misc_RNA (1)...(19): siRNA sense strand
uggagcagcuggagaacag

SEQ ID NO: 500723 - RNA, 19 nt, Homo sapiens
  misc_RNA (1)...(19): siRNA sense strand
ggauuuccgggucccauug

SEQ ID NO: 500724 - RNA, 19 nt, Homo sapiens
  misc_RNA (1)...(19): siRNA sense strand
gagaugguggauuacaaug

SEQ ID NO: 500725 - RNA, 19 nt, Homo sapiens
  misc_RNA (1)...(19): siRNA sense strand
uagcggagcgcacccacaa

SEQ ID NO: 500726 - RNA, 19 nt, Homo sapiens
  misc_RNA (1)...(19): siRNA sense strand
gggagaaccagggaaagga

SEQ ID NO: 500727 - RNA, 19 nt, Homo sapiens
  misc_RNA (1)...(19): siRNA sense strand
gagccaggccagcauccaa

SEQ ID NO: 500728 - RNA, 19 nt, Homo sapiens
  misc_RNA (1)...(19): siRNA sense strand
gguacuccaggaccaauug

SEQ ID NO: 500729 - RNA, 19 nt, Homo sapiens
  misc_RNA (1)...(19): siRNA sense strand
aaaggagacccugggauga

SEQ ID NO: 500730 - RNA, 19 nt, Homo sapiens
  misc_RNA (1)...(19): siRNA sense strand
gagccagggaucccaggaa

SEQ ID NO: 500731 - RNA, 19 nt, Homo sapiens
  misc_RNA (1)...(19): siRNA sense strand
gaaccagggaaaggagaga

SEQ ID NO: 500732 - RNA, 19 nt, Homo sapiens
  misc_RNA (1)...(19): siRNA sense strand
gauuacaauggaaacauca

SEQ ID NO: 500733 - RNA, 19 nt, Homo sapiens
  misc_RNA (1)...(19): siRNA sense strand
ggucaaccaggaacuagag

SEQ ID NO: 500734 - RNA, 19 nt, Homo sapiens
  misc_RNA (1)...(19): siRNA sense strand
aaggagagaugguggauua

SEQ ID NO: 500735 - RNA, 19 nt, Homo sapiens
  misc_RNA (1)...(19): siRNA sense strand
cagcugggcuuccugguuu

SEQ ID NO: 500736 - RNA, 19 nt, Homo sapiens
  misc_RNA (1)...(19): siRNA sense strand
ccaaagacaucuccaggau

SEQ ID NO: 500737 - RNA, 19 nt, Homo sapiens
  misc_RNA (1)...(19): siRNA sense strand
gagagaugguggauuacaa

SEQ ID NO: 500738 - RNA, 19 nt, Homo sapiens
  misc_RNA (1)...(19): siRNA sense strand
aaagggaccucgcgguaaa

SEQ ID NO: 500739 - RNA, 19 nt, Homo sapiens
  misc_RNA (1)...(19): siRNA sense strand
gaugguggauuacaaugga

SEQ ID NO: 500740 - RNA, 19 nt, Homo sapiens
  misc_RNA (1)...(19): siRNA sense strand
ggauuacaauggaaacauc

SEQ ID NO: 500741 - RNA, 19 nt, Homo sapiens
  misc_RNA (1)...(19): siRNA sense strand
caagggagaaccagggaaa

SEQ ID NO: 500742 - RNA, 19 nt, Homo sapiens
  misc_RNA (1)...(19): siRNA sense strand
ggaagcaggacuagaugga

SEQ ID NO: 500743 - RNA, 19 nt, Homo sapiens
  misc_RNA (1)...(19): siRNA sense strand
caaggcugcuggaacaagu

SEQ ID NO: 500744 - RNA, 19 nt, Homo sapiens
  misc_RNA (1)...(19): siRNA sense strand
gggagaagcaggugucgau

SEQ ID NO: 500745 - RNA, 19 nt, Homo sapiens
  misc_RNA (1)...(19): siRNA sense strand
ggagaacagggaccagaug

SEQ ID NO: 500746 - RNA, 19 nt, Homo sapiens
  misc_RNA (1)...(19): siRNA sense strand
acaauggaaacaucaauga

SEQ ID NO: 500747 - RNA, 19 nt, Homo sapiens
  misc_RNA (1)...(19): siRNA sense strand
gaaaggagagaugguggau

SEQ ID NO: 500748 - RNA, 19 nt, Homo sapiens
  misc_RNA (1)...(19): siRNA sense strand
cuagagguuucccuggauu

SEQ ID NO: 500749 - RNA, 19 nt, Homo sapiens
  misc_RNA (1)...(19): siRNA sense strand
gcaaauggagacggcuauu

SEQ ID NO: 500750 - RNA, 19 nt, Homo sapiens
  misc_RNA (1)...(19): siRNA sense strand
gaaaggcuuccagggagaa

SEQ ID NO: 500751 - RNA, 19 nt, Homo sapiens
  misc_RNA (1)...(19): siRNA sense strand
gcagcugggcuuccugguu

SEQ ID NO: 500752 - RNA, 19 nt, Homo sapiens
  misc_RNA (1)...(19): siRNA sense strand
ggagagaugguggauuaca

SEQ ID NO: 500753 - RNA, 19 nt, Homo sapiens
  misc_RNA (1)...(19): siRNA sense strand
gaugcuggcaacuccauug

SEQ ID NO: 500754 - RNA, 19 nt, Homo sapiens
  misc_RNA (1)...(19): siRNA sense strand
gcguggagcagcuggagaa

SEQ ID NO: 500755 - RNA, 19 nt, Homo sapiens
  misc_RNA (1)...(19): siRNA sense strand
uggagcagcuggagaacag

SEQ ID NO: 500756 - RNA, 19 nt, Homo sapiens
  misc_RNA (1)...(19): siRNA sense strand
ggauuuccgggucccauug

SEQ ID NO: 500757 - RNA, 19 nt, Homo sapiens
  misc_RNA (1)...(19): siRNA sense strand
gagaugguggauuacaaug

SEQ ID NO: 500758 - RNA, 19 nt, Homo sapiens
  misc_RNA (1)...(19): siRNA sense strand
uagcggagcgcacccacaa

SEQ ID NO: 500759 - RNA, 19 nt, Homo sapiens
  misc_RNA (1)...(19): siRNA sense strand
gggagaaccagggaaagga

SEQ ID NO: 500760 - RNA, 19 nt, Homo sapiens
  misc_RNA (1)...(19): siRNA sense strand
gagccaggccagcauccaa

SEQ ID NO: 500761 - RNA, 19 nt, Homo sapiens
  misc_RNA (1)...(19): siRNA sense strand
gguacuccaggaccaauug

SEQ ID NO: 500762 - RNA, 19 nt, Homo sapiens
  misc_RNA (1)...(19): siRNA sense strand
aaaggagacccugggauga

SEQ ID NO: 500763 - RNA, 19 nt, Homo sapiens
  misc_RNA (1)...(19): siRNA sense strand
gagccagggaucccaggaa

SEQ ID NO: 500764 - RNA, 19 nt, Homo sapiens
  misc_RNA (1)...(19): siRNA sense strand
gaaccagggaaaggagaga

SEQ ID NO: 500765 - RNA, 19 nt, Homo sapiens
  misc_RNA (1)...(19): siRNA sense strand
gauuacaauggaaacauca

SEQ ID NO: 500766 - RNA, 19 nt, Homo sapiens
  misc_RNA (1)...(19): siRNA sense strand
ggucaaccaggaacuagag

SEQ ID NO: 500767 - RNA, 19 nt, Homo sapiens
  misc_RNA (1)...(19): siRNA sense strand
aaggagagaugguggauua

SEQ ID NO: 500768 - RNA, 19 nt, Homo sapiens
  misc_RNA (1)...(19): siRNA sense strand
cagcugggcuuccugguuu

SEQ ID NO: 500769 - RNA, 19 nt, Homo sapiens
  misc_RNA (1)...(19): siRNA sense strand
ccaaagacaucuccaggau

SEQ ID NO: 500770 - RNA, 19 nt, Homo sapiens
  misc_RNA (1)...(19): siRNA sense strand
gagagaugguggauuacaa

SEQ ID NO: 500771 - RNA, 19 nt, Homo sapiens
  misc_RNA (1)...(19): siRNA sense strand
aaagggaccucgcgguaaa

SEQ ID NO: 500772 - RNA, 19 nt, Homo sapiens
  misc_RNA (1)...(19): siRNA sense strand
gaugguggauuacaaugga

SEQ ID NO: 500773 - RNA, 19 nt, Homo sapiens
  misc_RNA (1)...(19): siRNA sense strand
ggauuacaauggaaacauc

SEQ ID NO: 500774 - RNA, 19 nt, Homo sapiens
  misc_RNA (1)...(19): siRNA sense strand
caagggagaaccagggaaa

SEQ ID NO: 500775 - RNA, 19 nt, Homo sapiens
  misc_RNA (1)...(19): siRNA sense strand
ggaagcaggacuagaugga

SEQ ID NO: 500776 - RNA, 19 nt, Homo sapiens
  misc_RNA (1)...(19): siRNA sense strand
caaggcugcuggaacaagu

SEQ ID NO: 500777 - RNA, 19 nt, Homo sapiens
  misc_RNA (1)...(19): siRNA sense strand
gggagaagcaggugucgau

SEQ ID NO: 500778 - RNA, 19 nt, Homo sapiens
  misc_RNA (1)...(19): siRNA sense strand
ggagaacagggaccagaug

SEQ ID NO: 500779 - RNA, 19 nt, Homo sapiens
  misc_RNA (1)...(19): siRNA sense strand
acaauggaaacaucaauga

SEQ ID NO: 500780 - RNA, 19 nt, Homo sapiens
  misc_RNA (1)...(19): siRNA sense strand
gaaaggagagaugguggau

SEQ ID NO: 500781 - RNA, 19 nt, Homo sapiens
  misc_RNA (1)...(19): siRNA sense strand
cuagagguuucccuggauu

SEQ ID NO: 500782 - RNA, 19 nt, Homo sapiens
  misc_RNA (1)...(19): siRNA sense strand
gcaaauggagacggcuauu

SEQ ID NO: 500783 - RNA, 19 nt, Homo sapiens
  misc_RNA (1)...(19): siRNA sense strand
gaaaggcuuccagggagaa

SEQ ID NO: 500784 - RNA, 19 nt, Homo sapiens
  misc_RNA (1)...(19): siRNA sense strand
gcagcugggcuuccugguu

SEQ ID NO: 500785 - RNA, 19 nt, Homo sapiens
  misc_RNA (1)...(19): siRNA sense strand
ggagagaugguggauuaca

SEQ ID NO: 500786 - RNA, 19 nt, Homo sapiens
  misc_RNA (1)...(19): siRNA sense strand
gaugcuggcaacuccauug

SEQ ID NO: 500787 - RNA, 19 nt, Homo sapiens
  misc_RNA (1)...(19): siRNA sense strand
gcguggagcagcuggagaa

SEQ ID NO: 500788 - RNA, 19 nt, Homo sapiens
  misc_RNA (1)...(19): siRNA sense strand
uggagcagcuggagaacag

SEQ ID NO: 500789 - RNA, 19 nt, Homo sapiens
  misc_RNA (1)...(19): siRNA sense strand
ggauuuccgggucccauug

SEQ ID NO: 500790 - RNA, 19 nt, Homo sapiens
  misc_RNA (1)...(19): siRNA sense strand
gagaugguggauuacaaug

SEQ ID NO: 500791 - RNA, 19 nt, Homo sapiens
  misc_RNA (1)...(19): siRNA sense strand
uagcggagcgcacccacaa

SEQ ID NO: 500792 - RNA, 19 nt, Homo sapiens
  misc_RNA (1)...(19): siRNA sense strand
gggagaaccagggaaagga

SEQ ID NO: 500793 - RNA, 19 nt, Homo sapiens
  misc_RNA (1)...(19): siRNA sense strand
gagccaggccagcauccaa

SEQ ID NO: 500794 - RNA, 19 nt, Homo sapiens
  misc_RNA (1)...(19): siRNA sense strand
gguacuccaggaccaauug

SEQ ID NO: 500795 - RNA, 19 nt, Homo sapiens
  misc_RNA (1)...(19): siRNA sense strand
aaaggagacccugggauga

SEQ ID NO: 500796 - RNA, 19 nt, Homo sapiens
  misc_RNA (1)...(19): siRNA sense strand
gagccagggaucccaggaa

SEQ ID NO: 500797 - RNA, 19 nt, Homo sapiens
  misc_RNA (1)...(19): siRNA sense strand
gaaccagggaaaggagaga

SEQ ID NO: 500798 - RNA, 19 nt, Homo sapiens
  misc_RNA (1)...(19): siRNA sense strand
gauuacaauggaaacauca

SEQ ID NO: 500799 - RNA, 19 nt, Homo sapiens
  misc_RNA (1)...(19): siRNA sense strand
ggucaaccaggaacuagag

SEQ ID NO: 500800 - RNA, 19 nt, Homo sapiens
  misc_RNA (1)...(19): siRNA sense strand
aaggagagaugguggauua

SEQ ID NO: 500801 - RNA, 19 nt, Homo sapiens
  misc_RNA (1)...(19): siRNA sense strand
cagcugggcuuccugguuu

SEQ ID NO: 500802 - RNA, 19 nt, Homo sapiens
  misc_RNA (1)...(19): siRNA sense strand
ccaaagacaucuccaggau

SEQ ID NO: 500803 - RNA, 19 nt, Homo sapiens
  misc_RNA (1)...(19): siRNA sense strand
gagagaugguggauuacaa

SEQ ID NO: 500804 - RNA, 19 nt, Homo sapiens
  misc_RNA (1)...(19): siRNA sense strand
aaagggaccucgcgguaaa

SEQ ID NO: 500805 - RNA, 19 nt, Homo sapiens
  misc_RNA (1)...(19): siRNA sense strand
gaugguggauuacaaugga

SEQ ID NO: 500806 - RNA, 19 nt, Homo sapiens
  misc_RNA (1)...(19): siRNA sense strand
ggauuacaauggaaacauc

SEQ ID NO: 500807 - RNA, 19 nt, Homo sapiens
  misc_RNA (1)...(19): siRNA sense strand
caagggagaaccagggaaa

SEQ ID NO: 500808 - RNA, 19 nt, Homo sapiens
  misc_RNA (1)...(19): siRNA sense strand
ggaagcaggacuagaugga

SEQ ID NO: 500809 - RNA, 19 nt, Homo sapiens
  misc_RNA (1)...(19): siRNA sense strand
caaggcugcuggaacaagu

SEQ ID NO: 500810 - RNA, 19 nt, Homo sapiens
  misc_RNA (1)...(19): siRNA sense strand
gggagaagcaggugucgau

SEQ ID NO: 500811 - RNA, 19 nt, Homo sapiens
  misc_RNA (1)...(19): siRNA sense strand
ggagaacagggaccagaug

SEQ ID NO: 500812 - RNA, 19 nt, Homo sapiens
  misc_RNA (1)...(19): siRNA sense strand
acaauggaaacaucaauga

SEQ ID NO: 500813 - RNA, 19 nt, Homo sapiens
  misc_RNA (1)...(19): siRNA sense strand
gaaaggagagaugguggau

SEQ ID NO: 500814 - RNA, 19 nt, Homo sapiens
  misc_RNA (1)...(19): siRNA sense strand
cuagagguuucccuggauu

SEQ ID NO: 500815 - RNA, 19 nt, Homo sapiens
  misc_RNA (1)...(19): siRNA sense strand
gcaaauggagacggcuauu

SEQ ID NO: 500816 - RNA, 19 nt, Homo sapiens
  misc_RNA (1)...(19): siRNA sense strand
gaaaggcuuccagggagaa

SEQ ID NO: 500817 - RNA, 19 nt, Homo sapiens
  misc_RNA (1)...(19): siRNA sense strand
gcagcugggcuuccugguu

SEQ ID NO: 500818 - RNA, 19 nt, Homo sapiens
  misc_RNA (1)...(19): siRNA sense strand
ggagagaugguggauuaca

SEQ ID NO: 500819 - RNA, 19 nt, Homo sapiens
  misc_RNA (1)...(19): siRNA sense strand
gaugcuggcaacuccauug

SEQ ID NO: 500820 - RNA, 19 nt, Homo sapiens
  misc_RNA (1)...(19): siRNA sense strand
gcguggagcagcuggagaa

SEQ ID NO: 500821 - RNA, 19 nt, Homo sapiens
  misc_RNA (1)...(19): siRNA sense strand
uggagcagcuggagaacag

SEQ ID NO: 500822 - RNA, 19 nt, Homo sapiens
  misc_RNA (1)...(19): siRNA sense strand
ggauuuccgggucccauug

SEQ ID NO: 500823 - RNA, 19 nt, Homo sapiens
  misc_RNA (1)...(19): siRNA sense strand
gagaugguggauuacaaug

SEQ ID NO: 500824 - RNA, 19 nt, Homo sapiens
  misc_RNA (1)...(19): siRNA sense strand
uagcggagcgcacccacaa

SEQ ID NO: 500825 - RNA, 19 nt, Homo sapiens
  misc_RNA (1)...(19): siRNA sense strand
gggagaaccagggaaagga

SEQ ID NO: 500826 - RNA, 19 nt, Homo sapiens
  misc_RNA (1)...(19): siRNA sense strand
gagccaggccagcauccaa

SEQ ID NO: 500827 - RNA, 19 nt, Homo sapiens
  misc_RNA (1)...(19): siRNA sense strand
gguacuccaggaccaauug

SEQ ID NO: 500828 - RNA, 19 nt, Homo sapiens
  misc_RNA (1)...(19): siRNA sense strand
aaaggagacccugggauga

SEQ ID NO: 500829 - RNA, 19 nt, Homo sapiens
  misc_RNA (1)...(19): siRNA sense strand
gagccagggaucccaggaa

SEQ ID NO: 500830 - RNA, 19 nt, Homo sapiens
  misc_RNA (1)...(19): siRNA sense strand
gaaccagggaaaggagaga

SEQ ID NO: 500831 - RNA, 19 nt, Homo sapiens
  misc_RNA (1)...(19): siRNA sense strand
gauuacaauggaaacauca

SEQ ID NO: 500832 - RNA, 19 nt, Homo sapiens
  misc_RNA (1)...(19): siRNA sense strand
ggucaaccaggaacuagag

SEQ ID NO: 500833 - RNA, 19 nt, Homo sapiens
  misc_RNA (1)...(19): siRNA sense strand
aaggagagaugguggauua

SEQ ID NO: 500834 - RNA, 19 nt, Homo sapiens
  misc_RNA (1)...(19): siRNA sense strand
cagcugggcuuccugguuu

SEQ ID NO: 500835 - RNA, 19 nt, Homo sapiens
  misc_RNA (1)...(19): siRNA sense strand
ccaaagacaucuccaggau

SEQ ID NO: 500836 - RNA, 19 nt, Homo sapiens
  misc_RNA (1)...(19): siRNA sense strand
gagagaugguggauuacaa

SEQ ID NO: 500837 - RNA, 19 nt, Homo sapiens
  misc_RNA (1)...(19): siRNA sense strand
aaagggaccucgcgguaaa

SEQ ID NO: 500838 - RNA, 19 nt, Homo sapiens
  misc_RNA (1)...(19): siRNA sense strand
gaugguggauuacaaugga

SEQ ID NO: 500839 - RNA, 19 nt, Homo sapiens
  misc_RNA (1)...(19): siRNA sense strand
ggauuacaauggaaacauc

SEQ ID NO: 500840 - RNA, 19 nt, Homo sapiens
  misc_RNA (1)...(19): siRNA sense strand
caagggagaaccagggaaa

SEQ ID NO: 500841 - RNA, 19 nt, Homo sapiens
  misc_RNA (1)...(19): siRNA sense strand
ggaagcaggacuagaugga

SEQ ID NO: 500842 - RNA, 19 nt, Homo sapiens
  misc_RNA (1)...(19): siRNA sense strand
caaggcugcuggaacaagu

SEQ ID NO: 500843 - RNA, 19 nt, Homo sapiens
  misc_RNA (1)...(19): siRNA sense strand
gggagaagcaggugucgau

SEQ ID NO: 500844 - RNA, 19 nt, Homo sapiens
  misc_RNA (1)...(19): siRNA sense strand
ggagaacagggaccagaug

SEQ ID NO: 500845 - RNA, 19 nt, Homo sapiens
  misc_RNA (1)...(19): siRNA sense strand
acaauggaaacaucaauga

SEQ ID NO: 500846 - RNA, 19 nt, Homo sapiens
  misc_RNA (1)...(19): siRNA sense strand
gaaaggagagaugguggau

SEQ ID NO: 500847 - RNA, 19 nt, Homo sapiens
  misc_RNA (1)...(19): siRNA sense strand
cuagagguuucccuggauu

SEQ ID NO: 500848 - RNA, 19 nt, Homo sapiens
  misc_RNA (1)...(19): siRNA sense strand
gcaaauggagacggcuauu

SEQ ID NO: 500849 - RNA, 19 nt, Homo sapiens
  misc_RNA (1)...(19): siRNA sense strand
gaaaggcuuccagggagaa

SEQ ID NO: 500850 - RNA, 19 nt, Homo sapiens
  misc_RNA (1)...(19): siRNA sense strand
gcagcugggcuuccugguu

SEQ ID NO: 500851 - RNA, 19 nt, Homo sapiens
  misc_RNA (1)...(19): siRNA sense strand
ggagagaugguggauuaca

SEQ ID NO: 500852 - RNA, 19 nt, Homo sapiens
  misc_RNA (1)...(19): siRNA sense strand
gaugcuggcaacuccauug

SEQ ID NO: 500853 - RNA, 19 nt, Homo sapiens
  misc_RNA (1)...(19): siRNA sense strand
gcguggagcagcuggagaa

SEQ ID NO: 500854 - RNA, 19 nt, Homo sapiens
  misc_RNA (1)...(19): siRNA sense strand
uggagcagcuggagaacag

SEQ ID NO: 500855 - RNA, 19 nt, Homo sapiens
  misc_RNA (1)...(19): siRNA sense strand
ggauuuccgggucccauug

SEQ ID NO: 500856 - RNA, 19 nt, Homo sapiens
  misc_RNA (1)...(19): siRNA sense strand
gagaugguggauuacaaug

SEQ ID NO: 500857 - RNA, 19 nt, Homo sapiens
  misc_RNA (1)...(19): siRNA sense strand
uagcggagcgcacccacaa

SEQ ID NO: 500858 - RNA, 19 nt, Homo sapiens
  misc_RNA (1)...(19): siRNA sense strand
gggagaaccagggaaagga

SEQ ID NO: 500859 - RNA, 19 nt, Homo sapiens
  misc_RNA (1)...(19): siRNA sense strand
gagccaggccagcauccaa

SEQ ID NO: 500860 - RNA, 19 nt, Homo sapiens
  misc_RNA (1)...(19): siRNA sense strand
gguacuccaggaccaauug

SEQ ID NO: 500861 - RNA, 19 nt, Homo sapiens
  misc_RNA (1)...(19): siRNA sense strand
aaaggagacccugggauga

SEQ ID NO: 500862 - RNA, 19 nt, Homo sapiens
  misc_RNA (1)...(19): siRNA sense strand
gagccagggaucccaggaa

SEQ ID NO: 500863 - RNA, 19 nt, Homo sapiens
  misc_RNA (1)...(19): siRNA sense strand
gaaccagggaaaggagaga

SEQ ID NO: 500864 - RNA, 19 nt, Homo sapiens
  misc_RNA (1)...(19): siRNA sense strand
gauuacaauggaaacauca

SEQ ID NO: 500865 - RNA, 19 nt, Homo sapiens
  misc_RNA (1)...(19): siRNA sense strand
ggucaaccaggaacuagag

SEQ ID NO: 500866 - RNA, 19 nt, Homo sapiens
  misc_RNA (1)...(19): siRNA sense strand
aaggagagaugguggauua

SEQ ID NO: 500867 - RNA, 19 nt, Homo sapiens
  misc_RNA (1)...(19): siRNA sense strand
cagcugggcuuccugguuu

SEQ ID NO: 500868 - RNA, 19 nt, Homo sapiens
  misc_RNA (1)...(19): siRNA sense strand
ccaaagacaucuccaggau

SEQ ID NO: 500869 - RNA, 19 nt, Homo sapiens
  misc_RNA (1)...(19): siRNA sense strand
gagagaugguggauuacaa

SEQ ID NO: 500870 - RNA, 19 nt, Homo sapiens
  misc_RNA (1)...(19): siRNA sense strand
aaagggaccucgcgguaaa

SEQ ID NO: 500871 - RNA, 19 nt, Homo sapiens
  misc_RNA (1)...(19): siRNA sense strand
gaugguggauuacaaugga

SEQ ID NO: 500872 - RNA, 19 nt, Homo sapiens
  misc_RNA (1)...(19): siRNA sense strand
ggauuacaauggaaacauc

SEQ ID NO: 500873 - RNA, 19 nt, Homo sapiens
  misc_RNA (1)...(19): siRNA sense strand
caagggagaaccagggaaa

SEQ ID NO: 500874 - RNA, 19 nt, Homo sapiens
  misc_RNA (1)...(19): siRNA sense strand
ggaagcaggacuagaugga

SEQ ID NO: 500875 - RNA, 19 nt, Homo sapiens
  misc_RNA (1)...(19): siRNA sense strand
caaggcugcuggaacaagu

SEQ ID NO: 500876 - RNA, 19 nt, Homo sapiens
  misc_RNA (1)...(19): siRNA sense strand
gggagaagcaggugucgau

SEQ ID NO: 500877 - RNA, 19 nt, Homo sapiens
  misc_RNA (1)...(19): siRNA sense strand
ggagaacagggaccagaug

SEQ ID NO: 500878 - RNA, 19 nt, Homo sapiens
  misc_RNA (1)...(19): siRNA sense strand
acaauggaaacaucaauga

SEQ ID NO: 500879 - RNA, 19 nt, Homo sapiens
  misc_RNA (1)...(19): siRNA sense strand
gaaaggagagaugguggau

SEQ ID NO: 500880 - RNA, 19 nt, Homo sapiens
  misc_RNA (1)...(19): siRNA sense strand
cuagagguuucccuggauu

SEQ ID NO: 500881 - RNA, 19 nt, Homo sapiens
  misc_RNA (1)...(19): siRNA sense strand
gcaaauggagacggcuauu

SEQ ID NO: 500882 - RNA, 19 nt, Homo sapiens
  misc_RNA (1)...(19): siRNA sense strand
gaaaggcuuccagggagaa

SEQ ID NO: 500883 - RNA, 19 nt, Homo sapiens
  misc_RNA (1)...(19): siRNA sense strand
gcagcugggcuuccugguu

SEQ ID NO: 500884 - RNA, 19 nt, Homo sapiens
  misc_RNA (1)...(19): siRNA sense strand
ggagagaugguggauuaca

SEQ ID NO: 500885 - RNA, 19 nt, Homo sapiens
  misc_RNA (1)...(19): siRNA sense strand
gaugcuggcaacuccauug

SEQ ID NO: 500886 - RNA, 19 nt, Homo sapiens
  misc_RNA (1)...(19): siRNA sense strand
gcguggagcagcuggagaa

SEQ ID NO: 500887 - RNA, 19 nt, Homo sapiens
  misc_RNA (1)...(19): siRNA sense strand
uggagcagcuggagaacag

SEQ ID NO: 500888 - RNA, 19 nt, Homo sapiens
  misc_RNA (1)...(19): siRNA sense strand
ggauuuccgggucccauug

SEQ ID NO: 500889 - RNA, 19 nt, Homo sapiens
  misc_RNA (1)...(19): siRNA sense strand
gagaugguggauuacaaug

SEQ ID NO: 500890 - RNA, 19 nt, Homo sapiens
  misc_RNA (1)...(19): siRNA sense strand
uagcggagcgcacccacaa

SEQ ID NO: 500891 - RNA, 19 nt, Homo sapiens
  misc_RNA (1)...(19): siRNA sense strand
gggagaaccagggaaagga

SEQ ID NO: 500892 - RNA, 19 nt, Homo sapiens
  misc_RNA (1)...(19): siRNA sense strand
gagccaggccagcauccaa

SEQ ID NO: 500893 - RNA, 19 nt, Homo sapiens
  misc_RNA (1)...(19): siRNA sense strand
gguacuccaggaccaauug

SEQ ID NO: 500894 - RNA, 19 nt, Homo sapiens
  misc_RNA (1)...(19): siRNA sense strand
aaaggagacccugggauga

SEQ ID NO: 500895 - RNA, 19 nt, Homo sapiens
  misc_RNA (1)...(19): siRNA sense strand
gagccagggaucccaggaa

SEQ ID NO: 500896 - RNA, 19 nt, Homo sapiens
  misc_RNA (1)...(19): siRNA sense strand
gaaccagggaaaggagaga

SEQ ID NO: 500897 - RNA, 19 nt, Homo sapiens
  misc_RNA (1)...(19): siRNA sense strand
gauuacaauggaaacauca

SEQ ID NO: 500898 - RNA, 19 nt, Homo sapiens
  misc_RNA (1)...(19): siRNA sense strand
ggucaaccaggaacuagag

SEQ ID NO: 500899 - RNA, 19 nt, Homo sapiens
  misc_RNA (1)...(19): siRNA sense strand
aaggagagaugguggauua

SEQ ID NO: 500900 - RNA, 19 nt, Homo sapiens
  misc_RNA (1)...(19): siRNA sense strand
cagcugggcuuccugguuu

SEQ ID NO: 500901 - RNA, 19 nt, Homo sapiens
  misc_RNA (1)...(19): siRNA sense strand
ccaaagacaucuccaggau

SEQ ID NO: 500902 - RNA, 19 nt, Homo sapiens
  misc_RNA (1)...(19): siRNA sense strand
gagagaugguggauuacaa

SEQ ID NO: 500903 - RNA, 19 nt, Homo sapiens
  misc_RNA (1)...(19): siRNA sense strand
aaagggaccucgcgguaaa

SEQ ID NO: 500904 - RNA, 19 nt, Homo sapiens
  misc_RNA (1)...(19): siRNA sense strand
gaugguggauuacaaugga

SEQ ID NO: 500905 - RNA, 19 nt, Homo sapiens
  misc_RNA (1)...(19): siRNA sense strand
ggauuacaauggaaacauc

SEQ ID NO: 500906 - RNA, 19 nt, Homo sapiens
  misc_RNA (1)...(19): siRNA sense strand
caagggagaaccagggaaa

SEQ ID NO: 500907 - RNA, 19 nt, Homo sapiens
  misc_RNA (1)...(19): siRNA sense strand
ggaagcaggacuagaugga

SEQ ID NO: 500908 - RNA, 19 nt, Homo sapiens
  misc_RNA (1)...(19): siRNA sense strand
caaggcugcuggaacaagu

SEQ ID NO: 500909 - RNA, 19 nt, Homo sapiens
  misc_RNA (1)...(19): siRNA sense strand
gggagaagcaggugucgau

SEQ ID NO: 500910 - RNA, 19 nt, Homo sapiens
  misc_RNA (1)...(19): siRNA sense strand
ggagaacagggaccagaug

SEQ ID NO: 500911 - RNA, 19 nt, Homo sapiens
  misc_RNA (1)...(19): siRNA sense strand
acaauggaaacaucaauga

SEQ ID NO: 500912 - RNA, 19 nt, Homo sapiens
  misc_RNA (1)...(19): siRNA sense strand
gaaaggagagaugguggau

SEQ ID NO: 500913 - RNA, 19 nt, Homo sapiens
  misc_RNA (1)...(19): siRNA sense strand
cuagagguuucccuggauu

SEQ ID NO: 500914 - RNA, 19 nt, Homo sapiens
  misc_RNA (1)...(19): siRNA sense strand
gcaaauggagacggcuauu

SEQ ID NO: 500915 - RNA, 19 nt, Homo sapiens
  misc_RNA (1)...(19): siRNA sense strand
gaaaggcuuccagggagaa

SEQ ID NO: 500916 - RNA, 19 nt, Homo sapiens
  misc_RNA (1)...(19): siRNA sense strand
gcagcugggcuuccugguu

SEQ ID NO: 500917 - RNA, 19 nt, Homo sapiens
  misc_RNA (1)...(19): siRNA sense strand
ggagagaugguggauuaca

SEQ ID NO: 500918 - RNA, 19 nt, Homo sapiens
  misc_RNA (1)...(19): siRNA sense strand
gaugcuggcaacuccauug

SEQ ID NO: 500919 - RNA, 19 nt, Homo sapiens
  misc_RNA (1)...(19): siRNA sense strand
gcguggagcagcuggagaa

SEQ ID NO: 500920 - RNA, 19 nt, Homo sapiens
  misc_RNA (1)...(19): siRNA sense strand
uggagcagcuggagaacag

SEQ ID NO: 500921 - RNA, 19 nt, Homo sapiens
  misc_RNA (1)...(19): siRNA sense strand
ggauuuccgggucccauug

SEQ ID NO: 500922 - RNA, 19 nt, Homo sapiens
  misc_RNA (1)...(19): siRNA sense strand
gagaugguggauuacaaug

SEQ ID NO: 500923 - RNA, 19 nt, Homo sapiens
  misc_RNA (1)...(19): siRNA sense strand
uagcggagcgcacccacaa

SEQ ID NO: 500924 - RNA, 19 nt, Homo sapiens
  misc_RNA (1)...(19): siRNA sense strand
gggagaaccagggaaagga

SEQ ID NO: 500925 - RNA, 19 nt, Homo sapiens
  misc_RNA (1)...(19): siRNA sense strand
gagccaggccagcauccaa

SEQ ID NO: 500926 - RNA, 19 nt, Homo sapiens
  misc_RNA (1)...(19): siRNA sense strand
gguacuccaggaccaauug

SEQ ID NO: 500927 - RNA, 19 nt, Homo sapiens
  misc_RNA (1)...(19): siRNA sense strand
aaaggagacccugggauga

SEQ ID NO: 500928 - RNA, 19 nt, Homo sapiens
  misc_RNA (1)...(19): siRNA sense strand
gagccagggaucccaggaa

SEQ ID NO: 500929 - RNA, 19 nt, Homo sapiens
  misc_RNA (1)...(19): siRNA sense strand
gaaccagggaaaggagaga

SEQ ID NO: 500930 - RNA, 19 nt, Homo sapiens
  misc_RNA (1)...(19): siRNA sense strand
gauuacaauggaaacauca

SEQ ID NO: 500931 - RNA, 19 nt, Homo sapiens
  misc_RNA (1)...(19): siRNA sense strand
ggucaaccaggaacuagag

SEQ ID NO: 500932 - RNA, 19 nt, Homo sapiens
  misc_RNA (1)...(19): siRNA sense strand
aaggagagaugguggauua

SEQ ID NO: 500933 - RNA, 19 nt, Homo sapiens
  misc_RNA (1)...(19): siRNA sense strand
cagcugggcuuccugguuu

SEQ ID NO: 500934 - RNA, 19 nt, Homo sapiens
  misc_RNA (1)...(19): siRNA sense strand
ccaaagacaucuccaggau

SEQ ID NO: 500935 - RNA, 19 nt, Homo sapiens
  misc_RNA (1)...(19): siRNA sense strand
gagagaugguggauuacaa

SEQ ID NO: 500936 - RNA, 19 nt, Homo sapiens
  misc_RNA (1)...(19): siRNA sense strand
aaagggaccucgcgguaaa

SEQ ID NO: 500937 - RNA, 19 nt, Homo sapiens
  misc_RNA (1)...(19): siRNA sense strand
gaugguggauuacaaugga

SEQ ID NO: 500938 - RNA, 19 nt, Homo sapiens
  misc_RNA (1)...(19): siRNA sense strand
ggauuacaauggaaacauc

SEQ ID NO: 500939 - RNA, 19 nt, Homo sapiens
  misc_RNA (1)...(19): siRNA sense strand
caagggagaaccagggaaa

SEQ ID NO: 500940 - RNA, 19 nt, Homo sapiens
  misc_RNA (1)...(19): siRNA sense strand
ggaagcaggacuagaugga

SEQ ID NO: 500941 - RNA, 19 nt, Homo sapiens
  misc_RNA (1)...(19): siRNA sense strand
caaggcugcuggaacaagu

SEQ ID NO: 500942 - RNA, 19 nt, Homo sapiens
  misc_RNA (1)...(19): siRNA sense strand
gggagaagcaggugucgau

SEQ ID NO: 500943 - RNA, 19 nt, Homo sapiens
  misc_RNA (1)...(19): siRNA sense strand
ggagaacagggaccagaug

SEQ ID NO: 500944 - RNA, 19 nt, Homo sapiens
  misc_RNA (1)...(19): siRNA sense strand
acaauggaaacaucaauga

SEQ ID NO: 500945 - RNA, 19 nt, Homo sapiens
  misc_RNA (1)...(19): siRNA sense strand
gaaaggagagaugguggau

SEQ ID NO: 500946 - RNA, 19 nt, Homo sapiens
  misc_RNA (1)...(19): siRNA sense strand
cuagagguuucccuggauu

SEQ ID NO: 500947 - RNA, 19 nt, Homo sapiens
  misc_RNA (1)...(19): siRNA sense strand
gcaaauggagacggcuauu

SEQ ID NO: 500948 - RNA, 19 nt, Homo sapiens
  misc_RNA (1)...(19): siRNA sense strand
gaaaggcuuccagggagaa

SEQ ID NO: 500949 - RNA, 19 nt, Homo sapiens
  misc_RNA (1)...(19): siRNA sense strand
gcagcugggcuuccugguu

SEQ ID NO: 500950 - RNA, 19 nt, Homo sapiens
  misc_RNA (1)...(19): siRNA sense strand
ggagagaugguggauuaca

SEQ ID NO: 500951 - RNA, 19 nt, Homo sapiens
  misc_RNA (1)...(19): siRNA sense strand
gaugcuggcaacuccauug

SEQ ID NO: 500952 - RNA, 19 nt, Homo sapiens
  misc_RNA (1)...(19): siRNA sense strand
gcguggagcagcuggagaa

SEQ ID NO: 500953 - RNA, 19 nt, Homo sapiens
  misc_RNA (1)...(19): siRNA sense strand
uggagcagcuggagaacag

SEQ ID NO: 500954 - RNA, 19 nt, Homo sapiens
  misc_RNA (1)...(19): siRNA sense strand
ggauuuccgggucccauug

SEQ ID NO: 500955 - RNA, 19 nt, Homo sapiens
  misc_RNA (1)...(19): siRNA sense strand
gagaugguggauuacaaug

SEQ ID NO: 500956 - RNA, 19 nt, Homo sapiens
  misc_RNA (1)...(19): siRNA sense strand
uagcggagcgcacccacaa

SEQ ID NO: 500957 - RNA, 19 nt, Homo sapiens
  misc_RNA (1)...(19): siRNA sense strand
gggagaaccagggaaagga

SEQ ID NO: 500958 - RNA, 19 nt, Homo sapiens
  misc_RNA (1)...(19): siRNA sense strand
gagccaggccagcauccaa

SEQ ID NO: 500959 - RNA, 19 nt, Homo sapiens
  misc_RNA (1)...(19): siRNA sense strand
gguacuccaggaccaauug

SEQ ID NO: 500960 - RNA, 19 nt, Homo sapiens
  misc_RNA (1)...(19): siRNA sense strand
aaaggagacccugggauga

SEQ ID NO: 500961 - RNA, 19 nt, Homo sapiens
  misc_RNA (1)...(19): siRNA sense strand
gagccagggaucccaggaa

SEQ ID NO: 500962 - RNA, 19 nt, Homo sapiens
  misc_RNA (1)...(19): siRNA sense strand
gaaccagggaaaggagaga

SEQ ID NO: 500963 - RNA, 19 nt, Homo sapiens
  misc_RNA (1)...(19): siRNA sense strand
gauuacaauggaaacauca

SEQ ID NO: 500964 - RNA, 19 nt, Homo sapiens
  misc_RNA (1)...(19): siRNA sense strand
ggucaaccaggaacuagag

SEQ ID NO: 500965 - RNA, 19 nt, Homo sapiens
  misc_RNA (1)...(19): siRNA sense strand
aaggagagaugguggauua

SEQ ID NO: 500966 - RNA, 19 nt, Homo sapiens
  misc_RNA (1)...(19): siRNA sense strand
cagcugggcuuccugguuu

SEQ ID NO: 500967 - RNA, 19 nt, Homo sapiens
  misc_RNA (1)...(19): siRNA sense strand
ccaaagacaucuccaggau

SEQ ID NO: 500968 - RNA, 19 nt, Homo sapiens
  misc_RNA (1)...(19): siRNA sense strand
gagagaugguggauuacaa

SEQ ID NO: 500969 - RNA, 19 nt, Homo sapiens
  misc_RNA (1)...(19): siRNA sense strand
aaagggaccucgcgguaaa

SEQ ID NO: 500970 - RNA, 19 nt, Homo sapiens
  misc_RNA (1)...(19): siRNA sense strand
gaugguggauuacaaugga

SEQ ID NO: 500971 - RNA, 19 nt, Homo sapiens
  misc_RNA (1)...(19): siRNA sense strand
ggauuacaauggaaacauc

SEQ ID NO: 500972 - RNA, 19 nt, Homo sapiens
  misc_RNA (1)...(19): siRNA sense strand
gggcgaagauggcuuacca

SEQ ID NO: 500973 - RNA, 19 nt, Homo sapiens
  misc_RNA (1)...(19): siRNA sense strand
caagggagaaccagggaaa

SEQ ID NO: 500974 - RNA, 19 nt, Homo sapiens
  misc_RNA (1)...(19): siRNA sense strand
ggaagcaggacuagaugga

SEQ ID NO: 500975 - RNA, 19 nt, Homo sapiens
  misc_RNA (1)...(19): siRNA sense strand
caaggcugcuggaacaagu

SEQ ID NO: 500976 - RNA, 19 nt, Homo sapiens
  misc_RNA (1)...(19): siRNA sense strand
gggagaagcaggugucgau

SEQ ID NO: 500977 - RNA, 19 nt, Homo sapiens
  misc_RNA (1)...(19): siRNA sense strand
ggagaacagggaccagaug

SEQ ID NO: 500978 - RNA, 19 nt, Homo sapiens
  misc_RNA (1)...(19): siRNA sense strand
acaauggaaacaucaauga

SEQ ID NO: 500979 - RNA, 19 nt, Homo sapiens
  misc_RNA (1)...(19): siRNA sense strand
gaaaggagagaugguggau

SEQ ID NO: 500980 - RNA, 19 nt, Homo sapiens
  misc_RNA (1)...(19): siRNA sense strand
cuagagguuucccuggauu

SEQ ID NO: 500981 - RNA, 19 nt, Homo sapiens
  misc_RNA (1)...(19): siRNA sense strand
gcaaauggagacggcuauu

SEQ ID NO: 500982 - RNA, 19 nt, Homo sapiens
  misc_RNA (1)...(19): siRNA sense strand
gaaaggcuuccagggagaa

SEQ ID NO: 500983 - RNA, 19 nt, Homo sapiens
  misc_RNA (1)...(19): siRNA sense strand
gcagcugggcuuccugguu

SEQ ID NO: 500984 - RNA, 19 nt, Homo sapiens
  misc_RNA (1)...(19): siRNA sense strand
ggagagaugguggauuaca

SEQ ID NO: 500985 - RNA, 19 nt, Homo sapiens
  misc_RNA (1)...(19): siRNA sense strand
gaugcuggcaacuccauug

SEQ ID NO: 500986 - RNA, 19 nt, Homo sapiens
  misc_RNA (1)...(19): siRNA sense strand
gcguggagcagcuggagaa

SEQ ID NO: 500987 - RNA, 19 nt, Homo sapiens
  misc_RNA (1)...(19): siRNA sense strand
uggagcagcuggagaacag

SEQ ID NO: 500988 - RNA, 19 nt, Homo sapiens
  misc_RNA (1)...(19): siRNA sense strand
ggauuuccgggucccauug

SEQ ID NO: 500989 - RNA, 19 nt, Homo sapiens
  misc_RNA (1)...(19): siRNA sense strand
gagaugguggauuacaaug

SEQ ID NO: 500990 - RNA, 19 nt, Homo sapiens
  misc_RNA (1)...(19): siRNA sense strand
uagcggagcgcacccacaa

SEQ ID NO: 500991 - RNA, 19 nt, Homo sapiens
  misc_RNA (1)...(19): siRNA sense strand
gggagaaccagggaaagga

SEQ ID NO: 500992 - RNA, 19 nt, Homo sapiens
  misc_RNA (1)...(19): siRNA sense strand
gagccaggccagcauccaa

SEQ ID NO: 500993 - RNA, 19 nt, Homo sapiens
  misc_RNA (1)...(19): siRNA sense strand
gguacuccaggaccaauug

SEQ ID NO: 500994 - RNA, 19 nt, Homo sapiens
  misc_RNA (1)...(19): siRNA sense strand
aaaggagacccugggauga

SEQ ID NO: 500995 - RNA, 19 nt, Homo sapiens
  misc_RNA (1)...(19): siRNA sense strand
gagccagggaucccaggaa

SEQ ID NO: 500996 - RNA, 19 nt, Homo sapiens
  misc_RNA (1)...(19): siRNA sense strand
gaaccagggaaaggagaga

SEQ ID NO: 500997 - RNA, 19 nt, Homo sapiens
  misc_RNA (1)...(19): siRNA sense strand
gauuacaauggaaacauca

SEQ ID NO: 500998 - RNA, 19 nt, Homo sapiens
  misc_RNA (1)...(19): siRNA sense strand
ggucaaccaggaacuagag

SEQ ID NO: 500999 - RNA, 19 nt, Homo sapiens
  misc_RNA (1)...(19): siRNA sense strand
gcccugagaugcugaaaca

SEQ ID NO: 501000 - RNA, 19 nt, Homo sapiens
  misc_RNA (1)...(19): siRNA sense strand
gaaacacugcgccaacuuc

SEQ ID NO: 501001 - RNA, 19 nt, Homo sapiens
  misc_RNA (1)...(19): siRNA sense strand
ccgagcugcugcugcguua

SEQ ID NO: 501002 - RNA, 19 nt, Homo sapiens
  misc_RNA (1)...(19): siRNA sense strand
aggcuaaugugcugacuga

SEQ ID NO: 501003 - RNA, 19 nt, Homo sapiens
  misc_RNA (1)...(19): siRNA sense strand
agacccagcuguccaccaa

SEQ ID NO: 501004 - RNA, 19 nt, Homo sapiens
  misc_RNA (1)...(19): siRNA sense strand
ucccagagcuguggaagga

SEQ ID NO: 501005 - RNA, 19 nt, Homo sapiens
  misc_RNA (1)...(19): siRNA sense strand
uccaagcccuguuccaaga

SEQ ID NO: 501006 - RNA, 19 nt, Homo sapiens
  misc_RNA (1)...(19): siRNA sense strand
caagcccuguuccaagaug

SEQ ID NO: 501007 - RNA, 19 nt, Homo sapiens
  misc_RNA (1)...(19): siRNA sense strand
caacugggagccugaaguc

SEQ ID NO: 501008 - RNA, 19 nt, Homo sapiens
  misc_RNA (1)...(19): siRNA sense strand
caacaugauuguggagacu

SEQ ID NO: 501009 - RNA, 19 nt, Homo sapiens
  misc_RNA (1)...(19): siRNA sense strand
cuuaaugccuauccuugug

SEQ ID NO: 501010 - RNA, 19 nt, Homo sapiens
  misc_RNA (1)...(19): siRNA sense strand
gguccaagcccuguuccaa

SEQ ID NO: 501011 - RNA, 19 nt, Homo sapiens
  misc_RNA (1)...(19): siRNA sense strand
uggaaguccugcuuaaugc

SEQ ID NO: 501012 - RNA, 19 nt, Homo sapiens
  misc_RNA (1)...(19): siRNA sense strand
gcccuggaaguccugcuua

SEQ ID NO: 501013 - RNA, 19 nt, Homo sapiens
  misc_RNA (1)...(19): siRNA sense strand
agcaacauguggcucugua

SEQ ID NO: 501014 - RNA, 19 nt, Homo sapiens
  misc_RNA (1)...(19): siRNA sense strand
ucgccgcacugcuggacua

SEQ ID NO: 501015 - RNA, 19 nt, Homo sapiens
  misc_RNA (1)...(19): siRNA sense strand
gcccgaggcuacacagacu

SEQ ID NO: 501016 - RNA, 19 nt, Homo sapiens
  misc_RNA (1)...(19): siRNA sense strand
gcuuaaugccuauccuugu

SEQ ID NO: 501017 - RNA, 19 nt, Homo sapiens
  misc_RNA (1)...(19): siRNA sense strand
cuggaaguccugcuuaaug

SEQ ID NO: 501018 - RNA, 19 nt, Homo sapiens
  misc_RNA (1)...(19): siRNA sense strand
ccuggaggcuggagcugau

SEQ ID NO: 501019 - RNA, 19 nt, Homo sapiens
  misc_RNA (1)...(19): siRNA sense strand
cccuggaaguccugcuuaa

SEQ ID NO: 501020 - RNA, 19 nt, Homo sapiens
  misc_RNA (1)...(19): siRNA sense strand
agagagaccuuccccuuca

SEQ ID NO: 501021 - RNA, 19 nt, Homo sapiens
  misc_RNA (1)...(19): siRNA sense strand
ugaaacacugcgccaacuu

SEQ ID NO: 501022 - RNA, 19 nt, Homo sapiens
  misc_RNA (1)...(19): siRNA sense strand
ggaugcagaugcugaugaa

SEQ ID NO: 501023 - RNA, 19 nt, Homo sapiens
  misc_RNA (1)...(19): siRNA sense strand
cgacccagcuggcaaggaa

SEQ ID NO: 501024 - RNA, 19 nt, Homo sapiens
  misc_RNA (1)...(19): siRNA sense strand
gaauucauccgagcaguca

SEQ ID NO: 501025 - RNA, 19 nt, Homo sapiens
  misc_RNA (1)...(19): siRNA sense strand
ccacgaggcuaugggagau

SEQ ID NO: 501026 - RNA, 19 nt, Homo sapiens
  misc_RNA (1)...(19): siRNA sense strand
cauccgagcagucaucuuc

SEQ ID NO: 501027 - RNA, 19 nt, Homo sapiens
  misc_RNA (1)...(19): siRNA sense strand
ugaaaucaguagccuuugc

SEQ ID NO: 501028 - RNA, 19 nt, Homo sapiens
  misc_RNA (1)...(19): siRNA sense strand
agugaaaucaguagccuuu

SEQ ID NO: 501029 - RNA, 19 nt, Homo sapiens
  misc_RNA (1)...(19): siRNA sense strand
gaaaucaguagccuuugcu

SEQ ID NO: 501030 - RNA, 19 nt, Homo sapiens
  misc_RNA (1)...(19): siRNA sense strand
uagcaaaagugaaaucagu

SEQ ID NO: 501031 - RNA, 19 nt, Homo sapiens
  misc_RNA (1)...(19): siRNA sense strand
ucaagacacagacagaaua

SEQ ID NO: 501032 - RNA, 19 nt, Homo sapiens
  misc_RNA (1)...(19): siRNA sense strand
gcugcgugcugaucaugua

SEQ ID NO: 501033 - RNA, 19 nt, Homo sapiens
  misc_RNA (1)...(19): siRNA sense strand
gggcugccauggacagugu

SEQ ID NO: 501034 - RNA, 19 nt, Homo sapiens
  misc_RNA (1)...(19): siRNA sense strand
uguacaaggccaucuggua

SEQ ID NO: 501035 - RNA, 19 nt, Homo sapiens
  misc_RNA (1)...(19): siRNA sense strand
gacagugugccucugauca

SEQ ID NO: 501036 - RNA, 19 nt, Homo sapiens
  misc_RNA (1)...(19): siRNA sense strand
ggacagugugccucugauc

SEQ ID NO: 501037 - RNA, 19 nt, Homo sapiens
  misc_RNA (1)...(19): siRNA sense strand
caucaagacacagacagaa

SEQ ID NO: 501038 - RNA, 19 nt, Homo sapiens
  misc_RNA (1)...(19): siRNA sense strand
caagacacagacagaauac

SEQ ID NO: 501039 - RNA, 19 nt, Homo sapiens
  misc_RNA (1)...(19): siRNA sense strand
cgcugacccuggagaugua

SEQ ID NO: 501040 - RNA, 19 nt, Homo sapiens
  misc_RNA (1)...(19): siRNA sense strand
gcgugcugaucauguacaa

SEQ ID NO: 501041 - RNA, 19 nt, Homo sapiens
  misc_RNA (1)...(19): siRNA sense strand
acaaggccaucugguacga

SEQ ID NO: 501042 - RNA, 19 nt, Homo sapiens
  misc_RNA (1)...(19): siRNA sense strand
gaagauagcuugcaccaaa

SEQ ID NO: 501043 - RNA, 19 nt, Homo sapiens
  misc_RNA (1)...(19): siRNA sense strand
gaaccagacucucccugua

SEQ ID NO: 501044 - RNA, 19 nt, Homo sapiens
  misc_RNA (1)...(19): siRNA sense strand
ucaauacccugcacuuuaa

SEQ ID NO: 501045 - RNA, 19 nt, Homo sapiens
  misc_RNA (1)...(19): siRNA sense strand
gaaauaaugccacaguaaa

SEQ ID NO: 501046 - RNA, 19 nt, Homo sapiens
  misc_RNA (1)...(19): siRNA sense strand
gaacagacuuagcuaaugg

SEQ ID NO: 501047 - RNA, 19 nt, Homo sapiens
  misc_RNA (1)...(19): siRNA sense strand
ggagaugucuggagcugaa

SEQ ID NO: 501048 - RNA, 19 nt, Homo sapiens
  misc_RNA (1)...(19): siRNA sense strand
gcaaacaucaccugucuug

SEQ ID NO: 501049 - RNA, 19 nt, Homo sapiens
  misc_RNA (1)...(19): siRNA sense strand
gaccugaguuugagcuuga

SEQ ID NO: 501050 - RNA, 19 nt, Homo sapiens
  misc_RNA (1)...(19): siRNA sense strand
ggacaagggaggcguggua

SEQ ID NO: 501051 - RNA, 19 nt, Homo sapiens
  misc_RNA (1)...(19): siRNA sense strand
gucaauacccugcacuuua

SEQ ID NO: 501052 - RNA, 19 nt, Homo sapiens
  misc_RNA (1)...(19): siRNA sense strand
cccaguauguuaagagaua

SEQ ID NO: 501053 - RNA, 19 nt, Homo sapiens
  misc_RNA (1)...(19): siRNA sense strand
ggagacauccucaggcauu

SEQ ID NO: 501054 - RNA, 19 nt, Homo sapiens
  misc_RNA (1)...(19): siRNA sense strand
guucuuaucugcaggugaa

SEQ ID NO: 501055 - RNA, 19 nt, Homo sapiens
  misc_RNA (1)...(19): siRNA sense strand
ggaggacacuggucauuac

SEQ ID NO: 501056 - RNA, 19 nt, Homo sapiens
  misc_RNA (1)...(19): siRNA sense strand
gagcucaggugaagauaag

SEQ ID NO: 501057 - RNA, 19 nt, Homo sapiens
  misc_RNA (1)...(19): siRNA sense strand
cagaaauaaugccacagua

SEQ ID NO: 501058 - RNA, 19 nt, Homo sapiens
  misc_RNA (1)...(19): siRNA sense strand
cgaaacugguggugacaaa

SEQ ID NO: 501059 - RNA, 19 nt, Homo sapiens
  misc_RNA (1)...(19): siRNA sense strand
gagaucaguuuguaaggau

SEQ ID NO: 501060 - RNA, 19 nt, Homo sapiens
  misc_RNA (1)...(19): siRNA sense strand
ggaagaagaggaggaagaa

SEQ ID NO: 501061 - RNA, 19 nt, Homo sapiens
  misc_RNA (1)...(19): siRNA sense strand
gcagaacagacuuagcuaa

SEQ ID NO: 501062 - RNA, 19 nt, Homo sapiens
  misc_RNA (1)...(19): siRNA sense strand
uacaagggccacagaaaua

SEQ ID NO: 501063 - RNA, 19 nt, Homo sapiens
  misc_RNA (1)...(19): siRNA sense strand
cagagcuccuggccaguua

SEQ ID NO: 501064 - RNA, 19 nt, Homo sapiens
  misc_RNA (1)...(19): siRNA sense strand
cagcacagauggcagaaca

SEQ ID NO: 501065 - RNA, 19 nt, Homo sapiens
  misc_RNA (1)...(19): siRNA sense strand
ccaguggccuagaccauga

SEQ ID NO: 501066 - RNA, 19 nt, Homo sapiens
  misc_RNA (1)...(19): siRNA sense strand
gaaagucgaggcacagaca

SEQ ID NO: 501067 - RNA, 19 nt, Homo sapiens
  misc_RNA (1)...(19): siRNA sense strand
gauacaagggccacagaaa

SEQ ID NO: 501068 - RNA, 19 nt, Homo sapiens
  misc_RNA (1)...(19): siRNA sense strand
ggacgagaucaguuuguaa

SEQ ID NO: 501069 - RNA, 19 nt, Homo sapiens
  misc_RNA (1)...(19): siRNA sense strand
gaaugagaacaauggagua

SEQ ID NO: 501070 - RNA, 19 nt, Homo sapiens
  misc_RNA (1)...(19): siRNA sense strand
gaacagugaguccaaagca

SEQ ID NO: 501071 - RNA, 19 nt, Homo sapiens
  misc_RNA (1)...(19): siRNA sense strand
gaacaauggaguacucaag

SEQ ID NO: 501072 - RNA, 19 nt, Homo sapiens
  misc_RNA (1)...(19): siRNA sense strand
agaaauaaugccacaguaa

SEQ ID NO: 501073 - RNA, 19 nt, Homo sapiens
  misc_RNA (1)...(19): siRNA sense strand
gaagauaaggacucugaca

SEQ ID NO: 501074 - RNA, 19 nt, Homo sapiens
  misc_RNA (1)...(19): siRNA sense strand
uaaaaggcgucaauuucua

SEQ ID NO: 501075 - RNA, 19 nt, Homo sapiens
  misc_RNA (1)...(19): siRNA sense strand
aaacaucaccugucuugug

SEQ ID NO: 501076 - RNA, 19 nt, Homo sapiens
  misc_RNA (1)...(19): siRNA sense strand
acagagagcucaggugaag

SEQ ID NO: 501077 - RNA, 19 nt, Homo sapiens
  misc_RNA (1)...(19): siRNA sense strand
gcacagauggcagaacaga

SEQ ID NO: 501078 - RNA, 19 nt, Homo sapiens
  misc_RNA (1)...(19): siRNA sense strand
acaauggaguacucaagaa

SEQ ID NO: 501079 - RNA, 19 nt, Homo sapiens
  misc_RNA (1)...(19): siRNA sense strand
cgagaucaguuuguaagga

SEQ ID NO: 501080 - RNA, 19 nt, Homo sapiens
  misc_RNA (1)...(19): siRNA sense strand
ccauugaccugagacaaga

SEQ ID NO: 501081 - RNA, 19 nt, Homo sapiens
  misc_RNA (1)...(19): siRNA sense strand
cauacugguugugucaaua

SEQ ID NO: 501082 - RNA, 19 nt, Homo sapiens
  misc_RNA (1)...(19): siRNA sense strand
gugaagauaaggacucuga

SEQ ID NO: 501083 - RNA, 19 nt, Homo sapiens
  misc_RNA (1)...(19): siRNA sense strand
ggugagcgguagugacugu

SEQ ID NO: 501084 - RNA, 19 nt, Homo sapiens
  misc_RNA (1)...(19): siRNA sense strand
gaucaguuuguaaggauuu

SEQ ID NO: 501085 - RNA, 19 nt, Homo sapiens
  misc_RNA (1)...(19): siRNA sense strand
uguauacgaucuaugugaa

SEQ ID NO: 501086 - RNA, 19 nt, Homo sapiens
  misc_RNA (1)...(19): siRNA sense strand
uaacaguggugauucuacu

SEQ ID NO: 501087 - RNA, 19 nt, Homo sapiens
  misc_RNA (1)...(19): siRNA sense strand
gcaaagggagcagcacaga

SEQ ID NO: 501088 - RNA, 19 nt, Homo sapiens
  misc_RNA (1)...(19): siRNA sense strand
aaagggagcagcacagaug

SEQ ID NO: 501089 - RNA, 19 nt, Homo sapiens
  misc_RNA (1)...(19): siRNA sense strand
aagcaaacaucaccugucu

SEQ ID NO: 501090 - RNA, 19 nt, Homo sapiens
  misc_RNA (1)...(19): siRNA sense strand
agaacagacuuagcuaaug

SEQ ID NO: 501091 - RNA, 19 nt, Homo sapiens
  misc_RNA (1)...(19): siRNA sense strand
ccaaguuucuuccuaacag

SEQ ID NO: 501092 - RNA, 19 nt, Homo sapiens
  misc_RNA (1)...(19): siRNA sense strand
gcucagaggaagaggaaga

SEQ ID NO: 501093 - RNA, 19 nt, Homo sapiens
  misc_RNA (1)...(19): siRNA sense strand
ggugaacagugaguccaaa

SEQ ID NO: 501094 - RNA, 19 nt, Homo sapiens
  misc_RNA (1)...(19): siRNA sense strand
gaaguucuguccucaucac

SEQ ID NO: 501095 - RNA, 19 nt, Homo sapiens
  misc_RNA (1)...(19): siRNA sense strand
gccaauacccaccaguuug

SEQ ID NO: 501096 - RNA, 19 nt, Homo sapiens
  misc_RNA (1)...(19): siRNA sense strand
gagacauccucaggcauug

SEQ ID NO: 501097 - RNA, 19 nt, Homo sapiens
  misc_RNA (1)...(19): siRNA sense strand
ggaagaggaggaagaagag

SEQ ID NO: 501098 - RNA, 19 nt, Homo sapiens
  misc_RNA (1)...(19): siRNA sense strand
gagaguggccacaaaagua

SEQ ID NO: 501099 - RNA, 19 nt, Homo sapiens
  misc_RNA (1)...(19): siRNA sense strand
gcuaauggaagccugucua

SEQ ID NO: 501100 - RNA, 19 nt, Homo sapiens
  misc_RNA (1)...(19): siRNA sense strand
ggauuuaugaccagaggaa

SEQ ID NO: 501101 - RNA, 19 nt, Homo sapiens
  misc_RNA (1)...(19): siRNA sense strand
uggacgagaucaguuugua

SEQ ID NO: 501102 - RNA, 19 nt, Homo sapiens
  misc_RNA (1)...(19): siRNA sense strand
caaaagagaaagagaagaa

SEQ ID NO: 501103 - RNA, 19 nt, Homo sapiens
  misc_RNA (1)...(19): siRNA sense strand
cagaacagacuuagcuaau

SEQ ID NO: 501104 - RNA, 19 nt, Homo sapiens
  misc_RNA (1)...(19): siRNA sense strand
ggaggaagaagaggaggaa

SEQ ID NO: 501105 - RNA, 19 nt, Homo sapiens
  misc_RNA (1)...(19): siRNA sense strand
acauuuaccucuucaacuc

SEQ ID NO: 501106 - RNA, 19 nt, Homo sapiens
  misc_RNA (1)...(19): siRNA sense strand
ugagaacaauggaguacuc

SEQ ID NO: 501107 - RNA, 19 nt, Homo sapiens
  misc_RNA (1)...(19): siRNA sense strand
ucagaaacaucagcucuac

SEQ ID NO: 501108 - RNA, 19 nt, Homo sapiens
  misc_RNA (1)...(19): siRNA sense strand
gacuggguguccucagaaa

SEQ ID NO: 501109 - RNA, 19 nt, Homo sapiens
  misc_RNA (1)...(19): siRNA sense strand
ccaguuacaaugaugaaga

SEQ ID NO: 501110 - RNA, 19 nt, Homo sapiens
  misc_RNA (1)...(19): siRNA sense strand
gaggaaaauugaugagaau

SEQ ID NO: 501111 - RNA, 19 nt, Homo sapiens
  misc_RNA (1)...(19): siRNA sense strand
ggaagaggaagaggaggaa

SEQ ID NO: 501112 - RNA, 19 nt, Homo sapiens
  misc_RNA (1)...(19): siRNA sense strand
aggccaaguuucuuccuaa

SEQ ID NO: 501113 - RNA, 19 nt, Homo sapiens
  misc_RNA (1)...(19): siRNA sense strand
ggguucaagugcccgcuuu

SEQ ID NO: 501114 - RNA, 19 nt, Homo sapiens
  misc_RNA (1)...(19): siRNA sense strand
aagaagaggaggaagaaga

SEQ ID NO: 501115 - RNA, 19 nt, Homo sapiens
  misc_RNA (1)...(19): siRNA sense strand
acaagggccacagaaauaa

SEQ ID NO: 501116 - RNA, 19 nt, Homo sapiens
  misc_RNA (1)...(19): siRNA sense strand
caagugcccgcuuugucua

SEQ ID NO: 501117 - RNA, 19 nt, Homo sapiens
  misc_RNA (1)...(19): siRNA sense strand
ggcccaguauguuaagaga

SEQ ID NO: 501118 - RNA, 19 nt, Homo sapiens
  misc_RNA (1)...(19): siRNA sense strand
caucaccugucuuguguac

SEQ ID NO: 501119 - RNA, 19 nt, Homo sapiens
  misc_RNA (1)...(19): siRNA sense strand
aacaucaccugucuugugu

SEQ ID NO: 501120 - RNA, 19 nt, Homo sapiens
  misc_RNA (1)...(19): siRNA sense strand
gcaguuguuuucaccauug

SEQ ID NO: 501121 - RNA, 19 nt, Homo sapiens
  misc_RNA (1)...(19): siRNA sense strand
ccauacugguugugucaau

SEQ ID NO: 501122 - RNA, 19 nt, Homo sapiens
  misc_RNA (1)...(19): siRNA sense strand
ggagcgggaugaagauagc

SEQ ID NO: 501123 - RNA, 19 nt, Homo sapiens
  misc_RNA (1)...(19): siRNA sense strand
ccugccagauuauucaguu

SEQ ID NO: 501124 - RNA, 19 nt, Homo sapiens
  misc_RNA (1)...(19): siRNA sense strand
gagauacaagggccacaga

SEQ ID NO: 501125 - RNA, 19 nt, Homo sapiens
  misc_RNA (1)...(19): siRNA sense strand
gaaaauugaugagaaugag

SEQ ID NO: 501126 - RNA, 19 nt, Homo sapiens
  misc_RNA (1)...(19): siRNA sense strand
uggaggacacuggucauua

SEQ ID NO: 501127 - RNA, 19 nt, Homo sapiens
  misc_RNA (1)...(19): siRNA sense strand
ggaaaauugaugagaauga

SEQ ID NO: 501128 - RNA, 19 nt, Homo sapiens
  misc_RNA (1)...(19): siRNA sense strand
caggccaaguuucuuccua

SEQ ID NO: 501129 - RNA, 19 nt, Homo sapiens
  misc_RNA (1)...(19): siRNA sense strand
uggcagcgaugaccugaag

SEQ ID NO: 501130 - RNA, 19 nt, Homo sapiens
  misc_RNA (1)...(19): siRNA sense strand
caaccgcaccagcacagaa

SEQ ID NO: 501131 - RNA, 19 nt, Homo sapiens
  misc_RNA (1)...(19): siRNA sense strand
gaugagaaugagaacaaug

SEQ ID NO: 501132 - RNA, 19 nt, Homo sapiens
  misc_RNA (1)...(19): siRNA sense strand
caaguuucuuccuaacagu

SEQ ID NO: 501133 - RNA, 19 nt, Homo sapiens
  misc_RNA (1)...(19): siRNA sense strand
gacgagaucaguuuguaag

SEQ ID NO: 501134 - RNA, 19 nt, Homo sapiens
  misc_RNA (1)...(19): siRNA sense strand
acagugaguccaaagcaaa

SEQ ID NO: 501135 - RNA, 19 nt, Homo sapiens
  misc_RNA (1)...(19): siRNA sense strand
auacaagggccacagaaau

SEQ ID NO: 501136 - RNA, 19 nt, Homo sapiens
  misc_RNA (1)...(19): siRNA sense strand
ccuuaugcaucaccugaga

SEQ ID NO: 501137 - RNA, 19 nt, Homo sapiens
  misc_RNA (1)...(19): siRNA sense strand
gacaagggaggcgugguaa

SEQ ID NO: 501138 - RNA, 19 nt, Homo sapiens
  misc_RNA (1)...(19): siRNA sense strand
uauacgaucuaugugaauc

SEQ ID NO: 501139 - RNA, 19 nt, Homo sapiens
  misc_RNA (1)...(19): siRNA sense strand
ccuagaccaugaugugaag

SEQ ID NO: 501140 - RNA, 19 nt, Homo sapiens
  misc_RNA (1)...(19): siRNA sense strand
aauggaagccugucuagca

SEQ ID NO: 501141 - RNA, 19 nt, Homo sapiens
  misc_RNA (1)...(19): siRNA sense strand
acuggucauuacuccauua

SEQ ID NO: 501142 - RNA, 19 nt, Homo sapiens
  misc_RNA (1)...(19): siRNA sense strand
gaaacaaagucaacugaga

SEQ ID NO: 501143 - RNA, 19 nt, Homo sapiens
  misc_RNA (1)...(19): siRNA sense strand
acacuauccugaguaauua

SEQ ID NO: 501144 - RNA, 19 nt, Homo sapiens
  misc_RNA (1)...(19): siRNA sense strand
ugaacacuauccugaguaa

SEQ ID NO: 501145 - RNA, 19 nt, Homo sapiens
  misc_RNA (1)...(19): siRNA sense strand
gaguaauuaugaccacaaa

SEQ ID NO: 501146 - RNA, 19 nt, Homo sapiens
  misc_RNA (1)...(19): siRNA sense strand
gggaucaccucuguucuga

SEQ ID NO: 501147 - RNA, 19 nt, Homo sapiens
  misc_RNA (1)...(19): siRNA sense strand
ucacagccuuggauuucua

SEQ ID NO: 501148 - RNA, 19 nt, Homo sapiens
  misc_RNA (1)...(19): siRNA sense strand
ccgcgugucuccuauauca

SEQ ID NO: 501149 - RNA, 19 nt, Homo sapiens
  misc_RNA (1)...(19): siRNA sense strand
ggaauacaccauugacauc

SEQ ID NO: 501150 - RNA, 19 nt, Homo sapiens
  misc_RNA (1)...(19): siRNA sense strand
gcaagcguuuuaagaagua

SEQ ID NO: 501151 - RNA, 19 nt, Homo sapiens
  misc_RNA (1)...(19): siRNA sense strand
ucaacuuccugaucuacaa

SEQ ID NO: 501152 - RNA, 19 nt, Homo sapiens
  misc_RNA (1)...(19): siRNA sense strand
gaauacaccauugacauca

SEQ ID NO: 501153 - RNA, 19 nt, Homo sapiens
  misc_RNA (1)...(19): siRNA sense strand
cagacugaaucaaagaaug

SEQ ID NO: 501154 - RNA, 19 nt, Homo sapiens
  misc_RNA (1)...(19): siRNA sense strand
gugcucaacuuccugaucu

SEQ ID NO: 501155 - RNA, 19 nt, Homo sapiens
  misc_RNA (1)...(19): siRNA sense strand
gccaacaucaggaagcuuu

SEQ ID NO: 501156 - RNA, 19 nt, Homo sapiens
  misc_RNA (1)...(19): siRNA sense strand
acgaugcucuccuggguuu

SEQ ID NO: 501157 - RNA, 19 nt, Homo sapiens
  misc_RNA (1)...(19): siRNA sense strand
aaacuccgccauccucgua

SEQ ID NO: 501158 - RNA, 19 nt, Homo sapiens
  misc_RNA (1)...(19): siRNA sense strand
aaacugcgcccuggcauug

SEQ ID NO: 501159 - RNA, 19 nt, Homo sapiens
  misc_RNA (1)...(19): siRNA sense strand
cccagugacuuucuucuuc

SEQ ID NO: 501160 - RNA, 19 nt, Homo sapiens
  misc_RNA (1)...(19): siRNA sense strand
guaauuaugaccacaaacu

SEQ ID NO: 501161 - RNA, 19 nt, Homo sapiens
  misc_RNA (1)...(19): siRNA sense strand
agacugaaucaaagaauga

SEQ ID NO: 501162 - RNA, 19 nt, Homo sapiens
  misc_RNA (1)...(19): siRNA sense strand
caauggauucucacucuug

SEQ ID NO: 501163 - RNA, 19 nt, Homo sapiens
  misc_RNA (1)...(19): siRNA sense strand
ggaguuugcugugcucaac

SEQ ID NO: 501164 - RNA, 19 nt, Homo sapiens
  misc_RNA (1)...(19): siRNA sense strand
aacacuauccugaguaauu

SEQ ID NO: 501165 - RNA, 19 nt, Homo sapiens
  misc_RNA (1)...(19): siRNA sense strand
gccagauugucaccacuga

SEQ ID NO: 501166 - RNA, 19 nt, Homo sapiens
  misc_RNA (1)...(19): siRNA sense strand
uaucacagccuuggauuuc

SEQ ID NO: 501167 - RNA, 19 nt, Homo sapiens
  misc_RNA (1)...(19): siRNA sense strand
gcaggcgguuuggcuaugu

SEQ ID NO: 501168 - RNA, 19 nt, Homo sapiens
  misc_RNA (1)...(19): siRNA sense strand
ccaauggauucucacucuu

SEQ ID NO: 501169 - RNA, 19 nt, Homo sapiens
  misc_RNA (1)...(19): siRNA sense strand
ugaaaucaaugagaagaac

SEQ ID NO: 501170 - RNA, 19 nt, Homo sapiens
  misc_RNA (1)...(19): siRNA sense strand
uuacaggagugagcaacaa

SEQ ID NO: 501171 - RNA, 19 nt, Homo sapiens
  misc_RNA (1)...(19): siRNA sense strand
guuuggcuauguugccuuu

SEQ ID NO: 501172 - RNA, 19 nt, Homo sapiens
  misc_RNA (1)...(19): siRNA sense strand
gagacugggagcagaguug

SEQ ID NO: 501173 - RNA, 19 nt, Homo sapiens
  misc_RNA (1)...(19): siRNA sense strand
ccagugacuuucuucuucu

SEQ ID NO: 501174 - RNA, 19 nt, Homo sapiens
  misc_RNA (1)...(19): siRNA sense strand
gagcaggcgguuuggcuau

SEQ ID NO: 501175 - RNA, 19 nt, Homo sapiens
  misc_RNA (1)...(19): siRNA sense strand
gagcaacaaaacugaaaua

SEQ ID NO: 501176 - RNA, 19 nt, Homo sapiens
  misc_RNA (1)...(19): siRNA sense strand
acucuugcccucuaucuuu

SEQ ID NO: 501177 - RNA, 19 nt, Homo sapiens
  misc_RNA (1)...(19): siRNA sense strand
uuuccuauccugagaauga

SEQ ID NO: 501178 - RNA, 19 nt, Homo sapiens
  misc_RNA (1)...(19): siRNA sense strand
ucuaccgccuggauaacua

SEQ ID NO: 501179 - RNA, 19 nt, Homo sapiens
  misc_RNA (1)...(19): siRNA sense strand
ccuccuaggcaucuuauug

SEQ ID NO: 501180 - RNA, 19 nt, Homo sapiens
  misc_RNA (1)...(19): siRNA sense strand
ccauugacaucaucuucuc

SEQ ID NO: 501181 - RNA, 19 nt, Homo sapiens
  misc_RNA (1)...(19): siRNA sense strand
ugacuuucuucuucuucaa

SEQ ID NO: 501182 - RNA, 19 nt, Homo sapiens
  misc_RNA (1)...(19): siRNA sense strand
ccugaacacuauccugagu

SEQ ID NO: 501183 - RNA, 19 nt, Homo sapiens
  misc_RNA (1)...(19): siRNA sense strand
gugacuuucuucuucuuca

SEQ ID NO: 501184 - RNA, 19 nt, Homo sapiens
  misc_RNA (1)...(19): siRNA sense strand
gaggaaacaaagucaacug

SEQ ID NO: 501185 - RNA, 19 nt, Homo sapiens
  misc_RNA (1)...(19): siRNA sense strand
uaagaggacccacgagcau

SEQ ID NO: 501186 - RNA, 19 nt, Homo sapiens
  misc_RNA (1)...(19): siRNA sense strand
caaacugcgcccuggcauu

SEQ ID NO: 501187 - RNA, 19 nt, Homo sapiens
  misc_RNA (1)...(19): siRNA sense strand
gcccaugcuucuccuaaac

SEQ ID NO: 501188 - RNA, 19 nt, Homo sapiens
  misc_RNA (1)...(19): siRNA sense strand
aagcuggccugcugugagu

SEQ ID NO: 501189 - RNA, 19 nt, Homo sapiens
  misc_RNA (1)...(19): siRNA sense strand
uguggucacuguugagauc

SEQ ID NO: 501190 - RNA, 19 nt, Homo sapiens
  misc_RNA (1)...(19): siRNA sense strand
cuagggaucaccucuguuc

SEQ ID NO: 501191 - RNA, 19 nt, Homo sapiens
  misc_RNA (1)...(19): siRNA sense strand
aaaacuaugucccuucuuc

SEQ ID NO: 501192 - RNA, 19 nt, Homo sapiens
  misc_RNA (1)...(19): siRNA sense strand
ucucgcauccugaacacua

SEQ ID NO: 501193 - RNA, 19 nt, Homo sapiens
  misc_RNA (1)...(19): siRNA sense strand
gaugcucacuccacaugcu

SEQ ID NO: 501194 - RNA, 19 nt, Homo sapiens
  misc_RNA (1)...(19): siRNA sense strand
cgccauccucguaucaaua

SEQ ID NO: 501195 - RNA, 19 nt, Homo sapiens
  misc_RNA (1)...(19): siRNA sense strand
gcccuggcauuggagagaa

SEQ ID NO: 501196 - RNA, 19 nt, Homo sapiens
  misc_RNA (1)...(19): siRNA sense strand
aaugugagcaggcgguuug

SEQ ID NO: 501197 - RNA, 19 nt, Homo sapiens
  misc_RNA (1)...(19): siRNA sense strand
cccgugauguugucuaugg

SEQ ID NO: 501198 - RNA, 19 nt, Homo sapiens
  misc_RNA (1)...(19): siRNA sense strand
augcucagauuuccaaugg

SEQ ID NO: 501199 - RNA, 19 nt, Homo sapiens
  misc_RNA (1)...(19): siRNA sense strand
gaaaucaaugagaagaacu

SEQ ID NO: 501200 - RNA, 19 nt, Homo sapiens
  misc_RNA (1)...(19): siRNA sense strand
cccaguuggugacuucaug

SEQ ID NO: 501201 - RNA, 19 nt, Homo sapiens
  misc_RNA (1)...(19): siRNA sense strand
agccuuggauuucuauauc

SEQ ID NO: 501202 - RNA, 19 nt, Homo sapiens
  misc_RNA (1)...(19): siRNA sense strand
ucaccucuguucugaccau

SEQ ID NO: 501203 - RNA, 19 nt, Homo sapiens
  misc_RNA (1)...(19): siRNA sense strand
ucugcgcucuguuggaguu

SEQ ID NO: 501204 - RNA, 19 nt, Homo sapiens
  misc_RNA (1)...(19): siRNA sense strand
auacaccauugacaucauc

SEQ ID NO: 501205 - RNA, 19 nt, Homo sapiens
  misc_RNA (1)...(19): siRNA sense strand
gccauccucguaucaauag

SEQ ID NO: 501206 - RNA, 19 nt, Homo sapiens
  misc_RNA (1)...(19): siRNA sense strand
ccgccauccucguaucaau

SEQ ID NO: 501207 - RNA, 19 nt, Homo sapiens
  misc_RNA (1)...(19): siRNA sense strand
cagccuuggauuucuauau

SEQ ID NO: 501208 - RNA, 19 nt, Homo sapiens
  misc_RNA (1)...(19): siRNA sense strand
gcucuccuggguuuccuuu

SEQ ID NO: 501209 - RNA, 19 nt, Homo sapiens
  misc_RNA (1)...(19): siRNA sense strand
caccaugcccaaccagaug

SEQ ID NO: 501210 - RNA, 19 nt, Homo sapiens
  misc_RNA (1)...(19): siRNA sense strand
agaggacccacgagcauga

SEQ ID NO: 501211 - RNA, 19 nt, Homo sapiens
  misc_RNA (1)...(19): siRNA sense strand
gggaucaccucuguucuga

SEQ ID NO: 501212 - RNA, 19 nt, Homo sapiens
  misc_RNA (1)...(19): siRNA sense strand
ucacagccuuggauuucua

SEQ ID NO: 501213 - RNA, 19 nt, Homo sapiens
  misc_RNA (1)...(19): siRNA sense strand
ccgcgugucuccuauauca

SEQ ID NO: 501214 - RNA, 19 nt, Homo sapiens
  misc_RNA (1)...(19): siRNA sense strand
ggaauacaccauugacauc

SEQ ID NO: 501215 - RNA, 19 nt, Homo sapiens
  misc_RNA (1)...(19): siRNA sense strand
gcaagcguuuuaagaagua

SEQ ID NO: 501216 - RNA, 19 nt, Homo sapiens
  misc_RNA (1)...(19): siRNA sense strand
ucaacuuccugaucuacaa

SEQ ID NO: 501217 - RNA, 19 nt, Homo sapiens
  misc_RNA (1)...(19): siRNA sense strand
gaauacaccauugacauca

SEQ ID NO: 501218 - RNA, 19 nt, Homo sapiens
  misc_RNA (1)...(19): siRNA sense strand
gugcucaacuuccugaucu

SEQ ID NO: 501219 - RNA, 19 nt, Homo sapiens
  misc_RNA (1)...(19): siRNA sense strand
gccaacaucaggaagcuuu

SEQ ID NO: 501220 - RNA, 19 nt, Homo sapiens
  misc_RNA (1)...(19): siRNA sense strand
acgaugcucuccuggguuu

SEQ ID NO: 501221 - RNA, 19 nt, Homo sapiens
  misc_RNA (1)...(19): siRNA sense strand
aaacuccgccauccucgua

SEQ ID NO: 501222 - RNA, 19 nt, Homo sapiens
  misc_RNA (1)...(19): siRNA sense strand
cccagugacuuucuucuuc

SEQ ID NO: 501223 - RNA, 19 nt, Homo sapiens
  misc_RNA (1)...(19): siRNA sense strand
caauggauucucacucuug

SEQ ID NO: 501224 - RNA, 19 nt, Homo sapiens
  misc_RNA (1)...(19): siRNA sense strand
ggaguuugcugugcucaac

SEQ ID NO: 501225 - RNA, 19 nt, Homo sapiens
  misc_RNA (1)...(19): siRNA sense strand
ccaauggauucucacucuu

SEQ ID NO: 501226 - RNA, 19 nt, Homo sapiens
  misc_RNA (1)...(19): siRNA sense strand
gccagauugucaccacuga

SEQ ID NO: 501227 - RNA, 19 nt, Homo sapiens
  misc_RNA (1)...(19): siRNA sense strand
uaucacagccuuggauuuc

SEQ ID NO: 501228 - RNA, 19 nt, Homo sapiens
  misc_RNA (1)...(19): siRNA sense strand
gcaggcgguuuggcuaugu

SEQ ID NO: 501229 - RNA, 19 nt, Homo sapiens
  misc_RNA (1)...(19): siRNA sense strand
ugaaaucaaugagaagaac

SEQ ID NO: 501230 - RNA, 19 nt, Homo sapiens
  misc_RNA (1)...(19): siRNA sense strand
uuacaggagugagcaacaa

SEQ ID NO: 501231 - RNA, 19 nt, Homo sapiens
  misc_RNA (1)...(19): siRNA sense strand
guuuggcuauguugccuuu

SEQ ID NO: 501232 - RNA, 19 nt, Homo sapiens
  misc_RNA (1)...(19): siRNA sense strand
acucuugcccucuaucuuu

SEQ ID NO: 501233 - RNA, 19 nt, Homo sapiens
  misc_RNA (1)...(19): siRNA sense strand
ccagugacuuucuucuucu

SEQ ID NO: 501234 - RNA, 19 nt, Homo sapiens
  misc_RNA (1)...(19): siRNA sense strand
gagcaggcgguuuggcuau

SEQ ID NO: 501235 - RNA, 19 nt, Homo sapiens
  misc_RNA (1)...(19): siRNA sense strand
gagcaacaaaacugaaaua

SEQ ID NO: 501236 - RNA, 19 nt, Homo sapiens
  misc_RNA (1)...(19): siRNA sense strand
uuuccuauccugagaauga

SEQ ID NO: 501237 - RNA, 19 nt, Homo sapiens
  misc_RNA (1)...(19): siRNA sense strand
ucuaccgccuggauaacua

SEQ ID NO: 501238 - RNA, 19 nt, Homo sapiens
  misc_RNA (1)...(19): siRNA sense strand
ccauugacaucaucuucuc

SEQ ID NO: 501239 - RNA, 19 nt, Homo sapiens
  misc_RNA (1)...(19): siRNA sense strand
ugacuuucuucuucuucaa

SEQ ID NO: 501240 - RNA, 19 nt, Homo sapiens
  misc_RNA (1)...(19): siRNA sense strand
uaagaggacccacgagcau

SEQ ID NO: 501241 - RNA, 19 nt, Homo sapiens
  misc_RNA (1)...(19): siRNA sense strand
gugacuuucuucuucuuca

SEQ ID NO: 501242 - RNA, 19 nt, Homo sapiens
  misc_RNA (1)...(19): siRNA sense strand
gcccaugcuucuccuaaac

SEQ ID NO: 501243 - RNA, 19 nt, Homo sapiens
  misc_RNA (1)...(19): siRNA sense strand
aagcuggccugcugugagu

SEQ ID NO: 501244 - RNA, 19 nt, Homo sapiens
  misc_RNA (1)...(19): siRNA sense strand
aaaacuaugucccuucuuc

SEQ ID NO: 501245 - RNA, 19 nt, Homo sapiens
  misc_RNA (1)...(19): siRNA sense strand
cuagggaucaccucuguuc

SEQ ID NO: 501246 - RNA, 19 nt, Homo sapiens
  misc_RNA (1)...(19): siRNA sense strand
gaugcucacuccacaugcu

SEQ ID NO: 501247 - RNA, 19 nt, Homo sapiens
  misc_RNA (1)...(19): siRNA sense strand
cgccauccucguaucaaua

SEQ ID NO: 501248 - RNA, 19 nt, Homo sapiens
  misc_RNA (1)...(19): siRNA sense strand
aaugugagcaggcgguuug

SEQ ID NO: 501249 - RNA, 19 nt, Homo sapiens
  misc_RNA (1)...(19): siRNA sense strand
augcucagauuuccaaugg

SEQ ID NO: 501250 - RNA, 19 nt, Homo sapiens
  misc_RNA (1)...(19): siRNA sense strand
gaaaucaaugagaagaacu

SEQ ID NO: 501251 - RNA, 19 nt, Homo sapiens
  misc_RNA (1)...(19): siRNA sense strand
cccaguuggugacuucaug

SEQ ID NO: 501252 - RNA, 19 nt, Homo sapiens
  misc_RNA (1)...(19): siRNA sense strand
agccuuggauuucuauauc

SEQ ID NO: 501253 - RNA, 19 nt, Homo sapiens
  misc_RNA (1)...(19): siRNA sense strand
ucaccucuguucugaccau

SEQ ID NO: 501254 - RNA, 19 nt, Homo sapiens
  misc_RNA (1)...(19): siRNA sense strand
ucugcgcucuguuggaguu

SEQ ID NO: 501255 - RNA, 19 nt, Homo sapiens
  misc_RNA (1)...(19): siRNA sense strand
caccaugcccaaccagaug

SEQ ID NO: 501256 - RNA, 19 nt, Homo sapiens
  misc_RNA (1)...(19): siRNA sense strand
gccauccucguaucaauag

SEQ ID NO: 501257 - RNA, 19 nt, Homo sapiens
  misc_RNA (1)...(19): siRNA sense strand
ccgccauccucguaucaau

SEQ ID NO: 501258 - RNA, 19 nt, Homo sapiens
  misc_RNA (1)...(19): siRNA sense strand
cagccuuggauuucuauau

SEQ ID NO: 501259 - RNA, 19 nt, Homo sapiens
  misc_RNA (1)...(19): siRNA sense strand
auacaccauugacaucauc

SEQ ID NO: 501260 - RNA, 19 nt, Homo sapiens
  misc_RNA (1)...(19): siRNA sense strand
gcucuccuggguuuccuuu

SEQ ID NO: 501261 - RNA, 19 nt, Homo sapiens
  misc_RNA (1)...(19): siRNA sense strand
agaggacccacgagcauga

SEQ ID NO: 501262 - RNA, 19 nt, Homo sapiens
  misc_RNA (1)...(19): siRNA sense strand
gggaucaccucuguucuga

SEQ ID NO: 501263 - RNA, 19 nt, Homo sapiens
  misc_RNA (1)...(19): siRNA sense strand
ucacagccuuggauuucua

SEQ ID NO: 501264 - RNA, 19 nt, Homo sapiens
  misc_RNA (1)...(19): siRNA sense strand
ccgcgugucuccuauauca

SEQ ID NO: 501265 - RNA, 19 nt, Homo sapiens
  misc_RNA (1)...(19): siRNA sense strand
ggaauacaccauugacauc

SEQ ID NO: 501266 - RNA, 19 nt, Homo sapiens
  misc_RNA (1)...(19): siRNA sense strand
gcaagcguuuuaagaagua

SEQ ID NO: 501267 - RNA, 19 nt, Homo sapiens
  misc_RNA (1)...(19): siRNA sense strand
ucaacuuccugaucuacaa

SEQ ID NO: 501268 - RNA, 19 nt, Homo sapiens
  misc_RNA (1)...(19): siRNA sense strand
gaauacaccauugacauca

SEQ ID NO: 501269 - RNA, 19 nt, Homo sapiens
  misc_RNA (1)...(19): siRNA sense strand
gugcucaacuuccugaucu

SEQ ID NO: 501270 - RNA, 19 nt, Homo sapiens
  misc_RNA (1)...(19): siRNA sense strand
gccaacaucaggaagcuuu

SEQ ID NO: 501271 - RNA, 19 nt, Homo sapiens
  misc_RNA (1)...(19): siRNA sense strand
acgaugcucuccuggguuu

SEQ ID NO: 501272 - RNA, 19 nt, Homo sapiens
  misc_RNA (1)...(19): siRNA sense strand
aaacuccgccauccucgua

SEQ ID NO: 501273 - RNA, 19 nt, Homo sapiens
  misc_RNA (1)...(19): siRNA sense strand
cccagugacuuucuucuuc

SEQ ID NO: 501274 - RNA, 19 nt, Homo sapiens
  misc_RNA (1)...(19): siRNA sense strand
caauggauucucacucuug

SEQ ID NO: 501275 - RNA, 19 nt, Homo sapiens
  misc_RNA (1)...(19): siRNA sense strand
ggaguuugcugugcucaac

SEQ ID NO: 501276 - RNA, 19 nt, Homo sapiens
  misc_RNA (1)...(19): siRNA sense strand
ccaauggauucucacucuu

SEQ ID NO: 501277 - RNA, 19 nt, Homo sapiens
  misc_RNA (1)...(19): siRNA sense strand
gccagauugucaccacuga

SEQ ID NO: 501278 - RNA, 19 nt, Homo sapiens
  misc_RNA (1)...(19): siRNA sense strand
uaucacagccuuggauuuc

SEQ ID NO: 501279 - RNA, 19 nt, Homo sapiens
  misc_RNA (1)...(19): siRNA sense strand
gcaggcgguuuggcuaugu

SEQ ID NO: 501280 - RNA, 19 nt, Homo sapiens
  misc_RNA (1)...(19): siRNA sense strand
ugaaaucaaugagaagaac

SEQ ID NO: 501281 - RNA, 19 nt, Homo sapiens
  misc_RNA (1)...(19): siRNA sense strand
uuacaggagugagcaacaa

SEQ ID NO: 501282 - RNA, 19 nt, Homo sapiens
  misc_RNA (1)...(19): siRNA sense strand
guuuggcuauguugccuuu

SEQ ID NO: 501283 - RNA, 19 nt, Homo sapiens
  misc_RNA (1)...(19): siRNA sense strand
acucuugcccucuaucuuu

SEQ ID NO: 501284 - RNA, 19 nt, Homo sapiens
  misc_RNA (1)...(19): siRNA sense strand
ccagugacuuucuucuucu

SEQ ID NO: 501285 - RNA, 19 nt, Homo sapiens
  misc_RNA (1)...(19): siRNA sense strand
gagcaggcgguuuggcuau

SEQ ID NO: 501286 - RNA, 19 nt, Homo sapiens
  misc_RNA (1)...(19): siRNA sense strand
gagcaacaaaacugaaaua

SEQ ID NO: 501287 - RNA, 19 nt, Homo sapiens
  misc_RNA (1)...(19): siRNA sense strand
uuuccuauccugagaauga

SEQ ID NO: 501288 - RNA, 19 nt, Homo sapiens
  misc_RNA (1)...(19): siRNA sense strand
ucuaccgccuggauaacua

SEQ ID NO: 501289 - RNA, 19 nt, Homo sapiens
  misc_RNA (1)...(19): siRNA sense strand
ccauugacaucaucuucuc

SEQ ID NO: 501290 - RNA, 19 nt, Homo sapiens
  misc_RNA (1)...(19): siRNA sense strand
ugacuuucuucuucuucaa

SEQ ID NO: 501291 - RNA, 19 nt, Homo sapiens
  misc_RNA (1)...(19): siRNA sense strand
uaagaggacccacgagcau

SEQ ID NO: 501292 - RNA, 19 nt, Homo sapiens
  misc_RNA (1)...(19): siRNA sense strand
gugacuuucuucuucuuca

SEQ ID NO: 501293 - RNA, 19 nt, Homo sapiens
  misc_RNA (1)...(19): siRNA sense strand
gcccaugcuucuccuaaac

SEQ ID NO: 501294 - RNA, 19 nt, Homo sapiens
  misc_RNA (1)...(19): siRNA sense strand
aagcuggccugcugugagu

SEQ ID NO: 501295 - RNA, 19 nt, Homo sapiens
  misc_RNA (1)...(19): siRNA sense strand
aaaacuaugucccuucuuc

SEQ ID NO: 501296 - RNA, 19 nt, Homo sapiens
  misc_RNA (1)...(19): siRNA sense strand
cuagggaucaccucuguuc

SEQ ID NO: 501297 - RNA, 19 nt, Homo sapiens
  misc_RNA (1)...(19): siRNA sense strand
gaugcucacuccacaugcu

SEQ ID NO: 501298 - RNA, 19 nt, Homo sapiens
  misc_RNA (1)...(19): siRNA sense strand
cgccauccucguaucaaua

SEQ ID NO: 501299 - RNA, 19 nt, Homo sapiens
  misc_RNA (1)...(19): siRNA sense strand
aaugugagcaggcgguuug

SEQ ID NO: 501300 - RNA, 19 nt, Homo sapiens
  misc_RNA (1)...(19): siRNA sense strand
augcucagauuuccaaugg

SEQ ID NO: 501301 - RNA, 19 nt, Homo sapiens
  misc_RNA (1)...(19): siRNA sense strand
gaaaucaaugagaagaacu

SEQ ID NO: 501302 - RNA, 19 nt, Homo sapiens
  misc_RNA (1)...(19): siRNA sense strand
cccaguuggugacuucaug

SEQ ID NO: 501303 - RNA, 19 nt, Homo sapiens
  misc_RNA (1)...(19): siRNA sense strand
agccuuggauuucuauauc

SEQ ID NO: 501304 - RNA, 19 nt, Homo sapiens
  misc_RNA (1)...(19): siRNA sense strand
ucaccucuguucugaccau

SEQ ID NO: 501305 - RNA, 19 nt, Homo sapiens
  misc_RNA (1)...(19): siRNA sense strand
ucugcgcucuguuggaguu

SEQ ID NO: 501306 - RNA, 19 nt, Homo sapiens
  misc_RNA (1)...(19): siRNA sense strand
caccaugcccaaccagaug

SEQ ID NO: 501307 - RNA, 19 nt, Homo sapiens
  misc_RNA (1)...(19): siRNA sense strand
gccauccucguaucaauag

SEQ ID NO: 501308 - RNA, 19 nt, Homo sapiens
  misc_RNA (1)...(19): siRNA sense strand
ccgccauccucguaucaau

SEQ ID NO: 501309 - RNA, 19 nt, Homo sapiens
  misc_RNA (1)...(19): siRNA sense strand
cagccuuggauuucuauau

SEQ ID NO: 501310 - RNA, 19 nt, Homo sapiens
  misc_RNA (1)...(19): siRNA sense strand
auacaccauugacaucauc

SEQ ID NO: 501311 - RNA, 19 nt, Homo sapiens
  misc_RNA (1)...(19): siRNA sense strand
gcucuccuggguuuccuuu

SEQ ID NO: 501312 - RNA, 19 nt, Homo sapiens
  misc_RNA (1)...(19): siRNA sense strand
agaggacccacgagcauga

SEQ ID NO: 501313 - RNA, 19 nt, Homo sapiens
  misc_RNA (1)...(19): siRNA sense strand
gggaucaccucuguucuga

SEQ ID NO: 501314 - RNA, 19 nt, Homo sapiens
  misc_RNA (1)...(19): siRNA sense strand
ucacagccuuggauuucua

SEQ ID NO: 501315 - RNA, 19 nt, Homo sapiens
  misc_RNA (1)...(19): siRNA sense strand
ccgcgugucuccuauauca

SEQ ID NO: 501316 - RNA, 19 nt, Homo sapiens
  misc_RNA (1)...(19): siRNA sense strand
ggaauacaccauugacauc

SEQ ID NO: 501317 - RNA, 19 nt, Homo sapiens
  misc_RNA (1)...(19): siRNA sense strand
gcaagcguuuuaagaagua

SEQ ID NO: 501318 - RNA, 19 nt, Homo sapiens
  misc_RNA (1)...(19): siRNA sense strand
ucaacuuccugaucuacaa

SEQ ID NO: 501319 - RNA, 19 nt, Homo sapiens
  misc_RNA (1)...(19): siRNA sense strand
gaauacaccauugacauca

SEQ ID NO: 501320 - RNA, 19 nt, Homo sapiens
  misc_RNA (1)...(19): siRNA sense strand
gugcucaacuuccugaucu

SEQ ID NO: 501321 - RNA, 19 nt, Homo sapiens
  misc_RNA (1)...(19): siRNA sense strand
gccaacaucaggaagcuuu

SEQ ID NO: 501322 - RNA, 19 nt, Homo sapiens
  misc_RNA (1)...(19): siRNA sense strand
acgaugcucuccuggguuu

SEQ ID NO: 501323 - RNA, 19 nt, Homo sapiens
  misc_RNA (1)...(19): siRNA sense strand
aaacuccgccauccucgua

SEQ ID NO: 501324 - RNA, 19 nt, Homo sapiens
  misc_RNA (1)...(19): siRNA sense strand
cccagugacuuucuucuuc

SEQ ID NO: 501325 - RNA, 19 nt, Homo sapiens
  misc_RNA (1)...(19): siRNA sense strand
caauggauucucacucuug

SEQ ID NO: 501326 - RNA, 19 nt, Homo sapiens
  misc_RNA (1)...(19): siRNA sense strand
ggaguuugcugugcucaac

SEQ ID NO: 501327 - RNA, 19 nt, Homo sapiens
  misc_RNA (1)...(19): siRNA sense strand
ccaauggauucucacucuu

SEQ ID NO: 501328 - RNA, 19 nt, Homo sapiens
  misc_RNA (1)...(19): siRNA sense strand
gccagauugucaccacuga

SEQ ID NO: 501329 - RNA, 19 nt, Homo sapiens
  misc_RNA (1)...(19): siRNA sense strand
uaucacagccuuggauuuc

SEQ ID NO: 501330 - RNA, 19 nt, Homo sapiens
  misc_RNA (1)...(19): siRNA sense strand
gcaggcgguuuggcuaugu

SEQ ID NO: 501331 - RNA, 19 nt, Homo sapiens
  misc_RNA (1)...(19): siRNA sense strand
ugaaaucaaugagaagaac

SEQ ID NO: 501332 - RNA, 19 nt, Homo sapiens
  misc_RNA (1)...(19): siRNA sense strand
uuacaggagugagcaacaa

SEQ ID NO: 501333 - RNA, 19 nt, Homo sapiens
  misc_RNA (1)...(19): siRNA sense strand
guuuggcuauguugccuuu

SEQ ID NO: 501334 - RNA, 19 nt, Homo sapiens
  misc_RNA (1)...(19): siRNA sense strand
acucuugcccucuaucuuu

SEQ ID NO: 501335 - RNA, 19 nt, Homo sapiens
  misc_RNA (1)...(19): siRNA sense strand
ccagugacuuucuucuucu

SEQ ID NO: 501336 - RNA, 19 nt, Homo sapiens
  misc_RNA (1)...(19): siRNA sense strand
gagcaggcgguuuggcuau

SEQ ID NO: 501337 - RNA, 19 nt, Homo sapiens
  misc_RNA (1)...(19): siRNA sense strand
gagcaacaaaacugaaaua

SEQ ID NO: 501338 - RNA, 19 nt, Homo sapiens
  misc_RNA (1)...(19): siRNA sense strand
uuuccuauccugagaauga

SEQ ID NO: 501339 - RNA, 19 nt, Homo sapiens
  misc_RNA (1)...(19): siRNA sense strand
ucuaccgccuggauaacua

SEQ ID NO: 501340 - RNA, 19 nt, Homo sapiens
  misc_RNA (1)...(19): siRNA sense strand
ccauugacaucaucuucuc

SEQ ID NO: 501341 - RNA, 19 nt, Homo sapiens
  misc_RNA (1)...(19): siRNA sense strand
ugacuuucuucuucuucaa

SEQ ID NO: 501342 - RNA, 19 nt, Homo sapiens
  misc_RNA (1)...(19): siRNA sense strand
uaagaggacccacgagcau

SEQ ID NO: 501343 - RNA, 19 nt, Homo sapiens
  misc_RNA (1)...(19): siRNA sense strand
gugacuuucuucuucuuca

SEQ ID NO: 501344 - RNA, 19 nt, Homo sapiens
  misc_RNA (1)...(19): siRNA sense strand
gcccaugcuucuccuaaac

SEQ ID NO: 501345 - RNA, 19 nt, Homo sapiens
  misc_RNA (1)...(19): siRNA sense strand
aagcuggccugcugugagu

SEQ ID NO: 501346 - RNA, 19 nt, Homo sapiens
  misc_RNA (1)...(19): siRNA sense strand
aaaacuaugucccuucuuc

SEQ ID NO: 501347 - RNA, 19 nt, Homo sapiens
  misc_RNA (1)...(19): siRNA sense strand
cuagggaucaccucuguuc

SEQ ID NO: 501348 - RNA, 19 nt, Homo sapiens
  misc_RNA (1)...(19): siRNA sense strand
gaugcucacuccacaugcu

SEQ ID NO: 501349 - RNA, 19 nt, Homo sapiens
  misc_RNA (1)...(19): siRNA sense strand
cgccauccucguaucaaua

SEQ ID NO: 501350 - RNA, 19 nt, Homo sapiens
  misc_RNA (1)...(19): siRNA sense strand
aaugugagcaggcgguuug

SEQ ID NO: 501351 - RNA, 19 nt, Homo sapiens
  misc_RNA (1)...(19): siRNA sense strand
augcucagauuuccaaugg

SEQ ID NO: 501352 - RNA, 19 nt, Homo sapiens
  misc_RNA (1)...(19): siRNA sense strand
gaaaucaaugagaagaacu

SEQ ID NO: 501353 - RNA, 19 nt, Homo sapiens
  misc_RNA (1)...(19): siRNA sense strand
cccaguuggugacuucaug

SEQ ID NO: 501354 - RNA, 19 nt, Homo sapiens
  misc_RNA (1)...(19): siRNA sense strand
agccuuggauuucuauauc

SEQ ID NO: 501355 - RNA, 19 nt, Homo sapiens
  misc_RNA (1)...(19): siRNA sense strand
ucaccucuguucugaccau

SEQ ID NO: 501356 - RNA, 19 nt, Homo sapiens
  misc_RNA (1)...(19): siRNA sense strand
ucugcgcucuguuggaguu

SEQ ID NO: 501357 - RNA, 19 nt, Homo sapiens
  misc_RNA (1)...(19): siRNA sense strand
caccaugcccaaccagaug

SEQ ID NO: 501358 - RNA, 19 nt, Homo sapiens
  misc_RNA (1)...(19): siRNA sense strand
gccauccucguaucaauag

SEQ ID NO: 501359 - RNA, 19 nt, Homo sapiens
  misc_RNA (1)...(19): siRNA sense strand
ccgccauccucguaucaau

SEQ ID NO: 501360 - RNA, 19 nt, Homo sapiens
  misc_RNA (1)...(19): siRNA sense strand
cagccuuggauuucuauau

SEQ ID NO: 501361 - RNA, 19 nt, Homo sapiens
  misc_RNA (1)...(19): siRNA sense strand
auacaccauugacaucauc

SEQ ID NO: 501362 - RNA, 19 nt, Homo sapiens
  misc_RNA (1)...(19): siRNA sense strand
gcucuccuggguuuccuuu

SEQ ID NO: 501363 - RNA, 19 nt, Homo sapiens
  misc_RNA (1)...(19): siRNA sense strand
agaggacccacgagcauga

SEQ ID NO: 501364 - RNA, 19 nt, Homo sapiens
  misc_RNA (1)...(19): siRNA sense strand
ggacaguguuacagcaauu

SEQ ID NO: 501365 - RNA, 19 nt, Homo sapiens
  misc_RNA (1)...(19): siRNA sense strand
caucaaaguuguccugcaa

SEQ ID NO: 501366 - RNA, 19 nt, Homo sapiens
  misc_RNA (1)...(19): siRNA sense strand
caaaauggcagaauucaua

SEQ ID NO: 501367 - RNA, 19 nt, Homo sapiens
  misc_RNA (1)...(19): siRNA sense strand
ucauauagcaucaaaguug

SEQ ID NO: 501368 - RNA, 19 nt, Homo sapiens
  misc_RNA (1)...(19): siRNA sense strand
aauagaauguggaccuaaa

SEQ ID NO: 501369 - RNA, 19 nt, Homo sapiens
  misc_RNA (1)...(19): siRNA sense strand
ggaccuaaauacccagaag

SEQ ID NO: 501370 - RNA, 19 nt, Homo sapiens
  misc_RNA (1)...(19): siRNA sense strand
ggaguaaauaguucuaaug

SEQ ID NO: 501371 - RNA, 19 nt, Homo sapiens
  misc_RNA (1)...(19): siRNA sense strand
ccauaucagugcuagcaaa

SEQ ID NO: 501372 - RNA, 19 nt, Homo sapiens
  misc_RNA (1)...(19): siRNA sense strand
ucaaaguuguccugcaaga

SEQ ID NO: 501373 - RNA, 19 nt, Homo sapiens
  misc_RNA (1)...(19): siRNA sense strand
ugaauggaguaaauaguuc

SEQ ID NO: 501374 - RNA, 19 nt, Homo sapiens
  misc_RNA (1)...(19): siRNA sense strand
cauauagcaucaaaguugu

SEQ ID NO: 501375 - RNA, 19 nt, Homo sapiens
  misc_RNA (1)...(19): siRNA sense strand
gccuaaugaugucuaaaga

SEQ ID NO: 501376 - RNA, 19 nt, Homo sapiens
  misc_RNA (1)...(19): siRNA sense strand
uagaauguggaccuaaaua

SEQ ID NO: 501377 - RNA, 19 nt, Homo sapiens
  misc_RNA (1)...(19): siRNA sense strand
gaguaaauaguucuaaugg

SEQ ID NO: 501378 - RNA, 19 nt, Homo sapiens
  misc_RNA (1)...(19): siRNA sense strand
cagaauucauauagcauca

SEQ ID NO: 501379 - RNA, 19 nt, Homo sapiens
  misc_RNA (1)...(19): siRNA sense strand
ccgaauauacagccuuaaa

SEQ ID NO: 501380 - RNA, 19 nt, Homo sapiens
  misc_RNA (1)...(19): siRNA sense strand
uggcagaauucauauagca

SEQ ID NO: 501381 - RNA, 19 nt, Homo sapiens
  misc_RNA (1)...(19): siRNA sense strand
gacaguguuacagcaauua

SEQ ID NO: 501382 - RNA, 19 nt, Homo sapiens
  misc_RNA (1)...(19): siRNA sense strand
ggacccaagagccauauca

SEQ ID NO: 501383 - RNA, 19 nt, Homo sapiens
  misc_RNA (1)...(19): siRNA sense strand
uaucagugcuagcaaaaug

SEQ ID NO: 501384 - RNA, 19 nt, Homo sapiens
  misc_RNA (1)...(19): siRNA sense strand
ccuaaugaugucuaaagaa

SEQ ID NO: 501385 - RNA, 19 nt, Homo sapiens
  misc_RNA (1)...(19): siRNA sense strand
gguggacccaagagccaua

SEQ ID NO: 501386 - RNA, 19 nt, Homo sapiens
  misc_RNA (1)...(19): siRNA sense strand
gaauggaguaaauaguucu

SEQ ID NO: 501387 - RNA, 19 nt, Homo sapiens
  misc_RNA (1)...(19): siRNA sense strand
gaauguggaccuaaauacc

SEQ ID NO: 501388 - RNA, 19 nt, Homo sapiens
  misc_RNA (1)...(19): siRNA sense strand
aaaauagaauguggaccua

SEQ ID NO: 501389 - RNA, 19 nt, Homo sapiens
  misc_RNA (1)...(19): siRNA sense strand
ggacaguguuacagcaauu

SEQ ID NO: 501390 - RNA, 19 nt, Homo sapiens
  misc_RNA (1)...(19): siRNA sense strand
caucaaaguuguccugcaa

SEQ ID NO: 501391 - RNA, 19 nt, Homo sapiens
  misc_RNA (1)...(19): siRNA sense strand
caaaauggcagaauucaua

SEQ ID NO: 501392 - RNA, 19 nt, Homo sapiens
  misc_RNA (1)...(19): siRNA sense strand
ucauauagcaucaaaguug

SEQ ID NO: 501393 - RNA, 19 nt, Homo sapiens
  misc_RNA (1)...(19): siRNA sense strand
aauagaauguggaccuaaa

SEQ ID NO: 501394 - RNA, 19 nt, Homo sapiens
  misc_RNA (1)...(19): siRNA sense strand
ggaccuaaauacccagaag

SEQ ID NO: 501395 - RNA, 19 nt, Homo sapiens
  misc_RNA (1)...(19): siRNA sense strand
ggaguaaauaguucuaaug

SEQ ID NO: 501396 - RNA, 19 nt, Homo sapiens
  misc_RNA (1)...(19): siRNA sense strand
ccauaucagugcuagcaaa

SEQ ID NO: 501397 - RNA, 19 nt, Homo sapiens
  misc_RNA (1)...(19): siRNA sense strand
ucaaaguuguccugcaaga

SEQ ID NO: 501398 - RNA, 19 nt, Homo sapiens
  misc_RNA (1)...(19): siRNA sense strand
ugaauggaguaaauaguuc

SEQ ID NO: 501399 - RNA, 19 nt, Homo sapiens
  misc_RNA (1)...(19): siRNA sense strand
cauauagcaucaaaguugu

SEQ ID NO: 501400 - RNA, 19 nt, Homo sapiens
  misc_RNA (1)...(19): siRNA sense strand
gccuaaugaugucuaaaga

SEQ ID NO: 501401 - RNA, 19 nt, Homo sapiens
  misc_RNA (1)...(19): siRNA sense strand
uagaauguggaccuaaaua

SEQ ID NO: 501402 - RNA, 19 nt, Homo sapiens
  misc_RNA (1)...(19): siRNA sense strand
gaguaaauaguucuaaugg

SEQ ID NO: 501403 - RNA, 19 nt, Homo sapiens
  misc_RNA (1)...(19): siRNA sense strand
cagaauucauauagcauca

SEQ ID NO: 501404 - RNA, 19 nt, Homo sapiens
  misc_RNA (1)...(19): siRNA sense strand
ccgaauauacagccuuaaa

SEQ ID NO: 501405 - RNA, 19 nt, Homo sapiens
  misc_RNA (1)...(19): siRNA sense strand
uggcagaauucauauagca

SEQ ID NO: 501406 - RNA, 19 nt, Homo sapiens
  misc_RNA (1)...(19): siRNA sense strand
gacaguguuacagcaauua

SEQ ID NO: 501407 - RNA, 19 nt, Homo sapiens
  misc_RNA (1)...(19): siRNA sense strand
ggacccaagagccauauca

SEQ ID NO: 501408 - RNA, 19 nt, Homo sapiens
  misc_RNA (1)...(19): siRNA sense strand
uaucagugcuagcaaaaug

SEQ ID NO: 501409 - RNA, 19 nt, Homo sapiens
  misc_RNA (1)...(19): siRNA sense strand
ccuaaugaugucuaaagaa

SEQ ID NO: 501410 - RNA, 19 nt, Homo sapiens
  misc_RNA (1)...(19): siRNA sense strand
gguggacccaagagccaua

SEQ ID NO: 501411 - RNA, 19 nt, Homo sapiens
  misc_RNA (1)...(19): siRNA sense strand
gaauggaguaaauaguucu

SEQ ID NO: 501412 - RNA, 19 nt, Homo sapiens
  misc_RNA (1)...(19): siRNA sense strand
gaauguggaccuaaauacc

SEQ ID NO: 501413 - RNA, 19 nt, Homo sapiens
  misc_RNA (1)...(19): siRNA sense strand
aaaauagaauguggaccua

SEQ ID NO: 501414 - RNA, 19 nt, Homo sapiens
  misc_RNA (1)...(19): siRNA sense strand
ggacaguguuacagcaauu

SEQ ID NO: 501415 - RNA, 19 nt, Homo sapiens
  misc_RNA (1)...(19): siRNA sense strand
caucaaaguuguccugcaa

SEQ ID NO: 501416 - RNA, 19 nt, Homo sapiens
  misc_RNA (1)...(19): siRNA sense strand
caaaauggcagaauucaua

SEQ ID NO: 501417 - RNA, 19 nt, Homo sapiens
  misc_RNA (1)...(19): siRNA sense strand
ucauauagcaucaaaguug

SEQ ID NO: 501418 - RNA, 19 nt, Homo sapiens
  misc_RNA (1)...(19): siRNA sense strand
aauagaauguggaccuaaa

SEQ ID NO: 501419 - RNA, 19 nt, Homo sapiens
  misc_RNA (1)...(19): siRNA sense strand
ggaccuaaauacccagaag

SEQ ID NO: 501420 - RNA, 19 nt, Homo sapiens
  misc_RNA (1)...(19): siRNA sense strand
ggaguaaauaguucuaaug

SEQ ID NO: 501421 - RNA, 19 nt, Homo sapiens
  misc_RNA (1)...(19): siRNA sense strand
ccauaucagugcuagcaaa

SEQ ID NO: 501422 - RNA, 19 nt, Homo sapiens
  misc_RNA (1)...(19): siRNA sense strand
ucaaaguuguccugcaaga

SEQ ID NO: 501423 - RNA, 19 nt, Homo sapiens
  misc_RNA (1)...(19): siRNA sense strand
ugaauggaguaaauaguuc

SEQ ID NO: 501424 - RNA, 19 nt, Homo sapiens
  misc_RNA (1)...(19): siRNA sense strand
aaccgaauauacagccuua

SEQ ID NO: 501425 - RNA, 19 nt, Homo sapiens
  misc_RNA (1)...(19): siRNA sense strand
cauauagcaucaaaguugu

SEQ ID NO: 501426 - RNA, 19 nt, Homo sapiens
  misc_RNA (1)...(19): siRNA sense strand
gccuaaugaugucuaaaga

SEQ ID NO: 501427 - RNA, 19 nt, Homo sapiens
  misc_RNA (1)...(19): siRNA sense strand
uagaauguggaccuaaaua

SEQ ID NO: 501428 - RNA, 19 nt, Homo sapiens
  misc_RNA (1)...(19): siRNA sense strand
gaguaaauaguucuaaugg

SEQ ID NO: 501429 - RNA, 19 nt, Homo sapiens
  misc_RNA (1)...(19): siRNA sense strand
cagaauucauauagcauca

SEQ ID NO: 501430 - RNA, 19 nt, Homo sapiens
  misc_RNA (1)...(19): siRNA sense strand
ccgaauauacagccuuaaa

SEQ ID NO: 501431 - RNA, 19 nt, Homo sapiens
  misc_RNA (1)...(19): siRNA sense strand
uggcagaauucauauagca

SEQ ID NO: 501432 - RNA, 19 nt, Homo sapiens
  misc_RNA (1)...(19): siRNA sense strand
gacaguguuacagcaauua

SEQ ID NO: 501433 - RNA, 19 nt, Homo sapiens
  misc_RNA (1)...(19): siRNA sense strand
ggacccaagagccauauca

SEQ ID NO: 501434 - RNA, 19 nt, Homo sapiens
  misc_RNA (1)...(19): siRNA sense strand
uaucagugcuagcaaaaug

SEQ ID NO: 501435 - RNA, 19 nt, Homo sapiens
  misc_RNA (1)...(19): siRNA sense strand
ccuaaugaugucuaaagaa

SEQ ID NO: 501436 - RNA, 19 nt, Homo sapiens
  misc_RNA (1)...(19): siRNA sense strand
gaauggaguaaauaguucu

SEQ ID NO: 501437 - RNA, 19 nt, Homo sapiens
  misc_RNA (1)...(19): siRNA sense strand
gguggacccaagagccaua

SEQ ID NO: 501438 - RNA, 19 nt, Homo sapiens
  misc_RNA (1)...(19): siRNA sense strand
gaauguggaccuaaauacc

SEQ ID NO: 501439 - RNA, 19 nt, Homo sapiens
  misc_RNA (1)...(19): siRNA sense strand
aaaauagaauguggaccua

SEQ ID NO: 501440 - RNA, 19 nt, Homo sapiens
  misc_RNA (1)...(19): siRNA sense strand
gaaacaaagucaacugaga

SEQ ID NO: 501441 - RNA, 19 nt, Homo sapiens
  misc_RNA (1)...(19): siRNA sense strand
acacuauccugaguaauua

SEQ ID NO: 501442 - RNA, 19 nt, Homo sapiens
  misc_RNA (1)...(19): siRNA sense strand
ugaacacuauccugaguaa

SEQ ID NO: 501443 - RNA, 19 nt, Homo sapiens
  misc_RNA (1)...(19): siRNA sense strand
gaguaauuaugaccacaaa

SEQ ID NO: 501444 - RNA, 19 nt, Homo sapiens
  misc_RNA (1)...(19): siRNA sense strand
gggaucaccucuguucuga

SEQ ID NO: 501445 - RNA, 19 nt, Homo sapiens
  misc_RNA (1)...(19): siRNA sense strand
ucacagccuuggauuucua

SEQ ID NO: 501446 - RNA, 19 nt, Homo sapiens
  misc_RNA (1)...(19): siRNA sense strand
ccgcgugucuccuauauca

SEQ ID NO: 501447 - RNA, 19 nt, Homo sapiens
  misc_RNA (1)...(19): siRNA sense strand
ggaauacaccauugacauc

SEQ ID NO: 501448 - RNA, 19 nt, Homo sapiens
  misc_RNA (1)...(19): siRNA sense strand
gcaagcguuuuaagaagua

SEQ ID NO: 501449 - RNA, 19 nt, Homo sapiens
  misc_RNA (1)...(19): siRNA sense strand
ucaacuuccugaucuacaa

SEQ ID NO: 501450 - RNA, 19 nt, Homo sapiens
  misc_RNA (1)...(19): siRNA sense strand
gaauacaccauugacauca

SEQ ID NO: 501451 - RNA, 19 nt, Homo sapiens
  misc_RNA (1)...(19): siRNA sense strand
cagacugaaucaaagaaug

SEQ ID NO: 501452 - RNA, 19 nt, Homo sapiens
  misc_RNA (1)...(19): siRNA sense strand
gugcucaacuuccugaucu

SEQ ID NO: 501453 - RNA, 19 nt, Homo sapiens
  misc_RNA (1)...(19): siRNA sense strand
gccaacaucaggaagcuuu

SEQ ID NO: 501454 - RNA, 19 nt, Homo sapiens
  misc_RNA (1)...(19): siRNA sense strand
acgaugcucuccuggguuu

SEQ ID NO: 501455 - RNA, 19 nt, Homo sapiens
  misc_RNA (1)...(19): siRNA sense strand
aaacuccgccauccucgua

SEQ ID NO: 501456 - RNA, 19 nt, Homo sapiens
  misc_RNA (1)...(19): siRNA sense strand
aaacugcgcccuggcauug

SEQ ID NO: 501457 - RNA, 19 nt, Homo sapiens
  misc_RNA (1)...(19): siRNA sense strand
cccagugacuuucuucuuc

SEQ ID NO: 501458 - RNA, 19 nt, Homo sapiens
  misc_RNA (1)...(19): siRNA sense strand
guaauuaugaccacaaacu

SEQ ID NO: 501459 - RNA, 19 nt, Homo sapiens
  misc_RNA (1)...(19): siRNA sense strand
agacugaaucaaagaauga

SEQ ID NO: 501460 - RNA, 19 nt, Homo sapiens
  misc_RNA (1)...(19): siRNA sense strand
caauggauucucacucuug

SEQ ID NO: 501461 - RNA, 19 nt, Homo sapiens
  misc_RNA (1)...(19): siRNA sense strand
ggaguuugcugugcucaac

SEQ ID NO: 501462 - RNA, 19 nt, Homo sapiens
  misc_RNA (1)...(19): siRNA sense strand
aacacuauccugaguaauu

SEQ ID NO: 501463 - RNA, 19 nt, Homo sapiens
  misc_RNA (1)...(19): siRNA sense strand
gccagauugucaccacuga

SEQ ID NO: 501464 - RNA, 19 nt, Homo sapiens
  misc_RNA (1)...(19): siRNA sense strand
uaucacagccuuggauuuc

SEQ ID NO: 501465 - RNA, 19 nt, Homo sapiens
  misc_RNA (1)...(19): siRNA sense strand
gcaggcgguuuggcuaugu

SEQ ID NO: 501466 - RNA, 19 nt, Homo sapiens
  misc_RNA (1)...(19): siRNA sense strand
ccaauggauucucacucuu

SEQ ID NO: 501467 - RNA, 19 nt, Homo sapiens
  misc_RNA (1)...(19): siRNA sense strand
ugaaaucaaugagaagaac

SEQ ID NO: 501468 - RNA, 19 nt, Homo sapiens
  misc_RNA (1)...(19): siRNA sense strand
uuacaggagugagcaacaa

SEQ ID NO: 501469 - RNA, 19 nt, Homo sapiens
  misc_RNA (1)...(19): siRNA sense strand
guuuggcuauguugccuuu

SEQ ID NO: 501470 - RNA, 19 nt, Homo sapiens
  misc_RNA (1)...(19): siRNA sense strand
gagacugggagcagaguug

SEQ ID NO: 501471 - RNA, 19 nt, Homo sapiens
  misc_RNA (1)...(19): siRNA sense strand
ccagugacuuucuucuucu

SEQ ID NO: 501472 - RNA, 19 nt, Homo sapiens
  misc_RNA (1)...(19): siRNA sense strand
gagcaggcgguuuggcuau

SEQ ID NO: 501473 - RNA, 19 nt, Homo sapiens
  misc_RNA (1)...(19): siRNA sense strand
gagcaacaaaacugaaaua

SEQ ID NO: 501474 - RNA, 19 nt, Homo sapiens
  misc_RNA (1)...(19): siRNA sense strand
acucuugcccucuaucuuu

SEQ ID NO: 501475 - RNA, 19 nt, Homo sapiens
  misc_RNA (1)...(19): siRNA sense strand
uuuccuauccugagaauga

SEQ ID NO: 501476 - RNA, 19 nt, Homo sapiens
  misc_RNA (1)...(19): siRNA sense strand
ucuaccgccuggauaacua

SEQ ID NO: 501477 - RNA, 19 nt, Homo sapiens
  misc_RNA (1)...(19): siRNA sense strand
ccuccuaggcaucuuauug

SEQ ID NO: 501478 - RNA, 19 nt, Homo sapiens
  misc_RNA (1)...(19): siRNA sense strand
ccauugacaucaucuucuc

SEQ ID NO: 501479 - RNA, 19 nt, Homo sapiens
  misc_RNA (1)...(19): siRNA sense strand
ugacuuucuucuucuucaa

SEQ ID NO: 501480 - RNA, 19 nt, Homo sapiens
  misc_RNA (1)...(19): siRNA sense strand
ccugaacacuauccugagu

SEQ ID NO: 501481 - RNA, 19 nt, Homo sapiens
  misc_RNA (1)...(19): siRNA sense strand
gugacuuucuucuucuuca

SEQ ID NO: 501482 - RNA, 19 nt, Homo sapiens
  misc_RNA (1)...(19): siRNA sense strand
gaggaaacaaagucaacug

SEQ ID NO: 501483 - RNA, 19 nt, Homo sapiens
  misc_RNA (1)...(19): siRNA sense strand
uaagaggacccacgagcau

SEQ ID NO: 501484 - RNA, 19 nt, Homo sapiens
  misc_RNA (1)...(19): siRNA sense strand
caaacugcgcccuggcauu

SEQ ID NO: 501485 - RNA, 19 nt, Homo sapiens
  misc_RNA (1)...(19): siRNA sense strand
gcccaugcuucuccuaaac

SEQ ID NO: 501486 - RNA, 19 nt, Homo sapiens
  misc_RNA (1)...(19): siRNA sense strand
aagcuggccugcugugagu

SEQ ID NO: 501487 - RNA, 19 nt, Homo sapiens
  misc_RNA (1)...(19): siRNA sense strand
uguggucacuguugagauc

SEQ ID NO: 501488 - RNA, 19 nt, Homo sapiens
  misc_RNA (1)...(19): siRNA sense strand
cuagggaucaccucuguuc

SEQ ID NO: 501489 - RNA, 19 nt, Homo sapiens
  misc_RNA (1)...(19): siRNA sense strand
aaaacuaugucccuucuuc

SEQ ID NO: 501490 - RNA, 19 nt, Homo sapiens
  misc_RNA (1)...(19): siRNA sense strand
ucucgcauccugaacacua

SEQ ID NO: 501491 - RNA, 19 nt, Homo sapiens
  misc_RNA (1)...(19): siRNA sense strand
gaugcucacuccacaugcu

SEQ ID NO: 501492 - RNA, 19 nt, Homo sapiens
  misc_RNA (1)...(19): siRNA sense strand
cgccauccucguaucaaua

SEQ ID NO: 501493 - RNA, 19 nt, Homo sapiens
  misc_RNA (1)...(19): siRNA sense strand
gcccuggcauuggagagaa

SEQ ID NO: 501494 - RNA, 19 nt, Homo sapiens
  misc_RNA (1)...(19): siRNA sense strand
aaugugagcaggcgguuug

SEQ ID NO: 501495 - RNA, 19 nt, Homo sapiens
  misc_RNA (1)...(19): siRNA sense strand
cccgugauguugucuaugg

SEQ ID NO: 501496 - RNA, 19 nt, Homo sapiens
  misc_RNA (1)...(19): siRNA sense strand
augcucagauuuccaaugg

SEQ ID NO: 501497 - RNA, 19 nt, Homo sapiens
  misc_RNA (1)...(19): siRNA sense strand
gaaaucaaugagaagaacu

SEQ ID NO: 501498 - RNA, 19 nt, Homo sapiens
  misc_RNA (1)...(19): siRNA sense strand
cccaguuggugacuucaug

SEQ ID NO: 501499 - RNA, 19 nt, Homo sapiens
  misc_RNA (1)...(19): siRNA sense strand
agccuuggauuucuauauc

SEQ ID NO: 501500 - RNA, 19 nt, Homo sapiens
  misc_RNA (1)...(19): siRNA sense strand
ucaccucuguucugaccau

SEQ ID NO: 501501 - RNA, 19 nt, Homo sapiens
  misc_RNA (1)...(19): siRNA sense strand
ucugcgcucuguuggaguu

SEQ ID NO: 501502 - RNA, 19 nt, Homo sapiens
  misc_RNA (1)...(19): siRNA sense strand
auacaccauugacaucauc

SEQ ID NO: 501503 - RNA, 19 nt, Homo sapiens
  misc_RNA (1)...(19): siRNA sense strand
gccauccucguaucaauag

SEQ ID NO: 501504 - RNA, 19 nt, Homo sapiens
  misc_RNA (1)...(19): siRNA sense strand
ccgccauccucguaucaau

SEQ ID NO: 501505 - RNA, 19 nt, Homo sapiens
  misc_RNA (1)...(19): siRNA sense strand
cagccuuggauuucuauau

SEQ ID NO: 501506 - RNA, 19 nt, Homo sapiens
  misc_RNA (1)...(19): siRNA sense strand
gcucuccuggguuuccuuu

SEQ ID NO: 501507 - RNA, 19 nt, Homo sapiens
  misc_RNA (1)...(19): siRNA sense strand
caccaugcccaaccagaug

SEQ ID NO: 501508 - RNA, 19 nt, Homo sapiens
  misc_RNA (1)...(19): siRNA sense strand
agaggacccacgagcauga

SEQ ID NO: 501509 - RNA, 19 nt, Homo sapiens
  misc_RNA (1)...(19): siRNA sense strand
gggaucaccucuguucuga

SEQ ID NO: 501510 - RNA, 19 nt, Homo sapiens
  misc_RNA (1)...(19): siRNA sense strand
ucacagccuuggauuucua

SEQ ID NO: 501511 - RNA, 19 nt, Homo sapiens
  misc_RNA (1)...(19): siRNA sense strand
ccgcgugucuccuauauca

SEQ ID NO: 501512 - RNA, 19 nt, Homo sapiens
  misc_RNA (1)...(19): siRNA sense strand
ggaauacaccauugacauc

SEQ ID NO: 501513 - RNA, 19 nt, Homo sapiens
  misc_RNA (1)...(19): siRNA sense strand
gcaagcguuuuaagaagua

SEQ ID NO: 501514 - RNA, 19 nt, Homo sapiens
  misc_RNA (1)...(19): siRNA sense strand
ucaacuuccugaucuacaa

SEQ ID NO: 501515 - RNA, 19 nt, Homo sapiens
  misc_RNA (1)...(19): siRNA sense strand
gaauacaccauugacauca

SEQ ID NO: 501516 - RNA, 19 nt, Homo sapiens
  misc_RNA (1)...(19): siRNA sense strand
gugcucaacuuccugaucu

SEQ ID NO: 501517 - RNA, 19 nt, Homo sapiens
  misc_RNA (1)...(19): siRNA sense strand
gccaacaucaggaagcuuu

SEQ ID NO: 501518 - RNA, 19 nt, Homo sapiens
  misc_RNA (1)...(19): siRNA sense strand
acgaugcucuccuggguuu

SEQ ID NO: 501519 - RNA, 19 nt, Homo sapiens
  misc_RNA (1)...(19): siRNA sense strand
aaacuccgccauccucgua

SEQ ID NO: 501520 - RNA, 19 nt, Homo sapiens
  misc_RNA (1)...(19): siRNA sense strand
cccagugacuuucuucuuc

SEQ ID NO: 501521 - RNA, 19 nt, Homo sapiens
  misc_RNA (1)...(19): siRNA sense strand
caauggauucucacucuug

SEQ ID NO: 501522 - RNA, 19 nt, Homo sapiens
  misc_RNA (1)...(19): siRNA sense strand
ggaguuugcugugcucaac

SEQ ID NO: 501523 - RNA, 19 nt, Homo sapiens
  misc_RNA (1)...(19): siRNA sense strand
ccaauggauucucacucuu

SEQ ID NO: 501524 - RNA, 19 nt, Homo sapiens
  misc_RNA (1)...(19): siRNA sense strand
gccagauugucaccacuga

SEQ ID NO: 501525 - RNA, 19 nt, Homo sapiens
  misc_RNA (1)...(19): siRNA sense strand
uaucacagccuuggauuuc

SEQ ID NO: 501526 - RNA, 19 nt, Homo sapiens
  misc_RNA (1)...(19): siRNA sense strand
gcaggcgguuuggcuaugu

SEQ ID NO: 501527 - RNA, 19 nt, Homo sapiens
  misc_RNA (1)...(19): siRNA sense strand
ugaaaucaaugagaagaac

SEQ ID NO: 501528 - RNA, 19 nt, Homo sapiens
  misc_RNA (1)...(19): siRNA sense strand
uuacaggagugagcaacaa

SEQ ID NO: 501529 - RNA, 19 nt, Homo sapiens
  misc_RNA (1)...(19): siRNA sense strand
guuuggcuauguugccuuu

SEQ ID NO: 501530 - RNA, 19 nt, Homo sapiens
  misc_RNA (1)...(19): siRNA sense strand
acucuugcccucuaucuuu

SEQ ID NO: 501531 - RNA, 19 nt, Homo sapiens
  misc_RNA (1)...(19): siRNA sense strand
ccagugacuuucuucuucu

SEQ ID NO: 501532 - RNA, 19 nt, Homo sapiens
  misc_RNA (1)...(19): siRNA sense strand
gagcaggcgguuuggcuau

SEQ ID NO: 501533 - RNA, 19 nt, Homo sapiens
  misc_RNA (1)...(19): siRNA sense strand
gagcaacaaaacugaaaua

SEQ ID NO: 501534 - RNA, 19 nt, Homo sapiens
  misc_RNA (1)...(19): siRNA sense strand
uuuccuauccugagaauga

SEQ ID NO: 501535 - RNA, 19 nt, Homo sapiens
  misc_RNA (1)...(19): siRNA sense strand
ucuaccgccuggauaacua

SEQ ID NO: 501536 - RNA, 19 nt, Homo sapiens
  misc_RNA (1)...(19): siRNA sense strand
ccauugacaucaucuucuc

SEQ ID NO: 501537 - RNA, 19 nt, Homo sapiens
  misc_RNA (1)...(19): siRNA sense strand
ugacuuucuucuucuucaa

SEQ ID NO: 501538 - RNA, 19 nt, Homo sapiens
  misc_RNA (1)...(19): siRNA sense strand
uaagaggacccacgagcau

SEQ ID NO: 501539 - RNA, 19 nt, Homo sapiens
  misc_RNA (1)...(19): siRNA sense strand
gugacuuucuucuucuuca

SEQ ID NO: 501540 - RNA, 19 nt, Homo sapiens
  misc_RNA (1)...(19): siRNA sense strand
gcccaugcuucuccuaaac

SEQ ID NO: 501541 - RNA, 19 nt, Homo sapiens
  misc_RNA (1)...(19): siRNA sense strand
aagcuggccugcugugagu

SEQ ID NO: 501542 - RNA, 19 nt, Homo sapiens
  misc_RNA (1)...(19): siRNA sense strand
aaaacuaugucccuucuuc

SEQ ID NO: 501543 - RNA, 19 nt, Homo sapiens
  misc_RNA (1)...(19): siRNA sense strand
cuagggaucaccucuguuc

SEQ ID NO: 501544 - RNA, 19 nt, Homo sapiens
  misc_RNA (1)...(19): siRNA sense strand
gaugcucacuccacaugcu

SEQ ID NO: 501545 - RNA, 19 nt, Homo sapiens
  misc_RNA (1)...(19): siRNA sense strand
cgccauccucguaucaaua

SEQ ID NO: 501546 - RNA, 19 nt, Homo sapiens
  misc_RNA (1)...(19): siRNA sense strand
aaugugagcaggcgguuug

SEQ ID NO: 501547 - RNA, 19 nt, Homo sapiens
  misc_RNA (1)...(19): siRNA sense strand
augcucagauuuccaaugg

SEQ ID NO: 501548 - RNA, 19 nt, Homo sapiens
  misc_RNA (1)...(19): siRNA sense strand
gaaaucaaugagaagaacu

SEQ ID NO: 501549 - RNA, 19 nt, Homo sapiens
  misc_RNA (1)...(19): siRNA sense strand
cccaguuggugacuucaug

SEQ ID NO: 501550 - RNA, 19 nt, Homo sapiens
  misc_RNA (1)...(19): siRNA sense strand
agccuuggauuucuauauc

SEQ ID NO: 501551 - RNA, 19 nt, Homo sapiens
  misc_RNA (1)...(19): siRNA sense strand
ucaccucuguucugaccau

SEQ ID NO: 501552 - RNA, 19 nt, Homo sapiens
  misc_RNA (1)...(19): siRNA sense strand
ucugcgcucuguuggaguu

SEQ ID NO: 501553 - RNA, 19 nt, Homo sapiens
  misc_RNA (1)...(19): siRNA sense strand
caccaugcccaaccagaug

SEQ ID NO: 501554 - RNA, 19 nt, Homo sapiens
  misc_RNA (1)...(19): siRNA sense strand
gccauccucguaucaauag

SEQ ID NO: 501555 - RNA, 19 nt, Homo sapiens
  misc_RNA (1)...(19): siRNA sense strand
ccgccauccucguaucaau

SEQ ID NO: 501556 - RNA, 19 nt, Homo sapiens
  misc_RNA (1)...(19): siRNA sense strand
cagccuuggauuucuauau

SEQ ID NO: 501557 - RNA, 19 nt, Homo sapiens
  misc_RNA (1)...(19): siRNA sense strand
auacaccauugacaucauc

SEQ ID NO: 501558 - RNA, 19 nt, Homo sapiens
  misc_RNA (1)...(19): siRNA sense strand
gcucuccuggguuuccuuu

SEQ ID NO: 501559 - RNA, 19 nt, Homo sapiens
  misc_RNA (1)...(19): siRNA sense strand
agaggacccacgagcauga

SEQ ID NO: 501560 - RNA, 19 nt, Homo sapiens
  misc_RNA (1)...(19): siRNA sense strand
gggaucaccucuguucuga

SEQ ID NO: 501561 - RNA, 19 nt, Homo sapiens
  misc_RNA (1)...(19): siRNA sense strand
ucacagccuuggauuucua

SEQ ID NO: 501562 - RNA, 19 nt, Homo sapiens
  misc_RNA (1)...(19): siRNA sense strand
ccgcgugucuccuauauca

SEQ ID NO: 501563 - RNA, 19 nt, Homo sapiens
  misc_RNA (1)...(19): siRNA sense strand
ggaauacaccauugacauc

SEQ ID NO: 501564 - RNA, 19 nt, Homo sapiens
  misc_RNA (1)...(19): siRNA sense strand
gcaagcguuuuaagaagua

SEQ ID NO: 501565 - RNA, 19 nt, Homo sapiens
  misc_RNA (1)...(19): siRNA sense strand
ucaacuuccugaucuacaa

SEQ ID NO: 501566 - RNA, 19 nt, Homo sapiens
  misc_RNA (1)...(19): siRNA sense strand
gaauacaccauugacauca

SEQ ID NO: 501567 - RNA, 19 nt, Homo sapiens
  misc_RNA (1)...(19): siRNA sense strand
gugcucaacuuccugaucu

SEQ ID NO: 501568 - RNA, 19 nt, Homo sapiens
  misc_RNA (1)...(19): siRNA sense strand
gccaacaucaggaagcuuu

SEQ ID NO: 501569 - RNA, 19 nt, Homo sapiens
  misc_RNA (1)...(19): siRNA sense strand
acgaugcucuccuggguuu

SEQ ID NO: 501570 - RNA, 19 nt, Homo sapiens
  misc_RNA (1)...(19): siRNA sense strand
aaacuccgccauccucgua

SEQ ID NO: 501571 - RNA, 19 nt, Homo sapiens
  misc_RNA (1)...(19): siRNA sense strand
cccagugacuuucuucuuc

SEQ ID NO: 501572 - RNA, 19 nt, Homo sapiens
  misc_RNA (1)...(19): siRNA sense strand
caauggauucucacucuug

SEQ ID NO: 501573 - RNA, 19 nt, Homo sapiens
  misc_RNA (1)...(19): siRNA sense strand
ggaguuugcugugcucaac

SEQ ID NO: 501574 - RNA, 19 nt, Homo sapiens
  misc_RNA (1)...(19): siRNA sense strand
ccaauggauucucacucuu

SEQ ID NO: 501575 - RNA, 19 nt, Homo sapiens
  misc_RNA (1)...(19): siRNA sense strand
gccagauugucaccacuga

SEQ ID NO: 501576 - RNA, 19 nt, Homo sapiens
  misc_RNA (1)...(19): siRNA sense strand
uaucacagccuuggauuuc

SEQ ID NO: 501577 - RNA, 19 nt, Homo sapiens
  misc_RNA (1)...(19): siRNA sense strand
gcaggcgguuuggcuaugu

SEQ ID NO: 501578 - RNA, 19 nt, Homo sapiens
  misc_RNA (1)...(19): siRNA sense strand
ugaaaucaaugagaagaac

SEQ ID NO: 501579 - RNA, 19 nt, Homo sapiens
  misc_RNA (1)...(19): siRNA sense strand
uuacaggagugagcaacaa

SEQ ID NO: 501580 - RNA, 19 nt, Homo sapiens
  misc_RNA (1)...(19): siRNA sense strand
guuuggcuauguugccuuu

SEQ ID NO: 501581 - RNA, 19 nt, Homo sapiens
  misc_RNA (1)...(19): siRNA sense strand
acucuugcccucuaucuuu

SEQ ID NO: 501582 - RNA, 19 nt, Homo sapiens
  misc_RNA (1)...(19): siRNA sense strand
ccagugacuuucuucuucu

SEQ ID NO: 501583 - RNA, 19 nt, Homo sapiens
  misc_RNA (1)...(19): siRNA sense strand
gagcaggcgguuuggcuau

SEQ ID NO: 501584 - RNA, 19 nt, Homo sapiens
  misc_RNA (1)...(19): siRNA sense strand
gagcaacaaaacugaaaua

SEQ ID NO: 501585 - RNA, 19 nt, Homo sapiens
  misc_RNA (1)...(19): siRNA sense strand
uuuccuauccugagaauga

SEQ ID NO: 501586 - RNA, 19 nt, Homo sapiens
  misc_RNA (1)...(19): siRNA sense strand
ucuaccgccuggauaacua

SEQ ID NO: 501587 - RNA, 19 nt, Homo sapiens
  misc_RNA (1)...(19): siRNA sense strand
ccauugacaucaucuucuc

SEQ ID NO: 501588 - RNA, 19 nt, Homo sapiens
  misc_RNA (1)...(19): siRNA sense strand
ugacuuucuucuucuucaa

SEQ ID NO: 501589 - RNA, 19 nt, Homo sapiens
  misc_RNA (1)...(19): siRNA sense strand
uaagaggacccacgagcau

SEQ ID NO: 501590 - RNA, 19 nt, Homo sapiens
  misc_RNA (1)...(19): siRNA sense strand
gugacuuucuucuucuuca

SEQ ID NO: 501591 - RNA, 19 nt, Homo sapiens
  misc_RNA (1)...(19): siRNA sense strand
gcccaugcuucuccuaaac

SEQ ID NO: 501592 - RNA, 19 nt, Homo sapiens
  misc_RNA (1)...(19): siRNA sense strand
aagcuggccugcugugagu

SEQ ID NO: 501593 - RNA, 19 nt, Homo sapiens
  misc_RNA (1)...(19): siRNA sense strand
aaaacuaugucccuucuuc

SEQ ID NO: 501594 - RNA, 19 nt, Homo sapiens
  misc_RNA (1)...(19): siRNA sense strand
cuagggaucaccucuguuc

SEQ ID NO: 501595 - RNA, 19 nt, Homo sapiens
  misc_RNA (1)...(19): siRNA sense strand
gaugcucacuccacaugcu

SEQ ID NO: 501596 - RNA, 19 nt, Homo sapiens
  misc_RNA (1)...(19): siRNA sense strand
cgccauccucguaucaaua

SEQ ID NO: 501597 - RNA, 19 nt, Homo sapiens
  misc_RNA (1)...(19): siRNA sense strand
aaugugagcaggcgguuug

SEQ ID NO: 501598 - RNA, 19 nt, Homo sapiens
  misc_RNA (1)...(19): siRNA sense strand
augcucagauuuccaaugg

SEQ ID NO: 501599 - RNA, 19 nt, Homo sapiens
  misc_RNA (1)...(19): siRNA sense strand
gaaaucaaugagaagaacu

SEQ ID NO: 501600 - RNA, 19 nt, Homo sapiens
  misc_RNA (1)...(19): siRNA sense strand
cccaguuggugacuucaug

SEQ ID NO: 501601 - RNA, 19 nt, Homo sapiens
  misc_RNA (1)...(19): siRNA sense strand
agccuuggauuucuauauc

SEQ ID NO: 501602 - RNA, 19 nt, Homo sapiens
  misc_RNA (1)...(19): siRNA sense strand
ucaccucuguucugaccau

SEQ ID NO: 501603 - RNA, 19 nt, Homo sapiens
  misc_RNA (1)...(19): siRNA sense strand
ucugcgcucuguuggaguu

SEQ ID NO: 501604 - RNA, 19 nt, Homo sapiens
  misc_RNA (1)...(19): siRNA sense strand
caccaugcccaaccagaug

SEQ ID NO: 501605 - RNA, 19 nt, Homo sapiens
  misc_RNA (1)...(19): siRNA sense strand
gccauccucguaucaauag

SEQ ID NO: 501606 - RNA, 19 nt, Homo sapiens
  misc_RNA (1)...(19): siRNA sense strand
ccgccauccucguaucaau

SEQ ID NO: 501607 - RNA, 19 nt, Homo sapiens
  misc_RNA (1)...(19): siRNA sense strand
cagccuuggauuucuauau

SEQ ID NO: 501608 - RNA, 19 nt, Homo sapiens
  misc_RNA (1)...(19): siRNA sense strand
auacaccauugacaucauc

SEQ ID NO: 501609 - RNA, 19 nt, Homo sapiens
  misc_RNA (1)...(19): siRNA sense strand
gcucuccuggguuuccuuu

SEQ ID NO: 501610 - RNA, 19 nt, Homo sapiens
  misc_RNA (1)...(19): siRNA sense strand
agaggacccacgagcauga

SEQ ID NO: 501611 - RNA, 19 nt, Homo sapiens
  misc_RNA (1)...(19): siRNA sense strand
gggaucaccucuguucuga

SEQ ID NO: 501612 - RNA, 19 nt, Homo sapiens
  misc_RNA (1)...(19): siRNA sense strand
ucacagccuuggauuucua

SEQ ID NO: 501613 - RNA, 19 nt, Homo sapiens
  misc_RNA (1)...(19): siRNA sense strand
ccgcgugucuccuauauca

SEQ ID NO: 501614 - RNA, 19 nt, Homo sapiens
  misc_RNA (1)...(19): siRNA sense strand
ggaauacaccauugacauc

SEQ ID NO: 501615 - RNA, 19 nt, Homo sapiens
  misc_RNA (1)...(19): siRNA sense strand
gcaagcguuuuaagaagua

SEQ ID NO: 501616 - RNA, 19 nt, Homo sapiens
  misc_RNA (1)...(19): siRNA sense strand
ucaacuuccugaucuacaa

SEQ ID NO: 501617 - RNA, 19 nt, Homo sapiens
  misc_RNA (1)...(19): siRNA sense strand
gaauacaccauugacauca

SEQ ID NO: 501618 - RNA, 19 nt, Homo sapiens
  misc_RNA (1)...(19): siRNA sense strand
gugcucaacuuccugaucu

SEQ ID NO: 501619 - RNA, 19 nt, Homo sapiens
  misc_RNA (1)...(19): siRNA sense strand
gccaacaucaggaagcuuu

SEQ ID NO: 501620 - RNA, 19 nt, Homo sapiens
  misc_RNA (1)...(19): siRNA sense strand
acgaugcucuccuggguuu

SEQ ID NO: 501621 - RNA, 19 nt, Homo sapiens
  misc_RNA (1)...(19): siRNA sense strand
aaacuccgccauccucgua

SEQ ID NO: 501622 - RNA, 19 nt, Homo sapiens
  misc_RNA (1)...(19): siRNA sense strand
cccagugacuuucuucuuc

SEQ ID NO: 501623 - RNA, 19 nt, Homo sapiens
  misc_RNA (1)...(19): siRNA sense strand
caauggauucucacucuug

SEQ ID NO: 501624 - RNA, 19 nt, Homo sapiens
  misc_RNA (1)...(19): siRNA sense strand
ggaguuugcugugcucaac

SEQ ID NO: 501625 - RNA, 19 nt, Homo sapiens
  misc_RNA (1)...(19): siRNA sense strand
ccaauggauucucacucuu

SEQ ID NO: 501626 - RNA, 19 nt, Homo sapiens
  misc_RNA (1)...(19): siRNA sense strand
gccagauugucaccacuga

SEQ ID NO: 501627 - RNA, 19 nt, Homo sapiens
  misc_RNA (1)...(19): siRNA sense strand
uaucacagccuuggauuuc

SEQ ID NO: 501628 - RNA, 19 nt, Homo sapiens
  misc_RNA (1)...(19): siRNA sense strand
gcaggcgguuuggcuaugu

SEQ ID NO: 501629 - RNA, 19 nt, Homo sapiens
  misc_RNA (1)...(19): siRNA sense strand
ugaaaucaaugagaagaac

SEQ ID NO: 501630 - RNA, 19 nt, Homo sapiens
  misc_RNA (1)...(19): siRNA sense strand
uuacaggagugagcaacaa

SEQ ID NO: 501631 - RNA, 19 nt, Homo sapiens
  misc_RNA (1)...(19): siRNA sense strand
guuuggcuauguugccuuu

SEQ ID NO: 501632 - RNA, 19 nt, Homo sapiens
  misc_RNA (1)...(19): siRNA sense strand
acucuugcccucuaucuuu

SEQ ID NO: 501633 - RNA, 19 nt, Homo sapiens
  misc_RNA (1)...(19): siRNA sense strand
ccagugacuuucuucuucu

SEQ ID NO: 501634 - RNA, 19 nt, Homo sapiens
  misc_RNA (1)...(19): siRNA sense strand
gagcaggcgguuuggcuau

SEQ ID NO: 501635 - RNA, 19 nt, Homo sapiens
  misc_RNA (1)...(19): siRNA sense strand
gagcaacaaaacugaaaua

SEQ ID NO: 501636 - RNA, 19 nt, Homo sapiens
  misc_RNA (1)...(19): siRNA sense strand
uuuccuauccugagaauga

SEQ ID NO: 501637 - RNA, 19 nt, Homo sapiens
  misc_RNA (1)...(19): siRNA sense strand
ucuaccgccuggauaacua

SEQ ID NO: 501638 - RNA, 19 nt, Homo sapiens
  misc_RNA (1)...(19): siRNA sense strand
ccauugacaucaucuucuc

SEQ ID NO: 501639 - RNA, 19 nt, Homo sapiens
  misc_RNA (1)...(19): siRNA sense strand
ugacuuucuucuucuucaa

SEQ ID NO: 501640 - RNA, 19 nt, Homo sapiens
  misc_RNA (1)...(19): siRNA sense strand
uaagaggacccacgagcau

SEQ ID NO: 501641 - RNA, 19 nt, Homo sapiens
  misc_RNA (1)...(19): siRNA sense strand
gugacuuucuucuucuuca

SEQ ID NO: 501642 - RNA, 19 nt, Homo sapiens
  misc_RNA (1)...(19): siRNA sense strand
gcccaugcuucuccuaaac

SEQ ID NO: 501643 - RNA, 19 nt, Homo sapiens
  misc_RNA (1)...(19): siRNA sense strand
aagcuggccugcugugagu

SEQ ID NO: 501644 - RNA, 19 nt, Homo sapiens
  misc_RNA (1)...(19): siRNA sense strand
aaaacuaugucccuucuuc

SEQ ID NO: 501645 - RNA, 19 nt, Homo sapiens
  misc_RNA (1)...(19): siRNA sense strand
cuagggaucaccucuguuc

SEQ ID NO: 501646 - RNA, 19 nt, Homo sapiens
  misc_RNA (1)...(19): siRNA sense strand
gaugcucacuccacaugcu

SEQ ID NO: 501647 - RNA, 19 nt, Homo sapiens
  misc_RNA (1)...(19): siRNA sense strand
cgccauccucguaucaaua

SEQ ID NO: 501648 - RNA, 19 nt, Homo sapiens
  misc_RNA (1)...(19): siRNA sense strand
aaugugagcaggcgguuug

SEQ ID NO: 501649 - RNA, 19 nt, Homo sapiens
  misc_RNA (1)...(19): siRNA sense strand
augcucagauuuccaaugg

SEQ ID NO: 501650 - RNA, 19 nt, Homo sapiens
  misc_RNA (1)...(19): siRNA sense strand
gaaaucaaugagaagaacu

SEQ ID NO: 501651 - RNA, 19 nt, Homo sapiens
  misc_RNA (1)...(19): siRNA sense strand
cccaguuggugacuucaug

SEQ ID NO: 501652 - RNA, 19 nt, Homo sapiens
  misc_RNA (1)...(19): siRNA sense strand
agccuuggauuucuauauc

SEQ ID NO: 501653 - RNA, 19 nt, Homo sapiens
  misc_RNA (1)...(19): siRNA sense strand
ucaccucuguucugaccau

SEQ ID NO: 501654 - RNA, 19 nt, Homo sapiens
  misc_RNA (1)...(19): siRNA sense strand
ucugcgcucuguuggaguu

SEQ ID NO: 501655 - RNA, 19 nt, Homo sapiens
  misc_RNA (1)...(19): siRNA sense strand
caccaugcccaaccagaug

SEQ ID NO: 501656 - RNA, 19 nt, Homo sapiens
  misc_RNA (1)...(19): siRNA sense strand
gccauccucguaucaauag

SEQ ID NO: 501657 - RNA, 19 nt, Homo sapiens
  misc_RNA (1)...(19): siRNA sense strand
ccgccauccucguaucaau

SEQ ID NO: 501658 - RNA, 19 nt, Homo sapiens
  misc_RNA (1)...(19): siRNA sense strand
cagccuuggauuucuauau

SEQ ID NO: 501659 - RNA, 19 nt, Homo sapiens
  misc_RNA (1)...(19): siRNA sense strand
auacaccauugacaucauc

SEQ ID NO: 501660 - RNA, 19 nt, Homo sapiens
  misc_RNA (1)...(19): siRNA sense strand
gcucuccuggguuuccuuu

SEQ ID NO: 501661 - RNA, 19 nt, Homo sapiens
  misc_RNA (1)...(19): siRNA sense strand
agaggacccacgagcauga

SEQ ID NO: 501662 - RNA, 19 nt, Homo sapiens
  misc_RNA (1)...(19): siRNA sense strand
ggacauggauggagacuac

SEQ ID NO: 501663 - RNA, 19 nt, Homo sapiens
  misc_RNA (1)...(19): siRNA sense strand
gcaagcaccugaccagcaa

SEQ ID NO: 501664 - RNA, 19 nt, Homo sapiens
  misc_RNA (1)...(19): siRNA sense strand
ugaaccagcugucgaagaa

SEQ ID NO: 501665 - RNA, 19 nt, Homo sapiens
  misc_RNA (1)...(19): siRNA sense strand
ucaccaaacugcucaacga

SEQ ID NO: 501666 - RNA, 19 nt, Homo sapiens
  misc_RNA (1)...(19): siRNA sense strand
gugcguaccaugcagaaua

SEQ ID NO: 501667 - RNA, 19 nt, Homo sapiens
  misc_RNA (1)...(19): siRNA sense strand
acaagacgcuggugacaca

SEQ ID NO: 501668 - RNA, 19 nt, Homo sapiens
  misc_RNA (1)...(19): siRNA sense strand
gaucaugcguaacuacagu

SEQ ID NO: 501669 - RNA, 19 nt, Homo sapiens
  misc_RNA (1)...(19): siRNA sense strand
gcaacaacagcaagaacaa

SEQ ID NO: 501670 - RNA, 19 nt, Homo sapiens
  misc_RNA (1)...(19): siRNA sense strand
ggacaagaacccagacuac

SEQ ID NO: 501671 - RNA, 19 nt, Homo sapiens
  misc_RNA (1)...(19): siRNA sense strand
gaacaagacgcuggugaca

SEQ ID NO: 501672 - RNA, 19 nt, Homo sapiens
  misc_RNA (1)...(19): siRNA sense strand
ccaacucccucuucaagca

SEQ ID NO: 501673 - RNA, 19 nt, Homo sapiens
  misc_RNA (1)...(19): siRNA sense strand
caugugcccugguguguca

SEQ ID NO: 501674 - RNA, 19 nt, Homo sapiens
  misc_RNA (1)...(19): siRNA sense strand
gagagugugcugaagauuc

SEQ ID NO: 501675 - RNA, 19 nt, Homo sapiens
  misc_RNA (1)...(19): siRNA sense strand
gcaaccaucggcuugauca

SEQ ID NO: 501676 - RNA, 19 nt, Homo sapiens
  misc_RNA (1)...(19): siRNA sense strand
ucaagaaaaccaccacuua

SEQ ID NO: 501677 - RNA, 19 nt, Homo sapiens
  misc_RNA (1)...(19): siRNA sense strand
ucucagauguggccaccaa

SEQ ID NO: 501678 - RNA, 19 nt, Homo sapiens
  misc_RNA (1)...(19): siRNA sense strand
uggagucgguccuguucua

SEQ ID NO: 501679 - RNA, 19 nt, Homo sapiens
  misc_RNA (1)...(19): siRNA sense strand
ccaguacacgcucaagaaa

SEQ ID NO: 501680 - RNA, 19 nt, Homo sapiens
  misc_RNA (1)...(19): siRNA sense strand
gcucugcgccaccucacua

SEQ ID NO: 501681 - RNA, 19 nt, Homo sapiens
  misc_RNA (1)...(19): siRNA sense strand
gccaguacacgcucaagaa

SEQ ID NO: 501682 - RNA, 19 nt, Homo sapiens
  misc_RNA (1)...(19): siRNA sense strand
gcacacagcagcccuacac

SEQ ID NO: 501683 - RNA, 19 nt, Homo sapiens
  misc_RNA (1)...(19): siRNA sense strand
ucuccaaccugacaugcaa

SEQ ID NO: 501684 - RNA, 19 nt, Homo sapiens
  misc_RNA (1)...(19): siRNA sense strand
ccaccagcauccugcacaa

SEQ ID NO: 501685 - RNA, 19 nt, Homo sapiens
  misc_RNA (1)...(19): siRNA sense strand
caggagagcaagcugauca

SEQ ID NO: 501686 - RNA, 19 nt, Homo sapiens
  misc_RNA (1)...(19): siRNA sense strand
gcagcaagggcaucaugga

SEQ ID NO: 501687 - RNA, 19 nt, Homo sapiens
  misc_RNA (1)...(19): siRNA sense strand
cugaguggcagcagacaua

SEQ ID NO: 501688 - RNA, 19 nt, Homo sapiens
  misc_RNA (1)...(19): siRNA sense strand
agagugugcugaagauucu

SEQ ID NO: 501689 - RNA, 19 nt, Homo sapiens
  misc_RNA (1)...(19): siRNA sense strand
ugcacaaccugcuccugua

SEQ ID NO: 501690 - RNA, 19 nt, Homo sapiens
  misc_RNA (1)...(19): siRNA sense strand
cgucccagcugcucaaguc

SEQ ID NO: 501691 - RNA, 19 nt, Homo sapiens
  misc_RNA (1)...(19): siRNA sense strand
gaguguggaugacgucaac

SEQ ID NO: 501692 - RNA, 19 nt, Homo sapiens
  misc_RNA (1)...(19): siRNA sense strand
gcucaagucggccauugug

SEQ ID NO: 501693 - RNA, 19 nt, Homo sapiens
  misc_RNA (1)...(19): siRNA sense strand
uaccagauguccacaacag

SEQ ID NO: 501694 - RNA, 19 nt, Homo sapiens
  misc_RNA (1)...(19): siRNA sense strand
gugcagaucaugcguaacu

SEQ ID NO: 501695 - RNA, 19 nt, Homo sapiens
  misc_RNA (1)...(19): siRNA sense strand
ucgugcagaucaugcguaa

SEQ ID NO: 501696 - RNA, 19 nt, Homo sapiens
  misc_RNA (1)...(19): siRNA sense strand
uugugcaucucaucaacua

SEQ ID NO: 501697 - RNA, 19 nt, Homo sapiens
  misc_RNA (1)...(19): siRNA sense strand
aaccugacaugcaacaaca

SEQ ID NO: 501698 - RNA, 19 nt, Homo sapiens
  misc_RNA (1)...(19): siRNA sense strand
caaugagcccuauggagau

SEQ ID NO: 501699 - RNA, 19 nt, Homo sapiens
  misc_RNA (1)...(19): siRNA sense strand
agacgcuggugacacagaa

SEQ ID NO: 501700 - RNA, 19 nt, Homo sapiens
  misc_RNA (1)...(19): siRNA sense strand
ucaccacgcugcacaaccu

SEQ ID NO: 501701 - RNA, 19 nt, Homo sapiens
  misc_RNA (1)...(19): siRNA sense strand
ccguggagcucaccaacuc

SEQ ID NO: 501702 - RNA, 19 nt, Homo sapiens
  misc_RNA (1)...(19): siRNA sense strand
uggagagugugcugaagau

SEQ ID NO: 501703 - RNA, 19 nt, Homo sapiens
  misc_RNA (1)...(19): siRNA sense strand
gcacaaccugcuccuguac

SEQ ID NO: 501704 - RNA, 19 nt, Homo sapiens
  misc_RNA (1)...(19): siRNA sense strand
ugacaugcaacaacagcaa

SEQ ID NO: 501705 - RNA, 19 nt, Homo sapiens
  misc_RNA (1)...(19): siRNA sense strand
gcucaccaacucccucuuc

SEQ ID NO: 501706 - RNA, 19 nt, Homo sapiens
  misc_RNA (1)...(19): siRNA sense strand
gcagaucaugcguaacuac

SEQ ID NO: 501707 - RNA, 19 nt, Homo sapiens
  misc_RNA (1)...(19): siRNA sense strand
ucgugaagcugcucaacca

SEQ ID NO: 501708 - RNA, 19 nt, Homo sapiens
  misc_RNA (1)...(19): siRNA sense strand
cgagauggcccagaacucu

SEQ ID NO: 501709 - RNA, 19 nt, Homo sapiens
  misc_RNA (1)...(19): siRNA sense strand
aggagggccuggagagugu

SEQ ID NO: 501710 - RNA, 19 nt, Homo sapiens
  misc_RNA (1)...(19): siRNA sense strand
gaggcugcccagagcauga

SEQ ID NO: 501711 - RNA, 19 nt, Homo sapiens
  misc_RNA (1)...(19): siRNA sense strand
ggcagcagacauacaccua

SEQ ID NO: 501712 - RNA, 19 nt, Homo sapiens
  misc_RNA (1)...(19): siRNA sense strand
ggagagugugcugaagauu

SEQ ID NO: 501713 - RNA, 19 nt, Homo sapiens
  misc_RNA (1)...(19): siRNA sense strand
caccaacucccucuucaag

SEQ ID NO: 501714 - RNA, 19 nt, Homo sapiens
  misc_RNA (1)...(19): siRNA sense strand
ugcccgagcucaccaaacu

SEQ ID NO: 501715 - RNA, 19 nt, Homo sapiens
  misc_RNA (1)...(19): siRNA sense strand
caacaacagcaagaacaag

SEQ ID NO: 501716 - RNA, 19 nt, Homo sapiens
  misc_RNA (1)...(19): siRNA sense strand
ccagucgugugcucaaggu

SEQ ID NO: 501717 - RNA, 19 nt, Homo sapiens
  misc_RNA (1)...(19): siRNA sense strand
agagcaagcugaucauccu

SEQ ID NO: 501718 - RNA, 19 nt, Homo sapiens
  misc_RNA (1)...(19): siRNA sense strand
cagcagcaagggcaucaug

SEQ ID NO: 501719 - RNA, 19 nt, Homo sapiens
  misc_RNA (1)...(19): siRNA sense strand
ugaaccgcauggagaucuu

SEQ ID NO: 501720 - RNA, 19 nt, Homo sapiens
  misc_RNA (1)...(19): siRNA sense strand
gggcugcucgccaucuuca

SEQ ID NO: 501721 - RNA, 19 nt, Homo sapiens
  misc_RNA (1)...(19): siRNA sense strand
aaugagcccuauggagaug

SEQ ID NO: 501722 - RNA, 19 nt, Homo sapiens
  misc_RNA (1)...(19): siRNA sense strand
acucgucgguggagaacau

SEQ ID NO: 501723 - RNA, 19 nt, Homo sapiens
  misc_RNA (1)...(19): siRNA sense strand
gagaucuuccggcucaaca

SEQ ID NO: 501724 - RNA, 19 nt, Homo sapiens
  misc_RNA (1)...(19): siRNA sense strand
gugugaggauggaggagau

SEQ ID NO: 501725 - RNA, 19 nt, Homo sapiens
  misc_RNA (1)...(19): siRNA sense strand
aacaacagcaagaacaaga

SEQ ID NO: 501726 - RNA, 19 nt, Homo sapiens
  misc_RNA (1)...(19): siRNA sense strand
caaccugacaugcaacaac

SEQ ID NO: 501727 - RNA, 19 nt, Homo sapiens
  misc_RNA (1)...(19): siRNA sense strand
gcgcaaccucucagaugug

SEQ ID NO: 501728 - RNA, 19 nt, Homo sapiens
  misc_RNA (1)...(19): siRNA sense strand
ggagagcaagcugaucauc

SEQ ID NO: 501729 - RNA, 19 nt, Homo sapiens
  misc_RNA (1)...(19): siRNA sense strand
ggagucgguccuguucuau

SEQ ID NO: 501730 - RNA, 19 nt, Homo sapiens
  misc_RNA (1)...(19): siRNA sense strand
ggacauggauggagacuac

SEQ ID NO: 501731 - RNA, 19 nt, Homo sapiens
  misc_RNA (1)...(19): siRNA sense strand
gcaagcaccugaccagcaa

SEQ ID NO: 501732 - RNA, 19 nt, Homo sapiens
  misc_RNA (1)...(19): siRNA sense strand
ugaaccagcugucgaagaa

SEQ ID NO: 501733 - RNA, 19 nt, Homo sapiens
  misc_RNA (1)...(19): siRNA sense strand
ucaccaaacugcucaacga

SEQ ID NO: 501734 - RNA, 19 nt, Homo sapiens
  misc_RNA (1)...(19): siRNA sense strand
gugcguaccaugcagaaua

SEQ ID NO: 501735 - RNA, 19 nt, Homo sapiens
  misc_RNA (1)...(19): siRNA sense strand
acaagacgcuggugacaca

SEQ ID NO: 501736 - RNA, 19 nt, Homo sapiens
  misc_RNA (1)...(19): siRNA sense strand
gaucaugcguaacuacagu

SEQ ID NO: 501737 - RNA, 19 nt, Homo sapiens
  misc_RNA (1)...(19): siRNA sense strand
gcaacaacagcaagaacaa

SEQ ID NO: 501738 - RNA, 19 nt, Homo sapiens
  misc_RNA (1)...(19): siRNA sense strand
ggacaagaacccagacuac

SEQ ID NO: 501739 - RNA, 19 nt, Homo sapiens
  misc_RNA (1)...(19): siRNA sense strand
gaacaagacgcuggugaca

SEQ ID NO: 501740 - RNA, 19 nt, Homo sapiens
  misc_RNA (1)...(19): siRNA sense strand
ccaacucccucuucaagca

SEQ ID NO: 501741 - RNA, 19 nt, Homo sapiens
  misc_RNA (1)...(19): siRNA sense strand
caugugcccugguguguca

SEQ ID NO: 501742 - RNA, 19 nt, Homo sapiens
  misc_RNA (1)...(19): siRNA sense strand
gagagugugcugaagauuc

SEQ ID NO: 501743 - RNA, 19 nt, Homo sapiens
  misc_RNA (1)...(19): siRNA sense strand
gcaaccaucggcuugauca

SEQ ID NO: 501744 - RNA, 19 nt, Homo sapiens
  misc_RNA (1)...(19): siRNA sense strand
ucaagaaaaccaccacuua

SEQ ID NO: 501745 - RNA, 19 nt, Homo sapiens
  misc_RNA (1)...(19): siRNA sense strand
ucucagauguggccaccaa

SEQ ID NO: 501746 - RNA, 19 nt, Homo sapiens
  misc_RNA (1)...(19): siRNA sense strand
uggagucgguccuguucua

SEQ ID NO: 501747 - RNA, 19 nt, Homo sapiens
  misc_RNA (1)...(19): siRNA sense strand
ccaguacacgcucaagaaa

SEQ ID NO: 501748 - RNA, 19 nt, Homo sapiens
  misc_RNA (1)...(19): siRNA sense strand
gcucugcgccaccucacua

SEQ ID NO: 501749 - RNA, 19 nt, Homo sapiens
  misc_RNA (1)...(19): siRNA sense strand
gccaguacacgcucaagaa

SEQ ID NO: 501750 - RNA, 19 nt, Homo sapiens
  misc_RNA (1)...(19): siRNA sense strand
gcacacagcagcccuacac

SEQ ID NO: 501751 - RNA, 19 nt, Homo sapiens
  misc_RNA (1)...(19): siRNA sense strand
ucuccaaccugacaugcaa

SEQ ID NO: 501752 - RNA, 19 nt, Homo sapiens
  misc_RNA (1)...(19): siRNA sense strand
ccaccagcauccugcacaa

SEQ ID NO: 501753 - RNA, 19 nt, Homo sapiens
  misc_RNA (1)...(19): siRNA sense strand
caggagagcaagcugauca

SEQ ID NO: 501754 - RNA, 19 nt, Homo sapiens
  misc_RNA (1)...(19): siRNA sense strand
gcagcaagggcaucaugga

SEQ ID NO: 501755 - RNA, 19 nt, Homo sapiens
  misc_RNA (1)...(19): siRNA sense strand
cugaguggcagcagacaua

SEQ ID NO: 501756 - RNA, 19 nt, Homo sapiens
  misc_RNA (1)...(19): siRNA sense strand
agagugugcugaagauucu

SEQ ID NO: 501757 - RNA, 19 nt, Homo sapiens
  misc_RNA (1)...(19): siRNA sense strand
ugcacaaccugcuccugua

SEQ ID NO: 501758 - RNA, 19 nt, Homo sapiens
  misc_RNA (1)...(19): siRNA sense strand
cgucccagcugcucaaguc

SEQ ID NO: 501759 - RNA, 19 nt, Homo sapiens
  misc_RNA (1)...(19): siRNA sense strand
gaguguggaugacgucaac

SEQ ID NO: 501760 - RNA, 19 nt, Homo sapiens
  misc_RNA (1)...(19): siRNA sense strand
gcucaagucggccauugug

SEQ ID NO: 501761 - RNA, 19 nt, Homo sapiens
  misc_RNA (1)...(19): siRNA sense strand
uaccagauguccacaacag

SEQ ID NO: 501762 - RNA, 19 nt, Homo sapiens
  misc_RNA (1)...(19): siRNA sense strand
gugcagaucaugcguaacu

SEQ ID NO: 501763 - RNA, 19 nt, Homo sapiens
  misc_RNA (1)...(19): siRNA sense strand
ucgugcagaucaugcguaa

SEQ ID NO: 501764 - RNA, 19 nt, Homo sapiens
  misc_RNA (1)...(19): siRNA sense strand
uugugcaucucaucaacua

SEQ ID NO: 501765 - RNA, 19 nt, Homo sapiens
  misc_RNA (1)...(19): siRNA sense strand
aaccugacaugcaacaaca

SEQ ID NO: 501766 - RNA, 19 nt, Homo sapiens
  misc_RNA (1)...(19): siRNA sense strand
caaugagcccuauggagau

SEQ ID NO: 501767 - RNA, 19 nt, Homo sapiens
  misc_RNA (1)...(19): siRNA sense strand
agacgcuggugacacagaa

SEQ ID NO: 501768 - RNA, 19 nt, Homo sapiens
  misc_RNA (1)...(19): siRNA sense strand
ucaccacgcugcacaaccu

SEQ ID NO: 501769 - RNA, 19 nt, Homo sapiens
  misc_RNA (1)...(19): siRNA sense strand
ccguggagcucaccaacuc

SEQ ID NO: 501770 - RNA, 19 nt, Homo sapiens
  misc_RNA (1)...(19): siRNA sense strand
uggagagugugcugaagau

SEQ ID NO: 501771 - RNA, 19 nt, Homo sapiens
  misc_RNA (1)...(19): siRNA sense strand
gcacaaccugcuccuguac

SEQ ID NO: 501772 - RNA, 19 nt, Homo sapiens
  misc_RNA (1)...(19): siRNA sense strand
ugacaugcaacaacagcaa

SEQ ID NO: 501773 - RNA, 19 nt, Homo sapiens
  misc_RNA (1)...(19): siRNA sense strand
gcucaccaacucccucuuc

SEQ ID NO: 501774 - RNA, 19 nt, Homo sapiens
  misc_RNA (1)...(19): siRNA sense strand
gcagaucaugcguaacuac

SEQ ID NO: 501775 - RNA, 19 nt, Homo sapiens
  misc_RNA (1)...(19): siRNA sense strand
ucgugaagcugcucaacca

SEQ ID NO: 501776 - RNA, 19 nt, Homo sapiens
  misc_RNA (1)...(19): siRNA sense strand
cgagauggcccagaacucu

SEQ ID NO: 501777 - RNA, 19 nt, Homo sapiens
  misc_RNA (1)...(19): siRNA sense strand
aggagggccuggagagugu

SEQ ID NO: 501778 - RNA, 19 nt, Homo sapiens
  misc_RNA (1)...(19): siRNA sense strand
gaggcugcccagagcauga

SEQ ID NO: 501779 - RNA, 19 nt, Homo sapiens
  misc_RNA (1)...(19): siRNA sense strand
ggcagcagacauacaccua

SEQ ID NO: 501780 - RNA, 19 nt, Homo sapiens
  misc_RNA (1)...(19): siRNA sense strand
ggagagugugcugaagauu

SEQ ID NO: 501781 - RNA, 19 nt, Homo sapiens
  misc_RNA (1)...(19): siRNA sense strand
caccaacucccucuucaag

SEQ ID NO: 501782 - RNA, 19 nt, Homo sapiens
  misc_RNA (1)...(19): siRNA sense strand
ugcccgagcucaccaaacu

SEQ ID NO: 501783 - RNA, 19 nt, Homo sapiens
  misc_RNA (1)...(19): siRNA sense strand
caacaacagcaagaacaag

SEQ ID NO: 501784 - RNA, 19 nt, Homo sapiens
  misc_RNA (1)...(19): siRNA sense strand
ccagucgugugcucaaggu

SEQ ID NO: 501785 - RNA, 19 nt, Homo sapiens
  misc_RNA (1)...(19): siRNA sense strand
agagcaagcugaucauccu

SEQ ID NO: 501786 - RNA, 19 nt, Homo sapiens
  misc_RNA (1)...(19): siRNA sense strand
cagcagcaagggcaucaug

SEQ ID NO: 501787 - RNA, 19 nt, Homo sapiens
  misc_RNA (1)...(19): siRNA sense strand
ugaaccgcauggagaucuu

SEQ ID NO: 501788 - RNA, 19 nt, Homo sapiens
  misc_RNA (1)...(19): siRNA sense strand
gggcugcucgccaucuuca

SEQ ID NO: 501789 - RNA, 19 nt, Homo sapiens
  misc_RNA (1)...(19): siRNA sense strand
aaugagcccuauggagaug

SEQ ID NO: 501790 - RNA, 19 nt, Homo sapiens
  misc_RNA (1)...(19): siRNA sense strand
acucgucgguggagaacau

SEQ ID NO: 501791 - RNA, 19 nt, Homo sapiens
  misc_RNA (1)...(19): siRNA sense strand
gagaucuuccggcucaaca

SEQ ID NO: 501792 - RNA, 19 nt, Homo sapiens
  misc_RNA (1)...(19): siRNA sense strand
gugugaggauggaggagau

SEQ ID NO: 501793 - RNA, 19 nt, Homo sapiens
  misc_RNA (1)...(19): siRNA sense strand
aacaacagcaagaacaaga

SEQ ID NO: 501794 - RNA, 19 nt, Homo sapiens
  misc_RNA (1)...(19): siRNA sense strand
caaccugacaugcaacaac

SEQ ID NO: 501795 - RNA, 19 nt, Homo sapiens
  misc_RNA (1)...(19): siRNA sense strand
gcgcaaccucucagaugug

SEQ ID NO: 501796 - RNA, 19 nt, Homo sapiens
  misc_RNA (1)...(19): siRNA sense strand
ggagagcaagcugaucauc

SEQ ID NO: 501797 - RNA, 19 nt, Homo sapiens
  misc_RNA (1)...(19): siRNA sense strand
ggagucgguccuguucuau

SEQ ID NO: 501798 - RNA, 19 nt, Homo sapiens
  misc_RNA (1)...(19): siRNA sense strand
ggacaagauccuaacauuu

SEQ ID NO: 501799 - RNA, 19 nt, Homo sapiens
  misc_RNA (1)...(19): siRNA sense strand
gaggaaauuugagaaaguu

SEQ ID NO: 501800 - RNA, 19 nt, Homo sapiens
  misc_RNA (1)...(19): siRNA sense strand
ggauuucucuggacaagau

SEQ ID NO: 501801 - RNA, 19 nt, Homo sapiens
  misc_RNA (1)...(19): siRNA sense strand
gagcuucccuucuacagau

SEQ ID NO: 501802 - RNA, 19 nt, Homo sapiens
  misc_RNA (1)...(19): siRNA sense strand
gaaagagcuucccuucuac

SEQ ID NO: 501803 - RNA, 19 nt, Homo sapiens
  misc_RNA (1)...(19): siRNA sense strand
gaugcugggugcagaaaga

SEQ ID NO: 501804 - RNA, 19 nt, Homo sapiens
  misc_RNA (1)...(19): siRNA sense strand
caagaggaaauuugagaaa

SEQ ID NO: 501805 - RNA, 19 nt, Homo sapiens
  misc_RNA (1)...(19): siRNA sense strand
gacaagauccuaacauuuu

SEQ ID NO: 501806 - RNA, 19 nt, Homo sapiens
  misc_RNA (1)...(19): siRNA sense strand
uggacaagauccuaacauu

SEQ ID NO: 501807 - RNA, 19 nt, Homo sapiens
  misc_RNA (1)...(19): siRNA sense strand
cuacagauacugccagaga

SEQ ID NO: 501808 - RNA, 19 nt, Homo sapiens
  misc_RNA (1)...(19): siRNA sense strand
ccugauugcuucuggaaau

SEQ ID NO: 501809 - RNA, 19 nt, Homo sapiens
  misc_RNA (1)...(19): siRNA sense strand
agacucaaguaccaacauu

SEQ ID NO: 501810 - RNA, 19 nt, Homo sapiens
  misc_RNA (1)...(19): siRNA sense strand
ggaaagcagacucaaguac

SEQ ID NO: 501811 - RNA, 19 nt, Homo sapiens
  misc_RNA (1)...(19): siRNA sense strand
agaggaaauuugagaaagu

SEQ ID NO: 501812 - RNA, 19 nt, Homo sapiens
  misc_RNA (1)...(19): siRNA sense strand
caggaaagcagacucaagu

SEQ ID NO: 501813 - RNA, 19 nt, Homo sapiens
  misc_RNA (1)...(19): siRNA sense strand
gaggggauauucucaggaa

SEQ ID NO: 501814 - RNA, 19 nt, Homo sapiens
  misc_RNA (1)...(19): siRNA sense strand
ccaagaggaaauuugagaa

SEQ ID NO: 501815 - RNA, 19 nt, Homo sapiens
  misc_RNA (1)...(19): siRNA sense strand
cuggaaaccauacaagaaa

SEQ ID NO: 501816 - RNA, 19 nt, Homo sapiens
  misc_RNA (1)...(19): siRNA sense strand
cugauugcuucuggaaaua

SEQ ID NO: 501817 - RNA, 19 nt, Homo sapiens
  misc_RNA (1)...(19): siRNA sense strand
aaagcagacucaaguacca

SEQ ID NO: 501818 - RNA, 19 nt, Homo sapiens
  misc_RNA (1)...(19): siRNA sense strand
aaacgugagacuccugauu

SEQ ID NO: 501819 - RNA, 19 nt, Homo sapiens
  misc_RNA (1)...(19): siRNA sense strand
ucucagcaccucaugaaga

SEQ ID NO: 501820 - RNA, 19 nt, Homo sapiens
  misc_RNA (1)...(19): siRNA sense strand
uaacccaagaggaaauuug

SEQ ID NO: 501821 - RNA, 19 nt, Homo sapiens
  misc_RNA (1)...(19): siRNA sense strand
gauccuaacauuuuacuga

SEQ ID NO: 501822 - RNA, 19 nt, Homo sapiens
  misc_RNA (1)...(19): siRNA sense strand
cuggaaauacugugucuga

SEQ ID NO: 501823 - RNA, 19 nt, Homo sapiens
  misc_RNA (1)...(19): siRNA sense strand
aagaggaaauuugagaaag

SEQ ID NO: 501824 - RNA, 19 nt, Homo sapiens
  misc_RNA (1)...(19): siRNA sense strand
ucuggaaaccauacaagaa

SEQ ID NO: 501825 - RNA, 19 nt, Homo sapiens
  misc_RNA (1)...(19): siRNA sense strand
gaaucuggaaaccauacaa

SEQ ID NO: 501826 - RNA, 19 nt, Homo sapiens
  misc_RNA (1)...(19): siRNA sense strand
gugagacuccugauugcuu

SEQ ID NO: 501827 - RNA, 19 nt, Homo sapiens
  misc_RNA (1)...(19): siRNA sense strand
gcagaaagaggggauauuc

SEQ ID NO: 501828 - RNA, 19 nt, Homo sapiens
  misc_RNA (1)...(19): siRNA sense strand
gacucaaguaccaacauuu

SEQ ID NO: 501829 - RNA, 19 nt, Homo sapiens
  misc_RNA (1)...(19): siRNA sense strand
gagaugcugggugcagaaa

SEQ ID NO: 501830 - RNA, 19 nt, Homo sapiens
  misc_RNA (1)...(19): siRNA sense strand
gaaagaggggauauucuca

SEQ ID NO: 501831 - RNA, 19 nt, Homo sapiens
  misc_RNA (1)...(19): siRNA sense strand
aauauccuuucaacucuca

SEQ ID NO: 501832 - RNA, 19 nt, Homo sapiens
  misc_RNA (1)...(19): siRNA sense strand
aacgugagacuccugauug

SEQ ID NO: 501833 - RNA, 19 nt, Homo sapiens
  misc_RNA (1)...(19): siRNA sense strand
cccaagaggaaauuugaga

SEQ ID NO: 501834 - RNA, 19 nt, Homo sapiens
  misc_RNA (1)...(19): siRNA sense strand
uacagauacugccagagau

SEQ ID NO: 501835 - RNA, 19 nt, Homo sapiens
  misc_RNA (1)...(19): siRNA sense strand
caggauuucucuggacaag

SEQ ID NO: 501836 - RNA, 19 nt, Homo sapiens
  misc_RNA (1)...(19): siRNA sense strand
gggauauucucaggaaagc

SEQ ID NO: 501837 - RNA, 19 nt, Homo sapiens
  misc_RNA (1)...(19): siRNA sense strand
ggacaagauccuaacauuu

SEQ ID NO: 501838 - RNA, 19 nt, Homo sapiens
  misc_RNA (1)...(19): siRNA sense strand
gaggaaauuugagaaaguu

SEQ ID NO: 501839 - RNA, 19 nt, Homo sapiens
  misc_RNA (1)...(19): siRNA sense strand
ggauuucucuggacaagau

SEQ ID NO: 501840 - RNA, 19 nt, Homo sapiens
  misc_RNA (1)...(19): siRNA sense strand
gagcuucccuucuacagau

SEQ ID NO: 501841 - RNA, 19 nt, Homo sapiens
  misc_RNA (1)...(19): siRNA sense strand
gaaagagcuucccuucuac

SEQ ID NO: 501842 - RNA, 19 nt, Homo sapiens
  misc_RNA (1)...(19): siRNA sense strand
gaugcugggugcagaaaga

SEQ ID NO: 501843 - RNA, 19 nt, Homo sapiens
  misc_RNA (1)...(19): siRNA sense strand
caagaggaaauuugagaaa

SEQ ID NO: 501844 - RNA, 19 nt, Homo sapiens
  misc_RNA (1)...(19): siRNA sense strand
gacaagauccuaacauuuu

SEQ ID NO: 501845 - RNA, 19 nt, Homo sapiens
  misc_RNA (1)...(19): siRNA sense strand
uggacaagauccuaacauu

SEQ ID NO: 501846 - RNA, 19 nt, Homo sapiens
  misc_RNA (1)...(19): siRNA sense strand
cuacagauacugccagaga

SEQ ID NO: 501847 - RNA, 19 nt, Homo sapiens
  misc_RNA (1)...(19): siRNA sense strand
ccugauugcuucuggaaau

SEQ ID NO: 501848 - RNA, 19 nt, Homo sapiens
  misc_RNA (1)...(19): siRNA sense strand
agacucaaguaccaacauu

SEQ ID NO: 501849 - RNA, 19 nt, Homo sapiens
  misc_RNA (1)...(19): siRNA sense strand
ggaaagcagacucaaguac

SEQ ID NO: 501850 - RNA, 19 nt, Homo sapiens
  misc_RNA (1)...(19): siRNA sense strand
agaggaaauuugagaaagu

SEQ ID NO: 501851 - RNA, 19 nt, Homo sapiens
  misc_RNA (1)...(19): siRNA sense strand
caggaaagcagacucaagu

SEQ ID NO: 501852 - RNA, 19 nt, Homo sapiens
  misc_RNA (1)...(19): siRNA sense strand
gaggggauauucucaggaa

SEQ ID NO: 501853 - RNA, 19 nt, Homo sapiens
  misc_RNA (1)...(19): siRNA sense strand
ccaagaggaaauuugagaa

SEQ ID NO: 501854 - RNA, 19 nt, Homo sapiens
  misc_RNA (1)...(19): siRNA sense strand
cuggaaaccauacaagaaa

SEQ ID NO: 501855 - RNA, 19 nt, Homo sapiens
  misc_RNA (1)...(19): siRNA sense strand
cugauugcuucuggaaaua

SEQ ID NO: 501856 - RNA, 19 nt, Homo sapiens
  misc_RNA (1)...(19): siRNA sense strand
aaagcagacucaaguacca

SEQ ID NO: 501857 - RNA, 19 nt, Homo sapiens
  misc_RNA (1)...(19): siRNA sense strand
aaacgugagacuccugauu

SEQ ID NO: 501858 - RNA, 19 nt, Homo sapiens
  misc_RNA (1)...(19): siRNA sense strand
ucucagcaccucaugaaga

SEQ ID NO: 501859 - RNA, 19 nt, Homo sapiens
  misc_RNA (1)...(19): siRNA sense strand
uaacccaagaggaaauuug

SEQ ID NO: 501860 - RNA, 19 nt, Homo sapiens
  misc_RNA (1)...(19): siRNA sense strand
gauccuaacauuuuacuga

SEQ ID NO: 501861 - RNA, 19 nt, Homo sapiens
  misc_RNA (1)...(19): siRNA sense strand
cuggaaauacugugucuga

SEQ ID NO: 501862 - RNA, 19 nt, Homo sapiens
  misc_RNA (1)...(19): siRNA sense strand
aagaggaaauuugagaaag

SEQ ID NO: 501863 - RNA, 19 nt, Homo sapiens
  misc_RNA (1)...(19): siRNA sense strand
ucuggaaaccauacaagaa

SEQ ID NO: 501864 - RNA, 19 nt, Homo sapiens
  misc_RNA (1)...(19): siRNA sense strand
gaaucuggaaaccauacaa

SEQ ID NO: 501865 - RNA, 19 nt, Homo sapiens
  misc_RNA (1)...(19): siRNA sense strand
gugagacuccugauugcuu

SEQ ID NO: 501866 - RNA, 19 nt, Homo sapiens
  misc_RNA (1)...(19): siRNA sense strand
gcagaaagaggggauauuc

SEQ ID NO: 501867 - RNA, 19 nt, Homo sapiens
  misc_RNA (1)...(19): siRNA sense strand
gacucaaguaccaacauuu

SEQ ID NO: 501868 - RNA, 19 nt, Homo sapiens
  misc_RNA (1)...(19): siRNA sense strand
gagaugcugggugcagaaa

SEQ ID NO: 501869 - RNA, 19 nt, Homo sapiens
  misc_RNA (1)...(19): siRNA sense strand
gaaagaggggauauucuca

SEQ ID NO: 501870 - RNA, 19 nt, Homo sapiens
  misc_RNA (1)...(19): siRNA sense strand
aauauccuuucaacucuca

SEQ ID NO: 501871 - RNA, 19 nt, Homo sapiens
  misc_RNA (1)...(19): siRNA sense strand
aacgugagacuccugauug

SEQ ID NO: 501872 - RNA, 19 nt, Homo sapiens
  misc_RNA (1)...(19): siRNA sense strand
cccaagaggaaauuugaga

SEQ ID NO: 501873 - RNA, 19 nt, Homo sapiens
  misc_RNA (1)...(19): siRNA sense strand
uacagauacugccagagau

SEQ ID NO: 501874 - RNA, 19 nt, Homo sapiens
  misc_RNA (1)...(19): siRNA sense strand
caggauuucucuggacaag

SEQ ID NO: 501875 - RNA, 19 nt, Homo sapiens
  misc_RNA (1)...(19): siRNA sense strand
gggauauucucaggaaagc

SEQ ID NO: 501876 - RNA, 19 nt, Homo sapiens
  misc_RNA (1)...(19): siRNA sense strand
cagcuuaucuacaaucaua

SEQ ID NO: 501877 - RNA, 19 nt, Homo sapiens
  misc_RNA (1)...(19): siRNA sense strand
gcacucggcuucccaaugu

SEQ ID NO: 501878 - RNA, 19 nt, Homo sapiens
  misc_RNA (1)...(19): siRNA sense strand
ggucucagcuuaucuacaa

SEQ ID NO: 501879 - RNA, 19 nt, Homo sapiens
  misc_RNA (1)...(19): siRNA sense strand
gcagggagguggagaggaa

SEQ ID NO: 501880 - RNA, 19 nt, Homo sapiens
  misc_RNA (1)...(19): siRNA sense strand
uaaagaggauggacauaga

SEQ ID NO: 501881 - RNA, 19 nt, Homo sapiens
  misc_RNA (1)...(19): siRNA sense strand
caaaggagagaaguuauua

SEQ ID NO: 501882 - RNA, 19 nt, Homo sapiens
  misc_RNA (1)...(19): siRNA sense strand
gaacauggcaccagaccuu

SEQ ID NO: 501883 - RNA, 19 nt, Homo sapiens
  misc_RNA (1)...(19): siRNA sense strand
gagaaguuauuacggugua

SEQ ID NO: 501884 - RNA, 19 nt, Homo sapiens
  misc_RNA (1)...(19): siRNA sense strand
ugacaaaggagagaaguua

SEQ ID NO: 501885 - RNA, 19 nt, Homo sapiens
  misc_RNA (1)...(19): siRNA sense strand
gaacaacccagaguacuug

SEQ ID NO: 501886 - RNA, 19 nt, Homo sapiens
  misc_RNA (1)...(19): siRNA sense strand
gaggaggccuucuauuaca

SEQ ID NO: 501887 - RNA, 19 nt, Homo sapiens
  misc_RNA (1)...(19): siRNA sense strand
ccacaggccuauuggcauu

SEQ ID NO: 501888 - RNA, 19 nt, Homo sapiens
  misc_RNA (1)...(19): siRNA sense strand
ccacgaauguaccaaaugu

SEQ ID NO: 501889 - RNA, 19 nt, Homo sapiens
  misc_RNA (1)...(19): siRNA sense strand
gaagaggguguccaugauu

SEQ ID NO: 501890 - RNA, 19 nt, Homo sapiens
  misc_RNA (1)...(19): siRNA sense strand
ggacgaggcuagagaacag

SEQ ID NO: 501891 - RNA, 19 nt, Homo sapiens
  misc_RNA (1)...(19): siRNA sense strand
ugucacagguuacuccuuu

SEQ ID NO: 501892 - RNA, 19 nt, Homo sapiens
  misc_RNA (1)...(19): siRNA sense strand
aaacaugagucuugguaug

SEQ ID NO: 501893 - RNA, 19 nt, Homo sapiens
  misc_RNA (1)...(19): siRNA sense strand
uacagcagauugcagauuu

SEQ ID NO: 501894 - RNA, 19 nt, Homo sapiens
  misc_RNA (1)...(19): siRNA sense strand
acaaggagauauaguagau

SEQ ID NO: 501895 - RNA, 19 nt, Homo sapiens
  misc_RNA (1)...(19): siRNA sense strand
gauccgagagcagaauuua

SEQ ID NO: 501896 - RNA, 19 nt, Homo sapiens
  misc_RNA (1)...(19): siRNA sense strand
ugaagaagagcaagaagaa

SEQ ID NO: 501897 - RNA, 19 nt, Homo sapiens
  misc_RNA (1)...(19): siRNA sense strand
aaugaaauguggccucuug

SEQ ID NO: 501898 - RNA, 19 nt, Homo sapiens
  misc_RNA (1)...(19): siRNA sense strand
uugaggaggccuucuauua

SEQ ID NO: 501899 - RNA, 19 nt, Homo sapiens
  misc_RNA (1)...(19): siRNA sense strand
cgccaggacuucaacauga

SEQ ID NO: 501900 - RNA, 19 nt, Homo sapiens
  misc_RNA (1)...(19): siRNA sense strand
gaagcagucccaagucgaa

SEQ ID NO: 501901 - RNA, 19 nt, Homo sapiens
  misc_RNA (1)...(19): siRNA sense strand
caaaagagguccaggagau

SEQ ID NO: 501902 - RNA, 19 nt, Homo sapiens
  misc_RNA (1)...(19): siRNA sense strand
uaaccuguuuguuccauug

SEQ ID NO: 501903 - RNA, 19 nt, Homo sapiens
  misc_RNA (1)...(19): siRNA sense strand
uagacuagcagaucucuuu

SEQ ID NO: 501904 - RNA, 19 nt, Homo sapiens
  misc_RNA (1)...(19): siRNA sense strand
gaccacgaauguaccaaau

SEQ ID NO: 501905 - RNA, 19 nt, Homo sapiens
  misc_RNA (1)...(19): siRNA sense strand
aaagcaagguucuuauucu

SEQ ID NO: 501906 - RNA, 19 nt, Homo sapiens
  misc_RNA (1)...(19): siRNA sense strand
cugauucuauugcguauga

SEQ ID NO: 501907 - RNA, 19 nt, Homo sapiens
  misc_RNA (1)...(19): siRNA sense strand
cugcuagugucacagguua

SEQ ID NO: 501908 - RNA, 19 nt, Homo sapiens
  misc_RNA (1)...(19): siRNA sense strand
ccaguuugguuaagaucaa

SEQ ID NO: 501909 - RNA, 19 nt, Homo sapiens
  misc_RNA (1)...(19): siRNA sense strand
ucaugcggaugcucgauaa

SEQ ID NO: 501910 - RNA, 19 nt, Homo sapiens
  misc_RNA (1)...(19): siRNA sense strand
gcauucugguugaugaaga

SEQ ID NO: 501911 - RNA, 19 nt, Homo sapiens
  misc_RNA (1)...(19): siRNA sense strand
gggcugcggucucugcaau

SEQ ID NO: 501912 - RNA, 19 nt, Homo sapiens
  misc_RNA (1)...(19): siRNA sense strand
gaggauggacauagaacuu

SEQ ID NO: 501913 - RNA, 19 nt, Homo sapiens
  misc_RNA (1)...(19): siRNA sense strand
ugauacaggagcaauuuaa

SEQ ID NO: 501914 - RNA, 19 nt, Homo sapiens
  misc_RNA (1)...(19): siRNA sense strand
accgugagcuggaggagua

SEQ ID NO: 501915 - RNA, 19 nt, Homo sapiens
  misc_RNA (1)...(19): siRNA sense strand
gaauuuacaggacauuaag

SEQ ID NO: 501916 - RNA, 19 nt, Homo sapiens
  misc_RNA (1)...(19): siRNA sense strand
aggaggaccagacaacuua

SEQ ID NO: 501917 - RNA, 19 nt, Homo sapiens
  misc_RNA (1)...(19): siRNA sense strand
aagaagaggguguccauga

SEQ ID NO: 501918 - RNA, 19 nt, Homo sapiens
  misc_RNA (1)...(19): siRNA sense strand
acagguuacuccuuugcua

SEQ ID NO: 501919 - RNA, 19 nt, Homo sapiens
  misc_RNA (1)...(19): siRNA sense strand
gaucguggaagcacuaauc

SEQ ID NO: 501920 - RNA, 19 nt, Homo sapiens
  misc_RNA (1)...(19): siRNA sense strand
agaagaggguguccaugau

SEQ ID NO: 501921 - RNA, 19 nt, Homo sapiens
  misc_RNA (1)...(19): siRNA sense strand
gaauguaccaaaugucuac

SEQ ID NO: 501922 - RNA, 19 nt, Homo sapiens
  misc_RNA (1)...(19): siRNA sense strand
aagaagagcaagaagaaga

SEQ ID NO: 501923 - RNA, 19 nt, Homo sapiens
  misc_RNA (1)...(19): siRNA sense strand
cagugaugcugccaccuuu

SEQ ID NO: 501924 - RNA, 19 nt, Homo sapiens
  misc_RNA (1)...(19): siRNA sense strand
ucgauacccugcucugaga

SEQ ID NO: 501925 - RNA, 19 nt, Homo sapiens
  misc_RNA (1)...(19): siRNA sense strand
caacuuaguccugcugaau

SEQ ID NO: 501926 - RNA, 19 nt, Homo sapiens
  misc_RNA (1)...(19): siRNA sense strand
gcugcggucucugcaauga

SEQ ID NO: 501927 - RNA, 19 nt, Homo sapiens
  misc_RNA (1)...(19): siRNA sense strand
gcauccaguuugguuaaga

SEQ ID NO: 501928 - RNA, 19 nt, Homo sapiens
  misc_RNA (1)...(19): siRNA sense strand
cuuacacucugcaauuuau

SEQ ID NO: 501929 - RNA, 19 nt, Homo sapiens
  misc_RNA (1)...(19): siRNA sense strand
uuaaacaugagucuuggua

SEQ ID NO: 501930 - RNA, 19 nt, Homo sapiens
  misc_RNA (1)...(19): siRNA sense strand
ucuacaaggagauauagua

SEQ ID NO: 501931 - RNA, 19 nt, Homo sapiens
  misc_RNA (1)...(19): siRNA sense strand
uacaggagcaauuuaagaa

SEQ ID NO: 501932 - RNA, 19 nt, Homo sapiens
  misc_RNA (1)...(19): siRNA sense strand
gcuagagaacagaaagaaa

SEQ ID NO: 501933 - RNA, 19 nt, Homo sapiens
  misc_RNA (1)...(19): siRNA sense strand
guagaucguggaagcacua

SEQ ID NO: 501934 - RNA, 19 nt, Homo sapiens
  misc_RNA (1)...(19): siRNA sense strand
acaaaggagagaaguuauu

SEQ ID NO: 501935 - RNA, 19 nt, Homo sapiens
  misc_RNA (1)...(19): siRNA sense strand
caccuuacacucugcaauu

SEQ ID NO: 501936 - RNA, 19 nt, Homo sapiens
  misc_RNA (1)...(19): siRNA sense strand
gugaugcugccaccuuuaa

SEQ ID NO: 501937 - RNA, 19 nt, Homo sapiens
  misc_RNA (1)...(19): siRNA sense strand
ccaaggccaucauugaaaa

SEQ ID NO: 501938 - RNA, 19 nt, Homo sapiens
  misc_RNA (1)...(19): siRNA sense strand
ugacuaccauggcauucug

SEQ ID NO: 501939 - RNA, 19 nt, Homo sapiens
  misc_RNA (1)...(19): siRNA sense strand
auacagcgauguggagguu

SEQ ID NO: 501940 - RNA, 19 nt, Homo sapiens
  misc_RNA (1)...(19): siRNA sense strand
agaacuggcuacccuuauc

SEQ ID NO: 501941 - RNA, 19 nt, Homo sapiens
  misc_RNA (1)...(19): siRNA sense strand
uuacauccauaaccuugug

SEQ ID NO: 501942 - RNA, 19 nt, Homo sapiens
  misc_RNA (1)...(19): siRNA sense strand
gagggauggcugccuuaaa

SEQ ID NO: 501943 - RNA, 19 nt, Homo sapiens
  misc_RNA (1)...(19): siRNA sense strand
guuacuccuuugcuaguga

SEQ ID NO: 501944 - RNA, 19 nt, Homo sapiens
  misc_RNA (1)...(19): siRNA sense strand
gaugagaacaacccagagu

SEQ ID NO: 501945 - RNA, 19 nt, Homo sapiens
  misc_RNA (1)...(19): siRNA sense strand
acagaacuggcuacccuua

SEQ ID NO: 501946 - RNA, 19 nt, Homo sapiens
  misc_RNA (1)...(19): siRNA sense strand
ggagggauggcugccuuaa

SEQ ID NO: 501947 - RNA, 19 nt, Homo sapiens
  misc_RNA (1)...(19): siRNA sense strand
gccaggacuucaacaugau

SEQ ID NO: 501948 - RNA, 19 nt, Homo sapiens
  misc_RNA (1)...(19): siRNA sense strand
aagaggguguccaugauuc

SEQ ID NO: 501949 - RNA, 19 nt, Homo sapiens
  misc_RNA (1)...(19): siRNA sense strand
gacaaaggagagaaguuau

SEQ ID NO: 501950 - RNA, 19 nt, Homo sapiens
  misc_RNA (1)...(19): siRNA sense strand
gauggcugccuuaaacaug

SEQ ID NO: 501951 - RNA, 19 nt, Homo sapiens
  misc_RNA (1)...(19): siRNA sense strand
ccuccaaggccaucauuga

SEQ ID NO: 501952 - RNA, 19 nt, Homo sapiens
  misc_RNA (1)...(19): siRNA sense strand
cagaauuuacaggacauua

SEQ ID NO: 501953 - RNA, 19 nt, Homo sapiens
  misc_RNA (1)...(19): siRNA sense strand
uggcuacccuuaucgauac

SEQ ID NO: 501954 - RNA, 19 nt, Homo sapiens
  misc_RNA (1)...(19): siRNA sense strand
gaaccaugggcucguguca

SEQ ID NO: 501955 - RNA, 19 nt, Homo sapiens
  misc_RNA (1)...(19): siRNA sense strand
agggauggcugccuuaaac

SEQ ID NO: 501956 - RNA, 19 nt, Homo sapiens
  misc_RNA (1)...(19): siRNA sense strand
ggcccucagucccagguuu

SEQ ID NO: 501957 - RNA, 19 nt, Homo sapiens
  misc_RNA (1)...(19): siRNA sense strand
ugaggaggccuucuauuac

SEQ ID NO: 501958 - RNA, 19 nt, Homo sapiens
  misc_RNA (1)...(19): siRNA sense strand
ugcggucucugcaaugaaa

SEQ ID NO: 501959 - RNA, 19 nt, Homo sapiens
  misc_RNA (1)...(19): siRNA sense strand
gauauaguagaucguggaa

SEQ ID NO: 501960 - RNA, 19 nt, Homo sapiens
  misc_RNA (1)...(19): siRNA sense strand
gguggucucagcuuaucua

SEQ ID NO: 501961 - RNA, 19 nt, Homo sapiens
  misc_RNA (1)...(19): siRNA sense strand
gguauggugacuccuguga

SEQ ID NO: 501962 - RNA, 19 nt, Homo sapiens
  misc_RNA (1)...(19): siRNA sense strand
cuaaagaggauggacauag

SEQ ID NO: 501963 - RNA, 19 nt, Homo sapiens
  misc_RNA (1)...(19): siRNA sense strand
aaugauacaggagcaauuu

SEQ ID NO: 501964 - RNA, 19 nt, Homo sapiens
  misc_RNA (1)...(19): siRNA sense strand
cgaauguaccaaaugucua

SEQ ID NO: 501965 - RNA, 19 nt, Homo sapiens
  misc_RNA (1)...(19): siRNA sense strand
gaagaagagcaagaagaag

SEQ ID NO: 501966 - RNA, 19 nt, Homo sapiens
  misc_RNA (1)...(19): siRNA sense strand
caggagaugaggaacaaga

SEQ ID NO: 501967 - RNA, 19 nt, Homo sapiens
  misc_RNA (1)...(19): siRNA sense strand
ccaccucugcugucccuaa

SEQ ID NO: 501968 - RNA, 19 nt, Homo sapiens
  misc_RNA (1)...(19): siRNA sense strand
ccucccaaguggcagauug

SEQ ID NO: 501969 - RNA, 19 nt, Homo sapiens
  misc_RNA (1)...(19): siRNA sense strand
ggccuucuauuacauccau

SEQ ID NO: 501970 - RNA, 19 nt, Homo sapiens
  misc_RNA (1)...(19): siRNA sense strand
caaugauacaggagcaauu

SEQ ID NO: 501971 - RNA, 19 nt, Homo sapiens
  misc_RNA (1)...(19): siRNA sense strand
ggaggcgcuuucccuugga

SEQ ID NO: 501972 - RNA, 19 nt, Homo sapiens
  misc_RNA (1)...(19): siRNA sense strand
ccuuacacucugcaauuua

SEQ ID NO: 501973 - RNA, 19 nt, Homo sapiens
  misc_RNA (1)...(19): siRNA sense strand
cauccaguuugguuaagau

SEQ ID NO: 501974 - RNA, 19 nt, Homo sapiens
  misc_RNA (1)...(19): siRNA sense strand
aaagaggauggacauagaa

SEQ ID NO: 501975 - RNA, 19 nt, Homo sapiens
  misc_RNA (1)...(19): siRNA sense strand
ggagccgacuacuggagau

SEQ ID NO: 501976 - RNA, 19 nt, Homo sapiens
  misc_RNA (1)...(19): siRNA sense strand
cagcuuaucuacaaucaua

SEQ ID NO: 501977 - RNA, 19 nt, Homo sapiens
  misc_RNA (1)...(19): siRNA sense strand
gcacucggcuucccaaugu

SEQ ID NO: 501978 - RNA, 19 nt, Homo sapiens
  misc_RNA (1)...(19): siRNA sense strand
ggucucagcuuaucuacaa

SEQ ID NO: 501979 - RNA, 19 nt, Homo sapiens
  misc_RNA (1)...(19): siRNA sense strand
gcagggagguggagaggaa

SEQ ID NO: 501980 - RNA, 19 nt, Homo sapiens
  misc_RNA (1)...(19): siRNA sense strand
uaaagaggauggacauaga

SEQ ID NO: 501981 - RNA, 19 nt, Homo sapiens
  misc_RNA (1)...(19): siRNA sense strand
caaaggagagaaguuauua

SEQ ID NO: 501982 - RNA, 19 nt, Homo sapiens
  misc_RNA (1)...(19): siRNA sense strand
gaacauggcaccagaccuu

SEQ ID NO: 501983 - RNA, 19 nt, Homo sapiens
  misc_RNA (1)...(19): siRNA sense strand
gagaaguuauuacggugua

SEQ ID NO: 501984 - RNA, 19 nt, Homo sapiens
  misc_RNA (1)...(19): siRNA sense strand
ugacaaaggagagaaguua

SEQ ID NO: 501985 - RNA, 19 nt, Homo sapiens
  misc_RNA (1)...(19): siRNA sense strand
gaacaacccagaguacuug

SEQ ID NO: 501986 - RNA, 19 nt, Homo sapiens
  misc_RNA (1)...(19): siRNA sense strand
gaggaggccuucuauuaca

SEQ ID NO: 501987 - RNA, 19 nt, Homo sapiens
  misc_RNA (1)...(19): siRNA sense strand
ccacaggccuauuggcauu

SEQ ID NO: 501988 - RNA, 19 nt, Homo sapiens
  misc_RNA (1)...(19): siRNA sense strand
ccacgaauguaccaaaugu

SEQ ID NO: 501989 - RNA, 19 nt, Homo sapiens
  misc_RNA (1)...(19): siRNA sense strand
gaagaggguguccaugauu

SEQ ID NO: 501990 - RNA, 19 nt, Homo sapiens
  misc_RNA (1)...(19): siRNA sense strand
ggacgaggcuagagaacag

SEQ ID NO: 501991 - RNA, 19 nt, Homo sapiens
  misc_RNA (1)...(19): siRNA sense strand
ugucacagguuacuccuuu

SEQ ID NO: 501992 - RNA, 19 nt, Homo sapiens
  misc_RNA (1)...(19): siRNA sense strand
aaacaugagucuugguaug

SEQ ID NO: 501993 - RNA, 19 nt, Homo sapiens
  misc_RNA (1)...(19): siRNA sense strand
uacagcagauugcagauuu

SEQ ID NO: 501994 - RNA, 19 nt, Homo sapiens
  misc_RNA (1)...(19): siRNA sense strand
acaaggagauauaguagau

SEQ ID NO: 501995 - RNA, 19 nt, Homo sapiens
  misc_RNA (1)...(19): siRNA sense strand
gauccgagagcagaauuua

SEQ ID NO: 501996 - RNA, 19 nt, Homo sapiens
  misc_RNA (1)...(19): siRNA sense strand
ugaagaagagcaagaagaa

SEQ ID NO: 501997 - RNA, 19 nt, Homo sapiens
  misc_RNA (1)...(19): siRNA sense strand
aaugaaauguggccucuug

SEQ ID NO: 501998 - RNA, 19 nt, Homo sapiens
  misc_RNA (1)...(19): siRNA sense strand
uugaggaggccuucuauua

SEQ ID NO: 501999 - RNA, 19 nt, Homo sapiens
  misc_RNA (1)...(19): siRNA sense strand
cgccaggacuucaacauga

SEQ ID NO: 502000 - RNA, 19 nt, Homo sapiens
  misc_RNA (1)...(19): siRNA sense strand
gaagcagucccaagucgaa

SEQ ID NO: 502001 - RNA, 19 nt, Homo sapiens
  misc_RNA (1)...(19): siRNA sense strand
caaaagagguccaggagau

SEQ ID NO: 502002 - RNA, 19 nt, Homo sapiens
  misc_RNA (1)...(19): siRNA sense strand
uaaccuguuuguuccauug

SEQ ID NO: 502003 - RNA, 19 nt, Homo sapiens
  misc_RNA (1)...(19): siRNA sense strand
uagacuagcagaucucuuu

SEQ ID NO: 502004 - RNA, 19 nt, Homo sapiens
  misc_RNA (1)...(19): siRNA sense strand
gaccacgaauguaccaaau

SEQ ID NO: 502005 - RNA, 19 nt, Homo sapiens
  misc_RNA (1)...(19): siRNA sense strand
aaagcaagguucuuauucu

SEQ ID NO: 502006 - RNA, 19 nt, Homo sapiens
  misc_RNA (1)...(19): siRNA sense strand
cugauucuauugcguauga

SEQ ID NO: 502007 - RNA, 19 nt, Homo sapiens
  misc_RNA (1)...(19): siRNA sense strand
cugcuagugucacagguua

SEQ ID NO: 502008 - RNA, 19 nt, Homo sapiens
  misc_RNA (1)...(19): siRNA sense strand
ccaguuugguuaagaucaa

SEQ ID NO: 502009 - RNA, 19 nt, Homo sapiens
  misc_RNA (1)...(19): siRNA sense strand
ucaugcggaugcucgauaa

SEQ ID NO: 502010 - RNA, 19 nt, Homo sapiens
  misc_RNA (1)...(19): siRNA sense strand
gcauucugguugaugaaga

SEQ ID NO: 502011 - RNA, 19 nt, Homo sapiens
  misc_RNA (1)...(19): siRNA sense strand
gggcugcggucucugcaau

SEQ ID NO: 502012 - RNA, 19 nt, Homo sapiens
  misc_RNA (1)...(19): siRNA sense strand
gaggauggacauagaacuu

SEQ ID NO: 502013 - RNA, 19 nt, Homo sapiens
  misc_RNA (1)...(19): siRNA sense strand
ugauacaggagcaauuuaa

SEQ ID NO: 502014 - RNA, 19 nt, Homo sapiens
  misc_RNA (1)...(19): siRNA sense strand
accgugagcuggaggagua

SEQ ID NO: 502015 - RNA, 19 nt, Homo sapiens
  misc_RNA (1)...(19): siRNA sense strand
gaauuuacaggacauuaag

SEQ ID NO: 502016 - RNA, 19 nt, Homo sapiens
  misc_RNA (1)...(19): siRNA sense strand
aggaggaccagacaacuua

SEQ ID NO: 502017 - RNA, 19 nt, Homo sapiens
  misc_RNA (1)...(19): siRNA sense strand
aagaagaggguguccauga

SEQ ID NO: 502018 - RNA, 19 nt, Homo sapiens
  misc_RNA (1)...(19): siRNA sense strand
acagguuacuccuuugcua

SEQ ID NO: 502019 - RNA, 19 nt, Homo sapiens
  misc_RNA (1)...(19): siRNA sense strand
gaucguggaagcacuaauc

SEQ ID NO: 502020 - RNA, 19 nt, Homo sapiens
  misc_RNA (1)...(19): siRNA sense strand
agaagaggguguccaugau

SEQ ID NO: 502021 - RNA, 19 nt, Homo sapiens
  misc_RNA (1)...(19): siRNA sense strand
gaauguaccaaaugucuac

SEQ ID NO: 502022 - RNA, 19 nt, Homo sapiens
  misc_RNA (1)...(19): siRNA sense strand
aagaagagcaagaagaaga

SEQ ID NO: 502023 - RNA, 19 nt, Homo sapiens
  misc_RNA (1)...(19): siRNA sense strand
cagugaugcugccaccuuu

SEQ ID NO: 502024 - RNA, 19 nt, Homo sapiens
  misc_RNA (1)...(19): siRNA sense strand
ucgauacccugcucugaga

SEQ ID NO: 502025 - RNA, 19 nt, Homo sapiens
  misc_RNA (1)...(19): siRNA sense strand
caacuuaguccugcugaau

SEQ ID NO: 502026 - RNA, 19 nt, Homo sapiens
  misc_RNA (1)...(19): siRNA sense strand
gcugcggucucugcaauga

SEQ ID NO: 502027 - RNA, 19 nt, Homo sapiens
  misc_RNA (1)...(19): siRNA sense strand
gcauccaguuugguuaaga

SEQ ID NO: 502028 - RNA, 19 nt, Homo sapiens
  misc_RNA (1)...(19): siRNA sense strand
cuuacacucugcaauuuau

SEQ ID NO: 502029 - RNA, 19 nt, Homo sapiens
  misc_RNA (1)...(19): siRNA sense strand
uuaaacaugagucuuggua

SEQ ID NO: 502030 - RNA, 19 nt, Homo sapiens
  misc_RNA (1)...(19): siRNA sense strand
ucuacaaggagauauagua

SEQ ID NO: 502031 - RNA, 19 nt, Homo sapiens
  misc_RNA (1)...(19): siRNA sense strand
uacaggagcaauuuaagaa

SEQ ID NO: 502032 - RNA, 19 nt, Homo sapiens
  misc_RNA (1)...(19): siRNA sense strand
gcuagagaacagaaagaaa

SEQ ID NO: 502033 - RNA, 19 nt, Homo sapiens
  misc_RNA (1)...(19): siRNA sense strand
guagaucguggaagcacua

SEQ ID NO: 502034 - RNA, 19 nt, Homo sapiens
  misc_RNA (1)...(19): siRNA sense strand
acaaaggagagaaguuauu

SEQ ID NO: 502035 - RNA, 19 nt, Homo sapiens
  misc_RNA (1)...(19): siRNA sense strand
caccuuacacucugcaauu

SEQ ID NO: 502036 - RNA, 19 nt, Homo sapiens
  misc_RNA (1)...(19): siRNA sense strand
gugaugcugccaccuuuaa

SEQ ID NO: 502037 - RNA, 19 nt, Homo sapiens
  misc_RNA (1)...(19): siRNA sense strand
ccaaggccaucauugaaaa

SEQ ID NO: 502038 - RNA, 19 nt, Homo sapiens
  misc_RNA (1)...(19): siRNA sense strand
ugacuaccauggcauucug

SEQ ID NO: 502039 - RNA, 19 nt, Homo sapiens
  misc_RNA (1)...(19): siRNA sense strand
auacagcgauguggagguu

SEQ ID NO: 502040 - RNA, 19 nt, Homo sapiens
  misc_RNA (1)...(19): siRNA sense strand
agaacuggcuacccuuauc

SEQ ID NO: 502041 - RNA, 19 nt, Homo sapiens
  misc_RNA (1)...(19): siRNA sense strand
uuacauccauaaccuugug

SEQ ID NO: 502042 - RNA, 19 nt, Homo sapiens
  misc_RNA (1)...(19): siRNA sense strand
gagggauggcugccuuaaa

SEQ ID NO: 502043 - RNA, 19 nt, Homo sapiens
  misc_RNA (1)...(19): siRNA sense strand
guuacuccuuugcuaguga

SEQ ID NO: 502044 - RNA, 19 nt, Homo sapiens
  misc_RNA (1)...(19): siRNA sense strand
gaugagaacaacccagagu

SEQ ID NO: 502045 - RNA, 19 nt, Homo sapiens
  misc_RNA (1)...(19): siRNA sense strand
acagaacuggcuacccuua

SEQ ID NO: 502046 - RNA, 19 nt, Homo sapiens
  misc_RNA (1)...(19): siRNA sense strand
ggagggauggcugccuuaa

SEQ ID NO: 502047 - RNA, 19 nt, Homo sapiens
  misc_RNA (1)...(19): siRNA sense strand
gccaggacuucaacaugau

SEQ ID NO: 502048 - RNA, 19 nt, Homo sapiens
  misc_RNA (1)...(19): siRNA sense strand
aagaggguguccaugauuc

SEQ ID NO: 502049 - RNA, 19 nt, Homo sapiens
  misc_RNA (1)...(19): siRNA sense strand
gacaaaggagagaaguuau

SEQ ID NO: 502050 - RNA, 19 nt, Homo sapiens
  misc_RNA (1)...(19): siRNA sense strand
gauggcugccuuaaacaug

SEQ ID NO: 502051 - RNA, 19 nt, Homo sapiens
  misc_RNA (1)...(19): siRNA sense strand
ccuccaaggccaucauuga

SEQ ID NO: 502052 - RNA, 19 nt, Homo sapiens
  misc_RNA (1)...(19): siRNA sense strand
cagaauuuacaggacauua

SEQ ID NO: 502053 - RNA, 19 nt, Homo sapiens
  misc_RNA (1)...(19): siRNA sense strand
uggcuacccuuaucgauac

SEQ ID NO: 502054 - RNA, 19 nt, Homo sapiens
  misc_RNA (1)...(19): siRNA sense strand
gaaccaugggcucguguca

SEQ ID NO: 502055 - RNA, 19 nt, Homo sapiens
  misc_RNA (1)...(19): siRNA sense strand
agggauggcugccuuaaac

SEQ ID NO: 502056 - RNA, 19 nt, Homo sapiens
  misc_RNA (1)...(19): siRNA sense strand
ggcccucagucccagguuu

SEQ ID NO: 502057 - RNA, 19 nt, Homo sapiens
  misc_RNA (1)...(19): siRNA sense strand
ugaggaggccuucuauuac

SEQ ID NO: 502058 - RNA, 19 nt, Homo sapiens
  misc_RNA (1)...(19): siRNA sense strand
ugcggucucugcaaugaaa

SEQ ID NO: 502059 - RNA, 19 nt, Homo sapiens
  misc_RNA (1)...(19): siRNA sense strand
gauauaguagaucguggaa

SEQ ID NO: 502060 - RNA, 19 nt, Homo sapiens
  misc_RNA (1)...(19): siRNA sense strand
gguggucucagcuuaucua

SEQ ID NO: 502061 - RNA, 19 nt, Homo sapiens
  misc_RNA (1)...(19): siRNA sense strand
gguauggugacuccuguga

SEQ ID NO: 502062 - RNA, 19 nt, Homo sapiens
  misc_RNA (1)...(19): siRNA sense strand
cuaaagaggauggacauag

SEQ ID NO: 502063 - RNA, 19 nt, Homo sapiens
  misc_RNA (1)...(19): siRNA sense strand
aaugauacaggagcaauuu

SEQ ID NO: 502064 - RNA, 19 nt, Homo sapiens
  misc_RNA (1)...(19): siRNA sense strand
cgaauguaccaaaugucua

SEQ ID NO: 502065 - RNA, 19 nt, Homo sapiens
  misc_RNA (1)...(19): siRNA sense strand
gaagaagagcaagaagaag

SEQ ID NO: 502066 - RNA, 19 nt, Homo sapiens
  misc_RNA (1)...(19): siRNA sense strand
caggagaugaggaacaaga

SEQ ID NO: 502067 - RNA, 19 nt, Homo sapiens
  misc_RNA (1)...(19): siRNA sense strand
ccaccucugcugucccuaa

SEQ ID NO: 502068 - RNA, 19 nt, Homo sapiens
  misc_RNA (1)...(19): siRNA sense strand
ccucccaaguggcagauug

SEQ ID NO: 502069 - RNA, 19 nt, Homo sapiens
  misc_RNA (1)...(19): siRNA sense strand
ggccuucuauuacauccau

SEQ ID NO: 502070 - RNA, 19 nt, Homo sapiens
  misc_RNA (1)...(19): siRNA sense strand
caaugauacaggagcaauu

SEQ ID NO: 502071 - RNA, 19 nt, Homo sapiens
  misc_RNA (1)...(19): siRNA sense strand
ggaggcgcuuucccuugga

SEQ ID NO: 502072 - RNA, 19 nt, Homo sapiens
  misc_RNA (1)...(19): siRNA sense strand
ccuuacacucugcaauuua

SEQ ID NO: 502073 - RNA, 19 nt, Homo sapiens
  misc_RNA (1)...(19): siRNA sense strand
cauccaguuugguuaagau

SEQ ID NO: 502074 - RNA, 19 nt, Homo sapiens
  misc_RNA (1)...(19): siRNA sense strand
aaagaggauggacauagaa

SEQ ID NO: 502075 - RNA, 19 nt, Homo sapiens
  misc_RNA (1)...(19): siRNA sense strand
ggagccgacuacuggagau

SEQ ID NO: 502076 - RNA, 19 nt, Homo sapiens
  misc_RNA (1)...(19): siRNA sense strand
cagcuuaucuacaaucaua

SEQ ID NO: 502077 - RNA, 19 nt, Homo sapiens
  misc_RNA (1)...(19): siRNA sense strand
ggucucagcuuaucuacaa

SEQ ID NO: 502078 - RNA, 19 nt, Homo sapiens
  misc_RNA (1)...(19): siRNA sense strand
gcagggagguggagaggaa

SEQ ID NO: 502079 - RNA, 19 nt, Homo sapiens
  misc_RNA (1)...(19): siRNA sense strand
uaaagaggauggacauaga

SEQ ID NO: 502080 - RNA, 19 nt, Homo sapiens
  misc_RNA (1)...(19): siRNA sense strand
caaaggagagaaguuauua

SEQ ID NO: 502081 - RNA, 19 nt, Homo sapiens
  misc_RNA (1)...(19): siRNA sense strand
gaacauggcaccagaccuu

SEQ ID NO: 502082 - RNA, 19 nt, Homo sapiens
  misc_RNA (1)...(19): siRNA sense strand
gagaaguuauuacggugua

SEQ ID NO: 502083 - RNA, 19 nt, Homo sapiens
  misc_RNA (1)...(19): siRNA sense strand
ugacaaaggagagaaguua

SEQ ID NO: 502084 - RNA, 19 nt, Homo sapiens
  misc_RNA (1)...(19): siRNA sense strand
gaacaacccagaguacuug

SEQ ID NO: 502085 - RNA, 19 nt, Homo sapiens
  misc_RNA (1)...(19): siRNA sense strand
gaggaggccuucuauuaca

SEQ ID NO: 502086 - RNA, 19 nt, Homo sapiens
  misc_RNA (1)...(19): siRNA sense strand
ccacaggccuauuggcauu

SEQ ID NO: 502087 - RNA, 19 nt, Homo sapiens
  misc_RNA (1)...(19): siRNA sense strand
ccacgaauguaccaaaugu

SEQ ID NO: 502088 - RNA, 19 nt, Homo sapiens
  misc_RNA (1)...(19): siRNA sense strand
gaagaggguguccaugauu

SEQ ID NO: 502089 - RNA, 19 nt, Homo sapiens
  misc_RNA (1)...(19): siRNA sense strand
ggacgaggcuagagaacag

SEQ ID NO: 502090 - RNA, 19 nt, Homo sapiens
  misc_RNA (1)...(19): siRNA sense strand
ugucacagguuacuccuuu

SEQ ID NO: 502091 - RNA, 19 nt, Homo sapiens
  misc_RNA (1)...(19): siRNA sense strand
aaacaugagucuugguaug

SEQ ID NO: 502092 - RNA, 19 nt, Homo sapiens
  misc_RNA (1)...(19): siRNA sense strand
uacagcagauugcagauuu

SEQ ID NO: 502093 - RNA, 19 nt, Homo sapiens
  misc_RNA (1)...(19): siRNA sense strand
acaaggagauauaguagau

SEQ ID NO: 502094 - RNA, 19 nt, Homo sapiens
  misc_RNA (1)...(19): siRNA sense strand
gauccgagagcagaauuua

SEQ ID NO: 502095 - RNA, 19 nt, Homo sapiens
  misc_RNA (1)...(19): siRNA sense strand
aaugaaauguggccucuug

SEQ ID NO: 502096 - RNA, 19 nt, Homo sapiens
  misc_RNA (1)...(19): siRNA sense strand
uugaggaggccuucuauua

SEQ ID NO: 502097 - RNA, 19 nt, Homo sapiens
  misc_RNA (1)...(19): siRNA sense strand
cgccaggacuucaacauga

SEQ ID NO: 502098 - RNA, 19 nt, Homo sapiens
  misc_RNA (1)...(19): siRNA sense strand
gaagcagucccaagucgaa

SEQ ID NO: 502099 - RNA, 19 nt, Homo sapiens
  misc_RNA (1)...(19): siRNA sense strand
caaaagagguccaggagau

SEQ ID NO: 502100 - RNA, 19 nt, Homo sapiens
  misc_RNA (1)...(19): siRNA sense strand
uaaccuguuuguuccauug

SEQ ID NO: 502101 - RNA, 19 nt, Homo sapiens
  misc_RNA (1)...(19): siRNA sense strand
uagacuagcagaucucuuu

SEQ ID NO: 502102 - RNA, 19 nt, Homo sapiens
  misc_RNA (1)...(19): siRNA sense strand
gaccacgaauguaccaaau

SEQ ID NO: 502103 - RNA, 19 nt, Homo sapiens
  misc_RNA (1)...(19): siRNA sense strand
aaagcaagguucuuauucu

SEQ ID NO: 502104 - RNA, 19 nt, Homo sapiens
  misc_RNA (1)...(19): siRNA sense strand
cugauucuauugcguauga

SEQ ID NO: 502105 - RNA, 19 nt, Homo sapiens
  misc_RNA (1)...(19): siRNA sense strand
cugcuagugucacagguua

SEQ ID NO: 502106 - RNA, 19 nt, Homo sapiens
  misc_RNA (1)...(19): siRNA sense strand
ccaguuugguuaagaucaa

SEQ ID NO: 502107 - RNA, 19 nt, Homo sapiens
  misc_RNA (1)...(19): siRNA sense strand
ucaugcggaugcucgauaa

SEQ ID NO: 502108 - RNA, 19 nt, Homo sapiens
  misc_RNA (1)...(19): siRNA sense strand
gcauucugguugaugaaga

SEQ ID NO: 502109 - RNA, 19 nt, Homo sapiens
  misc_RNA (1)...(19): siRNA sense strand
gggcugcggucucugcaau

SEQ ID NO: 502110 - RNA, 19 nt, Homo sapiens
  misc_RNA (1)...(19): siRNA sense strand
gaggauggacauagaacuu

SEQ ID NO: 502111 - RNA, 19 nt, Homo sapiens
  misc_RNA (1)...(19): siRNA sense strand
ugauacaggagcaauuuaa

SEQ ID NO: 502112 - RNA, 19 nt, Homo sapiens
  misc_RNA (1)...(19): siRNA sense strand
accgugagcuggaggagua

SEQ ID NO: 502113 - RNA, 19 nt, Homo sapiens
  misc_RNA (1)...(19): siRNA sense strand
gaauuuacaggacauuaag

SEQ ID NO: 502114 - RNA, 19 nt, Homo sapiens
  misc_RNA (1)...(19): siRNA sense strand
aggaggaccagacaacuua

SEQ ID NO: 502115 - RNA, 19 nt, Homo sapiens
  misc_RNA (1)...(19): siRNA sense strand
aagaagaggguguccauga

SEQ ID NO: 502116 - RNA, 19 nt, Homo sapiens
  misc_RNA (1)...(19): siRNA sense strand
acagguuacuccuuugcua

SEQ ID NO: 502117 - RNA, 19 nt, Homo sapiens
  misc_RNA (1)...(19): siRNA sense strand
gaucguggaagcacuaauc

SEQ ID NO: 502118 - RNA, 19 nt, Homo sapiens
  misc_RNA (1)...(19): siRNA sense strand
agaagaggguguccaugau

SEQ ID NO: 502119 - RNA, 19 nt, Homo sapiens
  misc_RNA (1)...(19): siRNA sense strand
gaauguaccaaaugucuac

SEQ ID NO: 502120 - RNA, 19 nt, Homo sapiens
  misc_RNA (1)...(19): siRNA sense strand
ucgauacccugcucugaga

SEQ ID NO: 502121 - RNA, 19 nt, Homo sapiens
  misc_RNA (1)...(19): siRNA sense strand
caacuuaguccugcugaau

SEQ ID NO: 502122 - RNA, 19 nt, Homo sapiens
  misc_RNA (1)...(19): siRNA sense strand
gcugcggucucugcaauga

SEQ ID NO: 502123 - RNA, 19 nt, Homo sapiens
  misc_RNA (1)...(19): siRNA sense strand
gcauccaguuugguuaaga

SEQ ID NO: 502124 - RNA, 19 nt, Homo sapiens
  misc_RNA (1)...(19): siRNA sense strand
cuuacacucugcaauuuau

SEQ ID NO: 502125 - RNA, 19 nt, Homo sapiens
  misc_RNA (1)...(19): siRNA sense strand
uuaaacaugagucuuggua

SEQ ID NO: 502126 - RNA, 19 nt, Homo sapiens
  misc_RNA (1)...(19): siRNA sense strand
ucuacaaggagauauagua

SEQ ID NO: 502127 - RNA, 19 nt, Homo sapiens
  misc_RNA (1)...(19): siRNA sense strand
uacaggagcaauuuaagaa

SEQ ID NO: 502128 - RNA, 19 nt, Homo sapiens
  misc_RNA (1)...(19): siRNA sense strand
gcuagagaacagaaagaaa

SEQ ID NO: 502129 - RNA, 19 nt, Homo sapiens
  misc_RNA (1)...(19): siRNA sense strand
guagaucguggaagcacua

SEQ ID NO: 502130 - RNA, 19 nt, Homo sapiens
  misc_RNA (1)...(19): siRNA sense strand
acaaaggagagaaguuauu

SEQ ID NO: 502131 - RNA, 19 nt, Homo sapiens
  misc_RNA (1)...(19): siRNA sense strand
caccuuacacucugcaauu

SEQ ID NO: 502132 - RNA, 19 nt, Homo sapiens
  misc_RNA (1)...(19): siRNA sense strand
ccaaggccaucauugaaaa

SEQ ID NO: 502133 - RNA, 19 nt, Homo sapiens
  misc_RNA (1)...(19): siRNA sense strand
ugacuaccauggcauucug

SEQ ID NO: 502134 - RNA, 19 nt, Homo sapiens
  misc_RNA (1)...(19): siRNA sense strand
auacagcgauguggagguu

SEQ ID NO: 502135 - RNA, 19 nt, Homo sapiens
  misc_RNA (1)...(19): siRNA sense strand
agaacuggcuacccuuauc

SEQ ID NO: 502136 - RNA, 19 nt, Homo sapiens
  misc_RNA (1)...(19): siRNA sense strand
uuacauccauaaccuugug

SEQ ID NO: 502137 - RNA, 19 nt, Homo sapiens
  misc_RNA (1)...(19): siRNA sense strand
gagggauggcugccuuaaa

SEQ ID NO: 502138 - RNA, 19 nt, Homo sapiens
  misc_RNA (1)...(19): siRNA sense strand
guuacuccuuugcuaguga

SEQ ID NO: 502139 - RNA, 19 nt, Homo sapiens
  misc_RNA (1)...(19): siRNA sense strand
acagaacuggcuacccuua

SEQ ID NO: 502140 - RNA, 19 nt, Homo sapiens
  misc_RNA (1)...(19): siRNA sense strand
gaugagaacaacccagagu

SEQ ID NO: 502141 - RNA, 19 nt, Homo sapiens
  misc_RNA (1)...(19): siRNA sense strand
ggagggauggcugccuuaa

SEQ ID NO: 502142 - RNA, 19 nt, Homo sapiens
  misc_RNA (1)...(19): siRNA sense strand
gccaggacuucaacaugau

SEQ ID NO: 502143 - RNA, 19 nt, Homo sapiens
  misc_RNA (1)...(19): siRNA sense strand
aagaggguguccaugauuc

SEQ ID NO: 502144 - RNA, 19 nt, Homo sapiens
  misc_RNA (1)...(19): siRNA sense strand
gacaaaggagagaaguuau

SEQ ID NO: 502145 - RNA, 19 nt, Homo sapiens
  misc_RNA (1)...(19): siRNA sense strand
gauggcugccuuaaacaug

SEQ ID NO: 502146 - RNA, 19 nt, Homo sapiens
  misc_RNA (1)...(19): siRNA sense strand
ccuccaaggccaucauuga

SEQ ID NO: 502147 - RNA, 19 nt, Homo sapiens
  misc_RNA (1)...(19): siRNA sense strand
cagaauuuacaggacauua

SEQ ID NO: 502148 - RNA, 19 nt, Homo sapiens
  misc_RNA (1)...(19): siRNA sense strand
uggcuacccuuaucgauac

SEQ ID NO: 502149 - RNA, 19 nt, Homo sapiens
  misc_RNA (1)...(19): siRNA sense strand
gaaccaugggcucguguca

SEQ ID NO: 502150 - RNA, 19 nt, Homo sapiens
  misc_RNA (1)...(19): siRNA sense strand
agggauggcugccuuaaac

SEQ ID NO: 502151 - RNA, 19 nt, Homo sapiens
  misc_RNA (1)...(19): siRNA sense strand
ggcccucagucccagguuu

SEQ ID NO: 502152 - RNA, 19 nt, Homo sapiens
  misc_RNA (1)...(19): siRNA sense strand
ugaggaggccuucuauuac

SEQ ID NO: 502153 - RNA, 19 nt, Homo sapiens
  misc_RNA (1)...(19): siRNA sense strand
ugcggucucugcaaugaaa

SEQ ID NO: 502154 - RNA, 19 nt, Homo sapiens
  misc_RNA (1)...(19): siRNA sense strand
gauauaguagaucguggaa

SEQ ID NO: 502155 - RNA, 19 nt, Homo sapiens
  misc_RNA (1)...(19): siRNA sense strand
gguggucucagcuuaucua

SEQ ID NO: 502156 - RNA, 19 nt, Homo sapiens
  misc_RNA (1)...(19): siRNA sense strand
gguauggugacuccuguga

SEQ ID NO: 502157 - RNA, 19 nt, Homo sapiens
  misc_RNA (1)...(19): siRNA sense strand
cuaaagaggauggacauag

SEQ ID NO: 502158 - RNA, 19 nt, Homo sapiens
  misc_RNA (1)...(19): siRNA sense strand
aaugauacaggagcaauuu

SEQ ID NO: 502159 - RNA, 19 nt, Homo sapiens
  misc_RNA (1)...(19): siRNA sense strand
cgaauguaccaaaugucua

SEQ ID NO: 502160 - RNA, 19 nt, Homo sapiens
  misc_RNA (1)...(19): siRNA sense strand
caaugauacaggagcaauu

SEQ ID NO: 502161 - RNA, 19 nt, Homo sapiens
  misc_RNA (1)...(19): siRNA sense strand
caggagaugaggaacaaga

SEQ ID NO: 502162 - RNA, 19 nt, Homo sapiens
  misc_RNA (1)...(19): siRNA sense strand
ccaccucugcugucccuaa

SEQ ID NO: 502163 - RNA, 19 nt, Homo sapiens
  misc_RNA (1)...(19): siRNA sense strand
ccucccaaguggcagauug

SEQ ID NO: 502164 - RNA, 19 nt, Homo sapiens
  misc_RNA (1)...(19): siRNA sense strand
ggccuucuauuacauccau

SEQ ID NO: 502165 - RNA, 19 nt, Homo sapiens
  misc_RNA (1)...(19): siRNA sense strand
ggaggcgcuuucccuugga

SEQ ID NO: 502166 - RNA, 19 nt, Homo sapiens
  misc_RNA (1)...(19): siRNA sense strand
ccuuacacucugcaauuua

SEQ ID NO: 502167 - RNA, 19 nt, Homo sapiens
  misc_RNA (1)...(19): siRNA sense strand
cauccaguuugguuaagau

SEQ ID NO: 502168 - RNA, 19 nt, Homo sapiens
  misc_RNA (1)...(19): siRNA sense strand
gccuuaaacaugagucuug

SEQ ID NO: 502169 - RNA, 19 nt, Homo sapiens
  misc_RNA (1)...(19): siRNA sense strand
gauacaggagcaauuuaag

SEQ ID NO: 502170 - RNA, 19 nt, Homo sapiens
  misc_RNA (1)...(19): siRNA sense strand
aaagaggauggacauagaa

SEQ ID NO: 502171 - RNA, 19 nt, Homo sapiens
  misc_RNA (1)...(19): siRNA sense strand
gcugaauccugagaaguac

SEQ ID NO: 502172 - RNA, 19 nt, Homo sapiens
  misc_RNA (1)...(19): siRNA sense strand
aaagagguccaggagauga

SEQ ID NO: 502173 - RNA, 19 nt, Homo sapiens
  misc_RNA (1)...(19): siRNA sense strand
auacaggagcaauuuaaga

SEQ ID NO: 502174 - RNA, 19 nt, Homo sapiens
  misc_RNA (1)...(19): siRNA sense strand
agaacaacccagaguacuu

SEQ ID NO: 502175 - RNA, 19 nt, Homo sapiens
  misc_RNA (1)...(19): siRNA sense strand
ggagaugaggaacaagauc

SEQ ID NO: 502176 - RNA, 19 nt, Homo sapiens
  misc_RNA (1)...(19): siRNA sense strand
cagcuuaucuacaaucaua

SEQ ID NO: 502177 - RNA, 19 nt, Homo sapiens
  misc_RNA (1)...(19): siRNA sense strand
ggucucagcuuaucuacaa

SEQ ID NO: 502178 - RNA, 19 nt, Homo sapiens
  misc_RNA (1)...(19): siRNA sense strand
gcagggagguggagaggaa

SEQ ID NO: 502179 - RNA, 19 nt, Homo sapiens
  misc_RNA (1)...(19): siRNA sense strand
uaaagaggauggacauaga

SEQ ID NO: 502180 - RNA, 19 nt, Homo sapiens
  misc_RNA (1)...(19): siRNA sense strand
caaaggagagaaguuauua

SEQ ID NO: 502181 - RNA, 19 nt, Homo sapiens
  misc_RNA (1)...(19): siRNA sense strand
gaacauggcaccagaccuu

SEQ ID NO: 502182 - RNA, 19 nt, Homo sapiens
  misc_RNA (1)...(19): siRNA sense strand
gagaaguuauuacggugua

SEQ ID NO: 502183 - RNA, 19 nt, Homo sapiens
  misc_RNA (1)...(19): siRNA sense strand
ugacaaaggagagaaguua

SEQ ID NO: 502184 - RNA, 19 nt, Homo sapiens
  misc_RNA (1)...(19): siRNA sense strand
gaacaacccagaguacuug

SEQ ID NO: 502185 - RNA, 19 nt, Homo sapiens
  misc_RNA (1)...(19): siRNA sense strand
gaggaggccuucuauuaca

SEQ ID NO: 502186 - RNA, 19 nt, Homo sapiens
  misc_RNA (1)...(19): siRNA sense strand
ccacaggccuauuggcauu

SEQ ID NO: 502187 - RNA, 19 nt, Homo sapiens
  misc_RNA (1)...(19): siRNA sense strand
ccacgaauguaccaaaugu

SEQ ID NO: 502188 - RNA, 19 nt, Homo sapiens
  misc_RNA (1)...(19): siRNA sense strand
gaagaggguguccaugauu

SEQ ID NO: 502189 - RNA, 19 nt, Homo sapiens
  misc_RNA (1)...(19): siRNA sense strand
ggacgaggcuagagaacag

SEQ ID NO: 502190 - RNA, 19 nt, Homo sapiens
  misc_RNA (1)...(19): siRNA sense strand
ugucacagguuacuccuuu

SEQ ID NO: 502191 - RNA, 19 nt, Homo sapiens
  misc_RNA (1)...(19): siRNA sense strand
aaacaugagucuugguaug

SEQ ID NO: 502192 - RNA, 19 nt, Homo sapiens
  misc_RNA (1)...(19): siRNA sense strand
uacagcagauugcagauuu

SEQ ID NO: 502193 - RNA, 19 nt, Homo sapiens
  misc_RNA (1)...(19): siRNA sense strand
acaaggagauauaguagau

SEQ ID NO: 502194 - RNA, 19 nt, Homo sapiens
  misc_RNA (1)...(19): siRNA sense strand
aaugaaauguggccucuug

SEQ ID NO: 502195 - RNA, 19 nt, Homo sapiens
  misc_RNA (1)...(19): siRNA sense strand
uugaggaggccuucuauua

SEQ ID NO: 502196 - RNA, 19 nt, Homo sapiens
  misc_RNA (1)...(19): siRNA sense strand
cgccaggacuucaacauga

SEQ ID NO: 502197 - RNA, 19 nt, Homo sapiens
  misc_RNA (1)...(19): siRNA sense strand
gaagcagucccaagucgaa

SEQ ID NO: 502198 - RNA, 19 nt, Homo sapiens
  misc_RNA (1)...(19): siRNA sense strand
caaaagagguccaggagau

SEQ ID NO: 502199 - RNA, 19 nt, Homo sapiens
  misc_RNA (1)...(19): siRNA sense strand
uaaccuguuuguuccauug

SEQ ID NO: 502200 - RNA, 19 nt, Homo sapiens
  misc_RNA (1)...(19): siRNA sense strand
uagacuagcagaucucuuu

SEQ ID NO: 502201 - RNA, 19 nt, Homo sapiens
  misc_RNA (1)...(19): siRNA sense strand
gaccacgaauguaccaaau

SEQ ID NO: 502202 - RNA, 19 nt, Homo sapiens
  misc_RNA (1)...(19): siRNA sense strand
aaagcaagguucuuauucu

SEQ ID NO: 502203 - RNA, 19 nt, Homo sapiens
  misc_RNA (1)...(19): siRNA sense strand
cugauucuauugcguauga

SEQ ID NO: 502204 - RNA, 19 nt, Homo sapiens
  misc_RNA (1)...(19): siRNA sense strand
cugcuagugucacagguua

SEQ ID NO: 502205 - RNA, 19 nt, Homo sapiens
  misc_RNA (1)...(19): siRNA sense strand
ccaguuugguuaagaucaa

SEQ ID NO: 502206 - RNA, 19 nt, Homo sapiens
  misc_RNA (1)...(19): siRNA sense strand
ucaugcggaugcucgauaa

SEQ ID NO: 502207 - RNA, 19 nt, Homo sapiens
  misc_RNA (1)...(19): siRNA sense strand
gcauucugguugaugaaga

SEQ ID NO: 502208 - RNA, 19 nt, Homo sapiens
  misc_RNA (1)...(19): siRNA sense strand
gggcugcggucucugcaau

SEQ ID NO: 502209 - RNA, 19 nt, Homo sapiens
  misc_RNA (1)...(19): siRNA sense strand
gaggauggacauagaacuu

SEQ ID NO: 502210 - RNA, 19 nt, Homo sapiens
  misc_RNA (1)...(19): siRNA sense strand
ugauacaggagcaauuuaa

SEQ ID NO: 502211 - RNA, 19 nt, Homo sapiens
  misc_RNA (1)...(19): siRNA sense strand
accgugagcuggaggagua

SEQ ID NO: 502212 - RNA, 19 nt, Homo sapiens
  misc_RNA (1)...(19): siRNA sense strand
aggaggaccagacaacuua

SEQ ID NO: 502213 - RNA, 19 nt, Homo sapiens
  misc_RNA (1)...(19): siRNA sense strand
aagaagaggguguccauga

SEQ ID NO: 502214 - RNA, 19 nt, Homo sapiens
  misc_RNA (1)...(19): siRNA sense strand
acagguuacuccuuugcua

SEQ ID NO: 502215 - RNA, 19 nt, Homo sapiens
  misc_RNA (1)...(19): siRNA sense strand
gaucguggaagcacuaauc

SEQ ID NO: 502216 - RNA, 19 nt, Homo sapiens
  misc_RNA (1)...(19): siRNA sense strand
agaagaggguguccaugau

SEQ ID NO: 502217 - RNA, 19 nt, Homo sapiens
  misc_RNA (1)...(19): siRNA sense strand
gaauguaccaaaugucuac

SEQ ID NO: 502218 - RNA, 19 nt, Homo sapiens
  misc_RNA (1)...(19): siRNA sense strand
ucgauacccugcucugaga

SEQ ID NO: 502219 - RNA, 19 nt, Homo sapiens
  misc_RNA (1)...(19): siRNA sense strand
caacuuaguccugcugaau

SEQ ID NO: 502220 - RNA, 19 nt, Homo sapiens
  misc_RNA (1)...(19): siRNA sense strand
gcugcggucucugcaauga

SEQ ID NO: 502221 - RNA, 19 nt, Homo sapiens
  misc_RNA (1)...(19): siRNA sense strand
gcauccaguuugguuaaga

SEQ ID NO: 502222 - RNA, 19 nt, Homo sapiens
  misc_RNA (1)...(19): siRNA sense strand
cuuacacucugcaauuuau

SEQ ID NO: 502223 - RNA, 19 nt, Homo sapiens
  misc_RNA (1)...(19): siRNA sense strand
uuaaacaugagucuuggua

SEQ ID NO: 502224 - RNA, 19 nt, Homo sapiens
  misc_RNA (1)...(19): siRNA sense strand
ucuacaaggagauauagua

SEQ ID NO: 502225 - RNA, 19 nt, Homo sapiens
  misc_RNA (1)...(19): siRNA sense strand
uacaggagcaauuuaagaa

SEQ ID NO: 502226 - RNA, 19 nt, Homo sapiens
  misc_RNA (1)...(19): siRNA sense strand
gcuagagaacagaaagaaa

SEQ ID NO: 502227 - RNA, 19 nt, Homo sapiens
  misc_RNA (1)...(19): siRNA sense strand
guagaucguggaagcacua

SEQ ID NO: 502228 - RNA, 19 nt, Homo sapiens
  misc_RNA (1)...(19): siRNA sense strand
acaaaggagagaaguuauu

SEQ ID NO: 502229 - RNA, 19 nt, Homo sapiens
  misc_RNA (1)...(19): siRNA sense strand
caccuuacacucugcaauu

SEQ ID NO: 502230 - RNA, 19 nt, Homo sapiens
  misc_RNA (1)...(19): siRNA sense strand
ccaaggccaucauugaaaa

SEQ ID NO: 502231 - RNA, 19 nt, Homo sapiens
  misc_RNA (1)...(19): siRNA sense strand
ugacuaccauggcauucug

SEQ ID NO: 502232 - RNA, 19 nt, Homo sapiens
  misc_RNA (1)...(19): siRNA sense strand
auacagcgauguggagguu

SEQ ID NO: 502233 - RNA, 19 nt, Homo sapiens
  misc_RNA (1)...(19): siRNA sense strand
agaacuggcuacccuuauc

SEQ ID NO: 502234 - RNA, 19 nt, Homo sapiens
  misc_RNA (1)...(19): siRNA sense strand
uuacauccauaaccuugug

SEQ ID NO: 502235 - RNA, 19 nt, Homo sapiens
  misc_RNA (1)...(19): siRNA sense strand
gagggauggcugccuuaaa

SEQ ID NO: 502236 - RNA, 19 nt, Homo sapiens
  misc_RNA (1)...(19): siRNA sense strand
guuacuccuuugcuaguga

SEQ ID NO: 502237 - RNA, 19 nt, Homo sapiens
  misc_RNA (1)...(19): siRNA sense strand
acagaacuggcuacccuua

SEQ ID NO: 502238 - RNA, 19 nt, Homo sapiens
  misc_RNA (1)...(19): siRNA sense strand
gaugagaacaacccagagu

SEQ ID NO: 502239 - RNA, 19 nt, Homo sapiens
  misc_RNA (1)...(19): siRNA sense strand
gccaggacuucaacaugau

SEQ ID NO: 502240 - RNA, 19 nt, Homo sapiens
  misc_RNA (1)...(19): siRNA sense strand
gacaaaggagagaaguuau

SEQ ID NO: 502241 - RNA, 19 nt, Homo sapiens
  misc_RNA (1)...(19): siRNA sense strand
ggagggauggcugccuuaa

SEQ ID NO: 502242 - RNA, 19 nt, Homo sapiens
  misc_RNA (1)...(19): siRNA sense strand
aagaggguguccaugauuc

SEQ ID NO: 502243 - RNA, 19 nt, Homo sapiens
  misc_RNA (1)...(19): siRNA sense strand
gauggcugccuuaaacaug

SEQ ID NO: 502244 - RNA, 19 nt, Homo sapiens
  misc_RNA (1)...(19): siRNA sense strand
ccuccaaggccaucauuga

SEQ ID NO: 502245 - RNA, 19 nt, Homo sapiens
  misc_RNA (1)...(19): siRNA sense strand
uggcuacccuuaucgauac

SEQ ID NO: 502246 - RNA, 19 nt, Homo sapiens
  misc_RNA (1)...(19): siRNA sense strand
gaaccaugggcucguguca

SEQ ID NO: 502247 - RNA, 19 nt, Homo sapiens
  misc_RNA (1)...(19): siRNA sense strand
agggauggcugccuuaaac

SEQ ID NO: 502248 - RNA, 19 nt, Homo sapiens
  misc_RNA (1)...(19): siRNA sense strand
ggcccucagucccagguuu

SEQ ID NO: 502249 - RNA, 19 nt, Homo sapiens
  misc_RNA (1)...(19): siRNA sense strand
ugaggaggccuucuauuac

SEQ ID NO: 502250 - RNA, 19 nt, Homo sapiens
  misc_RNA (1)...(19): siRNA sense strand
ugcggucucugcaaugaaa

SEQ ID NO: 502251 - RNA, 19 nt, Homo sapiens
  misc_RNA (1)...(19): siRNA sense strand
gauauaguagaucguggaa

SEQ ID NO: 502252 - RNA, 19 nt, Homo sapiens
  misc_RNA (1)...(19): siRNA sense strand
gguggucucagcuuaucua

SEQ ID NO: 502253 - RNA, 19 nt, Homo sapiens
  misc_RNA (1)...(19): siRNA sense strand
gguauggugacuccuguga

SEQ ID NO: 502254 - RNA, 19 nt, Homo sapiens
  misc_RNA (1)...(19): siRNA sense strand
cuaaagaggauggacauag

SEQ ID NO: 502255 - RNA, 19 nt, Homo sapiens
  misc_RNA (1)...(19): siRNA sense strand
aaugauacaggagcaauuu

SEQ ID NO: 502256 - RNA, 19 nt, Homo sapiens
  misc_RNA (1)...(19): siRNA sense strand
cgaauguaccaaaugucua

SEQ ID NO: 502257 - RNA, 19 nt, Homo sapiens
  misc_RNA (1)...(19): siRNA sense strand
caaugauacaggagcaauu

SEQ ID NO: 502258 - RNA, 19 nt, Homo sapiens
  misc_RNA (1)...(19): siRNA sense strand
caggagaugaggaacaaga

SEQ ID NO: 502259 - RNA, 19 nt, Homo sapiens
  misc_RNA (1)...(19): siRNA sense strand
ccaccucugcugucccuaa

SEQ ID NO: 502260 - RNA, 19 nt, Homo sapiens
  misc_RNA (1)...(19): siRNA sense strand
ccucccaaguggcagauug

SEQ ID NO: 502261 - RNA, 19 nt, Homo sapiens
  misc_RNA (1)...(19): siRNA sense strand
ggccuucuauuacauccau

SEQ ID NO: 502262 - RNA, 19 nt, Homo sapiens
  misc_RNA (1)...(19): siRNA sense strand
ggaggcgcuuucccuugga

SEQ ID NO: 502263 - RNA, 19 nt, Homo sapiens
  misc_RNA (1)...(19): siRNA sense strand
ccuuacacucugcaauuua

SEQ ID NO: 502264 - RNA, 19 nt, Homo sapiens
  misc_RNA (1)...(19): siRNA sense strand
cauccaguuugguuaagau

SEQ ID NO: 502265 - RNA, 19 nt, Homo sapiens
  misc_RNA (1)...(19): siRNA sense strand
gccuuaaacaugagucuug

SEQ ID NO: 502266 - RNA, 19 nt, Homo sapiens
  misc_RNA (1)...(19): siRNA sense strand
aaagaggauggacauagaa

SEQ ID NO: 502267 - RNA, 19 nt, Homo sapiens
  misc_RNA (1)...(19): siRNA sense strand
gcugaauccugagaaguac

SEQ ID NO: 502268 - RNA, 19 nt, Homo sapiens
  misc_RNA (1)...(19): siRNA sense strand
gauacaggagcaauuuaag

SEQ ID NO: 502269 - RNA, 19 nt, Homo sapiens
  misc_RNA (1)...(19): siRNA sense strand
ugacuccugugaacgaucu

SEQ ID NO: 502270 - RNA, 19 nt, Homo sapiens
  misc_RNA (1)...(19): siRNA sense strand
ggagaugaggaacaagauc

SEQ ID NO: 502271 - RNA, 19 nt, Homo sapiens
  misc_RNA (1)...(19): siRNA sense strand
aaagagguccaggagauga

SEQ ID NO: 502272 - RNA, 19 nt, Homo sapiens
  misc_RNA (1)...(19): siRNA sense strand
gauguggagguuccugcua

SEQ ID NO: 502273 - RNA, 19 nt, Homo sapiens
  misc_RNA (1)...(19): siRNA sense strand
gaacuggcuacccuuaucg

SEQ ID NO: 502274 - RNA, 19 nt, Homo sapiens
  misc_RNA (1)...(19): siRNA sense strand
agaacaacccagaguacuu

SEQ ID NO: 502275 - RNA, 19 nt, Homo sapiens
  misc_RNA (1)...(19): siRNA sense strand
uuuggguggucucagcuua

SEQ ID NO: 502276 - RNA, 19 nt, Homo sapiens
  misc_RNA (1)...(19): siRNA sense strand
cagcuuaucuacaaucaua

SEQ ID NO: 502277 - RNA, 19 nt, Homo sapiens
  misc_RNA (1)...(19): siRNA sense strand
gcacucggcuucccaaugu

SEQ ID NO: 502278 - RNA, 19 nt, Homo sapiens
  misc_RNA (1)...(19): siRNA sense strand
ggucucagcuuaucuacaa

SEQ ID NO: 502279 - RNA, 19 nt, Homo sapiens
  misc_RNA (1)...(19): siRNA sense strand
gcagggagguggagaggaa

SEQ ID NO: 502280 - RNA, 19 nt, Homo sapiens
  misc_RNA (1)...(19): siRNA sense strand
uaaagaggauggacauaga

SEQ ID NO: 502281 - RNA, 19 nt, Homo sapiens
  misc_RNA (1)...(19): siRNA sense strand
caaaggagagaaguuauua

SEQ ID NO: 502282 - RNA, 19 nt, Homo sapiens
  misc_RNA (1)...(19): siRNA sense strand
gaacauggcaccagaccuu

SEQ ID NO: 502283 - RNA, 19 nt, Homo sapiens
  misc_RNA (1)...(19): siRNA sense strand
gagaaguuauuacggugua

SEQ ID NO: 502284 - RNA, 19 nt, Homo sapiens
  misc_RNA (1)...(19): siRNA sense strand
ugacaaaggagagaaguua

SEQ ID NO: 502285 - RNA, 19 nt, Homo sapiens
  misc_RNA (1)...(19): siRNA sense strand
gaacaacccagaguacuug

SEQ ID NO: 502286 - RNA, 19 nt, Homo sapiens
  misc_RNA (1)...(19): siRNA sense strand
gaggaggccuucuauuaca

SEQ ID NO: 502287 - RNA, 19 nt, Homo sapiens
  misc_RNA (1)...(19): siRNA sense strand
ccacaggccuauuggcauu

SEQ ID NO: 502288 - RNA, 19 nt, Homo sapiens
  misc_RNA (1)...(19): siRNA sense strand
ccacgaauguaccaaaugu

SEQ ID NO: 502289 - RNA, 19 nt, Homo sapiens
  misc_RNA (1)...(19): siRNA sense strand
gaagaggguguccaugauu

SEQ ID NO: 502290 - RNA, 19 nt, Homo sapiens
  misc_RNA (1)...(19): siRNA sense strand
ggacgaggcuagagaacag

SEQ ID NO: 502291 - RNA, 19 nt, Homo sapiens
  misc_RNA (1)...(19): siRNA sense strand
ugucacagguuacuccuuu

SEQ ID NO: 502292 - RNA, 19 nt, Homo sapiens
  misc_RNA (1)...(19): siRNA sense strand
aaacaugagucuugguaug

SEQ ID NO: 502293 - RNA, 19 nt, Homo sapiens
  misc_RNA (1)...(19): siRNA sense strand
uacagcagauugcagauuu

SEQ ID NO: 502294 - RNA, 19 nt, Homo sapiens
  misc_RNA (1)...(19): siRNA sense strand
acaaggagauauaguagau

SEQ ID NO: 502295 - RNA, 19 nt, Homo sapiens
  misc_RNA (1)...(19): siRNA sense strand
gauccgagagcagaauuua

SEQ ID NO: 502296 - RNA, 19 nt, Homo sapiens
  misc_RNA (1)...(19): siRNA sense strand
ugaagaagagcaagaagaa

SEQ ID NO: 502297 - RNA, 19 nt, Homo sapiens
  misc_RNA (1)...(19): siRNA sense strand
aaugaaauguggccucuug

SEQ ID NO: 502298 - RNA, 19 nt, Homo sapiens
  misc_RNA (1)...(19): siRNA sense strand
uugaggaggccuucuauua

SEQ ID NO: 502299 - RNA, 19 nt, Homo sapiens
  misc_RNA (1)...(19): siRNA sense strand
cgccaggacuucaacauga

SEQ ID NO: 502300 - RNA, 19 nt, Homo sapiens
  misc_RNA (1)...(19): siRNA sense strand
gaagcagucccaagucgaa

SEQ ID NO: 502301 - RNA, 19 nt, Homo sapiens
  misc_RNA (1)...(19): siRNA sense strand
caaaagagguccaggagau

SEQ ID NO: 502302 - RNA, 19 nt, Homo sapiens
  misc_RNA (1)...(19): siRNA sense strand
uaaccuguuuguuccauug

SEQ ID NO: 502303 - RNA, 19 nt, Homo sapiens
  misc_RNA (1)...(19): siRNA sense strand
uagacuagcagaucucuuu

SEQ ID NO: 502304 - RNA, 19 nt, Homo sapiens
  misc_RNA (1)...(19): siRNA sense strand
gaccacgaauguaccaaau

SEQ ID NO: 502305 - RNA, 19 nt, Homo sapiens
  misc_RNA (1)...(19): siRNA sense strand
aaagcaagguucuuauucu

SEQ ID NO: 502306 - RNA, 19 nt, Homo sapiens
  misc_RNA (1)...(19): siRNA sense strand
cugauucuauugcguauga

SEQ ID NO: 502307 - RNA, 19 nt, Homo sapiens
  misc_RNA (1)...(19): siRNA sense strand
cugcuagugucacagguua

SEQ ID NO: 502308 - RNA, 19 nt, Homo sapiens
  misc_RNA (1)...(19): siRNA sense strand
ccaguuugguuaagaucaa

SEQ ID NO: 502309 - RNA, 19 nt, Homo sapiens
  misc_RNA (1)...(19): siRNA sense strand
ucaugcggaugcucgauaa

SEQ ID NO: 502310 - RNA, 19 nt, Homo sapiens
  misc_RNA (1)...(19): siRNA sense strand
gcauucugguugaugaaga

SEQ ID NO: 502311 - RNA, 19 nt, Homo sapiens
  misc_RNA (1)...(19): siRNA sense strand
gggcugcggucucugcaau

SEQ ID NO: 502312 - RNA, 19 nt, Homo sapiens
  misc_RNA (1)...(19): siRNA sense strand
gaggauggacauagaacuu

SEQ ID NO: 502313 - RNA, 19 nt, Homo sapiens
  misc_RNA (1)...(19): siRNA sense strand
ugauacaggagcaauuuaa

SEQ ID NO: 502314 - RNA, 19 nt, Homo sapiens
  misc_RNA (1)...(19): siRNA sense strand
accgugagcuggaggagua

SEQ ID NO: 502315 - RNA, 19 nt, Homo sapiens
  misc_RNA (1)...(19): siRNA sense strand
gaauuuacaggacauuaag

SEQ ID NO: 502316 - RNA, 19 nt, Homo sapiens
  misc_RNA (1)...(19): siRNA sense strand
aggaggaccagacaacuua

SEQ ID NO: 502317 - RNA, 19 nt, Homo sapiens
  misc_RNA (1)...(19): siRNA sense strand
aagaagaggguguccauga

SEQ ID NO: 502318 - RNA, 19 nt, Homo sapiens
  misc_RNA (1)...(19): siRNA sense strand
acagguuacuccuuugcua

SEQ ID NO: 502319 - RNA, 19 nt, Homo sapiens
  misc_RNA (1)...(19): siRNA sense strand
gaucguggaagcacuaauc

SEQ ID NO: 502320 - RNA, 19 nt, Homo sapiens
  misc_RNA (1)...(19): siRNA sense strand
agaagaggguguccaugau

SEQ ID NO: 502321 - RNA, 19 nt, Homo sapiens
  misc_RNA (1)...(19): siRNA sense strand
gaauguaccaaaugucuac

SEQ ID NO: 502322 - RNA, 19 nt, Homo sapiens
  misc_RNA (1)...(19): siRNA sense strand
aagaagagcaagaagaaga

SEQ ID NO: 502323 - RNA, 19 nt, Homo sapiens
  misc_RNA (1)...(19): siRNA sense strand
cagugaugcugccaccuuu

SEQ ID NO: 502324 - RNA, 19 nt, Homo sapiens
  misc_RNA (1)...(19): siRNA sense strand
ucgauacccugcucugaga

SEQ ID NO: 502325 - RNA, 19 nt, Homo sapiens
  misc_RNA (1)...(19): siRNA sense strand
caacuuaguccugcugaau

SEQ ID NO: 502326 - RNA, 19 nt, Homo sapiens
  misc_RNA (1)...(19): siRNA sense strand
gcugcggucucugcaauga

SEQ ID NO: 502327 - RNA, 19 nt, Homo sapiens
  misc_RNA (1)...(19): siRNA sense strand
gcauccaguuugguuaaga

SEQ ID NO: 502328 - RNA, 19 nt, Homo sapiens
  misc_RNA (1)...(19): siRNA sense strand
cuuacacucugcaauuuau

SEQ ID NO: 502329 - RNA, 19 nt, Homo sapiens
  misc_RNA (1)...(19): siRNA sense strand
uuaaacaugagucuuggua

SEQ ID NO: 502330 - RNA, 19 nt, Homo sapiens
  misc_RNA (1)...(19): siRNA sense strand
ucuacaaggagauauagua

SEQ ID NO: 502331 - RNA, 19 nt, Homo sapiens
  misc_RNA (1)...(19): siRNA sense strand
uacaggagcaauuuaagaa

SEQ ID NO: 502332 - RNA, 19 nt, Homo sapiens
  misc_RNA (1)...(19): siRNA sense strand
gcuagagaacagaaagaaa

SEQ ID NO: 502333 - RNA, 19 nt, Homo sapiens
  misc_RNA (1)...(19): siRNA sense strand
guagaucguggaagcacua

SEQ ID NO: 502334 - RNA, 19 nt, Homo sapiens
  misc_RNA (1)...(19): siRNA sense strand
acaaaggagagaaguuauu

SEQ ID NO: 502335 - RNA, 19 nt, Homo sapiens
  misc_RNA (1)...(19): siRNA sense strand
caccuuacacucugcaauu

SEQ ID NO: 502336 - RNA, 19 nt, Homo sapiens
  misc_RNA (1)...(19): siRNA sense strand
gugaugcugccaccuuuaa

SEQ ID NO: 502337 - RNA, 19 nt, Homo sapiens
  misc_RNA (1)...(19): siRNA sense strand
ccaaggccaucauugaaaa

SEQ ID NO: 502338 - RNA, 19 nt, Homo sapiens
  misc_RNA (1)...(19): siRNA sense strand
ugacuaccauggcauucug

SEQ ID NO: 502339 - RNA, 19 nt, Homo sapiens
  misc_RNA (1)...(19): siRNA sense strand
auacagcgauguggagguu

SEQ ID NO: 502340 - RNA, 19 nt, Homo sapiens
  misc_RNA (1)...(19): siRNA sense strand
agaacuggcuacccuuauc

SEQ ID NO: 502341 - RNA, 19 nt, Homo sapiens
  misc_RNA (1)...(19): siRNA sense strand
uuacauccauaaccuugug

SEQ ID NO: 502342 - RNA, 19 nt, Homo sapiens
  misc_RNA (1)...(19): siRNA sense strand
gagggauggcugccuuaaa

SEQ ID NO: 502343 - RNA, 19 nt, Homo sapiens
  misc_RNA (1)...(19): siRNA sense strand
guuacuccuuugcuaguga

SEQ ID NO: 502344 - RNA, 19 nt, Homo sapiens
  misc_RNA (1)...(19): siRNA sense strand
gaugagaacaacccagagu

SEQ ID NO: 502345 - RNA, 19 nt, Homo sapiens
  misc_RNA (1)...(19): siRNA sense strand
acagaacuggcuacccuua

SEQ ID NO: 502346 - RNA, 19 nt, Homo sapiens
  misc_RNA (1)...(19): siRNA sense strand
ggagggauggcugccuuaa

SEQ ID NO: 502347 - RNA, 19 nt, Homo sapiens
  misc_RNA (1)...(19): siRNA sense strand
gccaggacuucaacaugau

SEQ ID NO: 502348 - RNA, 19 nt, Homo sapiens
  misc_RNA (1)...(19): siRNA sense strand
aagaggguguccaugauuc

SEQ ID NO: 502349 - RNA, 19 nt, Homo sapiens
  misc_RNA (1)...(19): siRNA sense strand
gacaaaggagagaaguuau

SEQ ID NO: 502350 - RNA, 19 nt, Homo sapiens
  misc_RNA (1)...(19): siRNA sense strand
gauggcugccuuaaacaug

SEQ ID NO: 502351 - RNA, 19 nt, Homo sapiens
  misc_RNA (1)...(19): siRNA sense strand
ccuccaaggccaucauuga

SEQ ID NO: 502352 - RNA, 19 nt, Homo sapiens
  misc_RNA (1)...(19): siRNA sense strand
cagaauuuacaggacauua

SEQ ID NO: 502353 - RNA, 19 nt, Homo sapiens
  misc_RNA (1)...(19): siRNA sense strand
uggcuacccuuaucgauac

SEQ ID NO: 502354 - RNA, 19 nt, Homo sapiens
  misc_RNA (1)...(19): siRNA sense strand
gaaccaugggcucguguca

SEQ ID NO: 502355 - RNA, 19 nt, Homo sapiens
  misc_RNA (1)...(19): siRNA sense strand
agggauggcugccuuaaac

SEQ ID NO: 502356 - RNA, 19 nt, Homo sapiens
  misc_RNA (1)...(19): siRNA sense strand
ggcccucagucccagguuu

SEQ ID NO: 502357 - RNA, 19 nt, Homo sapiens
  misc_RNA (1)...(19): siRNA sense strand
ugaggaggccuucuauuac

SEQ ID NO: 502358 - RNA, 19 nt, Homo sapiens
  misc_RNA (1)...(19): siRNA sense strand
ugcggucucugcaaugaaa

SEQ ID NO: 502359 - RNA, 19 nt, Homo sapiens
  misc_RNA (1)...(19): siRNA sense strand
gauauaguagaucguggaa

SEQ ID NO: 502360 - RNA, 19 nt, Homo sapiens
  misc_RNA (1)...(19): siRNA sense strand
gguggucucagcuuaucua

SEQ ID NO: 502361 - RNA, 19 nt, Homo sapiens
  misc_RNA (1)...(19): siRNA sense strand
gguauggugacuccuguga

SEQ ID NO: 502362 - RNA, 19 nt, Homo sapiens
  misc_RNA (1)...(19): siRNA sense strand
cuaaagaggauggacauag

SEQ ID NO: 502363 - RNA, 19 nt, Homo sapiens
  misc_RNA (1)...(19): siRNA sense strand
aaugauacaggagcaauuu

SEQ ID NO: 502364 - RNA, 19 nt, Homo sapiens
  misc_RNA (1)...(19): siRNA sense strand
cgaauguaccaaaugucua

SEQ ID NO: 502365 - RNA, 19 nt, Homo sapiens
  misc_RNA (1)...(19): siRNA sense strand
gaagaagagcaagaagaag

SEQ ID NO: 502366 - RNA, 19 nt, Homo sapiens
  misc_RNA (1)...(19): siRNA sense strand
caggagaugaggaacaaga

SEQ ID NO: 502367 - RNA, 19 nt, Homo sapiens
  misc_RNA (1)...(19): siRNA sense strand
ccaccucugcugucccuaa

SEQ ID NO: 502368 - RNA, 19 nt, Homo sapiens
  misc_RNA (1)...(19): siRNA sense strand
ccucccaaguggcagauug

SEQ ID NO: 502369 - RNA, 19 nt, Homo sapiens
  misc_RNA (1)...(19): siRNA sense strand
ggccuucuauuacauccau

SEQ ID NO: 502370 - RNA, 19 nt, Homo sapiens
  misc_RNA (1)...(19): siRNA sense strand
caaugauacaggagcaauu

SEQ ID NO: 502371 - RNA, 19 nt, Homo sapiens
  misc_RNA (1)...(19): siRNA sense strand
ggaggcgcuuucccuugga

SEQ ID NO: 502372 - RNA, 19 nt, Homo sapiens
  misc_RNA (1)...(19): siRNA sense strand
ccuuacacucugcaauuua

SEQ ID NO: 502373 - RNA, 19 nt, Homo sapiens
  misc_RNA (1)...(19): siRNA sense strand
cauccaguuugguuaagau

SEQ ID NO: 502374 - RNA, 19 nt, Homo sapiens
  misc_RNA (1)...(19): siRNA sense strand
aaagaggauggacauagaa

SEQ ID NO: 502375 - RNA, 19 nt, Homo sapiens
  misc_RNA (1)...(19): siRNA sense strand
ggagccgacuacuggagau

SEQ ID NO: 502376 - RNA, 19 nt, Homo sapiens
  misc_RNA (1)...(19): siRNA sense strand
cagcuuaucuacaaucaua

SEQ ID NO: 502377 - RNA, 19 nt, Homo sapiens
  misc_RNA (1)...(19): siRNA sense strand
gcacucggcuucccaaugu

SEQ ID NO: 502378 - RNA, 19 nt, Homo sapiens
  misc_RNA (1)...(19): siRNA sense strand
ggucucagcuuaucuacaa

SEQ ID NO: 502379 - RNA, 19 nt, Homo sapiens
  misc_RNA (1)...(19): siRNA sense strand
gcagggagguggagaggaa

SEQ ID NO: 502380 - RNA, 19 nt, Homo sapiens
  misc_RNA (1)...(19): siRNA sense strand
uaaagaggauggacauaga

SEQ ID NO: 502381 - RNA, 19 nt, Homo sapiens
  misc_RNA (1)...(19): siRNA sense strand
caaaggagagaaguuauua

SEQ ID NO: 502382 - RNA, 19 nt, Homo sapiens
  misc_RNA (1)...(19): siRNA sense strand
gaacauggcaccagaccuu

SEQ ID NO: 502383 - RNA, 19 nt, Homo sapiens
  misc_RNA (1)...(19): siRNA sense strand
gagaaguuauuacggugua

SEQ ID NO: 502384 - RNA, 19 nt, Homo sapiens
  misc_RNA (1)...(19): siRNA sense strand
ugacaaaggagagaaguua

SEQ ID NO: 502385 - RNA, 19 nt, Homo sapiens
  misc_RNA (1)...(19): siRNA sense strand
gaacaacccagaguacuug

SEQ ID NO: 502386 - RNA, 19 nt, Homo sapiens
  misc_RNA (1)...(19): siRNA sense strand
gaggaggccuucuauuaca

SEQ ID NO: 502387 - RNA, 19 nt, Homo sapiens
  misc_RNA (1)...(19): siRNA sense strand
ccacaggccuauuggcauu

SEQ ID NO: 502388 - RNA, 19 nt, Homo sapiens
  misc_RNA (1)...(19): siRNA sense strand
ccacgaauguaccaaaugu

SEQ ID NO: 502389 - RNA, 19 nt, Homo sapiens
  misc_RNA (1)...(19): siRNA sense strand
gaagaggguguccaugauu

SEQ ID NO: 502390 - RNA, 19 nt, Homo sapiens
  misc_RNA (1)...(19): siRNA sense strand
ggacgaggcuagagaacag

SEQ ID NO: 502391 - RNA, 19 nt, Homo sapiens
  misc_RNA (1)...(19): siRNA sense strand
ugucacagguuacuccuuu

SEQ ID NO: 502392 - RNA, 19 nt, Homo sapiens
  misc_RNA (1)...(19): siRNA sense strand
aaacaugagucuugguaug

SEQ ID NO: 502393 - RNA, 19 nt, Homo sapiens
  misc_RNA (1)...(19): siRNA sense strand
uacagcagauugcagauuu

SEQ ID NO: 502394 - RNA, 19 nt, Homo sapiens
  misc_RNA (1)...(19): siRNA sense strand
acaaggagauauaguagau

SEQ ID NO: 502395 - RNA, 19 nt, Homo sapiens
  misc_RNA (1)...(19): siRNA sense strand
gauccgagagcagaauuua

SEQ ID NO: 502396 - RNA, 19 nt, Homo sapiens
  misc_RNA (1)...(19): siRNA sense strand
ugaagaagagcaagaagaa

SEQ ID NO: 502397 - RNA, 19 nt, Homo sapiens
  misc_RNA (1)...(19): siRNA sense strand
aaugaaauguggccucuug

SEQ ID NO: 502398 - RNA, 19 nt, Homo sapiens
  misc_RNA (1)...(19): siRNA sense strand
uugaggaggccuucuauua

SEQ ID NO: 502399 - RNA, 19 nt, Homo sapiens
  misc_RNA (1)...(19): siRNA sense strand
cgccaggacuucaacauga

SEQ ID NO: 502400 - RNA, 19 nt, Homo sapiens
  misc_RNA (1)...(19): siRNA sense strand
gaagcagucccaagucgaa

SEQ ID NO: 502401 - RNA, 19 nt, Homo sapiens
  misc_RNA (1)...(19): siRNA sense strand
caaaagagguccaggagau

SEQ ID NO: 502402 - RNA, 19 nt, Homo sapiens
  misc_RNA (1)...(19): siRNA sense strand
uaaccuguuuguuccauug

SEQ ID NO: 502403 - RNA, 19 nt, Homo sapiens
  misc_RNA (1)...(19): siRNA sense strand
uagacuagcagaucucuuu

SEQ ID NO: 502404 - RNA, 19 nt, Homo sapiens
  misc_RNA (1)...(19): siRNA sense strand
gaccacgaauguaccaaau

SEQ ID NO: 502405 - RNA, 19 nt, Homo sapiens
  misc_RNA (1)...(19): siRNA sense strand
aaagcaagguucuuauucu

SEQ ID NO: 502406 - RNA, 19 nt, Homo sapiens
  misc_RNA (1)...(19): siRNA sense strand
cugauucuauugcguauga

SEQ ID NO: 502407 - RNA, 19 nt, Homo sapiens
  misc_RNA (1)...(19): siRNA sense strand
cugcuagugucacagguua

SEQ ID NO: 502408 - RNA, 19 nt, Homo sapiens
  misc_RNA (1)...(19): siRNA sense strand
ccaguuugguuaagaucaa

SEQ ID NO: 502409 - RNA, 19 nt, Homo sapiens
  misc_RNA (1)...(19): siRNA sense strand
ucaugcggaugcucgauaa

SEQ ID NO: 502410 - RNA, 19 nt, Homo sapiens
  misc_RNA (1)...(19): siRNA sense strand
gcauucugguugaugaaga

SEQ ID NO: 502411 - RNA, 19 nt, Homo sapiens
  misc_RNA (1)...(19): siRNA sense strand
gggcugcggucucugcaau

SEQ ID NO: 502412 - RNA, 19 nt, Homo sapiens
  misc_RNA (1)...(19): siRNA sense strand
gaggauggacauagaacuu

SEQ ID NO: 502413 - RNA, 19 nt, Homo sapiens
  misc_RNA (1)...(19): siRNA sense strand
ugauacaggagcaauuuaa

SEQ ID NO: 502414 - RNA, 19 nt, Homo sapiens
  misc_RNA (1)...(19): siRNA sense strand
accgugagcuggaggagua

SEQ ID NO: 502415 - RNA, 19 nt, Homo sapiens
  misc_RNA (1)...(19): siRNA sense strand
gaauuuacaggacauuaag

SEQ ID NO: 502416 - RNA, 19 nt, Homo sapiens
  misc_RNA (1)...(19): siRNA sense strand
aggaggaccagacaacuua

SEQ ID NO: 502417 - RNA, 19 nt, Homo sapiens
  misc_RNA (1)...(19): siRNA sense strand
aagaagaggguguccauga

SEQ ID NO: 502418 - RNA, 19 nt, Homo sapiens
  misc_RNA (1)...(19): siRNA sense strand
acagguuacuccuuugcua

SEQ ID NO: 502419 - RNA, 19 nt, Homo sapiens
  misc_RNA (1)...(19): siRNA sense strand
gaucguggaagcacuaauc

SEQ ID NO: 502420 - RNA, 19 nt, Homo sapiens
  misc_RNA (1)...(19): siRNA sense strand
agaagaggguguccaugau

SEQ ID NO: 502421 - RNA, 19 nt, Homo sapiens
  misc_RNA (1)...(19): siRNA sense strand
gaauguaccaaaugucuac

SEQ ID NO: 502422 - RNA, 19 nt, Homo sapiens
  misc_RNA (1)...(19): siRNA sense strand
aagaagagcaagaagaaga

SEQ ID NO: 502423 - RNA, 19 nt, Homo sapiens
  misc_RNA (1)...(19): siRNA sense strand
cagugaugcugccaccuuu

SEQ ID NO: 502424 - RNA, 19 nt, Homo sapiens
  misc_RNA (1)...(19): siRNA sense strand
ucgauacccugcucugaga

SEQ ID NO: 502425 - RNA, 19 nt, Homo sapiens
  misc_RNA (1)...(19): siRNA sense strand
caacuuaguccugcugaau

SEQ ID NO: 502426 - RNA, 19 nt, Homo sapiens
  misc_RNA (1)...(19): siRNA sense strand
gcugcggucucugcaauga

SEQ ID NO: 502427 - RNA, 19 nt, Homo sapiens
  misc_RNA (1)...(19): siRNA sense strand
gcauccaguuugguuaaga

SEQ ID NO: 502428 - RNA, 19 nt, Homo sapiens
  misc_RNA (1)...(19): siRNA sense strand
cuuacacucugcaauuuau

SEQ ID NO: 502429 - RNA, 19 nt, Homo sapiens
  misc_RNA (1)...(19): siRNA sense strand
uuaaacaugagucuuggua

SEQ ID NO: 502430 - RNA, 19 nt, Homo sapiens
  misc_RNA (1)...(19): siRNA sense strand
ucuacaaggagauauagua

SEQ ID NO: 502431 - RNA, 19 nt, Homo sapiens
  misc_RNA (1)...(19): siRNA sense strand
uacaggagcaauuuaagaa

SEQ ID NO: 502432 - RNA, 19 nt, Homo sapiens
  misc_RNA (1)...(19): siRNA sense strand
gcuagagaacagaaagaaa

SEQ ID NO: 502433 - RNA, 19 nt, Homo sapiens
  misc_RNA (1)...(19): siRNA sense strand
guagaucguggaagcacua

SEQ ID NO: 502434 - RNA, 19 nt, Homo sapiens
  misc_RNA (1)...(19): siRNA sense strand
acaaaggagagaaguuauu

SEQ ID NO: 502435 - RNA, 19 nt, Homo sapiens
  misc_RNA (1)...(19): siRNA sense strand
caccuuacacucugcaauu

SEQ ID NO: 502436 - RNA, 19 nt, Homo sapiens
  misc_RNA (1)...(19): siRNA sense strand
gugaugcugccaccuuuaa

SEQ ID NO: 502437 - RNA, 19 nt, Homo sapiens
  misc_RNA (1)...(19): siRNA sense strand
ccaaggccaucauugaaaa

SEQ ID NO: 502438 - RNA, 19 nt, Homo sapiens
  misc_RNA (1)...(19): siRNA sense strand
ugacuaccauggcauucug

SEQ ID NO: 502439 - RNA, 19 nt, Homo sapiens
  misc_RNA (1)...(19): siRNA sense strand
auacagcgauguggagguu

SEQ ID NO: 502440 - RNA, 19 nt, Homo sapiens
  misc_RNA (1)...(19): siRNA sense strand
agaacuggcuacccuuauc

SEQ ID NO: 502441 - RNA, 19 nt, Homo sapiens
  misc_RNA (1)...(19): siRNA sense strand
uuacauccauaaccuugug

SEQ ID NO: 502442 - RNA, 19 nt, Homo sapiens
  misc_RNA (1)...(19): siRNA sense strand
gagggauggcugccuuaaa

SEQ ID NO: 502443 - RNA, 19 nt, Homo sapiens
  misc_RNA (1)...(19): siRNA sense strand
guuacuccuuugcuaguga

SEQ ID NO: 502444 - RNA, 19 nt, Homo sapiens
  misc_RNA (1)...(19): siRNA sense strand
gaugagaacaacccagagu

SEQ ID NO: 502445 - RNA, 19 nt, Homo sapiens
  misc_RNA (1)...(19): siRNA sense strand
acagaacuggcuacccuua

SEQ ID NO: 502446 - RNA, 19 nt, Homo sapiens
  misc_RNA (1)...(19): siRNA sense strand
ggagggauggcugccuuaa

SEQ ID NO: 502447 - RNA, 19 nt, Homo sapiens
  misc_RNA (1)...(19): siRNA sense strand
gccaggacuucaacaugau

SEQ ID NO: 502448 - RNA, 19 nt, Homo sapiens
  misc_RNA (1)...(19): siRNA sense strand
aagaggguguccaugauuc

SEQ ID NO: 502449 - RNA, 19 nt, Homo sapiens
  misc_RNA (1)...(19): siRNA sense strand
gacaaaggagagaaguuau

SEQ ID NO: 502450 - RNA, 19 nt, Homo sapiens
  misc_RNA (1)...(19): siRNA sense strand
gauggcugccuuaaacaug

SEQ ID NO: 502451 - RNA, 19 nt, Homo sapiens
  misc_RNA (1)...(19): siRNA sense strand
ccuccaaggccaucauuga

SEQ ID NO: 502452 - RNA, 19 nt, Homo sapiens
  misc_RNA (1)...(19): siRNA sense strand
cagaauuuacaggacauua

SEQ ID NO: 502453 - RNA, 19 nt, Homo sapiens
  misc_RNA (1)...(19): siRNA sense strand
uggcuacccuuaucgauac

SEQ ID NO: 502454 - RNA, 19 nt, Homo sapiens
  misc_RNA (1)...(19): siRNA sense strand
gaaccaugggcucguguca

SEQ ID NO: 502455 - RNA, 19 nt, Homo sapiens
  misc_RNA (1)...(19): siRNA sense strand
agggauggcugccuuaaac

SEQ ID NO: 502456 - RNA, 19 nt, Homo sapiens
  misc_RNA (1)...(19): siRNA sense strand
ggcccucagucccagguuu

SEQ ID NO: 502457 - RNA, 19 nt, Homo sapiens
  misc_RNA (1)...(19): siRNA sense strand
ugaggaggccuucuauuac

SEQ ID NO: 502458 - RNA, 19 nt, Homo sapiens
  misc_RNA (1)...(19): siRNA sense strand
ugcggucucugcaaugaaa

SEQ ID NO: 502459 - RNA, 19 nt, Homo sapiens
  misc_RNA (1)...(19): siRNA sense strand
gauauaguagaucguggaa

SEQ ID NO: 502460 - RNA, 19 nt, Homo sapiens
  misc_RNA (1)...(19): siRNA sense strand
gguggucucagcuuaucua

SEQ ID NO: 502461 - RNA, 19 nt, Homo sapiens
  misc_RNA (1)...(19): siRNA sense strand
gguauggugacuccuguga

SEQ ID NO: 502462 - RNA, 19 nt, Homo sapiens
  misc_RNA (1)...(19): siRNA sense strand
cuaaagaggauggacauag

SEQ ID NO: 502463 - RNA, 19 nt, Homo sapiens
  misc_RNA (1)...(19): siRNA sense strand
aaugauacaggagcaauuu

SEQ ID NO: 502464 - RNA, 19 nt, Homo sapiens
  misc_RNA (1)...(19): siRNA sense strand
cgaauguaccaaaugucua

SEQ ID NO: 502465 - RNA, 19 nt, Homo sapiens
  misc_RNA (1)...(19): siRNA sense strand
gaagaagagcaagaagaag

SEQ ID NO: 502466 - RNA, 19 nt, Homo sapiens
  misc_RNA (1)...(19): siRNA sense strand
caggagaugaggaacaaga

SEQ ID NO: 502467 - RNA, 19 nt, Homo sapiens
  misc_RNA (1)...(19): siRNA sense strand
ccaccucugcugucccuaa

SEQ ID NO: 502468 - RNA, 19 nt, Homo sapiens
  misc_RNA (1)...(19): siRNA sense strand
ccucccaaguggcagauug

SEQ ID NO: 502469 - RNA, 19 nt, Homo sapiens
  misc_RNA (1)...(19): siRNA sense strand
ggccuucuauuacauccau

SEQ ID NO: 502470 - RNA, 19 nt, Homo sapiens
  misc_RNA (1)...(19): siRNA sense strand
caaugauacaggagcaauu

SEQ ID NO: 502471 - RNA, 19 nt, Homo sapiens
  misc_RNA (1)...(19): siRNA sense strand
ggaggcgcuuucccuugga

SEQ ID NO: 502472 - RNA, 19 nt, Homo sapiens
  misc_RNA (1)...(19): siRNA sense strand
ccuuacacucugcaauuua

SEQ ID NO: 502473 - RNA, 19 nt, Homo sapiens
  misc_RNA (1)...(19): siRNA sense strand
cauccaguuugguuaagau

SEQ ID NO: 502474 - RNA, 19 nt, Homo sapiens
  misc_RNA (1)...(19): siRNA sense strand
aaagaggauggacauagaa

SEQ ID NO: 502475 - RNA, 19 nt, Homo sapiens
  misc_RNA (1)...(19): siRNA sense strand
ggagccgacuacuggagau

SEQ ID NO: 502476 - RNA, 19 nt, Homo sapiens
  misc_RNA (1)...(19): siRNA sense strand
cagcuuaucuacaaucaua

SEQ ID NO: 502477 - RNA, 19 nt, Homo sapiens
  misc_RNA (1)...(19): siRNA sense strand
ggucucagcuuaucuacaa

SEQ ID NO: 502478 - RNA, 19 nt, Homo sapiens
  misc_RNA (1)...(19): siRNA sense strand
gcagggagguggagaggaa

SEQ ID NO: 502479 - RNA, 19 nt, Homo sapiens
  misc_RNA (1)...(19): siRNA sense strand
uaaagaggauggacauaga

SEQ ID NO: 502480 - RNA, 19 nt, Homo sapiens
  misc_RNA (1)...(19): siRNA sense strand
caaaggagagaaguuauua

SEQ ID NO: 502481 - RNA, 19 nt, Homo sapiens
  misc_RNA (1)...(19): siRNA sense strand
gaacauggcaccagaccuu

SEQ ID NO: 502482 - RNA, 19 nt, Homo sapiens
  misc_RNA (1)...(19): siRNA sense strand
gagaaguuauuacggugua

SEQ ID NO: 502483 - RNA, 19 nt, Homo sapiens
  misc_RNA (1)...(19): siRNA sense strand
ugacaaaggagagaaguua

SEQ ID NO: 502484 - RNA, 19 nt, Homo sapiens
  misc_RNA (1)...(19): siRNA sense strand
gaacaacccagaguacuug

SEQ ID NO: 502485 - RNA, 19 nt, Homo sapiens
  misc_RNA (1)...(19): siRNA sense strand
gaggaggccuucuauuaca

SEQ ID NO: 502486 - RNA, 19 nt, Homo sapiens
  misc_RNA (1)...(19): siRNA sense strand
ccacaggccuauuggcauu

SEQ ID NO: 502487 - RNA, 19 nt, Homo sapiens
  misc_RNA (1)...(19): siRNA sense strand
ccacgaauguaccaaaugu

SEQ ID NO: 502488 - RNA, 19 nt, Homo sapiens
  misc_RNA (1)...(19): siRNA sense strand
gaagaggguguccaugauu

SEQ ID NO: 502489 - RNA, 19 nt, Homo sapiens
  misc_RNA (1)...(19): siRNA sense strand
ggacgaggcuagagaacag

SEQ ID NO: 502490 - RNA, 19 nt, Homo sapiens
  misc_RNA (1)...(19): siRNA sense strand
ugucacagguuacuccuuu

SEQ ID NO: 502491 - RNA, 19 nt, Homo sapiens
  misc_RNA (1)...(19): siRNA sense strand
aaacaugagucuugguaug

SEQ ID NO: 502492 - RNA, 19 nt, Homo sapiens
  misc_RNA (1)...(19): siRNA sense strand
uacagcagauugcagauuu

SEQ ID NO: 502493 - RNA, 19 nt, Homo sapiens
  misc_RNA (1)...(19): siRNA sense strand
acaaggagauauaguagau

SEQ ID NO: 502494 - RNA, 19 nt, Homo sapiens
  misc_RNA (1)...(19): siRNA sense strand
gauccgagagcagaauuua

SEQ ID NO: 502495 - RNA, 19 nt, Homo sapiens
  misc_RNA (1)...(19): siRNA sense strand
aaugaaauguggccucuug

SEQ ID NO: 502496 - RNA, 19 nt, Homo sapiens
  misc_RNA (1)...(19): siRNA sense strand
uugaggaggccuucuauua

SEQ ID NO: 502497 - RNA, 19 nt, Homo sapiens
  misc_RNA (1)...(19): siRNA sense strand
cgccaggacuucaacauga

SEQ ID NO: 502498 - RNA, 19 nt, Homo sapiens
  misc_RNA (1)...(19): siRNA sense strand
gaagcagucccaagucgaa

SEQ ID NO: 502499 - RNA, 19 nt, Homo sapiens
  misc_RNA (1)...(19): siRNA sense strand
caaaagagguccaggagau

SEQ ID NO: 502500 - RNA, 19 nt, Homo sapiens
  misc_RNA (1)...(19): siRNA sense strand
uaaccuguuuguuccauug

SEQ ID NO: 502501 - RNA, 19 nt, Homo sapiens
  misc_RNA (1)...(19): siRNA sense strand
uagacuagcagaucucuuu

SEQ ID NO: 502502 - RNA, 19 nt, Homo sapiens
  misc_RNA (1)...(19): siRNA sense strand
gaccacgaauguaccaaau

SEQ ID NO: 502503 - RNA, 19 nt, Homo sapiens
  misc_RNA (1)...(19): siRNA sense strand
aaagcaagguucuuauucu

SEQ ID NO: 502504 - RNA, 19 nt, Homo sapiens
  misc_RNA (1)...(19): siRNA sense strand
cugauucuauugcguauga

SEQ ID NO: 502505 - RNA, 19 nt, Homo sapiens
  misc_RNA (1)...(19): siRNA sense strand
cugcuagugucacagguua

SEQ ID NO: 502506 - RNA, 19 nt, Homo sapiens
  misc_RNA (1)...(19): siRNA sense strand
ccaguuugguuaagaucaa

SEQ ID NO: 502507 - RNA, 19 nt, Homo sapiens
  misc_RNA (1)...(19): siRNA sense strand
ucaugcggaugcucgauaa

SEQ ID NO: 502508 - RNA, 19 nt, Homo sapiens
  misc_RNA (1)...(19): siRNA sense strand
gcauucugguugaugaaga

SEQ ID NO: 502509 - RNA, 19 nt, Homo sapiens
  misc_RNA (1)...(19): siRNA sense strand
gggcugcggucucugcaau

SEQ ID NO: 502510 - RNA, 19 nt, Homo sapiens
  misc_RNA (1)...(19): siRNA sense strand
gaggauggacauagaacuu

SEQ ID NO: 502511 - RNA, 19 nt, Homo sapiens
  misc_RNA (1)...(19): siRNA sense strand
ugauacaggagcaauuuaa

SEQ ID NO: 502512 - RNA, 19 nt, Homo sapiens
  misc_RNA (1)...(19): siRNA sense strand
accgugagcuggaggagua

SEQ ID NO: 502513 - RNA, 19 nt, Homo sapiens
  misc_RNA (1)...(19): siRNA sense strand
gaauuuacaggacauuaag

SEQ ID NO: 502514 - RNA, 19 nt, Homo sapiens
  misc_RNA (1)...(19): siRNA sense strand
aggaggaccagacaacuua

SEQ ID NO: 502515 - RNA, 19 nt, Homo sapiens
  misc_RNA (1)...(19): siRNA sense strand
aagaagaggguguccauga

SEQ ID NO: 502516 - RNA, 19 nt, Homo sapiens
  misc_RNA (1)...(19): siRNA sense strand
acagguuacuccuuugcua

SEQ ID NO: 502517 - RNA, 19 nt, Homo sapiens
  misc_RNA (1)...(19): siRNA sense strand
gaucguggaagcacuaauc

SEQ ID NO: 502518 - RNA, 19 nt, Homo sapiens
  misc_RNA (1)...(19): siRNA sense strand
agaagaggguguccaugau

SEQ ID NO: 502519 - RNA, 19 nt, Homo sapiens
  misc_RNA (1)...(19): siRNA sense strand
gaauguaccaaaugucuac

SEQ ID NO: 502520 - RNA, 19 nt, Homo sapiens
  misc_RNA (1)...(19): siRNA sense strand
ucgauacccugcucugaga

SEQ ID NO: 502521 - RNA, 19 nt, Homo sapiens
  misc_RNA (1)...(19): siRNA sense strand
caacuuaguccugcugaau

SEQ ID NO: 502522 - RNA, 19 nt, Homo sapiens
  misc_RNA (1)...(19): siRNA sense strand
gcugcggucucugcaauga

SEQ ID NO: 502523 - RNA, 19 nt, Homo sapiens
  misc_RNA (1)...(19): siRNA sense strand
gcauccaguuugguuaaga

SEQ ID NO: 502524 - RNA, 19 nt, Homo sapiens
  misc_RNA (1)...(19): siRNA sense strand
cuuacacucugcaauuuau

SEQ ID NO: 502525 - RNA, 19 nt, Homo sapiens
  misc_RNA (1)...(19): siRNA sense strand
uuaaacaugagucuuggua

SEQ ID NO: 502526 - RNA, 19 nt, Homo sapiens
  misc_RNA (1)...(19): siRNA sense strand
ucuacaaggagauauagua

SEQ ID NO: 502527 - RNA, 19 nt, Homo sapiens
  misc_RNA (1)...(19): siRNA sense strand
uacaggagcaauuuaagaa

SEQ ID NO: 502528 - RNA, 19 nt, Homo sapiens
  misc_RNA (1)...(19): siRNA sense strand
gcuagagaacagaaagaaa

SEQ ID NO: 502529 - RNA, 19 nt, Homo sapiens
  misc_RNA (1)...(19): siRNA sense strand
guagaucguggaagcacua

SEQ ID NO: 502530 - RNA, 19 nt, Homo sapiens
  misc_RNA (1)...(19): siRNA sense strand
acaaaggagagaaguuauu

SEQ ID NO: 502531 - RNA, 19 nt, Homo sapiens
  misc_RNA (1)...(19): siRNA sense strand
caccuuacacucugcaauu

SEQ ID NO: 502532 - RNA, 19 nt, Homo sapiens
  misc_RNA (1)...(19): siRNA sense strand
ccaaggccaucauugaaaa

SEQ ID NO: 502533 - RNA, 19 nt, Homo sapiens
  misc_RNA (1)...(19): siRNA sense strand
ugacuaccauggcauucug

SEQ ID NO: 502534 - RNA, 19 nt, Homo sapiens
  misc_RNA (1)...(19): siRNA sense strand
auacagcgauguggagguu

SEQ ID NO: 502535 - RNA, 19 nt, Homo sapiens
  misc_RNA (1)...(19): siRNA sense strand
agaacuggcuacccuuauc

SEQ ID NO: 502536 - RNA, 19 nt, Homo sapiens
  misc_RNA (1)...(19): siRNA sense strand
uuacauccauaaccuugug

SEQ ID NO: 502537 - RNA, 19 nt, Homo sapiens
  misc_RNA (1)...(19): siRNA sense strand
gagggauggcugccuuaaa

SEQ ID NO: 502538 - RNA, 19 nt, Homo sapiens
  misc_RNA (1)...(19): siRNA sense strand
guuacuccuuugcuaguga

SEQ ID NO: 502539 - RNA, 19 nt, Homo sapiens
  misc_RNA (1)...(19): siRNA sense strand
acagaacuggcuacccuua

SEQ ID NO: 502540 - RNA, 19 nt, Homo sapiens
  misc_RNA (1)...(19): siRNA sense strand
gaugagaacaacccagagu

SEQ ID NO: 502541 - RNA, 19 nt, Homo sapiens
  misc_RNA (1)...(19): siRNA sense strand
ggagggauggcugccuuaa

SEQ ID NO: 502542 - RNA, 19 nt, Homo sapiens
  misc_RNA (1)...(19): siRNA sense strand
gccaggacuucaacaugau

SEQ ID NO: 502543 - RNA, 19 nt, Homo sapiens
  misc_RNA (1)...(19): siRNA sense strand
aagaggguguccaugauuc

SEQ ID NO: 502544 - RNA, 19 nt, Homo sapiens
  misc_RNA (1)...(19): siRNA sense strand
gacaaaggagagaaguuau

SEQ ID NO: 502545 - RNA, 19 nt, Homo sapiens
  misc_RNA (1)...(19): siRNA sense strand
gauggcugccuuaaacaug

SEQ ID NO: 502546 - RNA, 19 nt, Homo sapiens
  misc_RNA (1)...(19): siRNA sense strand
ccuccaaggccaucauuga

SEQ ID NO: 502547 - RNA, 19 nt, Homo sapiens
  misc_RNA (1)...(19): siRNA sense strand
cagaauuuacaggacauua

SEQ ID NO: 502548 - RNA, 19 nt, Homo sapiens
  misc_RNA (1)...(19): siRNA sense strand
uggcuacccuuaucgauac

SEQ ID NO: 502549 - RNA, 19 nt, Homo sapiens
  misc_RNA (1)...(19): siRNA sense strand
gaaccaugggcucguguca

SEQ ID NO: 502550 - RNA, 19 nt, Homo sapiens
  misc_RNA (1)...(19): siRNA sense strand
agggauggcugccuuaaac

SEQ ID NO: 502551 - RNA, 19 nt, Homo sapiens
  misc_RNA (1)...(19): siRNA sense strand
ggcccucagucccagguuu

SEQ ID NO: 502552 - RNA, 19 nt, Homo sapiens
  misc_RNA (1)...(19): siRNA sense strand
ugaggaggccuucuauuac

SEQ ID NO: 502553 - RNA, 19 nt, Homo sapiens
  misc_RNA (1)...(19): siRNA sense strand
ugcggucucugcaaugaaa

SEQ ID NO: 502554 - RNA, 19 nt, Homo sapiens
  misc_RNA (1)...(19): siRNA sense strand
gauauaguagaucguggaa

SEQ ID NO: 502555 - RNA, 19 nt, Homo sapiens
  misc_RNA (1)...(19): siRNA sense strand
gguggucucagcuuaucua

SEQ ID NO: 502556 - RNA, 19 nt, Homo sapiens
  misc_RNA (1)...(19): siRNA sense strand
gguauggugacuccuguga

SEQ ID NO: 502557 - RNA, 19 nt, Homo sapiens
  misc_RNA (1)...(19): siRNA sense strand
cuaaagaggauggacauag

SEQ ID NO: 502558 - RNA, 19 nt, Homo sapiens
  misc_RNA (1)...(19): siRNA sense strand
aaugauacaggagcaauuu

SEQ ID NO: 502559 - RNA, 19 nt, Homo sapiens
  misc_RNA (1)...(19): siRNA sense strand
cgaauguaccaaaugucua

SEQ ID NO: 502560 - RNA, 19 nt, Homo sapiens
  misc_RNA (1)...(19): siRNA sense strand
caaugauacaggagcaauu

SEQ ID NO: 502561 - RNA, 19 nt, Homo sapiens
  misc_RNA (1)...(19): siRNA sense strand
caggagaugaggaacaaga

SEQ ID NO: 502562 - RNA, 19 nt, Homo sapiens
  misc_RNA (1)...(19): siRNA sense strand
ccaccucugcugucccuaa

SEQ ID NO: 502563 - RNA, 19 nt, Homo sapiens
  misc_RNA (1)...(19): siRNA sense strand
ccucccaaguggcagauug

SEQ ID NO: 502564 - RNA, 19 nt, Homo sapiens
  misc_RNA (1)...(19): siRNA sense strand
ggccuucuauuacauccau

SEQ ID NO: 502565 - RNA, 19 nt, Homo sapiens
  misc_RNA (1)...(19): siRNA sense strand
ggaggcgcuuucccuugga

SEQ ID NO: 502566 - RNA, 19 nt, Homo sapiens
  misc_RNA (1)...(19): siRNA sense strand
ccuuacacucugcaauuua

SEQ ID NO: 502567 - RNA, 19 nt, Homo sapiens
  misc_RNA (1)...(19): siRNA sense strand
cauccaguuugguuaagau

SEQ ID NO: 502568 - RNA, 19 nt, Homo sapiens
  misc_RNA (1)...(19): siRNA sense strand
gccuuaaacaugagucuug

SEQ ID NO: 502569 - RNA, 19 nt, Homo sapiens
  misc_RNA (1)...(19): siRNA sense strand
gauacaggagcaauuuaag

SEQ ID NO: 502570 - RNA, 19 nt, Homo sapiens
  misc_RNA (1)...(19): siRNA sense strand
aaagaggauggacauagaa

SEQ ID NO: 502571 - RNA, 19 nt, Homo sapiens
  misc_RNA (1)...(19): siRNA sense strand
gcugaauccugagaaguac

SEQ ID NO: 502572 - RNA, 19 nt, Homo sapiens
  misc_RNA (1)...(19): siRNA sense strand
aaagagguccaggagauga

SEQ ID NO: 502573 - RNA, 19 nt, Homo sapiens
  misc_RNA (1)...(19): siRNA sense strand
auacaggagcaauuuaaga

SEQ ID NO: 502574 - RNA, 19 nt, Homo sapiens
  misc_RNA (1)...(19): siRNA sense strand
agaacaacccagaguacuu

SEQ ID NO: 502575 - RNA, 19 nt, Homo sapiens
  misc_RNA (1)...(19): siRNA sense strand
ggagaugaggaacaagauc

SEQ ID NO: 502576 - RNA, 19 nt, Homo sapiens
  misc_RNA (1)...(19): siRNA sense strand
cagcuuaucuacaaucaua

SEQ ID NO: 502577 - RNA, 19 nt, Homo sapiens
  misc_RNA (1)...(19): siRNA sense strand
ggucucagcuuaucuacaa

SEQ ID NO: 502578 - RNA, 19 nt, Homo sapiens
  misc_RNA (1)...(19): siRNA sense strand
gcagggagguggagaggaa

SEQ ID NO: 502579 - RNA, 19 nt, Homo sapiens
  misc_RNA (1)...(19): siRNA sense strand
uaaagaggauggacauaga

SEQ ID NO: 502580 - RNA, 19 nt, Homo sapiens
  misc_RNA (1)...(19): siRNA sense strand
caaaggagagaaguuauua

SEQ ID NO: 502581 - RNA, 19 nt, Homo sapiens
  misc_RNA (1)...(19): siRNA sense strand
gaacauggcaccagaccuu

SEQ ID NO: 502582 - RNA, 19 nt, Homo sapiens
  misc_RNA (1)...(19): siRNA sense strand
gagaaguuauuacggugua

SEQ ID NO: 502583 - RNA, 19 nt, Homo sapiens
  misc_RNA (1)...(19): siRNA sense strand
ugacaaaggagagaaguua

SEQ ID NO: 502584 - RNA, 19 nt, Homo sapiens
  misc_RNA (1)...(19): siRNA sense strand
gaacaacccagaguacuug

SEQ ID NO: 502585 - RNA, 19 nt, Homo sapiens
  misc_RNA (1)...(19): siRNA sense strand
gaggaggccuucuauuaca

SEQ ID NO: 502586 - RNA, 19 nt, Homo sapiens
  misc_RNA (1)...(19): siRNA sense strand
ccacaggccuauuggcauu

SEQ ID NO: 502587 - RNA, 19 nt, Homo sapiens
  misc_RNA (1)...(19): siRNA sense strand
ccacgaauguaccaaaugu

SEQ ID NO: 502588 - RNA, 19 nt, Homo sapiens
  misc_RNA (1)...(19): siRNA sense strand
gaagaggguguccaugauu

SEQ ID NO: 502589 - RNA, 19 nt, Homo sapiens
  misc_RNA (1)...(19): siRNA sense strand
ggacgaggcuagagaacag

SEQ ID NO: 502590 - RNA, 19 nt, Homo sapiens
  misc_RNA (1)...(19): siRNA sense strand
ugucacagguuacuccuuu

SEQ ID NO: 502591 - RNA, 19 nt, Homo sapiens
  misc_RNA (1)...(19): siRNA sense strand
aaacaugagucuugguaug

SEQ ID NO: 502592 - RNA, 19 nt, Homo sapiens
  misc_RNA (1)...(19): siRNA sense strand
uacagcagauugcagauuu

SEQ ID NO: 502593 - RNA, 19 nt, Homo sapiens
  misc_RNA (1)...(19): siRNA sense strand
acaaggagauauaguagau

SEQ ID NO: 502594 - RNA, 19 nt, Homo sapiens
  misc_RNA (1)...(19): siRNA sense strand
aaugaaauguggccucuug

SEQ ID NO: 502595 - RNA, 19 nt, Homo sapiens
  misc_RNA (1)...(19): siRNA sense strand
uugaggaggccuucuauua

SEQ ID NO: 502596 - RNA, 19 nt, Homo sapiens
  misc_RNA (1)...(19): siRNA sense strand
cgccaggacuucaacauga

SEQ ID NO: 502597 - RNA, 19 nt, Homo sapiens
  misc_RNA (1)...(19): siRNA sense strand
gaagcagucccaagucgaa

SEQ ID NO: 502598 - RNA, 19 nt, Homo sapiens
  misc_RNA (1)...(19): siRNA sense strand
caaaagagguccaggagau

SEQ ID NO: 502599 - RNA, 19 nt, Homo sapiens
  misc_RNA (1)...(19): siRNA sense strand
uaaccuguuuguuccauug

SEQ ID NO: 502600 - RNA, 19 nt, Homo sapiens
  misc_RNA (1)...(19): siRNA sense strand
uagacuagcagaucucuuu

SEQ ID NO: 502601 - RNA, 19 nt, Homo sapiens
  misc_RNA (1)...(19): siRNA sense strand
gaccacgaauguaccaaau

SEQ ID NO: 502602 - RNA, 19 nt, Homo sapiens
  misc_RNA (1)...(19): siRNA sense strand
aaagcaagguucuuauucu

SEQ ID NO: 502603 - RNA, 19 nt, Homo sapiens
  misc_RNA (1)...(19): siRNA sense strand
cugauucuauugcguauga

SEQ ID NO: 502604 - RNA, 19 nt, Homo sapiens
  misc_RNA (1)...(19): siRNA sense strand
cugcuagugucacagguua

SEQ ID NO: 502605 - RNA, 19 nt, Homo sapiens
  misc_RNA (1)...(19): siRNA sense strand
ccaguuugguuaagaucaa

SEQ ID NO: 502606 - RNA, 19 nt, Homo sapiens
  misc_RNA (1)...(19): siRNA sense strand
ucaugcggaugcucgauaa

SEQ ID NO: 502607 - RNA, 19 nt, Homo sapiens
  misc_RNA (1)...(19): siRNA sense strand
gcauucugguugaugaaga

SEQ ID NO: 502608 - RNA, 19 nt, Homo sapiens
  misc_RNA (1)...(19): siRNA sense strand
gggcugcggucucugcaau

SEQ ID NO: 502609 - RNA, 19 nt, Homo sapiens
  misc_RNA (1)...(19): siRNA sense strand
gaggauggacauagaacuu

SEQ ID NO: 502610 - RNA, 19 nt, Homo sapiens
  misc_RNA (1)...(19): siRNA sense strand
ugauacaggagcaauuuaa

SEQ ID NO: 502611 - RNA, 19 nt, Homo sapiens
  misc_RNA (1)...(19): siRNA sense strand
accgugagcuggaggagua

SEQ ID NO: 502612 - RNA, 19 nt, Homo sapiens
  misc_RNA (1)...(19): siRNA sense strand
aggaggaccagacaacuua

SEQ ID NO: 502613 - RNA, 19 nt, Homo sapiens
  misc_RNA (1)...(19): siRNA sense strand
aagaagaggguguccauga

SEQ ID NO: 502614 - RNA, 19 nt, Homo sapiens
  misc_RNA (1)...(19): siRNA sense strand
acagguuacuccuuugcua

SEQ ID NO: 502615 - RNA, 19 nt, Homo sapiens
  misc_RNA (1)...(19): siRNA sense strand
gaucguggaagcacuaauc

SEQ ID NO: 502616 - RNA, 19 nt, Homo sapiens
  misc_RNA (1)...(19): siRNA sense strand
agaagaggguguccaugau

SEQ ID NO: 502617 - RNA, 19 nt, Homo sapiens
  misc_RNA (1)...(19): siRNA sense strand
gaauguaccaaaugucuac

SEQ ID NO: 502618 - RNA, 19 nt, Homo sapiens
  misc_RNA (1)...(19): siRNA sense strand
ucgauacccugcucugaga

SEQ ID NO: 502619 - RNA, 19 nt, Homo sapiens
  misc_RNA (1)...(19): siRNA sense strand
caacuuaguccugcugaau

SEQ ID NO: 502620 - RNA, 19 nt, Homo sapiens
  misc_RNA (1)...(19): siRNA sense strand
gcugcggucucugcaauga

SEQ ID NO: 502621 - RNA, 19 nt, Homo sapiens
  misc_RNA (1)...(19): siRNA sense strand
gcauccaguuugguuaaga

SEQ ID NO: 502622 - RNA, 19 nt, Homo sapiens
  misc_RNA (1)...(19): siRNA sense strand
cuuacacucugcaauuuau

SEQ ID NO: 502623 - RNA, 19 nt, Homo sapiens
  misc_RNA (1)...(19): siRNA sense strand
uuaaacaugagucuuggua

SEQ ID NO: 502624 - RNA, 19 nt, Homo sapiens
  misc_RNA (1)...(19): siRNA sense strand
ucuacaaggagauauagua

SEQ ID NO: 502625 - RNA, 19 nt, Homo sapiens
  misc_RNA (1)...(19): siRNA sense strand
uacaggagcaauuuaagaa

SEQ ID NO: 502626 - RNA, 19 nt, Homo sapiens
  misc_RNA (1)...(19): siRNA sense strand
gcuagagaacagaaagaaa

SEQ ID NO: 502627 - RNA, 19 nt, Homo sapiens
  misc_RNA (1)...(19): siRNA sense strand
guagaucguggaagcacua

SEQ ID NO: 502628 - RNA, 19 nt, Homo sapiens
  misc_RNA (1)...(19): siRNA sense strand
acaaaggagagaaguuauu

SEQ ID NO: 502629 - RNA, 19 nt, Homo sapiens
  misc_RNA (1)...(19): siRNA sense strand
caccuuacacucugcaauu

SEQ ID NO: 502630 - RNA, 19 nt, Homo sapiens
  misc_RNA (1)...(19): siRNA sense strand
ccaaggccaucauugaaaa

SEQ ID NO: 502631 - RNA, 19 nt, Homo sapiens
  misc_RNA (1)...(19): siRNA sense strand
ugacuaccauggcauucug

SEQ ID NO: 502632 - RNA, 19 nt, Homo sapiens
  misc_RNA (1)...(19): siRNA sense strand
auacagcgauguggagguu

SEQ ID NO: 502633 - RNA, 19 nt, Homo sapiens
  misc_RNA (1)...(19): siRNA sense strand
agaacuggcuacccuuauc

SEQ ID NO: 502634 - RNA, 19 nt, Homo sapiens
  misc_RNA (1)...(19): siRNA sense strand
uuacauccauaaccuugug

SEQ ID NO: 502635 - RNA, 19 nt, Homo sapiens
  misc_RNA (1)...(19): siRNA sense strand
gagggauggcugccuuaaa

SEQ ID NO: 502636 - RNA, 19 nt, Homo sapiens
  misc_RNA (1)...(19): siRNA sense strand
guuacuccuuugcuaguga

SEQ ID NO: 502637 - RNA, 19 nt, Homo sapiens
  misc_RNA (1)...(19): siRNA sense strand
acagaacuggcuacccuua

SEQ ID NO: 502638 - RNA, 19 nt, Homo sapiens
  misc_RNA (1)...(19): siRNA sense strand
gaugagaacaacccagagu

SEQ ID NO: 502639 - RNA, 19 nt, Homo sapiens
  misc_RNA (1)...(19): siRNA sense strand
gccaggacuucaacaugau

SEQ ID NO: 502640 - RNA, 19 nt, Homo sapiens
  misc_RNA (1)...(19): siRNA sense strand
gacaaaggagagaaguuau

SEQ ID NO: 502641 - RNA, 19 nt, Homo sapiens
  misc_RNA (1)...(19): siRNA sense strand
ggagggauggcugccuuaa

SEQ ID NO: 502642 - RNA, 19 nt, Homo sapiens
  misc_RNA (1)...(19): siRNA sense strand
aagaggguguccaugauuc

SEQ ID NO: 502643 - RNA, 19 nt, Homo sapiens
  misc_RNA (1)...(19): siRNA sense strand
gauggcugccuuaaacaug

SEQ ID NO: 502644 - RNA, 19 nt, Homo sapiens
  misc_RNA (1)...(19): siRNA sense strand
ccuccaaggccaucauuga

SEQ ID NO: 502645 - RNA, 19 nt, Homo sapiens
  misc_RNA (1)...(19): siRNA sense strand
uggcuacccuuaucgauac

SEQ ID NO: 502646 - RNA, 19 nt, Homo sapiens
  misc_RNA (1)...(19): siRNA sense strand
gaaccaugggcucguguca

SEQ ID NO: 502647 - RNA, 19 nt, Homo sapiens
  misc_RNA (1)...(19): siRNA sense strand
agggauggcugccuuaaac

SEQ ID NO: 502648 - RNA, 19 nt, Homo sapiens
  misc_RNA (1)...(19): siRNA sense strand
ggcccucagucccagguuu

SEQ ID NO: 502649 - RNA, 19 nt, Homo sapiens
  misc_RNA (1)...(19): siRNA sense strand
ugaggaggccuucuauuac

SEQ ID NO: 502650 - RNA, 19 nt, Homo sapiens
  misc_RNA (1)...(19): siRNA sense strand
ugcggucucugcaaugaaa

SEQ ID NO: 502651 - RNA, 19 nt, Homo sapiens
  misc_RNA (1)...(19): siRNA sense strand
gauauaguagaucguggaa

SEQ ID NO: 502652 - RNA, 19 nt, Homo sapiens
  misc_RNA (1)...(19): siRNA sense strand
gguggucucagcuuaucua

SEQ ID NO: 502653 - RNA, 19 nt, Homo sapiens
  misc_RNA (1)...(19): siRNA sense strand
gguauggugacuccuguga

SEQ ID NO: 502654 - RNA, 19 nt, Homo sapiens
  misc_RNA (1)...(19): siRNA sense strand
cuaaagaggauggacauag

SEQ ID NO: 502655 - RNA, 19 nt, Homo sapiens
  misc_RNA (1)...(19): siRNA sense strand
aaugauacaggagcaauuu

SEQ ID NO: 502656 - RNA, 19 nt, Homo sapiens
  misc_RNA (1)...(19): siRNA sense strand
cgaauguaccaaaugucua

SEQ ID NO: 502657 - RNA, 19 nt, Homo sapiens
  misc_RNA (1)...(19): siRNA sense strand
caaugauacaggagcaauu

SEQ ID NO: 502658 - RNA, 19 nt, Homo sapiens
  misc_RNA (1)...(19): siRNA sense strand
caggagaugaggaacaaga

SEQ ID NO: 502659 - RNA, 19 nt, Homo sapiens
  misc_RNA (1)...(19): siRNA sense strand
ccaccucugcugucccuaa

SEQ ID NO: 502660 - RNA, 19 nt, Homo sapiens
  misc_RNA (1)...(19): siRNA sense strand
ccucccaaguggcagauug

SEQ ID NO: 502661 - RNA, 19 nt, Homo sapiens
  misc_RNA (1)...(19): siRNA sense strand
ggccuucuauuacauccau

SEQ ID NO: 502662 - RNA, 19 nt, Homo sapiens
  misc_RNA (1)...(19): siRNA sense strand
ggaggcgcuuucccuugga

SEQ ID NO: 502663 - RNA, 19 nt, Homo sapiens
  misc_RNA (1)...(19): siRNA sense strand
ccuuacacucugcaauuua

SEQ ID NO: 502664 - RNA, 19 nt, Homo sapiens
  misc_RNA (1)...(19): siRNA sense strand
cauccaguuugguuaagau

SEQ ID NO: 502665 - RNA, 19 nt, Homo sapiens
  misc_RNA (1)...(19): siRNA sense strand
gccuuaaacaugagucuug

SEQ ID NO: 502666 - RNA, 19 nt, Homo sapiens
  misc_RNA (1)...(19): siRNA sense strand
aaagaggauggacauagaa

SEQ ID NO: 502667 - RNA, 19 nt, Homo sapiens
  misc_RNA (1)...(19): siRNA sense strand
gcugaauccugagaaguac

SEQ ID NO: 502668 - RNA, 19 nt, Homo sapiens
  misc_RNA (1)...(19): siRNA sense strand
gauacaggagcaauuuaag

SEQ ID NO: 502669 - RNA, 19 nt, Homo sapiens
  misc_RNA (1)...(19): siRNA sense strand
ugacuccugugaacgaucu

SEQ ID NO: 502670 - RNA, 19 nt, Homo sapiens
  misc_RNA (1)...(19): siRNA sense strand
ggagaugaggaacaagauc

SEQ ID NO: 502671 - RNA, 19 nt, Homo sapiens
  misc_RNA (1)...(19): siRNA sense strand
aaagagguccaggagauga

SEQ ID NO: 502672 - RNA, 19 nt, Homo sapiens
  misc_RNA (1)...(19): siRNA sense strand
gauguggagguuccugcua

SEQ ID NO: 502673 - RNA, 19 nt, Homo sapiens
  misc_RNA (1)...(19): siRNA sense strand
gaacuggcuacccuuaucg

SEQ ID NO: 502674 - RNA, 19 nt, Homo sapiens
  misc_RNA (1)...(19): siRNA sense strand
agaacaacccagaguacuu

SEQ ID NO: 502675 - RNA, 19 nt, Homo sapiens
  misc_RNA (1)...(19): siRNA sense strand
uuuggguggucucagcuua

SEQ ID NO: 502676 - RNA, 19 nt, Homo sapiens
  misc_RNA (1)...(19): siRNA sense strand
gaagacgcuuuacauaauu

SEQ ID NO: 502677 - RNA, 19 nt, Homo sapiens
  misc_RNA (1)...(19): siRNA sense strand
gaaaggaggagaucaagaa

SEQ ID NO: 502678 - RNA, 19 nt, Homo sapiens
  misc_RNA (1)...(19): siRNA sense strand
ugaagacgcuuuacauaau

SEQ ID NO: 502679 - RNA, 19 nt, Homo sapiens
  misc_RNA (1)...(19): siRNA sense strand
ggaggaauguguacaguuc

SEQ ID NO: 502680 - RNA, 19 nt, Homo sapiens
  misc_RNA (1)...(19): siRNA sense strand
guacaguucuucacgcuau

SEQ ID NO: 502681 - RNA, 19 nt, Homo sapiens
  misc_RNA (1)...(19): siRNA sense strand
caagaggauuugcuuaugu

SEQ ID NO: 502682 - RNA, 19 nt, Homo sapiens
  misc_RNA (1)...(19): siRNA sense strand
cgaaagacaccaaaucaga

SEQ ID NO: 502683 - RNA, 19 nt, Homo sapiens
  misc_RNA (1)...(19): siRNA sense strand
gcugaagacgcuuuacaua

SEQ ID NO: 502684 - RNA, 19 nt, Homo sapiens
  misc_RNA (1)...(19): siRNA sense strand
gaucguauaguccuagaaa

SEQ ID NO: 502685 - RNA, 19 nt, Homo sapiens
  misc_RNA (1)...(19): siRNA sense strand
gaaagacaccaaaucagau

SEQ ID NO: 502686 - RNA, 19 nt, Homo sapiens
  misc_RNA (1)...(19): siRNA sense strand
gacagaaaguggauuugug

SEQ ID NO: 502687 - RNA, 19 nt, Homo sapiens
  misc_RNA (1)...(19): siRNA sense strand
ccaagaggauuugcuuaug

SEQ ID NO: 502688 - RNA, 19 nt, Homo sapiens
  misc_RNA (1)...(19): siRNA sense strand
gcagauugaaauacaguuu

SEQ ID NO: 502689 - RNA, 19 nt, Homo sapiens
  misc_RNA (1)...(19): siRNA sense strand
ggacagaaaguggauuugu

SEQ ID NO: 502690 - RNA, 19 nt, Homo sapiens
  misc_RNA (1)...(19): siRNA sense strand
cugaagacgcuuuacauaa

SEQ ID NO: 502691 - RNA, 19 nt, Homo sapiens
  misc_RNA (1)...(19): siRNA sense strand
gacggcagauugaaauaca

SEQ ID NO: 502692 - RNA, 19 nt, Homo sapiens
  misc_RNA (1)...(19): siRNA sense strand
gaucgaaagacaccaaauc

SEQ ID NO: 502693 - RNA, 19 nt, Homo sapiens
  misc_RNA (1)...(19): siRNA sense strand
uaugacagauacagacguu

SEQ ID NO: 502694 - RNA, 19 nt, Homo sapiens
  misc_RNA (1)...(19): siRNA sense strand
ucuagaagccgaaguuaug

SEQ ID NO: 502695 - RNA, 19 nt, Homo sapiens
  misc_RNA (1)...(19): siRNA sense strand
aagaggauuugcuuauguu

SEQ ID NO: 502696 - RNA, 19 nt, Homo sapiens
  misc_RNA (1)...(19): siRNA sense strand
gaagucggucuuuugauua

SEQ ID NO: 502697 - RNA, 19 nt, Homo sapiens
  misc_RNA (1)...(19): siRNA sense strand
guuaugguccuauaguuga

SEQ ID NO: 502698 - RNA, 19 nt, Homo sapiens
  misc_RNA (1)...(19): siRNA sense strand
ggcgugaauuuggucguua

SEQ ID NO: 502699 - RNA, 19 nt, Homo sapiens
  misc_RNA (1)...(19): siRNA sense strand
gacaccaaaucagaugaaa

SEQ ID NO: 502700 - RNA, 19 nt, Homo sapiens
  misc_RNA (1)...(19): siRNA sense strand
guucuucacgcuaugauga

SEQ ID NO: 502701 - RNA, 19 nt, Homo sapiens
  misc_RNA (1)...(19): siRNA sense strand
aggaggagaucaagaaguc

SEQ ID NO: 502702 - RNA, 19 nt, Homo sapiens
  misc_RNA (1)...(19): siRNA sense strand
agauacagacguucuagaa

SEQ ID NO: 502703 - RNA, 19 nt, Homo sapiens
  misc_RNA (1)...(19): siRNA sense strand
aggauuugcuuauguucaa

SEQ ID NO: 502704 - RNA, 19 nt, Homo sapiens
  misc_RNA (1)...(19): siRNA sense strand
ggaagaccacggcguagca

SEQ ID NO: 502705 - RNA, 19 nt, Homo sapiens
  misc_RNA (1)...(19): siRNA sense strand
guauaguccuagaaacagu

SEQ ID NO: 502706 - RNA, 19 nt, Homo sapiens
  misc_RNA (1)...(19): siRNA sense strand
ugaauuuggucguuauggu

SEQ ID NO: 502707 - RNA, 19 nt, Homo sapiens
  misc_RNA (1)...(19): siRNA sense strand
agacuugcggcgugaauuu

SEQ ID NO: 502708 - RNA, 19 nt, Homo sapiens
  misc_RNA (1)...(19): siRNA sense strand
gcgugaauuuggucguuau

SEQ ID NO: 502709 - RNA, 19 nt, Homo sapiens
  misc_RNA (1)...(19): siRNA sense strand
ggauguucgugaugcugaa

SEQ ID NO: 502710 - RNA, 19 nt, Homo sapiens
  misc_RNA (1)...(19): siRNA sense strand
cuaugaugauuaugacaga

SEQ ID NO: 502711 - RNA, 19 nt, Homo sapiens
  misc_RNA (1)...(19): siRNA sense strand
cggcguagcagaagccauu

SEQ ID NO: 502712 - RNA, 19 nt, Homo sapiens
  misc_RNA (1)...(19): siRNA sense strand
agaagucggucuuuugauu

SEQ ID NO: 502713 - RNA, 19 nt, Homo sapiens
  misc_RNA (1)...(19): siRNA sense strand
uccuauaguugauguguau

SEQ ID NO: 502714 - RNA, 19 nt, Homo sapiens
  misc_RNA (1)...(19): siRNA sense strand
gaagacuugcggcgugaau

SEQ ID NO: 502715 - RNA, 19 nt, Homo sapiens
  misc_RNA (1)...(19): siRNA sense strand
agaagaucguauaguccua

SEQ ID NO: 502716 - RNA, 19 nt, Homo sapiens
  misc_RNA (1)...(19): siRNA sense strand
ugauguguauguuccacuu

SEQ ID NO: 502717 - RNA, 19 nt, Homo sapiens
  misc_RNA (1)...(19): siRNA sense strand
gaauguguacaguucuuca

SEQ ID NO: 502718 - RNA, 19 nt, Homo sapiens
  misc_RNA (1)...(19): siRNA sense strand
aaagacaccaaaucagaug

SEQ ID NO: 502719 - RNA, 19 nt, Homo sapiens
  misc_RNA (1)...(19): siRNA sense strand
guccuauaguugaugugua

SEQ ID NO: 502720 - RNA, 19 nt, Homo sapiens
  misc_RNA (1)...(19): siRNA sense strand
uaugaaaggaggagaucaa

SEQ ID NO: 502721 - RNA, 19 nt, Homo sapiens
  misc_RNA (1)...(19): siRNA sense strand
gaggauuugcuuauguuca

SEQ ID NO: 502722 - RNA, 19 nt, Homo sapiens
  misc_RNA (1)...(19): siRNA sense strand
guucuagaagccgaaguua

SEQ ID NO: 502723 - RNA, 19 nt, Homo sapiens
  misc_RNA (1)...(19): siRNA sense strand
gauacagacguucuagaag

SEQ ID NO: 502724 - RNA, 19 nt, Homo sapiens
  misc_RNA (1)...(19): siRNA sense strand
gacagauacagacguucua

SEQ ID NO: 502725 - RNA, 19 nt, Homo sapiens
  misc_RNA (1)...(19): siRNA sense strand
cagauugaaauacaguuug

SEQ ID NO: 502726 - RNA, 19 nt, Homo sapiens
  misc_RNA (1)...(19): siRNA sense strand
agaagccgaaguuaugaaa

SEQ ID NO: 502727 - RNA, 19 nt, Homo sapiens
  misc_RNA (1)...(19): siRNA sense strand
gggaggaauguguacaguu

SEQ ID NO: 502728 - RNA, 19 nt, Homo sapiens
  misc_RNA (1)...(19): siRNA sense strand
aagccgaaguuaugaaagg

SEQ ID NO: 502729 - RNA, 19 nt, Homo sapiens
  misc_RNA (1)...(19): siRNA sense strand
ggauuugcuuauguucaau

SEQ ID NO: 502730 - RNA, 19 nt, Homo sapiens
  misc_RNA (1)...(19): siRNA sense strand
ccaaggaagggaggaaugu

SEQ ID NO: 502731 - RNA, 19 nt, Homo sapiens
  misc_RNA (1)...(19): siRNA sense strand
ucagaugaaagccaaggaa

SEQ ID NO: 502732 - RNA, 19 nt, Homo sapiens
  misc_RNA (1)...(19): siRNA sense strand
ggacggcagauugaaauac

SEQ ID NO: 502733 - RNA, 19 nt, Homo sapiens
  misc_RNA (1)...(19): siRNA sense strand
guccaagaggauuugcuua

SEQ ID NO: 502734 - RNA, 19 nt, Homo sapiens
  misc_RNA (1)...(19): siRNA sense strand
ugaaaggaggagaucaaga

SEQ ID NO: 502735 - RNA, 19 nt, Homo sapiens
  misc_RNA (1)...(19): siRNA sense strand
uguauguuccacuugauuu

SEQ ID NO: 502736 - RNA, 19 nt, Homo sapiens
  misc_RNA (1)...(19): siRNA sense strand
gaagggaggaauguguaca

SEQ ID NO: 502737 - RNA, 19 nt, Homo sapiens
  misc_RNA (1)...(19): siRNA sense strand
caccaaaucagaugaaagc

SEQ ID NO: 502738 - RNA, 19 nt, Homo sapiens
  misc_RNA (1)...(19): siRNA sense strand
ucguuaugguccuauaguu

SEQ ID NO: 502739 - RNA, 19 nt, Homo sapiens
  misc_RNA (1)...(19): siRNA sense strand
uauaguccuagaaacagua

SEQ ID NO: 502740 - RNA, 19 nt, Homo sapiens
  misc_RNA (1)...(19): siRNA sense strand
cuagaagccgaaguuauga

SEQ ID NO: 502741 - RNA, 19 nt, Homo sapiens
  misc_RNA (1)...(19): siRNA sense strand
ugacagauacagacguucu

SEQ ID NO: 502742 - RNA, 19 nt, Homo sapiens
  misc_RNA (1)...(19): siRNA sense strand
uccaagaggauuugcuuau

SEQ ID NO: 502743 - RNA, 19 nt, Homo sapiens
  misc_RNA (1)...(19): siRNA sense strand
cggcgugaauuuggucguu

SEQ ID NO: 502744 - RNA, 19 nt, Homo sapiens
  misc_RNA (1)...(19): siRNA sense strand
aggaauguguacaguucuu

SEQ ID NO: 502745 - RNA, 19 nt, Homo sapiens
  misc_RNA (1)...(19): siRNA sense strand
ggaagggaggaauguguac

SEQ ID NO: 502746 - RNA, 19 nt, Homo sapiens
  misc_RNA (1)...(19): siRNA sense strand
guggacggcagauugaaau

SEQ ID NO: 502747 - RNA, 19 nt, Homo sapiens
  misc_RNA (1)...(19): siRNA sense strand
caacuauagaagaucguau

SEQ ID NO: 502748 - RNA, 19 nt, Homo sapiens
  misc_RNA (1)...(19): siRNA sense strand
cacgcuaugaugauuauga

SEQ ID NO: 502749 - RNA, 19 nt, Homo sapiens
  misc_RNA (1)...(19): siRNA sense strand
ggaauguguacaguucuuc

SEQ ID NO: 502750 - RNA, 19 nt, Homo sapiens
  misc_RNA (1)...(19): siRNA sense strand
gaagacgcuuuacauaauu

SEQ ID NO: 502751 - RNA, 19 nt, Homo sapiens
  misc_RNA (1)...(19): siRNA sense strand
gaaaggaggagaucaagaa

SEQ ID NO: 502752 - RNA, 19 nt, Homo sapiens
  misc_RNA (1)...(19): siRNA sense strand
ugaagacgcuuuacauaau

SEQ ID NO: 502753 - RNA, 19 nt, Homo sapiens
  misc_RNA (1)...(19): siRNA sense strand
ggaggaauguguacaguuc

SEQ ID NO: 502754 - RNA, 19 nt, Homo sapiens
  misc_RNA (1)...(19): siRNA sense strand
guacaguucuucacgcuau

SEQ ID NO: 502755 - RNA, 19 nt, Homo sapiens
  misc_RNA (1)...(19): siRNA sense strand
caagaggauuugcuuaugu

SEQ ID NO: 502756 - RNA, 19 nt, Homo sapiens
  misc_RNA (1)...(19): siRNA sense strand
cgaaagacaccaaaucaga

SEQ ID NO: 502757 - RNA, 19 nt, Homo sapiens
  misc_RNA (1)...(19): siRNA sense strand
gcugaagacgcuuuacaua

SEQ ID NO: 502758 - RNA, 19 nt, Homo sapiens
  misc_RNA (1)...(19): siRNA sense strand
gaucguauaguccuagaaa

SEQ ID NO: 502759 - RNA, 19 nt, Homo sapiens
  misc_RNA (1)...(19): siRNA sense strand
gaaagacaccaaaucagau

SEQ ID NO: 502760 - RNA, 19 nt, Homo sapiens
  misc_RNA (1)...(19): siRNA sense strand
gacagaaaguggauuugug

SEQ ID NO: 502761 - RNA, 19 nt, Homo sapiens
  misc_RNA (1)...(19): siRNA sense strand
ccaagaggauuugcuuaug

SEQ ID NO: 502762 - RNA, 19 nt, Homo sapiens
  misc_RNA (1)...(19): siRNA sense strand
gcagauugaaauacaguuu

SEQ ID NO: 502763 - RNA, 19 nt, Homo sapiens
  misc_RNA (1)...(19): siRNA sense strand
cagaagccauuccgacaau

SEQ ID NO: 502764 - RNA, 19 nt, Homo sapiens
  misc_RNA (1)...(19): siRNA sense strand
ggacagaaaguggauuugu

SEQ ID NO: 502765 - RNA, 19 nt, Homo sapiens
  misc_RNA (1)...(19): siRNA sense strand
cugaagacgcuuuacauaa

SEQ ID NO: 502766 - RNA, 19 nt, Homo sapiens
  misc_RNA (1)...(19): siRNA sense strand
gacggcagauugaaauaca

SEQ ID NO: 502767 - RNA, 19 nt, Homo sapiens
  misc_RNA (1)...(19): siRNA sense strand
gaucgaaagacaccaaauc

SEQ ID NO: 502768 - RNA, 19 nt, Homo sapiens
  misc_RNA (1)...(19): siRNA sense strand
gcagaagccauuccgacaa

SEQ ID NO: 502769 - RNA, 19 nt, Homo sapiens
  misc_RNA (1)...(19): siRNA sense strand
uaugacagauacagacguu

SEQ ID NO: 502770 - RNA, 19 nt, Homo sapiens
  misc_RNA (1)...(19): siRNA sense strand
ucuagaagccgaaguuaug

SEQ ID NO: 502771 - RNA, 19 nt, Homo sapiens
  misc_RNA (1)...(19): siRNA sense strand
aagaggauuugcuuauguu

SEQ ID NO: 502772 - RNA, 19 nt, Homo sapiens
  misc_RNA (1)...(19): siRNA sense strand
gaagucggucuuuugauua

SEQ ID NO: 502773 - RNA, 19 nt, Homo sapiens
  misc_RNA (1)...(19): siRNA sense strand
guuaugguccuauaguuga

SEQ ID NO: 502774 - RNA, 19 nt, Homo sapiens
  misc_RNA (1)...(19): siRNA sense strand
gacaccaaaucagaugaaa

SEQ ID NO: 502775 - RNA, 19 nt, Homo sapiens
  misc_RNA (1)...(19): siRNA sense strand
ggcgugaauuuggucguua

SEQ ID NO: 502776 - RNA, 19 nt, Homo sapiens
  misc_RNA (1)...(19): siRNA sense strand
guucuucacgcuaugauga

SEQ ID NO: 502777 - RNA, 19 nt, Homo sapiens
  misc_RNA (1)...(19): siRNA sense strand
aggaggagaucaagaaguc

SEQ ID NO: 502778 - RNA, 19 nt, Homo sapiens
  misc_RNA (1)...(19): siRNA sense strand
agauacagacguucuagaa

SEQ ID NO: 502779 - RNA, 19 nt, Homo sapiens
  misc_RNA (1)...(19): siRNA sense strand
aggauuugcuuauguucaa

SEQ ID NO: 502780 - RNA, 19 nt, Homo sapiens
  misc_RNA (1)...(19): siRNA sense strand
ugaauuuggucguuauggu

SEQ ID NO: 502781 - RNA, 19 nt, Homo sapiens
  misc_RNA (1)...(19): siRNA sense strand
ggaagaccacggcguagca

SEQ ID NO: 502782 - RNA, 19 nt, Homo sapiens
  misc_RNA (1)...(19): siRNA sense strand
guauaguccuagaaacagu

SEQ ID NO: 502783 - RNA, 19 nt, Homo sapiens
  misc_RNA (1)...(19): siRNA sense strand
agacuugcggcgugaauuu

SEQ ID NO: 502784 - RNA, 19 nt, Homo sapiens
  misc_RNA (1)...(19): siRNA sense strand
gcgugaauuuggucguuau

SEQ ID NO: 502785 - RNA, 19 nt, Homo sapiens
  misc_RNA (1)...(19): siRNA sense strand
ggauguucgugaugcugaa

SEQ ID NO: 502786 - RNA, 19 nt, Homo sapiens
  misc_RNA (1)...(19): siRNA sense strand
cuaugaugauuaugacaga

SEQ ID NO: 502787 - RNA, 19 nt, Homo sapiens
  misc_RNA (1)...(19): siRNA sense strand
cggcguagcagaagccauu

SEQ ID NO: 502788 - RNA, 19 nt, Homo sapiens
  misc_RNA (1)...(19): siRNA sense strand
agaagucggucuuuugauu

SEQ ID NO: 502789 - RNA, 19 nt, Homo sapiens
  misc_RNA (1)...(19): siRNA sense strand
uccuauaguugauguguau

SEQ ID NO: 502790 - RNA, 19 nt, Homo sapiens
  misc_RNA (1)...(19): siRNA sense strand
gaagacuugcggcgugaau

SEQ ID NO: 502791 - RNA, 19 nt, Homo sapiens
  misc_RNA (1)...(19): siRNA sense strand
agaagaucguauaguccua

SEQ ID NO: 502792 - RNA, 19 nt, Homo sapiens
  misc_RNA (1)...(19): siRNA sense strand
aaagacaccaaaucagaug

SEQ ID NO: 502793 - RNA, 19 nt, Homo sapiens
  misc_RNA (1)...(19): siRNA sense strand
guccuauaguugaugugua

SEQ ID NO: 502794 - RNA, 19 nt, Homo sapiens
  misc_RNA (1)...(19): siRNA sense strand
ugauguguauguuccacuu

SEQ ID NO: 502795 - RNA, 19 nt, Homo sapiens
  misc_RNA (1)...(19): siRNA sense strand
gaauguguacaguucuuca

SEQ ID NO: 502796 - RNA, 19 nt, Homo sapiens
  misc_RNA (1)...(19): siRNA sense strand
uaugaaaggaggagaucaa

SEQ ID NO: 502797 - RNA, 19 nt, Homo sapiens
  misc_RNA (1)...(19): siRNA sense strand
gaggauuugcuuauguuca

SEQ ID NO: 502798 - RNA, 19 nt, Homo sapiens
  misc_RNA (1)...(19): siRNA sense strand
guucuagaagccgaaguua

SEQ ID NO: 502799 - RNA, 19 nt, Homo sapiens
  misc_RNA (1)...(19): siRNA sense strand
gauacagacguucuagaag

SEQ ID NO: 502800 - RNA, 19 nt, Homo sapiens
  misc_RNA (1)...(19): siRNA sense strand
gacagauacagacguucua

SEQ ID NO: 502801 - RNA, 19 nt, Homo sapiens
  misc_RNA (1)...(19): siRNA sense strand
cagauugaaauacaguuug

SEQ ID NO: 502802 - RNA, 19 nt, Homo sapiens
  misc_RNA (1)...(19): siRNA sense strand
agaagccgaaguuaugaaa

SEQ ID NO: 502803 - RNA, 19 nt, Homo sapiens
  misc_RNA (1)...(19): siRNA sense strand
gggaggaauguguacaguu

SEQ ID NO: 502804 - RNA, 19 nt, Homo sapiens
  misc_RNA (1)...(19): siRNA sense strand
aagccgaaguuaugaaagg

SEQ ID NO: 502805 - RNA, 19 nt, Homo sapiens
  misc_RNA (1)...(19): siRNA sense strand
ggauuugcuuauguucaau

SEQ ID NO: 502806 - RNA, 19 nt, Homo sapiens
  misc_RNA (1)...(19): siRNA sense strand
ccaaggaagggaggaaugu

SEQ ID NO: 502807 - RNA, 19 nt, Homo sapiens
  misc_RNA (1)...(19): siRNA sense strand
ucagaugaaagccaaggaa

SEQ ID NO: 502808 - RNA, 19 nt, Homo sapiens
  misc_RNA (1)...(19): siRNA sense strand
ggacggcagauugaaauac

SEQ ID NO: 502809 - RNA, 19 nt, Homo sapiens
  misc_RNA (1)...(19): siRNA sense strand
guccaagaggauuugcuua

SEQ ID NO: 502810 - RNA, 19 nt, Homo sapiens
  misc_RNA (1)...(19): siRNA sense strand
ugaaaggaggagaucaaga

SEQ ID NO: 502811 - RNA, 19 nt, Homo sapiens
  misc_RNA (1)...(19): siRNA sense strand
caccaaaucagaugaaagc

SEQ ID NO: 502812 - RNA, 19 nt, Homo sapiens
  misc_RNA (1)...(19): siRNA sense strand
uguauguuccacuugauuu

SEQ ID NO: 502813 - RNA, 19 nt, Homo sapiens
  misc_RNA (1)...(19): siRNA sense strand
gaagggaggaauguguaca

SEQ ID NO: 502814 - RNA, 19 nt, Homo sapiens
  misc_RNA (1)...(19): siRNA sense strand
ucguuaugguccuauaguu

SEQ ID NO: 502815 - RNA, 19 nt, Homo sapiens
  misc_RNA (1)...(19): siRNA sense strand
uauaguccuagaaacagua

SEQ ID NO: 502816 - RNA, 19 nt, Homo sapiens
  misc_RNA (1)...(19): siRNA sense strand
uccaagaggauuugcuuau

SEQ ID NO: 502817 - RNA, 19 nt, Homo sapiens
  misc_RNA (1)...(19): siRNA sense strand
cuagaagccgaaguuauga

SEQ ID NO: 502818 - RNA, 19 nt, Homo sapiens
  misc_RNA (1)...(19): siRNA sense strand
ugacagauacagacguucu

SEQ ID NO: 502819 - RNA, 19 nt, Homo sapiens
  misc_RNA (1)...(19): siRNA sense strand
cggcgugaauuuggucguu

SEQ ID NO: 502820 - RNA, 19 nt, Homo sapiens
  misc_RNA (1)...(19): siRNA sense strand
aggaauguguacaguucuu

SEQ ID NO: 502821 - RNA, 19 nt, Homo sapiens
  misc_RNA (1)...(19): siRNA sense strand
ggaagggaggaauguguac

SEQ ID NO: 502822 - RNA, 19 nt, Homo sapiens
  misc_RNA (1)...(19): siRNA sense strand
guggacggcagauugaaau

SEQ ID NO: 502823 - RNA, 19 nt, Homo sapiens
  misc_RNA (1)...(19): siRNA sense strand
caacuauagaagaucguau

SEQ ID NO: 502824 - RNA, 19 nt, Homo sapiens
  misc_RNA (1)...(19): siRNA sense strand
cacgcuaugaugauuauga

SEQ ID NO: 502825 - RNA, 19 nt, Homo sapiens
  misc_RNA (1)...(19): siRNA sense strand
ggaauguguacaguucuuc

SEQ ID NO: 502826 - RNA, 19 nt, Homo sapiens
  misc_RNA (1)...(19): siRNA sense strand
ggaaauggcugugauguca

SEQ ID NO: 502827 - RNA, 19 nt, Homo sapiens
  misc_RNA (1)...(19): siRNA sense strand
caagagugaucccugaaua

SEQ ID NO: 502828 - RNA, 19 nt, Homo sapiens
  misc_RNA (1)...(19): siRNA sense strand
aaacagagaguguaagaua

SEQ ID NO: 502829 - RNA, 19 nt, Homo sapiens
  misc_RNA (1)...(19): siRNA sense strand
gaucagaaccuucacagaa

SEQ ID NO: 502830 - RNA, 19 nt, Homo sapiens
  misc_RNA (1)...(19): siRNA sense strand
gacggaggauuacagaaua

SEQ ID NO: 502831 - RNA, 19 nt, Homo sapiens
  misc_RNA (1)...(19): siRNA sense strand
ugaaauaucugagcacugu

SEQ ID NO: 502832 - RNA, 19 nt, Homo sapiens
  misc_RNA (1)...(19): siRNA sense strand
ucacagagaccaucauuga

SEQ ID NO: 502833 - RNA, 19 nt, Homo sapiens
  misc_RNA (1)...(19): siRNA sense strand
gcacagaucagaaccuuca

SEQ ID NO: 502834 - RNA, 19 nt, Homo sapiens
  misc_RNA (1)...(19): siRNA sense strand
ccgaagagaugcagagaga

SEQ ID NO: 502835 - RNA, 19 nt, Homo sapiens
  misc_RNA (1)...(19): siRNA sense strand
aauaugagcuacaagaaga

SEQ ID NO: 502836 - RNA, 19 nt, Homo sapiens
  misc_RNA (1)...(19): siRNA sense strand
ggagaaacuguauauggua

SEQ ID NO: 502837 - RNA, 19 nt, Homo sapiens
  misc_RNA (1)...(19): siRNA sense strand
gcaggaaaggcuauuguuu

SEQ ID NO: 502838 - RNA, 19 nt, Homo sapiens
  misc_RNA (1)...(19): siRNA sense strand
gaaaguguacauaugaaga

SEQ ID NO: 502839 - RNA, 19 nt, Homo sapiens
  misc_RNA (1)...(19): siRNA sense strand
gagaagucauuuccaguca

SEQ ID NO: 502840 - RNA, 19 nt, Homo sapiens
  misc_RNA (1)...(19): siRNA sense strand
caacaggcccgaagagaug

SEQ ID NO: 502841 - RNA, 19 nt, Homo sapiens
  misc_RNA (1)...(19): siRNA sense strand
ggauaaguaugaaauucug

SEQ ID NO: 502842 - RNA, 19 nt, Homo sapiens
  misc_RNA (1)...(19): siRNA sense strand
gaacugaaugaugugguua

SEQ ID NO: 502843 - RNA, 19 nt, Homo sapiens
  misc_RNA (1)...(19): siRNA sense strand
caugacagucgacgaaaua

SEQ ID NO: 502844 - RNA, 19 nt, Homo sapiens
  misc_RNA (1)...(19): siRNA sense strand
gaagagaugcagagagaca

SEQ ID NO: 502845 - RNA, 19 nt, Homo sapiens
  misc_RNA (1)...(19): siRNA sense strand
gaaaccaucauguccucua

SEQ ID NO: 502846 - RNA, 19 nt, Homo sapiens
  misc_RNA (1)...(19): siRNA sense strand
cuacagacccauccaaaug

SEQ ID NO: 502847 - RNA, 19 nt, Homo sapiens
  misc_RNA (1)...(19): siRNA sense strand
gaucacagagaccaucauu

SEQ ID NO: 502848 - RNA, 19 nt, Homo sapiens
  misc_RNA (1)...(19): siRNA sense strand
acagagaccaucauugaaa

SEQ ID NO: 502849 - RNA, 19 nt, Homo sapiens
  misc_RNA (1)...(19): siRNA sense strand
caaaggaaaggaaguagau

SEQ ID NO: 502850 - RNA, 19 nt, Homo sapiens
  misc_RNA (1)...(19): siRNA sense strand
cagcaaggcuuuaaaacuu

SEQ ID NO: 502851 - RNA, 19 nt, Homo sapiens
  misc_RNA (1)...(19): siRNA sense strand
guguacauaugaagauuga

SEQ ID NO: 502852 - RNA, 19 nt, Homo sapiens
  misc_RNA (1)...(19): siRNA sense strand
gaagucauuuccagucaac

SEQ ID NO: 502853 - RNA, 19 nt, Homo sapiens
  misc_RNA (1)...(19): siRNA sense strand
ggauaccgggagaauguua

SEQ ID NO: 502854 - RNA, 19 nt, Homo sapiens
  misc_RNA (1)...(19): siRNA sense strand
cuucuucccuguucaaguu

SEQ ID NO: 502855 - RNA, 19 nt, Homo sapiens
  misc_RNA (1)...(19): siRNA sense strand
gaauaugagcuacaagaag

SEQ ID NO: 502856 - RNA, 19 nt, Homo sapiens
  misc_RNA (1)...(19): siRNA sense strand
ucaagaacgugaagcuaag

SEQ ID NO: 502857 - RNA, 19 nt, Homo sapiens
  misc_RNA (1)...(19): siRNA sense strand
gaaacuguauaugguacug

SEQ ID NO: 502858 - RNA, 19 nt, Homo sapiens
  misc_RNA (1)...(19): siRNA sense strand
acauacagguuaccaaagu

SEQ ID NO: 502859 - RNA, 19 nt, Homo sapiens
  misc_RNA (1)...(19): siRNA sense strand
cagcugccaugaucacaga

SEQ ID NO: 502860 - RNA, 19 nt, Homo sapiens
  misc_RNA (1)...(19): siRNA sense strand
cauugaaacugauaaacca

SEQ ID NO: 502861 - RNA, 19 nt, Homo sapiens
  misc_RNA (1)...(19): siRNA sense strand
guggauaaguaugaaauuc

SEQ ID NO: 502862 - RNA, 19 nt, Homo sapiens
  misc_RNA (1)...(19): siRNA sense strand
gaaggugaaaccaucaugu

SEQ ID NO: 502863 - RNA, 19 nt, Homo sapiens
  misc_RNA (1)...(19): siRNA sense strand
ugaaacagagaguguaaga

SEQ ID NO: 502864 - RNA, 19 nt, Homo sapiens
  misc_RNA (1)...(19): siRNA sense strand
gugcuaaaguggagacuac

SEQ ID NO: 502865 - RNA, 19 nt, Homo sapiens
  misc_RNA (1)...(19): siRNA sense strand
cuaauuggccugaagaauc

SEQ ID NO: 502866 - RNA, 19 nt, Homo sapiens
  misc_RNA (1)...(19): siRNA sense strand
uggacgagacggaggauua

SEQ ID NO: 502867 - RNA, 19 nt, Homo sapiens
  misc_RNA (1)...(19): siRNA sense strand
gggcaagcguacuucugaa

SEQ ID NO: 502868 - RNA, 19 nt, Homo sapiens
  misc_RNA (1)...(19): siRNA sense strand
caucauguccucuaguaug

SEQ ID NO: 502869 - RNA, 19 nt, Homo sapiens
  misc_RNA (1)...(19): siRNA sense strand
ucagaaccuucacagaaau

SEQ ID NO: 502870 - RNA, 19 nt, Homo sapiens
  misc_RNA (1)...(19): siRNA sense strand
uauuguuucucgacaguuu

SEQ ID NO: 502871 - RNA, 19 nt, Homo sapiens
  misc_RNA (1)...(19): siRNA sense strand
uggagaaacuguauauggu

SEQ ID NO: 502872 - RNA, 19 nt, Homo sapiens
  misc_RNA (1)...(19): siRNA sense strand
gauuacagaauauggaguu

SEQ ID NO: 502873 - RNA, 19 nt, Homo sapiens
  misc_RNA (1)...(19): siRNA sense strand
ugagaugcgucguaaagca

SEQ ID NO: 502874 - RNA, 19 nt, Homo sapiens
  misc_RNA (1)...(19): siRNA sense strand
gaagauuuggagacccuaa

SEQ ID NO: 502875 - RNA, 19 nt, Homo sapiens
  misc_RNA (1)...(19): siRNA sense strand
cagagagacucaagaacgu

SEQ ID NO: 502876 - RNA, 19 nt, Homo sapiens
  misc_RNA (1)...(19): siRNA sense strand
gcagcccaaugacuucuuc

SEQ ID NO: 502877 - RNA, 19 nt, Homo sapiens
  misc_RNA (1)...(19): siRNA sense strand
gagugaucccugaauauug

SEQ ID NO: 502878 - RNA, 19 nt, Homo sapiens
  misc_RNA (1)...(19): siRNA sense strand
ugacccagguagauggaaa

SEQ ID NO: 502879 - RNA, 19 nt, Homo sapiens
  misc_RNA (1)...(19): siRNA sense strand
agaacugaaugaugugguu

SEQ ID NO: 502880 - RNA, 19 nt, Homo sapiens
  misc_RNA (1)...(19): siRNA sense strand
uagaauaugagcuacaaga

SEQ ID NO: 502881 - RNA, 19 nt, Homo sapiens
  misc_RNA (1)...(19): siRNA sense strand
guacauaugaagauugaag

SEQ ID NO: 502882 - RNA, 19 nt, Homo sapiens
  misc_RNA (1)...(19): siRNA sense strand
uaacuuggcacagaucaga

SEQ ID NO: 502883 - RNA, 19 nt, Homo sapiens
  misc_RNA (1)...(19): siRNA sense strand
aauguuaacuuggcacaga

SEQ ID NO: 502884 - RNA, 19 nt, Homo sapiens
  misc_RNA (1)...(19): siRNA sense strand
ugaauauugccgagccuua

SEQ ID NO: 502885 - RNA, 19 nt, Homo sapiens
  misc_RNA (1)...(19): siRNA sense strand
gaagagaaugaaauaucug

SEQ ID NO: 502886 - RNA, 19 nt, Homo sapiens
  misc_RNA (1)...(19): siRNA sense strand
caaagugacccagguagau

SEQ ID NO: 502887 - RNA, 19 nt, Homo sapiens
  misc_RNA (1)...(19): siRNA sense strand
gaagaauccagagaaguca

SEQ ID NO: 502888 - RNA, 19 nt, Homo sapiens
  misc_RNA (1)...(19): siRNA sense strand
uggaaaguguacauaugaa

SEQ ID NO: 502889 - RNA, 19 nt, Homo sapiens
  misc_RNA (1)...(19): siRNA sense strand
ucguaaagcaaaggaauua

SEQ ID NO: 502890 - RNA, 19 nt, Homo sapiens
  misc_RNA (1)...(19): siRNA sense strand
aucagaaccuucacagaaa

SEQ ID NO: 502891 - RNA, 19 nt, Homo sapiens
  misc_RNA (1)...(19): siRNA sense strand
ccgggagaauguuaacuug

SEQ ID NO: 502892 - RNA, 19 nt, Homo sapiens
  misc_RNA (1)...(19): siRNA sense strand
ugaagaauccagagaaguc

SEQ ID NO: 502893 - RNA, 19 nt, Homo sapiens
  misc_RNA (1)...(19): siRNA sense strand
aaggaaaggaaguagauaa

SEQ ID NO: 502894 - RNA, 19 nt, Homo sapiens
  misc_RNA (1)...(19): siRNA sense strand
gcuauuguuucucgacagu

SEQ ID NO: 502895 - RNA, 19 nt, Homo sapiens
  misc_RNA (1)...(19): siRNA sense strand
gcugagaugcgucguaaag

SEQ ID NO: 502896 - RNA, 19 nt, Homo sapiens
  misc_RNA (1)...(19): siRNA sense strand
guacugaucacuaccaaaa

SEQ ID NO: 502897 - RNA, 19 nt, Homo sapiens
  misc_RNA (1)...(19): siRNA sense strand
gaguggaaauggcugugau

SEQ ID NO: 502898 - RNA, 19 nt, Homo sapiens
  misc_RNA (1)...(19): siRNA sense strand
gagaugcgucguaaagcaa

SEQ ID NO: 502899 - RNA, 19 nt, Homo sapiens
  misc_RNA (1)...(19): siRNA sense strand
aaauaucugagcacuguuu

SEQ ID NO: 502900 - RNA, 19 nt, Homo sapiens
  misc_RNA (1)...(19): siRNA sense strand
guucaaguuuccuuugucu

SEQ ID NO: 502901 - RNA, 19 nt, Homo sapiens
  misc_RNA (1)...(19): siRNA sense strand
cuaaaguggagacuacaaa

SEQ ID NO: 502902 - RNA, 19 nt, Homo sapiens
  misc_RNA (1)...(19): siRNA sense strand
ggaaaguguacauaugaag

SEQ ID NO: 502903 - RNA, 19 nt, Homo sapiens
  misc_RNA (1)...(19): siRNA sense strand
aacagagaguguaagauau

SEQ ID NO: 502904 - RNA, 19 nt, Homo sapiens
  misc_RNA (1)...(19): siRNA sense strand
caugcuccacccauuaaua

SEQ ID NO: 502905 - RNA, 19 nt, Homo sapiens
  misc_RNA (1)...(19): siRNA sense strand
accaucauguccucuagua

SEQ ID NO: 502906 - RNA, 19 nt, Homo sapiens
  misc_RNA (1)...(19): siRNA sense strand
agaccaucauugaaacuga

SEQ ID NO: 502907 - RNA, 19 nt, Homo sapiens
  misc_RNA (1)...(19): siRNA sense strand
aggcugagaugcgucguaa

SEQ ID NO: 502908 - RNA, 19 nt, Homo sapiens
  misc_RNA (1)...(19): siRNA sense strand
cgucagagagacucaagaa

SEQ ID NO: 502909 - RNA, 19 nt, Homo sapiens
  misc_RNA (1)...(19): siRNA sense strand
guugaaacagagaguguaa

SEQ ID NO: 502910 - RNA, 19 nt, Homo sapiens
  misc_RNA (1)...(19): siRNA sense strand
gcacuguuuugauuugauu

SEQ ID NO: 502911 - RNA, 19 nt, Homo sapiens
  misc_RNA (1)...(19): siRNA sense strand
agagugaucccugaauauu

SEQ ID NO: 502912 - RNA, 19 nt, Homo sapiens
  misc_RNA (1)...(19): siRNA sense strand
uaauuggccugaagaaucc

SEQ ID NO: 502913 - RNA, 19 nt, Homo sapiens
  misc_RNA (1)...(19): siRNA sense strand
ucggauugagggcuuauua

SEQ ID NO: 502914 - RNA, 19 nt, Homo sapiens
  misc_RNA (1)...(19): siRNA sense strand
gaauauugccgagccuuag

SEQ ID NO: 502915 - RNA, 19 nt, Homo sapiens
  misc_RNA (1)...(19): siRNA sense strand
uauaugguacugaucacua

SEQ ID NO: 502916 - RNA, 19 nt, Homo sapiens
  misc_RNA (1)...(19): siRNA sense strand
ccaaagugacccagguaga

SEQ ID NO: 502917 - RNA, 19 nt, Homo sapiens
  misc_RNA (1)...(19): siRNA sense strand
gaaauggcugugaugucaa

SEQ ID NO: 502918 - RNA, 19 nt, Homo sapiens
  misc_RNA (1)...(19): siRNA sense strand
agacggaggauuacagaau

SEQ ID NO: 502919 - RNA, 19 nt, Homo sapiens
  misc_RNA (1)...(19): siRNA sense strand
ccaaaggaaaggaaguaga

SEQ ID NO: 502920 - RNA, 19 nt, Homo sapiens
  misc_RNA (1)...(19): siRNA sense strand
caugaacacuggaaaacaa

SEQ ID NO: 502921 - RNA, 19 nt, Homo sapiens
  misc_RNA (1)...(19): siRNA sense strand
gauaccgggagaauguuaa

SEQ ID NO: 502922 - RNA, 19 nt, Homo sapiens
  misc_RNA (1)...(19): siRNA sense strand
aaaccacagaggaaucuuu

SEQ ID NO: 502923 - RNA, 19 nt, Homo sapiens
  misc_RNA (1)...(19): siRNA sense strand
gaggauuacagaauaugga

SEQ ID NO: 502924 - RNA, 19 nt, Homo sapiens
  misc_RNA (1)...(19): siRNA sense strand
cagagaccaucauugaaac

SEQ ID NO: 502925 - RNA, 19 nt, Homo sapiens
  misc_RNA (1)...(19): siRNA sense strand
gaguggugccugccuguga

SEQ ID NO: 502926 - RNA, 19 nt, Homo sapiens
  misc_RNA (1)...(19): siRNA sense strand
ccaaugaccuagaagauaa

SEQ ID NO: 502927 - RNA, 19 nt, Homo sapiens
  misc_RNA (1)...(19): siRNA sense strand
aaacaguccuuucuacuau

SEQ ID NO: 502928 - RNA, 19 nt, Homo sapiens
  misc_RNA (1)...(19): siRNA sense strand
ggacgccaaugaccuagaa

SEQ ID NO: 502929 - RNA, 19 nt, Homo sapiens
  misc_RNA (1)...(19): siRNA sense strand
gccaaugaccuagaagaua

SEQ ID NO: 502930 - RNA, 19 nt, Homo sapiens
  misc_RNA (1)...(19): siRNA sense strand
acaguccuuucuacuauga

SEQ ID NO: 502931 - RNA, 19 nt, Homo sapiens
  misc_RNA (1)...(19): siRNA sense strand
caaugaccuagaagauaaa

SEQ ID NO: 502932 - RNA, 19 nt, Homo sapiens
  misc_RNA (1)...(19): siRNA sense strand
aaaacaguccuuucuacua

SEQ ID NO: 502933 - RNA, 19 nt, Homo sapiens
  misc_RNA (1)...(19): siRNA sense strand
gcaaguuuggccagaaguc

SEQ ID NO: 502934 - RNA, 19 nt, Homo sapiens
  misc_RNA (1)...(19): siRNA sense strand
gggcaucaucaucgucaug

SEQ ID NO: 502935 - RNA, 19 nt, Homo sapiens
  misc_RNA (1)...(19): siRNA sense strand
ccaaugaccuagaagauaa

SEQ ID NO: 502936 - RNA, 19 nt, Homo sapiens
  misc_RNA (1)...(19): siRNA sense strand
aaacaguccuuucuacuau

SEQ ID NO: 502937 - RNA, 19 nt, Homo sapiens
  misc_RNA (1)...(19): siRNA sense strand
ggacgccaaugaccuagaa

SEQ ID NO: 502938 - RNA, 19 nt, Homo sapiens
  misc_RNA (1)...(19): siRNA sense strand
gccaaugaccuagaagaua

SEQ ID NO: 502939 - RNA, 19 nt, Homo sapiens
  misc_RNA (1)...(19): siRNA sense strand
acaguccuuucuacuauga

SEQ ID NO: 502940 - RNA, 19 nt, Homo sapiens
  misc_RNA (1)...(19): siRNA sense strand
caaugaccuagaagauaaa

SEQ ID NO: 502941 - RNA, 19 nt, Homo sapiens
  misc_RNA (1)...(19): siRNA sense strand
aaaacaguccuuucuacua

SEQ ID NO: 502942 - RNA, 19 nt, Homo sapiens
  misc_RNA (1)...(19): siRNA sense strand
gcaaguuuggccagaaguc

SEQ ID NO: 502943 - RNA, 19 nt, Homo sapiens
  misc_RNA (1)...(19): siRNA sense strand
gggcaucaucaucgucaug

SEQ ID NO: 502944 - RNA, 19 nt, Homo sapiens
  misc_RNA (1)...(19): siRNA sense strand
caacaagccuggagagaua

SEQ ID NO: 502945 - RNA, 19 nt, Homo sapiens
  misc_RNA (1)...(19): siRNA sense strand
gcacaaugcuagccuauga

SEQ ID NO: 502946 - RNA, 19 nt, Homo sapiens
  misc_RNA (1)...(19): siRNA sense strand
gauuauaccuugacaaugu

SEQ ID NO: 502947 - RNA, 19 nt, Homo sapiens
  misc_RNA (1)...(19): siRNA sense strand
gauaagaggcuguccuaua

SEQ ID NO: 502948 - RNA, 19 nt, Homo sapiens
  misc_RNA (1)...(19): siRNA sense strand
gagaaacauuggcuacuuu

SEQ ID NO: 502949 - RNA, 19 nt, Homo sapiens
  misc_RNA (1)...(19): siRNA sense strand
auaagaggcuguccuauaa

SEQ ID NO: 502950 - RNA, 19 nt, Homo sapiens
  misc_RNA (1)...(19): siRNA sense strand
aguaauaugucgcugguua

SEQ ID NO: 502951 - RNA, 19 nt, Homo sapiens
  misc_RNA (1)...(19): siRNA sense strand
auacacaacugaugacauu

SEQ ID NO: 502952 - RNA, 19 nt, Homo sapiens
  misc_RNA (1)...(19): siRNA sense strand
gcaucgauaugguuucuga

SEQ ID NO: 502953 - RNA, 19 nt, Homo sapiens
  misc_RNA (1)...(19): siRNA sense strand
ccacaguucucuauuguag

SEQ ID NO: 502954 - RNA, 19 nt, Homo sapiens
  misc_RNA (1)...(19): siRNA sense strand
ugaaggccauugacaugua

SEQ ID NO: 502955 - RNA, 19 nt, Homo sapiens
  misc_RNA (1)...(19): siRNA sense strand
ugacuugacugaugugaau

SEQ ID NO: 502956 - RNA, 19 nt, Homo sapiens
  misc_RNA (1)...(19): siRNA sense strand
ucauggcccuucuggaaua

SEQ ID NO: 502957 - RNA, 19 nt, Homo sapiens
  misc_RNA (1)...(19): siRNA sense strand
gaaaggcuaugacauucgu

SEQ ID NO: 502958 - RNA, 19 nt, Homo sapiens
  misc_RNA (1)...(19): siRNA sense strand
aaacauacaugccuuccau

SEQ ID NO: 502959 - RNA, 19 nt, Homo sapiens
  misc_RNA (1)...(19): siRNA sense strand
gagauaagaggcuguccua

SEQ ID NO: 502960 - RNA, 19 nt, Homo sapiens
  misc_RNA (1)...(19): siRNA sense strand
ggagguacccacuggauga

SEQ ID NO: 502961 - RNA, 19 nt, Homo sapiens
  misc_RNA (1)...(19): siRNA sense strand
ccuauuuccugaacgauaa

SEQ ID NO: 502962 - RNA, 19 nt, Homo sapiens
  misc_RNA (1)...(19): siRNA sense strand
gcuguccuauaauguaaua

SEQ ID NO: 502963 - RNA, 19 nt, Homo sapiens
  misc_RNA (1)...(19): siRNA sense strand
gguuaucccucagcuuuaa

SEQ ID NO: 502964 - RNA, 19 nt, Homo sapiens
  misc_RNA (1)...(19): siRNA sense strand
ucacaacuguccucacaau

SEQ ID NO: 502965 - RNA, 19 nt, Homo sapiens
  misc_RNA (1)...(19): siRNA sense strand
guuaagaaccgcaugauuc

SEQ ID NO: 502966 - RNA, 19 nt, Homo sapiens
  misc_RNA (1)...(19): siRNA sense strand
gaucgguggucccgcauau

SEQ ID NO: 502967 - RNA, 19 nt, Homo sapiens
  misc_RNA (1)...(19): siRNA sense strand
ucaaugacccuaguaauau

SEQ ID NO: 502968 - RNA, 19 nt, Homo sapiens
  misc_RNA (1)...(19): siRNA sense strand
caugagaacaucuuacuga

SEQ ID NO: 502969 - RNA, 19 nt, Homo sapiens
  misc_RNA (1)...(19): siRNA sense strand
acugagcacucucgagaua

SEQ ID NO: 502970 - RNA, 19 nt, Homo sapiens
  misc_RNA (1)...(19): siRNA sense strand
caaugacccuaguaauaug

SEQ ID NO: 502971 - RNA, 19 nt, Homo sapiens
  misc_RNA (1)...(19): siRNA sense strand
ugagcacucucgagauaaa

SEQ ID NO: 502972 - RNA, 19 nt, Homo sapiens
  misc_RNA (1)...(19): siRNA sense strand
ggaugaacauugacauugc

SEQ ID NO: 502973 - RNA, 19 nt, Homo sapiens
  misc_RNA (1)...(19): siRNA sense strand
gacaauguacuuucaacaa

SEQ ID NO: 502974 - RNA, 19 nt, Homo sapiens
  misc_RNA (1)...(19): siRNA sense strand
gaggcuguccuauaaugua

SEQ ID NO: 502975 - RNA, 19 nt, Homo sapiens
  misc_RNA (1)...(19): siRNA sense strand
ccugaaaggcuaugacauu

SEQ ID NO: 502976 - RNA, 19 nt, Homo sapiens
  misc_RNA (1)...(19): siRNA sense strand
aaucacaacuguccucaca

SEQ ID NO: 502977 - RNA, 19 nt, Homo sapiens
  misc_RNA (1)...(19): siRNA sense strand
cagguuaucccucagcuuu

SEQ ID NO: 502978 - RNA, 19 nt, Homo sapiens
  misc_RNA (1)...(19): siRNA sense strand
gaaauugagagcuauggau

SEQ ID NO: 502979 - RNA, 19 nt, Homo sapiens
  misc_RNA (1)...(19): siRNA sense strand
aaacugcaccuuggaaauu

SEQ ID NO: 502980 - RNA, 19 nt, Homo sapiens
  misc_RNA (1)...(19): siRNA sense strand
auaugucgcugguuaaaga

SEQ ID NO: 502981 - RNA, 19 nt, Homo sapiens
  misc_RNA (1)...(19): siRNA sense strand
uuaaagagacgguggauag

SEQ ID NO: 502982 - RNA, 19 nt, Homo sapiens
  misc_RNA (1)...(19): siRNA sense strand
aaagaaagcagcugagaag

SEQ ID NO: 502983 - RNA, 19 nt, Homo sapiens
  misc_RNA (1)...(19): siRNA sense strand
gacauugccagcaucgaua

SEQ ID NO: 502984 - RNA, 19 nt, Homo sapiens
  misc_RNA (1)...(19): siRNA sense strand
ucaacuacaucuucuuugg

SEQ ID NO: 502985 - RNA, 19 nt, Homo sapiens
  misc_RNA (1)...(19): siRNA sense strand
acaaacuuaucaccaagaa

SEQ ID NO: 502986 - RNA, 19 nt, Homo sapiens
  misc_RNA (1)...(19): siRNA sense strand
aaauugagagcuauggaua

SEQ ID NO: 502987 - RNA, 19 nt, Homo sapiens
  misc_RNA (1)...(19): siRNA sense strand
ugagagcuauggauacaca

SEQ ID NO: 502988 - RNA, 19 nt, Homo sapiens
  misc_RNA (1)...(19): siRNA sense strand
agagaaacauuggcuacuu

SEQ ID NO: 502989 - RNA, 19 nt, Homo sapiens
  misc_RNA (1)...(19): siRNA sense strand
gauaugguuucugaaguca

SEQ ID NO: 502990 - RNA, 19 nt, Homo sapiens
  misc_RNA (1)...(19): siRNA sense strand
agacgcgccucccaacuga

SEQ ID NO: 502991 - RNA, 19 nt, Homo sapiens
  misc_RNA (1)...(19): siRNA sense strand
ggaauaugcccuagucaac

SEQ ID NO: 502992 - RNA, 19 nt, Homo sapiens
  misc_RNA (1)...(19): siRNA sense strand
gugcacggagugacuguua

SEQ ID NO: 502993 - RNA, 19 nt, Homo sapiens
  misc_RNA (1)...(19): siRNA sense strand
gggaugaacauugacauug

SEQ ID NO: 502994 - RNA, 19 nt, Homo sapiens
  misc_RNA (1)...(19): siRNA sense strand
guaauaugucgcugguuaa

SEQ ID NO: 502995 - RNA, 19 nt, Homo sapiens
  misc_RNA (1)...(19): siRNA sense strand
gaaggccauugacauguac

SEQ ID NO: 502996 - RNA, 19 nt, Homo sapiens
  misc_RNA (1)...(19): siRNA sense strand
acaacuguccucacaauga

SEQ ID NO: 502997 - RNA, 19 nt, Homo sapiens
  misc_RNA (1)...(19): siRNA sense strand
gcaaggguggcauuaggaa

SEQ ID NO: 502998 - RNA, 19 nt, Homo sapiens
  misc_RNA (1)...(19): siRNA sense strand
aagaggcuguccuauaaug

SEQ ID NO: 502999 - RNA, 19 nt, Homo sapiens
  misc_RNA (1)...(19): siRNA sense strand
cgauaugguuucugaaguc

SEQ ID NO: 503000 - RNA, 19 nt, Homo sapiens
  misc_RNA (1)...(19): siRNA sense strand
acaauguacuuucaacaag

SEQ ID NO: 503001 - RNA, 19 nt, Homo sapiens
  misc_RNA (1)...(19): siRNA sense strand
gaaacauuggcuacuuuau

SEQ ID NO: 503002 - RNA, 19 nt, Homo sapiens
  misc_RNA (1)...(19): siRNA sense strand
agaaacauuggcuacuuua

SEQ ID NO: 503003 - RNA, 19 nt, Homo sapiens
  misc_RNA (1)...(19): siRNA sense strand
aauaaucgccgcugucugu

SEQ ID NO: 503004 - RNA, 19 nt, Homo sapiens
  misc_RNA (1)...(19): siRNA sense strand
caacuguccucacaaugac

SEQ ID NO: 503005 - RNA, 19 nt, Homo sapiens
  misc_RNA (1)...(19): siRNA sense strand
cauuaggaaucacaacugu

SEQ ID NO: 503006 - RNA, 19 nt, Homo sapiens
  misc_RNA (1)...(19): siRNA sense strand
cugaugacauugaguuuua

SEQ ID NO: 503007 - RNA, 19 nt, Homo sapiens
  misc_RNA (1)...(19): siRNA sense strand
gaacgauaagaagucauuu

SEQ ID NO: 503008 - RNA, 19 nt, Homo sapiens
  misc_RNA (1)...(19): siRNA sense strand
aaacauuggcuacuuuauc

SEQ ID NO: 503009 - RNA, 19 nt, Homo sapiens
  misc_RNA (1)...(19): siRNA sense strand
ggacucagaaucacaacca

SEQ ID NO: 503010 - RNA, 19 nt, Homo sapiens
  misc_RNA (1)...(19): siRNA sense strand
ccuuggaaauugagagcua

SEQ ID NO: 503011 - RNA, 19 nt, Homo sapiens
  misc_RNA (1)...(19): siRNA sense strand
ugaacgauaagaagucauu

SEQ ID NO: 503012 - RNA, 19 nt, Homo sapiens
  misc_RNA (1)...(19): siRNA sense strand
gcgccuggaugucaacaag

SEQ ID NO: 503013 - RNA, 19 nt, Homo sapiens
  misc_RNA (1)...(19): siRNA sense strand
ugggucuccuucuggauua

SEQ ID NO: 503014 - RNA, 19 nt, Homo sapiens
  misc_RNA (1)...(19): siRNA sense strand
uaacaggaguaacgaaaau

SEQ ID NO: 503015 - RNA, 19 nt, Homo sapiens
  misc_RNA (1)...(19): siRNA sense strand
acacaacugaugacauuga

SEQ ID NO: 503016 - RNA, 19 nt, Homo sapiens
  misc_RNA (1)...(19): siRNA sense strand
ggaaauugagagcuaugga

SEQ ID NO: 503017 - RNA, 19 nt, Homo sapiens
  misc_RNA (1)...(19): siRNA sense strand
uaugguuucugaagucaau

SEQ ID NO: 503018 - RNA, 19 nt, Homo sapiens
  misc_RNA (1)...(19): siRNA sense strand
gugcgcagagugucaauga

SEQ ID NO: 503019 - RNA, 19 nt, Homo sapiens
  misc_RNA (1)...(19): siRNA sense strand
cugaaaggcuaugacauuc

SEQ ID NO: 503020 - RNA, 19 nt, Homo sapiens
  misc_RNA (1)...(19): siRNA sense strand
ccauugacauguaccugau

SEQ ID NO: 503021 - RNA, 19 nt, Homo sapiens
  misc_RNA (1)...(19): siRNA sense strand
acaaugaccacaaucaaca

SEQ ID NO: 503022 - RNA, 19 nt, Homo sapiens
  misc_RNA (1)...(19): siRNA sense strand
ucacaaugaccacaaucaa

SEQ ID NO: 503023 - RNA, 19 nt, Homo sapiens
  misc_RNA (1)...(19): siRNA sense strand
aaacuugacucuggacaac

SEQ ID NO: 503024 - RNA, 19 nt, Homo sapiens
  misc_RNA (1)...(19): siRNA sense strand
aggcuguccuauaauguaa

SEQ ID NO: 503025 - RNA, 19 nt, Homo sapiens
  misc_RNA (1)...(19): siRNA sense strand
uuucugaagucaauaugga

SEQ ID NO: 503026 - RNA, 19 nt, Homo sapiens
  misc_RNA (1)...(19): siRNA sense strand
ugaugugaaugccauagau

SEQ ID NO: 503027 - RNA, 19 nt, Homo sapiens
  misc_RNA (1)...(19): siRNA sense strand
caccaucccugacuugacu

SEQ ID NO: 503028 - RNA, 19 nt, Homo sapiens
  misc_RNA (1)...(19): siRNA sense strand
cuuccacaguucucuauug

SEQ ID NO: 503029 - RNA, 19 nt, Homo sapiens
  misc_RNA (1)...(19): siRNA sense strand
gguacccacuggaugaaca

SEQ ID NO: 503030 - RNA, 19 nt, Homo sapiens
  misc_RNA (1)...(19): siRNA sense strand
gauggcaccguccuuuaug

SEQ ID NO: 503031 - RNA, 19 nt, Homo sapiens
  misc_RNA (1)...(19): siRNA sense strand
cggagugacuguuaagaac

SEQ ID NO: 503032 - RNA, 19 nt, Homo sapiens
  misc_RNA (1)...(19): siRNA sense strand
ucuucaacaucgucuauug

SEQ ID NO: 503033 - RNA, 19 nt, Homo sapiens
  misc_RNA (1)...(19): siRNA sense strand
guggauagacuccugaaag

SEQ ID NO: 503034 - RNA, 19 nt, Homo sapiens
  misc_RNA (1)...(19): siRNA sense strand
acuuuauccugcaaacaua

SEQ ID NO: 503035 - RNA, 19 nt, Homo sapiens
  misc_RNA (1)...(19): siRNA sense strand
uaauaugucgcugguuaaa

SEQ ID NO: 503036 - RNA, 19 nt, Homo sapiens
  misc_RNA (1)...(19): siRNA sense strand
uggauagacuccugaaagg

SEQ ID NO: 503037 - RNA, 19 nt, Homo sapiens
  misc_RNA (1)...(19): siRNA sense strand
uggcgaugauaaugcagua

SEQ ID NO: 503038 - RNA, 19 nt, Homo sapiens
  misc_RNA (1)...(19): siRNA sense strand
aagcuuaagagaaacauug

SEQ ID NO: 503039 - RNA, 19 nt, Homo sapiens
  misc_RNA (1)...(19): siRNA sense strand
ccgaaaugcucuggaacga

SEQ ID NO: 503040 - RNA, 19 nt, Homo sapiens
  misc_RNA (1)...(19): siRNA sense strand
gccuggaugucaacaagau

SEQ ID NO: 503041 - RNA, 19 nt, Homo sapiens
  misc_RNA (1)...(19): siRNA sense strand
gaauaugcccuagucaacu

SEQ ID NO: 503042 - RNA, 19 nt, Homo sapiens
  misc_RNA (1)...(19): siRNA sense strand
uuucauggcccuucuggaa

SEQ ID NO: 503043 - RNA, 19 nt, Homo sapiens
  misc_RNA (1)...(19): siRNA sense strand
aaaaugaaauggccacauc

SEQ ID NO: 503044 - RNA, 19 nt, Homo sapiens
  misc_RNA (1)...(19): siRNA sense strand
caacaagccuggagagaua

SEQ ID NO: 503045 - RNA, 19 nt, Homo sapiens
  misc_RNA (1)...(19): siRNA sense strand
gcacaaugcuagccuauga

SEQ ID NO: 503046 - RNA, 19 nt, Homo sapiens
  misc_RNA (1)...(19): siRNA sense strand
gauuauaccuugacaaugu

SEQ ID NO: 503047 - RNA, 19 nt, Homo sapiens
  misc_RNA (1)...(19): siRNA sense strand
gauaagaggcuguccuaua

SEQ ID NO: 503048 - RNA, 19 nt, Homo sapiens
  misc_RNA (1)...(19): siRNA sense strand
gagaaacauuggcuacuuu

SEQ ID NO: 503049 - RNA, 19 nt, Homo sapiens
  misc_RNA (1)...(19): siRNA sense strand
auaagaggcuguccuauaa

SEQ ID NO: 503050 - RNA, 19 nt, Homo sapiens
  misc_RNA (1)...(19): siRNA sense strand
aguaauaugucgcugguua

SEQ ID NO: 503051 - RNA, 19 nt, Homo sapiens
  misc_RNA (1)...(19): siRNA sense strand
auacacaacugaugacauu

SEQ ID NO: 503052 - RNA, 19 nt, Homo sapiens
  misc_RNA (1)...(19): siRNA sense strand
gcaucgauaugguuucuga

SEQ ID NO: 503053 - RNA, 19 nt, Homo sapiens
  misc_RNA (1)...(19): siRNA sense strand
ccacaguucucuauuguag

SEQ ID NO: 503054 - RNA, 19 nt, Homo sapiens
  misc_RNA (1)...(19): siRNA sense strand
ugaaggccauugacaugua

SEQ ID NO: 503055 - RNA, 19 nt, Homo sapiens
  misc_RNA (1)...(19): siRNA sense strand
ugacuugacugaugugaau

SEQ ID NO: 503056 - RNA, 19 nt, Homo sapiens
  misc_RNA (1)...(19): siRNA sense strand
ucauggcccuucuggaaua

SEQ ID NO: 503057 - RNA, 19 nt, Homo sapiens
  misc_RNA (1)...(19): siRNA sense strand
gaaaggcuaugacauucgu

SEQ ID NO: 503058 - RNA, 19 nt, Homo sapiens
  misc_RNA (1)...(19): siRNA sense strand
aaacauacaugccuuccau

SEQ ID NO: 503059 - RNA, 19 nt, Homo sapiens
  misc_RNA (1)...(19): siRNA sense strand
gagauaagaggcuguccua

SEQ ID NO: 503060 - RNA, 19 nt, Homo sapiens
  misc_RNA (1)...(19): siRNA sense strand
ggagguacccacuggauga

SEQ ID NO: 503061 - RNA, 19 nt, Homo sapiens
  misc_RNA (1)...(19): siRNA sense strand
ccuauuuccugaacgauaa

SEQ ID NO: 503062 - RNA, 19 nt, Homo sapiens
  misc_RNA (1)...(19): siRNA sense strand
gcuguccuauaauguaaua

SEQ ID NO: 503063 - RNA, 19 nt, Homo sapiens
  misc_RNA (1)...(19): siRNA sense strand
gguuaucccucagcuuuaa

SEQ ID NO: 503064 - RNA, 19 nt, Homo sapiens
  misc_RNA (1)...(19): siRNA sense strand
ucacaacuguccucacaau

SEQ ID NO: 503065 - RNA, 19 nt, Homo sapiens
  misc_RNA (1)...(19): siRNA sense strand
guuaagaaccgcaugauuc

SEQ ID NO: 503066 - RNA, 19 nt, Homo sapiens
  misc_RNA (1)...(19): siRNA sense strand
gaucgguggucccgcauau

SEQ ID NO: 503067 - RNA, 19 nt, Homo sapiens
  misc_RNA (1)...(19): siRNA sense strand
ucaaugacccuaguaauau

SEQ ID NO: 503068 - RNA, 19 nt, Homo sapiens
  misc_RNA (1)...(19): siRNA sense strand
caugagaacaucuuacuga

SEQ ID NO: 503069 - RNA, 19 nt, Homo sapiens
  misc_RNA (1)...(19): siRNA sense strand
acugagcacucucgagaua

SEQ ID NO: 503070 - RNA, 19 nt, Homo sapiens
  misc_RNA (1)...(19): siRNA sense strand
caaugacccuaguaauaug

SEQ ID NO: 503071 - RNA, 19 nt, Homo sapiens
  misc_RNA (1)...(19): siRNA sense strand
ugagcacucucgagauaaa

SEQ ID NO: 503072 - RNA, 19 nt, Homo sapiens
  misc_RNA (1)...(19): siRNA sense strand
ggaugaacauugacauugc

SEQ ID NO: 503073 - RNA, 19 nt, Homo sapiens
  misc_RNA (1)...(19): siRNA sense strand
gacaauguacuuucaacaa

SEQ ID NO: 503074 - RNA, 19 nt, Homo sapiens
  misc_RNA (1)...(19): siRNA sense strand
gaggcuguccuauaaugua

SEQ ID NO: 503075 - RNA, 19 nt, Homo sapiens
  misc_RNA (1)...(19): siRNA sense strand
ccugaaaggcuaugacauu

SEQ ID NO: 503076 - RNA, 19 nt, Homo sapiens
  misc_RNA (1)...(19): siRNA sense strand
aaucacaacuguccucaca

SEQ ID NO: 503077 - RNA, 19 nt, Homo sapiens
  misc_RNA (1)...(19): siRNA sense strand
cagguuaucccucagcuuu

SEQ ID NO: 503078 - RNA, 19 nt, Homo sapiens
  misc_RNA (1)...(19): siRNA sense strand
gaaauugagagcuauggau

SEQ ID NO: 503079 - RNA, 19 nt, Homo sapiens
  misc_RNA (1)...(19): siRNA sense strand
aaacugcaccuuggaaauu

SEQ ID NO: 503080 - RNA, 19 nt, Homo sapiens
  misc_RNA (1)...(19): siRNA sense strand
auaugucgcugguuaaaga

SEQ ID NO: 503081 - RNA, 19 nt, Homo sapiens
  misc_RNA (1)...(19): siRNA sense strand
uuaaagagacgguggauag

SEQ ID NO: 503082 - RNA, 19 nt, Homo sapiens
  misc_RNA (1)...(19): siRNA sense strand
aaagaaagcagcugagaag

SEQ ID NO: 503083 - RNA, 19 nt, Homo sapiens
  misc_RNA (1)...(19): siRNA sense strand
gacauugccagcaucgaua

SEQ ID NO: 503084 - RNA, 19 nt, Homo sapiens
  misc_RNA (1)...(19): siRNA sense strand
ucaacuacaucuucuuugg

SEQ ID NO: 503085 - RNA, 19 nt, Homo sapiens
  misc_RNA (1)...(19): siRNA sense strand
acaaacuuaucaccaagaa

SEQ ID NO: 503086 - RNA, 19 nt, Homo sapiens
  misc_RNA (1)...(19): siRNA sense strand
aaauugagagcuauggaua

SEQ ID NO: 503087 - RNA, 19 nt, Homo sapiens
  misc_RNA (1)...(19): siRNA sense strand
ugagagcuauggauacaca

SEQ ID NO: 503088 - RNA, 19 nt, Homo sapiens
  misc_RNA (1)...(19): siRNA sense strand
agagaaacauuggcuacuu

SEQ ID NO: 503089 - RNA, 19 nt, Homo sapiens
  misc_RNA (1)...(19): siRNA sense strand
gauaugguuucugaaguca

SEQ ID NO: 503090 - RNA, 19 nt, Homo sapiens
  misc_RNA (1)...(19): siRNA sense strand
agacgcgccucccaacuga

SEQ ID NO: 503091 - RNA, 19 nt, Homo sapiens
  misc_RNA (1)...(19): siRNA sense strand
ggaauaugcccuagucaac

SEQ ID NO: 503092 - RNA, 19 nt, Homo sapiens
  misc_RNA (1)...(19): siRNA sense strand
gugcacggagugacuguua

SEQ ID NO: 503093 - RNA, 19 nt, Homo sapiens
  misc_RNA (1)...(19): siRNA sense strand
gggaugaacauugacauug

SEQ ID NO: 503094 - RNA, 19 nt, Homo sapiens
  misc_RNA (1)...(19): siRNA sense strand
guaauaugucgcugguuaa

SEQ ID NO: 503095 - RNA, 19 nt, Homo sapiens
  misc_RNA (1)...(19): siRNA sense strand
gaaggccauugacauguac

SEQ ID NO: 503096 - RNA, 19 nt, Homo sapiens
  misc_RNA (1)...(19): siRNA sense strand
acaacuguccucacaauga

SEQ ID NO: 503097 - RNA, 19 nt, Homo sapiens
  misc_RNA (1)...(19): siRNA sense strand
gcaaggguggcauuaggaa

SEQ ID NO: 503098 - RNA, 19 nt, Homo sapiens
  misc_RNA (1)...(19): siRNA sense strand
aagaggcuguccuauaaug

SEQ ID NO: 503099 - RNA, 19 nt, Homo sapiens
  misc_RNA (1)...(19): siRNA sense strand
cgauaugguuucugaaguc

SEQ ID NO: 503100 - RNA, 19 nt, Homo sapiens
  misc_RNA (1)...(19): siRNA sense strand
acaauguacuuucaacaag

SEQ ID NO: 503101 - RNA, 19 nt, Homo sapiens
  misc_RNA (1)...(19): siRNA sense strand
gaaacauuggcuacuuuau

SEQ ID NO: 503102 - RNA, 19 nt, Homo sapiens
  misc_RNA (1)...(19): siRNA sense strand
agaaacauuggcuacuuua

SEQ ID NO: 503103 - RNA, 19 nt, Homo sapiens
  misc_RNA (1)...(19): siRNA sense strand
aauaaucgccgcugucugu

SEQ ID NO: 503104 - RNA, 19 nt, Homo sapiens
  misc_RNA (1)...(19): siRNA sense strand
caacuguccucacaaugac

SEQ ID NO: 503105 - RNA, 19 nt, Homo sapiens
  misc_RNA (1)...(19): siRNA sense strand
cauuaggaaucacaacugu

SEQ ID NO: 503106 - RNA, 19 nt, Homo sapiens
  misc_RNA (1)...(19): siRNA sense strand
cugaugacauugaguuuua

SEQ ID NO: 503107 - RNA, 19 nt, Homo sapiens
  misc_RNA (1)...(19): siRNA sense strand
gaacgauaagaagucauuu

SEQ ID NO: 503108 - RNA, 19 nt, Homo sapiens
  misc_RNA (1)...(19): siRNA sense strand
aaacauuggcuacuuuauc

SEQ ID NO: 503109 - RNA, 19 nt, Homo sapiens
  misc_RNA (1)...(19): siRNA sense strand
ggacucagaaucacaacca

SEQ ID NO: 503110 - RNA, 19 nt, Homo sapiens
  misc_RNA (1)...(19): siRNA sense strand
ccuuggaaauugagagcua

SEQ ID NO: 503111 - RNA, 19 nt, Homo sapiens
  misc_RNA (1)...(19): siRNA sense strand
ugaacgauaagaagucauu

SEQ ID NO: 503112 - RNA, 19 nt, Homo sapiens
  misc_RNA (1)...(19): siRNA sense strand
gcgccuggaugucaacaag

SEQ ID NO: 503113 - RNA, 19 nt, Homo sapiens
  misc_RNA (1)...(19): siRNA sense strand
ugggucuccuucuggauua

SEQ ID NO: 503114 - RNA, 19 nt, Homo sapiens
  misc_RNA (1)...(19): siRNA sense strand
uaacaggaguaacgaaaau

SEQ ID NO: 503115 - RNA, 19 nt, Homo sapiens
  misc_RNA (1)...(19): siRNA sense strand
acacaacugaugacauuga

SEQ ID NO: 503116 - RNA, 19 nt, Homo sapiens
  misc_RNA (1)...(19): siRNA sense strand
ggaaauugagagcuaugga

SEQ ID NO: 503117 - RNA, 19 nt, Homo sapiens
  misc_RNA (1)...(19): siRNA sense strand
uaugguuucugaagucaau

SEQ ID NO: 503118 - RNA, 19 nt, Homo sapiens
  misc_RNA (1)...(19): siRNA sense strand
gugcgcagagugucaauga

SEQ ID NO: 503119 - RNA, 19 nt, Homo sapiens
  misc_RNA (1)...(19): siRNA sense strand
cugaaaggcuaugacauuc

SEQ ID NO: 503120 - RNA, 19 nt, Homo sapiens
  misc_RNA (1)...(19): siRNA sense strand
ccauugacauguaccugau

SEQ ID NO: 503121 - RNA, 19 nt, Homo sapiens
  misc_RNA (1)...(19): siRNA sense strand
acaaugaccacaaucaaca

SEQ ID NO: 503122 - RNA, 19 nt, Homo sapiens
  misc_RNA (1)...(19): siRNA sense strand
ucacaaugaccacaaucaa

SEQ ID NO: 503123 - RNA, 19 nt, Homo sapiens
  misc_RNA (1)...(19): siRNA sense strand
aaacuugacucuggacaac

SEQ ID NO: 503124 - RNA, 19 nt, Homo sapiens
  misc_RNA (1)...(19): siRNA sense strand
aggcuguccuauaauguaa

SEQ ID NO: 503125 - RNA, 19 nt, Homo sapiens
  misc_RNA (1)...(19): siRNA sense strand
uuucugaagucaauaugga

SEQ ID NO: 503126 - RNA, 19 nt, Homo sapiens
  misc_RNA (1)...(19): siRNA sense strand
ugaugugaaugccauagau

SEQ ID NO: 503127 - RNA, 19 nt, Homo sapiens
  misc_RNA (1)...(19): siRNA sense strand
caccaucccugacuugacu

SEQ ID NO: 503128 - RNA, 19 nt, Homo sapiens
  misc_RNA (1)...(19): siRNA sense strand
cuuccacaguucucuauug

SEQ ID NO: 503129 - RNA, 19 nt, Homo sapiens
  misc_RNA (1)...(19): siRNA sense strand
gguacccacuggaugaaca

SEQ ID NO: 503130 - RNA, 19 nt, Homo sapiens
  misc_RNA (1)...(19): siRNA sense strand
gauggcaccguccuuuaug

SEQ ID NO: 503131 - RNA, 19 nt, Homo sapiens
  misc_RNA (1)...(19): siRNA sense strand
cggagugacuguuaagaac

SEQ ID NO: 503132 - RNA, 19 nt, Homo sapiens
  misc_RNA (1)...(19): siRNA sense strand
ucuucaacaucgucuauug

SEQ ID NO: 503133 - RNA, 19 nt, Homo sapiens
  misc_RNA (1)...(19): siRNA sense strand
guggauagacuccugaaag

SEQ ID NO: 503134 - RNA, 19 nt, Homo sapiens
  misc_RNA (1)...(19): siRNA sense strand
acuuuauccugcaaacaua

SEQ ID NO: 503135 - RNA, 19 nt, Homo sapiens
  misc_RNA (1)...(19): siRNA sense strand
uaauaugucgcugguuaaa

SEQ ID NO: 503136 - RNA, 19 nt, Homo sapiens
  misc_RNA (1)...(19): siRNA sense strand
uggauagacuccugaaagg

SEQ ID NO: 503137 - RNA, 19 nt, Homo sapiens
  misc_RNA (1)...(19): siRNA sense strand
uggcgaugauaaugcagua

SEQ ID NO: 503138 - RNA, 19 nt, Homo sapiens
  misc_RNA (1)...(19): siRNA sense strand
aagcuuaagagaaacauug

SEQ ID NO: 503139 - RNA, 19 nt, Homo sapiens
  misc_RNA (1)...(19): siRNA sense strand
ccgaaaugcucuggaacga

SEQ ID NO: 503140 - RNA, 19 nt, Homo sapiens
  misc_RNA (1)...(19): siRNA sense strand
gccuggaugucaacaagau

SEQ ID NO: 503141 - RNA, 19 nt, Homo sapiens
  misc_RNA (1)...(19): siRNA sense strand
gaauaugcccuagucaacu

SEQ ID NO: 503142 - RNA, 19 nt, Homo sapiens
  misc_RNA (1)...(19): siRNA sense strand
uuucauggcccuucuggaa

SEQ ID NO: 503143 - RNA, 19 nt, Homo sapiens
  misc_RNA (1)...(19): siRNA sense strand
aaaaugaaauggccacauc

SEQ ID NO: 503144 - RNA, 19 nt, Homo sapiens
  misc_RNA (1)...(19): siRNA sense strand
caacauggauuauaccuua

SEQ ID NO: 503145 - RNA, 19 nt, Homo sapiens
  misc_RNA (1)...(19): siRNA sense strand
gaacugcacucuggaaauu

SEQ ID NO: 503146 - RNA, 19 nt, Homo sapiens
  misc_RNA (1)...(19): siRNA sense strand
ucacugagcuuucgguuga

SEQ ID NO: 503147 - RNA, 19 nt, Homo sapiens
  misc_RNA (1)...(19): siRNA sense strand
gaaauauucuguugacauc

SEQ ID NO: 503148 - RNA, 19 nt, Homo sapiens
  misc_RNA (1)...(19): siRNA sense strand
gauuauaccuuaaccaugu

SEQ ID NO: 503149 - RNA, 19 nt, Homo sapiens
  misc_RNA (1)...(19): siRNA sense strand
caacaauauuggagagaua

SEQ ID NO: 503150 - RNA, 19 nt, Homo sapiens
  misc_RNA (1)...(19): siRNA sense strand
ggauugagcucccgcaguu

SEQ ID NO: 503151 - RNA, 19 nt, Homo sapiens
  misc_RNA (1)...(19): siRNA sense strand
gaacauguccuuugugaag

SEQ ID NO: 503152 - RNA, 19 nt, Homo sapiens
  misc_RNA (1)...(19): siRNA sense strand
gaacauuggauacuucauu

SEQ ID NO: 503153 - RNA, 19 nt, Homo sapiens
  misc_RNA (1)...(19): siRNA sense strand
gggaacauguccuuuguga

SEQ ID NO: 503154 - RNA, 19 nt, Homo sapiens
  misc_RNA (1)...(19): siRNA sense strand
ugacaucgcuggaaguuca

SEQ ID NO: 503155 - RNA, 19 nt, Homo sapiens
  misc_RNA (1)...(19): siRNA sense strand
gaagucaacauggauuaua

SEQ ID NO: 503156 - RNA, 19 nt, Homo sapiens
  misc_RNA (1)...(19): siRNA sense strand
agacuuauaugcccucuau

SEQ ID NO: 503157 - RNA, 19 nt, Homo sapiens
  misc_RNA (1)...(19): siRNA sense strand
uaccaggaauucagcaaua

SEQ ID NO: 503158 - RNA, 19 nt, Homo sapiens
  misc_RNA (1)...(19): siRNA sense strand
gaauucagcaauauccuuu

SEQ ID NO: 503159 - RNA, 19 nt, Homo sapiens
  misc_RNA (1)...(19): siRNA sense strand
gcuguacuauguuaacuga

SEQ ID NO: 503160 - RNA, 19 nt, Homo sapiens
  misc_RNA (1)...(19): siRNA sense strand
agaagaagcuugcagaaaa

SEQ ID NO: 503161 - RNA, 19 nt, Homo sapiens
  misc_RNA (1)...(19): siRNA sense strand
ugauggaccucaggagaua

SEQ ID NO: 503162 - RNA, 19 nt, Homo sapiens
  misc_RNA (1)...(19): siRNA sense strand
gaggaacauuggauacuuc

SEQ ID NO: 503163 - RNA, 19 nt, Homo sapiens
  misc_RNA (1)...(19): siRNA sense strand
cgacaugguuuccgaaguc

SEQ ID NO: 503164 - RNA, 19 nt, Homo sapiens
  misc_RNA (1)...(19): siRNA sense strand
gcccgacacauauuucuua

SEQ ID NO: 503165 - RNA, 19 nt, Homo sapiens
  misc_RNA (1)...(19): siRNA sense strand
ggaaauauucuguugacau

SEQ ID NO: 503166 - RNA, 19 nt, Homo sapiens
  misc_RNA (1)...(19): siRNA sense strand
guugaaaggcuacgacauu

SEQ ID NO: 503167 - RNA, 19 nt, Homo sapiens
  misc_RNA (1)...(19): siRNA sense strand
ccauugacauguaccuuau

SEQ ID NO: 503168 - RNA, 19 nt, Homo sapiens
  misc_RNA (1)...(19): siRNA sense strand
gguggaugcucauggaaau

SEQ ID NO: 503169 - RNA, 19 nt, Homo sapiens
  misc_RNA (1)...(19): siRNA sense strand
caacugugcugacaaugac

SEQ ID NO: 503170 - RNA, 19 nt, Homo sapiens
  misc_RNA (1)...(19): siRNA sense strand
cggaugacauugaguuuua

SEQ ID NO: 503171 - RNA, 19 nt, Homo sapiens
  misc_RNA (1)...(19): siRNA sense strand
cuucacagcucaaaauuaa

SEQ ID NO: 503172 - RNA, 19 nt, Homo sapiens
  misc_RNA (1)...(19): siRNA sense strand
ucauggaaauauucuguug

SEQ ID NO: 503173 - RNA, 19 nt, Homo sapiens
  misc_RNA (1)...(19): siRNA sense strand
gccauugacauguaccuua

SEQ ID NO: 503174 - RNA, 19 nt, Homo sapiens
  misc_RNA (1)...(19): siRNA sense strand
caaaauccccuaugucaaa

SEQ ID NO: 503175 - RNA, 19 nt, Homo sapiens
  misc_RNA (1)...(19): siRNA sense strand
ugaagaggaacauuggaua

SEQ ID NO: 503176 - RNA, 19 nt, Homo sapiens
  misc_RNA (1)...(19): siRNA sense strand
aagaaugaccguucaaaga

SEQ ID NO: 503177 - RNA, 19 nt, Homo sapiens
  misc_RNA (1)...(19): siRNA sense strand
gcagaagaagcuugcagaa

SEQ ID NO: 503178 - RNA, 19 nt, Homo sapiens
  misc_RNA (1)...(19): siRNA sense strand
gcacaagaagacccaucua

SEQ ID NO: 503179 - RNA, 19 nt, Homo sapiens
  misc_RNA (1)...(19): siRNA sense strand
caaagaaugaccguucaaa

SEQ ID NO: 503180 - RNA, 19 nt, Homo sapiens
  misc_RNA (1)...(19): siRNA sense strand
cgucuggucucgaggaaug

SEQ ID NO: 503181 - RNA, 19 nt, Homo sapiens
  misc_RNA (1)...(19): siRNA sense strand
gcaauauccuuugacaacu

SEQ ID NO: 503182 - RNA, 19 nt, Homo sapiens
  misc_RNA (1)...(19): siRNA sense strand
ggcaaagaaugaccguuca

SEQ ID NO: 503183 - RNA, 19 nt, Homo sapiens
  misc_RNA (1)...(19): siRNA sense strand
gaagaggaacauuggauac

SEQ ID NO: 503184 - RNA, 19 nt, Homo sapiens
  misc_RNA (1)...(19): siRNA sense strand
cuacgacauucgccuaaga

SEQ ID NO: 503185 - RNA, 19 nt, Homo sapiens
  misc_RNA (1)...(19): siRNA sense strand
ggaugcucauggaaauauu

SEQ ID NO: 503186 - RNA, 19 nt, Homo sapiens
  misc_RNA (1)...(19): siRNA sense strand
ugaaugccauagacagaug

SEQ ID NO: 503187 - RNA, 19 nt, Homo sapiens
  misc_RNA (1)...(19): siRNA sense strand
acagaagccucccgcacaa
